(19) United States
(12) Patent Application Publication
(10) Pub. No.: US 2025/0290144 A1
(43) Pub. Date: Sep. 18, 2025

(54) tRNA-DERIVED FRAGMENTS AS BIOMARKERS FOR PARKINSON'S DISEASE

(71) Applicant: Thomas Jefferson University, Philadelphia, PA (US)

(72) Inventors: Isidore Rigoutsos, Astoria, NY (US); Rogan Magee, Philadelphia, PA (US); Eric Londin, Philadelphia, PA (US)

(21) Appl. No.: 19/075,744

(22) Filed: Mar. 10, 2025

Related U.S. Application Data
(63) Continuation of application No. 17/283,941, filed on Apr. 8, 2021, now abandoned.
(60) Provisional application No. 62/744,009, filed on Oct. 10, 2018.

(51) Int. Cl. C12Q 1/6883

(52) U.S. Cl. CPC C12Q 1/6883; C12Q 2600/158

(57) ABSTRACT

The present invention includes a method for analyzing tRNA-derived fragments. In one aspect, the present invention includes a method of identifying a subject in need of therapeutic intervention to treat a disease or condition, disease recurrence, or disease progression comprising characterizing the identity of tRNA fragments. The invention also includes diagnosing, identifying or monitoring a disease or condition, and a method for identifying tRNA fragments. The invention also includes diagnosing, identifying or monitoring Parkinson's disease in a subject in need thereof by characterizing the identity of tRNA fragments.

### CROSS-REFERENCE TO RELATED APPLICATIONS

[0001] The present application is a continuation of, and claims priority to, U.S. application Ser. No. 17/283,941, filed Apr. 8, 2021, currently pending, which is a 35 U.S.C. § 371 national phase application of, and claims priority to, International Application No. PCT/US2019/055648, filed Oct. 10, 2019, which claims priority under 35 U.S.C. § 119(e) to U.S. Provisional Patent Application No. 62/744,009, filed Oct. 10, 2018, each of which applications is hereby incorporated herein by reference in its entirety.

### REFERENCE TO AN ELECTRONIC SEQUENCE LISTING

[0002] The present application contains a Sequence Listing which has been submitted in XML format via Patent Center and is hereby incorporated by reference in its entirety. Said XML file, created on Mar. 10, 2025, is named 205961_7025US2SequenceListing.xml and is 61,626,091 bytes in size.

### BACKGROUND OF THE INVENTION

[0003] Transfer RNA (tRNA) molecules serve as a physical link between the mRNA and the amino acid sequence of proteins. The tRNA carries an amino acid to the protein synthetic machinery of a cell (ribosome) as directed by a 3-nucleotide sequence (codon) in a messenger RNA (mRNA), thereby serving as necessary components of translation, the biological synthesis of new proteins in accordance with the genetic code.

[0004] tRNA halves (tRHs) are produced in response to cellular stress and represent the first reported category of tRNA-derived fragments (tRFs). There are two variants of tRHs: 5′-tRNA halves (5′-tRH) and 3′-tRNA halves (3′-tRH). The endonuclease Angiogenin (ANG) has been shown to govern the production of tRHs from mature tRNAs, in several species and contexts. Subsequent work revealed two more categories that overlap the mature tRNA: the 5′-tRFs, whose 5′ termini are the 5′ ends of the mature tRNA, and the 3′-tRFs, whose 3′ termini are the 3′ end of the mature tRNA. Another category of tRFs are known as “internal tRFs” (i-tRFs); i-tRFs can begin and end anywhere along the mature tRNA sequence.

[0005] Functionally, tRFs have been linked to a variety of specific regulatory roles. Some tRFs act through miRNA pathway mechanisms, whereas other directly interact with cellular proteins such as cytochrome C. tRFs can also act as decoys for RNA-binding proteins, resulting in stabilization of oncogenic transcripts. Yet other tRFs directly interfere with translation, or disrupt formation of the multi-synthetase complex or ribosome biogenesis. tRFs have also been shown to control retrotransposon and reverse transcriptase activity in animals and plants.

[0006] Despite all the previously-reported links of different tRFs to different contexts there still exists an unmet need in the art to identify, characterize, quantify and ascertain the role of tRFs in diseased and healthy cells, as well as leverage information about these links for diagnosis and treatment. This invention contributes to the efforts to address these needs.

### BRIEF SUMMARY OF THE INVENTION

[0007] In one aspect, the invention provides a method of identifying a subject in need of therapeutic intervention to treat a disease, condition, disease recurrence, or disease progression. In certain embodiments, the method comprises isolating fragments derived from tRNAs (tRFs) from a sample obtained from the subject; and characterizing the tRFs and their relative abundance in the sample to identify a signature, wherein when the signature is indicative of a diagnosis of the disease, a treatment of the subject is recommended.

[0008] In another aspect, the invention comprises a method of diagnosing, identifying or monitoring Parkinson's Disease (PD) in a subject in need thereof. In certain embodiments, the method comprises isolating tRFs from a cell obtained from the subject, quantifying the tRFs using a panel of oligonucleotides engineered to detect tRFs, or another method; analyzing levels of the tRFs present in the cell; wherein a differential in the level of measured tRFs as compared to a reference is indicative of a diagnosis or identification of PD in the subject; and providing a treatment regimen to the subject dependent on the differential in the level of measured tRFs as compared to the reference.

[0009] In yet another aspect, the invention comprises a method of identifying a subject at risk for developing Parkinson's Disease (PD) or in need of therapeutic intervention to treat Parkinson's disease (PD). The method comprises steps of isolating fragments of tRFs from a sample obtained from the subject; quantifying the tRFs using a panel of oligonucleotides engineered to detect tRFs, or another method; and characterizing the tRFs and their relative abundance in the sample to identify a signature, wherein when the signature is indicative of a prognosis for developing PD or a diagnosis for a PD, a treatment of the subject is recommended.

[0010] In yet another aspect, the invention provides a kit for high-throughput analysis of tRFs fragments in a sample from a subject in need thereof, the kit comprising a collection of specially-designed qPCR assays for quantitating tRFs, or a panel of engineered oligonucleotides capable of hybridizing tRFs, or another quantification method.

[0011] In certain embodiments, the tRFs are selected from the group consisting of 3′-tRFs, 3′-tRHs, 5′-tRFs, 5′-tRHs, and i-tRFs from a mitochondrion (MT). In certain embodiments, the tRFs are selected from the group consisting of 3′-tRFs, 3′-tRHs, 5′-tRFs, 5′-tRHs, and i-tRFs a nucleus (Nuc).

[0012] In certain embodiments, the sample is isolated from a cell, a tissue, an extracellular vesicle, or a body fluid obtained from the subject. In certain embodiments, the body fluid, the extracellular vesicle, the tissue or the cell is selected from the group consisting of bile, blood serum, plasma, cerebrospinal fluid, and prefrontal cortex.

[0013] In certain embodiments, isolating the tRFs comprises isolating tRFs fragments with a length in the range of about 10 nucleotides to about 70 nucleotides. In certain embodiments, the signature comprises at least one sequence selected from the group consisting of SEQ ID NO: 53135-SEQ ID NO: 63850.

[0014] In certain embodiments, the tRFs and their relative abundance vary between the normal state as compared to disease state or condition. In certain embodiments, the tRFs and their relative abundance vary depending on sex of the subject.

[0015] In certain embodiments, the disease or condition, disease recurrence, or disease progression is a brain disease. In certain embodiments, the brain disease is genetically predisposed. In certain embodiments, the brain disease is Parkinson's Disease.

[0016] In certain embodiments, characterizing the tRFs comprises at least one assessment selected from the group consisting of sequencing tRFs, measuring overall abundance of a tRF mapped to the genome, measuring a relative abundance of a tRF to a reference, assessing a length of a tRF, identifying starting and ending points of a tRF, identifying genomic origin of a tRF, and identifying a terminal modification of a tRF.

[0017] In certain embodiments, the tRFs and their relative abundance vary between the normal state subject as compared to a subject at a risk of or suffering from PD.

[0018] In certain embodiments, the tRFs and their relative abundance compared to control subjects differ between subjects suffering from PD with dementia and subjects suffering from PD without dementia.

[0019] In certain embodiments, the tRFs and their relative abundance vary with the body fluid, extracellular vesicle, cell or tissue sample.

[0020] In certain embodiments, the tRFs and their relative abundance vary in the prefrontal cortex samples from the normal state subjects, the subjects suffering from PD with dementia, and the subjects suffering from PD without dementia.

[0021] In certain embodiments, the tRFs and their relative abundance vary in the cerebrospinal fluid samples from the normal state subjects, the subjects suffering from PD with dementia, and the subjects suffering from PD without dementia.

[0022] In certain embodiments, the tRFs and their relative abundance vary in the serum samples from the normal state subjects, the subjects suffering from PD with dementia, and the subjects suffering from PD without dementia.

[0023] In certain embodiments, the subject is a human.

### BRIEF DESCRIPTION OF THE DRAWINGS

[0024] The following detailed description of preferred embodiments of the invention will be better understood when read in conjunction with the appended drawings. For the purpose of illustrating the invention, there are examples shown in the drawings embodiments of which are presently preferred. It should be understood, however, that the invention is not limited to the precise arrangements and instrumentalities of the embodiments shown in the drawings.

[0025] FIGS. 1A-1F: tRFs identified in PFC, CSF and serum samples. The MINTmap and Threshold-seq algorithms were used to identify the set of tRFs recovered from all PFC samples, all CSF samples, and all SER samples. (FIG. 1A) The Venn diagram describes the overlap of tRFs discovered in these three collections. (FIG. 1B) The overlap shown in (FIG. 1A) was recomputed after filtering out any tRFs that are contained in the most recent Release 2.0 of MINTbase. Use of t tests allowed the identification of tRFs that are differentially abundant (DA) between control and Parkinson's disease samples in PFC (prefrontal cortex), CSF (cerebrospinal fluid), and SER (serum) samples. DA tRFs are those with a difference in means per a t test with p-value≤0.05. The shown Venn diagrams capture the overlap between tRFs identified in each context (FIGS. 1C-1F). Each panel describes the overlap of DA tRFs when splitting samples by patient sex (male or female) and sample tissue type (PFC, CSF, or SER), as indicated. Green circles represent PFC samples. Gold circles represent CSF samples. Red circles represent SER samples.

[0026] FIGS. 2A-2F: DA tRFs in PFC, CSF, and SER samples. The DA tRFs were identified as described herein. The results showing fold changes and p-values, in combination with a breakdown by tRF type were plotted. Specifically, the log₂ fold change (PD: control) for each DA tRF in each sample set were plotted. Each group of dots shows the distribution of fold changes across samples for tRFs of the respective category (MT 3′-tRF, Nuc 3′-tRF, etc.). Dots of a given group are shifted to the right of the interval's left boundary according to their p-value: the lower the p-value the higher the shift to the right. As FIG. 2F indicates, each shown interval spans the values 0 through 5 (in-log₁₀). The results were plotted for PFC male comparisons (FIG. 2A), CSF female comparisons (FIG. 2B), CSF male comparisons (FIG. 2C), SER female comparisons (FIG. 2D), and SER male comparisons (FIG. 2E). Green circles represent PFC samples. Gold circles represent CSF samples. Red circles represent SER samples. As can be seen, many tRFs exhibit considerable fold changes that are also statistically-significant.

[0027] FIGS. 3A-3D: tRF characteristics among PFC, CSF, and serum samples. A distribution of the probability that a tRF was expressed in any of X % of the samples in each collection was plotted. Specifically, FIG. 3A and FIG. 3B show what percentage of identified tRFs (y-axis) is identified in each relative percentage of samples from each collection (x-axis). Green lines show PFC samples (FIG. 3A); gold lines show CSF samples (FIG. 3A-B); and, red lines show SER samples (FIG. 3A-B). FIG. 3C and FIG. 3D describe the identified DA tRFs previously shown in FIG. 2. Specifically, the number of DA tRFs identified for each of the ten tRF types (y-axis) vs. the percentage of the tRFs of each type that were originally identified in the sample group is plotted. Circle areas are sized according to the relative percentage of the total DA tRFs that came from each of the ten tRF types. These results were plotted separately for male (FIG. 3C) and female (FIG. 3D) samples. Green circles represent PFC samples. Gold circles represent CSF samples. Red circles represent SER samples.

[0028] FIGS. 4A-4F: tRFs in PFC, CSF, and SER samples that are differentially abundant between CNTRL (Control), PND (Parkinson's Disease without dementia), and PDD (Parkinson's Disease with dementia). t-tests were used to identify the DA tRFs, focusing only on the tRFs in {PFC∪CSF∪SER}—{MINTbase}. These analyses were carried out separately for PFC, CSF, and SER. The Venn diagrams describe the overlap between DA tRFs identified in each context (FIGS. 4A-4E) with those originally identified in FIGS. 1C-1F. Each panel describes the overlap of DA tRFs when splitting samples by patient sex, and by collection (PFC, CSF, or SER). Specifically, sample groups are plotted as follows: PFC male (FIG. 4A), CSF female (FIG. 4B), CSF male (FIG. 4C), SER female (FIG. 4D), and SER male (FIG. 4E). FIG. 4F shows the complement of DA tRFs in PND vs. PDD comparisons. Specifically, retained and plotted are the intersections of DA tRFs that are not in {MINTbase} and also not part of the set of DA tRFs from CNTRL vs. PD, CNTRL vs. PND, or CNTRL vs. PDD comparisons. Green circles represent PFC samples. Gold circles represent CSF samples. Red circles represent SER samples.

[0029] FIGS. 5A-5D: Sample quality filtering based on identified tRF reads. The results of sample quality filtering for CSF (FIGS. 5A and 5C) and SER (FIGS. 5B and 5D). Specifically, FIGS. 5A and 5B represent the log₂ number of reads passing adapter trimming and quality control (y-axis) vs. the number of reads were mapped to tRFs. FIGS. 5C and 5D show the mean reads mapping to each unique tRF in each sample (y-axis) vs. the log₂ number of reads passing adapter trimming and quality control. Gold circles represent CSF samples, while red circles represent SER samples. Grey rectangles mask samples that contain fewer than 100,000 tRNA space reads and have been excluded from analyses.

[0030] FIGS. 6A-6F: tRF profiles by structural type. tRFs derived from either the nuclear or the mitochondrial genome are annotated based on which one of five structural categories they belong. The sum RPM of tRFs belonging to each of the ten possible sets (five structural categories for nuclear and five structural categories for mitochondrial tRFs) as a percentage of the total RPM in each sample are calculated, and the mean and S.E.M. are plotted for PFC (FIG. 6A), CSF (FIG. 6B), and SER (FIG. 6C). FIGS. 6D-6F: the mean and S.E.M on a log₂ scale. S.E.M. is propagated to log₂ per the formula:

$${log}_{2} e \frac{{s}_{\overline{x}}}{\overline{x}} .$$

RPM for any particular tRF of any of the ten tRF types. Green bars represent PFC PD samples, orange bars represent CSF PD samples, and red bars represent SER PD samples. Grey bars represent controls for each of PFC, CSF, and SER.

[0031] FIGS. 7A-7F: tRF profiles by length. In these datasets, tRFs can exist as mature short RNAs with lengths ranging from 16 to 48 nt. The sum RPM of tRFs for all tRFs of a particular length as a percentage of the total RPM in each sample is calculated, and then the mean and S.E.M. for nuclear tRFs only from PFC (FIG. 7A), CSF (FIG. 7B), and SER (FIG. 7C) samples, and for mitochondrial tRFs only for PFC (FIG. 7D), CSF (FIG. 7E), and SER (FIG. 7F) were plotted. Green bars represent PFC PD samples, orange bars represent CSF PD samples, and red bars represent SER PD samples. Grey bars represent controls for each of PFC, CSF, and SER.

### DETAILED DESCRIPTION OF THE INVENTION

### Definitions

[0032] Unless defined otherwise, all technical and scientific terms used herein have the same meaning as commonly understood by one of ordinary skill in the art to which the invention pertains. Although any methods and materials similar or equivalent to those described herein may be used in the practice for testing of the present invention, the preferred materials and methods are described herein. In describing and claiming the present invention, the following terminology will be used.

[0033] It is also to be understood that the terminology used herein is for the purpose of describing particular embodiments only, and is not intended to be limiting.

[0034] As used herein, the articles “a” and “an” are used to refer to one or to more than one (i.e., to at least one) of the grammatical object of the article. By way of example, “an element” means one element or more than one element.

[0035] As used herein when referring to a measurable value such as an amount, a temporal duration, and the like, the term “about” is meant to encompass variations of ±20% or within 10%, 9%, 8%, 7%, 6%, 5%, 4%, 3%, 2%, 1%, 0.5%, 0.1%, 0.05%, or 0.01% of the specified value, as such variations are appropriate to perform the disclosed methods. Unless otherwise clear from context, all numerical values provided herein are modified by the term about.

[0036] “About” as used herein when referring to a measurable value such as an amount, a temporal duration, and the like, is meant to encompass variations of ±20% or ±10%, more preferably ±5%, even more preferably ±1%, and still more preferably ±0.1% from the specified value, as such variations are appropriate to perform the disclosed methods.

[0037] By “alteration” is meant a change (increase or decrease) in the expression levels or activity of a gene or polypeptide as detected by standard art known methods such as those described herein. As used herein, an alteration includes a 10% change in expression levels, preferably a 25% change, more preferably a 40% change, and most preferably a 50% or greater change in expression levels.

[0038] By “complementary sequence” or “complement” is meant a nucleic acid base sequence that can form a double-stranded structure by matching base pairs to another polynucleotide sequence. Base pairing occurs through the formation of hydrogen bonds, which may be Watson-Crick, wobble, Hoogsteen or reversed Hoogsteen hydrogen bonding, between complementary nucleobases. For example, adenine and thymine are complementary nucleobases that pair through the formation of hydrogen bonds.

[0039] In this disclosure, “comprises,” “comprising,” “containing” and “having” and the like can have the meaning ascribed to them in U.S. Patent law and can mean “includes,” “including,” and the like; “consisting essentially of” or “consists essentially” likewise has the meaning ascribed in U.S. Patent law and the term is open-ended, allowing for the presence of more than that which is recited so long as basic or novel characteristics of that which is recited is not changed by the presence of more than that which is recited, but excludes prior art embodiments.

[0040] “Detect” refers to identifying the presence, absence or amount of the biomarker to be detected.

[0041] The phrase “differentially abundant” refers to differences in the quantity and/or the frequency of a biomarker present in a sample taken from subjects having a disease, or condition, as compared to a control subject. A biomarker can be differentially present in terms of quantity, frequency or both. A polypeptide or polynucleotide is differentially present between two samples if the amount or frequency of the polypeptide or polynucleotide in one sample is statistically significantly different (either higher or lower) from the amount of the polypeptide or polynucleotide in the other sample, such as reference or control samples. Alternatively or additionally, a polypeptide or polynucleotide is differentially present between two sets of samples if the amount or frequency of the polypeptide or polynucleotide in samples of the first set, such as diseased subjects' samples, is statistically significantly (either higher or lower) from the amount of the polypeptide or polynucleotide in samples of the second set, such as reference or control samples. A biomarker that is present in one sample, but undetectable in another sample is differentially present.

[0042] A “disease” is a state of health of an animal wherein the animal cannot maintain homeostasis, and wherein if the disease is not ameliorated then the animal's health continues to deteriorate. A “disease subtype” is a state of health of an animal wherein animals with the disease manifest different clinical features or symptoms. For example, Alzheimer's disease includes at least three subtypes, inflammatory, non-inflammatory, and cortical.

[0043] A “disorder” as used herein, is used interchangeably with “condition,” and refers to a state of health in an animal, wherein the animal is able to maintain homeostasis, but in which the animal's state of health is less favorable than it would be in the absence of the disorder. Left untreated, a disorder does not necessarily cause a further decrease in the animal's state of health.

[0044] By “effective amount” is meant the amount required to reduce or improve at least one symptom of a disease relative to an untreated patient. The effective amount of active compound(s) used to practice the present invention for therapeutic treatment of a disease varies depending upon the manner of administration, the age, body weight, and general health of the subject.

[0045] As used herein “endogenous” refers to any material from or produced inside an organism, cell, tissue or system.

[0046] The term “expression” as used herein is defined as the transcription and/or translation of a particular nucleotide sequence driven by its promoter.

[0047] By “fragment” is meant a portion of a polynucleotide or nucleic acid molecule. This portion contains, preferably, at least 10%, 20%, 30%, 40%, 50%, 60%, 70%, 80%, 90%, 91%, 92%, 93%, 94%, 95%, 96%, 97%, 98%, or 99% of the entire length of the reference nucleic acids. A fragment may contain 10, 20, 30, 40, 50, 60, 70, 80, 90, or 100, 200, 300, 400, 500, 600, 700, 800, 900, 1000, 1500, 2000 or 2500 (and any integer value in between) nucleotides. The fragment, as applied to a nucleic acid molecule, refers to a subsequence of a larger nucleic acid. The fragment can be an autonomous and functional molecule. A fragment may contain modifications at neither, one, or both of its termini. A modification can include but is not limited to a phosphate, a cyclic phosphate, a hydroxyl, and an amino acid. A “fragment” of a nucleic acid molecule may be at least about 10 nucleotides in length; for example, at least about 50 nucleotides to about 100 nucleotides; at least about 100 to about 500 nucleotides, at least about 500 to about 1000 nucleotides, at least about 1000 nucleotides to about 1500 nucleotides; or about 1500 nucleotides to about 2500 nucleotides; or about 2500 nucleotides (and any integer value in between).

[0048] “Similar” refers to the sequence similarity or sequence identity between two polypeptides or between two nucleic acid molecules. When a position in both of the two compared sequences is occupied by the same base or amino acid monomer subunit, e.g., if a position in each of two DNA molecules is occupied by adenine, then the molecules are similar at that position. The percent of similarity between two sequences is a function of the number of matching or similar positions shared by the two sequences divided by the number of positions compared X 100. For example, if 6 of 10 of the positions in two sequences are matched or similar then the two sequences are 60% similar. By way of example, the DNA sequences ATTGCC and TATGGC share 50% similarity. Generally, a comparison is made when two sequences are aligned in a way that maximizes their similarity.

[0049] “Instructional material,” as that term is used herein, includes a publication, a recording, a diagram, or any other medium of expression that may be used to communicate the usefulness of the compounds of the invention. In some instances, the instructional material may be part of a kit useful for effecting alleviating or treating the various diseases or conditions recited herein. Optionally, or alternately, the instructional material may describe one or more methods of alleviating the diseases or conditions in a cell or a tissue of a mammal. The instructional material of the kit may, for example, be affixed to a container that contains the compounds of the invention or be shipped together with a container that contains the compounds. Alternatively, the instructional material may be shipped separately from the container with the intention that the recipient uses the instructional material and the compound cooperatively. For example, the instructional material is for use of a kit; instructions for use of the compound; or instructions for use of a formulation of the compound.

[0050] “Isolated” means altered or removed from the natural state. For example, a nucleic acid or a peptide naturally present in a living animal is not “isolated,” but the same nucleic acid or peptide partially or completely separated from the coexisting materials of its natural state is “isolated.” An isolated nucleic acid or protein can exist in substantially purified form, or can exist in a non-native environment such as, for example, a host cell.

[0051] The term “tRF” stands for ‘tRNA-derived fragment. The term is used to refer to non-coding RNAs that are generated from a tRNA locus and are typically shorter than the locus’ corresponding tRNA product. tRFs have typical lengths that range from 10 to 50, and possibly more, nucleotides. For generality, in this discussion, we use the term “tRF” to refer to a fragment that could be derived from the corresponding “precursor tRNA” molecule and either contain a post-transcriptionally added modification (e.g. “CCA”, a “−1” nucleotide as e.g. in the case of tRNA^{HisGTG}, etc.) or not. As such, the term “tRF” could also refer to the entire “mature tRNA” (typical length of 75 nucleotides), or the entire mature tRNA without the CCA addition (typical length 72 nucleotides).

[0052] Generally speaking, the term “mitochondrial tRFs” is used to refer to tRNA fragments whose parental tRNA is located in the mitochondrial genome. Exceptions include: a) several tRNAs of mitochondrial origin that were recently found to be present in the nuclear genome; b) several sequences in the nuclear genome that were recently found to be similar to tRNAs of mitochondrial origin. The term “nuclear tRFs” is used to refer to tRNA fragments whose parental tRNA is located in the nuclear genome.

[0053] Unless otherwise specified, a “nucleotide sequence encoding an amino acid sequence” includes all nucleotide sequences that are degenerate versions of each other and that encode the same amino acid sequence. The phrase nucleotide sequence that encodes a protein or an RNA may also include introns to the extent that the nucleotide sequence encoding the protein may in some version contain an intron(s).

[0054] By “isolated polynucleotide” is meant a nucleic acid molecule (e.g., a DNA or an RNA) that is free of the nucleic acid sequences which flank it in the naturally-occurring genome of the organism from which the nucleic acid molecule of the invention is derived. The term therefore includes, for example, a recombinant DNA that is incorporated into a vector; into an autonomously replicating plasmid or virus; or into the genomic DNA of a prokaryote or eukaryote; or that exists as a separate molecule (for example, a tRF, cDNA or a genomic or cDNA fragment produced by PCR or restriction endonuclease digestion) independent of other sequences. In addition, the term includes an RNA molecule that is transcribed from a DNA molecule, as well as a recombinant DNA that is part of a hybrid gene encoding additional polypeptide sequence.

[0055] The term “oligonucleotide panel” or “panel of oligonucleotides” refers to a collection of one or more oligonucleotides that may be used to identify DNA (e.g. genomic segments comprising a specific sequence, DNA sequences bound by particular protein, etc.) or RNA (e.g. mRNAs, microRNAs, tRNAs etc.) or fragments thereof through hybridization of complementary regions between the oligonucleotides and the DNA or RNA. If the sought molecule is RNA, it is commonly converted to DNA through a reverse transcription step). The oligonucleotides may include complementary sequences to known DNA or known RNA sequences. The oligonucleotides may be engineered to be between about 5 nucleotides to about 40 nucleotides, or about 5 nucleotides to about 30 nucleotides, or about 5 nucleotides to about 20 nucleotides, or about 5 nucleotides to about 15 nucleotides in length. The term “oligonucleotide panel” or “panel of oligonucleotides” could also refer to a system and accompanying collection of reagents that, in addition to being able to hybridize to molecules containing a complementary sequence, can also ensure that the identified molecule's 3′ terminus matches precisely the 3′ terminus of the sought molecule, or that the identified molecule's 5′ terminus matches precisely the 5′ terminus of the sought molecule, or both: this ability is unlike what can be achieved by conventional assays such as e.g. Affymetrix chips and methods (e.g. “dumbbell-PCR”) and systems (e.g. the Fireplex system of Firefly BioWorks) that can achieve this are now beginning to be available.

[0056] The term “operably linked” refers to functional linkage between a regulatory sequence and a heterologous nucleic acid sequence resulting in expression or changes in abundance of the latter. For example, a first nucleic acid sequence is operably linked with a second nucleic acid sequence when the first nucleic acid sequence is placed in a functional relationship with the second nucleic acid sequence. For instance, a promoter is operably linked to a coding sequence if the promoter affects the transcription or expression of the coding sequence.

[0057] The terms “patient,” “subject,” “individual,” and the like are used interchangeably herein, and refer to a human or non-human mammal, or cells thereof whether in vitro or in situ, amenable to the methods described herein. Non-human mammals include, for example, livestock and pets, such as ovine, bovine, porcine, canine, feline and murine mammals. The term “subject” is intended to include living organisms in which an immune response can be elicited (e.g., mammals). Examples of subjects include humans, dogs, cats, mice, rats, and transgenic species thereof. In certain non-limiting embodiments, the patient, subject or individual is a human.

[0058] The term “polynucleotide” as used herein is defined as a chain of nucleotides. Furthermore, nucleic acids are polymers of nucleotides. Thus, nucleic acids and polynucleotides as used herein are interchangeable. One skilled in the art has the general knowledge that nucleic acids are polynucleotides, which may be hydrolyzed into the constituent monomeric “nucleotides.” The monomeric nucleotides may be hydrolyzed into nucleosides. As used herein polynucleotides include, but are not limited to, all nucleic acid sequences that are obtained by any means available in the art, including, without limitation, recombinant means, i.e., the cloning of nucleic acid sequences from a recombinant library or a cell genome, using ordinary cloning technology and PCR™, and the like, and by synthetic means. The following abbreviations for the commonly occurring nucleic acid bases are used. “A” refers to adenosine, “C” refers to cytosine, “G” refers to guanosine, “T” refers to thymidine, and “U” refers to uridine. The term “RNA” as used herein is defined as ribonucleic acid. The term “recombinant DNA” as used herein is defined as DNA produced by joining pieces of DNA from different sources.

[0059] As used herein, the terms “prevent,” “preventing,” “prevention,” and the like refer to reducing the probability of developing a disease or condition in a subject, who does not have, but is at risk of or susceptible to developing a disease or condition.

[0060] As used herein, the term “promoter/regulatory sequence” means a nucleic acid sequence which is required for expression of a gene product operably linked to the promoter/regulatory sequence. In some instances, this sequence may be the core promoter sequence and in other instances, this sequence may also include an enhancer sequence and other regulatory elements which are required for expression of the gene product. The promoter/regulatory sequence may, for example, be one which expresses the gene product in a tissue specific manner.

[0061] The terms “purified,” or “biologically pure” refer to material that is free to varying degrees from components which normally accompany it as found in its native state. “Purify” denotes a degree of separation that is higher than isolation. A “purified” or “biologically pure” protein is sufficiently free of other materials such that any impurities do not materially affect the biological properties of the protein or cause other adverse consequences. That is, a nucleic acid or peptide of this invention is purified if it is substantially free of cellular material, viral material, or culture medium when produced by recombinant DNA techniques, or chemical precursors or other chemicals when chemically synthesized. Purity and homogeneity are typically determined using analytical chemistry techniques, for example, polyacrylamide gel electrophoresis or high-performance liquid chromatography. The term “purified” can denote that a nucleic acid or protein gives rise to essentially one band in an electrophoretic gel. For a protein that can be subjected to modifications, for example, phosphorylation or glycosylation, different modifications may give rise to different isolated proteins, which can be separately purified.

[0062] By “reduces” or “decreases” is meant a negative alteration of at least 10%, 25%, 50%, 75%, or 100%.

[0063] By “reference” is meant a standard or control. A “reference” is also a defined standard or control used as a basis for comparison.

[0064] As used herein, “relative abundance” refers to the ratio of the quantities of two or more molecules of interest (e.g. tRFs) present in a sample. The relative abundance of two or more molecules of interest in a given sample may differ from the relative abundance of the same two or more molecules in a second sample.

[0065] As used herein, “sample” or “biological sample” refers to anything, which may contain the biomarker (e.g., polypeptide, polynucleotide, or fragment thereof) for which a biomarker assay is desired. The sample may be a biological sample, such as a biological fluid or a biological tissue or an isolated cell or a collection of isolated cells or an isolated extracellular vesicle or collection of extracellular vesicles. In one embodiment, a biological sample is a tissue from prefrontal cortex. Examples of biological fluids include cerebrospinal fluid, urine, blood, plasma, serum, saliva, semen, stool, sputum, cerebral spinal fluid, tears, mucus, amniotic fluid or the like.

[0066] As used herein, the term “sensitivity” is indicates a percentage of biomarker-detected subjects with a particular disease. For example, in a specific assay to detect a percentage of disease-affected subjects in a particular population, the higher detectability of percentage of biomarkers (such as, for example tRFs) related to the diseases being detected corresponds to the higher sensitivity index of that assay.

[0067] The terms “short RNA profile” or “RNA profile” or “tRF profile” or “tRF profile” or “tRNA profile” or “tRNA fragment profile” are used interchangeably and refer to a genetic makeup of RNA molecules that are present in a sample, such as a cell, tissue, or subject. Optionally, the abundance of an RNA molecule that is part of an RNA profile may also be sought. Optionally, other attributes of an RNA molecule that is part of an RNA profile may also be sought and include but are not limited to a molecule's location within the genomic locus of origin, the molecule's starting point, the molecule's ending point, the molecule's length, the identity of the molecule's terminal modifications, etc.

[0068] The term “signature” or “tRF signature” as used herein refers to a subset of an RNA profile and comprises the identity of one or more molecules that are selected from an RNA profile and optionally one or more of the attributes of the one or more molecules that are selected from the RNA profile.

[0069] By “substantially identical” is meant a polypeptide or nucleic acid molecule exhibiting at least 50% identity to a reference amino acid sequence (for example, any one of the amino acid sequences described herein) or nucleic acid sequence (for example, any one of the nucleic acid sequences described herein). Preferably, such a sequence is at least 60%, more preferably 80% or 85%, and more preferably 90%, 95% or even 99% identical at the amino acid level or nucleic acid to the sequence used for comparison.

[0070] The term “therapeutic” as used herein means a treatment and/or prophylaxis. A therapeutic effect is obtained by suppression, remission, or eradication of a disease state.

[0071] As used herein, the terms “treat,” treating,” “treatment,” and the like refer to reducing or improving a disease or condition and/or symptom associated therewith. It will be appreciated that, although not precluded, treating a disease or condition does not require that the disease, condition or symptoms associated therewith be completely ameliorated or eliminated.

[0072] Ranges provided herein are understood to be shorthand for all of the values within the range. For example, a range of 1 to 50 is understood to include any number, combination of numbers, or sub-range from the group consisting 1, 2, 3, 4, 5, 6, 7, 8, 9, 10, 11, 12, 13, 14, 15, 16, 17, 18, 19, 20, 21, 22, 23, 24, 25, 26, 27, 28, 29, 30, 31, 32, 33, 34, 35, 36, 37, 38, 39, 40, 41, 42, 43, 44, 45, 46, 47, 48, 49, or 50.

[0073] The recitation of an embodiment for a variable or aspect herein includes that embodiment as any single embodiment or in combination with any other embodiments or portions thereof.

[0074] Any compositions or methods provided herein can be combined with one or more of any of the other compositions and methods provided herein.

### Description

[0075] The present invention includes methods and compositions of analyzing tRFs. Described herein are tRFs that are important for disease diagnosis. The present invention utilizes tRF-profiling to identify subjects in need of therapeutic intervention. One or more of the tRFs that are important for disease diagnosis can also serve as therapeutic targets themselves.

[0076] In one aspect, the invention provides a method of identifying a subject in need of therapeutic intervention to treat a disease, disease progression, or disease recurrence. The method comprises isolating tRFs from a sample obtained from the subject; characterizing the fragments of tRFs and their relative abundance in the sample to identify a signature, wherein when the signature is indicative of a diagnosis of the disease (or of a disease subtype or of a disease recurrence), a treatment of the subject is recommended or provided. It is generally the case that the mechanistic events that are promoted by the tRFs used to determine whether treatment is recommended or provided can be elucidated through additional work. Consequently, one or more of these tRFs can serve as novel therapeutic targets as well.

### tRF Fragments

[0077] Analysis of tRF profiles or signatures in one or more cells lead to the discovery of RF signatures present in healthy cells or diseased cells. tRF signatures of one or more cells, or a tissue may be used to identify a diseased cell, disease progression, or disease recurrence in a subject. Thus, the subject may be identified as in need of therapeutic intervention to delay the onset of, reduce, improve, and/or treat a disease or condition, such as cancer, in a subject in need thereof. One or more of the tRFs that comprise these signatures can also serve as targets of novel therapeutic interventions.

[0078] In another aspect, the invention includes a method for identifying tRFs from sequenced reads, typically obtained through next generation sequencing approaches. Various sequencing methodologies and platforms are known in the art. The choice of a platform may be based on the user's and experiment's requirements. In some embodiments, the sequencing method is a high throughput next-generation method. Non-limiting examples of massively parallel signature sequencing platforms are Illumina sequencing by synthesis (Illumina, san Diego CA), 454 pyrosequencing (Roche Diagnostics, Indianapolis IN), SOLID sequencing (Life Technologies, Carlsbad, CA), Ion Torrent semiconductor sequencing (Life Technologies, Carlsbad, CA), Heliscope single molecule sequencing (Helicos Biosciences, Cambridge, MA), and Single molecule real time (SMRT) sequencing (Pacific Biosciences, Menlo Park, CA).

[0079] In certain embodiments the invention comprises analyzing five different and previously-defined structural categories of tRFs that overlap the mature tRNA. Further, these analyses may distinguish among these tRFs based on whether they originate in nuclearly- or mitochondrially-encoded tRNAs. Thus, the analyses can comprise as many as 10 different groups: 3′-tRFs, 3′-tRHs, 5′-tRFs, 5′-tRHs, and i-tRFs from the mitochondrion (MT) and the nucleus (Nuc), respectively.

[0080] In certain embodiments the method for characterizing the tRNA fragments in this invention comprises at least one assessment selected from the group consisting of sequencing the tRFs, measuring overall abundance of one of the tRFs, measuring a relative abundance of the one tRF to a reference, assessing a length of the one tRF, identifying starting and ending points of the one tRF, identifying genomic origin of the one tRF, and identifying a terminal modification of the one tRF.

### Diagnostics

[0081] Samples from subjects suffering from a disease or a condition have a specific tRF-profile in the cell or cells that are diseased, including cells from the subject suffering from the Parkinson's Disease (PD). One or more of these tRFs could enter circulation and be found in, for example, extracellular vesicles. In such an event, the profile of tRFs contained in isolated exosomes could prove equally powerful in helping identify the disease or condition as the cells of the ailing tissue. Moreover, the disease or condition could also affect the tRF profile of cells in other adjacent or distant tissues. In such an event, the tRF profile of cells from these adjacent or distant tissues could prove equally powerful in helping identify the disease or condition as the cells of the ailing tissue. It is noted that the disease or a condition can affect the composition and abundance of tRNAs, of tRFs, or both.

[0082] In one aspect, a method of diagnosing, identifying or monitoring a disease in the subject comprises isolating tRFs from a cell obtained from the subject; analyzing levels of the tRFs present in the cell; wherein a differential in the level of measured tRFs as compared to a reference is indicative of a diagnosis or identification of Parkinson's disease in the subject; and providing a treatment regimen to the subject dependent on the differential in the level of measured tRFs as compared to the reference.

[0083] Identifying the existence of a disease or condition by identifying a tRF profile associated with the disease or condition in a sample obtained from the subject allows recommending or offering the subject a personalized treatment. In one aspect, the invention includes a method of identifying a cell's tRF population to establish and treat the onset of a disease, or the state of the disease, or that disease has recurred in a subject in need thereof comprising isolating fragments of tRFs from a sample (e.g. a cell) obtained from the subject; characterizing the fragments of tRF, which can include assessing one or more of, overall abundance, relative abundance, length of the fragment, starting and ending points of the fragment, terminal modifications, etc., in the sample to identify a signature, wherein the signature is indicative of the presence of the disease, of the state of the disease, or of disease recurrence; and providing a treatment regimen to the subject dependent on the sampled cell's profile of tRFs.

[0084] In certain embodiments, characterizing the tRFs and their relative abundance can identify subjects in need of treatment. In certain embodiments the tRFs and their relative abundance vary between the normal state subject as compared to a subject at risk of or suffering from PD. In certain embodiments, the tRFs and their relative abundance compared to control subjects differ between subjects suffering from PD with dementia and subjects suffering from PD without dementia. In certain embodiments, the tRFs and their relative abundance vary with the gender of the subject. In certain embodiments, the tRFs and their relative abundance vary with the body fluid, cell or tissue sample.

[0085] In certain embodiments, the relative abundance of the tRFs that are present in the RNA profile can identify subjects in need of treatment. In another approach, diagnostic methods are used to assess tRF profiles in a biological sample relative to a reference (e.g., tRF profile in a healthy cell or tissue or body fluid in a corresponding control sample). Examples of a body fluid and tissues may include, but are not limited to amniotic fluid, bile, blood serum, plasma, cerebrospinal fluid, plasma and prefrontal cortex.

[0086] In certain embodiments, the sample, such as a cell or tissue or body fluid is obtained from the subject. In another embodiment, the cell or tissue or body fluid is isolated from the sample. In another embodiment, the cell or tissue is isolated from a body fluid.

[0087] In certain embodiments, a signature of tRFs or a presence or absence of specific tRFs are indicative a diagnosis of a disease or condition. In some embodiments, the signature of tRFs distinguishes a normal state as compared to a disease state or a condition.

[0088] In some embodiments, the signature of tRF comprises at least one sequence selected from the group consisting of: SEQ ID NOs: 53135-63850. In some embodiments, the signature comprises at least one sequence among those listed in SEQ ID NOs: 1-53134 that are not contained in SEQ ID NOs: 53135-69512.

[0089] In some embodiments, the methods or assays described herein comprise analyzing the presence or absence or the signature of tRFs in a disease or condition, disease recurrence, or disease progression selected from the group consisting of a cancer, a brain disease, a glaucoma, or a genetically predisposed disease or condition.

[0090] In general, characterizing the tRFs of this invention identifies a signature that may be indicative of a diagnosis of a disease or condition, the onset of a disease or condition, or the recurrence of a disease or condition. Moreover, characterizing the tRFs of this invention identifies one or more molecules that can serve as therapeutic targets themselves.

[0091] The character of the tRFs in the sample may be compared with a reference, such as other tRFs present within the cell, a healthy cell or a diseased cell will yield a relative abundance of the tRFs to identify a signature. Alternatively, the abundance of two or more tRFs, two or more tRNAs, or at least one tRF and at least one tRNA may be compared to identify a signature. Alternatively, the signature may be established by comparing the locations of the two or more tRFs within the genomic loci of origin, the starting and ending points of the fragments, the lengths of the fragments, and any other feature of the fragments as compared to other tRFs within the same sample or another sample or reference to distinguish a diseased state or condition, a propensity to develop a disease or condition, and/or the absence of a disease or condition. The skilled artisan will appreciate that the diagnostic can be adjusted to increase the sensitivity or specificity of the assay. In general, any significant increase (e.g., at least about 10%, 15%, 30%, 50%, 60%, 75%, 80%, or 90%) in the level of a polynucleotide or polypeptide biomarker in the subject sample relative to a reference may be used to diagnose a diseased state, a propensity to develop a disease or condition, and/or the absence of a disease or condition.

[0092] Accordingly, a tRF profile may be obtained from a sample from a subject and compared to a reference tRF or tRNA fragment profile obtained from a reference cell or tissue or body fluid, so that it is possible to classify the subject as belonging to or not belonging to the reference population. The association may take into account the presence or absence of one or more tRF or tRNA fragments in a test sample and the frequency of detection of the tRF or tRNA fragments in a test sample compared to a control. The association may take into account both of such factors to facilitate a diagnosis of a disease or condition. The association may take into account both of such factors to guide recommending or offering a treatment. In one embodiment, the reference is the identity and abundance level of the tRF or tRNA fragments present in a control sample, such as non-diseased cell, a cell obtained from a patient that does not have the disease or condition at issue or a propensity to develop such a disease or condition. In another embodiment, the reference is a baseline level of the tRF or tRNA fragment presence and abundance in a biologic sample derived from the patient prior to, during, or after treatment for the disease or condition. In yet another embodiment, the reference is a standardized curve.

### Methods of Use

[0093] In one aspect, the invention includes a method of identifying a subject in need of treatment. The method comprises isolating fragments of tRFs from a sample obtained from the subject; characterizing the identity of the tRFs and their relative abundance in the sample to identify a signature, wherein the signature differs depending on the sex of the subject; and recommending or providing a personalized treatment regimen or a disease prognosis to the subject. In some embodiments, the signature comprises at least one sequence selected from the group consisting of SEQ ID NOs: 53135-63850. In some embodiments, the signature comprises at least one sequence among those listed in SEQ ID NOs: 1-53134 that are not contained in 53135-69152.

[0094] In another aspect, the method described herein includes diagnosing, identifying or monitoring the onset or recurrence of a disease or condition, such as a PD, in a subject in need of therapeutic intervention. In one embodiment, the method includes isolating RNA from a cell, tissue or body fluid obtained from the subject; hybridizing the RNA to a panel of oligonucleotides engineered to detect tRFs; analyzing an identity and levels of the tRFs present in the cell; wherein a differential in the identity or measured tRFs' levels to the reference is indicative of a diagnosis or identification of a disease or condition, such as PD, in the subject; and providing a treatment regimen to the subject dependent on the differential in the identity and measured tRFs' levels to the reference.

[0095] The non-coding RNAs of interest (tRFs or tRNAs) may be isolated by a method known in the art or selected from the group consisting of size selection, amplification and sequencing.

[0096] In some embodiments, the size of the tRFs is in the range of about 10 nucleotides to about 70 nucleotides are isolated. The range of sizes may include, but are not limited to, from about 15 nucleotides to about 50 nucleotides, and from about 20 nucleotides to about 45 nucleotides. The size of the tRFs fragments may be about 10 nucleotides, 11, 12, 13, 14, 15, 16, 17, 18, 19, 20, 21, 22, 23, 24, 25, 26, 27, 28, 29, 30, 31, 32, 33, 34, 35, 36, 37, 38, 39, 40, 41, 42, 43, 44, 45, 46, 47, 48, 49, 50, 51, 52, 53, 54, 55, 56, 57, 58, 59, 60, 61, 62, 63, 64, 65, 66, 67, 68, 69 or about 70 nucleotides.

[0097] In one embodiment, the signature is obtained by hybridization to a single oligonucleotide, or to a panel of oligonucleotides, such as those that comprise at least two or more oligonucleotides that selectively hybridize to the tRFs. To prepare the sample for characterization, the tRFs may be amplified prior to the hybridization.

### Monitoring

[0098] Methods of monitoring subjects that are at risk of developing a disease or condition, or are at risk of disease or condition recurrence, or who are receiving therapeutic intervention to reduce, improve, or treat a symptom of the disease or condition, such as breast cancer, are also useful in determining whether to administer treatment and in managing treatment. Provided are methods where the tRFs are measured and characterized. In some cases, the tRFs are measured and characterized as part of a routine course of action. In other cases, the tRFs are measured and characterized before and again after subject management or treatment. In these cases, the methods are used to monitor the onset of a disease or condition, the recurrence of the disease or condition, the status of the disease or condition, or a propensity to develop such disease or condition, e.g., Parkinson's disease.

[0099] For example, characterization of tRFs or signatures can be used to monitor a subject's response to certain treatments. Such characterization can be used to monitor for the presence or absence of the disease or condition. The changes in the relative abundance or tRF signature delineated herein before treatment, during treatment, or following the conclusion of a treatment regimen may be indicative of the course of the disease or condition, progression of disease or condition, or response to treatment. In some embodiments, characterization of tRFs or signatures may be assessed at one or more time points (e.g., 2, 3, 4, 5). Analysis of the tRFs is made, for example, using a size selection, amplification, and sequencing, or other standard method to determine the tRF profile. If desired, the tRF profile is compared to a reference to determine if any alteration in the tRF profile is present. Such monitoring may be useful, for example, in assessing the efficacy of a particular treatment in a patient. Therapeutics that normalize the tRF profile are taken as particularly useful.

### Kits

[0100] Kits for diagnosing, identifying or monitoring a disease or condition, such as PD with or without dementia, are included. In one aspect, the invention includes a panel of engineered oligonucleotides comprising a mixture of oligonucleotides that are about 5 to about 15 nucleotides (nts) in length and capable of hybridizing RNAs (e.g. tRFs, full-length tRNAs, etc.), wherein the RNAs and RNA fragments are less than about 70 nts in length. In another aspect, the invention includes a kit for high-throughput analysis of RNAs or RNA fragments in a sample comprising the panel of engineered oligonucleotides of this invention along with hybridization reagents and RNA isolation reagents. In another aspect, the invention includes a kit for high-throughput analysis of RNAs or RNA fragments in a sample comprising a set of specially designed TaqMan® assays aimed at measuring the abundance of molecules mentioned in this invention. Alternatively, the kit could include: a specially designed TaqMan® Gene Expression Assays, TaqMan® Low Density Array-micro fluidic cards; a set of end-point specific assays such as dumbbell-PCR; a set of miR-ID assays. Other kits with variations on the components and oligonucleotide panels may be used in the context of the present invention. For example, the panel of engineered oligonucleotides or specially-designed kit may be specific to a cell type, disease type, stage of disease, or other aspect that may differentiate RNA fragment signatures. The kits and oligonucleotide panel may also be used to identify agents that modulate disease, or progression of disease in in vitro or in vivo animal models for the disease. In some embodiments, the subject in need thereof is a human.

[0101] The practice of the present invention employs, unless otherwise indicated, conventional techniques of molecular biology (including recombinant techniques), microbiology, cell biology, biochemistry and immunology, which are well within the purview of the skilled artisan. Such techniques are explained fully in the literature, such as, “Molecular Cloning: A Laboratory Manual”, fourth edition (Sambrook, 2012); “Oligonucleotide Synthesis” (Gait, 1984); “Culture of Animal Cells” (Freshney, 2010); “Methods in Enzymology” “Handbook of Experimental Immunology” (Weir, 1997); “Gene Transfer Vectors for Mammalian Cells” (Miller and Calos, 1987); “Short Protocols in Molecular Biology” (Ausubel, 2002); “Polymerase Chain Reaction: Principles, Applications and Troubleshooting”, (Babar, 2011); “Current Protocols in Immunology” (Coligan, 2002). These techniques are applicable to the production of the polynucleotides and polypeptides of the invention, and, as such, may be considered in making and practicing the invention. Particularly useful techniques for particular embodiments will be discussed in the sections that follow.

[0102] It is to be understood that wherever values and ranges are provided herein, all values and ranges encompassed by these values and ranges, are meant to be encompassed within the scope of the present invention. Moreover, all values that fall within these ranges, as well as the upper or lower limits of a range of values, are also contemplated by the present application.

[0103] The following examples further illustrate aspects of the present invention. However, they are in no way a limitation of the teachings or disclosure of the present invention as set forth herein.

### EXAMPLES

[0104] The invention is further described in detail by reference to the following experimental examples. These examples are provided for purposes of illustration only, and are not intended to be limiting unless otherwise specified. Thus, the invention should in no way be construed as being limited to the following examples, but rather, should be construed to encompass any and all variations which become evident as a result of the teaching provided herein.

[0105] Without further description, it is believed that one of ordinary skill in the art can, using the preceding description and the following illustrative examples, make and utilize the compounds of the present invention and practice the claimed methods. The following working examples therefore, specifically point out the preferred embodiments of the present invention, and are not to be construed as limiting in any way the remainder of the disclosure. The Results of the experiments disclosed herein are now described.

### Materials and Methods

### Datasets

[0106] Short RNA-sequencing (RNA-seq) data were obtained from two independent collections. Prefrontal cortex (PFC) data (Brodmann's area nine) were obtained from NIH GEO: the 29 PD samples are from series #GSE72962, (Hoss et al, Front Aging Neurosci 2016; 8:36.) whereas the 33 control samples are from series # GSE64977 (Hoss et al., BMC Med Genomics 2015; 8:10). The 67 PD CSF samples, 69 CSF controls, 61 PD SER samples, and 71 SER controls were obtained from dbGap, reference # phs000727. (Burgos et al., PLOS One 2014; 9(5): €94839)

### Preprocessing of Sequenced Reads and tRF Profiling

[0107] First, short RNA-seq samples were quality-trimmed and adapters removed using the cutadapt (v1.5) tool. The MINTmap pipeline was used to profile and quantify tRFs in these samples. MINTmap only uses exact matches and distinguishes between exclusive tRFs that can only be found inside “tRNA space” and ambiguous tRFs that exist both inside and outside of tRNA space. Next, the Threshold-seq algorithm was used to calculate an adaptive threshold for each short RNA-seq sample. All tRFs that exceeded this threshold entered the downstream analysis. Finally, for all tRFs in each sample that exceeded the Threshold-seq threshold, a normalized value of abundance in reads per million (RPM) was calculated.

### Sample Quality Control

[0108] Extracting RNA from biofluids can be challenging due to instability of miRNA profiles derived from CSF and SER samples. In these analyses, a positive correlation between the number of reads after cutadapt quality-trimming of the CSF and SER collections and the number of reads that are identified as tRFs was observed (FIGS. 5A-5B). The correlation appears to break down in those samples where fewer reads survive quality-filtering. Looking at the average numbers of reads that map to the tRNA space allowed to determine the minimum number of trimmed reads needed to identify all unique tRFs: this appears to be achieved in samples where ≥100,000 reads map to tRFs (FIG. 5C-5D). Importantly, this minimum required number of reads mapping to tRNA space allowed to confidently identify samples in which tRFs are either present at very low levels, or not expressed at all. 127 CSF samples and 65 SER samples satisfied the requirement that ≥100,000 reads map to tRNA space.

### Sequence Batch Correction

[0109] The PFC samples that were analyzed were originally sequenced in three batches (SEQ ID NOs: 1-53134). To correct for batch effects, the RPM expression data was processed using the ComBat algorithm from Bioconductor (release 3.6). Combat-processed reads were used for all downstream analysis.

### Statistical Analyses

[0110] All analyses were run in R version 3.3.0. Two-tailed t tests were used to identify differentially-abundant tRFs, retaining those which showed a significant difference in mean across sample categories (p-value≤0.05). To construct classifier models, the rpart package was used for regression trees, and the DiscriMiner package for Partial Least Squares—Discriminant Analysis (PLSDA). These two methods were chosen for their opposing qualities: RPART regression trees seek to define a step-by-step classification method that separates defined sample groups using “yes” /“no” decisions on quantitative data; PLSDA transforms collective observations about samples so that they most readily discriminate defined sample groups.

[0111] Monte Carlo simulations were used to evaluate the performance of these models. For each sample group, the datasets were randomly split into a training set comprised of 60% of the control and 60% of the disease samples, and a test set comprising the remaining 40% of control and disease samples. Using the training set, a classifier was built and used to determine the status of each sample in the test set. To adequately measure model performance, this was iterated over random sampling a total of N² times, where N is the sum total of the disease and control samples. To compute sensitivity and specificity, the total number of true positive, true negative, false positive, and false negative calls were tallied and made in each of the N² iterations.

[0112] Datasets corresponding to samples from prefrontal cortex (PFC), cerebrospinal fluid (CSF), and serum (SER) were obtained from NIH's GEO and dbGap. The datasets were subjected to the quality filtering described elsewhere, herein. After filtering, 62 PFC, 127 CSF, and 65 SER samples were further analyzed. All of the PFC samples were obtained from male patients. The clinical characteristics of these patients are listed in Table 1.

TABLE 1

| CLINICAL | | | |
|---|---|---|---|
| CHARACTERISTICS | PFC | CSF | SER |
| Control Samples | 33 | 64 | 31 |
| PD Samples | 29 | 63 | 34 |
| PD with Dementia | 11 | 24 | 12 |
| PD without Dementia | 18 | 39 | 22 |
| Male-Control | 33 | 37 | 15 |
| Male-PD | 29 | 37 | 23 |
| Female-Control | 0 | 27 | 16 |
| Female-PD | 0 | 26 | 11 |
| Age at Death | 72.5 ± 13.22 | 79.3 ± 8.6 | 80.9 ± 8.0 |
| (Mean ± SD) | | | |
| Motor Onset | 66.5 ± 9.8 | N/A | N/A |
| (Mean ± SD) | | | |

### Example 1: The tRF Abundance Profiles Differ Among PFC, CSF and SER

[0113] By applying MINTmap and Threshold-seq on the datasets that survived the filtering, 31,196 tRFs in the PFC collection, 12,608 tRFs in the CSF collection, and 9,857 tRFs in the SER collection were identified. The corresponding tRF sequences are listed in SEQ ID NOs: 1-53134. Some tRFs appeared in two or more datasets. In total, there were 33,561 unique tRFs discovered across the three collections. In this work, “{PFC∪CSF∪SER}” is used to denote this set of unique tRFs. FIG. 1A shows how many tRFs are shared among the three collections. 58% of the tRFs in {PFC∪CSF∪SER} are unique to the PFC samples.

[0114] As mentioned elsewhere herein, MINTmap distinguishes between tRFs that can arise exclusively from annotated tRNAs (“exclusive” tRFs) and “ambiguous” tRFs. The sequences of the latter exist in tRNA space as well as elsewhere on the genome. Of all PFC tRFs, 22,477 (72.05%) are exclusive. Similarly, 9,390 (74.47%) of all CSF tRFs are exclusive, as are 7,609 (77.19%) of all SER tRFs.

### Example 2: All Five Structural Categories are Represented Among the Identified tRFs

[0115] The analyses herein focus on the five categories of tRFs that overlap the mature tRNA. The analyses distinguish among these tRFs based on whether they originate in nuclearly- or mitochondrially-encoded tRNAs. Thus, a total of 10 groups: 3′-tRFs, 3′-tRHs, 5′-tRFs, 5′-tRHs, and i-tRFs from the mitochondrion (MT) and the nucleus (Nuc), respectively, are considered.

[0116] First, relative abundances at the level of tRF categories are examined. FIGS. 6A-6C show that nuclear 5′-tRHs are most abundant in each of the three collections. In PFC, the majority of the remaining reads map to MT 3′-tRFs and nuclear i-tRFs. On the other hand, in both CSF and SER, most of the remaining reads map to nuclear 5′-tRFs, i-tRFs and 3′-tRFs.

[0117] However, this representation is skewed in that it does not account for the fact that different numbers of distinct tRFs are present in each tRF category. To address this bias, the relative abundances at the level of individual tRFs was examined separately for each of the 10 groups under consideration. Specifically, for each sample in a collection, e.g. PFC, the total RPM supporting a tRF category was divided, e.g. nuclear 5′-tRFs, by the number of distinct tRFs in the category. This number was then averaged across all the samples within the same collection. This calculation for the CSF and SER collections was repeated. The results are summarized in FIGS. 6D-6F. This representation demonstrated that the average abundance per tRF is considerably less polarized across the 10 considered RF groups than FIG. 6A-6C would suggest. For example, in the CSF collection, the nuclear 3′-tRFs account for a larger percentage of total reads than do 5′-tRFs. However, the reads land on comparatively fewer 5′-tRFs, which essentially puts the individual tRFs in these categories on equal footing in terms of relative abundances.

### Example 3: The Observed tRFs Have Length Distributions That Are Sample-Source-Dependent

[0118] The average abundance of tRFs of a specific length separately in each of the three collections was examined. The distribution of RPM sums as a function of length, where all lengths are between 16 and 48 nt was considered. Overall, the three collections do not show any appreciable length differences between control (CNTRL) and PD. This is true for both MT tRFs (FIG. 7A-7C) and nuclear tRFs (FIG. 7D-7F) from all three collections. Even though no intra-collection differences were observed, it was found that there are inter-collection length differences. In particular, the majority of nuclear tRFs in the PFC collection are of lengths 32-34 nt (FIGS. 7D-7F). On the other hand, PFC MT tRFs are primarily 31-33 nt long (FIG. 7A), whereas in both CSF and SER the MT tRFs have peaks at both 29-31 nt and 44-46 nt (FIG. 7B-7C).

### Example 4: Many of the Discovered tRFs are Unique to a Given Cellular Context

[0119] As mentioned above, numerous tRFs have been reported by now in different cellular contexts. This is an important consideration for attempts to develop potential biomarkers. tRFs that appear in multiple cellular contexts do not have the desirable tissue-and disease-state specificity that is expected of a good biomarker, and thus should be excluded from consideration.

[0120] With that in mind, MINTbase, which is currently the largest repository of tRFs from human samples, was used. In particular, release 2.0 of MINTbase contains 26,744 distinct tRFs mined from 11,721 datasets and a multitude of contexts. In what follows, this set of 26,744 tRFs is denoted as “{MINTbase}.” MINTbase contains tRFs from 32 cancer types from TCGA, 452 samples from the 1000 Genomes Project for which RNA-seq data were made available, as well as several hundred more samples from other studies, both non-cancer and cancer. Release 2.0 of MINTbase also contains 7,405 distinct tRFs that were mined from the 535 brain tissue samples of TCGA's project on lower grade glioma (LGG). Any and all {MINTbase} tRFs that are present among the 33,561 tRFs of {PFC∪CSF∪SER} that is described above were removed as their presence in {MINTbase} indicates that their expression is neither PD-specific nor tissue-specific.

[0121] The tRF set {PFC∪CSF∪SER}—{MINTbase} that includes 17,009 tRFs was created. Specifically, {PFC∪CSF∪SER}—{MINTbase} retained only 15,593 (49.98%) of the original PFC tRFs, 4,026 (33.33%) of the original CSF tRFs, and 2,705 (27.44%) of the original SER tRFs (FIG. 1B). The {PFC∪CSF∪SER}—{MINTbase} tRFs are present in the samples from PD patients and the matching CNTRL, and absent from the 11,271 datasets of {MINTbase}. In other words, they are as tissue-and as disease-context specific as allowed by the currently available data on tRFs. FIG. 1B shows how the tRFs that remain in {PFC∪CSF∪SER}—{MINTbase} are distributed across the three collections (PFC, CSF, SER).

### Example 5: Multiple tRFs Are Differentially Abundant Between CNTRL and PD in All Three Collections

[0122] The tRFs that are differentially abundant (DA) between health and the PD state were sought. Specifically, the t statistic and p-value of comparison of each individual tRF in CNTRL and PD groups of batch-corrected PFC data was computed, and a t test was performed of each individual tRF in CNTRL and PD groups in CSF and SER data with a p-value threshold set to 0.05. Because it is known that a person's sex modulates tRF expression, DA tRFs were sought separately in samples from male and female donors.

[0123] For the full collection of tRFs in the {PFC∪CSF∪SER} set, the numbers of identified DA tRFs and their overlaps are summarized in FIGS. 1C-1D, for males and females. FIGS. 1E-IF show how the overlaps change when tRFs that are in the {MINTbase} set are removed from consideration. Note how 19 tRFs are DA between PD and CNTRL CSF in both males and females: of these, six have not been seen yet in other contexts (i.e., these six are not in part of the {MINTbase} collection of tRFs). By contrast, only three tRFs are DA between PD and CNTRL SER in both males and females: however, these three tRFs are in {MINTbase} and thus are considered to not be specific to the PD context.

[0124] tRFs that are DA in the original comparison of PFC brain tissue (all male donors) overlap with male comparisons in biofluids. 62 tRFs are DA between PD and CNTRL samples in both CSF and PFC: 16 of the 62 are novel and have not been seen in other contexts. FIG. 2 shows the log₂ fold change between PD and CNTRL (i.e. the log₂ of the ratio of mean PD over mean CNTRL for each tRF) for all DA tRFs and across all comparisons. The data are provided separately for each of the five tRF categories and two genomic origins (nucleus and MT). In each plot, individual points represent DA tRFs, with the point's Y-value capturing the magnitude of the tRF's observed fold change (log₂) and the X-value capturing the −log₁₀ of the tRF's p-value (the further right, the lower the p-value).

[0125] Next, the distribution of tRFs across the collections was examined (FIG. 3A-B). As can be seen, there is a characteristic difference among the three collections. In PFC, ˜10% of tRFs are present in nearly all samples. On the other hand, in SER, most tRFs are present only in small groups of samples. In CSF, multiple tRFs are present in multiple samples. In other words, there exists a large number of tRFs from which DA tRF biomarkers could be drawn.

[0126] Lastly, examination was done to evaluate which of the 10 groups (five structural categories×2 genomic origins) contribute to the DA tRFs of the {PFC∪CSF∪SER} set (FIGS. 3C-3D). Specifically, the number of DA tRFs in a given group (Y-axis) was plotted as a function of the percentage of tRFs from the same structural group that the DA tRFs represent (X-axis). In this FIG, the area of each bubble (and not the bubble's radius) associated with each tRF category is proportional to the number of DA tRFs (from the category). The rendering helps capture the relative relevance of the various tRF types in disease states. For example, in all three collections (PFC, CSF, and SER) it was found that a large number of nuclear i-tRFs that are DA (FIGS. 3C-3D). However, these i-tRFs are a relatively small portion of all i-tRFs that are present. On the other hand, almost one third of the MT 3′-tRFs that are present in PFC are DA between PD and CNTRL. Analogous observations can be made for the other tRF groups.

### Example 6: Multiple tRFs Are Differentially Abundant in the Context of Dementia Associated With PD

[0127] Next, tRFs that are DA between patients who had PD with dementia (PDD) and PD without dementia (PND) were sought. FIG. 4 illustrates which DA tRFs are shared among PDD, PND and CNTRL. The comparisons were carried out separately for males and females, and for each of the three collections (PFC, CSF, and SER). The DA tRFs compared here came from the {PFC∪CSF∪SER}—{MINTbase} set.

[0128] Of note in PFC, it was found that 491 tRFs that are DA between CNTRL and PD, CNTRL and PND, and CNTRL and PDD patients: this indicates that these tRFs are DA independently of the stage of disease (FIG. 4A). Conversely, 265 and 159 tRFs are commonly DA between CNTRL vs. PD and CNTRL vs. PND and CNTRL vs. PDD comparisons, respectively (FIG. 4A). These tRFs likely capture changes that are specific to disease progression, and warrant further investigation into whether their roles are causative in this regard. The mutation background of these patients is not known, so it is conceivable that these tRFs could also change as a result of specific molecular alterations in individual donors.

[0129] It was also sought to determine whether any tRFs are DA between PND and PDD. It was found that a unique set of tRFs (from all five tRF structural categories) that are not contained in {MINTbase} are DA between PND and PDD, and do not appear as DA in any other comparisons (FIG. 4F). Interestingly, these select tRFs that are DA between PND and PDD show essentially no overlap among the three collections (PFC, CSF, and SER). It is necessary to emphasize that the tRFs that are DA between PND and PDD in SER exhibit a very strong dependence on the sex of the patient: males and females share only one DA tRF (FIG. 4F).

### Example 7: tRFs Could Serve as Candidate PD Biomarkers

[0130] It was sought to determine whether DA tRFs could serve as biomarkers of PD. Two classification techniques were employed that used the abundance of tRFs as features: RPART and PLSDA (see Methods). Each RPART model was tuned to optimize the minimum number of features in each node of the decision tree. PLSDA was allowed to automatically select the number of components (latent variables) in the model. Each approach was used in a Monte Carlo simulation. The number of iterations varied across collections (see Methods). The performance assessment was done for the PLSDA model using all DA tRFs for each comparison (Table 2) and using only tRFs in {PFC∪CSF∪SER}—{MINTbase} (Table 2: “Sens” stands for sensitivity and “Spec” stands for specificity).

TABLE 2

| | Male PFC | | Female CSF | | Male CSF | | Female SER | | Male SER | |
|---|---|---|---|---|---|---|---|---|---|---|
| | Sens | Spec | Sens | Spec | Sens | Spec | Sens | Spec | Sens | Spec |
| tRFs in | 98% | 86% | 90% | 98% | 91% | 79% | 100% | 59% | 91% | 96% |
| {PFC ∪ CSF ∪ SER} | | | | | | | | | | |
| tRFs in | 97% | 83% | 89% | 98% | 87% | 76% | 97% | 71% | 86% | 95% |
| {PFC ∪ CSF ∪ SER}- | | | | | | | | | | |
| tRHs | | | | | | | | | | |
| tRFs in | 99% | 85% | 91% | 94% | 89% | 78% | 96% | 53% | 93% | 97% |
| {PFC ∪ CSF ∪ SER}- | | | | | | | | | | |
| {MINTbase} | | | | | | | | | | |
| tRFs in | 97% | 83% | 88% | 95% | 88% | 78% | 98% | 64% | 65% | 98% |
| {PFC ∪ CSF ∪ SER}- | | | | | | | | | | |
| {MINTbase}-tRHs | | | | | | | | | | |

[0131] Also assessed, but not plotted here, are the results from using RPART, because the PLSDA model showed better performance (Table 3: “Sens” stands for sensitivity and “Spec” stands for specificity).

TABLE 3

| | Male PFC | | Female CSF | | Male CSF | | Female SER | | Male SER | |
|---|---|---|---|---|---|---|---|---|---|---|
| | Sens | Spec | Sens | Spec | Sens | Spec | Sens | Spec | Sens | Spec |
| tRFs in | 79% | 83% | 59% | 59% | 67% | 56% | 95% | 10% | 53% | 62% |
| {PFC ∪ CSF ∪ SER} | | | | | | | | | | |
| tRFs in | 82% | 81% | 59% | 60% | 67% | 56% | 92% | 18% | 57% | 85% |
| {PFC ∪ CSF ∪ SER}- | | | | | | | | | | |
| {MINTbase} | | | | | | | | | | |

[0132] Finally, the performance of the PLSDA after scrambling the sample labels over the course of N² iterations was assessed, in order to determine how robust the PLSDA method was to noise. It was found that the performance of the model decreased dramatically, indicating that the PLSDA model identified true signal (data not shown).

[0133] Many tRNA halves have been shown to be induced by stress conditions in a wide variety of cell types. Consequently, tRNA halves are not expected to have the tissue- or disease-specificity required of good biomarker candidates. With this potential non-specificity in mind, all tRHs (5′ and 3′) were removed from the collection {PFC∪CSF∪SER}—{MINTbase}, and Monte-Carlo simulations were reran. As expected, it was observed that there was only a marginal decrease across all sensitivity and specificity measures (Table 2). Of note, there was an increase in specificity in the female SER classifier, which is anticipated given the rather small number (10) of starting tRFs (FIG. 1F).

### Example 8: tRFs Could Serve as Candidate PND and PDD Biomarkers

[0134] Having shown the ability of tRFs to differentiate PD from CNTRL, it was sought to determine whether tRFs could also distinguish each of PDD and PND from CNTRL. In each of the comparisons, PDD vs. CNTRL and PND vs. CNTRL the DA tRFs described above and shown in FIG. 4 were used. The focus specifically was on the tRFs in {PFC∪CSF∪SER}—{MINTbase} given that these tRFs are more likely to exhibit the desired specificity that is expected of biomarkers. For the PFC samples, it was found that classification of CNTRL vs. PND and CNTRL vs. PDD is more specific than the comparison of CNTRL vs. PD (Table 4).

TABLE 4

| | Male PFC | | Female CSF | | Male CSF | | Female SER | | Male SER | |
|---|---|---|---|---|---|---|---|---|---|---|
| | Sens | Spec | Sens | Spec | Sens | Spec | Sens | Spec | Sens | Spec |
| | tRFs in {PFC ∪ CSF ∪ SER}-{MINTbase} | | | | | | | | | |
| CNTRL vs. PND | 100% | 95% | 100% | 95% | 98% | 98% | 80% | 58% | 89% | 64% |
| CNTRL vs. PDD | 100% | 99% | 100% | 99% | 98% | 93% | 98% | 78% | 57% | 68% |
| | tRFs in {PFC ∪ CSF ∪ SER}-{MINTbase}-tRHs | | | | | | | | | |
| CNTRL vs. PND | 100% | 95% | 96% | 97% | 86% | 88% | 83% | 59% | 83% | 65% |
| CNTRL vs. PDD | 100% | 98% | 99% | 92% | 89% | 83% | 98% | 77% | 37% | 59% |

[0135] Sensitivity remains at 100% across these three models, while specificity ranges from 85% to 99%. For CSF samples from female donors, the sensitivity improves from 91% to 98%. Specificity is relatively unchanged in CNTRL vs. PDD, but improves from 94% to 98% in CNTRL vs. PND. For CSF samples from male donors, sensitivity remains relatively unchanged, whereas specificity increases modestly. Curiously, sensitivity and specificity decrease substantially in SER comparisons (Table 4).

### Example 9: Prioritizing the tRFs That Can Distinguish PD, PND, and PDD From CNTRL

[0136] Next, it was sought to prioritize the various tRFs based on their ability to discriminate PD from CNTRL. For PLSDA models using all tRFs from the original set {PFC∪CSF∪SER}, summed were the instances in which a tRF showed a Variance Importance in Projection (VIP) score≥1.5 in a PLSDA model, for all N² models (SEQ ID NOs: 57143-60526). Generally, the higher the VIP score is for any tRF, the higher the tRF's contribution to the PLSDA classification. Naturally, tRFs with higher VIP scores are comparatively better choices as biomarkers. Furthermore, the original model here to identify tRFs that were called VIP in the presence of both other potentially specific biomarkers and tRFs known to be non-specific to PD contexts were looked into.

[0137] To increase stringency of selection of highly specific biomarkers, VIP sums were filtered further keeping only those tRFs that are exclusive to the tRNA space and also absent from {MINTbase}. Notably, some of these tRFs are of the aforementioned tRH category. Even though the tRNA halves so far have been shown to be non-specific, it was opted to include these tRHs because they survived all possible filtering that is permitted by the currently available public data. As such, they can be viewed as candidate PD-specific biomarkers, with the understanding that they may lose their ‘PD-specific’ status if more data becomes available. For comparison, VIP votes for tRFs from the PLSDA models that do not include tRHs or tRFs seen in MINTbase were summer. The outcome of these steps resulted in a prioritized list of tRFs that would make ideal biomarker candidates. For example, 5′-tRFs contribute and average of 336.3 VIP votes in the analyses of the PFC collection (Table 5A).

TABLE 5A

| | tRF | # | Sum | Mean | # | Sum | Mean |
|---|---|---|---|---|---|---|---|
| Comparison | Category | tRFs | VIP | VIP | tRFs | VIP | VIP |
| Female CSF CNTRL vs. PD | Nuc i-tRF | 31 | 1755 | 56.6 | 23 | 1532 | 66.6 |
| Female CSF CNTRL vs. PD | Nuc 3′-tRF | 14 | 314 | 22.4 | 14 | 358 | 25.6 |
| Female CSF CNTRL vs. PD | Nuc 5′-tRH | 2 | 11 | 5.5 | 0 | 0 | 0.0 |
| Female CSF CNTRL vs. PD | Nuc 3′-tRH | 3 | 16 | 5.3 | 0 | 0 | 0.0 |
| Female CSF CNTRL vs. PD | Nuc 5′-tRF | 4 | 20 | 5.0 | 3 | 32 | 10.7 |
| Female CSF CNTRL vs. PD | MT i-tRF | 1 | 1 | 1.0 | 1 | 5 | 5.0 |
| Female SER CNTRL vs. PD | Nuc i-tRF | 3 | 1076 | 358.7 | 8 | 243 | 30.4 |
| Female SER CNTRL vs. PD | MT i-tRF | 1 | 19 | 19.0 | 2 | 18 | 9.0 |
| Male CSF CNTRL vs. PD | Nuc 5′-tRH | 1 | 1053 | 1053.0 | 0 | 0 | 0 |
| Male CSF CNTRL vs. PD | MT i-tRF | 3 | 1986 | 662.0 | 3 | 1524 | 508.0 |
| Male CSF CNTRL vs. PD | Nuc i-tRF | 92 | 19447 | 211.4 | 64 | 9922 | 155.0 |
| Male CSF CNTRL vs. PD | Nuc 3′-tRF | 91 | 6009 | 66.0 | 67 | 2964 | 44.2 |
| Male CSF CNTRL vs. PD | MT 3′-tRF | 1 | 42 | 42.0 | 1 | 125 | 125.0 |
| Male CSF CNTRL vs. PD | Nuc 3′-tRH | 7 | 91 | 13.0 | 0 | 0 | 0.0 |
| Male CSF CNTRL vs. PD | Nuc 5′-tRF | 2 | 8 | 4.0 | 0 | 0 | 0.0 |
| Male PFC CNTRL vs. PD | Nuc 5′-tRF | 28 | 8421 | 300.8 | 30 | 4207 | 140.2 |
| Male PFC CNTRL vs. PD | Nuc 5′-tRH | 15 | 3926 | 261.7 | 0 | 0 | 0.0 |
| Male PFC CNTRL vs. PD | MT 5′-tRF | 20 | 4663 | 233.2 | 397 | 1614 | 4.0 |
| Male PFC CNTRL vs. PD | Nuc 3′-tRF | 83 | 16322 | 196.7 | 218 | 8318 | 38.2 |
| Male PFC CNTRL vs. PD | MT 3′-tRF | 99 | 14865 | 150.2 | 86 | 7755 | 90.2 |
| Male PFC CNTRL vs. PD | Nuc i-tRF | 377 | 50092 | 132.9 | 112 | 34253 | 305.8 |
| Male PFC CNTRL vs. PD | MT i-tRF | 210 | 25153 | 119.8 | 17 | 9299 | 547.0 |
| Male PFC CNTRL vs. PD | MT 3′-tRH | 8 | 787 | 98.4 | 0 | 0 | 0 |
| Male PFC CNTRL vs. PD | Nuc 3′-tRH | 5 | 63 | 12.6 | 0 | 0 | 0 |
| Male PFC CNTRL vs. PD | MT 5′-tRH | 3 | 12 | 4.0 | 0 | 0 | 0 |
| Male SER CNTRL vs. PD | Nuc 3′-tRH | 1 | 90 | 90.0 | 0 | 0 | 0 |
| Male SER CNTRL vs. PD | Nuc i-tRF | 3 | 85 | 28.3 | 2 | 31 | 15.5 |
| Male SER CNTRL vs. PD | Nuc 3′-tRF | 4 | 39 | 9.8 | 2 | 9 | 4.5 |

[0138] When the tRFs from the other two tRF categories were subjected to the same filtering, the importance of nuclear i-tRFs as potent biomarkers emerged. Whereas most of the tRFs from the other categories are filtered out, nuclear i-tRFs contribute a high number of VIP votes on average in all five model contexts (Table 5A). Thus, nuclear i-tRFs may represent the most important set of tRFs to investigate in subsequent biomarker validation experiments.

[0139] It was noted that when this filtering was extended to the PLSDA models using CNTRL vs. PDD or CNTRL vs. PDD, this trend held (SEQ ID NOs: 60527-63850). By 10 design, none of the tRFs identified as VIP in these models, using the same filtering criteria of a VIP score≥1.5, are recorded in MINTbase. Here again, i-tRFs emerge as potential PD biomarkers (Table 5B, 5C).

TABLE 5B

| | tRF | # | Sum | Mean |
|---|---|---|---|---|
| Comparison | Category | tRFs | VIP | VIP |
| Female CSF CNTRL vs. | Nuc 3′-tRF | 21 | 5237 | 249.4 |
| PDD | | | | |
| Female CSF CNTRL vs. | Nuc i-tRF | 26 | 4538 | 174.5 |
| PDD | | | | |
| Female CSF CNTRL vs. | MT i-tRF | 1 | 2 | 2.0 |
| PDD | | | | |
| Female CSF CNTRL vs. | MT 3′-tRF | 2 | 3 | 1.5 |
| PDD | | | | |
| Female CSF CNTRL vs. | Nuc i-tRF | 33 | 5345 | 162.0 |
| PND | | | | |
| Female CSF CNTRL vs. | MT i-tRF | 1 | 149 | 149.0 |
| PND | | | | |
| Female CSF CNTRL vs. | Nuc 3′-tRF | 15 | 1832 | 122.1 |
| PND | | | | |
| Female CSF CNTRL vs. | Nuc 5′-tRF | 1 | 23 | 23.0 |
| PND | | | | |
| Female SER CNTRL vs. | Nuc i-tRF | 12 | 249 | 20.8 |
| PDD | | | | |
| Female SER CNTRL vs. | Nuc 5′-tRF | 1 | 6 | 6.0 |
| PDD | | | | |
| Female SER CNTRL vs. | MT 3′-tRF | 1 | 2 | 2.0 |
| PDD | | | | |
| Female SER CNTRL vs. | Nuc 3′-tRF | 1 | 1 | 1.0 |
| PDD | | | | |
| Female SER CNTRL vs. | Nuc 3′-tRF | 4 | 7 | 1.8 |
| PND | | | | |
| Female SER CNTRL vs. | Nuc i-tRF | 3 | 4 | 1.3 |
| PND | | | | |

TABLE 5C

| | tRF | # | Sum | Mean |
|---|---|---|---|---|
| Comparison | Category | tRFs | VIP | VIP |
| Male CSF CNTRL vs. PDD | MT i-tRF | 5 | 2731 | 546.2 |
| Male CSF CNTRL vs. PDD | MT 3′-tRF | 8 | 3177 | 397.1 |
| Male CSF CNTRL vs. PDD | Nuc i-tRF | 133 | 47960 | 360.6 |
| Male CSF CNTRL vs. PDD | Nuc 3′-tRF | 245 | 11201 | 45.7 |
| Male CSF CNTRL vs. PND | Nuc i-tRF | 65 | 9603 | 147.7 |
| Male CSF CNTRL vs. PND | Nuc 3′-tRF | 49 | 5197 | 106.1 |
| Male CSF CNTRL vs. PND | MT i-tRF | 2 | 16 | 8.0 |
| Male CSF CNTRL vs. PND | Nuc 5′-tRF | 1 | 3 | 3.0 |
| Male PFC CNTRL vs. PDD | Nuc 3′-tRF | 149 | 21840 | 146.6 |
| Male PFC CNTRL vs. PDD | MT i-tRF | 373 | 48527 | 130.1 |
| Male PFC CNTRL vs. PDD | Nuc i-tRF | 679 | 79638 | 117.3 |
| Male PFC CNTRL vs. PDD | MT 5′-tRF | 18 | 862 | 47.9 |
| Male PFC CNTRL vs. PDD | Nuc 5′-tRF | 25 | 1003 | 40.1 |
| Male PFC CNTRL vs. PDD | MT 3′-tRF | 60 | 1362 | 22.7 |
| Male PFC CNTRL vs. PND | Nuc i-tRF | 520 | 57859 | 111.2 |
| Male PFC CNTRL vs. PND | Nuc 3′-tRF | 94 | 9067 | 96.5 |
| Male PFC CNTRL vs. PND | MT 5′-tRF | 25 | 1945 | 77.8 |
| Male PFC CNTRL vs. PND | MT i-tRF | 522 | 39415 | 75.5 |
| Male PFC CNTRL vs. PND | Nuc 5′-tRF | 28 | 1680 | 60.0 |
| Male PFC CNTRL vs. PND | MT 3′-tRF | 59 | 1563 | 26.5 |
| Male SER CNTRL vs. PDD | Nuc i-tRF | 1 | 1 | 1.0 |
| Male SER CNTRL vs. PND | MT 3′-tRF | 3 | 39 | 13.0 |
| Male SER CNTRL vs. PND | MT i-tRF | 1 | 4 | 4.0 |
| Male SER CNTRL vs. PND | Nuc i-tRF | 8 | 27 | 3.4 |

[0140] Though i-tRFs do not show the highest mean VIP vote in all cases, the number of unique tRFs contributing VIP votes is highest among i-tRFs in all but one case (male CSF CNTRL vs. PDD). Additionally, although i-tRFs show the lowest mean VIP sum in female CSF CNTRL vs. PDD comparisons for example, there are 34 unique i-tRFs contributing VIP votes, as compared to only two 5′-tRFs. In all other female CNTRL vs. PDD and CNTRL vs. PND comparisons, i-tRFs exhibit among the top two mean VIP scores. In male comparisons, i-tRFs again contribute high stable means over a larger number of unique tRFs than alternative categories. Hence, i-tRFs emerge as promising biomarkers in the context of CNTRL vs. PDD or CNTRL vs. PND as well.

### Example 10: The Candidate tRF Biomarkers Are PD-Specific

[0141] While the described analyses of this project were ongoing, and after Release 2.0 of MINTbase became available, several samples from Alzheimer's disease (AD) patients in NIH GEO (GSE63501) were noted. This collection includes 13 PFC samples from 3 female and 4 male control patients, and 4 female and 2 male AD patients.

[0142] To validate the specificity of PD classification signature, whether the DA tRFs with high VIP scores that emerged from the above analyses are present among these AD samples and controls was analyzed. MINTmap was ran on the 13 samples that are part of the GSE63501 collection, and identified 5,662 tRFs with normalized abundance ≥1 RPM (SEQ ID NOs: 63851-69512). 3,734 of these tRFs are present in at least one female sample and 3,628 tRFs are present in at least one male control sample. 2,563 of these tRFs are present in female and 1,944 are present in male AD samples. Using the same approach and threshold settings that were employed to analyze the PFC, CSF and SER collections, 334 tRFs were identified that are DA in female control vs. female AD samples, and 807 tRFs that are DA in male control vs. male AD.

[0143] Finally, it was sought to identify which of the DA tRFs that can effectively distinguish PD from CNTRL are also DA between the AD and control samples of the GSE63501 collection. Any tRFs that appeared to be DA in both of these comparisons would be suboptimal choices for biomarkers, because they would not be disease-specific. On comparing the two lists, it was found that only 49 (15, respectively) of the 807 (334, respectively) tRFs that are DA between male (female, respectively) AD patients and controls are also present among the 987 tRFs that are DA between PD and CNTRL in the PFC samples. These 49+15 tRFs collectively contribute 3,924 (1.58%) of the 248,274 VIP votes in the PFC collection, i.e. a very small percentage of the total. Similarly, only 4 of the identified male AD DA tRFs are also DA in male CSF PD samples, 1 of the identified male AD DA tRFs is also DA in female CSF PD samples, and 2 of the identified male AD DA tRFs are also DA in male CSF PD samples. Together, only 1 of these 7 reidentified tRFs—a nuclear i-tRF accounting for 950 (1.40%) of 67,624 male CSF VIP —is among the VIP tRFs included in Table 4.

### Other Embodiments

[0144] The recitation of a listing of elements in any definition of a variable herein includes definitions of that variable as any single element or combination (or subcombination) of listed elements. The recitation of an embodiment herein includes that embodiment as any single embodiment or in combination with any other embodiments or portions thereof.

[0145] The disclosures of each and every patent, patent application, and publication cited herein are hereby incorporated herein by reference in their entirety. While this invention has been disclosed with reference to specific embodiments, it is apparent that other embodiments and variations of this invention may be devised by others skilled in the art without departing from the true spirit and scope of the invention. The appended claims are intended to be construed to include all such embodiments and equivalent variations.

The application's sequence listing, which the Patent Office published only in electronic form, follows.

SEQUENCE LISTING (69512 sequences)

SEQ ID NO: 1 - DNA, 17 bp, Homo sapiens
  source 1..17: mol_type = genomic DNA
aaaaaccatttcataac

SEQ ID NO: 2 - DNA, 18 bp, Homo sapiens
  source 1..18: mol_type = genomic DNA
aaaaaccatttcataact

SEQ ID NO: 3 - DNA, 22 bp, Homo sapiens
  source 1..22: mol_type = genomic DNA
aaaaaccatttcataactttgt

SEQ ID NO: 4 - DNA, 23 bp, Homo sapiens
  source 1..23: mol_type = genomic DNA
aaaaaccatttcataactttgtc

SEQ ID NO: 5 - DNA, 16 bp, Homo sapiens
  source 1..16: mol_type = genomic DNA
aaaaagtcatggaggc

SEQ ID NO: 6 - DNA, 17 bp, Homo sapiens
  source 1..17: mol_type = genomic DNA
aaaaagtcatggaggcc

SEQ ID NO: 7 - DNA, 18 bp, Homo sapiens
  source 1..18: mol_type = genomic DNA
aaaaagtcatggaggcca

SEQ ID NO: 8 - DNA, 20 bp, Homo sapiens
  source 1..20: mol_type = genomic DNA
aaaaagtcatggaggccatg

SEQ ID NO: 9 - DNA, 23 bp, Homo sapiens
  source 1..23: mol_type = genomic DNA
aaaaagtcatggaggccatgggg

SEQ ID NO: 10 - DNA, 24 bp, Homo sapiens
  source 1..24: mol_type = genomic DNA
aaaaagtcatggaggccatggggt

SEQ ID NO: 11 - DNA, 25 bp, Homo sapiens
  source 1..25: mol_type = genomic DNA
aaaaagtcatggaggccatggggtt

SEQ ID NO: 12 - DNA, 26 bp, Homo sapiens
  source 1..26: mol_type = genomic DNA
aaaaagtcatggaggccatggggttg

SEQ ID NO: 13 - DNA, 27 bp, Homo sapiens
  source 1..27: mol_type = genomic DNA
aaaaagtcatggaggccatggggttgg

SEQ ID NO: 14 - DNA, 30 bp, Homo sapiens
  source 1..30: mol_type = genomic DNA
aaaaagtcatggaggccatggggttggctt

SEQ ID NO: 15 - DNA, 16 bp, Homo sapiens
  source 1..16: mol_type = genomic DNA
aaaaattttggtgcaa

SEQ ID NO: 16 - DNA, 17 bp, Homo sapiens
  source 1..17: mol_type = genomic DNA
aaaaattttggtgcaac

SEQ ID NO: 17 - DNA, 18 bp, Homo sapiens
  source 1..18: mol_type = genomic DNA
aaaaattttggtgcaact

SEQ ID NO: 18 - DNA, 19 bp, Homo sapiens
  source 1..19: mol_type = genomic DNA
aaaaattttggtgcaactc

SEQ ID NO: 19 - DNA, 20 bp, Homo sapiens
  source 1..20: mol_type = genomic DNA
aaaaattttggtgcaactcc

SEQ ID NO: 20 - DNA, 22 bp, Homo sapiens
  source 1..22: mol_type = genomic DNA
aaaaattttggtgcaactccaa

SEQ ID NO: 21 - DNA, 24 bp, Homo sapiens
  source 1..24: mol_type = genomic DNA
aaaaattttggtgcaactccaaat

SEQ ID NO: 22 - DNA, 25 bp, Homo sapiens
  source 1..25: mol_type = genomic DNA
aaaaattttggtgcaactccaaata

SEQ ID NO: 23 - DNA, 29 bp, Homo sapiens
  source 1..29: mol_type = genomic DNA
aaaaattttggtgcaactccaaataaaag

SEQ ID NO: 24 - DNA, 30 bp, Homo sapiens
  source 1..30: mol_type = genomic DNA
aaaaattttggtgcaactccaaataaaagt

SEQ ID NO: 25 - DNA, 31 bp, Homo sapiens
  source 1..31: mol_type = genomic DNA
aaaaattttggtgcaactccaaataaaagta

SEQ ID NO: 26 - DNA, 32 bp, Homo sapiens
  source 1..32: mol_type = genomic DNA
aaaaattttggtgcaactccaaataaaagtac

SEQ ID NO: 27 - DNA, 33 bp, Homo sapiens
  source 1..33: mol_type = genomic DNA
aaaaattttggtgcaactccaaataaaagtacc

SEQ ID NO: 28 - DNA, 34 bp, Homo sapiens
  source 1..34: mol_type = genomic DNA
aaaaattttggtgcaactccaaataaaagtacca

SEQ ID NO: 29 - DNA, 16 bp, Homo sapiens
  source 1..16: mol_type = genomic DNA
aaaacatcagattgtg

SEQ ID NO: 30 - DNA, 17 bp, Homo sapiens
  source 1..17: mol_type = genomic DNA
aaaacatcagattgtga

SEQ ID NO: 31 - DNA, 18 bp, Homo sapiens
  source 1..18: mol_type = genomic DNA
aaaacatcagattgtgaa

SEQ ID NO: 32 - DNA, 19 bp, Homo sapiens
  source 1..19: mol_type = genomic DNA
aaaacatcagattgtgaat

SEQ ID NO: 33 - DNA, 20 bp, Homo sapiens
  source 1..20: mol_type = genomic DNA
aaaacatcagattgtgaatc

SEQ ID NO: 34 - DNA, 21 bp, Homo sapiens
  source 1..21: mol_type = genomic DNA
aaaacatcagattgtgaatct

SEQ ID NO: 35 - DNA, 22 bp, Homo sapiens
  source 1..22: mol_type = genomic DNA
aaaacatcagattgtgaatctg

SEQ ID NO: 36 - DNA, 23 bp, Homo sapiens
  source 1..23: mol_type = genomic DNA
aaaacatcagattgtgaatctga

SEQ ID NO: 37 - DNA, 24 bp, Homo sapiens
  source 1..24: mol_type = genomic DNA
aaaacatcagattgtgaatctgac

SEQ ID NO: 38 - DNA, 25 bp, Homo sapiens
  source 1..25: mol_type = genomic DNA
aaaacatcagattgtgaatctgaca

SEQ ID NO: 39 - DNA, 27 bp, Homo sapiens
  source 1..27: mol_type = genomic DNA
aaaacatcagattgtgaatctgacaac

SEQ ID NO: 40 - DNA, 28 bp, Homo sapiens
  source 1..28: mol_type = genomic DNA
aaaacatcagattgtgaatctgacaaca

SEQ ID NO: 41 - DNA, 29 bp, Homo sapiens
  source 1..29: mol_type = genomic DNA
aaaacatcagattgtgaatctgacaacag

SEQ ID NO: 42 - DNA, 30 bp, Homo sapiens
  source 1..30: mol_type = genomic DNA
aaaacatcagattgtgaatctgacaacaga

SEQ ID NO: 43 - DNA, 31 bp, Homo sapiens
  source 1..31: mol_type = genomic DNA
aaaacatcagattgtgaatctgacaacagag

SEQ ID NO: 44 - DNA, 32 bp, Homo sapiens
  source 1..32: mol_type = genomic DNA
aaaacatcagattgtgaatctgacaacagagg

SEQ ID NO: 45 - DNA, 33 bp, Homo sapiens
  source 1..33: mol_type = genomic DNA
aaaacatcagattgtgaatctgacaacagaggc

SEQ ID NO: 46 - DNA, 34 bp, Homo sapiens
  source 1..34: mol_type = genomic DNA
aaaacatcagattgtgaatctgacaacagaggct

SEQ ID NO: 47 - DNA, 35 bp, Homo sapiens
  source 1..35: mol_type = genomic DNA
aaaacatcagattgtgaatctgacaacagaggctt

SEQ ID NO: 48 - DNA, 36 bp, Homo sapiens
  source 1..36: mol_type = genomic DNA
aaaacatcagattgtgaatctgacaacagaggctta

SEQ ID NO: 49 - DNA, 37 bp, Homo sapiens
  source 1..37: mol_type = genomic DNA
aaaacatcagattgtgaatctgacaacagaggcttac

SEQ ID NO: 50 - DNA, 38 bp, Homo sapiens
  source 1..38: mol_type = genomic DNA
aaaacatcagattgtgaatctgacaacagaggcttacg

SEQ ID NO: 51 - DNA, 39 bp, Homo sapiens
  source 1..39: mol_type = genomic DNA
aaaacatcagattgtgaatctgacaacagaggcttacga

SEQ ID NO: 52 - DNA, 40 bp, Homo sapiens
  source 1..40: mol_type = genomic DNA
aaaacatcagattgtgaatctgacaacagaggcttacgac

SEQ ID NO: 53 - DNA, 41 bp, Homo sapiens
  source 1..41: mol_type = genomic DNA
aaaacatcagattgtgaatctgacaacagaggcttacgacc

SEQ ID NO: 54 - DNA, 42 bp, Homo sapiens
  source 1..42: mol_type = genomic DNA
aaaacatcagattgtgaatctgacaacagaggcttacgaccc

SEQ ID NO: 55 - DNA, 43 bp, Homo sapiens
  source 1..43: mol_type = genomic DNA
aaaacatcagattgtgaatctgacaacagaggcttacgacccc

SEQ ID NO: 56 - DNA, 44 bp, Homo sapiens
  source 1..44: mol_type = genomic DNA
aaaacatcagattgtgaatctgacaacagaggcttacgacccct

SEQ ID NO: 57 - DNA, 45 bp, Homo sapiens
  source 1..45: mol_type = genomic DNA
aaaacatcagattgtgaatctgacaacagaggcttacgacccctt

SEQ ID NO: 58 - DNA, 46 bp, Homo sapiens
  source 1..46: mol_type = genomic DNA
aaaacatcagattgtgaatctgacaacagaggcttacgacccctta

SEQ ID NO: 59 - DNA, 48 bp, Homo sapiens
  source 1..48: mol_type = genomic DNA
aaaacatcagattgtgaatctgacaacagaggcttacgaccccttatt

SEQ ID NO: 60 - DNA, 22 bp, Homo sapiens
  source 1..22: mol_type = genomic DNA
aaaaccatttcataactttgtc

SEQ ID NO: 61 - DNA, 22 bp, Homo sapiens
  source 1..22: mol_type = genomic DNA
aaaacctttttccaaggacacc

SEQ ID NO: 62 - DNA, 23 bp, Homo sapiens
  source 1..23: mol_type = genomic DNA
aaaacctttttccaaggacacca

SEQ ID NO: 63 - DNA, 16 bp, Homo sapiens
  source 1..16: mol_type = genomic DNA
aaaacgaatgatttcg

SEQ ID NO: 64 - DNA, 18 bp, Homo sapiens
  source 1..18: mol_type = genomic DNA
aaaacgaatgatttcgac

SEQ ID NO: 65 - DNA, 19 bp, Homo sapiens
  source 1..19: mol_type = genomic DNA
aaaacgaatgatttcgact

SEQ ID NO: 66 - DNA, 20 bp, Homo sapiens
  source 1..20: mol_type = genomic DNA
aaaacgaatgatttcgactc

SEQ ID NO: 67 - DNA, 21 bp, Homo sapiens
  source 1..21: mol_type = genomic DNA
aaaacgaatgatttcgactca

SEQ ID NO: 68 - DNA, 22 bp, Homo sapiens
  source 1..22: mol_type = genomic DNA
aaaacgaatgatttcgactcat

SEQ ID NO: 69 - DNA, 24 bp, Homo sapiens
  source 1..24: mol_type = genomic DNA
aaaacgaatgatttcgactcatta

SEQ ID NO: 70 - DNA, 26 bp, Homo sapiens
  source 1..26: mol_type = genomic DNA
aaaacgaatgatttcgactcattaaa

SEQ ID NO: 71 - DNA, 28 bp, Homo sapiens
  source 1..28: mol_type = genomic DNA
aaaacgaatgatttcgactcattaaatt

SEQ ID NO: 72 - DNA, 31 bp, Homo sapiens
  source 1..31: mol_type = genomic DNA
aaaacgaatgatttcgactcattaaattatg

SEQ ID NO: 73 - DNA, 32 bp, Homo sapiens
  source 1..32: mol_type = genomic DNA
aaaacgaatgatttcgactcattaaattatga

SEQ ID NO: 74 - DNA, 33 bp, Homo sapiens
  source 1..33: mol_type = genomic DNA
aaaacgaatgatttcgactcattaaattatgat

SEQ ID NO: 75 - DNA, 34 bp, Homo sapiens
  source 1..34: mol_type = genomic DNA
aaaacgaatgatttcgactcattaaattatgata

SEQ ID NO: 76 - DNA, 37 bp, Homo sapiens
  source 1..37: mol_type = genomic DNA
aaaacgaatgatttcgactcattaaattatgataatc

SEQ ID NO: 77 - DNA, 38 bp, Homo sapiens
  source 1..38: mol_type = genomic DNA
aaaacgaatgatttcgactcattaaattatgataatca

SEQ ID NO: 78 - DNA, 17 bp, Homo sapiens
  source 1..17: mol_type = genomic DNA
aaaacttaaaactttac

SEQ ID NO: 79 - DNA, 28 bp, Homo sapiens
  source 1..28: mol_type = genomic DNA
aaaacttaaaactttacaatcagaggtt

SEQ ID NO: 80 - DNA, 20 bp, Homo sapiens
  source 1..20: mol_type = genomic DNA
aaaacttaaaactttacagt

SEQ ID NO: 81 - DNA, 23 bp, Homo sapiens
  source 1..23: mol_type = genomic DNA
aaaacttaaaactttacagtcag

SEQ ID NO: 82 - DNA, 24 bp, Homo sapiens
  source 1..24: mol_type = genomic DNA
aaaacttaaaactttacagtcaga

SEQ ID NO: 83 - DNA, 25 bp, Homo sapiens
  source 1..25: mol_type = genomic DNA
aaaacttaaaactttacagtcagag

SEQ ID NO: 84 - DNA, 26 bp, Homo sapiens
  source 1..26: mol_type = genomic DNA
aaaacttaaaactttacagtcagagg

SEQ ID NO: 85 - DNA, 27 bp, Homo sapiens
  source 1..27: mol_type = genomic DNA
aaaacttaaaactttacagtcagaggt

SEQ ID NO: 86 - DNA, 28 bp, Homo sapiens
  source 1..28: mol_type = genomic DNA
aaaacttaaaactttacagtcagaggtt

SEQ ID NO: 87 - DNA, 29 bp, Homo sapiens
  source 1..29: mol_type = genomic DNA
aaaacttaaaactttacagtcagaggttc

SEQ ID NO: 88 - DNA, 37 bp, Homo sapiens
  source 1..37: mol_type = genomic DNA
aaaacttaaaactttacagtcagaggttcaattcctc

SEQ ID NO: 89 - DNA, 38 bp, Homo sapiens
  source 1..38: mol_type = genomic DNA
aaaacttaaaactttacagtcagaggttcaattcctct

SEQ ID NO: 90 - DNA, 39 bp, Homo sapiens
  source 1..39: mol_type = genomic DNA
aaaacttaaaactttacagtcagaggttcaattcctctt

SEQ ID NO: 91 - DNA, 40 bp, Homo sapiens
  source 1..40: mol_type = genomic DNA
aaaacttaaaactttacagtcagaggttcaattcctcttc

SEQ ID NO: 92 - DNA, 41 bp, Homo sapiens
  source 1..41: mol_type = genomic DNA
aaaacttaaaactttacagtcagaggttcaattcctcttct

SEQ ID NO: 93 - DNA, 48 bp, Homo sapiens
  source 1..48: mol_type = genomic DNA
aaaacttaaaactttacagtcagaggttcaattcctcttcttaacacc

SEQ ID NO: 94 - DNA, 18 bp, Homo sapiens
  source 1..18: mol_type = genomic DNA
aaaactttacagtcagag

SEQ ID NO: 95 - DNA, 19 bp, Homo sapiens
  source 1..19: mol_type = genomic DNA
aaaactttacagtcagagg

SEQ ID NO: 96 - DNA, 21 bp, Homo sapiens
  source 1..21: mol_type = genomic DNA
aaaactttacagtcagaggtt

SEQ ID NO: 97 - DNA, 22 bp, Homo sapiens
  source 1..22: mol_type = genomic DNA
aaaactttacagtcagaggttc

SEQ ID NO: 98 - DNA, 33 bp, Homo sapiens
  source 1..33: mol_type = genomic DNA
aaaactttacagtcagaggttcaattcctcttc

SEQ ID NO: 99 - DNA, 17 bp, Homo sapiens
  source 1..17: mol_type = genomic DNA
aaaagagttactttgat

SEQ ID NO: 100 - DNA, 19 bp, Homo sapiens
  source 1..19: mol_type = genomic DNA
aaaagagttactttgatag

SEQ ID NO: 101 - DNA, 21 bp, Homo sapiens
  source 1..21: mol_type = genomic DNA
aaaagagttactttgatagag

SEQ ID NO: 102 - DNA, 34 bp, Homo sapiens
  source 1..34: mol_type = genomic DNA
aaaagagttactttgatagagtaaataataggag

SEQ ID NO: 103 - DNA, 35 bp, Homo sapiens
  source 1..35: mol_type = genomic DNA
aaaagagttactttgatagagtaaataataggagc

SEQ ID NO: 104 - DNA, 36 bp, Homo sapiens
  source 1..36: mol_type = genomic DNA
aaaagagttactttgatagagtaaataataggagct

SEQ ID NO: 105 - DNA, 16 bp, Homo sapiens
  source 1..16: mol_type = genomic DNA
aaaagtcatggaggcc

SEQ ID NO: 106 - DNA, 17 bp, Homo sapiens
  source 1..17: mol_type = genomic DNA
aaaagtcatggaggcca

SEQ ID NO: 107 - DNA, 19 bp, Homo sapiens
  source 1..19: mol_type = genomic DNA
aaaagtcatggaggccatg

SEQ ID NO: 108 - DNA, 22 bp, Homo sapiens
  source 1..22: mol_type = genomic DNA
aaaagtcatggaggccatgggg

SEQ ID NO: 109 - DNA, 23 bp, Homo sapiens
  source 1..23: mol_type = genomic DNA
aaaagtcatggaggccatggggt

SEQ ID NO: 110 - DNA, 24 bp, Homo sapiens
  source 1..24: mol_type = genomic DNA
aaaagtcatggaggccatggggtt

SEQ ID NO: 111 - DNA, 25 bp, Homo sapiens
  source 1..25: mol_type = genomic DNA
aaaagtcatggaggccatggggttg

SEQ ID NO: 112 - DNA, 26 bp, Homo sapiens
  source 1..26: mol_type = genomic DNA
aaaagtcatggaggccatggggttgg

SEQ ID NO: 113 - DNA, 25 bp, Homo sapiens
  source 1..25: mol_type = genomic DNA
aaaatggctgagtgaagcattggac

SEQ ID NO: 114 - DNA, 26 bp, Homo sapiens
  source 1..26: mol_type = genomic DNA
aaaatggctgagtgaagcattggact

SEQ ID NO: 115 - DNA, 27 bp, Homo sapiens
  source 1..27: mol_type = genomic DNA
aaaatggctgagtgaagcattggactg

SEQ ID NO: 116 - DNA, 28 bp, Homo sapiens
  source 1..28: mol_type = genomic DNA
aaaatggctgagtgaagcattggactgt

SEQ ID NO: 117 - DNA, 29 bp, Homo sapiens
  source 1..29: mol_type = genomic DNA
aaaatggctgagtgaagcattggactgta

SEQ ID NO: 118 - DNA, 37 bp, Homo sapiens
  source 1..37: mol_type = genomic DNA
aaaatggctgagtgaagcattggactgtaaatctaaa

SEQ ID NO: 119 - DNA, 16 bp, Homo sapiens
  source 1..16: mol_type = genomic DNA
aaaatgttggttatac

SEQ ID NO: 120 - DNA, 17 bp, Homo sapiens
  source 1..17: mol_type = genomic DNA
aaaatgttggttatacc

SEQ ID NO: 121 - DNA, 18 bp, Homo sapiens
  source 1..18: mol_type = genomic DNA
aaaatgttggttataccc

SEQ ID NO: 122 - DNA, 20 bp, Homo sapiens
  source 1..20: mol_type = genomic DNA
aaaatgttggttataccctt

SEQ ID NO: 123 - DNA, 21 bp, Homo sapiens
  source 1..21: mol_type = genomic DNA
aaaatgttggttatacccttc

SEQ ID NO: 124 - DNA, 22 bp, Homo sapiens
  source 1..22: mol_type = genomic DNA
aaaatgttggttatacccttcc

SEQ ID NO: 125 - DNA, 23 bp, Homo sapiens
  source 1..23: mol_type = genomic DNA
aaaatgttggttatacccttccc

SEQ ID NO: 126 - DNA, 24 bp, Homo sapiens
  source 1..24: mol_type = genomic DNA
aaaatgttggttatacccttcccg

SEQ ID NO: 127 - DNA, 27 bp, Homo sapiens
  source 1..27: mol_type = genomic DNA
aaaatgttggttatacccttcccgtac

SEQ ID NO: 128 - DNA, 28 bp, Homo sapiens
  source 1..28: mol_type = genomic DNA
aaaatgttggttatacccttcccgtact

SEQ ID NO: 129 - DNA, 29 bp, Homo sapiens
  source 1..29: mol_type = genomic DNA
aaaatgttggttatacccttcccgtacta

SEQ ID NO: 130 - DNA, 30 bp, Homo sapiens
  source 1..30: mol_type = genomic DNA
aaaatgttggttatacccttcccgtactac

SEQ ID NO: 131 - DNA, 31 bp, Homo sapiens
  source 1..31: mol_type = genomic DNA
aaaatgttggttatacccttcccgtactacc

SEQ ID NO: 132 - DNA, 32 bp, Homo sapiens
  source 1..32: mol_type = genomic DNA
aaaatgttggttatacccttcccgtactacca

SEQ ID NO: 133 - DNA, 16 bp, Homo sapiens
  source 1..16: mol_type = genomic DNA
aaaatgtttagacggg

SEQ ID NO: 134 - DNA, 17 bp, Homo sapiens
  source 1..17: mol_type = genomic DNA
aaaatgtttagacgggc

SEQ ID NO: 135 - DNA, 18 bp, Homo sapiens
  source 1..18: mol_type = genomic DNA
aaaatgtttagacgggct

SEQ ID NO: 136 - DNA, 19 bp, Homo sapiens
  source 1..19: mol_type = genomic DNA
aaaatgtttagacgggctc

SEQ ID NO: 137 - DNA, 20 bp, Homo sapiens
  source 1..20: mol_type = genomic DNA
aaaatgtttagacgggctca

SEQ ID NO: 138 - DNA, 21 bp, Homo sapiens
  source 1..21: mol_type = genomic DNA
aaaatgtttagacgggctcac

SEQ ID NO: 139 - DNA, 22 bp, Homo sapiens
  source 1..22: mol_type = genomic DNA
aaaatgtttagacgggctcaca

SEQ ID NO: 140 - DNA, 23 bp, Homo sapiens
  source 1..23: mol_type = genomic DNA
aaaatgtttagacgggctcacat

SEQ ID NO: 141 - DNA, 24 bp, Homo sapiens
  source 1..24: mol_type = genomic DNA
aaaatgtttagacgggctcacatc

SEQ ID NO: 142 - DNA, 25 bp, Homo sapiens
  source 1..25: mol_type = genomic DNA
aaaatgtttagacgggctcacatca

SEQ ID NO: 143 - DNA, 26 bp, Homo sapiens
  source 1..26: mol_type = genomic DNA
aaaatgtttagacgggctcacatcac

SEQ ID NO: 144 - DNA, 27 bp, Homo sapiens
  source 1..27: mol_type = genomic DNA
aaaatgtttagacgggctcacatcacc

SEQ ID NO: 145 - DNA, 28 bp, Homo sapiens
  source 1..28: mol_type = genomic DNA
aaaatgtttagacgggctcacatcaccc

SEQ ID NO: 146 - DNA, 29 bp, Homo sapiens
  source 1..29: mol_type = genomic DNA
aaaatgtttagacgggctcacatcacccc

SEQ ID NO: 147 - DNA, 30 bp, Homo sapiens
  source 1..30: mol_type = genomic DNA
aaaatgtttagacgggctcacatcacccca

SEQ ID NO: 148 - DNA, 31 bp, Homo sapiens
  source 1..31: mol_type = genomic DNA
aaaatgtttagacgggctcacatcaccccat

SEQ ID NO: 149 - DNA, 32 bp, Homo sapiens
  source 1..32: mol_type = genomic DNA
aaaatgtttagacgggctcacatcaccccata

SEQ ID NO: 150 - DNA, 33 bp, Homo sapiens
  source 1..33: mol_type = genomic DNA
aaaatgtttagacgggctcacatcaccccataa

SEQ ID NO: 151 - DNA, 34 bp, Homo sapiens
  source 1..34: mol_type = genomic DNA
aaaatgtttagacgggctcacatcaccccataaa

SEQ ID NO: 152 - DNA, 35 bp, Homo sapiens
  source 1..35: mol_type = genomic DNA
aaaatgtttagacgggctcacatcaccccataaac

SEQ ID NO: 153 - DNA, 36 bp, Homo sapiens
  source 1..36: mol_type = genomic DNA
aaaatgtttagacgggctcacatcaccccataaaca

SEQ ID NO: 154 - DNA, 38 bp, Homo sapiens
  source 1..38: mol_type = genomic DNA
aaaatgtttagacgggctcacatcaccccataaacacc

SEQ ID NO: 155 - DNA, 39 bp, Homo sapiens
  source 1..39: mol_type = genomic DNA
aaaatgtttagacgggctcacatcaccccataaacacca

SEQ ID NO: 156 - DNA, 16 bp, Homo sapiens
  source 1..16: mol_type = genomic DNA
aaaattttggtgcaac

SEQ ID NO: 157 - DNA, 17 bp, Homo sapiens
  source 1..17: mol_type = genomic DNA
aaaattttggtgcaact

SEQ ID NO: 158 - DNA, 18 bp, Homo sapiens
  source 1..18: mol_type = genomic DNA
aaaattttggtgcaactc

SEQ ID NO: 159 - DNA, 19 bp, Homo sapiens
  source 1..19: mol_type = genomic DNA
aaaattttggtgcaactcc

SEQ ID NO: 160 - DNA, 20 bp, Homo sapiens
  source 1..20: mol_type = genomic DNA
aaaattttggtgcaactcca

SEQ ID NO: 161 - DNA, 28 bp, Homo sapiens
  source 1..28: mol_type = genomic DNA
aaaattttggtgcaactccaaataaaag

SEQ ID NO: 162 - DNA, 29 bp, Homo sapiens
  source 1..29: mol_type = genomic DNA
aaaattttggtgcaactccaaataaaagt

SEQ ID NO: 163 - DNA, 30 bp, Homo sapiens
  source 1..30: mol_type = genomic DNA
aaaattttggtgcaactccaaataaaagta

SEQ ID NO: 164 - DNA, 31 bp, Homo sapiens
  source 1..31: mol_type = genomic DNA
aaaattttggtgcaactccaaataaaagtac

SEQ ID NO: 165 - DNA, 32 bp, Homo sapiens
  source 1..32: mol_type = genomic DNA
aaaattttggtgcaactccaaataaaagtacc

SEQ ID NO: 166 - DNA, 20 bp, Homo sapiens
  source 1..20: mol_type = genomic DNA
aaacaaaacgaatgatttcg

SEQ ID NO: 167 - DNA, 22 bp, Homo sapiens
  source 1..22: mol_type = genomic DNA
aaacaaaacgaatgatttcgac

SEQ ID NO: 168 - DNA, 23 bp, Homo sapiens
  source 1..23: mol_type = genomic DNA
aaacaaaacgaatgatttcgact

SEQ ID NO: 169 - DNA, 24 bp, Homo sapiens
  source 1..24: mol_type = genomic DNA
aaacaaaacgaatgatttcgactc

SEQ ID NO: 170 - DNA, 25 bp, Homo sapiens
  source 1..25: mol_type = genomic DNA
aaacaaaacgaatgatttcgactca

SEQ ID NO: 171 - DNA, 26 bp, Homo sapiens
  source 1..26: mol_type = genomic DNA
aaacaaaacgaatgatttcgactcat

SEQ ID NO: 172 - DNA, 28 bp, Homo sapiens
  source 1..28: mol_type = genomic DNA
aaacaaaacgaatgatttcgactcatta

SEQ ID NO: 173 - DNA, 35 bp, Homo sapiens
  source 1..35: mol_type = genomic DNA
aaacaaaacgaatgatttcgactcattaaattatg

SEQ ID NO: 174 - DNA, 37 bp, Homo sapiens
  source 1..37: mol_type = genomic DNA
aaacaaaacgaatgatttcgactcattaaattatgat

SEQ ID NO: 175 - DNA, 38 bp, Homo sapiens
  source 1..38: mol_type = genomic DNA
aaacaaaacgaatgatttcgactcattaaattatgata

SEQ ID NO: 176 - DNA, 21 bp, Homo sapiens
  source 1..21: mol_type = genomic DNA
aaacaggagatcctgggttcg

SEQ ID NO: 177 - DNA, 22 bp, Homo sapiens
  source 1..22: mol_type = genomic DNA
aaacaggagatcctgggttcga

SEQ ID NO: 178 - DNA, 35 bp, Homo sapiens
  source 1..35: mol_type = genomic DNA
aaacaggagatcctgggttcgaatcccagcggggc

SEQ ID NO: 179 - DNA, 36 bp, Homo sapiens
  source 1..36: mol_type = genomic DNA
aaacaggagatcctgggttcgaatcccagcggggcc

SEQ ID NO: 180 - DNA, 37 bp, Homo sapiens
  source 1..37: mol_type = genomic DNA
aaacaggagatcctgggttcgaatcccagcggggcct

SEQ ID NO: 181 - DNA, 38 bp, Homo sapiens
  source 1..38: mol_type = genomic DNA
aaacaggagatcctgggttcgaatcccagcggggcctc

SEQ ID NO: 182 - DNA, 39 bp, Homo sapiens
  source 1..39: mol_type = genomic DNA
aaacaggagatcctgggttcgaatcccagcggggcctcc

SEQ ID NO: 183 - DNA, 34 bp, Homo sapiens
  source 1..34: mol_type = genomic DNA
aaacaggagatcctgggttcgaatcccagcggtg

SEQ ID NO: 184 - DNA, 35 bp, Homo sapiens
  source 1..35: mol_type = genomic DNA
aaacaggagatcctgggttcgaatcccagcggtgc

SEQ ID NO: 185 - DNA, 37 bp, Homo sapiens
  source 1..37: mol_type = genomic DNA
aaacaggagatcctgggttcgaatcccagcggtgcct

SEQ ID NO: 186 - DNA, 38 bp, Homo sapiens
  source 1..38: mol_type = genomic DNA
aaacaggagatcctgggttcgaatcccagcggtgcctc

SEQ ID NO: 187 - DNA, 39 bp, Homo sapiens
  source 1..39: mol_type = genomic DNA
aaacaggagatcctgggttcgaatcccagcggtgcctcc

SEQ ID NO: 188 - DNA, 40 bp, Homo sapiens
  source 1..40: mol_type = genomic DNA
aaacaggagatcctgggttcgaatcccagcggtgcctcca

SEQ ID NO: 189 - DNA, 38 bp, Homo sapiens
  source 1..38: mol_type = genomic DNA
aaacaggagatcctgggttcgaatcccagtagagcctc

SEQ ID NO: 190 - DNA, 38 bp, Homo sapiens
  source 1..38: mol_type = genomic DNA
aaacaggagatcctgggttcgactcccagtggggcctc

SEQ ID NO: 191 - DNA, 16 bp, Homo sapiens
  source 1..16: mol_type = genomic DNA
aaacatcagattgtga

SEQ ID NO: 192 - DNA, 17 bp, Homo sapiens
  source 1..17: mol_type = genomic DNA
aaacatcagattgtgaa

SEQ ID NO: 193 - DNA, 18 bp, Homo sapiens
  source 1..18: mol_type = genomic DNA
aaacatcagattgtgaat

SEQ ID NO: 194 - DNA, 19 bp, Homo sapiens
  source 1..19: mol_type = genomic DNA
aaacatcagattgtgaatc

SEQ ID NO: 195 - DNA, 20 bp, Homo sapiens
  source 1..20: mol_type = genomic DNA
aaacatcagattgtgaatct

SEQ ID NO: 196 - DNA, 21 bp, Homo sapiens
  source 1..21: mol_type = genomic DNA
aaacatcagattgtgaatctg

SEQ ID NO: 197 - DNA, 23 bp, Homo sapiens
  source 1..23: mol_type = genomic DNA
aaacatcagattgtgaatctgac

SEQ ID NO: 198 - DNA, 24 bp, Homo sapiens
  source 1..24: mol_type = genomic DNA
aaacatcagattgtgaatctgaca

SEQ ID NO: 199 - DNA, 25 bp, Homo sapiens
  source 1..25: mol_type = genomic DNA
aaacatcagattgtgaatctgacaa

SEQ ID NO: 200 - DNA, 26 bp, Homo sapiens
  source 1..26: mol_type = genomic DNA
aaacatcagattgtgaatctgacaac

SEQ ID NO: 201 - DNA, 27 bp, Homo sapiens
  source 1..27: mol_type = genomic DNA
aaacatcagattgtgaatctgacaaca

SEQ ID NO: 202 - DNA, 28 bp, Homo sapiens
  source 1..28: mol_type = genomic DNA
aaacatcagattgtgaatctgacaacag

SEQ ID NO: 203 - DNA, 29 bp, Homo sapiens
  source 1..29: mol_type = genomic DNA
aaacatcagattgtgaatctgacaacaga

SEQ ID NO: 204 - DNA, 30 bp, Homo sapiens
  source 1..30: mol_type = genomic DNA
aaacatcagattgtgaatctgacaacagag

SEQ ID NO: 205 - DNA, 31 bp, Homo sapiens
  source 1..31: mol_type = genomic DNA
aaacatcagattgtgaatctgacaacagagg

SEQ ID NO: 206 - DNA, 32 bp, Homo sapiens
  source 1..32: mol_type = genomic DNA
aaacatcagattgtgaatctgacaacagaggc

SEQ ID NO: 207 - DNA, 33 bp, Homo sapiens
  source 1..33: mol_type = genomic DNA
aaacatcagattgtgaatctgacaacagaggct

SEQ ID NO: 208 - DNA, 34 bp, Homo sapiens
  source 1..34: mol_type = genomic DNA
aaacatcagattgtgaatctgacaacagaggctt

SEQ ID NO: 209 - DNA, 35 bp, Homo sapiens
  source 1..35: mol_type = genomic DNA
aaacatcagattgtgaatctgacaacagaggctta

SEQ ID NO: 210 - DNA, 36 bp, Homo sapiens
  source 1..36: mol_type = genomic DNA
aaacatcagattgtgaatctgacaacagaggcttac

SEQ ID NO: 211 - DNA, 37 bp, Homo sapiens
  source 1..37: mol_type = genomic DNA
aaacatcagattgtgaatctgacaacagaggcttacg

SEQ ID NO: 212 - DNA, 38 bp, Homo sapiens
  source 1..38: mol_type = genomic DNA
aaacatcagattgtgaatctgacaacagaggcttacga

SEQ ID NO: 213 - DNA, 39 bp, Homo sapiens
  source 1..39: mol_type = genomic DNA
aaacatcagattgtgaatctgacaacagaggcttacgac

SEQ ID NO: 214 - DNA, 40 bp, Homo sapiens
  source 1..40: mol_type = genomic DNA
aaacatcagattgtgaatctgacaacagaggcttacgacc

SEQ ID NO: 215 - DNA, 41 bp, Homo sapiens
  source 1..41: mol_type = genomic DNA
aaacatcagattgtgaatctgacaacagaggcttacgaccc

SEQ ID NO: 216 - DNA, 42 bp, Homo sapiens
  source 1..42: mol_type = genomic DNA
aaacatcagattgtgaatctgacaacagaggcttacgacccc

SEQ ID NO: 217 - DNA, 43 bp, Homo sapiens
  source 1..43: mol_type = genomic DNA
aaacatcagattgtgaatctgacaacagaggcttacgacccct

SEQ ID NO: 218 - DNA, 44 bp, Homo sapiens
  source 1..44: mol_type = genomic DNA
aaacatcagattgtgaatctgacaacagaggcttacgacccctt

SEQ ID NO: 219 - DNA, 45 bp, Homo sapiens
  source 1..45: mol_type = genomic DNA
aaacatcagattgtgaatctgacaacagaggcttacgacccctta

SEQ ID NO: 220 - DNA, 46 bp, Homo sapiens
  source 1..46: mol_type = genomic DNA
aaacatcagattgtgaatctgacaacagaggcttacgaccccttat

SEQ ID NO: 221 - DNA, 47 bp, Homo sapiens
  source 1..47: mol_type = genomic DNA
aaacatcagattgtgaatctgacaacagaggcttacgaccccttatt

SEQ ID NO: 222 - DNA, 48 bp, Homo sapiens
  source 1..48: mol_type = genomic DNA
aaacatcagattgtgaatctgacaacagaggcttacgaccccttattt

SEQ ID NO: 223 - DNA, 16 bp, Homo sapiens
  source 1..16: mol_type = genomic DNA
aaaccaggggtcgcga

SEQ ID NO: 224 - DNA, 20 bp, Homo sapiens
  source 1..20: mol_type = genomic DNA
aaaccaggggtcgcgagttc

SEQ ID NO: 225 - DNA, 21 bp, Homo sapiens
  source 1..21: mol_type = genomic DNA
aaaccaggggtcgcgagttca

SEQ ID NO: 226 - DNA, 30 bp, Homo sapiens
  source 1..30: mol_type = genomic DNA
aaaccaggggtcgcgagttcaaatctcgct

SEQ ID NO: 227 - DNA, 35 bp, Homo sapiens
  source 1..35: mol_type = genomic DNA
aaaccaggggtcgcgagttcaaatctcgctggggc

SEQ ID NO: 228 - DNA, 37 bp, Homo sapiens
  source 1..37: mol_type = genomic DNA
aaaccaggggtcgcgagttcaaatctcgctggggcct

SEQ ID NO: 229 - DNA, 38 bp, Homo sapiens
  source 1..38: mol_type = genomic DNA
aaaccaggggtcgcgagttcaaatctcgctggggcctc

SEQ ID NO: 230 - DNA, 39 bp, Homo sapiens
  source 1..39: mol_type = genomic DNA
aaaccaggggtcgcgagttcaaatctcgctggggcctcc

SEQ ID NO: 231 - DNA, 37 bp, Homo sapiens
  source 1..37: mol_type = genomic DNA
aaaccaggggtcgcgagttcaattctcgctggggcct

SEQ ID NO: 232 - DNA, 37 bp, Homo sapiens
  source 1..37: mol_type = genomic DNA
aaaccaggggtcgcgagttcgatcctcgctggggcct

SEQ ID NO: 233 - DNA, 39 bp, Homo sapiens
  source 1..39: mol_type = genomic DNA
aaaccaggggtcgcgagttcgatcctcgctggggcctcc

SEQ ID NO: 234 - DNA, 18 bp, Homo sapiens
  source 1..18: mol_type = genomic DNA
aaaccatcctctgctacc

SEQ ID NO: 235 - DNA, 19 bp, Homo sapiens
  source 1..19: mol_type = genomic DNA
aaaccatcctctgctacca

SEQ ID NO: 236 - DNA, 16 bp, Homo sapiens
  source 1..16: mol_type = genomic DNA
aaaccatttcataact

SEQ ID NO: 237 - DNA, 17 bp, Homo sapiens
  source 1..17: mol_type = genomic DNA
aaaccatttcataactt

SEQ ID NO: 238 - DNA, 20 bp, Homo sapiens
  source 1..20: mol_type = genomic DNA
aaaccatttcataactttgt

SEQ ID NO: 239 - DNA, 21 bp, Homo sapiens
  source 1..21: mol_type = genomic DNA
aaaccatttcataactttgtc

SEQ ID NO: 240 - DNA, 22 bp, Homo sapiens
  source 1..22: mol_type = genomic DNA
aaaccatttcataactttgtca

SEQ ID NO: 241 - DNA, 23 bp, Homo sapiens
  source 1..23: mol_type = genomic DNA
aaaccatttcataactttgtcaa

SEQ ID NO: 242 - DNA, 25 bp, Homo sapiens
  source 1..25: mol_type = genomic DNA
aaaccatttcataactttgtcaaag

SEQ ID NO: 243 - DNA, 28 bp, Homo sapiens
  source 1..28: mol_type = genomic DNA
aaaccatttcataactttgtcaaagtta

SEQ ID NO: 244 - DNA, 33 bp, Homo sapiens
  source 1..33: mol_type = genomic DNA
aaaccatttcataactttgtcaaagttaaatta

SEQ ID NO: 245 - DNA, 38 bp, Homo sapiens
  source 1..38: mol_type = genomic DNA
aaaccatttcataactttgtcaaagttaaattataggc

SEQ ID NO: 246 - DNA, 39 bp, Homo sapiens
  source 1..39: mol_type = genomic DNA
aaaccatttcataactttgtcaaagttaaattataggct

SEQ ID NO: 247 - DNA, 17 bp, Homo sapiens
  source 1..17: mol_type = genomic DNA
aaacccccttatttcta

SEQ ID NO: 248 - DNA, 18 bp, Homo sapiens
  source 1..18: mol_type = genomic DNA
aaacccccttatttctac

SEQ ID NO: 249 - DNA, 19 bp, Homo sapiens
  source 1..19: mol_type = genomic DNA
aaacccccttatttctacc

SEQ ID NO: 250 - DNA, 20 bp, Homo sapiens
  source 1..20: mol_type = genomic DNA
aaacccccttatttctacca

SEQ ID NO: 251 - DNA, 21 bp, Homo sapiens
  source 1..21: mol_type = genomic DNA
aaaccgaagatcacgggttcg

SEQ ID NO: 252 - DNA, 37 bp, Homo sapiens
  source 1..37: mol_type = genomic DNA
aaaccgaagatcacgggttcgaaccccgtccgtgcct

SEQ ID NO: 253 - DNA, 38 bp, Homo sapiens
  source 1..38: mol_type = genomic DNA
aaaccgaagatcacgggttcgaaccccgtccgtgcctc

SEQ ID NO: 254 - DNA, 39 bp, Homo sapiens
  source 1..39: mol_type = genomic DNA
aaaccgaagatcacgggttcgaaccccgtccgtgcctcc

SEQ ID NO: 255 - DNA, 40 bp, Homo sapiens
  source 1..40: mol_type = genomic DNA
aaaccgaagatcacgggttcgaaccccgtccgtgcctcca

SEQ ID NO: 256 - DNA, 18 bp, Homo sapiens
  source 1..18: mol_type = genomic DNA
aaaccgaagatcgcgggt

SEQ ID NO: 257 - DNA, 20 bp, Homo sapiens
  source 1..20: mol_type = genomic DNA
aaaccgaagatcgcgggttc

SEQ ID NO: 258 - DNA, 21 bp, Homo sapiens
  source 1..21: mol_type = genomic DNA
aaaccgaagatcgcgggttcg

SEQ ID NO: 259 - DNA, 22 bp, Homo sapiens
  source 1..22: mol_type = genomic DNA
aaaccgaagatcgcgggttcga

SEQ ID NO: 260 - DNA, 24 bp, Homo sapiens
  source 1..24: mol_type = genomic DNA
aaaccgaagatcgcgggttcgaac

SEQ ID NO: 261 - DNA, 25 bp, Homo sapiens
  source 1..25: mol_type = genomic DNA
aaaccgaagatcgcgggttcgaacc

SEQ ID NO: 262 - DNA, 37 bp, Homo sapiens
  source 1..37: mol_type = genomic DNA
aaaccgaagatcgcgggttcgaaccccgtccgtgcct

SEQ ID NO: 263 - DNA, 38 bp, Homo sapiens
  source 1..38: mol_type = genomic DNA
aaaccgaagatcgcgggttcgaaccccgtccgtgcctc

SEQ ID NO: 264 - DNA, 39 bp, Homo sapiens
  source 1..39: mol_type = genomic DNA
aaaccgaagatcgcgggttcgaaccccgtccgtgcctcc

SEQ ID NO: 265 - DNA, 40 bp, Homo sapiens
  source 1..40: mol_type = genomic DNA
aaaccgaagatcgcgggttcgaaccccgtccgtgcctcca

SEQ ID NO: 266 - DNA, 16 bp, Homo sapiens
  source 1..16: mol_type = genomic DNA
aaaccggagatgaaaa

SEQ ID NO: 267 - DNA, 17 bp, Homo sapiens
  source 1..17: mol_type = genomic DNA
aaaccggagatgaaaac

SEQ ID NO: 268 - DNA, 18 bp, Homo sapiens
  source 1..18: mol_type = genomic DNA
aaaccggagatgaaaacc

SEQ ID NO: 269 - DNA, 19 bp, Homo sapiens
  source 1..19: mol_type = genomic DNA
aaaccggagatgaaaacct

SEQ ID NO: 270 - DNA, 31 bp, Homo sapiens
  source 1..31: mol_type = genomic DNA
aaaccggagatgaaaacctttttccaaggac

SEQ ID NO: 271 - DNA, 32 bp, Homo sapiens
  source 1..32: mol_type = genomic DNA
aaaccggagatgaaaacctttttccaaggaca

SEQ ID NO: 272 - DNA, 33 bp, Homo sapiens
  source 1..33: mol_type = genomic DNA
aaaccggagatgaaaacctttttccaaggacac

SEQ ID NO: 273 - DNA, 34 bp, Homo sapiens
  source 1..34: mol_type = genomic DNA
aaaccggagatgaaaacctttttccaaggacacc

SEQ ID NO: 274 - DNA, 35 bp, Homo sapiens
  source 1..35: mol_type = genomic DNA
aaaccggagatgaaaacctttttccaaggacacca

SEQ ID NO: 275 - DNA, 18 bp, Homo sapiens
  source 1..18: mol_type = genomic DNA
aaaccgggcagaagcacc

SEQ ID NO: 276 - DNA, 19 bp, Homo sapiens
  source 1..19: mol_type = genomic DNA
aaaccgggcagaagcacca

SEQ ID NO: 277 - DNA, 16 bp, Homo sapiens
  source 1..16: mol_type = genomic DNA
aaaccgggcggaaaca

SEQ ID NO: 278 - DNA, 17 bp, Homo sapiens
  source 1..17: mol_type = genomic DNA
aaaccgggcggaaacac

SEQ ID NO: 279 - DNA, 18 bp, Homo sapiens
  source 1..18: mol_type = genomic DNA
aaaccgggcggaaacacc

SEQ ID NO: 280 - DNA, 19 bp, Homo sapiens
  source 1..19: mol_type = genomic DNA
aaaccgggcggaaacacca

SEQ ID NO: 281 - DNA, 16 bp, Homo sapiens
  source 1..16: mol_type = genomic DNA
aaacctgccggggctt

SEQ ID NO: 282 - DNA, 17 bp, Homo sapiens
  source 1..17: mol_type = genomic DNA
aaacctgccggggcttc

SEQ ID NO: 283 - DNA, 18 bp, Homo sapiens
  source 1..18: mol_type = genomic DNA
aaacctgccggggcttcc

SEQ ID NO: 284 - DNA, 19 bp, Homo sapiens
  source 1..19: mol_type = genomic DNA
aaacctgccggggcttcca

SEQ ID NO: 285 - DNA, 21 bp, Homo sapiens
  source 1..21: mol_type = genomic DNA
aaacctttttccaaggacacc

SEQ ID NO: 286 - DNA, 22 bp, Homo sapiens
  source 1..22: mol_type = genomic DNA
aaacctttttccaaggacacca

SEQ ID NO: 287 - DNA, 17 bp, Homo sapiens
  source 1..17: mol_type = genomic DNA
aaacgaatgatttcgac

SEQ ID NO: 288 - DNA, 18 bp, Homo sapiens
  source 1..18: mol_type = genomic DNA
aaacgaatgatttcgact

SEQ ID NO: 289 - DNA, 19 bp, Homo sapiens
  source 1..19: mol_type = genomic DNA
aaacgaatgatttcgactc

SEQ ID NO: 290 - DNA, 20 bp, Homo sapiens
  source 1..20: mol_type = genomic DNA
aaacgaatgatttcgactca

SEQ ID NO: 291 - DNA, 21 bp, Homo sapiens
  source 1..21: mol_type = genomic DNA
aaacgaatgatttcgactcat

SEQ ID NO: 292 - DNA, 23 bp, Homo sapiens
  source 1..23: mol_type = genomic DNA
aaacgaatgatttcgactcatta

SEQ ID NO: 293 - DNA, 24 bp, Homo sapiens
  source 1..24: mol_type = genomic DNA
aaacgaatgatttcgactcattaa

SEQ ID NO: 294 - DNA, 25 bp, Homo sapiens
  source 1..25: mol_type = genomic DNA
aaacgaatgatttcgactcattaaa

SEQ ID NO: 295 - DNA, 26 bp, Homo sapiens
  source 1..26: mol_type = genomic DNA
aaacgaatgatttcgactcattaaat

SEQ ID NO: 296 - DNA, 30 bp, Homo sapiens
  source 1..30: mol_type = genomic DNA
aaacgaatgatttcgactcattaaattatg

SEQ ID NO: 297 - DNA, 32 bp, Homo sapiens
  source 1..32: mol_type = genomic DNA
aaacgaatgatttcgactcattaaattatgat

SEQ ID NO: 298 - DNA, 33 bp, Homo sapiens
  source 1..33: mol_type = genomic DNA
aaacgaatgatttcgactcattaaattatgata

SEQ ID NO: 299 - DNA, 41 bp, Homo sapiens
  source 1..41: mol_type = genomic DNA
aaacgaatgatttcgactcattaaattatgataatcatatt

SEQ ID NO: 300 - DNA, 44 bp, Homo sapiens
  source 1..44: mol_type = genomic DNA
aaacgaatgatttcgactcattaaattatgataatcatatttac

SEQ ID NO: 301 - DNA, 48 bp, Homo sapiens
  source 1..48: mol_type = genomic DNA
aaacgaatgatttcgactcattaaattatgataatcatatttaccaac

SEQ ID NO: 302 - DNA, 16 bp, Homo sapiens
  source 1..16: mol_type = genomic DNA
aaacttaaaactttac

SEQ ID NO: 303 - DNA, 17 bp, Homo sapiens
  source 1..17: mol_type = genomic DNA
aaacttaaaactttaca

SEQ ID NO: 304 - DNA, 28 bp, Homo sapiens
  source 1..28: mol_type = genomic DNA
aaacttaaaactttacaatcagaggttc

SEQ ID NO: 305 - DNA, 22 bp, Homo sapiens
  source 1..22: mol_type = genomic DNA
aaacttaaaactttacagtcag

SEQ ID NO: 306 - DNA, 23 bp, Homo sapiens
  source 1..23: mol_type = genomic DNA
aaacttaaaactttacagtcaga

SEQ ID NO: 307 - DNA, 24 bp, Homo sapiens
  source 1..24: mol_type = genomic DNA
aaacttaaaactttacagtcagag

SEQ ID NO: 308 - DNA, 25 bp, Homo sapiens
  source 1..25: mol_type = genomic DNA
aaacttaaaactttacagtcagagg

SEQ ID NO: 309 - DNA, 26 bp, Homo sapiens
  source 1..26: mol_type = genomic DNA
aaacttaaaactttacagtcagaggt

SEQ ID NO: 310 - DNA, 27 bp, Homo sapiens
  source 1..27: mol_type = genomic DNA
aaacttaaaactttacagtcagaggtt

SEQ ID NO: 311 - DNA, 28 bp, Homo sapiens
  source 1..28: mol_type = genomic DNA
aaacttaaaactttacagtcagaggttc

SEQ ID NO: 312 - DNA, 39 bp, Homo sapiens
  source 1..39: mol_type = genomic DNA
aaacttaaaactttacagtcagaggttcaattcctcttc

SEQ ID NO: 313 - DNA, 45 bp, Homo sapiens
  source 1..45: mol_type = genomic DNA
aaacttaaaactttacagtcagaggttcaattcctcttcttaaca

SEQ ID NO: 314 - DNA, 47 bp, Homo sapiens
  source 1..47: mol_type = genomic DNA
aaacttaaaactttacagtcagaggttcaattcctcttcttaacacc

SEQ ID NO: 315 - DNA, 17 bp, Homo sapiens
  source 1..17: mol_type = genomic DNA
aaactttacagtcagag

SEQ ID NO: 316 - DNA, 18 bp, Homo sapiens
  source 1..18: mol_type = genomic DNA
aaactttacagtcagagg

SEQ ID NO: 317 - DNA, 19 bp, Homo sapiens
  source 1..19: mol_type = genomic DNA
aaactttacagtcagaggt

SEQ ID NO: 318 - DNA, 20 bp, Homo sapiens
  source 1..20: mol_type = genomic DNA
aaactttacagtcagaggtt

SEQ ID NO: 319 - DNA, 21 bp, Homo sapiens
  source 1..21: mol_type = genomic DNA
aaactttacagtcagaggttc

SEQ ID NO: 320 - DNA, 27 bp, Homo sapiens
  source 1..27: mol_type = genomic DNA
aaactttacagtcagaggttcaattcc

SEQ ID NO: 321 - DNA, 16 bp, Homo sapiens
  source 1..16: mol_type = genomic DNA
aaagacaggggttagg

SEQ ID NO: 322 - DNA, 17 bp, Homo sapiens
  source 1..17: mol_type = genomic DNA
aaagacaggggttaggc

SEQ ID NO: 323 - DNA, 18 bp, Homo sapiens
  source 1..18: mol_type = genomic DNA
aaagacaggggttaggcc

SEQ ID NO: 324 - DNA, 19 bp, Homo sapiens
  source 1..19: mol_type = genomic DNA
aaagacaggggttaggcct

SEQ ID NO: 325 - DNA, 20 bp, Homo sapiens
  source 1..20: mol_type = genomic DNA
aaagacaggggttaggcctc

SEQ ID NO: 326 - DNA, 21 bp, Homo sapiens
  source 1..21: mol_type = genomic DNA
aaagacaggggttaggcctct

SEQ ID NO: 327 - DNA, 22 bp, Homo sapiens
  source 1..22: mol_type = genomic DNA
aaagacaggggttaggcctctt

SEQ ID NO: 328 - DNA, 23 bp, Homo sapiens
  source 1..23: mol_type = genomic DNA
aaagacaggggttaggcctcttt

SEQ ID NO: 329 - DNA, 24 bp, Homo sapiens
  source 1..24: mol_type = genomic DNA
aaagacaggggttaggcctctttt

SEQ ID NO: 330 - DNA, 28 bp, Homo sapiens
  source 1..28: mol_type = genomic DNA
aaagacaggggttaggcctctttttacc

SEQ ID NO: 331 - DNA, 29 bp, Homo sapiens
  source 1..29: mol_type = genomic DNA
aaagacaggggttaggcctctttttacca

SEQ ID NO: 332 - DNA, 30 bp, Homo sapiens
  source 1..30: mol_type = genomic DNA
aaagacaggggttaggcctctttttaccac

SEQ ID NO: 333 - DNA, 31 bp, Homo sapiens
  source 1..31: mol_type = genomic DNA
aaagacaggggttaggcctctttttaccacc

SEQ ID NO: 334 - DNA, 32 bp, Homo sapiens
  source 1..32: mol_type = genomic DNA
aaagacaggggttaggcctctttttaccacca

SEQ ID NO: 335 - DNA, 16 bp, Homo sapiens
  source 1..16: mol_type = genomic DNA
aaagactttttctctg

SEQ ID NO: 336 - DNA, 17 bp, Homo sapiens
  source 1..17: mol_type = genomic DNA
aaagactttttctctga

SEQ ID NO: 337 - DNA, 18 bp, Homo sapiens
  source 1..18: mol_type = genomic DNA
aaagactttttctctgac

SEQ ID NO: 338 - DNA, 19 bp, Homo sapiens
  source 1..19: mol_type = genomic DNA
aaagactttttctctgacc

SEQ ID NO: 339 - DNA, 20 bp, Homo sapiens
  source 1..20: mol_type = genomic DNA
aaagactttttctctgacca

SEQ ID NO: 340 - DNA, 16 bp, Homo sapiens
  source 1..16: mol_type = genomic DNA
aaagagttactttgat

SEQ ID NO: 341 - DNA, 20 bp, Homo sapiens
  source 1..20: mol_type = genomic DNA
aaagagttactttgatagag

SEQ ID NO: 342 - DNA, 21 bp, Homo sapiens
  source 1..21: mol_type = genomic DNA
aaagagttactttgatagagt

SEQ ID NO: 343 - DNA, 34 bp, Homo sapiens
  source 1..34: mol_type = genomic DNA
aaagagttactttgatagagtaaataataggagc

SEQ ID NO: 344 - DNA, 35 bp, Homo sapiens
  source 1..35: mol_type = genomic DNA
aaagagttactttgatagagtaaataataggagct

SEQ ID NO: 345 - DNA, 16 bp, Homo sapiens
  source 1..16: mol_type = genomic DNA
aaagattaagagaacc

SEQ ID NO: 346 - DNA, 17 bp, Homo sapiens
  source 1..17: mol_type = genomic DNA
aaagattaagagaacca

SEQ ID NO: 347 - DNA, 18 bp, Homo sapiens
  source 1..18: mol_type = genomic DNA
aaagattaagagaaccaa

SEQ ID NO: 348 - DNA, 19 bp, Homo sapiens
  source 1..19: mol_type = genomic DNA
aaagattaagagaaccaac

SEQ ID NO: 349 - DNA, 20 bp, Homo sapiens
  source 1..20: mol_type = genomic DNA
aaagattaagagaaccaaca

SEQ ID NO: 350 - DNA, 21 bp, Homo sapiens
  source 1..21: mol_type = genomic DNA
aaagattaagagaaccaacac

SEQ ID NO: 351 - DNA, 22 bp, Homo sapiens
  source 1..22: mol_type = genomic DNA
aaagattaagagaaccaacacc

SEQ ID NO: 352 - DNA, 23 bp, Homo sapiens
  source 1..23: mol_type = genomic DNA
aaagattaagagaaccaacacct

SEQ ID NO: 353 - DNA, 24 bp, Homo sapiens
  source 1..24: mol_type = genomic DNA
aaagattaagagaaccaacacctc

SEQ ID NO: 354 - DNA, 25 bp, Homo sapiens
  source 1..25: mol_type = genomic DNA
aaagattaagagaaccaacacctct

SEQ ID NO: 355 - DNA, 26 bp, Homo sapiens
  source 1..26: mol_type = genomic DNA
aaagattaagagaaccaacacctctt

SEQ ID NO: 356 - DNA, 27 bp, Homo sapiens
  source 1..27: mol_type = genomic DNA
aaagattaagagaaccaacacctcttt

SEQ ID NO: 357 - DNA, 28 bp, Homo sapiens
  source 1..28: mol_type = genomic DNA
aaagattaagagaaccaacacctcttta

SEQ ID NO: 358 - DNA, 30 bp, Homo sapiens
  source 1..30: mol_type = genomic DNA
aaagattaagagaaccaacacctctttaca

SEQ ID NO: 359 - DNA, 31 bp, Homo sapiens
  source 1..31: mol_type = genomic DNA
aaagattaagagaaccaacacctctttacag

SEQ ID NO: 360 - DNA, 33 bp, Homo sapiens
  source 1..33: mol_type = genomic DNA
aaagattaagagaaccaacacctctttacagtg

SEQ ID NO: 361 - DNA, 34 bp, Homo sapiens
  source 1..34: mol_type = genomic DNA
aaagattaagagaaccaacacctctttacagtga

SEQ ID NO: 362 - DNA, 35 bp, Homo sapiens
  source 1..35: mol_type = genomic DNA
aaagattaagagaaccaacacctctttacagtgac

SEQ ID NO: 363 - DNA, 36 bp, Homo sapiens
  source 1..36: mol_type = genomic DNA
aaagattaagagaaccaacacctctttacagtgacc

SEQ ID NO: 364 - DNA, 37 bp, Homo sapiens
  source 1..37: mol_type = genomic DNA
aaagattaagagaaccaacacctctttacagtgacca

SEQ ID NO: 365 - DNA, 31 bp, Homo sapiens
  source 1..31: mol_type = genomic DNA
aaagattggtggttcgagcccacccagggac

SEQ ID NO: 366 - DNA, 16 bp, Homo sapiens
  source 1..16: mol_type = genomic DNA
aaagcaatacactgaa

SEQ ID NO: 367 - DNA, 27 bp, Homo sapiens
  source 1..27: mol_type = genomic DNA
aaagcaatacactgaaaatgtttagac

SEQ ID NO: 368 - DNA, 29 bp, Homo sapiens
  source 1..29: mol_type = genomic DNA
aaagcaatacactgaaaatgtttagacgg

SEQ ID NO: 369 - DNA, 31 bp, Homo sapiens
  source 1..31: mol_type = genomic DNA
aaagcaatacactgaaaatgtttagacgggc

SEQ ID NO: 370 - DNA, 32 bp, Homo sapiens
  source 1..32: mol_type = genomic DNA
aaagcaatacactgaaaatgtttagacgggct

SEQ ID NO: 371 - DNA, 33 bp, Homo sapiens
  source 1..33: mol_type = genomic DNA
aaagcaatacactgaaaatgtttagacgggctc

SEQ ID NO: 372 - DNA, 34 bp, Homo sapiens
  source 1..34: mol_type = genomic DNA
aaagcaatacactgaaaatgtttagacgggctca

SEQ ID NO: 373 - DNA, 35 bp, Homo sapiens
  source 1..35: mol_type = genomic DNA
aaagcaatacactgaaaatgtttagacgggctcac

SEQ ID NO: 374 - DNA, 36 bp, Homo sapiens
  source 1..36: mol_type = genomic DNA
aaagcaatacactgaaaatgtttagacgggctcaca

SEQ ID NO: 375 - DNA, 37 bp, Homo sapiens
  source 1..37: mol_type = genomic DNA
aaagcaatacactgaaaatgtttagacgggctcacat

SEQ ID NO: 376 - DNA, 38 bp, Homo sapiens
  source 1..38: mol_type = genomic DNA
aaagcaatacactgaaaatgtttagacgggctcacatc

SEQ ID NO: 377 - DNA, 39 bp, Homo sapiens
  source 1..39: mol_type = genomic DNA
aaagcaatacactgaaaatgtttagacgggctcacatca

SEQ ID NO: 378 - DNA, 41 bp, Homo sapiens
  source 1..41: mol_type = genomic DNA
aaagcaatacactgaaaatgtttagacgggctcacatcacc

SEQ ID NO: 379 - DNA, 42 bp, Homo sapiens
  source 1..42: mol_type = genomic DNA
aaagcaatacactgaaaatgtttagacgggctcacatcaccc

SEQ ID NO: 380 - DNA, 43 bp, Homo sapiens
  source 1..43: mol_type = genomic DNA
aaagcaatacactgaaaatgtttagacgggctcacatcacccc

SEQ ID NO: 381 - DNA, 44 bp, Homo sapiens
  source 1..44: mol_type = genomic DNA
aaagcaatacactgaaaatgtttagacgggctcacatcacccca

SEQ ID NO: 382 - DNA, 16 bp, Homo sapiens
  source 1..16: mol_type = genomic DNA
aaagcacccaacttac

SEQ ID NO: 383 - DNA, 17 bp, Homo sapiens
  source 1..17: mol_type = genomic DNA
aaagcacccaacttaca

SEQ ID NO: 384 - DNA, 18 bp, Homo sapiens
  source 1..18: mol_type = genomic DNA
aaagcacccaacttacac

SEQ ID NO: 385 - DNA, 19 bp, Homo sapiens
  source 1..19: mol_type = genomic DNA
aaagcacccaacttacact

SEQ ID NO: 386 - DNA, 20 bp, Homo sapiens
  source 1..20: mol_type = genomic DNA
aaagcacccaacttacactt

SEQ ID NO: 387 - DNA, 21 bp, Homo sapiens
  source 1..21: mol_type = genomic DNA
aaagcacccaacttacactta

SEQ ID NO: 388 - DNA, 31 bp, Homo sapiens
  source 1..31: mol_type = genomic DNA
aaagcacccaacttacacttaggagatttca

SEQ ID NO: 389 - DNA, 32 bp, Homo sapiens
  source 1..32: mol_type = genomic DNA
aaagcacccaacttacacttaggagatttcaa

SEQ ID NO: 390 - DNA, 33 bp, Homo sapiens
  source 1..33: mol_type = genomic DNA
aaagcacccaacttacacttaggagatttcaac

SEQ ID NO: 391 - DNA, 34 bp, Homo sapiens
  source 1..34: mol_type = genomic DNA
aaagcacccaacttacacttaggagatttcaact

SEQ ID NO: 392 - DNA, 35 bp, Homo sapiens
  source 1..35: mol_type = genomic DNA
aaagcacccaacttacacttaggagatttcaactt

SEQ ID NO: 393 - DNA, 37 bp, Homo sapiens
  source 1..37: mol_type = genomic DNA
aaagcacccaacttacacttaggagatttcaacttaa

SEQ ID NO: 394 - DNA, 38 bp, Homo sapiens
  source 1..38: mol_type = genomic DNA
aaagcacccaacttacacttaggagatttcaacttaac

SEQ ID NO: 395 - DNA, 44 bp, Homo sapiens
  source 1..44: mol_type = genomic DNA
aaagcacccaacttacacttaggagatttcaacttaacttgacc

SEQ ID NO: 396 - DNA, 47 bp, Homo sapiens
  source 1..47: mol_type = genomic DNA
aaagcacccaacttacacttaggagatttcaacttaacttgaccgct

SEQ ID NO: 397 - DNA, 36 bp, Homo sapiens
  source 1..36: mol_type = genomic DNA
aaagccctcagtaagttgcaatacttaatttctgcc

SEQ ID NO: 398 - DNA, 37 bp, Homo sapiens
  source 1..37: mol_type = genomic DNA
aaagccctcagtaagttgcaatacttaatttctgcca

SEQ ID NO: 399 - DNA, 16 bp, Homo sapiens
  source 1..16: mol_type = genomic DNA
aaagctcacaagaact

SEQ ID NO: 400 - DNA, 17 bp, Homo sapiens
  source 1..17: mol_type = genomic DNA
aaagctcacaagaactg

SEQ ID NO: 401 - DNA, 18 bp, Homo sapiens
  source 1..18: mol_type = genomic DNA
aaagctcacaagaactgc

SEQ ID NO: 402 - DNA, 19 bp, Homo sapiens
  source 1..19: mol_type = genomic DNA
aaagctcacaagaactgct

SEQ ID NO: 403 - DNA, 20 bp, Homo sapiens
  source 1..20: mol_type = genomic DNA
aaagctcacaagaactgcta

SEQ ID NO: 404 - DNA, 21 bp, Homo sapiens
  source 1..21: mol_type = genomic DNA
aaagctcacaagaactgctaa

SEQ ID NO: 405 - DNA, 22 bp, Homo sapiens
  source 1..22: mol_type = genomic DNA
aaagctcacaagaactgctaac

SEQ ID NO: 406 - DNA, 23 bp, Homo sapiens
  source 1..23: mol_type = genomic DNA
aaagctcacaagaactgctaact

SEQ ID NO: 407 - DNA, 24 bp, Homo sapiens
  source 1..24: mol_type = genomic DNA
aaagctcacaagaactgctaactc

SEQ ID NO: 408 - DNA, 25 bp, Homo sapiens
  source 1..25: mol_type = genomic DNA
aaagctcacaagaactgctaactca

SEQ ID NO: 409 - DNA, 26 bp, Homo sapiens
  source 1..26: mol_type = genomic DNA
aaagctcacaagaactgctaactcat

SEQ ID NO: 410 - DNA, 27 bp, Homo sapiens
  source 1..27: mol_type = genomic DNA
aaagctcacaagaactgctaactcatg

SEQ ID NO: 411 - DNA, 28 bp, Homo sapiens
  source 1..28: mol_type = genomic DNA
aaagctcacaagaactgctaactcatgc

SEQ ID NO: 412 - DNA, 29 bp, Homo sapiens
  source 1..29: mol_type = genomic DNA
aaagctcacaagaactgctaactcatgcc

SEQ ID NO: 413 - DNA, 30 bp, Homo sapiens
  source 1..30: mol_type = genomic DNA
aaagctcacaagaactgctaactcatgccc

SEQ ID NO: 414 - DNA, 31 bp, Homo sapiens
  source 1..31: mol_type = genomic DNA
aaagctcacaagaactgctaactcatgcccc

SEQ ID NO: 415 - DNA, 32 bp, Homo sapiens
  source 1..32: mol_type = genomic DNA
aaagctcacaagaactgctaactcatgccccc

SEQ ID NO: 416 - DNA, 33 bp, Homo sapiens
  source 1..33: mol_type = genomic DNA
aaagctcacaagaactgctaactcatgccccca

SEQ ID NO: 417 - DNA, 34 bp, Homo sapiens
  source 1..34: mol_type = genomic DNA
aaagctcacaagaactgctaactcatgcccccat

SEQ ID NO: 418 - DNA, 35 bp, Homo sapiens
  source 1..35: mol_type = genomic DNA
aaagctcacaagaactgctaactcatgcccccatg

SEQ ID NO: 419 - DNA, 36 bp, Homo sapiens
  source 1..36: mol_type = genomic DNA
aaagctcacaagaactgctaactcatgcccccatgt

SEQ ID NO: 420 - DNA, 37 bp, Homo sapiens
  source 1..37: mol_type = genomic DNA
aaagctcacaagaactgctaactcatgcccccatgtc

SEQ ID NO: 421 - DNA, 38 bp, Homo sapiens
  source 1..38: mol_type = genomic DNA
aaagctcacaagaactgctaactcatgcccccatgtct

SEQ ID NO: 422 - DNA, 40 bp, Homo sapiens
  source 1..40: mol_type = genomic DNA
aaagctcacaagaactgctaactcatgcccccatgtctaa

SEQ ID NO: 423 - DNA, 41 bp, Homo sapiens
  source 1..41: mol_type = genomic DNA
aaagctcacaagaactgctaactcatgcccccatgtctaac

SEQ ID NO: 424 - DNA, 42 bp, Homo sapiens
  source 1..42: mol_type = genomic DNA
aaagctcacaagaactgctaactcatgcccccatgtctaaca

SEQ ID NO: 425 - DNA, 44 bp, Homo sapiens
  source 1..44: mol_type = genomic DNA
aaagctcacaagaactgctaactcatgcccccatgtctaacaac

SEQ ID NO: 426 - DNA, 45 bp, Homo sapiens
  source 1..45: mol_type = genomic DNA
aaagctcacaagaactgctaactcatgcccccatgtctaacaaca

SEQ ID NO: 427 - DNA, 46 bp, Homo sapiens
  source 1..46: mol_type = genomic DNA
aaagctcacaagaactgctaactcatgcccccatgtctaacaacat

SEQ ID NO: 428 - DNA, 47 bp, Homo sapiens
  source 1..47: mol_type = genomic DNA
aaagctcacaagaactgctaactcatgcccccatgtctaacaacatg

SEQ ID NO: 429 - DNA, 48 bp, Homo sapiens
  source 1..48: mol_type = genomic DNA
aaagctcacaagaactgctaactcatgcccccatgtctaacaacatgg

SEQ ID NO: 430 - DNA, 17 bp, Homo sapiens
  source 1..17: mol_type = genomic DNA
aaaggataacagctatc

SEQ ID NO: 431 - DNA, 25 bp, Homo sapiens
  source 1..25: mol_type = genomic DNA
aaaggataacagctatccattggtc

SEQ ID NO: 432 - DNA, 26 bp, Homo sapiens
  source 1..26: mol_type = genomic DNA
aaaggataacagctatccattggtct

SEQ ID NO: 433 - DNA, 27 bp, Homo sapiens
  source 1..27: mol_type = genomic DNA
aaaggataacagctatccattggtctt

SEQ ID NO: 434 - DNA, 28 bp, Homo sapiens
  source 1..28: mol_type = genomic DNA
aaaggataacagctatccattggtctta

SEQ ID NO: 435 - DNA, 29 bp, Homo sapiens
  source 1..29: mol_type = genomic DNA
aaaggataacagctatccattggtcttag

SEQ ID NO: 436 - DNA, 35 bp, Homo sapiens
  source 1..35: mol_type = genomic DNA
aaaggataacagctatccattggtcttaggcccca

SEQ ID NO: 437 - DNA, 16 bp, Homo sapiens
  source 1..16: mol_type = genomic DNA
aaaggtccccggttcg

SEQ ID NO: 438 - DNA, 31 bp, Homo sapiens
  source 1..31: mol_type = genomic DNA
aaaggtccccggttcgaaaccgggcggaaac

SEQ ID NO: 439 - DNA, 34 bp, Homo sapiens
  source 1..34: mol_type = genomic DNA
aaaggtccccggttcgaaaccgggcggaaacacc

SEQ ID NO: 440 - DNA, 22 bp, Homo sapiens
  source 1..22: mol_type = genomic DNA
aaaggtccccggttcgaaactg

SEQ ID NO: 441 - DNA, 34 bp, Homo sapiens
  source 1..34: mol_type = genomic DNA
aaaggtccctggttcaatcccgggtttcggcacc

SEQ ID NO: 442 - DNA, 16 bp, Homo sapiens
  source 1..16: mol_type = genomic DNA
aaaggtccctggttcg

SEQ ID NO: 443 - DNA, 31 bp, Homo sapiens
  source 1..31: mol_type = genomic DNA
aaaggtccctggttcgatcccgggtttcggc

SEQ ID NO: 444 - DNA, 33 bp, Homo sapiens
  source 1..33: mol_type = genomic DNA
aaaggtccctggttcgatcccgggtttcggcac

SEQ ID NO: 445 - DNA, 34 bp, Homo sapiens
  source 1..34: mol_type = genomic DNA
aaaggtccctggttcgatcccgggtttcggcacc

SEQ ID NO: 446 - DNA, 35 bp, Homo sapiens
  source 1..35: mol_type = genomic DNA
aaaggtccctggttcgatcccgggtttcggcacca

SEQ ID NO: 447 - DNA, 31 bp, Homo sapiens
  source 1..31: mol_type = genomic DNA
aaaggttccgggttcgagtcccggcggagtc

SEQ ID NO: 448 - DNA, 32 bp, Homo sapiens
  source 1..32: mol_type = genomic DNA
aaaggttccgggttcgagtcccggcggagtcg

SEQ ID NO: 449 - DNA, 33 bp, Homo sapiens
  source 1..33: mol_type = genomic DNA
aaaggttccgggttcgagtcccggcggagtcgc

SEQ ID NO: 450 - DNA, 34 bp, Homo sapiens
  source 1..34: mol_type = genomic DNA
aaaggttccgggttcgagtcccggcggagtcgcc

SEQ ID NO: 451 - DNA, 35 bp, Homo sapiens
  source 1..35: mol_type = genomic DNA
aaaggttccgggttcgagtcccggcggagtcgcca

SEQ ID NO: 452 - DNA, 16 bp, Homo sapiens
  source 1..16: mol_type = genomic DNA
aaaggttggtggttcg

SEQ ID NO: 453 - DNA, 31 bp, Homo sapiens
  source 1..31: mol_type = genomic DNA
aaaggttggtggttcgagcccacccagggac

SEQ ID NO: 454 - DNA, 33 bp, Homo sapiens
  source 1..33: mol_type = genomic DNA
aaaggttggtggttcgagcccacccagggacgc

SEQ ID NO: 455 - DNA, 34 bp, Homo sapiens
  source 1..34: mol_type = genomic DNA
aaaggttggtggttcgagcccacccagggacgcc

SEQ ID NO: 456 - DNA, 35 bp, Homo sapiens
  source 1..35: mol_type = genomic DNA
aaaggttggtggttcgagcccacccagggacgcca

SEQ ID NO: 457 - DNA, 34 bp, Homo sapiens
  source 1..34: mol_type = genomic DNA
aaaggttggtggttcgatcccacccagggacgcc

SEQ ID NO: 458 - DNA, 33 bp, Homo sapiens
  source 1..33: mol_type = genomic DNA
aaaggttgtgggttcgaatcccaccagagtcgc

SEQ ID NO: 459 - DNA, 34 bp, Homo sapiens
  source 1..34: mol_type = genomic DNA
aaaggttgtgggttcgaatcccaccagagtcgcc

SEQ ID NO: 460 - DNA, 35 bp, Homo sapiens
  source 1..35: mol_type = genomic DNA
aaaggttgtgggttcgaatcccaccagagtcgcca

SEQ ID NO: 461 - DNA, 33 bp, Homo sapiens
  source 1..33: mol_type = genomic DNA
aaaggttgtgggttcgagtcccaccagagtcgc

SEQ ID NO: 462 - DNA, 34 bp, Homo sapiens
  source 1..34: mol_type = genomic DNA
aaaggttgtgggttcgagtcccaccagagtcgcc

SEQ ID NO: 463 - DNA, 16 bp, Homo sapiens
  source 1..16: mol_type = genomic DNA
aaagtcatggaggcca

SEQ ID NO: 464 - DNA, 18 bp, Homo sapiens
  source 1..18: mol_type = genomic DNA
aaagtcatggaggccatg

SEQ ID NO: 465 - DNA, 21 bp, Homo sapiens
  source 1..21: mol_type = genomic DNA
aaagtcatggaggccatgggg

SEQ ID NO: 466 - DNA, 22 bp, Homo sapiens
  source 1..22: mol_type = genomic DNA
aaagtcatggaggccatggggt

SEQ ID NO: 467 - DNA, 23 bp, Homo sapiens
  source 1..23: mol_type = genomic DNA
aaagtcatggaggccatggggtt

SEQ ID NO: 468 - DNA, 24 bp, Homo sapiens
  source 1..24: mol_type = genomic DNA
aaagtcatggaggccatggggttg

SEQ ID NO: 469 - DNA, 25 bp, Homo sapiens
  source 1..25: mol_type = genomic DNA
aaagtcatggaggccatggggttgg

SEQ ID NO: 470 - DNA, 16 bp, Homo sapiens
  source 1..16: mol_type = genomic DNA
aaagtggctgatttgc

SEQ ID NO: 471 - DNA, 21 bp, Homo sapiens
  source 1..21: mol_type = genomic DNA
aaagtggctgatttgcgttca

SEQ ID NO: 472 - DNA, 28 bp, Homo sapiens
  source 1..28: mol_type = genomic DNA
aaagtggctgatttgcgttcagttgatg

SEQ ID NO: 473 - DNA, 35 bp, Homo sapiens
  source 1..35: mol_type = genomic DNA
aaagtggctgatttgcgttcagttgatgcagagtg

SEQ ID NO: 474 - DNA, 16 bp, Homo sapiens
  source 1..16: mol_type = genomic DNA
aaagttaaattatagg

SEQ ID NO: 475 - DNA, 17 bp, Homo sapiens
  source 1..17: mol_type = genomic DNA
aaagttaaattataggc

SEQ ID NO: 476 - DNA, 18 bp, Homo sapiens
  source 1..18: mol_type = genomic DNA
aaagttaaattataggct

SEQ ID NO: 477 - DNA, 19 bp, Homo sapiens
  source 1..19: mol_type = genomic DNA
aaagttaaattataggcta

SEQ ID NO: 478 - DNA, 20 bp, Homo sapiens
  source 1..20: mol_type = genomic DNA
aaagttaaattataggctaa

SEQ ID NO: 479 - DNA, 21 bp, Homo sapiens
  source 1..21: mol_type = genomic DNA
aaagttaaattataggctaaa

SEQ ID NO: 480 - DNA, 23 bp, Homo sapiens
  source 1..23: mol_type = genomic DNA
aaagttaaattataggctaaatc

SEQ ID NO: 481 - DNA, 24 bp, Homo sapiens
  source 1..24: mol_type = genomic DNA
aaagttaaattataggctaaatcc

SEQ ID NO: 482 - DNA, 25 bp, Homo sapiens
  source 1..25: mol_type = genomic DNA
aaagttaaattataggctaaatcct

SEQ ID NO: 483 - DNA, 28 bp, Homo sapiens
  source 1..28: mol_type = genomic DNA
aaagttaaattataggctaaatcctata

SEQ ID NO: 484 - DNA, 30 bp, Homo sapiens
  source 1..30: mol_type = genomic DNA
aaagttaaattataggctaaatcctatata

SEQ ID NO: 485 - DNA, 34 bp, Homo sapiens
  source 1..34: mol_type = genomic DNA
aaagttaaattataggctaaatcctatatatctt

SEQ ID NO: 486 - DNA, 16 bp, Homo sapiens
  source 1..16: mol_type = genomic DNA
aaataagctatcgggc

SEQ ID NO: 487 - DNA, 17 bp, Homo sapiens
  source 1..17: mol_type = genomic DNA
aaataagctatcgggcc

SEQ ID NO: 488 - DNA, 18 bp, Homo sapiens
  source 1..18: mol_type = genomic DNA
aaataagctatcgggccc

SEQ ID NO: 489 - DNA, 19 bp, Homo sapiens
  source 1..19: mol_type = genomic DNA
aaataagctatcgggccca

SEQ ID NO: 490 - DNA, 20 bp, Homo sapiens
  source 1..20: mol_type = genomic DNA
aaataagctatcgggcccat

SEQ ID NO: 491 - DNA, 21 bp, Homo sapiens
  source 1..21: mol_type = genomic DNA
aaataagctatcgggcccata

SEQ ID NO: 492 - DNA, 22 bp, Homo sapiens
  source 1..22: mol_type = genomic DNA
aaataagctatcgggcccatac

SEQ ID NO: 493 - DNA, 23 bp, Homo sapiens
  source 1..23: mol_type = genomic DNA
aaataagctatcgggcccatacc

SEQ ID NO: 494 - DNA, 24 bp, Homo sapiens
  source 1..24: mol_type = genomic DNA
aaataagctatcgggcccataccc

SEQ ID NO: 495 - DNA, 25 bp, Homo sapiens
  source 1..25: mol_type = genomic DNA
aaataagctatcgggcccatacccc

SEQ ID NO: 496 - DNA, 26 bp, Homo sapiens
  source 1..26: mol_type = genomic DNA
aaataagctatcgggcccataccccg

SEQ ID NO: 497 - DNA, 27 bp, Homo sapiens
  source 1..27: mol_type = genomic DNA
aaataagctatcgggcccataccccga

SEQ ID NO: 498 - DNA, 28 bp, Homo sapiens
  source 1..28: mol_type = genomic DNA
aaataagctatcgggcccataccccgaa

SEQ ID NO: 499 - DNA, 29 bp, Homo sapiens
  source 1..29: mol_type = genomic DNA
aaataagctatcgggcccataccccgaaa

SEQ ID NO: 500 - DNA, 30 bp, Homo sapiens
  source 1..30: mol_type = genomic DNA
aaataagctatcgggcccataccccgaaaa

SEQ ID NO: 501 - DNA, 31 bp, Homo sapiens
  source 1..31: mol_type = genomic DNA
aaataagctatcgggcccataccccgaaaat

SEQ ID NO: 502 - DNA, 32 bp, Homo sapiens
  source 1..32: mol_type = genomic DNA
aaataagctatcgggcccataccccgaaaatg

SEQ ID NO: 503 - DNA, 33 bp, Homo sapiens
  source 1..33: mol_type = genomic DNA
aaataagctatcgggcccataccccgaaaatgt

SEQ ID NO: 504 - DNA, 34 bp, Homo sapiens
  source 1..34: mol_type = genomic DNA
aaataagctatcgggcccataccccgaaaatgtt

SEQ ID NO: 505 - DNA, 35 bp, Homo sapiens
  source 1..35: mol_type = genomic DNA
aaataagctatcgggcccataccccgaaaatgttg

SEQ ID NO: 506 - DNA, 36 bp, Homo sapiens
  source 1..36: mol_type = genomic DNA
aaataagctatcgggcccataccccgaaaatgttgg

SEQ ID NO: 507 - DNA, 37 bp, Homo sapiens
  source 1..37: mol_type = genomic DNA
aaataagctatcgggcccataccccgaaaatgttggt

SEQ ID NO: 508 - DNA, 38 bp, Homo sapiens
  source 1..38: mol_type = genomic DNA
aaataagctatcgggcccataccccgaaaatgttggtt

SEQ ID NO: 509 - DNA, 39 bp, Homo sapiens
  source 1..39: mol_type = genomic DNA
aaataagctatcgggcccataccccgaaaatgttggtta

SEQ ID NO: 510 - DNA, 40 bp, Homo sapiens
  source 1..40: mol_type = genomic DNA
aaataagctatcgggcccataccccgaaaatgttggttat

SEQ ID NO: 511 - DNA, 43 bp, Homo sapiens
  source 1..43: mol_type = genomic DNA
aaataagctatcgggcccataccccgaaaatgttggttatacc

SEQ ID NO: 512 - DNA, 16 bp, Homo sapiens
  source 1..16: mol_type = genomic DNA
aaataataggagctta

SEQ ID NO: 513 - DNA, 17 bp, Homo sapiens
  source 1..17: mol_type = genomic DNA
aaataataggagcttaa

SEQ ID NO: 514 - DNA, 19 bp, Homo sapiens
  source 1..19: mol_type = genomic DNA
aaataataggagcttaaac

SEQ ID NO: 515 - DNA, 20 bp, Homo sapiens
  source 1..20: mol_type = genomic DNA
aaataataggagcttaaacc

SEQ ID NO: 516 - DNA, 21 bp, Homo sapiens
  source 1..21: mol_type = genomic DNA
aaataataggagcttaaaccc

SEQ ID NO: 517 - DNA, 22 bp, Homo sapiens
  source 1..22: mol_type = genomic DNA
aaataataggagcttaaacccc

SEQ ID NO: 518 - DNA, 23 bp, Homo sapiens
  source 1..23: mol_type = genomic DNA
aaataataggagcttaaaccccc

SEQ ID NO: 519 - DNA, 24 bp, Homo sapiens
  source 1..24: mol_type = genomic DNA
aaataataggagcttaaaccccct

SEQ ID NO: 520 - DNA, 25 bp, Homo sapiens
  source 1..25: mol_type = genomic DNA
aaataataggagcttaaaccccctt

SEQ ID NO: 521 - DNA, 26 bp, Homo sapiens
  source 1..26: mol_type = genomic DNA
aaataataggagcttaaaccccctta

SEQ ID NO: 522 - DNA, 28 bp, Homo sapiens
  source 1..28: mol_type = genomic DNA
aaataataggagcttaaacccccttatt

SEQ ID NO: 523 - DNA, 29 bp, Homo sapiens
  source 1..29: mol_type = genomic DNA
aaataataggagcttaaacccccttattt

SEQ ID NO: 524 - DNA, 30 bp, Homo sapiens
  source 1..30: mol_type = genomic DNA
aaataataggagcttaaacccccttatttc

SEQ ID NO: 525 - DNA, 31 bp, Homo sapiens
  source 1..31: mol_type = genomic DNA
aaataataggagcttaaacccccttatttct

SEQ ID NO: 526 - DNA, 32 bp, Homo sapiens
  source 1..32: mol_type = genomic DNA
aaataataggagcttaaacccccttatttcta

SEQ ID NO: 527 - DNA, 33 bp, Homo sapiens
  source 1..33: mol_type = genomic DNA
aaataataggagcttaaacccccttatttctac

SEQ ID NO: 528 - DNA, 34 bp, Homo sapiens
  source 1..34: mol_type = genomic DNA
aaataataggagcttaaacccccttatttctacc

SEQ ID NO: 529 - DNA, 35 bp, Homo sapiens
  source 1..35: mol_type = genomic DNA
aaataataggagcttaaacccccttatttctacca

SEQ ID NO: 530 - DNA, 19 bp, Homo sapiens
  source 1..19: mol_type = genomic DNA
aaatacaacgatggttttt

SEQ ID NO: 531 - DNA, 20 bp, Homo sapiens
  source 1..20: mol_type = genomic DNA
aaatacaacgatggtttttc

SEQ ID NO: 532 - DNA, 21 bp, Homo sapiens
  source 1..21: mol_type = genomic DNA
aaatacaacgatggtttttca

SEQ ID NO: 533 - DNA, 22 bp, Homo sapiens
  source 1..22: mol_type = genomic DNA
aaatacaacgatggtttttcat

SEQ ID NO: 534 - DNA, 24 bp, Homo sapiens
  source 1..24: mol_type = genomic DNA
aaatacaacgatggtttttcatat

SEQ ID NO: 535 - DNA, 25 bp, Homo sapiens
  source 1..25: mol_type = genomic DNA
aaatacaacgatggtttttcatatc

SEQ ID NO: 536 - DNA, 34 bp, Homo sapiens
  source 1..34: mol_type = genomic DNA
aaatacaacgatggtttttcatatcattggtcgt

SEQ ID NO: 537 - DNA, 39 bp, Homo sapiens
  source 1..39: mol_type = genomic DNA
aaatacaacgatggtttttcatatcattggtcgtggttg

SEQ ID NO: 538 - DNA, 40 bp, Homo sapiens
  source 1..40: mol_type = genomic DNA
aaatacaacgatggtttttcatatcattggtcgtggttgt

SEQ ID NO: 539 - DNA, 41 bp, Homo sapiens
  source 1..41: mol_type = genomic DNA
aaatacaacgatggtttttcatatcattggtcgtggttgta

SEQ ID NO: 540 - DNA, 43 bp, Homo sapiens
  source 1..43: mol_type = genomic DNA
aaatacaacgatggtttttcatatcattggtcgtggttgtagt

SEQ ID NO: 541 - DNA, 44 bp, Homo sapiens
  source 1..44: mol_type = genomic DNA
aaatacaacgatggtttttcatatcattggtcgtggttgtagtc

SEQ ID NO: 542 - DNA, 45 bp, Homo sapiens
  source 1..45: mol_type = genomic DNA
aaatacaacgatggtttttcatatcattggtcgtggttgtagtcc

SEQ ID NO: 543 - DNA, 46 bp, Homo sapiens
  source 1..46: mol_type = genomic DNA
aaatacaacgatggtttttcatatcattggtcgtggttgtagtccg

SEQ ID NO: 544 - DNA, 47 bp, Homo sapiens
  source 1..47: mol_type = genomic DNA
aaatacaacgatggtttttcatatcattggtcgtggttgtagtccgt

SEQ ID NO: 545 - DNA, 48 bp, Homo sapiens
  source 1..48: mol_type = genomic DNA
aaatacaacgatggtttttcatatcattggtcgtggttgtagtccgtg

SEQ ID NO: 546 - DNA, 16 bp, Homo sapiens
  source 1..16: mol_type = genomic DNA
aaatacagaccaagag

SEQ ID NO: 547 - DNA, 17 bp, Homo sapiens
  source 1..17: mol_type = genomic DNA
aaatacagaccaagagc

SEQ ID NO: 548 - DNA, 18 bp, Homo sapiens
  source 1..18: mol_type = genomic DNA
aaatacagaccaagagcc

SEQ ID NO: 549 - DNA, 19 bp, Homo sapiens
  source 1..19: mol_type = genomic DNA
aaatacagaccaagagcct

SEQ ID NO: 550 - DNA, 20 bp, Homo sapiens
  source 1..20: mol_type = genomic DNA
aaatacagaccaagagcctt

SEQ ID NO: 551 - DNA, 21 bp, Homo sapiens
  source 1..21: mol_type = genomic DNA
aaatacagaccaagagccttc

SEQ ID NO: 552 - DNA, 22 bp, Homo sapiens
  source 1..22: mol_type = genomic DNA
aaatacagaccaagagccttca

SEQ ID NO: 553 - DNA, 27 bp, Homo sapiens
  source 1..27: mol_type = genomic DNA
aaatacagaccaagagccttcaaagcc

SEQ ID NO: 554 - DNA, 28 bp, Homo sapiens
  source 1..28: mol_type = genomic DNA
aaatacagaccaagagccttcaaagccc

SEQ ID NO: 555 - DNA, 29 bp, Homo sapiens
  source 1..29: mol_type = genomic DNA
aaatacagaccaagagccttcaaagccct

SEQ ID NO: 556 - DNA, 34 bp, Homo sapiens
  source 1..34: mol_type = genomic DNA
aaatacagaccaagagccttcaaagccctcagta

SEQ ID NO: 557 - DNA, 18 bp, Homo sapiens
  source 1..18: mol_type = genomic DNA
aaatagctcagttgggag

SEQ ID NO: 558 - DNA, 33 bp, Homo sapiens
  source 1..33: mol_type = genomic DNA
aaatagctcagttgggagagcgttagactgaag

SEQ ID NO: 559 - DNA, 35 bp, Homo sapiens
  source 1..35: mol_type = genomic DNA
aaatagctcagttgggagagcgttagactgaagat

SEQ ID NO: 560 - DNA, 16 bp, Homo sapiens
  source 1..16: mol_type = genomic DNA
aaatagtaccgttaac

SEQ ID NO: 561 - DNA, 17 bp, Homo sapiens
  source 1..17: mol_type = genomic DNA
aaatagtaccgttaact

SEQ ID NO: 562 - DNA, 18 bp, Homo sapiens
  source 1..18: mol_type = genomic DNA
aaatagtaccgttaactt

SEQ ID NO: 563 - DNA, 19 bp, Homo sapiens
  source 1..19: mol_type = genomic DNA
aaatagtaccgttaacttc

SEQ ID NO: 564 - DNA, 20 bp, Homo sapiens
  source 1..20: mol_type = genomic DNA
aaatagtaccgttaacttcc

SEQ ID NO: 565 - DNA, 21 bp, Homo sapiens
  source 1..21: mol_type = genomic DNA
aaatagtaccgttaacttcca

SEQ ID NO: 566 - DNA, 24 bp, Homo sapiens
  source 1..24: mol_type = genomic DNA
aaatagtaccgttaacttccaatt

SEQ ID NO: 567 - DNA, 25 bp, Homo sapiens
  source 1..25: mol_type = genomic DNA
aaatagtaccgttaacttccaatta

SEQ ID NO: 568 - DNA, 27 bp, Homo sapiens
  source 1..27: mol_type = genomic DNA
aaatagtaccgttaacttccaattaac

SEQ ID NO: 569 - DNA, 37 bp, Homo sapiens
  source 1..37: mol_type = genomic DNA
aaatagtaccgttaacttccaattaactagttttgac

SEQ ID NO: 570 - DNA, 40 bp, Homo sapiens
  source 1..40: mol_type = genomic DNA
aaatagtaccgttaacttccaattaactagttttgacaac

SEQ ID NO: 571 - DNA, 30 bp, Homo sapiens
  source 1..30: mol_type = genomic DNA
aaatatagtttaaccaaaacatcagattgt

SEQ ID NO: 572 - DNA, 31 bp, Homo sapiens
  source 1..31: mol_type = genomic DNA
aaatatagtttaaccaaaacatcagattgtg

SEQ ID NO: 573 - DNA, 32 bp, Homo sapiens
  source 1..32: mol_type = genomic DNA
aaatatagtttaaccaaaacatcagattgtga

SEQ ID NO: 574 - DNA, 35 bp, Homo sapiens
  source 1..35: mol_type = genomic DNA
aaatatagtttaaccaaaacatcagattgtgaatc

SEQ ID NO: 575 - DNA, 18 bp, Homo sapiens
  source 1..18: mol_type = genomic DNA
aaatatgtctgataaaag

SEQ ID NO: 576 - DNA, 23 bp, Homo sapiens
  source 1..23: mol_type = genomic DNA
aaatatgtctgataaaagagtta

SEQ ID NO: 577 - DNA, 29 bp, Homo sapiens
  source 1..29: mol_type = genomic DNA
aaatatgtctgataaaagagttactttga

SEQ ID NO: 578 - DNA, 30 bp, Homo sapiens
  source 1..30: mol_type = genomic DNA
aaatatgtctgataaaagagttactttgat

SEQ ID NO: 579 - DNA, 34 bp, Homo sapiens
  source 1..34: mol_type = genomic DNA
aaatatgtctgataaaagagttactttgatagag

SEQ ID NO: 580 - DNA, 19 bp, Homo sapiens
  source 1..19: mol_type = genomic DNA
aaatcacgtcggggtcacc

SEQ ID NO: 581 - DNA, 38 bp, Homo sapiens
  source 1..38: mol_type = genomic DNA
aaatccattggggtttccccgcgcaggttcgaatcctg

SEQ ID NO: 582 - DNA, 16 bp, Homo sapiens
  source 1..16: mol_type = genomic DNA
aaatcccggacgagcc

SEQ ID NO: 583 - DNA, 17 bp, Homo sapiens
  source 1..17: mol_type = genomic DNA
aaatcccggacgagccc

SEQ ID NO: 584 - DNA, 18 bp, Homo sapiens
  source 1..18: mol_type = genomic DNA
aaatcccggacgagcccc

SEQ ID NO: 585 - DNA, 19 bp, Homo sapiens
  source 1..19: mol_type = genomic DNA
aaatcccggacgagccccc

SEQ ID NO: 586 - DNA, 20 bp, Homo sapiens
  source 1..20: mol_type = genomic DNA
aaatcccggacgagccccca

SEQ ID NO: 587 - DNA, 18 bp, Homo sapiens
  source 1..18: mol_type = genomic DNA
aaatccgggtgccccctc

SEQ ID NO: 588 - DNA, 19 bp, Homo sapiens
  source 1..19: mol_type = genomic DNA
aaatcctatatatcttacc

SEQ ID NO: 589 - DNA, 20 bp, Homo sapiens
  source 1..20: mol_type = genomic DNA
aaatcctatatatcttacca

SEQ ID NO: 590 - DNA, 22 bp, Homo sapiens
  source 1..22: mol_type = genomic DNA
aaatctaaagacaggggttagg

SEQ ID NO: 591 - DNA, 24 bp, Homo sapiens
  source 1..24: mol_type = genomic DNA
aaatctaaagacaggggttaggcc

SEQ ID NO: 592 - DNA, 25 bp, Homo sapiens
  source 1..25: mol_type = genomic DNA
aaatctaaagacaggggttaggcct

SEQ ID NO: 593 - DNA, 26 bp, Homo sapiens
  source 1..26: mol_type = genomic DNA
aaatctaaagacaggggttaggcctc

SEQ ID NO: 594 - DNA, 30 bp, Homo sapiens
  source 1..30: mol_type = genomic DNA
aaatctaaagacaggggttaggcctctttt

SEQ ID NO: 595 - DNA, 31 bp, Homo sapiens
  source 1..31: mol_type = genomic DNA
aaatctaaagacaggggttaggcctcttttt

SEQ ID NO: 596 - DNA, 32 bp, Homo sapiens
  source 1..32: mol_type = genomic DNA
aaatctaaagacaggggttaggcctcttttta

SEQ ID NO: 597 - DNA, 34 bp, Homo sapiens
  source 1..34: mol_type = genomic DNA
aaatctaaagacaggggttaggcctctttttacc

SEQ ID NO: 598 - DNA, 37 bp, Homo sapiens
  source 1..37: mol_type = genomic DNA
aaatctaaagacaggggttaggcctctttttaccacc

SEQ ID NO: 599 - DNA, 38 bp, Homo sapiens
  source 1..38: mol_type = genomic DNA
aaatctaaagacaggggttaggcctctttttaccacca

SEQ ID NO: 600 - DNA, 16 bp, Homo sapiens
  source 1..16: mol_type = genomic DNA
aaatctcgctggggcc

SEQ ID NO: 601 - DNA, 17 bp, Homo sapiens
  source 1..17: mol_type = genomic DNA
aaatctcgctggggcct

SEQ ID NO: 602 - DNA, 19 bp, Homo sapiens
  source 1..19: mol_type = genomic DNA
aaatctcgctggggcctcc

SEQ ID NO: 603 - DNA, 16 bp, Homo sapiens
  source 1..16: mol_type = genomic DNA
aaatctcggtggaacc

SEQ ID NO: 604 - DNA, 17 bp, Homo sapiens
  source 1..17: mol_type = genomic DNA
aaatctcggtggaacct

SEQ ID NO: 605 - DNA, 18 bp, Homo sapiens
  source 1..18: mol_type = genomic DNA
aaatctcggtggaacctc

SEQ ID NO: 606 - DNA, 19 bp, Homo sapiens
  source 1..19: mol_type = genomic DNA
aaatctcggtggaacctcc

SEQ ID NO: 607 - DNA, 20 bp, Homo sapiens
  source 1..20: mol_type = genomic DNA
aaatctcggtggaacctcca

SEQ ID NO: 608 - DNA, 18 bp, Homo sapiens
  source 1..18: mol_type = genomic DNA
aaatctcggtgggacccc

SEQ ID NO: 609 - DNA, 19 bp, Homo sapiens
  source 1..19: mol_type = genomic DNA
aaatctcggtgggaccccc

SEQ ID NO: 610 - DNA, 17 bp, Homo sapiens
  source 1..17: mol_type = genomic DNA
aaatctcggtgggacct

SEQ ID NO: 611 - DNA, 19 bp, Homo sapiens
  source 1..19: mol_type = genomic DNA
aaatctcggtgggacctcc

SEQ ID NO: 612 - DNA, 24 bp, Homo sapiens
  source 1..24: mol_type = genomic DNA
aaatggctgagtgaagcattggac

SEQ ID NO: 613 - DNA, 25 bp, Homo sapiens
  source 1..25: mol_type = genomic DNA
aaatggctgagtgaagcattggact

SEQ ID NO: 614 - DNA, 27 bp, Homo sapiens
  source 1..27: mol_type = genomic DNA
aaatggctgagtgaagcattggactgt

SEQ ID NO: 615 - DNA, 28 bp, Homo sapiens
  source 1..28: mol_type = genomic DNA
aaatggctgagtgaagcattggactgta

SEQ ID NO: 616 - DNA, 29 bp, Homo sapiens
  source 1..29: mol_type = genomic DNA
aaatggctgagtgaagcattggactgtaa

SEQ ID NO: 617 - DNA, 30 bp, Homo sapiens
  source 1..30: mol_type = genomic DNA
aaatggctgagtgaagcattggactgtaaa

SEQ ID NO: 618 - DNA, 16 bp, Homo sapiens
  source 1..16: mol_type = genomic DNA
aaatggtagagcgctc

SEQ ID NO: 619 - DNA, 18 bp, Homo sapiens
  source 1..18: mol_type = genomic DNA
aaatggtagagcgctcgc

SEQ ID NO: 620 - DNA, 20 bp, Homo sapiens
  source 1..20: mol_type = genomic DNA
aaatggtagagcgctcgctt

SEQ ID NO: 621 - DNA, 16 bp, Homo sapiens
  source 1..16: mol_type = genomic DNA
aaatgttggttatacc

SEQ ID NO: 622 - DNA, 17 bp, Homo sapiens
  source 1..17: mol_type = genomic DNA
aaatgttggttataccc

SEQ ID NO: 623 - DNA, 20 bp, Homo sapiens
  source 1..20: mol_type = genomic DNA
aaatgttggttatacccttc

SEQ ID NO: 624 - DNA, 27 bp, Homo sapiens
  source 1..27: mol_type = genomic DNA
aaatgttggttatacccttcccgtact

SEQ ID NO: 625 - DNA, 28 bp, Homo sapiens
  source 1..28: mol_type = genomic DNA
aaatgttggttatacccttcccgtacta

SEQ ID NO: 626 - DNA, 29 bp, Homo sapiens
  source 1..29: mol_type = genomic DNA
aaatgttggttatacccttcccgtactac

SEQ ID NO: 627 - DNA, 30 bp, Homo sapiens
  source 1..30: mol_type = genomic DNA
aaatgttggttatacccttcccgtactacc

SEQ ID NO: 628 - DNA, 31 bp, Homo sapiens
  source 1..31: mol_type = genomic DNA
aaatgttggttatacccttcccgtactacca

SEQ ID NO: 629 - DNA, 16 bp, Homo sapiens
  source 1..16: mol_type = genomic DNA
aaatgtttagacgggc

SEQ ID NO: 630 - DNA, 17 bp, Homo sapiens
  source 1..17: mol_type = genomic DNA
aaatgtttagacgggct

SEQ ID NO: 631 - DNA, 18 bp, Homo sapiens
  source 1..18: mol_type = genomic DNA
aaatgtttagacgggctc

SEQ ID NO: 632 - DNA, 19 bp, Homo sapiens
  source 1..19: mol_type = genomic DNA
aaatgtttagacgggctca

SEQ ID NO: 633 - DNA, 20 bp, Homo sapiens
  source 1..20: mol_type = genomic DNA
aaatgtttagacgggctcac

SEQ ID NO: 634 - DNA, 21 bp, Homo sapiens
  source 1..21: mol_type = genomic DNA
aaatgtttagacgggctcaca

SEQ ID NO: 635 - DNA, 22 bp, Homo sapiens
  source 1..22: mol_type = genomic DNA
aaatgtttagacgggctcacat

SEQ ID NO: 636 - DNA, 23 bp, Homo sapiens
  source 1..23: mol_type = genomic DNA
aaatgtttagacgggctcacatc

SEQ ID NO: 637 - DNA, 24 bp, Homo sapiens
  source 1..24: mol_type = genomic DNA
aaatgtttagacgggctcacatca

SEQ ID NO: 638 - DNA, 25 bp, Homo sapiens
  source 1..25: mol_type = genomic DNA
aaatgtttagacgggctcacatcac

SEQ ID NO: 639 - DNA, 26 bp, Homo sapiens
  source 1..26: mol_type = genomic DNA
aaatgtttagacgggctcacatcacc

SEQ ID NO: 640 - DNA, 27 bp, Homo sapiens
  source 1..27: mol_type = genomic DNA
aaatgtttagacgggctcacatcaccc

SEQ ID NO: 641 - DNA, 28 bp, Homo sapiens
  source 1..28: mol_type = genomic DNA
aaatgtttagacgggctcacatcacccc

SEQ ID NO: 642 - DNA, 29 bp, Homo sapiens
  source 1..29: mol_type = genomic DNA
aaatgtttagacgggctcacatcacccca

SEQ ID NO: 643 - DNA, 31 bp, Homo sapiens
  source 1..31: mol_type = genomic DNA
aaatgtttagacgggctcacatcaccccata

SEQ ID NO: 644 - DNA, 32 bp, Homo sapiens
  source 1..32: mol_type = genomic DNA
aaatgtttagacgggctcacatcaccccataa

SEQ ID NO: 645 - DNA, 33 bp, Homo sapiens
  source 1..33: mol_type = genomic DNA
aaatgtttagacgggctcacatcaccccataaa

SEQ ID NO: 646 - DNA, 34 bp, Homo sapiens
  source 1..34: mol_type = genomic DNA
aaatgtttagacgggctcacatcaccccataaac

SEQ ID NO: 647 - DNA, 37 bp, Homo sapiens
  source 1..37: mol_type = genomic DNA
aaatgtttagacgggctcacatcaccccataaacacc

SEQ ID NO: 648 - DNA, 38 bp, Homo sapiens
  source 1..38: mol_type = genomic DNA
aaatgtttagacgggctcacatcaccccataaacacca

SEQ ID NO: 649 - DNA, 16 bp, Homo sapiens
  source 1..16: mol_type = genomic DNA
aaattagaatcttagc

SEQ ID NO: 650 - DNA, 17 bp, Homo sapiens
  source 1..17: mol_type = genomic DNA
aaattagaatcttagct

SEQ ID NO: 651 - DNA, 18 bp, Homo sapiens
  source 1..18: mol_type = genomic DNA
aaattagaatcttagctt

SEQ ID NO: 652 - DNA, 19 bp, Homo sapiens
  source 1..19: mol_type = genomic DNA
aaattagaatcttagcttt

SEQ ID NO: 653 - DNA, 20 bp, Homo sapiens
  source 1..20: mol_type = genomic DNA
aaattagaatcttagctttg

SEQ ID NO: 654 - DNA, 21 bp, Homo sapiens
  source 1..21: mol_type = genomic DNA
aaattagaatcttagctttgg

SEQ ID NO: 655 - DNA, 24 bp, Homo sapiens
  source 1..24: mol_type = genomic DNA
aaattagaatcttagctttgggtg

SEQ ID NO: 656 - DNA, 28 bp, Homo sapiens
  source 1..28: mol_type = genomic DNA
aaattagaatcttagctttgggtgctaa

SEQ ID NO: 657 - DNA, 31 bp, Homo sapiens
  source 1..31: mol_type = genomic DNA
aaattagaatcttagctttgggtgctaatgg

SEQ ID NO: 658 - DNA, 36 bp, Homo sapiens
  source 1..36: mol_type = genomic DNA
aaattagaatcttagctttgggtgctaatggtggag

SEQ ID NO: 659 - DNA, 37 bp, Homo sapiens
  source 1..37: mol_type = genomic DNA
aaattagaatcttagctttgggtgctaatggtggagt

SEQ ID NO: 660 - DNA, 38 bp, Homo sapiens
  source 1..38: mol_type = genomic DNA
aaattagaatcttagctttgggtgctaatggtggagtt

SEQ ID NO: 661 - DNA, 39 bp, Homo sapiens
  source 1..39: mol_type = genomic DNA
aaattagaatcttagctttgggtgctaatggtggagtta

SEQ ID NO: 662 - DNA, 40 bp, Homo sapiens
  source 1..40: mol_type = genomic DNA
aaattagaatcttagctttgggtgctaatggtggagttaa

SEQ ID NO: 663 - DNA, 44 bp, Homo sapiens
  source 1..44: mol_type = genomic DNA
aaattagaatcttagctttgggtgctaatggtggagttaaagac

SEQ ID NO: 664 - DNA, 45 bp, Homo sapiens
  source 1..45: mol_type = genomic DNA
aaattagaatcttagctttgggtgctaatggtggagttaaagact

SEQ ID NO: 665 - DNA, 46 bp, Homo sapiens
  source 1..46: mol_type = genomic DNA
aaattagaatcttagctttgggtgctaatggtggagttaaagactt

SEQ ID NO: 666 - DNA, 16 bp, Homo sapiens
  source 1..16: mol_type = genomic DNA
aaattataggctaaat

SEQ ID NO: 667 - DNA, 17 bp, Homo sapiens
  source 1..17: mol_type = genomic DNA
aaattataggctaaatc

SEQ ID NO: 668 - DNA, 18 bp, Homo sapiens
  source 1..18: mol_type = genomic DNA
aaattataggctaaatcc

SEQ ID NO: 669 - DNA, 19 bp, Homo sapiens
  source 1..19: mol_type = genomic DNA
aaattataggctaaatcct

SEQ ID NO: 670 - DNA, 22 bp, Homo sapiens
  source 1..22: mol_type = genomic DNA
aaattataggctaaatcctata

SEQ ID NO: 671 - DNA, 27 bp, Homo sapiens
  source 1..27: mol_type = genomic DNA
aaattataggctaaatcctatatatct

SEQ ID NO: 672 - DNA, 31 bp, Homo sapiens
  source 1..31: mol_type = genomic DNA
aaattataggctaaatcctatatatcttacc

SEQ ID NO: 673 - DNA, 26 bp, Homo sapiens
  source 1..26: mol_type = genomic DNA
aaattatgataatcatatttaccaac

SEQ ID NO: 674 - DNA, 27 bp, Homo sapiens
  source 1..27: mol_type = genomic DNA
aaattatgataatcatatttaccaacc

SEQ ID NO: 675 - DNA, 28 bp, Homo sapiens
  source 1..28: mol_type = genomic DNA
aaattatgataatcatatttaccaacca

SEQ ID NO: 676 - DNA, 19 bp, Homo sapiens
  source 1..19: mol_type = genomic DNA
aaattcgaagaagcagctt

SEQ ID NO: 677 - DNA, 20 bp, Homo sapiens
  source 1..20: mol_type = genomic DNA
aaattcgaagaagcagcttc

SEQ ID NO: 678 - DNA, 27 bp, Homo sapiens
  source 1..27: mol_type = genomic DNA
aaattcgaagaagcagcttcaaacctg

SEQ ID NO: 679 - DNA, 34 bp, Homo sapiens
  source 1..34: mol_type = genomic DNA
aaattcgaagaagcagcttcaaacctgccggggc

SEQ ID NO: 680 - DNA, 35 bp, Homo sapiens
  source 1..35: mol_type = genomic DNA
aaattcgaagaagcagcttcaaacctgccggggct

SEQ ID NO: 681 - DNA, 36 bp, Homo sapiens
  source 1..36: mol_type = genomic DNA
aaattcgaagaagcagcttcaaacctgccggggctt

SEQ ID NO: 682 - DNA, 37 bp, Homo sapiens
  source 1..37: mol_type = genomic DNA
aaattcgaagaagcagcttcaaacctgccggggcttc

SEQ ID NO: 683 - DNA, 38 bp, Homo sapiens
  source 1..38: mol_type = genomic DNA
aaattcgaagaagcagcttcaaacctgccggggcttcc

SEQ ID NO: 684 - DNA, 39 bp, Homo sapiens
  source 1..39: mol_type = genomic DNA
aaattcgaagaagcagcttcaaacctgccggggcttcca

SEQ ID NO: 685 - DNA, 17 bp, Homo sapiens
  source 1..17: mol_type = genomic DNA
aaatttaggttaaatac

SEQ ID NO: 686 - DNA, 19 bp, Homo sapiens
  source 1..19: mol_type = genomic DNA
aaatttaggttaaatacag

SEQ ID NO: 687 - DNA, 21 bp, Homo sapiens
  source 1..21: mol_type = genomic DNA
aaatttaggttaaatacagac

SEQ ID NO: 688 - DNA, 22 bp, Homo sapiens
  source 1..22: mol_type = genomic DNA
aaatttaggttaaatacagacc

SEQ ID NO: 689 - DNA, 29 bp, Homo sapiens
  source 1..29: mol_type = genomic DNA
aaatttaggttaaatacagaccaagagcc

SEQ ID NO: 690 - DNA, 32 bp, Homo sapiens
  source 1..32: mol_type = genomic DNA
aaatttaggttaaatacagaccaagagccttc

SEQ ID NO: 691 - DNA, 33 bp, Homo sapiens
  source 1..33: mol_type = genomic DNA
aaatttaggttaaatacagaccaagagccttca

SEQ ID NO: 692 - DNA, 17 bp, Homo sapiens
  source 1..17: mol_type = genomic DNA
aaattttggtgcaactc

SEQ ID NO: 693 - DNA, 18 bp, Homo sapiens
  source 1..18: mol_type = genomic DNA
aaattttggtgcaactcc

SEQ ID NO: 694 - DNA, 28 bp, Homo sapiens
  source 1..28: mol_type = genomic DNA
aaattttggtgcaactccaaataaaagt

SEQ ID NO: 695 - DNA, 29 bp, Homo sapiens
  source 1..29: mol_type = genomic DNA
aaattttggtgcaactccaaataaaagta

SEQ ID NO: 696 - DNA, 30 bp, Homo sapiens
  source 1..30: mol_type = genomic DNA
aaattttggtgcaactccaaataaaagtac

SEQ ID NO: 697 - DNA, 31 bp, Homo sapiens
  source 1..31: mol_type = genomic DNA
aaattttggtgcaactccaaataaaagtacc

SEQ ID NO: 698 - DNA, 32 bp, Homo sapiens
  source 1..32: mol_type = genomic DNA
aaattttggtgcaactccaaataaaagtacca

SEQ ID NO: 699 - DNA, 19 bp, Homo sapiens
  source 1..19: mol_type = genomic DNA
aacaaaacgaatgatttcg

SEQ ID NO: 700 - DNA, 20 bp, Homo sapiens
  source 1..20: mol_type = genomic DNA
aacaaaacgaatgatttcga

SEQ ID NO: 701 - DNA, 21 bp, Homo sapiens
  source 1..21: mol_type = genomic DNA
aacaaaacgaatgatttcgac

SEQ ID NO: 702 - DNA, 22 bp, Homo sapiens
  source 1..22: mol_type = genomic DNA
aacaaaacgaatgatttcgact

SEQ ID NO: 703 - DNA, 23 bp, Homo sapiens
  source 1..23: mol_type = genomic DNA
aacaaaacgaatgatttcgactc

SEQ ID NO: 704 - DNA, 24 bp, Homo sapiens
  source 1..24: mol_type = genomic DNA
aacaaaacgaatgatttcgactca

SEQ ID NO: 705 - DNA, 25 bp, Homo sapiens
  source 1..25: mol_type = genomic DNA
aacaaaacgaatgatttcgactcat

SEQ ID NO: 706 - DNA, 27 bp, Homo sapiens
  source 1..27: mol_type = genomic DNA
aacaaaacgaatgatttcgactcatta

SEQ ID NO: 707 - DNA, 34 bp, Homo sapiens
  source 1..34: mol_type = genomic DNA
aacaaaacgaatgatttcgactcattaaattatg

SEQ ID NO: 708 - DNA, 16 bp, Homo sapiens
  source 1..16: mol_type = genomic DNA
aacaacatggctttct

SEQ ID NO: 709 - DNA, 17 bp, Homo sapiens
  source 1..17: mol_type = genomic DNA
aacaacatggctttctc

SEQ ID NO: 710 - DNA, 18 bp, Homo sapiens
  source 1..18: mol_type = genomic DNA
aacaacatggctttctca

SEQ ID NO: 711 - DNA, 19 bp, Homo sapiens
  source 1..19: mol_type = genomic DNA
aacaacatggctttctcac

SEQ ID NO: 712 - DNA, 20 bp, Homo sapiens
  source 1..20: mol_type = genomic DNA
aacaacatggctttctcacc

SEQ ID NO: 713 - DNA, 21 bp, Homo sapiens
  source 1..21: mol_type = genomic DNA
aacaacatggctttctcacca

SEQ ID NO: 714 - DNA, 16 bp, Homo sapiens
  source 1..16: mol_type = genomic DNA
aacacaaagcacccaa

SEQ ID NO: 715 - DNA, 17 bp, Homo sapiens
  source 1..17: mol_type = genomic DNA
aacacaaagcacccaac

SEQ ID NO: 716 - DNA, 18 bp, Homo sapiens
  source 1..18: mol_type = genomic DNA
aacacaaagcacccaact

SEQ ID NO: 717 - DNA, 19 bp, Homo sapiens
  source 1..19: mol_type = genomic DNA
aacacaaagcacccaactt

SEQ ID NO: 718 - DNA, 21 bp, Homo sapiens
  source 1..21: mol_type = genomic DNA
aacacaaagcacccaacttac

SEQ ID NO: 719 - DNA, 22 bp, Homo sapiens
  source 1..22: mol_type = genomic DNA
aacacaaagcacccaacttaca

SEQ ID NO: 720 - DNA, 24 bp, Homo sapiens
  source 1..24: mol_type = genomic DNA
aacacaaagcacccaacttacact

SEQ ID NO: 721 - DNA, 25 bp, Homo sapiens
  source 1..25: mol_type = genomic DNA
aacacaaagcacccaacttacactt

SEQ ID NO: 722 - DNA, 26 bp, Homo sapiens
  source 1..26: mol_type = genomic DNA
aacacaaagcacccaacttacactta

SEQ ID NO: 723 - DNA, 27 bp, Homo sapiens
  source 1..27: mol_type = genomic DNA
aacacaaagcacccaacttacacttag

SEQ ID NO: 724 - DNA, 28 bp, Homo sapiens
  source 1..28: mol_type = genomic DNA
aacacaaagcacccaacttacacttagg

SEQ ID NO: 725 - DNA, 29 bp, Homo sapiens
  source 1..29: mol_type = genomic DNA
aacacaaagcacccaacttacacttagga

SEQ ID NO: 726 - DNA, 31 bp, Homo sapiens
  source 1..31: mol_type = genomic DNA
aacacaaagcacccaacttacacttaggaga

SEQ ID NO: 727 - DNA, 32 bp, Homo sapiens
  source 1..32: mol_type = genomic DNA
aacacaaagcacccaacttacacttaggagat

SEQ ID NO: 728 - DNA, 33 bp, Homo sapiens
  source 1..33: mol_type = genomic DNA
aacacaaagcacccaacttacacttaggagatt

SEQ ID NO: 729 - DNA, 35 bp, Homo sapiens
  source 1..35: mol_type = genomic DNA
aacacaaagcacccaacttacacttaggagatttc

SEQ ID NO: 730 - DNA, 36 bp, Homo sapiens
  source 1..36: mol_type = genomic DNA
aacacaaagcacccaacttacacttaggagatttca

SEQ ID NO: 731 - DNA, 39 bp, Homo sapiens
  source 1..39: mol_type = genomic DNA
aacacaaagcacccaacttacacttaggagatttcaact

SEQ ID NO: 732 - DNA, 42 bp, Homo sapiens
  source 1..42: mol_type = genomic DNA
aacacaaagcacccaacttacacttaggagatttcaacttaa

SEQ ID NO: 733 - DNA, 44 bp, Homo sapiens
  source 1..44: mol_type = genomic DNA
aacacaaagcacccaacttacacttaggagatttcaacttaact

SEQ ID NO: 734 - DNA, 18 bp, Homo sapiens
  source 1..18: mol_type = genomic DNA
aacacctctttacagtga

SEQ ID NO: 735 - DNA, 19 bp, Homo sapiens
  source 1..19: mol_type = genomic DNA
aacacctctttacagtgac

SEQ ID NO: 736 - DNA, 20 bp, Homo sapiens
  source 1..20: mol_type = genomic DNA
aacacctctttacagtgacc

SEQ ID NO: 737 - DNA, 21 bp, Homo sapiens
  source 1..21: mol_type = genomic DNA
aacacctctttacagtgacca

SEQ ID NO: 738 - DNA, 16 bp, Homo sapiens
  source 1..16: mol_type = genomic DNA
aacagaggcttacgac

SEQ ID NO: 739 - DNA, 17 bp, Homo sapiens
  source 1..17: mol_type = genomic DNA
aacagaggcttacgacc

SEQ ID NO: 740 - DNA, 18 bp, Homo sapiens
  source 1..18: mol_type = genomic DNA
aacagaggcttacgaccc

SEQ ID NO: 741 - DNA, 19 bp, Homo sapiens
  source 1..19: mol_type = genomic DNA
aacagaggcttacgacccc

SEQ ID NO: 742 - DNA, 20 bp, Homo sapiens
  source 1..20: mol_type = genomic DNA
aacagaggcttacgacccct

SEQ ID NO: 743 - DNA, 24 bp, Homo sapiens
  source 1..24: mol_type = genomic DNA
aacagaggcttacgaccccttatt

SEQ ID NO: 744 - DNA, 28 bp, Homo sapiens
  source 1..28: mol_type = genomic DNA
aacagaggcttacgaccccttatttacc

SEQ ID NO: 745 - DNA, 29 bp, Homo sapiens
  source 1..29: mol_type = genomic DNA
aacagaggcttacgaccccttatttaccc

SEQ ID NO: 746 - DNA, 30 bp, Homo sapiens
  source 1..30: mol_type = genomic DNA
aacagaggcttacgaccccttatttacccc

SEQ ID NO: 747 - DNA, 31 bp, Homo sapiens
  source 1..31: mol_type = genomic DNA
aacagaggcttacgaccccttatttacccca

SEQ ID NO: 748 - DNA, 16 bp, Homo sapiens
  source 1..16: mol_type = genomic DNA
aacagctatccattgg

SEQ ID NO: 749 - DNA, 18 bp, Homo sapiens
  source 1..18: mol_type = genomic DNA
aacagctatccattggtc

SEQ ID NO: 750 - DNA, 19 bp, Homo sapiens
  source 1..19: mol_type = genomic DNA
aacagctatccattggtct

SEQ ID NO: 751 - DNA, 20 bp, Homo sapiens
  source 1..20: mol_type = genomic DNA
aacagctatccattggtctt

SEQ ID NO: 752 - DNA, 21 bp, Homo sapiens
  source 1..21: mol_type = genomic DNA
aacagctatccattggtctta

SEQ ID NO: 753 - DNA, 22 bp, Homo sapiens
  source 1..22: mol_type = genomic DNA
aacagctatccattggtcttag

SEQ ID NO: 754 - DNA, 25 bp, Homo sapiens
  source 1..25: mol_type = genomic DNA
aacagctatccattggtcttaggcc

SEQ ID NO: 755 - DNA, 26 bp, Homo sapiens
  source 1..26: mol_type = genomic DNA
aacagctatccattggtcttaggccc

SEQ ID NO: 756 - DNA, 27 bp, Homo sapiens
  source 1..27: mol_type = genomic DNA
aacagctatccattggtcttaggcccc

SEQ ID NO: 757 - DNA, 28 bp, Homo sapiens
  source 1..28: mol_type = genomic DNA
aacagctatccattggtcttaggcccca

SEQ ID NO: 758 - DNA, 30 bp, Homo sapiens
  source 1..30: mol_type = genomic DNA
aacagctatccattggtcttaggccccaaa

SEQ ID NO: 759 - DNA, 31 bp, Homo sapiens
  source 1..31: mol_type = genomic DNA
aacagctatccattggtcttaggccccaaaa

SEQ ID NO: 760 - DNA, 32 bp, Homo sapiens
  source 1..32: mol_type = genomic DNA
aacagctatccattggtcttaggccccaaaaa

SEQ ID NO: 761 - DNA, 33 bp, Homo sapiens
  source 1..33: mol_type = genomic DNA
aacagctatccattggtcttaggccccaaaaat

SEQ ID NO: 762 - DNA, 19 bp, Homo sapiens
  source 1..19: mol_type = genomic DNA
aacaggagatcctgggttc

SEQ ID NO: 763 - DNA, 21 bp, Homo sapiens
  source 1..21: mol_type = genomic DNA
aacaggagatcctgggttcga

SEQ ID NO: 764 - DNA, 23 bp, Homo sapiens
  source 1..23: mol_type = genomic DNA
aacaggagatcctgggttcgaat

SEQ ID NO: 765 - DNA, 24 bp, Homo sapiens
  source 1..24: mol_type = genomic DNA
aacaggagatcctgggttcgaatc

SEQ ID NO: 766 - DNA, 30 bp, Homo sapiens
  source 1..30: mol_type = genomic DNA
aacaggagatcctgggttcgaatcccagcg

SEQ ID NO: 767 - DNA, 36 bp, Homo sapiens
  source 1..36: mol_type = genomic DNA
aacaggagatcctgggttcgaatcccagcgaggcct

SEQ ID NO: 768 - DNA, 37 bp, Homo sapiens
  source 1..37: mol_type = genomic DNA
aacaggagatcctgggttcgaatcccagcgaggcctc

SEQ ID NO: 769 - DNA, 31 bp, Homo sapiens
  source 1..31: mol_type = genomic DNA
aacaggagatcctgggttcgaatcccagcgg

SEQ ID NO: 770 - DNA, 33 bp, Homo sapiens
  source 1..33: mol_type = genomic DNA
aacaggagatcctgggttcgaatcccagcgggg

SEQ ID NO: 771 - DNA, 34 bp, Homo sapiens
  source 1..34: mol_type = genomic DNA
aacaggagatcctgggttcgaatcccagcggggc

SEQ ID NO: 772 - DNA, 35 bp, Homo sapiens
  source 1..35: mol_type = genomic DNA
aacaggagatcctgggttcgaatcccagcggggcc

SEQ ID NO: 773 - DNA, 36 bp, Homo sapiens
  source 1..36: mol_type = genomic DNA
aacaggagatcctgggttcgaatcccagcggggcct

SEQ ID NO: 774 - DNA, 37 bp, Homo sapiens
  source 1..37: mol_type = genomic DNA
aacaggagatcctgggttcgaatcccagcggggcctc

SEQ ID NO: 775 - DNA, 38 bp, Homo sapiens
  source 1..38: mol_type = genomic DNA
aacaggagatcctgggttcgaatcccagcggggcctcc

SEQ ID NO: 776 - DNA, 33 bp, Homo sapiens
  source 1..33: mol_type = genomic DNA
aacaggagatcctgggttcgaatcccagcggtg

SEQ ID NO: 777 - DNA, 34 bp, Homo sapiens
  source 1..34: mol_type = genomic DNA
aacaggagatcctgggttcgaatcccagcggtgc

SEQ ID NO: 778 - DNA, 35 bp, Homo sapiens
  source 1..35: mol_type = genomic DNA
aacaggagatcctgggttcgaatcccagcggtgcc

SEQ ID NO: 779 - DNA, 36 bp, Homo sapiens
  source 1..36: mol_type = genomic DNA
aacaggagatcctgggttcgaatcccagcggtgcct

SEQ ID NO: 780 - DNA, 37 bp, Homo sapiens
  source 1..37: mol_type = genomic DNA
aacaggagatcctgggttcgaatcccagcggtgcctc

SEQ ID NO: 781 - DNA, 38 bp, Homo sapiens
  source 1..38: mol_type = genomic DNA
aacaggagatcctgggttcgaatcccagcggtgcctcc

SEQ ID NO: 782 - DNA, 39 bp, Homo sapiens
  source 1..39: mol_type = genomic DNA
aacaggagatcctgggttcgaatcccagcggtgcctcca

SEQ ID NO: 783 - DNA, 34 bp, Homo sapiens
  source 1..34: mol_type = genomic DNA
aacaggagatcctgggttcgaatcccagtagagc

SEQ ID NO: 784 - DNA, 36 bp, Homo sapiens
  source 1..36: mol_type = genomic DNA
aacaggagatcctgggttcgaatcccagtagagcct

SEQ ID NO: 785 - DNA, 37 bp, Homo sapiens
  source 1..37: mol_type = genomic DNA
aacaggagatcctgggttcgaatcccagtagagcctc

SEQ ID NO: 786 - DNA, 37 bp, Homo sapiens
  source 1..37: mol_type = genomic DNA
aacaggagatcctgggttcgactcccagcggggcctc

SEQ ID NO: 787 - DNA, 36 bp, Homo sapiens
  source 1..36: mol_type = genomic DNA
aacaggagatcctgggttcgactcccagtggggcct

SEQ ID NO: 788 - DNA, 17 bp, Homo sapiens
  source 1..17: mol_type = genomic DNA
aacatcagattgtgaat

SEQ ID NO: 789 - DNA, 18 bp, Homo sapiens
  source 1..18: mol_type = genomic DNA
aacatcagattgtgaatc

SEQ ID NO: 790 - DNA, 19 bp, Homo sapiens
  source 1..19: mol_type = genomic DNA
aacatcagattgtgaatct

SEQ ID NO: 791 - DNA, 20 bp, Homo sapiens
  source 1..20: mol_type = genomic DNA
aacatcagattgtgaatctg

SEQ ID NO: 792 - DNA, 22 bp, Homo sapiens
  source 1..22: mol_type = genomic DNA
aacatcagattgtgaatctgac

SEQ ID NO: 793 - DNA, 23 bp, Homo sapiens
  source 1..23: mol_type = genomic DNA
aacatcagattgtgaatctgaca

SEQ ID NO: 794 - DNA, 25 bp, Homo sapiens
  source 1..25: mol_type = genomic DNA
aacatcagattgtgaatctgacaac

SEQ ID NO: 795 - DNA, 26 bp, Homo sapiens
  source 1..26: mol_type = genomic DNA
aacatcagattgtgaatctgacaaca

SEQ ID NO: 796 - DNA, 27 bp, Homo sapiens
  source 1..27: mol_type = genomic DNA
aacatcagattgtgaatctgacaacag

SEQ ID NO: 797 - DNA, 28 bp, Homo sapiens
  source 1..28: mol_type = genomic DNA
aacatcagattgtgaatctgacaacaga

SEQ ID NO: 798 - DNA, 29 bp, Homo sapiens
  source 1..29: mol_type = genomic DNA
aacatcagattgtgaatctgacaacagag

SEQ ID NO: 799 - DNA, 30 bp, Homo sapiens
  source 1..30: mol_type = genomic DNA
aacatcagattgtgaatctgacaacagagg

SEQ ID NO: 800 - DNA, 31 bp, Homo sapiens
  source 1..31: mol_type = genomic DNA
aacatcagattgtgaatctgacaacagaggc

SEQ ID NO: 801 - DNA, 32 bp, Homo sapiens
  source 1..32: mol_type = genomic DNA
aacatcagattgtgaatctgacaacagaggct

SEQ ID NO: 802 - DNA, 33 bp, Homo sapiens
  source 1..33: mol_type = genomic DNA
aacatcagattgtgaatctgacaacagaggctt

SEQ ID NO: 803 - DNA, 34 bp, Homo sapiens
  source 1..34: mol_type = genomic DNA
aacatcagattgtgaatctgacaacagaggctta

SEQ ID NO: 804 - DNA, 35 bp, Homo sapiens
  source 1..35: mol_type = genomic DNA
aacatcagattgtgaatctgacaacagaggcttac

SEQ ID NO: 805 - DNA, 36 bp, Homo sapiens
  source 1..36: mol_type = genomic DNA
aacatcagattgtgaatctgacaacagaggcttacg

SEQ ID NO: 806 - DNA, 37 bp, Homo sapiens
  source 1..37: mol_type = genomic DNA
aacatcagattgtgaatctgacaacagaggcttacga

SEQ ID NO: 807 - DNA, 38 bp, Homo sapiens
  source 1..38: mol_type = genomic DNA
aacatcagattgtgaatctgacaacagaggcttacgac

SEQ ID NO: 808 - DNA, 39 bp, Homo sapiens
  source 1..39: mol_type = genomic DNA
aacatcagattgtgaatctgacaacagaggcttacgacc

SEQ ID NO: 809 - DNA, 40 bp, Homo sapiens
  source 1..40: mol_type = genomic DNA
aacatcagattgtgaatctgacaacagaggcttacgaccc

SEQ ID NO: 810 - DNA, 41 bp, Homo sapiens
  source 1..41: mol_type = genomic DNA
aacatcagattgtgaatctgacaacagaggcttacgacccc

SEQ ID NO: 811 - DNA, 42 bp, Homo sapiens
  source 1..42: mol_type = genomic DNA
aacatcagattgtgaatctgacaacagaggcttacgacccct

SEQ ID NO: 812 - DNA, 43 bp, Homo sapiens
  source 1..43: mol_type = genomic DNA
aacatcagattgtgaatctgacaacagaggcttacgacccctt

SEQ ID NO: 813 - DNA, 44 bp, Homo sapiens
  source 1..44: mol_type = genomic DNA
aacatcagattgtgaatctgacaacagaggcttacgacccctta

SEQ ID NO: 814 - DNA, 45 bp, Homo sapiens
  source 1..45: mol_type = genomic DNA
aacatcagattgtgaatctgacaacagaggcttacgaccccttat

SEQ ID NO: 815 - DNA, 46 bp, Homo sapiens
  source 1..46: mol_type = genomic DNA
aacatcagattgtgaatctgacaacagaggcttacgaccccttatt

SEQ ID NO: 816 - DNA, 47 bp, Homo sapiens
  source 1..47: mol_type = genomic DNA
aacatcagattgtgaatctgacaacagaggcttacgaccccttattt

SEQ ID NO: 817 - DNA, 16 bp, Homo sapiens
  source 1..16: mol_type = genomic DNA
aacatggctttctcac

SEQ ID NO: 818 - DNA, 17 bp, Homo sapiens
  source 1..17: mol_type = genomic DNA
aacatggctttctcacc

SEQ ID NO: 819 - DNA, 18 bp, Homo sapiens
  source 1..18: mol_type = genomic DNA
aacatggctttctcacca

SEQ ID NO: 820 - DNA, 20 bp, Homo sapiens
  source 1..20: mol_type = genomic DNA
aacattcaaaaaagagtacc

SEQ ID NO: 821 - DNA, 21 bp, Homo sapiens
  source 1..21: mol_type = genomic DNA
aacattcaaaaaagagtacca

SEQ ID NO: 822 - DNA, 16 bp, Homo sapiens
  source 1..16: mol_type = genomic DNA
aaccaaaacatcagat

SEQ ID NO: 823 - DNA, 18 bp, Homo sapiens
  source 1..18: mol_type = genomic DNA
aaccaaaacatcagattg

SEQ ID NO: 824 - DNA, 19 bp, Homo sapiens
  source 1..19: mol_type = genomic DNA
aaccaaaacatcagattgt

SEQ ID NO: 825 - DNA, 20 bp, Homo sapiens
  source 1..20: mol_type = genomic DNA
aaccaaaacatcagattgtg

SEQ ID NO: 826 - DNA, 21 bp, Homo sapiens
  source 1..21: mol_type = genomic DNA
aaccaaaacatcagattgtga

SEQ ID NO: 827 - DNA, 22 bp, Homo sapiens
  source 1..22: mol_type = genomic DNA
aaccaaaacatcagattgtgaa

SEQ ID NO: 828 - DNA, 23 bp, Homo sapiens
  source 1..23: mol_type = genomic DNA
aaccaaaacatcagattgtgaat

SEQ ID NO: 829 - DNA, 24 bp, Homo sapiens
  source 1..24: mol_type = genomic DNA
aaccaaaacatcagattgtgaatc

SEQ ID NO: 830 - DNA, 25 bp, Homo sapiens
  source 1..25: mol_type = genomic DNA
aaccaaaacatcagattgtgaatct

SEQ ID NO: 831 - DNA, 26 bp, Homo sapiens
  source 1..26: mol_type = genomic DNA
aaccaaaacatcagattgtgaatctg

SEQ ID NO: 832 - DNA, 28 bp, Homo sapiens
  source 1..28: mol_type = genomic DNA
aaccaaaacatcagattgtgaatctgac

SEQ ID NO: 833 - DNA, 29 bp, Homo sapiens
  source 1..29: mol_type = genomic DNA
aaccaaaacatcagattgtgaatctgaca

SEQ ID NO: 834 - DNA, 30 bp, Homo sapiens
  source 1..30: mol_type = genomic DNA
aaccaaaacatcagattgtgaatctgacaa

SEQ ID NO: 835 - DNA, 31 bp, Homo sapiens
  source 1..31: mol_type = genomic DNA
aaccaaaacatcagattgtgaatctgacaac

SEQ ID NO: 836 - DNA, 32 bp, Homo sapiens
  source 1..32: mol_type = genomic DNA
aaccaaaacatcagattgtgaatctgacaaca

SEQ ID NO: 837 - DNA, 33 bp, Homo sapiens
  source 1..33: mol_type = genomic DNA
aaccaaaacatcagattgtgaatctgacaacag

SEQ ID NO: 838 - DNA, 34 bp, Homo sapiens
  source 1..34: mol_type = genomic DNA
aaccaaaacatcagattgtgaatctgacaacaga

SEQ ID NO: 839 - DNA, 35 bp, Homo sapiens
  source 1..35: mol_type = genomic DNA
aaccaaaacatcagattgtgaatctgacaacagag

SEQ ID NO: 840 - DNA, 36 bp, Homo sapiens
  source 1..36: mol_type = genomic DNA
aaccaaaacatcagattgtgaatctgacaacagagg

SEQ ID NO: 841 - DNA, 37 bp, Homo sapiens
  source 1..37: mol_type = genomic DNA
aaccaaaacatcagattgtgaatctgacaacagaggc

SEQ ID NO: 842 - DNA, 38 bp, Homo sapiens
  source 1..38: mol_type = genomic DNA
aaccaaaacatcagattgtgaatctgacaacagaggct

SEQ ID NO: 843 - DNA, 39 bp, Homo sapiens
  source 1..39: mol_type = genomic DNA
aaccaaaacatcagattgtgaatctgacaacagaggctt

SEQ ID NO: 844 - DNA, 41 bp, Homo sapiens
  source 1..41: mol_type = genomic DNA
aaccaaaacatcagattgtgaatctgacaacagaggcttac

SEQ ID NO: 845 - DNA, 45 bp, Homo sapiens
  source 1..45: mol_type = genomic DNA
aaccaaaacatcagattgtgaatctgacaacagaggcttacgacc

SEQ ID NO: 846 - DNA, 46 bp, Homo sapiens
  source 1..46: mol_type = genomic DNA
aaccaaaacatcagattgtgaatctgacaacagaggcttacgaccc

SEQ ID NO: 847 - DNA, 47 bp, Homo sapiens
  source 1..47: mol_type = genomic DNA
aaccaaaacatcagattgtgaatctgacaacagaggcttacgacccc

SEQ ID NO: 848 - DNA, 48 bp, Homo sapiens
  source 1..48: mol_type = genomic DNA
aaccaaaacatcagattgtgaatctgacaacagaggcttacgacccct

SEQ ID NO: 849 - DNA, 16 bp, Homo sapiens
  source 1..16: mol_type = genomic DNA
aaccaacacctcttta

SEQ ID NO: 850 - DNA, 18 bp, Homo sapiens
  source 1..18: mol_type = genomic DNA
aaccaacacctctttaca

SEQ ID NO: 851 - DNA, 19 bp, Homo sapiens
  source 1..19: mol_type = genomic DNA
aaccaacacctctttacag

SEQ ID NO: 852 - DNA, 20 bp, Homo sapiens
  source 1..20: mol_type = genomic DNA
aaccaacacctctttacagt

SEQ ID NO: 853 - DNA, 21 bp, Homo sapiens
  source 1..21: mol_type = genomic DNA
aaccaacacctctttacagtg

SEQ ID NO: 854 - DNA, 22 bp, Homo sapiens
  source 1..22: mol_type = genomic DNA
aaccaacacctctttacagtga

SEQ ID NO: 855 - DNA, 23 bp, Homo sapiens
  source 1..23: mol_type = genomic DNA
aaccaacacctctttacagtgac

SEQ ID NO: 856 - DNA, 24 bp, Homo sapiens
  source 1..24: mol_type = genomic DNA
aaccaacacctctttacagtgacc

SEQ ID NO: 857 - DNA, 25 bp, Homo sapiens
  source 1..25: mol_type = genomic DNA
aaccaacacctctttacagtgacca

SEQ ID NO: 858 - DNA, 17 bp, Homo sapiens
  source 1..17: mol_type = genomic DNA
aaccagctttggggggt

SEQ ID NO: 859 - DNA, 18 bp, Homo sapiens
  source 1..18: mol_type = genomic DNA
aaccagctttggggggtt

SEQ ID NO: 860 - DNA, 16 bp, Homo sapiens
  source 1..16: mol_type = genomic DNA
aaccaggcggaaacac

SEQ ID NO: 861 - DNA, 18 bp, Homo sapiens
  source 1..18: mol_type = genomic DNA
aaccaggcggaaacacca

SEQ ID NO: 862 - DNA, 18 bp, Homo sapiens
  source 1..18: mol_type = genomic DNA
aaccaggggtcgcgagtt

SEQ ID NO: 863 - DNA, 19 bp, Homo sapiens
  source 1..19: mol_type = genomic DNA
aaccaggggtcgcgagttc

SEQ ID NO: 864 - DNA, 20 bp, Homo sapiens
  source 1..20: mol_type = genomic DNA
aaccaggggtcgcgagttca

SEQ ID NO: 865 - DNA, 30 bp, Homo sapiens
  source 1..30: mol_type = genomic DNA
aaccaggggtcgcgagttcaaatctcgctg

SEQ ID NO: 866 - DNA, 33 bp, Homo sapiens
  source 1..33: mol_type = genomic DNA
aaccaggggtcgcgagttcaaatctcgctgggg

SEQ ID NO: 867 - DNA, 34 bp, Homo sapiens
  source 1..34: mol_type = genomic DNA
aaccaggggtcgcgagttcaaatctcgctggggc

SEQ ID NO: 868 - DNA, 35 bp, Homo sapiens
  source 1..35: mol_type = genomic DNA
aaccaggggtcgcgagttcaaatctcgctggggcc

SEQ ID NO: 869 - DNA, 36 bp, Homo sapiens
  source 1..36: mol_type = genomic DNA
aaccaggggtcgcgagttcaaatctcgctggggcct

SEQ ID NO: 870 - DNA, 37 bp, Homo sapiens
  source 1..37: mol_type = genomic DNA
aaccaggggtcgcgagttcaaatctcgctggggcctc

SEQ ID NO: 871 - DNA, 38 bp, Homo sapiens
  source 1..38: mol_type = genomic DNA
aaccaggggtcgcgagttcaaatctcgctggggcctcc

SEQ ID NO: 872 - DNA, 36 bp, Homo sapiens
  source 1..36: mol_type = genomic DNA
aaccaggggtcgcgagttcaattctcgctggggcct

SEQ ID NO: 873 - DNA, 38 bp, Homo sapiens
  source 1..38: mol_type = genomic DNA
aaccaggggtcgcgagttcaattctcgctggggcctcc

SEQ ID NO: 874 - DNA, 38 bp, Homo sapiens
  source 1..38: mol_type = genomic DNA
aaccaggggtcgcgagttcgatcctcgctggggcctcc

SEQ ID NO: 875 - DNA, 16 bp, Homo sapiens
  source 1..16: mol_type = genomic DNA
aaccatcctctgctac

SEQ ID NO: 876 - DNA, 17 bp, Homo sapiens
  source 1..17: mol_type = genomic DNA
aaccatcctctgctacc

SEQ ID NO: 877 - DNA, 18 bp, Homo sapiens
  source 1..18: mol_type = genomic DNA
aaccatcctctgctacca

SEQ ID NO: 878 - DNA, 19 bp, Homo sapiens
  source 1..19: mol_type = genomic DNA
aaccatttcataactttgt

SEQ ID NO: 879 - DNA, 20 bp, Homo sapiens
  source 1..20: mol_type = genomic DNA
aaccatttcataactttgtc

SEQ ID NO: 880 - DNA, 21 bp, Homo sapiens
  source 1..21: mol_type = genomic DNA
aaccatttcataactttgtca

SEQ ID NO: 881 - DNA, 37 bp, Homo sapiens
  source 1..37: mol_type = genomic DNA
aaccatttcataactttgtcaaagttaaattataggc

SEQ ID NO: 882 - DNA, 38 bp, Homo sapiens
  source 1..38: mol_type = genomic DNA
aaccatttcataactttgtcaaagttaaattataggct

SEQ ID NO: 883 - DNA, 19 bp, Homo sapiens
  source 1..19: mol_type = genomic DNA
aacccagaggtcgatggat

SEQ ID NO: 884 - DNA, 20 bp, Homo sapiens
  source 1..20: mol_type = genomic DNA
aacccagaggtcgatggatc

SEQ ID NO: 885 - DNA, 21 bp, Homo sapiens
  source 1..21: mol_type = genomic DNA
aacccagaggtcgatggatcg

SEQ ID NO: 886 - DNA, 22 bp, Homo sapiens
  source 1..22: mol_type = genomic DNA
aacccagaggtcgatggatcga

SEQ ID NO: 887 - DNA, 23 bp, Homo sapiens
  source 1..23: mol_type = genomic DNA
aacccagaggtcgatggatcgaa

SEQ ID NO: 888 - DNA, 25 bp, Homo sapiens
  source 1..25: mol_type = genomic DNA
aacccagaggtcgatggatcgaaac

SEQ ID NO: 889 - DNA, 26 bp, Homo sapiens
  source 1..26: mol_type = genomic DNA
aacccagaggtcgatggatcgaaacc

SEQ ID NO: 890 - DNA, 27 bp, Homo sapiens
  source 1..27: mol_type = genomic DNA
aacccagaggtcgatggatcgaaacca

SEQ ID NO: 891 - DNA, 18 bp, Homo sapiens
  source 1..18: mol_type = genomic DNA
aaccccactcctggtacc

SEQ ID NO: 892 - DNA, 19 bp, Homo sapiens
  source 1..19: mol_type = genomic DNA
aaccccactcctggtacca

SEQ ID NO: 893 - DNA, 16 bp, Homo sapiens
  source 1..16: mol_type = genomic DNA
aacccccttatttcta

SEQ ID NO: 894 - DNA, 17 bp, Homo sapiens
  source 1..17: mol_type = genomic DNA
aacccccttatttctac

SEQ ID NO: 895 - DNA, 18 bp, Homo sapiens
  source 1..18: mol_type = genomic DNA
aacccccttatttctacc

SEQ ID NO: 896 - DNA, 19 bp, Homo sapiens
  source 1..19: mol_type = genomic DNA
aacccccttatttctacca

SEQ ID NO: 897 - DNA, 16 bp, Homo sapiens
  source 1..16: mol_type = genomic DNA
aaccccgtccgtgcct

SEQ ID NO: 898 - DNA, 17 bp, Homo sapiens
  source 1..17: mol_type = genomic DNA
aaccccgtccgtgcctc

SEQ ID NO: 899 - DNA, 18 bp, Homo sapiens
  source 1..18: mol_type = genomic DNA
aaccccgtccgtgcctcc

SEQ ID NO: 900 - DNA, 19 bp, Homo sapiens
  source 1..19: mol_type = genomic DNA
aaccccgtccgtgcctcca

SEQ ID NO: 901 - DNA, 17 bp, Homo sapiens
  source 1..17: mol_type = genomic DNA
aaccctgctcgctgcgc

SEQ ID NO: 902 - DNA, 18 bp, Homo sapiens
  source 1..18: mol_type = genomic DNA
aaccctgctcgctgcgcc

SEQ ID NO: 903 - DNA, 19 bp, Homo sapiens
  source 1..19: mol_type = genomic DNA
aaccctgctcgctgcgcca

SEQ ID NO: 904 - DNA, 19 bp, Homo sapiens
  source 1..19: mol_type = genomic DNA
aaccgaaaggttggtggtt

SEQ ID NO: 905 - DNA, 20 bp, Homo sapiens
  source 1..20: mol_type = genomic DNA
aaccgaaaggttggtggttc

SEQ ID NO: 906 - DNA, 21 bp, Homo sapiens
  source 1..21: mol_type = genomic DNA
aaccgaaaggttggtggttcg

SEQ ID NO: 907 - DNA, 22 bp, Homo sapiens
  source 1..22: mol_type = genomic DNA
aaccgaaaggttggtggttcga

SEQ ID NO: 908 - DNA, 23 bp, Homo sapiens
  source 1..23: mol_type = genomic DNA
aaccgaaaggttggtggttcgag

SEQ ID NO: 909 - DNA, 24 bp, Homo sapiens
  source 1..24: mol_type = genomic DNA
aaccgaaaggttggtggttcgagc

SEQ ID NO: 910 - DNA, 36 bp, Homo sapiens
  source 1..36: mol_type = genomic DNA
aaccgaaaggttggtggttcgagcccacccagggac

SEQ ID NO: 911 - DNA, 37 bp, Homo sapiens
  source 1..37: mol_type = genomic DNA
aaccgaaaggttggtggttcgagcccacccagggacg

SEQ ID NO: 912 - DNA, 38 bp, Homo sapiens
  source 1..38: mol_type = genomic DNA
aaccgaaaggttggtggttcgagcccacccagggacgc

SEQ ID NO: 913 - DNA, 39 bp, Homo sapiens
  source 1..39: mol_type = genomic DNA
aaccgaaaggttggtggttcgagcccacccagggacgcc

SEQ ID NO: 914 - DNA, 40 bp, Homo sapiens
  source 1..40: mol_type = genomic DNA
aaccgaaaggttggtggttcgagcccacccagggacgcca

SEQ ID NO: 915 - DNA, 20 bp, Homo sapiens
  source 1..20: mol_type = genomic DNA
aaccgaagatcacgggttcg

SEQ ID NO: 916 - DNA, 23 bp, Homo sapiens
  source 1..23: mol_type = genomic DNA
aaccgaagatcacgggttcgaac

SEQ ID NO: 917 - DNA, 33 bp, Homo sapiens
  source 1..33: mol_type = genomic DNA
aaccgaagatcacgggttcgaaccccgtccgtg

SEQ ID NO: 918 - DNA, 36 bp, Homo sapiens
  source 1..36: mol_type = genomic DNA
aaccgaagatcacgggttcgaaccccgtccgtgcct

SEQ ID NO: 919 - DNA, 37 bp, Homo sapiens
  source 1..37: mol_type = genomic DNA
aaccgaagatcacgggttcgaaccccgtccgtgcctc

SEQ ID NO: 920 - DNA, 38 bp, Homo sapiens
  source 1..38: mol_type = genomic DNA
aaccgaagatcacgggttcgaaccccgtccgtgcctcc

SEQ ID NO: 921 - DNA, 39 bp, Homo sapiens
  source 1..39: mol_type = genomic DNA
aaccgaagatcacgggttcgaaccccgtccgtgcctcca

SEQ ID NO: 922 - DNA, 17 bp, Homo sapiens
  source 1..17: mol_type = genomic DNA
aaccgaagatcgcgggt

SEQ ID NO: 923 - DNA, 20 bp, Homo sapiens
  source 1..20: mol_type = genomic DNA
aaccgaagatcgcgggttcg

SEQ ID NO: 924 - DNA, 21 bp, Homo sapiens
  source 1..21: mol_type = genomic DNA
aaccgaagatcgcgggttcga

SEQ ID NO: 925 - DNA, 23 bp, Homo sapiens
  source 1..23: mol_type = genomic DNA
aaccgaagatcgcgggttcgaac

SEQ ID NO: 926 - DNA, 24 bp, Homo sapiens
  source 1..24: mol_type = genomic DNA
aaccgaagatcgcgggttcgaacc

SEQ ID NO: 927 - DNA, 25 bp, Homo sapiens
  source 1..25: mol_type = genomic DNA
aaccgaagatcgcgggttcgaaccc

SEQ ID NO: 928 - DNA, 31 bp, Homo sapiens
  source 1..31: mol_type = genomic DNA
aaccgaagatcgcgggttcgaaccccgtccg

SEQ ID NO: 929 - DNA, 36 bp, Homo sapiens
  source 1..36: mol_type = genomic DNA
aaccgaagatcgcgggttcgaaccccgtccgtgcct

SEQ ID NO: 930 - DNA, 37 bp, Homo sapiens
  source 1..37: mol_type = genomic DNA
aaccgaagatcgcgggttcgaaccccgtccgtgcctc

SEQ ID NO: 931 - DNA, 38 bp, Homo sapiens
  source 1..38: mol_type = genomic DNA
aaccgaagatcgcgggttcgaaccccgtccgtgcctcc

SEQ ID NO: 932 - DNA, 39 bp, Homo sapiens
  source 1..39: mol_type = genomic DNA
aaccgaagatcgcgggttcgaaccccgtccgtgcctcca

SEQ ID NO: 933 - DNA, 17 bp, Homo sapiens
  source 1..17: mol_type = genomic DNA
aaccgagcggaaacacc

SEQ ID NO: 934 - DNA, 18 bp, Homo sapiens
  source 1..18: mol_type = genomic DNA
aaccgagcggaaacacca

SEQ ID NO: 935 - DNA, 16 bp, Homo sapiens
  source 1..16: mol_type = genomic DNA
aaccggagatgaaaac

SEQ ID NO: 936 - DNA, 17 bp, Homo sapiens
  source 1..17: mol_type = genomic DNA
aaccggagatgaaaacc

SEQ ID NO: 937 - DNA, 18 bp, Homo sapiens
  source 1..18: mol_type = genomic DNA
aaccggagatgaaaacct

SEQ ID NO: 938 - DNA, 19 bp, Homo sapiens
  source 1..19: mol_type = genomic DNA
aaccggagatgaaaacctt

SEQ ID NO: 939 - DNA, 21 bp, Homo sapiens
  source 1..21: mol_type = genomic DNA
aaccggagatgaaaacctttt

SEQ ID NO: 940 - DNA, 23 bp, Homo sapiens
  source 1..23: mol_type = genomic DNA
aaccggagatgaaaacctttttc

SEQ ID NO: 941 - DNA, 24 bp, Homo sapiens
  source 1..24: mol_type = genomic DNA
aaccggagatgaaaacctttttcc

SEQ ID NO: 942 - DNA, 25 bp, Homo sapiens
  source 1..25: mol_type = genomic DNA
aaccggagatgaaaacctttttcca

SEQ ID NO: 943 - DNA, 27 bp, Homo sapiens
  source 1..27: mol_type = genomic DNA
aaccggagatgaaaacctttttccaag

SEQ ID NO: 944 - DNA, 28 bp, Homo sapiens
  source 1..28: mol_type = genomic DNA
aaccggagatgaaaacctttttccaagg

SEQ ID NO: 945 - DNA, 29 bp, Homo sapiens
  source 1..29: mol_type = genomic DNA
aaccggagatgaaaacctttttccaagga

SEQ ID NO: 946 - DNA, 30 bp, Homo sapiens
  source 1..30: mol_type = genomic DNA
aaccggagatgaaaacctttttccaaggac

SEQ ID NO: 947 - DNA, 31 bp, Homo sapiens
  source 1..31: mol_type = genomic DNA
aaccggagatgaaaacctttttccaaggaca

SEQ ID NO: 948 - DNA, 32 bp, Homo sapiens
  source 1..32: mol_type = genomic DNA
aaccggagatgaaaacctttttccaaggacac

SEQ ID NO: 949 - DNA, 33 bp, Homo sapiens
  source 1..33: mol_type = genomic DNA
aaccggagatgaaaacctttttccaaggacacc

SEQ ID NO: 950 - DNA, 34 bp, Homo sapiens
  source 1..34: mol_type = genomic DNA
aaccggagatgaaaacctttttccaaggacacca

SEQ ID NO: 951 - DNA, 16 bp, Homo sapiens
  source 1..16: mol_type = genomic DNA
aaccgggcagaaacac

SEQ ID NO: 952 - DNA, 17 bp, Homo sapiens
  source 1..17: mol_type = genomic DNA
aaccgggcagaaacacc

SEQ ID NO: 953 - DNA, 18 bp, Homo sapiens
  source 1..18: mol_type = genomic DNA
aaccgggcagaaacacca

SEQ ID NO: 954 - DNA, 16 bp, Homo sapiens
  source 1..16: mol_type = genomic DNA
aaccgggcagaagcac

SEQ ID NO: 955 - DNA, 17 bp, Homo sapiens
  source 1..17: mol_type = genomic DNA
aaccgggcagaagcacc

SEQ ID NO: 956 - DNA, 18 bp, Homo sapiens
  source 1..18: mol_type = genomic DNA
aaccgggcagaagcacca

SEQ ID NO: 957 - DNA, 16 bp, Homo sapiens
  source 1..16: mol_type = genomic DNA
aaccgggcggaaacac

SEQ ID NO: 958 - DNA, 17 bp, Homo sapiens
  source 1..17: mol_type = genomic DNA
aaccgggcggaaacacc

SEQ ID NO: 959 - DNA, 18 bp, Homo sapiens
  source 1..18: mol_type = genomic DNA
aaccgggcggaaacacca

SEQ ID NO: 960 - DNA, 27 bp, Homo sapiens
  source 1..27: mol_type = genomic DNA
aacctcggttcgaatccgagtcacggc

SEQ ID NO: 961 - DNA, 28 bp, Homo sapiens
  source 1..28: mol_type = genomic DNA
aacctcggttcgaatccgagtcacggca

SEQ ID NO: 962 - DNA, 29 bp, Homo sapiens
  source 1..29: mol_type = genomic DNA
aacctcggttcgaatccgagtcacggcac

SEQ ID NO: 963 - DNA, 31 bp, Homo sapiens
  source 1..31: mol_type = genomic DNA
aacctcggttcgaatccgagtcacggcacca

SEQ ID NO: 964 - DNA, 16 bp, Homo sapiens
  source 1..16: mol_type = genomic DNA
aacctgccggggcttc

SEQ ID NO: 965 - DNA, 17 bp, Homo sapiens
  source 1..17: mol_type = genomic DNA
aacctgccggggcttcc

SEQ ID NO: 966 - DNA, 18 bp, Homo sapiens
  source 1..18: mol_type = genomic DNA
aacctgccggggcttcca

SEQ ID NO: 967 - DNA, 25 bp, Homo sapiens
  source 1..25: mol_type = genomic DNA
aaccttttaagttaaagattaagag

SEQ ID NO: 968 - DNA, 28 bp, Homo sapiens
  source 1..28: mol_type = genomic DNA
aaccttttaagttaaagattaagagaac

SEQ ID NO: 969 - DNA, 29 bp, Homo sapiens
  source 1..29: mol_type = genomic DNA
aaccttttaagttaaagattaagagaacc

SEQ ID NO: 970 - DNA, 30 bp, Homo sapiens
  source 1..30: mol_type = genomic DNA
aaccttttaagttaaagattaagagaacca

SEQ ID NO: 971 - DNA, 31 bp, Homo sapiens
  source 1..31: mol_type = genomic DNA
aaccttttaagttaaagattaagagaaccaa

SEQ ID NO: 972 - DNA, 32 bp, Homo sapiens
  source 1..32: mol_type = genomic DNA
aaccttttaagttaaagattaagagaaccaac

SEQ ID NO: 973 - DNA, 34 bp, Homo sapiens
  source 1..34: mol_type = genomic DNA
aaccttttaagttaaagattaagagaaccaacac

SEQ ID NO: 974 - DNA, 35 bp, Homo sapiens
  source 1..35: mol_type = genomic DNA
aaccttttaagttaaagattaagagaaccaacacc

SEQ ID NO: 975 - DNA, 36 bp, Homo sapiens
  source 1..36: mol_type = genomic DNA
aaccttttaagttaaagattaagagaaccaacacct

SEQ ID NO: 976 - DNA, 38 bp, Homo sapiens
  source 1..38: mol_type = genomic DNA
aaccttttaagttaaagattaagagaaccaacacctct

SEQ ID NO: 977 - DNA, 47 bp, Homo sapiens
  source 1..47: mol_type = genomic DNA
aaccttttaagttaaagattaagagaaccaacacctctttacagtga

SEQ ID NO: 978 - DNA, 48 bp, Homo sapiens
  source 1..48: mol_type = genomic DNA
aaccttttaagttaaagattaagagaaccaacacctctttacagtgac

SEQ ID NO: 979 - DNA, 17 bp, Homo sapiens
  source 1..17: mol_type = genomic DNA
aacctttttccaaggac

SEQ ID NO: 980 - DNA, 18 bp, Homo sapiens
  source 1..18: mol_type = genomic DNA
aacctttttccaaggaca

SEQ ID NO: 981 - DNA, 20 bp, Homo sapiens
  source 1..20: mol_type = genomic DNA
aacctttttccaaggacacc

SEQ ID NO: 982 - DNA, 21 bp, Homo sapiens
  source 1..21: mol_type = genomic DNA
aacctttttccaaggacacca

SEQ ID NO: 983 - DNA, 16 bp, Homo sapiens
  source 1..16: mol_type = genomic DNA
aacgaatgatttcgac

SEQ ID NO: 984 - DNA, 17 bp, Homo sapiens
  source 1..17: mol_type = genomic DNA
aacgaatgatttcgact

SEQ ID NO: 985 - DNA, 18 bp, Homo sapiens
  source 1..18: mol_type = genomic DNA
aacgaatgatttcgactc

SEQ ID NO: 986 - DNA, 19 bp, Homo sapiens
  source 1..19: mol_type = genomic DNA
aacgaatgatttcgactca

SEQ ID NO: 987 - DNA, 20 bp, Homo sapiens
  source 1..20: mol_type = genomic DNA
aacgaatgatttcgactcat

SEQ ID NO: 988 - DNA, 21 bp, Homo sapiens
  source 1..21: mol_type = genomic DNA
aacgaatgatttcgactcatt

SEQ ID NO: 989 - DNA, 22 bp, Homo sapiens
  source 1..22: mol_type = genomic DNA
aacgaatgatttcgactcatta

SEQ ID NO: 990 - DNA, 24 bp, Homo sapiens
  source 1..24: mol_type = genomic DNA
aacgaatgatttcgactcattaaa

SEQ ID NO: 991 - DNA, 29 bp, Homo sapiens
  source 1..29: mol_type = genomic DNA
aacgaatgatttcgactcattaaattatg

SEQ ID NO: 992 - DNA, 31 bp, Homo sapiens
  source 1..31: mol_type = genomic DNA
aacgaatgatttcgactcattaaattatgat

SEQ ID NO: 993 - DNA, 32 bp, Homo sapiens
  source 1..32: mol_type = genomic DNA
aacgaatgatttcgactcattaaattatgata

SEQ ID NO: 994 - DNA, 33 bp, Homo sapiens
  source 1..33: mol_type = genomic DNA
aacgaatgatttcgactcattaaattatgataa

SEQ ID NO: 995 - DNA, 35 bp, Homo sapiens
  source 1..35: mol_type = genomic DNA
aacgaatgatttcgactcattaaattatgataatc

SEQ ID NO: 996 - DNA, 44 bp, Homo sapiens
  source 1..44: mol_type = genomic DNA
aacgaatgatttcgactcattaaattatgataatcatatttacc

SEQ ID NO: 997 - DNA, 46 bp, Homo sapiens
  source 1..46: mol_type = genomic DNA
aacgaatgatttcgactcattaaattatgataatcatatttaccaa

SEQ ID NO: 998 - DNA, 48 bp, Homo sapiens
  source 1..48: mol_type = genomic DNA
aacgaatgatttcgactcattaaattatgataatcatatttaccaacc

SEQ ID NO: 999 - DNA, 16 bp, Homo sapiens
  source 1..16: mol_type = genomic DNA
aacgatggtttttcat

SEQ ID NO: 1000 - DNA, 19 bp, Homo sapiens
  source 1..19: mol_type = genomic DNA
aacgatggtttttcatatc

SEQ ID NO: 1001 - DNA, 26 bp, Homo sapiens
  source 1..26: mol_type = genomic DNA
aacgatggtttttcatatcattggtc

SEQ ID NO: 1002 - DNA, 27 bp, Homo sapiens
  source 1..27: mol_type = genomic DNA
aacgatggtttttcatatcattggtcg

SEQ ID NO: 1003 - DNA, 28 bp, Homo sapiens
  source 1..28: mol_type = genomic DNA
aacgatggtttttcatatcattggtcgt

SEQ ID NO: 1004 - DNA, 29 bp, Homo sapiens
  source 1..29: mol_type = genomic DNA
aacgatggtttttcatatcattggtcgtg

SEQ ID NO: 1005 - DNA, 32 bp, Homo sapiens
  source 1..32: mol_type = genomic DNA
aacgatggtttttcatatcattggtcgtggtt

SEQ ID NO: 1006 - DNA, 33 bp, Homo sapiens
  source 1..33: mol_type = genomic DNA
aacgatggtttttcatatcattggtcgtggttg

SEQ ID NO: 1007 - DNA, 34 bp, Homo sapiens
  source 1..34: mol_type = genomic DNA
aacgatggtttttcatatcattggtcgtggttgt

SEQ ID NO: 1008 - DNA, 35 bp, Homo sapiens
  source 1..35: mol_type = genomic DNA
aacgatggtttttcatatcattggtcgtggttgta

SEQ ID NO: 1009 - DNA, 36 bp, Homo sapiens
  source 1..36: mol_type = genomic DNA
aacgatggtttttcatatcattggtcgtggttgtag

SEQ ID NO: 1010 - DNA, 37 bp, Homo sapiens
  source 1..37: mol_type = genomic DNA
aacgatggtttttcatatcattggtcgtggttgtagt

SEQ ID NO: 1011 - DNA, 38 bp, Homo sapiens
  source 1..38: mol_type = genomic DNA
aacgatggtttttcatatcattggtcgtggttgtagtc

SEQ ID NO: 1012 - DNA, 39 bp, Homo sapiens
  source 1..39: mol_type = genomic DNA
aacgatggtttttcatatcattggtcgtggttgtagtcc

SEQ ID NO: 1013 - DNA, 40 bp, Homo sapiens
  source 1..40: mol_type = genomic DNA
aacgatggtttttcatatcattggtcgtggttgtagtccg

SEQ ID NO: 1014 - DNA, 41 bp, Homo sapiens
  source 1..41: mol_type = genomic DNA
aacgatggtttttcatatcattggtcgtggttgtagtccgt

SEQ ID NO: 1015 - DNA, 43 bp, Homo sapiens
  source 1..43: mol_type = genomic DNA
aacgatggtttttcatatcattggtcgtggttgtagtccgtgc

SEQ ID NO: 1016 - DNA, 44 bp, Homo sapiens
  source 1..44: mol_type = genomic DNA
aacgatggtttttcatatcattggtcgtggttgtagtccgtgcg

SEQ ID NO: 1017 - DNA, 45 bp, Homo sapiens
  source 1..45: mol_type = genomic DNA
aacgatggtttttcatatcattggtcgtggttgtagtccgtgcga

SEQ ID NO: 1018 - DNA, 46 bp, Homo sapiens
  source 1..46: mol_type = genomic DNA
aacgatggtttttcatatcattggtcgtggttgtagtccgtgcgag

SEQ ID NO: 1019 - DNA, 47 bp, Homo sapiens
  source 1..47: mol_type = genomic DNA
aacgatggtttttcatatcattggtcgtggttgtagtccgtgcgaga

SEQ ID NO: 1020 - DNA, 48 bp, Homo sapiens
  source 1..48: mol_type = genomic DNA
aacgatggtttttcatatcattggtcgtggttgtagtccgtgcgagaa

SEQ ID NO: 1021 - DNA, 35 bp, Homo sapiens
  source 1..35: mol_type = genomic DNA
aacgccaaggtcgcgggttcgatccccgtacgggc

SEQ ID NO: 1022 - DNA, 39 bp, Homo sapiens
  source 1..39: mol_type = genomic DNA
aacgccaaggtcgcgggttcgatccccgtacgggccacc

SEQ ID NO: 1023 - DNA, 40 bp, Homo sapiens
  source 1..40: mol_type = genomic DNA
aacgccaaggtcgcgggttcgatccccgtacgggccacca

SEQ ID NO: 1024 - DNA, 33 bp, Homo sapiens
  source 1..33: mol_type = genomic DNA
aacgccaaggtcgcgggttcgatccccgtactg

SEQ ID NO: 1025 - DNA, 17 bp, Homo sapiens
  source 1..17: mol_type = genomic DNA
aactaagtgtttgtggg

SEQ ID NO: 1026 - DNA, 18 bp, Homo sapiens
  source 1..18: mol_type = genomic DNA
aactaagtgtttgtgggt

SEQ ID NO: 1027 - DNA, 19 bp, Homo sapiens
  source 1..19: mol_type = genomic DNA
aactaagtgtttgtgggtt

SEQ ID NO: 1028 - DNA, 20 bp, Homo sapiens
  source 1..20: mol_type = genomic DNA
aactaagtgtttgtgggttt

SEQ ID NO: 1029 - DNA, 21 bp, Homo sapiens
  source 1..21: mol_type = genomic DNA
aactaagtgtttgtgggttta

SEQ ID NO: 1030 - DNA, 22 bp, Homo sapiens
  source 1..22: mol_type = genomic DNA
aactaagtgtttgtgggtttaa

SEQ ID NO: 1031 - DNA, 23 bp, Homo sapiens
  source 1..23: mol_type = genomic DNA
aactaagtgtttgtgggtttaag

SEQ ID NO: 1032 - DNA, 25 bp, Homo sapiens
  source 1..25: mol_type = genomic DNA
aactaagtgtttgtgggtttaagtc

SEQ ID NO: 1033 - DNA, 26 bp, Homo sapiens
  source 1..26: mol_type = genomic DNA
aactaagtgtttgtgggtttaagtcc

SEQ ID NO: 1034 - DNA, 27 bp, Homo sapiens
  source 1..27: mol_type = genomic DNA
aactaagtgtttgtgggtttaagtccc

SEQ ID NO: 1035 - DNA, 28 bp, Homo sapiens
  source 1..28: mol_type = genomic DNA
aactaagtgtttgtgggtttaagtccca

SEQ ID NO: 1036 - DNA, 30 bp, Homo sapiens
  source 1..30: mol_type = genomic DNA
aactaagtgtttgtgggtttaagtcccatt

SEQ ID NO: 1037 - DNA, 33 bp, Homo sapiens
  source 1..33: mol_type = genomic DNA
aactaagtgtttgtgggtttaagtcccattggt

SEQ ID NO: 1038 - DNA, 34 bp, Homo sapiens
  source 1..34: mol_type = genomic DNA
aactaagtgtttgtgggtttaagtcccattggtc

SEQ ID NO: 1039 - DNA, 35 bp, Homo sapiens
  source 1..35: mol_type = genomic DNA
aactaagtgtttgtgggtttaagtcccattggtct

SEQ ID NO: 1040 - DNA, 36 bp, Homo sapiens
  source 1..36: mol_type = genomic DNA
aactaagtgtttgtgggtttaagtcccattggtcta

SEQ ID NO: 1041 - DNA, 37 bp, Homo sapiens
  source 1..37: mol_type = genomic DNA
aactaagtgtttgtgggtttaagtcccattggtctag

SEQ ID NO: 1042 - DNA, 38 bp, Homo sapiens
  source 1..38: mol_type = genomic DNA
aactaagtgtttgtgggtttaagtcccattggtctagc

SEQ ID NO: 1043 - DNA, 39 bp, Homo sapiens
  source 1..39: mol_type = genomic DNA
aactaagtgtttgtgggtttaagtcccattggtctagcc

SEQ ID NO: 1044 - DNA, 40 bp, Homo sapiens
  source 1..40: mol_type = genomic DNA
aactaagtgtttgtgggtttaagtcccattggtctagcca

SEQ ID NO: 1045 - DNA, 16 bp, Homo sapiens
  source 1..16: mol_type = genomic DNA
aactagttttgacaac

SEQ ID NO: 1046 - DNA, 17 bp, Homo sapiens
  source 1..17: mol_type = genomic DNA
aactagttttgacaaca

SEQ ID NO: 1047 - DNA, 20 bp, Homo sapiens
  source 1..20: mol_type = genomic DNA
aactagttttgacaacattc

SEQ ID NO: 1048 - DNA, 29 bp, Homo sapiens
  source 1..29: mol_type = genomic DNA
aactagttttgacaacattcaaaaaagag

SEQ ID NO: 1049 - DNA, 30 bp, Homo sapiens
  source 1..30: mol_type = genomic DNA
aactagttttgacaacattcaaaaaagagt

SEQ ID NO: 1050 - DNA, 31 bp, Homo sapiens
  source 1..31: mol_type = genomic DNA
aactagttttgacaacattcaaaaaagagta

SEQ ID NO: 1051 - DNA, 32 bp, Homo sapiens
  source 1..32: mol_type = genomic DNA
aactagttttgacaacattcaaaaaagagtac

SEQ ID NO: 1052 - DNA, 33 bp, Homo sapiens
  source 1..33: mol_type = genomic DNA
aactagttttgacaacattcaaaaaagagtacc

SEQ ID NO: 1053 - DNA, 34 bp, Homo sapiens
  source 1..34: mol_type = genomic DNA
aactagttttgacaacattcaaaaaagagtacca

SEQ ID NO: 1054 - DNA, 16 bp, Homo sapiens
  source 1..16: mol_type = genomic DNA
aactcatgcccccatg

SEQ ID NO: 1055 - DNA, 17 bp, Homo sapiens
  source 1..17: mol_type = genomic DNA
aactcatgcccccatgt

SEQ ID NO: 1056 - DNA, 18 bp, Homo sapiens
  source 1..18: mol_type = genomic DNA
aactcatgcccccatgtc

SEQ ID NO: 1057 - DNA, 19 bp, Homo sapiens
  source 1..19: mol_type = genomic DNA
aactcatgcccccatgtct

SEQ ID NO: 1058 - DNA, 20 bp, Homo sapiens
  source 1..20: mol_type = genomic DNA
aactcatgcccccatgtcta

SEQ ID NO: 1059 - DNA, 21 bp, Homo sapiens
  source 1..21: mol_type = genomic DNA
aactcatgcccccatgtctaa

SEQ ID NO: 1060 - DNA, 22 bp, Homo sapiens
  source 1..22: mol_type = genomic DNA
aactcatgcccccatgtctaac

SEQ ID NO: 1061 - DNA, 23 bp, Homo sapiens
  source 1..23: mol_type = genomic DNA
aactcatgcccccatgtctaaca

SEQ ID NO: 1062 - DNA, 24 bp, Homo sapiens
  source 1..24: mol_type = genomic DNA
aactcatgcccccatgtctaacaa

SEQ ID NO: 1063 - DNA, 25 bp, Homo sapiens
  source 1..25: mol_type = genomic DNA
aactcatgcccccatgtctaacaac

SEQ ID NO: 1064 - DNA, 26 bp, Homo sapiens
  source 1..26: mol_type = genomic DNA
aactcatgcccccatgtctaacaaca

SEQ ID NO: 1065 - DNA, 27 bp, Homo sapiens
  source 1..27: mol_type = genomic DNA
aactcatgcccccatgtctaacaacat

SEQ ID NO: 1066 - DNA, 28 bp, Homo sapiens
  source 1..28: mol_type = genomic DNA
aactcatgcccccatgtctaacaacatg

SEQ ID NO: 1067 - DNA, 29 bp, Homo sapiens
  source 1..29: mol_type = genomic DNA
aactcatgcccccatgtctaacaacatgg

SEQ ID NO: 1068 - DNA, 30 bp, Homo sapiens
  source 1..30: mol_type = genomic DNA
aactcatgcccccatgtctaacaacatggc

SEQ ID NO: 1069 - DNA, 31 bp, Homo sapiens
  source 1..31: mol_type = genomic DNA
aactcatgcccccatgtctaacaacatggct

SEQ ID NO: 1070 - DNA, 32 bp, Homo sapiens
  source 1..32: mol_type = genomic DNA
aactcatgcccccatgtctaacaacatggctt

SEQ ID NO: 1071 - DNA, 33 bp, Homo sapiens
  source 1..33: mol_type = genomic DNA
aactcatgcccccatgtctaacaacatggcttt

SEQ ID NO: 1072 - DNA, 34 bp, Homo sapiens
  source 1..34: mol_type = genomic DNA
aactcatgcccccatgtctaacaacatggctttc

SEQ ID NO: 1073 - DNA, 35 bp, Homo sapiens
  source 1..35: mol_type = genomic DNA
aactcatgcccccatgtctaacaacatggctttct

SEQ ID NO: 1074 - DNA, 36 bp, Homo sapiens
  source 1..36: mol_type = genomic DNA
aactcatgcccccatgtctaacaacatggctttctc

SEQ ID NO: 1075 - DNA, 37 bp, Homo sapiens
  source 1..37: mol_type = genomic DNA
aactcatgcccccatgtctaacaacatggctttctca

SEQ ID NO: 1076 - DNA, 38 bp, Homo sapiens
  source 1..38: mol_type = genomic DNA
aactcatgcccccatgtctaacaacatggctttctcac

SEQ ID NO: 1077 - DNA, 39 bp, Homo sapiens
  source 1..39: mol_type = genomic DNA
aactcatgcccccatgtctaacaacatggctttctcacc

SEQ ID NO: 1078 - DNA, 40 bp, Homo sapiens
  source 1..40: mol_type = genomic DNA
aactcatgcccccatgtctaacaacatggctttctcacca

SEQ ID NO: 1079 - DNA, 17 bp, Homo sapiens
  source 1..17: mol_type = genomic DNA
aactccaaataaaagta

SEQ ID NO: 1080 - DNA, 18 bp, Homo sapiens
  source 1..18: mol_type = genomic DNA
aactccaaataaaagtac

SEQ ID NO: 1081 - DNA, 19 bp, Homo sapiens
  source 1..19: mol_type = genomic DNA
aactccaaataaaagtacc

SEQ ID NO: 1082 - DNA, 20 bp, Homo sapiens
  source 1..20: mol_type = genomic DNA
aactccaaataaaagtacca

SEQ ID NO: 1083 - DNA, 16 bp, Homo sapiens
  source 1..16: mol_type = genomic DNA
aactgctaactcatgc

SEQ ID NO: 1084 - DNA, 17 bp, Homo sapiens
  source 1..17: mol_type = genomic DNA
aactgctaactcatgcc

SEQ ID NO: 1085 - DNA, 18 bp, Homo sapiens
  source 1..18: mol_type = genomic DNA
aactgctaactcatgccc

SEQ ID NO: 1086 - DNA, 19 bp, Homo sapiens
  source 1..19: mol_type = genomic DNA
aactgctaactcatgcccc

SEQ ID NO: 1087 - DNA, 20 bp, Homo sapiens
  source 1..20: mol_type = genomic DNA
aactgctaactcatgccccc

SEQ ID NO: 1088 - DNA, 21 bp, Homo sapiens
  source 1..21: mol_type = genomic DNA
aactgctaactcatgccccca

SEQ ID NO: 1089 - DNA, 22 bp, Homo sapiens
  source 1..22: mol_type = genomic DNA
aactgctaactcatgcccccat

SEQ ID NO: 1090 - DNA, 23 bp, Homo sapiens
  source 1..23: mol_type = genomic DNA
aactgctaactcatgcccccatg

SEQ ID NO: 1091 - DNA, 24 bp, Homo sapiens
  source 1..24: mol_type = genomic DNA
aactgctaactcatgcccccatgt

SEQ ID NO: 1092 - DNA, 25 bp, Homo sapiens
  source 1..25: mol_type = genomic DNA
aactgctaactcatgcccccatgtc

SEQ ID NO: 1093 - DNA, 26 bp, Homo sapiens
  source 1..26: mol_type = genomic DNA
aactgctaactcatgcccccatgtct

SEQ ID NO: 1094 - DNA, 27 bp, Homo sapiens
  source 1..27: mol_type = genomic DNA
aactgctaactcatgcccccatgtcta

SEQ ID NO: 1095 - DNA, 28 bp, Homo sapiens
  source 1..28: mol_type = genomic DNA
aactgctaactcatgcccccatgtctaa

SEQ ID NO: 1096 - DNA, 29 bp, Homo sapiens
  source 1..29: mol_type = genomic DNA
aactgctaactcatgcccccatgtctaac

SEQ ID NO: 1097 - DNA, 30 bp, Homo sapiens
  source 1..30: mol_type = genomic DNA
aactgctaactcatgcccccatgtctaaca

SEQ ID NO: 1098 - DNA, 31 bp, Homo sapiens
  source 1..31: mol_type = genomic DNA
aactgctaactcatgcccccatgtctaacaa

SEQ ID NO: 1099 - DNA, 32 bp, Homo sapiens
  source 1..32: mol_type = genomic DNA
aactgctaactcatgcccccatgtctaacaac

SEQ ID NO: 1100 - DNA, 33 bp, Homo sapiens
  source 1..33: mol_type = genomic DNA
aactgctaactcatgcccccatgtctaacaaca

SEQ ID NO: 1101 - DNA, 34 bp, Homo sapiens
  source 1..34: mol_type = genomic DNA
aactgctaactcatgcccccatgtctaacaacat

SEQ ID NO: 1102 - DNA, 35 bp, Homo sapiens
  source 1..35: mol_type = genomic DNA
aactgctaactcatgcccccatgtctaacaacatg

SEQ ID NO: 1103 - DNA, 36 bp, Homo sapiens
  source 1..36: mol_type = genomic DNA
aactgctaactcatgcccccatgtctaacaacatgg

SEQ ID NO: 1104 - DNA, 37 bp, Homo sapiens
  source 1..37: mol_type = genomic DNA
aactgctaactcatgcccccatgtctaacaacatggc

SEQ ID NO: 1105 - DNA, 38 bp, Homo sapiens
  source 1..38: mol_type = genomic DNA
aactgctaactcatgcccccatgtctaacaacatggct

SEQ ID NO: 1106 - DNA, 39 bp, Homo sapiens
  source 1..39: mol_type = genomic DNA
aactgctaactcatgcccccatgtctaacaacatggctt

SEQ ID NO: 1107 - DNA, 40 bp, Homo sapiens
  source 1..40: mol_type = genomic DNA
aactgctaactcatgcccccatgtctaacaacatggcttt

SEQ ID NO: 1108 - DNA, 41 bp, Homo sapiens
  source 1..41: mol_type = genomic DNA
aactgctaactcatgcccccatgtctaacaacatggctttc

SEQ ID NO: 1109 - DNA, 42 bp, Homo sapiens
  source 1..42: mol_type = genomic DNA
aactgctaactcatgcccccatgtctaacaacatggctttct

SEQ ID NO: 1110 - DNA, 43 bp, Homo sapiens
  source 1..43: mol_type = genomic DNA
aactgctaactcatgcccccatgtctaacaacatggctttctc

SEQ ID NO: 1111 - DNA, 44 bp, Homo sapiens
  source 1..44: mol_type = genomic DNA
aactgctaactcatgcccccatgtctaacaacatggctttctca

SEQ ID NO: 1112 - DNA, 45 bp, Homo sapiens
  source 1..45: mol_type = genomic DNA
aactgctaactcatgcccccatgtctaacaacatggctttctcac

SEQ ID NO: 1113 - DNA, 46 bp, Homo sapiens
  source 1..46: mol_type = genomic DNA
aactgctaactcatgcccccatgtctaacaacatggctttctcacc

SEQ ID NO: 1114 - DNA, 47 bp, Homo sapiens
  source 1..47: mol_type = genomic DNA
aactgctaactcatgcccccatgtctaacaacatggctttctcacca

SEQ ID NO: 1115 - DNA, 17 bp, Homo sapiens
  source 1..17: mol_type = genomic DNA
aactgggcggaaacacc

SEQ ID NO: 1116 - DNA, 18 bp, Homo sapiens
  source 1..18: mol_type = genomic DNA
aactgggcggaaacacca

SEQ ID NO: 1117 - DNA, 17 bp, Homo sapiens
  source 1..17: mol_type = genomic DNA
aacttaaaactttacag

SEQ ID NO: 1118 - DNA, 21 bp, Homo sapiens
  source 1..21: mol_type = genomic DNA
aacttaaaactttacagtcag

SEQ ID NO: 1119 - DNA, 22 bp, Homo sapiens
  source 1..22: mol_type = genomic DNA
aacttaaaactttacagtcaga

SEQ ID NO: 1120 - DNA, 23 bp, Homo sapiens
  source 1..23: mol_type = genomic DNA
aacttaaaactttacagtcagag

SEQ ID NO: 1121 - DNA, 24 bp, Homo sapiens
  source 1..24: mol_type = genomic DNA
aacttaaaactttacagtcagagg

SEQ ID NO: 1122 - DNA, 26 bp, Homo sapiens
  source 1..26: mol_type = genomic DNA
aacttaaaactttacagtcagaggtt

SEQ ID NO: 1123 - DNA, 27 bp, Homo sapiens
  source 1..27: mol_type = genomic DNA
aacttaaaactttacagtcagaggttc

SEQ ID NO: 1124 - DNA, 28 bp, Homo sapiens
  source 1..28: mol_type = genomic DNA
aacttaaaactttacagtcagaggttca

SEQ ID NO: 1125 - DNA, 35 bp, Homo sapiens
  source 1..35: mol_type = genomic DNA
aacttaaaactttacagtcagaggttcaattcctc

SEQ ID NO: 1126 - DNA, 38 bp, Homo sapiens
  source 1..38: mol_type = genomic DNA
aacttaaaactttacagtcagaggttcaattcctcttc

SEQ ID NO: 1127 - DNA, 39 bp, Homo sapiens
  source 1..39: mol_type = genomic DNA
aacttaaaactttacagtcagaggttcaattcctcttct

SEQ ID NO: 1128 - DNA, 46 bp, Homo sapiens
  source 1..46: mol_type = genomic DNA
aacttaaaactttacagtcagaggttcaattcctcttcttaacacc

SEQ ID NO: 1129 - DNA, 16 bp, Homo sapiens
  source 1..16: mol_type = genomic DNA
aacttaacttgaccgc

SEQ ID NO: 1130 - DNA, 17 bp, Homo sapiens
  source 1..17: mol_type = genomic DNA
aacttaacttgaccgct

SEQ ID NO: 1131 - DNA, 18 bp, Homo sapiens
  source 1..18: mol_type = genomic DNA
aacttaacttgaccgctc

SEQ ID NO: 1132 - DNA, 19 bp, Homo sapiens
  source 1..19: mol_type = genomic DNA
aacttaacttgaccgctct

SEQ ID NO: 1133 - DNA, 20 bp, Homo sapiens
  source 1..20: mol_type = genomic DNA
aacttaacttgaccgctctg

SEQ ID NO: 1134 - DNA, 21 bp, Homo sapiens
  source 1..21: mol_type = genomic DNA
aacttaacttgaccgctctga

SEQ ID NO: 1135 - DNA, 22 bp, Homo sapiens
  source 1..22: mol_type = genomic DNA
aacttaacttgaccgctctgac

SEQ ID NO: 1136 - DNA, 23 bp, Homo sapiens
  source 1..23: mol_type = genomic DNA
aacttaacttgaccgctctgacc

SEQ ID NO: 1137 - DNA, 24 bp, Homo sapiens
  source 1..24: mol_type = genomic DNA
aacttaacttgaccgctctgacca

SEQ ID NO: 1138 - DNA, 16 bp, Homo sapiens
  source 1..16: mol_type = genomic DNA
aacttacacttaggag

SEQ ID NO: 1139 - DNA, 17 bp, Homo sapiens
  source 1..17: mol_type = genomic DNA
aacttacacttaggaga

SEQ ID NO: 1140 - DNA, 18 bp, Homo sapiens
  source 1..18: mol_type = genomic DNA
aacttacacttaggagat

SEQ ID NO: 1141 - DNA, 19 bp, Homo sapiens
  source 1..19: mol_type = genomic DNA
aacttacacttaggagatt

SEQ ID NO: 1142 - DNA, 20 bp, Homo sapiens
  source 1..20: mol_type = genomic DNA
aacttacacttaggagattt

SEQ ID NO: 1143 - DNA, 21 bp, Homo sapiens
  source 1..21: mol_type = genomic DNA
aacttacacttaggagatttc

SEQ ID NO: 1144 - DNA, 22 bp, Homo sapiens
  source 1..22: mol_type = genomic DNA
aacttacacttaggagatttca

SEQ ID NO: 1145 - DNA, 23 bp, Homo sapiens
  source 1..23: mol_type = genomic DNA
aacttacacttaggagatttcaa

SEQ ID NO: 1146 - DNA, 24 bp, Homo sapiens
  source 1..24: mol_type = genomic DNA
aacttacacttaggagatttcaac

SEQ ID NO: 1147 - DNA, 25 bp, Homo sapiens
  source 1..25: mol_type = genomic DNA
aacttacacttaggagatttcaact

SEQ ID NO: 1148 - DNA, 26 bp, Homo sapiens
  source 1..26: mol_type = genomic DNA
aacttacacttaggagatttcaactt

SEQ ID NO: 1149 - DNA, 27 bp, Homo sapiens
  source 1..27: mol_type = genomic DNA
aacttacacttaggagatttcaactta

SEQ ID NO: 1150 - DNA, 28 bp, Homo sapiens
  source 1..28: mol_type = genomic DNA
aacttacacttaggagatttcaacttaa

SEQ ID NO: 1151 - DNA, 29 bp, Homo sapiens
  source 1..29: mol_type = genomic DNA
aacttacacttaggagatttcaacttaac

SEQ ID NO: 1152 - DNA, 30 bp, Homo sapiens
  source 1..30: mol_type = genomic DNA
aacttacacttaggagatttcaacttaact

SEQ ID NO: 1153 - DNA, 31 bp, Homo sapiens
  source 1..31: mol_type = genomic DNA
aacttacacttaggagatttcaacttaactt

SEQ ID NO: 1154 - DNA, 32 bp, Homo sapiens
  source 1..32: mol_type = genomic DNA
aacttacacttaggagatttcaacttaacttg

SEQ ID NO: 1155 - DNA, 34 bp, Homo sapiens
  source 1..34: mol_type = genomic DNA
aacttacacttaggagatttcaacttaacttgac

SEQ ID NO: 1156 - DNA, 35 bp, Homo sapiens
  source 1..35: mol_type = genomic DNA
aacttacacttaggagatttcaacttaacttgacc

SEQ ID NO: 1157 - DNA, 36 bp, Homo sapiens
  source 1..36: mol_type = genomic DNA
aacttacacttaggagatttcaacttaacttgaccg

SEQ ID NO: 1158 - DNA, 37 bp, Homo sapiens
  source 1..37: mol_type = genomic DNA
aacttacacttaggagatttcaacttaacttgaccgc

SEQ ID NO: 1159 - DNA, 38 bp, Homo sapiens
  source 1..38: mol_type = genomic DNA
aacttacacttaggagatttcaacttaacttgaccgct

SEQ ID NO: 1160 - DNA, 39 bp, Homo sapiens
  source 1..39: mol_type = genomic DNA
aacttacacttaggagatttcaacttaacttgaccgctc

SEQ ID NO: 1161 - DNA, 40 bp, Homo sapiens
  source 1..40: mol_type = genomic DNA
aacttacacttaggagatttcaacttaacttgaccgctct

SEQ ID NO: 1162 - DNA, 41 bp, Homo sapiens
  source 1..41: mol_type = genomic DNA
aacttacacttaggagatttcaacttaacttgaccgctctg

SEQ ID NO: 1163 - DNA, 42 bp, Homo sapiens
  source 1..42: mol_type = genomic DNA
aacttacacttaggagatttcaacttaacttgaccgctctga

SEQ ID NO: 1164 - DNA, 43 bp, Homo sapiens
  source 1..43: mol_type = genomic DNA
aacttacacttaggagatttcaacttaacttgaccgctctgac

SEQ ID NO: 1165 - DNA, 44 bp, Homo sapiens
  source 1..44: mol_type = genomic DNA
aacttacacttaggagatttcaacttaacttgaccgctctgacc

SEQ ID NO: 1166 - DNA, 45 bp, Homo sapiens
  source 1..45: mol_type = genomic DNA
aacttacacttaggagatttcaacttaacttgaccgctctgacca

SEQ ID NO: 1167 - DNA, 18 bp, Homo sapiens
  source 1..18: mol_type = genomic DNA
aacttagcattaaccttt

SEQ ID NO: 1168 - DNA, 19 bp, Homo sapiens
  source 1..19: mol_type = genomic DNA
aacttagcattaacctttt

SEQ ID NO: 1169 - DNA, 21 bp, Homo sapiens
  source 1..21: mol_type = genomic DNA
aacttagcattaaccttttaa

SEQ ID NO: 1170 - DNA, 23 bp, Homo sapiens
  source 1..23: mol_type = genomic DNA
aacttagcattaaccttttaagt

SEQ ID NO: 1171 - DNA, 39 bp, Homo sapiens
  source 1..39: mol_type = genomic DNA
aacttagcattaaccttttaagttaaagattaagagaac

SEQ ID NO: 1172 - DNA, 40 bp, Homo sapiens
  source 1..40: mol_type = genomic DNA
aacttagcattaaccttttaagttaaagattaagagaacc

SEQ ID NO: 1173 - DNA, 46 bp, Homo sapiens
  source 1..46: mol_type = genomic DNA
aacttagcattaaccttttaagttaaagattaagagaaccaacacc

SEQ ID NO: 1174 - DNA, 47 bp, Homo sapiens
  source 1..47: mol_type = genomic DNA
aacttagcattaaccttttaagttaaagattaagagaaccaacacct

SEQ ID NO: 1175 - DNA, 17 bp, Homo sapiens
  source 1..17: mol_type = genomic DNA
aacttccaattaactag

SEQ ID NO: 1176 - DNA, 19 bp, Homo sapiens
  source 1..19: mol_type = genomic DNA
aacttccaattaactagtt

SEQ ID NO: 1177 - DNA, 21 bp, Homo sapiens
  source 1..21: mol_type = genomic DNA
aacttccaattaactagtttt

SEQ ID NO: 1178 - DNA, 24 bp, Homo sapiens
  source 1..24: mol_type = genomic DNA
aacttccaattaactagttttgac

SEQ ID NO: 1179 - DNA, 26 bp, Homo sapiens
  source 1..26: mol_type = genomic DNA
aacttccaattaactagttttgacaa

SEQ ID NO: 1180 - DNA, 27 bp, Homo sapiens
  source 1..27: mol_type = genomic DNA
aacttccaattaactagttttgacaac

SEQ ID NO: 1181 - DNA, 28 bp, Homo sapiens
  source 1..28: mol_type = genomic DNA
aacttccaattaactagttttgacaaca

SEQ ID NO: 1182 - DNA, 42 bp, Homo sapiens
  source 1..42: mol_type = genomic DNA
aacttccaattaactagttttgacaacattcaaaaaagagta

SEQ ID NO: 1183 - DNA, 43 bp, Homo sapiens
  source 1..43: mol_type = genomic DNA
aacttccaattaactagttttgacaacattcaaaaaagagtac

SEQ ID NO: 1184 - DNA, 44 bp, Homo sapiens
  source 1..44: mol_type = genomic DNA
aacttccaattaactagttttgacaacattcaaaaaagagtacc

SEQ ID NO: 1185 - DNA, 45 bp, Homo sapiens
  source 1..45: mol_type = genomic DNA
aacttccaattaactagttttgacaacattcaaaaaagagtacca

SEQ ID NO: 1186 - DNA, 16 bp, Homo sapiens
  source 1..16: mol_type = genomic DNA
aacttgaccgctctga

SEQ ID NO: 1187 - DNA, 17 bp, Homo sapiens
  source 1..17: mol_type = genomic DNA
aacttgaccgctctgac

SEQ ID NO: 1188 - DNA, 18 bp, Homo sapiens
  source 1..18: mol_type = genomic DNA
aacttgaccgctctgacc

SEQ ID NO: 1189 - DNA, 19 bp, Homo sapiens
  source 1..19: mol_type = genomic DNA
aacttgaccgctctgacca

SEQ ID NO: 1190 - DNA, 19 bp, Homo sapiens
  source 1..19: mol_type = genomic DNA
aactttacaatcagaggtt

SEQ ID NO: 1191 - DNA, 16 bp, Homo sapiens
  source 1..16: mol_type = genomic DNA
aactttacagtcagag

SEQ ID NO: 1192 - DNA, 17 bp, Homo sapiens
  source 1..17: mol_type = genomic DNA
aactttacagtcagagg

SEQ ID NO: 1193 - DNA, 18 bp, Homo sapiens
  source 1..18: mol_type = genomic DNA
aactttacagtcagaggt

SEQ ID NO: 1194 - DNA, 19 bp, Homo sapiens
  source 1..19: mol_type = genomic DNA
aactttacagtcagaggtt

SEQ ID NO: 1195 - DNA, 20 bp, Homo sapiens
  source 1..20: mol_type = genomic DNA
aactttacagtcagaggttc

SEQ ID NO: 1196 - DNA, 21 bp, Homo sapiens
  source 1..21: mol_type = genomic DNA
aactttacagtcagaggttca

SEQ ID NO: 1197 - DNA, 25 bp, Homo sapiens
  source 1..25: mol_type = genomic DNA
aactttacagtcagaggttcaattc

SEQ ID NO: 1198 - DNA, 26 bp, Homo sapiens
  source 1..26: mol_type = genomic DNA
aactttacagtcagaggttcaattcc

SEQ ID NO: 1199 - DNA, 31 bp, Homo sapiens
  source 1..31: mol_type = genomic DNA
aactttacagtcagaggttcaattcctcttc

SEQ ID NO: 1200 - DNA, 32 bp, Homo sapiens
  source 1..32: mol_type = genomic DNA
aactttacagtcagaggttcaattcctcttct

SEQ ID NO: 1201 - DNA, 26 bp, Homo sapiens
  source 1..26: mol_type = genomic DNA
aactttgtcaaagttaaattataggc

SEQ ID NO: 1202 - DNA, 27 bp, Homo sapiens
  source 1..27: mol_type = genomic DNA
aactttgtcaaagttaaattataggct

SEQ ID NO: 1203 - DNA, 28 bp, Homo sapiens
  source 1..28: mol_type = genomic DNA
aactttgtcaaagttaaattataggcta

SEQ ID NO: 1204 - DNA, 29 bp, Homo sapiens
  source 1..29: mol_type = genomic DNA
aactttgtcaaagttaaattataggctaa

SEQ ID NO: 1205 - DNA, 30 bp, Homo sapiens
  source 1..30: mol_type = genomic DNA
aactttgtcaaagttaaattataggctaaa

SEQ ID NO: 1206 - DNA, 32 bp, Homo sapiens
  source 1..32: mol_type = genomic DNA
aactttgtcaaagttaaattataggctaaatc

SEQ ID NO: 1207 - DNA, 33 bp, Homo sapiens
  source 1..33: mol_type = genomic DNA
aactttgtcaaagttaaattataggctaaatcc

SEQ ID NO: 1208 - DNA, 34 bp, Homo sapiens
  source 1..34: mol_type = genomic DNA
aactttgtcaaagttaaattataggctaaatcct

SEQ ID NO: 1209 - DNA, 37 bp, Homo sapiens
  source 1..37: mol_type = genomic DNA
aactttgtcaaagttaaattataggctaaatcctata

SEQ ID NO: 1210 - DNA, 39 bp, Homo sapiens
  source 1..39: mol_type = genomic DNA
aactttgtcaaagttaaattataggctaaatcctatata

SEQ ID NO: 1211 - DNA, 46 bp, Homo sapiens
  source 1..46: mol_type = genomic DNA
aactttgtcaaagttaaattataggctaaatcctatatatcttacc

SEQ ID NO: 1212 - DNA, 38 bp, Homo sapiens
  source 1..38: mol_type = genomic DNA
aacttttaaaggataacagctatccattggtcttaggc

SEQ ID NO: 1213 - DNA, 16 bp, Homo sapiens
  source 1..16: mol_type = genomic DNA
aagaactgctaactca

SEQ ID NO: 1214 - DNA, 17 bp, Homo sapiens
  source 1..17: mol_type = genomic DNA
aagaactgctaactcat

SEQ ID NO: 1215 - DNA, 18 bp, Homo sapiens
  source 1..18: mol_type = genomic DNA
aagaactgctaactcatg

SEQ ID NO: 1216 - DNA, 19 bp, Homo sapiens
  source 1..19: mol_type = genomic DNA
aagaactgctaactcatgc

SEQ ID NO: 1217 - DNA, 20 bp, Homo sapiens
  source 1..20: mol_type = genomic DNA
aagaactgctaactcatgcc

SEQ ID NO: 1218 - DNA, 21 bp, Homo sapiens
  source 1..21: mol_type = genomic DNA
aagaactgctaactcatgccc

SEQ ID NO: 1219 - DNA, 22 bp, Homo sapiens
  source 1..22: mol_type = genomic DNA
aagaactgctaactcatgcccc

SEQ ID NO: 1220 - DNA, 23 bp, Homo sapiens
  source 1..23: mol_type = genomic DNA
aagaactgctaactcatgccccc

SEQ ID NO: 1221 - DNA, 24 bp, Homo sapiens
  source 1..24: mol_type = genomic DNA
aagaactgctaactcatgccccca

SEQ ID NO: 1222 - DNA, 25 bp, Homo sapiens
  source 1..25: mol_type = genomic DNA
aagaactgctaactcatgcccccat

SEQ ID NO: 1223 - DNA, 26 bp, Homo sapiens
  source 1..26: mol_type = genomic DNA
aagaactgctaactcatgcccccatg

SEQ ID NO: 1224 - DNA, 27 bp, Homo sapiens
  source 1..27: mol_type = genomic DNA
aagaactgctaactcatgcccccatgt

SEQ ID NO: 1225 - DNA, 28 bp, Homo sapiens
  source 1..28: mol_type = genomic DNA
aagaactgctaactcatgcccccatgtc

SEQ ID NO: 1226 - DNA, 29 bp, Homo sapiens
  source 1..29: mol_type = genomic DNA
aagaactgctaactcatgcccccatgtct

SEQ ID NO: 1227 - DNA, 30 bp, Homo sapiens
  source 1..30: mol_type = genomic DNA
aagaactgctaactcatgcccccatgtcta

SEQ ID NO: 1228 - DNA, 31 bp, Homo sapiens
  source 1..31: mol_type = genomic DNA
aagaactgctaactcatgcccccatgtctaa

SEQ ID NO: 1229 - DNA, 32 bp, Homo sapiens
  source 1..32: mol_type = genomic DNA
aagaactgctaactcatgcccccatgtctaac

SEQ ID NO: 1230 - DNA, 33 bp, Homo sapiens
  source 1..33: mol_type = genomic DNA
aagaactgctaactcatgcccccatgtctaaca

SEQ ID NO: 1231 - DNA, 34 bp, Homo sapiens
  source 1..34: mol_type = genomic DNA
aagaactgctaactcatgcccccatgtctaacaa

SEQ ID NO: 1232 - DNA, 35 bp, Homo sapiens
  source 1..35: mol_type = genomic DNA
aagaactgctaactcatgcccccatgtctaacaac

SEQ ID NO: 1233 - DNA, 36 bp, Homo sapiens
  source 1..36: mol_type = genomic DNA
aagaactgctaactcatgcccccatgtctaacaaca

SEQ ID NO: 1234 - DNA, 37 bp, Homo sapiens
  source 1..37: mol_type = genomic DNA
aagaactgctaactcatgcccccatgtctaacaacat

SEQ ID NO: 1235 - DNA, 38 bp, Homo sapiens
  source 1..38: mol_type = genomic DNA
aagaactgctaactcatgcccccatgtctaacaacatg

SEQ ID NO: 1236 - DNA, 39 bp, Homo sapiens
  source 1..39: mol_type = genomic DNA
aagaactgctaactcatgcccccatgtctaacaacatgg

SEQ ID NO: 1237 - DNA, 40 bp, Homo sapiens
  source 1..40: mol_type = genomic DNA
aagaactgctaactcatgcccccatgtctaacaacatggc

SEQ ID NO: 1238 - DNA, 41 bp, Homo sapiens
  source 1..41: mol_type = genomic DNA
aagaactgctaactcatgcccccatgtctaacaacatggct

SEQ ID NO: 1239 - DNA, 42 bp, Homo sapiens
  source 1..42: mol_type = genomic DNA
aagaactgctaactcatgcccccatgtctaacaacatggctt

SEQ ID NO: 1240 - DNA, 43 bp, Homo sapiens
  source 1..43: mol_type = genomic DNA
aagaactgctaactcatgcccccatgtctaacaacatggcttt

SEQ ID NO: 1241 - DNA, 44 bp, Homo sapiens
  source 1..44: mol_type = genomic DNA
aagaactgctaactcatgcccccatgtctaacaacatggctttc

SEQ ID NO: 1242 - DNA, 45 bp, Homo sapiens
  source 1..45: mol_type = genomic DNA
aagaactgctaactcatgcccccatgtctaacaacatggctttct

SEQ ID NO: 1243 - DNA, 46 bp, Homo sapiens
  source 1..46: mol_type = genomic DNA
aagaactgctaactcatgcccccatgtctaacaacatggctttctc

SEQ ID NO: 1244 - DNA, 47 bp, Homo sapiens
  source 1..47: mol_type = genomic DNA
aagaactgctaactcatgcccccatgtctaacaacatggctttctca

SEQ ID NO: 1245 - DNA, 48 bp, Homo sapiens
  source 1..48: mol_type = genomic DNA
aagaactgctaactcatgcccccatgtctaacaacatggctttctcac

SEQ ID NO: 1246 - DNA, 17 bp, Homo sapiens
  source 1..17: mol_type = genomic DNA
aagaagcagcttcaaac

SEQ ID NO: 1247 - DNA, 18 bp, Homo sapiens
  source 1..18: mol_type = genomic DNA
aagaagcagcttcaaacc

SEQ ID NO: 1248 - DNA, 19 bp, Homo sapiens
  source 1..19: mol_type = genomic DNA
aagaagcagcttcaaacct

SEQ ID NO: 1249 - DNA, 20 bp, Homo sapiens
  source 1..20: mol_type = genomic DNA
aagaagcagcttcaaacctg

SEQ ID NO: 1250 - DNA, 26 bp, Homo sapiens
  source 1..26: mol_type = genomic DNA
aagaagcagcttcaaacctgccgggg

SEQ ID NO: 1251 - DNA, 27 bp, Homo sapiens
  source 1..27: mol_type = genomic DNA
aagaagcagcttcaaacctgccggggc

SEQ ID NO: 1252 - DNA, 28 bp, Homo sapiens
  source 1..28: mol_type = genomic DNA
aagaagcagcttcaaacctgccggggct

SEQ ID NO: 1253 - DNA, 29 bp, Homo sapiens
  source 1..29: mol_type = genomic DNA
aagaagcagcttcaaacctgccggggctt

SEQ ID NO: 1254 - DNA, 30 bp, Homo sapiens
  source 1..30: mol_type = genomic DNA
aagaagcagcttcaaacctgccggggcttc

SEQ ID NO: 1255 - DNA, 31 bp, Homo sapiens
  source 1..31: mol_type = genomic DNA
aagaagcagcttcaaacctgccggggcttcc

SEQ ID NO: 1256 - DNA, 32 bp, Homo sapiens
  source 1..32: mol_type = genomic DNA
aagaagcagcttcaaacctgccggggcttcca

SEQ ID NO: 1257 - DNA, 16 bp, Homo sapiens
  source 1..16: mol_type = genomic DNA
aagacaggggttaggc

SEQ ID NO: 1258 - DNA, 17 bp, Homo sapiens
  source 1..17: mol_type = genomic DNA
aagacaggggttaggcc

SEQ ID NO: 1259 - DNA, 18 bp, Homo sapiens
  source 1..18: mol_type = genomic DNA
aagacaggggttaggcct

SEQ ID NO: 1260 - DNA, 19 bp, Homo sapiens
  source 1..19: mol_type = genomic DNA
aagacaggggttaggcctc

SEQ ID NO: 1261 - DNA, 20 bp, Homo sapiens
  source 1..20: mol_type = genomic DNA
aagacaggggttaggcctct

SEQ ID NO: 1262 - DNA, 21 bp, Homo sapiens
  source 1..21: mol_type = genomic DNA
aagacaggggttaggcctctt

SEQ ID NO: 1263 - DNA, 22 bp, Homo sapiens
  source 1..22: mol_type = genomic DNA
aagacaggggttaggcctcttt

SEQ ID NO: 1264 - DNA, 24 bp, Homo sapiens
  source 1..24: mol_type = genomic DNA
aagacaggggttaggcctcttttt

SEQ ID NO: 1265 - DNA, 27 bp, Homo sapiens
  source 1..27: mol_type = genomic DNA
aagacaggggttaggcctctttttacc

SEQ ID NO: 1266 - DNA, 28 bp, Homo sapiens
  source 1..28: mol_type = genomic DNA
aagacaggggttaggcctctttttacca

SEQ ID NO: 1267 - DNA, 29 bp, Homo sapiens
  source 1..29: mol_type = genomic DNA
aagacaggggttaggcctctttttaccac

SEQ ID NO: 1268 - DNA, 30 bp, Homo sapiens
  source 1..30: mol_type = genomic DNA
aagacaggggttaggcctctttttaccacc

SEQ ID NO: 1269 - DNA, 31 bp, Homo sapiens
  source 1..31: mol_type = genomic DNA
aagacaggggttaggcctctttttaccacca

SEQ ID NO: 1270 - DNA, 16 bp, Homo sapiens
  source 1..16: mol_type = genomic DNA
aagactttttctctga

SEQ ID NO: 1271 - DNA, 17 bp, Homo sapiens
  source 1..17: mol_type = genomic DNA
aagactttttctctgac

SEQ ID NO: 1272 - DNA, 18 bp, Homo sapiens
  source 1..18: mol_type = genomic DNA
aagactttttctctgacc

SEQ ID NO: 1273 - DNA, 19 bp, Homo sapiens
  source 1..19: mol_type = genomic DNA
aagactttttctctgacca

SEQ ID NO: 1274 - DNA, 16 bp, Homo sapiens
  source 1..16: mol_type = genomic DNA
aagagaaccaacacct

SEQ ID NO: 1275 - DNA, 17 bp, Homo sapiens
  source 1..17: mol_type = genomic DNA
aagagaaccaacacctc

SEQ ID NO: 1276 - DNA, 18 bp, Homo sapiens
  source 1..18: mol_type = genomic DNA
aagagaaccaacacctct

SEQ ID NO: 1277 - DNA, 20 bp, Homo sapiens
  source 1..20: mol_type = genomic DNA
aagagaaccaacacctcttt

SEQ ID NO: 1278 - DNA, 21 bp, Homo sapiens
  source 1..21: mol_type = genomic DNA
aagagaaccaacacctcttta

SEQ ID NO: 1279 - DNA, 26 bp, Homo sapiens
  source 1..26: mol_type = genomic DNA
aagagaaccaacacctctttacagtg

SEQ ID NO: 1280 - DNA, 27 bp, Homo sapiens
  source 1..27: mol_type = genomic DNA
aagagaaccaacacctctttacagtga

SEQ ID NO: 1281 - DNA, 28 bp, Homo sapiens
  source 1..28: mol_type = genomic DNA
aagagaaccaacacctctttacagtgac

SEQ ID NO: 1282 - DNA, 29 bp, Homo sapiens
  source 1..29: mol_type = genomic DNA
aagagaaccaacacctctttacagtgacc

SEQ ID NO: 1283 - DNA, 30 bp, Homo sapiens
  source 1..30: mol_type = genomic DNA
aagagaaccaacacctctttacagtgacca

SEQ ID NO: 1284 - DNA, 18 bp, Homo sapiens
  source 1..18: mol_type = genomic DNA
aagagccttcaaagccct

SEQ ID NO: 1285 - DNA, 26 bp, Homo sapiens
  source 1..26: mol_type = genomic DNA
aagagccttcaaagccctcagtaagt

SEQ ID NO: 1286 - DNA, 29 bp, Homo sapiens
  source 1..29: mol_type = genomic DNA
aagagccttcaaagccctcagtaagttgc

SEQ ID NO: 1287 - DNA, 30 bp, Homo sapiens
  source 1..30: mol_type = genomic DNA
aagagccttcaaagccctcagtaagttgca

SEQ ID NO: 1288 - DNA, 46 bp, Homo sapiens
  source 1..46: mol_type = genomic DNA
aagagccttcaaagccctcagtaagttgcaatacttaatttctgcc

SEQ ID NO: 1289 - DNA, 47 bp, Homo sapiens
  source 1..47: mol_type = genomic DNA
aagagccttcaaagccctcagtaagttgcaatacttaatttctgcca

SEQ ID NO: 1290 - DNA, 16 bp, Homo sapiens
  source 1..16: mol_type = genomic DNA
aagaggtccccggttc

SEQ ID NO: 1291 - DNA, 17 bp, Homo sapiens
  source 1..17: mol_type = genomic DNA
aagaggtccccggttca

SEQ ID NO: 1292 - DNA, 27 bp, Homo sapiens
  source 1..27: mol_type = genomic DNA
aagaggtccccggttcaaatccgggtg

SEQ ID NO: 1293 - DNA, 33 bp, Homo sapiens
  source 1..33: mol_type = genomic DNA
aagaggtccccggttcaaatccgggtgccccct

SEQ ID NO: 1294 - DNA, 34 bp, Homo sapiens
  source 1..34: mol_type = genomic DNA
aagaggtccccggttcaaatccgggtgccccctc

SEQ ID NO: 1295 - DNA, 35 bp, Homo sapiens
  source 1..35: mol_type = genomic DNA
aagaggtccccggttcaaatccgggtgccccctcc

SEQ ID NO: 1296 - DNA, 16 bp, Homo sapiens
  source 1..16: mol_type = genomic DNA
aagaggtccctggttc

SEQ ID NO: 1297 - DNA, 35 bp, Homo sapiens
  source 1..35: mol_type = genomic DNA
aagaggtccctggttcaaatccgggtgccccctcc

SEQ ID NO: 1298 - DNA, 17 bp, Homo sapiens
  source 1..17: mol_type = genomic DNA
aagagttactttgatag

SEQ ID NO: 1299 - DNA, 18 bp, Homo sapiens
  source 1..18: mol_type = genomic DNA
aagagttactttgataga

SEQ ID NO: 1300 - DNA, 19 bp, Homo sapiens
  source 1..19: mol_type = genomic DNA
aagagttactttgatagag

SEQ ID NO: 1301 - DNA, 20 bp, Homo sapiens
  source 1..20: mol_type = genomic DNA
aagagttactttgatagagt

SEQ ID NO: 1302 - DNA, 33 bp, Homo sapiens
  source 1..33: mol_type = genomic DNA
aagagttactttgatagagtaaataataggagc

SEQ ID NO: 1303 - DNA, 34 bp, Homo sapiens
  source 1..34: mol_type = genomic DNA
aagagttactttgatagagtaaataataggagct

SEQ ID NO: 1304 - DNA, 35 bp, Homo sapiens
  source 1..35: mol_type = genomic DNA
aagagttactttgatagagtaaataataggagctt

SEQ ID NO: 1305 - DNA, 16 bp, Homo sapiens
  source 1..16: mol_type = genomic DNA
aagatccaatggacat

SEQ ID NO: 1306 - DNA, 33 bp, Homo sapiens
  source 1..33: mol_type = genomic DNA
aagatcgcgggttcgaaccccgtccgtgcctcc

SEQ ID NO: 1307 - DNA, 16 bp, Homo sapiens
  source 1..16: mol_type = genomic DNA
aagatggcagagcccg

SEQ ID NO: 1308 - DNA, 17 bp, Homo sapiens
  source 1..17: mol_type = genomic DNA
aagatggcagagcccgg

SEQ ID NO: 1309 - DNA, 18 bp, Homo sapiens
  source 1..18: mol_type = genomic DNA
aagatggcagagcccggt

SEQ ID NO: 1310 - DNA, 19 bp, Homo sapiens
  source 1..19: mol_type = genomic DNA
aagatggcagagcccggta

SEQ ID NO: 1311 - DNA, 20 bp, Homo sapiens
  source 1..20: mol_type = genomic DNA
aagatggcagagcccggtaa

SEQ ID NO: 1312 - DNA, 21 bp, Homo sapiens
  source 1..21: mol_type = genomic DNA
aagatggcagagcccggtaat

SEQ ID NO: 1313 - DNA, 22 bp, Homo sapiens
  source 1..22: mol_type = genomic DNA
aagatggcagagcccggtaatc

SEQ ID NO: 1314 - DNA, 23 bp, Homo sapiens
  source 1..23: mol_type = genomic DNA
aagatggcagagcccggtaatcg

SEQ ID NO: 1315 - DNA, 26 bp, Homo sapiens
  source 1..26: mol_type = genomic DNA
aagatggcagagcccggtaatcgcat

SEQ ID NO: 1316 - DNA, 27 bp, Homo sapiens
  source 1..27: mol_type = genomic DNA
aagatggcagagcccggtaatcgcata

SEQ ID NO: 1317 - DNA, 28 bp, Homo sapiens
  source 1..28: mol_type = genomic DNA
aagatggcagagcccggtaatcgcataa

SEQ ID NO: 1318 - DNA, 29 bp, Homo sapiens
  source 1..29: mol_type = genomic DNA
aagatggcagagcccggtaatcgcataaa

SEQ ID NO: 1319 - DNA, 30 bp, Homo sapiens
  source 1..30: mol_type = genomic DNA
aagatggcagagcccggtaatcgcataaaa

SEQ ID NO: 1320 - DNA, 31 bp, Homo sapiens
  source 1..31: mol_type = genomic DNA
aagatggcagagcccggtaatcgcataaaac

SEQ ID NO: 1321 - DNA, 34 bp, Homo sapiens
  source 1..34: mol_type = genomic DNA
aagatggcagagcccggtaatcgcataaaactta

SEQ ID NO: 1322 - DNA, 35 bp, Homo sapiens
  source 1..35: mol_type = genomic DNA
aagatggcagagcccggtaatcgcataaaacttaa

SEQ ID NO: 1323 - DNA, 36 bp, Homo sapiens
  source 1..36: mol_type = genomic DNA
aagatggcagagcccggtaatcgcataaaacttaaa

SEQ ID NO: 1324 - DNA, 37 bp, Homo sapiens
  source 1..37: mol_type = genomic DNA
aagatggcagagcccggtaatcgcataaaacttaaaa

SEQ ID NO: 1325 - DNA, 38 bp, Homo sapiens
  source 1..38: mol_type = genomic DNA
aagatggcagagcccggtaatcgcataaaacttaaaac

SEQ ID NO: 1326 - DNA, 39 bp, Homo sapiens
  source 1..39: mol_type = genomic DNA
aagatggcagagcccggtaatcgcataaaacttaaaact

SEQ ID NO: 1327 - DNA, 40 bp, Homo sapiens
  source 1..40: mol_type = genomic DNA
aagatggcagagcccggtaatcgcataaaacttaaaactt

SEQ ID NO: 1328 - DNA, 44 bp, Homo sapiens
  source 1..44: mol_type = genomic DNA
aagatggcagagcccggtaatcgcataaaacttaaaactttaca

SEQ ID NO: 1329 - DNA, 16 bp, Homo sapiens
  source 1..16: mol_type = genomic DNA
aagattaagagaacca

SEQ ID NO: 1330 - DNA, 17 bp, Homo sapiens
  source 1..17: mol_type = genomic DNA
aagattaagagaaccaa

SEQ ID NO: 1331 - DNA, 18 bp, Homo sapiens
  source 1..18: mol_type = genomic DNA
aagattaagagaaccaac

SEQ ID NO: 1332 - DNA, 19 bp, Homo sapiens
  source 1..19: mol_type = genomic DNA
aagattaagagaaccaaca

SEQ ID NO: 1333 - DNA, 20 bp, Homo sapiens
  source 1..20: mol_type = genomic DNA
aagattaagagaaccaacac

SEQ ID NO: 1334 - DNA, 21 bp, Homo sapiens
  source 1..21: mol_type = genomic DNA
aagattaagagaaccaacacc

SEQ ID NO: 1335 - DNA, 22 bp, Homo sapiens
  source 1..22: mol_type = genomic DNA
aagattaagagaaccaacacct

SEQ ID NO: 1336 - DNA, 23 bp, Homo sapiens
  source 1..23: mol_type = genomic DNA
aagattaagagaaccaacacctc

SEQ ID NO: 1337 - DNA, 24 bp, Homo sapiens
  source 1..24: mol_type = genomic DNA
aagattaagagaaccaacacctct

SEQ ID NO: 1338 - DNA, 25 bp, Homo sapiens
  source 1..25: mol_type = genomic DNA
aagattaagagaaccaacacctctt

SEQ ID NO: 1339 - DNA, 26 bp, Homo sapiens
  source 1..26: mol_type = genomic DNA
aagattaagagaaccaacacctcttt

SEQ ID NO: 1340 - DNA, 27 bp, Homo sapiens
  source 1..27: mol_type = genomic DNA
aagattaagagaaccaacacctcttta

SEQ ID NO: 1341 - DNA, 28 bp, Homo sapiens
  source 1..28: mol_type = genomic DNA
aagattaagagaaccaacacctctttac

SEQ ID NO: 1342 - DNA, 30 bp, Homo sapiens
  source 1..30: mol_type = genomic DNA
aagattaagagaaccaacacctctttacag

SEQ ID NO: 1343 - DNA, 32 bp, Homo sapiens
  source 1..32: mol_type = genomic DNA
aagattaagagaaccaacacctctttacagtg

SEQ ID NO: 1344 - DNA, 33 bp, Homo sapiens
  source 1..33: mol_type = genomic DNA
aagattaagagaaccaacacctctttacagtga

SEQ ID NO: 1345 - DNA, 34 bp, Homo sapiens
  source 1..34: mol_type = genomic DNA
aagattaagagaaccaacacctctttacagtgac

SEQ ID NO: 1346 - DNA, 35 bp, Homo sapiens
  source 1..35: mol_type = genomic DNA
aagattaagagaaccaacacctctttacagtgacc

SEQ ID NO: 1347 - DNA, 36 bp, Homo sapiens
  source 1..36: mol_type = genomic DNA
aagattaagagaaccaacacctctttacagtgacca

SEQ ID NO: 1348 - DNA, 22 bp, Homo sapiens
  source 1..22: mol_type = genomic DNA
aagattccaggttcgactcctg

SEQ ID NO: 1349 - DNA, 24 bp, Homo sapiens
  source 1..24: mol_type = genomic DNA
aagattccaggttcgactcctggc

SEQ ID NO: 1350 - DNA, 26 bp, Homo sapiens
  source 1..26: mol_type = genomic DNA
aagattccaggttcgactcctggctg

SEQ ID NO: 1351 - DNA, 29 bp, Homo sapiens
  source 1..29: mol_type = genomic DNA
aagattccaggttcgactcctggctggct

SEQ ID NO: 1352 - DNA, 30 bp, Homo sapiens
  source 1..30: mol_type = genomic DNA
aagattccaggttcgactcctggctggctc

SEQ ID NO: 1353 - DNA, 31 bp, Homo sapiens
  source 1..31: mol_type = genomic DNA
aagattccaggttcgactcctggctggctcg

SEQ ID NO: 1354 - DNA, 32 bp, Homo sapiens
  source 1..32: mol_type = genomic DNA
aagattccaggttcgactcctggctggctcgc

SEQ ID NO: 1355 - DNA, 33 bp, Homo sapiens
  source 1..33: mol_type = genomic DNA
aagattccaggttcgactcctggctggctcgcc

SEQ ID NO: 1356 - DNA, 34 bp, Homo sapiens
  source 1..34: mol_type = genomic DNA
aagattccaggttcgactcctggctggctcgcca

SEQ ID NO: 1357 - DNA, 20 bp, Homo sapiens
  source 1..20: mol_type = genomic DNA
aagattcccattcttgcgac

SEQ ID NO: 1358 - DNA, 29 bp, Homo sapiens
  source 1..29: mol_type = genomic DNA
aagattctaggttcgactcctggctggct

SEQ ID NO: 1359 - DNA, 30 bp, Homo sapiens
  source 1..30: mol_type = genomic DNA
aagattctaggttcgactcctggctggctc

SEQ ID NO: 1360 - DNA, 31 bp, Homo sapiens
  source 1..31: mol_type = genomic DNA
aagattctaggttcgactcctggctggctcg

SEQ ID NO: 1361 - DNA, 32 bp, Homo sapiens
  source 1..32: mol_type = genomic DNA
aagattctaggttcgactcctggctggctcgc

SEQ ID NO: 1362 - DNA, 33 bp, Homo sapiens
  source 1..33: mol_type = genomic DNA
aagattctaggttcgactcctggctggctcgcc

SEQ ID NO: 1363 - DNA, 34 bp, Homo sapiens
  source 1..34: mol_type = genomic DNA
aagattctaggttcgactcctggctggctcgcca

SEQ ID NO: 1364 - DNA, 22 bp, Homo sapiens
  source 1..22: mol_type = genomic DNA
aagattgagggttcgaatccct

SEQ ID NO: 1365 - DNA, 33 bp, Homo sapiens
  source 1..33: mol_type = genomic DNA
aagattgagggttcgaatcccttcgtggttgcc

SEQ ID NO: 1366 - DNA, 34 bp, Homo sapiens
  source 1..34: mol_type = genomic DNA
aagattgagggttcgaatcccttcgtggttgcca

SEQ ID NO: 1367 - DNA, 19 bp, Homo sapiens
  source 1..19: mol_type = genomic DNA
aagattgagggttcgagtc

SEQ ID NO: 1368 - DNA, 22 bp, Homo sapiens
  source 1..22: mol_type = genomic DNA
aagattgagggttcgagtccct

SEQ ID NO: 1369 - DNA, 24 bp, Homo sapiens
  source 1..24: mol_type = genomic DNA
aagattgagggttcgagtcccttc

SEQ ID NO: 1370 - DNA, 31 bp, Homo sapiens
  source 1..31: mol_type = genomic DNA
aagattgagggttcgagtcccttcgtggtcg

SEQ ID NO: 1371 - DNA, 32 bp, Homo sapiens
  source 1..32: mol_type = genomic DNA
aagattgagggttcgagtcccttcgtggtcgc

SEQ ID NO: 1372 - DNA, 33 bp, Homo sapiens
  source 1..33: mol_type = genomic DNA
aagattgagggttcgagtcccttcgtggtcgcc

SEQ ID NO: 1373 - DNA, 34 bp, Homo sapiens
  source 1..34: mol_type = genomic DNA
aagattgagggttcgagtcccttcgtggtcgcca

SEQ ID NO: 1374 - DNA, 22 bp, Homo sapiens
  source 1..22: mol_type = genomic DNA
aagattgcaggttcgagtcctg

SEQ ID NO: 1375 - DNA, 24 bp, Homo sapiens
  source 1..24: mol_type = genomic DNA
aagattgcaggttcgagtcctgcc

SEQ ID NO: 1376 - DNA, 30 bp, Homo sapiens
  source 1..30: mol_type = genomic DNA
aagattgcaggttcgagtcctgccgcggtc

SEQ ID NO: 1377 - DNA, 31 bp, Homo sapiens
  source 1..31: mol_type = genomic DNA
aagattgcaggttcgagtcctgccgcggtcg

SEQ ID NO: 1378 - DNA, 32 bp, Homo sapiens
  source 1..32: mol_type = genomic DNA
aagattgcaggttcgagtcctgccgcggtcgc

SEQ ID NO: 1379 - DNA, 33 bp, Homo sapiens
  source 1..33: mol_type = genomic DNA
aagattgcaggttcgagtcctgccgcggtcgcc

SEQ ID NO: 1380 - DNA, 34 bp, Homo sapiens
  source 1..34: mol_type = genomic DNA
aagattgcaggttcgagtcctgccgcggtcgcca

SEQ ID NO: 1381 - DNA, 30 bp, Homo sapiens
  source 1..30: mol_type = genomic DNA
aagcaatacactgaaaatgtttagacgggc

SEQ ID NO: 1382 - DNA, 31 bp, Homo sapiens
  source 1..31: mol_type = genomic DNA
aagcaatacactgaaaatgtttagacgggct

SEQ ID NO: 1383 - DNA, 32 bp, Homo sapiens
  source 1..32: mol_type = genomic DNA
aagcaatacactgaaaatgtttagacgggctc

SEQ ID NO: 1384 - DNA, 33 bp, Homo sapiens
  source 1..33: mol_type = genomic DNA
aagcaatacactgaaaatgtttagacgggctca

SEQ ID NO: 1385 - DNA, 34 bp, Homo sapiens
  source 1..34: mol_type = genomic DNA
aagcaatacactgaaaatgtttagacgggctcac

SEQ ID NO: 1386 - DNA, 35 bp, Homo sapiens
  source 1..35: mol_type = genomic DNA
aagcaatacactgaaaatgtttagacgggctcaca

SEQ ID NO: 1387 - DNA, 37 bp, Homo sapiens
  source 1..37: mol_type = genomic DNA
aagcaatacactgaaaatgtttagacgggctcacatc

SEQ ID NO: 1388 - DNA, 40 bp, Homo sapiens
  source 1..40: mol_type = genomic DNA
aagcaatacactgaaaatgtttagacgggctcacatcacc

SEQ ID NO: 1389 - DNA, 45 bp, Homo sapiens
  source 1..45: mol_type = genomic DNA
aagcaatacactgaaaatgtttagacgggctcacatcaccccata

SEQ ID NO: 1390 - DNA, 16 bp, Homo sapiens
  source 1..16: mol_type = genomic DNA
aagcacccaacttaca

SEQ ID NO: 1391 - DNA, 17 bp, Homo sapiens
  source 1..17: mol_type = genomic DNA
aagcacccaacttacac

SEQ ID NO: 1392 - DNA, 18 bp, Homo sapiens
  source 1..18: mol_type = genomic DNA
aagcacccaacttacact

SEQ ID NO: 1393 - DNA, 20 bp, Homo sapiens
  source 1..20: mol_type = genomic DNA
aagcacccaacttacactta

SEQ ID NO: 1394 - DNA, 21 bp, Homo sapiens
  source 1..21: mol_type = genomic DNA
aagcacccaacttacacttag

SEQ ID NO: 1395 - DNA, 23 bp, Homo sapiens
  source 1..23: mol_type = genomic DNA
aagcacccaacttacacttagga

SEQ ID NO: 1396 - DNA, 27 bp, Homo sapiens
  source 1..27: mol_type = genomic DNA
aagcacccaacttacacttaggagatt

SEQ ID NO: 1397 - DNA, 30 bp, Homo sapiens
  source 1..30: mol_type = genomic DNA
aagcacccaacttacacttaggagatttca

SEQ ID NO: 1398 - DNA, 31 bp, Homo sapiens
  source 1..31: mol_type = genomic DNA
aagcacccaacttacacttaggagatttcaa

SEQ ID NO: 1399 - DNA, 32 bp, Homo sapiens
  source 1..32: mol_type = genomic DNA
aagcacccaacttacacttaggagatttcaac

SEQ ID NO: 1400 - DNA, 34 bp, Homo sapiens
  source 1..34: mol_type = genomic DNA
aagcacccaacttacacttaggagatttcaactt

SEQ ID NO: 1401 - DNA, 35 bp, Homo sapiens
  source 1..35: mol_type = genomic DNA
aagcacccaacttacacttaggagatttcaactta

SEQ ID NO: 1402 - DNA, 36 bp, Homo sapiens
  source 1..36: mol_type = genomic DNA
aagcacccaacttacacttaggagatttcaacttaa

SEQ ID NO: 1403 - DNA, 37 bp, Homo sapiens
  source 1..37: mol_type = genomic DNA
aagcacccaacttacacttaggagatttcaacttaac

SEQ ID NO: 1404 - DNA, 42 bp, Homo sapiens
  source 1..42: mol_type = genomic DNA
aagcacccaacttacacttaggagatttcaacttaacttgac

SEQ ID NO: 1405 - DNA, 43 bp, Homo sapiens
  source 1..43: mol_type = genomic DNA
aagcacccaacttacacttaggagatttcaacttaacttgacc

SEQ ID NO: 1406 - DNA, 44 bp, Homo sapiens
  source 1..44: mol_type = genomic DNA
aagcacccaacttacacttaggagatttcaacttaacttgaccg

SEQ ID NO: 1407 - DNA, 39 bp, Homo sapiens
  source 1..39: mol_type = genomic DNA
aagcactctggactctgaatccagcgatccgagttcgag

SEQ ID NO: 1408 - DNA, 16 bp, Homo sapiens
  source 1..16: mol_type = genomic DNA
aagcagcttcaaacct

SEQ ID NO: 1409 - DNA, 17 bp, Homo sapiens
  source 1..17: mol_type = genomic DNA
aagcagcttcaaacctg

SEQ ID NO: 1410 - DNA, 23 bp, Homo sapiens
  source 1..23: mol_type = genomic DNA
aagcagcttcaaacctgccgggg

SEQ ID NO: 1411 - DNA, 24 bp, Homo sapiens
  source 1..24: mol_type = genomic DNA
aagcagcttcaaacctgccggggc

SEQ ID NO: 1412 - DNA, 25 bp, Homo sapiens
  source 1..25: mol_type = genomic DNA
aagcagcttcaaacctgccggggct

SEQ ID NO: 1413 - DNA, 26 bp, Homo sapiens
  source 1..26: mol_type = genomic DNA
aagcagcttcaaacctgccggggctt

SEQ ID NO: 1414 - DNA, 27 bp, Homo sapiens
  source 1..27: mol_type = genomic DNA
aagcagcttcaaacctgccggggcttc

SEQ ID NO: 1415 - DNA, 28 bp, Homo sapiens
  source 1..28: mol_type = genomic DNA
aagcagcttcaaacctgccggggcttcc

SEQ ID NO: 1416 - DNA, 29 bp, Homo sapiens
  source 1..29: mol_type = genomic DNA
aagcagcttcaaacctgccggggcttcca

SEQ ID NO: 1417 - DNA, 17 bp, Homo sapiens
  source 1..17: mol_type = genomic DNA
aagcagttgacccgggt

SEQ ID NO: 1418 - DNA, 19 bp, Homo sapiens
  source 1..19: mol_type = genomic DNA
aagcagttgacccgggttc

SEQ ID NO: 1419 - DNA, 27 bp, Homo sapiens
  source 1..27: mol_type = genomic DNA
aagcagttgacccgggttcgattcccg

SEQ ID NO: 1420 - DNA, 29 bp, Homo sapiens
  source 1..29: mol_type = genomic DNA
aagcagttgacccgggttcgattcccggc

SEQ ID NO: 1421 - DNA, 30 bp, Homo sapiens
  source 1..30: mol_type = genomic DNA
aagcagttgacccgggttcgattcccggcc

SEQ ID NO: 1422 - DNA, 31 bp, Homo sapiens
  source 1..31: mol_type = genomic DNA
aagcagttgacccgggttcgattcccggcca

SEQ ID NO: 1423 - DNA, 32 bp, Homo sapiens
  source 1..32: mol_type = genomic DNA
aagcagttgacccgggttcgattcccggccaa

SEQ ID NO: 1424 - DNA, 33 bp, Homo sapiens
  source 1..33: mol_type = genomic DNA
aagcagttgacccgggttcgattcccggccaac

SEQ ID NO: 1425 - DNA, 34 bp, Homo sapiens
  source 1..34: mol_type = genomic DNA
aagcagttgacccgggttcgattcccggccaacg

SEQ ID NO: 1426 - DNA, 35 bp, Homo sapiens
  source 1..35: mol_type = genomic DNA
aagcagttgacccgggttcgattcccggccaacgc

SEQ ID NO: 1427 - DNA, 37 bp, Homo sapiens
  source 1..37: mol_type = genomic DNA
aagcagttgacccgggttcgattcccggccaacgcac

SEQ ID NO: 1428 - DNA, 38 bp, Homo sapiens
  source 1..38: mol_type = genomic DNA
aagcagttgacccgggttcgattcccggccaacgcacc

SEQ ID NO: 1429 - DNA, 39 bp, Homo sapiens
  source 1..39: mol_type = genomic DNA
aagcagttgacccgggttcgattcccggccaacgcacca

SEQ ID NO: 1430 - DNA, 32 bp, Homo sapiens
  source 1..32: mol_type = genomic DNA
aagcatagctgccttccaagcagttgacccgg

SEQ ID NO: 1431 - DNA, 34 bp, Homo sapiens
  source 1..34: mol_type = genomic DNA
aagcatagctgccttccaagcagttgacccgggt

SEQ ID NO: 1432 - DNA, 16 bp, Homo sapiens
  source 1..16: mol_type = genomic DNA
aagcattggactgtaa

SEQ ID NO: 1433 - DNA, 17 bp, Homo sapiens
  source 1..17: mol_type = genomic DNA
aagcattggactgtaaa

SEQ ID NO: 1434 - DNA, 18 bp, Homo sapiens
  source 1..18: mol_type = genomic DNA
aagcattggactgtaaat

SEQ ID NO: 1435 - DNA, 19 bp, Homo sapiens
  source 1..19: mol_type = genomic DNA
aagcattggactgtaaatc

SEQ ID NO: 1436 - DNA, 20 bp, Homo sapiens
  source 1..20: mol_type = genomic DNA
aagcattggactgtaaatct

SEQ ID NO: 1437 - DNA, 21 bp, Homo sapiens
  source 1..21: mol_type = genomic DNA
aagcattggactgtaaatcta

SEQ ID NO: 1438 - DNA, 22 bp, Homo sapiens
  source 1..22: mol_type = genomic DNA
aagcattggactgtaaatctaa

SEQ ID NO: 1439 - DNA, 23 bp, Homo sapiens
  source 1..23: mol_type = genomic DNA
aagcattggactgtaaatctaaa

SEQ ID NO: 1440 - DNA, 24 bp, Homo sapiens
  source 1..24: mol_type = genomic DNA
aagcattggactgtaaatctaaag

SEQ ID NO: 1441 - DNA, 25 bp, Homo sapiens
  source 1..25: mol_type = genomic DNA
aagcattggactgtaaatctaaaga

SEQ ID NO: 1442 - DNA, 30 bp, Homo sapiens
  source 1..30: mol_type = genomic DNA
aagcattggactgtaaatctaaagacaggg

SEQ ID NO: 1443 - DNA, 33 bp, Homo sapiens
  source 1..33: mol_type = genomic DNA
aagcattggactgtaaatctaaagacaggggtt

SEQ ID NO: 1444 - DNA, 34 bp, Homo sapiens
  source 1..34: mol_type = genomic DNA
aagcattggactgtaaatctaaagacaggggtta

SEQ ID NO: 1445 - DNA, 36 bp, Homo sapiens
  source 1..36: mol_type = genomic DNA
aagcattggactgtaaatctaaagacaggggttagg

SEQ ID NO: 1446 - DNA, 37 bp, Homo sapiens
  source 1..37: mol_type = genomic DNA
aagcattggactgtaaatctaaagacaggggttaggc

SEQ ID NO: 1447 - DNA, 38 bp, Homo sapiens
  source 1..38: mol_type = genomic DNA
aagcattggactgtaaatctaaagacaggggttaggcc

SEQ ID NO: 1448 - DNA, 39 bp, Homo sapiens
  source 1..39: mol_type = genomic DNA
aagcattggactgtaaatctaaagacaggggttaggcct

SEQ ID NO: 1449 - DNA, 40 bp, Homo sapiens
  source 1..40: mol_type = genomic DNA
aagcattggactgtaaatctaaagacaggggttaggcctc

SEQ ID NO: 1450 - DNA, 42 bp, Homo sapiens
  source 1..42: mol_type = genomic DNA
aagcattggactgtaaatctaaagacaggggttaggcctctt

SEQ ID NO: 1451 - DNA, 43 bp, Homo sapiens
  source 1..43: mol_type = genomic DNA
aagcattggactgtaaatctaaagacaggggttaggcctcttt

SEQ ID NO: 1452 - DNA, 44 bp, Homo sapiens
  source 1..44: mol_type = genomic DNA
aagcattggactgtaaatctaaagacaggggttaggcctctttt

SEQ ID NO: 1453 - DNA, 46 bp, Homo sapiens
  source 1..46: mol_type = genomic DNA
aagcattggactgtaaatctaaagacaggggttaggcctcttttta

SEQ ID NO: 1454 - DNA, 47 bp, Homo sapiens
  source 1..47: mol_type = genomic DNA
aagcattggactgtaaatctaaagacaggggttaggcctctttttac

SEQ ID NO: 1455 - skipped

SEQ ID NO: 1456 - DNA, 16 bp, Homo sapiens
  source 1..16: mol_type = genomic DNA
aagccagggattgtgg

SEQ ID NO: 1457 - DNA, 18 bp, Homo sapiens
  source 1..18: mol_type = genomic DNA
aagccagggattgtgggt

SEQ ID NO: 1458 - DNA, 20 bp, Homo sapiens
  source 1..20: mol_type = genomic DNA
aagccagggattgtgggttc

SEQ ID NO: 1459 - DNA, 21 bp, Homo sapiens
  source 1..21: mol_type = genomic DNA
aagccagggattgtgggttcg

SEQ ID NO: 1460 - DNA, 24 bp, Homo sapiens
  source 1..24: mol_type = genomic DNA
aagccagggattgtgggttcgagt

SEQ ID NO: 1461 - DNA, 33 bp, Homo sapiens
  source 1..33: mol_type = genomic DNA
aagccagggattgtgggttcgagtcccacccgg

SEQ ID NO: 1462 - DNA, 34 bp, Homo sapiens
  source 1..34: mol_type = genomic DNA
aagccagggattgtgggttcgagtcccacccggg

SEQ ID NO: 1463 - DNA, 35 bp, Homo sapiens
  source 1..35: mol_type = genomic DNA
aagccagggattgtgggttcgagtcccacccgggg

SEQ ID NO: 1464 - DNA, 36 bp, Homo sapiens
  source 1..36: mol_type = genomic DNA
aagccagggattgtgggttcgagtcccacccggggt

SEQ ID NO: 1465 - DNA, 37 bp, Homo sapiens
  source 1..37: mol_type = genomic DNA
aagccagggattgtgggttcgagtcccacccggggta

SEQ ID NO: 1466 - DNA, 38 bp, Homo sapiens
  source 1..38: mol_type = genomic DNA
aagccagggattgtgggttcgagtcccacccggggtac

SEQ ID NO: 1467 - DNA, 39 bp, Homo sapiens
  source 1..39: mol_type = genomic DNA
aagccagggattgtgggttcgagtcccacccggggtacc

SEQ ID NO: 1468 - DNA, 40 bp, Homo sapiens
  source 1..40: mol_type = genomic DNA
aagccagggattgtgggttcgagtcccacccggggtacca

SEQ ID NO: 1469 - DNA, 37 bp, Homo sapiens
  source 1..37: mol_type = genomic DNA
aagccagggattgtgggttcgagtcccacctggggta

SEQ ID NO: 1470 - DNA, 38 bp, Homo sapiens
  source 1..38: mol_type = genomic DNA
aagccagggattgtgggttcgagtcccacctggggtac

SEQ ID NO: 1471 - DNA, 39 bp, Homo sapiens
  source 1..39: mol_type = genomic DNA
aagccagggattgtgggttcgagtcccacctggggtacc

SEQ ID NO: 1472 - DNA, 40 bp, Homo sapiens
  source 1..40: mol_type = genomic DNA
aagccagggattgtgggttcgagtcccacctggggtacca

SEQ ID NO: 1473 - DNA, 37 bp, Homo sapiens
  source 1..37: mol_type = genomic DNA
aagccagggattgtgggttcgagtcccacctggggtg

SEQ ID NO: 1474 - DNA, 38 bp, Homo sapiens
  source 1..38: mol_type = genomic DNA
aagccagggattgtgggttcgagtcccacctggggtgc

SEQ ID NO: 1475 - DNA, 39 bp, Homo sapiens
  source 1..39: mol_type = genomic DNA
aagccagggattgtgggttcgagtcccacctggggtgcc

SEQ ID NO: 1476 - DNA, 40 bp, Homo sapiens
  source 1..40: mol_type = genomic DNA
aagccagggattgtgggttcgagtcccacctggggtgcca

SEQ ID NO: 1477 - DNA, 30 bp, Homo sapiens
  source 1..30: mol_type = genomic DNA
aagccagggattgtgggttcgagtcccatc

SEQ ID NO: 1478 - DNA, 31 bp, Homo sapiens
  source 1..31: mol_type = genomic DNA
aagccagggattgtgggttcgagtcccatct

SEQ ID NO: 1479 - DNA, 32 bp, Homo sapiens
  source 1..32: mol_type = genomic DNA
aagccagggattgtgggttcgagtcccatctg

SEQ ID NO: 1480 - DNA, 33 bp, Homo sapiens
  source 1..33: mol_type = genomic DNA
aagccagggattgtgggttcgagtcccatctgg

SEQ ID NO: 1481 - DNA, 35 bp, Homo sapiens
  source 1..35: mol_type = genomic DNA
aagccagggattgtgggttcgagtcccatctgggg

SEQ ID NO: 1482 - DNA, 37 bp, Homo sapiens
  source 1..37: mol_type = genomic DNA
aagccagggattgtgggttcgagtcccatctggggtg

SEQ ID NO: 1483 - DNA, 38 bp, Homo sapiens
  source 1..38: mol_type = genomic DNA
aagccagggattgtgggttcgagtcccatctggggtgc

SEQ ID NO: 1484 - DNA, 39 bp, Homo sapiens
  source 1..39: mol_type = genomic DNA
aagccagggattgtgggttcgagtcccatctggggtgcc

SEQ ID NO: 1485 - DNA, 40 bp, Homo sapiens
  source 1..40: mol_type = genomic DNA
aagccagggattgtgggttcgagtcccatctggggtgcca

SEQ ID NO: 1486 - DNA, 29 bp, Homo sapiens
  source 1..29: mol_type = genomic DNA
aagccagttgattagggtgcttagctgtt

SEQ ID NO: 1487 - DNA, 18 bp, Homo sapiens
  source 1..18: mol_type = genomic DNA
aagccctcagtaagttgc

SEQ ID NO: 1488 - DNA, 33 bp, Homo sapiens
  source 1..33: mol_type = genomic DNA
aagccctcagtaagttgcaatacttaatttctg

SEQ ID NO: 1489 - DNA, 34 bp, Homo sapiens
  source 1..34: mol_type = genomic DNA
aagccctcagtaagttgcaatacttaatttctgc

SEQ ID NO: 1490 - DNA, 35 bp, Homo sapiens
  source 1..35: mol_type = genomic DNA
aagccctcagtaagttgcaatacttaatttctgcc

SEQ ID NO: 1491 - DNA, 36 bp, Homo sapiens
  source 1..36: mol_type = genomic DNA
aagccctcagtaagttgcaatacttaatttctgcca

SEQ ID NO: 1492 - DNA, 16 bp, Homo sapiens
  source 1..16: mol_type = genomic DNA
aagcgtgctgggccca

SEQ ID NO: 1493 - DNA, 17 bp, Homo sapiens
  source 1..17: mol_type = genomic DNA
aagcgtgctgggcccat

SEQ ID NO: 1494 - DNA, 22 bp, Homo sapiens
  source 1..22: mol_type = genomic DNA
aagcgtgctgggcccataaccc

SEQ ID NO: 1495 - DNA, 25 bp, Homo sapiens
  source 1..25: mol_type = genomic DNA
aagcgtgctgggcccataacccaga

SEQ ID NO: 1496 - DNA, 35 bp, Homo sapiens
  source 1..35: mol_type = genomic DNA
aagcgtgctgggcccataacccagaggtcgatgga

SEQ ID NO: 1497 - DNA, 36 bp, Homo sapiens
  source 1..36: mol_type = genomic DNA
aagcgtgctgggcccataacccagaggtcgatggat

SEQ ID NO: 1498 - DNA, 37 bp, Homo sapiens
  source 1..37: mol_type = genomic DNA
aagcgtgctgggcccataacccagaggtcgatggatc

SEQ ID NO: 1499 - DNA, 38 bp, Homo sapiens
  source 1..38: mol_type = genomic DNA
aagcgtgctgggcccataacccagaggtcgatggatcg

SEQ ID NO: 1500 - DNA, 16 bp, Homo sapiens
  source 1..16: mol_type = genomic DNA
aagctatcgggcccat

SEQ ID NO: 1501 - DNA, 17 bp, Homo sapiens
  source 1..17: mol_type = genomic DNA
aagctatcgggcccata

SEQ ID NO: 1502 - DNA, 18 bp, Homo sapiens
  source 1..18: mol_type = genomic DNA
aagctatcgggcccatac

SEQ ID NO: 1503 - DNA, 19 bp, Homo sapiens
  source 1..19: mol_type = genomic DNA
aagctatcgggcccatacc

SEQ ID NO: 1504 - DNA, 20 bp, Homo sapiens
  source 1..20: mol_type = genomic DNA
aagctatcgggcccataccc

SEQ ID NO: 1505 - DNA, 21 bp, Homo sapiens
  source 1..21: mol_type = genomic DNA
aagctatcgggcccatacccc

SEQ ID NO: 1506 - DNA, 22 bp, Homo sapiens
  source 1..22: mol_type = genomic DNA
aagctatcgggcccataccccg

SEQ ID NO: 1507 - DNA, 23 bp, Homo sapiens
  source 1..23: mol_type = genomic DNA
aagctatcgggcccataccccga

SEQ ID NO: 1508 - DNA, 24 bp, Homo sapiens
  source 1..24: mol_type = genomic DNA
aagctatcgggcccataccccgaa

SEQ ID NO: 1509 - DNA, 25 bp, Homo sapiens
  source 1..25: mol_type = genomic DNA
aagctatcgggcccataccccgaaa

SEQ ID NO: 1510 - DNA, 26 bp, Homo sapiens
  source 1..26: mol_type = genomic DNA
aagctatcgggcccataccccgaaaa

SEQ ID NO: 1511 - DNA, 27 bp, Homo sapiens
  source 1..27: mol_type = genomic DNA
aagctatcgggcccataccccgaaaat

SEQ ID NO: 1512 - DNA, 28 bp, Homo sapiens
  source 1..28: mol_type = genomic DNA
aagctatcgggcccataccccgaaaatg

SEQ ID NO: 1513 - DNA, 29 bp, Homo sapiens
  source 1..29: mol_type = genomic DNA
aagctatcgggcccataccccgaaaatgt

SEQ ID NO: 1514 - DNA, 30 bp, Homo sapiens
  source 1..30: mol_type = genomic DNA
aagctatcgggcccataccccgaaaatgtt

SEQ ID NO: 1515 - DNA, 32 bp, Homo sapiens
  source 1..32: mol_type = genomic DNA
aagctatcgggcccataccccgaaaatgttgg

SEQ ID NO: 1516 - DNA, 33 bp, Homo sapiens
  source 1..33: mol_type = genomic DNA
aagctatcgggcccataccccgaaaatgttggt

SEQ ID NO: 1517 - DNA, 34 bp, Homo sapiens
  source 1..34: mol_type = genomic DNA
aagctatcgggcccataccccgaaaatgttggtt

SEQ ID NO: 1518 - DNA, 35 bp, Homo sapiens
  source 1..35: mol_type = genomic DNA
aagctatcgggcccataccccgaaaatgttggtta

SEQ ID NO: 1519 - DNA, 36 bp, Homo sapiens
  source 1..36: mol_type = genomic DNA
aagctatcgggcccataccccgaaaatgttggttat

SEQ ID NO: 1520 - DNA, 37 bp, Homo sapiens
  source 1..37: mol_type = genomic DNA
aagctatcgggcccataccccgaaaatgttggttata

SEQ ID NO: 1521 - DNA, 38 bp, Homo sapiens
  source 1..38: mol_type = genomic DNA
aagctatcgggcccataccccgaaaatgttggttatac

SEQ ID NO: 1522 - DNA, 40 bp, Homo sapiens
  source 1..40: mol_type = genomic DNA
aagctatcgggcccataccccgaaaatgttggttataccc

SEQ ID NO: 1523 - DNA, 41 bp, Homo sapiens
  source 1..41: mol_type = genomic DNA
aagctatcgggcccataccccgaaaatgttggttataccct

SEQ ID NO: 1524 - DNA, 16 bp, Homo sapiens
  source 1..16: mol_type = genomic DNA
aagctcacaagaactg

SEQ ID NO: 1525 - DNA, 17 bp, Homo sapiens
  source 1..17: mol_type = genomic DNA
aagctcacaagaactgc

SEQ ID NO: 1526 - DNA, 18 bp, Homo sapiens
  source 1..18: mol_type = genomic DNA
aagctcacaagaactgct

SEQ ID NO: 1527 - DNA, 19 bp, Homo sapiens
  source 1..19: mol_type = genomic DNA
aagctcacaagaactgcta

SEQ ID NO: 1528 - DNA, 20 bp, Homo sapiens
  source 1..20: mol_type = genomic DNA
aagctcacaagaactgctaa

SEQ ID NO: 1529 - DNA, 21 bp, Homo sapiens
  source 1..21: mol_type = genomic DNA
aagctcacaagaactgctaac

SEQ ID NO: 1530 - DNA, 22 bp, Homo sapiens
  source 1..22: mol_type = genomic DNA
aagctcacaagaactgctaact

SEQ ID NO: 1531 - DNA, 23 bp, Homo sapiens
  source 1..23: mol_type = genomic DNA
aagctcacaagaactgctaactc

SEQ ID NO: 1532 - DNA, 24 bp, Homo sapiens
  source 1..24: mol_type = genomic DNA
aagctcacaagaactgctaactca

SEQ ID NO: 1533 - DNA, 25 bp, Homo sapiens
  source 1..25: mol_type = genomic DNA
aagctcacaagaactgctaactcat

SEQ ID NO: 1534 - DNA, 26 bp, Homo sapiens
  source 1..26: mol_type = genomic DNA
aagctcacaagaactgctaactcatg

SEQ ID NO: 1535 - DNA, 27 bp, Homo sapiens
  source 1..27: mol_type = genomic DNA
aagctcacaagaactgctaactcatgc

SEQ ID NO: 1536 - DNA, 28 bp, Homo sapiens
  source 1..28: mol_type = genomic DNA
aagctcacaagaactgctaactcatgcc

SEQ ID NO: 1537 - DNA, 29 bp, Homo sapiens
  source 1..29: mol_type = genomic DNA
aagctcacaagaactgctaactcatgccc

SEQ ID NO: 1538 - DNA, 30 bp, Homo sapiens
  source 1..30: mol_type = genomic DNA
aagctcacaagaactgctaactcatgcccc

SEQ ID NO: 1539 - DNA, 31 bp, Homo sapiens
  source 1..31: mol_type = genomic DNA
aagctcacaagaactgctaactcatgccccc

SEQ ID NO: 1540 - DNA, 32 bp, Homo sapiens
  source 1..32: mol_type = genomic DNA
aagctcacaagaactgctaactcatgccccca

SEQ ID NO: 1541 - DNA, 33 bp, Homo sapiens
  source 1..33: mol_type = genomic DNA
aagctcacaagaactgctaactcatgcccccat

SEQ ID NO: 1542 - DNA, 34 bp, Homo sapiens
  source 1..34: mol_type = genomic DNA
aagctcacaagaactgctaactcatgcccccatg

SEQ ID NO: 1543 - DNA, 35 bp, Homo sapiens
  source 1..35: mol_type = genomic DNA
aagctcacaagaactgctaactcatgcccccatgt

SEQ ID NO: 1544 - DNA, 36 bp, Homo sapiens
  source 1..36: mol_type = genomic DNA
aagctcacaagaactgctaactcatgcccccatgtc

SEQ ID NO: 1545 - DNA, 37 bp, Homo sapiens
  source 1..37: mol_type = genomic DNA
aagctcacaagaactgctaactcatgcccccatgtct

SEQ ID NO: 1546 - DNA, 39 bp, Homo sapiens
  source 1..39: mol_type = genomic DNA
aagctcacaagaactgctaactcatgcccccatgtctaa

SEQ ID NO: 1547 - DNA, 40 bp, Homo sapiens
  source 1..40: mol_type = genomic DNA
aagctcacaagaactgctaactcatgcccccatgtctaac

SEQ ID NO: 1548 - DNA, 41 bp, Homo sapiens
  source 1..41: mol_type = genomic DNA
aagctcacaagaactgctaactcatgcccccatgtctaaca

SEQ ID NO: 1549 - DNA, 42 bp, Homo sapiens
  source 1..42: mol_type = genomic DNA
aagctcacaagaactgctaactcatgcccccatgtctaacaa

SEQ ID NO: 1550 - DNA, 43 bp, Homo sapiens
  source 1..43: mol_type = genomic DNA
aagctcacaagaactgctaactcatgcccccatgtctaacaac

SEQ ID NO: 1551 - DNA, 44 bp, Homo sapiens
  source 1..44: mol_type = genomic DNA
aagctcacaagaactgctaactcatgcccccatgtctaacaaca

SEQ ID NO: 1552 - DNA, 45 bp, Homo sapiens
  source 1..45: mol_type = genomic DNA
aagctcacaagaactgctaactcatgcccccatgtctaacaacat

SEQ ID NO: 1553 - DNA, 46 bp, Homo sapiens
  source 1..46: mol_type = genomic DNA
aagctcacaagaactgctaactcatgcccccatgtctaacaacatg

SEQ ID NO: 1554 - DNA, 47 bp, Homo sapiens
  source 1..47: mol_type = genomic DNA
aagctcacaagaactgctaactcatgcccccatgtctaacaacatgg

SEQ ID NO: 1555 - DNA, 48 bp, Homo sapiens
  source 1..48: mol_type = genomic DNA
aagctcacaagaactgctaactcatgcccccatgtctaacaacatggc

SEQ ID NO: 1556 - DNA, 16 bp, Homo sapiens
  source 1..16: mol_type = genomic DNA
aaggataacagctatc

SEQ ID NO: 1557 - DNA, 19 bp, Homo sapiens
  source 1..19: mol_type = genomic DNA
aaggataacagctatccat

SEQ ID NO: 1558 - DNA, 21 bp, Homo sapiens
  source 1..21: mol_type = genomic DNA
aaggataacagctatccattg

SEQ ID NO: 1559 - DNA, 24 bp, Homo sapiens
  source 1..24: mol_type = genomic DNA
aaggataacagctatccattggtc

SEQ ID NO: 1560 - DNA, 25 bp, Homo sapiens
  source 1..25: mol_type = genomic DNA
aaggataacagctatccattggtct

SEQ ID NO: 1561 - DNA, 26 bp, Homo sapiens
  source 1..26: mol_type = genomic DNA
aaggataacagctatccattggtctt

SEQ ID NO: 1562 - DNA, 27 bp, Homo sapiens
  source 1..27: mol_type = genomic DNA
aaggataacagctatccattggtctta

SEQ ID NO: 1563 - DNA, 28 bp, Homo sapiens
  source 1..28: mol_type = genomic DNA
aaggataacagctatccattggtcttag

SEQ ID NO: 1564 - DNA, 34 bp, Homo sapiens
  source 1..34: mol_type = genomic DNA
aaggataacagctatccattggtcttaggcccca

SEQ ID NO: 1565 - DNA, 22 bp, Homo sapiens
  source 1..22: mol_type = genomic DNA
aaggcatcagcctccggagctg

SEQ ID NO: 1566 - DNA, 30 bp, Homo sapiens
  source 1..30: mol_type = genomic DNA
aaggcatcagcctccggagctggggattgt

SEQ ID NO: 1567 - DNA, 16 bp, Homo sapiens
  source 1..16: mol_type = genomic DNA
aaggcgccagactcaa

SEQ ID NO: 1568 - DNA, 16 bp, Homo sapiens
  source 1..16: mol_type = genomic DNA
aaggcgctgcgttcag

SEQ ID NO: 1569 - DNA, 16 bp, Homo sapiens
  source 1..16: mol_type = genomic DNA
aaggcgctggatttag

SEQ ID NO: 1570 - DNA, 24 bp, Homo sapiens
  source 1..24: mol_type = genomic DNA
aaggcgtctgacttcggatcagaa

SEQ ID NO: 1571 - DNA, 18 bp, Homo sapiens
  source 1..18: mol_type = genomic DNA
aaggctgcgtgttcgaat

SEQ ID NO: 1572 - DNA, 22 bp, Homo sapiens
  source 1..22: mol_type = genomic DNA
aaggctgcgtgttcgaatcacg

SEQ ID NO: 1573 - DNA, 26 bp, Homo sapiens
  source 1..26: mol_type = genomic DNA
aaggctgcgtgttcgaatcacgtcgg

SEQ ID NO: 1574 - DNA, 28 bp, Homo sapiens
  source 1..28: mol_type = genomic DNA
aaggctgcgtgttcgaatcacgtcgggg

SEQ ID NO: 1575 - DNA, 30 bp, Homo sapiens
  source 1..30: mol_type = genomic DNA
aaggctgcgtgttcgaatcacgtcggggtc

SEQ ID NO: 1576 - DNA, 33 bp, Homo sapiens
  source 1..33: mol_type = genomic DNA
aaggctgcgtgttcgaatcacgtcggggtcacc

SEQ ID NO: 1577 - DNA, 34 bp, Homo sapiens
  source 1..34: mol_type = genomic DNA
aaggctgcgtgttcgaatcacgtcggggtcacca

SEQ ID NO: 1578 - DNA, 16 bp, Homo sapiens
  source 1..16: mol_type = genomic DNA
aagggcttagcttaat

SEQ ID NO: 1579 - DNA, 17 bp, Homo sapiens
  source 1..17: mol_type = genomic DNA
aagggcttagcttaatt

SEQ ID NO: 1580 - DNA, 18 bp, Homo sapiens
  source 1..18: mol_type = genomic DNA
aagggcttagcttaatta

SEQ ID NO: 1581 - DNA, 19 bp, Homo sapiens
  source 1..19: mol_type = genomic DNA
aagggcttagcttaattaa

SEQ ID NO: 1582 - DNA, 20 bp, Homo sapiens
  source 1..20: mol_type = genomic DNA
aagggcttagcttaattaaa

SEQ ID NO: 1583 - DNA, 21 bp, Homo sapiens
  source 1..21: mol_type = genomic DNA
aagggcttagcttaattaaag

SEQ ID NO: 1584 - DNA, 22 bp, Homo sapiens
  source 1..22: mol_type = genomic DNA
aagggcttagcttaattaaagt

SEQ ID NO: 1585 - DNA, 23 bp, Homo sapiens
  source 1..23: mol_type = genomic DNA
aagggcttagcttaattaaagtg

SEQ ID NO: 1586 - DNA, 24 bp, Homo sapiens
  source 1..24: mol_type = genomic DNA
aagggcttagcttaattaaagtgg

SEQ ID NO: 1587 - DNA, 25 bp, Homo sapiens
  source 1..25: mol_type = genomic DNA
aagggcttagcttaattaaagtggc

SEQ ID NO: 1588 - DNA, 26 bp, Homo sapiens
  source 1..26: mol_type = genomic DNA
aagggcttagcttaattaaagtggct

SEQ ID NO: 1589 - DNA, 27 bp, Homo sapiens
  source 1..27: mol_type = genomic DNA
aagggcttagcttaattaaagtggctg

SEQ ID NO: 1590 - DNA, 28 bp, Homo sapiens
  source 1..28: mol_type = genomic DNA
aagggcttagcttaattaaagtggctga

SEQ ID NO: 1591 - DNA, 29 bp, Homo sapiens
  source 1..29: mol_type = genomic DNA
aagggcttagcttaattaaagtggctgat

SEQ ID NO: 1592 - DNA, 30 bp, Homo sapiens
  source 1..30: mol_type = genomic DNA
aagggcttagcttaattaaagtggctgatt

SEQ ID NO: 1593 - DNA, 31 bp, Homo sapiens
  source 1..31: mol_type = genomic DNA
aagggcttagcttaattaaagtggctgattt

SEQ ID NO: 1594 - DNA, 32 bp, Homo sapiens
  source 1..32: mol_type = genomic DNA
aagggcttagcttaattaaagtggctgatttg

SEQ ID NO: 1595 - DNA, 33 bp, Homo sapiens
  source 1..33: mol_type = genomic DNA
aagggcttagcttaattaaagtggctgatttgc

SEQ ID NO: 1596 - DNA, 34 bp, Homo sapiens
  source 1..34: mol_type = genomic DNA
aagggcttagcttaattaaagtggctgatttgcg

SEQ ID NO: 1597 - DNA, 35 bp, Homo sapiens
  source 1..35: mol_type = genomic DNA
aagggcttagcttaattaaagtggctgatttgcgt

SEQ ID NO: 1598 - DNA, 36 bp, Homo sapiens
  source 1..36: mol_type = genomic DNA
aagggcttagcttaattaaagtggctgatttgcgtt

SEQ ID NO: 1599 - DNA, 37 bp, Homo sapiens
  source 1..37: mol_type = genomic DNA
aagggcttagcttaattaaagtggctgatttgcgttc

SEQ ID NO: 1600 - DNA, 39 bp, Homo sapiens
  source 1..39: mol_type = genomic DNA
aagggcttagcttaattaaagtggctgatttgcgttcag

SEQ ID NO: 1601 - DNA, 40 bp, Homo sapiens
  source 1..40: mol_type = genomic DNA
aagggcttagcttaattaaagtggctgatttgcgttcagt

SEQ ID NO: 1602 - DNA, 41 bp, Homo sapiens
  source 1..41: mol_type = genomic DNA
aagggcttagcttaattaaagtggctgatttgcgttcagtt

SEQ ID NO: 1603 - DNA, 45 bp, Homo sapiens
  source 1..45: mol_type = genomic DNA
aagggcttagcttaattaaagtggctgatttgcgttcagttgatg

SEQ ID NO: 1604 - DNA, 16 bp, Homo sapiens
  source 1..16: mol_type = genomic DNA
aaggtattagaaaaac

SEQ ID NO: 1605 - DNA, 17 bp, Homo sapiens
  source 1..17: mol_type = genomic DNA
aaggtattagaaaaacc

SEQ ID NO: 1606 - DNA, 25 bp, Homo sapiens
  source 1..25: mol_type = genomic DNA
aaggtattagaaaaaccatttcata

SEQ ID NO: 1607 - DNA, 28 bp, Homo sapiens
  source 1..28: mol_type = genomic DNA
aaggtattagaaaaaccatttcataact

SEQ ID NO: 1608 - DNA, 29 bp, Homo sapiens
  source 1..29: mol_type = genomic DNA
aaggtattagaaaaaccatttcataactt

SEQ ID NO: 1609 - DNA, 32 bp, Homo sapiens
  source 1..32: mol_type = genomic DNA
aaggtattagaaaaaccatttcataactttgt

SEQ ID NO: 1610 - DNA, 33 bp, Homo sapiens
  source 1..33: mol_type = genomic DNA
aaggtattagaaaaaccatttcataactttgtc

SEQ ID NO: 1611 - DNA, 34 bp, Homo sapiens
  source 1..34: mol_type = genomic DNA
aaggtattagaaaaaccatttcataactttgtca

SEQ ID NO: 1612 - DNA, 37 bp, Homo sapiens
  source 1..37: mol_type = genomic DNA
aaggtattagaaaaaccatttcataactttgtcaaag

SEQ ID NO: 1613 - DNA, 38 bp, Homo sapiens
  source 1..38: mol_type = genomic DNA
aaggtattagaaaaaccatttcataactttgtcaaagt

SEQ ID NO: 1614 - DNA, 39 bp, Homo sapiens
  source 1..39: mol_type = genomic DNA
aaggtattagaaaaaccatttcataactttgtcaaagtt

SEQ ID NO: 1615 - DNA, 40 bp, Homo sapiens
  source 1..40: mol_type = genomic DNA
aaggtattagaaaaaccatttcataactttgtcaaagtta

SEQ ID NO: 1616 - DNA, 42 bp, Homo sapiens
  source 1..42: mol_type = genomic DNA
aaggtattagaaaaaccatttcataactttgtcaaagttaaa

SEQ ID NO: 1617 - DNA, 16 bp, Homo sapiens
  source 1..16: mol_type = genomic DNA
aaggtcagctaaataa

SEQ ID NO: 1618 - DNA, 17 bp, Homo sapiens
  source 1..17: mol_type = genomic DNA
aaggtcagctaaataag

SEQ ID NO: 1619 - DNA, 22 bp, Homo sapiens
  source 1..22: mol_type = genomic DNA
aaggtcagctaaataagctatc

SEQ ID NO: 1620 - DNA, 26 bp, Homo sapiens
  source 1..26: mol_type = genomic DNA
aaggtcagctaaataagctatcgggc

SEQ ID NO: 1621 - DNA, 27 bp, Homo sapiens
  source 1..27: mol_type = genomic DNA
aaggtcagctaaataagctatcgggcc

SEQ ID NO: 1622 - DNA, 28 bp, Homo sapiens
  source 1..28: mol_type = genomic DNA
aaggtcagctaaataagctatcgggccc

SEQ ID NO: 1623 - DNA, 29 bp, Homo sapiens
  source 1..29: mol_type = genomic DNA
aaggtcagctaaataagctatcgggccca

SEQ ID NO: 1624 - DNA, 30 bp, Homo sapiens
  source 1..30: mol_type = genomic DNA
aaggtcagctaaataagctatcgggcccat

SEQ ID NO: 1625 - DNA, 33 bp, Homo sapiens
  source 1..33: mol_type = genomic DNA
aaggtcagctaaataagctatcgggcccatacc

SEQ ID NO: 1626 - DNA, 37 bp, Homo sapiens
  source 1..37: mol_type = genomic DNA
aaggtcagctaaataagctatcgggcccataccccga

SEQ ID NO: 1627 - DNA, 38 bp, Homo sapiens
  source 1..38: mol_type = genomic DNA
aaggtcagctaaataagctatcgggcccataccccgaa

SEQ ID NO: 1628 - DNA, 40 bp, Homo sapiens
  source 1..40: mol_type = genomic DNA
aaggtcagctaaataagctatcgggcccataccccgaaaa

SEQ ID NO: 1629 - DNA, 42 bp, Homo sapiens
  source 1..42: mol_type = genomic DNA
aaggtcagctaaataagctatcgggcccataccccgaaaatg

SEQ ID NO: 1630 - DNA, 48 bp, Homo sapiens
  source 1..48: mol_type = genomic DNA
aaggtcagctaaataagctatcgggcccataccccgaaaatgttggtt

SEQ ID NO: 1631 - DNA, 21 bp, Homo sapiens
  source 1..21: mol_type = genomic DNA
aaggtccccggttcgaaaccg

SEQ ID NO: 1632 - DNA, 30 bp, Homo sapiens
  source 1..30: mol_type = genomic DNA
aaggtccccggttcgaaaccgggcggaaac

SEQ ID NO: 1633 - DNA, 32 bp, Homo sapiens
  source 1..32: mol_type = genomic DNA
aaggtccccggttcgaaaccgggcggaaacac

SEQ ID NO: 1634 - DNA, 32 bp, Homo sapiens
  source 1..32: mol_type = genomic DNA
aaggtccctggttcgatcccgggtttcggcac

SEQ ID NO: 1635 - DNA, 19 bp, Homo sapiens
  source 1..19: mol_type = genomic DNA
aaggtcctgagttcgaacc

SEQ ID NO: 1636 - DNA, 20 bp, Homo sapiens
  source 1..20: mol_type = genomic DNA
aaggtcctgagttcgaacct

SEQ ID NO: 1637 - DNA, 30 bp, Homo sapiens
  source 1..30: mol_type = genomic DNA
aaggtcctgagttcgaacctcagagggggc

SEQ ID NO: 1638 - DNA, 31 bp, Homo sapiens
  source 1..31: mol_type = genomic DNA
aaggtcctgagttcgaacctcagagggggca

SEQ ID NO: 1639 - DNA, 32 bp, Homo sapiens
  source 1..32: mol_type = genomic DNA
aaggtcctgagttcgaacctcagagggggcac

SEQ ID NO: 1640 - DNA, 20 bp, Homo sapiens
  source 1..20: mol_type = genomic DNA
aaggtcctgggttcgagccc

SEQ ID NO: 1641 - DNA, 27 bp, Homo sapiens
  source 1..27: mol_type = genomic DNA
aaggtcctgggttcgagccccagtgga

SEQ ID NO: 1642 - DNA, 28 bp, Homo sapiens
  source 1..28: mol_type = genomic DNA
aaggtcctgggttcgagccccagtggaa

SEQ ID NO: 1643 - DNA, 29 bp, Homo sapiens
  source 1..29: mol_type = genomic DNA
aaggtcctgggttcgagccccagtggaac

SEQ ID NO: 1644 - DNA, 30 bp, Homo sapiens
  source 1..30: mol_type = genomic DNA
aaggtcctgggttcgagccccagtggaacc

SEQ ID NO: 1645 - DNA, 33 bp, Homo sapiens
  source 1..33: mol_type = genomic DNA
aaggtcctgggttcgagccccagtggaaccacc

SEQ ID NO: 1646 - DNA, 34 bp, Homo sapiens
  source 1..34: mol_type = genomic DNA
aaggtcctgggttcgagccccagtggaaccacca

SEQ ID NO: 1647 - DNA, 24 bp, Homo sapiens
  source 1..24: mol_type = genomic DNA
aaggtcgcgggttcgaaccccgta

SEQ ID NO: 1648 - DNA, 29 bp, Homo sapiens
  source 1..29: mol_type = genomic DNA
aaggtcgcgggttcgaaccccgtacgggc

SEQ ID NO: 1649 - DNA, 30 bp, Homo sapiens
  source 1..30: mol_type = genomic DNA
aaggtcgcgggttcgaaccccgtacgggcc

SEQ ID NO: 1650 - DNA, 29 bp, Homo sapiens
  source 1..29: mol_type = genomic DNA
aaggtcgcgggttcgatccccgtacgggc

SEQ ID NO: 1651 - DNA, 30 bp, Homo sapiens
  source 1..30: mol_type = genomic DNA
aaggtcgcgggttcgatccccgtacgggcc

SEQ ID NO: 1652 - DNA, 31 bp, Homo sapiens
  source 1..31: mol_type = genomic DNA
aaggtcgcgggttcgatccccgtacgggcca

SEQ ID NO: 1653 - DNA, 32 bp, Homo sapiens
  source 1..32: mol_type = genomic DNA
aaggtcgcgggttcgatccccgtacgggccac

SEQ ID NO: 1654 - DNA, 33 bp, Homo sapiens
  source 1..33: mol_type = genomic DNA
aaggtcgcgggttcgatccccgtacgggccacc

SEQ ID NO: 1655 - DNA, 34 bp, Homo sapiens
  source 1..34: mol_type = genomic DNA
aaggtcgcgggttcgatccccgtacgggccacca

SEQ ID NO: 1656 - DNA, 28 bp, Homo sapiens
  source 1..28: mol_type = genomic DNA
aaggtcgtgagttcgagcctcacacggg

SEQ ID NO: 1657 - DNA, 30 bp, Homo sapiens
  source 1..30: mol_type = genomic DNA
aaggtcgtgagttcgatcctcacacggggc

SEQ ID NO: 1658 - DNA, 33 bp, Homo sapiens
  source 1..33: mol_type = genomic DNA
aaggtcgtgagttcgatcctcacacggggcacc

SEQ ID NO: 1659 - DNA, 24 bp, Homo sapiens
  source 1..24: mol_type = genomic DNA
aaggttccgggttcgagtcccggc

SEQ ID NO: 1660 - DNA, 28 bp, Homo sapiens
  source 1..28: mol_type = genomic DNA
aaggttccgggttcgagtcccggcggag

SEQ ID NO: 1661 - DNA, 30 bp, Homo sapiens
  source 1..30: mol_type = genomic DNA
aaggttccgggttcgagtcccggcggagtc

SEQ ID NO: 1662 - DNA, 31 bp, Homo sapiens
  source 1..31: mol_type = genomic DNA
aaggttccgggttcgagtcccggcggagtcg

SEQ ID NO: 1663 - DNA, 32 bp, Homo sapiens
  source 1..32: mol_type = genomic DNA
aaggttccgggttcgagtcccggcggagtcgc

SEQ ID NO: 1664 - DNA, 33 bp, Homo sapiens
  source 1..33: mol_type = genomic DNA
aaggttccgggttcgagtcccggcggagtcgcc

SEQ ID NO: 1665 - DNA, 34 bp, Homo sapiens
  source 1..34: mol_type = genomic DNA
aaggttccgggttcgagtcccggcggagtcgcca

SEQ ID NO: 1666 - DNA, 31 bp, Homo sapiens
  source 1..31: mol_type = genomic DNA
aaggttgcgtgttcaagtcacgtcggggtca

SEQ ID NO: 1667 - DNA, 33 bp, Homo sapiens
  source 1..33: mol_type = genomic DNA
aaggttgcgtgttcaagtcacgtcggggtcacc

SEQ ID NO: 1668 - DNA, 31 bp, Homo sapiens
  source 1..31: mol_type = genomic DNA
aaggttggtggttcgagcccacccagggacg

SEQ ID NO: 1669 - DNA, 32 bp, Homo sapiens
  source 1..32: mol_type = genomic DNA
aaggttggtggttcgagcccacccagggacgc

SEQ ID NO: 1670 - DNA, 33 bp, Homo sapiens
  source 1..33: mol_type = genomic DNA
aaggttggtggttcgagcccacccagggacgcc

SEQ ID NO: 1671 - DNA, 33 bp, Homo sapiens
  source 1..33: mol_type = genomic DNA
aaggttgtgggttcgaatcccaccagagtcgcc

SEQ ID NO: 1672 - DNA, 34 bp, Homo sapiens
  source 1..34: mol_type = genomic DNA
aaggttgtgggttcgaatcccaccagagtcgcca

SEQ ID NO: 1673 - DNA, 32 bp, Homo sapiens
  source 1..32: mol_type = genomic DNA
aaggttgtgggttcgagtcccaccagagtcgc

SEQ ID NO: 1674 - DNA, 33 bp, Homo sapiens
  source 1..33: mol_type = genomic DNA
aaggttgtgggttcgagtcccaccagagtcgcc

SEQ ID NO: 1675 - DNA, 34 bp, Homo sapiens
  source 1..34: mol_type = genomic DNA
aaggttgtgggttcgagtcccaccagagtcgcca

SEQ ID NO: 1676 - DNA, 31 bp, Homo sapiens
  source 1..31: mol_type = genomic DNA
aagtaaggtcagctaaataagctatcgggcc

SEQ ID NO: 1677 - DNA, 32 bp, Homo sapiens
  source 1..32: mol_type = genomic DNA
aagtaaggtcagctaaataagctatcgggccc

SEQ ID NO: 1678 - DNA, 17 bp, Homo sapiens
  source 1..17: mol_type = genomic DNA
aagtcacgtcggggtca

SEQ ID NO: 1679 - DNA, 19 bp, Homo sapiens
  source 1..19: mol_type = genomic DNA
aagtcacgtcggggtcacc

SEQ ID NO: 1680 - DNA, 17 bp, Homo sapiens
  source 1..17: mol_type = genomic DNA
aagtcatggaggccatg

SEQ ID NO: 1681 - DNA, 19 bp, Homo sapiens
  source 1..19: mol_type = genomic DNA
aagtcatggaggccatggg

SEQ ID NO: 1682 - DNA, 20 bp, Homo sapiens
  source 1..20: mol_type = genomic DNA
aagtcatggaggccatgggg

SEQ ID NO: 1683 - DNA, 21 bp, Homo sapiens
  source 1..21: mol_type = genomic DNA
aagtcatggaggccatggggt

SEQ ID NO: 1684 - DNA, 22 bp, Homo sapiens
  source 1..22: mol_type = genomic DNA
aagtcatggaggccatggggtt

SEQ ID NO: 1685 - DNA, 23 bp, Homo sapiens
  source 1..23: mol_type = genomic DNA
aagtcatggaggccatggggttg

SEQ ID NO: 1686 - DNA, 24 bp, Homo sapiens
  source 1..24: mol_type = genomic DNA
aagtcatggaggccatggggttgg

SEQ ID NO: 1687 - DNA, 29 bp, Homo sapiens
  source 1..29: mol_type = genomic DNA
aagtcatggaggccatggggttggcttga

SEQ ID NO: 1688 - DNA, 18 bp, Homo sapiens
  source 1..18: mol_type = genomic DNA
aagtcccattggtctagc

SEQ ID NO: 1689 - DNA, 19 bp, Homo sapiens
  source 1..19: mol_type = genomic DNA
aagtcccattggtctagcc

SEQ ID NO: 1690 - DNA, 20 bp, Homo sapiens
  source 1..20: mol_type = genomic DNA
aagtcccattggtctagcca

SEQ ID NO: 1691 - DNA, 16 bp, Homo sapiens
  source 1..16: mol_type = genomic DNA
aagtccctgttcgggc

SEQ ID NO: 1692 - DNA, 18 bp, Homo sapiens
  source 1..18: mol_type = genomic DNA
aagtccctgttcgggcgc

SEQ ID NO: 1693 - DNA, 19 bp, Homo sapiens
  source 1..19: mol_type = genomic DNA
aagtccctgttcgggcgcc

SEQ ID NO: 1694 - DNA, 19 bp, Homo sapiens
  source 1..19: mol_type = genomic DNA
aagtggctgatttgcgttc

SEQ ID NO: 1695 - DNA, 27 bp, Homo sapiens
  source 1..27: mol_type = genomic DNA
aagtggctgatttgcgttcagttgatg

SEQ ID NO: 1696 - DNA, 16 bp, Homo sapiens
  source 1..16: mol_type = genomic DNA
aagtgtttgtgggttt

SEQ ID NO: 1697 - DNA, 17 bp, Homo sapiens
  source 1..17: mol_type = genomic DNA
aagtgtttgtgggttta

SEQ ID NO: 1698 - DNA, 18 bp, Homo sapiens
  source 1..18: mol_type = genomic DNA
aagtgtttgtgggtttaa

SEQ ID NO: 1699 - DNA, 19 bp, Homo sapiens
  source 1..19: mol_type = genomic DNA
aagtgtttgtgggtttaag

SEQ ID NO: 1700 - DNA, 20 bp, Homo sapiens
  source 1..20: mol_type = genomic DNA
aagtgtttgtgggtttaagt

SEQ ID NO: 1701 - DNA, 21 bp, Homo sapiens
  source 1..21: mol_type = genomic DNA
aagtgtttgtgggtttaagtc

SEQ ID NO: 1702 - DNA, 22 bp, Homo sapiens
  source 1..22: mol_type = genomic DNA
aagtgtttgtgggtttaagtcc

SEQ ID NO: 1703 - DNA, 25 bp, Homo sapiens
  source 1..25: mol_type = genomic DNA
aagtgtttgtgggtttaagtcccat

SEQ ID NO: 1704 - DNA, 26 bp, Homo sapiens
  source 1..26: mol_type = genomic DNA
aagtgtttgtgggtttaagtcccatt

SEQ ID NO: 1705 - DNA, 27 bp, Homo sapiens
  source 1..27: mol_type = genomic DNA
aagtgtttgtgggtttaagtcccattg

SEQ ID NO: 1706 - DNA, 28 bp, Homo sapiens
  source 1..28: mol_type = genomic DNA
aagtgtttgtgggtttaagtcccattgg

SEQ ID NO: 1707 - DNA, 29 bp, Homo sapiens
  source 1..29: mol_type = genomic DNA
aagtgtttgtgggtttaagtcccattggt

SEQ ID NO: 1708 - DNA, 30 bp, Homo sapiens
  source 1..30: mol_type = genomic DNA
aagtgtttgtgggtttaagtcccattggtc

SEQ ID NO: 1709 - DNA, 31 bp, Homo sapiens
  source 1..31: mol_type = genomic DNA
aagtgtttgtgggtttaagtcccattggtct

SEQ ID NO: 1710 - DNA, 32 bp, Homo sapiens
  source 1..32: mol_type = genomic DNA
aagtgtttgtgggtttaagtcccattggtcta

SEQ ID NO: 1711 - DNA, 33 bp, Homo sapiens
  source 1..33: mol_type = genomic DNA
aagtgtttgtgggtttaagtcccattggtctag

SEQ ID NO: 1712 - DNA, 34 bp, Homo sapiens
  source 1..34: mol_type = genomic DNA
aagtgtttgtgggtttaagtcccattggtctagc

SEQ ID NO: 1713 - DNA, 35 bp, Homo sapiens
  source 1..35: mol_type = genomic DNA
aagtgtttgtgggtttaagtcccattggtctagcc

SEQ ID NO: 1714 - DNA, 36 bp, Homo sapiens
  source 1..36: mol_type = genomic DNA
aagtgtttgtgggtttaagtcccattggtctagcca

SEQ ID NO: 1715 - DNA, 19 bp, Homo sapiens
  source 1..19: mol_type = genomic DNA
aagttaaagattaagagaa

SEQ ID NO: 1716 - DNA, 20 bp, Homo sapiens
  source 1..20: mol_type = genomic DNA
aagttaaagattaagagaac

SEQ ID NO: 1717 - DNA, 21 bp, Homo sapiens
  source 1..21: mol_type = genomic DNA
aagttaaagattaagagaacc

SEQ ID NO: 1718 - DNA, 22 bp, Homo sapiens
  source 1..22: mol_type = genomic DNA
aagttaaagattaagagaacca

SEQ ID NO: 1719 - DNA, 23 bp, Homo sapiens
  source 1..23: mol_type = genomic DNA
aagttaaagattaagagaaccaa

SEQ ID NO: 1720 - DNA, 24 bp, Homo sapiens
  source 1..24: mol_type = genomic DNA
aagttaaagattaagagaaccaac

SEQ ID NO: 1721 - DNA, 25 bp, Homo sapiens
  source 1..25: mol_type = genomic DNA
aagttaaagattaagagaaccaaca

SEQ ID NO: 1722 - DNA, 26 bp, Homo sapiens
  source 1..26: mol_type = genomic DNA
aagttaaagattaagagaaccaacac

SEQ ID NO: 1723 - DNA, 27 bp, Homo sapiens
  source 1..27: mol_type = genomic DNA
aagttaaagattaagagaaccaacacc

SEQ ID NO: 1724 - DNA, 28 bp, Homo sapiens
  source 1..28: mol_type = genomic DNA
aagttaaagattaagagaaccaacacct

SEQ ID NO: 1725 - DNA, 29 bp, Homo sapiens
  source 1..29: mol_type = genomic DNA
aagttaaagattaagagaaccaacacctc

SEQ ID NO: 1726 - DNA, 30 bp, Homo sapiens
  source 1..30: mol_type = genomic DNA
aagttaaagattaagagaaccaacacctct

SEQ ID NO: 1727 - DNA, 31 bp, Homo sapiens
  source 1..31: mol_type = genomic DNA
aagttaaagattaagagaaccaacacctctt

SEQ ID NO: 1728 - DNA, 32 bp, Homo sapiens
  source 1..32: mol_type = genomic DNA
aagttaaagattaagagaaccaacacctcttt

SEQ ID NO: 1729 - DNA, 33 bp, Homo sapiens
  source 1..33: mol_type = genomic DNA
aagttaaagattaagagaaccaacacctcttta

SEQ ID NO: 1730 - DNA, 38 bp, Homo sapiens
  source 1..38: mol_type = genomic DNA
aagttaaagattaagagaaccaacacctctttacagtg

SEQ ID NO: 1731 - DNA, 39 bp, Homo sapiens
  source 1..39: mol_type = genomic DNA
aagttaaagattaagagaaccaacacctctttacagtga

SEQ ID NO: 1732 - DNA, 40 bp, Homo sapiens
  source 1..40: mol_type = genomic DNA
aagttaaagattaagagaaccaacacctctttacagtgac

SEQ ID NO: 1733 - DNA, 41 bp, Homo sapiens
  source 1..41: mol_type = genomic DNA
aagttaaagattaagagaaccaacacctctttacagtgacc

SEQ ID NO: 1734 - DNA, 42 bp, Homo sapiens
  source 1..42: mol_type = genomic DNA
aagttaaagattaagagaaccaacacctctttacagtgacca

SEQ ID NO: 1735 - DNA, 16 bp, Homo sapiens
  source 1..16: mol_type = genomic DNA
aagttaaattataggc

SEQ ID NO: 1736 - DNA, 17 bp, Homo sapiens
  source 1..17: mol_type = genomic DNA
aagttaaattataggct

SEQ ID NO: 1737 - DNA, 18 bp, Homo sapiens
  source 1..18: mol_type = genomic DNA
aagttaaattataggcta

SEQ ID NO: 1738 - DNA, 19 bp, Homo sapiens
  source 1..19: mol_type = genomic DNA
aagttaaattataggctaa

SEQ ID NO: 1739 - DNA, 20 bp, Homo sapiens
  source 1..20: mol_type = genomic DNA
aagttaaattataggctaaa

SEQ ID NO: 1740 - DNA, 22 bp, Homo sapiens
  source 1..22: mol_type = genomic DNA
aagttaaattataggctaaatc

SEQ ID NO: 1741 - DNA, 23 bp, Homo sapiens
  source 1..23: mol_type = genomic DNA
aagttaaattataggctaaatcc

SEQ ID NO: 1742 - DNA, 24 bp, Homo sapiens
  source 1..24: mol_type = genomic DNA
aagttaaattataggctaaatcct

SEQ ID NO: 1743 - DNA, 27 bp, Homo sapiens
  source 1..27: mol_type = genomic DNA
aagttaaattataggctaaatcctata

SEQ ID NO: 1744 - DNA, 29 bp, Homo sapiens
  source 1..29: mol_type = genomic DNA
aagttaaattataggctaaatcctatata

SEQ ID NO: 1745 - DNA, 32 bp, Homo sapiens
  source 1..32: mol_type = genomic DNA
aagttaaattataggctaaatcctatatatct

SEQ ID NO: 1746 - DNA, 17 bp, Homo sapiens
  source 1..17: mol_type = genomic DNA
aagttctggtctccgga

SEQ ID NO: 1747 - DNA, 22 bp, Homo sapiens
  source 1..22: mol_type = genomic DNA
aagttgcaatacttaatttctg

SEQ ID NO: 1748 - DNA, 23 bp, Homo sapiens
  source 1..23: mol_type = genomic DNA
aagttgcaatacttaatttctgc

SEQ ID NO: 1749 - DNA, 24 bp, Homo sapiens
  source 1..24: mol_type = genomic DNA
aagttgcaatacttaatttctgcc

SEQ ID NO: 1750 - DNA, 25 bp, Homo sapiens
  source 1..25: mol_type = genomic DNA
aagttgcaatacttaatttctgcca

SEQ ID NO: 1751 - DNA, 16 bp, Homo sapiens
  source 1..16: mol_type = genomic DNA
aataagctatcgggcc

SEQ ID NO: 1752 - DNA, 17 bp, Homo sapiens
  source 1..17: mol_type = genomic DNA
aataagctatcgggccc

SEQ ID NO: 1753 - DNA, 18 bp, Homo sapiens
  source 1..18: mol_type = genomic DNA
aataagctatcgggccca

SEQ ID NO: 1754 - DNA, 19 bp, Homo sapiens
  source 1..19: mol_type = genomic DNA
aataagctatcgggcccat

SEQ ID NO: 1755 - DNA, 20 bp, Homo sapiens
  source 1..20: mol_type = genomic DNA
aataagctatcgggcccata

SEQ ID NO: 1756 - DNA, 21 bp, Homo sapiens
  source 1..21: mol_type = genomic DNA
aataagctatcgggcccatac

SEQ ID NO: 1757 - DNA, 22 bp, Homo sapiens
  source 1..22: mol_type = genomic DNA
aataagctatcgggcccatacc

SEQ ID NO: 1758 - DNA, 23 bp, Homo sapiens
  source 1..23: mol_type = genomic DNA
aataagctatcgggcccataccc

SEQ ID NO: 1759 - DNA, 24 bp, Homo sapiens
  source 1..24: mol_type = genomic DNA
aataagctatcgggcccatacccc

SEQ ID NO: 1760 - DNA, 25 bp, Homo sapiens
  source 1..25: mol_type = genomic DNA
aataagctatcgggcccataccccg

SEQ ID NO: 1761 - DNA, 26 bp, Homo sapiens
  source 1..26: mol_type = genomic DNA
aataagctatcgggcccataccccga

SEQ ID NO: 1762 - DNA, 27 bp, Homo sapiens
  source 1..27: mol_type = genomic DNA
aataagctatcgggcccataccccgaa

SEQ ID NO: 1763 - DNA, 28 bp, Homo sapiens
  source 1..28: mol_type = genomic DNA
aataagctatcgggcccataccccgaaa

SEQ ID NO: 1764 - DNA, 29 bp, Homo sapiens
  source 1..29: mol_type = genomic DNA
aataagctatcgggcccataccccgaaaa

SEQ ID NO: 1765 - DNA, 30 bp, Homo sapiens
  source 1..30: mol_type = genomic DNA
aataagctatcgggcccataccccgaaaat

SEQ ID NO: 1766 - DNA, 31 bp, Homo sapiens
  source 1..31: mol_type = genomic DNA
aataagctatcgggcccataccccgaaaatg

SEQ ID NO: 1767 - DNA, 33 bp, Homo sapiens
  source 1..33: mol_type = genomic DNA
aataagctatcgggcccataccccgaaaatgtt

SEQ ID NO: 1768 - DNA, 34 bp, Homo sapiens
  source 1..34: mol_type = genomic DNA
aataagctatcgggcccataccccgaaaatgttg

SEQ ID NO: 1769 - DNA, 36 bp, Homo sapiens
  source 1..36: mol_type = genomic DNA
aataagctatcgggcccataccccgaaaatgttggt

SEQ ID NO: 1770 - DNA, 37 bp, Homo sapiens
  source 1..37: mol_type = genomic DNA
aataagctatcgggcccataccccgaaaatgttggtt

SEQ ID NO: 1771 - DNA, 38 bp, Homo sapiens
  source 1..38: mol_type = genomic DNA
aataagctatcgggcccataccccgaaaatgttggtta

SEQ ID NO: 1772 - DNA, 39 bp, Homo sapiens
  source 1..39: mol_type = genomic DNA
aataagctatcgggcccataccccgaaaatgttggttat

SEQ ID NO: 1773 - DNA, 16 bp, Homo sapiens
  source 1..16: mol_type = genomic DNA
aataataggagcttaa

SEQ ID NO: 1774 - DNA, 17 bp, Homo sapiens
  source 1..17: mol_type = genomic DNA
aataataggagcttaaa

SEQ ID NO: 1775 - DNA, 18 bp, Homo sapiens
  source 1..18: mol_type = genomic DNA
aataataggagcttaaac

SEQ ID NO: 1776 - DNA, 19 bp, Homo sapiens
  source 1..19: mol_type = genomic DNA
aataataggagcttaaacc

SEQ ID NO: 1777 - DNA, 20 bp, Homo sapiens
  source 1..20: mol_type = genomic DNA
aataataggagcttaaaccc

SEQ ID NO: 1778 - DNA, 21 bp, Homo sapiens
  source 1..21: mol_type = genomic DNA
aataataggagcttaaacccc

SEQ ID NO: 1779 - DNA, 22 bp, Homo sapiens
  source 1..22: mol_type = genomic DNA
aataataggagcttaaaccccc

SEQ ID NO: 1780 - DNA, 23 bp, Homo sapiens
  source 1..23: mol_type = genomic DNA
aataataggagcttaaaccccct

SEQ ID NO: 1781 - DNA, 25 bp, Homo sapiens
  source 1..25: mol_type = genomic DNA
aataataggagcttaaaccccctta

SEQ ID NO: 1782 - DNA, 26 bp, Homo sapiens
  source 1..26: mol_type = genomic DNA
aataataggagcttaaacccccttat

SEQ ID NO: 1783 - DNA, 27 bp, Homo sapiens
  source 1..27: mol_type = genomic DNA
aataataggagcttaaacccccttatt

SEQ ID NO: 1784 - DNA, 31 bp, Homo sapiens
  source 1..31: mol_type = genomic DNA
aataataggagcttaaacccccttatttcta

SEQ ID NO: 1785 - DNA, 32 bp, Homo sapiens
  source 1..32: mol_type = genomic DNA
aataataggagcttaaacccccttatttctac

SEQ ID NO: 1786 - DNA, 33 bp, Homo sapiens
  source 1..33: mol_type = genomic DNA
aataataggagcttaaacccccttatttctacc

SEQ ID NO: 1787 - DNA, 34 bp, Homo sapiens
  source 1..34: mol_type = genomic DNA
aataataggagcttaaacccccttatttctacca

SEQ ID NO: 1788 - DNA, 17 bp, Homo sapiens
  source 1..17: mol_type = genomic DNA
aatacaacgatggtttt

SEQ ID NO: 1789 - DNA, 18 bp, Homo sapiens
  source 1..18: mol_type = genomic DNA
aatacaacgatggttttt

SEQ ID NO: 1790 - DNA, 19 bp, Homo sapiens
  source 1..19: mol_type = genomic DNA
aatacaacgatggtttttc

SEQ ID NO: 1791 - DNA, 21 bp, Homo sapiens
  source 1..21: mol_type = genomic DNA
aatacaacgatggtttttcat

SEQ ID NO: 1792 - DNA, 23 bp, Homo sapiens
  source 1..23: mol_type = genomic DNA
aatacaacgatggtttttcatat

SEQ ID NO: 1793 - DNA, 24 bp, Homo sapiens
  source 1..24: mol_type = genomic DNA
aatacaacgatggtttttcatatc

SEQ ID NO: 1794 - DNA, 26 bp, Homo sapiens
  source 1..26: mol_type = genomic DNA
aatacaacgatggtttttcatatcat

SEQ ID NO: 1795 - DNA, 32 bp, Homo sapiens
  source 1..32: mol_type = genomic DNA
aatacaacgatggtttttcatatcattggtcg

SEQ ID NO: 1796 - DNA, 33 bp, Homo sapiens
  source 1..33: mol_type = genomic DNA
aatacaacgatggtttttcatatcattggtcgt

SEQ ID NO: 1797 - DNA, 38 bp, Homo sapiens
  source 1..38: mol_type = genomic DNA
aatacaacgatggtttttcatatcattggtcgtggttg

SEQ ID NO: 1798 - DNA, 39 bp, Homo sapiens
  source 1..39: mol_type = genomic DNA
aatacaacgatggtttttcatatcattggtcgtggttgt

SEQ ID NO: 1799 - DNA, 40 bp, Homo sapiens
  source 1..40: mol_type = genomic DNA
aatacaacgatggtttttcatatcattggtcgtggttgta

SEQ ID NO: 1800 - DNA, 43 bp, Homo sapiens
  source 1..43: mol_type = genomic DNA
aatacaacgatggtttttcatatcattggtcgtggttgtagtc

SEQ ID NO: 1801 - DNA, 44 bp, Homo sapiens
  source 1..44: mol_type = genomic DNA
aatacaacgatggtttttcatatcattggtcgtggttgtagtcc

SEQ ID NO: 1802 - DNA, 45 bp, Homo sapiens
  source 1..45: mol_type = genomic DNA
aatacaacgatggtttttcatatcattggtcgtggttgtagtccg

SEQ ID NO: 1803 - DNA, 48 bp, Homo sapiens
  source 1..48: mol_type = genomic DNA
aatacaacgatggtttttcatatcattggtcgtggttgtagtccgtgc

SEQ ID NO: 1804 - DNA, 16 bp, Homo sapiens
  source 1..16: mol_type = genomic DNA
aatacaccagtcttgt

SEQ ID NO: 1805 - DNA, 28 bp, Homo sapiens
  source 1..28: mol_type = genomic DNA
aatacaccagtcttgtaaaccggagatg

SEQ ID NO: 1806 - DNA, 46 bp, Homo sapiens
  source 1..46: mol_type = genomic DNA
aatacaccagtcttgtaaaccggagatgaaaacctttttccaagga

SEQ ID NO: 1807 - DNA, 48 bp, Homo sapiens
  source 1..48: mol_type = genomic DNA
aatacaccagtcttgtaaaccggagatgaaaacctttttccaaggaca

SEQ ID NO: 1808 - DNA, 26 bp, Homo sapiens
  source 1..26: mol_type = genomic DNA
aatacactgaaaatgtttagacgggc

SEQ ID NO: 1809 - DNA, 27 bp, Homo sapiens
  source 1..27: mol_type = genomic DNA
aatacactgaaaatgtttagacgggct

SEQ ID NO: 1810 - DNA, 28 bp, Homo sapiens
  source 1..28: mol_type = genomic DNA
aatacactgaaaatgtttagacgggctc

SEQ ID NO: 1811 - DNA, 29 bp, Homo sapiens
  source 1..29: mol_type = genomic DNA
aatacactgaaaatgtttagacgggctca

SEQ ID NO: 1812 - DNA, 30 bp, Homo sapiens
  source 1..30: mol_type = genomic DNA
aatacactgaaaatgtttagacgggctcac

SEQ ID NO: 1813 - DNA, 31 bp, Homo sapiens
  source 1..31: mol_type = genomic DNA
aatacactgaaaatgtttagacgggctcaca

SEQ ID NO: 1814 - DNA, 32 bp, Homo sapiens
  source 1..32: mol_type = genomic DNA
aatacactgaaaatgtttagacgggctcacat

SEQ ID NO: 1815 - DNA, 33 bp, Homo sapiens
  source 1..33: mol_type = genomic DNA
aatacactgaaaatgtttagacgggctcacatc

SEQ ID NO: 1816 - DNA, 34 bp, Homo sapiens
  source 1..34: mol_type = genomic DNA
aatacactgaaaatgtttagacgggctcacatca

SEQ ID NO: 1817 - DNA, 35 bp, Homo sapiens
  source 1..35: mol_type = genomic DNA
aatacactgaaaatgtttagacgggctcacatcac

SEQ ID NO: 1818 - DNA, 36 bp, Homo sapiens
  source 1..36: mol_type = genomic DNA
aatacactgaaaatgtttagacgggctcacatcacc

SEQ ID NO: 1819 - DNA, 37 bp, Homo sapiens
  source 1..37: mol_type = genomic DNA
aatacactgaaaatgtttagacgggctcacatcaccc

SEQ ID NO: 1820 - DNA, 38 bp, Homo sapiens
  source 1..38: mol_type = genomic DNA
aatacactgaaaatgtttagacgggctcacatcacccc

SEQ ID NO: 1821 - DNA, 45 bp, Homo sapiens
  source 1..45: mol_type = genomic DNA
aatacactgaaaatgtttagacgggctcacatcaccccataaaca

SEQ ID NO: 1822 - DNA, 47 bp, Homo sapiens
  source 1..47: mol_type = genomic DNA
aatacactgaaaatgtttagacgggctcacatcaccccataaacacc

SEQ ID NO: 1823 - DNA, 48 bp, Homo sapiens
  source 1..48: mol_type = genomic DNA
aatacactgaaaatgtttagacgggctcacatcaccccataaacacca

SEQ ID NO: 1824 - DNA, 16 bp, Homo sapiens
  source 1..16: mol_type = genomic DNA
aatacagaccaagagc

SEQ ID NO: 1825 - DNA, 17 bp, Homo sapiens
  source 1..17: mol_type = genomic DNA
aatacagaccaagagcc

SEQ ID NO: 1826 - DNA, 18 bp, Homo sapiens
  source 1..18: mol_type = genomic DNA
aatacagaccaagagcct

SEQ ID NO: 1827 - DNA, 19 bp, Homo sapiens
  source 1..19: mol_type = genomic DNA
aatacagaccaagagcctt

SEQ ID NO: 1828 - DNA, 20 bp, Homo sapiens
  source 1..20: mol_type = genomic DNA
aatacagaccaagagccttc

SEQ ID NO: 1829 - DNA, 21 bp, Homo sapiens
  source 1..21: mol_type = genomic DNA
aatacagaccaagagccttca

SEQ ID NO: 1830 - DNA, 22 bp, Homo sapiens
  source 1..22: mol_type = genomic DNA
aatacagaccaagagccttcaa

SEQ ID NO: 1831 - DNA, 23 bp, Homo sapiens
  source 1..23: mol_type = genomic DNA
aatacagaccaagagccttcaaa

SEQ ID NO: 1832 - DNA, 24 bp, Homo sapiens
  source 1..24: mol_type = genomic DNA
aatacagaccaagagccttcaaag

SEQ ID NO: 1833 - DNA, 26 bp, Homo sapiens
  source 1..26: mol_type = genomic DNA
aatacagaccaagagccttcaaagcc

SEQ ID NO: 1834 - DNA, 27 bp, Homo sapiens
  source 1..27: mol_type = genomic DNA
aatacagaccaagagccttcaaagccc

SEQ ID NO: 1835 - DNA, 30 bp, Homo sapiens
  source 1..30: mol_type = genomic DNA
aatacagaccaagagccttcaaagccctca

SEQ ID NO: 1836 - DNA, 44 bp, Homo sapiens
  source 1..44: mol_type = genomic DNA
aatacagaccaagagccttcaaagccctcagtaagttgcaatac

SEQ ID NO: 1837 - DNA, 16 bp, Homo sapiens
  source 1..16: mol_type = genomic DNA
aatacttaatttctgc

SEQ ID NO: 1838 - DNA, 17 bp, Homo sapiens
  source 1..17: mol_type = genomic DNA
aatacttaatttctgcc

SEQ ID NO: 1839 - DNA, 18 bp, Homo sapiens
  source 1..18: mol_type = genomic DNA
aatacttaatttctgcca

SEQ ID NO: 1840 - DNA, 38 bp, Homo sapiens
  source 1..38: mol_type = genomic DNA
aatagctcagttgggagagcgttagactgaagatctaa

SEQ ID NO: 1841 - DNA, 16 bp, Homo sapiens
  source 1..16: mol_type = genomic DNA
aataggagcttaaacc

SEQ ID NO: 1842 - DNA, 17 bp, Homo sapiens
  source 1..17: mol_type = genomic DNA
aataggagcttaaaccc

SEQ ID NO: 1843 - DNA, 18 bp, Homo sapiens
  source 1..18: mol_type = genomic DNA
aataggagcttaaacccc

SEQ ID NO: 1844 - DNA, 19 bp, Homo sapiens
  source 1..19: mol_type = genomic DNA
aataggagcttaaaccccc

SEQ ID NO: 1845 - DNA, 20 bp, Homo sapiens
  source 1..20: mol_type = genomic DNA
aataggagcttaaaccccct

SEQ ID NO: 1846 - DNA, 22 bp, Homo sapiens
  source 1..22: mol_type = genomic DNA
aataggagcttaaaccccctta

SEQ ID NO: 1847 - DNA, 24 bp, Homo sapiens
  source 1..24: mol_type = genomic DNA
aataggagcttaaacccccttatt

SEQ ID NO: 1848 - DNA, 26 bp, Homo sapiens
  source 1..26: mol_type = genomic DNA
aataggagcttaaacccccttatttc

SEQ ID NO: 1849 - DNA, 27 bp, Homo sapiens
  source 1..27: mol_type = genomic DNA
aataggagcttaaacccccttatttct

SEQ ID NO: 1850 - DNA, 28 bp, Homo sapiens
  source 1..28: mol_type = genomic DNA
aataggagcttaaacccccttatttcta

SEQ ID NO: 1851 - DNA, 29 bp, Homo sapiens
  source 1..29: mol_type = genomic DNA
aataggagcttaaacccccttatttctac

SEQ ID NO: 1852 - DNA, 30 bp, Homo sapiens
  source 1..30: mol_type = genomic DNA
aataggagcttaaacccccttatttctacc

SEQ ID NO: 1853 - DNA, 31 bp, Homo sapiens
  source 1..31: mol_type = genomic DNA
aataggagcttaaacccccttatttctacca

SEQ ID NO: 1854 - DNA, 16 bp, Homo sapiens
  source 1..16: mol_type = genomic DNA
aatagtaccgttaact

SEQ ID NO: 1855 - DNA, 17 bp, Homo sapiens
  source 1..17: mol_type = genomic DNA
aatagtaccgttaactt

SEQ ID NO: 1856 - DNA, 18 bp, Homo sapiens
  source 1..18: mol_type = genomic DNA
aatagtaccgttaacttc

SEQ ID NO: 1857 - DNA, 19 bp, Homo sapiens
  source 1..19: mol_type = genomic DNA
aatagtaccgttaacttcc

SEQ ID NO: 1858 - DNA, 20 bp, Homo sapiens
  source 1..20: mol_type = genomic DNA
aatagtaccgttaacttcca

SEQ ID NO: 1859 - DNA, 21 bp, Homo sapiens
  source 1..21: mol_type = genomic DNA
aatagtaccgttaacttccaa

SEQ ID NO: 1860 - DNA, 24 bp, Homo sapiens
  source 1..24: mol_type = genomic DNA
aatagtaccgttaacttccaatta

SEQ ID NO: 1861 - DNA, 34 bp, Homo sapiens
  source 1..34: mol_type = genomic DNA
aatagtaccgttaacttccaattaactagttttg

SEQ ID NO: 1862 - DNA, 36 bp, Homo sapiens
  source 1..36: mol_type = genomic DNA
aatagtaccgttaacttccaattaactagttttgac

SEQ ID NO: 1863 - DNA, 37 bp, Homo sapiens
  source 1..37: mol_type = genomic DNA
aatagtaccgttaacttccaattaactagttttgaca

SEQ ID NO: 1864 - DNA, 38 bp, Homo sapiens
  source 1..38: mol_type = genomic DNA
aatagtaccgttaacttccaattaactagttttgacaa

SEQ ID NO: 1865 - DNA, 39 bp, Homo sapiens
  source 1..39: mol_type = genomic DNA
aatagtaccgttaacttccaattaactagttttgacaac

SEQ ID NO: 1866 - DNA, 19 bp, Homo sapiens
  source 1..19: mol_type = genomic DNA
aatagtttaaattagaatc

SEQ ID NO: 1867 - DNA, 20 bp, Homo sapiens
  source 1..20: mol_type = genomic DNA
aatagtttaaattagaatct

SEQ ID NO: 1868 - DNA, 21 bp, Homo sapiens
  source 1..21: mol_type = genomic DNA
aatagtttaaattagaatctt

SEQ ID NO: 1869 - DNA, 26 bp, Homo sapiens
  source 1..26: mol_type = genomic DNA
aatagtttaaattagaatcttagctt

SEQ ID NO: 1870 - DNA, 28 bp, Homo sapiens
  source 1..28: mol_type = genomic DNA
aatagtttaaattagaatcttagctttg

SEQ ID NO: 1871 - DNA, 29 bp, Homo sapiens
  source 1..29: mol_type = genomic DNA
aatagtttaaattagaatcttagctttgg

SEQ ID NO: 1872 - DNA, 29 bp, Homo sapiens
  source 1..29: mol_type = genomic DNA
aatatagtttaaccaaaacatcagattgt

SEQ ID NO: 1873 - DNA, 30 bp, Homo sapiens
  source 1..30: mol_type = genomic DNA
aatatagtttaaccaaaacatcagattgtg

SEQ ID NO: 1874 - DNA, 31 bp, Homo sapiens
  source 1..31: mol_type = genomic DNA
aatatagtttaaccaaaacatcagattgtga

SEQ ID NO: 1875 - DNA, 33 bp, Homo sapiens
  source 1..33: mol_type = genomic DNA
aatatagtttaaccaaaacatcagattgtgaat

SEQ ID NO: 1876 - DNA, 34 bp, Homo sapiens
  source 1..34: mol_type = genomic DNA
aatatagtttaaccaaaacatcagattgtgaatc

SEQ ID NO: 1877 - DNA, 35 bp, Homo sapiens
  source 1..35: mol_type = genomic DNA
aatatagtttaaccaaaacatcagattgtgaatct

SEQ ID NO: 1878 - DNA, 39 bp, Homo sapiens
  source 1..39: mol_type = genomic DNA
aatatagtttaaccaaaacatcagattgtgaatctgaca

SEQ ID NO: 1879 - DNA, 29 bp, Homo sapiens
  source 1..29: mol_type = genomic DNA
aatatgtctgataaaagagttactttgat

SEQ ID NO: 1880 - DNA, 17 bp, Homo sapiens
  source 1..17: mol_type = genomic DNA
aatcacgtcggggtcac

SEQ ID NO: 1881 - DNA, 18 bp, Homo sapiens
  source 1..18: mol_type = genomic DNA
aatcacgtcggggtcacc

SEQ ID NO: 1882 - DNA, 19 bp, Homo sapiens
  source 1..19: mol_type = genomic DNA
aatcacgtcggggtcacca

SEQ ID NO: 1883 - DNA, 16 bp, Homo sapiens
  source 1..16: mol_type = genomic DNA
aatcatatttaccaac

SEQ ID NO: 1884 - DNA, 17 bp, Homo sapiens
  source 1..17: mol_type = genomic DNA
aatcatatttaccaacc

SEQ ID NO: 1885 - DNA, 18 bp, Homo sapiens
  source 1..18: mol_type = genomic DNA
aatcatatttaccaacca

SEQ ID NO: 1886 - DNA, 25 bp, Homo sapiens
  source 1..25: mol_type = genomic DNA
aatccaatgggggttccccgcgcag

SEQ ID NO: 1887 - DNA, 37 bp, Homo sapiens
  source 1..37: mol_type = genomic DNA
aatccaatggggtctccccgcgcaggttcgaaccctg

SEQ ID NO: 1888 - DNA, 41 bp, Homo sapiens
  source 1..41: mol_type = genomic DNA
aatccaatggggtctccccgcgcaggttcgaaccctgctcg

SEQ ID NO: 1889 - DNA, 48 bp, Homo sapiens
  source 1..48: mol_type = genomic DNA
aatccaatggggtttccccgcacaggttcgaatcctgttcgtgacgcc

SEQ ID NO: 1890 - DNA, 37 bp, Homo sapiens
  source 1..37: mol_type = genomic DNA
aatccagaggttccgggttcgagtcccggcagagatg

SEQ ID NO: 1891 - DNA, 38 bp, Homo sapiens
  source 1..38: mol_type = genomic DNA
aatccagaggttccgggttcgagtcccggcagagatgc

SEQ ID NO: 1892 - DNA, 39 bp, Homo sapiens
  source 1..39: mol_type = genomic DNA
aatccagaggttccgggttcgagtcccggcagagatgcc

SEQ ID NO: 1893 - DNA, 40 bp, Homo sapiens
  source 1..40: mol_type = genomic DNA
aatccagaggttccgggttcgagtcccggcagagatgcca

SEQ ID NO: 1894 - DNA, 19 bp, Homo sapiens
  source 1..19: mol_type = genomic DNA
aatccagcaatccgagttc

SEQ ID NO: 1895 - DNA, 21 bp, Homo sapiens
  source 1..21: mol_type = genomic DNA
aatccagcaatccgagttcga

SEQ ID NO: 1896 - DNA, 22 bp, Homo sapiens
  source 1..22: mol_type = genomic DNA
aatccagcaatccgagttcgaa

SEQ ID NO: 1897 - DNA, 23 bp, Homo sapiens
  source 1..23: mol_type = genomic DNA
aatccagcaatccgagttcgaat

SEQ ID NO: 1898 - DNA, 34 bp, Homo sapiens
  source 1..34: mol_type = genomic DNA
aatccagcaatccgagttcgaatctcggtgggac

SEQ ID NO: 1899 - DNA, 38 bp, Homo sapiens
  source 1..38: mol_type = genomic DNA
aatccagcaatccgagttcgaatctcggtgggacctcc

SEQ ID NO: 1900 - DNA, 39 bp, Homo sapiens
  source 1..39: mol_type = genomic DNA
aatccagcaatccgagttcgaatctcggtgggacctcca

SEQ ID NO: 1901 - DNA, 17 bp, Homo sapiens
  source 1..17: mol_type = genomic DNA
aatccagcgatccgagt

SEQ ID NO: 1902 - DNA, 18 bp, Homo sapiens
  source 1..18: mol_type = genomic DNA
aatccagcgatccgagtt

SEQ ID NO: 1903 - DNA, 19 bp, Homo sapiens
  source 1..19: mol_type = genomic DNA
aatccagcgatccgagttc

SEQ ID NO: 1904 - DNA, 20 bp, Homo sapiens
  source 1..20: mol_type = genomic DNA
aatccagcgatccgagttca

SEQ ID NO: 1905 - DNA, 21 bp, Homo sapiens
  source 1..21: mol_type = genomic DNA
aatccagcgatccgagttcaa

SEQ ID NO: 1906 - DNA, 22 bp, Homo sapiens
  source 1..22: mol_type = genomic DNA
aatccagcgatccgagttcaaa

SEQ ID NO: 1907 - DNA, 23 bp, Homo sapiens
  source 1..23: mol_type = genomic DNA
aatccagcgatccgagttcaaat

SEQ ID NO: 1908 - DNA, 24 bp, Homo sapiens
  source 1..24: mol_type = genomic DNA
aatccagcgatccgagttcaaatc

SEQ ID NO: 1909 - DNA, 25 bp, Homo sapiens
  source 1..25: mol_type = genomic DNA
aatccagcgatccgagttcaaatct

SEQ ID NO: 1910 - DNA, 29 bp, Homo sapiens
  source 1..29: mol_type = genomic DNA
aatccagcgatccgagttcaaatctcggt

SEQ ID NO: 1911 - DNA, 30 bp, Homo sapiens
  source 1..30: mol_type = genomic DNA
aatccagcgatccgagttcaaatctcggtg

SEQ ID NO: 1912 - DNA, 31 bp, Homo sapiens
  source 1..31: mol_type = genomic DNA
aatccagcgatccgagttcaaatctcggtgg

SEQ ID NO: 1913 - DNA, 36 bp, Homo sapiens
  source 1..36: mol_type = genomic DNA
aatccagcgatccgagttcaaatctcggtggaacct

SEQ ID NO: 1914 - DNA, 37 bp, Homo sapiens
  source 1..37: mol_type = genomic DNA
aatccagcgatccgagttcaaatctcggtggaacctc

SEQ ID NO: 1915 - DNA, 38 bp, Homo sapiens
  source 1..38: mol_type = genomic DNA
aatccagcgatccgagttcaaatctcggtggaacctcc

SEQ ID NO: 1916 - DNA, 39 bp, Homo sapiens
  source 1..39: mol_type = genomic DNA
aatccagcgatccgagttcaaatctcggtggaacctcca

SEQ ID NO: 1917 - DNA, 32 bp, Homo sapiens
  source 1..32: mol_type = genomic DNA
aatccagcgatccgagttcaaatctcggtggg

SEQ ID NO: 1918 - DNA, 34 bp, Homo sapiens
  source 1..34: mol_type = genomic DNA
aatccagcgatccgagttcaaatctcggtgggac

SEQ ID NO: 1919 - DNA, 35 bp, Homo sapiens
  source 1..35: mol_type = genomic DNA
aatccagcgatccgagttcaaatctcggtgggacc

SEQ ID NO: 1920 - DNA, 36 bp, Homo sapiens
  source 1..36: mol_type = genomic DNA
aatccagcgatccgagttcaaatctcggtgggacct

SEQ ID NO: 1921 - DNA, 37 bp, Homo sapiens
  source 1..37: mol_type = genomic DNA
aatccagcgatccgagttcaaatctcggtgggacctc

SEQ ID NO: 1922 - DNA, 38 bp, Homo sapiens
  source 1..38: mol_type = genomic DNA
aatccagcgatccgagttcaaatctcggtgggacctcc

SEQ ID NO: 1923 - DNA, 39 bp, Homo sapiens
  source 1..39: mol_type = genomic DNA
aatccagcgatccgagttcaaatctcggtgggacctcca

SEQ ID NO: 1924 - DNA, 22 bp, Homo sapiens
  source 1..22: mol_type = genomic DNA
aatccagcgatccgagttcaag

SEQ ID NO: 1925 - DNA, 23 bp, Homo sapiens
  source 1..23: mol_type = genomic DNA
aatccagcgatccgagttcaagt

SEQ ID NO: 1926 - DNA, 37 bp, Homo sapiens
  source 1..37: mol_type = genomic DNA
aatccagcgatccgagttcaagtctcggtggaacctc

SEQ ID NO: 1927 - DNA, 38 bp, Homo sapiens
  source 1..38: mol_type = genomic DNA
aatccagcgatccgagttcaagtctcggtggaacctcc

SEQ ID NO: 1928 - DNA, 39 bp, Homo sapiens
  source 1..39: mol_type = genomic DNA
aatccagcgatccgagttcaagtctcggtggaacctcca

SEQ ID NO: 1929 - DNA, 20 bp, Homo sapiens
  source 1..20: mol_type = genomic DNA
aatccagcgatccgagttcg

SEQ ID NO: 1930 - DNA, 21 bp, Homo sapiens
  source 1..21: mol_type = genomic DNA
aatccagcgatccgagttcga

SEQ ID NO: 1931 - DNA, 22 bp, Homo sapiens
  source 1..22: mol_type = genomic DNA
aatccagcgatccgagttcgag

SEQ ID NO: 1932 - DNA, 23 bp, Homo sapiens
  source 1..23: mol_type = genomic DNA
aatccagcgatccgagttcgagt

SEQ ID NO: 1933 - DNA, 24 bp, Homo sapiens
  source 1..24: mol_type = genomic DNA
aatccagcgatccgagttcgagtc

SEQ ID NO: 1934 - DNA, 25 bp, Homo sapiens
  source 1..25: mol_type = genomic DNA
aatccagcgatccgagttcgagtct

SEQ ID NO: 1935 - DNA, 30 bp, Homo sapiens
  source 1..30: mol_type = genomic DNA
aatccagcgatccgagttcgagtctcggtg

SEQ ID NO: 1936 - DNA, 36 bp, Homo sapiens
  source 1..36: mol_type = genomic DNA
aatccagcgatccgagttcgagtctcggtggaacct

SEQ ID NO: 1937 - DNA, 37 bp, Homo sapiens
  source 1..37: mol_type = genomic DNA
aatccagcgatccgagttcgagtctcggtggaacctc

SEQ ID NO: 1938 - DNA, 38 bp, Homo sapiens
  source 1..38: mol_type = genomic DNA
aatccagcgatccgagttcgagtctcggtggaacctcc

SEQ ID NO: 1939 - DNA, 39 bp, Homo sapiens
  source 1..39: mol_type = genomic DNA
aatccagcgatccgagttcgagtctcggtggaacctcca

SEQ ID NO: 1940 - DNA, 25 bp, Homo sapiens
  source 1..25: mol_type = genomic DNA
aatccattggggtctccccgcgcag

SEQ ID NO: 1941 - DNA, 37 bp, Homo sapiens
  source 1..37: mol_type = genomic DNA
aatccattggggtctccccgcgcaggttcgaatcctg

SEQ ID NO: 1942 - DNA, 40 bp, Homo sapiens
  source 1..40: mol_type = genomic DNA
aatccattggggtctccccgcgcaggttcgaatcctgccg

SEQ ID NO: 1943 - DNA, 41 bp, Homo sapiens
  source 1..41: mol_type = genomic DNA
aatccattggggtctccccgcgcaggttcgaatcctgccga

SEQ ID NO: 1944 - DNA, 42 bp, Homo sapiens
  source 1..42: mol_type = genomic DNA
aatccattggggtctccccgcgcaggttcgaatcctgccgac

SEQ ID NO: 1945 - DNA, 43 bp, Homo sapiens
  source 1..43: mol_type = genomic DNA
aatccattggggtctccccgcgcaggttcgaatcctgccgact

SEQ ID NO: 1946 - DNA, 22 bp, Homo sapiens
  source 1..22: mol_type = genomic DNA
aatccattggggtttccccgcg

SEQ ID NO: 1947 - DNA, 23 bp, Homo sapiens
  source 1..23: mol_type = genomic DNA
aatccattggggtttccccgcgc

SEQ ID NO: 1948 - DNA, 25 bp, Homo sapiens
  source 1..25: mol_type = genomic DNA
aatccattggggtttccccgcgcag

SEQ ID NO: 1949 - DNA, 26 bp, Homo sapiens
  source 1..26: mol_type = genomic DNA
aatccattggggtttccccgcgcagg

SEQ ID NO: 1950 - DNA, 27 bp, Homo sapiens
  source 1..27: mol_type = genomic DNA
aatccattggggtttccccgcgcaggt

SEQ ID NO: 1951 - DNA, 28 bp, Homo sapiens
  source 1..28: mol_type = genomic DNA
aatccattggggtttccccgcgcaggtt

SEQ ID NO: 1952 - DNA, 29 bp, Homo sapiens
  source 1..29: mol_type = genomic DNA
aatccattggggtttccccgcgcaggttc

SEQ ID NO: 1953 - DNA, 37 bp, Homo sapiens
  source 1..37: mol_type = genomic DNA
aatccattggggtttccccgcgcaggttcgaatcctg

SEQ ID NO: 1954 - DNA, 38 bp, Homo sapiens
  source 1..38: mol_type = genomic DNA
aatccattggggtttccccgcgcaggttcgaatcctgc

SEQ ID NO: 1955 - DNA, 39 bp, Homo sapiens
  source 1..39: mol_type = genomic DNA
aatccattggggtttccccgcgcaggttcgaatcctgcc

SEQ ID NO: 1956 - DNA, 40 bp, Homo sapiens
  source 1..40: mol_type = genomic DNA
aatccattggggtttccccgcgcaggttcgaatcctgccg

SEQ ID NO: 1957 - DNA, 41 bp, Homo sapiens
  source 1..41: mol_type = genomic DNA
aatccattggggtttccccgcgcaggttcgaatcctgccga

SEQ ID NO: 1958 - DNA, 42 bp, Homo sapiens
  source 1..42: mol_type = genomic DNA
aatccattggggtttccccgcgcaggttcgaatcctgccgac

SEQ ID NO: 1959 - DNA, 43 bp, Homo sapiens
  source 1..43: mol_type = genomic DNA
aatccattggggtttccccgcgcaggttcgaatcctgccgact

SEQ ID NO: 1960 - DNA, 46 bp, Homo sapiens
  source 1..46: mol_type = genomic DNA
aatccattggggtttccccgcgcaggttcgaatcctgccgactacg

SEQ ID NO: 1961 - DNA, 48 bp, Homo sapiens
  source 1..48: mol_type = genomic DNA
aatccattggggtttccccgcgcaggttcgaatcctgccgactacgcc

SEQ ID NO: 1962 - DNA, 16 bp, Homo sapiens
  source 1..16: mol_type = genomic DNA
aatccattgtgctctg

SEQ ID NO: 1963 - DNA, 23 bp, Homo sapiens
  source 1..23: mol_type = genomic DNA
aatccattgtgctctgcacgcgt

SEQ ID NO: 1964 - DNA, 24 bp, Homo sapiens
  source 1..24: mol_type = genomic DNA
aatccattgtgctctgcacgcgtg

SEQ ID NO: 1965 - DNA, 40 bp, Homo sapiens
  source 1..40: mol_type = genomic DNA
aatccattgtgctttgcacgcgtgggttcgaatcccatcc

SEQ ID NO: 1966 - DNA, 41 bp, Homo sapiens
  source 1..41: mol_type = genomic DNA
aatccattgtgctttgcacgcgtgggttcgaatcccatcct

SEQ ID NO: 1967 - DNA, 48 bp, Homo sapiens
  source 1..48: mol_type = genomic DNA
aatccattgtgctttgcacgcgtgggttcgaatcccatcctcgtcgcc

SEQ ID NO: 1968 - DNA, 18 bp, Homo sapiens
  source 1..18: mol_type = genomic DNA
aatcccaccctcgtcgcc

SEQ ID NO: 1969 - DNA, 19 bp, Homo sapiens
  source 1..19: mol_type = genomic DNA
aatcccaccctcgtcgcca

SEQ ID NO: 1970 - DNA, 16 bp, Homo sapiens
  source 1..16: mol_type = genomic DNA
aatcccaccgctgcca

SEQ ID NO: 1971 - DNA, 17 bp, Homo sapiens
  source 1..17: mol_type = genomic DNA
aatcccaccgctgccac

SEQ ID NO: 1972 - DNA, 18 bp, Homo sapiens
  source 1..18: mol_type = genomic DNA
aatcccaccgctgccacc

SEQ ID NO: 1973 - DNA, 19 bp, Homo sapiens
  source 1..19: mol_type = genomic DNA
aatcccaccgctgccacca

SEQ ID NO: 1974 - DNA, 18 bp, Homo sapiens
  source 1..18: mol_type = genomic DNA
aatcccaccttcgtcgcc

SEQ ID NO: 1975 - DNA, 19 bp, Homo sapiens
  source 1..19: mol_type = genomic DNA
aatcccaccttcgtcgcca

SEQ ID NO: 1976 - DNA, 17 bp, Homo sapiens
  source 1..17: mol_type = genomic DNA
aatcccactcctgacac

SEQ ID NO: 1977 - DNA, 18 bp, Homo sapiens
  source 1..18: mol_type = genomic DNA
aatcccactcctgacacc

SEQ ID NO: 1978 - DNA, 19 bp, Homo sapiens
  source 1..19: mol_type = genomic DNA
aatcccactcctgacacca

SEQ ID NO: 1979 - DNA, 16 bp, Homo sapiens
  source 1..16: mol_type = genomic DNA
aatcccacttctgaca

SEQ ID NO: 1980 - DNA, 18 bp, Homo sapiens
  source 1..18: mol_type = genomic DNA
aatcccacttctgacacc

SEQ ID NO: 1981 - DNA, 19 bp, Homo sapiens
  source 1..19: mol_type = genomic DNA
aatcccacttctgacacca

SEQ ID NO: 1982 - DNA, 16 bp, Homo sapiens
  source 1..16: mol_type = genomic DNA
aatcccagcggggcct

SEQ ID NO: 1983 - DNA, 16 bp, Homo sapiens
  source 1..16: mol_type = genomic DNA
aatcccagcggtgcct

SEQ ID NO: 1984 - DNA, 17 bp, Homo sapiens
  source 1..17: mol_type = genomic DNA
aatcccagcggtgcctc

SEQ ID NO: 1985 - DNA, 18 bp, Homo sapiens
  source 1..18: mol_type = genomic DNA
aatcccagcggtgcctcc

SEQ ID NO: 1986 - DNA, 19 bp, Homo sapiens
  source 1..19: mol_type = genomic DNA
aatcccagcggtgcctcca

SEQ ID NO: 1987 - DNA, 34 bp, Homo sapiens
  source 1..34: mol_type = genomic DNA
aatcccagggtcgtgggttcgagccccacgttgg

SEQ ID NO: 1988 - DNA, 36 bp, Homo sapiens
  source 1..36: mol_type = genomic DNA
aatcccagggtcgtgggttcgagccccacgttgggc

SEQ ID NO: 1989 - DNA, 39 bp, Homo sapiens
  source 1..39: mol_type = genomic DNA
aatcccagggtcgtgggttcgagccccacgttgggcgcc

SEQ ID NO: 1990 - DNA, 18 bp, Homo sapiens
  source 1..18: mol_type = genomic DNA
aatcccagtagagcctcc

SEQ ID NO: 1991 - DNA, 19 bp, Homo sapiens
  source 1..19: mol_type = genomic DNA
aatcccagtagagcctcca

SEQ ID NO: 1992 - DNA, 17 bp, Homo sapiens
  source 1..17: mol_type = genomic DNA
aatcccatcctcgtcgc

SEQ ID NO: 1993 - DNA, 18 bp, Homo sapiens
  source 1..18: mol_type = genomic DNA
aatcccatcctcgtcgcc

SEQ ID NO: 1994 - DNA, 19 bp, Homo sapiens
  source 1..19: mol_type = genomic DNA
aatcccatcctcgtcgcca

SEQ ID NO: 1995 - DNA, 19 bp, Homo sapiens
  source 1..19: mol_type = genomic DNA
aatccccggcacctccacc

SEQ ID NO: 1996 - DNA, 20 bp, Homo sapiens
  source 1..20: mol_type = genomic DNA
aatccccggcacctccacca

SEQ ID NO: 1997 - DNA, 16 bp, Homo sapiens
  source 1..16: mol_type = genomic DNA
aatcccggacgagccc

SEQ ID NO: 1998 - DNA, 17 bp, Homo sapiens
  source 1..17: mol_type = genomic DNA
aatcccggacgagcccc

SEQ ID NO: 1999 - DNA, 18 bp, Homo sapiens
  source 1..18: mol_type = genomic DNA
aatcccggacgagccccc

SEQ ID NO: 2000 - DNA, 19 bp, Homo sapiens
  source 1..19: mol_type = genomic DNA
aatcccggacgagccccca

SEQ ID NO: 2001 - DNA, 19 bp, Homo sapiens
  source 1..19: mol_type = genomic DNA
aatccctccgtggttacca

SEQ ID NO: 2002 - DNA, 16 bp, Homo sapiens
  source 1..16: mol_type = genomic DNA
aatcccttgtgcactg

SEQ ID NO: 2003 - DNA, 16 bp, Homo sapiens
  source 1..16: mol_type = genomic DNA
aatccgagtcacggca

SEQ ID NO: 2004 - DNA, 17 bp, Homo sapiens
  source 1..17: mol_type = genomic DNA
aatccgagtcacggcac

SEQ ID NO: 2005 - DNA, 18 bp, Homo sapiens
  source 1..18: mol_type = genomic DNA
aatccgagtcacggcacc

SEQ ID NO: 2006 - DNA, 19 bp, Homo sapiens
  source 1..19: mol_type = genomic DNA
aatccgagtcacggcacca

SEQ ID NO: 2007 - DNA, 18 bp, Homo sapiens
  source 1..18: mol_type = genomic DNA
aatccggctcgaaggacc

SEQ ID NO: 2008 - DNA, 19 bp, Homo sapiens
  source 1..19: mol_type = genomic DNA
aatccggctcgaaggacca

SEQ ID NO: 2009 - DNA, 18 bp, Homo sapiens
  source 1..18: mol_type = genomic DNA
aatccggctcggaggacc

SEQ ID NO: 2010 - DNA, 17 bp, Homo sapiens
  source 1..17: mol_type = genomic DNA
aatccgggtgccccctc

SEQ ID NO: 2011 - DNA, 18 bp, Homo sapiens
  source 1..18: mol_type = genomic DNA
aatccgggtgccccctcc

SEQ ID NO: 2012 - DNA, 19 bp, Homo sapiens
  source 1..19: mol_type = genomic DNA
aatccgggtgccccctcca

SEQ ID NO: 2013 - DNA, 18 bp, Homo sapiens
  source 1..18: mol_type = genomic DNA
aatcctatatatcttacc

SEQ ID NO: 2014 - DNA, 19 bp, Homo sapiens
  source 1..19: mol_type = genomic DNA
aatcctatatatcttacca

SEQ ID NO: 2015 - DNA, 18 bp, Homo sapiens
  source 1..18: mol_type = genomic DNA
aatcctgccgactacgcc

SEQ ID NO: 2016 - DNA, 19 bp, Homo sapiens
  source 1..19: mol_type = genomic DNA
aatcctgccgactacgcca

SEQ ID NO: 2017 - DNA, 18 bp, Homo sapiens
  source 1..18: mol_type = genomic DNA
aatcctgttcgtgacgcc

SEQ ID NO: 2018 - DNA, 19 bp, Homo sapiens
  source 1..19: mol_type = genomic DNA
aatcctgttcgtgacgcca

SEQ ID NO: 2019 - DNA, 20 bp, Homo sapiens
  source 1..20: mol_type = genomic DNA
aatcgcataaaacttaaaac

SEQ ID NO: 2020 - DNA, 21 bp, Homo sapiens
  source 1..21: mol_type = genomic DNA
aatcgcataaaacttaaaact

SEQ ID NO: 2021 - DNA, 22 bp, Homo sapiens
  source 1..22: mol_type = genomic DNA
aatcgcataaaacttaaaactt

SEQ ID NO: 2022 - DNA, 23 bp, Homo sapiens
  source 1..23: mol_type = genomic DNA
aatcgcataaaacttaaaacttt

SEQ ID NO: 2023 - DNA, 27 bp, Homo sapiens
  source 1..27: mol_type = genomic DNA
aatcgcataaaacttaaaactttacag

SEQ ID NO: 2024 - DNA, 32 bp, Homo sapiens
  source 1..32: mol_type = genomic DNA
aatcgcataaaacttaaaactttacagtcaga

SEQ ID NO: 2025 - DNA, 34 bp, Homo sapiens
  source 1..34: mol_type = genomic DNA
aatcgcataaaacttaaaactttacagtcagagg

SEQ ID NO: 2026 - DNA, 48 bp, Homo sapiens
  source 1..48: mol_type = genomic DNA
aatcgcataaaacttaaaactttacagtcagaggttcaattcctcttc

SEQ ID NO: 2027 - DNA, 21 bp, Homo sapiens
  source 1..21: mol_type = genomic DNA
aatcggttagcgcgcggtact

SEQ ID NO: 2028 - DNA, 23 bp, Homo sapiens
  source 1..23: mol_type = genomic DNA
aatcggttagcgcgcggtactta

SEQ ID NO: 2029 - DNA, 29 bp, Homo sapiens
  source 1..29: mol_type = genomic DNA
aatcggttagcgcgcggtacttataatgc

SEQ ID NO: 2030 - DNA, 20 bp, Homo sapiens
  source 1..20: mol_type = genomic DNA
aatctaaagacaggggttag

SEQ ID NO: 2031 - DNA, 21 bp, Homo sapiens
  source 1..21: mol_type = genomic DNA
aatctaaagacaggggttagg

SEQ ID NO: 2032 - DNA, 23 bp, Homo sapiens
  source 1..23: mol_type = genomic DNA
aatctaaagacaggggttaggcc

SEQ ID NO: 2033 - DNA, 24 bp, Homo sapiens
  source 1..24: mol_type = genomic DNA
aatctaaagacaggggttaggcct

SEQ ID NO: 2034 - DNA, 25 bp, Homo sapiens
  source 1..25: mol_type = genomic DNA
aatctaaagacaggggttaggcctc

SEQ ID NO: 2035 - DNA, 26 bp, Homo sapiens
  source 1..26: mol_type = genomic DNA
aatctaaagacaggggttaggcctct

SEQ ID NO: 2036 - DNA, 27 bp, Homo sapiens
  source 1..27: mol_type = genomic DNA
aatctaaagacaggggttaggcctctt

SEQ ID NO: 2037 - DNA, 28 bp, Homo sapiens
  source 1..28: mol_type = genomic DNA
aatctaaagacaggggttaggcctcttt

SEQ ID NO: 2038 - DNA, 29 bp, Homo sapiens
  source 1..29: mol_type = genomic DNA
aatctaaagacaggggttaggcctctttt

SEQ ID NO: 2039 - DNA, 31 bp, Homo sapiens
  source 1..31: mol_type = genomic DNA
aatctaaagacaggggttaggcctcttttta

SEQ ID NO: 2040 - DNA, 33 bp, Homo sapiens
  source 1..33: mol_type = genomic DNA
aatctaaagacaggggttaggcctctttttacc

SEQ ID NO: 2041 - DNA, 36 bp, Homo sapiens
  source 1..36: mol_type = genomic DNA
aatctaaagacaggggttaggcctctttttaccacc

SEQ ID NO: 2042 - DNA, 37 bp, Homo sapiens
  source 1..37: mol_type = genomic DNA
aatctaaagacaggggttaggcctctttttaccacca

SEQ ID NO: 2043 - DNA, 21 bp, Homo sapiens
  source 1..21: mol_type = genomic DNA
aatctcagggtcgtgggttcg

SEQ ID NO: 2044 - DNA, 35 bp, Homo sapiens
  source 1..35: mol_type = genomic DNA
aatctcagggtcgtgggttcgagccccacgttggg

SEQ ID NO: 2045 - DNA, 36 bp, Homo sapiens
  source 1..36: mol_type = genomic DNA
aatctcagggtcgtgggttcgagccccacgttgggc

SEQ ID NO: 2046 - DNA, 37 bp, Homo sapiens
  source 1..37: mol_type = genomic DNA
aatctcagggtcgtgggttcgagccccacgttgggcg

SEQ ID NO: 2047 - DNA, 38 bp, Homo sapiens
  source 1..38: mol_type = genomic DNA
aatctcagggtcgtgggttcgagccccacgttgggcgc

SEQ ID NO: 2048 - DNA, 39 bp, Homo sapiens
  source 1..39: mol_type = genomic DNA
aatctcagggtcgtgggttcgagccccacgttgggcgcc

SEQ ID NO: 2049 - DNA, 40 bp, Homo sapiens
  source 1..40: mol_type = genomic DNA
aatctcagggtcgtgggttcgagccccacgttgggcgcca

SEQ ID NO: 2050 - DNA, 16 bp, Homo sapiens
  source 1..16: mol_type = genomic DNA
aatctcgctggggcct

SEQ ID NO: 2051 - DNA, 17 bp, Homo sapiens
  source 1..17: mol_type = genomic DNA
aatctcgctggggcctc

SEQ ID NO: 2052 - DNA, 18 bp, Homo sapiens
  source 1..18: mol_type = genomic DNA
aatctcgctggggcctcc

SEQ ID NO: 2053 - DNA, 19 bp, Homo sapiens
  source 1..19: mol_type = genomic DNA
aatctcgctggggcctcca

SEQ ID NO: 2054 - DNA, 16 bp, Homo sapiens
  source 1..16: mol_type = genomic DNA
aatctcggtggaacct

SEQ ID NO: 2055 - DNA, 17 bp, Homo sapiens
  source 1..17: mol_type = genomic DNA
aatctcggtggaacctc

SEQ ID NO: 2056 - DNA, 18 bp, Homo sapiens
  source 1..18: mol_type = genomic DNA
aatctcggtggaacctcc

SEQ ID NO: 2057 - DNA, 19 bp, Homo sapiens
  source 1..19: mol_type = genomic DNA
aatctcggtggaacctcca

SEQ ID NO: 2058 - DNA, 17 bp, Homo sapiens
  source 1..17: mol_type = genomic DNA
aatctcggtgggacccc

SEQ ID NO: 2059 - DNA, 16 bp, Homo sapiens
  source 1..16: mol_type = genomic DNA
aatctcggtgggacct

SEQ ID NO: 2060 - DNA, 17 bp, Homo sapiens
  source 1..17: mol_type = genomic DNA
aatctcggtgggacctc

SEQ ID NO: 2061 - DNA, 18 bp, Homo sapiens
  source 1..18: mol_type = genomic DNA
aatctcggtgggacctcc

SEQ ID NO: 2062 - DNA, 19 bp, Homo sapiens
  source 1..19: mol_type = genomic DNA
aatctcggtgggacctcca

SEQ ID NO: 2063 - DNA, 18 bp, Homo sapiens
  source 1..18: mol_type = genomic DNA
aatctgaaggtcctgagt

SEQ ID NO: 2064 - DNA, 20 bp, Homo sapiens
  source 1..20: mol_type = genomic DNA
aatctgaaggtcctgagttc

SEQ ID NO: 2065 - DNA, 21 bp, Homo sapiens
  source 1..21: mol_type = genomic DNA
aatctgaaggtcctgagttcg

SEQ ID NO: 2066 - DNA, 24 bp, Homo sapiens
  source 1..24: mol_type = genomic DNA
aatctgaaggtcctgagttcgaac

SEQ ID NO: 2067 - DNA, 26 bp, Homo sapiens
  source 1..26: mol_type = genomic DNA
aatctgaaggtcctgagttcgaacct

SEQ ID NO: 2068 - DNA, 35 bp, Homo sapiens
  source 1..35: mol_type = genomic DNA
aatctgaaggtcctgagttcgaacctcagaggggg

SEQ ID NO: 2069 - DNA, 36 bp, Homo sapiens
  source 1..36: mol_type = genomic DNA
aatctgaaggtcctgagttcgaacctcagagggggc

SEQ ID NO: 2070 - DNA, 37 bp, Homo sapiens
  source 1..37: mol_type = genomic DNA
aatctgaaggtcctgagttcgaacctcagagggggca

SEQ ID NO: 2071 - DNA, 38 bp, Homo sapiens
  source 1..38: mol_type = genomic DNA
aatctgaaggtcctgagttcgaacctcagagggggcac

SEQ ID NO: 2072 - DNA, 39 bp, Homo sapiens
  source 1..39: mol_type = genomic DNA
aatctgaaggtcctgagttcgaacctcagagggggcacc

SEQ ID NO: 2073 - DNA, 40 bp, Homo sapiens
  source 1..40: mol_type = genomic DNA
aatctgaaggtcctgagttcgaacctcagagggggcacca

SEQ ID NO: 2074 - DNA, 36 bp, Homo sapiens
  source 1..36: mol_type = genomic DNA
aatctgaaggtcctgagttcgagcctcagagagggc

SEQ ID NO: 2075 - DNA, 37 bp, Homo sapiens
  source 1..37: mol_type = genomic DNA
aatctgaaggtcctgagttcgagcctcagagagggca

SEQ ID NO: 2076 - DNA, 39 bp, Homo sapiens
  source 1..39: mol_type = genomic DNA
aatctgaaggtcctgagttcgagcctcagagagggcacc

SEQ ID NO: 2077 - DNA, 19 bp, Homo sapiens
  source 1..19: mol_type = genomic DNA
aatctgaaggtcgtgagtt

SEQ ID NO: 2078 - DNA, 21 bp, Homo sapiens
  source 1..21: mol_type = genomic DNA
aatctgaaggtcgtgagttcg

SEQ ID NO: 2079 - DNA, 22 bp, Homo sapiens
  source 1..22: mol_type = genomic DNA
aatctgaaggtcgtgagttcga

SEQ ID NO: 2080 - DNA, 24 bp, Homo sapiens
  source 1..24: mol_type = genomic DNA
aatctgaaggtcgtgagttcgagc

SEQ ID NO: 2081 - DNA, 34 bp, Homo sapiens
  source 1..34: mol_type = genomic DNA
aatctgaaggtcgtgagttcgagcctcacacggg

SEQ ID NO: 2082 - DNA, 35 bp, Homo sapiens
  source 1..35: mol_type = genomic DNA
aatctgaaggtcgtgagttcgagcctcacacgggg

SEQ ID NO: 2083 - DNA, 36 bp, Homo sapiens
  source 1..36: mol_type = genomic DNA
aatctgaaggtcgtgagttcgagcctcacacggggc

SEQ ID NO: 2084 - DNA, 37 bp, Homo sapiens
  source 1..37: mol_type = genomic DNA
aatctgaaggtcgtgagttcgagcctcacacggggca

SEQ ID NO: 2085 - DNA, 38 bp, Homo sapiens
  source 1..38: mol_type = genomic DNA
aatctgaaggtcgtgagttcgagcctcacacggggcac

SEQ ID NO: 2086 - DNA, 39 bp, Homo sapiens
  source 1..39: mol_type = genomic DNA
aatctgaaggtcgtgagttcgagcctcacacggggcacc

SEQ ID NO: 2087 - DNA, 40 bp, Homo sapiens
  source 1..40: mol_type = genomic DNA
aatctgaaggtcgtgagttcgagcctcacacggggcacca

SEQ ID NO: 2088 - DNA, 24 bp, Homo sapiens
  source 1..24: mol_type = genomic DNA
aatctgaaggtcgtgagttcgatc

SEQ ID NO: 2089 - DNA, 34 bp, Homo sapiens
  source 1..34: mol_type = genomic DNA
aatctgaaggtcgtgagttcgatcctcacacggg

SEQ ID NO: 2090 - DNA, 35 bp, Homo sapiens
  source 1..35: mol_type = genomic DNA
aatctgaaggtcgtgagttcgatcctcacacgggg

SEQ ID NO: 2091 - DNA, 36 bp, Homo sapiens
  source 1..36: mol_type = genomic DNA
aatctgaaggtcgtgagttcgatcctcacacggggc

SEQ ID NO: 2092 - DNA, 37 bp, Homo sapiens
  source 1..37: mol_type = genomic DNA
aatctgaaggtcgtgagttcgatcctcacacggggca

SEQ ID NO: 2093 - DNA, 38 bp, Homo sapiens
  source 1..38: mol_type = genomic DNA
aatctgaaggtcgtgagttcgatcctcacacggggcac

SEQ ID NO: 2094 - DNA, 39 bp, Homo sapiens
  source 1..39: mol_type = genomic DNA
aatctgaaggtcgtgagttcgatcctcacacggggcacc

SEQ ID NO: 2095 - DNA, 40 bp, Homo sapiens
  source 1..40: mol_type = genomic DNA
aatctgaaggtcgtgagttcgatcctcacacggggcacca

SEQ ID NO: 2096 - DNA, 22 bp, Homo sapiens
  source 1..22: mol_type = genomic DNA
aatctgacaacagaggcttacg

SEQ ID NO: 2097 - DNA, 23 bp, Homo sapiens
  source 1..23: mol_type = genomic DNA
aatctgacaacagaggcttacga

SEQ ID NO: 2098 - DNA, 24 bp, Homo sapiens
  source 1..24: mol_type = genomic DNA
aatctgacaacagaggcttacgac

SEQ ID NO: 2099 - DNA, 25 bp, Homo sapiens
  source 1..25: mol_type = genomic DNA
aatctgacaacagaggcttacgacc

SEQ ID NO: 2100 - DNA, 26 bp, Homo sapiens
  source 1..26: mol_type = genomic DNA
aatctgacaacagaggcttacgaccc

SEQ ID NO: 2101 - DNA, 27 bp, Homo sapiens
  source 1..27: mol_type = genomic DNA
aatctgacaacagaggcttacgacccc

SEQ ID NO: 2102 - DNA, 28 bp, Homo sapiens
  source 1..28: mol_type = genomic DNA
aatctgacaacagaggcttacgacccct

SEQ ID NO: 2103 - DNA, 29 bp, Homo sapiens
  source 1..29: mol_type = genomic DNA
aatctgacaacagaggcttacgacccctt

SEQ ID NO: 2104 - DNA, 30 bp, Homo sapiens
  source 1..30: mol_type = genomic DNA
aatctgacaacagaggcttacgacccctta

SEQ ID NO: 2105 - DNA, 31 bp, Homo sapiens
  source 1..31: mol_type = genomic DNA
aatctgacaacagaggcttacgaccccttat

SEQ ID NO: 2106 - DNA, 32 bp, Homo sapiens
  source 1..32: mol_type = genomic DNA
aatctgacaacagaggcttacgaccccttatt

SEQ ID NO: 2107 - DNA, 34 bp, Homo sapiens
  source 1..34: mol_type = genomic DNA
aatctgacaacagaggcttacgaccccttattta

SEQ ID NO: 2108 - DNA, 35 bp, Homo sapiens
  source 1..35: mol_type = genomic DNA
aatctgacaacagaggcttacgaccccttatttac

SEQ ID NO: 2109 - DNA, 36 bp, Homo sapiens
  source 1..36: mol_type = genomic DNA
aatctgacaacagaggcttacgaccccttatttacc

SEQ ID NO: 2110 - DNA, 37 bp, Homo sapiens
  source 1..37: mol_type = genomic DNA
aatctgacaacagaggcttacgaccccttatttaccc

SEQ ID NO: 2111 - DNA, 38 bp, Homo sapiens
  source 1..38: mol_type = genomic DNA
aatctgacaacagaggcttacgaccccttatttacccc

SEQ ID NO: 2112 - DNA, 39 bp, Homo sapiens
  source 1..39: mol_type = genomic DNA
aatctgacaacagaggcttacgaccccttatttacccca

SEQ ID NO: 2113 - DNA, 29 bp, Homo sapiens
  source 1..29: mol_type = genomic DNA
aatctgagggtccagggttcaagtccctg

SEQ ID NO: 2114 - DNA, 37 bp, Homo sapiens
  source 1..37: mol_type = genomic DNA
aatctgagggtccagggttcaagtccctgttcgggcg

SEQ ID NO: 2115 - DNA, 38 bp, Homo sapiens
  source 1..38: mol_type = genomic DNA
aatctgagggtccagggttcaagtccctgttcgggcgc

SEQ ID NO: 2116 - DNA, 39 bp, Homo sapiens
  source 1..39: mol_type = genomic DNA
aatctgagggtccagggttcaagtccctgttcgggcgcc

SEQ ID NO: 2117 - DNA, 40 bp, Homo sapiens
  source 1..40: mol_type = genomic DNA
aatctgagggtccagggttcaagtccctgttcgggcgcca

SEQ ID NO: 2118 - DNA, 17 bp, Homo sapiens
  source 1..17: mol_type = genomic DNA
aatcttagctttgggtg

SEQ ID NO: 2119 - DNA, 20 bp, Homo sapiens
  source 1..20: mol_type = genomic DNA
aatcttagctttgggtgcta

SEQ ID NO: 2120 - DNA, 30 bp, Homo sapiens
  source 1..30: mol_type = genomic DNA
aatcttagctttgggtgctaatggtggagt

SEQ ID NO: 2121 - DNA, 31 bp, Homo sapiens
  source 1..31: mol_type = genomic DNA
aatcttagctttgggtgctaatggtggagtt

SEQ ID NO: 2122 - DNA, 32 bp, Homo sapiens
  source 1..32: mol_type = genomic DNA
aatcttagctttgggtgctaatggtggagtta

SEQ ID NO: 2123 - DNA, 37 bp, Homo sapiens
  source 1..37: mol_type = genomic DNA
aatcttagctttgggtgctaatggtggagttaaagac

SEQ ID NO: 2124 - DNA, 38 bp, Homo sapiens
  source 1..38: mol_type = genomic DNA
aatcttagctttgggtgctaatggtggagttaaagact

SEQ ID NO: 2125 - DNA, 16 bp, Homo sapiens
  source 1..16: mol_type = genomic DNA
aatgatttcgactcat

SEQ ID NO: 2126 - DNA, 17 bp, Homo sapiens
  source 1..17: mol_type = genomic DNA
aatgatttcgactcatt

SEQ ID NO: 2127 - DNA, 18 bp, Homo sapiens
  source 1..18: mol_type = genomic DNA
aatgatttcgactcatta

SEQ ID NO: 2128 - DNA, 19 bp, Homo sapiens
  source 1..19: mol_type = genomic DNA
aatgatttcgactcattaa

SEQ ID NO: 2129 - DNA, 20 bp, Homo sapiens
  source 1..20: mol_type = genomic DNA
aatgatttcgactcattaaa

SEQ ID NO: 2130 - DNA, 22 bp, Homo sapiens
  source 1..22: mol_type = genomic DNA
aatgatttcgactcattaaatt

SEQ ID NO: 2131 - DNA, 27 bp, Homo sapiens
  source 1..27: mol_type = genomic DNA
aatgatttcgactcattaaattatgat

SEQ ID NO: 2132 - DNA, 28 bp, Homo sapiens
  source 1..28: mol_type = genomic DNA
aatgatttcgactcattaaattatgata

SEQ ID NO: 2133 - DNA, 30 bp, Homo sapiens
  source 1..30: mol_type = genomic DNA
aatgatttcgactcattaaattatgataat

SEQ ID NO: 2134 - DNA, 31 bp, Homo sapiens
  source 1..31: mol_type = genomic DNA
aatgatttcgactcattaaattatgataatc

SEQ ID NO: 2135 - DNA, 40 bp, Homo sapiens
  source 1..40: mol_type = genomic DNA
aatgatttcgactcattaaattatgataatcatatttacc

SEQ ID NO: 2136 - DNA, 44 bp, Homo sapiens
  source 1..44: mol_type = genomic DNA
aatgatttcgactcattaaattatgataatcatatttaccaacc

SEQ ID NO: 2137 - DNA, 19 bp, Homo sapiens
  source 1..19: mol_type = genomic DNA
aatgccgaggttgtgagtt

SEQ ID NO: 2138 - DNA, 20 bp, Homo sapiens
  source 1..20: mol_type = genomic DNA
aatgccgaggttgtgagttc

SEQ ID NO: 2139 - DNA, 24 bp, Homo sapiens
  source 1..24: mol_type = genomic DNA
aatgccgaggttgtgagttcaagc

SEQ ID NO: 2140 - DNA, 23 bp, Homo sapiens
  source 1..23: mol_type = genomic DNA
aatgccgaggttgtgagttcgag

SEQ ID NO: 2141 - DNA, 24 bp, Homo sapiens
  source 1..24: mol_type = genomic DNA
aatgccgaggttgtgagttcgagc

SEQ ID NO: 2142 - DNA, 26 bp, Homo sapiens
  source 1..26: mol_type = genomic DNA
aatgccgaggttgtgagttcgagcct

SEQ ID NO: 2143 - DNA, 34 bp, Homo sapiens
  source 1..34: mol_type = genomic DNA
aatgccgaggttgtgagttcgagcctcacctgga

SEQ ID NO: 2144 - DNA, 35 bp, Homo sapiens
  source 1..35: mol_type = genomic DNA
aatgccgaggttgtgagttcgagcctcacctggag

SEQ ID NO: 2145 - DNA, 37 bp, Homo sapiens
  source 1..37: mol_type = genomic DNA
aatgccgaggttgtgagttcgagcctcacctggagca

SEQ ID NO: 2146 - DNA, 39 bp, Homo sapiens
  source 1..39: mol_type = genomic DNA
aatgccgaggttgtgagttcgagcctcacctggagcacc

SEQ ID NO: 2147 - DNA, 23 bp, Homo sapiens
  source 1..23: mol_type = genomic DNA
aatggacatatgtccgcgtgggt

SEQ ID NO: 2148 - DNA, 25 bp, Homo sapiens
  source 1..25: mol_type = genomic DNA
aatggacatatgtccgcgtgggttc

SEQ ID NO: 2149 - DNA, 26 bp, Homo sapiens
  source 1..26: mol_type = genomic DNA
aatggacatatgtccgcgtgggttcg

SEQ ID NO: 2150 - DNA, 43 bp, Homo sapiens
  source 1..43: mol_type = genomic DNA
aatggacatatgtccgcgtgggttcgaaccccactcctggtac

SEQ ID NO: 2151 - DNA, 16 bp, Homo sapiens
  source 1..16: mol_type = genomic DNA
aatggacgagcgcgct

SEQ ID NO: 2152 - DNA, 17 bp, Homo sapiens
  source 1..17: mol_type = genomic DNA
aatggacgagcgcgctg

SEQ ID NO: 2153 - DNA, 19 bp, Homo sapiens
  source 1..19: mol_type = genomic DNA
aatggacgagcgcgctgga

SEQ ID NO: 2154 - DNA, 16 bp, Homo sapiens
  source 1..16: mol_type = genomic DNA
aatggaggcgtgggtt

SEQ ID NO: 2155 - DNA, 21 bp, Homo sapiens
  source 1..21: mol_type = genomic DNA
aatggaggcgtgggttcgaat

SEQ ID NO: 2156 - DNA, 23 bp, Homo sapiens
  source 1..23: mol_type = genomic DNA
aatggaggcgtgggttcgaatcc

SEQ ID NO: 2157 - DNA, 27 bp, Homo sapiens
  source 1..27: mol_type = genomic DNA
aatggaggcgtgggttcgaatcccact

SEQ ID NO: 2158 - DNA, 29 bp, Homo sapiens
  source 1..29: mol_type = genomic DNA
aatggaggcgtgggttcgaatcccacttc

SEQ ID NO: 2159 - DNA, 31 bp, Homo sapiens
  source 1..31: mol_type = genomic DNA
aatggaggcgtgggttcgaatcccacttctg

SEQ ID NO: 2160 - DNA, 34 bp, Homo sapiens
  source 1..34: mol_type = genomic DNA
aatggaggcgtgggttcgaatcccacttctgaca

SEQ ID NO: 2161 - DNA, 35 bp, Homo sapiens
  source 1..35: mol_type = genomic DNA
aatggaggcgtgggttcgaatcccacttctgacac

SEQ ID NO: 2162 - DNA, 36 bp, Homo sapiens
  source 1..36: mol_type = genomic DNA
aatggaggcgtgggttcgaatcccacttctgacacc

SEQ ID NO: 2163 - DNA, 37 bp, Homo sapiens
  source 1..37: mol_type = genomic DNA
aatggaggcgtgggttcgaatcccacttctgacacca

SEQ ID NO: 2164 - DNA, 18 bp, Homo sapiens
  source 1..18: mol_type = genomic DNA
aatggataacgcgtctga

SEQ ID NO: 2165 - DNA, 19 bp, Homo sapiens
  source 1..19: mol_type = genomic DNA
aatggataacgcgtctgac

SEQ ID NO: 2166 - DNA, 20 bp, Homo sapiens
  source 1..20: mol_type = genomic DNA
aatggataacgcgtctgact

SEQ ID NO: 2167 - DNA, 16 bp, Homo sapiens
  source 1..16: mol_type = genomic DNA
aatggataaggcactg

SEQ ID NO: 2168 - DNA, 17 bp, Homo sapiens
  source 1..17: mol_type = genomic DNA
aatggataaggcactgg

SEQ ID NO: 2169 - DNA, 18 bp, Homo sapiens
  source 1..18: mol_type = genomic DNA
aatggataaggcactggc

SEQ ID NO: 2170 - DNA, 19 bp, Homo sapiens
  source 1..19: mol_type = genomic DNA
aatggataaggcactggcc

SEQ ID NO: 2171 - DNA, 16 bp, Homo sapiens
  source 1..16: mol_type = genomic DNA
aatggataaggcatca

SEQ ID NO: 2172 - DNA, 17 bp, Homo sapiens
  source 1..17: mol_type = genomic DNA
aatggataaggcatcag

SEQ ID NO: 2173 - DNA, 18 bp, Homo sapiens
  source 1..18: mol_type = genomic DNA
aatggataaggcatcagc

SEQ ID NO: 2174 - DNA, 20 bp, Homo sapiens
  source 1..20: mol_type = genomic DNA
aatggataaggcatcagcct

SEQ ID NO: 2175 - DNA, 22 bp, Homo sapiens
  source 1..22: mol_type = genomic DNA
aatggataaggcatcagcctcc

SEQ ID NO: 2176 - DNA, 23 bp, Homo sapiens
  source 1..23: mol_type = genomic DNA
aatggataaggcatcagcctccg

SEQ ID NO: 2177 - DNA, 29 bp, Homo sapiens
  source 1..29: mol_type = genomic DNA
aatggataaggcatcagcctccggagctg

SEQ ID NO: 2178 - DNA, 16 bp, Homo sapiens
  source 1..16: mol_type = genomic DNA
aatggataaggcattg

SEQ ID NO: 2179 - DNA, 17 bp, Homo sapiens
  source 1..17: mol_type = genomic DNA
aatggataaggcattgg

SEQ ID NO: 2180 - DNA, 18 bp, Homo sapiens
  source 1..18: mol_type = genomic DNA
aatggataaggcattggc

SEQ ID NO: 2181 - DNA, 19 bp, Homo sapiens
  source 1..19: mol_type = genomic DNA
aatggataaggcattggcc

SEQ ID NO: 2182 - DNA, 20 bp, Homo sapiens
  source 1..20: mol_type = genomic DNA
aatggataaggcattggcct

SEQ ID NO: 2183 - DNA, 21 bp, Homo sapiens
  source 1..21: mol_type = genomic DNA
aatggataaggcattggcctc

SEQ ID NO: 2184 - DNA, 22 bp, Homo sapiens
  source 1..22: mol_type = genomic DNA
aatggataaggcattggcctcc

SEQ ID NO: 2185 - DNA, 17 bp, Homo sapiens
  source 1..17: mol_type = genomic DNA
aatggataaggcgtctg

SEQ ID NO: 2186 - DNA, 18 bp, Homo sapiens
  source 1..18: mol_type = genomic DNA
aatggataaggcgtctga

SEQ ID NO: 2187 - DNA, 22 bp, Homo sapiens
  source 1..22: mol_type = genomic DNA
aatggataaggcgtctgattcc

SEQ ID NO: 2188 - DNA, 16 bp, Homo sapiens
  source 1..16: mol_type = genomic DNA
aatggatagcgcattg

SEQ ID NO: 2189 - DNA, 17 bp, Homo sapiens
  source 1..17: mol_type = genomic DNA
aatggatagcgcattgg

SEQ ID NO: 2190 - DNA, 18 bp, Homo sapiens
  source 1..18: mol_type = genomic DNA
aatggatagcgcattgga

SEQ ID NO: 2191 - DNA, 19 bp, Homo sapiens
  source 1..19: mol_type = genomic DNA
aatggatagcgcattggac

SEQ ID NO: 2192 - DNA, 20 bp, Homo sapiens
  source 1..20: mol_type = genomic DNA
aatggatagcgcattggact

SEQ ID NO: 2193 - DNA, 25 bp, Homo sapiens
  source 1..25: mol_type = genomic DNA
aatggattcatatccgcgtgggttc

SEQ ID NO: 2194 - DNA, 42 bp, Homo sapiens
  source 1..42: mol_type = genomic DNA
aatggattcatatccgcgtgggttcgaaccccacttctggta

SEQ ID NO: 2195 - DNA, 23 bp, Homo sapiens
  source 1..23: mol_type = genomic DNA
aatggctgagtgaagcattggac

SEQ ID NO: 2196 - DNA, 24 bp, Homo sapiens
  source 1..24: mol_type = genomic DNA
aatggctgagtgaagcattggact

SEQ ID NO: 2197 - DNA, 25 bp, Homo sapiens
  source 1..25: mol_type = genomic DNA
aatggctgagtgaagcattggactg

SEQ ID NO: 2198 - DNA, 26 bp, Homo sapiens
  source 1..26: mol_type = genomic DNA
aatggctgagtgaagcattggactgt

SEQ ID NO: 2199 - DNA, 27 bp, Homo sapiens
  source 1..27: mol_type = genomic DNA
aatggctgagtgaagcattggactgta

SEQ ID NO: 2200 - DNA, 28 bp, Homo sapiens
  source 1..28: mol_type = genomic DNA
aatggctgagtgaagcattggactgtaa

SEQ ID NO: 2201 - DNA, 29 bp, Homo sapiens
  source 1..29: mol_type = genomic DNA
aatggctgagtgaagcattggactgtaaa

SEQ ID NO: 2202 - DNA, 18 bp, Homo sapiens
  source 1..18: mol_type = genomic DNA
aatgggctggtgcccgcg

SEQ ID NO: 2203 - DNA, 44 bp, Homo sapiens
  source 1..44: mol_type = genomic DNA
aatgggctggtgcccgcgtgggttcgaaccccactctcggtacc

SEQ ID NO: 2204 - DNA, 24 bp, Homo sapiens
  source 1..24: mol_type = genomic DNA
aatggggtttccccgcacaggttc

SEQ ID NO: 2205 - DNA, 25 bp, Homo sapiens
  source 1..25: mol_type = genomic DNA
aatggggtttccccgcacaggttcg

SEQ ID NO: 2206 - DNA, 32 bp, Homo sapiens
  source 1..32: mol_type = genomic DNA
aatggggtttccccgcacaggttcgaatcctg

SEQ ID NO: 2207 - DNA, 43 bp, Homo sapiens
  source 1..43: mol_type = genomic DNA
aatggggtttccccgcacaggttcgaatcctgttcgtgacgcc

SEQ ID NO: 2208 - DNA, 17 bp, Homo sapiens
  source 1..17: mol_type = genomic DNA
aatggtaagcactctgg

SEQ ID NO: 2209 - DNA, 18 bp, Homo sapiens
  source 1..18: mol_type = genomic DNA
aatggtaagcactctgga

SEQ ID NO: 2210 - DNA, 18 bp, Homo sapiens
  source 1..18: mol_type = genomic DNA
aatggtagaattctcgcc

SEQ ID NO: 2211 - DNA, 16 bp, Homo sapiens
  source 1..16: mol_type = genomic DNA
aatggtgagcactctg

SEQ ID NO: 2212 - DNA, 17 bp, Homo sapiens
  source 1..17: mol_type = genomic DNA
aatggtgagcactctgg

SEQ ID NO: 2213 - DNA, 18 bp, Homo sapiens
  source 1..18: mol_type = genomic DNA
aatggtgagcactctgga

SEQ ID NO: 2214 - DNA, 20 bp, Homo sapiens
  source 1..20: mol_type = genomic DNA
aatggtgagcactctggact

SEQ ID NO: 2215 - DNA, 32 bp, Homo sapiens
  source 1..32: mol_type = genomic DNA
aatggtgagcactctggactctgaatccagcg

SEQ ID NO: 2216 - DNA, 22 bp, Homo sapiens
  source 1..22: mol_type = genomic DNA
aatggtgagcactttggactct

SEQ ID NO: 2217 - DNA, 23 bp, Homo sapiens
  source 1..23: mol_type = genomic DNA
aatggtgagcactttggactctg

SEQ ID NO: 2218 - DNA, 16 bp, Homo sapiens
  source 1..16: mol_type = genomic DNA
aatggtggagttaaag

SEQ ID NO: 2219 - DNA, 17 bp, Homo sapiens
  source 1..17: mol_type = genomic DNA
aatggtggagttaaaga

SEQ ID NO: 2220 - DNA, 18 bp, Homo sapiens
  source 1..18: mol_type = genomic DNA
aatggtggagttaaagac

SEQ ID NO: 2221 - DNA, 19 bp, Homo sapiens
  source 1..19: mol_type = genomic DNA
aatggtggagttaaagact

SEQ ID NO: 2222 - DNA, 20 bp, Homo sapiens
  source 1..20: mol_type = genomic DNA
aatggtggagttaaagactt

SEQ ID NO: 2223 - DNA, 21 bp, Homo sapiens
  source 1..21: mol_type = genomic DNA
aatggtggagttaaagacttt

SEQ ID NO: 2224 - DNA, 22 bp, Homo sapiens
  source 1..22: mol_type = genomic DNA
aatggtggagttaaagactttt

SEQ ID NO: 2225 - DNA, 23 bp, Homo sapiens
  source 1..23: mol_type = genomic DNA
aatggtggagttaaagacttttt

SEQ ID NO: 2226 - DNA, 24 bp, Homo sapiens
  source 1..24: mol_type = genomic DNA
aatggtggagttaaagactttttc

SEQ ID NO: 2227 - DNA, 25 bp, Homo sapiens
  source 1..25: mol_type = genomic DNA
aatggtggagttaaagactttttct

SEQ ID NO: 2228 - DNA, 26 bp, Homo sapiens
  source 1..26: mol_type = genomic DNA
aatggtggagttaaagactttttctc

SEQ ID NO: 2229 - DNA, 27 bp, Homo sapiens
  source 1..27: mol_type = genomic DNA
aatggtggagttaaagactttttctct

SEQ ID NO: 2230 - DNA, 28 bp, Homo sapiens
  source 1..28: mol_type = genomic DNA
aatggtggagttaaagactttttctctg

SEQ ID NO: 2231 - DNA, 29 bp, Homo sapiens
  source 1..29: mol_type = genomic DNA
aatggtggagttaaagactttttctctga

SEQ ID NO: 2232 - DNA, 30 bp, Homo sapiens
  source 1..30: mol_type = genomic DNA
aatggtggagttaaagactttttctctgac

SEQ ID NO: 2233 - DNA, 31 bp, Homo sapiens
  source 1..31: mol_type = genomic DNA
aatggtggagttaaagactttttctctgacc

SEQ ID NO: 2234 - DNA, 32 bp, Homo sapiens
  source 1..32: mol_type = genomic DNA
aatggtggagttaaagactttttctctgacca

SEQ ID NO: 2235 - DNA, 28 bp, Homo sapiens
  source 1..28: mol_type = genomic DNA
aatggtggttcagtggtagaattctcgc

SEQ ID NO: 2236 - DNA, 30 bp, Homo sapiens
  source 1..30: mol_type = genomic DNA
aatggtggttcagtggtagaattctcgcct

SEQ ID NO: 2237 - DNA, 16 bp, Homo sapiens
  source 1..16: mol_type = genomic DNA
aatggttagcactctg

SEQ ID NO: 2238 - DNA, 17 bp, Homo sapiens
  source 1..17: mol_type = genomic DNA
aatggttagcactctgg

SEQ ID NO: 2239 - DNA, 18 bp, Homo sapiens
  source 1..18: mol_type = genomic DNA
aatggttagcactctgga

SEQ ID NO: 2240 - DNA, 19 bp, Homo sapiens
  source 1..19: mol_type = genomic DNA
aatggttagcactctggac

SEQ ID NO: 2241 - DNA, 20 bp, Homo sapiens
  source 1..20: mol_type = genomic DNA
aatggttagcactctggact

SEQ ID NO: 2242 - DNA, 21 bp, Homo sapiens
  source 1..21: mol_type = genomic DNA
aatggttagcactctggactc

SEQ ID NO: 2243 - DNA, 22 bp, Homo sapiens
  source 1..22: mol_type = genomic DNA
aatggttagcactctggactct

SEQ ID NO: 2244 - DNA, 23 bp, Homo sapiens
  source 1..23: mol_type = genomic DNA
aatggttagcactctggactctg

SEQ ID NO: 2245 - DNA, 24 bp, Homo sapiens
  source 1..24: mol_type = genomic DNA
aatggttagcactctggactctga

SEQ ID NO: 2246 - DNA, 25 bp, Homo sapiens
  source 1..25: mol_type = genomic DNA
aatggttagcactctggactctgaa

SEQ ID NO: 2247 - DNA, 26 bp, Homo sapiens
  source 1..26: mol_type = genomic DNA
aatggttagcactctggactctgaat

SEQ ID NO: 2248 - DNA, 27 bp, Homo sapiens
  source 1..27: mol_type = genomic DNA
aatggttagcactctggactctgaatc

SEQ ID NO: 2249 - DNA, 28 bp, Homo sapiens
  source 1..28: mol_type = genomic DNA
aatggttagcactctggactctgaatcc

SEQ ID NO: 2250 - DNA, 29 bp, Homo sapiens
  source 1..29: mol_type = genomic DNA
aatggttagcactctggactctgaatcca

SEQ ID NO: 2251 - DNA, 31 bp, Homo sapiens
  source 1..31: mol_type = genomic DNA
aatggttagcactctggactctgaatccagc

SEQ ID NO: 2252 - DNA, 32 bp, Homo sapiens
  source 1..32: mol_type = genomic DNA
aatggttagcactctggactctgaatccagcg

SEQ ID NO: 2253 - DNA, 39 bp, Homo sapiens
  source 1..39: mol_type = genomic DNA
aatggttagcactctggactctgaatccagcgatccgag

SEQ ID NO: 2254 - DNA, 40 bp, Homo sapiens
  source 1..40: mol_type = genomic DNA
aatggttagcactctggactctgaatccagcgatccgagt

SEQ ID NO: 2255 - DNA, 43 bp, Homo sapiens
  source 1..43: mol_type = genomic DNA
aatggttagcactctggactctgaatccagcgatccgagttca

SEQ ID NO: 2256 - DNA, 23 bp, Homo sapiens
  source 1..23: mol_type = genomic DNA
aatggttagcactctggactttg

SEQ ID NO: 2257 - DNA, 25 bp, Homo sapiens
  source 1..25: mol_type = genomic DNA
aatggttagcactctggactttgaa

SEQ ID NO: 2258 - DNA, 31 bp, Homo sapiens
  source 1..31: mol_type = genomic DNA
aatggttagcactctggactttgaatccagc

SEQ ID NO: 2259 - DNA, 39 bp, Homo sapiens
  source 1..39: mol_type = genomic DNA
aatggttagcactctggactttgaatccagcgatccgag

SEQ ID NO: 2260 - DNA, 40 bp, Homo sapiens
  source 1..40: mol_type = genomic DNA
aatggttagcactctggactttgaatccagcgatccgagt

SEQ ID NO: 2261 - DNA, 16 bp, Homo sapiens
  source 1..16: mol_type = genomic DNA
aatgttggttataccc

SEQ ID NO: 2262 - DNA, 17 bp, Homo sapiens
  source 1..17: mol_type = genomic DNA
aatgttggttataccct

SEQ ID NO: 2263 - DNA, 19 bp, Homo sapiens
  source 1..19: mol_type = genomic DNA
aatgttggttatacccttc

SEQ ID NO: 2264 - DNA, 20 bp, Homo sapiens
  source 1..20: mol_type = genomic DNA
aatgttggttatacccttcc

SEQ ID NO: 2265 - DNA, 21 bp, Homo sapiens
  source 1..21: mol_type = genomic DNA
aatgttggttatacccttccc

SEQ ID NO: 2266 - DNA, 22 bp, Homo sapiens
  source 1..22: mol_type = genomic DNA
aatgttggttatacccttcccg

SEQ ID NO: 2267 - DNA, 24 bp, Homo sapiens
  source 1..24: mol_type = genomic DNA
aatgttggttatacccttcccgta

SEQ ID NO: 2268 - DNA, 26 bp, Homo sapiens
  source 1..26: mol_type = genomic DNA
aatgttggttatacccttcccgtact

SEQ ID NO: 2269 - DNA, 27 bp, Homo sapiens
  source 1..27: mol_type = genomic DNA
aatgttggttatacccttcccgtacta

SEQ ID NO: 2270 - DNA, 28 bp, Homo sapiens
  source 1..28: mol_type = genomic DNA
aatgttggttatacccttcccgtactac

SEQ ID NO: 2271 - DNA, 29 bp, Homo sapiens
  source 1..29: mol_type = genomic DNA
aatgttggttatacccttcccgtactacc

SEQ ID NO: 2272 - DNA, 30 bp, Homo sapiens
  source 1..30: mol_type = genomic DNA
aatgttggttatacccttcccgtactacca

SEQ ID NO: 2273 - DNA, 16 bp, Homo sapiens
  source 1..16: mol_type = genomic DNA
aatgtttagacgggct

SEQ ID NO: 2274 - DNA, 17 bp, Homo sapiens
  source 1..17: mol_type = genomic DNA
aatgtttagacgggctc

SEQ ID NO: 2275 - DNA, 18 bp, Homo sapiens
  source 1..18: mol_type = genomic DNA
aatgtttagacgggctca

SEQ ID NO: 2276 - DNA, 19 bp, Homo sapiens
  source 1..19: mol_type = genomic DNA
aatgtttagacgggctcac

SEQ ID NO: 2277 - DNA, 20 bp, Homo sapiens
  source 1..20: mol_type = genomic DNA
aatgtttagacgggctcaca

SEQ ID NO: 2278 - DNA, 21 bp, Homo sapiens
  source 1..21: mol_type = genomic DNA
aatgtttagacgggctcacat

SEQ ID NO: 2279 - DNA, 22 bp, Homo sapiens
  source 1..22: mol_type = genomic DNA
aatgtttagacgggctcacatc

SEQ ID NO: 2280 - DNA, 23 bp, Homo sapiens
  source 1..23: mol_type = genomic DNA
aatgtttagacgggctcacatca

SEQ ID NO: 2281 - DNA, 24 bp, Homo sapiens
  source 1..24: mol_type = genomic DNA
aatgtttagacgggctcacatcac

SEQ ID NO: 2282 - DNA, 25 bp, Homo sapiens
  source 1..25: mol_type = genomic DNA
aatgtttagacgggctcacatcacc

SEQ ID NO: 2283 - DNA, 26 bp, Homo sapiens
  source 1..26: mol_type = genomic DNA
aatgtttagacgggctcacatcaccc

SEQ ID NO: 2284 - DNA, 27 bp, Homo sapiens
  source 1..27: mol_type = genomic DNA
aatgtttagacgggctcacatcacccc

SEQ ID NO: 2285 - DNA, 28 bp, Homo sapiens
  source 1..28: mol_type = genomic DNA
aatgtttagacgggctcacatcacccca

SEQ ID NO: 2286 - DNA, 29 bp, Homo sapiens
  source 1..29: mol_type = genomic DNA
aatgtttagacgggctcacatcaccccat

SEQ ID NO: 2287 - DNA, 30 bp, Homo sapiens
  source 1..30: mol_type = genomic DNA
aatgtttagacgggctcacatcaccccata

SEQ ID NO: 2288 - DNA, 31 bp, Homo sapiens
  source 1..31: mol_type = genomic DNA
aatgtttagacgggctcacatcaccccataa

SEQ ID NO: 2289 - DNA, 32 bp, Homo sapiens
  source 1..32: mol_type = genomic DNA
aatgtttagacgggctcacatcaccccataaa

SEQ ID NO: 2290 - DNA, 33 bp, Homo sapiens
  source 1..33: mol_type = genomic DNA
aatgtttagacgggctcacatcaccccataaac

SEQ ID NO: 2291 - DNA, 34 bp, Homo sapiens
  source 1..34: mol_type = genomic DNA
aatgtttagacgggctcacatcaccccataaaca

SEQ ID NO: 2292 - DNA, 36 bp, Homo sapiens
  source 1..36: mol_type = genomic DNA
aatgtttagacgggctcacatcaccccataaacacc

SEQ ID NO: 2293 - DNA, 37 bp, Homo sapiens
  source 1..37: mol_type = genomic DNA
aatgtttagacgggctcacatcaccccataaacacca

SEQ ID NO: 2294 - DNA, 16 bp, Homo sapiens
  source 1..16: mol_type = genomic DNA
aattaaagtggctgat

SEQ ID NO: 2295 - DNA, 17 bp, Homo sapiens
  source 1..17: mol_type = genomic DNA
aattaaagtggctgatt

SEQ ID NO: 2296 - DNA, 18 bp, Homo sapiens
  source 1..18: mol_type = genomic DNA
aattaaagtggctgattt

SEQ ID NO: 2297 - DNA, 19 bp, Homo sapiens
  source 1..19: mol_type = genomic DNA
aattaaagtggctgatttg

SEQ ID NO: 2298 - DNA, 20 bp, Homo sapiens
  source 1..20: mol_type = genomic DNA
aattaaagtggctgatttgc

SEQ ID NO: 2299 - DNA, 17 bp, Homo sapiens
  source 1..17: mol_type = genomic DNA
aattaactagttttgac

SEQ ID NO: 2300 - DNA, 18 bp, Homo sapiens
  source 1..18: mol_type = genomic DNA
aattaactagttttgaca

SEQ ID NO: 2301 - DNA, 19 bp, Homo sapiens
  source 1..19: mol_type = genomic DNA
aattaactagttttgacaa

SEQ ID NO: 2302 - DNA, 20 bp, Homo sapiens
  source 1..20: mol_type = genomic DNA
aattaactagttttgacaac

SEQ ID NO: 2303 - DNA, 21 bp, Homo sapiens
  source 1..21: mol_type = genomic DNA
aattaactagttttgacaaca

SEQ ID NO: 2304 - DNA, 24 bp, Homo sapiens
  source 1..24: mol_type = genomic DNA
aattaactagttttgacaacattc

SEQ ID NO: 2305 - DNA, 31 bp, Homo sapiens
  source 1..31: mol_type = genomic DNA
aattaactagttttgacaacattcaaaaaag

SEQ ID NO: 2306 - DNA, 32 bp, Homo sapiens
  source 1..32: mol_type = genomic DNA
aattaactagttttgacaacattcaaaaaaga

SEQ ID NO: 2307 - DNA, 33 bp, Homo sapiens
  source 1..33: mol_type = genomic DNA
aattaactagttttgacaacattcaaaaaagag

SEQ ID NO: 2308 - DNA, 34 bp, Homo sapiens
  source 1..34: mol_type = genomic DNA
aattaactagttttgacaacattcaaaaaagagt

SEQ ID NO: 2309 - DNA, 35 bp, Homo sapiens
  source 1..35: mol_type = genomic DNA
aattaactagttttgacaacattcaaaaaagagta

SEQ ID NO: 2310 - DNA, 36 bp, Homo sapiens
  source 1..36: mol_type = genomic DNA
aattaactagttttgacaacattcaaaaaagagtac

SEQ ID NO: 2311 - DNA, 37 bp, Homo sapiens
  source 1..37: mol_type = genomic DNA
aattaactagttttgacaacattcaaaaaagagtacc

SEQ ID NO: 2312 - DNA, 38 bp, Homo sapiens
  source 1..38: mol_type = genomic DNA
aattaactagttttgacaacattcaaaaaagagtacca

SEQ ID NO: 2313 - DNA, 16 bp, Homo sapiens
  source 1..16: mol_type = genomic DNA
aattagaatcttagct

SEQ ID NO: 2314 - DNA, 17 bp, Homo sapiens
  source 1..17: mol_type = genomic DNA
aattagaatcttagctt

SEQ ID NO: 2315 - DNA, 18 bp, Homo sapiens
  source 1..18: mol_type = genomic DNA
aattagaatcttagcttt

SEQ ID NO: 2316 - DNA, 19 bp, Homo sapiens
  source 1..19: mol_type = genomic DNA
aattagaatcttagctttg

SEQ ID NO: 2317 - DNA, 20 bp, Homo sapiens
  source 1..20: mol_type = genomic DNA
aattagaatcttagctttgg

SEQ ID NO: 2318 - DNA, 23 bp, Homo sapiens
  source 1..23: mol_type = genomic DNA
aattagaatcttagctttgggtg

SEQ ID NO: 2319 - DNA, 24 bp, Homo sapiens
  source 1..24: mol_type = genomic DNA
aattagaatcttagctttgggtgc

SEQ ID NO: 2320 - DNA, 25 bp, Homo sapiens
  source 1..25: mol_type = genomic DNA
aattagaatcttagctttgggtgct

SEQ ID NO: 2321 - DNA, 28 bp, Homo sapiens
  source 1..28: mol_type = genomic DNA
aattagaatcttagctttgggtgctaat

SEQ ID NO: 2322 - DNA, 35 bp, Homo sapiens
  source 1..35: mol_type = genomic DNA
aattagaatcttagctttgggtgctaatggtggag

SEQ ID NO: 2323 - DNA, 36 bp, Homo sapiens
  source 1..36: mol_type = genomic DNA
aattagaatcttagctttgggtgctaatggtggagt

SEQ ID NO: 2324 - DNA, 37 bp, Homo sapiens
  source 1..37: mol_type = genomic DNA
aattagaatcttagctttgggtgctaatggtggagtt

SEQ ID NO: 2325 - DNA, 38 bp, Homo sapiens
  source 1..38: mol_type = genomic DNA
aattagaatcttagctttgggtgctaatggtggagtta

SEQ ID NO: 2326 - DNA, 43 bp, Homo sapiens
  source 1..43: mol_type = genomic DNA
aattagaatcttagctttgggtgctaatggtggagttaaagac

SEQ ID NO: 2327 - DNA, 44 bp, Homo sapiens
  source 1..44: mol_type = genomic DNA
aattagaatcttagctttgggtgctaatggtggagttaaagact

SEQ ID NO: 2328 - DNA, 45 bp, Homo sapiens
  source 1..45: mol_type = genomic DNA
aattagaatcttagctttgggtgctaatggtggagttaaagactt

SEQ ID NO: 2329 - DNA, 46 bp, Homo sapiens
  source 1..46: mol_type = genomic DNA
aattagaatcttagctttgggtgctaatggtggagttaaagacttt

SEQ ID NO: 2330 - DNA, 16 bp, Homo sapiens
  source 1..16: mol_type = genomic DNA
aattataggctaaatc

SEQ ID NO: 2331 - DNA, 17 bp, Homo sapiens
  source 1..17: mol_type = genomic DNA
aattataggctaaatcc

SEQ ID NO: 2332 - DNA, 18 bp, Homo sapiens
  source 1..18: mol_type = genomic DNA
aattataggctaaatcct

SEQ ID NO: 2333 - DNA, 30 bp, Homo sapiens
  source 1..30: mol_type = genomic DNA
aattataggctaaatcctatatatcttacc

SEQ ID NO: 2334 - DNA, 22 bp, Homo sapiens
  source 1..22: mol_type = genomic DNA
aattatgataatcatatttacc

SEQ ID NO: 2335 - DNA, 26 bp, Homo sapiens
  source 1..26: mol_type = genomic DNA
aattatgataatcatatttaccaacc

SEQ ID NO: 2336 - DNA, 18 bp, Homo sapiens
  source 1..18: mol_type = genomic DNA
aattcaaaggttccgggt

SEQ ID NO: 2337 - DNA, 35 bp, Homo sapiens
  source 1..35: mol_type = genomic DNA
aattcaaaggttccgggttcgagtcccggcggagt

SEQ ID NO: 2338 - DNA, 36 bp, Homo sapiens
  source 1..36: mol_type = genomic DNA
aattcaaaggttccgggttcgagtcccggcggagtc

SEQ ID NO: 2339 - DNA, 37 bp, Homo sapiens
  source 1..37: mol_type = genomic DNA
aattcaaaggttccgggttcgagtcccggcggagtcg

SEQ ID NO: 2340 - DNA, 38 bp, Homo sapiens
  source 1..38: mol_type = genomic DNA
aattcaaaggttccgggttcgagtcccggcggagtcgc

SEQ ID NO: 2341 - DNA, 39 bp, Homo sapiens
  source 1..39: mol_type = genomic DNA
aattcaaaggttccgggttcgagtcccggcggagtcgcc

SEQ ID NO: 2342 - DNA, 40 bp, Homo sapiens
  source 1..40: mol_type = genomic DNA
aattcaaaggttccgggttcgagtcccggcggagtcgcca

SEQ ID NO: 2343 - DNA, 39 bp, Homo sapiens
  source 1..39: mol_type = genomic DNA
aattcaaaggttgtgggttcgaatcccaccagagtcgcc

SEQ ID NO: 2344 - DNA, 40 bp, Homo sapiens
  source 1..40: mol_type = genomic DNA
aattcaaaggttgtgggttcgaatcccaccagagtcgcca

SEQ ID NO: 2345 - DNA, 39 bp, Homo sapiens
  source 1..39: mol_type = genomic DNA
aattcaaaggttgtgggttcgagtcccaccagagtcgcc

SEQ ID NO: 2346 - DNA, 40 bp, Homo sapiens
  source 1..40: mol_type = genomic DNA
aattcaaaggttgtgggttcgagtcccaccagagtcgcca

SEQ ID NO: 2347 - DNA, 18 bp, Homo sapiens
  source 1..18: mol_type = genomic DNA
aattccccgacggggagc

SEQ ID NO: 2348 - DNA, 19 bp, Homo sapiens
  source 1..19: mol_type = genomic DNA
aattccccgacggggagcc

SEQ ID NO: 2349 - DNA, 20 bp, Homo sapiens
  source 1..20: mol_type = genomic DNA
aattccccgacggggagcca

SEQ ID NO: 2350 - DNA, 16 bp, Homo sapiens
  source 1..16: mol_type = genomic DNA
aattcgaagaagcagc

SEQ ID NO: 2351 - DNA, 20 bp, Homo sapiens
  source 1..20: mol_type = genomic DNA
aattcgaagaagcagcttca

SEQ ID NO: 2352 - DNA, 26 bp, Homo sapiens
  source 1..26: mol_type = genomic DNA
aattcgaagaagcagcttcaaacctg

SEQ ID NO: 2353 - DNA, 33 bp, Homo sapiens
  source 1..33: mol_type = genomic DNA
aattcgaagaagcagcttcaaacctgccggggc

SEQ ID NO: 2354 - DNA, 34 bp, Homo sapiens
  source 1..34: mol_type = genomic DNA
aattcgaagaagcagcttcaaacctgccggggct

SEQ ID NO: 2355 - DNA, 35 bp, Homo sapiens
  source 1..35: mol_type = genomic DNA
aattcgaagaagcagcttcaaacctgccggggctt

SEQ ID NO: 2356 - DNA, 36 bp, Homo sapiens
  source 1..36: mol_type = genomic DNA
aattcgaagaagcagcttcaaacctgccggggcttc

SEQ ID NO: 2357 - DNA, 37 bp, Homo sapiens
  source 1..37: mol_type = genomic DNA
aattcgaagaagcagcttcaaacctgccggggcttcc

SEQ ID NO: 2358 - DNA, 38 bp, Homo sapiens
  source 1..38: mol_type = genomic DNA
aattcgaagaagcagcttcaaacctgccggggcttcca

SEQ ID NO: 2359 - DNA, 16 bp, Homo sapiens
  source 1..16: mol_type = genomic DNA
aattctcgcctgccac

SEQ ID NO: 2360 - DNA, 17 bp, Homo sapiens
  source 1..17: mol_type = genomic DNA
aattctcgcctgccacg

SEQ ID NO: 2361 - DNA, 18 bp, Homo sapiens
  source 1..18: mol_type = genomic DNA
aattctcgcctgccacgc

SEQ ID NO: 2362 - DNA, 27 bp, Homo sapiens
  source 1..27: mol_type = genomic DNA
aattctcgcctgccacgcgggaggccc

SEQ ID NO: 2363 - DNA, 29 bp, Homo sapiens
  source 1..29: mol_type = genomic DNA
aattctcgcctgccacgcgggaggcccgg

SEQ ID NO: 2364 - DNA, 30 bp, Homo sapiens
  source 1..30: mol_type = genomic DNA
aattctcgcctgccacgcgggaggcccggg

SEQ ID NO: 2365 - DNA, 34 bp, Homo sapiens
  source 1..34: mol_type = genomic DNA
aattctcgcctgccacgcgggaggcccgggttcg

SEQ ID NO: 2366 - DNA, 44 bp, Homo sapiens
  source 1..44: mol_type = genomic DNA
aattctcgcctgccacgcgggaggcccgggttcgattcccggcc

SEQ ID NO: 2367 - DNA, 16 bp, Homo sapiens
  source 1..16: mol_type = genomic DNA
aattctcgctggggcc

SEQ ID NO: 2368 - DNA, 18 bp, Homo sapiens
  source 1..18: mol_type = genomic DNA
aattctcgctggggcctc

SEQ ID NO: 2369 - DNA, 19 bp, Homo sapiens
  source 1..19: mol_type = genomic DNA
aattgcaaattcgaagaag

SEQ ID NO: 2370 - DNA, 20 bp, Homo sapiens
  source 1..20: mol_type = genomic DNA
aattgcaaattcgaagaagc

SEQ ID NO: 2371 - DNA, 26 bp, Homo sapiens
  source 1..26: mol_type = genomic DNA
aattgcaaattcgaagaagcagcttc

SEQ ID NO: 2372 - DNA, 28 bp, Homo sapiens
  source 1..28: mol_type = genomic DNA
aattgcaaattcgaagaagcagcttcaa

SEQ ID NO: 2373 - DNA, 33 bp, Homo sapiens
  source 1..33: mol_type = genomic DNA
aattgcaaattcgaagaagcagcttcaaacctg

SEQ ID NO: 2374 - DNA, 39 bp, Homo sapiens
  source 1..39: mol_type = genomic DNA
aattgcaaattcgaagaagcagcttcaaacctgccgggg

SEQ ID NO: 2375 - DNA, 40 bp, Homo sapiens
  source 1..40: mol_type = genomic DNA
aattgcaaattcgaagaagcagcttcaaacctgccggggc

SEQ ID NO: 2376 - DNA, 41 bp, Homo sapiens
  source 1..41: mol_type = genomic DNA
aattgcaaattcgaagaagcagcttcaaacctgccggggct

SEQ ID NO: 2377 - DNA, 42 bp, Homo sapiens
  source 1..42: mol_type = genomic DNA
aattgcaaattcgaagaagcagcttcaaacctgccggggctt

SEQ ID NO: 2378 - DNA, 43 bp, Homo sapiens
  source 1..43: mol_type = genomic DNA
aattgcaaattcgaagaagcagcttcaaacctgccggggcttc

SEQ ID NO: 2379 - DNA, 44 bp, Homo sapiens
  source 1..44: mol_type = genomic DNA
aattgcaaattcgaagaagcagcttcaaacctgccggggcttcc

SEQ ID NO: 2380 - DNA, 45 bp, Homo sapiens
  source 1..45: mol_type = genomic DNA
aattgcaaattcgaagaagcagcttcaaacctgccggggcttcca

SEQ ID NO: 2381 - DNA, 16 bp, Homo sapiens
  source 1..16: mol_type = genomic DNA
aatttaggttaaatac

SEQ ID NO: 2382 - DNA, 20 bp, Homo sapiens
  source 1..20: mol_type = genomic DNA
aatttaggttaaatacagac

SEQ ID NO: 2383 - DNA, 40 bp, Homo sapiens
  source 1..40: mol_type = genomic DNA
aattttggattctcagggatgggttcgattctcatagtcc

SEQ ID NO: 2384 - DNA, 41 bp, Homo sapiens
  source 1..41: mol_type = genomic DNA
aattttggattctcagggatgggttcgattctcatagtcct

SEQ ID NO: 2385 - DNA, 45 bp, Homo sapiens
  source 1..45: mol_type = genomic DNA
aattttggattctcagggatgggttcgattctcatagtcctagcc

SEQ ID NO: 2386 - DNA, 46 bp, Homo sapiens
  source 1..46: mol_type = genomic DNA
aattttggattctcagggatgggttcgattctcatagtcctagcca

SEQ ID NO: 2387 - DNA, 16 bp, Homo sapiens
  source 1..16: mol_type = genomic DNA
aattttggtgcaactc

SEQ ID NO: 2388 - DNA, 17 bp, Homo sapiens
  source 1..17: mol_type = genomic DNA
aattttggtgcaactcc

SEQ ID NO: 2389 - DNA, 18 bp, Homo sapiens
  source 1..18: mol_type = genomic DNA
aattttggtgcaactcca

SEQ ID NO: 2390 - DNA, 22 bp, Homo sapiens
  source 1..22: mol_type = genomic DNA
aattttggtgcaactccaaata

SEQ ID NO: 2391 - DNA, 29 bp, Homo sapiens
  source 1..29: mol_type = genomic DNA
aattttggtgcaactccaaataaaagtac

SEQ ID NO: 2392 - DNA, 30 bp, Homo sapiens
  source 1..30: mol_type = genomic DNA
aattttggtgcaactccaaataaaagtacc

SEQ ID NO: 2393 - DNA, 31 bp, Homo sapiens
  source 1..31: mol_type = genomic DNA
aattttggtgcaactccaaataaaagtacca

SEQ ID NO: 2394 - DNA, 18 bp, Homo sapiens
  source 1..18: mol_type = genomic DNA
acaaaacgaatgatttcg

SEQ ID NO: 2395 - DNA, 20 bp, Homo sapiens
  source 1..20: mol_type = genomic DNA
acaaaacgaatgatttcgac

SEQ ID NO: 2396 - DNA, 21 bp, Homo sapiens
  source 1..21: mol_type = genomic DNA
acaaaacgaatgatttcgact

SEQ ID NO: 2397 - DNA, 22 bp, Homo sapiens
  source 1..22: mol_type = genomic DNA
acaaaacgaatgatttcgactc

SEQ ID NO: 2398 - DNA, 23 bp, Homo sapiens
  source 1..23: mol_type = genomic DNA
acaaaacgaatgatttcgactca

SEQ ID NO: 2399 - DNA, 24 bp, Homo sapiens
  source 1..24: mol_type = genomic DNA
acaaaacgaatgatttcgactcat

SEQ ID NO: 2400 - DNA, 26 bp, Homo sapiens
  source 1..26: mol_type = genomic DNA
acaaaacgaatgatttcgactcatta

SEQ ID NO: 2401 - DNA, 27 bp, Homo sapiens
  source 1..27: mol_type = genomic DNA
acaaaacgaatgatttcgactcattaa

SEQ ID NO: 2402 - DNA, 35 bp, Homo sapiens
  source 1..35: mol_type = genomic DNA
acaaaacgaatgatttcgactcattaaattatgat

SEQ ID NO: 2403 - DNA, 40 bp, Homo sapiens
  source 1..40: mol_type = genomic DNA
acaaaacgaatgatttcgactcattaaattatgataatca

SEQ ID NO: 2404 - DNA, 17 bp, Homo sapiens
  source 1..17: mol_type = genomic DNA
acaaagcacccaactta

SEQ ID NO: 2405 - DNA, 18 bp, Homo sapiens
  source 1..18: mol_type = genomic DNA
acaaagcacccaacttac

SEQ ID NO: 2406 - DNA, 19 bp, Homo sapiens
  source 1..19: mol_type = genomic DNA
acaaagcacccaacttaca

SEQ ID NO: 2407 - DNA, 20 bp, Homo sapiens
  source 1..20: mol_type = genomic DNA
acaaagcacccaacttacac

SEQ ID NO: 2408 - DNA, 21 bp, Homo sapiens
  source 1..21: mol_type = genomic DNA
acaaagcacccaacttacact

SEQ ID NO: 2409 - DNA, 22 bp, Homo sapiens
  source 1..22: mol_type = genomic DNA
acaaagcacccaacttacactt

SEQ ID NO: 2410 - DNA, 23 bp, Homo sapiens
  source 1..23: mol_type = genomic DNA
acaaagcacccaacttacactta

SEQ ID NO: 2411 - DNA, 27 bp, Homo sapiens
  source 1..27: mol_type = genomic DNA
acaaagcacccaacttacacttaggag

SEQ ID NO: 2412 - DNA, 28 bp, Homo sapiens
  source 1..28: mol_type = genomic DNA
acaaagcacccaacttacacttaggaga

SEQ ID NO: 2413 - DNA, 30 bp, Homo sapiens
  source 1..30: mol_type = genomic DNA
acaaagcacccaacttacacttaggagatt

SEQ ID NO: 2414 - DNA, 31 bp, Homo sapiens
  source 1..31: mol_type = genomic DNA
acaaagcacccaacttacacttaggagattt

SEQ ID NO: 2415 - DNA, 33 bp, Homo sapiens
  source 1..33: mol_type = genomic DNA
acaaagcacccaacttacacttaggagatttca

SEQ ID NO: 2416 - DNA, 34 bp, Homo sapiens
  source 1..34: mol_type = genomic DNA
acaaagcacccaacttacacttaggagatttcaa

SEQ ID NO: 2417 - DNA, 35 bp, Homo sapiens
  source 1..35: mol_type = genomic DNA
acaaagcacccaacttacacttaggagatttcaac

SEQ ID NO: 2418 - DNA, 36 bp, Homo sapiens
  source 1..36: mol_type = genomic DNA
acaaagcacccaacttacacttaggagatttcaact

SEQ ID NO: 2419 - DNA, 37 bp, Homo sapiens
  source 1..37: mol_type = genomic DNA
acaaagcacccaacttacacttaggagatttcaactt

SEQ ID NO: 2420 - DNA, 39 bp, Homo sapiens
  source 1..39: mol_type = genomic DNA
acaaagcacccaacttacacttaggagatttcaacttaa

SEQ ID NO: 2421 - DNA, 40 bp, Homo sapiens
  source 1..40: mol_type = genomic DNA
acaaagcacccaacttacacttaggagatttcaacttaac

SEQ ID NO: 2422 - DNA, 46 bp, Homo sapiens
  source 1..46: mol_type = genomic DNA
acaaagcacccaacttacacttaggagatttcaacttaacttgacc

SEQ ID NO: 2423 - DNA, 16 bp, Homo sapiens
  source 1..16: mol_type = genomic DNA
acaacagaggcttacg

SEQ ID NO: 2424 - DNA, 18 bp, Homo sapiens
  source 1..18: mol_type = genomic DNA
acaacagaggcttacgac

SEQ ID NO: 2425 - DNA, 19 bp, Homo sapiens
  source 1..19: mol_type = genomic DNA
acaacagaggcttacgacc

SEQ ID NO: 2426 - DNA, 20 bp, Homo sapiens
  source 1..20: mol_type = genomic DNA
acaacagaggcttacgaccc

SEQ ID NO: 2427 - DNA, 21 bp, Homo sapiens
  source 1..21: mol_type = genomic DNA
acaacagaggcttacgacccc

SEQ ID NO: 2428 - DNA, 22 bp, Homo sapiens
  source 1..22: mol_type = genomic DNA
acaacagaggcttacgacccct

SEQ ID NO: 2429 - DNA, 24 bp, Homo sapiens
  source 1..24: mol_type = genomic DNA
acaacagaggcttacgacccctta

SEQ ID NO: 2430 - DNA, 26 bp, Homo sapiens
  source 1..26: mol_type = genomic DNA
acaacagaggcttacgaccccttatt

SEQ ID NO: 2431 - DNA, 30 bp, Homo sapiens
  source 1..30: mol_type = genomic DNA
acaacagaggcttacgaccccttatttacc

SEQ ID NO: 2432 - DNA, 31 bp, Homo sapiens
  source 1..31: mol_type = genomic DNA
acaacagaggcttacgaccccttatttaccc

SEQ ID NO: 2433 - DNA, 32 bp, Homo sapiens
  source 1..32: mol_type = genomic DNA
acaacagaggcttacgaccccttatttacccc

SEQ ID NO: 2434 - DNA, 33 bp, Homo sapiens
  source 1..33: mol_type = genomic DNA
acaacagaggcttacgaccccttatttacccca

SEQ ID NO: 2435 - DNA, 16 bp, Homo sapiens
  source 1..16: mol_type = genomic DNA
acaacatggctttctc

SEQ ID NO: 2436 - DNA, 17 bp, Homo sapiens
  source 1..17: mol_type = genomic DNA
acaacatggctttctca

SEQ ID NO: 2437 - DNA, 18 bp, Homo sapiens
  source 1..18: mol_type = genomic DNA
acaacatggctttctcac

SEQ ID NO: 2438 - DNA, 19 bp, Homo sapiens
  source 1..19: mol_type = genomic DNA
acaacatggctttctcacc

SEQ ID NO: 2439 - DNA, 20 bp, Homo sapiens
  source 1..20: mol_type = genomic DNA
acaacatggctttctcacca

SEQ ID NO: 2440 - DNA, 16 bp, Homo sapiens
  source 1..16: mol_type = genomic DNA
acaacattcaaaaaag

SEQ ID NO: 2441 - DNA, 20 bp, Homo sapiens
  source 1..20: mol_type = genomic DNA
acaacattcaaaaaagagta

SEQ ID NO: 2442 - DNA, 21 bp, Homo sapiens
  source 1..21: mol_type = genomic DNA
acaacattcaaaaaagagtac

SEQ ID NO: 2443 - DNA, 22 bp, Homo sapiens
  source 1..22: mol_type = genomic DNA
acaacattcaaaaaagagtacc

SEQ ID NO: 2444 - DNA, 23 bp, Homo sapiens
  source 1..23: mol_type = genomic DNA
acaacattcaaaaaagagtacca

SEQ ID NO: 2445 - DNA, 16 bp, Homo sapiens
  source 1..16: mol_type = genomic DNA
acaacgatggtttttc

SEQ ID NO: 2446 - DNA, 18 bp, Homo sapiens
  source 1..18: mol_type = genomic DNA
acaacgatggtttttcat

SEQ ID NO: 2447 - DNA, 20 bp, Homo sapiens
  source 1..20: mol_type = genomic DNA
acaacgatggtttttcatat

SEQ ID NO: 2448 - DNA, 29 bp, Homo sapiens
  source 1..29: mol_type = genomic DNA
acaacgatggtttttcatatcattggtcg

SEQ ID NO: 2449 - DNA, 30 bp, Homo sapiens
  source 1..30: mol_type = genomic DNA
acaacgatggtttttcatatcattggtcgt

SEQ ID NO: 2450 - DNA, 31 bp, Homo sapiens
  source 1..31: mol_type = genomic DNA
acaacgatggtttttcatatcattggtcgtg

SEQ ID NO: 2451 - DNA, 35 bp, Homo sapiens
  source 1..35: mol_type = genomic DNA
acaacgatggtttttcatatcattggtcgtggttg

SEQ ID NO: 2452 - DNA, 36 bp, Homo sapiens
  source 1..36: mol_type = genomic DNA
acaacgatggtttttcatatcattggtcgtggttgt

SEQ ID NO: 2453 - DNA, 37 bp, Homo sapiens
  source 1..37: mol_type = genomic DNA
acaacgatggtttttcatatcattggtcgtggttgta

SEQ ID NO: 2454 - DNA, 40 bp, Homo sapiens
  source 1..40: mol_type = genomic DNA
acaacgatggtttttcatatcattggtcgtggttgtagtc

SEQ ID NO: 2455 - DNA, 41 bp, Homo sapiens
  source 1..41: mol_type = genomic DNA
acaacgatggtttttcatatcattggtcgtggttgtagtcc

SEQ ID NO: 2456 - DNA, 42 bp, Homo sapiens
  source 1..42: mol_type = genomic DNA
acaacgatggtttttcatatcattggtcgtggttgtagtccg

SEQ ID NO: 2457 - DNA, 43 bp, Homo sapiens
  source 1..43: mol_type = genomic DNA
acaacgatggtttttcatatcattggtcgtggttgtagtccgt

SEQ ID NO: 2458 - DNA, 45 bp, Homo sapiens
  source 1..45: mol_type = genomic DNA
acaacgatggtttttcatatcattggtcgtggttgtagtccgtgc

SEQ ID NO: 2459 - DNA, 16 bp, Homo sapiens
  source 1..16: mol_type = genomic DNA
acaagaactgctaact

SEQ ID NO: 2460 - DNA, 17 bp, Homo sapiens
  source 1..17: mol_type = genomic DNA
acaagaactgctaactc

SEQ ID NO: 2461 - DNA, 18 bp, Homo sapiens
  source 1..18: mol_type = genomic DNA
acaagaactgctaactca

SEQ ID NO: 2462 - DNA, 19 bp, Homo sapiens
  source 1..19: mol_type = genomic DNA
acaagaactgctaactcat

SEQ ID NO: 2463 - DNA, 20 bp, Homo sapiens
  source 1..20: mol_type = genomic DNA
acaagaactgctaactcatg

SEQ ID NO: 2464 - DNA, 21 bp, Homo sapiens
  source 1..21: mol_type = genomic DNA
acaagaactgctaactcatgc

SEQ ID NO: 2465 - DNA, 22 bp, Homo sapiens
  source 1..22: mol_type = genomic DNA
acaagaactgctaactcatgcc

SEQ ID NO: 2466 - DNA, 23 bp, Homo sapiens
  source 1..23: mol_type = genomic DNA
acaagaactgctaactcatgccc

SEQ ID NO: 2467 - DNA, 24 bp, Homo sapiens
  source 1..24: mol_type = genomic DNA
acaagaactgctaactcatgcccc

SEQ ID NO: 2468 - DNA, 25 bp, Homo sapiens
  source 1..25: mol_type = genomic DNA
acaagaactgctaactcatgccccc

SEQ ID NO: 2469 - DNA, 26 bp, Homo sapiens
  source 1..26: mol_type = genomic DNA
acaagaactgctaactcatgccccca

SEQ ID NO: 2470 - DNA, 27 bp, Homo sapiens
  source 1..27: mol_type = genomic DNA
acaagaactgctaactcatgcccccat

SEQ ID NO: 2471 - DNA, 28 bp, Homo sapiens
  source 1..28: mol_type = genomic DNA
acaagaactgctaactcatgcccccatg

SEQ ID NO: 2472 - DNA, 29 bp, Homo sapiens
  source 1..29: mol_type = genomic DNA
acaagaactgctaactcatgcccccatgt

SEQ ID NO: 2473 - DNA, 30 bp, Homo sapiens
  source 1..30: mol_type = genomic DNA
acaagaactgctaactcatgcccccatgtc

SEQ ID NO: 2474 - DNA, 31 bp, Homo sapiens
  source 1..31: mol_type = genomic DNA
acaagaactgctaactcatgcccccatgtct

SEQ ID NO: 2475 - DNA, 32 bp, Homo sapiens
  source 1..32: mol_type = genomic DNA
acaagaactgctaactcatgcccccatgtcta

SEQ ID NO: 2476 - DNA, 33 bp, Homo sapiens
  source 1..33: mol_type = genomic DNA
acaagaactgctaactcatgcccccatgtctaa

SEQ ID NO: 2477 - DNA, 34 bp, Homo sapiens
  source 1..34: mol_type = genomic DNA
acaagaactgctaactcatgcccccatgtctaac

SEQ ID NO: 2478 - DNA, 35 bp, Homo sapiens
  source 1..35: mol_type = genomic DNA
acaagaactgctaactcatgcccccatgtctaaca

SEQ ID NO: 2479 - DNA, 36 bp, Homo sapiens
  source 1..36: mol_type = genomic DNA
acaagaactgctaactcatgcccccatgtctaacaa

SEQ ID NO: 2480 - DNA, 37 bp, Homo sapiens
  source 1..37: mol_type = genomic DNA
acaagaactgctaactcatgcccccatgtctaacaac

SEQ ID NO: 2481 - DNA, 38 bp, Homo sapiens
  source 1..38: mol_type = genomic DNA
acaagaactgctaactcatgcccccatgtctaacaaca

SEQ ID NO: 2482 - DNA, 39 bp, Homo sapiens
  source 1..39: mol_type = genomic DNA
acaagaactgctaactcatgcccccatgtctaacaacat

SEQ ID NO: 2483 - DNA, 40 bp, Homo sapiens
  source 1..40: mol_type = genomic DNA
acaagaactgctaactcatgcccccatgtctaacaacatg

SEQ ID NO: 2484 - DNA, 41 bp, Homo sapiens
  source 1..41: mol_type = genomic DNA
acaagaactgctaactcatgcccccatgtctaacaacatgg

SEQ ID NO: 2485 - DNA, 42 bp, Homo sapiens
  source 1..42: mol_type = genomic DNA
acaagaactgctaactcatgcccccatgtctaacaacatggc

SEQ ID NO: 2486 - DNA, 43 bp, Homo sapiens
  source 1..43: mol_type = genomic DNA
acaagaactgctaactcatgcccccatgtctaacaacatggct

SEQ ID NO: 2487 - DNA, 44 bp, Homo sapiens
  source 1..44: mol_type = genomic DNA
acaagaactgctaactcatgcccccatgtctaacaacatggctt

SEQ ID NO: 2488 - DNA, 45 bp, Homo sapiens
  source 1..45: mol_type = genomic DNA
acaagaactgctaactcatgcccccatgtctaacaacatggcttt

SEQ ID NO: 2489 - DNA, 46 bp, Homo sapiens
  source 1..46: mol_type = genomic DNA
acaagaactgctaactcatgcccccatgtctaacaacatggctttc

SEQ ID NO: 2490 - DNA, 47 bp, Homo sapiens
  source 1..47: mol_type = genomic DNA
acaagaactgctaactcatgcccccatgtctaacaacatggctttct

SEQ ID NO: 2491 - DNA, 48 bp, Homo sapiens
  source 1..48: mol_type = genomic DNA
acaagaactgctaactcatgcccccatgtctaacaacatggctttctc

SEQ ID NO: 2492 - DNA, 17 bp, Homo sapiens
  source 1..17: mol_type = genomic DNA
acacaaagcacccaact

SEQ ID NO: 2493 - DNA, 20 bp, Homo sapiens
  source 1..20: mol_type = genomic DNA
acacaaagcacccaacttac

SEQ ID NO: 2494 - DNA, 23 bp, Homo sapiens
  source 1..23: mol_type = genomic DNA
acacaaagcacccaacttacact

SEQ ID NO: 2495 - DNA, 24 bp, Homo sapiens
  source 1..24: mol_type = genomic DNA
acacaaagcacccaacttacactt

SEQ ID NO: 2496 - DNA, 25 bp, Homo sapiens
  source 1..25: mol_type = genomic DNA
acacaaagcacccaacttacactta

SEQ ID NO: 2497 - DNA, 28 bp, Homo sapiens
  source 1..28: mol_type = genomic DNA
acacaaagcacccaacttacacttagga

SEQ ID NO: 2498 - DNA, 34 bp, Homo sapiens
  source 1..34: mol_type = genomic DNA
acacaaagcacccaacttacacttaggagatttc

SEQ ID NO: 2499 - DNA, 37 bp, Homo sapiens
  source 1..37: mol_type = genomic DNA
acacaaagcacccaacttacacttaggagatttcaac

SEQ ID NO: 2500 - DNA, 38 bp, Homo sapiens
  source 1..38: mol_type = genomic DNA
acacaaagcacccaacttacacttaggagatttcaact

SEQ ID NO: 2501 - DNA, 46 bp, Homo sapiens
  source 1..46: mol_type = genomic DNA
acacaaagcacccaacttacacttaggagatttcaacttaacttga

SEQ ID NO: 2502 - DNA, 17 bp, Homo sapiens
  source 1..17: mol_type = genomic DNA
acacctctttacagtga

SEQ ID NO: 2503 - DNA, 18 bp, Homo sapiens
  source 1..18: mol_type = genomic DNA
acacctctttacagtgac

SEQ ID NO: 2504 - DNA, 19 bp, Homo sapiens
  source 1..19: mol_type = genomic DNA
acacctctttacagtgacc

SEQ ID NO: 2505 - DNA, 20 bp, Homo sapiens
  source 1..20: mol_type = genomic DNA
acacctctttacagtgacca

SEQ ID NO: 2506 - DNA, 17 bp, Homo sapiens
  source 1..17: mol_type = genomic DNA
acacgcagaaggtcctg

SEQ ID NO: 2507 - DNA, 40 bp, Homo sapiens
  source 1..40: mol_type = genomic DNA
acacgcagaaggtcctgggttcgagccccagtggaaccac

SEQ ID NO: 2508 - DNA, 41 bp, Homo sapiens
  source 1..41: mol_type = genomic DNA
acacgcagaaggtcctgggttcgagccccagtggaaccacc

SEQ ID NO: 2509 - DNA, 42 bp, Homo sapiens
  source 1..42: mol_type = genomic DNA
acacgcagaaggtcctgggttcgagccccagtggaaccacca

SEQ ID NO: 2510 - DNA, 19 bp, Homo sapiens
  source 1..19: mol_type = genomic DNA
acacgcgaaaggtccccgg

SEQ ID NO: 2511 - DNA, 23 bp, Homo sapiens
  source 1..23: mol_type = genomic DNA
acacgcgaaaggtccccggttcg

SEQ ID NO: 2512 - DNA, 34 bp, Homo sapiens
  source 1..34: mol_type = genomic DNA
acacgcgaaaggtccccggttcgaaaccgggcgg

SEQ ID NO: 2513 - DNA, 40 bp, Homo sapiens
  source 1..40: mol_type = genomic DNA
acacgcgaaaggtccccggttcgaaaccgggcggaaacac

SEQ ID NO: 2514 - DNA, 41 bp, Homo sapiens
  source 1..41: mol_type = genomic DNA
acacgcgaaaggtccccggttcgaaaccgggcggaaacacc

SEQ ID NO: 2515 - DNA, 41 bp, Homo sapiens
  source 1..41: mol_type = genomic DNA
acacgcgaaaggtccccggttcgatcccgggcggaaacacc

SEQ ID NO: 2516 - DNA, 21 bp, Homo sapiens
  source 1..21: mol_type = genomic DNA
acacgcgaaaggtccctggat

SEQ ID NO: 2517 - DNA, 31 bp, Homo sapiens
  source 1..31: mol_type = genomic DNA
acacgtgggttcgaatcccatcctcgtcgcc

SEQ ID NO: 2518 - DNA, 19 bp, Homo sapiens
  source 1..19: mol_type = genomic DNA
acactgaaaatgtttagac

SEQ ID NO: 2519 - DNA, 20 bp, Homo sapiens
  source 1..20: mol_type = genomic DNA
acactgaaaatgtttagacg

SEQ ID NO: 2520 - DNA, 23 bp, Homo sapiens
  source 1..23: mol_type = genomic DNA
acactgaaaatgtttagacgggc

SEQ ID NO: 2521 - DNA, 24 bp, Homo sapiens
  source 1..24: mol_type = genomic DNA
acactgaaaatgtttagacgggct

SEQ ID NO: 2522 - DNA, 25 bp, Homo sapiens
  source 1..25: mol_type = genomic DNA
acactgaaaatgtttagacgggctc

SEQ ID NO: 2523 - DNA, 26 bp, Homo sapiens
  source 1..26: mol_type = genomic DNA
acactgaaaatgtttagacgggctca

SEQ ID NO: 2524 - DNA, 27 bp, Homo sapiens
  source 1..27: mol_type = genomic DNA
acactgaaaatgtttagacgggctcac

SEQ ID NO: 2525 - DNA, 28 bp, Homo sapiens
  source 1..28: mol_type = genomic DNA
acactgaaaatgtttagacgggctcaca

SEQ ID NO: 2526 - DNA, 29 bp, Homo sapiens
  source 1..29: mol_type = genomic DNA
acactgaaaatgtttagacgggctcacat

SEQ ID NO: 2527 - DNA, 30 bp, Homo sapiens
  source 1..30: mol_type = genomic DNA
acactgaaaatgtttagacgggctcacatc

SEQ ID NO: 2528 - DNA, 31 bp, Homo sapiens
  source 1..31: mol_type = genomic DNA
acactgaaaatgtttagacgggctcacatca

SEQ ID NO: 2529 - DNA, 33 bp, Homo sapiens
  source 1..33: mol_type = genomic DNA
acactgaaaatgtttagacgggctcacatcacc

SEQ ID NO: 2530 - DNA, 34 bp, Homo sapiens
  source 1..34: mol_type = genomic DNA
acactgaaaatgtttagacgggctcacatcaccc

SEQ ID NO: 2531 - DNA, 35 bp, Homo sapiens
  source 1..35: mol_type = genomic DNA
acactgaaaatgtttagacgggctcacatcacccc

SEQ ID NO: 2532 - DNA, 42 bp, Homo sapiens
  source 1..42: mol_type = genomic DNA
acactgaaaatgtttagacgggctcacatcaccccataaaca

SEQ ID NO: 2533 - DNA, 44 bp, Homo sapiens
  source 1..44: mol_type = genomic DNA
acactgaaaatgtttagacgggctcacatcaccccataaacacc

SEQ ID NO: 2534 - DNA, 45 bp, Homo sapiens
  source 1..45: mol_type = genomic DNA
acactgaaaatgtttagacgggctcacatcaccccataaacacca

SEQ ID NO: 2535 - DNA, 16 bp, Homo sapiens
  source 1..16: mol_type = genomic DNA
acactgtaaagctaac

SEQ ID NO: 2536 - DNA, 16 bp, Homo sapiens
  source 1..16: mol_type = genomic DNA
acacttaggagatttc

SEQ ID NO: 2537 - DNA, 17 bp, Homo sapiens
  source 1..17: mol_type = genomic DNA
acacttaggagatttca

SEQ ID NO: 2538 - DNA, 19 bp, Homo sapiens
  source 1..19: mol_type = genomic DNA
acacttaggagatttcaac

SEQ ID NO: 2539 - DNA, 20 bp, Homo sapiens
  source 1..20: mol_type = genomic DNA
acacttaggagatttcaact

SEQ ID NO: 2540 - DNA, 21 bp, Homo sapiens
  source 1..21: mol_type = genomic DNA
acacttaggagatttcaactt

SEQ ID NO: 2541 - DNA, 22 bp, Homo sapiens
  source 1..22: mol_type = genomic DNA
acacttaggagatttcaactta

SEQ ID NO: 2542 - DNA, 23 bp, Homo sapiens
  source 1..23: mol_type = genomic DNA
acacttaggagatttcaacttaa

SEQ ID NO: 2543 - DNA, 24 bp, Homo sapiens
  source 1..24: mol_type = genomic DNA
acacttaggagatttcaacttaac

SEQ ID NO: 2544 - DNA, 25 bp, Homo sapiens
  source 1..25: mol_type = genomic DNA
acacttaggagatttcaacttaact

SEQ ID NO: 2545 - DNA, 26 bp, Homo sapiens
  source 1..26: mol_type = genomic DNA
acacttaggagatttcaacttaactt

SEQ ID NO: 2546 - DNA, 27 bp, Homo sapiens
  source 1..27: mol_type = genomic DNA
acacttaggagatttcaacttaacttg

SEQ ID NO: 2547 - DNA, 29 bp, Homo sapiens
  source 1..29: mol_type = genomic DNA
acacttaggagatttcaacttaacttgac

SEQ ID NO: 2548 - DNA, 30 bp, Homo sapiens
  source 1..30: mol_type = genomic DNA
acacttaggagatttcaacttaacttgacc

SEQ ID NO: 2549 - DNA, 31 bp, Homo sapiens
  source 1..31: mol_type = genomic DNA
acacttaggagatttcaacttaacttgaccg

SEQ ID NO: 2550 - DNA, 32 bp, Homo sapiens
  source 1..32: mol_type = genomic DNA
acacttaggagatttcaacttaacttgaccgc

SEQ ID NO: 2551 - DNA, 33 bp, Homo sapiens
  source 1..33: mol_type = genomic DNA
acacttaggagatttcaacttaacttgaccgct

SEQ ID NO: 2552 - DNA, 34 bp, Homo sapiens
  source 1..34: mol_type = genomic DNA
acacttaggagatttcaacttaacttgaccgctc

SEQ ID NO: 2553 - DNA, 35 bp, Homo sapiens
  source 1..35: mol_type = genomic DNA
acacttaggagatttcaacttaacttgaccgctct

SEQ ID NO: 2554 - DNA, 36 bp, Homo sapiens
  source 1..36: mol_type = genomic DNA
acacttaggagatttcaacttaacttgaccgctctg

SEQ ID NO: 2555 - DNA, 37 bp, Homo sapiens
  source 1..37: mol_type = genomic DNA
acacttaggagatttcaacttaacttgaccgctctga

SEQ ID NO: 2556 - DNA, 38 bp, Homo sapiens
  source 1..38: mol_type = genomic DNA
acacttaggagatttcaacttaacttgaccgctctgac

SEQ ID NO: 2557 - DNA, 39 bp, Homo sapiens
  source 1..39: mol_type = genomic DNA
acacttaggagatttcaacttaacttgaccgctctgacc

SEQ ID NO: 2558 - DNA, 40 bp, Homo sapiens
  source 1..40: mol_type = genomic DNA
acacttaggagatttcaacttaacttgaccgctctgacca

SEQ ID NO: 2559 - DNA, 17 bp, Homo sapiens
  source 1..17: mol_type = genomic DNA
acagaccaagagccttc

SEQ ID NO: 2560 - DNA, 18 bp, Homo sapiens
  source 1..18: mol_type = genomic DNA
acagaccaagagccttca

SEQ ID NO: 2561 - DNA, 19 bp, Homo sapiens
  source 1..19: mol_type = genomic DNA
acagaccaagagccttcaa

SEQ ID NO: 2562 - DNA, 20 bp, Homo sapiens
  source 1..20: mol_type = genomic DNA
acagaccaagagccttcaaa

SEQ ID NO: 2563 - DNA, 21 bp, Homo sapiens
  source 1..21: mol_type = genomic DNA
acagaccaagagccttcaaag

SEQ ID NO: 2564 - DNA, 22 bp, Homo sapiens
  source 1..22: mol_type = genomic DNA
acagaccaagagccttcaaagc

SEQ ID NO: 2565 - DNA, 23 bp, Homo sapiens
  source 1..23: mol_type = genomic DNA
acagaccaagagccttcaaagcc

SEQ ID NO: 2566 - DNA, 24 bp, Homo sapiens
  source 1..24: mol_type = genomic DNA
acagaccaagagccttcaaagccc

SEQ ID NO: 2567 - DNA, 26 bp, Homo sapiens
  source 1..26: mol_type = genomic DNA
acagaccaagagccttcaaagccctc

SEQ ID NO: 2568 - DNA, 27 bp, Homo sapiens
  source 1..27: mol_type = genomic DNA
acagaccaagagccttcaaagccctca

SEQ ID NO: 2569 - DNA, 28 bp, Homo sapiens
  source 1..28: mol_type = genomic DNA
acagaccaagagccttcaaagccctcag

SEQ ID NO: 2570 - DNA, 30 bp, Homo sapiens
  source 1..30: mol_type = genomic DNA
acagaccaagagccttcaaagccctcagta

SEQ ID NO: 2571 - DNA, 32 bp, Homo sapiens
  source 1..32: mol_type = genomic DNA
acagaccaagagccttcaaagccctcagtaag

SEQ ID NO: 2572 - DNA, 33 bp, Homo sapiens
  source 1..33: mol_type = genomic DNA
acagaccaagagccttcaaagccctcagtaagt

SEQ ID NO: 2573 - DNA, 35 bp, Homo sapiens
  source 1..35: mol_type = genomic DNA
acagaccaagagccttcaaagccctcagtaagttg

SEQ ID NO: 2574 - DNA, 36 bp, Homo sapiens
  source 1..36: mol_type = genomic DNA
acagaccaagagccttcaaagccctcagtaagttgc

SEQ ID NO: 2575 - DNA, 46 bp, Homo sapiens
  source 1..46: mol_type = genomic DNA
acagaccaagagccttcaaagccctcagtaagttgcaatacttaat

SEQ ID NO: 2576 - DNA, 25 bp, Homo sapiens
  source 1..25: mol_type = genomic DNA
acagagaatagtttaaattagaatc

SEQ ID NO: 2577 - DNA, 33 bp, Homo sapiens
  source 1..33: mol_type = genomic DNA
acagagaatagtttaaattagaatcttagcttt

SEQ ID NO: 2578 - DNA, 34 bp, Homo sapiens
  source 1..34: mol_type = genomic DNA
acagagaatagtttaaattagaatcttagctttg

SEQ ID NO: 2579 - DNA, 35 bp, Homo sapiens
  source 1..35: mol_type = genomic DNA
acagagaatagtttaaattagaatcttagctttgg

SEQ ID NO: 2580 - DNA, 41 bp, Homo sapiens
  source 1..41: mol_type = genomic DNA
acagagaatagtttaaattagaatcttagctttgggtgcta

SEQ ID NO: 2581 - DNA, 16 bp, Homo sapiens
  source 1..16: mol_type = genomic DNA
acagaggcttacgacc

SEQ ID NO: 2582 - DNA, 17 bp, Homo sapiens
  source 1..17: mol_type = genomic DNA
acagaggcttacgaccc

SEQ ID NO: 2583 - DNA, 18 bp, Homo sapiens
  source 1..18: mol_type = genomic DNA
acagaggcttacgacccc

SEQ ID NO: 2584 - DNA, 19 bp, Homo sapiens
  source 1..19: mol_type = genomic DNA
acagaggcttacgacccct

SEQ ID NO: 2585 - DNA, 21 bp, Homo sapiens
  source 1..21: mol_type = genomic DNA
acagaggcttacgacccctta

SEQ ID NO: 2586 - DNA, 26 bp, Homo sapiens
  source 1..26: mol_type = genomic DNA
acagaggcttacgaccccttatttac

SEQ ID NO: 2587 - DNA, 27 bp, Homo sapiens
  source 1..27: mol_type = genomic DNA
acagaggcttacgaccccttatttacc

SEQ ID NO: 2588 - DNA, 28 bp, Homo sapiens
  source 1..28: mol_type = genomic DNA
acagaggcttacgaccccttatttaccc

SEQ ID NO: 2589 - DNA, 29 bp, Homo sapiens
  source 1..29: mol_type = genomic DNA
acagaggcttacgaccccttatttacccc

SEQ ID NO: 2590 - DNA, 30 bp, Homo sapiens
  source 1..30: mol_type = genomic DNA
acagaggcttacgaccccttatttacccca

SEQ ID NO: 2591 - DNA, 16 bp, Homo sapiens
  source 1..16: mol_type = genomic DNA
acagctatccattggt

SEQ ID NO: 2592 - DNA, 17 bp, Homo sapiens
  source 1..17: mol_type = genomic DNA
acagctatccattggtc

SEQ ID NO: 2593 - DNA, 18 bp, Homo sapiens
  source 1..18: mol_type = genomic DNA
acagctatccattggtct

SEQ ID NO: 2594 - DNA, 19 bp, Homo sapiens
  source 1..19: mol_type = genomic DNA
acagctatccattggtctt

SEQ ID NO: 2595 - DNA, 20 bp, Homo sapiens
  source 1..20: mol_type = genomic DNA
acagctatccattggtctta

SEQ ID NO: 2596 - DNA, 21 bp, Homo sapiens
  source 1..21: mol_type = genomic DNA
acagctatccattggtcttag

SEQ ID NO: 2597 - DNA, 23 bp, Homo sapiens
  source 1..23: mol_type = genomic DNA
acagctatccattggtcttaggc

SEQ ID NO: 2598 - DNA, 24 bp, Homo sapiens
  source 1..24: mol_type = genomic DNA
acagctatccattggtcttaggcc

SEQ ID NO: 2599 - DNA, 25 bp, Homo sapiens
  source 1..25: mol_type = genomic DNA
acagctatccattggtcttaggccc

SEQ ID NO: 2600 - DNA, 26 bp, Homo sapiens
  source 1..26: mol_type = genomic DNA
acagctatccattggtcttaggcccc

SEQ ID NO: 2601 - DNA, 27 bp, Homo sapiens
  source 1..27: mol_type = genomic DNA
acagctatccattggtcttaggcccca

SEQ ID NO: 2602 - DNA, 30 bp, Homo sapiens
  source 1..30: mol_type = genomic DNA
acagctatccattggtcttaggccccaaaa

SEQ ID NO: 2603 - DNA, 31 bp, Homo sapiens
  source 1..31: mol_type = genomic DNA
acagctatccattggtcttaggccccaaaaa

SEQ ID NO: 2604 - DNA, 17 bp, Homo sapiens
  source 1..17: mol_type = genomic DNA
acaggagatcctgggtt

SEQ ID NO: 2605 - DNA, 18 bp, Homo sapiens
  source 1..18: mol_type = genomic DNA
acaggagatcctgggttc

SEQ ID NO: 2606 - DNA, 22 bp, Homo sapiens
  source 1..22: mol_type = genomic DNA
acaggagatcctgggttcgaat

SEQ ID NO: 2607 - DNA, 23 bp, Homo sapiens
  source 1..23: mol_type = genomic DNA
acaggagatcctgggttcgaatc

SEQ ID NO: 2608 - DNA, 27 bp, Homo sapiens
  source 1..27: mol_type = genomic DNA
acaggagatcctgggttcgaatcccag

SEQ ID NO: 2609 - DNA, 28 bp, Homo sapiens
  source 1..28: mol_type = genomic DNA
acaggagatcctgggttcgaatcccagc

SEQ ID NO: 2610 - DNA, 29 bp, Homo sapiens
  source 1..29: mol_type = genomic DNA
acaggagatcctgggttcgaatcccagcg

SEQ ID NO: 2611 - DNA, 35 bp, Homo sapiens
  source 1..35: mol_type = genomic DNA
acaggagatcctgggttcgaatcccagcgaggcct

SEQ ID NO: 2612 - DNA, 37 bp, Homo sapiens
  source 1..37: mol_type = genomic DNA
acaggagatcctgggttcgaatcccagcgaggcctcc

SEQ ID NO: 2613 - DNA, 30 bp, Homo sapiens
  source 1..30: mol_type = genomic DNA
acaggagatcctgggttcgaatcccagcgg

SEQ ID NO: 2614 - DNA, 32 bp, Homo sapiens
  source 1..32: mol_type = genomic DNA
acaggagatcctgggttcgaatcccagcgggg

SEQ ID NO: 2615 - DNA, 33 bp, Homo sapiens
  source 1..33: mol_type = genomic DNA
acaggagatcctgggttcgaatcccagcggggc

SEQ ID NO: 2616 - DNA, 34 bp, Homo sapiens
  source 1..34: mol_type = genomic DNA
acaggagatcctgggttcgaatcccagcggggcc

SEQ ID NO: 2617 - DNA, 35 bp, Homo sapiens
  source 1..35: mol_type = genomic DNA
acaggagatcctgggttcgaatcccagcggggcct

SEQ ID NO: 2618 - DNA, 36 bp, Homo sapiens
  source 1..36: mol_type = genomic DNA
acaggagatcctgggttcgaatcccagcggggcctc

SEQ ID NO: 2619 - DNA, 37 bp, Homo sapiens
  source 1..37: mol_type = genomic DNA
acaggagatcctgggttcgaatcccagcggggcctcc

SEQ ID NO: 2620 - DNA, 38 bp, Homo sapiens
  source 1..38: mol_type = genomic DNA
acaggagatcctgggttcgaatcccagcggggcctcca

SEQ ID NO: 2621 - DNA, 31 bp, Homo sapiens
  source 1..31: mol_type = genomic DNA
acaggagatcctgggttcgaatcccagcggt

SEQ ID NO: 2622 - DNA, 32 bp, Homo sapiens
  source 1..32: mol_type = genomic DNA
acaggagatcctgggttcgaatcccagcggtg

SEQ ID NO: 2623 - DNA, 33 bp, Homo sapiens
  source 1..33: mol_type = genomic DNA
acaggagatcctgggttcgaatcccagcggtgc

SEQ ID NO: 2624 - DNA, 34 bp, Homo sapiens
  source 1..34: mol_type = genomic DNA
acaggagatcctgggttcgaatcccagcggtgcc

SEQ ID NO: 2625 - DNA, 35 bp, Homo sapiens
  source 1..35: mol_type = genomic DNA
acaggagatcctgggttcgaatcccagcggtgcct

SEQ ID NO: 2626 - DNA, 36 bp, Homo sapiens
  source 1..36: mol_type = genomic DNA
acaggagatcctgggttcgaatcccagcggtgcctc

SEQ ID NO: 2627 - DNA, 37 bp, Homo sapiens
  source 1..37: mol_type = genomic DNA
acaggagatcctgggttcgaatcccagcggtgcctcc

SEQ ID NO: 2628 - DNA, 38 bp, Homo sapiens
  source 1..38: mol_type = genomic DNA
acaggagatcctgggttcgaatcccagcggtgcctcca

SEQ ID NO: 2629 - DNA, 35 bp, Homo sapiens
  source 1..35: mol_type = genomic DNA
acaggagatcctgggttcgaatcccagtagagcct

SEQ ID NO: 2630 - DNA, 36 bp, Homo sapiens
  source 1..36: mol_type = genomic DNA
acaggagatcctgggttcgaatcccagtagagcctc

SEQ ID NO: 2631 - DNA, 37 bp, Homo sapiens
  source 1..37: mol_type = genomic DNA
acaggagatcctgggttcgaatcccagtagagcctcc

SEQ ID NO: 2632 - DNA, 35 bp, Homo sapiens
  source 1..35: mol_type = genomic DNA
acaggagatcctgggttcgactcccagcggggcct

SEQ ID NO: 2633 - DNA, 36 bp, Homo sapiens
  source 1..36: mol_type = genomic DNA
acaggagatcctgggttcgactcccagcggggcctc

SEQ ID NO: 2634 - DNA, 37 bp, Homo sapiens
  source 1..37: mol_type = genomic DNA
acaggagatcctgggttcgactcccagcggggcctcc

SEQ ID NO: 2635 - DNA, 35 bp, Homo sapiens
  source 1..35: mol_type = genomic DNA
acaggagatcctgggttcgactcccagtggggcct

SEQ ID NO: 2636 - DNA, 36 bp, Homo sapiens
  source 1..36: mol_type = genomic DNA
acaggagatcctgggttcgactcccagtggggcctc

SEQ ID NO: 2637 - DNA, 37 bp, Homo sapiens
  source 1..37: mol_type = genomic DNA
acaggagatcctgggttcgactcccagtggggcctcc

SEQ ID NO: 2638 - DNA, 16 bp, Homo sapiens
  source 1..16: mol_type = genomic DNA
acaggggttaggcctc

SEQ ID NO: 2639 - DNA, 24 bp, Homo sapiens
  source 1..24: mol_type = genomic DNA
acaggggttaggcctctttttacc

SEQ ID NO: 2640 - DNA, 27 bp, Homo sapiens
  source 1..27: mol_type = genomic DNA
acaggggttaggcctctttttaccacc

SEQ ID NO: 2641 - DNA, 28 bp, Homo sapiens
  source 1..28: mol_type = genomic DNA
acaggggttaggcctctttttaccacca

SEQ ID NO: 2642 - DNA, 25 bp, Homo sapiens
  source 1..25: mol_type = genomic DNA
acaggttcgaatcctgttcgtgacg

SEQ ID NO: 2643 - DNA, 27 bp, Homo sapiens
  source 1..27: mol_type = genomic DNA
acaggttcgaatcctgttcgtgacgcc

SEQ ID NO: 2644 - DNA, 28 bp, Homo sapiens
  source 1..28: mol_type = genomic DNA
acaggttcgaatcctgttcgtgacgcca

SEQ ID NO: 2645 - DNA, 16 bp, Homo sapiens
  source 1..16: mol_type = genomic DNA
acagtcagaggttcaa

SEQ ID NO: 2646 - DNA, 19 bp, Homo sapiens
  source 1..19: mol_type = genomic DNA
acagtcagaggttcaattc

SEQ ID NO: 2647 - DNA, 20 bp, Homo sapiens
  source 1..20: mol_type = genomic DNA
acagtcagaggttcaattcc

SEQ ID NO: 2648 - DNA, 21 bp, Homo sapiens
  source 1..21: mol_type = genomic DNA
acagtcagaggttcaattcct

SEQ ID NO: 2649 - DNA, 22 bp, Homo sapiens
  source 1..22: mol_type = genomic DNA
acagtcagaggttcaattcctc

SEQ ID NO: 2650 - DNA, 23 bp, Homo sapiens
  source 1..23: mol_type = genomic DNA
acagtcagaggttcaattcctct

SEQ ID NO: 2651 - DNA, 31 bp, Homo sapiens
  source 1..31: mol_type = genomic DNA
acagtcagaggttcaattcctcttcttaaca

SEQ ID NO: 2652 - DNA, 17 bp, Homo sapiens
  source 1..17: mol_type = genomic DNA
acatatgtccgcgtggg

SEQ ID NO: 2653 - DNA, 18 bp, Homo sapiens
  source 1..18: mol_type = genomic DNA
acatatgtccgcgtgggt

SEQ ID NO: 2654 - DNA, 19 bp, Homo sapiens
  source 1..19: mol_type = genomic DNA
acatatgtccgcgtgggtt

SEQ ID NO: 2655 - DNA, 28 bp, Homo sapiens
  source 1..28: mol_type = genomic DNA
acatatgtccgcgtgggttcgaacccca

SEQ ID NO: 2656 - DNA, 33 bp, Homo sapiens
  source 1..33: mol_type = genomic DNA
acatatgtccgcgtgggttcgaaccccactcct

SEQ ID NO: 2657 - DNA, 16 bp, Homo sapiens
  source 1..16: mol_type = genomic DNA
acatcaccccataaac

SEQ ID NO: 2658 - DNA, 17 bp, Homo sapiens
  source 1..17: mol_type = genomic DNA
acatcaccccataaaca

SEQ ID NO: 2659 - DNA, 18 bp, Homo sapiens
  source 1..18: mol_type = genomic DNA
acatcaccccataaacac

SEQ ID NO: 2660 - DNA, 19 bp, Homo sapiens
  source 1..19: mol_type = genomic DNA
acatcaccccataaacacc

SEQ ID NO: 2661 - DNA, 20 bp, Homo sapiens
  source 1..20: mol_type = genomic DNA
acatcaccccataaacacca

SEQ ID NO: 2662 - DNA, 16 bp, Homo sapiens
  source 1..16: mol_type = genomic DNA
acatcagattgtgaat

SEQ ID NO: 2663 - DNA, 17 bp, Homo sapiens
  source 1..17: mol_type = genomic DNA
acatcagattgtgaatc

SEQ ID NO: 2664 - DNA, 18 bp, Homo sapiens
  source 1..18: mol_type = genomic DNA
acatcagattgtgaatct

SEQ ID NO: 2665 - DNA, 19 bp, Homo sapiens
  source 1..19: mol_type = genomic DNA
acatcagattgtgaatctg

SEQ ID NO: 2666 - DNA, 20 bp, Homo sapiens
  source 1..20: mol_type = genomic DNA
acatcagattgtgaatctga

SEQ ID NO: 2667 - DNA, 21 bp, Homo sapiens
  source 1..21: mol_type = genomic DNA
acatcagattgtgaatctgac

SEQ ID NO: 2668 - DNA, 22 bp, Homo sapiens
  source 1..22: mol_type = genomic DNA
acatcagattgtgaatctgaca

SEQ ID NO: 2669 - DNA, 24 bp, Homo sapiens
  source 1..24: mol_type = genomic DNA
acatcagattgtgaatctgacaac

SEQ ID NO: 2670 - DNA, 25 bp, Homo sapiens
  source 1..25: mol_type = genomic DNA
acatcagattgtgaatctgacaaca

SEQ ID NO: 2671 - DNA, 26 bp, Homo sapiens
  source 1..26: mol_type = genomic DNA
acatcagattgtgaatctgacaacag

SEQ ID NO: 2672 - DNA, 27 bp, Homo sapiens
  source 1..27: mol_type = genomic DNA
acatcagattgtgaatctgacaacaga

SEQ ID NO: 2673 - DNA, 28 bp, Homo sapiens
  source 1..28: mol_type = genomic DNA
acatcagattgtgaatctgacaacagag

SEQ ID NO: 2674 - DNA, 29 bp, Homo sapiens
  source 1..29: mol_type = genomic DNA
acatcagattgtgaatctgacaacagagg

SEQ ID NO: 2675 - DNA, 30 bp, Homo sapiens
  source 1..30: mol_type = genomic DNA
acatcagattgtgaatctgacaacagaggc

SEQ ID NO: 2676 - DNA, 31 bp, Homo sapiens
  source 1..31: mol_type = genomic DNA
acatcagattgtgaatctgacaacagaggct

SEQ ID NO: 2677 - DNA, 32 bp, Homo sapiens
  source 1..32: mol_type = genomic DNA
acatcagattgtgaatctgacaacagaggctt

SEQ ID NO: 2678 - DNA, 33 bp, Homo sapiens
  source 1..33: mol_type = genomic DNA
acatcagattgtgaatctgacaacagaggctta

SEQ ID NO: 2679 - DNA, 34 bp, Homo sapiens
  source 1..34: mol_type = genomic DNA
acatcagattgtgaatctgacaacagaggcttac

SEQ ID NO: 2680 - DNA, 35 bp, Homo sapiens
  source 1..35: mol_type = genomic DNA
acatcagattgtgaatctgacaacagaggcttacg

SEQ ID NO: 2681 - DNA, 36 bp, Homo sapiens
  source 1..36: mol_type = genomic DNA
acatcagattgtgaatctgacaacagaggcttacga

SEQ ID NO: 2682 - DNA, 37 bp, Homo sapiens
  source 1..37: mol_type = genomic DNA
acatcagattgtgaatctgacaacagaggcttacgac

SEQ ID NO: 2683 - DNA, 38 bp, Homo sapiens
  source 1..38: mol_type = genomic DNA
acatcagattgtgaatctgacaacagaggcttacgacc

SEQ ID NO: 2684 - DNA, 39 bp, Homo sapiens
  source 1..39: mol_type = genomic DNA
acatcagattgtgaatctgacaacagaggcttacgaccc

SEQ ID NO: 2685 - DNA, 40 bp, Homo sapiens
  source 1..40: mol_type = genomic DNA
acatcagattgtgaatctgacaacagaggcttacgacccc

SEQ ID NO: 2686 - DNA, 41 bp, Homo sapiens
  source 1..41: mol_type = genomic DNA
acatcagattgtgaatctgacaacagaggcttacgacccct

SEQ ID NO: 2687 - DNA, 42 bp, Homo sapiens
  source 1..42: mol_type = genomic DNA
acatcagattgtgaatctgacaacagaggcttacgacccctt

SEQ ID NO: 2688 - DNA, 43 bp, Homo sapiens
  source 1..43: mol_type = genomic DNA
acatcagattgtgaatctgacaacagaggcttacgacccctta

SEQ ID NO: 2689 - DNA, 44 bp, Homo sapiens
  source 1..44: mol_type = genomic DNA
acatcagattgtgaatctgacaacagaggcttacgaccccttat

SEQ ID NO: 2690 - DNA, 45 bp, Homo sapiens
  source 1..45: mol_type = genomic DNA
acatcagattgtgaatctgacaacagaggcttacgaccccttatt

SEQ ID NO: 2691 - DNA, 48 bp, Homo sapiens
  source 1..48: mol_type = genomic DNA
acatcagattgtgaatctgacaacagaggcttacgaccccttatttac

SEQ ID NO: 2692 - DNA, 16 bp, Homo sapiens
  source 1..16: mol_type = genomic DNA
acatggactctggagc

SEQ ID NO: 2693 - DNA, 16 bp, Homo sapiens
  source 1..16: mol_type = genomic DNA
acatggctttctcacc

SEQ ID NO: 2694 - DNA, 17 bp, Homo sapiens
  source 1..17: mol_type = genomic DNA
acatggctttctcacca

SEQ ID NO: 2695 - DNA, 21 bp, Homo sapiens
  source 1..21: mol_type = genomic DNA
acatggtctagcggttaggat

SEQ ID NO: 2696 - DNA, 22 bp, Homo sapiens
  source 1..22: mol_type = genomic DNA
acatggtctagcggttaggatt

SEQ ID NO: 2697 - DNA, 23 bp, Homo sapiens
  source 1..23: mol_type = genomic DNA
acatggtctagcggttaggattc

SEQ ID NO: 2698 - DNA, 24 bp, Homo sapiens
  source 1..24: mol_type = genomic DNA
acatggtctagcggttaggattcc

SEQ ID NO: 2699 - DNA, 25 bp, Homo sapiens
  source 1..25: mol_type = genomic DNA
acatggtctagcggttaggattcct

SEQ ID NO: 2700 - DNA, 26 bp, Homo sapiens
  source 1..26: mol_type = genomic DNA
acatggtctagcggttaggattcctg

SEQ ID NO: 2701 - DNA, 27 bp, Homo sapiens
  source 1..27: mol_type = genomic DNA
acatggtctagcggttaggattcctgg

SEQ ID NO: 2702 - DNA, 28 bp, Homo sapiens
  source 1..28: mol_type = genomic DNA
acatggtctagcggttaggattcctggt

SEQ ID NO: 2703 - DNA, 29 bp, Homo sapiens
  source 1..29: mol_type = genomic DNA
acatggtctagcggttaggattcctggtt

SEQ ID NO: 2704 - DNA, 30 bp, Homo sapiens
  source 1..30: mol_type = genomic DNA
acatggtctagcggttaggattcctggttt

SEQ ID NO: 2705 - DNA, 31 bp, Homo sapiens
  source 1..31: mol_type = genomic DNA
acatggtctagcggttaggattcctggtttt

SEQ ID NO: 2706 - DNA, 32 bp, Homo sapiens
  source 1..32: mol_type = genomic DNA
acatggtctagcggttaggattcctggttttc

SEQ ID NO: 2707 - DNA, 33 bp, Homo sapiens
  source 1..33: mol_type = genomic DNA
acatggtctagcggttaggattcctggttttca

SEQ ID NO: 2708 - DNA, 34 bp, Homo sapiens
  source 1..34: mol_type = genomic DNA
acatggtctagcggttaggattcctggttttcac

SEQ ID NO: 2709 - DNA, 36 bp, Homo sapiens
  source 1..36: mol_type = genomic DNA
acatggtctagcggttaggattcctggttttcaccc

SEQ ID NO: 2710 - DNA, 38 bp, Homo sapiens
  source 1..38: mol_type = genomic DNA
acatggtctagcggttaggattcctggttttcacccag

SEQ ID NO: 2711 - DNA, 19 bp, Homo sapiens
  source 1..19: mol_type = genomic DNA
acattcaaaaaagagtacc

SEQ ID NO: 2712 - DNA, 20 bp, Homo sapiens
  source 1..20: mol_type = genomic DNA
acattcaaaaaagagtacca

SEQ ID NO: 2713 - DNA, 18 bp, Homo sapiens
  source 1..18: mol_type = genomic DNA
accaaaacatcagattgt

SEQ ID NO: 2714 - DNA, 19 bp, Homo sapiens
  source 1..19: mol_type = genomic DNA
accaaaacatcagattgtg

SEQ ID NO: 2715 - DNA, 20 bp, Homo sapiens
  source 1..20: mol_type = genomic DNA
accaaaacatcagattgtga

SEQ ID NO: 2716 - DNA, 21 bp, Homo sapiens
  source 1..21: mol_type = genomic DNA
accaaaacatcagattgtgaa

SEQ ID NO: 2717 - DNA, 22 bp, Homo sapiens
  source 1..22: mol_type = genomic DNA
accaaaacatcagattgtgaat

SEQ ID NO: 2718 - DNA, 23 bp, Homo sapiens
  source 1..23: mol_type = genomic DNA
accaaaacatcagattgtgaatc

SEQ ID NO: 2719 - DNA, 24 bp, Homo sapiens
  source 1..24: mol_type = genomic DNA
accaaaacatcagattgtgaatct

SEQ ID NO: 2720 - DNA, 25 bp, Homo sapiens
  source 1..25: mol_type = genomic DNA
accaaaacatcagattgtgaatctg

SEQ ID NO: 2721 - DNA, 27 bp, Homo sapiens
  source 1..27: mol_type = genomic DNA
accaaaacatcagattgtgaatctgac

SEQ ID NO: 2722 - DNA, 28 bp, Homo sapiens
  source 1..28: mol_type = genomic DNA
accaaaacatcagattgtgaatctgaca

SEQ ID NO: 2723 - DNA, 30 bp, Homo sapiens
  source 1..30: mol_type = genomic DNA
accaaaacatcagattgtgaatctgacaac

SEQ ID NO: 2724 - DNA, 31 bp, Homo sapiens
  source 1..31: mol_type = genomic DNA
accaaaacatcagattgtgaatctgacaaca

SEQ ID NO: 2725 - DNA, 32 bp, Homo sapiens
  source 1..32: mol_type = genomic DNA
accaaaacatcagattgtgaatctgacaacag

SEQ ID NO: 2726 - DNA, 33 bp, Homo sapiens
  source 1..33: mol_type = genomic DNA
accaaaacatcagattgtgaatctgacaacaga

SEQ ID NO: 2727 - DNA, 34 bp, Homo sapiens
  source 1..34: mol_type = genomic DNA
accaaaacatcagattgtgaatctgacaacagag

SEQ ID NO: 2728 - DNA, 35 bp, Homo sapiens
  source 1..35: mol_type = genomic DNA
accaaaacatcagattgtgaatctgacaacagagg

SEQ ID NO: 2729 - DNA, 36 bp, Homo sapiens
  source 1..36: mol_type = genomic DNA
accaaaacatcagattgtgaatctgacaacagaggc

SEQ ID NO: 2730 - DNA, 37 bp, Homo sapiens
  source 1..37: mol_type = genomic DNA
accaaaacatcagattgtgaatctgacaacagaggct

SEQ ID NO: 2731 - DNA, 38 bp, Homo sapiens
  source 1..38: mol_type = genomic DNA
accaaaacatcagattgtgaatctgacaacagaggctt

SEQ ID NO: 2732 - DNA, 39 bp, Homo sapiens
  source 1..39: mol_type = genomic DNA
accaaaacatcagattgtgaatctgacaacagaggctta

SEQ ID NO: 2733 - DNA, 40 bp, Homo sapiens
  source 1..40: mol_type = genomic DNA
accaaaacatcagattgtgaatctgacaacagaggcttac

SEQ ID NO: 2734 - DNA, 41 bp, Homo sapiens
  source 1..41: mol_type = genomic DNA
accaaaacatcagattgtgaatctgacaacagaggcttacg

SEQ ID NO: 2735 - DNA, 43 bp, Homo sapiens
  source 1..43: mol_type = genomic DNA
accaaaacatcagattgtgaatctgacaacagaggcttacgac

SEQ ID NO: 2736 - DNA, 44 bp, Homo sapiens
  source 1..44: mol_type = genomic DNA
accaaaacatcagattgtgaatctgacaacagaggcttacgacc

SEQ ID NO: 2737 - DNA, 45 bp, Homo sapiens
  source 1..45: mol_type = genomic DNA
accaaaacatcagattgtgaatctgacaacagaggcttacgaccc

SEQ ID NO: 2738 - DNA, 46 bp, Homo sapiens
  source 1..46: mol_type = genomic DNA
accaaaacatcagattgtgaatctgacaacagaggcttacgacccc

SEQ ID NO: 2739 - DNA, 47 bp, Homo sapiens
  source 1..47: mol_type = genomic DNA
accaaaacatcagattgtgaatctgacaacagaggcttacgacccct

SEQ ID NO: 2740 - DNA, 48 bp, Homo sapiens
  source 1..48: mol_type = genomic DNA
accaaaacatcagattgtgaatctgacaacagaggcttacgacccctt

SEQ ID NO: 2741 - DNA, 16 bp, Homo sapiens
  source 1..16: mol_type = genomic DNA
accaacacctctttac

SEQ ID NO: 2742 - DNA, 17 bp, Homo sapiens
  source 1..17: mol_type = genomic DNA
accaacacctctttaca

SEQ ID NO: 2743 - DNA, 18 bp, Homo sapiens
  source 1..18: mol_type = genomic DNA
accaacacctctttacag

SEQ ID NO: 2744 - DNA, 19 bp, Homo sapiens
  source 1..19: mol_type = genomic DNA
accaacacctctttacagt

SEQ ID NO: 2745 - DNA, 20 bp, Homo sapiens
  source 1..20: mol_type = genomic DNA
accaacacctctttacagtg

SEQ ID NO: 2746 - DNA, 21 bp, Homo sapiens
  source 1..21: mol_type = genomic DNA
accaacacctctttacagtga

SEQ ID NO: 2747 - DNA, 22 bp, Homo sapiens
  source 1..22: mol_type = genomic DNA
accaacacctctttacagtgac

SEQ ID NO: 2748 - DNA, 23 bp, Homo sapiens
  source 1..23: mol_type = genomic DNA
accaacacctctttacagtgacc

SEQ ID NO: 2749 - DNA, 24 bp, Homo sapiens
  source 1..24: mol_type = genomic DNA
accaacacctctttacagtgacca

SEQ ID NO: 2750 - DNA, 24 bp, Homo sapiens
  source 1..24: mol_type = genomic DNA
accaagagccttcaaagccctcag

SEQ ID NO: 2751 - DNA, 25 bp, Homo sapiens
  source 1..25: mol_type = genomic DNA
accaagagccttcaaagccctcagt

SEQ ID NO: 2752 - DNA, 32 bp, Homo sapiens
  source 1..32: mol_type = genomic DNA
accaagagccttcaaagccctcagtaagttgc

SEQ ID NO: 2753 - DNA, 16 bp, Homo sapiens
  source 1..16: mol_type = genomic DNA
accagaatggccgagt

SEQ ID NO: 2754 - DNA, 17 bp, Homo sapiens
  source 1..17: mol_type = genomic DNA
accagaatggccgagtg

SEQ ID NO: 2755 - DNA, 18 bp, Homo sapiens
  source 1..18: mol_type = genomic DNA
accagaatggccgagtgg

SEQ ID NO: 2756 - DNA, 20 bp, Homo sapiens
  source 1..20: mol_type = genomic DNA
accagaatggccgagtggtt

SEQ ID NO: 2757 - DNA, 21 bp, Homo sapiens
  source 1..21: mol_type = genomic DNA
accagaatggccgagtggtta

SEQ ID NO: 2758 - DNA, 22 bp, Homo sapiens
  source 1..22: mol_type = genomic DNA
accagaatggccgagtggttaa

SEQ ID NO: 2759 - DNA, 23 bp, Homo sapiens
  source 1..23: mol_type = genomic DNA
accagaatggccgagtggttaag

SEQ ID NO: 2760 - DNA, 16 bp, Homo sapiens
  source 1..16: mol_type = genomic DNA
accagctttggggggt

SEQ ID NO: 2761 - DNA, 17 bp, Homo sapiens
  source 1..17: mol_type = genomic DNA
accagctttggggggtt

SEQ ID NO: 2762 - DNA, 18 bp, Homo sapiens
  source 1..18: mol_type = genomic DNA
accagctttggggggttc

SEQ ID NO: 2763 - DNA, 19 bp, Homo sapiens
  source 1..19: mol_type = genomic DNA
accagctttggggggttcg

SEQ ID NO: 2764 - DNA, 20 bp, Homo sapiens
  source 1..20: mol_type = genomic DNA
accagctttggggggttcga

SEQ ID NO: 2765 - DNA, 28 bp, Homo sapiens
  source 1..28: mol_type = genomic DNA
accagctttggggggttcgattccttcc

SEQ ID NO: 2766 - DNA, 29 bp, Homo sapiens
  source 1..29: mol_type = genomic DNA
accagctttggggggttcgattccttcct

SEQ ID NO: 2767 - DNA, 30 bp, Homo sapiens
  source 1..30: mol_type = genomic DNA
accagctttggggggttcgattccttcctt

SEQ ID NO: 2768 - DNA, 31 bp, Homo sapiens
  source 1..31: mol_type = genomic DNA
accagctttggggggttcgattccttccttt

SEQ ID NO: 2769 - DNA, 34 bp, Homo sapiens
  source 1..34: mol_type = genomic DNA
accagctttggggggttcgattccttcctttttt

SEQ ID NO: 2770 - DNA, 37 bp, Homo sapiens
  source 1..37: mol_type = genomic DNA
accagctttggggggttcgattccttccttttttgcc

SEQ ID NO: 2771 - DNA, 16 bp, Homo sapiens
  source 1..16: mol_type = genomic DNA
accaggatggccgagt

SEQ ID NO: 2772 - DNA, 17 bp, Homo sapiens
  source 1..17: mol_type = genomic DNA
accaggatggccgagtg

SEQ ID NO: 2773 - DNA, 18 bp, Homo sapiens
  source 1..18: mol_type = genomic DNA
accaggatggccgagtgg

SEQ ID NO: 2774 - DNA, 19 bp, Homo sapiens
  source 1..19: mol_type = genomic DNA
accaggatggccgagtggt

SEQ ID NO: 2775 - DNA, 20 bp, Homo sapiens
  source 1..20: mol_type = genomic DNA
accaggatggccgagtggtt

SEQ ID NO: 2776 - DNA, 21 bp, Homo sapiens
  source 1..21: mol_type = genomic DNA
accaggatggccgagtggtta

SEQ ID NO: 2777 - DNA, 22 bp, Homo sapiens
  source 1..22: mol_type = genomic DNA
accaggatggccgagtggttaa

SEQ ID NO: 2778 - DNA, 23 bp, Homo sapiens
  source 1..23: mol_type = genomic DNA
accaggatggccgagtggttaag

SEQ ID NO: 2779 - DNA, 24 bp, Homo sapiens
  source 1..24: mol_type = genomic DNA
accaggatggccgagtggttaagg

SEQ ID NO: 2780 - DNA, 25 bp, Homo sapiens
  source 1..25: mol_type = genomic DNA
accaggatggccgagtggttaaggc

SEQ ID NO: 2781 - DNA, 32 bp, Homo sapiens
  source 1..32: mol_type = genomic DNA
accaggatggccgagtggttaaggcgttggac

SEQ ID NO: 2782 - DNA, 33 bp, Homo sapiens
  source 1..33: mol_type = genomic DNA
accaggatggccgagtggttaaggcgttggact

SEQ ID NO: 2783 - DNA, 16 bp, Homo sapiens
  source 1..16: mol_type = genomic DNA
accaggcggaaacacc

SEQ ID NO: 2784 - DNA, 17 bp, Homo sapiens
  source 1..17: mol_type = genomic DNA
accaggcggaaacacca

SEQ ID NO: 2785 - DNA, 16 bp, Homo sapiens
  source 1..16: mol_type = genomic DNA
accaggggtcgcgagt

SEQ ID NO: 2786 - DNA, 17 bp, Homo sapiens
  source 1..17: mol_type = genomic DNA
accaggggtcgcgagtt

SEQ ID NO: 2787 - DNA, 18 bp, Homo sapiens
  source 1..18: mol_type = genomic DNA
accaggggtcgcgagttc

SEQ ID NO: 2788 - DNA, 19 bp, Homo sapiens
  source 1..19: mol_type = genomic DNA
accaggggtcgcgagttca

SEQ ID NO: 2789 - DNA, 28 bp, Homo sapiens
  source 1..28: mol_type = genomic DNA
accaggggtcgcgagttcaaatctcgct

SEQ ID NO: 2790 - DNA, 32 bp, Homo sapiens
  source 1..32: mol_type = genomic DNA
accaggggtcgcgagttcaaatctcgctgggg

SEQ ID NO: 2791 - DNA, 33 bp, Homo sapiens
  source 1..33: mol_type = genomic DNA
accaggggtcgcgagttcaaatctcgctggggc

SEQ ID NO: 2792 - DNA, 34 bp, Homo sapiens
  source 1..34: mol_type = genomic DNA
accaggggtcgcgagttcaaatctcgctggggcc

SEQ ID NO: 2793 - DNA, 35 bp, Homo sapiens
  source 1..35: mol_type = genomic DNA
accaggggtcgcgagttcaaatctcgctggggcct

SEQ ID NO: 2794 - DNA, 36 bp, Homo sapiens
  source 1..36: mol_type = genomic DNA
accaggggtcgcgagttcaaatctcgctggggcctc

SEQ ID NO: 2795 - DNA, 37 bp, Homo sapiens
  source 1..37: mol_type = genomic DNA
accaggggtcgcgagttcaaatctcgctggggcctcc

SEQ ID NO: 2796 - DNA, 38 bp, Homo sapiens
  source 1..38: mol_type = genomic DNA
accaggggtcgcgagttcaaatctcgctggggcctcca

SEQ ID NO: 2797 - DNA, 35 bp, Homo sapiens
  source 1..35: mol_type = genomic DNA
accaggggtcgcgagttcaattctcgctggggcct

SEQ ID NO: 2798 - DNA, 37 bp, Homo sapiens
  source 1..37: mol_type = genomic DNA
accaggggtcgcgagttcaattctcgctggggcctcc

SEQ ID NO: 2799 - DNA, 19 bp, Homo sapiens
  source 1..19: mol_type = genomic DNA
accaggggtcgcgagttcg

SEQ ID NO: 2800 - DNA, 35 bp, Homo sapiens
  source 1..35: mol_type = genomic DNA
accaggggtcgcgagttcgatcctcgctggggcct

SEQ ID NO: 2801 - DNA, 37 bp, Homo sapiens
  source 1..37: mol_type = genomic DNA
accaggggtcgcgagttcgatcctcgctggggcctcc

SEQ ID NO: 2802 - DNA, 45 bp, Homo sapiens
  source 1..45: mol_type = genomic DNA
accagtcttgtaaaccggagatgaaaacctttttccaaggacacc

SEQ ID NO: 2803 - DNA, 46 bp, Homo sapiens
  source 1..46: mol_type = genomic DNA
accagtcttgtaaaccggagatgaaaacctttttccaaggacacca

SEQ ID NO: 2804 - DNA, 16 bp, Homo sapiens
  source 1..16: mol_type = genomic DNA
accatcctctgctacc

SEQ ID NO: 2805 - DNA, 17 bp, Homo sapiens
  source 1..17: mol_type = genomic DNA
accatcctctgctacca

SEQ ID NO: 2806 - DNA, 19 bp, Homo sapiens
  source 1..19: mol_type = genomic DNA
accatttcataactttgtc

SEQ ID NO: 2807 - DNA, 20 bp, Homo sapiens
  source 1..20: mol_type = genomic DNA
accatttcataactttgtca

SEQ ID NO: 2808 - DNA, 37 bp, Homo sapiens
  source 1..37: mol_type = genomic DNA
accatttcataactttgtcaaagttaaattataggct

SEQ ID NO: 2809 - DNA, 38 bp, Homo sapiens
  source 1..38: mol_type = genomic DNA
accatttcataactttgtcaaagttaaattataggcta

SEQ ID NO: 2810 - DNA, 16 bp, Homo sapiens
  source 1..16: mol_type = genomic DNA
acccaacttacactta

SEQ ID NO: 2811 - DNA, 19 bp, Homo sapiens
  source 1..19: mol_type = genomic DNA
acccaacttacacttagga

SEQ ID NO: 2812 - DNA, 20 bp, Homo sapiens
  source 1..20: mol_type = genomic DNA
acccaacttacacttaggag

SEQ ID NO: 2813 - DNA, 22 bp, Homo sapiens
  source 1..22: mol_type = genomic DNA
acccaacttacacttaggagat

SEQ ID NO: 2814 - DNA, 23 bp, Homo sapiens
  source 1..23: mol_type = genomic DNA
acccaacttacacttaggagatt

SEQ ID NO: 2815 - DNA, 25 bp, Homo sapiens
  source 1..25: mol_type = genomic DNA
acccaacttacacttaggagatttc

SEQ ID NO: 2816 - DNA, 26 bp, Homo sapiens
  source 1..26: mol_type = genomic DNA
acccaacttacacttaggagatttca

SEQ ID NO: 2817 - DNA, 27 bp, Homo sapiens
  source 1..27: mol_type = genomic DNA
acccaacttacacttaggagatttcaa

SEQ ID NO: 2818 - DNA, 28 bp, Homo sapiens
  source 1..28: mol_type = genomic DNA
acccaacttacacttaggagatttcaac

SEQ ID NO: 2819 - DNA, 29 bp, Homo sapiens
  source 1..29: mol_type = genomic DNA
acccaacttacacttaggagatttcaact

SEQ ID NO: 2820 - DNA, 30 bp, Homo sapiens
  source 1..30: mol_type = genomic DNA
acccaacttacacttaggagatttcaactt

SEQ ID NO: 2821 - DNA, 31 bp, Homo sapiens
  source 1..31: mol_type = genomic DNA
acccaacttacacttaggagatttcaactta

SEQ ID NO: 2822 - DNA, 32 bp, Homo sapiens
  source 1..32: mol_type = genomic DNA
acccaacttacacttaggagatttcaacttaa

SEQ ID NO: 2823 - DNA, 33 bp, Homo sapiens
  source 1..33: mol_type = genomic DNA
acccaacttacacttaggagatttcaacttaac

SEQ ID NO: 2824 - DNA, 35 bp, Homo sapiens
  source 1..35: mol_type = genomic DNA
acccaacttacacttaggagatttcaacttaactt

SEQ ID NO: 2825 - DNA, 36 bp, Homo sapiens
  source 1..36: mol_type = genomic DNA
acccaacttacacttaggagatttcaacttaacttg

SEQ ID NO: 2826 - DNA, 38 bp, Homo sapiens
  source 1..38: mol_type = genomic DNA
acccaacttacacttaggagatttcaacttaacttgac

SEQ ID NO: 2827 - DNA, 39 bp, Homo sapiens
  source 1..39: mol_type = genomic DNA
acccaacttacacttaggagatttcaacttaacttgacc

SEQ ID NO: 2828 - DNA, 40 bp, Homo sapiens
  source 1..40: mol_type = genomic DNA
acccaacttacacttaggagatttcaacttaacttgaccg

SEQ ID NO: 2829 - DNA, 41 bp, Homo sapiens
  source 1..41: mol_type = genomic DNA
acccaacttacacttaggagatttcaacttaacttgaccgc

SEQ ID NO: 2830 - DNA, 42 bp, Homo sapiens
  source 1..42: mol_type = genomic DNA
acccaacttacacttaggagatttcaacttaacttgaccgct

SEQ ID NO: 2831 - DNA, 43 bp, Homo sapiens
  source 1..43: mol_type = genomic DNA
acccaacttacacttaggagatttcaacttaacttgaccgctc

SEQ ID NO: 2832 - DNA, 44 bp, Homo sapiens
  source 1..44: mol_type = genomic DNA
acccaacttacacttaggagatttcaacttaacttgaccgctct

SEQ ID NO: 2833 - DNA, 45 bp, Homo sapiens
  source 1..45: mol_type = genomic DNA
acccaacttacacttaggagatttcaacttaacttgaccgctctg

SEQ ID NO: 2834 - DNA, 46 bp, Homo sapiens
  source 1..46: mol_type = genomic DNA
acccaacttacacttaggagatttcaacttaacttgaccgctctga

SEQ ID NO: 2835 - DNA, 47 bp, Homo sapiens
  source 1..47: mol_type = genomic DNA
acccaacttacacttaggagatttcaacttaacttgaccgctctgac

SEQ ID NO: 2836 - DNA, 48 bp, Homo sapiens
  source 1..48: mol_type = genomic DNA
acccaacttacacttaggagatttcaacttaacttgaccgctctgacc

SEQ ID NO: 2837 - DNA, 17 bp, Homo sapiens
  source 1..17: mol_type = genomic DNA
acccagaggtcgatgga

SEQ ID NO: 2838 - DNA, 18 bp, Homo sapiens
  source 1..18: mol_type = genomic DNA
acccagaggtcgatggat

SEQ ID NO: 2839 - DNA, 19 bp, Homo sapiens
  source 1..19: mol_type = genomic DNA
acccagaggtcgatggatc

SEQ ID NO: 2840 - DNA, 20 bp, Homo sapiens
  source 1..20: mol_type = genomic DNA
acccagaggtcgatggatcg

SEQ ID NO: 2841 - DNA, 21 bp, Homo sapiens
  source 1..21: mol_type = genomic DNA
acccagaggtcgatggatcga

SEQ ID NO: 2842 - DNA, 22 bp, Homo sapiens
  source 1..22: mol_type = genomic DNA
acccagaggtcgatggatcgaa

SEQ ID NO: 2843 - DNA, 23 bp, Homo sapiens
  source 1..23: mol_type = genomic DNA
acccagaggtcgatggatcgaaa

SEQ ID NO: 2844 - DNA, 24 bp, Homo sapiens
  source 1..24: mol_type = genomic DNA
acccagaggtcgatggatcgaaac

SEQ ID NO: 2845 - DNA, 35 bp, Homo sapiens
  source 1..35: mol_type = genomic DNA
acccagaggtcgatggatcgaaaccatcctctgct

SEQ ID NO: 2846 - DNA, 21 bp, Homo sapiens
  source 1..21: mol_type = genomic DNA
acccagaggtcgatggatcta

SEQ ID NO: 2847 - DNA, 28 bp, Homo sapiens
  source 1..28: mol_type = genomic DNA
acccaggcggcccgggttcgactcccgg

SEQ ID NO: 2848 - DNA, 29 bp, Homo sapiens
  source 1..29: mol_type = genomic DNA
acccaggcggcccgggttcgactcccggt

SEQ ID NO: 2849 - DNA, 30 bp, Homo sapiens
  source 1..30: mol_type = genomic DNA
acccaggcggcccgggttcgactcccggtg

SEQ ID NO: 2850 - DNA, 31 bp, Homo sapiens
  source 1..31: mol_type = genomic DNA
acccaggcggcccgggttcgactcccggtgt

SEQ ID NO: 2851 - DNA, 32 bp, Homo sapiens
  source 1..32: mol_type = genomic DNA
acccaggcggcccgggttcgactcccggtgtg

SEQ ID NO: 2852 - DNA, 33 bp, Homo sapiens
  source 1..33: mol_type = genomic DNA
acccaggcggcccgggttcgactcccggtgtgg

SEQ ID NO: 2853 - DNA, 34 bp, Homo sapiens
  source 1..34: mol_type = genomic DNA
acccaggcggcccgggttcgactcccggtgtggg

SEQ ID NO: 2854 - DNA, 35 bp, Homo sapiens
  source 1..35: mol_type = genomic DNA
acccaggcggcccgggttcgactcccggtgtggga

SEQ ID NO: 2855 - DNA, 36 bp, Homo sapiens
  source 1..36: mol_type = genomic DNA
acccaggcggcccgggttcgactcccggtgtgggaa

SEQ ID NO: 2856 - DNA, 37 bp, Homo sapiens
  source 1..37: mol_type = genomic DNA
acccaggcggcccgggttcgactcccggtgtgggaac

SEQ ID NO: 2857 - DNA, 38 bp, Homo sapiens
  source 1..38: mol_type = genomic DNA
acccaggcggcccgggttcgactcccggtgtgggaacc

SEQ ID NO: 2858 - DNA, 39 bp, Homo sapiens
  source 1..39: mol_type = genomic DNA
acccaggcggcccgggttcgactcccggtgtgggaacca

SEQ ID NO: 2859 - DNA, 30 bp, Homo sapiens
  source 1..30: mol_type = genomic DNA
acccaggtggcccgggttcgactcccggta

SEQ ID NO: 2860 - DNA, 32 bp, Homo sapiens
  source 1..32: mol_type = genomic DNA
acccaggtggcccgggttcgactcccggtatg

SEQ ID NO: 2861 - DNA, 33 bp, Homo sapiens
  source 1..33: mol_type = genomic DNA
acccaggtggcccgggttcgactcccggtatgg

SEQ ID NO: 2862 - DNA, 34 bp, Homo sapiens
  source 1..34: mol_type = genomic DNA
acccaggtggcccgggttcgactcccggtatggg

SEQ ID NO: 2863 - DNA, 35 bp, Homo sapiens
  source 1..35: mol_type = genomic DNA
acccaggtggcccgggttcgactcccggtatggga

SEQ ID NO: 2864 - DNA, 36 bp, Homo sapiens
  source 1..36: mol_type = genomic DNA
acccaggtggcccgggttcgactcccggtatgggaa

SEQ ID NO: 2865 - DNA, 37 bp, Homo sapiens
  source 1..37: mol_type = genomic DNA
acccaggtggcccgggttcgactcccggtatgggaac

SEQ ID NO: 2866 - DNA, 38 bp, Homo sapiens
  source 1..38: mol_type = genomic DNA
acccaggtggcccgggttcgactcccggtatgggaacc

SEQ ID NO: 2867 - DNA, 39 bp, Homo sapiens
  source 1..39: mol_type = genomic DNA
acccaggtggcccgggttcgactcccggtatgggaacca

SEQ ID NO: 2868 - DNA, 18 bp, Homo sapiens
  source 1..18: mol_type = genomic DNA
acccagtggcctaatgga

SEQ ID NO: 2869 - DNA, 22 bp, Homo sapiens
  source 1..22: mol_type = genomic DNA
acccagtggcctaatggataag

SEQ ID NO: 2870 - DNA, 34 bp, Homo sapiens
  source 1..34: mol_type = genomic DNA
acccagtggcctaatggataaggcatcagcctcc

SEQ ID NO: 2871 - DNA, 35 bp, Homo sapiens
  source 1..35: mol_type = genomic DNA
acccagtggcctaatggataaggcatcagcctccg

SEQ ID NO: 2872 - DNA, 18 bp, Homo sapiens
  source 1..18: mol_type = genomic DNA
accccactactggtacca

SEQ ID NO: 2873 - DNA, 16 bp, Homo sapiens
  source 1..16: mol_type = genomic DNA
accccactcctggtac

SEQ ID NO: 2874 - DNA, 17 bp, Homo sapiens
  source 1..17: mol_type = genomic DNA
accccactcctggtacc

SEQ ID NO: 2875 - DNA, 18 bp, Homo sapiens
  source 1..18: mol_type = genomic DNA
accccactcctggtacca

SEQ ID NO: 2876 - DNA, 18 bp, Homo sapiens
  source 1..18: mol_type = genomic DNA
accccactctcggtacca

SEQ ID NO: 2877 - DNA, 17 bp, Homo sapiens
  source 1..17: mol_type = genomic DNA
accccacttctggtacc

SEQ ID NO: 2878 - DNA, 16 bp, Homo sapiens
  source 1..16: mol_type = genomic DNA
acccccttatttctac

SEQ ID NO: 2879 - DNA, 17 bp, Homo sapiens
  source 1..17: mol_type = genomic DNA
acccccttatttctacc

SEQ ID NO: 2880 - DNA, 18 bp, Homo sapiens
  source 1..18: mol_type = genomic DNA
acccccttatttctacca

SEQ ID NO: 2881 - DNA, 19 bp, Homo sapiens
  source 1..19: mol_type = genomic DNA
accccgaaaatgttggtta

SEQ ID NO: 2882 - DNA, 20 bp, Homo sapiens
  source 1..20: mol_type = genomic DNA
accccgaaaatgttggttat

SEQ ID NO: 2883 - DNA, 21 bp, Homo sapiens
  source 1..21: mol_type = genomic DNA
accccgaaaatgttggttata

SEQ ID NO: 2884 - DNA, 22 bp, Homo sapiens
  source 1..22: mol_type = genomic DNA
accccgaaaatgttggttatac

SEQ ID NO: 2885 - DNA, 33 bp, Homo sapiens
  source 1..33: mol_type = genomic DNA
accccgaaaatgttggttatacccttcccgtac

SEQ ID NO: 2886 - DNA, 34 bp, Homo sapiens
  source 1..34: mol_type = genomic DNA
accccgaaaatgttggttatacccttcccgtact

SEQ ID NO: 2887 - DNA, 35 bp, Homo sapiens
  source 1..35: mol_type = genomic DNA
accccgaaaatgttggttatacccttcccgtacta

SEQ ID NO: 2888 - DNA, 36 bp, Homo sapiens
  source 1..36: mol_type = genomic DNA
accccgaaaatgttggttatacccttcccgtactac

SEQ ID NO: 2889 - DNA, 37 bp, Homo sapiens
  source 1..37: mol_type = genomic DNA
accccgaaaatgttggttatacccttcccgtactacc

SEQ ID NO: 2890 - DNA, 38 bp, Homo sapiens
  source 1..38: mol_type = genomic DNA
accccgaaaatgttggttatacccttcccgtactacca

SEQ ID NO: 2891 - DNA, 17 bp, Homo sapiens
  source 1..17: mol_type = genomic DNA
accccgtacgggccacc

SEQ ID NO: 2892 - DNA, 18 bp, Homo sapiens
  source 1..18: mol_type = genomic DNA
accccgtacgggccacca

SEQ ID NO: 2893 - DNA, 16 bp, Homo sapiens
  source 1..16: mol_type = genomic DNA
accccgtccgtgcctc

SEQ ID NO: 2894 - DNA, 17 bp, Homo sapiens
  source 1..17: mol_type = genomic DNA
accccgtccgtgcctcc

SEQ ID NO: 2895 - DNA, 18 bp, Homo sapiens
  source 1..18: mol_type = genomic DNA
accccgtccgtgcctcca

SEQ ID NO: 2896 - DNA, 16 bp, Homo sapiens
  source 1..16: mol_type = genomic DNA
accccttatttacccc

SEQ ID NO: 2897 - DNA, 17 bp, Homo sapiens
  source 1..17: mol_type = genomic DNA
accccttatttacccca

SEQ ID NO: 2898 - DNA, 24 bp, Homo sapiens
  source 1..24: mol_type = genomic DNA
acccgggttcgattcccgggcggc

SEQ ID NO: 2899 - DNA, 28 bp, Homo sapiens
  source 1..28: mol_type = genomic DNA
acccgggttcgattcccgggcggcgcac

SEQ ID NO: 2900 - DNA, 16 bp, Homo sapiens
  source 1..16: mol_type = genomic DNA
accctgctcgctgcgc

SEQ ID NO: 2901 - DNA, 17 bp, Homo sapiens
  source 1..17: mol_type = genomic DNA
accctgctcgctgcgcc

SEQ ID NO: 2902 - DNA, 18 bp, Homo sapiens
  source 1..18: mol_type = genomic DNA
accctgctcgctgcgcca

SEQ ID NO: 2903 - DNA, 16 bp, Homo sapiens
  source 1..16: mol_type = genomic DNA
acccttcccgtactac

SEQ ID NO: 2904 - DNA, 17 bp, Homo sapiens
  source 1..17: mol_type = genomic DNA
acccttcccgtactacc

SEQ ID NO: 2905 - DNA, 18 bp, Homo sapiens
  source 1..18: mol_type = genomic DNA
acccttcccgtactacca

SEQ ID NO: 2906 - DNA, 19 bp, Homo sapiens
  source 1..19: mol_type = genomic DNA
accgaaaggttggtggttc

SEQ ID NO: 2907 - DNA, 20 bp, Homo sapiens
  source 1..20: mol_type = genomic DNA
accgaaaggttggtggttcg

SEQ ID NO: 2908 - DNA, 23 bp, Homo sapiens
  source 1..23: mol_type = genomic DNA
accgaaaggttggtggttcgagc

SEQ ID NO: 2909 - DNA, 27 bp, Homo sapiens
  source 1..27: mol_type = genomic DNA
accgaaaggttggtggttcgagcccac

SEQ ID NO: 2910 - DNA, 35 bp, Homo sapiens
  source 1..35: mol_type = genomic DNA
accgaaaggttggtggttcgagcccacccagggac

SEQ ID NO: 2911 - DNA, 36 bp, Homo sapiens
  source 1..36: mol_type = genomic DNA
accgaaaggttggtggttcgagcccacccagggacg

SEQ ID NO: 2912 - DNA, 38 bp, Homo sapiens
  source 1..38: mol_type = genomic DNA
accgaaaggttggtggttcgagcccacccagggacgcc

SEQ ID NO: 2913 - DNA, 39 bp, Homo sapiens
  source 1..39: mol_type = genomic DNA
accgaaaggttggtggttcgagcccacccagggacgcca

SEQ ID NO: 2914 - DNA, 16 bp, Homo sapiens
  source 1..16: mol_type = genomic DNA
accgaagatcacgggt

SEQ ID NO: 2915 - DNA, 33 bp, Homo sapiens
  source 1..33: mol_type = genomic DNA
accgaagatcacgggttcgaaccccgtccgtgc

SEQ ID NO: 2916 - DNA, 34 bp, Homo sapiens
  source 1..34: mol_type = genomic DNA
accgaagatcacgggttcgaaccccgtccgtgcc

SEQ ID NO: 2917 - DNA, 35 bp, Homo sapiens
  source 1..35: mol_type = genomic DNA
accgaagatcacgggttcgaaccccgtccgtgcct

SEQ ID NO: 2918 - DNA, 36 bp, Homo sapiens
  source 1..36: mol_type = genomic DNA
accgaagatcacgggttcgaaccccgtccgtgcctc

SEQ ID NO: 2919 - DNA, 37 bp, Homo sapiens
  source 1..37: mol_type = genomic DNA
accgaagatcacgggttcgaaccccgtccgtgcctcc

SEQ ID NO: 2920 - DNA, 38 bp, Homo sapiens
  source 1..38: mol_type = genomic DNA
accgaagatcacgggttcgaaccccgtccgtgcctcca

SEQ ID NO: 2921 - DNA, 16 bp, Homo sapiens
  source 1..16: mol_type = genomic DNA
accgaagatcgcgggt

SEQ ID NO: 2922 - DNA, 17 bp, Homo sapiens
  source 1..17: mol_type = genomic DNA
accgaagatcgcgggtt

SEQ ID NO: 2923 - DNA, 18 bp, Homo sapiens
  source 1..18: mol_type = genomic DNA
accgaagatcgcgggttc

SEQ ID NO: 2924 - DNA, 19 bp, Homo sapiens
  source 1..19: mol_type = genomic DNA
accgaagatcgcgggttcg

SEQ ID NO: 2925 - DNA, 32 bp, Homo sapiens
  source 1..32: mol_type = genomic DNA
accgaagatcgcgggttcgaaccccgtccgtg

SEQ ID NO: 2926 - DNA, 34 bp, Homo sapiens
  source 1..34: mol_type = genomic DNA
accgaagatcgcgggttcgaaccccgtccgtgcc

SEQ ID NO: 2927 - DNA, 35 bp, Homo sapiens
  source 1..35: mol_type = genomic DNA
accgaagatcgcgggttcgaaccccgtccgtgcct

SEQ ID NO: 2928 - DNA, 36 bp, Homo sapiens
  source 1..36: mol_type = genomic DNA
accgaagatcgcgggttcgaaccccgtccgtgcctc

SEQ ID NO: 2929 - DNA, 37 bp, Homo sapiens
  source 1..37: mol_type = genomic DNA
accgaagatcgcgggttcgaaccccgtccgtgcctcc

SEQ ID NO: 2930 - DNA, 38 bp, Homo sapiens
  source 1..38: mol_type = genomic DNA
accgaagatcgcgggttcgaaccccgtccgtgcctcca

SEQ ID NO: 2931 - DNA, 16 bp, Homo sapiens
  source 1..16: mol_type = genomic DNA
accgagcggaaacacc

SEQ ID NO: 2932 - DNA, 17 bp, Homo sapiens
  source 1..17: mol_type = genomic DNA
accgagcggaaacacca

SEQ ID NO: 2933 - DNA, 31 bp, Homo sapiens
  source 1..31: mol_type = genomic DNA
accgccgcagcccgggttcgattcccggtca

SEQ ID NO: 2934 - DNA, 16 bp, Homo sapiens
  source 1..16: mol_type = genomic DNA
accgccgcggcccggg

SEQ ID NO: 2935 - DNA, 17 bp, Homo sapiens
  source 1..17: mol_type = genomic DNA
accgccgcggcccgggt

SEQ ID NO: 2936 - DNA, 18 bp, Homo sapiens
  source 1..18: mol_type = genomic DNA
accgccgcggcccgggtt

SEQ ID NO: 2937 - DNA, 19 bp, Homo sapiens
  source 1..19: mol_type = genomic DNA
accgccgcggcccgggttc

SEQ ID NO: 2938 - DNA, 20 bp, Homo sapiens
  source 1..20: mol_type = genomic DNA
accgccgcggcccgggttcg

SEQ ID NO: 2939 - DNA, 21 bp, Homo sapiens
  source 1..21: mol_type = genomic DNA
accgccgcggcccgggttcga

SEQ ID NO: 2940 - DNA, 22 bp, Homo sapiens
  source 1..22: mol_type = genomic DNA
accgccgcggcccgggttcgat

SEQ ID NO: 2941 - DNA, 23 bp, Homo sapiens
  source 1..23: mol_type = genomic DNA
accgccgcggcccgggttcgatt

SEQ ID NO: 2942 - DNA, 25 bp, Homo sapiens
  source 1..25: mol_type = genomic DNA
accgccgcggcccgggttcgattcc

SEQ ID NO: 2943 - DNA, 27 bp, Homo sapiens
  source 1..27: mol_type = genomic DNA
accgccgcggcccgggttcgattcccg

SEQ ID NO: 2944 - DNA, 28 bp, Homo sapiens
  source 1..28: mol_type = genomic DNA
accgccgcggcccgggttcgattcccgg

SEQ ID NO: 2945 - DNA, 33 bp, Homo sapiens
  source 1..33: mol_type = genomic DNA
accgccgcggcccgggttcgattcccggccagg

SEQ ID NO: 2946 - DNA, 38 bp, Homo sapiens
  source 1..38: mol_type = genomic DNA
accgccgcggcccgggttcgattcccggccagggaacc

SEQ ID NO: 2947 - DNA, 39 bp, Homo sapiens
  source 1..39: mol_type = genomic DNA
accgccgcggcccgggttcgattcccggccagggaacca

SEQ ID NO: 2948 - DNA, 29 bp, Homo sapiens
  source 1..29: mol_type = genomic DNA
accgccgcggcccgggttcgattcccggt

SEQ ID NO: 2949 - DNA, 30 bp, Homo sapiens
  source 1..30: mol_type = genomic DNA
accgccgcggcccgggttcgattcccggtc

SEQ ID NO: 2950 - DNA, 31 bp, Homo sapiens
  source 1..31: mol_type = genomic DNA
accgccgcggcccgggttcgattcccggtca

SEQ ID NO: 2951 - DNA, 32 bp, Homo sapiens
  source 1..32: mol_type = genomic DNA
accgccgcggcccgggttcgattcccggtcag

SEQ ID NO: 2952 - DNA, 33 bp, Homo sapiens
  source 1..33: mol_type = genomic DNA
accgccgcggcccgggttcgattcccggtcagg

SEQ ID NO: 2953 - DNA, 36 bp, Homo sapiens
  source 1..36: mol_type = genomic DNA
accgccgcggcccgggttcgattcccggtcaggaaa

SEQ ID NO: 2954 - DNA, 38 bp, Homo sapiens
  source 1..38: mol_type = genomic DNA
accgccgcggcccgggttcgattcccggtcaggaaacc

SEQ ID NO: 2955 - DNA, 34 bp, Homo sapiens
  source 1..34: mol_type = genomic DNA
accgccgcggcccgggttcgattcccggtcaggg

SEQ ID NO: 2956 - DNA, 35 bp, Homo sapiens
  source 1..35: mol_type = genomic DNA
accgccgcggcccgggttcgattcccggtcaggga

SEQ ID NO: 2957 - DNA, 36 bp, Homo sapiens
  source 1..36: mol_type = genomic DNA
accgccgcggcccgggttcgattcccggtcagggaa

SEQ ID NO: 2958 - DNA, 37 bp, Homo sapiens
  source 1..37: mol_type = genomic DNA
accgccgcggcccgggttcgattcccggtcagggaac

SEQ ID NO: 2959 - DNA, 38 bp, Homo sapiens
  source 1..38: mol_type = genomic DNA
accgccgcggcccgggttcgattcccggtcagggaacc

SEQ ID NO: 2960 - DNA, 39 bp, Homo sapiens
  source 1..39: mol_type = genomic DNA
accgccgcggcccgggttcgattcccggtcagggaacca

SEQ ID NO: 2961 - DNA, 17 bp, Homo sapiens
  source 1..17: mol_type = genomic DNA
accgcgtggcctaatgg

SEQ ID NO: 2962 - DNA, 18 bp, Homo sapiens
  source 1..18: mol_type = genomic DNA
accgcgtggcctaatgga

SEQ ID NO: 2963 - DNA, 29 bp, Homo sapiens
  source 1..29: mol_type = genomic DNA
accgcgtggcctaatggataaggcgtctg

SEQ ID NO: 2964 - DNA, 32 bp, Homo sapiens
  source 1..32: mol_type = genomic DNA
accgcgtggcctaatggataaggcgtctgact

SEQ ID NO: 2965 - DNA, 34 bp, Homo sapiens
  source 1..34: mol_type = genomic DNA
accgcgtggcctaatggataaggcgtctgacttc

SEQ ID NO: 2966 - DNA, 35 bp, Homo sapiens
  source 1..35: mol_type = genomic DNA
accgcgtggcctaatggataaggcgtctgacttcg

SEQ ID NO: 2967 - DNA, 16 bp, Homo sapiens
  source 1..16: mol_type = genomic DNA
accggagatgaaaacc

SEQ ID NO: 2968 - DNA, 17 bp, Homo sapiens
  source 1..17: mol_type = genomic DNA
accggagatgaaaacct

SEQ ID NO: 2969 - DNA, 18 bp, Homo sapiens
  source 1..18: mol_type = genomic DNA
accggagatgaaaacctt

SEQ ID NO: 2970 - DNA, 19 bp, Homo sapiens
  source 1..19: mol_type = genomic DNA
accggagatgaaaaccttt

SEQ ID NO: 2971 - DNA, 20 bp, Homo sapiens
  source 1..20: mol_type = genomic DNA
accggagatgaaaacctttt

SEQ ID NO: 2972 - DNA, 21 bp, Homo sapiens
  source 1..21: mol_type = genomic DNA
accggagatgaaaaccttttt

SEQ ID NO: 2973 - DNA, 22 bp, Homo sapiens
  source 1..22: mol_type = genomic DNA
accggagatgaaaacctttttc

SEQ ID NO: 2974 - DNA, 23 bp, Homo sapiens
  source 1..23: mol_type = genomic DNA
accggagatgaaaacctttttcc

SEQ ID NO: 2975 - DNA, 26 bp, Homo sapiens
  source 1..26: mol_type = genomic DNA
accggagatgaaaacctttttccaag

SEQ ID NO: 2976 - DNA, 29 bp, Homo sapiens
  source 1..29: mol_type = genomic DNA
accggagatgaaaacctttttccaaggac

SEQ ID NO: 2977 - DNA, 30 bp, Homo sapiens
  source 1..30: mol_type = genomic DNA
accggagatgaaaacctttttccaaggaca

SEQ ID NO: 2978 - DNA, 31 bp, Homo sapiens
  source 1..31: mol_type = genomic DNA
accggagatgaaaacctttttccaaggacac

SEQ ID NO: 2979 - DNA, 32 bp, Homo sapiens
  source 1..32: mol_type = genomic DNA
accggagatgaaaacctttttccaaggacacc

SEQ ID NO: 2980 - DNA, 33 bp, Homo sapiens
  source 1..33: mol_type = genomic DNA
accggagatgaaaacctttttccaaggacacca

SEQ ID NO: 2981 - DNA, 33 bp, Homo sapiens
  source 1..33: mol_type = genomic DNA
accgggatggctgagtggttaaggcgttggact

SEQ ID NO: 2982 - DNA, 17 bp, Homo sapiens
  source 1..17: mol_type = genomic DNA
accgggcagaaacacca

SEQ ID NO: 2983 - DNA, 16 bp, Homo sapiens
  source 1..16: mol_type = genomic DNA
accgggcagaagcacc

SEQ ID NO: 2984 - DNA, 17 bp, Homo sapiens
  source 1..17: mol_type = genomic DNA
accgggcagaagcacca

SEQ ID NO: 2985 - DNA, 16 bp, Homo sapiens
  source 1..16: mol_type = genomic DNA
accgggcggaaacacc

SEQ ID NO: 2986 - DNA, 17 bp, Homo sapiens
  source 1..17: mol_type = genomic DNA
accgggcggaaacacca

SEQ ID NO: 2987 - DNA, 27 bp, Homo sapiens
  source 1..27: mol_type = genomic DNA
accggggttcaattccccgacggggag

SEQ ID NO: 2988 - DNA, 28 bp, Homo sapiens
  source 1..28: mol_type = genomic DNA
accggggttcaattccccgacggggagc

SEQ ID NO: 2989 - DNA, 29 bp, Homo sapiens
  source 1..29: mol_type = genomic DNA
accggggttcaattccccgacggggagcc

SEQ ID NO: 2990 - DNA, 28 bp, Homo sapiens
  source 1..28: mol_type = genomic DNA
accggggttcgattccccgacggggagc

SEQ ID NO: 2991 - DNA, 29 bp, Homo sapiens
  source 1..29: mol_type = genomic DNA
accggggttcgattccccgacggggagcc

SEQ ID NO: 2992 - DNA, 30 bp, Homo sapiens
  source 1..30: mol_type = genomic DNA
accggggttcgattccccgacggggagcca

SEQ ID NO: 2993 - DNA, 24 bp, Homo sapiens
  source 1..24: mol_type = genomic DNA
accgttaacttccaattaactagt

SEQ ID NO: 2994 - DNA, 28 bp, Homo sapiens
  source 1..28: mol_type = genomic DNA
accgttaacttccaattaactagttttg

SEQ ID NO: 2995 - DNA, 30 bp, Homo sapiens
  source 1..30: mol_type = genomic DNA
accgttaacttccaattaactagttttgac

SEQ ID NO: 2996 - DNA, 31 bp, Homo sapiens
  source 1..31: mol_type = genomic DNA
accgttaacttccaattaactagttttgaca

SEQ ID NO: 2997 - DNA, 32 bp, Homo sapiens
  source 1..32: mol_type = genomic DNA
accgttaacttccaattaactagttttgacaa

SEQ ID NO: 2998 - DNA, 33 bp, Homo sapiens
  source 1..33: mol_type = genomic DNA
accgttaacttccaattaactagttttgacaac

SEQ ID NO: 2999 - DNA, 34 bp, Homo sapiens
  source 1..34: mol_type = genomic DNA
accgttaacttccaattaactagttttgacaaca

SEQ ID NO: 3000 - DNA, 17 bp, Homo sapiens
  source 1..17: mol_type = genomic DNA
acctcagagggggcacc

SEQ ID NO: 3001 - DNA, 18 bp, Homo sapiens
  source 1..18: mol_type = genomic DNA
acctcagagggggcacca

SEQ ID NO: 3002 - DNA, 17 bp, Homo sapiens
  source 1..17: mol_type = genomic DNA
acctcctcaaagcaata

SEQ ID NO: 3003 - DNA, 18 bp, Homo sapiens
  source 1..18: mol_type = genomic DNA
acctcctcaaagcaatac

SEQ ID NO: 3004 - DNA, 19 bp, Homo sapiens
  source 1..19: mol_type = genomic DNA
acctcctcaaagcaataca

SEQ ID NO: 3005 - DNA, 21 bp, Homo sapiens
  source 1..21: mol_type = genomic DNA
acctcctcaaagcaatacact

SEQ ID NO: 3006 - DNA, 22 bp, Homo sapiens
  source 1..22: mol_type = genomic DNA
acctcctcaaagcaatacactg

SEQ ID NO: 3007 - DNA, 23 bp, Homo sapiens
  source 1..23: mol_type = genomic DNA
acctcctcaaagcaatacactga

SEQ ID NO: 3008 - DNA, 40 bp, Homo sapiens
  source 1..40: mol_type = genomic DNA
acctcctcaaagcaatacactgaaaatgtttagacgggct

SEQ ID NO: 3009 - DNA, 26 bp, Homo sapiens
  source 1..26: mol_type = genomic DNA
acctcggttcgaatccgagtcacggc

SEQ ID NO: 3010 - DNA, 16 bp, Homo sapiens
  source 1..16: mol_type = genomic DNA
acctcgtggcgcaacg

SEQ ID NO: 3011 - DNA, 17 bp, Homo sapiens
  source 1..17: mol_type = genomic DNA
acctcgtggcgcaacgg

SEQ ID NO: 3012 - DNA, 17 bp, Homo sapiens
  source 1..17: mol_type = genomic DNA
acctcgtggcgcaatgg

SEQ ID NO: 3013 - DNA, 16 bp, Homo sapiens
  source 1..16: mol_type = genomic DNA
acctctttacagtgac

SEQ ID NO: 3014 - DNA, 17 bp, Homo sapiens
  source 1..17: mol_type = genomic DNA
acctctttacagtgacc

SEQ ID NO: 3015 - DNA, 18 bp, Homo sapiens
  source 1..18: mol_type = genomic DNA
acctctttacagtgacca

SEQ ID NO: 3016 - DNA, 16 bp, Homo sapiens
  source 1..16: mol_type = genomic DNA
acctgccggggcttcc

SEQ ID NO: 3017 - DNA, 17 bp, Homo sapiens
  source 1..17: mol_type = genomic DNA
acctgccggggcttcca

SEQ ID NO: 3018 - DNA, 22 bp, Homo sapiens
  source 1..22: mol_type = genomic DNA
accttttaagttaaagattaag

SEQ ID NO: 3019 - DNA, 24 bp, Homo sapiens
  source 1..24: mol_type = genomic DNA
accttttaagttaaagattaagag

SEQ ID NO: 3020 - DNA, 26 bp, Homo sapiens
  source 1..26: mol_type = genomic DNA
accttttaagttaaagattaagagaa

SEQ ID NO: 3021 - DNA, 27 bp, Homo sapiens
  source 1..27: mol_type = genomic DNA
accttttaagttaaagattaagagaac

SEQ ID NO: 3022 - DNA, 28 bp, Homo sapiens
  source 1..28: mol_type = genomic DNA
accttttaagttaaagattaagagaacc

SEQ ID NO: 3023 - DNA, 29 bp, Homo sapiens
  source 1..29: mol_type = genomic DNA
accttttaagttaaagattaagagaacca

SEQ ID NO: 3024 - DNA, 30 bp, Homo sapiens
  source 1..30: mol_type = genomic DNA
accttttaagttaaagattaagagaaccaa

SEQ ID NO: 3025 - DNA, 31 bp, Homo sapiens
  source 1..31: mol_type = genomic DNA
accttttaagttaaagattaagagaaccaac

SEQ ID NO: 3026 - DNA, 33 bp, Homo sapiens
  source 1..33: mol_type = genomic DNA
accttttaagttaaagattaagagaaccaacac

SEQ ID NO: 3027 - DNA, 34 bp, Homo sapiens
  source 1..34: mol_type = genomic DNA
accttttaagttaaagattaagagaaccaacacc

SEQ ID NO: 3028 - DNA, 35 bp, Homo sapiens
  source 1..35: mol_type = genomic DNA
accttttaagttaaagattaagagaaccaacacct

SEQ ID NO: 3029 - DNA, 36 bp, Homo sapiens
  source 1..36: mol_type = genomic DNA
accttttaagttaaagattaagagaaccaacacctc

SEQ ID NO: 3030 - DNA, 37 bp, Homo sapiens
  source 1..37: mol_type = genomic DNA
accttttaagttaaagattaagagaaccaacacctct

SEQ ID NO: 3031 - DNA, 40 bp, Homo sapiens
  source 1..40: mol_type = genomic DNA
accttttaagttaaagattaagagaaccaacacctcttta

SEQ ID NO: 3032 - DNA, 42 bp, Homo sapiens
  source 1..42: mol_type = genomic DNA
accttttaagttaaagattaagagaaccaacacctctttaca

SEQ ID NO: 3033 - DNA, 43 bp, Homo sapiens
  source 1..43: mol_type = genomic DNA
accttttaagttaaagattaagagaaccaacacctctttacag

SEQ ID NO: 3034 - DNA, 46 bp, Homo sapiens
  source 1..46: mol_type = genomic DNA
accttttaagttaaagattaagagaaccaacacctctttacagtga

SEQ ID NO: 3035 - DNA, 47 bp, Homo sapiens
  source 1..47: mol_type = genomic DNA
accttttaagttaaagattaagagaaccaacacctctttacagtgac

SEQ ID NO: 3036 - DNA, 48 bp, Homo sapiens
  source 1..48: mol_type = genomic DNA
accttttaagttaaagattaagagaaccaacacctctttacagtgacc

SEQ ID NO: 3037 - DNA, 16 bp, Homo sapiens
  source 1..16: mol_type = genomic DNA
acctttttccaaggac

SEQ ID NO: 3038 - DNA, 17 bp, Homo sapiens
  source 1..17: mol_type = genomic DNA
acctttttccaaggaca

SEQ ID NO: 3039 - DNA, 18 bp, Homo sapiens
  source 1..18: mol_type = genomic DNA
acctttttccaaggacac

SEQ ID NO: 3040 - DNA, 19 bp, Homo sapiens
  source 1..19: mol_type = genomic DNA
acctttttccaaggacacc

SEQ ID NO: 3041 - DNA, 20 bp, Homo sapiens
  source 1..20: mol_type = genomic DNA
acctttttccaaggacacca

SEQ ID NO: 3042 - DNA, 16 bp, Homo sapiens
  source 1..16: mol_type = genomic DNA
acgaatgatttcgact

SEQ ID NO: 3043 - DNA, 17 bp, Homo sapiens
  source 1..17: mol_type = genomic DNA
acgaatgatttcgactc

SEQ ID NO: 3044 - DNA, 18 bp, Homo sapiens
  source 1..18: mol_type = genomic DNA
acgaatgatttcgactca

SEQ ID NO: 3045 - DNA, 19 bp, Homo sapiens
  source 1..19: mol_type = genomic DNA
acgaatgatttcgactcat

SEQ ID NO: 3046 - DNA, 21 bp, Homo sapiens
  source 1..21: mol_type = genomic DNA
acgaatgatttcgactcatta

SEQ ID NO: 3047 - DNA, 23 bp, Homo sapiens
  source 1..23: mol_type = genomic DNA
acgaatgatttcgactcattaaa

SEQ ID NO: 3048 - DNA, 24 bp, Homo sapiens
  source 1..24: mol_type = genomic DNA
acgaatgatttcgactcattaaat

SEQ ID NO: 3049 - DNA, 28 bp, Homo sapiens
  source 1..28: mol_type = genomic DNA
acgaatgatttcgactcattaaattatg

SEQ ID NO: 3050 - DNA, 30 bp, Homo sapiens
  source 1..30: mol_type = genomic DNA
acgaatgatttcgactcattaaattatgat

SEQ ID NO: 3051 - DNA, 31 bp, Homo sapiens
  source 1..31: mol_type = genomic DNA
acgaatgatttcgactcattaaattatgata

SEQ ID NO: 3052 - DNA, 33 bp, Homo sapiens
  source 1..33: mol_type = genomic DNA
acgaatgatttcgactcattaaattatgataat

SEQ ID NO: 3053 - DNA, 34 bp, Homo sapiens
  source 1..34: mol_type = genomic DNA
acgaatgatttcgactcattaaattatgataatc

SEQ ID NO: 3054 - DNA, 43 bp, Homo sapiens
  source 1..43: mol_type = genomic DNA
acgaatgatttcgactcattaaattatgataatcatatttacc

SEQ ID NO: 3055 - DNA, 46 bp, Homo sapiens
  source 1..46: mol_type = genomic DNA
acgaatgatttcgactcattaaattatgataatcatatttaccaac

SEQ ID NO: 3056 - DNA, 47 bp, Homo sapiens
  source 1..47: mol_type = genomic DNA
acgaatgatttcgactcattaaattatgataatcatatttaccaacc

SEQ ID NO: 3057 - DNA, 48 bp, Homo sapiens
  source 1..48: mol_type = genomic DNA
acgaatgatttcgactcattaaattatgataatcatatttaccaacca

SEQ ID NO: 3058 - DNA, 17 bp, Homo sapiens
  source 1..17: mol_type = genomic DNA
acgaccccttatttacc

SEQ ID NO: 3059 - DNA, 18 bp, Homo sapiens
  source 1..18: mol_type = genomic DNA
acgaccccttatttaccc

SEQ ID NO: 3060 - DNA, 19 bp, Homo sapiens
  source 1..19: mol_type = genomic DNA
acgaccccttatttacccc

SEQ ID NO: 3061 - DNA, 20 bp, Homo sapiens
  source 1..20: mol_type = genomic DNA
acgaccccttatttacccca

SEQ ID NO: 3062 - DNA, 31 bp, Homo sapiens
  source 1..31: mol_type = genomic DNA
acgagcgcgctggacttctaatccagaggtt

SEQ ID NO: 3063 - DNA, 22 bp, Homo sapiens
  source 1..22: mol_type = genomic DNA
acgaggccccgggttcaatccc

SEQ ID NO: 3064 - DNA, 29 bp, Homo sapiens
  source 1..29: mol_type = genomic DNA
acgaggccccgggttcaatccccggcacc

SEQ ID NO: 3065 - DNA, 31 bp, Homo sapiens
  source 1..31: mol_type = genomic DNA
acgaggccccgggttcaatccccggcacctc

SEQ ID NO: 3066 - DNA, 35 bp, Homo sapiens
  source 1..35: mol_type = genomic DNA
acgaggccccgggttcaatccccggcacctccacc

SEQ ID NO: 3067 - DNA, 36 bp, Homo sapiens
  source 1..36: mol_type = genomic DNA
acgaggccccgggttcaatccccggcacctccacca

SEQ ID NO: 3068 - DNA, 16 bp, Homo sapiens
  source 1..16: mol_type = genomic DNA
acgaggtcccgggttc

SEQ ID NO: 3069 - DNA, 18 bp, Homo sapiens
  source 1..18: mol_type = genomic DNA
acgatggtttttcatatc

SEQ ID NO: 3070 - DNA, 25 bp, Homo sapiens
  source 1..25: mol_type = genomic DNA
acgatggtttttcatatcattggtc

SEQ ID NO: 3071 - DNA, 26 bp, Homo sapiens
  source 1..26: mol_type = genomic DNA
acgatggtttttcatatcattggtcg

SEQ ID NO: 3072 - DNA, 27 bp, Homo sapiens
  source 1..27: mol_type = genomic DNA
acgatggtttttcatatcattggtcgt

SEQ ID NO: 3073 - DNA, 28 bp, Homo sapiens
  source 1..28: mol_type = genomic DNA
acgatggtttttcatatcattggtcgtg

SEQ ID NO: 3074 - DNA, 30 bp, Homo sapiens
  source 1..30: mol_type = genomic DNA
acgatggtttttcatatcattggtcgtggt

SEQ ID NO: 3075 - DNA, 31 bp, Homo sapiens
  source 1..31: mol_type = genomic DNA
acgatggtttttcatatcattggtcgtggtt

SEQ ID NO: 3076 - DNA, 32 bp, Homo sapiens
  source 1..32: mol_type = genomic DNA
acgatggtttttcatatcattggtcgtggttg

SEQ ID NO: 3077 - DNA, 33 bp, Homo sapiens
  source 1..33: mol_type = genomic DNA
acgatggtttttcatatcattggtcgtggttgt

SEQ ID NO: 3078 - DNA, 34 bp, Homo sapiens
  source 1..34: mol_type = genomic DNA
acgatggtttttcatatcattggtcgtggttgta

SEQ ID NO: 3079 - DNA, 35 bp, Homo sapiens
  source 1..35: mol_type = genomic DNA
acgatggtttttcatatcattggtcgtggttgtag

SEQ ID NO: 3080 - DNA, 36 bp, Homo sapiens
  source 1..36: mol_type = genomic DNA
acgatggtttttcatatcattggtcgtggttgtagt

SEQ ID NO: 3081 - DNA, 37 bp, Homo sapiens
  source 1..37: mol_type = genomic DNA
acgatggtttttcatatcattggtcgtggttgtagtc

SEQ ID NO: 3082 - DNA, 38 bp, Homo sapiens
  source 1..38: mol_type = genomic DNA
acgatggtttttcatatcattggtcgtggttgtagtcc

SEQ ID NO: 3083 - DNA, 39 bp, Homo sapiens
  source 1..39: mol_type = genomic DNA
acgatggtttttcatatcattggtcgtggttgtagtccg

SEQ ID NO: 3084 - DNA, 40 bp, Homo sapiens
  source 1..40: mol_type = genomic DNA
acgatggtttttcatatcattggtcgtggttgtagtccgt

SEQ ID NO: 3085 - DNA, 41 bp, Homo sapiens
  source 1..41: mol_type = genomic DNA
acgatggtttttcatatcattggtcgtggttgtagtccgtg

SEQ ID NO: 3086 - DNA, 42 bp, Homo sapiens
  source 1..42: mol_type = genomic DNA
acgatggtttttcatatcattggtcgtggttgtagtccgtgc

SEQ ID NO: 3087 - DNA, 43 bp, Homo sapiens
  source 1..43: mol_type = genomic DNA
acgatggtttttcatatcattggtcgtggttgtagtccgtgcg

SEQ ID NO: 3088 - DNA, 45 bp, Homo sapiens
  source 1..45: mol_type = genomic DNA
acgatggtttttcatatcattggtcgtggttgtagtccgtgcgag

SEQ ID NO: 3089 - DNA, 46 bp, Homo sapiens
  source 1..46: mol_type = genomic DNA
acgatggtttttcatatcattggtcgtggttgtagtccgtgcgaga

SEQ ID NO: 3090 - DNA, 47 bp, Homo sapiens
  source 1..47: mol_type = genomic DNA
acgatggtttttcatatcattggtcgtggttgtagtccgtgcgagaa

SEQ ID NO: 3091 - DNA, 48 bp, Homo sapiens
  source 1..48: mol_type = genomic DNA
acgatggtttttcatatcattggtcgtggttgtagtccgtgcgagaat

SEQ ID NO: 3092 - DNA, 39 bp, Homo sapiens
  source 1..39: mol_type = genomic DNA
acgcagaaggtcctgggttcaagccccagtggaaccacc

SEQ ID NO: 3093 - DNA, 25 bp, Homo sapiens
  source 1..25: mol_type = genomic DNA
acgcagaaggtcctgggttcgagcc

SEQ ID NO: 3094 - DNA, 29 bp, Homo sapiens
  source 1..29: mol_type = genomic DNA
acgcagaaggtcctgggttcgagccccag

SEQ ID NO: 3095 - DNA, 31 bp, Homo sapiens
  source 1..31: mol_type = genomic DNA
acgcagaaggtcctgggttcgagccccagtg

SEQ ID NO: 3096 - DNA, 35 bp, Homo sapiens
  source 1..35: mol_type = genomic DNA
acgcagaaggtcctgggttcgagccccagtggaac

SEQ ID NO: 3097 - DNA, 36 bp, Homo sapiens
  source 1..36: mol_type = genomic DNA
acgcagaaggtcctgggttcgagccccagtggaacc

SEQ ID NO: 3098 - DNA, 37 bp, Homo sapiens
  source 1..37: mol_type = genomic DNA
acgcagaaggtcctgggttcgagccccagtggaacca

SEQ ID NO: 3099 - DNA, 38 bp, Homo sapiens
  source 1..38: mol_type = genomic DNA
acgcagaaggtcctgggttcgagccccagtggaaccac

SEQ ID NO: 3100 - DNA, 39 bp, Homo sapiens
  source 1..39: mol_type = genomic DNA
acgcagaaggtcctgggttcgagccccagtggaaccacc

SEQ ID NO: 3101 - DNA, 40 bp, Homo sapiens
  source 1..40: mol_type = genomic DNA
acgcagaaggtcctgggttcgagccccagtggaaccacca

SEQ ID NO: 3102 - DNA, 38 bp, Homo sapiens
  source 1..38: mol_type = genomic DNA
acgcaggagacccaggttcgattcctggccaatgcacc

SEQ ID NO: 3103 - DNA, 16 bp, Homo sapiens
  source 1..16: mol_type = genomic DNA
acgccaaggtcgcggg

SEQ ID NO: 3104 - DNA, 18 bp, Homo sapiens
  source 1..18: mol_type = genomic DNA
acgccaaggtcgcgggtt

SEQ ID NO: 3105 - DNA, 19 bp, Homo sapiens
  source 1..19: mol_type = genomic DNA
acgccaaggtcgcgggttc

SEQ ID NO: 3106 - DNA, 21 bp, Homo sapiens
  source 1..21: mol_type = genomic DNA
acgccaaggtcgcgggttcga

SEQ ID NO: 3107 - DNA, 34 bp, Homo sapiens
  source 1..34: mol_type = genomic DNA
acgccaaggtcgcgggttcgaaccccgtacgggc

SEQ ID NO: 3108 - DNA, 38 bp, Homo sapiens
  source 1..38: mol_type = genomic DNA
acgccaaggtcgcgggttcgaaccccgtacgggccacc

SEQ ID NO: 3109 - DNA, 22 bp, Homo sapiens
  source 1..22: mol_type = genomic DNA
acgccaaggtcgcgggttcgat

SEQ ID NO: 3110 - DNA, 29 bp, Homo sapiens
  source 1..29: mol_type = genomic DNA
acgccaaggtcgcgggttcgatccccgta

SEQ ID NO: 3111 - DNA, 30 bp, Homo sapiens
  source 1..30: mol_type = genomic DNA
acgccaaggtcgcgggttcgatccccgtac

SEQ ID NO: 3112 - DNA, 33 bp, Homo sapiens
  source 1..33: mol_type = genomic DNA
acgccaaggtcgcgggttcgatccccgtacggg

SEQ ID NO: 3113 - DNA, 34 bp, Homo sapiens
  source 1..34: mol_type = genomic DNA
acgccaaggtcgcgggttcgatccccgtacgggc

SEQ ID NO: 3114 - DNA, 37 bp, Homo sapiens
  source 1..37: mol_type = genomic DNA
acgccaaggtcgcgggttcgatccccgtacgggccac

SEQ ID NO: 3115 - DNA, 38 bp, Homo sapiens
  source 1..38: mol_type = genomic DNA
acgccaaggtcgcgggttcgatccccgtacgggccacc

SEQ ID NO: 3116 - DNA, 39 bp, Homo sapiens
  source 1..39: mol_type = genomic DNA
acgccaaggtcgcgggttcgatccccgtacgggccacca

SEQ ID NO: 3117 - DNA, 38 bp, Homo sapiens
  source 1..38: mol_type = genomic DNA
acgccaaggtcgcgggttcgatccccgtactggccacc

SEQ ID NO: 3118 - DNA, 16 bp, Homo sapiens
  source 1..16: mol_type = genomic DNA
acgcgaaaggtccccg

SEQ ID NO: 3119 - DNA, 17 bp, Homo sapiens
  source 1..17: mol_type = genomic DNA
acgcgaaaggtccccgg

SEQ ID NO: 3120 - DNA, 18 bp, Homo sapiens
  source 1..18: mol_type = genomic DNA
acgcgaaaggtccccggt

SEQ ID NO: 3121 - DNA, 22 bp, Homo sapiens
  source 1..22: mol_type = genomic DNA
acgcgaaaggtccccggttcga

SEQ ID NO: 3122 - DNA, 35 bp, Homo sapiens
  source 1..35: mol_type = genomic DNA
acgcgaaaggtccccggttcgaaaccgggcagaag

SEQ ID NO: 3123 - DNA, 39 bp, Homo sapiens
  source 1..39: mol_type = genomic DNA
acgcgaaaggtccccggttcgaaaccgggcagaagcacc

SEQ ID NO: 3124 - DNA, 31 bp, Homo sapiens
  source 1..31: mol_type = genomic DNA
acgcgaaaggtccccggttcgaaaccgggcg

SEQ ID NO: 3125 - DNA, 34 bp, Homo sapiens
  source 1..34: mol_type = genomic DNA
acgcgaaaggtccccggttcgaaaccgggcggaa

SEQ ID NO: 3126 - DNA, 35 bp, Homo sapiens
  source 1..35: mol_type = genomic DNA
acgcgaaaggtccccggttcgaaaccgggcggaaa

SEQ ID NO: 3127 - DNA, 36 bp, Homo sapiens
  source 1..36: mol_type = genomic DNA
acgcgaaaggtccccggttcgaaaccgggcggaaac

SEQ ID NO: 3128 - DNA, 37 bp, Homo sapiens
  source 1..37: mol_type = genomic DNA
acgcgaaaggtccccggttcgaaaccgggcggaaaca

SEQ ID NO: 3129 - DNA, 38 bp, Homo sapiens
  source 1..38: mol_type = genomic DNA
acgcgaaaggtccccggttcgaaaccgggcggaaacac

SEQ ID NO: 3130 - DNA, 39 bp, Homo sapiens
  source 1..39: mol_type = genomic DNA
acgcgaaaggtccccggttcgaaaccgggcggaaacacc

SEQ ID NO: 3131 - DNA, 40 bp, Homo sapiens
  source 1..40: mol_type = genomic DNA
acgcgaaaggtccccggttcgaaaccgggcggaaacacca

SEQ ID NO: 3132 - DNA, 36 bp, Homo sapiens
  source 1..36: mol_type = genomic DNA
acgcgaaaggtccccggttcgatcccgggcggaaac

SEQ ID NO: 3133 - DNA, 38 bp, Homo sapiens
  source 1..38: mol_type = genomic DNA
acgcgaaaggtccccggttcgatcccgggcggaaacac

SEQ ID NO: 3134 - DNA, 39 bp, Homo sapiens
  source 1..39: mol_type = genomic DNA
acgcgaaaggtccccggttcgatcccgggcggaaacacc

SEQ ID NO: 3135 - DNA, 39 bp, Homo sapiens
  source 1..39: mol_type = genomic DNA
acgcgaaaggtccctggatcaaaaccaggcggaaacacc

SEQ ID NO: 3136 - DNA, 34 bp, Homo sapiens
  source 1..34: mol_type = genomic DNA
acgcgggagacccgggttcaattcccggccaatg

SEQ ID NO: 3137 - DNA, 38 bp, Homo sapiens
  source 1..38: mol_type = genomic DNA
acgcgggagacccgggttcaattcccggccaatgcacc

SEQ ID NO: 3138 - DNA, 39 bp, Homo sapiens
  source 1..39: mol_type = genomic DNA
acgcgggagacccgggttcaattcccggccaatgcacca

SEQ ID NO: 3139 - DNA, 16 bp, Homo sapiens
  source 1..16: mol_type = genomic DNA
acgcgggagaccgggg

SEQ ID NO: 3140 - DNA, 29 bp, Homo sapiens
  source 1..29: mol_type = genomic DNA
acgcgggagaccggggttcaattccccga

SEQ ID NO: 3141 - DNA, 30 bp, Homo sapiens
  source 1..30: mol_type = genomic DNA
acgcgggagaccggggttcaattccccgac

SEQ ID NO: 3142 - DNA, 33 bp, Homo sapiens
  source 1..33: mol_type = genomic DNA
acgcgggagaccggggttcaattccccgacggg

SEQ ID NO: 3143 - DNA, 34 bp, Homo sapiens
  source 1..34: mol_type = genomic DNA
acgcgggagaccggggttcaattccccgacgggg

SEQ ID NO: 3144 - DNA, 35 bp, Homo sapiens
  source 1..35: mol_type = genomic DNA
acgcgggagaccggggttcaattccccgacgggga

SEQ ID NO: 3145 - DNA, 36 bp, Homo sapiens
  source 1..36: mol_type = genomic DNA
acgcgggagaccggggttcaattccccgacggggag

SEQ ID NO: 3146 - DNA, 37 bp, Homo sapiens
  source 1..37: mol_type = genomic DNA
acgcgggagaccggggttcaattccccgacggggagc

SEQ ID NO: 3147 - DNA, 38 bp, Homo sapiens
  source 1..38: mol_type = genomic DNA
acgcgggagaccggggttcaattccccgacggggagcc

SEQ ID NO: 3148 - DNA, 39 bp, Homo sapiens
  source 1..39: mol_type = genomic DNA
acgcgggagaccggggttcaattccccgacggggagcca

SEQ ID NO: 3149 - DNA, 22 bp, Homo sapiens
  source 1..22: mol_type = genomic DNA
acgcgggagaccggggttcgat

SEQ ID NO: 3150 - DNA, 37 bp, Homo sapiens
  source 1..37: mol_type = genomic DNA
acgcgggagaccggggttcgattccccaacggggagc

SEQ ID NO: 3151 - DNA, 38 bp, Homo sapiens
  source 1..38: mol_type = genomic DNA
acgcgggagaccggggttcgattccccaacggggagcc

SEQ ID NO: 3152 - DNA, 39 bp, Homo sapiens
  source 1..39: mol_type = genomic DNA
acgcgggagaccggggttcgattccccaacggggagcca

SEQ ID NO: 3153 - DNA, 28 bp, Homo sapiens
  source 1..28: mol_type = genomic DNA
acgcgggagaccggggttcgattccccg

SEQ ID NO: 3154 - DNA, 29 bp, Homo sapiens
  source 1..29: mol_type = genomic DNA
acgcgggagaccggggttcgattccccga

SEQ ID NO: 3155 - DNA, 30 bp, Homo sapiens
  source 1..30: mol_type = genomic DNA
acgcgggagaccggggttcgattccccgac

SEQ ID NO: 3156 - DNA, 31 bp, Homo sapiens
  source 1..31: mol_type = genomic DNA
acgcgggagaccggggttcgattccccgacg

SEQ ID NO: 3157 - DNA, 32 bp, Homo sapiens
  source 1..32: mol_type = genomic DNA
acgcgggagaccggggttcgattccccgacgg

SEQ ID NO: 3158 - DNA, 33 bp, Homo sapiens
  source 1..33: mol_type = genomic DNA
acgcgggagaccggggttcgattccccgacggg

SEQ ID NO: 3159 - DNA, 34 bp, Homo sapiens
  source 1..34: mol_type = genomic DNA
acgcgggagaccggggttcgattccccgacgggg

SEQ ID NO: 3160 - DNA, 35 bp, Homo sapiens
  source 1..35: mol_type = genomic DNA
acgcgggagaccggggttcgattccccgacgggga

SEQ ID NO: 3161 - DNA, 36 bp, Homo sapiens
  source 1..36: mol_type = genomic DNA
acgcgggagaccggggttcgattccccgacggggag

SEQ ID NO: 3162 - DNA, 37 bp, Homo sapiens
  source 1..37: mol_type = genomic DNA
acgcgggagaccggggttcgattccccgacggggagc

SEQ ID NO: 3163 - DNA, 38 bp, Homo sapiens
  source 1..38: mol_type = genomic DNA
acgcgggagaccggggttcgattccccgacggggagcc

SEQ ID NO: 3164 - DNA, 39 bp, Homo sapiens
  source 1..39: mol_type = genomic DNA
acgcgggagaccggggttcgattccccgacggggagcca

SEQ ID NO: 3165 - DNA, 16 bp, Homo sapiens
  source 1..16: mol_type = genomic DNA
acgcgggaggcccggg

SEQ ID NO: 3166 - DNA, 17 bp, Homo sapiens
  source 1..17: mol_type = genomic DNA
acgcgggaggcccgggt

SEQ ID NO: 3167 - DNA, 18 bp, Homo sapiens
  source 1..18: mol_type = genomic DNA
acgcgggaggcccgggtt

SEQ ID NO: 3168 - DNA, 29 bp, Homo sapiens
  source 1..29: mol_type = genomic DNA
acgcgggaggcccgggttcgattcccggc

SEQ ID NO: 3169 - DNA, 30 bp, Homo sapiens
  source 1..30: mol_type = genomic DNA
acgcgggaggcccgggttcgattcccggcc

SEQ ID NO: 3170 - DNA, 32 bp, Homo sapiens
  source 1..32: mol_type = genomic DNA
acgcgggaggcccgggttcgattcccggccaa

SEQ ID NO: 3171 - DNA, 33 bp, Homo sapiens
  source 1..33: mol_type = genomic DNA
acgcgggaggcccgggttcgattcccggccaat

SEQ ID NO: 3172 - DNA, 34 bp, Homo sapiens
  source 1..34: mol_type = genomic DNA
acgcgggaggcccgggttcgattcccggccaatg

SEQ ID NO: 3173 - DNA, 35 bp, Homo sapiens
  source 1..35: mol_type = genomic DNA
acgcgggaggcccgggttcgattcccggccaatgc

SEQ ID NO: 3174 - DNA, 36 bp, Homo sapiens
  source 1..36: mol_type = genomic DNA
acgcgggaggcccgggttcgattcccggccaatgca

SEQ ID NO: 3175 - DNA, 37 bp, Homo sapiens
  source 1..37: mol_type = genomic DNA
acgcgggaggcccgggttcgattcccggccaatgcac

SEQ ID NO: 3176 - DNA, 38 bp, Homo sapiens
  source 1..38: mol_type = genomic DNA
acgcgggaggcccgggttcgattcccggccaatgcacc

SEQ ID NO: 3177 - DNA, 39 bp, Homo sapiens
  source 1..39: mol_type = genomic DNA
acgcgggaggcccgggttcgattcccggccaatgcacca

SEQ ID NO: 3178 - DNA, 33 bp, Homo sapiens
  source 1..33: mol_type = genomic DNA
acgcgggaggcccgggttcgattcccggcccat

SEQ ID NO: 3179 - DNA, 34 bp, Homo sapiens
  source 1..34: mol_type = genomic DNA
acgcgggaggcccgggttcgattcccggcccatg

SEQ ID NO: 3180 - DNA, 37 bp, Homo sapiens
  source 1..37: mol_type = genomic DNA
acgcgggaggcccgggttcgattcccggcccatgcac

SEQ ID NO: 3181 - DNA, 38 bp, Homo sapiens
  source 1..38: mol_type = genomic DNA
acgcgggaggcccgggttcgattcccggcccatgcacc

SEQ ID NO: 3182 - DNA, 39 bp, Homo sapiens
  source 1..39: mol_type = genomic DNA
acgcgggaggcccgggttcgattcccggcccatgcacca

SEQ ID NO: 3183 - DNA, 30 bp, Homo sapiens
  source 1..30: mol_type = genomic DNA
acgcgggaggcccgggtttgattcccggcc

SEQ ID NO: 3184 - DNA, 27 bp, Homo sapiens
  source 1..27: mol_type = genomic DNA
acgcgtctgactacggatcagaagatt

SEQ ID NO: 3185 - DNA, 30 bp, Homo sapiens
  source 1..30: mol_type = genomic DNA
acgcgtgggttcgaatcccatcctcgtcgc

SEQ ID NO: 3186 - DNA, 31 bp, Homo sapiens
  source 1..31: mol_type = genomic DNA
acgcgtgggttcgaatcccatcctcgtcgcc

SEQ ID NO: 3187 - DNA, 32 bp, Homo sapiens
  source 1..32: mol_type = genomic DNA
acgcgtgggttcgaatcccatcctcgtcgcca

SEQ ID NO: 3188 - DNA, 26 bp, Homo sapiens
  source 1..26: mol_type = genomic DNA
acggagaattttggattctcagggat

SEQ ID NO: 3189 - DNA, 35 bp, Homo sapiens
  source 1..35: mol_type = genomic DNA
acggagaattttggattctcagggatgggttcgat

SEQ ID NO: 3190 - DNA, 34 bp, Homo sapiens
  source 1..34: mol_type = genomic DNA
acggatcagaagattccaggttcgactcctggct

SEQ ID NO: 3191 - DNA, 16 bp, Homo sapiens
  source 1..16: mol_type = genomic DNA
acgggctcacatcacc

SEQ ID NO: 3192 - DNA, 17 bp, Homo sapiens
  source 1..17: mol_type = genomic DNA
acgggctcacatcaccc

SEQ ID NO: 3193 - DNA, 18 bp, Homo sapiens
  source 1..18: mol_type = genomic DNA
acgggctcacatcacccc

SEQ ID NO: 3194 - DNA, 19 bp, Homo sapiens
  source 1..19: mol_type = genomic DNA
acgggctcacatcacccca

SEQ ID NO: 3195 - DNA, 20 bp, Homo sapiens
  source 1..20: mol_type = genomic DNA
acgggctcacatcaccccat

SEQ ID NO: 3196 - DNA, 21 bp, Homo sapiens
  source 1..21: mol_type = genomic DNA
acgggctcacatcaccccata

SEQ ID NO: 3197 - DNA, 22 bp, Homo sapiens
  source 1..22: mol_type = genomic DNA
acgggctcacatcaccccataa

SEQ ID NO: 3198 - DNA, 23 bp, Homo sapiens
  source 1..23: mol_type = genomic DNA
acgggctcacatcaccccataaa

SEQ ID NO: 3199 - DNA, 24 bp, Homo sapiens
  source 1..24: mol_type = genomic DNA
acgggctcacatcaccccataaac

SEQ ID NO: 3200 - DNA, 25 bp, Homo sapiens
  source 1..25: mol_type = genomic DNA
acgggctcacatcaccccataaaca

SEQ ID NO: 3201 - DNA, 26 bp, Homo sapiens
  source 1..26: mol_type = genomic DNA
acgggctcacatcaccccataaacac

SEQ ID NO: 3202 - DNA, 27 bp, Homo sapiens
  source 1..27: mol_type = genomic DNA
acgggctcacatcaccccataaacacc

SEQ ID NO: 3203 - DNA, 28 bp, Homo sapiens
  source 1..28: mol_type = genomic DNA
acgggctcacatcaccccataaacacca

SEQ ID NO: 3204 - DNA, 20 bp, Homo sapiens
  source 1..20: mol_type = genomic DNA
acggtggccgagtggttaag

SEQ ID NO: 3205 - DNA, 35 bp, Homo sapiens
  source 1..35: mol_type = genomic DNA
acgtatgaggccccgggttcaatccccggcatctc

SEQ ID NO: 3206 - DNA, 39 bp, Homo sapiens
  source 1..39: mol_type = genomic DNA
acgtatgaggccccgggttcaatccccggcatctccacc

SEQ ID NO: 3207 - DNA, 17 bp, Homo sapiens
  source 1..17: mol_type = genomic DNA
acgtctgctttacacgc

SEQ ID NO: 3208 - DNA, 29 bp, Homo sapiens
  source 1..29: mol_type = genomic DNA
acgtgggttcgaatcccatcctcgtcgcc

SEQ ID NO: 3209 - DNA, 16 bp, Homo sapiens
  source 1..16: mol_type = genomic DNA
actaagtgtttgtggg

SEQ ID NO: 3210 - DNA, 17 bp, Homo sapiens
  source 1..17: mol_type = genomic DNA
actaagtgtttgtgggt

SEQ ID NO: 3211 - DNA, 18 bp, Homo sapiens
  source 1..18: mol_type = genomic DNA
actaagtgtttgtgggtt

SEQ ID NO: 3212 - DNA, 19 bp, Homo sapiens
  source 1..19: mol_type = genomic DNA
actaagtgtttgtgggttt

SEQ ID NO: 3213 - DNA, 20 bp, Homo sapiens
  source 1..20: mol_type = genomic DNA
actaagtgtttgtgggttta

SEQ ID NO: 3214 - DNA, 23 bp, Homo sapiens
  source 1..23: mol_type = genomic DNA
actaagtgtttgtgggtttaagt

SEQ ID NO: 3215 - DNA, 24 bp, Homo sapiens
  source 1..24: mol_type = genomic DNA
actaagtgtttgtgggtttaagtc

SEQ ID NO: 3216 - DNA, 27 bp, Homo sapiens
  source 1..27: mol_type = genomic DNA
actaagtgtttgtgggtttaagtccca

SEQ ID NO: 3217 - DNA, 28 bp, Homo sapiens
  source 1..28: mol_type = genomic DNA
actaagtgtttgtgggtttaagtcccat

SEQ ID NO: 3218 - DNA, 29 bp, Homo sapiens
  source 1..29: mol_type = genomic DNA
actaagtgtttgtgggtttaagtcccatt

SEQ ID NO: 3219 - DNA, 31 bp, Homo sapiens
  source 1..31: mol_type = genomic DNA
actaagtgtttgtgggtttaagtcccattgg

SEQ ID NO: 3220 - DNA, 32 bp, Homo sapiens
  source 1..32: mol_type = genomic DNA
actaagtgtttgtgggtttaagtcccattggt

SEQ ID NO: 3221 - DNA, 33 bp, Homo sapiens
  source 1..33: mol_type = genomic DNA
actaagtgtttgtgggtttaagtcccattggtc

SEQ ID NO: 3222 - DNA, 34 bp, Homo sapiens
  source 1..34: mol_type = genomic DNA
actaagtgtttgtgggtttaagtcccattggtct

SEQ ID NO: 3223 - DNA, 35 bp, Homo sapiens
  source 1..35: mol_type = genomic DNA
actaagtgtttgtgggtttaagtcccattggtcta

SEQ ID NO: 3224 - DNA, 36 bp, Homo sapiens
  source 1..36: mol_type = genomic DNA
actaagtgtttgtgggtttaagtcccattggtctag

SEQ ID NO: 3225 - DNA, 37 bp, Homo sapiens
  source 1..37: mol_type = genomic DNA
actaagtgtttgtgggtttaagtcccattggtctagc

SEQ ID NO: 3226 - DNA, 38 bp, Homo sapiens
  source 1..38: mol_type = genomic DNA
actaagtgtttgtgggtttaagtcccattggtctagcc

SEQ ID NO: 3227 - DNA, 39 bp, Homo sapiens
  source 1..39: mol_type = genomic DNA
actaagtgtttgtgggtttaagtcccattggtctagcca

SEQ ID NO: 3228 - DNA, 16 bp, Homo sapiens
  source 1..16: mol_type = genomic DNA
actagttttgacaaca

SEQ ID NO: 3229 - DNA, 18 bp, Homo sapiens
  source 1..18: mol_type = genomic DNA
actagttttgacaacatt

SEQ ID NO: 3230 - DNA, 19 bp, Homo sapiens
  source 1..19: mol_type = genomic DNA
actagttttgacaacattc

SEQ ID NO: 3231 - DNA, 20 bp, Homo sapiens
  source 1..20: mol_type = genomic DNA
actagttttgacaacattca

SEQ ID NO: 3232 - DNA, 26 bp, Homo sapiens
  source 1..26: mol_type = genomic DNA
actagttttgacaacattcaaaaaag

SEQ ID NO: 3233 - DNA, 28 bp, Homo sapiens
  source 1..28: mol_type = genomic DNA
actagttttgacaacattcaaaaaagag

SEQ ID NO: 3234 - DNA, 29 bp, Homo sapiens
  source 1..29: mol_type = genomic DNA
actagttttgacaacattcaaaaaagagt

SEQ ID NO: 3235 - DNA, 30 bp, Homo sapiens
  source 1..30: mol_type = genomic DNA
actagttttgacaacattcaaaaaagagta

SEQ ID NO: 3236 - DNA, 31 bp, Homo sapiens
  source 1..31: mol_type = genomic DNA
actagttttgacaacattcaaaaaagagtac

SEQ ID NO: 3237 - DNA, 32 bp, Homo sapiens
  source 1..32: mol_type = genomic DNA
actagttttgacaacattcaaaaaagagtacc

SEQ ID NO: 3238 - DNA, 33 bp, Homo sapiens
  source 1..33: mol_type = genomic DNA
actagttttgacaacattcaaaaaagagtacca

SEQ ID NO: 3239 - DNA, 16 bp, Homo sapiens
  source 1..16: mol_type = genomic DNA
actcaagttctggtct

SEQ ID NO: 3240 - DNA, 17 bp, Homo sapiens
  source 1..17: mol_type = genomic DNA
actcaagttctggtctc

SEQ ID NO: 3241 - DNA, 18 bp, Homo sapiens
  source 1..18: mol_type = genomic DNA
actcaagttctggtctcc

SEQ ID NO: 3242 - DNA, 19 bp, Homo sapiens
  source 1..19: mol_type = genomic DNA
actcaagttctggtctcca

SEQ ID NO: 3243 - DNA, 21 bp, Homo sapiens
  source 1..21: mol_type = genomic DNA
actcaagttctggtctccaat

SEQ ID NO: 3244 - DNA, 19 bp, Homo sapiens
  source 1..19: mol_type = genomic DNA
actcaagttctggtctccg

SEQ ID NO: 3245 - DNA, 21 bp, Homo sapiens
  source 1..21: mol_type = genomic DNA
actcaagttctggtctccgga

SEQ ID NO: 3246 - DNA, 22 bp, Homo sapiens
  source 1..22: mol_type = genomic DNA
actcaagttctggtctccggat

SEQ ID NO: 3247 - DNA, 34 bp, Homo sapiens
  source 1..34: mol_type = genomic DNA
actcaagttctggtctccggatggaggcgtgggt

SEQ ID NO: 3248 - DNA, 17 bp, Homo sapiens
  source 1..17: mol_type = genomic DNA
actcatgcccccatgtc

SEQ ID NO: 3249 - DNA, 18 bp, Homo sapiens
  source 1..18: mol_type = genomic DNA
actcatgcccccatgtct

SEQ ID NO: 3250 - DNA, 20 bp, Homo sapiens
  source 1..20: mol_type = genomic DNA
actcatgcccccatgtctaa

SEQ ID NO: 3251 - DNA, 21 bp, Homo sapiens
  source 1..21: mol_type = genomic DNA
actcatgcccccatgtctaac

SEQ ID NO: 3252 - DNA, 22 bp, Homo sapiens
  source 1..22: mol_type = genomic DNA
actcatgcccccatgtctaaca

SEQ ID NO: 3253 - DNA, 24 bp, Homo sapiens
  source 1..24: mol_type = genomic DNA
actcatgcccccatgtctaacaac

SEQ ID NO: 3254 - DNA, 25 bp, Homo sapiens
  source 1..25: mol_type = genomic DNA
actcatgcccccatgtctaacaaca

SEQ ID NO: 3255 - DNA, 27 bp, Homo sapiens
  source 1..27: mol_type = genomic DNA
actcatgcccccatgtctaacaacatg

SEQ ID NO: 3256 - DNA, 28 bp, Homo sapiens
  source 1..28: mol_type = genomic DNA
actcatgcccccatgtctaacaacatgg

SEQ ID NO: 3257 - DNA, 29 bp, Homo sapiens
  source 1..29: mol_type = genomic DNA
actcatgcccccatgtctaacaacatggc

SEQ ID NO: 3258 - DNA, 30 bp, Homo sapiens
  source 1..30: mol_type = genomic DNA
actcatgcccccatgtctaacaacatggct

SEQ ID NO: 3259 - DNA, 31 bp, Homo sapiens
  source 1..31: mol_type = genomic DNA
actcatgcccccatgtctaacaacatggctt

SEQ ID NO: 3260 - DNA, 32 bp, Homo sapiens
  source 1..32: mol_type = genomic DNA
actcatgcccccatgtctaacaacatggcttt

SEQ ID NO: 3261 - DNA, 33 bp, Homo sapiens
  source 1..33: mol_type = genomic DNA
actcatgcccccatgtctaacaacatggctttc

SEQ ID NO: 3262 - DNA, 34 bp, Homo sapiens
  source 1..34: mol_type = genomic DNA
actcatgcccccatgtctaacaacatggctttct

SEQ ID NO: 3263 - DNA, 35 bp, Homo sapiens
  source 1..35: mol_type = genomic DNA
actcatgcccccatgtctaacaacatggctttctc

SEQ ID NO: 3264 - DNA, 36 bp, Homo sapiens
  source 1..36: mol_type = genomic DNA
actcatgcccccatgtctaacaacatggctttctca

SEQ ID NO: 3265 - DNA, 37 bp, Homo sapiens
  source 1..37: mol_type = genomic DNA
actcatgcccccatgtctaacaacatggctttctcac

SEQ ID NO: 3266 - DNA, 38 bp, Homo sapiens
  source 1..38: mol_type = genomic DNA
actcatgcccccatgtctaacaacatggctttctcacc

SEQ ID NO: 3267 - DNA, 39 bp, Homo sapiens
  source 1..39: mol_type = genomic DNA
actcatgcccccatgtctaacaacatggctttctcacca

SEQ ID NO: 3268 - DNA, 29 bp, Homo sapiens
  source 1..29: mol_type = genomic DNA
actcattaaattatgataatcatatttac

SEQ ID NO: 3269 - DNA, 30 bp, Homo sapiens
  source 1..30: mol_type = genomic DNA
actcattaaattatgataatcatatttacc

SEQ ID NO: 3270 - DNA, 32 bp, Homo sapiens
  source 1..32: mol_type = genomic DNA
actcattaaattatgataatcatatttaccaa

SEQ ID NO: 3271 - DNA, 33 bp, Homo sapiens
  source 1..33: mol_type = genomic DNA
actcattaaattatgataatcatatttaccaac

SEQ ID NO: 3272 - DNA, 34 bp, Homo sapiens
  source 1..34: mol_type = genomic DNA
actcattaaattatgataatcatatttaccaacc

SEQ ID NO: 3273 - DNA, 35 bp, Homo sapiens
  source 1..35: mol_type = genomic DNA
actcattaaattatgataatcatatttaccaacca

SEQ ID NO: 3274 - DNA, 18 bp, Homo sapiens
  source 1..18: mol_type = genomic DNA
actccaaataaaagtacc

SEQ ID NO: 3275 - DNA, 19 bp, Homo sapiens
  source 1..19: mol_type = genomic DNA
actccaaataaaagtacca

SEQ ID NO: 3276 - DNA, 18 bp, Homo sapiens
  source 1..18: mol_type = genomic DNA
actccagatcagaaggct

SEQ ID NO: 3277 - DNA, 23 bp, Homo sapiens
  source 1..23: mol_type = genomic DNA
actccagatcagaaggctgcgtg

SEQ ID NO: 3278 - DNA, 26 bp, Homo sapiens
  source 1..26: mol_type = genomic DNA
actccagatcagaaggctgcgtgttc

SEQ ID NO: 3279 - DNA, 20 bp, Homo sapiens
  source 1..20: mol_type = genomic DNA
actccagatcagaaggttgc

SEQ ID NO: 3280 - DNA, 17 bp, Homo sapiens
  source 1..17: mol_type = genomic DNA
actcccggtatgggaac

SEQ ID NO: 3281 - DNA, 18 bp, Homo sapiens
  source 1..18: mol_type = genomic DNA
actcccggtatgggaacc

SEQ ID NO: 3282 - DNA, 17 bp, Homo sapiens
  source 1..17: mol_type = genomic DNA
actcccggtgtgggaac

SEQ ID NO: 3283 - DNA, 18 bp, Homo sapiens
  source 1..18: mol_type = genomic DNA
actcccggtgtgggaacc

SEQ ID NO: 3284 - DNA, 19 bp, Homo sapiens
  source 1..19: mol_type = genomic DNA
actcccggtgtgggaacca

SEQ ID NO: 3285 - DNA, 16 bp, Homo sapiens
  source 1..16: mol_type = genomic DNA
actcctggctggctcg

SEQ ID NO: 3286 - DNA, 17 bp, Homo sapiens
  source 1..17: mol_type = genomic DNA
actcctggctggctcgc

SEQ ID NO: 3287 - DNA, 18 bp, Homo sapiens
  source 1..18: mol_type = genomic DNA
actcctggctggctcgcc

SEQ ID NO: 3288 - DNA, 19 bp, Homo sapiens
  source 1..19: mol_type = genomic DNA
actcctggctggctcgcca

SEQ ID NO: 3289 - DNA, 19 bp, Homo sapiens
  source 1..19: mol_type = genomic DNA
actctgaatccagcgatcc

SEQ ID NO: 3290 - DNA, 20 bp, Homo sapiens
  source 1..20: mol_type = genomic DNA
actctgaatccagcgatccg

SEQ ID NO: 3291 - DNA, 21 bp, Homo sapiens
  source 1..21: mol_type = genomic DNA
actctgaatccagcgatccga

SEQ ID NO: 3292 - DNA, 22 bp, Homo sapiens
  source 1..22: mol_type = genomic DNA
actctgaatccagcgatccgag

SEQ ID NO: 3293 - DNA, 23 bp, Homo sapiens
  source 1..23: mol_type = genomic DNA
actctgaatccagcgatccgagt

SEQ ID NO: 3294 - DNA, 25 bp, Homo sapiens
  source 1..25: mol_type = genomic DNA
actctgaatccagcgatccgagttc

SEQ ID NO: 3295 - DNA, 37 bp, Homo sapiens
  source 1..37: mol_type = genomic DNA
actctgaatccagcgatccgagttcaaatctcggtgg

SEQ ID NO: 3296 - DNA, 39 bp, Homo sapiens
  source 1..39: mol_type = genomic DNA
actctgaatccagcgatccgagttcaaatctcggtggaa

SEQ ID NO: 3297 - DNA, 43 bp, Homo sapiens
  source 1..43: mol_type = genomic DNA
actctgaatccagcgatccgagttcaaatctcggtggaacctc

SEQ ID NO: 3298 - DNA, 44 bp, Homo sapiens
  source 1..44: mol_type = genomic DNA
actctgaatccagcgatccgagttcaaatctcggtggaacctcc

SEQ ID NO: 3299 - DNA, 45 bp, Homo sapiens
  source 1..45: mol_type = genomic DNA
actctgaatccagcgatccgagttcaaatctcggtggaacctcca

SEQ ID NO: 3300 - DNA, 36 bp, Homo sapiens
  source 1..36: mol_type = genomic DNA
actctgaatccagcgatccgagttcgagtctcggtg

SEQ ID NO: 3301 - DNA, 16 bp, Homo sapiens
  source 1..16: mol_type = genomic DNA
actctgcgttgtggcc

SEQ ID NO: 3302 - DNA, 17 bp, Homo sapiens
  source 1..17: mol_type = genomic DNA
actctgcgttgtggccg

SEQ ID NO: 3303 - DNA, 29 bp, Homo sapiens
  source 1..29: mol_type = genomic DNA
actctgcgttgtggccgcagcaacctcgg

SEQ ID NO: 3304 - DNA, 30 bp, Homo sapiens
  source 1..30: mol_type = genomic DNA
actctgcgttgtggccgcagcaacctcggt

SEQ ID NO: 3305 - DNA, 33 bp, Homo sapiens
  source 1..33: mol_type = genomic DNA
actctgcgttgtggccgcagcaacctcggttcg

SEQ ID NO: 3306 - DNA, 16 bp, Homo sapiens
  source 1..16: mol_type = genomic DNA
actctggactctgaat

SEQ ID NO: 3307 - DNA, 17 bp, Homo sapiens
  source 1..17: mol_type = genomic DNA
actctggactctgaatc

SEQ ID NO: 3308 - DNA, 18 bp, Homo sapiens
  source 1..18: mol_type = genomic DNA
actctggactctgaatcc

SEQ ID NO: 3309 - DNA, 19 bp, Homo sapiens
  source 1..19: mol_type = genomic DNA
actctggactctgaatcca

SEQ ID NO: 3310 - DNA, 20 bp, Homo sapiens
  source 1..20: mol_type = genomic DNA
actctggactctgaatccag

SEQ ID NO: 3311 - DNA, 21 bp, Homo sapiens
  source 1..21: mol_type = genomic DNA
actctggactctgaatccagc

SEQ ID NO: 3312 - DNA, 22 bp, Homo sapiens
  source 1..22: mol_type = genomic DNA
actctggactctgaatccagcg

SEQ ID NO: 3313 - DNA, 23 bp, Homo sapiens
  source 1..23: mol_type = genomic DNA
actctggactctgaatccagcga

SEQ ID NO: 3314 - DNA, 24 bp, Homo sapiens
  source 1..24: mol_type = genomic DNA
actctggactctgaatccagcgat

SEQ ID NO: 3315 - DNA, 26 bp, Homo sapiens
  source 1..26: mol_type = genomic DNA
actctggactctgaatccagcgatcc

SEQ ID NO: 3316 - DNA, 27 bp, Homo sapiens
  source 1..27: mol_type = genomic DNA
actctggactctgaatccagcgatccg

SEQ ID NO: 3317 - DNA, 28 bp, Homo sapiens
  source 1..28: mol_type = genomic DNA
actctggactctgaatccagcgatccga

SEQ ID NO: 3318 - DNA, 29 bp, Homo sapiens
  source 1..29: mol_type = genomic DNA
actctggactctgaatccagcgatccgag

SEQ ID NO: 3319 - DNA, 30 bp, Homo sapiens
  source 1..30: mol_type = genomic DNA
actctggactctgaatccagcgatccgagt

SEQ ID NO: 3320 - DNA, 31 bp, Homo sapiens
  source 1..31: mol_type = genomic DNA
actctggactctgaatccagcgatccgagtt

SEQ ID NO: 3321 - DNA, 32 bp, Homo sapiens
  source 1..32: mol_type = genomic DNA
actctggactctgaatccagcgatccgagttc

SEQ ID NO: 3322 - DNA, 33 bp, Homo sapiens
  source 1..33: mol_type = genomic DNA
actctggactctgaatccagcgatccgagttca

SEQ ID NO: 3323 - DNA, 36 bp, Homo sapiens
  source 1..36: mol_type = genomic DNA
actctggactctgaatccagcgatccgagttcaaat

SEQ ID NO: 3324 - DNA, 46 bp, Homo sapiens
  source 1..46: mol_type = genomic DNA
actctggactctgaatccagcgatccgagttcaaatctcggtggaa

SEQ ID NO: 3325 - DNA, 48 bp, Homo sapiens
  source 1..48: mol_type = genomic DNA
actctggactctgaatccagcgatccgagttcaaatctcggtggaacc

SEQ ID NO: 3326 - DNA, 33 bp, Homo sapiens
  source 1..33: mol_type = genomic DNA
actctggactctgaatccagcgatccgagttcg

SEQ ID NO: 3327 - DNA, 16 bp, Homo sapiens
  source 1..16: mol_type = genomic DNA
actctggactttgaat

SEQ ID NO: 3328 - DNA, 17 bp, Homo sapiens
  source 1..17: mol_type = genomic DNA
actctggactttgaatc

SEQ ID NO: 3329 - DNA, 18 bp, Homo sapiens
  source 1..18: mol_type = genomic DNA
actctggactttgaatcc

SEQ ID NO: 3330 - DNA, 19 bp, Homo sapiens
  source 1..19: mol_type = genomic DNA
actctggactttgaatcca

SEQ ID NO: 3331 - DNA, 21 bp, Homo sapiens
  source 1..21: mol_type = genomic DNA
actctggactttgaatccagc

SEQ ID NO: 3332 - DNA, 29 bp, Homo sapiens
  source 1..29: mol_type = genomic DNA
actctggactttgaatccagcgatccgag

SEQ ID NO: 3333 - DNA, 30 bp, Homo sapiens
  source 1..30: mol_type = genomic DNA
actctggactttgaatccagcgatccgagt

SEQ ID NO: 3334 - DNA, 32 bp, Homo sapiens
  source 1..32: mol_type = genomic DNA
actctggactttgaatccagcgatccgagttc

SEQ ID NO: 3335 - DNA, 33 bp, Homo sapiens
  source 1..33: mol_type = genomic DNA
actctggactttgaatccagcgatccgagttca

SEQ ID NO: 3336 - DNA, 19 bp, Homo sapiens
  source 1..19: mol_type = genomic DNA
actcttaatcccagggtcg

SEQ ID NO: 3337 - DNA, 21 bp, Homo sapiens
  source 1..21: mol_type = genomic DNA
actcttaatcccagggtcgtg

SEQ ID NO: 3338 - DNA, 20 bp, Homo sapiens
  source 1..20: mol_type = genomic DNA
actcttaatctcagggtcgt

SEQ ID NO: 3339 - DNA, 22 bp, Homo sapiens
  source 1..22: mol_type = genomic DNA
actcttaatctcagggtcgtgg

SEQ ID NO: 3340 - DNA, 29 bp, Homo sapiens
  source 1..29: mol_type = genomic DNA
actcttttagtataaatagtaccgttaac

SEQ ID NO: 3341 - DNA, 30 bp, Homo sapiens
  source 1..30: mol_type = genomic DNA
actcttttagtataaatagtaccgttaact

SEQ ID NO: 3342 - DNA, 31 bp, Homo sapiens
  source 1..31: mol_type = genomic DNA
actcttttagtataaatagtaccgttaactt

SEQ ID NO: 3343 - DNA, 32 bp, Homo sapiens
  source 1..32: mol_type = genomic DNA
actcttttagtataaatagtaccgttaacttc

SEQ ID NO: 3344 - DNA, 33 bp, Homo sapiens
  source 1..33: mol_type = genomic DNA
actcttttagtataaatagtaccgttaacttcc

SEQ ID NO: 3345 - DNA, 34 bp, Homo sapiens
  source 1..34: mol_type = genomic DNA
actcttttagtataaatagtaccgttaacttcca

SEQ ID NO: 3346 - DNA, 37 bp, Homo sapiens
  source 1..37: mol_type = genomic DNA
actcttttagtataaatagtaccgttaacttccaatt

SEQ ID NO: 3347 - DNA, 38 bp, Homo sapiens
  source 1..38: mol_type = genomic DNA
actcttttagtataaatagtaccgttaacttccaatta

SEQ ID NO: 3348 - DNA, 39 bp, Homo sapiens
  source 1..39: mol_type = genomic DNA
actcttttagtataaatagtaccgttaacttccaattaa

SEQ ID NO: 3349 - DNA, 17 bp, Homo sapiens
  source 1..17: mol_type = genomic DNA
actgaaaatgtttagac

SEQ ID NO: 3350 - DNA, 18 bp, Homo sapiens
  source 1..18: mol_type = genomic DNA
actgaaaatgtttagacg

SEQ ID NO: 3351 - DNA, 21 bp, Homo sapiens
  source 1..21: mol_type = genomic DNA
actgaaaatgtttagacgggc

SEQ ID NO: 3352 - DNA, 22 bp, Homo sapiens
  source 1..22: mol_type = genomic DNA
actgaaaatgtttagacgggct

SEQ ID NO: 3353 - DNA, 23 bp, Homo sapiens
  source 1..23: mol_type = genomic DNA
actgaaaatgtttagacgggctc

SEQ ID NO: 3354 - DNA, 24 bp, Homo sapiens
  source 1..24: mol_type = genomic DNA
actgaaaatgtttagacgggctca

SEQ ID NO: 3355 - DNA, 25 bp, Homo sapiens
  source 1..25: mol_type = genomic DNA
actgaaaatgtttagacgggctcac

SEQ ID NO: 3356 - DNA, 26 bp, Homo sapiens
  source 1..26: mol_type = genomic DNA
actgaaaatgtttagacgggctcaca

SEQ ID NO: 3357 - DNA, 27 bp, Homo sapiens
  source 1..27: mol_type = genomic DNA
actgaaaatgtttagacgggctcacat

SEQ ID NO: 3358 - DNA, 28 bp, Homo sapiens
  source 1..28: mol_type = genomic DNA
actgaaaatgtttagacgggctcacatc

SEQ ID NO: 3359 - DNA, 30 bp, Homo sapiens
  source 1..30: mol_type = genomic DNA
actgaaaatgtttagacgggctcacatcac

SEQ ID NO: 3360 - DNA, 31 bp, Homo sapiens
  source 1..31: mol_type = genomic DNA
actgaaaatgtttagacgggctcacatcacc

SEQ ID NO: 3361 - DNA, 32 bp, Homo sapiens
  source 1..32: mol_type = genomic DNA
actgaaaatgtttagacgggctcacatcaccc

SEQ ID NO: 3362 - DNA, 33 bp, Homo sapiens
  source 1..33: mol_type = genomic DNA
actgaaaatgtttagacgggctcacatcacccc

SEQ ID NO: 3363 - DNA, 34 bp, Homo sapiens
  source 1..34: mol_type = genomic DNA
actgaaaatgtttagacgggctcacatcacccca

SEQ ID NO: 3364 - DNA, 38 bp, Homo sapiens
  source 1..38: mol_type = genomic DNA
actgaaaatgtttagacgggctcacatcaccccataaa

SEQ ID NO: 3365 - DNA, 40 bp, Homo sapiens
  source 1..40: mol_type = genomic DNA
actgaaaatgtttagacgggctcacatcaccccataaaca

SEQ ID NO: 3366 - DNA, 42 bp, Homo sapiens
  source 1..42: mol_type = genomic DNA
actgaaaatgtttagacgggctcacatcaccccataaacacc

SEQ ID NO: 3367 - DNA, 43 bp, Homo sapiens
  source 1..43: mol_type = genomic DNA
actgaaaatgtttagacgggctcacatcaccccataaacacca

SEQ ID NO: 3368 - DNA, 42 bp, Homo sapiens
  source 1..42: mol_type = genomic DNA
actgcagatcaagaggtccccggttcaaatccgggtgccccc

SEQ ID NO: 3369 - DNA, 16 bp, Homo sapiens
  source 1..16: mol_type = genomic DNA
actgctaactcatgcc

SEQ ID NO: 3370 - DNA, 17 bp, Homo sapiens
  source 1..17: mol_type = genomic DNA
actgctaactcatgccc

SEQ ID NO: 3371 - DNA, 18 bp, Homo sapiens
  source 1..18: mol_type = genomic DNA
actgctaactcatgcccc

SEQ ID NO: 3372 - DNA, 19 bp, Homo sapiens
  source 1..19: mol_type = genomic DNA
actgctaactcatgccccc

SEQ ID NO: 3373 - DNA, 20 bp, Homo sapiens
  source 1..20: mol_type = genomic DNA
actgctaactcatgccccca

SEQ ID NO: 3374 - DNA, 21 bp, Homo sapiens
  source 1..21: mol_type = genomic DNA
actgctaactcatgcccccat

SEQ ID NO: 3375 - DNA, 22 bp, Homo sapiens
  source 1..22: mol_type = genomic DNA
actgctaactcatgcccccatg

SEQ ID NO: 3376 - DNA, 23 bp, Homo sapiens
  source 1..23: mol_type = genomic DNA
actgctaactcatgcccccatgt

SEQ ID NO: 3377 - DNA, 24 bp, Homo sapiens
  source 1..24: mol_type = genomic DNA
actgctaactcatgcccccatgtc

SEQ ID NO: 3378 - DNA, 25 bp, Homo sapiens
  source 1..25: mol_type = genomic DNA
actgctaactcatgcccccatgtct

SEQ ID NO: 3379 - DNA, 26 bp, Homo sapiens
  source 1..26: mol_type = genomic DNA
actgctaactcatgcccccatgtcta

SEQ ID NO: 3380 - DNA, 27 bp, Homo sapiens
  source 1..27: mol_type = genomic DNA
actgctaactcatgcccccatgtctaa

SEQ ID NO: 3381 - DNA, 28 bp, Homo sapiens
  source 1..28: mol_type = genomic DNA
actgctaactcatgcccccatgtctaac

SEQ ID NO: 3382 - DNA, 29 bp, Homo sapiens
  source 1..29: mol_type = genomic DNA
actgctaactcatgcccccatgtctaaca

SEQ ID NO: 3383 - DNA, 31 bp, Homo sapiens
  source 1..31: mol_type = genomic DNA
actgctaactcatgcccccatgtctaacaac

SEQ ID NO: 3384 - DNA, 32 bp, Homo sapiens
  source 1..32: mol_type = genomic DNA
actgctaactcatgcccccatgtctaacaaca

SEQ ID NO: 3385 - DNA, 33 bp, Homo sapiens
  source 1..33: mol_type = genomic DNA
actgctaactcatgcccccatgtctaacaacat

SEQ ID NO: 3386 - DNA, 34 bp, Homo sapiens
  source 1..34: mol_type = genomic DNA
actgctaactcatgcccccatgtctaacaacatg

SEQ ID NO: 3387 - DNA, 35 bp, Homo sapiens
  source 1..35: mol_type = genomic DNA
actgctaactcatgcccccatgtctaacaacatgg

SEQ ID NO: 3388 - DNA, 36 bp, Homo sapiens
  source 1..36: mol_type = genomic DNA
actgctaactcatgcccccatgtctaacaacatggc

SEQ ID NO: 3389 - DNA, 37 bp, Homo sapiens
  source 1..37: mol_type = genomic DNA
actgctaactcatgcccccatgtctaacaacatggct

SEQ ID NO: 3390 - DNA, 38 bp, Homo sapiens
  source 1..38: mol_type = genomic DNA
actgctaactcatgcccccatgtctaacaacatggctt

SEQ ID NO: 3391 - DNA, 39 bp, Homo sapiens
  source 1..39: mol_type = genomic DNA
actgctaactcatgcccccatgtctaacaacatggcttt

SEQ ID NO: 3392 - DNA, 40 bp, Homo sapiens
  source 1..40: mol_type = genomic DNA
actgctaactcatgcccccatgtctaacaacatggctttc

SEQ ID NO: 3393 - DNA, 41 bp, Homo sapiens
  source 1..41: mol_type = genomic DNA
actgctaactcatgcccccatgtctaacaacatggctttct

SEQ ID NO: 3394 - DNA, 42 bp, Homo sapiens
  source 1..42: mol_type = genomic DNA
actgctaactcatgcccccatgtctaacaacatggctttctc

SEQ ID NO: 3395 - DNA, 43 bp, Homo sapiens
  source 1..43: mol_type = genomic DNA
actgctaactcatgcccccatgtctaacaacatggctttctca

SEQ ID NO: 3396 - DNA, 44 bp, Homo sapiens
  source 1..44: mol_type = genomic DNA
actgctaactcatgcccccatgtctaacaacatggctttctcac

SEQ ID NO: 3397 - DNA, 45 bp, Homo sapiens
  source 1..45: mol_type = genomic DNA
actgctaactcatgcccccatgtctaacaacatggctttctcacc

SEQ ID NO: 3398 - DNA, 46 bp, Homo sapiens
  source 1..46: mol_type = genomic DNA
actgctaactcatgcccccatgtctaacaacatggctttctcacca

SEQ ID NO: 3399 - DNA, 18 bp, Homo sapiens
  source 1..18: mol_type = genomic DNA
actgctaatccattgtgc

SEQ ID NO: 3400 - DNA, 16 bp, Homo sapiens
  source 1..16: mol_type = genomic DNA
actgggcggaaacacc

SEQ ID NO: 3401 - DNA, 17 bp, Homo sapiens
  source 1..17: mol_type = genomic DNA
actgggcggaaacacca

SEQ ID NO: 3402 - DNA, 16 bp, Homo sapiens
  source 1..16: mol_type = genomic DNA
actggtcttgtaaacc

SEQ ID NO: 3403 - DNA, 30 bp, Homo sapiens
  source 1..30: mol_type = genomic DNA
actggtggttcagtggtagaattctcgcct

SEQ ID NO: 3404 - DNA, 22 bp, Homo sapiens
  source 1..22: mol_type = genomic DNA
actgtaaagctaacttagcatt

SEQ ID NO: 3405 - DNA, 26 bp, Homo sapiens
  source 1..26: mol_type = genomic DNA
actgtaaagctaacttagcattaacc

SEQ ID NO: 3406 - DNA, 27 bp, Homo sapiens
  source 1..27: mol_type = genomic DNA
actgtaaagctaacttagcattaacct

SEQ ID NO: 3407 - DNA, 33 bp, Homo sapiens
  source 1..33: mol_type = genomic DNA
actgtaaagctaacttagcattaaccttttaag

SEQ ID NO: 3408 - DNA, 34 bp, Homo sapiens
  source 1..34: mol_type = genomic DNA
actgtaaatctaaagacaggggttaggcctcttt

SEQ ID NO: 3409 - DNA, 42 bp, Homo sapiens
  source 1..42: mol_type = genomic DNA
actgtaaatctaaagacaggggttaggcctctttttaccacc

SEQ ID NO: 3410 - DNA, 43 bp, Homo sapiens
  source 1..43: mol_type = genomic DNA
actgtaaatctaaagacaggggttaggcctctttttaccacca

SEQ ID NO: 3411 - DNA, 20 bp, Homo sapiens
  source 1..20: mol_type = genomic DNA
acttaaaactttacagtcag

SEQ ID NO: 3412 - DNA, 22 bp, Homo sapiens
  source 1..22: mol_type = genomic DNA
acttaaaactttacagtcagag

SEQ ID NO: 3413 - DNA, 23 bp, Homo sapiens
  source 1..23: mol_type = genomic DNA
acttaaaactttacagtcagagg

SEQ ID NO: 3414 - DNA, 24 bp, Homo sapiens
  source 1..24: mol_type = genomic DNA
acttaaaactttacagtcagaggt

SEQ ID NO: 3415 - DNA, 25 bp, Homo sapiens
  source 1..25: mol_type = genomic DNA
acttaaaactttacagtcagaggtt

SEQ ID NO: 3416 - DNA, 26 bp, Homo sapiens
  source 1..26: mol_type = genomic DNA
acttaaaactttacagtcagaggttc

SEQ ID NO: 3417 - DNA, 37 bp, Homo sapiens
  source 1..37: mol_type = genomic DNA
acttaaaactttacagtcagaggttcaattcctcttc

SEQ ID NO: 3418 - DNA, 38 bp, Homo sapiens
  source 1..38: mol_type = genomic DNA
acttaaaactttacagtcagaggttcaattcctcttct

SEQ ID NO: 3419 - DNA, 16 bp, Homo sapiens
  source 1..16: mol_type = genomic DNA
acttaacttgaccgct

SEQ ID NO: 3420 - DNA, 17 bp, Homo sapiens
  source 1..17: mol_type = genomic DNA
acttaacttgaccgctc

SEQ ID NO: 3421 - DNA, 18 bp, Homo sapiens
  source 1..18: mol_type = genomic DNA
acttaacttgaccgctct

SEQ ID NO: 3422 - DNA, 19 bp, Homo sapiens
  source 1..19: mol_type = genomic DNA
acttaacttgaccgctctg

SEQ ID NO: 3423 - DNA, 20 bp, Homo sapiens
  source 1..20: mol_type = genomic DNA
acttaacttgaccgctctga

SEQ ID NO: 3424 - DNA, 21 bp, Homo sapiens
  source 1..21: mol_type = genomic DNA
acttaacttgaccgctctgac

SEQ ID NO: 3425 - DNA, 22 bp, Homo sapiens
  source 1..22: mol_type = genomic DNA
acttaacttgaccgctctgacc

SEQ ID NO: 3426 - DNA, 23 bp, Homo sapiens
  source 1..23: mol_type = genomic DNA
acttaacttgaccgctctgacca

SEQ ID NO: 3427 - DNA, 17 bp, Homo sapiens
  source 1..17: mol_type = genomic DNA
acttaagatccaatgga

SEQ ID NO: 3428 - DNA, 18 bp, Homo sapiens
  source 1..18: mol_type = genomic DNA
acttaagatccaatggac

SEQ ID NO: 3429 - DNA, 20 bp, Homo sapiens
  source 1..20: mol_type = genomic DNA
acttaagatccaatggacat

SEQ ID NO: 3430 - DNA, 21 bp, Homo sapiens
  source 1..21: mol_type = genomic DNA
acttaagatccaatggacata

SEQ ID NO: 3431 - DNA, 22 bp, Homo sapiens
  source 1..22: mol_type = genomic DNA
acttaagatccaatggacatat

SEQ ID NO: 3432 - DNA, 16 bp, Homo sapiens
  source 1..16: mol_type = genomic DNA
acttacacttaggaga

SEQ ID NO: 3433 - DNA, 17 bp, Homo sapiens
  source 1..17: mol_type = genomic DNA
acttacacttaggagat

SEQ ID NO: 3434 - DNA, 18 bp, Homo sapiens
  source 1..18: mol_type = genomic DNA
acttacacttaggagatt

SEQ ID NO: 3435 - DNA, 20 bp, Homo sapiens
  source 1..20: mol_type = genomic DNA
acttacacttaggagatttc

SEQ ID NO: 3436 - DNA, 21 bp, Homo sapiens
  source 1..21: mol_type = genomic DNA
acttacacttaggagatttca

SEQ ID NO: 3437 - DNA, 22 bp, Homo sapiens
  source 1..22: mol_type = genomic DNA
acttacacttaggagatttcaa

SEQ ID NO: 3438 - DNA, 23 bp, Homo sapiens
  source 1..23: mol_type = genomic DNA
acttacacttaggagatttcaac

SEQ ID NO: 3439 - DNA, 24 bp, Homo sapiens
  source 1..24: mol_type = genomic DNA
acttacacttaggagatttcaact

SEQ ID NO: 3440 - DNA, 25 bp, Homo sapiens
  source 1..25: mol_type = genomic DNA
acttacacttaggagatttcaactt

SEQ ID NO: 3441 - DNA, 27 bp, Homo sapiens
  source 1..27: mol_type = genomic DNA
acttacacttaggagatttcaacttaa

SEQ ID NO: 3442 - DNA, 28 bp, Homo sapiens
  source 1..28: mol_type = genomic DNA
acttacacttaggagatttcaacttaac

SEQ ID NO: 3443 - DNA, 29 bp, Homo sapiens
  source 1..29: mol_type = genomic DNA
acttacacttaggagatttcaacttaact

SEQ ID NO: 3444 - DNA, 30 bp, Homo sapiens
  source 1..30: mol_type = genomic DNA
acttacacttaggagatttcaacttaactt

SEQ ID NO: 3445 - DNA, 31 bp, Homo sapiens
  source 1..31: mol_type = genomic DNA
acttacacttaggagatttcaacttaacttg

SEQ ID NO: 3446 - DNA, 33 bp, Homo sapiens
  source 1..33: mol_type = genomic DNA
acttacacttaggagatttcaacttaacttgac

SEQ ID NO: 3447 - DNA, 34 bp, Homo sapiens
  source 1..34: mol_type = genomic DNA
acttacacttaggagatttcaacttaacttgacc

SEQ ID NO: 3448 - DNA, 35 bp, Homo sapiens
  source 1..35: mol_type = genomic DNA
acttacacttaggagatttcaacttaacttgaccg

SEQ ID NO: 3449 - DNA, 36 bp, Homo sapiens
  source 1..36: mol_type = genomic DNA
acttacacttaggagatttcaacttaacttgaccgc

SEQ ID NO: 3450 - DNA, 37 bp, Homo sapiens
  source 1..37: mol_type = genomic DNA
acttacacttaggagatttcaacttaacttgaccgct

SEQ ID NO: 3451 - DNA, 38 bp, Homo sapiens
  source 1..38: mol_type = genomic DNA
acttacacttaggagatttcaacttaacttgaccgctc

SEQ ID NO: 3452 - DNA, 39 bp, Homo sapiens
  source 1..39: mol_type = genomic DNA
acttacacttaggagatttcaacttaacttgaccgctct

SEQ ID NO: 3453 - DNA, 40 bp, Homo sapiens
  source 1..40: mol_type = genomic DNA
acttacacttaggagatttcaacttaacttgaccgctctg

SEQ ID NO: 3454 - DNA, 41 bp, Homo sapiens
  source 1..41: mol_type = genomic DNA
acttacacttaggagatttcaacttaacttgaccgctctga

SEQ ID NO: 3455 - DNA, 42 bp, Homo sapiens
  source 1..42: mol_type = genomic DNA
acttacacttaggagatttcaacttaacttgaccgctctgac

SEQ ID NO: 3456 - DNA, 43 bp, Homo sapiens
  source 1..43: mol_type = genomic DNA
acttacacttaggagatttcaacttaacttgaccgctctgacc

SEQ ID NO: 3457 - DNA, 44 bp, Homo sapiens
  source 1..44: mol_type = genomic DNA
acttacacttaggagatttcaacttaacttgaccgctctgacca

SEQ ID NO: 3458 - DNA, 22 bp, Homo sapiens
  source 1..22: mol_type = genomic DNA
acttagcattaaccttttaagt

SEQ ID NO: 3459 - DNA, 25 bp, Homo sapiens
  source 1..25: mol_type = genomic DNA
acttagcattaaccttttaagttaa

SEQ ID NO: 3460 - DNA, 32 bp, Homo sapiens
  source 1..32: mol_type = genomic DNA
acttagcattaaccttttaagttaaagattaa

SEQ ID NO: 3461 - DNA, 38 bp, Homo sapiens
  source 1..38: mol_type = genomic DNA
acttagcattaaccttttaagttaaagattaagagaac

SEQ ID NO: 3462 - DNA, 39 bp, Homo sapiens
  source 1..39: mol_type = genomic DNA
acttagcattaaccttttaagttaaagattaagagaacc

SEQ ID NO: 3463 - DNA, 45 bp, Homo sapiens
  source 1..45: mol_type = genomic DNA
acttagcattaaccttttaagttaaagattaagagaaccaacacc

SEQ ID NO: 3464 - DNA, 16 bp, Homo sapiens
  source 1..16: mol_type = genomic DNA
acttaggagatttcaa

SEQ ID NO: 3465 - DNA, 17 bp, Homo sapiens
  source 1..17: mol_type = genomic DNA
acttaggagatttcaac

SEQ ID NO: 3466 - DNA, 18 bp, Homo sapiens
  source 1..18: mol_type = genomic DNA
acttaggagatttcaact

SEQ ID NO: 3467 - DNA, 19 bp, Homo sapiens
  source 1..19: mol_type = genomic DNA
acttaggagatttcaactt

SEQ ID NO: 3468 - DNA, 20 bp, Homo sapiens
  source 1..20: mol_type = genomic DNA
acttaggagatttcaactta

SEQ ID NO: 3469 - DNA, 21 bp, Homo sapiens
  source 1..21: mol_type = genomic DNA
acttaggagatttcaacttaa

SEQ ID NO: 3470 - DNA, 22 bp, Homo sapiens
  source 1..22: mol_type = genomic DNA
acttaggagatttcaacttaac

SEQ ID NO: 3471 - DNA, 23 bp, Homo sapiens
  source 1..23: mol_type = genomic DNA
acttaggagatttcaacttaact

SEQ ID NO: 3472 - DNA, 24 bp, Homo sapiens
  source 1..24: mol_type = genomic DNA
acttaggagatttcaacttaactt

SEQ ID NO: 3473 - DNA, 25 bp, Homo sapiens
  source 1..25: mol_type = genomic DNA
acttaggagatttcaacttaacttg

SEQ ID NO: 3474 - DNA, 26 bp, Homo sapiens
  source 1..26: mol_type = genomic DNA
acttaggagatttcaacttaacttga

SEQ ID NO: 3475 - DNA, 27 bp, Homo sapiens
  source 1..27: mol_type = genomic DNA
acttaggagatttcaacttaacttgac

SEQ ID NO: 3476 - DNA, 28 bp, Homo sapiens
  source 1..28: mol_type = genomic DNA
acttaggagatttcaacttaacttgacc

SEQ ID NO: 3477 - DNA, 29 bp, Homo sapiens
  source 1..29: mol_type = genomic DNA
acttaggagatttcaacttaacttgaccg

SEQ ID NO: 3478 - DNA, 30 bp, Homo sapiens
  source 1..30: mol_type = genomic DNA
acttaggagatttcaacttaacttgaccgc

SEQ ID NO: 3479 - DNA, 31 bp, Homo sapiens
  source 1..31: mol_type = genomic DNA
acttaggagatttcaacttaacttgaccgct

SEQ ID NO: 3480 - DNA, 32 bp, Homo sapiens
  source 1..32: mol_type = genomic DNA
acttaggagatttcaacttaacttgaccgctc

SEQ ID NO: 3481 - DNA, 33 bp, Homo sapiens
  source 1..33: mol_type = genomic DNA
acttaggagatttcaacttaacttgaccgctct

SEQ ID NO: 3482 - DNA, 34 bp, Homo sapiens
  source 1..34: mol_type = genomic DNA
acttaggagatttcaacttaacttgaccgctctg

SEQ ID NO: 3483 - DNA, 35 bp, Homo sapiens
  source 1..35: mol_type = genomic DNA
acttaggagatttcaacttaacttgaccgctctga

SEQ ID NO: 3484 - DNA, 36 bp, Homo sapiens
  source 1..36: mol_type = genomic DNA
acttaggagatttcaacttaacttgaccgctctgac

SEQ ID NO: 3485 - DNA, 37 bp, Homo sapiens
  source 1..37: mol_type = genomic DNA
acttaggagatttcaacttaacttgaccgctctgacc

SEQ ID NO: 3486 - DNA, 38 bp, Homo sapiens
  source 1..38: mol_type = genomic DNA
acttaggagatttcaacttaacttgaccgctctgacca

SEQ ID NO: 3487 - DNA, 16 bp, Homo sapiens
  source 1..16: mol_type = genomic DNA
acttataatgccgagg

SEQ ID NO: 3488 - DNA, 17 bp, Homo sapiens
  source 1..17: mol_type = genomic DNA
acttataatgccgaggt

SEQ ID NO: 3489 - DNA, 21 bp, Homo sapiens
  source 1..21: mol_type = genomic DNA
acttataatgccgaggttgtg

SEQ ID NO: 3490 - DNA, 16 bp, Homo sapiens
  source 1..16: mol_type = genomic DNA
acttccaattaactag

SEQ ID NO: 3491 - DNA, 19 bp, Homo sapiens
  source 1..19: mol_type = genomic DNA
acttccaattaactagttt

SEQ ID NO: 3492 - DNA, 21 bp, Homo sapiens
  source 1..21: mol_type = genomic DNA
acttccaattaactagttttg

SEQ ID NO: 3493 - DNA, 22 bp, Homo sapiens
  source 1..22: mol_type = genomic DNA
acttccaattaactagttttga

SEQ ID NO: 3494 - DNA, 23 bp, Homo sapiens
  source 1..23: mol_type = genomic DNA
acttccaattaactagttttgac

SEQ ID NO: 3495 - DNA, 24 bp, Homo sapiens
  source 1..24: mol_type = genomic DNA
acttccaattaactagttttgaca

SEQ ID NO: 3496 - DNA, 25 bp, Homo sapiens
  source 1..25: mol_type = genomic DNA
acttccaattaactagttttgacaa

SEQ ID NO: 3497 - DNA, 26 bp, Homo sapiens
  source 1..26: mol_type = genomic DNA
acttccaattaactagttttgacaac

SEQ ID NO: 3498 - DNA, 43 bp, Homo sapiens
  source 1..43: mol_type = genomic DNA
acttccaattaactagttttgacaacattcaaaaaagagtacc

SEQ ID NO: 3499 - DNA, 44 bp, Homo sapiens
  source 1..44: mol_type = genomic DNA
acttccaattaactagttttgacaacattcaaaaaagagtacca

SEQ ID NO: 3500 - DNA, 16 bp, Homo sapiens
  source 1..16: mol_type = genomic DNA
acttcggatcagaaga

SEQ ID NO: 3501 - DNA, 23 bp, Homo sapiens
  source 1..23: mol_type = genomic DNA
acttcggatcagaagattgaggg

SEQ ID NO: 3502 - DNA, 24 bp, Homo sapiens
  source 1..24: mol_type = genomic DNA
acttcggatcagaagattgagggt

SEQ ID NO: 3503 - DNA, 35 bp, Homo sapiens
  source 1..35: mol_type = genomic DNA
acttcggatcagaagattgagggttcgagtccctt

SEQ ID NO: 3504 - DNA, 22 bp, Homo sapiens
  source 1..22: mol_type = genomic DNA
acttcggatcagaagattgcag

SEQ ID NO: 3505 - DNA, 23 bp, Homo sapiens
  source 1..23: mol_type = genomic DNA
acttcggatcagaagattgcagg

SEQ ID NO: 3506 - DNA, 25 bp, Homo sapiens
  source 1..25: mol_type = genomic DNA
acttcggatcagaagattgcaggtt

SEQ ID NO: 3507 - DNA, 26 bp, Homo sapiens
  source 1..26: mol_type = genomic DNA
acttcggatcagaagattgcaggttc

SEQ ID NO: 3508 - DNA, 27 bp, Homo sapiens
  source 1..27: mol_type = genomic DNA
acttcggatcagaagattgcaggttcg

SEQ ID NO: 3509 - DNA, 45 bp, Homo sapiens
  source 1..45: mol_type = genomic DNA
acttcggatcagaagattgcaggttcgagtcctgccgcggtcgcc

SEQ ID NO: 3510 - DNA, 16 bp, Homo sapiens
  source 1..16: mol_type = genomic DNA
acttgaccgctctgac

SEQ ID NO: 3511 - DNA, 17 bp, Homo sapiens
  source 1..17: mol_type = genomic DNA
acttgaccgctctgacc

SEQ ID NO: 3512 - DNA, 18 bp, Homo sapiens
  source 1..18: mol_type = genomic DNA
acttgaccgctctgacca

SEQ ID NO: 3513 - DNA, 18 bp, Homo sapiens
  source 1..18: mol_type = genomic DNA
actttacaatcagaggtt

SEQ ID NO: 3514 - DNA, 16 bp, Homo sapiens
  source 1..16: mol_type = genomic DNA
actttacagtcagagg

SEQ ID NO: 3515 - DNA, 17 bp, Homo sapiens
  source 1..17: mol_type = genomic DNA
actttacagtcagaggt

SEQ ID NO: 3516 - DNA, 18 bp, Homo sapiens
  source 1..18: mol_type = genomic DNA
actttacagtcagaggtt

SEQ ID NO: 3517 - DNA, 19 bp, Homo sapiens
  source 1..19: mol_type = genomic DNA
actttacagtcagaggttc

SEQ ID NO: 3518 - DNA, 20 bp, Homo sapiens
  source 1..20: mol_type = genomic DNA
actttacagtcagaggttca

SEQ ID NO: 3519 - DNA, 24 bp, Homo sapiens
  source 1..24: mol_type = genomic DNA
actttacagtcagaggttcaattc

SEQ ID NO: 3520 - DNA, 25 bp, Homo sapiens
  source 1..25: mol_type = genomic DNA
actttacagtcagaggttcaattcc

SEQ ID NO: 3521 - DNA, 26 bp, Homo sapiens
  source 1..26: mol_type = genomic DNA
actttacagtcagaggttcaattcct

SEQ ID NO: 3522 - DNA, 30 bp, Homo sapiens
  source 1..30: mol_type = genomic DNA
actttacagtcagaggttcaattcctcttc

SEQ ID NO: 3523 - DNA, 31 bp, Homo sapiens
  source 1..31: mol_type = genomic DNA
actttacagtcagaggttcaattcctcttct

SEQ ID NO: 3524 - DNA, 21 bp, Homo sapiens
  source 1..21: mol_type = genomic DNA
actttgaatccagcaatccga

SEQ ID NO: 3525 - DNA, 22 bp, Homo sapiens
  source 1..22: mol_type = genomic DNA
actttgaatccagcaatccgag

SEQ ID NO: 3526 - DNA, 23 bp, Homo sapiens
  source 1..23: mol_type = genomic DNA
actttgaatccagcaatccgagt

SEQ ID NO: 3527 - DNA, 24 bp, Homo sapiens
  source 1..24: mol_type = genomic DNA
actttgaatccagcaatccgagtt

SEQ ID NO: 3528 - DNA, 17 bp, Homo sapiens
  source 1..17: mol_type = genomic DNA
actttgaatccagcgat

SEQ ID NO: 3529 - DNA, 19 bp, Homo sapiens
  source 1..19: mol_type = genomic DNA
actttgaatccagcgatcc

SEQ ID NO: 3530 - DNA, 20 bp, Homo sapiens
  source 1..20: mol_type = genomic DNA
actttgaatccagcgatccg

SEQ ID NO: 3531 - DNA, 21 bp, Homo sapiens
  source 1..21: mol_type = genomic DNA
actttgaatccagcgatccga

SEQ ID NO: 3532 - DNA, 22 bp, Homo sapiens
  source 1..22: mol_type = genomic DNA
actttgaatccagcgatccgag

SEQ ID NO: 3533 - DNA, 23 bp, Homo sapiens
  source 1..23: mol_type = genomic DNA
actttgaatccagcgatccgagt

SEQ ID NO: 3534 - DNA, 24 bp, Homo sapiens
  source 1..24: mol_type = genomic DNA
actttgaatccagcgatccgagtt

SEQ ID NO: 3535 - DNA, 26 bp, Homo sapiens
  source 1..26: mol_type = genomic DNA
actttgaatccagcgatccgagttca

SEQ ID NO: 3536 - DNA, 23 bp, Homo sapiens
  source 1..23: mol_type = genomic DNA
actttgatagagtaaataatagg

SEQ ID NO: 3537 - DNA, 24 bp, Homo sapiens
  source 1..24: mol_type = genomic DNA
actttgatagagtaaataatagga

SEQ ID NO: 3538 - DNA, 25 bp, Homo sapiens
  source 1..25: mol_type = genomic DNA
actttgatagagtaaataataggag

SEQ ID NO: 3539 - DNA, 26 bp, Homo sapiens
  source 1..26: mol_type = genomic DNA
actttgatagagtaaataataggagc

SEQ ID NO: 3540 - DNA, 27 bp, Homo sapiens
  source 1..27: mol_type = genomic DNA
actttgatagagtaaataataggagct

SEQ ID NO: 3541 - DNA, 28 bp, Homo sapiens
  source 1..28: mol_type = genomic DNA
actttgatagagtaaataataggagctt

SEQ ID NO: 3542 - DNA, 29 bp, Homo sapiens
  source 1..29: mol_type = genomic DNA
actttgatagagtaaataataggagctta

SEQ ID NO: 3543 - DNA, 30 bp, Homo sapiens
  source 1..30: mol_type = genomic DNA
actttgatagagtaaataataggagcttaa

SEQ ID NO: 3544 - DNA, 31 bp, Homo sapiens
  source 1..31: mol_type = genomic DNA
actttgatagagtaaataataggagcttaaa

SEQ ID NO: 3545 - DNA, 32 bp, Homo sapiens
  source 1..32: mol_type = genomic DNA
actttgatagagtaaataataggagcttaaac

SEQ ID NO: 3546 - DNA, 33 bp, Homo sapiens
  source 1..33: mol_type = genomic DNA
actttgatagagtaaataataggagcttaaacc

SEQ ID NO: 3547 - DNA, 34 bp, Homo sapiens
  source 1..34: mol_type = genomic DNA
actttgatagagtaaataataggagcttaaaccc

SEQ ID NO: 3548 - DNA, 35 bp, Homo sapiens
  source 1..35: mol_type = genomic DNA
actttgatagagtaaataataggagcttaaacccc

SEQ ID NO: 3549 - DNA, 36 bp, Homo sapiens
  source 1..36: mol_type = genomic DNA
actttgatagagtaaataataggagcttaaaccccc

SEQ ID NO: 3550 - DNA, 37 bp, Homo sapiens
  source 1..37: mol_type = genomic DNA
actttgatagagtaaataataggagcttaaaccccct

SEQ ID NO: 3551 - DNA, 38 bp, Homo sapiens
  source 1..38: mol_type = genomic DNA
actttgatagagtaaataataggagcttaaaccccctt

SEQ ID NO: 3552 - DNA, 39 bp, Homo sapiens
  source 1..39: mol_type = genomic DNA
actttgatagagtaaataataggagcttaaaccccctta

SEQ ID NO: 3553 - DNA, 40 bp, Homo sapiens
  source 1..40: mol_type = genomic DNA
actttgatagagtaaataataggagcttaaacccccttat

SEQ ID NO: 3554 - DNA, 47 bp, Homo sapiens
  source 1..47: mol_type = genomic DNA
actttgatagagtaaataataggagcttaaacccccttatttctacc

SEQ ID NO: 3555 - DNA, 48 bp, Homo sapiens
  source 1..48: mol_type = genomic DNA
actttgatagagtaaataataggagcttaaacccccttatttctacca

SEQ ID NO: 3556 - DNA, 19 bp, Homo sapiens
  source 1..19: mol_type = genomic DNA
actttgtcaaagttaaatt

SEQ ID NO: 3557 - DNA, 20 bp, Homo sapiens
  source 1..20: mol_type = genomic DNA
actttgtcaaagttaaatta

SEQ ID NO: 3558 - DNA, 23 bp, Homo sapiens
  source 1..23: mol_type = genomic DNA
actttgtcaaagttaaattatag

SEQ ID NO: 3559 - DNA, 24 bp, Homo sapiens
  source 1..24: mol_type = genomic DNA
actttgtcaaagttaaattatagg

SEQ ID NO: 3560 - DNA, 25 bp, Homo sapiens
  source 1..25: mol_type = genomic DNA
actttgtcaaagttaaattataggc

SEQ ID NO: 3561 - DNA, 26 bp, Homo sapiens
  source 1..26: mol_type = genomic DNA
actttgtcaaagttaaattataggct

SEQ ID NO: 3562 - DNA, 27 bp, Homo sapiens
  source 1..27: mol_type = genomic DNA
actttgtcaaagttaaattataggcta

SEQ ID NO: 3563 - DNA, 28 bp, Homo sapiens
  source 1..28: mol_type = genomic DNA
actttgtcaaagttaaattataggctaa

SEQ ID NO: 3564 - DNA, 29 bp, Homo sapiens
  source 1..29: mol_type = genomic DNA
actttgtcaaagttaaattataggctaaa

SEQ ID NO: 3565 - DNA, 30 bp, Homo sapiens
  source 1..30: mol_type = genomic DNA
actttgtcaaagttaaattataggctaaat

SEQ ID NO: 3566 - DNA, 31 bp, Homo sapiens
  source 1..31: mol_type = genomic DNA
actttgtcaaagttaaattataggctaaatc

SEQ ID NO: 3567 - DNA, 32 bp, Homo sapiens
  source 1..32: mol_type = genomic DNA
actttgtcaaagttaaattataggctaaatcc

SEQ ID NO: 3568 - DNA, 33 bp, Homo sapiens
  source 1..33: mol_type = genomic DNA
actttgtcaaagttaaattataggctaaatcct

SEQ ID NO: 3569 - DNA, 34 bp, Homo sapiens
  source 1..34: mol_type = genomic DNA
actttgtcaaagttaaattataggctaaatccta

SEQ ID NO: 3570 - DNA, 36 bp, Homo sapiens
  source 1..36: mol_type = genomic DNA
actttgtcaaagttaaattataggctaaatcctata

SEQ ID NO: 3571 - DNA, 37 bp, Homo sapiens
  source 1..37: mol_type = genomic DNA
actttgtcaaagttaaattataggctaaatcctatat

SEQ ID NO: 3572 - DNA, 38 bp, Homo sapiens
  source 1..38: mol_type = genomic DNA
actttgtcaaagttaaattataggctaaatcctatata

SEQ ID NO: 3573 - DNA, 41 bp, Homo sapiens
  source 1..41: mol_type = genomic DNA
actttgtcaaagttaaattataggctaaatcctatatatct

SEQ ID NO: 3574 - DNA, 44 bp, Homo sapiens
  source 1..44: mol_type = genomic DNA
actttgtcaaagttaaattataggctaaatcctatatatcttac

SEQ ID NO: 3575 - DNA, 45 bp, Homo sapiens
  source 1..45: mol_type = genomic DNA
actttgtcaaagttaaattataggctaaatcctatatatcttacc

SEQ ID NO: 3576 - DNA, 46 bp, Homo sapiens
  source 1..46: mol_type = genomic DNA
actttgtcaaagttaaattataggctaaatcctatatatcttacca

SEQ ID NO: 3577 - DNA, 16 bp, Homo sapiens
  source 1..16: mol_type = genomic DNA
acttttaaaggataac

SEQ ID NO: 3578 - DNA, 17 bp, Homo sapiens
  source 1..17: mol_type = genomic DNA
acttttaaaggataaca

SEQ ID NO: 3579 - DNA, 18 bp, Homo sapiens
  source 1..18: mol_type = genomic DNA
acttttaaaggataacag

SEQ ID NO: 3580 - DNA, 19 bp, Homo sapiens
  source 1..19: mol_type = genomic DNA
acttttaaaggataacagc

SEQ ID NO: 3581 - DNA, 20 bp, Homo sapiens
  source 1..20: mol_type = genomic DNA
acttttaaaggataacagct

SEQ ID NO: 3582 - DNA, 21 bp, Homo sapiens
  source 1..21: mol_type = genomic DNA
acttttaaaggataacagcta

SEQ ID NO: 3583 - DNA, 22 bp, Homo sapiens
  source 1..22: mol_type = genomic DNA
acttttaaaggataacagctat

SEQ ID NO: 3584 - DNA, 23 bp, Homo sapiens
  source 1..23: mol_type = genomic DNA
acttttaaaggataacagctatc

SEQ ID NO: 3585 - DNA, 24 bp, Homo sapiens
  source 1..24: mol_type = genomic DNA
acttttaaaggataacagctatcc

SEQ ID NO: 3586 - DNA, 26 bp, Homo sapiens
  source 1..26: mol_type = genomic DNA
acttttaaaggataacagctatccat

SEQ ID NO: 3587 - DNA, 27 bp, Homo sapiens
  source 1..27: mol_type = genomic DNA
acttttaaaggataacagctatccatt

SEQ ID NO: 3588 - DNA, 28 bp, Homo sapiens
  source 1..28: mol_type = genomic DNA
acttttaaaggataacagctatccattg

SEQ ID NO: 3589 - DNA, 29 bp, Homo sapiens
  source 1..29: mol_type = genomic DNA
acttttaaaggataacagctatccattgg

SEQ ID NO: 3590 - DNA, 30 bp, Homo sapiens
  source 1..30: mol_type = genomic DNA
acttttaaaggataacagctatccattggt

SEQ ID NO: 3591 - DNA, 31 bp, Homo sapiens
  source 1..31: mol_type = genomic DNA
acttttaaaggataacagctatccattggtc

SEQ ID NO: 3592 - DNA, 32 bp, Homo sapiens
  source 1..32: mol_type = genomic DNA
acttttaaaggataacagctatccattggtct

SEQ ID NO: 3593 - DNA, 33 bp, Homo sapiens
  source 1..33: mol_type = genomic DNA
acttttaaaggataacagctatccattggtctt

SEQ ID NO: 3594 - DNA, 34 bp, Homo sapiens
  source 1..34: mol_type = genomic DNA
acttttaaaggataacagctatccattggtctta

SEQ ID NO: 3595 - DNA, 37 bp, Homo sapiens
  source 1..37: mol_type = genomic DNA
acttttaaaggataacagctatccattggtcttaggc

SEQ ID NO: 3596 - DNA, 38 bp, Homo sapiens
  source 1..38: mol_type = genomic DNA
acttttaaaggataacagctatccattggtcttaggcc

SEQ ID NO: 3597 - DNA, 39 bp, Homo sapiens
  source 1..39: mol_type = genomic DNA
acttttaaaggataacagctatccattggtcttaggccc

SEQ ID NO: 3598 - DNA, 40 bp, Homo sapiens
  source 1..40: mol_type = genomic DNA
acttttaaaggataacagctatccattggtcttaggcccc

SEQ ID NO: 3599 - DNA, 41 bp, Homo sapiens
  source 1..41: mol_type = genomic DNA
acttttaaaggataacagctatccattggtcttaggcccca

SEQ ID NO: 3600 - DNA, 48 bp, Homo sapiens
  source 1..48: mol_type = genomic DNA
acttttaaaggataacagctatccattggtcttaggccccaaaaattt

SEQ ID NO: 3601 - DNA, 38 bp, Homo sapiens
  source 1..38: mol_type = genomic DNA
acttttaatctgagggtccagggttcatgtccctgttc

SEQ ID NO: 3602 - DNA, 16 bp, Homo sapiens
  source 1..16: mol_type = genomic DNA
actttttctctgacca

SEQ ID NO: 3603 - DNA, 16 bp, Homo sapiens
  source 1..16: mol_type = genomic DNA
agaaagctcacaagaa

SEQ ID NO: 3604 - DNA, 17 bp, Homo sapiens
  source 1..17: mol_type = genomic DNA
agaaagctcacaagaac

SEQ ID NO: 3605 - DNA, 18 bp, Homo sapiens
  source 1..18: mol_type = genomic DNA
agaaagctcacaagaact

SEQ ID NO: 3606 - DNA, 19 bp, Homo sapiens
  source 1..19: mol_type = genomic DNA
agaaagctcacaagaactg

SEQ ID NO: 3607 - DNA, 20 bp, Homo sapiens
  source 1..20: mol_type = genomic DNA
agaaagctcacaagaactgc

SEQ ID NO: 3608 - DNA, 21 bp, Homo sapiens
  source 1..21: mol_type = genomic DNA
agaaagctcacaagaactgct

SEQ ID NO: 3609 - DNA, 22 bp, Homo sapiens
  source 1..22: mol_type = genomic DNA
agaaagctcacaagaactgcta

SEQ ID NO: 3610 - DNA, 23 bp, Homo sapiens
  source 1..23: mol_type = genomic DNA
agaaagctcacaagaactgctaa

SEQ ID NO: 3611 - DNA, 24 bp, Homo sapiens
  source 1..24: mol_type = genomic DNA
agaaagctcacaagaactgctaac

SEQ ID NO: 3612 - DNA, 25 bp, Homo sapiens
  source 1..25: mol_type = genomic DNA
agaaagctcacaagaactgctaact

SEQ ID NO: 3613 - DNA, 26 bp, Homo sapiens
  source 1..26: mol_type = genomic DNA
agaaagctcacaagaactgctaactc

SEQ ID NO: 3614 - DNA, 27 bp, Homo sapiens
  source 1..27: mol_type = genomic DNA
agaaagctcacaagaactgctaactca

SEQ ID NO: 3615 - DNA, 28 bp, Homo sapiens
  source 1..28: mol_type = genomic DNA
agaaagctcacaagaactgctaactcat

SEQ ID NO: 3616 - DNA, 29 bp, Homo sapiens
  source 1..29: mol_type = genomic DNA
agaaagctcacaagaactgctaactcatg

SEQ ID NO: 3617 - DNA, 30 bp, Homo sapiens
  source 1..30: mol_type = genomic DNA
agaaagctcacaagaactgctaactcatgc

SEQ ID NO: 3618 - DNA, 31 bp, Homo sapiens
  source 1..31: mol_type = genomic DNA
agaaagctcacaagaactgctaactcatgcc

SEQ ID NO: 3619 - DNA, 32 bp, Homo sapiens
  source 1..32: mol_type = genomic DNA
agaaagctcacaagaactgctaactcatgccc

SEQ ID NO: 3620 - DNA, 33 bp, Homo sapiens
  source 1..33: mol_type = genomic DNA
agaaagctcacaagaactgctaactcatgcccc

SEQ ID NO: 3621 - DNA, 34 bp, Homo sapiens
  source 1..34: mol_type = genomic DNA
agaaagctcacaagaactgctaactcatgccccc

SEQ ID NO: 3622 - DNA, 35 bp, Homo sapiens
  source 1..35: mol_type = genomic DNA
agaaagctcacaagaactgctaactcatgccccca

SEQ ID NO: 3623 - DNA, 36 bp, Homo sapiens
  source 1..36: mol_type = genomic DNA
agaaagctcacaagaactgctaactcatgcccccat

SEQ ID NO: 3624 - DNA, 38 bp, Homo sapiens
  source 1..38: mol_type = genomic DNA
agaaagctcacaagaactgctaactcatgcccccatgt

SEQ ID NO: 3625 - DNA, 39 bp, Homo sapiens
  source 1..39: mol_type = genomic DNA
agaaagctcacaagaactgctaactcatgcccccatgtc

SEQ ID NO: 3626 - DNA, 40 bp, Homo sapiens
  source 1..40: mol_type = genomic DNA
agaaagctcacaagaactgctaactcatgcccccatgtct

SEQ ID NO: 3627 - DNA, 41 bp, Homo sapiens
  source 1..41: mol_type = genomic DNA
agaaagctcacaagaactgctaactcatgcccccatgtcta

SEQ ID NO: 3628 - DNA, 42 bp, Homo sapiens
  source 1..42: mol_type = genomic DNA
agaaagctcacaagaactgctaactcatgcccccatgtctaa

SEQ ID NO: 3629 - DNA, 43 bp, Homo sapiens
  source 1..43: mol_type = genomic DNA
agaaagctcacaagaactgctaactcatgcccccatgtctaac

SEQ ID NO: 3630 - DNA, 44 bp, Homo sapiens
  source 1..44: mol_type = genomic DNA
agaaagctcacaagaactgctaactcatgcccccatgtctaaca

SEQ ID NO: 3631 - DNA, 45 bp, Homo sapiens
  source 1..45: mol_type = genomic DNA
agaaagctcacaagaactgctaactcatgcccccatgtctaacaa

SEQ ID NO: 3632 - DNA, 46 bp, Homo sapiens
  source 1..46: mol_type = genomic DNA
agaaagctcacaagaactgctaactcatgcccccatgtctaacaac

SEQ ID NO: 3633 - DNA, 47 bp, Homo sapiens
  source 1..47: mol_type = genomic DNA
agaaagctcacaagaactgctaactcatgcccccatgtctaacaaca

SEQ ID NO: 3634 - DNA, 48 bp, Homo sapiens
  source 1..48: mol_type = genomic DNA
agaaagctcacaagaactgctaactcatgcccccatgtctaacaacat

SEQ ID NO: 3635 - DNA, 16 bp, Homo sapiens
  source 1..16: mol_type = genomic DNA
agaaatatgtctgata

SEQ ID NO: 3636 - DNA, 17 bp, Homo sapiens
  source 1..17: mol_type = genomic DNA
agaaatatgtctgataa

SEQ ID NO: 3637 - DNA, 18 bp, Homo sapiens
  source 1..18: mol_type = genomic DNA
agaaatatgtctgataaa

SEQ ID NO: 3638 - DNA, 19 bp, Homo sapiens
  source 1..19: mol_type = genomic DNA
agaaatatgtctgataaaa

SEQ ID NO: 3639 - DNA, 20 bp, Homo sapiens
  source 1..20: mol_type = genomic DNA
agaaatatgtctgataaaag

SEQ ID NO: 3640 - DNA, 21 bp, Homo sapiens
  source 1..21: mol_type = genomic DNA
agaaatatgtctgataaaaga

SEQ ID NO: 3641 - DNA, 22 bp, Homo sapiens
  source 1..22: mol_type = genomic DNA
agaaatatgtctgataaaagag

SEQ ID NO: 3642 - DNA, 23 bp, Homo sapiens
  source 1..23: mol_type = genomic DNA
agaaatatgtctgataaaagagt

SEQ ID NO: 3643 - DNA, 24 bp, Homo sapiens
  source 1..24: mol_type = genomic DNA
agaaatatgtctgataaaagagtt

SEQ ID NO: 3644 - DNA, 25 bp, Homo sapiens
  source 1..25: mol_type = genomic DNA
agaaatatgtctgataaaagagtta

SEQ ID NO: 3645 - DNA, 26 bp, Homo sapiens
  source 1..26: mol_type = genomic DNA
agaaatatgtctgataaaagagttac

SEQ ID NO: 3646 - DNA, 27 bp, Homo sapiens
  source 1..27: mol_type = genomic DNA
agaaatatgtctgataaaagagttact

SEQ ID NO: 3647 - DNA, 28 bp, Homo sapiens
  source 1..28: mol_type = genomic DNA
agaaatatgtctgataaaagagttactt

SEQ ID NO: 3648 - DNA, 29 bp, Homo sapiens
  source 1..29: mol_type = genomic DNA
agaaatatgtctgataaaagagttacttt

SEQ ID NO: 3649 - DNA, 30 bp, Homo sapiens
  source 1..30: mol_type = genomic DNA
agaaatatgtctgataaaagagttactttg

SEQ ID NO: 3650 - DNA, 31 bp, Homo sapiens
  source 1..31: mol_type = genomic DNA
agaaatatgtctgataaaagagttactttga

SEQ ID NO: 3651 - DNA, 32 bp, Homo sapiens
  source 1..32: mol_type = genomic DNA
agaaatatgtctgataaaagagttactttgat

SEQ ID NO: 3652 - DNA, 33 bp, Homo sapiens
  source 1..33: mol_type = genomic DNA
agaaatatgtctgataaaagagttactttgata

SEQ ID NO: 3653 - DNA, 34 bp, Homo sapiens
  source 1..34: mol_type = genomic DNA
agaaatatgtctgataaaagagttactttgatag

SEQ ID NO: 3654 - DNA, 35 bp, Homo sapiens
  source 1..35: mol_type = genomic DNA
agaaatatgtctgataaaagagttactttgataga

SEQ ID NO: 3655 - DNA, 36 bp, Homo sapiens
  source 1..36: mol_type = genomic DNA
agaaatatgtctgataaaagagttactttgatagag

SEQ ID NO: 3656 - DNA, 37 bp, Homo sapiens
  source 1..37: mol_type = genomic DNA
agaaatatgtctgataaaagagttactttgatagagt

SEQ ID NO: 3657 - DNA, 38 bp, Homo sapiens
  source 1..38: mol_type = genomic DNA
agaaatatgtctgataaaagagttactttgatagagta

SEQ ID NO: 3658 - DNA, 39 bp, Homo sapiens
  source 1..39: mol_type = genomic DNA
agaaatatgtctgataaaagagttactttgatagagtaa

SEQ ID NO: 3659 - DNA, 40 bp, Homo sapiens
  source 1..40: mol_type = genomic DNA
agaaatatgtctgataaaagagttactttgatagagtaaa

SEQ ID NO: 3660 - DNA, 41 bp, Homo sapiens
  source 1..41: mol_type = genomic DNA
agaaatatgtctgataaaagagttactttgatagagtaaat

SEQ ID NO: 3661 - DNA, 47 bp, Homo sapiens
  source 1..47: mol_type = genomic DNA
agaaatatgtctgataaaagagttactttgatagagtaaataatagg

SEQ ID NO: 3662 - DNA, 48 bp, Homo sapiens
  source 1..48: mol_type = genomic DNA
agaaatatgtctgataaaagagttactttgatagagtaaataatagga

SEQ ID NO: 3663 - DNA, 17 bp, Homo sapiens
  source 1..17: mol_type = genomic DNA
agaaatttaggttaaat

SEQ ID NO: 3664 - DNA, 19 bp, Homo sapiens
  source 1..19: mol_type = genomic DNA
agaaatttaggttaaatac

SEQ ID NO: 3665 - DNA, 20 bp, Homo sapiens
  source 1..20: mol_type = genomic DNA
agaaatttaggttaaataca

SEQ ID NO: 3666 - DNA, 21 bp, Homo sapiens
  source 1..21: mol_type = genomic DNA
agaaatttaggttaaatacag

SEQ ID NO: 3667 - DNA, 23 bp, Homo sapiens
  source 1..23: mol_type = genomic DNA
agaaatttaggttaaatacagac

SEQ ID NO: 3668 - DNA, 24 bp, Homo sapiens
  source 1..24: mol_type = genomic DNA
agaaatttaggttaaatacagacc

SEQ ID NO: 3669 - DNA, 25 bp, Homo sapiens
  source 1..25: mol_type = genomic DNA
agaaatttaggttaaatacagacca

SEQ ID NO: 3670 - DNA, 27 bp, Homo sapiens
  source 1..27: mol_type = genomic DNA
agaaatttaggttaaatacagaccaag

SEQ ID NO: 3671 - DNA, 28 bp, Homo sapiens
  source 1..28: mol_type = genomic DNA
agaaatttaggttaaatacagaccaaga

SEQ ID NO: 3672 - DNA, 31 bp, Homo sapiens
  source 1..31: mol_type = genomic DNA
agaaatttaggttaaatacagaccaagagcc

SEQ ID NO: 3673 - DNA, 34 bp, Homo sapiens
  source 1..34: mol_type = genomic DNA
agaaatttaggttaaatacagaccaagagccttc

SEQ ID NO: 3674 - DNA, 35 bp, Homo sapiens
  source 1..35: mol_type = genomic DNA
agaaatttaggttaaatacagaccaagagccttca

SEQ ID NO: 3675 - DNA, 40 bp, Homo sapiens
  source 1..40: mol_type = genomic DNA
agaaatttaggttaaatacagaccaagagccttcaaagcc

SEQ ID NO: 3676 - DNA, 16 bp, Homo sapiens
  source 1..16: mol_type = genomic DNA
agaaccaacacctctt

SEQ ID NO: 3677 - DNA, 17 bp, Homo sapiens
  source 1..17: mol_type = genomic DNA
agaaccaacacctcttt

SEQ ID NO: 3678 - DNA, 18 bp, Homo sapiens
  source 1..18: mol_type = genomic DNA
agaaccaacacctcttta

SEQ ID NO: 3679 - DNA, 19 bp, Homo sapiens
  source 1..19: mol_type = genomic DNA
agaaccaacacctctttac

SEQ ID NO: 3680 - DNA, 20 bp, Homo sapiens
  source 1..20: mol_type = genomic DNA
agaaccaacacctctttaca

SEQ ID NO: 3681 - DNA, 21 bp, Homo sapiens
  source 1..21: mol_type = genomic DNA
agaaccaacacctctttacag

SEQ ID NO: 3682 - DNA, 22 bp, Homo sapiens
  source 1..22: mol_type = genomic DNA
agaaccaacacctctttacagt

SEQ ID NO: 3683 - DNA, 23 bp, Homo sapiens
  source 1..23: mol_type = genomic DNA
agaaccaacacctctttacagtg

SEQ ID NO: 3684 - DNA, 24 bp, Homo sapiens
  source 1..24: mol_type = genomic DNA
agaaccaacacctctttacagtga

SEQ ID NO: 3685 - DNA, 25 bp, Homo sapiens
  source 1..25: mol_type = genomic DNA
agaaccaacacctctttacagtgac

SEQ ID NO: 3686 - DNA, 26 bp, Homo sapiens
  source 1..26: mol_type = genomic DNA
agaaccaacacctctttacagtgacc

SEQ ID NO: 3687 - DNA, 27 bp, Homo sapiens
  source 1..27: mol_type = genomic DNA
agaaccaacacctctttacagtgacca

SEQ ID NO: 3688 - DNA, 16 bp, Homo sapiens
  source 1..16: mol_type = genomic DNA
agaactgctaactcat

SEQ ID NO: 3689 - DNA, 17 bp, Homo sapiens
  source 1..17: mol_type = genomic DNA
agaactgctaactcatg

SEQ ID NO: 3690 - DNA, 18 bp, Homo sapiens
  source 1..18: mol_type = genomic DNA
agaactgctaactcatgc

SEQ ID NO: 3691 - DNA, 19 bp, Homo sapiens
  source 1..19: mol_type = genomic DNA
agaactgctaactcatgcc

SEQ ID NO: 3692 - DNA, 20 bp, Homo sapiens
  source 1..20: mol_type = genomic DNA
agaactgctaactcatgccc

SEQ ID NO: 3693 - DNA, 21 bp, Homo sapiens
  source 1..21: mol_type = genomic DNA
agaactgctaactcatgcccc

SEQ ID NO: 3694 - DNA, 22 bp, Homo sapiens
  source 1..22: mol_type = genomic DNA
agaactgctaactcatgccccc

SEQ ID NO: 3695 - DNA, 23 bp, Homo sapiens
  source 1..23: mol_type = genomic DNA
agaactgctaactcatgccccca

SEQ ID NO: 3696 - DNA, 24 bp, Homo sapiens
  source 1..24: mol_type = genomic DNA
agaactgctaactcatgcccccat

SEQ ID NO: 3697 - DNA, 25 bp, Homo sapiens
  source 1..25: mol_type = genomic DNA
agaactgctaactcatgcccccatg

SEQ ID NO: 3698 - DNA, 26 bp, Homo sapiens
  source 1..26: mol_type = genomic DNA
agaactgctaactcatgcccccatgt

SEQ ID NO: 3699 - DNA, 27 bp, Homo sapiens
  source 1..27: mol_type = genomic DNA
agaactgctaactcatgcccccatgtc

SEQ ID NO: 3700 - DNA, 28 bp, Homo sapiens
  source 1..28: mol_type = genomic DNA
agaactgctaactcatgcccccatgtct

SEQ ID NO: 3701 - DNA, 29 bp, Homo sapiens
  source 1..29: mol_type = genomic DNA
agaactgctaactcatgcccccatgtcta

SEQ ID NO: 3702 - DNA, 30 bp, Homo sapiens
  source 1..30: mol_type = genomic DNA
agaactgctaactcatgcccccatgtctaa

SEQ ID NO: 3703 - DNA, 31 bp, Homo sapiens
  source 1..31: mol_type = genomic DNA
agaactgctaactcatgcccccatgtctaac

SEQ ID NO: 3704 - DNA, 32 bp, Homo sapiens
  source 1..32: mol_type = genomic DNA
agaactgctaactcatgcccccatgtctaaca

SEQ ID NO: 3705 - DNA, 33 bp, Homo sapiens
  source 1..33: mol_type = genomic DNA
agaactgctaactcatgcccccatgtctaacaa

SEQ ID NO: 3706 - DNA, 34 bp, Homo sapiens
  source 1..34: mol_type = genomic DNA
agaactgctaactcatgcccccatgtctaacaac

SEQ ID NO: 3707 - DNA, 35 bp, Homo sapiens
  source 1..35: mol_type = genomic DNA
agaactgctaactcatgcccccatgtctaacaaca

SEQ ID NO: 3708 - DNA, 36 bp, Homo sapiens
  source 1..36: mol_type = genomic DNA
agaactgctaactcatgcccccatgtctaacaacat

SEQ ID NO: 3709 - DNA, 37 bp, Homo sapiens
  source 1..37: mol_type = genomic DNA
agaactgctaactcatgcccccatgtctaacaacatg

SEQ ID NO: 3710 - DNA, 38 bp, Homo sapiens
  source 1..38: mol_type = genomic DNA
agaactgctaactcatgcccccatgtctaacaacatgg

SEQ ID NO: 3711 - DNA, 39 bp, Homo sapiens
  source 1..39: mol_type = genomic DNA
agaactgctaactcatgcccccatgtctaacaacatggc

SEQ ID NO: 3712 - DNA, 40 bp, Homo sapiens
  source 1..40: mol_type = genomic DNA
agaactgctaactcatgcccccatgtctaacaacatggct

SEQ ID NO: 3713 - DNA, 41 bp, Homo sapiens
  source 1..41: mol_type = genomic DNA
agaactgctaactcatgcccccatgtctaacaacatggctt

SEQ ID NO: 3714 - DNA, 42 bp, Homo sapiens
  source 1..42: mol_type = genomic DNA
agaactgctaactcatgcccccatgtctaacaacatggcttt

SEQ ID NO: 3715 - DNA, 43 bp, Homo sapiens
  source 1..43: mol_type = genomic DNA
agaactgctaactcatgcccccatgtctaacaacatggctttc

SEQ ID NO: 3716 - DNA, 44 bp, Homo sapiens
  source 1..44: mol_type = genomic DNA
agaactgctaactcatgcccccatgtctaacaacatggctttct

SEQ ID NO: 3717 - DNA, 45 bp, Homo sapiens
  source 1..45: mol_type = genomic DNA
agaactgctaactcatgcccccatgtctaacaacatggctttctc

SEQ ID NO: 3718 - DNA, 46 bp, Homo sapiens
  source 1..46: mol_type = genomic DNA
agaactgctaactcatgcccccatgtctaacaacatggctttctca

SEQ ID NO: 3719 - DNA, 47 bp, Homo sapiens
  source 1..47: mol_type = genomic DNA
agaactgctaactcatgcccccatgtctaacaacatggctttctcac

SEQ ID NO: 3720 - DNA, 48 bp, Homo sapiens
  source 1..48: mol_type = genomic DNA
agaactgctaactcatgcccccatgtctaacaacatggctttctcacc

SEQ ID NO: 3721 - DNA, 16 bp, Homo sapiens
  source 1..16: mol_type = genomic DNA
agaagattccaggttc

SEQ ID NO: 3722 - DNA, 17 bp, Homo sapiens
  source 1..17: mol_type = genomic DNA
agaagattccaggttcg

SEQ ID NO: 3723 - DNA, 21 bp, Homo sapiens
  source 1..21: mol_type = genomic DNA
agaagattccaggttcgactc

SEQ ID NO: 3724 - DNA, 24 bp, Homo sapiens
  source 1..24: mol_type = genomic DNA
agaagattccaggttcgactcctg

SEQ ID NO: 3725 - DNA, 28 bp, Homo sapiens
  source 1..28: mol_type = genomic DNA
agaagattccaggttcgactcctggctg

SEQ ID NO: 3726 - DNA, 30 bp, Homo sapiens
  source 1..30: mol_type = genomic DNA
agaagattccaggttcgactcctggctggc

SEQ ID NO: 3727 - DNA, 31 bp, Homo sapiens
  source 1..31: mol_type = genomic DNA
agaagattccaggttcgactcctggctggct

SEQ ID NO: 3728 - DNA, 32 bp, Homo sapiens
  source 1..32: mol_type = genomic DNA
agaagattccaggttcgactcctggctggctc

SEQ ID NO: 3729 - DNA, 33 bp, Homo sapiens
  source 1..33: mol_type = genomic DNA
agaagattccaggttcgactcctggctggctcg

SEQ ID NO: 3730 - DNA, 34 bp, Homo sapiens
  source 1..34: mol_type = genomic DNA
agaagattccaggttcgactcctggctggctcgc

SEQ ID NO: 3731 - DNA, 35 bp, Homo sapiens
  source 1..35: mol_type = genomic DNA
agaagattccaggttcgactcctggctggctcgcc

SEQ ID NO: 3732 - DNA, 36 bp, Homo sapiens
  source 1..36: mol_type = genomic DNA
agaagattccaggttcgactcctggctggctcgcca

SEQ ID NO: 3733 - DNA, 16 bp, Homo sapiens
  source 1..16: mol_type = genomic DNA
agaagattctaggttc

SEQ ID NO: 3734 - DNA, 17 bp, Homo sapiens
  source 1..17: mol_type = genomic DNA
agaagattctaggttcg

SEQ ID NO: 3735 - DNA, 26 bp, Homo sapiens
  source 1..26: mol_type = genomic DNA
agaagattctaggttcgactcctggc

SEQ ID NO: 3736 - DNA, 30 bp, Homo sapiens
  source 1..30: mol_type = genomic DNA
agaagattctaggttcgactcctggctggc

SEQ ID NO: 3737 - DNA, 31 bp, Homo sapiens
  source 1..31: mol_type = genomic DNA
agaagattctaggttcgactcctggctggct

SEQ ID NO: 3738 - DNA, 32 bp, Homo sapiens
  source 1..32: mol_type = genomic DNA
agaagattctaggttcgactcctggctggctc

SEQ ID NO: 3739 - DNA, 33 bp, Homo sapiens
  source 1..33: mol_type = genomic DNA
agaagattctaggttcgactcctggctggctcg

SEQ ID NO: 3740 - DNA, 34 bp, Homo sapiens
  source 1..34: mol_type = genomic DNA
agaagattctaggttcgactcctggctggctcgc

SEQ ID NO: 3741 - DNA, 35 bp, Homo sapiens
  source 1..35: mol_type = genomic DNA
agaagattctaggttcgactcctggctggctcgcc

SEQ ID NO: 3742 - DNA, 36 bp, Homo sapiens
  source 1..36: mol_type = genomic DNA
agaagattctaggttcgactcctggctggctcgcca

SEQ ID NO: 3743 - DNA, 16 bp, Homo sapiens
  source 1..16: mol_type = genomic DNA
agaagattgagggttc

SEQ ID NO: 3744 - DNA, 17 bp, Homo sapiens
  source 1..17: mol_type = genomic DNA
agaagattgagggttcg

SEQ ID NO: 3745 - DNA, 24 bp, Homo sapiens
  source 1..24: mol_type = genomic DNA
agaagattgagggttcgaatccct

SEQ ID NO: 3746 - DNA, 33 bp, Homo sapiens
  source 1..33: mol_type = genomic DNA
agaagattgagggttcgaatcccttcgtggttg

SEQ ID NO: 3747 - DNA, 34 bp, Homo sapiens
  source 1..34: mol_type = genomic DNA
agaagattgagggttcgaatcccttcgtggttgc

SEQ ID NO: 3748 - DNA, 35 bp, Homo sapiens
  source 1..35: mol_type = genomic DNA
agaagattgagggttcgaatcccttcgtggttgcc

SEQ ID NO: 3749 - DNA, 36 bp, Homo sapiens
  source 1..36: mol_type = genomic DNA
agaagattgagggttcgaatcccttcgtggttgcca

SEQ ID NO: 3750 - DNA, 24 bp, Homo sapiens
  source 1..24: mol_type = genomic DNA
agaagattgagggttcgagtccct

SEQ ID NO: 3751 - DNA, 33 bp, Homo sapiens
  source 1..33: mol_type = genomic DNA
agaagattgagggttcgagtcccttcgtggtcg

SEQ ID NO: 3752 - DNA, 34 bp, Homo sapiens
  source 1..34: mol_type = genomic DNA
agaagattgagggttcgagtcccttcgtggtcgc

SEQ ID NO: 3753 - DNA, 35 bp, Homo sapiens
  source 1..35: mol_type = genomic DNA
agaagattgagggttcgagtcccttcgtggtcgcc

SEQ ID NO: 3754 - DNA, 36 bp, Homo sapiens
  source 1..36: mol_type = genomic DNA
agaagattgagggttcgagtcccttcgtggtcgcca

SEQ ID NO: 3755 - DNA, 16 bp, Homo sapiens
  source 1..16: mol_type = genomic DNA
agaagattgcaggttc

SEQ ID NO: 3756 - DNA, 17 bp, Homo sapiens
  source 1..17: mol_type = genomic DNA
agaagattgcaggttcg

SEQ ID NO: 3757 - DNA, 24 bp, Homo sapiens
  source 1..24: mol_type = genomic DNA
agaagattgcaggttcgagtcctg

SEQ ID NO: 3758 - DNA, 32 bp, Homo sapiens
  source 1..32: mol_type = genomic DNA
agaagattgcaggttcgagtcctgccgcggtc

SEQ ID NO: 3759 - DNA, 33 bp, Homo sapiens
  source 1..33: mol_type = genomic DNA
agaagattgcaggttcgagtcctgccgcggtcg

SEQ ID NO: 3760 - DNA, 34 bp, Homo sapiens
  source 1..34: mol_type = genomic DNA
agaagattgcaggttcgagtcctgccgcggtcgc

SEQ ID NO: 3761 - DNA, 35 bp, Homo sapiens
  source 1..35: mol_type = genomic DNA
agaagattgcaggttcgagtcctgccgcggtcgcc

SEQ ID NO: 3762 - DNA, 36 bp, Homo sapiens
  source 1..36: mol_type = genomic DNA
agaagattgcaggttcgagtcctgccgcggtcgcca

SEQ ID NO: 3763 - DNA, 17 bp, Homo sapiens
  source 1..17: mol_type = genomic DNA
agaagcagcttcaaacc

SEQ ID NO: 3764 - DNA, 19 bp, Homo sapiens
  source 1..19: mol_type = genomic DNA
agaagcagcttcaaacctg

SEQ ID NO: 3765 - DNA, 25 bp, Homo sapiens
  source 1..25: mol_type = genomic DNA
agaagcagcttcaaacctgccgggg

SEQ ID NO: 3766 - DNA, 26 bp, Homo sapiens
  source 1..26: mol_type = genomic DNA
agaagcagcttcaaacctgccggggc

SEQ ID NO: 3767 - DNA, 27 bp, Homo sapiens
  source 1..27: mol_type = genomic DNA
agaagcagcttcaaacctgccggggct

SEQ ID NO: 3768 - DNA, 28 bp, Homo sapiens
  source 1..28: mol_type = genomic DNA
agaagcagcttcaaacctgccggggctt

SEQ ID NO: 3769 - DNA, 29 bp, Homo sapiens
  source 1..29: mol_type = genomic DNA
agaagcagcttcaaacctgccggggcttc

SEQ ID NO: 3770 - DNA, 30 bp, Homo sapiens
  source 1..30: mol_type = genomic DNA
agaagcagcttcaaacctgccggggcttcc

SEQ ID NO: 3771 - DNA, 31 bp, Homo sapiens
  source 1..31: mol_type = genomic DNA
agaagcagcttcaaacctgccggggcttcca

SEQ ID NO: 3772 - DNA, 16 bp, Homo sapiens
  source 1..16: mol_type = genomic DNA
agaaggctgcgtgttc

SEQ ID NO: 3773 - DNA, 21 bp, Homo sapiens
  source 1..21: mol_type = genomic DNA
agaaggctgcgtgttcgaatc

SEQ ID NO: 3774 - DNA, 28 bp, Homo sapiens
  source 1..28: mol_type = genomic DNA
agaaggctgcgtgttcgaatcacgtcgg

SEQ ID NO: 3775 - DNA, 29 bp, Homo sapiens
  source 1..29: mol_type = genomic DNA
agaaggctgcgtgttcgaatcacgtcggg

SEQ ID NO: 3776 - DNA, 30 bp, Homo sapiens
  source 1..30: mol_type = genomic DNA
agaaggctgcgtgttcgaatcacgtcgggg

SEQ ID NO: 3777 - DNA, 32 bp, Homo sapiens
  source 1..32: mol_type = genomic DNA
agaaggctgcgtgttcgaatcacgtcggggtc

SEQ ID NO: 3778 - DNA, 34 bp, Homo sapiens
  source 1..34: mol_type = genomic DNA
agaaggctgcgtgttcgaatcacgtcggggtcac

SEQ ID NO: 3779 - DNA, 35 bp, Homo sapiens
  source 1..35: mol_type = genomic DNA
agaaggctgcgtgttcgaatcacgtcggggtcacc

SEQ ID NO: 3780 - DNA, 36 bp, Homo sapiens
  source 1..36: mol_type = genomic DNA
agaaggctgcgtgttcgaatcacgtcggggtcacca

SEQ ID NO: 3781 - DNA, 16 bp, Homo sapiens
  source 1..16: mol_type = genomic DNA
agaaggtcctgggttc

SEQ ID NO: 3782 - DNA, 24 bp, Homo sapiens
  source 1..24: mol_type = genomic DNA
agaaggtcctgggttcgagcccca

SEQ ID NO: 3783 - DNA, 31 bp, Homo sapiens
  source 1..31: mol_type = genomic DNA
agaaggtcctgggttcgagccccagtggaac

SEQ ID NO: 3784 - DNA, 32 bp, Homo sapiens
  source 1..32: mol_type = genomic DNA
agaaggtcctgggttcgagccccagtggaacc

SEQ ID NO: 3785 - DNA, 33 bp, Homo sapiens
  source 1..33: mol_type = genomic DNA
agaaggtcctgggttcgagccccagtggaacca

SEQ ID NO: 3786 - DNA, 34 bp, Homo sapiens
  source 1..34: mol_type = genomic DNA
agaaggtcctgggttcgagccccagtggaaccac

SEQ ID NO: 3787 - DNA, 35 bp, Homo sapiens
  source 1..35: mol_type = genomic DNA
agaaggtcctgggttcgagccccagtggaaccacc

SEQ ID NO: 3788 - DNA, 36 bp, Homo sapiens
  source 1..36: mol_type = genomic DNA
agaaggtcctgggttcgagccccagtggaaccacca

SEQ ID NO: 3789 - DNA, 16 bp, Homo sapiens
  source 1..16: mol_type = genomic DNA
agaaggttgcgtgttc

SEQ ID NO: 3790 - DNA, 33 bp, Homo sapiens
  source 1..33: mol_type = genomic DNA
agaaggttgcgtgttcaaatcacgtcggggtca

SEQ ID NO: 3791 - DNA, 35 bp, Homo sapiens
  source 1..35: mol_type = genomic DNA
agaaggttgcgtgttcaaatcacgtcggggtcacc

SEQ ID NO: 3792 - DNA, 36 bp, Homo sapiens
  source 1..36: mol_type = genomic DNA
agaaggttgcgtgttcaaatcacgtcggggtcacca

SEQ ID NO: 3793 - DNA, 32 bp, Homo sapiens
  source 1..32: mol_type = genomic DNA
agaaggttgcgtgttcaagtcacgtcggggtc

SEQ ID NO: 3794 - DNA, 33 bp, Homo sapiens
  source 1..33: mol_type = genomic DNA
agaaggttgcgtgttcaagtcacgtcggggtca

SEQ ID NO: 3795 - DNA, 34 bp, Homo sapiens
  source 1..34: mol_type = genomic DNA
agaaggttgcgtgttcaagtcacgtcggggtcac

SEQ ID NO: 3796 - DNA, 35 bp, Homo sapiens
  source 1..35: mol_type = genomic DNA
agaaggttgcgtgttcaagtcacgtcggggtcacc

SEQ ID NO: 3797 - DNA, 36 bp, Homo sapiens
  source 1..36: mol_type = genomic DNA
agaaggttgcgtgttcaagtcacgtcggggtcacca

SEQ ID NO: 3798 - DNA, 26 bp, Homo sapiens
  source 1..26: mol_type = genomic DNA
agaatagtttaaattagaatcttagc

SEQ ID NO: 3799 - DNA, 27 bp, Homo sapiens
  source 1..27: mol_type = genomic DNA
agaatagtttaaattagaatcttagct

SEQ ID NO: 3800 - DNA, 28 bp, Homo sapiens
  source 1..28: mol_type = genomic DNA
agaatagtttaaattagaatcttagctt

SEQ ID NO: 3801 - DNA, 30 bp, Homo sapiens
  source 1..30: mol_type = genomic DNA
agaatagtttaaattagaatcttagctttg

SEQ ID NO: 3802 - DNA, 31 bp, Homo sapiens
  source 1..31: mol_type = genomic DNA
agaatagtttaaattagaatcttagctttgg

SEQ ID NO: 3803 - DNA, 16 bp, Homo sapiens
  source 1..16: mol_type = genomic DNA
agaatcttagctttgg

SEQ ID NO: 3804 - DNA, 19 bp, Homo sapiens
  source 1..19: mol_type = genomic DNA
agaatcttagctttgggtg

SEQ ID NO: 3805 - DNA, 21 bp, Homo sapiens
  source 1..21: mol_type = genomic DNA
agaatcttagctttgggtgct

SEQ ID NO: 3806 - DNA, 23 bp, Homo sapiens
  source 1..23: mol_type = genomic DNA
agaatcttagctttgggtgctaa

SEQ ID NO: 3807 - DNA, 31 bp, Homo sapiens
  source 1..31: mol_type = genomic DNA
agaatcttagctttgggtgctaatggtggag

SEQ ID NO: 3808 - DNA, 32 bp, Homo sapiens
  source 1..32: mol_type = genomic DNA
agaatcttagctttgggtgctaatggtggagt

SEQ ID NO: 3809 - DNA, 33 bp, Homo sapiens
  source 1..33: mol_type = genomic DNA
agaatcttagctttgggtgctaatggtggagtt

SEQ ID NO: 3810 - DNA, 34 bp, Homo sapiens
  source 1..34: mol_type = genomic DNA
agaatcttagctttgggtgctaatggtggagtta

SEQ ID NO: 3811 - DNA, 37 bp, Homo sapiens
  source 1..37: mol_type = genomic DNA
agaatcttagctttgggtgctaatggtggagttaaag

SEQ ID NO: 3812 - DNA, 38 bp, Homo sapiens
  source 1..38: mol_type = genomic DNA
agaatcttagctttgggtgctaatggtggagttaaaga

SEQ ID NO: 3813 - DNA, 39 bp, Homo sapiens
  source 1..39: mol_type = genomic DNA
agaatcttagctttgggtgctaatggtggagttaaagac

SEQ ID NO: 3814 - DNA, 40 bp, Homo sapiens
  source 1..40: mol_type = genomic DNA
agaatcttagctttgggtgctaatggtggagttaaagact

SEQ ID NO: 3815 - DNA, 41 bp, Homo sapiens
  source 1..41: mol_type = genomic DNA
agaatcttagctttgggtgctaatggtggagttaaagactt

SEQ ID NO: 3816 - DNA, 42 bp, Homo sapiens
  source 1..42: mol_type = genomic DNA
agaatcttagctttgggtgctaatggtggagttaaagacttt

SEQ ID NO: 3817 - DNA, 43 bp, Homo sapiens
  source 1..43: mol_type = genomic DNA
agaatcttagctttgggtgctaatggtggagttaaagactttt

SEQ ID NO: 3818 - DNA, 45 bp, Homo sapiens
  source 1..45: mol_type = genomic DNA
agaatcttagctttgggtgctaatggtggagttaaagactttttc

SEQ ID NO: 3819 - DNA, 47 bp, Homo sapiens
  source 1..47: mol_type = genomic DNA
agaatcttagctttgggtgctaatggtggagttaaagactttttctc

SEQ ID NO: 3820 - DNA, 20 bp, Homo sapiens
  source 1..20: mol_type = genomic DNA
agaatggccgagtggttaag

SEQ ID NO: 3821 - DNA, 16 bp, Homo sapiens
  source 1..16: mol_type = genomic DNA
agaattctcgcctgcc

SEQ ID NO: 3822 - DNA, 17 bp, Homo sapiens
  source 1..17: mol_type = genomic DNA
agaattctcgcctgcca

SEQ ID NO: 3823 - DNA, 18 bp, Homo sapiens
  source 1..18: mol_type = genomic DNA
agaattctcgcctgccac

SEQ ID NO: 3824 - DNA, 19 bp, Homo sapiens
  source 1..19: mol_type = genomic DNA
agaattctcgcctgccacg

SEQ ID NO: 3825 - DNA, 24 bp, Homo sapiens
  source 1..24: mol_type = genomic DNA
agaattctcgcctgccacgcggga

SEQ ID NO: 3826 - DNA, 25 bp, Homo sapiens
  source 1..25: mol_type = genomic DNA
agaattctcgcctgccacgcgggag

SEQ ID NO: 3827 - DNA, 31 bp, Homo sapiens
  source 1..31: mol_type = genomic DNA
agaattctcgcctgccacgcgggaggcccgg

SEQ ID NO: 3828 - DNA, 35 bp, Homo sapiens
  source 1..35: mol_type = genomic DNA
agaattctcgcctgccacgcgggaggcccgggttc

SEQ ID NO: 3829 - DNA, 19 bp, Homo sapiens
  source 1..19: mol_type = genomic DNA
agaattctcgcctgccatg

SEQ ID NO: 3830 - DNA, 22 bp, Homo sapiens
  source 1..22: mol_type = genomic DNA
agaattttggattctcagggat

SEQ ID NO: 3831 - DNA, 16 bp, Homo sapiens
  source 1..16: mol_type = genomic DNA
agacaggggttaggcc

SEQ ID NO: 3832 - DNA, 17 bp, Homo sapiens
  source 1..17: mol_type = genomic DNA
agacaggggttaggcct

SEQ ID NO: 3833 - DNA, 18 bp, Homo sapiens
  source 1..18: mol_type = genomic DNA
agacaggggttaggcctc

SEQ ID NO: 3834 - DNA, 19 bp, Homo sapiens
  source 1..19: mol_type = genomic DNA
agacaggggttaggcctct

SEQ ID NO: 3835 - DNA, 21 bp, Homo sapiens
  source 1..21: mol_type = genomic DNA
agacaggggttaggcctcttt

SEQ ID NO: 3836 - DNA, 22 bp, Homo sapiens
  source 1..22: mol_type = genomic DNA
agacaggggttaggcctctttt

SEQ ID NO: 3837 - DNA, 26 bp, Homo sapiens
  source 1..26: mol_type = genomic DNA
agacaggggttaggcctctttttacc

SEQ ID NO: 3838 - DNA, 29 bp, Homo sapiens
  source 1..29: mol_type = genomic DNA
agacaggggttaggcctctttttaccacc

SEQ ID NO: 3839 - DNA, 30 bp, Homo sapiens
  source 1..30: mol_type = genomic DNA
agacaggggttaggcctctttttaccacca

SEQ ID NO: 3840 - DNA, 16 bp, Homo sapiens
  source 1..16: mol_type = genomic DNA
agaccaagagccttca

SEQ ID NO: 3841 - DNA, 17 bp, Homo sapiens
  source 1..17: mol_type = genomic DNA
agaccaagagccttcaa

SEQ ID NO: 3842 - DNA, 18 bp, Homo sapiens
  source 1..18: mol_type = genomic DNA
agaccaagagccttcaaa

SEQ ID NO: 3843 - DNA, 19 bp, Homo sapiens
  source 1..19: mol_type = genomic DNA
agaccaagagccttcaaag

SEQ ID NO: 3844 - DNA, 21 bp, Homo sapiens
  source 1..21: mol_type = genomic DNA
agaccaagagccttcaaagcc

SEQ ID NO: 3845 - DNA, 22 bp, Homo sapiens
  source 1..22: mol_type = genomic DNA
agaccaagagccttcaaagccc

SEQ ID NO: 3846 - DNA, 24 bp, Homo sapiens
  source 1..24: mol_type = genomic DNA
agaccaagagccttcaaagccctc

SEQ ID NO: 3847 - DNA, 31 bp, Homo sapiens
  source 1..31: mol_type = genomic DNA
agaccaagagccttcaaagccctcagtaagt

SEQ ID NO: 3848 - DNA, 34 bp, Homo sapiens
  source 1..34: mol_type = genomic DNA
agaccaagagccttcaaagccctcagtaagttgc

SEQ ID NO: 3849 - DNA, 23 bp, Homo sapiens
  source 1..23: mol_type = genomic DNA
agaccggggttcaattccccgac

SEQ ID NO: 3850 - DNA, 25 bp, Homo sapiens
  source 1..25: mol_type = genomic DNA
agaccggggttcaattccccgacgg

SEQ ID NO: 3851 - DNA, 30 bp, Homo sapiens
  source 1..30: mol_type = genomic DNA
agaccggggttcaattccccgacggggagc

SEQ ID NO: 3852 - DNA, 31 bp, Homo sapiens
  source 1..31: mol_type = genomic DNA
agaccggggttcaattccccgacggggagcc

SEQ ID NO: 3853 - DNA, 32 bp, Homo sapiens
  source 1..32: mol_type = genomic DNA
agaccggggttcaattccccgacggggagcca

SEQ ID NO: 3854 - DNA, 19 bp, Homo sapiens
  source 1..19: mol_type = genomic DNA
agaccggggttcgattccc

SEQ ID NO: 3855 - DNA, 23 bp, Homo sapiens
  source 1..23: mol_type = genomic DNA
agaccggggttcgattccccgac

SEQ ID NO: 3856 - DNA, 25 bp, Homo sapiens
  source 1..25: mol_type = genomic DNA
agaccggggttcgattccccgacgg

SEQ ID NO: 3857 - DNA, 26 bp, Homo sapiens
  source 1..26: mol_type = genomic DNA
agaccggggttcgattccccgacggg

SEQ ID NO: 3858 - DNA, 27 bp, Homo sapiens
  source 1..27: mol_type = genomic DNA
agaccggggttcgattccccgacgggg

SEQ ID NO: 3859 - DNA, 28 bp, Homo sapiens
  source 1..28: mol_type = genomic DNA
agaccggggttcgattccccgacgggga

SEQ ID NO: 3860 - DNA, 29 bp, Homo sapiens
  source 1..29: mol_type = genomic DNA
agaccggggttcgattccccgacggggag

SEQ ID NO: 3861 - DNA, 30 bp, Homo sapiens
  source 1..30: mol_type = genomic DNA
agaccggggttcgattccccgacggggagc

SEQ ID NO: 3862 - DNA, 31 bp, Homo sapiens
  source 1..31: mol_type = genomic DNA
agaccggggttcgattccccgacggggagcc

SEQ ID NO: 3863 - DNA, 32 bp, Homo sapiens
  source 1..32: mol_type = genomic DNA
agaccggggttcgattccccgacggggagcca

SEQ ID NO: 3864 - DNA, 16 bp, Homo sapiens
  source 1..16: mol_type = genomic DNA
agacgggctcacatca

SEQ ID NO: 3865 - DNA, 17 bp, Homo sapiens
  source 1..17: mol_type = genomic DNA
agacgggctcacatcac

SEQ ID NO: 3866 - DNA, 18 bp, Homo sapiens
  source 1..18: mol_type = genomic DNA
agacgggctcacatcacc

SEQ ID NO: 3867 - DNA, 19 bp, Homo sapiens
  source 1..19: mol_type = genomic DNA
agacgggctcacatcaccc

SEQ ID NO: 3868 - DNA, 20 bp, Homo sapiens
  source 1..20: mol_type = genomic DNA
agacgggctcacatcacccc

SEQ ID NO: 3869 - DNA, 21 bp, Homo sapiens
  source 1..21: mol_type = genomic DNA
agacgggctcacatcacccca

SEQ ID NO: 3870 - DNA, 23 bp, Homo sapiens
  source 1..23: mol_type = genomic DNA
agacgggctcacatcaccccata

SEQ ID NO: 3871 - DNA, 24 bp, Homo sapiens
  source 1..24: mol_type = genomic DNA
agacgggctcacatcaccccataa

SEQ ID NO: 3872 - DNA, 25 bp, Homo sapiens
  source 1..25: mol_type = genomic DNA
agacgggctcacatcaccccataaa

SEQ ID NO: 3873 - DNA, 26 bp, Homo sapiens
  source 1..26: mol_type = genomic DNA
agacgggctcacatcaccccataaac

SEQ ID NO: 3874 - DNA, 27 bp, Homo sapiens
  source 1..27: mol_type = genomic DNA
agacgggctcacatcaccccataaaca

SEQ ID NO: 3875 - DNA, 28 bp, Homo sapiens
  source 1..28: mol_type = genomic DNA
agacgggctcacatcaccccataaacac

SEQ ID NO: 3876 - DNA, 29 bp, Homo sapiens
  source 1..29: mol_type = genomic DNA
agacgggctcacatcaccccataaacacc

SEQ ID NO: 3877 - DNA, 30 bp, Homo sapiens
  source 1..30: mol_type = genomic DNA
agacgggctcacatcaccccataaacacca

SEQ ID NO: 3878 - DNA, 18 bp, Homo sapiens
  source 1..18: mol_type = genomic DNA
agactcaagttctggtct

SEQ ID NO: 3879 - DNA, 20 bp, Homo sapiens
  source 1..20: mol_type = genomic DNA
agactcaagttctggtctcc

SEQ ID NO: 3880 - DNA, 23 bp, Homo sapiens
  source 1..23: mol_type = genomic DNA
agactcaagttctggtctccaat

SEQ ID NO: 3881 - DNA, 24 bp, Homo sapiens
  source 1..24: mol_type = genomic DNA
agactcaagttctggtctccaatg

SEQ ID NO: 3882 - DNA, 22 bp, Homo sapiens
  source 1..22: mol_type = genomic DNA
agactcaagttctggtctccgg

SEQ ID NO: 3883 - DNA, 23 bp, Homo sapiens
  source 1..23: mol_type = genomic DNA
agactcaagttctggtctccgga

SEQ ID NO: 3884 - DNA, 24 bp, Homo sapiens
  source 1..24: mol_type = genomic DNA
agactcaagttctggtctccggat

SEQ ID NO: 3885 - DNA, 25 bp, Homo sapiens
  source 1..25: mol_type = genomic DNA
agactcaagttctggtctccggatg

SEQ ID NO: 3886 - DNA, 36 bp, Homo sapiens
  source 1..36: mol_type = genomic DNA
agactcaagttctggtctccggatggaggcgtgggt

SEQ ID NO: 3887 - DNA, 37 bp, Homo sapiens
  source 1..37: mol_type = genomic DNA
agactcaagttctggtctccggatggaggcgtgggtt

SEQ ID NO: 3888 - DNA, 47 bp, Homo sapiens
  source 1..47: mol_type = genomic DNA
agactcttaatctcagggtcgtgggttcgagccccacgttgggcgcc

SEQ ID NO: 3889 - DNA, 39 bp, Homo sapiens
  source 1..39: mol_type = genomic DNA
agacttttaatctgagggtccagggttcaagtccctgtt

SEQ ID NO: 3890 - DNA, 16 bp, Homo sapiens
  source 1..16: mol_type = genomic DNA
agactttttctctgac

SEQ ID NO: 3891 - DNA, 17 bp, Homo sapiens
  source 1..17: mol_type = genomic DNA
agactttttctctgacc

SEQ ID NO: 3892 - DNA, 18 bp, Homo sapiens
  source 1..18: mol_type = genomic DNA
agactttttctctgacca

SEQ ID NO: 3893 - DNA, 16 bp, Homo sapiens
  source 1..16: mol_type = genomic DNA
agagaaccaacacctc

SEQ ID NO: 3894 - DNA, 17 bp, Homo sapiens
  source 1..17: mol_type = genomic DNA
agagaaccaacacctct

SEQ ID NO: 3895 - DNA, 19 bp, Homo sapiens
  source 1..19: mol_type = genomic DNA
agagaaccaacacctcttt

SEQ ID NO: 3896 - DNA, 23 bp, Homo sapiens
  source 1..23: mol_type = genomic DNA
agagaaccaacacctctttacag

SEQ ID NO: 3897 - DNA, 25 bp, Homo sapiens
  source 1..25: mol_type = genomic DNA
agagaaccaacacctctttacagtg

SEQ ID NO: 3898 - DNA, 26 bp, Homo sapiens
  source 1..26: mol_type = genomic DNA
agagaaccaacacctctttacagtga

SEQ ID NO: 3899 - DNA, 27 bp, Homo sapiens
  source 1..27: mol_type = genomic DNA
agagaaccaacacctctttacagtgac

SEQ ID NO: 3900 - DNA, 28 bp, Homo sapiens
  source 1..28: mol_type = genomic DNA
agagaaccaacacctctttacagtgacc

SEQ ID NO: 3901 - DNA, 29 bp, Homo sapiens
  source 1..29: mol_type = genomic DNA
agagaaccaacacctctttacagtgacca

SEQ ID NO: 3902 - DNA, 23 bp, Homo sapiens
  source 1..23: mol_type = genomic DNA
agagaatagtttaaattagaatc

SEQ ID NO: 3903 - DNA, 32 bp, Homo sapiens
  source 1..32: mol_type = genomic DNA
agagaatagtttaaattagaatcttagctttg

SEQ ID NO: 3904 - DNA, 33 bp, Homo sapiens
  source 1..33: mol_type = genomic DNA
agagaatagtttaaattagaatcttagctttgg

SEQ ID NO: 3905 - DNA, 20 bp, Homo sapiens
  source 1..20: mol_type = genomic DNA
agagcactggtcttgtaaac

SEQ ID NO: 3906 - DNA, 21 bp, Homo sapiens
  source 1..21: mol_type = genomic DNA
agagcatgagactcttaatct

SEQ ID NO: 3907 - DNA, 22 bp, Homo sapiens
  source 1..22: mol_type = genomic DNA
agagcatgagactcttaatctc

SEQ ID NO: 3908 - DNA, 29 bp, Homo sapiens
  source 1..29: mol_type = genomic DNA
agagcatgagactcttaatctcagggtcg

SEQ ID NO: 3909 - DNA, 30 bp, Homo sapiens
  source 1..30: mol_type = genomic DNA
agagcatgagactcttaatctcagggtcgt

SEQ ID NO: 3910 - DNA, 31 bp, Homo sapiens
  source 1..31: mol_type = genomic DNA
agagcatgagactcttaatctcagggtcgtg

SEQ ID NO: 3911 - DNA, 32 bp, Homo sapiens
  source 1..32: mol_type = genomic DNA
agagcatgagactcttaatctcagggtcgtgg

SEQ ID NO: 3912 - DNA, 34 bp, Homo sapiens
  source 1..34: mol_type = genomic DNA
agagcatgagactcttaatctcagggtcgtgggt

SEQ ID NO: 3913 - DNA, 35 bp, Homo sapiens
  source 1..35: mol_type = genomic DNA
agagcatgagactcttaatctcagggtcgtgggtt

SEQ ID NO: 3914 - DNA, 37 bp, Homo sapiens
  source 1..37: mol_type = genomic DNA
agagcatgagactcttaatctcagggtcgtgggttcg

SEQ ID NO: 3915 - DNA, 16 bp, Homo sapiens
  source 1..16: mol_type = genomic DNA
agagcatgggactctt

SEQ ID NO: 3916 - DNA, 21 bp, Homo sapiens
  source 1..21: mol_type = genomic DNA
agagcatgggactcttaatcc

SEQ ID NO: 3917 - DNA, 22 bp, Homo sapiens
  source 1..22: mol_type = genomic DNA
agagcatgggactcttaatccc

SEQ ID NO: 3918 - DNA, 29 bp, Homo sapiens
  source 1..29: mol_type = genomic DNA
agagcatgggactcttaatcccagggtcg

SEQ ID NO: 3919 - DNA, 30 bp, Homo sapiens
  source 1..30: mol_type = genomic DNA
agagcatgggactcttaatcccagggtcgt

SEQ ID NO: 3920 - DNA, 31 bp, Homo sapiens
  source 1..31: mol_type = genomic DNA
agagcatgggactcttaatcccagggtcgtg

SEQ ID NO: 3921 - DNA, 32 bp, Homo sapiens
  source 1..32: mol_type = genomic DNA
agagcatgggactcttaatcccagggtcgtgg

SEQ ID NO: 3922 - DNA, 33 bp, Homo sapiens
  source 1..33: mol_type = genomic DNA
agagcatgggactcttaatcccagggtcgtggg

SEQ ID NO: 3923 - DNA, 34 bp, Homo sapiens
  source 1..34: mol_type = genomic DNA
agagcatgggactcttaatcccagggtcgtgggt

SEQ ID NO: 3924 - DNA, 35 bp, Homo sapiens
  source 1..35: mol_type = genomic DNA
agagcatgggactcttaatcccagggtcgtgggtt

SEQ ID NO: 3925 - DNA, 36 bp, Homo sapiens
  source 1..36: mol_type = genomic DNA
agagcatgggactcttaatcccagggtcgtgggttc

SEQ ID NO: 3926 - DNA, 37 bp, Homo sapiens
  source 1..37: mol_type = genomic DNA
agagcatgggactcttaatcccagggtcgtgggttcg

SEQ ID NO: 3927 - DNA, 43 bp, Homo sapiens
  source 1..43: mol_type = genomic DNA
agagcatgggactcttaatcccagggtcgtgggttcgagcccc

SEQ ID NO: 3928 - DNA, 47 bp, Homo sapiens
  source 1..47: mol_type = genomic DNA
agagcatgggactcttaatcccagggtcgtgggttcgagccccacgt

SEQ ID NO: 3929 - DNA, 32 bp, Homo sapiens
  source 1..32: mol_type = genomic DNA
agagcatgggactcttaatctcagggtcgtgg

SEQ ID NO: 3930 - DNA, 35 bp, Homo sapiens
  source 1..35: mol_type = genomic DNA
agagcatgggactcttaatctcagggtcgtgggtt

SEQ ID NO: 3931 - DNA, 16 bp, Homo sapiens
  source 1..16: mol_type = genomic DNA
agagcatttgactgca

SEQ ID NO: 3932 - DNA, 33 bp, Homo sapiens
  source 1..33: mol_type = genomic DNA
agagcatttgactgcagatcaagaggtccccgg

SEQ ID NO: 3933 - DNA, 21 bp, Homo sapiens
  source 1..21: mol_type = genomic DNA
agagccagactgcctgggttt

SEQ ID NO: 3934 - DNA, 19 bp, Homo sapiens
  source 1..19: mol_type = genomic DNA
agagcccggtaatcgcata

SEQ ID NO: 3935 - DNA, 23 bp, Homo sapiens
  source 1..23: mol_type = genomic DNA
agagcccggtaatcgcataaaac

SEQ ID NO: 3936 - DNA, 26 bp, Homo sapiens
  source 1..26: mol_type = genomic DNA
agagcccggtaatcgcataaaactta

SEQ ID NO: 3937 - DNA, 27 bp, Homo sapiens
  source 1..27: mol_type = genomic DNA
agagcccggtaatcgcataaaacttaa

SEQ ID NO: 3938 - DNA, 28 bp, Homo sapiens
  source 1..28: mol_type = genomic DNA
agagcccggtaatcgcataaaacttaaa

SEQ ID NO: 3939 - DNA, 29 bp, Homo sapiens
  source 1..29: mol_type = genomic DNA
agagcccggtaatcgcataaaacttaaaa

SEQ ID NO: 3940 - DNA, 30 bp, Homo sapiens
  source 1..30: mol_type = genomic DNA
agagcccggtaatcgcataaaacttaaaac

SEQ ID NO: 3941 - DNA, 31 bp, Homo sapiens
  source 1..31: mol_type = genomic DNA
agagcccggtaatcgcataaaacttaaaact

SEQ ID NO: 3942 - DNA, 32 bp, Homo sapiens
  source 1..32: mol_type = genomic DNA
agagcccggtaatcgcataaaacttaaaactt

SEQ ID NO: 3943 - DNA, 33 bp, Homo sapiens
  source 1..33: mol_type = genomic DNA
agagcccggtaatcgcataaaacttaaaacttt

SEQ ID NO: 3944 - DNA, 35 bp, Homo sapiens
  source 1..35: mol_type = genomic DNA
agagcccggtaatcgcataaaacttaaaactttac

SEQ ID NO: 3945 - DNA, 36 bp, Homo sapiens
  source 1..36: mol_type = genomic DNA
agagcccggtaatcgcataaaacttaaaactttaca

SEQ ID NO: 3946 - DNA, 28 bp, Homo sapiens
  source 1..28: mol_type = genomic DNA
agagccttcaaagccctcagtaagttgc

SEQ ID NO: 3947 - DNA, 30 bp, Homo sapiens
  source 1..30: mol_type = genomic DNA
agagcgcgtgcttagcatgcacgaggcccc

SEQ ID NO: 3948 - DNA, 35 bp, Homo sapiens
  source 1..35: mol_type = genomic DNA
agagcgtggtgctaataacgccaaggtcgcgggtt

SEQ ID NO: 3949 - DNA, 16 bp, Homo sapiens
  source 1..16: mol_type = genomic DNA
agaggcttacgacccc

SEQ ID NO: 3950 - DNA, 17 bp, Homo sapiens
  source 1..17: mol_type = genomic DNA
agaggcttacgacccct

SEQ ID NO: 3951 - DNA, 19 bp, Homo sapiens
  source 1..19: mol_type = genomic DNA
agaggcttacgacccctta

SEQ ID NO: 3952 - DNA, 24 bp, Homo sapiens
  source 1..24: mol_type = genomic DNA
agaggcttacgaccccttatttac

SEQ ID NO: 3953 - DNA, 25 bp, Homo sapiens
  source 1..25: mol_type = genomic DNA
agaggcttacgaccccttatttacc

SEQ ID NO: 3954 - DNA, 26 bp, Homo sapiens
  source 1..26: mol_type = genomic DNA
agaggcttacgaccccttatttaccc

SEQ ID NO: 3955 - DNA, 27 bp, Homo sapiens
  source 1..27: mol_type = genomic DNA
agaggcttacgaccccttatttacccc

SEQ ID NO: 3956 - DNA, 28 bp, Homo sapiens
  source 1..28: mol_type = genomic DNA
agaggcttacgaccccttatttacccca

SEQ ID NO: 3957 - DNA, 16 bp, Homo sapiens
  source 1..16: mol_type = genomic DNA
agaggtccccggttca

SEQ ID NO: 3958 - DNA, 16 bp, Homo sapiens
  source 1..16: mol_type = genomic DNA
agaggtcccgggttca

SEQ ID NO: 3959 - DNA, 26 bp, Homo sapiens
  source 1..26: mol_type = genomic DNA
agaggtcccgggttcaaatcccggac

SEQ ID NO: 3960 - DNA, 32 bp, Homo sapiens
  source 1..32: mol_type = genomic DNA
agaggtcccgggttcaaatcccggacgagccc

SEQ ID NO: 3961 - DNA, 33 bp, Homo sapiens
  source 1..33: mol_type = genomic DNA
agaggtcccgggttcaaatcccggacgagcccc

SEQ ID NO: 3962 - DNA, 34 bp, Homo sapiens
  source 1..34: mol_type = genomic DNA
agaggtcccgggttcaaatcccggacgagccccc

SEQ ID NO: 3963 - DNA, 16 bp, Homo sapiens
  source 1..16: mol_type = genomic DNA
agaggtccctggttca

SEQ ID NO: 3964 - DNA, 22 bp, Homo sapiens
  source 1..22: mol_type = genomic DNA
agaggtccctggttcaaatccg

SEQ ID NO: 3965 - DNA, 23 bp, Homo sapiens
  source 1..23: mol_type = genomic DNA
agaggtccctggttcaaatccgg

SEQ ID NO: 3966 - DNA, 26 bp, Homo sapiens
  source 1..26: mol_type = genomic DNA
agaggtccctggttcaaatccgggtg

SEQ ID NO: 3967 - DNA, 16 bp, Homo sapiens
  source 1..16: mol_type = genomic DNA
agaggtcgatggatcg

SEQ ID NO: 3968 - DNA, 20 bp, Homo sapiens
  source 1..20: mol_type = genomic DNA
agaggtcgatggatcgaaac

SEQ ID NO: 3969 - DNA, 21 bp, Homo sapiens
  source 1..21: mol_type = genomic DNA
agaggtcgatggatcgaaacc

SEQ ID NO: 3970 - DNA, 22 bp, Homo sapiens
  source 1..22: mol_type = genomic DNA
agaggtcgatggatcgaaacca

SEQ ID NO: 3971 - DNA, 23 bp, Homo sapiens
  source 1..23: mol_type = genomic DNA
agaggtcgatggatcgaaaccat

SEQ ID NO: 3972 - DNA, 25 bp, Homo sapiens
  source 1..25: mol_type = genomic DNA
agaggtcgatggatcgaaaccatcc

SEQ ID NO: 3973 - DNA, 26 bp, Homo sapiens
  source 1..26: mol_type = genomic DNA
agaggtcgatggatcgaaaccatcct

SEQ ID NO: 3974 - DNA, 27 bp, Homo sapiens
  source 1..27: mol_type = genomic DNA
agaggtcgatggatcgaaaccatcctc

SEQ ID NO: 3975 - DNA, 16 bp, Homo sapiens
  source 1..16: mol_type = genomic DNA
agaggttccgggttcg

SEQ ID NO: 3976 - DNA, 25 bp, Homo sapiens
  source 1..25: mol_type = genomic DNA
agaggttccgggttcgagtcccggc

SEQ ID NO: 3977 - DNA, 32 bp, Homo sapiens
  source 1..32: mol_type = genomic DNA
agaggttccgggttcgagtcccggcagagatg

SEQ ID NO: 3978 - DNA, 33 bp, Homo sapiens
  source 1..33: mol_type = genomic DNA
agaggttccgggttcgagtcccggcagagatgc

SEQ ID NO: 3979 - DNA, 34 bp, Homo sapiens
  source 1..34: mol_type = genomic DNA
agaggttccgggttcgagtcccggcagagatgcc

SEQ ID NO: 3980 - DNA, 35 bp, Homo sapiens
  source 1..35: mol_type = genomic DNA
agaggttccgggttcgagtcccggcagagatgcca

SEQ ID NO: 3981 - DNA, 16 bp, Homo sapiens
  source 1..16: mol_type = genomic DNA
agagtaaataatagga

SEQ ID NO: 3982 - DNA, 17 bp, Homo sapiens
  source 1..17: mol_type = genomic DNA
agagtaaataataggag

SEQ ID NO: 3983 - DNA, 18 bp, Homo sapiens
  source 1..18: mol_type = genomic DNA
agagtaaataataggagc

SEQ ID NO: 3984 - DNA, 19 bp, Homo sapiens
  source 1..19: mol_type = genomic DNA
agagtaaataataggagct

SEQ ID NO: 3985 - DNA, 20 bp, Homo sapiens
  source 1..20: mol_type = genomic DNA
agagtaaataataggagctt

SEQ ID NO: 3986 - DNA, 21 bp, Homo sapiens
  source 1..21: mol_type = genomic DNA
agagtaaataataggagctta

SEQ ID NO: 3987 - DNA, 22 bp, Homo sapiens
  source 1..22: mol_type = genomic DNA
agagtaaataataggagcttaa

SEQ ID NO: 3988 - DNA, 23 bp, Homo sapiens
  source 1..23: mol_type = genomic DNA
agagtaaataataggagcttaaa

SEQ ID NO: 3989 - DNA, 24 bp, Homo sapiens
  source 1..24: mol_type = genomic DNA
agagtaaataataggagcttaaac

SEQ ID NO: 3990 - DNA, 25 bp, Homo sapiens
  source 1..25: mol_type = genomic DNA
agagtaaataataggagcttaaacc

SEQ ID NO: 3991 - DNA, 26 bp, Homo sapiens
  source 1..26: mol_type = genomic DNA
agagtaaataataggagcttaaaccc

SEQ ID NO: 3992 - DNA, 27 bp, Homo sapiens
  source 1..27: mol_type = genomic DNA
agagtaaataataggagcttaaacccc

SEQ ID NO: 3993 - DNA, 28 bp, Homo sapiens
  source 1..28: mol_type = genomic DNA
agagtaaataataggagcttaaaccccc

SEQ ID NO: 3994 - DNA, 29 bp, Homo sapiens
  source 1..29: mol_type = genomic DNA
agagtaaataataggagcttaaaccccct

SEQ ID NO: 3995 - DNA, 30 bp, Homo sapiens
  source 1..30: mol_type = genomic DNA
agagtaaataataggagcttaaaccccctt

SEQ ID NO: 3996 - DNA, 31 bp, Homo sapiens
  source 1..31: mol_type = genomic DNA
agagtaaataataggagcttaaaccccctta

SEQ ID NO: 3997 - DNA, 32 bp, Homo sapiens
  source 1..32: mol_type = genomic DNA
agagtaaataataggagcttaaacccccttat

SEQ ID NO: 3998 - DNA, 33 bp, Homo sapiens
  source 1..33: mol_type = genomic DNA
agagtaaataataggagcttaaacccccttatt

SEQ ID NO: 3999 - DNA, 34 bp, Homo sapiens
  source 1..34: mol_type = genomic DNA
agagtaaataataggagcttaaacccccttattt

SEQ ID NO: 4000 - DNA, 36 bp, Homo sapiens
  source 1..36: mol_type = genomic DNA
agagtaaataataggagcttaaacccccttatttct

SEQ ID NO: 4001 - DNA, 37 bp, Homo sapiens
  source 1..37: mol_type = genomic DNA
agagtaaataataggagcttaaacccccttatttcta

SEQ ID NO: 4002 - DNA, 39 bp, Homo sapiens
  source 1..39: mol_type = genomic DNA
agagtaaataataggagcttaaacccccttatttctacc

SEQ ID NO: 4003 - DNA, 18 bp, Homo sapiens
  source 1..18: mol_type = genomic DNA
agagtggcgcagcggaag

SEQ ID NO: 4004 - DNA, 20 bp, Homo sapiens
  source 1..20: mol_type = genomic DNA
agagtggcgcagcggaagcg

SEQ ID NO: 4005 - DNA, 25 bp, Homo sapiens
  source 1..25: mol_type = genomic DNA
agagtggcgcagcggaagcgtgctg

SEQ ID NO: 4006 - DNA, 27 bp, Homo sapiens
  source 1..27: mol_type = genomic DNA
agagtggcgcagcggaagcgtgctggg

SEQ ID NO: 4007 - DNA, 28 bp, Homo sapiens
  source 1..28: mol_type = genomic DNA
agagtggcgcagcggaagcgtgctgggc

SEQ ID NO: 4008 - DNA, 29 bp, Homo sapiens
  source 1..29: mol_type = genomic DNA
agagtggcgcagcggaagcgtgctgggcc

SEQ ID NO: 4009 - DNA, 30 bp, Homo sapiens
  source 1..30: mol_type = genomic DNA
agagtggcgcagcggaagcgtgctgggccc

SEQ ID NO: 4010 - DNA, 31 bp, Homo sapiens
  source 1..31: mol_type = genomic DNA
agagtggcgcagcggaagcgtgctgggccca

SEQ ID NO: 4011 - DNA, 32 bp, Homo sapiens
  source 1..32: mol_type = genomic DNA
agagtggcgcagcggaagcgtgctgggcccat

SEQ ID NO: 4012 - DNA, 36 bp, Homo sapiens
  source 1..36: mol_type = genomic DNA
agagtggcgcagcggaagcgtgctgggcccataacc

SEQ ID NO: 4013 - DNA, 46 bp, Homo sapiens
  source 1..46: mol_type = genomic DNA
agagtggcgcagcggaagcgtgctgggcccataacccagaggtcga

SEQ ID NO: 4014 - DNA, 16 bp, Homo sapiens
  source 1..16: mol_type = genomic DNA
agagtggggttttgca

SEQ ID NO: 4015 - DNA, 20 bp, Homo sapiens
  source 1..20: mol_type = genomic DNA
agagtggggttttgcagtcc

SEQ ID NO: 4016 - DNA, 21 bp, Homo sapiens
  source 1..21: mol_type = genomic DNA
agagtggggttttgcagtcct

SEQ ID NO: 4017 - DNA, 23 bp, Homo sapiens
  source 1..23: mol_type = genomic DNA
agagtggggttttgcagtcctta

SEQ ID NO: 4018 - DNA, 25 bp, Homo sapiens
  source 1..25: mol_type = genomic DNA
agagtggggttttgcagtccttacc

SEQ ID NO: 4019 - DNA, 26 bp, Homo sapiens
  source 1..26: mol_type = genomic DNA
agagtggggttttgcagtccttacca

SEQ ID NO: 4020 - DNA, 25 bp, Homo sapiens
  source 1..25: mol_type = genomic DNA
agagtgtagcttaacacaaagcacc

SEQ ID NO: 4021 - DNA, 26 bp, Homo sapiens
  source 1..26: mol_type = genomic DNA
agagtgtagcttaacacaaagcaccc

SEQ ID NO: 4022 - DNA, 27 bp, Homo sapiens
  source 1..27: mol_type = genomic DNA
agagtgtagcttaacacaaagcaccca

SEQ ID NO: 4023 - DNA, 28 bp, Homo sapiens
  source 1..28: mol_type = genomic DNA
agagtgtagcttaacacaaagcacccaa

SEQ ID NO: 4024 - DNA, 30 bp, Homo sapiens
  source 1..30: mol_type = genomic DNA
agagtgtagcttaacacaaagcacccaact

SEQ ID NO: 4025 - DNA, 31 bp, Homo sapiens
  source 1..31: mol_type = genomic DNA
agagtgtagcttaacacaaagcacccaactt

SEQ ID NO: 4026 - DNA, 16 bp, Homo sapiens
  source 1..16: mol_type = genomic DNA
agagttactttgatag

SEQ ID NO: 4027 - DNA, 19 bp, Homo sapiens
  source 1..19: mol_type = genomic DNA
agagttactttgatagagt

SEQ ID NO: 4028 - DNA, 31 bp, Homo sapiens
  source 1..31: mol_type = genomic DNA
agagttactttgatagagtaaataataggag

SEQ ID NO: 4029 - DNA, 32 bp, Homo sapiens
  source 1..32: mol_type = genomic DNA
agagttactttgatagagtaaataataggagc

SEQ ID NO: 4030 - DNA, 33 bp, Homo sapiens
  source 1..33: mol_type = genomic DNA
agagttactttgatagagtaaataataggagct

SEQ ID NO: 4031 - DNA, 34 bp, Homo sapiens
  source 1..34: mol_type = genomic DNA
agagttactttgatagagtaaataataggagctt

SEQ ID NO: 4032 - DNA, 16 bp, Homo sapiens
  source 1..16: mol_type = genomic DNA
agatcaagaggtcccc

SEQ ID NO: 4033 - DNA, 17 bp, Homo sapiens
  source 1..17: mol_type = genomic DNA
agatcaagaggtccccg

SEQ ID NO: 4034 - DNA, 24 bp, Homo sapiens
  source 1..24: mol_type = genomic DNA
agatcacgggttcgaaccccgtcc

SEQ ID NO: 4035 - DNA, 21 bp, Homo sapiens
  source 1..21: mol_type = genomic DNA
agatcagaaggctgcgtgttc

SEQ ID NO: 4036 - DNA, 33 bp, Homo sapiens
  source 1..33: mol_type = genomic DNA
agatcagaaggctgcgtgttcgaatcacgtcgg

SEQ ID NO: 4037 - DNA, 40 bp, Homo sapiens
  source 1..40: mol_type = genomic DNA
agatcagaaggctgcgtgttcgaatcacgtcggggtcacc

SEQ ID NO: 4038 - DNA, 21 bp, Homo sapiens
  source 1..21: mol_type = genomic DNA
agatcagaaggttgcgtgttc

SEQ ID NO: 4039 - DNA, 22 bp, Homo sapiens
  source 1..22: mol_type = genomic DNA
agatcagaaggttgcgtgttca

SEQ ID NO: 4040 - DNA, 40 bp, Homo sapiens
  source 1..40: mol_type = genomic DNA
agatcagaaggttgcgtgttcaaatcacgtcggggtcacc

SEQ ID NO: 4041 - DNA, 34 bp, Homo sapiens
  source 1..34: mol_type = genomic DNA
agatcagaaggttgcgtgttcaagtcacgtcggg

SEQ ID NO: 4042 - DNA, 36 bp, Homo sapiens
  source 1..36: mol_type = genomic DNA
agatcagaaggttgcgtgttcaagtcacgtcggggt

SEQ ID NO: 4043 - DNA, 37 bp, Homo sapiens
  source 1..37: mol_type = genomic DNA
agatcagaaggttgcgtgttcaagtcacgtcggggtc

SEQ ID NO: 4044 - DNA, 39 bp, Homo sapiens
  source 1..39: mol_type = genomic DNA
agatcagaaggttgcgtgttcaagtcacgtcggggtcac

SEQ ID NO: 4045 - DNA, 40 bp, Homo sapiens
  source 1..40: mol_type = genomic DNA
agatcagaaggttgcgtgttcaagtcacgtcggggtcacc

SEQ ID NO: 4046 - DNA, 41 bp, Homo sapiens
  source 1..41: mol_type = genomic DNA
agatcagaaggttgcgtgttcaagtcacgtcggggtcacca

SEQ ID NO: 4047 - DNA, 28 bp, Homo sapiens
  source 1..28: mol_type = genomic DNA
agatcctgggttcgaatcccagcggggc

SEQ ID NO: 4048 - DNA, 29 bp, Homo sapiens
  source 1..29: mol_type = genomic DNA
agatcctgggttcgaatcccagcggggcc

SEQ ID NO: 4049 - DNA, 31 bp, Homo sapiens
  source 1..31: mol_type = genomic DNA
agatcctgggttcgaatcccagcggggcctc

SEQ ID NO: 4050 - DNA, 32 bp, Homo sapiens
  source 1..32: mol_type = genomic DNA
agatcctgggttcgaatcccagcggggcctcc

SEQ ID NO: 4051 - DNA, 27 bp, Homo sapiens
  source 1..27: mol_type = genomic DNA
agatcctgggttcgaatcccagcggtg

SEQ ID NO: 4052 - DNA, 31 bp, Homo sapiens
  source 1..31: mol_type = genomic DNA
agatcctgggttcgaatcccagcggtgcctc

SEQ ID NO: 4053 - DNA, 32 bp, Homo sapiens
  source 1..32: mol_type = genomic DNA
agatcctgggttcgaatcccagcggtgcctcc

SEQ ID NO: 4054 - DNA, 29 bp, Homo sapiens
  source 1..29: mol_type = genomic DNA
agatcctgggttcgactcccagtggggcc

SEQ ID NO: 4055 - DNA, 18 bp, Homo sapiens
  source 1..18: mol_type = genomic DNA
agatcgcgggttcgaacc

SEQ ID NO: 4056 - DNA, 19 bp, Homo sapiens
  source 1..19: mol_type = genomic DNA
agatcgcgggttcgaaccc

SEQ ID NO: 4057 - DNA, 32 bp, Homo sapiens
  source 1..32: mol_type = genomic DNA
agatcgcgggttcgaaccccgtccgtgcctcc

SEQ ID NO: 4058 - DNA, 24 bp, Homo sapiens
  source 1..24: mol_type = genomic DNA
agatgaaaacctttttccaaggac

SEQ ID NO: 4059 - DNA, 25 bp, Homo sapiens
  source 1..25: mol_type = genomic DNA
agatgaaaacctttttccaaggaca

SEQ ID NO: 4060 - DNA, 26 bp, Homo sapiens
  source 1..26: mol_type = genomic DNA
agatgaaaacctttttccaaggacac

SEQ ID NO: 4061 - DNA, 27 bp, Homo sapiens
  source 1..27: mol_type = genomic DNA
agatgaaaacctttttccaaggacacc

SEQ ID NO: 4062 - DNA, 28 bp, Homo sapiens
  source 1..28: mol_type = genomic DNA
agatgaaaacctttttccaaggacacca

SEQ ID NO: 4063 - DNA, 17 bp, Homo sapiens
  source 1..17: mol_type = genomic DNA
agatggcagagcccggt

SEQ ID NO: 4064 - DNA, 18 bp, Homo sapiens
  source 1..18: mol_type = genomic DNA
agatggcagagcccggta

SEQ ID NO: 4065 - DNA, 19 bp, Homo sapiens
  source 1..19: mol_type = genomic DNA
agatggcagagcccggtaa

SEQ ID NO: 4066 - DNA, 20 bp, Homo sapiens
  source 1..20: mol_type = genomic DNA
agatggcagagcccggtaat

SEQ ID NO: 4067 - DNA, 26 bp, Homo sapiens
  source 1..26: mol_type = genomic DNA
agatggcagagcccggtaatcgcata

SEQ ID NO: 4068 - DNA, 28 bp, Homo sapiens
  source 1..28: mol_type = genomic DNA
agatggcagagcccggtaatcgcataaa

SEQ ID NO: 4069 - DNA, 30 bp, Homo sapiens
  source 1..30: mol_type = genomic DNA
agatggcagagcccggtaatcgcataaaac

SEQ ID NO: 4070 - DNA, 31 bp, Homo sapiens
  source 1..31: mol_type = genomic DNA
agatggcagagcccggtaatcgcataaaact

SEQ ID NO: 4071 - DNA, 33 bp, Homo sapiens
  source 1..33: mol_type = genomic DNA
agatggcagagcccggtaatcgcataaaactta

SEQ ID NO: 4072 - DNA, 34 bp, Homo sapiens
  source 1..34: mol_type = genomic DNA
agatggcagagcccggtaatcgcataaaacttaa

SEQ ID NO: 4073 - DNA, 35 bp, Homo sapiens
  source 1..35: mol_type = genomic DNA
agatggcagagcccggtaatcgcataaaacttaaa

SEQ ID NO: 4074 - DNA, 36 bp, Homo sapiens
  source 1..36: mol_type = genomic DNA
agatggcagagcccggtaatcgcataaaacttaaaa

SEQ ID NO: 4075 - DNA, 37 bp, Homo sapiens
  source 1..37: mol_type = genomic DNA
agatggcagagcccggtaatcgcataaaacttaaaac

SEQ ID NO: 4076 - DNA, 38 bp, Homo sapiens
  source 1..38: mol_type = genomic DNA
agatggcagagcccggtaatcgcataaaacttaaaact

SEQ ID NO: 4077 - DNA, 39 bp, Homo sapiens
  source 1..39: mol_type = genomic DNA
agatggcagagcccggtaatcgcataaaacttaaaactt

SEQ ID NO: 4078 - DNA, 16 bp, Homo sapiens
  source 1..16: mol_type = genomic DNA
agattaagagaaccaa

SEQ ID NO: 4079 - DNA, 17 bp, Homo sapiens
  source 1..17: mol_type = genomic DNA
agattaagagaaccaac

SEQ ID NO: 4080 - DNA, 18 bp, Homo sapiens
  source 1..18: mol_type = genomic DNA
agattaagagaaccaaca

SEQ ID NO: 4081 - DNA, 19 bp, Homo sapiens
  source 1..19: mol_type = genomic DNA
agattaagagaaccaacac

SEQ ID NO: 4082 - DNA, 20 bp, Homo sapiens
  source 1..20: mol_type = genomic DNA
agattaagagaaccaacacc

SEQ ID NO: 4083 - DNA, 21 bp, Homo sapiens
  source 1..21: mol_type = genomic DNA
agattaagagaaccaacacct

SEQ ID NO: 4084 - DNA, 22 bp, Homo sapiens
  source 1..22: mol_type = genomic DNA
agattaagagaaccaacacctc

SEQ ID NO: 4085 - DNA, 23 bp, Homo sapiens
  source 1..23: mol_type = genomic DNA
agattaagagaaccaacacctct

SEQ ID NO: 4086 - DNA, 24 bp, Homo sapiens
  source 1..24: mol_type = genomic DNA
agattaagagaaccaacacctctt

SEQ ID NO: 4087 - DNA, 25 bp, Homo sapiens
  source 1..25: mol_type = genomic DNA
agattaagagaaccaacacctcttt

SEQ ID NO: 4088 - DNA, 26 bp, Homo sapiens
  source 1..26: mol_type = genomic DNA
agattaagagaaccaacacctcttta

SEQ ID NO: 4089 - DNA, 29 bp, Homo sapiens
  source 1..29: mol_type = genomic DNA
agattaagagaaccaacacctctttacag

SEQ ID NO: 4090 - DNA, 31 bp, Homo sapiens
  source 1..31: mol_type = genomic DNA
agattaagagaaccaacacctctttacagtg

SEQ ID NO: 4091 - DNA, 32 bp, Homo sapiens
  source 1..32: mol_type = genomic DNA
agattaagagaaccaacacctctttacagtga

SEQ ID NO: 4092 - DNA, 33 bp, Homo sapiens
  source 1..33: mol_type = genomic DNA
agattaagagaaccaacacctctttacagtgac

SEQ ID NO: 4093 - DNA, 34 bp, Homo sapiens
  source 1..34: mol_type = genomic DNA
agattaagagaaccaacacctctttacagtgacc

SEQ ID NO: 4094 - DNA, 35 bp, Homo sapiens
  source 1..35: mol_type = genomic DNA
agattaagagaaccaacacctctttacagtgacca

SEQ ID NO: 4095 - DNA, 17 bp, Homo sapiens
  source 1..17: mol_type = genomic DNA
agattccaggttcgact

SEQ ID NO: 4096 - DNA, 18 bp, Homo sapiens
  source 1..18: mol_type = genomic DNA
agattccaggttcgactc

SEQ ID NO: 4097 - DNA, 21 bp, Homo sapiens
  source 1..21: mol_type = genomic DNA
agattccaggttcgactcctg

SEQ ID NO: 4098 - DNA, 30 bp, Homo sapiens
  source 1..30: mol_type = genomic DNA
agattccaggttcgactcctggctggctcg

SEQ ID NO: 4099 - DNA, 31 bp, Homo sapiens
  source 1..31: mol_type = genomic DNA
agattccaggttcgactcctggctggctcgc

SEQ ID NO: 4100 - DNA, 32 bp, Homo sapiens
  source 1..32: mol_type = genomic DNA
agattccaggttcgactcctggctggctcgcc

SEQ ID NO: 4101 - DNA, 33 bp, Homo sapiens
  source 1..33: mol_type = genomic DNA
agattccaggttcgactcctggctggctcgcca

SEQ ID NO: 4102 - DNA, 19 bp, Homo sapiens
  source 1..19: mol_type = genomic DNA
agattcccattcttgcgac

SEQ ID NO: 4103 - DNA, 23 bp, Homo sapiens
  source 1..23: mol_type = genomic DNA
agattcccattcttgcgacccgg

SEQ ID NO: 4104 - DNA, 46 bp, Homo sapiens
  source 1..46: mol_type = genomic DNA
agattcccattcttgcgacccgggttcgattcccgggcggcgcacc

SEQ ID NO: 4105 - DNA, 16 bp, Homo sapiens
  source 1..16: mol_type = genomic DNA
agattctaggttcgac

SEQ ID NO: 4106 - DNA, 17 bp, Homo sapiens
  source 1..17: mol_type = genomic DNA
agattctaggttcgact

SEQ ID NO: 4107 - DNA, 18 bp, Homo sapiens
  source 1..18: mol_type = genomic DNA
agattctaggttcgactc

SEQ ID NO: 4108 - DNA, 23 bp, Homo sapiens
  source 1..23: mol_type = genomic DNA
agattctaggttcgactcctggc

SEQ ID NO: 4109 - DNA, 29 bp, Homo sapiens
  source 1..29: mol_type = genomic DNA
agattctaggttcgactcctggctggctc

SEQ ID NO: 4110 - DNA, 30 bp, Homo sapiens
  source 1..30: mol_type = genomic DNA
agattctaggttcgactcctggctggctcg

SEQ ID NO: 4111 - DNA, 31 bp, Homo sapiens
  source 1..31: mol_type = genomic DNA
agattctaggttcgactcctggctggctcgc

SEQ ID NO: 4112 - DNA, 32 bp, Homo sapiens
  source 1..32: mol_type = genomic DNA
agattctaggttcgactcctggctggctcgcc

SEQ ID NO: 4113 - DNA, 33 bp, Homo sapiens
  source 1..33: mol_type = genomic DNA
agattctaggttcgactcctggctggctcgcca

SEQ ID NO: 4114 - DNA, 21 bp, Homo sapiens
  source 1..21: mol_type = genomic DNA
agattgagggttcgaatccct

SEQ ID NO: 4115 - DNA, 30 bp, Homo sapiens
  source 1..30: mol_type = genomic DNA
agattgagggttcgaatcccttcgtggttg

SEQ ID NO: 4116 - DNA, 31 bp, Homo sapiens
  source 1..31: mol_type = genomic DNA
agattgagggttcgaatcccttcgtggttgc

SEQ ID NO: 4117 - DNA, 32 bp, Homo sapiens
  source 1..32: mol_type = genomic DNA
agattgagggttcgaatcccttcgtggttgcc

SEQ ID NO: 4118 - DNA, 33 bp, Homo sapiens
  source 1..33: mol_type = genomic DNA
agattgagggttcgaatcccttcgtggttgcca

SEQ ID NO: 4119 - DNA, 18 bp, Homo sapiens
  source 1..18: mol_type = genomic DNA
agattgagggttcgagtc

SEQ ID NO: 4120 - DNA, 19 bp, Homo sapiens
  source 1..19: mol_type = genomic DNA
agattgagggttcgagtcc

SEQ ID NO: 4121 - DNA, 21 bp, Homo sapiens
  source 1..21: mol_type = genomic DNA
agattgagggttcgagtccct

SEQ ID NO: 4122 - DNA, 30 bp, Homo sapiens
  source 1..30: mol_type = genomic DNA
agattgagggttcgagtcccttcgtggtcg

SEQ ID NO: 4123 - DNA, 31 bp, Homo sapiens
  source 1..31: mol_type = genomic DNA
agattgagggttcgagtcccttcgtggtcgc

SEQ ID NO: 4124 - DNA, 32 bp, Homo sapiens
  source 1..32: mol_type = genomic DNA
agattgagggttcgagtcccttcgtggtcgcc

SEQ ID NO: 4125 - DNA, 33 bp, Homo sapiens
  source 1..33: mol_type = genomic DNA
agattgagggttcgagtcccttcgtggtcgcca

SEQ ID NO: 4126 - DNA, 18 bp, Homo sapiens
  source 1..18: mol_type = genomic DNA
agattgcaggttcgagtc

SEQ ID NO: 4127 - DNA, 21 bp, Homo sapiens
  source 1..21: mol_type = genomic DNA
agattgcaggttcgagtcctg

SEQ ID NO: 4128 - DNA, 23 bp, Homo sapiens
  source 1..23: mol_type = genomic DNA
agattgcaggttcgagtcctgcc

SEQ ID NO: 4129 - DNA, 29 bp, Homo sapiens
  source 1..29: mol_type = genomic DNA
agattgcaggttcgagtcctgccgcggtc

SEQ ID NO: 4130 - DNA, 30 bp, Homo sapiens
  source 1..30: mol_type = genomic DNA
agattgcaggttcgagtcctgccgcggtcg

SEQ ID NO: 4131 - DNA, 31 bp, Homo sapiens
  source 1..31: mol_type = genomic DNA
agattgcaggttcgagtcctgccgcggtcgc

SEQ ID NO: 4132 - DNA, 32 bp, Homo sapiens
  source 1..32: mol_type = genomic DNA
agattgcaggttcgagtcctgccgcggtcgcc

SEQ ID NO: 4133 - DNA, 33 bp, Homo sapiens
  source 1..33: mol_type = genomic DNA
agattgcaggttcgagtcctgccgcggtcgcca

SEQ ID NO: 4134 - DNA, 16 bp, Homo sapiens
  source 1..16: mol_type = genomic DNA
agattgtgaatctgac

SEQ ID NO: 4135 - DNA, 17 bp, Homo sapiens
  source 1..17: mol_type = genomic DNA
agattgtgaatctgaca

SEQ ID NO: 4136 - DNA, 18 bp, Homo sapiens
  source 1..18: mol_type = genomic DNA
agattgtgaatctgacaa

SEQ ID NO: 4137 - DNA, 19 bp, Homo sapiens
  source 1..19: mol_type = genomic DNA
agattgtgaatctgacaac

SEQ ID NO: 4138 - DNA, 20 bp, Homo sapiens
  source 1..20: mol_type = genomic DNA
agattgtgaatctgacaaca

SEQ ID NO: 4139 - DNA, 21 bp, Homo sapiens
  source 1..21: mol_type = genomic DNA
agattgtgaatctgacaacag

SEQ ID NO: 4140 - DNA, 22 bp, Homo sapiens
  source 1..22: mol_type = genomic DNA
agattgtgaatctgacaacaga

SEQ ID NO: 4141 - DNA, 23 bp, Homo sapiens
  source 1..23: mol_type = genomic DNA
agattgtgaatctgacaacagag

SEQ ID NO: 4142 - DNA, 24 bp, Homo sapiens
  source 1..24: mol_type = genomic DNA
agattgtgaatctgacaacagagg

SEQ ID NO: 4143 - DNA, 25 bp, Homo sapiens
  source 1..25: mol_type = genomic DNA
agattgtgaatctgacaacagaggc

SEQ ID NO: 4144 - DNA, 26 bp, Homo sapiens
  source 1..26: mol_type = genomic DNA
agattgtgaatctgacaacagaggct

SEQ ID NO: 4145 - DNA, 27 bp, Homo sapiens
  source 1..27: mol_type = genomic DNA
agattgtgaatctgacaacagaggctt

SEQ ID NO: 4146 - DNA, 28 bp, Homo sapiens
  source 1..28: mol_type = genomic DNA
agattgtgaatctgacaacagaggctta

SEQ ID NO: 4147 - DNA, 29 bp, Homo sapiens
  source 1..29: mol_type = genomic DNA
agattgtgaatctgacaacagaggcttac

SEQ ID NO: 4148 - DNA, 30 bp, Homo sapiens
  source 1..30: mol_type = genomic DNA
agattgtgaatctgacaacagaggcttacg

SEQ ID NO: 4149 - DNA, 31 bp, Homo sapiens
  source 1..31: mol_type = genomic DNA
agattgtgaatctgacaacagaggcttacga

SEQ ID NO: 4150 - DNA, 32 bp, Homo sapiens
  source 1..32: mol_type = genomic DNA
agattgtgaatctgacaacagaggcttacgac

SEQ ID NO: 4151 - DNA, 33 bp, Homo sapiens
  source 1..33: mol_type = genomic DNA
agattgtgaatctgacaacagaggcttacgacc

SEQ ID NO: 4152 - DNA, 34 bp, Homo sapiens
  source 1..34: mol_type = genomic DNA
agattgtgaatctgacaacagaggcttacgaccc

SEQ ID NO: 4153 - DNA, 35 bp, Homo sapiens
  source 1..35: mol_type = genomic DNA
agattgtgaatctgacaacagaggcttacgacccc

SEQ ID NO: 4154 - DNA, 36 bp, Homo sapiens
  source 1..36: mol_type = genomic DNA
agattgtgaatctgacaacagaggcttacgacccct

SEQ ID NO: 4155 - DNA, 37 bp, Homo sapiens
  source 1..37: mol_type = genomic DNA
agattgtgaatctgacaacagaggcttacgacccctt

SEQ ID NO: 4156 - DNA, 38 bp, Homo sapiens
  source 1..38: mol_type = genomic DNA
agattgtgaatctgacaacagaggcttacgacccctta

SEQ ID NO: 4157 - DNA, 39 bp, Homo sapiens
  source 1..39: mol_type = genomic DNA
agattgtgaatctgacaacagaggcttacgaccccttat

SEQ ID NO: 4158 - DNA, 40 bp, Homo sapiens
  source 1..40: mol_type = genomic DNA
agattgtgaatctgacaacagaggcttacgaccccttatt

SEQ ID NO: 4159 - DNA, 41 bp, Homo sapiens
  source 1..41: mol_type = genomic DNA
agattgtgaatctgacaacagaggcttacgaccccttattt

SEQ ID NO: 4160 - DNA, 42 bp, Homo sapiens
  source 1..42: mol_type = genomic DNA
agattgtgaatctgacaacagaggcttacgaccccttattta

SEQ ID NO: 4161 - DNA, 43 bp, Homo sapiens
  source 1..43: mol_type = genomic DNA
agattgtgaatctgacaacagaggcttacgaccccttatttac

SEQ ID NO: 4162 - DNA, 44 bp, Homo sapiens
  source 1..44: mol_type = genomic DNA
agattgtgaatctgacaacagaggcttacgaccccttatttacc

SEQ ID NO: 4163 - DNA, 45 bp, Homo sapiens
  source 1..45: mol_type = genomic DNA
agattgtgaatctgacaacagaggcttacgaccccttatttaccc

SEQ ID NO: 4164 - DNA, 46 bp, Homo sapiens
  source 1..46: mol_type = genomic DNA
agattgtgaatctgacaacagaggcttacgaccccttatttacccc

SEQ ID NO: 4165 - DNA, 47 bp, Homo sapiens
  source 1..47: mol_type = genomic DNA
agattgtgaatctgacaacagaggcttacgaccccttatttacccca

SEQ ID NO: 4166 - DNA, 18 bp, Homo sapiens
  source 1..18: mol_type = genomic DNA
agatttcaacttaacttg

SEQ ID NO: 4167 - DNA, 19 bp, Homo sapiens
  source 1..19: mol_type = genomic DNA
agatttcaacttaacttga

SEQ ID NO: 4168 - DNA, 20 bp, Homo sapiens
  source 1..20: mol_type = genomic DNA
agatttcaacttaacttgac

SEQ ID NO: 4169 - DNA, 21 bp, Homo sapiens
  source 1..21: mol_type = genomic DNA
agatttcaacttaacttgacc

SEQ ID NO: 4170 - DNA, 22 bp, Homo sapiens
  source 1..22: mol_type = genomic DNA
agatttcaacttaacttgaccg

SEQ ID NO: 4171 - DNA, 23 bp, Homo sapiens
  source 1..23: mol_type = genomic DNA
agatttcaacttaacttgaccgc

SEQ ID NO: 4172 - DNA, 24 bp, Homo sapiens
  source 1..24: mol_type = genomic DNA
agatttcaacttaacttgaccgct

SEQ ID NO: 4173 - DNA, 25 bp, Homo sapiens
  source 1..25: mol_type = genomic DNA
agatttcaacttaacttgaccgctc

SEQ ID NO: 4174 - DNA, 26 bp, Homo sapiens
  source 1..26: mol_type = genomic DNA
agatttcaacttaacttgaccgctct

SEQ ID NO: 4175 - DNA, 27 bp, Homo sapiens
  source 1..27: mol_type = genomic DNA
agatttcaacttaacttgaccgctctg

SEQ ID NO: 4176 - DNA, 28 bp, Homo sapiens
  source 1..28: mol_type = genomic DNA
agatttcaacttaacttgaccgctctga

SEQ ID NO: 4177 - DNA, 29 bp, Homo sapiens
  source 1..29: mol_type = genomic DNA
agatttcaacttaacttgaccgctctgac

SEQ ID NO: 4178 - DNA, 30 bp, Homo sapiens
  source 1..30: mol_type = genomic DNA
agatttcaacttaacttgaccgctctgacc

SEQ ID NO: 4179 - DNA, 31 bp, Homo sapiens
  source 1..31: mol_type = genomic DNA
agatttcaacttaacttgaccgctctgacca

SEQ ID NO: 4180 - DNA, 22 bp, Homo sapiens
  source 1..22: mol_type = genomic DNA
agcaacctcggttcgaatccga

SEQ ID NO: 4181 - DNA, 30 bp, Homo sapiens
  source 1..30: mol_type = genomic DNA
agcaacctcggttcgaatccgagtcacggc

SEQ ID NO: 4182 - DNA, 31 bp, Homo sapiens
  source 1..31: mol_type = genomic DNA
agcaacctcggttcgaatccgagtcacggca

SEQ ID NO: 4183 - DNA, 32 bp, Homo sapiens
  source 1..32: mol_type = genomic DNA
agcaacctcggttcgaatccgagtcacggcac

SEQ ID NO: 4184 - DNA, 33 bp, Homo sapiens
  source 1..33: mol_type = genomic DNA
agcaacctcggttcgaatccgagtcacggcacc

SEQ ID NO: 4185 - DNA, 25 bp, Homo sapiens
  source 1..25: mol_type = genomic DNA
agcaatacactgaaaatgtttagac

SEQ ID NO: 4186 - DNA, 26 bp, Homo sapiens
  source 1..26: mol_type = genomic DNA
agcaatacactgaaaatgtttagacg

SEQ ID NO: 4187 - DNA, 27 bp, Homo sapiens
  source 1..27: mol_type = genomic DNA
agcaatacactgaaaatgtttagacgg

SEQ ID NO: 4188 - DNA, 29 bp, Homo sapiens
  source 1..29: mol_type = genomic DNA
agcaatacactgaaaatgtttagacgggc

SEQ ID NO: 4189 - DNA, 30 bp, Homo sapiens
  source 1..30: mol_type = genomic DNA
agcaatacactgaaaatgtttagacgggct

SEQ ID NO: 4190 - DNA, 31 bp, Homo sapiens
  source 1..31: mol_type = genomic DNA
agcaatacactgaaaatgtttagacgggctc

SEQ ID NO: 4191 - DNA, 32 bp, Homo sapiens
  source 1..32: mol_type = genomic DNA
agcaatacactgaaaatgtttagacgggctca

SEQ ID NO: 4192 - DNA, 33 bp, Homo sapiens
  source 1..33: mol_type = genomic DNA
agcaatacactgaaaatgtttagacgggctcac

SEQ ID NO: 4193 - DNA, 34 bp, Homo sapiens
  source 1..34: mol_type = genomic DNA
agcaatacactgaaaatgtttagacgggctcaca

SEQ ID NO: 4194 - DNA, 36 bp, Homo sapiens
  source 1..36: mol_type = genomic DNA
agcaatacactgaaaatgtttagacgggctcacatc

SEQ ID NO: 4195 - DNA, 39 bp, Homo sapiens
  source 1..39: mol_type = genomic DNA
agcaatacactgaaaatgtttagacgggctcacatcacc

SEQ ID NO: 4196 - DNA, 29 bp, Homo sapiens
  source 1..29: mol_type = genomic DNA
agcaatccgagttcgaatctcggtgggac

SEQ ID NO: 4197 - DNA, 30 bp, Homo sapiens
  source 1..30: mol_type = genomic DNA
agcaatccgagttcgaatctcggtgggacc

SEQ ID NO: 4198 - DNA, 31 bp, Homo sapiens
  source 1..31: mol_type = genomic DNA
agcaatccgagttcgaatctcggtgggacct

SEQ ID NO: 4199 - DNA, 32 bp, Homo sapiens
  source 1..32: mol_type = genomic DNA
agcaatccgagttcgaatctcggtgggacctc

SEQ ID NO: 4200 - DNA, 33 bp, Homo sapiens
  source 1..33: mol_type = genomic DNA
agcaatccgagttcgaatctcggtgggacctcc

SEQ ID NO: 4201 - DNA, 16 bp, Homo sapiens
  source 1..16: mol_type = genomic DNA
agcacccaacttacac

SEQ ID NO: 4202 - DNA, 17 bp, Homo sapiens
  source 1..17: mol_type = genomic DNA
agcacccaacttacact

SEQ ID NO: 4203 - DNA, 18 bp, Homo sapiens
  source 1..18: mol_type = genomic DNA
agcacccaacttacactt

SEQ ID NO: 4204 - DNA, 19 bp, Homo sapiens
  source 1..19: mol_type = genomic DNA
agcacccaacttacactta

SEQ ID NO: 4205 - DNA, 25 bp, Homo sapiens
  source 1..25: mol_type = genomic DNA
agcacccaacttacacttaggagat

SEQ ID NO: 4206 - DNA, 27 bp, Homo sapiens
  source 1..27: mol_type = genomic DNA
agcacccaacttacacttaggagattt

SEQ ID NO: 4207 - DNA, 28 bp, Homo sapiens
  source 1..28: mol_type = genomic DNA
agcacccaacttacacttaggagatttc

SEQ ID NO: 4208 - DNA, 29 bp, Homo sapiens
  source 1..29: mol_type = genomic DNA
agcacccaacttacacttaggagatttca

SEQ ID NO: 4209 - DNA, 30 bp, Homo sapiens
  source 1..30: mol_type = genomic DNA
agcacccaacttacacttaggagatttcaa

SEQ ID NO: 4210 - DNA, 31 bp, Homo sapiens
  source 1..31: mol_type = genomic DNA
agcacccaacttacacttaggagatttcaac

SEQ ID NO: 4211 - DNA, 32 bp, Homo sapiens
  source 1..32: mol_type = genomic DNA
agcacccaacttacacttaggagatttcaact

SEQ ID NO: 4212 - DNA, 33 bp, Homo sapiens
  source 1..33: mol_type = genomic DNA
agcacccaacttacacttaggagatttcaactt

SEQ ID NO: 4213 - DNA, 35 bp, Homo sapiens
  source 1..35: mol_type = genomic DNA
agcacccaacttacacttaggagatttcaacttaa

SEQ ID NO: 4214 - DNA, 36 bp, Homo sapiens
  source 1..36: mol_type = genomic DNA
agcacccaacttacacttaggagatttcaacttaac

SEQ ID NO: 4215 - DNA, 37 bp, Homo sapiens
  source 1..37: mol_type = genomic DNA
agcacccaacttacacttaggagatttcaacttaact

SEQ ID NO: 4216 - DNA, 42 bp, Homo sapiens
  source 1..42: mol_type = genomic DNA
agcacccaacttacacttaggagatttcaacttaacttgacc

SEQ ID NO: 4217 - DNA, 46 bp, Homo sapiens
  source 1..46: mol_type = genomic DNA
agcacccaacttacacttaggagatttcaacttaacttgaccgctc

SEQ ID NO: 4218 - DNA, 47 bp, Homo sapiens
  source 1..47: mol_type = genomic DNA
agcacccaacttacacttaggagatttcaacttaacttgaccgctct

SEQ ID NO: 4219 - DNA, 48 bp, Homo sapiens
  source 1..48: mol_type = genomic DNA
agcacccaacttacacttaggagatttcaacttaacttgaccgctctg

SEQ ID NO: 4220 - DNA, 16 bp, Homo sapiens
  source 1..16: mol_type = genomic DNA
agcactctggactctg

SEQ ID NO: 4221 - DNA, 17 bp, Homo sapiens
  source 1..17: mol_type = genomic DNA
agcactctggactctga

SEQ ID NO: 4222 - DNA, 18 bp, Homo sapiens
  source 1..18: mol_type = genomic DNA
agcactctggactctgaa

SEQ ID NO: 4223 - DNA, 19 bp, Homo sapiens
  source 1..19: mol_type = genomic DNA
agcactctggactctgaat

SEQ ID NO: 4224 - DNA, 20 bp, Homo sapiens
  source 1..20: mol_type = genomic DNA
agcactctggactctgaatc

SEQ ID NO: 4225 - DNA, 21 bp, Homo sapiens
  source 1..21: mol_type = genomic DNA
agcactctggactctgaatcc

SEQ ID NO: 4226 - DNA, 22 bp, Homo sapiens
  source 1..22: mol_type = genomic DNA
agcactctggactctgaatcca

SEQ ID NO: 4227 - DNA, 23 bp, Homo sapiens
  source 1..23: mol_type = genomic DNA
agcactctggactctgaatccag

SEQ ID NO: 4228 - DNA, 24 bp, Homo sapiens
  source 1..24: mol_type = genomic DNA
agcactctggactctgaatccagc

SEQ ID NO: 4229 - DNA, 25 bp, Homo sapiens
  source 1..25: mol_type = genomic DNA
agcactctggactctgaatccagcg

SEQ ID NO: 4230 - DNA, 26 bp, Homo sapiens
  source 1..26: mol_type = genomic DNA
agcactctggactctgaatccagcga

SEQ ID NO: 4231 - DNA, 29 bp, Homo sapiens
  source 1..29: mol_type = genomic DNA
agcactctggactctgaatccagcgatcc

SEQ ID NO: 4232 - DNA, 30 bp, Homo sapiens
  source 1..30: mol_type = genomic DNA
agcactctggactctgaatccagcgatccg

SEQ ID NO: 4233 - DNA, 31 bp, Homo sapiens
  source 1..31: mol_type = genomic DNA
agcactctggactctgaatccagcgatccga

SEQ ID NO: 4234 - DNA, 32 bp, Homo sapiens
  source 1..32: mol_type = genomic DNA
agcactctggactctgaatccagcgatccgag

SEQ ID NO: 4235 - DNA, 33 bp, Homo sapiens
  source 1..33: mol_type = genomic DNA
agcactctggactctgaatccagcgatccgagt

SEQ ID NO: 4236 - DNA, 34 bp, Homo sapiens
  source 1..34: mol_type = genomic DNA
agcactctggactctgaatccagcgatccgagtt

SEQ ID NO: 4237 - DNA, 35 bp, Homo sapiens
  source 1..35: mol_type = genomic DNA
agcactctggactctgaatccagcgatccgagttc

SEQ ID NO: 4238 - DNA, 36 bp, Homo sapiens
  source 1..36: mol_type = genomic DNA
agcactctggactctgaatccagcgatccgagttca

SEQ ID NO: 4239 - DNA, 37 bp, Homo sapiens
  source 1..37: mol_type = genomic DNA
agcactctggactctgaatccagcgatccgagttcaa

SEQ ID NO: 4240 - DNA, 38 bp, Homo sapiens
  source 1..38: mol_type = genomic DNA
agcactctggactctgaatccagcgatccgagttcaaa

SEQ ID NO: 4241 - DNA, 39 bp, Homo sapiens
  source 1..39: mol_type = genomic DNA
agcactctggactctgaatccagcgatccgagttcaaat

SEQ ID NO: 4242 - DNA, 44 bp, Homo sapiens
  source 1..44: mol_type = genomic DNA
agcactctggactctgaatccagcgatccgagttcaaatctcgg

SEQ ID NO: 4243 - DNA, 45 bp, Homo sapiens
  source 1..45: mol_type = genomic DNA
agcactctggactctgaatccagcgatccgagttcaaatctcggt

SEQ ID NO: 4244 - DNA, 46 bp, Homo sapiens
  source 1..46: mol_type = genomic DNA
agcactctggactctgaatccagcgatccgagttcaaatctcggtg

SEQ ID NO: 4245 - DNA, 47 bp, Homo sapiens
  source 1..47: mol_type = genomic DNA
agcactctggactctgaatccagcgatccgagttcaaatctcggtgg

SEQ ID NO: 4246 - DNA, 48 bp, Homo sapiens
  source 1..48: mol_type = genomic DNA
agcactctggactctgaatccagcgatccgagttcaaatctcggtgga

SEQ ID NO: 4247 - DNA, 36 bp, Homo sapiens
  source 1..36: mol_type = genomic DNA
agcactctggactctgaatccagcgatccgagttcg

SEQ ID NO: 4248 - DNA, 38 bp, Homo sapiens
  source 1..38: mol_type = genomic DNA
agcactctggactctgaatccagcgatccgagttcgag

SEQ ID NO: 4249 - DNA, 22 bp, Homo sapiens
  source 1..22: mol_type = genomic DNA
agcactctggactctgaatccg

SEQ ID NO: 4250 - DNA, 16 bp, Homo sapiens
  source 1..16: mol_type = genomic DNA
agcactctggactttg

SEQ ID NO: 4251 - DNA, 17 bp, Homo sapiens
  source 1..17: mol_type = genomic DNA
agcactctggactttga

SEQ ID NO: 4252 - DNA, 18 bp, Homo sapiens
  source 1..18: mol_type = genomic DNA
agcactctggactttgaa

SEQ ID NO: 4253 - DNA, 20 bp, Homo sapiens
  source 1..20: mol_type = genomic DNA
agcactctggactttgaatc

SEQ ID NO: 4254 - DNA, 21 bp, Homo sapiens
  source 1..21: mol_type = genomic DNA
agcactctggactttgaatcc

SEQ ID NO: 4255 - DNA, 22 bp, Homo sapiens
  source 1..22: mol_type = genomic DNA
agcactctggactttgaatcca

SEQ ID NO: 4256 - DNA, 23 bp, Homo sapiens
  source 1..23: mol_type = genomic DNA
agcactctggactttgaatccag

SEQ ID NO: 4257 - DNA, 24 bp, Homo sapiens
  source 1..24: mol_type = genomic DNA
agcactctggactttgaatccagc

SEQ ID NO: 4258 - DNA, 28 bp, Homo sapiens
  source 1..28: mol_type = genomic DNA
agcactctggactttgaatccagcgatc

SEQ ID NO: 4259 - DNA, 29 bp, Homo sapiens
  source 1..29: mol_type = genomic DNA
agcactctggactttgaatccagcgatcc

SEQ ID NO: 4260 - DNA, 31 bp, Homo sapiens
  source 1..31: mol_type = genomic DNA
agcactctggactttgaatccagcgatccga

SEQ ID NO: 4261 - DNA, 32 bp, Homo sapiens
  source 1..32: mol_type = genomic DNA
agcactctggactttgaatccagcgatccgag

SEQ ID NO: 4262 - DNA, 33 bp, Homo sapiens
  source 1..33: mol_type = genomic DNA
agcactctggactttgaatccagcgatccgagt

SEQ ID NO: 4263 - DNA, 34 bp, Homo sapiens
  source 1..34: mol_type = genomic DNA
agcactctggactttgaatccagcgatccgagtt

SEQ ID NO: 4264 - DNA, 35 bp, Homo sapiens
  source 1..35: mol_type = genomic DNA
agcactctggactttgaatccagcgatccgagttc

SEQ ID NO: 4265 - DNA, 36 bp, Homo sapiens
  source 1..36: mol_type = genomic DNA
agcactctggactttgaatccagcgatccgagttca

SEQ ID NO: 4266 - DNA, 39 bp, Homo sapiens
  source 1..39: mol_type = genomic DNA
agcactctggactttgaatccagcgatccgagttcaaat

SEQ ID NO: 4267 - DNA, 46 bp, Homo sapiens
  source 1..46: mol_type = genomic DNA
agcactctggactttgaatccagcgatccgagttcaaatctcggtg

SEQ ID NO: 4268 - DNA, 18 bp, Homo sapiens
  source 1..18: mol_type = genomic DNA
agcactggtcttgtaaac

SEQ ID NO: 4269 - DNA, 19 bp, Homo sapiens
  source 1..19: mol_type = genomic DNA
agcactggtcttgtaaacc

SEQ ID NO: 4270 - DNA, 16 bp, Homo sapiens
  source 1..16: mol_type = genomic DNA
agcagagtggcgcagc

SEQ ID NO: 4271 - DNA, 17 bp, Homo sapiens
  source 1..17: mol_type = genomic DNA
agcagagtggcgcagcg

SEQ ID NO: 4272 - DNA, 18 bp, Homo sapiens
  source 1..18: mol_type = genomic DNA
agcagagtggcgcagcgg

SEQ ID NO: 4273 - DNA, 19 bp, Homo sapiens
  source 1..19: mol_type = genomic DNA
agcagagtggcgcagcgga

SEQ ID NO: 4274 - DNA, 20 bp, Homo sapiens
  source 1..20: mol_type = genomic DNA
agcagagtggcgcagcggaa

SEQ ID NO: 4275 - DNA, 21 bp, Homo sapiens
  source 1..21: mol_type = genomic DNA
agcagagtggcgcagcggaag

SEQ ID NO: 4276 - DNA, 22 bp, Homo sapiens
  source 1..22: mol_type = genomic DNA
agcagagtggcgcagcggaagc

SEQ ID NO: 4277 - DNA, 23 bp, Homo sapiens
  source 1..23: mol_type = genomic DNA
agcagagtggcgcagcggaagcg

SEQ ID NO: 4278 - DNA, 24 bp, Homo sapiens
  source 1..24: mol_type = genomic DNA
agcagagtggcgcagcggaagcgt

SEQ ID NO: 4279 - DNA, 26 bp, Homo sapiens
  source 1..26: mol_type = genomic DNA
agcagagtggcgcagcggaagcgtgc

SEQ ID NO: 4280 - DNA, 27 bp, Homo sapiens
  source 1..27: mol_type = genomic DNA
agcagagtggcgcagcggaagcgtgct

SEQ ID NO: 4281 - DNA, 28 bp, Homo sapiens
  source 1..28: mol_type = genomic DNA
agcagagtggcgcagcggaagcgtgctg

SEQ ID NO: 4282 - DNA, 29 bp, Homo sapiens
  source 1..29: mol_type = genomic DNA
agcagagtggcgcagcggaagcgtgctgg

SEQ ID NO: 4283 - DNA, 30 bp, Homo sapiens
  source 1..30: mol_type = genomic DNA
agcagagtggcgcagcggaagcgtgctggg

SEQ ID NO: 4284 - DNA, 31 bp, Homo sapiens
  source 1..31: mol_type = genomic DNA
agcagagtggcgcagcggaagcgtgctgggc

SEQ ID NO: 4285 - DNA, 32 bp, Homo sapiens
  source 1..32: mol_type = genomic DNA
agcagagtggcgcagcggaagcgtgctgggcc

SEQ ID NO: 4286 - DNA, 33 bp, Homo sapiens
  source 1..33: mol_type = genomic DNA
agcagagtggcgcagcggaagcgtgctgggccc

SEQ ID NO: 4287 - DNA, 34 bp, Homo sapiens
  source 1..34: mol_type = genomic DNA
agcagagtggcgcagcggaagcgtgctgggccca

SEQ ID NO: 4288 - DNA, 35 bp, Homo sapiens
  source 1..35: mol_type = genomic DNA
agcagagtggcgcagcggaagcgtgctgggcccat

SEQ ID NO: 4289 - DNA, 36 bp, Homo sapiens
  source 1..36: mol_type = genomic DNA
agcagagtggcgcagcggaagcgtgctgggcccata

SEQ ID NO: 4290 - DNA, 39 bp, Homo sapiens
  source 1..39: mol_type = genomic DNA
agcagagtggcgcagcggaagcgtgctgggcccataacc

SEQ ID NO: 4291 - DNA, 42 bp, Homo sapiens
  source 1..42: mol_type = genomic DNA
agcagagtggcgcagcggaagcgtgctgggcccataacccag

SEQ ID NO: 4292 - DNA, 43 bp, Homo sapiens
  source 1..43: mol_type = genomic DNA
agcagagtggcgcagcggaagcgtgctgggcccataacccaga

SEQ ID NO: 4293 - DNA, 16 bp, Homo sapiens
  source 1..16: mol_type = genomic DNA
agcagcttcaaacctg

SEQ ID NO: 4294 - DNA, 23 bp, Homo sapiens
  source 1..23: mol_type = genomic DNA
agcagcttcaaacctgccggggc

SEQ ID NO: 4295 - DNA, 24 bp, Homo sapiens
  source 1..24: mol_type = genomic DNA
agcagcttcaaacctgccggggct

SEQ ID NO: 4296 - DNA, 25 bp, Homo sapiens
  source 1..25: mol_type = genomic DNA
agcagcttcaaacctgccggggctt

SEQ ID NO: 4297 - DNA, 26 bp, Homo sapiens
  source 1..26: mol_type = genomic DNA
agcagcttcaaacctgccggggcttc

SEQ ID NO: 4298 - DNA, 27 bp, Homo sapiens
  source 1..27: mol_type = genomic DNA
agcagcttcaaacctgccggggcttcc

SEQ ID NO: 4299 - DNA, 28 bp, Homo sapiens
  source 1..28: mol_type = genomic DNA
agcagcttcaaacctgccggggcttcca

SEQ ID NO: 4300 - DNA, 19 bp, Homo sapiens
  source 1..19: mol_type = genomic DNA
agcagttaacgcgggttcg

SEQ ID NO: 4301 - DNA, 16 bp, Homo sapiens
  source 1..16: mol_type = genomic DNA
agcagttgacccgggt

SEQ ID NO: 4302 - DNA, 17 bp, Homo sapiens
  source 1..17: mol_type = genomic DNA
agcagttgacccgggtt

SEQ ID NO: 4303 - DNA, 18 bp, Homo sapiens
  source 1..18: mol_type = genomic DNA
agcagttgacccgggttc

SEQ ID NO: 4304 - DNA, 28 bp, Homo sapiens
  source 1..28: mol_type = genomic DNA
agcagttgacccgggttcgattcccggc

SEQ ID NO: 4305 - DNA, 29 bp, Homo sapiens
  source 1..29: mol_type = genomic DNA
agcagttgacccgggttcgattcccggcc

SEQ ID NO: 4306 - DNA, 30 bp, Homo sapiens
  source 1..30: mol_type = genomic DNA
agcagttgacccgggttcgattcccggcca

SEQ ID NO: 4307 - DNA, 31 bp, Homo sapiens
  source 1..31: mol_type = genomic DNA
agcagttgacccgggttcgattcccggccaa

SEQ ID NO: 4308 - DNA, 32 bp, Homo sapiens
  source 1..32: mol_type = genomic DNA
agcagttgacccgggttcgattcccggccaac

SEQ ID NO: 4309 - DNA, 33 bp, Homo sapiens
  source 1..33: mol_type = genomic DNA
agcagttgacccgggttcgattcccggccaacg

SEQ ID NO: 4310 - DNA, 34 bp, Homo sapiens
  source 1..34: mol_type = genomic DNA
agcagttgacccgggttcgattcccggccaacgc

SEQ ID NO: 4311 - DNA, 37 bp, Homo sapiens
  source 1..37: mol_type = genomic DNA
agcagttgacccgggttcgattcccggccaacgcacc

SEQ ID NO: 4312 - DNA, 38 bp, Homo sapiens
  source 1..38: mol_type = genomic DNA
agcagttgacccgggttcgattcccggccaacgcacca

SEQ ID NO: 4313 - DNA, 19 bp, Homo sapiens
  source 1..19: mol_type = genomic DNA
agcataagactcttaatct

SEQ ID NO: 4314 - DNA, 31 bp, Homo sapiens
  source 1..31: mol_type = genomic DNA
agcatagctgccttccaagcagttgacccgg

SEQ ID NO: 4315 - DNA, 32 bp, Homo sapiens
  source 1..32: mol_type = genomic DNA
agcatagctgccttccaagcagttgacccggg

SEQ ID NO: 4316 - DNA, 33 bp, Homo sapiens
  source 1..33: mol_type = genomic DNA
agcatagctgccttccaagcagttgacccgggt

SEQ ID NO: 4317 - DNA, 36 bp, Homo sapiens
  source 1..36: mol_type = genomic DNA
agcatagctgccttccaagcagttgacccgggttcg

SEQ ID NO: 4318 - DNA, 16 bp, Homo sapiens
  source 1..16: mol_type = genomic DNA
agcatgagactcttaa

SEQ ID NO: 4319 - DNA, 17 bp, Homo sapiens
  source 1..17: mol_type = genomic DNA
agcatgagactcttaat

SEQ ID NO: 4320 - DNA, 18 bp, Homo sapiens
  source 1..18: mol_type = genomic DNA
agcatgagactcttaatc

SEQ ID NO: 4321 - DNA, 19 bp, Homo sapiens
  source 1..19: mol_type = genomic DNA
agcatgagactcttaatct

SEQ ID NO: 4322 - DNA, 20 bp, Homo sapiens
  source 1..20: mol_type = genomic DNA
agcatgagactcttaatctc

SEQ ID NO: 4323 - DNA, 26 bp, Homo sapiens
  source 1..26: mol_type = genomic DNA
agcatgagactcttaatctcagggtc

SEQ ID NO: 4324 - DNA, 28 bp, Homo sapiens
  source 1..28: mol_type = genomic DNA
agcatgagactcttaatctcagggtcgt

SEQ ID NO: 4325 - DNA, 29 bp, Homo sapiens
  source 1..29: mol_type = genomic DNA
agcatgagactcttaatctcagggtcgtg

SEQ ID NO: 4326 - DNA, 30 bp, Homo sapiens
  source 1..30: mol_type = genomic DNA
agcatgagactcttaatctcagggtcgtgg

SEQ ID NO: 4327 - DNA, 33 bp, Homo sapiens
  source 1..33: mol_type = genomic DNA
agcatgagactcttaatctcagggtcgtgggtt

SEQ ID NO: 4328 - DNA, 16 bp, Homo sapiens
  source 1..16: mol_type = genomic DNA
agcatgggactcttaa

SEQ ID NO: 4329 - DNA, 17 bp, Homo sapiens
  source 1..17: mol_type = genomic DNA
agcatgggactcttaat

SEQ ID NO: 4330 - DNA, 18 bp, Homo sapiens
  source 1..18: mol_type = genomic DNA
agcatgggactcttaatc

SEQ ID NO: 4331 - DNA, 19 bp, Homo sapiens
  source 1..19: mol_type = genomic DNA
agcatgggactcttaatcc

SEQ ID NO: 4332 - DNA, 20 bp, Homo sapiens
  source 1..20: mol_type = genomic DNA
agcatgggactcttaatccc

SEQ ID NO: 4333 - DNA, 28 bp, Homo sapiens
  source 1..28: mol_type = genomic DNA
agcatgggactcttaatcccagggtcgt

SEQ ID NO: 4334 - DNA, 29 bp, Homo sapiens
  source 1..29: mol_type = genomic DNA
agcatgggactcttaatcccagggtcgtg

SEQ ID NO: 4335 - DNA, 30 bp, Homo sapiens
  source 1..30: mol_type = genomic DNA
agcatgggactcttaatcccagggtcgtgg

SEQ ID NO: 4336 - DNA, 31 bp, Homo sapiens
  source 1..31: mol_type = genomic DNA
agcatgggactcttaatcccagggtcgtggg

SEQ ID NO: 4337 - DNA, 33 bp, Homo sapiens
  source 1..33: mol_type = genomic DNA
agcatgggactcttaatcccagggtcgtgggtt

SEQ ID NO: 4338 - DNA, 34 bp, Homo sapiens
  source 1..34: mol_type = genomic DNA
agcatgggactcttaatcccagggtcgtgggttc

SEQ ID NO: 4339 - DNA, 35 bp, Homo sapiens
  source 1..35: mol_type = genomic DNA
agcatgggactcttaatcccagggtcgtgggttcg

SEQ ID NO: 4340 - DNA, 19 bp, Homo sapiens
  source 1..19: mol_type = genomic DNA
agcatgggactcttaatct

SEQ ID NO: 4341 - DNA, 20 bp, Homo sapiens
  source 1..20: mol_type = genomic DNA
agcatgggactcttaatctc

SEQ ID NO: 4342 - DNA, 33 bp, Homo sapiens
  source 1..33: mol_type = genomic DNA
agcatgggtggttcagtggtagaattctcgcct

SEQ ID NO: 4343 - DNA, 35 bp, Homo sapiens
  source 1..35: mol_type = genomic DNA
agcatgggtggttcagtggtagaattctcgcctgc

SEQ ID NO: 4344 - DNA, 16 bp, Homo sapiens
  source 1..16: mol_type = genomic DNA
agcattaaccttttaa

SEQ ID NO: 4345 - DNA, 17 bp, Homo sapiens
  source 1..17: mol_type = genomic DNA
agcattaaccttttaag

SEQ ID NO: 4346 - DNA, 18 bp, Homo sapiens
  source 1..18: mol_type = genomic DNA
agcattaaccttttaagt

SEQ ID NO: 4347 - DNA, 20 bp, Homo sapiens
  source 1..20: mol_type = genomic DNA
agcattaaccttttaagtta

SEQ ID NO: 4348 - DNA, 31 bp, Homo sapiens
  source 1..31: mol_type = genomic DNA
agcattaaccttttaagttaaagattaagag

SEQ ID NO: 4349 - DNA, 34 bp, Homo sapiens
  source 1..34: mol_type = genomic DNA
agcattaaccttttaagttaaagattaagagaac

SEQ ID NO: 4350 - DNA, 35 bp, Homo sapiens
  source 1..35: mol_type = genomic DNA
agcattaaccttttaagttaaagattaagagaacc

SEQ ID NO: 4351 - DNA, 36 bp, Homo sapiens
  source 1..36: mol_type = genomic DNA
agcattaaccttttaagttaaagattaagagaacca

SEQ ID NO: 4352 - DNA, 38 bp, Homo sapiens
  source 1..38: mol_type = genomic DNA
agcattaaccttttaagttaaagattaagagaaccaac

SEQ ID NO: 4353 - DNA, 40 bp, Homo sapiens
  source 1..40: mol_type = genomic DNA
agcattaaccttttaagttaaagattaagagaaccaacac

SEQ ID NO: 4354 - DNA, 41 bp, Homo sapiens
  source 1..41: mol_type = genomic DNA
agcattaaccttttaagttaaagattaagagaaccaacacc

SEQ ID NO: 4355 - DNA, 42 bp, Homo sapiens
  source 1..42: mol_type = genomic DNA
agcattaaccttttaagttaaagattaagagaaccaacacct

SEQ ID NO: 4356 - DNA, 44 bp, Homo sapiens
  source 1..44: mol_type = genomic DNA
agcattaaccttttaagttaaagattaagagaaccaacacctct

SEQ ID NO: 4357 - DNA, 16 bp, Homo sapiens
  source 1..16: mol_type = genomic DNA
agcattggactgtaaa

SEQ ID NO: 4358 - DNA, 17 bp, Homo sapiens
  source 1..17: mol_type = genomic DNA
agcattggactgtaaat

SEQ ID NO: 4359 - DNA, 18 bp, Homo sapiens
  source 1..18: mol_type = genomic DNA
agcattggactgtaaatc

SEQ ID NO: 4360 - DNA, 19 bp, Homo sapiens
  source 1..19: mol_type = genomic DNA
agcattggactgtaaatct

SEQ ID NO: 4361 - DNA, 21 bp, Homo sapiens
  source 1..21: mol_type = genomic DNA
agcattggactgtaaatctaa

SEQ ID NO: 4362 - DNA, 23 bp, Homo sapiens
  source 1..23: mol_type = genomic DNA
agcattggactgtaaatctaaag

SEQ ID NO: 4363 - DNA, 25 bp, Homo sapiens
  source 1..25: mol_type = genomic DNA
agcattggactgtaaatctaaagac

SEQ ID NO: 4364 - DNA, 34 bp, Homo sapiens
  source 1..34: mol_type = genomic DNA
agcattggactgtaaatctaaagacaggggttag

SEQ ID NO: 4365 - DNA, 36 bp, Homo sapiens
  source 1..36: mol_type = genomic DNA
agcattggactgtaaatctaaagacaggggttaggc

SEQ ID NO: 4366 - DNA, 38 bp, Homo sapiens
  source 1..38: mol_type = genomic DNA
agcattggactgtaaatctaaagacaggggttaggcct

SEQ ID NO: 4367 - DNA, 22 bp, Homo sapiens
  source 1..22: mol_type = genomic DNA
agcattggtggttcagtggtag

SEQ ID NO: 4368 - DNA, 29 bp, Homo sapiens
  source 1..29: mol_type = genomic DNA
agcattggtggttcagtggtagaattctc

SEQ ID NO: 4369 - DNA, 31 bp, Homo sapiens
  source 1..31: mol_type = genomic DNA
agcattggtggttcagtggtagaattctcgc

SEQ ID NO: 4370 - DNA, 32 bp, Homo sapiens
  source 1..32: mol_type = genomic DNA
agcattggtggttcagtggtagaattctcgcc

SEQ ID NO: 4371 - DNA, 33 bp, Homo sapiens
  source 1..33: mol_type = genomic DNA
agcattggtggttcagtggtagaattctcgcct

SEQ ID NO: 4372 - DNA, 34 bp, Homo sapiens
  source 1..34: mol_type = genomic DNA
agcattggtggttcagtggtagaattctcgcctg

SEQ ID NO: 4373 - DNA, 35 bp, Homo sapiens
  source 1..35: mol_type = genomic DNA
agcattggtggttcagtggtagaattctcgcctgc

SEQ ID NO: 4374 - DNA, 36 bp, Homo sapiens
  source 1..36: mol_type = genomic DNA
agcattggtggttcagtggtagaattctcgcctgcc

SEQ ID NO: 4375 - DNA, 37 bp, Homo sapiens
  source 1..37: mol_type = genomic DNA
agcattggtggttcagtggtagaattctcgcctgcca

SEQ ID NO: 4376 - DNA, 17 bp, Homo sapiens
  source 1..17: mol_type = genomic DNA
agccagggattgtgggt

SEQ ID NO: 4377 - DNA, 18 bp, Homo sapiens
  source 1..18: mol_type = genomic DNA
agccagggattgtgggtt

SEQ ID NO: 4378 - DNA, 19 bp, Homo sapiens
  source 1..19: mol_type = genomic DNA
agccagggattgtgggttc

SEQ ID NO: 4379 - DNA, 20 bp, Homo sapiens
  source 1..20: mol_type = genomic DNA
agccagggattgtgggttcg

SEQ ID NO: 4380 - DNA, 24 bp, Homo sapiens
  source 1..24: mol_type = genomic DNA
agccagggattgtgggttcgagtc

SEQ ID NO: 4381 - DNA, 30 bp, Homo sapiens
  source 1..30: mol_type = genomic DNA
agccagggattgtgggttcgagtcccaccc

SEQ ID NO: 4382 - DNA, 31 bp, Homo sapiens
  source 1..31: mol_type = genomic DNA
agccagggattgtgggttcgagtcccacccg

SEQ ID NO: 4383 - DNA, 33 bp, Homo sapiens
  source 1..33: mol_type = genomic DNA
agccagggattgtgggttcgagtcccacccggg

SEQ ID NO: 4384 - DNA, 34 bp, Homo sapiens
  source 1..34: mol_type = genomic DNA
agccagggattgtgggttcgagtcccacccgggg

SEQ ID NO: 4385 - DNA, 35 bp, Homo sapiens
  source 1..35: mol_type = genomic DNA
agccagggattgtgggttcgagtcccacccggggt

SEQ ID NO: 4386 - DNA, 36 bp, Homo sapiens
  source 1..36: mol_type = genomic DNA
agccagggattgtgggttcgagtcccacccggggta

SEQ ID NO: 4387 - DNA, 37 bp, Homo sapiens
  source 1..37: mol_type = genomic DNA
agccagggattgtgggttcgagtcccacccggggtac

SEQ ID NO: 4388 - DNA, 38 bp, Homo sapiens
  source 1..38: mol_type = genomic DNA
agccagggattgtgggttcgagtcccacccggggtacc

SEQ ID NO: 4389 - DNA, 39 bp, Homo sapiens
  source 1..39: mol_type = genomic DNA
agccagggattgtgggttcgagtcccacccggggtacca

SEQ ID NO: 4390 - DNA, 31 bp, Homo sapiens
  source 1..31: mol_type = genomic DNA
agccagggattgtgggttcgagtcccacctg

SEQ ID NO: 4391 - DNA, 32 bp, Homo sapiens
  source 1..32: mol_type = genomic DNA
agccagggattgtgggttcgagtcccacctgg

SEQ ID NO: 4392 - DNA, 36 bp, Homo sapiens
  source 1..36: mol_type = genomic DNA
agccagggattgtgggttcgagtcccacctggggta

SEQ ID NO: 4393 - DNA, 38 bp, Homo sapiens
  source 1..38: mol_type = genomic DNA
agccagggattgtgggttcgagtcccacctggggtacc

SEQ ID NO: 4394 - DNA, 39 bp, Homo sapiens
  source 1..39: mol_type = genomic DNA
agccagggattgtgggttcgagtcccacctggggtacca

SEQ ID NO: 4395 - DNA, 36 bp, Homo sapiens
  source 1..36: mol_type = genomic DNA
agccagggattgtgggttcgagtcccacctggggtg

SEQ ID NO: 4396 - DNA, 37 bp, Homo sapiens
  source 1..37: mol_type = genomic DNA
agccagggattgtgggttcgagtcccacctggggtgc

SEQ ID NO: 4397 - DNA, 38 bp, Homo sapiens
  source 1..38: mol_type = genomic DNA
agccagggattgtgggttcgagtcccacctggggtgcc

SEQ ID NO: 4398 - DNA, 39 bp, Homo sapiens
  source 1..39: mol_type = genomic DNA
agccagggattgtgggttcgagtcccacctggggtgcca

SEQ ID NO: 4399 - DNA, 29 bp, Homo sapiens
  source 1..29: mol_type = genomic DNA
agccagggattgtgggttcgagtcccatc

SEQ ID NO: 4400 - DNA, 32 bp, Homo sapiens
  source 1..32: mol_type = genomic DNA
agccagggattgtgggttcgagtcccatctgg

SEQ ID NO: 4401 - DNA, 34 bp, Homo sapiens
  source 1..34: mol_type = genomic DNA
agccagggattgtgggttcgagtcccatctgggg

SEQ ID NO: 4402 - DNA, 35 bp, Homo sapiens
  source 1..35: mol_type = genomic DNA
agccagggattgtgggttcgagtcccatctggggt

SEQ ID NO: 4403 - DNA, 36 bp, Homo sapiens
  source 1..36: mol_type = genomic DNA
agccagggattgtgggttcgagtcccatctggggtg

SEQ ID NO: 4404 - DNA, 37 bp, Homo sapiens
  source 1..37: mol_type = genomic DNA
agccagggattgtgggttcgagtcccatctggggtgc

SEQ ID NO: 4405 - DNA, 38 bp, Homo sapiens
  source 1..38: mol_type = genomic DNA
agccagggattgtgggttcgagtcccatctggggtgcc

SEQ ID NO: 4406 - DNA, 39 bp, Homo sapiens
  source 1..39: mol_type = genomic DNA
agccagggattgtgggttcgagtcccatctggggtgcca

SEQ ID NO: 4407 - DNA, 24 bp, Homo sapiens
  source 1..24: mol_type = genomic DNA
agccagttgattagggtgcttagc

SEQ ID NO: 4408 - DNA, 30 bp, Homo sapiens
  source 1..30: mol_type = genomic DNA
agccatgatcgtatagtggttagtactctg

SEQ ID NO: 4409 - DNA, 19 bp, Homo sapiens
  source 1..19: mol_type = genomic DNA
agccccacgttgggcgcca

SEQ ID NO: 4410 - DNA, 17 bp, Homo sapiens
  source 1..17: mol_type = genomic DNA
agccccagtggaaccac

SEQ ID NO: 4411 - DNA, 18 bp, Homo sapiens
  source 1..18: mol_type = genomic DNA
agccccagtggaaccacc

SEQ ID NO: 4412 - DNA, 19 bp, Homo sapiens
  source 1..19: mol_type = genomic DNA
agccccagtggaaccacca

SEQ ID NO: 4413 - DNA, 33 bp, Homo sapiens
  source 1..33: mol_type = genomic DNA
agcccggatagctcagtcggtagagcatcagac

SEQ ID NO: 4414 - DNA, 37 bp, Homo sapiens
  source 1..37: mol_type = genomic DNA
agcccggatagctcagtcggtagagcatcagactttt

SEQ ID NO: 4415 - DNA, 33 bp, Homo sapiens
  source 1..33: mol_type = genomic DNA
agcccggctagctcagtcggtagagcatgagac

SEQ ID NO: 4416 - DNA, 34 bp, Homo sapiens
  source 1..34: mol_type = genomic DNA
agcccggctagctcagtcggtagagcatgagact

SEQ ID NO: 4417 - DNA, 35 bp, Homo sapiens
  source 1..35: mol_type = genomic DNA
agcccggctagctcagtcggtagagcatgagactc

SEQ ID NO: 4418 - DNA, 34 bp, Homo sapiens
  source 1..34: mol_type = genomic DNA
agcccggctagctcagtcggtagagcatgggact

SEQ ID NO: 4419 - DNA, 21 bp, Homo sapiens
  source 1..21: mol_type = genomic DNA
agcccggtaatcgcataaaac

SEQ ID NO: 4420 - DNA, 24 bp, Homo sapiens
  source 1..24: mol_type = genomic DNA
agcccggtaatcgcataaaactta

SEQ ID NO: 4421 - DNA, 25 bp, Homo sapiens
  source 1..25: mol_type = genomic DNA
agcccggtaatcgcataaaacttaa

SEQ ID NO: 4422 - DNA, 27 bp, Homo sapiens
  source 1..27: mol_type = genomic DNA
agcccggtaatcgcataaaacttaaaa

SEQ ID NO: 4423 - DNA, 28 bp, Homo sapiens
  source 1..28: mol_type = genomic DNA
agcccggtaatcgcataaaacttaaaac

SEQ ID NO: 4424 - DNA, 29 bp, Homo sapiens
  source 1..29: mol_type = genomic DNA
agcccggtaatcgcataaaacttaaaact

SEQ ID NO: 4425 - DNA, 30 bp, Homo sapiens
  source 1..30: mol_type = genomic DNA
agcccggtaatcgcataaaacttaaaactt

SEQ ID NO: 4426 - DNA, 33 bp, Homo sapiens
  source 1..33: mol_type = genomic DNA
agcccggtaatcgcataaaacttaaaactttac

SEQ ID NO: 4427 - DNA, 40 bp, Homo sapiens
  source 1..40: mol_type = genomic DNA
agcccggtaatcgcataaaacttaaaactttacagtcaga

SEQ ID NO: 4428 - DNA, 17 bp, Homo sapiens
  source 1..17: mol_type = genomic DNA
agccctcagtaagttgc

SEQ ID NO: 4429 - DNA, 18 bp, Homo sapiens
  source 1..18: mol_type = genomic DNA
agccctcagtaagttgca

SEQ ID NO: 4430 - DNA, 22 bp, Homo sapiens
  source 1..22: mol_type = genomic DNA
agccctcagtaagttgcaatac

SEQ ID NO: 4431 - DNA, 26 bp, Homo sapiens
  source 1..26: mol_type = genomic DNA
agccctcagtaagttgcaatacttaa

SEQ ID NO: 4432 - DNA, 30 bp, Homo sapiens
  source 1..30: mol_type = genomic DNA
agccctcagtaagttgcaatacttaatttc

SEQ ID NO: 4433 - DNA, 32 bp, Homo sapiens
  source 1..32: mol_type = genomic DNA
agccctcagtaagttgcaatacttaatttctg

SEQ ID NO: 4434 - DNA, 33 bp, Homo sapiens
  source 1..33: mol_type = genomic DNA
agccctcagtaagttgcaatacttaatttctgc

SEQ ID NO: 4435 - DNA, 34 bp, Homo sapiens
  source 1..34: mol_type = genomic DNA
agccctcagtaagttgcaatacttaatttctgcc

SEQ ID NO: 4436 - DNA, 35 bp, Homo sapiens
  source 1..35: mol_type = genomic DNA
agccctcagtaagttgcaatacttaatttctgcca

SEQ ID NO: 4437 - DNA, 16 bp, Homo sapiens
  source 1..16: mol_type = genomic DNA
agccgtgatcgtatag

SEQ ID NO: 4438 - DNA, 17 bp, Homo sapiens
  source 1..17: mol_type = genomic DNA
agccgtgatcgtatagt

SEQ ID NO: 4439 - DNA, 18 bp, Homo sapiens
  source 1..18: mol_type = genomic DNA
agccgtgatcgtatagtg

SEQ ID NO: 4440 - DNA, 19 bp, Homo sapiens
  source 1..19: mol_type = genomic DNA
agccgtgatcgtatagtgg

SEQ ID NO: 4441 - DNA, 20 bp, Homo sapiens
  source 1..20: mol_type = genomic DNA
agccgtgatcgtatagtggt

SEQ ID NO: 4442 - DNA, 21 bp, Homo sapiens
  source 1..21: mol_type = genomic DNA
agccgtgatcgtatagtggtt

SEQ ID NO: 4443 - DNA, 22 bp, Homo sapiens
  source 1..22: mol_type = genomic DNA
agccgtgatcgtatagtggtta

SEQ ID NO: 4444 - DNA, 23 bp, Homo sapiens
  source 1..23: mol_type = genomic DNA
agccgtgatcgtatagtggttag

SEQ ID NO: 4445 - DNA, 24 bp, Homo sapiens
  source 1..24: mol_type = genomic DNA
agccgtgatcgtatagtggttagt

SEQ ID NO: 4446 - DNA, 25 bp, Homo sapiens
  source 1..25: mol_type = genomic DNA
agccgtgatcgtatagtggttagta

SEQ ID NO: 4447 - DNA, 26 bp, Homo sapiens
  source 1..26: mol_type = genomic DNA
agccgtgatcgtatagtggttagtac

SEQ ID NO: 4448 - DNA, 27 bp, Homo sapiens
  source 1..27: mol_type = genomic DNA
agccgtgatcgtatagtggttagtact

SEQ ID NO: 4449 - DNA, 28 bp, Homo sapiens
  source 1..28: mol_type = genomic DNA
agccgtgatcgtatagtggttagtactc

SEQ ID NO: 4450 - DNA, 29 bp, Homo sapiens
  source 1..29: mol_type = genomic DNA
agccgtgatcgtatagtggttagtactct

SEQ ID NO: 4451 - DNA, 30 bp, Homo sapiens
  source 1..30: mol_type = genomic DNA
agccgtgatcgtatagtggttagtactctg

SEQ ID NO: 4452 - DNA, 31 bp, Homo sapiens
  source 1..31: mol_type = genomic DNA
agccgtgatcgtatagtggttagtactctgc

SEQ ID NO: 4453 - DNA, 32 bp, Homo sapiens
  source 1..32: mol_type = genomic DNA
agccgtgatcgtatagtggttagtactctgcg

SEQ ID NO: 4454 - DNA, 33 bp, Homo sapiens
  source 1..33: mol_type = genomic DNA
agccgtgatcgtatagtggttagtactctgcgt

SEQ ID NO: 4455 - DNA, 34 bp, Homo sapiens
  source 1..34: mol_type = genomic DNA
agccgtgatcgtatagtggttagtactctgcgtt

SEQ ID NO: 4456 - DNA, 35 bp, Homo sapiens
  source 1..35: mol_type = genomic DNA
agccgtgatcgtatagtggttagtactctgcgttg

SEQ ID NO: 4457 - DNA, 36 bp, Homo sapiens
  source 1..36: mol_type = genomic DNA
agccgtgatcgtatagtggttagtactctgcgttgt

SEQ ID NO: 4458 - DNA, 37 bp, Homo sapiens
  source 1..37: mol_type = genomic DNA
agccgtgatcgtatagtggttagtactctgcgttgtg

SEQ ID NO: 4459 - DNA, 40 bp, Homo sapiens
  source 1..40: mol_type = genomic DNA
agccgtgatcgtatagtggttagtactctgcgttgtggcc

SEQ ID NO: 4460 - DNA, 41 bp, Homo sapiens
  source 1..41: mol_type = genomic DNA
agccgtgatcgtatagtggttagtactctgcgttgtggccg

SEQ ID NO: 4461 - DNA, 19 bp, Homo sapiens
  source 1..19: mol_type = genomic DNA
agcctcacctggagcacca

SEQ ID NO: 4462 - DNA, 22 bp, Homo sapiens
  source 1..22: mol_type = genomic DNA
agcctccggagctggggattgt

SEQ ID NO: 4463 - DNA, 28 bp, Homo sapiens
  source 1..28: mol_type = genomic DNA
agcctccggagctggggattgtgggttc

SEQ ID NO: 4464 - DNA, 43 bp, Homo sapiens
  source 1..43: mol_type = genomic DNA
agccttcaaagccctcagtaagttgcaatacttaatttctgcc

SEQ ID NO: 4465 - DNA, 44 bp, Homo sapiens
  source 1..44: mol_type = genomic DNA
agccttcaaagccctcagtaagttgcaatacttaatttctgcca

SEQ ID NO: 4466 - DNA, 21 bp, Homo sapiens
  source 1..21: mol_type = genomic DNA
agcgatccgagttcaaatctc

SEQ ID NO: 4467 - DNA, 25 bp, Homo sapiens
  source 1..25: mol_type = genomic DNA
agcgatccgagttcaaatctcggtg

SEQ ID NO: 4468 - DNA, 29 bp, Homo sapiens
  source 1..29: mol_type = genomic DNA
agcgatccgagttcaaatctcggtggaac

SEQ ID NO: 4469 - DNA, 30 bp, Homo sapiens
  source 1..30: mol_type = genomic DNA
agcgatccgagttcaaatctcggtggaacc

SEQ ID NO: 4470 - DNA, 31 bp, Homo sapiens
  source 1..31: mol_type = genomic DNA
agcgatccgagttcaaatctcggtggaacct

SEQ ID NO: 4471 - DNA, 32 bp, Homo sapiens
  source 1..32: mol_type = genomic DNA
agcgatccgagttcaaatctcggtggaacctc

SEQ ID NO: 4472 - DNA, 33 bp, Homo sapiens
  source 1..33: mol_type = genomic DNA
agcgatccgagttcaaatctcggtggaacctcc

SEQ ID NO: 4473 - DNA, 29 bp, Homo sapiens
  source 1..29: mol_type = genomic DNA
agcgatccgagttcaaatctcggtgggac

SEQ ID NO: 4474 - DNA, 30 bp, Homo sapiens
  source 1..30: mol_type = genomic DNA
agcgatccgagttcaaatctcggtgggacc

SEQ ID NO: 4475 - DNA, 31 bp, Homo sapiens
  source 1..31: mol_type = genomic DNA
agcgatccgagttcaaatctcggtgggacct

SEQ ID NO: 4476 - DNA, 32 bp, Homo sapiens
  source 1..32: mol_type = genomic DNA
agcgatccgagttcaaatctcggtgggacctc

SEQ ID NO: 4477 - DNA, 33 bp, Homo sapiens
  source 1..33: mol_type = genomic DNA
agcgatccgagttcaaatctcggtgggacctcc

SEQ ID NO: 4478 - DNA, 32 bp, Homo sapiens
  source 1..32: mol_type = genomic DNA
agcgatccgagttcaagtctcggtggaacctc

SEQ ID NO: 4479 - DNA, 21 bp, Homo sapiens
  source 1..21: mol_type = genomic DNA
agcgatccgagttcgagtctc

SEQ ID NO: 4480 - DNA, 24 bp, Homo sapiens
  source 1..24: mol_type = genomic DNA
agcgatccgagttcgagtctcggt

SEQ ID NO: 4481 - DNA, 29 bp, Homo sapiens
  source 1..29: mol_type = genomic DNA
agcgatccgagttcgagtctcggtggaac

SEQ ID NO: 4482 - DNA, 30 bp, Homo sapiens
  source 1..30: mol_type = genomic DNA
agcgatccgagttcgagtctcggtggaacc

SEQ ID NO: 4483 - DNA, 31 bp, Homo sapiens
  source 1..31: mol_type = genomic DNA
agcgatccgagttcgagtctcggtggaacct

SEQ ID NO: 4484 - DNA, 32 bp, Homo sapiens
  source 1..32: mol_type = genomic DNA
agcgatccgagttcgagtctcggtggaacctc

SEQ ID NO: 4485 - DNA, 33 bp, Homo sapiens
  source 1..33: mol_type = genomic DNA
agcgatccgagttcgagtctcggtggaacctcc

SEQ ID NO: 4486 - DNA, 21 bp, Homo sapiens
  source 1..21: mol_type = genomic DNA
agcgatggccgagtggttaag

SEQ ID NO: 4487 - DNA, 23 bp, Homo sapiens
  source 1..23: mol_type = genomic DNA
agcgatggccgagtggttaaggc

SEQ ID NO: 4488 - DNA, 17 bp, Homo sapiens
  source 1..17: mol_type = genomic DNA
agcgcattggacttcta

SEQ ID NO: 4489 - DNA, 19 bp, Homo sapiens
  source 1..19: mol_type = genomic DNA
agcgcattggacttctaat

SEQ ID NO: 4490 - DNA, 21 bp, Homo sapiens
  source 1..21: mol_type = genomic DNA
agcgcattggacttctaattc

SEQ ID NO: 4491 - DNA, 24 bp, Homo sapiens
  source 1..24: mol_type = genomic DNA
agcgcattggacttctaattcaaa

SEQ ID NO: 4492 - DNA, 25 bp, Homo sapiens
  source 1..25: mol_type = genomic DNA
agcgcattggacttctaattcaaag

SEQ ID NO: 4493 - DNA, 33 bp, Homo sapiens
  source 1..33: mol_type = genomic DNA
agcgcattggacttctaattcaaaggttccggg

SEQ ID NO: 4494 - DNA, 39 bp, Homo sapiens
  source 1..39: mol_type = genomic DNA
agcgcattggacttctaattcaaaggttgtgggttcgag

SEQ ID NO: 4495 - DNA, 16 bp, Homo sapiens
  source 1..16: mol_type = genomic DNA
agcgcgcggtacttat

SEQ ID NO: 4496 - DNA, 19 bp, Homo sapiens
  source 1..19: mol_type = genomic DNA
agcgcgctggacttctaat

SEQ ID NO: 4497 - DNA, 16 bp, Homo sapiens
  source 1..16: mol_type = genomic DNA
agcgcgttcggctgtt

SEQ ID NO: 4498 - DNA, 20 bp, Homo sapiens
  source 1..20: mol_type = genomic DNA
agcgcgttcggctgttaacc

SEQ ID NO: 4499 - DNA, 24 bp, Homo sapiens
  source 1..24: mol_type = genomic DNA
agcgcgttcggctgttaaccgaaa

SEQ ID NO: 4500 - DNA, 25 bp, Homo sapiens
  source 1..25: mol_type = genomic DNA
agcgcgttcggctgttaaccgaaag

SEQ ID NO: 4501 - DNA, 26 bp, Homo sapiens
  source 1..26: mol_type = genomic DNA
agcgcgttcggctgttaaccgaaagg

SEQ ID NO: 4502 - DNA, 27 bp, Homo sapiens
  source 1..27: mol_type = genomic DNA
agcgcgttcggctgttaaccgaaaggt

SEQ ID NO: 4503 - DNA, 35 bp, Homo sapiens
  source 1..35: mol_type = genomic DNA
agcgcgttcggctgttaaccgaaaggttggtggtt

SEQ ID NO: 4504 - DNA, 37 bp, Homo sapiens
  source 1..37: mol_type = genomic DNA
agcgcgttcggctgttaaccgaaaggttggtggttcg

SEQ ID NO: 4505 - DNA, 21 bp, Homo sapiens
  source 1..21: mol_type = genomic DNA
agcgcgttcggctgttaatct

SEQ ID NO: 4506 - DNA, 16 bp, Homo sapiens
  source 1..16: mol_type = genomic DNA
agcggaagcgtgctgg

SEQ ID NO: 4507 - DNA, 17 bp, Homo sapiens
  source 1..17: mol_type = genomic DNA
agcggaagcgtgctggg

SEQ ID NO: 4508 - DNA, 18 bp, Homo sapiens
  source 1..18: mol_type = genomic DNA
agcggaagcgtgctgggc

SEQ ID NO: 4509 - DNA, 19 bp, Homo sapiens
  source 1..19: mol_type = genomic DNA
agcggaagcgtgctgggcc

SEQ ID NO: 4510 - DNA, 20 bp, Homo sapiens
  source 1..20: mol_type = genomic DNA
agcggaagcgtgctgggccc

SEQ ID NO: 4511 - DNA, 21 bp, Homo sapiens
  source 1..21: mol_type = genomic DNA
agcggaagcgtgctgggccca

SEQ ID NO: 4512 - DNA, 22 bp, Homo sapiens
  source 1..22: mol_type = genomic DNA
agcggaagcgtgctgggcccat

SEQ ID NO: 4513 - DNA, 25 bp, Homo sapiens
  source 1..25: mol_type = genomic DNA
agcggaagcgtgctgggcccataac

SEQ ID NO: 4514 - DNA, 28 bp, Homo sapiens
  source 1..28: mol_type = genomic DNA
agcggaagcgtgctgggcccataaccca

SEQ ID NO: 4515 - DNA, 29 bp, Homo sapiens
  source 1..29: mol_type = genomic DNA
agcgggatcgatgcccgcatcctccacca

SEQ ID NO: 4516 - DNA, 17 bp, Homo sapiens
  source 1..17: mol_type = genomic DNA
agcggtctaaggcgctg

SEQ ID NO: 4517 - DNA, 24 bp, Homo sapiens
  source 1..24: mol_type = genomic DNA
agcggtctaaggcgctgcgttcag

SEQ ID NO: 4518 - DNA, 19 bp, Homo sapiens
  source 1..19: mol_type = genomic DNA
agcggtctaaggcgctgga

SEQ ID NO: 4519 - DNA, 21 bp, Homo sapiens
  source 1..21: mol_type = genomic DNA
agcggtctaaggcgctggatt

SEQ ID NO: 4520 - DNA, 19 bp, Homo sapiens
  source 1..19: mol_type = genomic DNA
agcggttaggattcctggt

SEQ ID NO: 4521 - DNA, 20 bp, Homo sapiens
  source 1..20: mol_type = genomic DNA
agcggttaggattcctggtt

SEQ ID NO: 4522 - DNA, 22 bp, Homo sapiens
  source 1..22: mol_type = genomic DNA
agcggttaggattcctggtttt

SEQ ID NO: 4523 - DNA, 23 bp, Homo sapiens
  source 1..23: mol_type = genomic DNA
agcggttaggattcctggttttc

SEQ ID NO: 4524 - DNA, 20 bp, Homo sapiens
  source 1..20: mol_type = genomic DNA
agcggttatcacattcgcct

SEQ ID NO: 4525 - DNA, 21 bp, Homo sapiens
  source 1..21: mol_type = genomic DNA
agcgtgctgggcccataaccc

SEQ ID NO: 4526 - DNA, 23 bp, Homo sapiens
  source 1..23: mol_type = genomic DNA
agcgtgctgggcccataacccag

SEQ ID NO: 4527 - DNA, 24 bp, Homo sapiens
  source 1..24: mol_type = genomic DNA
agcgtgctgggcccataacccaga

SEQ ID NO: 4528 - DNA, 32 bp, Homo sapiens
  source 1..32: mol_type = genomic DNA
agcgtgctgggcccataacccagaggtcgatg

SEQ ID NO: 4529 - DNA, 34 bp, Homo sapiens
  source 1..34: mol_type = genomic DNA
agcgtgctgggcccataacccagaggtcgatgga

SEQ ID NO: 4530 - DNA, 35 bp, Homo sapiens
  source 1..35: mol_type = genomic DNA
agcgtgctgggcccataacccagaggtcgatggat

SEQ ID NO: 4531 - DNA, 36 bp, Homo sapiens
  source 1..36: mol_type = genomic DNA
agcgtgctgggcccataacccagaggtcgatggatc

SEQ ID NO: 4532 - DNA, 37 bp, Homo sapiens
  source 1..37: mol_type = genomic DNA
agcgtgctgggcccataacccagaggtcgatggatcg

SEQ ID NO: 4533 - DNA, 18 bp, Homo sapiens
  source 1..18: mol_type = genomic DNA
agcgtggccgagcggtct

SEQ ID NO: 4534 - DNA, 19 bp, Homo sapiens
  source 1..19: mol_type = genomic DNA
agcgtggccgagcggtcta

SEQ ID NO: 4535 - DNA, 21 bp, Homo sapiens
  source 1..21: mol_type = genomic DNA
agcgtggccgagcggtctaag

SEQ ID NO: 4536 - DNA, 22 bp, Homo sapiens
  source 1..22: mol_type = genomic DNA
agcgtggccgagcggtctaagg

SEQ ID NO: 4537 - DNA, 23 bp, Homo sapiens
  source 1..23: mol_type = genomic DNA
agcgtggccgagcggtctaaggc

SEQ ID NO: 4538 - DNA, 34 bp, Homo sapiens
  source 1..34: mol_type = genomic DNA
agcgtggccgagcggtctaaggcgctggatttag

SEQ ID NO: 4539 - DNA, 34 bp, Homo sapiens
  source 1..34: mol_type = genomic DNA
agcgtggccgagtggtctaaggcgctggatttag

SEQ ID NO: 4540 - DNA, 33 bp, Homo sapiens
  source 1..33: mol_type = genomic DNA
agcgtggtgctaataacgccaaggtcgcgggtt

SEQ ID NO: 4541 - DNA, 19 bp, Homo sapiens
  source 1..19: mol_type = genomic DNA
agctaaataagctatcggg

SEQ ID NO: 4542 - DNA, 20 bp, Homo sapiens
  source 1..20: mol_type = genomic DNA
agctaaataagctatcgggc

SEQ ID NO: 4543 - DNA, 21 bp, Homo sapiens
  source 1..21: mol_type = genomic DNA
agctaaataagctatcgggcc

SEQ ID NO: 4544 - DNA, 22 bp, Homo sapiens
  source 1..22: mol_type = genomic DNA
agctaaataagctatcgggccc

SEQ ID NO: 4545 - DNA, 23 bp, Homo sapiens
  source 1..23: mol_type = genomic DNA
agctaaataagctatcgggccca

SEQ ID NO: 4546 - DNA, 24 bp, Homo sapiens
  source 1..24: mol_type = genomic DNA
agctaaataagctatcgggcccat

SEQ ID NO: 4547 - DNA, 25 bp, Homo sapiens
  source 1..25: mol_type = genomic DNA
agctaaataagctatcgggcccata

SEQ ID NO: 4548 - DNA, 26 bp, Homo sapiens
  source 1..26: mol_type = genomic DNA
agctaaataagctatcgggcccatac

SEQ ID NO: 4549 - DNA, 27 bp, Homo sapiens
  source 1..27: mol_type = genomic DNA
agctaaataagctatcgggcccatacc

SEQ ID NO: 4550 - DNA, 28 bp, Homo sapiens
  source 1..28: mol_type = genomic DNA
agctaaataagctatcgggcccataccc

SEQ ID NO: 4551 - DNA, 29 bp, Homo sapiens
  source 1..29: mol_type = genomic DNA
agctaaataagctatcgggcccatacccc

SEQ ID NO: 4552 - DNA, 33 bp, Homo sapiens
  source 1..33: mol_type = genomic DNA
agctaaataagctatcgggcccataccccgaaa

SEQ ID NO: 4553 - DNA, 40 bp, Homo sapiens
  source 1..40: mol_type = genomic DNA
agctaaataagctatcgggcccataccccgaaaatgttgg

SEQ ID NO: 4554 - DNA, 41 bp, Homo sapiens
  source 1..41: mol_type = genomic DNA
agctaaataagctatcgggcccataccccgaaaatgttggt

SEQ ID NO: 4555 - DNA, 42 bp, Homo sapiens
  source 1..42: mol_type = genomic DNA
agctaaataagctatcgggcccataccccgaaaatgttggtt

SEQ ID NO: 4556 - DNA, 16 bp, Homo sapiens
  source 1..16: mol_type = genomic DNA
agctatccattggtct

SEQ ID NO: 4557 - DNA, 17 bp, Homo sapiens
  source 1..17: mol_type = genomic DNA
agctatccattggtctt

SEQ ID NO: 4558 - DNA, 18 bp, Homo sapiens
  source 1..18: mol_type = genomic DNA
agctatccattggtctta

SEQ ID NO: 4559 - DNA, 19 bp, Homo sapiens
  source 1..19: mol_type = genomic DNA
agctatccattggtcttag

SEQ ID NO: 4560 - DNA, 22 bp, Homo sapiens
  source 1..22: mol_type = genomic DNA
agctatccattggtcttaggcc

SEQ ID NO: 4561 - DNA, 23 bp, Homo sapiens
  source 1..23: mol_type = genomic DNA
agctatccattggtcttaggccc

SEQ ID NO: 4562 - DNA, 28 bp, Homo sapiens
  source 1..28: mol_type = genomic DNA
agctatccattggtcttaggccccaaaa

SEQ ID NO: 4563 - DNA, 29 bp, Homo sapiens
  source 1..29: mol_type = genomic DNA
agctatccattggtcttaggccccaaaaa

SEQ ID NO: 4564 - DNA, 30 bp, Homo sapiens
  source 1..30: mol_type = genomic DNA
agctatccattggtcttaggccccaaaaat

SEQ ID NO: 4565 - DNA, 16 bp, Homo sapiens
  source 1..16: mol_type = genomic DNA
agctatcgggcccata

SEQ ID NO: 4566 - DNA, 17 bp, Homo sapiens
  source 1..17: mol_type = genomic DNA
agctatcgggcccatac

SEQ ID NO: 4567 - DNA, 18 bp, Homo sapiens
  source 1..18: mol_type = genomic DNA
agctatcgggcccatacc

SEQ ID NO: 4568 - DNA, 19 bp, Homo sapiens
  source 1..19: mol_type = genomic DNA
agctatcgggcccataccc

SEQ ID NO: 4569 - DNA, 20 bp, Homo sapiens
  source 1..20: mol_type = genomic DNA
agctatcgggcccatacccc

SEQ ID NO: 4570 - DNA, 21 bp, Homo sapiens
  source 1..21: mol_type = genomic DNA
agctatcgggcccataccccg

SEQ ID NO: 4571 - DNA, 22 bp, Homo sapiens
  source 1..22: mol_type = genomic DNA
agctatcgggcccataccccga

SEQ ID NO: 4572 - DNA, 23 bp, Homo sapiens
  source 1..23: mol_type = genomic DNA
agctatcgggcccataccccgaa

SEQ ID NO: 4573 - DNA, 24 bp, Homo sapiens
  source 1..24: mol_type = genomic DNA
agctatcgggcccataccccgaaa

SEQ ID NO: 4574 - DNA, 25 bp, Homo sapiens
  source 1..25: mol_type = genomic DNA
agctatcgggcccataccccgaaaa

SEQ ID NO: 4575 - DNA, 26 bp, Homo sapiens
  source 1..26: mol_type = genomic DNA
agctatcgggcccataccccgaaaat

SEQ ID NO: 4576 - DNA, 27 bp, Homo sapiens
  source 1..27: mol_type = genomic DNA
agctatcgggcccataccccgaaaatg

SEQ ID NO: 4577 - DNA, 28 bp, Homo sapiens
  source 1..28: mol_type = genomic DNA
agctatcgggcccataccccgaaaatgt

SEQ ID NO: 4578 - DNA, 29 bp, Homo sapiens
  source 1..29: mol_type = genomic DNA
agctatcgggcccataccccgaaaatgtt

SEQ ID NO: 4579 - DNA, 30 bp, Homo sapiens
  source 1..30: mol_type = genomic DNA
agctatcgggcccataccccgaaaatgttg

SEQ ID NO: 4580 - DNA, 31 bp, Homo sapiens
  source 1..31: mol_type = genomic DNA
agctatcgggcccataccccgaaaatgttgg

SEQ ID NO: 4581 - DNA, 32 bp, Homo sapiens
  source 1..32: mol_type = genomic DNA
agctatcgggcccataccccgaaaatgttggt

SEQ ID NO: 4582 - DNA, 33 bp, Homo sapiens
  source 1..33: mol_type = genomic DNA
agctatcgggcccataccccgaaaatgttggtt

SEQ ID NO: 4583 - DNA, 34 bp, Homo sapiens
  source 1..34: mol_type = genomic DNA
agctatcgggcccataccccgaaaatgttggtta

SEQ ID NO: 4584 - DNA, 35 bp, Homo sapiens
  source 1..35: mol_type = genomic DNA
agctatcgggcccataccccgaaaatgttggttat

SEQ ID NO: 4585 - DNA, 36 bp, Homo sapiens
  source 1..36: mol_type = genomic DNA
agctatcgggcccataccccgaaaatgttggttata

SEQ ID NO: 4586 - DNA, 37 bp, Homo sapiens
  source 1..37: mol_type = genomic DNA
agctatcgggcccataccccgaaaatgttggttatac

SEQ ID NO: 4587 - DNA, 40 bp, Homo sapiens
  source 1..40: mol_type = genomic DNA
agctatcgggcccataccccgaaaatgttggttataccct

SEQ ID NO: 4588 - DNA, 44 bp, Homo sapiens
  source 1..44: mol_type = genomic DNA
agctatcgggcccataccccgaaaatgttggttatacccttccc

SEQ ID NO: 4589 - DNA, 47 bp, Homo sapiens
  source 1..47: mol_type = genomic DNA
agctatcgggcccataccccgaaaatgttggttatacccttcccgta

SEQ ID NO: 4590 - DNA, 16 bp, Homo sapiens
  source 1..16: mol_type = genomic DNA
agctcacaagaactgc

SEQ ID NO: 4591 - DNA, 17 bp, Homo sapiens
  source 1..17: mol_type = genomic DNA
agctcacaagaactgct

SEQ ID NO: 4592 - DNA, 18 bp, Homo sapiens
  source 1..18: mol_type = genomic DNA
agctcacaagaactgcta

SEQ ID NO: 4593 - DNA, 19 bp, Homo sapiens
  source 1..19: mol_type = genomic DNA
agctcacaagaactgctaa

SEQ ID NO: 4594 - DNA, 20 bp, Homo sapiens
  source 1..20: mol_type = genomic DNA
agctcacaagaactgctaac

SEQ ID NO: 4595 - DNA, 21 bp, Homo sapiens
  source 1..21: mol_type = genomic DNA
agctcacaagaactgctaact

SEQ ID NO: 4596 - DNA, 22 bp, Homo sapiens
  source 1..22: mol_type = genomic DNA
agctcacaagaactgctaactc

SEQ ID NO: 4597 - DNA, 23 bp, Homo sapiens
  source 1..23: mol_type = genomic DNA
agctcacaagaactgctaactca

SEQ ID NO: 4598 - DNA, 24 bp, Homo sapiens
  source 1..24: mol_type = genomic DNA
agctcacaagaactgctaactcat

SEQ ID NO: 4599 - DNA, 25 bp, Homo sapiens
  source 1..25: mol_type = genomic DNA
agctcacaagaactgctaactcatg

SEQ ID NO: 4600 - DNA, 26 bp, Homo sapiens
  source 1..26: mol_type = genomic DNA
agctcacaagaactgctaactcatgc

SEQ ID NO: 4601 - DNA, 27 bp, Homo sapiens
  source 1..27: mol_type = genomic DNA
agctcacaagaactgctaactcatgcc

SEQ ID NO: 4602 - DNA, 28 bp, Homo sapiens
  source 1..28: mol_type = genomic DNA
agctcacaagaactgctaactcatgccc

SEQ ID NO: 4603 - DNA, 29 bp, Homo sapiens
  source 1..29: mol_type = genomic DNA
agctcacaagaactgctaactcatgcccc

SEQ ID NO: 4604 - DNA, 30 bp, Homo sapiens
  source 1..30: mol_type = genomic DNA
agctcacaagaactgctaactcatgccccc

SEQ ID NO: 4605 - DNA, 31 bp, Homo sapiens
  source 1..31: mol_type = genomic DNA
agctcacaagaactgctaactcatgccccca

SEQ ID NO: 4606 - DNA, 33 bp, Homo sapiens
  source 1..33: mol_type = genomic DNA
agctcacaagaactgctaactcatgcccccatg

SEQ ID NO: 4607 - DNA, 34 bp, Homo sapiens
  source 1..34: mol_type = genomic DNA
agctcacaagaactgctaactcatgcccccatgt

SEQ ID NO: 4608 - DNA, 35 bp, Homo sapiens
  source 1..35: mol_type = genomic DNA
agctcacaagaactgctaactcatgcccccatgtc

SEQ ID NO: 4609 - DNA, 36 bp, Homo sapiens
  source 1..36: mol_type = genomic DNA
agctcacaagaactgctaactcatgcccccatgtct

SEQ ID NO: 4610 - DNA, 38 bp, Homo sapiens
  source 1..38: mol_type = genomic DNA
agctcacaagaactgctaactcatgcccccatgtctaa

SEQ ID NO: 4611 - DNA, 39 bp, Homo sapiens
  source 1..39: mol_type = genomic DNA
agctcacaagaactgctaactcatgcccccatgtctaac

SEQ ID NO: 4612 - DNA, 40 bp, Homo sapiens
  source 1..40: mol_type = genomic DNA
agctcacaagaactgctaactcatgcccccatgtctaaca

SEQ ID NO: 4613 - DNA, 42 bp, Homo sapiens
  source 1..42: mol_type = genomic DNA
agctcacaagaactgctaactcatgcccccatgtctaacaac

SEQ ID NO: 4614 - DNA, 43 bp, Homo sapiens
  source 1..43: mol_type = genomic DNA
agctcacaagaactgctaactcatgcccccatgtctaacaaca

SEQ ID NO: 4615 - DNA, 44 bp, Homo sapiens
  source 1..44: mol_type = genomic DNA
agctcacaagaactgctaactcatgcccccatgtctaacaacat

SEQ ID NO: 4616 - DNA, 45 bp, Homo sapiens
  source 1..45: mol_type = genomic DNA
agctcacaagaactgctaactcatgcccccatgtctaacaacatg

SEQ ID NO: 4617 - DNA, 46 bp, Homo sapiens
  source 1..46: mol_type = genomic DNA
agctcacaagaactgctaactcatgcccccatgtctaacaacatgg

SEQ ID NO: 4618 - DNA, 47 bp, Homo sapiens
  source 1..47: mol_type = genomic DNA
agctcacaagaactgctaactcatgcccccatgtctaacaacatggc

SEQ ID NO: 4619 - DNA, 48 bp, Homo sapiens
  source 1..48: mol_type = genomic DNA
agctcacaagaactgctaactcatgcccccatgtctaacaacatggct

SEQ ID NO: 4620 - DNA, 25 bp, Homo sapiens
  source 1..25: mol_type = genomic DNA
agctcagctggtagagcggaggact

SEQ ID NO: 4621 - DNA, 24 bp, Homo sapiens
  source 1..24: mol_type = genomic DNA
agctcaggggtagagcatttgact

SEQ ID NO: 4622 - DNA, 24 bp, Homo sapiens
  source 1..24: mol_type = genomic DNA
agctcaggggttagagcactggtc

SEQ ID NO: 4623 - DNA, 25 bp, Homo sapiens
  source 1..25: mol_type = genomic DNA
agctcaggggttagagcactggtct

SEQ ID NO: 4624 - DNA, 16 bp, Homo sapiens
  source 1..16: mol_type = genomic DNA
agctcagtcggtagag

SEQ ID NO: 4625 - DNA, 17 bp, Homo sapiens
  source 1..17: mol_type = genomic DNA
agctcagtcggtagagc

SEQ ID NO: 4626 - DNA, 20 bp, Homo sapiens
  source 1..20: mol_type = genomic DNA
agctcagtcggtagagcatc

SEQ ID NO: 4627 - DNA, 24 bp, Homo sapiens
  source 1..24: mol_type = genomic DNA
agctcagtcggtagagcatcagac

SEQ ID NO: 4628 - DNA, 25 bp, Homo sapiens
  source 1..25: mol_type = genomic DNA
agctcagtcggtagagcatcagact

SEQ ID NO: 4629 - DNA, 26 bp, Homo sapiens
  source 1..26: mol_type = genomic DNA
agctcagtcggtagagcatcagactt

SEQ ID NO: 4630 - DNA, 27 bp, Homo sapiens
  source 1..27: mol_type = genomic DNA
agctcagtcggtagagcatcagacttt

SEQ ID NO: 4631 - DNA, 28 bp, Homo sapiens
  source 1..28: mol_type = genomic DNA
agctcagtcggtagagcatcagactttt

SEQ ID NO: 4632 - DNA, 20 bp, Homo sapiens
  source 1..20: mol_type = genomic DNA
agctcagtcggtagagcatg

SEQ ID NO: 4633 - DNA, 24 bp, Homo sapiens
  source 1..24: mol_type = genomic DNA
agctcagtcggtagagcatgagac

SEQ ID NO: 4634 - DNA, 25 bp, Homo sapiens
  source 1..25: mol_type = genomic DNA
agctcagtcggtagagcatgagacc

SEQ ID NO: 4635 - DNA, 26 bp, Homo sapiens
  source 1..26: mol_type = genomic DNA
agctcagtcggtagagcatgagaccc

SEQ ID NO: 4636 - DNA, 27 bp, Homo sapiens
  source 1..27: mol_type = genomic DNA
agctcagtcggtagagcatgagaccct

SEQ ID NO: 4637 - DNA, 28 bp, Homo sapiens
  source 1..28: mol_type = genomic DNA
agctcagtcggtagagcatgagaccctt

SEQ ID NO: 4638 - DNA, 25 bp, Homo sapiens
  source 1..25: mol_type = genomic DNA
agctcagtcggtagagcatgagact

SEQ ID NO: 4639 - DNA, 26 bp, Homo sapiens
  source 1..26: mol_type = genomic DNA
agctcagtcggtagagcatgagactc

SEQ ID NO: 4640 - DNA, 27 bp, Homo sapiens
  source 1..27: mol_type = genomic DNA
agctcagtcggtagagcatgagactct

SEQ ID NO: 4641 - DNA, 28 bp, Homo sapiens
  source 1..28: mol_type = genomic DNA
agctcagtcggtagagcatgagactctt

SEQ ID NO: 4642 - DNA, 30 bp, Homo sapiens
  source 1..30: mol_type = genomic DNA
agctcagtcggtagagcatgagactcttaa

SEQ ID NO: 4643 - DNA, 31 bp, Homo sapiens
  source 1..31: mol_type = genomic DNA
agctcagtcggtagagcatgagactcttaat

SEQ ID NO: 4644 - DNA, 32 bp, Homo sapiens
  source 1..32: mol_type = genomic DNA
agctcagtcggtagagcatgagactcttaatc

SEQ ID NO: 4645 - DNA, 33 bp, Homo sapiens
  source 1..33: mol_type = genomic DNA
agctcagtcggtagagcatgagactcttaatct

SEQ ID NO: 4646 - DNA, 44 bp, Homo sapiens
  source 1..44: mol_type = genomic DNA
agctcagtcggtagagcatgagactcttaatctcagggtcgtgg

SEQ ID NO: 4647 - DNA, 46 bp, Homo sapiens
  source 1..46: mol_type = genomic DNA
agctcagtcggtagagcatgagactcttaatctcagggtcgtgggt

SEQ ID NO: 4648 - DNA, 47 bp, Homo sapiens
  source 1..47: mol_type = genomic DNA
agctcagtcggtagagcatgagactcttaatctcagggtcgtgggtt

SEQ ID NO: 4649 - DNA, 22 bp, Homo sapiens
  source 1..22: mol_type = genomic DNA
agctcagtcggtagagcatggg

SEQ ID NO: 4650 - DNA, 23 bp, Homo sapiens
  source 1..23: mol_type = genomic DNA
agctcagtcggtagagcatggga

SEQ ID NO: 4651 - DNA, 24 bp, Homo sapiens
  source 1..24: mol_type = genomic DNA
agctcagtcggtagagcatgggac

SEQ ID NO: 4652 - DNA, 25 bp, Homo sapiens
  source 1..25: mol_type = genomic DNA
agctcagtcggtagagcatgggact

SEQ ID NO: 4653 - DNA, 26 bp, Homo sapiens
  source 1..26: mol_type = genomic DNA
agctcagtcggtagagcatgggactc

SEQ ID NO: 4654 - DNA, 27 bp, Homo sapiens
  source 1..27: mol_type = genomic DNA
agctcagtcggtagagcatgggactct

SEQ ID NO: 4655 - DNA, 28 bp, Homo sapiens
  source 1..28: mol_type = genomic DNA
agctcagtcggtagagcatgggactctt

SEQ ID NO: 4656 - DNA, 29 bp, Homo sapiens
  source 1..29: mol_type = genomic DNA
agctcagtcggtagagcatgggactctta

SEQ ID NO: 4657 - DNA, 30 bp, Homo sapiens
  source 1..30: mol_type = genomic DNA
agctcagtcggtagagcatgggactcttaa

SEQ ID NO: 4658 - DNA, 31 bp, Homo sapiens
  source 1..31: mol_type = genomic DNA
agctcagtcggtagagcatgggactcttaat

SEQ ID NO: 4659 - DNA, 32 bp, Homo sapiens
  source 1..32: mol_type = genomic DNA
agctcagtcggtagagcatgggactcttaatc

SEQ ID NO: 4660 - DNA, 33 bp, Homo sapiens
  source 1..33: mol_type = genomic DNA
agctcagtcggtagagcatgggactcttaatcc

SEQ ID NO: 4661 - DNA, 44 bp, Homo sapiens
  source 1..44: mol_type = genomic DNA
agctcagtcggtagagcatgggactcttaatcccagggtcgtgg

SEQ ID NO: 4662 - DNA, 46 bp, Homo sapiens
  source 1..46: mol_type = genomic DNA
agctcagtcggtagagcatgggactcttaatcccagggtcgtgggt

SEQ ID NO: 4663 - DNA, 47 bp, Homo sapiens
  source 1..47: mol_type = genomic DNA
agctcagtcggtagagcatgggactcttaatcccagggtcgtgggtt

SEQ ID NO: 4664 - DNA, 47 bp, Homo sapiens
  source 1..47: mol_type = genomic DNA
agctcagtcggtagagcatgggactcttaatctcagggtcgtgggtt

SEQ ID NO: 4665 - DNA, 24 bp, Homo sapiens
  source 1..24: mol_type = genomic DNA
agctcagtggtagagcatttgact

SEQ ID NO: 4666 - DNA, 25 bp, Homo sapiens
  source 1..25: mol_type = genomic DNA
agctcagtggtagagcatttgactg

SEQ ID NO: 4667 - DNA, 26 bp, Homo sapiens
  source 1..26: mol_type = genomic DNA
agctcagtggtagagcatttgactgc

SEQ ID NO: 4668 - DNA, 27 bp, Homo sapiens
  source 1..27: mol_type = genomic DNA
agctcagtggtagagcatttgactgca

SEQ ID NO: 4669 - DNA, 27 bp, Homo sapiens
  source 1..27: mol_type = genomic DNA
agctcagttgggagagcgttagactga

SEQ ID NO: 4670 - DNA, 24 bp, Homo sapiens
  source 1..24: mol_type = genomic DNA
agctcagttggtagagcatcagac

SEQ ID NO: 4671 - DNA, 16 bp, Homo sapiens
  source 1..16: mol_type = genomic DNA
agctccgaggtgattt

SEQ ID NO: 4672 - DNA, 17 bp, Homo sapiens
  source 1..17: mol_type = genomic DNA
agctccgaggtgatttt

SEQ ID NO: 4673 - DNA, 18 bp, Homo sapiens
  source 1..18: mol_type = genomic DNA
agctccgaggtgattttc

SEQ ID NO: 4674 - DNA, 19 bp, Homo sapiens
  source 1..19: mol_type = genomic DNA
agctccgaggtgattttca

SEQ ID NO: 4675 - DNA, 20 bp, Homo sapiens
  source 1..20: mol_type = genomic DNA
agctccgaggtgattttcat

SEQ ID NO: 4676 - DNA, 21 bp, Homo sapiens
  source 1..21: mol_type = genomic DNA
agctccgaggtgattttcata

SEQ ID NO: 4677 - DNA, 22 bp, Homo sapiens
  source 1..22: mol_type = genomic DNA
agctccgaggtgattttcatat

SEQ ID NO: 4678 - DNA, 23 bp, Homo sapiens
  source 1..23: mol_type = genomic DNA
agctccgaggtgattttcatatt

SEQ ID NO: 4679 - DNA, 24 bp, Homo sapiens
  source 1..24: mol_type = genomic DNA
agctccgaggtgattttcatattg

SEQ ID NO: 4680 - DNA, 25 bp, Homo sapiens
  source 1..25: mol_type = genomic DNA
agctccgaggtgattttcatattga

SEQ ID NO: 4681 - DNA, 26 bp, Homo sapiens
  source 1..26: mol_type = genomic DNA
agctccgaggtgattttcatattgaa

SEQ ID NO: 4682 - DNA, 27 bp, Homo sapiens
  source 1..27: mol_type = genomic DNA
agctccgaggtgattttcatattgaat

SEQ ID NO: 4683 - DNA, 28 bp, Homo sapiens
  source 1..28: mol_type = genomic DNA
agctccgaggtgattttcatattgaatt

SEQ ID NO: 4684 - DNA, 29 bp, Homo sapiens
  source 1..29: mol_type = genomic DNA
agctccgaggtgattttcatattgaattg

SEQ ID NO: 4685 - DNA, 30 bp, Homo sapiens
  source 1..30: mol_type = genomic DNA
agctccgaggtgattttcatattgaattgc

SEQ ID NO: 4686 - DNA, 31 bp, Homo sapiens
  source 1..31: mol_type = genomic DNA
agctccgaggtgattttcatattgaattgca

SEQ ID NO: 4687 - DNA, 32 bp, Homo sapiens
  source 1..32: mol_type = genomic DNA
agctccgaggtgattttcatattgaattgcaa

SEQ ID NO: 4688 - DNA, 33 bp, Homo sapiens
  source 1..33: mol_type = genomic DNA
agctccgaggtgattttcatattgaattgcaaa

SEQ ID NO: 4689 - DNA, 34 bp, Homo sapiens
  source 1..34: mol_type = genomic DNA
agctccgaggtgattttcatattgaattgcaaat

SEQ ID NO: 4690 - DNA, 35 bp, Homo sapiens
  source 1..35: mol_type = genomic DNA
agctccgaggtgattttcatattgaattgcaaatt

SEQ ID NO: 4691 - DNA, 36 bp, Homo sapiens
  source 1..36: mol_type = genomic DNA
agctccgaggtgattttcatattgaattgcaaattc

SEQ ID NO: 4692 - DNA, 37 bp, Homo sapiens
  source 1..37: mol_type = genomic DNA
agctccgaggtgattttcatattgaattgcaaattcg

SEQ ID NO: 4693 - DNA, 38 bp, Homo sapiens
  source 1..38: mol_type = genomic DNA
agctccgaggtgattttcatattgaattgcaaattcga

SEQ ID NO: 4694 - DNA, 39 bp, Homo sapiens
  source 1..39: mol_type = genomic DNA
agctccgaggtgattttcatattgaattgcaaattcgaa

SEQ ID NO: 4695 - DNA, 40 bp, Homo sapiens
  source 1..40: mol_type = genomic DNA
agctccgaggtgattttcatattgaattgcaaattcgaag

SEQ ID NO: 4696 - DNA, 41 bp, Homo sapiens
  source 1..41: mol_type = genomic DNA
agctccgaggtgattttcatattgaattgcaaattcgaaga

SEQ ID NO: 4697 - DNA, 42 bp, Homo sapiens
  source 1..42: mol_type = genomic DNA
agctccgaggtgattttcatattgaattgcaaattcgaagaa

SEQ ID NO: 4698 - DNA, 43 bp, Homo sapiens
  source 1..43: mol_type = genomic DNA
agctccgaggtgattttcatattgaattgcaaattcgaagaag

SEQ ID NO: 4699 - DNA, 44 bp, Homo sapiens
  source 1..44: mol_type = genomic DNA
agctccgaggtgattttcatattgaattgcaaattcgaagaagc

SEQ ID NO: 4700 - DNA, 45 bp, Homo sapiens
  source 1..45: mol_type = genomic DNA
agctccgaggtgattttcatattgaattgcaaattcgaagaagca

SEQ ID NO: 4701 - DNA, 47 bp, Homo sapiens
  source 1..47: mol_type = genomic DNA
agctccgaggtgattttcatattgaattgcaaattcgaagaagcagc

SEQ ID NO: 4702 - DNA, 48 bp, Homo sapiens
  source 1..48: mol_type = genomic DNA
agctccgaggtgattttcatattgaattgcaaattcgaagaagcagct

SEQ ID NO: 4703 - DNA, 26 bp, Homo sapiens
  source 1..26: mol_type = genomic DNA
agctgccttccaagcagttgacccgg

SEQ ID NO: 4704 - DNA, 27 bp, Homo sapiens
  source 1..27: mol_type = genomic DNA
agctgccttccaagcagttgacccggg

SEQ ID NO: 4705 - DNA, 28 bp, Homo sapiens
  source 1..28: mol_type = genomic DNA
agctgccttccaagcagttgacccgggt

SEQ ID NO: 4706 - DNA, 29 bp, Homo sapiens
  source 1..29: mol_type = genomic DNA
agctgccttccaagcagttgacccgggtt

SEQ ID NO: 4707 - DNA, 30 bp, Homo sapiens
  source 1..30: mol_type = genomic DNA
agctgccttccaagcagttgacccgggttc

SEQ ID NO: 4708 - DNA, 31 bp, Homo sapiens
  source 1..31: mol_type = genomic DNA
agctgccttccaagcagttgacccgggttcg

SEQ ID NO: 4709 - DNA, 16 bp, Homo sapiens
  source 1..16: mol_type = genomic DNA
agctggggattgtggg

SEQ ID NO: 4710 - DNA, 17 bp, Homo sapiens
  source 1..17: mol_type = genomic DNA
agctggggattgtgggt

SEQ ID NO: 4711 - DNA, 18 bp, Homo sapiens
  source 1..18: mol_type = genomic DNA
agctggggattgtgggtt

SEQ ID NO: 4712 - DNA, 19 bp, Homo sapiens
  source 1..19: mol_type = genomic DNA
agctggggattgtgggttc

SEQ ID NO: 4713 - DNA, 26 bp, Homo sapiens
  source 1..26: mol_type = genomic DNA
agctggggattgtgggttcgagtccc

SEQ ID NO: 4714 - DNA, 33 bp, Homo sapiens
  source 1..33: mol_type = genomic DNA
agctggggattgtgggttcgagtcccatctggg

SEQ ID NO: 4715 - DNA, 34 bp, Homo sapiens
  source 1..34: mol_type = genomic DNA
agctggggattgtgggttcgagtcccatctgggt

SEQ ID NO: 4716 - DNA, 36 bp, Homo sapiens
  source 1..36: mol_type = genomic DNA
agctggggattgtgggttcgagtcccatctgggtcg

SEQ ID NO: 4717 - DNA, 37 bp, Homo sapiens
  source 1..37: mol_type = genomic DNA
agctggggattgtgggttcgagtcccatctgggtcgc

SEQ ID NO: 4718 - DNA, 38 bp, Homo sapiens
  source 1..38: mol_type = genomic DNA
agctggggattgtgggttcgagtcccatctgggtcgcc

SEQ ID NO: 4719 - DNA, 39 bp, Homo sapiens
  source 1..39: mol_type = genomic DNA
agctggggattgtgggttcgagtcccatctgggtcgcca

SEQ ID NO: 4720 - DNA, 18 bp, Homo sapiens
  source 1..18: mol_type = genomic DNA
agctggtagagcggagga

SEQ ID NO: 4721 - DNA, 19 bp, Homo sapiens
  source 1..19: mol_type = genomic DNA
agctggtagagcggaggac

SEQ ID NO: 4722 - DNA, 20 bp, Homo sapiens
  source 1..20: mol_type = genomic DNA
agctggtagagcggaggact

SEQ ID NO: 4723 - DNA, 21 bp, Homo sapiens
  source 1..21: mol_type = genomic DNA
agctggtagagcggaggactg

SEQ ID NO: 4724 - DNA, 24 bp, Homo sapiens
  source 1..24: mol_type = genomic DNA
agctggtagagcggaggactgtag

SEQ ID NO: 4725 - DNA, 19 bp, Homo sapiens
  source 1..19: mol_type = genomic DNA
agctgttaactaagtgttt

SEQ ID NO: 4726 - DNA, 20 bp, Homo sapiens
  source 1..20: mol_type = genomic DNA
agctgttaactaagtgtttg

SEQ ID NO: 4727 - DNA, 21 bp, Homo sapiens
  source 1..21: mol_type = genomic DNA
agctgttaactaagtgtttgt

SEQ ID NO: 4728 - DNA, 23 bp, Homo sapiens
  source 1..23: mol_type = genomic DNA
agctgttaactaagtgtttgtgg

SEQ ID NO: 4729 - DNA, 26 bp, Homo sapiens
  source 1..26: mol_type = genomic DNA
agctgttaactaagtgtttgtgggtt

SEQ ID NO: 4730 - DNA, 27 bp, Homo sapiens
  source 1..27: mol_type = genomic DNA
agctgttaactaagtgtttgtgggttt

SEQ ID NO: 4731 - DNA, 28 bp, Homo sapiens
  source 1..28: mol_type = genomic DNA
agctgttaactaagtgtttgtgggttta

SEQ ID NO: 4732 - DNA, 29 bp, Homo sapiens
  source 1..29: mol_type = genomic DNA
agctgttaactaagtgtttgtgggtttaa

SEQ ID NO: 4733 - DNA, 30 bp, Homo sapiens
  source 1..30: mol_type = genomic DNA
agctgttaactaagtgtttgtgggtttaag

SEQ ID NO: 4734 - DNA, 34 bp, Homo sapiens
  source 1..34: mol_type = genomic DNA
agctgttaactaagtgtttgtgggtttaagtccc

SEQ ID NO: 4735 - DNA, 37 bp, Homo sapiens
  source 1..37: mol_type = genomic DNA
agctgttaactaagtgtttgtgggtttaagtcccatt

SEQ ID NO: 4736 - DNA, 39 bp, Homo sapiens
  source 1..39: mol_type = genomic DNA
agctgttaactaagtgtttgtgggtttaagtcccattgg

SEQ ID NO: 4737 - DNA, 40 bp, Homo sapiens
  source 1..40: mol_type = genomic DNA
agctgttaactaagtgtttgtgggtttaagtcccattggt

SEQ ID NO: 4738 - DNA, 41 bp, Homo sapiens
  source 1..41: mol_type = genomic DNA
agctgttaactaagtgtttgtgggtttaagtcccattggtc

SEQ ID NO: 4739 - DNA, 42 bp, Homo sapiens
  source 1..42: mol_type = genomic DNA
agctgttaactaagtgtttgtgggtttaagtcccattggtct

SEQ ID NO: 4740 - DNA, 44 bp, Homo sapiens
  source 1..44: mol_type = genomic DNA
agctgttaactaagtgtttgtgggtttaagtcccattggtctag

SEQ ID NO: 4741 - DNA, 45 bp, Homo sapiens
  source 1..45: mol_type = genomic DNA
agctgttaactaagtgtttgtgggtttaagtcccattggtctagc

SEQ ID NO: 4742 - DNA, 46 bp, Homo sapiens
  source 1..46: mol_type = genomic DNA
agctgttaactaagtgtttgtgggtttaagtcccattggtctagcc

SEQ ID NO: 4743 - DNA, 47 bp, Homo sapiens
  source 1..47: mol_type = genomic DNA
agctgttaactaagtgtttgtgggtttaagtcccattggtctagcca

SEQ ID NO: 4744 - DNA, 17 bp, Homo sapiens
  source 1..17: mol_type = genomic DNA
agcttaaacccccttat

SEQ ID NO: 4745 - DNA, 18 bp, Homo sapiens
  source 1..18: mol_type = genomic DNA
agcttaaacccccttatt

SEQ ID NO: 4746 - DNA, 20 bp, Homo sapiens
  source 1..20: mol_type = genomic DNA
agcttaaacccccttatttc

SEQ ID NO: 4747 - DNA, 21 bp, Homo sapiens
  source 1..21: mol_type = genomic DNA
agcttaaacccccttatttct

SEQ ID NO: 4748 - DNA, 22 bp, Homo sapiens
  source 1..22: mol_type = genomic DNA
agcttaaacccccttatttcta

SEQ ID NO: 4749 - DNA, 23 bp, Homo sapiens
  source 1..23: mol_type = genomic DNA
agcttaaacccccttatttctac

SEQ ID NO: 4750 - DNA, 24 bp, Homo sapiens
  source 1..24: mol_type = genomic DNA
agcttaaacccccttatttctacc

SEQ ID NO: 4751 - DNA, 25 bp, Homo sapiens
  source 1..25: mol_type = genomic DNA
agcttaaacccccttatttctacca

SEQ ID NO: 4752 - DNA, 25 bp, Homo sapiens
  source 1..25: mol_type = genomic DNA
agcttaattaaagtggctgatttgc

SEQ ID NO: 4753 - DNA, 27 bp, Homo sapiens
  source 1..27: mol_type = genomic DNA
agcttacctcctcaaagcaatacactg

SEQ ID NO: 4754 - DNA, 26 bp, Homo sapiens
  source 1..26: mol_type = genomic DNA
agcttagcggtagagcatttgactgc

SEQ ID NO: 4755 - DNA, 16 bp, Homo sapiens
  source 1..16: mol_type = genomic DNA
agcttcaaacctgccg

SEQ ID NO: 4756 - DNA, 17 bp, Homo sapiens
  source 1..17: mol_type = genomic DNA
agcttcaaacctgccgg

SEQ ID NO: 4757 - DNA, 18 bp, Homo sapiens
  source 1..18: mol_type = genomic DNA
agcttcaaacctgccggg

SEQ ID NO: 4758 - DNA, 19 bp, Homo sapiens
  source 1..19: mol_type = genomic DNA
agcttcaaacctgccgggg

SEQ ID NO: 4759 - DNA, 20 bp, Homo sapiens
  source 1..20: mol_type = genomic DNA
agcttcaaacctgccggggc

SEQ ID NO: 4760 - DNA, 21 bp, Homo sapiens
  source 1..21: mol_type = genomic DNA
agcttcaaacctgccggggct

SEQ ID NO: 4761 - DNA, 22 bp, Homo sapiens
  source 1..22: mol_type = genomic DNA
agcttcaaacctgccggggctt

SEQ ID NO: 4762 - DNA, 23 bp, Homo sapiens
  source 1..23: mol_type = genomic DNA
agcttcaaacctgccggggcttc

SEQ ID NO: 4763 - DNA, 24 bp, Homo sapiens
  source 1..24: mol_type = genomic DNA
agcttcaaacctgccggggcttcc

SEQ ID NO: 4764 - DNA, 25 bp, Homo sapiens
  source 1..25: mol_type = genomic DNA
agcttcaaacctgccggggcttcca

SEQ ID NO: 4765 - DNA, 16 bp, Homo sapiens
  source 1..16: mol_type = genomic DNA
agctttggggggttcg

SEQ ID NO: 4766 - DNA, 17 bp, Homo sapiens
  source 1..17: mol_type = genomic DNA
agctttggggggttcga

SEQ ID NO: 4767 - DNA, 18 bp, Homo sapiens
  source 1..18: mol_type = genomic DNA
agctttggggggttcgat

SEQ ID NO: 4768 - DNA, 19 bp, Homo sapiens
  source 1..19: mol_type = genomic DNA
agctttggggggttcgatt

SEQ ID NO: 4769 - DNA, 20 bp, Homo sapiens
  source 1..20: mol_type = genomic DNA
agctttggggggttcgattc

SEQ ID NO: 4770 - DNA, 21 bp, Homo sapiens
  source 1..21: mol_type = genomic DNA
agctttggggggttcgattcc

SEQ ID NO: 4771 - DNA, 22 bp, Homo sapiens
  source 1..22: mol_type = genomic DNA
agctttggggggttcgattcct

SEQ ID NO: 4772 - DNA, 23 bp, Homo sapiens
  source 1..23: mol_type = genomic DNA
agctttggggggttcgattcctt

SEQ ID NO: 4773 - DNA, 24 bp, Homo sapiens
  source 1..24: mol_type = genomic DNA
agctttggggggttcgattccttc

SEQ ID NO: 4774 - DNA, 25 bp, Homo sapiens
  source 1..25: mol_type = genomic DNA
agctttggggggttcgattccttcc

SEQ ID NO: 4775 - DNA, 26 bp, Homo sapiens
  source 1..26: mol_type = genomic DNA
agctttggggggttcgattccttcct

SEQ ID NO: 4776 - DNA, 27 bp, Homo sapiens
  source 1..27: mol_type = genomic DNA
agctttggggggttcgattccttcctt

SEQ ID NO: 4777 - DNA, 28 bp, Homo sapiens
  source 1..28: mol_type = genomic DNA
agctttggggggttcgattccttccttt

SEQ ID NO: 4778 - DNA, 32 bp, Homo sapiens
  source 1..32: mol_type = genomic DNA
agctttggggggttcgattccttccttttttg

SEQ ID NO: 4779 - DNA, 33 bp, Homo sapiens
  source 1..33: mol_type = genomic DNA
agctttggggggttcgattccttccttttttgc

SEQ ID NO: 4780 - DNA, 34 bp, Homo sapiens
  source 1..34: mol_type = genomic DNA
agctttggggggttcgattccttccttttttgcc

SEQ ID NO: 4781 - DNA, 35 bp, Homo sapiens
  source 1..35: mol_type = genomic DNA
agctttggggggttcgattccttccttttttgcca

SEQ ID NO: 4782 - DNA, 20 bp, Homo sapiens
  source 1..20: mol_type = genomic DNA
agctttgggtgctaatggtg

SEQ ID NO: 4783 - DNA, 22 bp, Homo sapiens
  source 1..22: mol_type = genomic DNA
agctttgggtgctaatggtgga

SEQ ID NO: 4784 - DNA, 23 bp, Homo sapiens
  source 1..23: mol_type = genomic DNA
agctttgggtgctaatggtggag

SEQ ID NO: 4785 - DNA, 24 bp, Homo sapiens
  source 1..24: mol_type = genomic DNA
agctttgggtgctaatggtggagt

SEQ ID NO: 4786 - DNA, 25 bp, Homo sapiens
  source 1..25: mol_type = genomic DNA
agctttgggtgctaatggtggagtt

SEQ ID NO: 4787 - DNA, 26 bp, Homo sapiens
  source 1..26: mol_type = genomic DNA
agctttgggtgctaatggtggagtta

SEQ ID NO: 4788 - DNA, 27 bp, Homo sapiens
  source 1..27: mol_type = genomic DNA
agctttgggtgctaatggtggagttaa

SEQ ID NO: 4789 - DNA, 28 bp, Homo sapiens
  source 1..28: mol_type = genomic DNA
agctttgggtgctaatggtggagttaaa

SEQ ID NO: 4790 - DNA, 29 bp, Homo sapiens
  source 1..29: mol_type = genomic DNA
agctttgggtgctaatggtggagttaaag

SEQ ID NO: 4791 - DNA, 30 bp, Homo sapiens
  source 1..30: mol_type = genomic DNA
agctttgggtgctaatggtggagttaaaga

SEQ ID NO: 4792 - DNA, 31 bp, Homo sapiens
  source 1..31: mol_type = genomic DNA
agctttgggtgctaatggtggagttaaagac

SEQ ID NO: 4793 - DNA, 32 bp, Homo sapiens
  source 1..32: mol_type = genomic DNA
agctttgggtgctaatggtggagttaaagact

SEQ ID NO: 4794 - DNA, 33 bp, Homo sapiens
  source 1..33: mol_type = genomic DNA
agctttgggtgctaatggtggagttaaagactt

SEQ ID NO: 4795 - DNA, 34 bp, Homo sapiens
  source 1..34: mol_type = genomic DNA
agctttgggtgctaatggtggagttaaagacttt

SEQ ID NO: 4796 - DNA, 35 bp, Homo sapiens
  source 1..35: mol_type = genomic DNA
agctttgggtgctaatggtggagttaaagactttt

SEQ ID NO: 4797 - DNA, 40 bp, Homo sapiens
  source 1..40: mol_type = genomic DNA
agctttgggtgctaatggtggagttaaagactttttctct

SEQ ID NO: 4798 - DNA, 42 bp, Homo sapiens
  source 1..42: mol_type = genomic DNA
agctttgggtgctaatggtggagttaaagactttttctctga

SEQ ID NO: 4799 - DNA, 43 bp, Homo sapiens
  source 1..43: mol_type = genomic DNA
agctttgggtgctaatggtggagttaaagactttttctctgac

SEQ ID NO: 4800 - DNA, 44 bp, Homo sapiens
  source 1..44: mol_type = genomic DNA
agctttgggtgctaatggtggagttaaagactttttctctgacc

SEQ ID NO: 4801 - DNA, 45 bp, Homo sapiens
  source 1..45: mol_type = genomic DNA
agctttgggtgctaatggtggagttaaagactttttctctgacca

SEQ ID NO: 4802 - DNA, 16 bp, Homo sapiens
  source 1..16: mol_type = genomic DNA
aggagatcctgggttc

SEQ ID NO: 4803 - DNA, 17 bp, Homo sapiens
  source 1..17: mol_type = genomic DNA
aggagatcctgggttcg

SEQ ID NO: 4804 - DNA, 27 bp, Homo sapiens
  source 1..27: mol_type = genomic DNA
aggagatcctgggttcgaatcccagcg

SEQ ID NO: 4805 - DNA, 31 bp, Homo sapiens
  source 1..31: mol_type = genomic DNA
aggagatcctgggttcgaatcccagcggggc

SEQ ID NO: 4806 - DNA, 32 bp, Homo sapiens
  source 1..32: mol_type = genomic DNA
aggagatcctgggttcgaatcccagcggggcc

SEQ ID NO: 4807 - DNA, 33 bp, Homo sapiens
  source 1..33: mol_type = genomic DNA
aggagatcctgggttcgaatcccagcggggcct

SEQ ID NO: 4808 - DNA, 34 bp, Homo sapiens
  source 1..34: mol_type = genomic DNA
aggagatcctgggttcgaatcccagcggggcctc

SEQ ID NO: 4809 - DNA, 35 bp, Homo sapiens
  source 1..35: mol_type = genomic DNA
aggagatcctgggttcgaatcccagcggggcctcc

SEQ ID NO: 4810 - DNA, 30 bp, Homo sapiens
  source 1..30: mol_type = genomic DNA
aggagatcctgggttcgaatcccagcggtg

SEQ ID NO: 4811 - DNA, 31 bp, Homo sapiens
  source 1..31: mol_type = genomic DNA
aggagatcctgggttcgaatcccagcggtgc

SEQ ID NO: 4812 - DNA, 32 bp, Homo sapiens
  source 1..32: mol_type = genomic DNA
aggagatcctgggttcgaatcccagcggtgcc

SEQ ID NO: 4813 - DNA, 33 bp, Homo sapiens
  source 1..33: mol_type = genomic DNA
aggagatcctgggttcgaatcccagcggtgcct

SEQ ID NO: 4814 - DNA, 34 bp, Homo sapiens
  source 1..34: mol_type = genomic DNA
aggagatcctgggttcgaatcccagcggtgcctc

SEQ ID NO: 4815 - DNA, 35 bp, Homo sapiens
  source 1..35: mol_type = genomic DNA
aggagatcctgggttcgaatcccagcggtgcctcc

SEQ ID NO: 4816 - DNA, 32 bp, Homo sapiens
  source 1..32: mol_type = genomic DNA
aggagatcctgggttcgaatcccagtagagcc

SEQ ID NO: 4817 - DNA, 34 bp, Homo sapiens
  source 1..34: mol_type = genomic DNA
aggagatcctgggttcgaatcccagtagagcctc

SEQ ID NO: 4818 - DNA, 35 bp, Homo sapiens
  source 1..35: mol_type = genomic DNA
aggagatcctgggttcgaatcccagtagagcctcc

SEQ ID NO: 4819 - DNA, 34 bp, Homo sapiens
  source 1..34: mol_type = genomic DNA
aggagatcctgggttcgactcccagcggggcctc

SEQ ID NO: 4820 - DNA, 35 bp, Homo sapiens
  source 1..35: mol_type = genomic DNA
aggagatcctgggttcgactcccagcggggcctcc

SEQ ID NO: 4821 - DNA, 30 bp, Homo sapiens
  source 1..30: mol_type = genomic DNA
aggagatcctgggttcgactcccagtgggg

SEQ ID NO: 4822 - DNA, 34 bp, Homo sapiens
  source 1..34: mol_type = genomic DNA
aggagatcctgggttcgactcccagtggggcctc

SEQ ID NO: 4823 - DNA, 35 bp, Homo sapiens
  source 1..35: mol_type = genomic DNA
aggagatcctgggttcgactcccagtggggcctcc

SEQ ID NO: 4824 - DNA, 16 bp, Homo sapiens
  source 1..16: mol_type = genomic DNA
aggagatttcaactta

SEQ ID NO: 4825 - DNA, 17 bp, Homo sapiens
  source 1..17: mol_type = genomic DNA
aggagatttcaacttaa

SEQ ID NO: 4826 - DNA, 18 bp, Homo sapiens
  source 1..18: mol_type = genomic DNA
aggagatttcaacttaac

SEQ ID NO: 4827 - DNA, 19 bp, Homo sapiens
  source 1..19: mol_type = genomic DNA
aggagatttcaacttaact

SEQ ID NO: 4828 - DNA, 20 bp, Homo sapiens
  source 1..20: mol_type = genomic DNA
aggagatttcaacttaactt

SEQ ID NO: 4829 - DNA, 21 bp, Homo sapiens
  source 1..21: mol_type = genomic DNA
aggagatttcaacttaacttg

SEQ ID NO: 4830 - DNA, 22 bp, Homo sapiens
  source 1..22: mol_type = genomic DNA
aggagatttcaacttaacttga

SEQ ID NO: 4831 - DNA, 23 bp, Homo sapiens
  source 1..23: mol_type = genomic DNA
aggagatttcaacttaacttgac

SEQ ID NO: 4832 - DNA, 24 bp, Homo sapiens
  source 1..24: mol_type = genomic DNA
aggagatttcaacttaacttgacc

SEQ ID NO: 4833 - DNA, 25 bp, Homo sapiens
  source 1..25: mol_type = genomic DNA
aggagatttcaacttaacttgaccg

SEQ ID NO: 4834 - DNA, 26 bp, Homo sapiens
  source 1..26: mol_type = genomic DNA
aggagatttcaacttaacttgaccgc

SEQ ID NO: 4835 - DNA, 27 bp, Homo sapiens
  source 1..27: mol_type = genomic DNA
aggagatttcaacttaacttgaccgct

SEQ ID NO: 4836 - DNA, 28 bp, Homo sapiens
  source 1..28: mol_type = genomic DNA
aggagatttcaacttaacttgaccgctc

SEQ ID NO: 4837 - DNA, 29 bp, Homo sapiens
  source 1..29: mol_type = genomic DNA
aggagatttcaacttaacttgaccgctct

SEQ ID NO: 4838 - DNA, 30 bp, Homo sapiens
  source 1..30: mol_type = genomic DNA
aggagatttcaacttaacttgaccgctctg

SEQ ID NO: 4839 - DNA, 31 bp, Homo sapiens
  source 1..31: mol_type = genomic DNA
aggagatttcaacttaacttgaccgctctga

SEQ ID NO: 4840 - DNA, 32 bp, Homo sapiens
  source 1..32: mol_type = genomic DNA
aggagatttcaacttaacttgaccgctctgac

SEQ ID NO: 4841 - DNA, 33 bp, Homo sapiens
  source 1..33: mol_type = genomic DNA
aggagatttcaacttaacttgaccgctctgacc

SEQ ID NO: 4842 - DNA, 34 bp, Homo sapiens
  source 1..34: mol_type = genomic DNA
aggagatttcaacttaacttgaccgctctgacca

SEQ ID NO: 4843 - DNA, 16 bp, Homo sapiens
  source 1..16: mol_type = genomic DNA
aggagcttaaaccccc

SEQ ID NO: 4844 - DNA, 19 bp, Homo sapiens
  source 1..19: mol_type = genomic DNA
aggagcttaaaccccctta

SEQ ID NO: 4845 - DNA, 22 bp, Homo sapiens
  source 1..22: mol_type = genomic DNA
aggagcttaaacccccttattt

SEQ ID NO: 4846 - DNA, 24 bp, Homo sapiens
  source 1..24: mol_type = genomic DNA
aggagcttaaacccccttatttct

SEQ ID NO: 4847 - DNA, 25 bp, Homo sapiens
  source 1..25: mol_type = genomic DNA
aggagcttaaacccccttatttcta

SEQ ID NO: 4848 - DNA, 26 bp, Homo sapiens
  source 1..26: mol_type = genomic DNA
aggagcttaaacccccttatttctac

SEQ ID NO: 4849 - DNA, 27 bp, Homo sapiens
  source 1..27: mol_type = genomic DNA
aggagcttaaacccccttatttctacc

SEQ ID NO: 4850 - DNA, 28 bp, Homo sapiens
  source 1..28: mol_type = genomic DNA
aggagcttaaacccccttatttctacca

SEQ ID NO: 4851 - DNA, 23 bp, Homo sapiens
  source 1..23: mol_type = genomic DNA
aggataacagctatccattggtc

SEQ ID NO: 4852 - DNA, 24 bp, Homo sapiens
  source 1..24: mol_type = genomic DNA
aggataacagctatccattggtct

SEQ ID NO: 4853 - DNA, 25 bp, Homo sapiens
  source 1..25: mol_type = genomic DNA
aggataacagctatccattggtctt

SEQ ID NO: 4854 - DNA, 26 bp, Homo sapiens
  source 1..26: mol_type = genomic DNA
aggataacagctatccattggtctta

SEQ ID NO: 4855 - DNA, 27 bp, Homo sapiens
  source 1..27: mol_type = genomic DNA
aggataacagctatccattggtcttag

SEQ ID NO: 4856 - DNA, 30 bp, Homo sapiens
  source 1..30: mol_type = genomic DNA
aggataacagctatccattggtcttaggcc

SEQ ID NO: 4857 - DNA, 31 bp, Homo sapiens
  source 1..31: mol_type = genomic DNA
aggataacagctatccattggtcttaggccc

SEQ ID NO: 4858 - DNA, 17 bp, Homo sapiens
  source 1..17: mol_type = genomic DNA
aggatggccgagcggtc

SEQ ID NO: 4859 - DNA, 18 bp, Homo sapiens
  source 1..18: mol_type = genomic DNA
aggatggccgagcggtct

SEQ ID NO: 4860 - DNA, 19 bp, Homo sapiens
  source 1..19: mol_type = genomic DNA
aggatggccgagcggtcta

SEQ ID NO: 4861 - DNA, 20 bp, Homo sapiens
  source 1..20: mol_type = genomic DNA
aggatggccgagcggtctaa

SEQ ID NO: 4862 - DNA, 21 bp, Homo sapiens
  source 1..21: mol_type = genomic DNA
aggatggccgagcggtctaag

SEQ ID NO: 4863 - DNA, 22 bp, Homo sapiens
  source 1..22: mol_type = genomic DNA
aggatggccgagcggtctaagg

SEQ ID NO: 4864 - DNA, 23 bp, Homo sapiens
  source 1..23: mol_type = genomic DNA
aggatggccgagcggtctaaggc

SEQ ID NO: 4865 - DNA, 26 bp, Homo sapiens
  source 1..26: mol_type = genomic DNA
aggatggccgagcggtctaaggcgct

SEQ ID NO: 4866 - DNA, 27 bp, Homo sapiens
  source 1..27: mol_type = genomic DNA
aggatggccgagcggtctaaggcgctg

SEQ ID NO: 4867 - DNA, 28 bp, Homo sapiens
  source 1..28: mol_type = genomic DNA
aggatggccgagcggtctaaggcgctgc

SEQ ID NO: 4868 - DNA, 29 bp, Homo sapiens
  source 1..29: mol_type = genomic DNA
aggatggccgagcggtctaaggcgctgcg

SEQ ID NO: 4869 - DNA, 30 bp, Homo sapiens
  source 1..30: mol_type = genomic DNA
aggatggccgagcggtctaaggcgctgcgt

SEQ ID NO: 4870 - DNA, 31 bp, Homo sapiens
  source 1..31: mol_type = genomic DNA
aggatggccgagcggtctaaggcgctgcgtt

SEQ ID NO: 4871 - DNA, 32 bp, Homo sapiens
  source 1..32: mol_type = genomic DNA
aggatggccgagcggtctaaggcgctgcgttc

SEQ ID NO: 4872 - DNA, 33 bp, Homo sapiens
  source 1..33: mol_type = genomic DNA
aggatggccgagcggtctaaggcgctgcgttca

SEQ ID NO: 4873 - DNA, 34 bp, Homo sapiens
  source 1..34: mol_type = genomic DNA
aggatggccgagcggtctaaggcgctgcgttcag

SEQ ID NO: 4874 - DNA, 16 bp, Homo sapiens
  source 1..16: mol_type = genomic DNA
aggatggccgagtggt

SEQ ID NO: 4875 - DNA, 19 bp, Homo sapiens
  source 1..19: mol_type = genomic DNA
aggatggccgagtggtcta

SEQ ID NO: 4876 - DNA, 21 bp, Homo sapiens
  source 1..21: mol_type = genomic DNA
aggatggccgagtggtctaag

SEQ ID NO: 4877 - DNA, 23 bp, Homo sapiens
  source 1..23: mol_type = genomic DNA
aggatggccgagtggtctaaggc

SEQ ID NO: 4878 - DNA, 25 bp, Homo sapiens
  source 1..25: mol_type = genomic DNA
aggatggccgagtggtctaaggcgc

SEQ ID NO: 4879 - DNA, 26 bp, Homo sapiens
  source 1..26: mol_type = genomic DNA
aggatggccgagtggtctaaggcgcc

SEQ ID NO: 4880 - DNA, 32 bp, Homo sapiens
  source 1..32: mol_type = genomic DNA
aggatggccgagtggtctaaggcgccagactc

SEQ ID NO: 4881 - DNA, 33 bp, Homo sapiens
  source 1..33: mol_type = genomic DNA
aggatggccgagtggtctaaggcgccagactca

SEQ ID NO: 4882 - DNA, 20 bp, Homo sapiens
  source 1..20: mol_type = genomic DNA
aggatggccgagtggttaag

SEQ ID NO: 4883 - DNA, 21 bp, Homo sapiens
  source 1..21: mol_type = genomic DNA
aggatggccgagtggttaagg

SEQ ID NO: 4884 - DNA, 22 bp, Homo sapiens
  source 1..22: mol_type = genomic DNA
aggatggccgagtggttaaggc

SEQ ID NO: 4885 - DNA, 19 bp, Homo sapiens
  source 1..19: mol_type = genomic DNA
aggatggggtgtgataggt

SEQ ID NO: 4886 - DNA, 20 bp, Homo sapiens
  source 1..20: mol_type = genomic DNA
aggatggggtgtgataggtg

SEQ ID NO: 4887 - DNA, 27 bp, Homo sapiens
  source 1..27: mol_type = genomic DNA
aggatggggtgtgataggtggcacgga

SEQ ID NO: 4888 - DNA, 28 bp, Homo sapiens
  source 1..28: mol_type = genomic DNA
aggatggggtgtgataggtggcacggag

SEQ ID NO: 4889 - DNA, 29 bp, Homo sapiens
  source 1..29: mol_type = genomic DNA
aggatggggtgtgataggtggcacggaga

SEQ ID NO: 4890 - DNA, 30 bp, Homo sapiens
  source 1..30: mol_type = genomic DNA
aggatggggtgtgataggtggcacggagaa

SEQ ID NO: 4891 - DNA, 31 bp, Homo sapiens
  source 1..31: mol_type = genomic DNA
aggatggggtgtgataggtggcacggagaat

SEQ ID NO: 4892 - DNA, 32 bp, Homo sapiens
  source 1..32: mol_type = genomic DNA
aggatggggtgtgataggtggcacggagaatt

SEQ ID NO: 4893 - DNA, 33 bp, Homo sapiens
  source 1..33: mol_type = genomic DNA
aggatggggtgtgataggtggcacggagaattt

SEQ ID NO: 4894 - DNA, 34 bp, Homo sapiens
  source 1..34: mol_type = genomic DNA
aggatggggtgtgataggtggcacggagaatttt

SEQ ID NO: 4895 - DNA, 35 bp, Homo sapiens
  source 1..35: mol_type = genomic DNA
aggatggggtgtgataggtggcacggagaattttg

SEQ ID NO: 4896 - DNA, 16 bp, Homo sapiens
  source 1..16: mol_type = genomic DNA
aggattcctggttttc

SEQ ID NO: 4897 - DNA, 24 bp, Homo sapiens
  source 1..24: mol_type = genomic DNA
aggattcctggttttcacccaggc

SEQ ID NO: 4898 - DNA, 28 bp, Homo sapiens
  source 1..28: mol_type = genomic DNA
aggattcctggttttcacccaggcggcc

SEQ ID NO: 4899 - DNA, 30 bp, Homo sapiens
  source 1..30: mol_type = genomic DNA
aggattcctggttttcacccaggcggcccg

SEQ ID NO: 4900 - DNA, 34 bp, Homo sapiens
  source 1..34: mol_type = genomic DNA
aggattcctggttttcacccaggcggcccgggtt

SEQ ID NO: 4901 - DNA, 35 bp, Homo sapiens
  source 1..35: mol_type = genomic DNA
aggattcctggttttcacccaggcggcccgggttc

SEQ ID NO: 4902 - DNA, 48 bp, Homo sapiens
  source 1..48: mol_type = genomic DNA
aggattcctggttttcacccaggcggcccgggttcgactcccggtgtg

SEQ ID NO: 4903 - DNA, 25 bp, Homo sapiens
  source 1..25: mol_type = genomic DNA
aggattcctggttttcacccaggtg

SEQ ID NO: 4904 - DNA, 29 bp, Homo sapiens
  source 1..29: mol_type = genomic DNA
aggattcctggttttcacccaggtggccc

SEQ ID NO: 4905 - DNA, 32 bp, Homo sapiens
  source 1..32: mol_type = genomic DNA
aggattcctggttttcacccaggtggcccggg

SEQ ID NO: 4906 - DNA, 16 bp, Homo sapiens
  source 1..16: mol_type = genomic DNA
aggattcggcgctctc

SEQ ID NO: 4907 - DNA, 17 bp, Homo sapiens
  source 1..17: mol_type = genomic DNA
aggattcggcgctctca

SEQ ID NO: 4908 - DNA, 18 bp, Homo sapiens
  source 1..18: mol_type = genomic DNA
aggattcggcgctctcac

SEQ ID NO: 4909 - DNA, 19 bp, Homo sapiens
  source 1..19: mol_type = genomic DNA
aggattcggcgctctcacc

SEQ ID NO: 4910 - DNA, 20 bp, Homo sapiens
  source 1..20: mol_type = genomic DNA
aggattcggcgctctcaccg

SEQ ID NO: 4911 - DNA, 21 bp, Homo sapiens
  source 1..21: mol_type = genomic DNA
aggattcggcgctctcaccgc

SEQ ID NO: 4912 - DNA, 22 bp, Homo sapiens
  source 1..22: mol_type = genomic DNA
aggattcggcgctctcaccgcc

SEQ ID NO: 4913 - DNA, 23 bp, Homo sapiens
  source 1..23: mol_type = genomic DNA
aggattcggcgctctcaccgccg

SEQ ID NO: 4914 - DNA, 24 bp, Homo sapiens
  source 1..24: mol_type = genomic DNA
aggattcggcgctctcaccgccgc

SEQ ID NO: 4915 - DNA, 27 bp, Homo sapiens
  source 1..27: mol_type = genomic DNA
aggattcggcgctctcaccgccgcggc

SEQ ID NO: 4916 - DNA, 28 bp, Homo sapiens
  source 1..28: mol_type = genomic DNA
aggattcggcgctctcaccgccgcggcc

SEQ ID NO: 4917 - DNA, 29 bp, Homo sapiens
  source 1..29: mol_type = genomic DNA
aggattcggcgctctcaccgccgcggccc

SEQ ID NO: 4918 - DNA, 30 bp, Homo sapiens
  source 1..30: mol_type = genomic DNA
aggattcggcgctctcaccgccgcggcccg

SEQ ID NO: 4919 - DNA, 31 bp, Homo sapiens
  source 1..31: mol_type = genomic DNA
aggattcggcgctctcaccgccgcggcccgg

SEQ ID NO: 4920 - DNA, 32 bp, Homo sapiens
  source 1..32: mol_type = genomic DNA
aggattcggcgctctcaccgccgcggcccggg

SEQ ID NO: 4921 - DNA, 33 bp, Homo sapiens
  source 1..33: mol_type = genomic DNA
aggattcggcgctctcaccgccgcggcccgggt

SEQ ID NO: 4922 - DNA, 34 bp, Homo sapiens
  source 1..34: mol_type = genomic DNA
aggattcggcgctctcaccgccgcggcccgggtt

SEQ ID NO: 4923 - DNA, 35 bp, Homo sapiens
  source 1..35: mol_type = genomic DNA
aggattcggcgctctcaccgccgcggcccgggttc

SEQ ID NO: 4924 - DNA, 36 bp, Homo sapiens
  source 1..36: mol_type = genomic DNA
aggattcggcgctctcaccgccgcggcccgggttcg

SEQ ID NO: 4925 - DNA, 38 bp, Homo sapiens
  source 1..38: mol_type = genomic DNA
aggattcggcgctctcaccgccgcggcccgggttcgat

SEQ ID NO: 4926 - DNA, 44 bp, Homo sapiens
  source 1..44: mol_type = genomic DNA
aggattcggcgctctcaccgccgcggcccgggttcgattcccgg

SEQ ID NO: 4927 - DNA, 45 bp, Homo sapiens
  source 1..45: mol_type = genomic DNA
aggattcggcgctctcaccgccgcggcccgggttcgattcccggt

SEQ ID NO: 4928 - DNA, 46 bp, Homo sapiens
  source 1..46: mol_type = genomic DNA
aggattcggcgctctcaccgccgcggcccgggttcgattcccggtc

SEQ ID NO: 4929 - DNA, 47 bp, Homo sapiens
  source 1..47: mol_type = genomic DNA
aggattcggcgctctcaccgccgcggcccgggttcgattcccggtca

SEQ ID NO: 4930 - DNA, 16 bp, Homo sapiens
  source 1..16: mol_type = genomic DNA
aggattcggcgctttc

SEQ ID NO: 4931 - DNA, 17 bp, Homo sapiens
  source 1..17: mol_type = genomic DNA
aggattcggcgctttca

SEQ ID NO: 4932 - DNA, 18 bp, Homo sapiens
  source 1..18: mol_type = genomic DNA
aggattcggcgctttcac

SEQ ID NO: 4933 - DNA, 19 bp, Homo sapiens
  source 1..19: mol_type = genomic DNA
aggattcggcgctttcacc

SEQ ID NO: 4934 - DNA, 20 bp, Homo sapiens
  source 1..20: mol_type = genomic DNA
aggattcggcgctttcaccg

SEQ ID NO: 4935 - DNA, 24 bp, Homo sapiens
  source 1..24: mol_type = genomic DNA
aggattcggcgctttcaccgccgc

SEQ ID NO: 4936 - DNA, 29 bp, Homo sapiens
  source 1..29: mol_type = genomic DNA
aggattcggcgctttcaccgccgcggccc

SEQ ID NO: 4937 - DNA, 35 bp, Homo sapiens
  source 1..35: mol_type = genomic DNA
aggattcggcgctttcaccgccgcggcccgggttc

SEQ ID NO: 4938 - DNA, 21 bp, Homo sapiens
  source 1..21: mol_type = genomic DNA
aggcatcagcctccggagctg

SEQ ID NO: 4939 - DNA, 25 bp, Homo sapiens
  source 1..25: mol_type = genomic DNA
aggcatcagcctccggagctgggga

SEQ ID NO: 4940 - DNA, 27 bp, Homo sapiens
  source 1..27: mol_type = genomic DNA
aggcatcagcctccggagctggggatt

SEQ ID NO: 4941 - DNA, 28 bp, Homo sapiens
  source 1..28: mol_type = genomic DNA
aggcatcagcctccggagctggggattg

SEQ ID NO: 4942 - DNA, 29 bp, Homo sapiens
  source 1..29: mol_type = genomic DNA
aggcatcagcctccggagctggggattgt

SEQ ID NO: 4943 - DNA, 36 bp, Homo sapiens
  source 1..36: mol_type = genomic DNA
aggcatcagcctccggagctggggattgtgggttcg

SEQ ID NO: 4944 - DNA, 20 bp, Homo sapiens
  source 1..20: mol_type = genomic DNA
aggcattggcctcctaagcc

SEQ ID NO: 4945 - DNA, 29 bp, Homo sapiens
  source 1..29: mol_type = genomic DNA
aggcattggcctcctaagccagggattgt

SEQ ID NO: 4946 - DNA, 40 bp, Homo sapiens
  source 1..40: mol_type = genomic DNA
aggccccaaaaattttggtgcaactccaaataaaagtacc

SEQ ID NO: 4947 - DNA, 24 bp, Homo sapiens
  source 1..24: mol_type = genomic DNA
aggccccgggttcaatccccggca

SEQ ID NO: 4948 - DNA, 26 bp, Homo sapiens
  source 1..26: mol_type = genomic DNA
aggccccgggttcaatccccggcacc

SEQ ID NO: 4949 - DNA, 32 bp, Homo sapiens
  source 1..32: mol_type = genomic DNA
aggccccgggttcaatccccggcacctccacc

SEQ ID NO: 4950 - DNA, 33 bp, Homo sapiens
  source 1..33: mol_type = genomic DNA
aggccccgggttcaatccccggcacctccacca

SEQ ID NO: 4951 - DNA, 32 bp, Homo sapiens
  source 1..32: mol_type = genomic DNA
aggccccgggttcgatccccggcatctccacc

SEQ ID NO: 4952 - DNA, 33 bp, Homo sapiens
  source 1..33: mol_type = genomic DNA
aggccccgggttcgatccccggcatctccacca

SEQ ID NO: 4953 - DNA, 33 bp, Homo sapiens
  source 1..33: mol_type = genomic DNA
aggcctcgtggcgcaacggtagcgcgtctgact

SEQ ID NO: 4954 - DNA, 35 bp, Homo sapiens
  source 1..35: mol_type = genomic DNA
aggcctcgtggcgcaacggtagcgcgtctgactcc

SEQ ID NO: 4955 - DNA, 18 bp, Homo sapiens
  source 1..18: mol_type = genomic DNA
aggcctctttttaccacc

SEQ ID NO: 4956 - DNA, 19 bp, Homo sapiens
  source 1..19: mol_type = genomic DNA
aggcctctttttaccacca

SEQ ID NO: 4957 - DNA, 19 bp, Homo sapiens
  source 1..19: mol_type = genomic DNA
aggcggcccgggttcgact

SEQ ID NO: 4958 - DNA, 20 bp, Homo sapiens
  source 1..20: mol_type = genomic DNA
aggcggcccgggttcgactc

SEQ ID NO: 4959 - DNA, 22 bp, Homo sapiens
  source 1..22: mol_type = genomic DNA
aggcggcccgggttcgactccc

SEQ ID NO: 4960 - DNA, 23 bp, Homo sapiens
  source 1..23: mol_type = genomic DNA
aggcggcccgggttcgactcccg

SEQ ID NO: 4961 - DNA, 24 bp, Homo sapiens
  source 1..24: mol_type = genomic DNA
aggcggcccgggttcgactcccgg

SEQ ID NO: 4962 - DNA, 25 bp, Homo sapiens
  source 1..25: mol_type = genomic DNA
aggcggcccgggttcgactcccggt

SEQ ID NO: 4963 - DNA, 26 bp, Homo sapiens
  source 1..26: mol_type = genomic DNA
aggcggcccgggttcgactcccggtg

SEQ ID NO: 4964 - DNA, 27 bp, Homo sapiens
  source 1..27: mol_type = genomic DNA
aggcggcccgggttcgactcccggtgt

SEQ ID NO: 4965 - DNA, 28 bp, Homo sapiens
  source 1..28: mol_type = genomic DNA
aggcggcccgggttcgactcccggtgtg

SEQ ID NO: 4966 - DNA, 29 bp, Homo sapiens
  source 1..29: mol_type = genomic DNA
aggcggcccgggttcgactcccggtgtgg

SEQ ID NO: 4967 - DNA, 30 bp, Homo sapiens
  source 1..30: mol_type = genomic DNA
aggcggcccgggttcgactcccggtgtggg

SEQ ID NO: 4968 - DNA, 31 bp, Homo sapiens
  source 1..31: mol_type = genomic DNA
aggcggcccgggttcgactcccggtgtggga

SEQ ID NO: 4969 - DNA, 32 bp, Homo sapiens
  source 1..32: mol_type = genomic DNA
aggcggcccgggttcgactcccggtgtgggaa

SEQ ID NO: 4970 - DNA, 33 bp, Homo sapiens
  source 1..33: mol_type = genomic DNA
aggcggcccgggttcgactcccggtgtgggaac

SEQ ID NO: 4971 - DNA, 34 bp, Homo sapiens
  source 1..34: mol_type = genomic DNA
aggcggcccgggttcgactcccggtgtgggaacc

SEQ ID NO: 4972 - DNA, 35 bp, Homo sapiens
  source 1..35: mol_type = genomic DNA
aggcggcccgggttcgactcccggtgtgggaacca

SEQ ID NO: 4973 - DNA, 19 bp, Homo sapiens
  source 1..19: mol_type = genomic DNA
aggcgtctgacttcggatc

SEQ ID NO: 4974 - DNA, 23 bp, Homo sapiens
  source 1..23: mol_type = genomic DNA
aggcgtctgacttcggatcagaa

SEQ ID NO: 4975 - DNA, 18 bp, Homo sapiens
  source 1..18: mol_type = genomic DNA
aggcgtctgattccggat

SEQ ID NO: 4976 - DNA, 19 bp, Homo sapiens
  source 1..19: mol_type = genomic DNA
aggcgtctgattccggatc

SEQ ID NO: 4977 - DNA, 33 bp, Homo sapiens
  source 1..33: mol_type = genomic DNA
aggcgtctgattccggatcagaagattgagggt

SEQ ID NO: 4978 - DNA, 19 bp, Homo sapiens
  source 1..19: mol_type = genomic DNA
aggcgtgggttcgaatccc

SEQ ID NO: 4979 - DNA, 20 bp, Homo sapiens
  source 1..20: mol_type = genomic DNA
aggcgtgggttcgaatccca

SEQ ID NO: 4980 - DNA, 20 bp, Homo sapiens
  source 1..20: mol_type = genomic DNA
aggctaaatcctatatatct

SEQ ID NO: 4981 - DNA, 24 bp, Homo sapiens
  source 1..24: mol_type = genomic DNA
aggctaaatcctatatatcttacc

SEQ ID NO: 4982 - DNA, 25 bp, Homo sapiens
  source 1..25: mol_type = genomic DNA
aggctaaatcctatatatcttacca

SEQ ID NO: 4983 - DNA, 18 bp, Homo sapiens
  source 1..18: mol_type = genomic DNA
aggctgcgtgttcgaatc

SEQ ID NO: 4984 - DNA, 25 bp, Homo sapiens
  source 1..25: mol_type = genomic DNA
aggctgcgtgttcgaatcacgtcgg

SEQ ID NO: 4985 - DNA, 32 bp, Homo sapiens
  source 1..32: mol_type = genomic DNA
aggctgcgtgttcgaatcacgtcggggtcacc

SEQ ID NO: 4986 - DNA, 18 bp, Homo sapiens
  source 1..18: mol_type = genomic DNA
aggcttacgaccccttat

SEQ ID NO: 4987 - DNA, 19 bp, Homo sapiens
  source 1..19: mol_type = genomic DNA
aggcttacgaccccttatt

SEQ ID NO: 4988 - DNA, 20 bp, Homo sapiens
  source 1..20: mol_type = genomic DNA
aggcttacgaccccttattt

SEQ ID NO: 4989 - DNA, 22 bp, Homo sapiens
  source 1..22: mol_type = genomic DNA
aggcttacgaccccttatttac

SEQ ID NO: 4990 - DNA, 23 bp, Homo sapiens
  source 1..23: mol_type = genomic DNA
aggcttacgaccccttatttacc

SEQ ID NO: 4991 - DNA, 24 bp, Homo sapiens
  source 1..24: mol_type = genomic DNA
aggcttacgaccccttatttaccc

SEQ ID NO: 4992 - DNA, 25 bp, Homo sapiens
  source 1..25: mol_type = genomic DNA
aggcttacgaccccttatttacccc

SEQ ID NO: 4993 - DNA, 26 bp, Homo sapiens
  source 1..26: mol_type = genomic DNA
aggcttacgaccccttatttacccca

SEQ ID NO: 4994 - DNA, 17 bp, Homo sapiens
  source 1..17: mol_type = genomic DNA
agggatgggttcgattc

SEQ ID NO: 4995 - DNA, 18 bp, Homo sapiens
  source 1..18: mol_type = genomic DNA
agggatgggttcgattct

SEQ ID NO: 4996 - DNA, 19 bp, Homo sapiens
  source 1..19: mol_type = genomic DNA
agggatgggttcgattctc

SEQ ID NO: 4997 - DNA, 20 bp, Homo sapiens
  source 1..20: mol_type = genomic DNA
agggatgggttcgattctca

SEQ ID NO: 4998 - DNA, 22 bp, Homo sapiens
  source 1..22: mol_type = genomic DNA
agggatgggttcgattctcata

SEQ ID NO: 4999 - DNA, 25 bp, Homo sapiens
  source 1..25: mol_type = genomic DNA
agggatgggttcgattctcatagtc

SEQ ID NO: 5000 - DNA, 26 bp, Homo sapiens
  source 1..26: mol_type = genomic DNA
agggatgggttcgattctcatagtcc

SEQ ID NO: 5001 - DNA, 27 bp, Homo sapiens
  source 1..27: mol_type = genomic DNA
agggatgggttcgattctcatagtcct

SEQ ID NO: 5002 - DNA, 29 bp, Homo sapiens
  source 1..29: mol_type = genomic DNA
agggatgggttcgattctcatagtcctag

SEQ ID NO: 5003 - DNA, 30 bp, Homo sapiens
  source 1..30: mol_type = genomic DNA
agggatgggttcgattctcatagtcctagc

SEQ ID NO: 5004 - DNA, 31 bp, Homo sapiens
  source 1..31: mol_type = genomic DNA
agggatgggttcgattctcatagtcctagcc

SEQ ID NO: 5005 - DNA, 32 bp, Homo sapiens
  source 1..32: mol_type = genomic DNA
agggatgggttcgattctcatagtcctagcca

SEQ ID NO: 5006 - DNA, 16 bp, Homo sapiens
  source 1..16: mol_type = genomic DNA
agggattgtgggttcg

SEQ ID NO: 5007 - DNA, 19 bp, Homo sapiens
  source 1..19: mol_type = genomic DNA
agggattgtgggttcgagt

SEQ ID NO: 5008 - DNA, 21 bp, Homo sapiens
  source 1..21: mol_type = genomic DNA
agggattgtgggttcgagtcc

SEQ ID NO: 5009 - DNA, 22 bp, Homo sapiens
  source 1..22: mol_type = genomic DNA
agggattgtgggttcgagtccc

SEQ ID NO: 5010 - DNA, 23 bp, Homo sapiens
  source 1..23: mol_type = genomic DNA
agggattgtgggttcgagtccca

SEQ ID NO: 5011 - DNA, 25 bp, Homo sapiens
  source 1..25: mol_type = genomic DNA
agggattgtgggttcgagtcccacc

SEQ ID NO: 5012 - DNA, 29 bp, Homo sapiens
  source 1..29: mol_type = genomic DNA
agggattgtgggttcgagtcccacccggg

SEQ ID NO: 5013 - DNA, 30 bp, Homo sapiens
  source 1..30: mol_type = genomic DNA
agggattgtgggttcgagtcccacccgggg

SEQ ID NO: 5014 - DNA, 31 bp, Homo sapiens
  source 1..31: mol_type = genomic DNA
agggattgtgggttcgagtcccacccggggt

SEQ ID NO: 5015 - DNA, 32 bp, Homo sapiens
  source 1..32: mol_type = genomic DNA
agggattgtgggttcgagtcccacccggggta

SEQ ID NO: 5016 - DNA, 33 bp, Homo sapiens
  source 1..33: mol_type = genomic DNA
agggattgtgggttcgagtcccacccggggtac

SEQ ID NO: 5017 - DNA, 34 bp, Homo sapiens
  source 1..34: mol_type = genomic DNA
agggattgtgggttcgagtcccacccggggtacc

SEQ ID NO: 5018 - DNA, 35 bp, Homo sapiens
  source 1..35: mol_type = genomic DNA
agggattgtgggttcgagtcccacccggggtacca

SEQ ID NO: 5019 - DNA, 31 bp, Homo sapiens
  source 1..31: mol_type = genomic DNA
agggattgtgggttcgagtcccacctggggt

SEQ ID NO: 5020 - DNA, 32 bp, Homo sapiens
  source 1..32: mol_type = genomic DNA
agggattgtgggttcgagtcccacctggggta

SEQ ID NO: 5021 - DNA, 33 bp, Homo sapiens
  source 1..33: mol_type = genomic DNA
agggattgtgggttcgagtcccacctggggtac

SEQ ID NO: 5022 - DNA, 34 bp, Homo sapiens
  source 1..34: mol_type = genomic DNA
agggattgtgggttcgagtcccacctggggtacc

SEQ ID NO: 5023 - DNA, 35 bp, Homo sapiens
  source 1..35: mol_type = genomic DNA
agggattgtgggttcgagtcccacctggggtacca

SEQ ID NO: 5024 - DNA, 32 bp, Homo sapiens
  source 1..32: mol_type = genomic DNA
agggattgtgggttcgagtcccacctggggtg

SEQ ID NO: 5025 - DNA, 33 bp, Homo sapiens
  source 1..33: mol_type = genomic DNA
agggattgtgggttcgagtcccacctggggtgc

SEQ ID NO: 5026 - DNA, 34 bp, Homo sapiens
  source 1..34: mol_type = genomic DNA
agggattgtgggttcgagtcccacctggggtgcc

SEQ ID NO: 5027 - DNA, 35 bp, Homo sapiens
  source 1..35: mol_type = genomic DNA
agggattgtgggttcgagtcccacctggggtgcca

SEQ ID NO: 5028 - DNA, 25 bp, Homo sapiens
  source 1..25: mol_type = genomic DNA
agggattgtgggttcgagtcccatc

SEQ ID NO: 5029 - DNA, 26 bp, Homo sapiens
  source 1..26: mol_type = genomic DNA
agggattgtgggttcgagtcccatct

SEQ ID NO: 5030 - DNA, 29 bp, Homo sapiens
  source 1..29: mol_type = genomic DNA
agggattgtgggttcgagtcccatctggg

SEQ ID NO: 5031 - DNA, 30 bp, Homo sapiens
  source 1..30: mol_type = genomic DNA
agggattgtgggttcgagtcccatctgggg

SEQ ID NO: 5032 - DNA, 31 bp, Homo sapiens
  source 1..31: mol_type = genomic DNA
agggattgtgggttcgagtcccatctggggt

SEQ ID NO: 5033 - DNA, 32 bp, Homo sapiens
  source 1..32: mol_type = genomic DNA
agggattgtgggttcgagtcccatctggggtg

SEQ ID NO: 5034 - DNA, 33 bp, Homo sapiens
  source 1..33: mol_type = genomic DNA
agggattgtgggttcgagtcccatctggggtgc

SEQ ID NO: 5035 - DNA, 34 bp, Homo sapiens
  source 1..34: mol_type = genomic DNA
agggattgtgggttcgagtcccatctggggtgcc

SEQ ID NO: 5036 - DNA, 35 bp, Homo sapiens
  source 1..35: mol_type = genomic DNA
agggattgtgggttcgagtcccatctggggtgcca

SEQ ID NO: 5037 - DNA, 33 bp, Homo sapiens
  source 1..33: mol_type = genomic DNA
agggggtatagctcagtggtagagcatttgact

SEQ ID NO: 5038 - DNA, 20 bp, Homo sapiens
  source 1..20: mol_type = genomic DNA
aggggtagagcatttgactg

SEQ ID NO: 5039 - DNA, 21 bp, Homo sapiens
  source 1..21: mol_type = genomic DNA
aggggtagagcatttgactgc

SEQ ID NO: 5040 - DNA, 16 bp, Homo sapiens
  source 1..16: mol_type = genomic DNA
aggggtatgattctcg

SEQ ID NO: 5041 - DNA, 17 bp, Homo sapiens
  source 1..17: mol_type = genomic DNA
aggggtatgattctcgc

SEQ ID NO: 5042 - DNA, 18 bp, Homo sapiens
  source 1..18: mol_type = genomic DNA
aggggtatgattctcgct

SEQ ID NO: 5043 - DNA, 19 bp, Homo sapiens
  source 1..19: mol_type = genomic DNA
aggggtatgattctcgctt

SEQ ID NO: 5044 - DNA, 20 bp, Homo sapiens
  source 1..20: mol_type = genomic DNA
aggggtatgattctcgcttc

SEQ ID NO: 5045 - DNA, 22 bp, Homo sapiens
  source 1..22: mol_type = genomic DNA
aggggtatgattctcgcttcgg

SEQ ID NO: 5046 - DNA, 22 bp, Homo sapiens
  source 1..22: mol_type = genomic DNA
aggggtatgattctcgctttgg

SEQ ID NO: 5047 - DNA, 18 bp, Homo sapiens
  source 1..18: mol_type = genomic DNA
aggggtatgattctcggt

SEQ ID NO: 5048 - DNA, 19 bp, Homo sapiens
  source 1..19: mol_type = genomic DNA
aggggtatgattctcggtt

SEQ ID NO: 5049 - DNA, 20 bp, Homo sapiens
  source 1..20: mol_type = genomic DNA
aggggtatgattctcggttt

SEQ ID NO: 5050 - DNA, 21 bp, Homo sapiens
  source 1..21: mol_type = genomic DNA
aggggtatgattctcggtttg

SEQ ID NO: 5051 - DNA, 22 bp, Homo sapiens
  source 1..22: mol_type = genomic DNA
aggggtatgattctcggtttgg

SEQ ID NO: 5052 - DNA, 16 bp, Homo sapiens
  source 1..16: mol_type = genomic DNA
aggggtcgcgagttca

SEQ ID NO: 5053 - DNA, 28 bp, Homo sapiens
  source 1..28: mol_type = genomic DNA
aggggtcgcgagttcaaatctcgctggg

SEQ ID NO: 5054 - DNA, 30 bp, Homo sapiens
  source 1..30: mol_type = genomic DNA
aggggtcgcgagttcaaatctcgctggggc

SEQ ID NO: 5055 - DNA, 31 bp, Homo sapiens
  source 1..31: mol_type = genomic DNA
aggggtcgcgagttcaaatctcgctggggcc

SEQ ID NO: 5056 - DNA, 32 bp, Homo sapiens
  source 1..32: mol_type = genomic DNA
aggggtcgcgagttcaaatctcgctggggcct

SEQ ID NO: 5057 - DNA, 33 bp, Homo sapiens
  source 1..33: mol_type = genomic DNA
aggggtcgcgagttcaaatctcgctggggcctc

SEQ ID NO: 5058 - DNA, 34 bp, Homo sapiens
  source 1..34: mol_type = genomic DNA
aggggtcgcgagttcaaatctcgctggggcctcc

SEQ ID NO: 5059 - DNA, 32 bp, Homo sapiens
  source 1..32: mol_type = genomic DNA
aggggtcgcgagttcaattctcgctggggcct

SEQ ID NO: 5060 - DNA, 33 bp, Homo sapiens
  source 1..33: mol_type = genomic DNA
aggggtcgcgagttcaattctcgctggggcctc

SEQ ID NO: 5061 - DNA, 16 bp, Homo sapiens
  source 1..16: mol_type = genomic DNA
aggggtcgcgagttcg

SEQ ID NO: 5062 - DNA, 32 bp, Homo sapiens
  source 1..32: mol_type = genomic DNA
aggggtcgcgagttcgatcctcgctggggcct

SEQ ID NO: 5063 - DNA, 33 bp, Homo sapiens
  source 1..33: mol_type = genomic DNA
aggggtcgcgagttcgatcctcgctggggcctc

SEQ ID NO: 5064 - DNA, 16 bp, Homo sapiens
  source 1..16: mol_type = genomic DNA
aggggttagagcactg

SEQ ID NO: 5065 - DNA, 17 bp, Homo sapiens
  source 1..17: mol_type = genomic DNA
aggggttagagcactgg

SEQ ID NO: 5066 - DNA, 19 bp, Homo sapiens
  source 1..19: mol_type = genomic DNA
aggggttagagcactggtc

SEQ ID NO: 5067 - DNA, 20 bp, Homo sapiens
  source 1..20: mol_type = genomic DNA
aggggttagagcactggtct

SEQ ID NO: 5068 - DNA, 22 bp, Homo sapiens
  source 1..22: mol_type = genomic DNA
aggggttaggcctctttttacc

SEQ ID NO: 5069 - DNA, 25 bp, Homo sapiens
  source 1..25: mol_type = genomic DNA
aggggttaggcctctttttaccacc

SEQ ID NO: 5070 - DNA, 26 bp, Homo sapiens
  source 1..26: mol_type = genomic DNA
aggggttaggcctctttttaccacca

SEQ ID NO: 5071 - DNA, 24 bp, Homo sapiens
  source 1..24: mol_type = genomic DNA
agggtccagggttcaagtccctgt

SEQ ID NO: 5072 - DNA, 34 bp, Homo sapiens
  source 1..34: mol_type = genomic DNA
agggtccagggttcaagtccctgttcaggcgcca

SEQ ID NO: 5073 - DNA, 30 bp, Homo sapiens
  source 1..30: mol_type = genomic DNA
agggtccagggttcaagtccctgttcgggc

SEQ ID NO: 5074 - DNA, 31 bp, Homo sapiens
  source 1..31: mol_type = genomic DNA
agggtccagggttcaagtccctgttcgggcg

SEQ ID NO: 5075 - DNA, 32 bp, Homo sapiens
  source 1..32: mol_type = genomic DNA
agggtccagggttcaagtccctgttcgggcgc

SEQ ID NO: 5076 - DNA, 33 bp, Homo sapiens
  source 1..33: mol_type = genomic DNA
agggtccagggttcaagtccctgttcgggcgcc

SEQ ID NO: 5077 - DNA, 34 bp, Homo sapiens
  source 1..34: mol_type = genomic DNA
agggtccagggttcaagtccctgttcgggcgcca

SEQ ID NO: 5078 - DNA, 25 bp, Homo sapiens
  source 1..25: mol_type = genomic DNA
agggtccagggttcatgtccctgtt

SEQ ID NO: 5079 - DNA, 21 bp, Homo sapiens
  source 1..21: mol_type = genomic DNA
agggtcgtgggttcgagcccc

SEQ ID NO: 5080 - DNA, 22 bp, Homo sapiens
  source 1..22: mol_type = genomic DNA
agggtcgtgggttcgagcccca

SEQ ID NO: 5081 - DNA, 24 bp, Homo sapiens
  source 1..24: mol_type = genomic DNA
agggtcgtgggttcgagccccacg

SEQ ID NO: 5082 - DNA, 25 bp, Homo sapiens
  source 1..25: mol_type = genomic DNA
agggtcgtgggttcgagccccacgt

SEQ ID NO: 5083 - DNA, 27 bp, Homo sapiens
  source 1..27: mol_type = genomic DNA
agggtcgtgggttcgagccccacgttg

SEQ ID NO: 5084 - DNA, 28 bp, Homo sapiens
  source 1..28: mol_type = genomic DNA
agggtcgtgggttcgagccccacgttgg

SEQ ID NO: 5085 - DNA, 29 bp, Homo sapiens
  source 1..29: mol_type = genomic DNA
agggtcgtgggttcgagccccacgttggg

SEQ ID NO: 5086 - DNA, 30 bp, Homo sapiens
  source 1..30: mol_type = genomic DNA
agggtcgtgggttcgagccccacgttgggc

SEQ ID NO: 5087 - DNA, 31 bp, Homo sapiens
  source 1..31: mol_type = genomic DNA
agggtcgtgggttcgagccccacgttgggcg

SEQ ID NO: 5088 - DNA, 32 bp, Homo sapiens
  source 1..32: mol_type = genomic DNA
agggtcgtgggttcgagccccacgttgggcgc

SEQ ID NO: 5089 - DNA, 33 bp, Homo sapiens
  source 1..33: mol_type = genomic DNA
agggtcgtgggttcgagccccacgttgggcgcc

SEQ ID NO: 5090 - DNA, 34 bp, Homo sapiens
  source 1..34: mol_type = genomic DNA
agggtcgtgggttcgagccccacgttgggcgcca

SEQ ID NO: 5091 - DNA, 16 bp, Homo sapiens
  source 1..16: mol_type = genomic DNA
agggtgcttagctgtt

SEQ ID NO: 5092 - DNA, 20 bp, Homo sapiens
  source 1..20: mol_type = genomic DNA
agggtgcttagctgttaact

SEQ ID NO: 5093 - DNA, 27 bp, Homo sapiens
  source 1..27: mol_type = genomic DNA
agggtgcttagctgttaactaagtgtt

SEQ ID NO: 5094 - DNA, 30 bp, Homo sapiens
  source 1..30: mol_type = genomic DNA
agggtgcttagctgttaactaagtgtttgt

SEQ ID NO: 5095 - DNA, 31 bp, Homo sapiens
  source 1..31: mol_type = genomic DNA
agggtgcttagctgttaactaagtgtttgtg

SEQ ID NO: 5096 - DNA, 35 bp, Homo sapiens
  source 1..35: mol_type = genomic DNA
agggtgcttagctgttaactaagtgtttgtgggtt

SEQ ID NO: 5097 - DNA, 36 bp, Homo sapiens
  source 1..36: mol_type = genomic DNA
agggtgcttagctgttaactaagtgtttgtgggttt

SEQ ID NO: 5098 - DNA, 37 bp, Homo sapiens
  source 1..37: mol_type = genomic DNA
agggtgcttagctgttaactaagtgtttgtgggttta

SEQ ID NO: 5099 - DNA, 46 bp, Homo sapiens
  source 1..46: mol_type = genomic DNA
agggtgcttagctgttaactaagtgtttgtgggtttaagtcccatt

SEQ ID NO: 5100 - DNA, 23 bp, Homo sapiens
  source 1..23: mol_type = genomic DNA
agggttcaagtccctgttcgggc

SEQ ID NO: 5101 - DNA, 24 bp, Homo sapiens
  source 1..24: mol_type = genomic DNA
agggttcaagtccctgttcgggcg

SEQ ID NO: 5102 - DNA, 25 bp, Homo sapiens
  source 1..25: mol_type = genomic DNA
agggttcaagtccctgttcgggcgc

SEQ ID NO: 5103 - DNA, 26 bp, Homo sapiens
  source 1..26: mol_type = genomic DNA
agggttcaagtccctgttcgggcgcc

SEQ ID NO: 5104 - DNA, 27 bp, Homo sapiens
  source 1..27: mol_type = genomic DNA
agggttcaagtccctgttcgggcgcca

SEQ ID NO: 5105 - DNA, 17 bp, Homo sapiens
  source 1..17: mol_type = genomic DNA
agggttcatgtccctgt

SEQ ID NO: 5106 - DNA, 26 bp, Homo sapiens
  source 1..26: mol_type = genomic DNA
agggttcgaatcccttcgtggttgcc

SEQ ID NO: 5107 - DNA, 24 bp, Homo sapiens
  source 1..24: mol_type = genomic DNA
agggttcgagtcccttcgtggtcg

SEQ ID NO: 5108 - DNA, 25 bp, Homo sapiens
  source 1..25: mol_type = genomic DNA
agggttcgagtcccttcgtggtcgc

SEQ ID NO: 5109 - DNA, 26 bp, Homo sapiens
  source 1..26: mol_type = genomic DNA
agggttcgagtcccttcgtggtcgcc

SEQ ID NO: 5110 - DNA, 27 bp, Homo sapiens
  source 1..27: mol_type = genomic DNA
agggttcgagtcccttcgtggtcgcca

SEQ ID NO: 5111 - DNA, 16 bp, Homo sapiens
  source 1..16: mol_type = genomic DNA
aggtagcgcatcagtc

SEQ ID NO: 5112 - DNA, 17 bp, Homo sapiens
  source 1..17: mol_type = genomic DNA
aggtagcgcatcagtct

SEQ ID NO: 5113 - DNA, 16 bp, Homo sapiens
  source 1..16: mol_type = genomic DNA
aggtcagctaaataag

SEQ ID NO: 5114 - DNA, 21 bp, Homo sapiens
  source 1..21: mol_type = genomic DNA
aggtcagctaaataagctatc

SEQ ID NO: 5115 - DNA, 24 bp, Homo sapiens
  source 1..24: mol_type = genomic DNA
aggtcagctaaataagctatcggg

SEQ ID NO: 5116 - DNA, 25 bp, Homo sapiens
  source 1..25: mol_type = genomic DNA
aggtcagctaaataagctatcgggc

SEQ ID NO: 5117 - DNA, 26 bp, Homo sapiens
  source 1..26: mol_type = genomic DNA
aggtcagctaaataagctatcgggcc

SEQ ID NO: 5118 - DNA, 27 bp, Homo sapiens
  source 1..27: mol_type = genomic DNA
aggtcagctaaataagctatcgggccc

SEQ ID NO: 5119 - DNA, 28 bp, Homo sapiens
  source 1..28: mol_type = genomic DNA
aggtcagctaaataagctatcgggccca

SEQ ID NO: 5120 - DNA, 29 bp, Homo sapiens
  source 1..29: mol_type = genomic DNA
aggtcagctaaataagctatcgggcccat

SEQ ID NO: 5121 - DNA, 30 bp, Homo sapiens
  source 1..30: mol_type = genomic DNA
aggtcagctaaataagctatcgggcccata

SEQ ID NO: 5122 - DNA, 32 bp, Homo sapiens
  source 1..32: mol_type = genomic DNA
aggtcagctaaataagctatcgggcccatacc

SEQ ID NO: 5123 - DNA, 36 bp, Homo sapiens
  source 1..36: mol_type = genomic DNA
aggtcagctaaataagctatcgggcccataccccga

SEQ ID NO: 5124 - DNA, 37 bp, Homo sapiens
  source 1..37: mol_type = genomic DNA
aggtcagctaaataagctatcgggcccataccccgaa

SEQ ID NO: 5125 - DNA, 38 bp, Homo sapiens
  source 1..38: mol_type = genomic DNA
aggtcagctaaataagctatcgggcccataccccgaaa

SEQ ID NO: 5126 - DNA, 41 bp, Homo sapiens
  source 1..41: mol_type = genomic DNA
aggtcagctaaataagctatcgggcccataccccgaaaatg

SEQ ID NO: 5127 - DNA, 43 bp, Homo sapiens
  source 1..43: mol_type = genomic DNA
aggtcagctaaataagctatcgggcccataccccgaaaatgtt

SEQ ID NO: 5128 - DNA, 47 bp, Homo sapiens
  source 1..47: mol_type = genomic DNA
aggtcagctaaataagctatcgggcccataccccgaaaatgttggtt

SEQ ID NO: 5129 - DNA, 48 bp, Homo sapiens
  source 1..48: mol_type = genomic DNA
aggtcagctaaataagctatcgggcccataccccgaaaatgttggtta

SEQ ID NO: 5130 - DNA, 30 bp, Homo sapiens
  source 1..30: mol_type = genomic DNA
aggtccccggttcgaaaccgggcggaaaca

SEQ ID NO: 5131 - DNA, 24 bp, Homo sapiens
  source 1..24: mol_type = genomic DNA
aggtcccgggttcaaatcccggac

SEQ ID NO: 5132 - DNA, 21 bp, Homo sapiens
  source 1..21: mol_type = genomic DNA
aggtcccgggttcaatccccg

SEQ ID NO: 5133 - DNA, 31 bp, Homo sapiens
  source 1..31: mol_type = genomic DNA
aggtcccgggttcgatccccagcatctccac

SEQ ID NO: 5134 - DNA, 32 bp, Homo sapiens
  source 1..32: mol_type = genomic DNA
aggtcccgggttcgatccccagcatctccacc

SEQ ID NO: 5135 - DNA, 33 bp, Homo sapiens
  source 1..33: mol_type = genomic DNA
aggtcccgggttcgatccccagcatctccacca

SEQ ID NO: 5136 - DNA, 21 bp, Homo sapiens
  source 1..21: mol_type = genomic DNA
aggtccctggttcaaatccgg

SEQ ID NO: 5137 - DNA, 17 bp, Homo sapiens
  source 1..17: mol_type = genomic DNA
aggtccctggttcaatc

SEQ ID NO: 5138 - DNA, 31 bp, Homo sapiens
  source 1..31: mol_type = genomic DNA
aggtccctggttcgatcccgggtttcggcac

SEQ ID NO: 5139 - DNA, 33 bp, Homo sapiens
  source 1..33: mol_type = genomic DNA
aggtccctggttcgatcccgggtttcggcacca

SEQ ID NO: 5140 - DNA, 16 bp, Homo sapiens
  source 1..16: mol_type = genomic DNA
aggtcctgagttcgaa

SEQ ID NO: 5141 - DNA, 17 bp, Homo sapiens
  source 1..17: mol_type = genomic DNA
aggtcctgagttcgaac

SEQ ID NO: 5142 - DNA, 18 bp, Homo sapiens
  source 1..18: mol_type = genomic DNA
aggtcctgagttcgaacc

SEQ ID NO: 5143 - DNA, 19 bp, Homo sapiens
  source 1..19: mol_type = genomic DNA
aggtcctgagttcgaacct

SEQ ID NO: 5144 - DNA, 29 bp, Homo sapiens
  source 1..29: mol_type = genomic DNA
aggtcctgagttcgaacctcagagggggc

SEQ ID NO: 5145 - DNA, 31 bp, Homo sapiens
  source 1..31: mol_type = genomic DNA
aggtcctgagttcgaacctcagagggggcac

SEQ ID NO: 5146 - DNA, 32 bp, Homo sapiens
  source 1..32: mol_type = genomic DNA
aggtcctgagttcgaacctcagagggggcacc

SEQ ID NO: 5147 - DNA, 33 bp, Homo sapiens
  source 1..33: mol_type = genomic DNA
aggtcctgagttcgaacctcagagggggcacca

SEQ ID NO: 5148 - DNA, 20 bp, Homo sapiens
  source 1..20: mol_type = genomic DNA
aggtcctgggttcgagcccc

SEQ ID NO: 5149 - DNA, 31 bp, Homo sapiens
  source 1..31: mol_type = genomic DNA
aggtcctgggttcgagccccagtggaaccac

SEQ ID NO: 5150 - DNA, 32 bp, Homo sapiens
  source 1..32: mol_type = genomic DNA
aggtcctgggttcgagccccagtggaaccacc

SEQ ID NO: 5151 - DNA, 33 bp, Homo sapiens
  source 1..33: mol_type = genomic DNA
aggtcctgggttcgagccccagtggaaccacca

SEQ ID NO: 5152 - DNA, 17 bp, Homo sapiens
  source 1..17: mol_type = genomic DNA
aggtcgatggatcgaaa

SEQ ID NO: 5153 - DNA, 18 bp, Homo sapiens
  source 1..18: mol_type = genomic DNA
aggtcgatggatcgaaac

SEQ ID NO: 5154 - DNA, 19 bp, Homo sapiens
  source 1..19: mol_type = genomic DNA
aggtcgatggatcgaaacc

SEQ ID NO: 5155 - DNA, 20 bp, Homo sapiens
  source 1..20: mol_type = genomic DNA
aggtcgatggatcgaaacca

SEQ ID NO: 5156 - DNA, 21 bp, Homo sapiens
  source 1..21: mol_type = genomic DNA
aggtcgatggatcgaaaccat

SEQ ID NO: 5157 - DNA, 32 bp, Homo sapiens
  source 1..32: mol_type = genomic DNA
aggtcgatggatcgaaaccatcctctgctacc

SEQ ID NO: 5158 - DNA, 29 bp, Homo sapiens
  source 1..29: mol_type = genomic DNA
aggtcgcgggttcgaaccccgtacgggcc

SEQ ID NO: 5159 - DNA, 30 bp, Homo sapiens
  source 1..30: mol_type = genomic DNA
aggtcgcgggttcgaaccccgtacgggcca

SEQ ID NO: 5160 - DNA, 19 bp, Homo sapiens
  source 1..19: mol_type = genomic DNA
aggtcgcgggttcgatccc

SEQ ID NO: 5161 - DNA, 23 bp, Homo sapiens
  source 1..23: mol_type = genomic DNA
aggtcgcgggttcgatccccgta

SEQ ID NO: 5162 - DNA, 27 bp, Homo sapiens
  source 1..27: mol_type = genomic DNA
aggtcgcgggttcgatccccgtacggg

SEQ ID NO: 5163 - DNA, 28 bp, Homo sapiens
  source 1..28: mol_type = genomic DNA
aggtcgcgggttcgatccccgtacgggc

SEQ ID NO: 5164 - DNA, 29 bp, Homo sapiens
  source 1..29: mol_type = genomic DNA
aggtcgcgggttcgatccccgtacgggcc

SEQ ID NO: 5165 - DNA, 30 bp, Homo sapiens
  source 1..30: mol_type = genomic DNA
aggtcgcgggttcgatccccgtacgggcca

SEQ ID NO: 5166 - DNA, 31 bp, Homo sapiens
  source 1..31: mol_type = genomic DNA
aggtcgcgggttcgatccccgtacgggccac

SEQ ID NO: 5167 - DNA, 32 bp, Homo sapiens
  source 1..32: mol_type = genomic DNA
aggtcgcgggttcgatccccgtacgggccacc

SEQ ID NO: 5168 - DNA, 33 bp, Homo sapiens
  source 1..33: mol_type = genomic DNA
aggtcgcgggttcgatccccgtacgggccacca

SEQ ID NO: 5169 - DNA, 26 bp, Homo sapiens
  source 1..26: mol_type = genomic DNA
aggtcgcgggttcgatccccgtactg

SEQ ID NO: 5170 - DNA, 31 bp, Homo sapiens
  source 1..31: mol_type = genomic DNA
aggtcgctggttcgaatccggctcgaaggac

SEQ ID NO: 5171 - DNA, 32 bp, Homo sapiens
  source 1..32: mol_type = genomic DNA
aggtcgctggttcgaatccggctcgaaggacc

SEQ ID NO: 5172 - DNA, 33 bp, Homo sapiens
  source 1..33: mol_type = genomic DNA
aggtcgctggttcgaatccggctcgaaggacca

SEQ ID NO: 5173 - DNA, 31 bp, Homo sapiens
  source 1..31: mol_type = genomic DNA
aggtcgctggttcgaatccggctcggaggac

SEQ ID NO: 5174 - DNA, 32 bp, Homo sapiens
  source 1..32: mol_type = genomic DNA
aggtcgctggttcgaatccggctcggaggacc

SEQ ID NO: 5175 - DNA, 19 bp, Homo sapiens
  source 1..19: mol_type = genomic DNA
aggtcgctggttcgattcc

SEQ ID NO: 5176 - DNA, 32 bp, Homo sapiens
  source 1..32: mol_type = genomic DNA
aggtcgctggttcgattccagctcgaaggacc

SEQ ID NO: 5177 - DNA, 22 bp, Homo sapiens
  source 1..22: mol_type = genomic DNA
aggtcgctggttcgattccggc

SEQ ID NO: 5178 - DNA, 23 bp, Homo sapiens
  source 1..23: mol_type = genomic DNA
aggtcgctggttcgattccggct

SEQ ID NO: 5179 - DNA, 31 bp, Homo sapiens
  source 1..31: mol_type = genomic DNA
aggtcgctggttcgattccggctcgaaggac

SEQ ID NO: 5180 - DNA, 32 bp, Homo sapiens
  source 1..32: mol_type = genomic DNA
aggtcgctggttcgattccggctcgaaggacc

SEQ ID NO: 5181 - DNA, 33 bp, Homo sapiens
  source 1..33: mol_type = genomic DNA
aggtcgctggttcgattccggctcgaaggacca

SEQ ID NO: 5182 - DNA, 18 bp, Homo sapiens
  source 1..18: mol_type = genomic DNA
aggtcgtgagttcgagcc

SEQ ID NO: 5183 - DNA, 19 bp, Homo sapiens
  source 1..19: mol_type = genomic DNA
aggtcgtgagttcgagcct

SEQ ID NO: 5184 - DNA, 20 bp, Homo sapiens
  source 1..20: mol_type = genomic DNA
aggtcgtgagttcgagcctc

SEQ ID NO: 5185 - DNA, 21 bp, Homo sapiens
  source 1..21: mol_type = genomic DNA
aggtcgtgagttcgagcctca

SEQ ID NO: 5186 - DNA, 18 bp, Homo sapiens
  source 1..18: mol_type = genomic DNA
aggtcgtgagttcgatcc

SEQ ID NO: 5187 - DNA, 20 bp, Homo sapiens
  source 1..20: mol_type = genomic DNA
aggtcgtgagttcgatcctc

SEQ ID NO: 5188 - DNA, 29 bp, Homo sapiens
  source 1..29: mol_type = genomic DNA
aggtcgtgagttcgatcctcacacggggc

SEQ ID NO: 5189 - DNA, 18 bp, Homo sapiens
  source 1..18: mol_type = genomic DNA
aggtgattttcatattga

SEQ ID NO: 5190 - DNA, 19 bp, Homo sapiens
  source 1..19: mol_type = genomic DNA
aggtgattttcatattgaa

SEQ ID NO: 5191 - DNA, 20 bp, Homo sapiens
  source 1..20: mol_type = genomic DNA
aggtgattttcatattgaat

SEQ ID NO: 5192 - DNA, 21 bp, Homo sapiens
  source 1..21: mol_type = genomic DNA
aggtgattttcatattgaatt

SEQ ID NO: 5193 - DNA, 22 bp, Homo sapiens
  source 1..22: mol_type = genomic DNA
aggtgattttcatattgaattg

SEQ ID NO: 5194 - DNA, 23 bp, Homo sapiens
  source 1..23: mol_type = genomic DNA
aggtgattttcatattgaattgc

SEQ ID NO: 5195 - DNA, 24 bp, Homo sapiens
  source 1..24: mol_type = genomic DNA
aggtgattttcatattgaattgca

SEQ ID NO: 5196 - DNA, 36 bp, Homo sapiens
  source 1..36: mol_type = genomic DNA
aggtgattttcatattgaattgcaaattcgaagaag

SEQ ID NO: 5197 - DNA, 37 bp, Homo sapiens
  source 1..37: mol_type = genomic DNA
aggtgattttcatattgaattgcaaattcgaagaagc

SEQ ID NO: 5198 - DNA, 38 bp, Homo sapiens
  source 1..38: mol_type = genomic DNA
aggtgattttcatattgaattgcaaattcgaagaagca

SEQ ID NO: 5199 - DNA, 39 bp, Homo sapiens
  source 1..39: mol_type = genomic DNA
aggtgattttcatattgaattgcaaattcgaagaagcag

SEQ ID NO: 5200 - DNA, 40 bp, Homo sapiens
  source 1..40: mol_type = genomic DNA
aggtgattttcatattgaattgcaaattcgaagaagcagc

SEQ ID NO: 5201 - DNA, 16 bp, Homo sapiens
  source 1..16: mol_type = genomic DNA
aggtggcacggagaat

SEQ ID NO: 5202 - DNA, 17 bp, Homo sapiens
  source 1..17: mol_type = genomic DNA
aggtggcacggagaatt

SEQ ID NO: 5203 - DNA, 18 bp, Homo sapiens
  source 1..18: mol_type = genomic DNA
aggtggcacggagaattt

SEQ ID NO: 5204 - DNA, 19 bp, Homo sapiens
  source 1..19: mol_type = genomic DNA
aggtggcacggagaatttt

SEQ ID NO: 5205 - DNA, 20 bp, Homo sapiens
  source 1..20: mol_type = genomic DNA
aggtggcacggagaattttg

SEQ ID NO: 5206 - DNA, 35 bp, Homo sapiens
  source 1..35: mol_type = genomic DNA
aggtggcacggagaattttggattctcagggatgg

SEQ ID NO: 5207 - DNA, 36 bp, Homo sapiens
  source 1..36: mol_type = genomic DNA
aggtggcacggagaattttggattctcagggatggg

SEQ ID NO: 5208 - DNA, 38 bp, Homo sapiens
  source 1..38: mol_type = genomic DNA
aggtggcacggagaattttggattctcagggatgggtt

SEQ ID NO: 5209 - DNA, 18 bp, Homo sapiens
  source 1..18: mol_type = genomic DNA
aggtggcccgggttcgac

SEQ ID NO: 5210 - DNA, 24 bp, Homo sapiens
  source 1..24: mol_type = genomic DNA
aggtggcccgggttcgactcccgg

SEQ ID NO: 5211 - DNA, 26 bp, Homo sapiens
  source 1..26: mol_type = genomic DNA
aggtggcccgggttcgactcccggta

SEQ ID NO: 5212 - DNA, 28 bp, Homo sapiens
  source 1..28: mol_type = genomic DNA
aggtggcccgggttcgactcccggtatg

SEQ ID NO: 5213 - DNA, 29 bp, Homo sapiens
  source 1..29: mol_type = genomic DNA
aggtggcccgggttcgactcccggtatgg

SEQ ID NO: 5214 - DNA, 30 bp, Homo sapiens
  source 1..30: mol_type = genomic DNA
aggtggcccgggttcgactcccggtatggg

SEQ ID NO: 5215 - DNA, 31 bp, Homo sapiens
  source 1..31: mol_type = genomic DNA
aggtggcccgggttcgactcccggtatggga

SEQ ID NO: 5216 - DNA, 32 bp, Homo sapiens
  source 1..32: mol_type = genomic DNA
aggtggcccgggttcgactcccggtatgggaa

SEQ ID NO: 5217 - DNA, 33 bp, Homo sapiens
  source 1..33: mol_type = genomic DNA
aggtggcccgggttcgactcccggtatgggaac

SEQ ID NO: 5218 - DNA, 34 bp, Homo sapiens
  source 1..34: mol_type = genomic DNA
aggtggcccgggttcgactcccggtatgggaacc

SEQ ID NO: 5219 - DNA, 35 bp, Homo sapiens
  source 1..35: mol_type = genomic DNA
aggtggcccgggttcgactcccggtatgggaacca

SEQ ID NO: 5220 - DNA, 19 bp, Homo sapiens
  source 1..19: mol_type = genomic DNA
aggtggccgagtggttaag

SEQ ID NO: 5221 - DNA, 27 bp, Homo sapiens
  source 1..27: mol_type = genomic DNA
aggttaaatacagaccaagagccttca

SEQ ID NO: 5222 - DNA, 21 bp, Homo sapiens
  source 1..21: mol_type = genomic DNA
aggttcaattcctcttcttaa

SEQ ID NO: 5223 - DNA, 23 bp, Homo sapiens
  source 1..23: mol_type = genomic DNA
aggttcaattcctcttcttaaca

SEQ ID NO: 5224 - DNA, 25 bp, Homo sapiens
  source 1..25: mol_type = genomic DNA
aggttcaattcctcttcttaacacc

SEQ ID NO: 5225 - DNA, 34 bp, Homo sapiens
  source 1..34: mol_type = genomic DNA
aggttccatggtgtaatggttagcactctggact

SEQ ID NO: 5226 - DNA, 23 bp, Homo sapiens
  source 1..23: mol_type = genomic DNA
aggttccgggttcgagtcccggc

SEQ ID NO: 5227 - DNA, 29 bp, Homo sapiens
  source 1..29: mol_type = genomic DNA
aggttccgggttcgagtcccggcggagtc

SEQ ID NO: 5228 - DNA, 31 bp, Homo sapiens
  source 1..31: mol_type = genomic DNA
aggttccgggttcgagtcccggcggagtcgc

SEQ ID NO: 5229 - DNA, 32 bp, Homo sapiens
  source 1..32: mol_type = genomic DNA
aggttccgggttcgagtcccggcggagtcgcc

SEQ ID NO: 5230 - DNA, 33 bp, Homo sapiens
  source 1..33: mol_type = genomic DNA
aggttccgggttcgagtcccggcggagtcgcca

SEQ ID NO: 5231 - DNA, 20 bp, Homo sapiens
  source 1..20: mol_type = genomic DNA
aggttcgaaccctgctcgct

SEQ ID NO: 5232 - DNA, 25 bp, Homo sapiens
  source 1..25: mol_type = genomic DNA
aggttcgaaccctgctcgctgcgcc

SEQ ID NO: 5233 - DNA, 26 bp, Homo sapiens
  source 1..26: mol_type = genomic DNA
aggttcgaaccctgctcgctgcgcca

SEQ ID NO: 5234 - DNA, 20 bp, Homo sapiens
  source 1..20: mol_type = genomic DNA
aggttcgaatcctgccgact

SEQ ID NO: 5235 - DNA, 24 bp, Homo sapiens
  source 1..24: mol_type = genomic DNA
aggttcgaatcctgtcggctacgc

SEQ ID NO: 5236 - DNA, 25 bp, Homo sapiens
  source 1..25: mol_type = genomic DNA
aggttcgaatcctgttcgtgacgcc

SEQ ID NO: 5237 - DNA, 26 bp, Homo sapiens
  source 1..26: mol_type = genomic DNA
aggttcgaatcctgttcgtgacgcca

SEQ ID NO: 5238 - DNA, 16 bp, Homo sapiens
  source 1..16: mol_type = genomic DNA
aggttcgactcctggc

SEQ ID NO: 5239 - DNA, 20 bp, Homo sapiens
  source 1..20: mol_type = genomic DNA
aggttcgactcctggctggc

SEQ ID NO: 5240 - DNA, 21 bp, Homo sapiens
  source 1..21: mol_type = genomic DNA
aggttcgactcctggctggct

SEQ ID NO: 5241 - DNA, 22 bp, Homo sapiens
  source 1..22: mol_type = genomic DNA
aggttcgactcctggctggctc

SEQ ID NO: 5242 - DNA, 23 bp, Homo sapiens
  source 1..23: mol_type = genomic DNA
aggttcgactcctggctggctcg

SEQ ID NO: 5243 - DNA, 24 bp, Homo sapiens
  source 1..24: mol_type = genomic DNA
aggttcgactcctggctggctcgc

SEQ ID NO: 5244 - DNA, 25 bp, Homo sapiens
  source 1..25: mol_type = genomic DNA
aggttcgactcctggctggctcgcc

SEQ ID NO: 5245 - DNA, 26 bp, Homo sapiens
  source 1..26: mol_type = genomic DNA
aggttcgactcctggctggctcgcca

SEQ ID NO: 5246 - DNA, 22 bp, Homo sapiens
  source 1..22: mol_type = genomic DNA
aggttcgagtcctgccgcggtc

SEQ ID NO: 5247 - DNA, 23 bp, Homo sapiens
  source 1..23: mol_type = genomic DNA
aggttcgagtcctgccgcggtcg

SEQ ID NO: 5248 - DNA, 26 bp, Homo sapiens
  source 1..26: mol_type = genomic DNA
aggttcgagtcctgccgcggtcgcca

SEQ ID NO: 5249 - DNA, 29 bp, Homo sapiens
  source 1..29: mol_type = genomic DNA
aggttgcgtgttcaaatcacgtcggggtc

SEQ ID NO: 5250 - DNA, 32 bp, Homo sapiens
  source 1..32: mol_type = genomic DNA
aggttgcgtgttcaaatcacgtcggggtcacc

SEQ ID NO: 5251 - DNA, 21 bp, Homo sapiens
  source 1..21: mol_type = genomic DNA
aggttgcgtgttcaagtcacg

SEQ ID NO: 5252 - DNA, 31 bp, Homo sapiens
  source 1..31: mol_type = genomic DNA
aggttgcgtgttcaagtcacgtcggggtcac

SEQ ID NO: 5253 - DNA, 33 bp, Homo sapiens
  source 1..33: mol_type = genomic DNA
aggttgcgtgttcaagtcacgtcggggtcacca

SEQ ID NO: 5254 - DNA, 16 bp, Homo sapiens
  source 1..16: mol_type = genomic DNA
aggttggtggttcgag

SEQ ID NO: 5255 - DNA, 29 bp, Homo sapiens
  source 1..29: mol_type = genomic DNA
aggttggtggttcgagcccacccagggac

SEQ ID NO: 5256 - DNA, 30 bp, Homo sapiens
  source 1..30: mol_type = genomic DNA
aggttggtggttcgagcccacccagggacg

SEQ ID NO: 5257 - DNA, 32 bp, Homo sapiens
  source 1..32: mol_type = genomic DNA
aggttggtggttcgagcccacccagggacgcc

SEQ ID NO: 5258 - DNA, 17 bp, Homo sapiens
  source 1..17: mol_type = genomic DNA
aggttgtgagttcgagc

SEQ ID NO: 5259 - DNA, 20 bp, Homo sapiens
  source 1..20: mol_type = genomic DNA
aggttgtgagttcgagcctc

SEQ ID NO: 5260 - DNA, 21 bp, Homo sapiens
  source 1..21: mol_type = genomic DNA
aggttgtgagttcgagcctca

SEQ ID NO: 5261 - DNA, 23 bp, Homo sapiens
  source 1..23: mol_type = genomic DNA
aggttgtgagttcgagcctcacc

SEQ ID NO: 5262 - DNA, 23 bp, Homo sapiens
  source 1..23: mol_type = genomic DNA
aggttgtgggttcgaatcccacc

SEQ ID NO: 5263 - DNA, 32 bp, Homo sapiens
  source 1..32: mol_type = genomic DNA
aggttgtgggttcgaatcccaccagagtcgcc

SEQ ID NO: 5264 - DNA, 33 bp, Homo sapiens
  source 1..33: mol_type = genomic DNA
aggttgtgggttcgaatcccaccagagtcgcca

SEQ ID NO: 5265 - DNA, 23 bp, Homo sapiens
  source 1..23: mol_type = genomic DNA
aggttgtgggttcgagtcccacc

SEQ ID NO: 5266 - DNA, 32 bp, Homo sapiens
  source 1..32: mol_type = genomic DNA
aggttgtgggttcgagtcccaccagagtcgcc

SEQ ID NO: 5267 - DNA, 16 bp, Homo sapiens
  source 1..16: mol_type = genomic DNA
agtaaataataggagc

SEQ ID NO: 5268 - DNA, 17 bp, Homo sapiens
  source 1..17: mol_type = genomic DNA
agtaaataataggagct

SEQ ID NO: 5269 - DNA, 18 bp, Homo sapiens
  source 1..18: mol_type = genomic DNA
agtaaataataggagctt

SEQ ID NO: 5270 - DNA, 19 bp, Homo sapiens
  source 1..19: mol_type = genomic DNA
agtaaataataggagctta

SEQ ID NO: 5271 - DNA, 20 bp, Homo sapiens
  source 1..20: mol_type = genomic DNA
agtaaataataggagcttaa

SEQ ID NO: 5272 - DNA, 21 bp, Homo sapiens
  source 1..21: mol_type = genomic DNA
agtaaataataggagcttaaa

SEQ ID NO: 5273 - DNA, 22 bp, Homo sapiens
  source 1..22: mol_type = genomic DNA
agtaaataataggagcttaaac

SEQ ID NO: 5274 - DNA, 23 bp, Homo sapiens
  source 1..23: mol_type = genomic DNA
agtaaataataggagcttaaacc

SEQ ID NO: 5275 - DNA, 24 bp, Homo sapiens
  source 1..24: mol_type = genomic DNA
agtaaataataggagcttaaaccc

SEQ ID NO: 5276 - DNA, 25 bp, Homo sapiens
  source 1..25: mol_type = genomic DNA
agtaaataataggagcttaaacccc

SEQ ID NO: 5277 - DNA, 26 bp, Homo sapiens
  source 1..26: mol_type = genomic DNA
agtaaataataggagcttaaaccccc

SEQ ID NO: 5278 - DNA, 27 bp, Homo sapiens
  source 1..27: mol_type = genomic DNA
agtaaataataggagcttaaaccccct

SEQ ID NO: 5279 - DNA, 28 bp, Homo sapiens
  source 1..28: mol_type = genomic DNA
agtaaataataggagcttaaaccccctt

SEQ ID NO: 5280 - DNA, 29 bp, Homo sapiens
  source 1..29: mol_type = genomic DNA
agtaaataataggagcttaaaccccctta

SEQ ID NO: 5281 - DNA, 30 bp, Homo sapiens
  source 1..30: mol_type = genomic DNA
agtaaataataggagcttaaacccccttat

SEQ ID NO: 5282 - DNA, 31 bp, Homo sapiens
  source 1..31: mol_type = genomic DNA
agtaaataataggagcttaaacccccttatt

SEQ ID NO: 5283 - DNA, 33 bp, Homo sapiens
  source 1..33: mol_type = genomic DNA
agtaaataataggagcttaaacccccttatttc

SEQ ID NO: 5284 - DNA, 34 bp, Homo sapiens
  source 1..34: mol_type = genomic DNA
agtaaataataggagcttaaacccccttatttct

SEQ ID NO: 5285 - DNA, 37 bp, Homo sapiens
  source 1..37: mol_type = genomic DNA
agtaaataataggagcttaaacccccttatttctacc

SEQ ID NO: 5286 - DNA, 16 bp, Homo sapiens
  source 1..16: mol_type = genomic DNA
agtaaggtcagctaaa

SEQ ID NO: 5287 - DNA, 17 bp, Homo sapiens
  source 1..17: mol_type = genomic DNA
agtaaggtcagctaaat

SEQ ID NO: 5288 - DNA, 18 bp, Homo sapiens
  source 1..18: mol_type = genomic DNA
agtaaggtcagctaaata

SEQ ID NO: 5289 - DNA, 19 bp, Homo sapiens
  source 1..19: mol_type = genomic DNA
agtaaggtcagctaaataa

SEQ ID NO: 5290 - DNA, 20 bp, Homo sapiens
  source 1..20: mol_type = genomic DNA
agtaaggtcagctaaataag

SEQ ID NO: 5291 - DNA, 21 bp, Homo sapiens
  source 1..21: mol_type = genomic DNA
agtaaggtcagctaaataagc

SEQ ID NO: 5292 - DNA, 22 bp, Homo sapiens
  source 1..22: mol_type = genomic DNA
agtaaggtcagctaaataagct

SEQ ID NO: 5293 - DNA, 23 bp, Homo sapiens
  source 1..23: mol_type = genomic DNA
agtaaggtcagctaaataagcta

SEQ ID NO: 5294 - DNA, 24 bp, Homo sapiens
  source 1..24: mol_type = genomic DNA
agtaaggtcagctaaataagctat

SEQ ID NO: 5295 - DNA, 25 bp, Homo sapiens
  source 1..25: mol_type = genomic DNA
agtaaggtcagctaaataagctatc

SEQ ID NO: 5296 - DNA, 26 bp, Homo sapiens
  source 1..26: mol_type = genomic DNA
agtaaggtcagctaaataagctatcg

SEQ ID NO: 5297 - DNA, 27 bp, Homo sapiens
  source 1..27: mol_type = genomic DNA
agtaaggtcagctaaataagctatcgg

SEQ ID NO: 5298 - DNA, 28 bp, Homo sapiens
  source 1..28: mol_type = genomic DNA
agtaaggtcagctaaataagctatcggg

SEQ ID NO: 5299 - DNA, 29 bp, Homo sapiens
  source 1..29: mol_type = genomic DNA
agtaaggtcagctaaataagctatcgggc

SEQ ID NO: 5300 - DNA, 30 bp, Homo sapiens
  source 1..30: mol_type = genomic DNA
agtaaggtcagctaaataagctatcgggcc

SEQ ID NO: 5301 - DNA, 31 bp, Homo sapiens
  source 1..31: mol_type = genomic DNA
agtaaggtcagctaaataagctatcgggccc

SEQ ID NO: 5302 - DNA, 32 bp, Homo sapiens
  source 1..32: mol_type = genomic DNA
agtaaggtcagctaaataagctatcgggccca

SEQ ID NO: 5303 - DNA, 33 bp, Homo sapiens
  source 1..33: mol_type = genomic DNA
agtaaggtcagctaaataagctatcgggcccat

SEQ ID NO: 5304 - DNA, 34 bp, Homo sapiens
  source 1..34: mol_type = genomic DNA
agtaaggtcagctaaataagctatcgggcccata

SEQ ID NO: 5305 - DNA, 35 bp, Homo sapiens
  source 1..35: mol_type = genomic DNA
agtaaggtcagctaaataagctatcgggcccatac

SEQ ID NO: 5306 - DNA, 36 bp, Homo sapiens
  source 1..36: mol_type = genomic DNA
agtaaggtcagctaaataagctatcgggcccatacc

SEQ ID NO: 5307 - DNA, 37 bp, Homo sapiens
  source 1..37: mol_type = genomic DNA
agtaaggtcagctaaataagctatcgggcccataccc

SEQ ID NO: 5308 - DNA, 38 bp, Homo sapiens
  source 1..38: mol_type = genomic DNA
agtaaggtcagctaaataagctatcgggcccatacccc

SEQ ID NO: 5309 - DNA, 39 bp, Homo sapiens
  source 1..39: mol_type = genomic DNA
agtaaggtcagctaaataagctatcgggcccataccccg

SEQ ID NO: 5310 - DNA, 40 bp, Homo sapiens
  source 1..40: mol_type = genomic DNA
agtaaggtcagctaaataagctatcgggcccataccccga

SEQ ID NO: 5311 - DNA, 41 bp, Homo sapiens
  source 1..41: mol_type = genomic DNA
agtaaggtcagctaaataagctatcgggcccataccccgaa

SEQ ID NO: 5312 - DNA, 42 bp, Homo sapiens
  source 1..42: mol_type = genomic DNA
agtaaggtcagctaaataagctatcgggcccataccccgaaa

SEQ ID NO: 5313 - DNA, 43 bp, Homo sapiens
  source 1..43: mol_type = genomic DNA
agtaaggtcagctaaataagctatcgggcccataccccgaaaa

SEQ ID NO: 5314 - DNA, 44 bp, Homo sapiens
  source 1..44: mol_type = genomic DNA
agtaaggtcagctaaataagctatcgggcccataccccgaaaat

SEQ ID NO: 5315 - DNA, 45 bp, Homo sapiens
  source 1..45: mol_type = genomic DNA
agtaaggtcagctaaataagctatcgggcccataccccgaaaatg

SEQ ID NO: 5316 - DNA, 46 bp, Homo sapiens
  source 1..46: mol_type = genomic DNA
agtaaggtcagctaaataagctatcgggcccataccccgaaaatgt

SEQ ID NO: 5317 - DNA, 47 bp, Homo sapiens
  source 1..47: mol_type = genomic DNA
agtaaggtcagctaaataagctatcgggcccataccccgaaaatgtt

SEQ ID NO: 5318 - DNA, 48 bp, Homo sapiens
  source 1..48: mol_type = genomic DNA
agtaaggtcagctaaataagctatcgggcccataccccgaaaatgttg

SEQ ID NO: 5319 - DNA, 16 bp, Homo sapiens
  source 1..16: mol_type = genomic DNA
agtaagttgcaatact

SEQ ID NO: 5320 - DNA, 22 bp, Homo sapiens
  source 1..22: mol_type = genomic DNA
agtaagttgcaatacttaattt

SEQ ID NO: 5321 - DNA, 25 bp, Homo sapiens
  source 1..25: mol_type = genomic DNA
agtaagttgcaatacttaatttctg

SEQ ID NO: 5322 - DNA, 26 bp, Homo sapiens
  source 1..26: mol_type = genomic DNA
agtaagttgcaatacttaatttctgc

SEQ ID NO: 5323 - DNA, 27 bp, Homo sapiens
  source 1..27: mol_type = genomic DNA
agtaagttgcaatacttaatttctgcc

SEQ ID NO: 5324 - DNA, 28 bp, Homo sapiens
  source 1..28: mol_type = genomic DNA
agtaagttgcaatacttaatttctgcca

SEQ ID NO: 5325 - DNA, 16 bp, Homo sapiens
  source 1..16: mol_type = genomic DNA
agtaccgttaacttcc

SEQ ID NO: 5326 - DNA, 20 bp, Homo sapiens
  source 1..20: mol_type = genomic DNA
agtaccgttaacttccaatt

SEQ ID NO: 5327 - DNA, 31 bp, Homo sapiens
  source 1..31: mol_type = genomic DNA
agtaccgttaacttccaattaactagttttg

SEQ ID NO: 5328 - DNA, 33 bp, Homo sapiens
  source 1..33: mol_type = genomic DNA
agtaccgttaacttccaattaactagttttgac

SEQ ID NO: 5329 - DNA, 34 bp, Homo sapiens
  source 1..34: mol_type = genomic DNA
agtaccgttaacttccaattaactagttttgaca

SEQ ID NO: 5330 - DNA, 36 bp, Homo sapiens
  source 1..36: mol_type = genomic DNA
agtaccgttaacttccaattaactagttttgacaac

SEQ ID NO: 5331 - DNA, 16 bp, Homo sapiens
  source 1..16: mol_type = genomic DNA
agtactctgcgttgtg

SEQ ID NO: 5332 - DNA, 19 bp, Homo sapiens
  source 1..19: mol_type = genomic DNA
agtactctgcgttgtggcc

SEQ ID NO: 5333 - DNA, 22 bp, Homo sapiens
  source 1..22: mol_type = genomic DNA
agtactctgcgttgtggccgca

SEQ ID NO: 5334 - DNA, 29 bp, Homo sapiens
  source 1..29: mol_type = genomic DNA
agtactctgcgttgtggccgcagcaacct

SEQ ID NO: 5335 - DNA, 33 bp, Homo sapiens
  source 1..33: mol_type = genomic DNA
agtactctgcgttgtggccgcagcaacctcggt

SEQ ID NO: 5336 - DNA, 19 bp, Homo sapiens
  source 1..19: mol_type = genomic DNA
agtaggtagcgcatcagtc

SEQ ID NO: 5337 - DNA, 20 bp, Homo sapiens
  source 1..20: mol_type = genomic DNA
agtaggtagcgcatcagtct

SEQ ID NO: 5338 - DNA, 19 bp, Homo sapiens
  source 1..19: mol_type = genomic DNA
agtaggtagcgcgtcagtc

SEQ ID NO: 5339 - DNA, 20 bp, Homo sapiens
  source 1..20: mol_type = genomic DNA
agtaggtagcgcgtcagtct

SEQ ID NO: 5340 - DNA, 22 bp, Homo sapiens
  source 1..22: mol_type = genomic DNA
agtataaatagtaccgttaact

SEQ ID NO: 5341 - DNA, 26 bp, Homo sapiens
  source 1..26: mol_type = genomic DNA
agtataaatagtaccgttaacttcca

SEQ ID NO: 5342 - DNA, 23 bp, Homo sapiens
  source 1..23: mol_type = genomic DNA
agtatagtggtgagtatccccgc

SEQ ID NO: 5343 - DNA, 26 bp, Homo sapiens
  source 1..26: mol_type = genomic DNA
agtatagtggtgagtatccccgcctg

SEQ ID NO: 5344 - DNA, 31 bp, Homo sapiens
  source 1..31: mol_type = genomic DNA
agtatagtggtgagtatccccgcctgtcacg

SEQ ID NO: 5345 - DNA, 16 bp, Homo sapiens
  source 1..16: mol_type = genomic DNA
agtatccccgcctgtc

SEQ ID NO: 5346 - DNA, 18 bp, Homo sapiens
  source 1..18: mol_type = genomic DNA
agtatccccgcctgtcac

SEQ ID NO: 5347 - DNA, 20 bp, Homo sapiens
  source 1..20: mol_type = genomic DNA
agtatccccgcctgtcacgc

SEQ ID NO: 5348 - DNA, 16 bp, Homo sapiens
  source 1..16: mol_type = genomic DNA
agtcacgtcggggtca

SEQ ID NO: 5349 - DNA, 18 bp, Homo sapiens
  source 1..18: mol_type = genomic DNA
agtcacgtcggggtcacc

SEQ ID NO: 5350 - DNA, 19 bp, Homo sapiens
  source 1..19: mol_type = genomic DNA
agtcacgtcggggtcacca

SEQ ID NO: 5351 - DNA, 17 bp, Homo sapiens
  source 1..17: mol_type = genomic DNA
agtcagaggttcaattc

SEQ ID NO: 5352 - DNA, 16 bp, Homo sapiens
  source 1..16: mol_type = genomic DNA
agtcatggaggccatg

SEQ ID NO: 5353 - DNA, 19 bp, Homo sapiens
  source 1..19: mol_type = genomic DNA
agtcatggaggccatgggg

SEQ ID NO: 5354 - DNA, 20 bp, Homo sapiens
  source 1..20: mol_type = genomic DNA
agtcatggaggccatggggt

SEQ ID NO: 5355 - DNA, 21 bp, Homo sapiens
  source 1..21: mol_type = genomic DNA
agtcatggaggccatggggtt

SEQ ID NO: 5356 - DNA, 22 bp, Homo sapiens
  source 1..22: mol_type = genomic DNA
agtcatggaggccatggggttg

SEQ ID NO: 5357 - DNA, 23 bp, Homo sapiens
  source 1..23: mol_type = genomic DNA
agtcatggaggccatggggttgg

SEQ ID NO: 5358 - DNA, 28 bp, Homo sapiens
  source 1..28: mol_type = genomic DNA
agtcatggaggccatggggttggcttga

SEQ ID NO: 5359 - DNA, 22 bp, Homo sapiens
  source 1..22: mol_type = genomic DNA
agtcatttcgatggcgtgggtt

SEQ ID NO: 5360 - DNA, 23 bp, Homo sapiens
  source 1..23: mol_type = genomic DNA
agtcatttcgatggcgtgggttc

SEQ ID NO: 5361 - DNA, 37 bp, Homo sapiens
  source 1..37: mol_type = genomic DNA
agtcatttcgatggcgtgggttcgaatcccaccgctg

SEQ ID NO: 5362 - DNA, 18 bp, Homo sapiens
  source 1..18: mol_type = genomic DNA
agtcccaccagagtcgcc

SEQ ID NO: 5363 - DNA, 18 bp, Homo sapiens
  source 1..18: mol_type = genomic DNA
agtcccacccggggtacc

SEQ ID NO: 5364 - DNA, 16 bp, Homo sapiens
  source 1..16: mol_type = genomic DNA
agtcccatctggggtg

SEQ ID NO: 5365 - DNA, 17 bp, Homo sapiens
  source 1..17: mol_type = genomic DNA
agtcccattggtctagc

SEQ ID NO: 5366 - DNA, 18 bp, Homo sapiens
  source 1..18: mol_type = genomic DNA
agtcccattggtctagcc

SEQ ID NO: 5367 - DNA, 19 bp, Homo sapiens
  source 1..19: mol_type = genomic DNA
agtcccattggtctagcca

SEQ ID NO: 5368 - DNA, 16 bp, Homo sapiens
  source 1..16: mol_type = genomic DNA
agtcccggcagagatg

SEQ ID NO: 5369 - DNA, 16 bp, Homo sapiens
  source 1..16: mol_type = genomic DNA
agtcccggcggagtcg

SEQ ID NO: 5370 - DNA, 17 bp, Homo sapiens
  source 1..17: mol_type = genomic DNA
agtcccggcggagtcgc

SEQ ID NO: 5371 - DNA, 19 bp, Homo sapiens
  source 1..19: mol_type = genomic DNA
agtcccggcggagtcgcca

SEQ ID NO: 5372 - DNA, 19 bp, Homo sapiens
  source 1..19: mol_type = genomic DNA
agtccctgtccaggcgcca

SEQ ID NO: 5373 - DNA, 18 bp, Homo sapiens
  source 1..18: mol_type = genomic DNA
agtccctgttcaggcgcc

SEQ ID NO: 5374 - DNA, 16 bp, Homo sapiens
  source 1..16: mol_type = genomic DNA
agtccctgttcgggcg

SEQ ID NO: 5375 - DNA, 17 bp, Homo sapiens
  source 1..17: mol_type = genomic DNA
agtccctgttcgggcgc

SEQ ID NO: 5376 - DNA, 18 bp, Homo sapiens
  source 1..18: mol_type = genomic DNA
agtccctgttcgggcgcc

SEQ ID NO: 5377 - DNA, 19 bp, Homo sapiens
  source 1..19: mol_type = genomic DNA
agtccctgttcgggcgcca

SEQ ID NO: 5378 - DNA, 16 bp, Homo sapiens
  source 1..16: mol_type = genomic DNA
agtcccttcgtggtcg

SEQ ID NO: 5379 - DNA, 16 bp, Homo sapiens
  source 1..16: mol_type = genomic DNA
agtccgtgcgagaata

SEQ ID NO: 5380 - DNA, 17 bp, Homo sapiens
  source 1..17: mol_type = genomic DNA
agtccgtgcgagaatac

SEQ ID NO: 5381 - DNA, 18 bp, Homo sapiens
  source 1..18: mol_type = genomic DNA
agtccgtgcgagaatacc

SEQ ID NO: 5382 - DNA, 19 bp, Homo sapiens
  source 1..19: mol_type = genomic DNA
agtccgtgcgagaatacca

SEQ ID NO: 5383 - DNA, 16 bp, Homo sapiens
  source 1..16: mol_type = genomic DNA
agtcctgccgcggtcg

SEQ ID NO: 5384 - DNA, 18 bp, Homo sapiens
  source 1..18: mol_type = genomic DNA
agtcctgccgcggtcgcc

SEQ ID NO: 5385 - DNA, 19 bp, Homo sapiens
  source 1..19: mol_type = genomic DNA
agtcctgccgcggtcgcca

SEQ ID NO: 5386 - DNA, 16 bp, Homo sapiens
  source 1..16: mol_type = genomic DNA
agtcggtagagcatca

SEQ ID NO: 5387 - DNA, 17 bp, Homo sapiens
  source 1..17: mol_type = genomic DNA
agtcggtagagcatcag

SEQ ID NO: 5388 - DNA, 18 bp, Homo sapiens
  source 1..18: mol_type = genomic DNA
agtcggtagagcatcaga

SEQ ID NO: 5389 - DNA, 19 bp, Homo sapiens
  source 1..19: mol_type = genomic DNA
agtcggtagagcatcagac

SEQ ID NO: 5390 - DNA, 20 bp, Homo sapiens
  source 1..20: mol_type = genomic DNA
agtcggtagagcatcagact

SEQ ID NO: 5391 - DNA, 21 bp, Homo sapiens
  source 1..21: mol_type = genomic DNA
agtcggtagagcatcagactt

SEQ ID NO: 5392 - DNA, 22 bp, Homo sapiens
  source 1..22: mol_type = genomic DNA
agtcggtagagcatcagacttt

SEQ ID NO: 5393 - DNA, 23 bp, Homo sapiens
  source 1..23: mol_type = genomic DNA
agtcggtagagcatcagactttt

SEQ ID NO: 5394 - DNA, 27 bp, Homo sapiens
  source 1..27: mol_type = genomic DNA
agtcggtagagcatcagacttttaatc

SEQ ID NO: 5395 - DNA, 28 bp, Homo sapiens
  source 1..28: mol_type = genomic DNA
agtcggtagagcatcagacttttaatct

SEQ ID NO: 5396 - DNA, 16 bp, Homo sapiens
  source 1..16: mol_type = genomic DNA
agtcggtagagcatga

SEQ ID NO: 5397 - DNA, 17 bp, Homo sapiens
  source 1..17: mol_type = genomic DNA
agtcggtagagcatgag

SEQ ID NO: 5398 - DNA, 18 bp, Homo sapiens
  source 1..18: mol_type = genomic DNA
agtcggtagagcatgaga

SEQ ID NO: 5399 - DNA, 19 bp, Homo sapiens
  source 1..19: mol_type = genomic DNA
agtcggtagagcatgagac

SEQ ID NO: 5400 - DNA, 20 bp, Homo sapiens
  source 1..20: mol_type = genomic DNA
agtcggtagagcatgagacc

SEQ ID NO: 5401 - DNA, 21 bp, Homo sapiens
  source 1..21: mol_type = genomic DNA
agtcggtagagcatgagaccc

SEQ ID NO: 5402 - DNA, 22 bp, Homo sapiens
  source 1..22: mol_type = genomic DNA
agtcggtagagcatgagaccct

SEQ ID NO: 5403 - DNA, 25 bp, Homo sapiens
  source 1..25: mol_type = genomic DNA
agtcggtagagcatgagacccttaa

SEQ ID NO: 5404 - DNA, 26 bp, Homo sapiens
  source 1..26: mol_type = genomic DNA
agtcggtagagcatgagacccttaat

SEQ ID NO: 5405 - DNA, 27 bp, Homo sapiens
  source 1..27: mol_type = genomic DNA
agtcggtagagcatgagacccttaatc

SEQ ID NO: 5406 - DNA, 28 bp, Homo sapiens
  source 1..28: mol_type = genomic DNA
agtcggtagagcatgagacccttaatct

SEQ ID NO: 5407 - DNA, 20 bp, Homo sapiens
  source 1..20: mol_type = genomic DNA
agtcggtagagcatgagact

SEQ ID NO: 5408 - DNA, 21 bp, Homo sapiens
  source 1..21: mol_type = genomic DNA
agtcggtagagcatgagactc

SEQ ID NO: 5409 - DNA, 22 bp, Homo sapiens
  source 1..22: mol_type = genomic DNA
agtcggtagagcatgagactct

SEQ ID NO: 5410 - DNA, 23 bp, Homo sapiens
  source 1..23: mol_type = genomic DNA
agtcggtagagcatgagactctt

SEQ ID NO: 5411 - DNA, 24 bp, Homo sapiens
  source 1..24: mol_type = genomic DNA
agtcggtagagcatgagactctta

SEQ ID NO: 5412 - DNA, 25 bp, Homo sapiens
  source 1..25: mol_type = genomic DNA
agtcggtagagcatgagactcttaa

SEQ ID NO: 5413 - DNA, 26 bp, Homo sapiens
  source 1..26: mol_type = genomic DNA
agtcggtagagcatgagactcttaat

SEQ ID NO: 5414 - DNA, 27 bp, Homo sapiens
  source 1..27: mol_type = genomic DNA
agtcggtagagcatgagactcttaatc

SEQ ID NO: 5415 - DNA, 28 bp, Homo sapiens
  source 1..28: mol_type = genomic DNA
agtcggtagagcatgagactcttaatct

SEQ ID NO: 5416 - DNA, 29 bp, Homo sapiens
  source 1..29: mol_type = genomic DNA
agtcggtagagcatgagactcttaatctc

SEQ ID NO: 5417 - DNA, 30 bp, Homo sapiens
  source 1..30: mol_type = genomic DNA
agtcggtagagcatgagactcttaatctca

SEQ ID NO: 5418 - DNA, 36 bp, Homo sapiens
  source 1..36: mol_type = genomic DNA
agtcggtagagcatgagactcttaatctcagggtcg

SEQ ID NO: 5419 - DNA, 37 bp, Homo sapiens
  source 1..37: mol_type = genomic DNA
agtcggtagagcatgagactcttaatctcagggtcgt

SEQ ID NO: 5420 - DNA, 38 bp, Homo sapiens
  source 1..38: mol_type = genomic DNA
agtcggtagagcatgagactcttaatctcagggtcgtg

SEQ ID NO: 5421 - DNA, 39 bp, Homo sapiens
  source 1..39: mol_type = genomic DNA
agtcggtagagcatgagactcttaatctcagggtcgtgg

SEQ ID NO: 5422 - DNA, 40 bp, Homo sapiens
  source 1..40: mol_type = genomic DNA
agtcggtagagcatgagactcttaatctcagggtcgtggg

SEQ ID NO: 5423 - DNA, 41 bp, Homo sapiens
  source 1..41: mol_type = genomic DNA
agtcggtagagcatgagactcttaatctcagggtcgtgggt

SEQ ID NO: 5424 - DNA, 42 bp, Homo sapiens
  source 1..42: mol_type = genomic DNA
agtcggtagagcatgagactcttaatctcagggtcgtgggtt

SEQ ID NO: 5425 - DNA, 44 bp, Homo sapiens
  source 1..44: mol_type = genomic DNA
agtcggtagagcatgagactcttaatctcagggtcgtgggttcg

SEQ ID NO: 5426 - DNA, 16 bp, Homo sapiens
  source 1..16: mol_type = genomic DNA
agtcggtagagcatgg

SEQ ID NO: 5427 - DNA, 17 bp, Homo sapiens
  source 1..17: mol_type = genomic DNA
agtcggtagagcatggg

SEQ ID NO: 5428 - DNA, 18 bp, Homo sapiens
  source 1..18: mol_type = genomic DNA
agtcggtagagcatggga

SEQ ID NO: 5429 - DNA, 19 bp, Homo sapiens
  source 1..19: mol_type = genomic DNA
agtcggtagagcatgggac

SEQ ID NO: 5430 - DNA, 20 bp, Homo sapiens
  source 1..20: mol_type = genomic DNA
agtcggtagagcatgggact

SEQ ID NO: 5431 - DNA, 21 bp, Homo sapiens
  source 1..21: mol_type = genomic DNA
agtcggtagagcatgggactc

SEQ ID NO: 5432 - DNA, 22 bp, Homo sapiens
  source 1..22: mol_type = genomic DNA
agtcggtagagcatgggactct

SEQ ID NO: 5433 - DNA, 23 bp, Homo sapiens
  source 1..23: mol_type = genomic DNA
agtcggtagagcatgggactctt

SEQ ID NO: 5434 - DNA, 24 bp, Homo sapiens
  source 1..24: mol_type = genomic DNA
agtcggtagagcatgggactctta

SEQ ID NO: 5435 - DNA, 25 bp, Homo sapiens
  source 1..25: mol_type = genomic DNA
agtcggtagagcatgggactcttaa

SEQ ID NO: 5436 - DNA, 26 bp, Homo sapiens
  source 1..26: mol_type = genomic DNA
agtcggtagagcatgggactcttaat

SEQ ID NO: 5437 - DNA, 27 bp, Homo sapiens
  source 1..27: mol_type = genomic DNA
agtcggtagagcatgggactcttaatc

SEQ ID NO: 5438 - DNA, 28 bp, Homo sapiens
  source 1..28: mol_type = genomic DNA
agtcggtagagcatgggactcttaatcc

SEQ ID NO: 5439 - DNA, 29 bp, Homo sapiens
  source 1..29: mol_type = genomic DNA
agtcggtagagcatgggactcttaatccc

SEQ ID NO: 5440 - DNA, 30 bp, Homo sapiens
  source 1..30: mol_type = genomic DNA
agtcggtagagcatgggactcttaatccca

SEQ ID NO: 5441 - DNA, 36 bp, Homo sapiens
  source 1..36: mol_type = genomic DNA
agtcggtagagcatgggactcttaatcccagggtcg

SEQ ID NO: 5442 - DNA, 37 bp, Homo sapiens
  source 1..37: mol_type = genomic DNA
agtcggtagagcatgggactcttaatcccagggtcgt

SEQ ID NO: 5443 - DNA, 38 bp, Homo sapiens
  source 1..38: mol_type = genomic DNA
agtcggtagagcatgggactcttaatcccagggtcgtg

SEQ ID NO: 5444 - DNA, 39 bp, Homo sapiens
  source 1..39: mol_type = genomic DNA
agtcggtagagcatgggactcttaatcccagggtcgtgg

SEQ ID NO: 5445 - DNA, 40 bp, Homo sapiens
  source 1..40: mol_type = genomic DNA
agtcggtagagcatgggactcttaatcccagggtcgtggg

SEQ ID NO: 5446 - DNA, 42 bp, Homo sapiens
  source 1..42: mol_type = genomic DNA
agtcggtagagcatgggactcttaatcccagggtcgtgggtt

SEQ ID NO: 5447 - DNA, 44 bp, Homo sapiens
  source 1..44: mol_type = genomic DNA
agtcggtagagcatgggactcttaatcccagggtcgtgggttcg

SEQ ID NO: 5448 - DNA, 48 bp, Homo sapiens
  source 1..48: mol_type = genomic DNA
agtcggtagagcatgggactcttaatcccagggtcgtgggttcgagcc

SEQ ID NO: 5449 - DNA, 28 bp, Homo sapiens
  source 1..28: mol_type = genomic DNA
agtcggtagagcatgggactcttaatct

SEQ ID NO: 5450 - DNA, 29 bp, Homo sapiens
  source 1..29: mol_type = genomic DNA
agtcggtagagcatgggactcttaatctc

SEQ ID NO: 5451 - DNA, 42 bp, Homo sapiens
  source 1..42: mol_type = genomic DNA
agtcggtagagcatgggactcttaatctcagggtcgtgggtt

SEQ ID NO: 5452 - DNA, 19 bp, Homo sapiens
  source 1..19: mol_type = genomic DNA
agtcggtggagcatgggac

SEQ ID NO: 5453 - DNA, 21 bp, Homo sapiens
  source 1..21: mol_type = genomic DNA
agtcgtggccgagtggttaag

SEQ ID NO: 5454 - DNA, 22 bp, Homo sapiens
  source 1..22: mol_type = genomic DNA
agtcgtggccgagtggttaagg

SEQ ID NO: 5455 - DNA, 23 bp, Homo sapiens
  source 1..23: mol_type = genomic DNA
agtcgtggccgagtggttaaggc

SEQ ID NO: 5456 - DNA, 22 bp, Homo sapiens
  source 1..22: mol_type = genomic DNA
agtctcataatctgaaggtcct

SEQ ID NO: 5457 - DNA, 23 bp, Homo sapiens
  source 1..23: mol_type = genomic DNA
agtctcataatctgaaggtcctg

SEQ ID NO: 5458 - DNA, 24 bp, Homo sapiens
  source 1..24: mol_type = genomic DNA
agtctcataatctgaaggtcctga

SEQ ID NO: 5459 - DNA, 26 bp, Homo sapiens
  source 1..26: mol_type = genomic DNA
agtctcataatctgaaggtcctgagt

SEQ ID NO: 5460 - DNA, 27 bp, Homo sapiens
  source 1..27: mol_type = genomic DNA
agtctcataatctgaaggtcctgagtt

SEQ ID NO: 5461 - DNA, 36 bp, Homo sapiens
  source 1..36: mol_type = genomic DNA
agtctcataatctgaaggtcctgagttcgaacctca

SEQ ID NO: 5462 - DNA, 21 bp, Homo sapiens
  source 1..21: mol_type = genomic DNA
agtctcataatctgaaggtcg

SEQ ID NO: 5463 - DNA, 22 bp, Homo sapiens
  source 1..22: mol_type = genomic DNA
agtctcataatctgaaggtcgt

SEQ ID NO: 5464 - DNA, 23 bp, Homo sapiens
  source 1..23: mol_type = genomic DNA
agtctcataatctgaaggtcgtg

SEQ ID NO: 5465 - DNA, 24 bp, Homo sapiens
  source 1..24: mol_type = genomic DNA
agtctcataatctgaaggtcgtga

SEQ ID NO: 5466 - DNA, 26 bp, Homo sapiens
  source 1..26: mol_type = genomic DNA
agtctcataatctgaaggtcgtgagt

SEQ ID NO: 5467 - DNA, 27 bp, Homo sapiens
  source 1..27: mol_type = genomic DNA
agtctcataatctgaaggtcgtgagtt

SEQ ID NO: 5468 - DNA, 47 bp, Homo sapiens
  source 1..47: mol_type = genomic DNA
agtctcataatctgaaggtcgtgagttcgatcctcacacggggcacc

SEQ ID NO: 5469 - DNA, 18 bp, Homo sapiens
  source 1..18: mol_type = genomic DNA
agtctcggtggaacctcc

SEQ ID NO: 5470 - DNA, 19 bp, Homo sapiens
  source 1..19: mol_type = genomic DNA
agtctcggtggaacctcca

SEQ ID NO: 5471 - DNA, 22 bp, Homo sapiens
  source 1..22: mol_type = genomic DNA
agtctcttcggaggcgtgggtt

SEQ ID NO: 5472 - DNA, 23 bp, Homo sapiens
  source 1..23: mol_type = genomic DNA
agtctcttcggaggcgtgggttc

SEQ ID NO: 5473 - DNA, 24 bp, Homo sapiens
  source 1..24: mol_type = genomic DNA
agtctcttcggaggcgtgggttcg

SEQ ID NO: 5474 - DNA, 16 bp, Homo sapiens
  source 1..16: mol_type = genomic DNA
agtctcttcgggggcg

SEQ ID NO: 5475 - DNA, 20 bp, Homo sapiens
  source 1..20: mol_type = genomic DNA
agtctcttcgggggcgtggg

SEQ ID NO: 5476 - DNA, 21 bp, Homo sapiens
  source 1..21: mol_type = genomic DNA
agtctcttcgggggcgtgggt

SEQ ID NO: 5477 - DNA, 22 bp, Homo sapiens
  source 1..22: mol_type = genomic DNA
agtctcttcgggggcgtgggtt

SEQ ID NO: 5478 - DNA, 23 bp, Homo sapiens
  source 1..23: mol_type = genomic DNA
agtctcttcgggggcgtgggttc

SEQ ID NO: 5479 - DNA, 24 bp, Homo sapiens
  source 1..24: mol_type = genomic DNA
agtctcttcgggggcgtgggttcg

SEQ ID NO: 5480 - DNA, 39 bp, Homo sapiens
  source 1..39: mol_type = genomic DNA
agtctcttcgggggcgtgggttcgaatcccaccgctgcc

SEQ ID NO: 5481 - DNA, 43 bp, Homo sapiens
  source 1..43: mol_type = genomic DNA
agtctcttcgggggcgtgggttcgaatcccaccgctgccacca

SEQ ID NO: 5482 - DNA, 20 bp, Homo sapiens
  source 1..20: mol_type = genomic DNA
agtcttgtaaaccggagatg

SEQ ID NO: 5483 - DNA, 27 bp, Homo sapiens
  source 1..27: mol_type = genomic DNA
agtcttgtaaaccggagatgaaaacct

SEQ ID NO: 5484 - DNA, 42 bp, Homo sapiens
  source 1..42: mol_type = genomic DNA
agtcttgtaaaccggagatgaaaacctttttccaaggacacc

SEQ ID NO: 5485 - DNA, 43 bp, Homo sapiens
  source 1..43: mol_type = genomic DNA
agtcttgtaaaccggagatgaaaacctttttccaaggacacca

SEQ ID NO: 5486 - DNA, 16 bp, Homo sapiens
  source 1..16: mol_type = genomic DNA
agtgaagcattggact

SEQ ID NO: 5487 - DNA, 17 bp, Homo sapiens
  source 1..17: mol_type = genomic DNA
agtgaagcattggactg

SEQ ID NO: 5488 - DNA, 18 bp, Homo sapiens
  source 1..18: mol_type = genomic DNA
agtgaagcattggactgt

SEQ ID NO: 5489 - DNA, 19 bp, Homo sapiens
  source 1..19: mol_type = genomic DNA
agtgaagcattggactgta

SEQ ID NO: 5490 - DNA, 20 bp, Homo sapiens
  source 1..20: mol_type = genomic DNA
agtgaagcattggactgtaa

SEQ ID NO: 5491 - DNA, 21 bp, Homo sapiens
  source 1..21: mol_type = genomic DNA
agtgaagcattggactgtaaa

SEQ ID NO: 5492 - DNA, 23 bp, Homo sapiens
  source 1..23: mol_type = genomic DNA
agtgaagcattggactgtaaatc

SEQ ID NO: 5493 - DNA, 24 bp, Homo sapiens
  source 1..24: mol_type = genomic DNA
agtgaagcattggactgtaaatct

SEQ ID NO: 5494 - DNA, 25 bp, Homo sapiens
  source 1..25: mol_type = genomic DNA
agtgaagcattggactgtaaatcta

SEQ ID NO: 5495 - DNA, 26 bp, Homo sapiens
  source 1..26: mol_type = genomic DNA
agtgaagcattggactgtaaatctaa

SEQ ID NO: 5496 - DNA, 27 bp, Homo sapiens
  source 1..27: mol_type = genomic DNA
agtgaagcattggactgtaaatctaaa

SEQ ID NO: 5497 - DNA, 28 bp, Homo sapiens
  source 1..28: mol_type = genomic DNA
agtgaagcattggactgtaaatctaaag

SEQ ID NO: 5498 - DNA, 37 bp, Homo sapiens
  source 1..37: mol_type = genomic DNA
agtgaagcattggactgtaaatctaaagacaggggtt

SEQ ID NO: 5499 - DNA, 30 bp, Homo sapiens
  source 1..30: mol_type = genomic DNA
agtggcctaatggataaggcatcagcctcc

SEQ ID NO: 5500 - DNA, 31 bp, Homo sapiens
  source 1..31: mol_type = genomic DNA
agtggcctaatggataaggcatcagcctccg

SEQ ID NO: 5501 - DNA, 33 bp, Homo sapiens
  source 1..33: mol_type = genomic DNA
agtggcgcaatcggttagcgcgcggtacttata

SEQ ID NO: 5502 - DNA, 19 bp, Homo sapiens
  source 1..19: mol_type = genomic DNA
agtggcgcaatggataacg

SEQ ID NO: 5503 - DNA, 17 bp, Homo sapiens
  source 1..17: mol_type = genomic DNA
agtggcgcagcggaagc

SEQ ID NO: 5504 - DNA, 18 bp, Homo sapiens
  source 1..18: mol_type = genomic DNA
agtggcgcagcggaagcg

SEQ ID NO: 5505 - DNA, 26 bp, Homo sapiens
  source 1..26: mol_type = genomic DNA
agtggcgcagcggaagcgtgctgggc

SEQ ID NO: 5506 - DNA, 27 bp, Homo sapiens
  source 1..27: mol_type = genomic DNA
agtggcgcagcggaagcgtgctgggcc

SEQ ID NO: 5507 - DNA, 28 bp, Homo sapiens
  source 1..28: mol_type = genomic DNA
agtggcgcagcggaagcgtgctgggccc

SEQ ID NO: 5508 - DNA, 29 bp, Homo sapiens
  source 1..29: mol_type = genomic DNA
agtggcgcagcggaagcgtgctgggccca

SEQ ID NO: 5509 - DNA, 30 bp, Homo sapiens
  source 1..30: mol_type = genomic DNA
agtggcgcagcggaagcgtgctgggcccat

SEQ ID NO: 5510 - DNA, 34 bp, Homo sapiens
  source 1..34: mol_type = genomic DNA
agtggcgcagcggaagcgtgctgggcccataacc

SEQ ID NO: 5511 - DNA, 16 bp, Homo sapiens
  source 1..16: mol_type = genomic DNA
agtggctaggattcgg

SEQ ID NO: 5512 - DNA, 17 bp, Homo sapiens
  source 1..17: mol_type = genomic DNA
agtggctaggattcggc

SEQ ID NO: 5513 - DNA, 18 bp, Homo sapiens
  source 1..18: mol_type = genomic DNA
agtggctaggattcggcg

SEQ ID NO: 5514 - DNA, 19 bp, Homo sapiens
  source 1..19: mol_type = genomic DNA
agtggctaggattcggcgc

SEQ ID NO: 5515 - DNA, 20 bp, Homo sapiens
  source 1..20: mol_type = genomic DNA
agtggctaggattcggcgct

SEQ ID NO: 5516 - DNA, 26 bp, Homo sapiens
  source 1..26: mol_type = genomic DNA
agtggctaggattcggcgctttcacc

SEQ ID NO: 5517 - DNA, 18 bp, Homo sapiens
  source 1..18: mol_type = genomic DNA
agtggctgatttgcgttc

SEQ ID NO: 5518 - DNA, 20 bp, Homo sapiens
  source 1..20: mol_type = genomic DNA
agtggctgatttgcgttcag

SEQ ID NO: 5519 - DNA, 26 bp, Homo sapiens
  source 1..26: mol_type = genomic DNA
agtggctgatttgcgttcagttgatg

SEQ ID NO: 5520 - DNA, 17 bp, Homo sapiens
  source 1..17: mol_type = genomic DNA
agtggggttttgcagtc

SEQ ID NO: 5521 - DNA, 18 bp, Homo sapiens
  source 1..18: mol_type = genomic DNA
agtggggttttgcagtcc

SEQ ID NO: 5522 - DNA, 20 bp, Homo sapiens
  source 1..20: mol_type = genomic DNA
agtggggttttgcagtcctt

SEQ ID NO: 5523 - DNA, 23 bp, Homo sapiens
  source 1..23: mol_type = genomic DNA
agtggggttttgcagtccttacc

SEQ ID NO: 5524 - DNA, 24 bp, Homo sapiens
  source 1..24: mol_type = genomic DNA
agtggggttttgcagtccttacca

SEQ ID NO: 5525 - DNA, 19 bp, Homo sapiens
  source 1..19: mol_type = genomic DNA
agtgggtagagcatcagac

SEQ ID NO: 5526 - DNA, 17 bp, Homo sapiens
  source 1..17: mol_type = genomic DNA
agtggtaagcatagctg

SEQ ID NO: 5527 - DNA, 18 bp, Homo sapiens
  source 1..18: mol_type = genomic DNA
agtggtaagcatagctgc

SEQ ID NO: 5528 - DNA, 19 bp, Homo sapiens
  source 1..19: mol_type = genomic DNA
agtggtaagcatagctgcc

SEQ ID NO: 5529 - DNA, 40 bp, Homo sapiens
  source 1..40: mol_type = genomic DNA
agtggtaagcatagctgccttccaagcagttgacccgggt

SEQ ID NO: 5530 - DNA, 18 bp, Homo sapiens
  source 1..18: mol_type = genomic DNA
agtggtagaattctcacc

SEQ ID NO: 5531 - DNA, 16 bp, Homo sapiens
  source 1..16: mol_type = genomic DNA
agtggtagaattctcg

SEQ ID NO: 5532 - DNA, 17 bp, Homo sapiens
  source 1..17: mol_type = genomic DNA
agtggtagaattctcgc

SEQ ID NO: 5533 - DNA, 18 bp, Homo sapiens
  source 1..18: mol_type = genomic DNA
agtggtagaattctcgcc

SEQ ID NO: 5534 - DNA, 19 bp, Homo sapiens
  source 1..19: mol_type = genomic DNA
agtggtagaattctcgcct

SEQ ID NO: 5535 - DNA, 20 bp, Homo sapiens
  source 1..20: mol_type = genomic DNA
agtggtagaattctcgcctc

SEQ ID NO: 5536 - DNA, 21 bp, Homo sapiens
  source 1..21: mol_type = genomic DNA
agtggtagaattctcgcctcc

SEQ ID NO: 5537 - DNA, 22 bp, Homo sapiens
  source 1..22: mol_type = genomic DNA
agtggtagaattctcgcctccc

SEQ ID NO: 5538 - DNA, 20 bp, Homo sapiens
  source 1..20: mol_type = genomic DNA
agtggtagaattctcgcctg

SEQ ID NO: 5539 - DNA, 21 bp, Homo sapiens
  source 1..21: mol_type = genomic DNA
agtggtagaattctcgcctgc

SEQ ID NO: 5540 - DNA, 22 bp, Homo sapiens
  source 1..22: mol_type = genomic DNA
agtggtagaattctcgcctgcc

SEQ ID NO: 5541 - DNA, 23 bp, Homo sapiens
  source 1..23: mol_type = genomic DNA
agtggtagaattctcgcctgcca

SEQ ID NO: 5542 - DNA, 24 bp, Homo sapiens
  source 1..24: mol_type = genomic DNA
agtggtagaattctcgcctgccac

SEQ ID NO: 5543 - DNA, 25 bp, Homo sapiens
  source 1..25: mol_type = genomic DNA
agtggtagaattctcgcctgccacg

SEQ ID NO: 5544 - DNA, 26 bp, Homo sapiens
  source 1..26: mol_type = genomic DNA
agtggtagaattctcgcctgccacgc

SEQ ID NO: 5545 - DNA, 28 bp, Homo sapiens
  source 1..28: mol_type = genomic DNA
agtggtagaattctcgcctgccacgcgg

SEQ ID NO: 5546 - DNA, 30 bp, Homo sapiens
  source 1..30: mol_type = genomic DNA
agtggtagaattctcgcctgccacgcggga

SEQ ID NO: 5547 - DNA, 34 bp, Homo sapiens
  source 1..34: mol_type = genomic DNA
agtggtagaattctcgcctgccacgcgggaggcc

SEQ ID NO: 5548 - DNA, 35 bp, Homo sapiens
  source 1..35: mol_type = genomic DNA
agtggtagaattctcgcctgccacgcgggaggccc

SEQ ID NO: 5549 - DNA, 36 bp, Homo sapiens
  source 1..36: mol_type = genomic DNA
agtggtagaattctcgcctgccacgcgggaggcccg

SEQ ID NO: 5550 - DNA, 37 bp, Homo sapiens
  source 1..37: mol_type = genomic DNA
agtggtagaattctcgcctgccacgcgggaggcccgg

SEQ ID NO: 5551 - DNA, 38 bp, Homo sapiens
  source 1..38: mol_type = genomic DNA
agtggtagaattctcgcctgccacgcgggaggcccggg

SEQ ID NO: 5552 - DNA, 39 bp, Homo sapiens
  source 1..39: mol_type = genomic DNA
agtggtagaattctcgcctgccacgcgggaggcccgggt

SEQ ID NO: 5553 - DNA, 40 bp, Homo sapiens
  source 1..40: mol_type = genomic DNA
agtggtagaattctcgcctgccacgcgggaggcccgggtt

SEQ ID NO: 5554 - DNA, 43 bp, Homo sapiens
  source 1..43: mol_type = genomic DNA
agtggtagaattctcgcctgccacgcgggaggcccgggttcga

SEQ ID NO: 5555 - DNA, 18 bp, Homo sapiens
  source 1..18: mol_type = genomic DNA
agtggtagaattcttgcc

SEQ ID NO: 5556 - DNA, 22 bp, Homo sapiens
  source 1..22: mol_type = genomic DNA
agtggtagaattcttgcctgcc

SEQ ID NO: 5557 - DNA, 16 bp, Homo sapiens
  source 1..16: mol_type = genomic DNA
agtggtagagcatttg

SEQ ID NO: 5558 - DNA, 17 bp, Homo sapiens
  source 1..17: mol_type = genomic DNA
agtggtagagcatttga

SEQ ID NO: 5559 - DNA, 18 bp, Homo sapiens
  source 1..18: mol_type = genomic DNA
agtggtagagcatttgac

SEQ ID NO: 5560 - DNA, 19 bp, Homo sapiens
  source 1..19: mol_type = genomic DNA
agtggtagagcatttgact

SEQ ID NO: 5561 - DNA, 20 bp, Homo sapiens
  source 1..20: mol_type = genomic DNA
agtggtagagcatttgactg

SEQ ID NO: 5562 - DNA, 21 bp, Homo sapiens
  source 1..21: mol_type = genomic DNA
agtggtagagcatttgactgc

SEQ ID NO: 5563 - DNA, 22 bp, Homo sapiens
  source 1..22: mol_type = genomic DNA
agtggtagagcatttgactgca

SEQ ID NO: 5564 - DNA, 26 bp, Homo sapiens
  source 1..26: mol_type = genomic DNA
agtggtagagcatttgactgcagatc

SEQ ID NO: 5565 - DNA, 27 bp, Homo sapiens
  source 1..27: mol_type = genomic DNA
agtggtagagcatttgactgcagatca

SEQ ID NO: 5566 - DNA, 29 bp, Homo sapiens
  source 1..29: mol_type = genomic DNA
agtggtagagcatttgactgcagatcaag

SEQ ID NO: 5567 - DNA, 35 bp, Homo sapiens
  source 1..35: mol_type = genomic DNA
agtggtagagcatttgactgcagatcaagaggtcc

SEQ ID NO: 5568 - DNA, 36 bp, Homo sapiens
  source 1..36: mol_type = genomic DNA
agtggtagagcatttgactgcagatcaagaggtccc

SEQ ID NO: 5569 - DNA, 16 bp, Homo sapiens
  source 1..16: mol_type = genomic DNA
agtggtagagcgcatg

SEQ ID NO: 5570 - DNA, 17 bp, Homo sapiens
  source 1..17: mol_type = genomic DNA
agtggtagagcgcatgc

SEQ ID NO: 5571 - DNA, 18 bp, Homo sapiens
  source 1..18: mol_type = genomic DNA
agtggtagagcgcatgct

SEQ ID NO: 5572 - DNA, 41 bp, Homo sapiens
  source 1..41: mol_type = genomic DNA
agtggtagagcgcatgctttgcatgtatgaggccccgggtt

SEQ ID NO: 5573 - DNA, 17 bp, Homo sapiens
  source 1..17: mol_type = genomic DNA
agtggtagagcgcgtgc

SEQ ID NO: 5574 - DNA, 18 bp, Homo sapiens
  source 1..18: mol_type = genomic DNA
agtggtatcatgcaagat

SEQ ID NO: 5575 - DNA, 19 bp, Homo sapiens
  source 1..19: mol_type = genomic DNA
agtggtatcatgcaagatt

SEQ ID NO: 5576 - DNA, 20 bp, Homo sapiens
  source 1..20: mol_type = genomic DNA
agtggtatcatgcaagattc

SEQ ID NO: 5577 - DNA, 21 bp, Homo sapiens
  source 1..21: mol_type = genomic DNA
agtggtatcatgcaagattcc

SEQ ID NO: 5578 - DNA, 39 bp, Homo sapiens
  source 1..39: mol_type = genomic DNA
agtggtatcatgcaagattcccattcttgcgacccgggt

SEQ ID NO: 5579 - DNA, 42 bp, Homo sapiens
  source 1..42: mol_type = genomic DNA
agtggtatcatgcaagattcccattcttgcgacccgggttcg

SEQ ID NO: 5580 - DNA, 17 bp, Homo sapiens
  source 1..17: mol_type = genomic DNA
agtggtatgattctcgc

SEQ ID NO: 5581 - DNA, 19 bp, Homo sapiens
  source 1..19: mol_type = genomic DNA
agtggtatgattctcgctt

SEQ ID NO: 5582 - DNA, 22 bp, Homo sapiens
  source 1..22: mol_type = genomic DNA
agtggtatgattctcgctttgg

SEQ ID NO: 5583 - DNA, 18 bp, Homo sapiens
  source 1..18: mol_type = genomic DNA
agtggtcatcacgttcgc

SEQ ID NO: 5584 - DNA, 19 bp, Homo sapiens
  source 1..19: mol_type = genomic DNA
agtggtcatcacgttcgcc

SEQ ID NO: 5585 - DNA, 20 bp, Homo sapiens
  source 1..20: mol_type = genomic DNA
agtggtcatcacgttcgcct

SEQ ID NO: 5586 - DNA, 20 bp, Homo sapiens
  source 1..20: mol_type = genomic DNA
agtggtctaaggcgccagac

SEQ ID NO: 5587 - DNA, 22 bp, Homo sapiens
  source 1..22: mol_type = genomic DNA
agtggtctaaggcgccagactc

SEQ ID NO: 5588 - DNA, 17 bp, Homo sapiens
  source 1..17: mol_type = genomic DNA
agtggtctaaggcgctg

SEQ ID NO: 5589 - DNA, 18 bp, Homo sapiens
  source 1..18: mol_type = genomic DNA
agtggtgagcatagctgc

SEQ ID NO: 5590 - DNA, 19 bp, Homo sapiens
  source 1..19: mol_type = genomic DNA
agtggtgagcatagctgcc

SEQ ID NO: 5591 - DNA, 23 bp, Homo sapiens
  source 1..23: mol_type = genomic DNA
agtggtgagcatagctgccttcc

SEQ ID NO: 5592 - DNA, 40 bp, Homo sapiens
  source 1..40: mol_type = genomic DNA
agtggtgagcatagctgccttccaagcagttgacccgggt

SEQ ID NO: 5593 - DNA, 36 bp, Homo sapiens
  source 1..36: mol_type = genomic DNA
agtggtgagtatccccgcctgtcacgcgggagaccg

SEQ ID NO: 5594 - DNA, 19 bp, Homo sapiens
  source 1..19: mol_type = genomic DNA
agtggttaaggcgttggac

SEQ ID NO: 5595 - DNA, 20 bp, Homo sapiens
  source 1..20: mol_type = genomic DNA
agtggttagagcactggtct

SEQ ID NO: 5596 - DNA, 19 bp, Homo sapiens
  source 1..19: mol_type = genomic DNA
agtggttagcatagctgcc

SEQ ID NO: 5597 - DNA, 40 bp, Homo sapiens
  source 1..40: mol_type = genomic DNA
agtggttagcatagctgccttccaagcagttgacccgggt

SEQ ID NO: 5598 - DNA, 16 bp, Homo sapiens
  source 1..16: mol_type = genomic DNA
agtggttaggattcgg

SEQ ID NO: 5599 - DNA, 17 bp, Homo sapiens
  source 1..17: mol_type = genomic DNA
agtggttaggattcggc

SEQ ID NO: 5600 - DNA, 18 bp, Homo sapiens
  source 1..18: mol_type = genomic DNA
agtggttaggattcggcg

SEQ ID NO: 5601 - DNA, 19 bp, Homo sapiens
  source 1..19: mol_type = genomic DNA
agtggttaggattcggcgc

SEQ ID NO: 5602 - DNA, 20 bp, Homo sapiens
  source 1..20: mol_type = genomic DNA
agtggttaggattcggcgct

SEQ ID NO: 5603 - DNA, 21 bp, Homo sapiens
  source 1..21: mol_type = genomic DNA
agtggttaggattcggcgctc

SEQ ID NO: 5604 - DNA, 22 bp, Homo sapiens
  source 1..22: mol_type = genomic DNA
agtggttaggattcggcgctct

SEQ ID NO: 5605 - DNA, 23 bp, Homo sapiens
  source 1..23: mol_type = genomic DNA
agtggttaggattcggcgctctc

SEQ ID NO: 5606 - DNA, 24 bp, Homo sapiens
  source 1..24: mol_type = genomic DNA
agtggttaggattcggcgctctca

SEQ ID NO: 5607 - DNA, 25 bp, Homo sapiens
  source 1..25: mol_type = genomic DNA
agtggttaggattcggcgctctcac

SEQ ID NO: 5608 - DNA, 26 bp, Homo sapiens
  source 1..26: mol_type = genomic DNA
agtggttaggattcggcgctctcacc

SEQ ID NO: 5609 - DNA, 27 bp, Homo sapiens
  source 1..27: mol_type = genomic DNA
agtggttaggattcggcgctctcaccg

SEQ ID NO: 5610 - DNA, 28 bp, Homo sapiens
  source 1..28: mol_type = genomic DNA
agtggttaggattcggcgctctcaccgc

SEQ ID NO: 5611 - DNA, 29 bp, Homo sapiens
  source 1..29: mol_type = genomic DNA
agtggttaggattcggcgctctcaccgcc

SEQ ID NO: 5612 - DNA, 31 bp, Homo sapiens
  source 1..31: mol_type = genomic DNA
agtggttaggattcggcgctctcaccgccgc

SEQ ID NO: 5613 - DNA, 32 bp, Homo sapiens
  source 1..32: mol_type = genomic DNA
agtggttaggattcggcgctctcaccgccgcg

SEQ ID NO: 5614 - DNA, 34 bp, Homo sapiens
  source 1..34: mol_type = genomic DNA
agtggttaggattcggcgctctcaccgccgcggc

SEQ ID NO: 5615 - DNA, 35 bp, Homo sapiens
  source 1..35: mol_type = genomic DNA
agtggttaggattcggcgctctcaccgccgcggcc

SEQ ID NO: 5616 - DNA, 36 bp, Homo sapiens
  source 1..36: mol_type = genomic DNA
agtggttaggattcggcgctctcaccgccgcggccc

SEQ ID NO: 5617 - DNA, 37 bp, Homo sapiens
  source 1..37: mol_type = genomic DNA
agtggttaggattcggcgctctcaccgccgcggcccg

SEQ ID NO: 5618 - DNA, 38 bp, Homo sapiens
  source 1..38: mol_type = genomic DNA
agtggttaggattcggcgctctcaccgccgcggcccgg

SEQ ID NO: 5619 - DNA, 39 bp, Homo sapiens
  source 1..39: mol_type = genomic DNA
agtggttaggattcggcgctctcaccgccgcggcccggg

SEQ ID NO: 5620 - DNA, 40 bp, Homo sapiens
  source 1..40: mol_type = genomic DNA
agtggttaggattcggcgctctcaccgccgcggcccgggt

SEQ ID NO: 5621 - DNA, 41 bp, Homo sapiens
  source 1..41: mol_type = genomic DNA
agtggttaggattcggcgctctcaccgccgcggcccgggtt

SEQ ID NO: 5622 - DNA, 42 bp, Homo sapiens
  source 1..42: mol_type = genomic DNA
agtggttaggattcggcgctctcaccgccgcggcccgggttc

SEQ ID NO: 5623 - DNA, 46 bp, Homo sapiens
  source 1..46: mol_type = genomic DNA
agtggttaggattcggcgctctcaccgccgcggcccgggttcgatt

SEQ ID NO: 5624 - DNA, 16 bp, Homo sapiens
  source 1..16: mol_type = genomic DNA
agtggttagtactctg

SEQ ID NO: 5625 - DNA, 17 bp, Homo sapiens
  source 1..17: mol_type = genomic DNA
agtggttagtactctgc

SEQ ID NO: 5626 - DNA, 18 bp, Homo sapiens
  source 1..18: mol_type = genomic DNA
agtggttagtactctgcg

SEQ ID NO: 5627 - DNA, 19 bp, Homo sapiens
  source 1..19: mol_type = genomic DNA
agtggttagtactctgcgt

SEQ ID NO: 5628 - DNA, 20 bp, Homo sapiens
  source 1..20: mol_type = genomic DNA
agtggttagtactctgcgtt

SEQ ID NO: 5629 - DNA, 21 bp, Homo sapiens
  source 1..21: mol_type = genomic DNA
agtggttagtactctgcgttg

SEQ ID NO: 5630 - DNA, 22 bp, Homo sapiens
  source 1..22: mol_type = genomic DNA
agtggttagtactctgcgttgt

SEQ ID NO: 5631 - DNA, 23 bp, Homo sapiens
  source 1..23: mol_type = genomic DNA
agtggttagtactctgcgttgtg

SEQ ID NO: 5632 - DNA, 26 bp, Homo sapiens
  source 1..26: mol_type = genomic DNA
agtggttagtactctgcgttgtggcc

SEQ ID NO: 5633 - DNA, 27 bp, Homo sapiens
  source 1..27: mol_type = genomic DNA
agtggttagtactctgcgttgtggccg

SEQ ID NO: 5634 - DNA, 35 bp, Homo sapiens
  source 1..35: mol_type = genomic DNA
agtggttagtactctgcgttgtggccgcagcaacc

SEQ ID NO: 5635 - DNA, 36 bp, Homo sapiens
  source 1..36: mol_type = genomic DNA
agtggttagtactctgcgttgtggccgcagcaacct

SEQ ID NO: 5636 - DNA, 26 bp, Homo sapiens
  source 1..26: mol_type = genomic DNA
agtggttagtatccccgcctgtcacg

SEQ ID NO: 5637 - DNA, 19 bp, Homo sapiens
  source 1..19: mol_type = genomic DNA
agtggttatcacattcgcc

SEQ ID NO: 5638 - DNA, 18 bp, Homo sapiens
  source 1..18: mol_type = genomic DNA
agtggttatcacgtctgc

SEQ ID NO: 5639 - DNA, 19 bp, Homo sapiens
  source 1..19: mol_type = genomic DNA
agtggttatcacgtctgct

SEQ ID NO: 5640 - DNA, 20 bp, Homo sapiens
  source 1..20: mol_type = genomic DNA
agtggttatcacgtctgctt

SEQ ID NO: 5641 - DNA, 21 bp, Homo sapiens
  source 1..21: mol_type = genomic DNA
agtggttatcacgtctgcttt

SEQ ID NO: 5642 - DNA, 22 bp, Homo sapiens
  source 1..22: mol_type = genomic DNA
agtggttatcacgtctgcttta

SEQ ID NO: 5643 - DNA, 23 bp, Homo sapiens
  source 1..23: mol_type = genomic DNA
agtggttatcacgtctgctttac

SEQ ID NO: 5644 - DNA, 25 bp, Homo sapiens
  source 1..25: mol_type = genomic DNA
agtggttatcacgtctgctttacac

SEQ ID NO: 5645 - DNA, 26 bp, Homo sapiens
  source 1..26: mol_type = genomic DNA
agtggttatcacgtctgctttacacg

SEQ ID NO: 5646 - DNA, 27 bp, Homo sapiens
  source 1..27: mol_type = genomic DNA
agtggttatcacgtctgctttacacgc

SEQ ID NO: 5647 - DNA, 18 bp, Homo sapiens
  source 1..18: mol_type = genomic DNA
agtggttatcacgttcgc

SEQ ID NO: 5648 - DNA, 19 bp, Homo sapiens
  source 1..19: mol_type = genomic DNA
agtggttatcacgttcgcc

SEQ ID NO: 5649 - DNA, 20 bp, Homo sapiens
  source 1..20: mol_type = genomic DNA
agtggttatcacgttcgcct

SEQ ID NO: 5650 - DNA, 21 bp, Homo sapiens
  source 1..21: mol_type = genomic DNA
agtggttatcacgttcgcctc

SEQ ID NO: 5651 - DNA, 22 bp, Homo sapiens
  source 1..22: mol_type = genomic DNA
agtggttatcacgttcgcctca

SEQ ID NO: 5652 - DNA, 23 bp, Homo sapiens
  source 1..23: mol_type = genomic DNA
agtggttatcacgttcgcctcac

SEQ ID NO: 5653 - DNA, 25 bp, Homo sapiens
  source 1..25: mol_type = genomic DNA
agtggttatcacgttcgcctcacac

SEQ ID NO: 5654 - DNA, 26 bp, Homo sapiens
  source 1..26: mol_type = genomic DNA
agtggttatcacgttcgcctcacacg

SEQ ID NO: 5655 - DNA, 27 bp, Homo sapiens
  source 1..27: mol_type = genomic DNA
agtggttatcacgttcgcctcacacgc

SEQ ID NO: 5656 - DNA, 26 bp, Homo sapiens
  source 1..26: mol_type = genomic DNA
agtgtagcggttatcacgtctgcttt

SEQ ID NO: 5657 - DNA, 25 bp, Homo sapiens
  source 1..25: mol_type = genomic DNA
agtgtagcttaacacaaagcaccca

SEQ ID NO: 5658 - DNA, 24 bp, Homo sapiens
  source 1..24: mol_type = genomic DNA
agtgtagtggtcatcacgttcgcc

SEQ ID NO: 5659 - DNA, 25 bp, Homo sapiens
  source 1..25: mol_type = genomic DNA
agtgtagtggtcatcacgttcgcct

SEQ ID NO: 5660 - DNA, 24 bp, Homo sapiens
  source 1..24: mol_type = genomic DNA
agtgtagtggttatcacgtctgct

SEQ ID NO: 5661 - DNA, 25 bp, Homo sapiens
  source 1..25: mol_type = genomic DNA
agtgtagtggttatcacgtctgctt

SEQ ID NO: 5662 - DNA, 26 bp, Homo sapiens
  source 1..26: mol_type = genomic DNA
agtgtagtggttatcacgtctgcttt

SEQ ID NO: 5663 - DNA, 23 bp, Homo sapiens
  source 1..23: mol_type = genomic DNA
agtgtagtggttatcacgttcgc

SEQ ID NO: 5664 - DNA, 24 bp, Homo sapiens
  source 1..24: mol_type = genomic DNA
agtgtagtggttatcacgttcgcc

SEQ ID NO: 5665 - DNA, 25 bp, Homo sapiens
  source 1..25: mol_type = genomic DNA
agtgtagtggttatcacgttcgcct

SEQ ID NO: 5666 - DNA, 26 bp, Homo sapiens
  source 1..26: mol_type = genomic DNA
agtgtagtggttatcacgttcgcctc

SEQ ID NO: 5667 - DNA, 28 bp, Homo sapiens
  source 1..28: mol_type = genomic DNA
agtgtagtggttatcacgttcgcctcac

SEQ ID NO: 5668 - DNA, 31 bp, Homo sapiens
  source 1..31: mol_type = genomic DNA
agtgtggccgagcggtctaaggcgctggatt

SEQ ID NO: 5669 - DNA, 16 bp, Homo sapiens
  source 1..16: mol_type = genomic DNA
agtgtttgtgggttta

SEQ ID NO: 5670 - DNA, 17 bp, Homo sapiens
  source 1..17: mol_type = genomic DNA
agtgtttgtgggtttaa

SEQ ID NO: 5671 - DNA, 21 bp, Homo sapiens
  source 1..21: mol_type = genomic DNA
agtgtttgtgggtttaagtcc

SEQ ID NO: 5672 - DNA, 25 bp, Homo sapiens
  source 1..25: mol_type = genomic DNA
agtgtttgtgggtttaagtcccatt

SEQ ID NO: 5673 - DNA, 29 bp, Homo sapiens
  source 1..29: mol_type = genomic DNA
agtgtttgtgggtttaagtcccattggtc

SEQ ID NO: 5674 - DNA, 30 bp, Homo sapiens
  source 1..30: mol_type = genomic DNA
agtgtttgtgggtttaagtcccattggtct

SEQ ID NO: 5675 - DNA, 31 bp, Homo sapiens
  source 1..31: mol_type = genomic DNA
agtgtttgtgggtttaagtcccattggtcta

SEQ ID NO: 5676 - DNA, 32 bp, Homo sapiens
  source 1..32: mol_type = genomic DNA
agtgtttgtgggtttaagtcccattggtctag

SEQ ID NO: 5677 - DNA, 33 bp, Homo sapiens
  source 1..33: mol_type = genomic DNA
agtgtttgtgggtttaagtcccattggtctagc

SEQ ID NO: 5678 - DNA, 34 bp, Homo sapiens
  source 1..34: mol_type = genomic DNA
agtgtttgtgggtttaagtcccattggtctagcc

SEQ ID NO: 5679 - DNA, 35 bp, Homo sapiens
  source 1..35: mol_type = genomic DNA
agtgtttgtgggtttaagtcccattggtctagcca

SEQ ID NO: 5680 - DNA, 18 bp, Homo sapiens
  source 1..18: mol_type = genomic DNA
agttaaagactttttctc

SEQ ID NO: 5681 - DNA, 19 bp, Homo sapiens
  source 1..19: mol_type = genomic DNA
agttaaagactttttctct

SEQ ID NO: 5682 - DNA, 20 bp, Homo sapiens
  source 1..20: mol_type = genomic DNA
agttaaagactttttctctg

SEQ ID NO: 5683 - DNA, 21 bp, Homo sapiens
  source 1..21: mol_type = genomic DNA
agttaaagactttttctctga

SEQ ID NO: 5684 - DNA, 22 bp, Homo sapiens
  source 1..22: mol_type = genomic DNA
agttaaagactttttctctgac

SEQ ID NO: 5685 - DNA, 23 bp, Homo sapiens
  source 1..23: mol_type = genomic DNA
agttaaagactttttctctgacc

SEQ ID NO: 5686 - DNA, 24 bp, Homo sapiens
  source 1..24: mol_type = genomic DNA
agttaaagactttttctctgacca

SEQ ID NO: 5687 - DNA, 17 bp, Homo sapiens
  source 1..17: mol_type = genomic DNA
agttaaagattaagaga

SEQ ID NO: 5688 - DNA, 18 bp, Homo sapiens
  source 1..18: mol_type = genomic DNA
agttaaagattaagagaa

SEQ ID NO: 5689 - DNA, 19 bp, Homo sapiens
  source 1..19: mol_type = genomic DNA
agttaaagattaagagaac

SEQ ID NO: 5690 - DNA, 20 bp, Homo sapiens
  source 1..20: mol_type = genomic DNA
agttaaagattaagagaacc

SEQ ID NO: 5691 - DNA, 21 bp, Homo sapiens
  source 1..21: mol_type = genomic DNA
agttaaagattaagagaacca

SEQ ID NO: 5692 - DNA, 22 bp, Homo sapiens
  source 1..22: mol_type = genomic DNA
agttaaagattaagagaaccaa

SEQ ID NO: 5693 - DNA, 23 bp, Homo sapiens
  source 1..23: mol_type = genomic DNA
agttaaagattaagagaaccaac

SEQ ID NO: 5694 - DNA, 24 bp, Homo sapiens
  source 1..24: mol_type = genomic DNA
agttaaagattaagagaaccaaca

SEQ ID NO: 5695 - DNA, 25 bp, Homo sapiens
  source 1..25: mol_type = genomic DNA
agttaaagattaagagaaccaacac

SEQ ID NO: 5696 - DNA, 26 bp, Homo sapiens
  source 1..26: mol_type = genomic DNA
agttaaagattaagagaaccaacacc

SEQ ID NO: 5697 - DNA, 27 bp, Homo sapiens
  source 1..27: mol_type = genomic DNA
agttaaagattaagagaaccaacacct

SEQ ID NO: 5698 - DNA, 28 bp, Homo sapiens
  source 1..28: mol_type = genomic DNA
agttaaagattaagagaaccaacacctc

SEQ ID NO: 5699 - DNA, 29 bp, Homo sapiens
  source 1..29: mol_type = genomic DNA
agttaaagattaagagaaccaacacctct

SEQ ID NO: 5700 - DNA, 30 bp, Homo sapiens
  source 1..30: mol_type = genomic DNA
agttaaagattaagagaaccaacacctctt

SEQ ID NO: 5701 - DNA, 31 bp, Homo sapiens
  source 1..31: mol_type = genomic DNA
agttaaagattaagagaaccaacacctcttt

SEQ ID NO: 5702 - DNA, 32 bp, Homo sapiens
  source 1..32: mol_type = genomic DNA
agttaaagattaagagaaccaacacctcttta

SEQ ID NO: 5703 - DNA, 37 bp, Homo sapiens
  source 1..37: mol_type = genomic DNA
agttaaagattaagagaaccaacacctctttacagtg

SEQ ID NO: 5704 - DNA, 38 bp, Homo sapiens
  source 1..38: mol_type = genomic DNA
agttaaagattaagagaaccaacacctctttacagtga

SEQ ID NO: 5705 - DNA, 39 bp, Homo sapiens
  source 1..39: mol_type = genomic DNA
agttaaagattaagagaaccaacacctctttacagtgac

SEQ ID NO: 5706 - DNA, 40 bp, Homo sapiens
  source 1..40: mol_type = genomic DNA
agttaaagattaagagaaccaacacctctttacagtgacc

SEQ ID NO: 5707 - DNA, 41 bp, Homo sapiens
  source 1..41: mol_type = genomic DNA
agttaaagattaagagaaccaacacctctttacagtgacca

SEQ ID NO: 5708 - DNA, 16 bp, Homo sapiens
  source 1..16: mol_type = genomic DNA
agttaaattataggct

SEQ ID NO: 5709 - DNA, 17 bp, Homo sapiens
  source 1..17: mol_type = genomic DNA
agttaaattataggcta

SEQ ID NO: 5710 - DNA, 18 bp, Homo sapiens
  source 1..18: mol_type = genomic DNA
agttaaattataggctaa

SEQ ID NO: 5711 - DNA, 19 bp, Homo sapiens
  source 1..19: mol_type = genomic DNA
agttaaattataggctaaa

SEQ ID NO: 5712 - DNA, 21 bp, Homo sapiens
  source 1..21: mol_type = genomic DNA
agttaaattataggctaaatc

SEQ ID NO: 5713 - DNA, 22 bp, Homo sapiens
  source 1..22: mol_type = genomic DNA
agttaaattataggctaaatcc

SEQ ID NO: 5714 - DNA, 23 bp, Homo sapiens
  source 1..23: mol_type = genomic DNA
agttaaattataggctaaatcct

SEQ ID NO: 5715 - DNA, 27 bp, Homo sapiens
  source 1..27: mol_type = genomic DNA
agttaaattataggctaaatcctatat

SEQ ID NO: 5716 - DNA, 28 bp, Homo sapiens
  source 1..28: mol_type = genomic DNA
agttaaattataggctaaatcctatata

SEQ ID NO: 5717 - DNA, 34 bp, Homo sapiens
  source 1..34: mol_type = genomic DNA
agttaaattataggctaaatcctatatatcttac

SEQ ID NO: 5718 - DNA, 35 bp, Homo sapiens
  source 1..35: mol_type = genomic DNA
agttaaattataggctaaatcctatatatcttacc

SEQ ID NO: 5719 - DNA, 29 bp, Homo sapiens
  source 1..29: mol_type = genomic DNA
agttactttgatagagtaaataataggag

SEQ ID NO: 5720 - DNA, 30 bp, Homo sapiens
  source 1..30: mol_type = genomic DNA
agttactttgatagagtaaataataggagc

SEQ ID NO: 5721 - DNA, 31 bp, Homo sapiens
  source 1..31: mol_type = genomic DNA
agttactttgatagagtaaataataggagct

SEQ ID NO: 5722 - DNA, 21 bp, Homo sapiens
  source 1..21: mol_type = genomic DNA
agttcaaatctcgctggggcc

SEQ ID NO: 5723 - DNA, 22 bp, Homo sapiens
  source 1..22: mol_type = genomic DNA
agttcaaatctcgctggggcct

SEQ ID NO: 5724 - DNA, 23 bp, Homo sapiens
  source 1..23: mol_type = genomic DNA
agttcaaatctcgctggggcctc

SEQ ID NO: 5725 - DNA, 24 bp, Homo sapiens
  source 1..24: mol_type = genomic DNA
agttcaaatctcgctggggcctcc

SEQ ID NO: 5726 - DNA, 16 bp, Homo sapiens
  source 1..16: mol_type = genomic DNA
agttcaaatctcggtg

SEQ ID NO: 5727 - DNA, 18 bp, Homo sapiens
  source 1..18: mol_type = genomic DNA
agttcaaatctcggtgga

SEQ ID NO: 5728 - DNA, 19 bp, Homo sapiens
  source 1..19: mol_type = genomic DNA
agttcaaatctcggtggaa

SEQ ID NO: 5729 - DNA, 20 bp, Homo sapiens
  source 1..20: mol_type = genomic DNA
agttcaaatctcggtggaac

SEQ ID NO: 5730 - DNA, 21 bp, Homo sapiens
  source 1..21: mol_type = genomic DNA
agttcaaatctcggtggaacc

SEQ ID NO: 5731 - DNA, 22 bp, Homo sapiens
  source 1..22: mol_type = genomic DNA
agttcaaatctcggtggaacct

SEQ ID NO: 5732 - DNA, 23 bp, Homo sapiens
  source 1..23: mol_type = genomic DNA
agttcaaatctcggtggaacctc

SEQ ID NO: 5733 - DNA, 24 bp, Homo sapiens
  source 1..24: mol_type = genomic DNA
agttcaaatctcggtggaacctcc

SEQ ID NO: 5734 - DNA, 25 bp, Homo sapiens
  source 1..25: mol_type = genomic DNA
agttcaaatctcggtggaacctcca

SEQ ID NO: 5735 - DNA, 19 bp, Homo sapiens
  source 1..19: mol_type = genomic DNA
agttcaaatctcggtggga

SEQ ID NO: 5736 - DNA, 20 bp, Homo sapiens
  source 1..20: mol_type = genomic DNA
agttcaaatctcggtgggac

SEQ ID NO: 5737 - DNA, 21 bp, Homo sapiens
  source 1..21: mol_type = genomic DNA
agttcaaatctcggtgggacc

SEQ ID NO: 5738 - DNA, 22 bp, Homo sapiens
  source 1..22: mol_type = genomic DNA
agttcaaatctcggtgggacct

SEQ ID NO: 5739 - DNA, 24 bp, Homo sapiens
  source 1..24: mol_type = genomic DNA
agttcaaatctcggtgggacctcc

SEQ ID NO: 5740 - DNA, 25 bp, Homo sapiens
  source 1..25: mol_type = genomic DNA
agttcaaatctcggtgggacctcca

SEQ ID NO: 5741 - DNA, 22 bp, Homo sapiens
  source 1..22: mol_type = genomic DNA
agttcaattctcgctggggcct

SEQ ID NO: 5742 - DNA, 18 bp, Homo sapiens
  source 1..18: mol_type = genomic DNA
agttcgaacctcagaggg

SEQ ID NO: 5743 - DNA, 19 bp, Homo sapiens
  source 1..19: mol_type = genomic DNA
agttcgaacctcagagggg

SEQ ID NO: 5744 - DNA, 24 bp, Homo sapiens
  source 1..24: mol_type = genomic DNA
agttcgaacctcagagggggcacc

SEQ ID NO: 5745 - DNA, 24 bp, Homo sapiens
  source 1..24: mol_type = genomic DNA
agttcgaatctcggtgggacctcc

SEQ ID NO: 5746 - DNA, 25 bp, Homo sapiens
  source 1..25: mol_type = genomic DNA
agttcgagcctcacacggggcacca

SEQ ID NO: 5747 - DNA, 19 bp, Homo sapiens
  source 1..19: mol_type = genomic DNA
agttcgagcctcacctgga

SEQ ID NO: 5748 - DNA, 24 bp, Homo sapiens
  source 1..24: mol_type = genomic DNA
agttcgagcctcacctggagcacc

SEQ ID NO: 5749 - DNA, 20 bp, Homo sapiens
  source 1..20: mol_type = genomic DNA
agttcgagtctcggtggaac

SEQ ID NO: 5750 - DNA, 21 bp, Homo sapiens
  source 1..21: mol_type = genomic DNA
agttcgagtctcggtggaacc

SEQ ID NO: 5751 - DNA, 22 bp, Homo sapiens
  source 1..22: mol_type = genomic DNA
agttcgagtctcggtggaacct

SEQ ID NO: 5752 - DNA, 23 bp, Homo sapiens
  source 1..23: mol_type = genomic DNA
agttcgagtctcggtggaacctc

SEQ ID NO: 5753 - DNA, 24 bp, Homo sapiens
  source 1..24: mol_type = genomic DNA
agttcgagtctcggtggaacctcc

SEQ ID NO: 5754 - DNA, 25 bp, Homo sapiens
  source 1..25: mol_type = genomic DNA
agttcgagtctcggtggaacctcca

SEQ ID NO: 5755 - DNA, 24 bp, Homo sapiens
  source 1..24: mol_type = genomic DNA
agttcgatcctcacacggggcacc

SEQ ID NO: 5756 - DNA, 19 bp, Homo sapiens
  source 1..19: mol_type = genomic DNA
agttcgatcctcgctgggg

SEQ ID NO: 5757 - DNA, 22 bp, Homo sapiens
  source 1..22: mol_type = genomic DNA
agttcgatcctcgctggggcct

SEQ ID NO: 5758 - DNA, 24 bp, Homo sapiens
  source 1..24: mol_type = genomic DNA
agttcgatcctcgctggggcctcc

SEQ ID NO: 5759 - DNA, 21 bp, Homo sapiens
  source 1..21: mol_type = genomic DNA
agttctggtctccaatggagg

SEQ ID NO: 5760 - DNA, 16 bp, Homo sapiens
  source 1..16: mol_type = genomic DNA
agttctggtctccgga

SEQ ID NO: 5761 - DNA, 17 bp, Homo sapiens
  source 1..17: mol_type = genomic DNA
agttctggtctccggat

SEQ ID NO: 5762 - DNA, 20 bp, Homo sapiens
  source 1..20: mol_type = genomic DNA
agttctggtctccggatgga

SEQ ID NO: 5763 - DNA, 21 bp, Homo sapiens
  source 1..21: mol_type = genomic DNA
agttctggtctccggatggag

SEQ ID NO: 5764 - DNA, 22 bp, Homo sapiens
  source 1..22: mol_type = genomic DNA
agttctggtctccggatggagg

SEQ ID NO: 5765 - DNA, 25 bp, Homo sapiens
  source 1..25: mol_type = genomic DNA
agttctggtctccggatggaggcgt

SEQ ID NO: 5766 - DNA, 28 bp, Homo sapiens
  source 1..28: mol_type = genomic DNA
agttctggtctccggatggaggcgtggg

SEQ ID NO: 5767 - DNA, 29 bp, Homo sapiens
  source 1..29: mol_type = genomic DNA
agttctggtctccggatggaggcgtgggt

SEQ ID NO: 5768 - DNA, 30 bp, Homo sapiens
  source 1..30: mol_type = genomic DNA
agttctggtctccggatggaggcgtgggtt

SEQ ID NO: 5769 - DNA, 16 bp, Homo sapiens
  source 1..16: mol_type = genomic DNA
agttgacccgggttcg

SEQ ID NO: 5770 - DNA, 25 bp, Homo sapiens
  source 1..25: mol_type = genomic DNA
agttgacccgggttcgattcccggc

SEQ ID NO: 5771 - DNA, 26 bp, Homo sapiens
  source 1..26: mol_type = genomic DNA
agttgacccgggttcgattcccggcc

SEQ ID NO: 5772 - DNA, 34 bp, Homo sapiens
  source 1..34: mol_type = genomic DNA
agttgacccgggttcgattcccggccaacgcacc

SEQ ID NO: 5773 - DNA, 17 bp, Homo sapiens
  source 1..17: mol_type = genomic DNA
agttgatgcagagtggg

SEQ ID NO: 5774 - DNA, 18 bp, Homo sapiens
  source 1..18: mol_type = genomic DNA
agttgatgcagagtgggg

SEQ ID NO: 5775 - DNA, 19 bp, Homo sapiens
  source 1..19: mol_type = genomic DNA
agttgatgcagagtggggt

SEQ ID NO: 5776 - DNA, 20 bp, Homo sapiens
  source 1..20: mol_type = genomic DNA
agttgatgcagagtggggtt

SEQ ID NO: 5777 - DNA, 22 bp, Homo sapiens
  source 1..22: mol_type = genomic DNA
agttgatgcagagtggggtttt

SEQ ID NO: 5778 - DNA, 23 bp, Homo sapiens
  source 1..23: mol_type = genomic DNA
agttgatgcagagtggggttttg

SEQ ID NO: 5779 - DNA, 24 bp, Homo sapiens
  source 1..24: mol_type = genomic DNA
agttgatgcagagtggggttttgc

SEQ ID NO: 5780 - DNA, 25 bp, Homo sapiens
  source 1..25: mol_type = genomic DNA
agttgatgcagagtggggttttgca

SEQ ID NO: 5781 - DNA, 28 bp, Homo sapiens
  source 1..28: mol_type = genomic DNA
agttgatgcagagtggggttttgcagtc

SEQ ID NO: 5782 - DNA, 29 bp, Homo sapiens
  source 1..29: mol_type = genomic DNA
agttgatgcagagtggggttttgcagtcc

SEQ ID NO: 5783 - DNA, 30 bp, Homo sapiens
  source 1..30: mol_type = genomic DNA
agttgatgcagagtggggttttgcagtcct

SEQ ID NO: 5784 - DNA, 31 bp, Homo sapiens
  source 1..31: mol_type = genomic DNA
agttgatgcagagtggggttttgcagtcctt

SEQ ID NO: 5785 - DNA, 32 bp, Homo sapiens
  source 1..32: mol_type = genomic DNA
agttgatgcagagtggggttttgcagtcctta

SEQ ID NO: 5786 - DNA, 33 bp, Homo sapiens
  source 1..33: mol_type = genomic DNA
agttgatgcagagtggggttttgcagtccttac

SEQ ID NO: 5787 - DNA, 34 bp, Homo sapiens
  source 1..34: mol_type = genomic DNA
agttgatgcagagtggggttttgcagtccttacc

SEQ ID NO: 5788 - DNA, 35 bp, Homo sapiens
  source 1..35: mol_type = genomic DNA
agttgatgcagagtggggttttgcagtccttacca

SEQ ID NO: 5789 - DNA, 16 bp, Homo sapiens
  source 1..16: mol_type = genomic DNA
agttgattagggtgct

SEQ ID NO: 5790 - DNA, 17 bp, Homo sapiens
  source 1..17: mol_type = genomic DNA
agttgattagggtgctt

SEQ ID NO: 5791 - DNA, 18 bp, Homo sapiens
  source 1..18: mol_type = genomic DNA
agttgattagggtgctta

SEQ ID NO: 5792 - DNA, 19 bp, Homo sapiens
  source 1..19: mol_type = genomic DNA
agttgattagggtgcttag

SEQ ID NO: 5793 - DNA, 20 bp, Homo sapiens
  source 1..20: mol_type = genomic DNA
agttgattagggtgcttagc

SEQ ID NO: 5794 - DNA, 21 bp, Homo sapiens
  source 1..21: mol_type = genomic DNA
agttgattagggtgcttagct

SEQ ID NO: 5795 - DNA, 22 bp, Homo sapiens
  source 1..22: mol_type = genomic DNA
agttgattagggtgcttagctg

SEQ ID NO: 5796 - DNA, 23 bp, Homo sapiens
  source 1..23: mol_type = genomic DNA
agttgattagggtgcttagctgt

SEQ ID NO: 5797 - DNA, 24 bp, Homo sapiens
  source 1..24: mol_type = genomic DNA
agttgattagggtgcttagctgtt

SEQ ID NO: 5798 - DNA, 25 bp, Homo sapiens
  source 1..25: mol_type = genomic DNA
agttgattagggtgcttagctgtta

SEQ ID NO: 5799 - DNA, 26 bp, Homo sapiens
  source 1..26: mol_type = genomic DNA
agttgattagggtgcttagctgttaa

SEQ ID NO: 5800 - DNA, 27 bp, Homo sapiens
  source 1..27: mol_type = genomic DNA
agttgattagggtgcttagctgttaac

SEQ ID NO: 5801 - DNA, 28 bp, Homo sapiens
  source 1..28: mol_type = genomic DNA
agttgattagggtgcttagctgttaact

SEQ ID NO: 5802 - DNA, 30 bp, Homo sapiens
  source 1..30: mol_type = genomic DNA
agttgattagggtgcttagctgttaactaa

SEQ ID NO: 5803 - DNA, 31 bp, Homo sapiens
  source 1..31: mol_type = genomic DNA
agttgattagggtgcttagctgttaactaag

SEQ ID NO: 5804 - DNA, 35 bp, Homo sapiens
  source 1..35: mol_type = genomic DNA
agttgattagggtgcttagctgttaactaagtgtt

SEQ ID NO: 5805 - DNA, 36 bp, Homo sapiens
  source 1..36: mol_type = genomic DNA
agttgattagggtgcttagctgttaactaagtgttt

SEQ ID NO: 5806 - DNA, 38 bp, Homo sapiens
  source 1..38: mol_type = genomic DNA
agttgattagggtgcttagctgttaactaagtgtttgt

SEQ ID NO: 5807 - DNA, 41 bp, Homo sapiens
  source 1..41: mol_type = genomic DNA
agttgattagggtgcttagctgttaactaagtgtttgtggg

SEQ ID NO: 5808 - DNA, 42 bp, Homo sapiens
  source 1..42: mol_type = genomic DNA
agttgattagggtgcttagctgttaactaagtgtttgtgggt

SEQ ID NO: 5809 - DNA, 43 bp, Homo sapiens
  source 1..43: mol_type = genomic DNA
agttgattagggtgcttagctgttaactaagtgtttgtgggtt

SEQ ID NO: 5810 - DNA, 44 bp, Homo sapiens
  source 1..44: mol_type = genomic DNA
agttgattagggtgcttagctgttaactaagtgtttgtgggttt

SEQ ID NO: 5811 - DNA, 45 bp, Homo sapiens
  source 1..45: mol_type = genomic DNA
agttgattagggtgcttagctgttaactaagtgtttgtgggttta

SEQ ID NO: 5812 - DNA, 46 bp, Homo sapiens
  source 1..46: mol_type = genomic DNA
agttgattagggtgcttagctgttaactaagtgtttgtgggtttaa

SEQ ID NO: 5813 - DNA, 17 bp, Homo sapiens
  source 1..17: mol_type = genomic DNA
agttgcaatacttaatt

SEQ ID NO: 5814 - DNA, 19 bp, Homo sapiens
  source 1..19: mol_type = genomic DNA
agttgcaatacttaatttc

SEQ ID NO: 5815 - DNA, 20 bp, Homo sapiens
  source 1..20: mol_type = genomic DNA
agttgcaatacttaatttct

SEQ ID NO: 5816 - DNA, 21 bp, Homo sapiens
  source 1..21: mol_type = genomic DNA
agttgcaatacttaatttctg

SEQ ID NO: 5817 - DNA, 22 bp, Homo sapiens
  source 1..22: mol_type = genomic DNA
agttgcaatacttaatttctgc

SEQ ID NO: 5818 - DNA, 23 bp, Homo sapiens
  source 1..23: mol_type = genomic DNA
agttgcaatacttaatttctgcc

SEQ ID NO: 5819 - DNA, 24 bp, Homo sapiens
  source 1..24: mol_type = genomic DNA
agttgcaatacttaatttctgcca

SEQ ID NO: 5820 - DNA, 22 bp, Homo sapiens
  source 1..22: mol_type = genomic DNA
agttgggagagcgttagactga

SEQ ID NO: 5821 - DNA, 29 bp, Homo sapiens
  source 1..29: mol_type = genomic DNA
agttgggagagcgttagactgaagatcta

SEQ ID NO: 5822 - DNA, 16 bp, Homo sapiens
  source 1..16: mol_type = genomic DNA
agttggtagagcatca

SEQ ID NO: 5823 - DNA, 18 bp, Homo sapiens
  source 1..18: mol_type = genomic DNA
agttggtagagcatcaga

SEQ ID NO: 5824 - DNA, 19 bp, Homo sapiens
  source 1..19: mol_type = genomic DNA
agttggtagagcatcagac

SEQ ID NO: 5825 - DNA, 20 bp, Homo sapiens
  source 1..20: mol_type = genomic DNA
agttggtagagcatcagact

SEQ ID NO: 5826 - DNA, 19 bp, Homo sapiens
  source 1..19: mol_type = genomic DNA
agttggtagagcatgggac

SEQ ID NO: 5827 - DNA, 28 bp, Homo sapiens
  source 1..28: mol_type = genomic DNA
agttggtagagcatgggactcttaatcc

SEQ ID NO: 5828 - DNA, 29 bp, Homo sapiens
  source 1..29: mol_type = genomic DNA
agttggtagagcatgggactcttaatccc

SEQ ID NO: 5829 - DNA, 38 bp, Homo sapiens
  source 1..38: mol_type = genomic DNA
agttggtagagcattggacttttaatttgagggcccag

SEQ ID NO: 5830 - DNA, 18 bp, Homo sapiens
  source 1..18: mol_type = genomic DNA
agttggtagagcggagga

SEQ ID NO: 5831 - DNA, 19 bp, Homo sapiens
  source 1..19: mol_type = genomic DNA
agttggtagagcggaggac

SEQ ID NO: 5832 - DNA, 21 bp, Homo sapiens
  source 1..21: mol_type = genomic DNA
agttggtagagcggaggactg

SEQ ID NO: 5833 - DNA, 23 bp, Homo sapiens
  source 1..23: mol_type = genomic DNA
agttggtagagcggaggactgta

SEQ ID NO: 5834 - DNA, 24 bp, Homo sapiens
  source 1..24: mol_type = genomic DNA
agttggtagagcggaggactgtag

SEQ ID NO: 5835 - DNA, 27 bp, Homo sapiens
  source 1..27: mol_type = genomic DNA
agtttaaacaaaacgaatgatttcgac

SEQ ID NO: 5836 - DNA, 28 bp, Homo sapiens
  source 1..28: mol_type = genomic DNA
agtttaaacaaaacgaatgatttcgact

SEQ ID NO: 5837 - DNA, 29 bp, Homo sapiens
  source 1..29: mol_type = genomic DNA
agtttaaacaaaacgaatgatttcgactc

SEQ ID NO: 5838 - DNA, 30 bp, Homo sapiens
  source 1..30: mol_type = genomic DNA
agtttaaacaaaacgaatgatttcgactca

SEQ ID NO: 5839 - DNA, 32 bp, Homo sapiens
  source 1..32: mol_type = genomic DNA
agtttaaacaaaacgaatgatttcgactcatt

SEQ ID NO: 5840 - DNA, 23 bp, Homo sapiens
  source 1..23: mol_type = genomic DNA
agtttaaattagaatcttagctt

SEQ ID NO: 5841 - DNA, 25 bp, Homo sapiens
  source 1..25: mol_type = genomic DNA
agtttaaattagaatcttagctttg

SEQ ID NO: 5842 - DNA, 26 bp, Homo sapiens
  source 1..26: mol_type = genomic DNA
agtttaaattagaatcttagctttgg

SEQ ID NO: 5843 - DNA, 44 bp, Homo sapiens
  source 1..44: mol_type = genomic DNA
agtttaaattagaatcttagctttgggtgctaatggtggagtta

SEQ ID NO: 5844 - DNA, 24 bp, Homo sapiens
  source 1..24: mol_type = genomic DNA
agtttaaccaaaacatcagattgt

SEQ ID NO: 5845 - DNA, 25 bp, Homo sapiens
  source 1..25: mol_type = genomic DNA
agtttaaccaaaacatcagattgtg

SEQ ID NO: 5846 - DNA, 26 bp, Homo sapiens
  source 1..26: mol_type = genomic DNA
agtttaaccaaaacatcagattgtga

SEQ ID NO: 5847 - DNA, 28 bp, Homo sapiens
  source 1..28: mol_type = genomic DNA
agtttaaccaaaacatcagattgtgaat

SEQ ID NO: 5848 - DNA, 29 bp, Homo sapiens
  source 1..29: mol_type = genomic DNA
agtttaaccaaaacatcagattgtgaatc

SEQ ID NO: 5849 - DNA, 30 bp, Homo sapiens
  source 1..30: mol_type = genomic DNA
agtttaaccaaaacatcagattgtgaatct

SEQ ID NO: 5850 - DNA, 31 bp, Homo sapiens
  source 1..31: mol_type = genomic DNA
agtttaaccaaaacatcagattgtgaatctg

SEQ ID NO: 5851 - DNA, 33 bp, Homo sapiens
  source 1..33: mol_type = genomic DNA
agtttaaccaaaacatcagattgtgaatctgac

SEQ ID NO: 5852 - DNA, 34 bp, Homo sapiens
  source 1..34: mol_type = genomic DNA
agtttaaccaaaacatcagattgtgaatctgaca

SEQ ID NO: 5853 - DNA, 35 bp, Homo sapiens
  source 1..35: mol_type = genomic DNA
agtttaaccaaaacatcagattgtgaatctgacaa

SEQ ID NO: 5854 - DNA, 37 bp, Homo sapiens
  source 1..37: mol_type = genomic DNA
agtttaaccaaaacatcagattgtgaatctgacaaca

SEQ ID NO: 5855 - DNA, 40 bp, Homo sapiens
  source 1..40: mol_type = genomic DNA
agtttaaccaaaacatcagattgtgaatctgacaacagag

SEQ ID NO: 5856 - DNA, 42 bp, Homo sapiens
  source 1..42: mol_type = genomic DNA
agtttaaccaaaacatcagattgtgaatctgacaacagaggc

SEQ ID NO: 5857 - DNA, 43 bp, Homo sapiens
  source 1..43: mol_type = genomic DNA
agtttaaccaaaacatcagattgtgaatctgacaacagaggct

SEQ ID NO: 5858 - DNA, 20 bp, Homo sapiens
  source 1..20: mol_type = genomic DNA
agtttatgtagcttacctcc

SEQ ID NO: 5859 - DNA, 21 bp, Homo sapiens
  source 1..21: mol_type = genomic DNA
agtttatgtagcttacctcct

SEQ ID NO: 5860 - DNA, 34 bp, Homo sapiens
  source 1..34: mol_type = genomic DNA
agtttccgtagtgtagtggttatcacgttcgcct

SEQ ID NO: 5861 - DNA, 35 bp, Homo sapiens
  source 1..35: mol_type = genomic DNA
agtttccgtagtgtagtggttatcacgttcgcctc

SEQ ID NO: 5862 - DNA, 26 bp, Homo sapiens
  source 1..26: mol_type = genomic DNA
agttttgacaacattcaaaaaagagt

SEQ ID NO: 5863 - DNA, 28 bp, Homo sapiens
  source 1..28: mol_type = genomic DNA
agttttgacaacattcaaaaaagagtac

SEQ ID NO: 5864 - DNA, 29 bp, Homo sapiens
  source 1..29: mol_type = genomic DNA
agttttgacaacattcaaaaaagagtacc

SEQ ID NO: 5865 - DNA, 30 bp, Homo sapiens
  source 1..30: mol_type = genomic DNA
agttttgacaacattcaaaaaagagtacca

SEQ ID NO: 5866 - DNA, 23 bp, Homo sapiens
  source 1..23: mol_type = genomic DNA
ataaaacttaaaactttacagtc

SEQ ID NO: 5867 - DNA, 25 bp, Homo sapiens
  source 1..25: mol_type = genomic DNA
ataaaacttaaaactttacagtcag

SEQ ID NO: 5868 - DNA, 26 bp, Homo sapiens
  source 1..26: mol_type = genomic DNA
ataaaacttaaaactttacagtcaga

SEQ ID NO: 5869 - DNA, 27 bp, Homo sapiens
  source 1..27: mol_type = genomic DNA
ataaaacttaaaactttacagtcagag

SEQ ID NO: 5870 - DNA, 28 bp, Homo sapiens
  source 1..28: mol_type = genomic DNA
ataaaacttaaaactttacagtcagagg

SEQ ID NO: 5871 - DNA, 29 bp, Homo sapiens
  source 1..29: mol_type = genomic DNA
ataaaacttaaaactttacagtcagaggt

SEQ ID NO: 5872 - DNA, 30 bp, Homo sapiens
  source 1..30: mol_type = genomic DNA
ataaaacttaaaactttacagtcagaggtt

SEQ ID NO: 5873 - DNA, 31 bp, Homo sapiens
  source 1..31: mol_type = genomic DNA
ataaaacttaaaactttacagtcagaggttc

SEQ ID NO: 5874 - DNA, 23 bp, Homo sapiens
  source 1..23: mol_type = genomic DNA
ataaaagagttactttgatagag

SEQ ID NO: 5875 - DNA, 38 bp, Homo sapiens
  source 1..38: mol_type = genomic DNA
ataaaagagttactttgatagagtaaataataggagct

SEQ ID NO: 5876 - DNA, 18 bp, Homo sapiens
  source 1..18: mol_type = genomic DNA
ataaatagtaccgttaac

SEQ ID NO: 5877 - DNA, 19 bp, Homo sapiens
  source 1..19: mol_type = genomic DNA
ataaatagtaccgttaact

SEQ ID NO: 5878 - DNA, 20 bp, Homo sapiens
  source 1..20: mol_type = genomic DNA
ataaatagtaccgttaactt

SEQ ID NO: 5879 - DNA, 21 bp, Homo sapiens
  source 1..21: mol_type = genomic DNA
ataaatagtaccgttaacttc

SEQ ID NO: 5880 - DNA, 22 bp, Homo sapiens
  source 1..22: mol_type = genomic DNA
ataaatagtaccgttaacttcc

SEQ ID NO: 5881 - DNA, 27 bp, Homo sapiens
  source 1..27: mol_type = genomic DNA
ataaatagtaccgttaacttccaatta

SEQ ID NO: 5882 - DNA, 39 bp, Homo sapiens
  source 1..39: mol_type = genomic DNA
ataaatagtaccgttaacttccaattaactagttttgac

SEQ ID NO: 5883 - DNA, 16 bp, Homo sapiens
  source 1..16: mol_type = genomic DNA
ataacagctatccatt

SEQ ID NO: 5884 - DNA, 17 bp, Homo sapiens
  source 1..17: mol_type = genomic DNA
ataacagctatccattg

SEQ ID NO: 5885 - DNA, 19 bp, Homo sapiens
  source 1..19: mol_type = genomic DNA
ataacagctatccattggt

SEQ ID NO: 5886 - DNA, 20 bp, Homo sapiens
  source 1..20: mol_type = genomic DNA
ataacagctatccattggtc

SEQ ID NO: 5887 - DNA, 21 bp, Homo sapiens
  source 1..21: mol_type = genomic DNA
ataacagctatccattggtct

SEQ ID NO: 5888 - DNA, 22 bp, Homo sapiens
  source 1..22: mol_type = genomic DNA
ataacagctatccattggtctt

SEQ ID NO: 5889 - DNA, 23 bp, Homo sapiens
  source 1..23: mol_type = genomic DNA
ataacagctatccattggtctta

SEQ ID NO: 5890 - DNA, 24 bp, Homo sapiens
  source 1..24: mol_type = genomic DNA
ataacagctatccattggtcttag

SEQ ID NO: 5891 - DNA, 27 bp, Homo sapiens
  source 1..27: mol_type = genomic DNA
ataacagctatccattggtcttaggcc

SEQ ID NO: 5892 - DNA, 28 bp, Homo sapiens
  source 1..28: mol_type = genomic DNA
ataacagctatccattggtcttaggccc

SEQ ID NO: 5893 - DNA, 29 bp, Homo sapiens
  source 1..29: mol_type = genomic DNA
ataacagctatccattggtcttaggcccc

SEQ ID NO: 5894 - DNA, 30 bp, Homo sapiens
  source 1..30: mol_type = genomic DNA
ataacagctatccattggtcttaggcccca

SEQ ID NO: 5895 - DNA, 32 bp, Homo sapiens
  source 1..32: mol_type = genomic DNA
ataacagctatccattggtcttaggccccaaa

SEQ ID NO: 5896 - DNA, 34 bp, Homo sapiens
  source 1..34: mol_type = genomic DNA
ataacagctatccattggtcttaggccccaaaaa

SEQ ID NO: 5897 - DNA, 35 bp, Homo sapiens
  source 1..35: mol_type = genomic DNA
ataacagctatccattggtcttaggccccaaaaat

SEQ ID NO: 5898 - DNA, 16 bp, Homo sapiens
  source 1..16: mol_type = genomic DNA
ataacccagaggtcga

SEQ ID NO: 5899 - DNA, 17 bp, Homo sapiens
  source 1..17: mol_type = genomic DNA
ataacccagaggtcgat

SEQ ID NO: 5900 - DNA, 18 bp, Homo sapiens
  source 1..18: mol_type = genomic DNA
ataacccagaggtcgatg

SEQ ID NO: 5901 - DNA, 20 bp, Homo sapiens
  source 1..20: mol_type = genomic DNA
ataacccagaggtcgatgga

SEQ ID NO: 5902 - DNA, 21 bp, Homo sapiens
  source 1..21: mol_type = genomic DNA
ataacccagaggtcgatggat

SEQ ID NO: 5903 - DNA, 22 bp, Homo sapiens
  source 1..22: mol_type = genomic DNA
ataacccagaggtcgatggatc

SEQ ID NO: 5904 - DNA, 23 bp, Homo sapiens
  source 1..23: mol_type = genomic DNA
ataacccagaggtcgatggatcg

SEQ ID NO: 5905 - DNA, 24 bp, Homo sapiens
  source 1..24: mol_type = genomic DNA
ataacccagaggtcgatggatcga

SEQ ID NO: 5906 - DNA, 27 bp, Homo sapiens
  source 1..27: mol_type = genomic DNA
ataacccagaggtcgatggatcgaaac

SEQ ID NO: 5907 - DNA, 23 bp, Homo sapiens
  source 1..23: mol_type = genomic DNA
ataacccagaggtcgatggatct

SEQ ID NO: 5908 - DNA, 16 bp, Homo sapiens
  source 1..16: mol_type = genomic DNA
ataacgccaaggtcgc

SEQ ID NO: 5909 - DNA, 20 bp, Homo sapiens
  source 1..20: mol_type = genomic DNA
ataacgccaaggtcgcgggt

SEQ ID NO: 5910 - DNA, 21 bp, Homo sapiens
  source 1..21: mol_type = genomic DNA
ataacgccaaggtcgcgggtt

SEQ ID NO: 5911 - DNA, 23 bp, Homo sapiens
  source 1..23: mol_type = genomic DNA
ataacgccaaggtcgcgggttcg

SEQ ID NO: 5912 - DNA, 37 bp, Homo sapiens
  source 1..37: mol_type = genomic DNA
ataacgccaaggtcgcgggttcgatccccgtacgggc

SEQ ID NO: 5913 - DNA, 41 bp, Homo sapiens
  source 1..41: mol_type = genomic DNA
ataacgccaaggtcgcgggttcgatccccgtacgggccacc

SEQ ID NO: 5914 - DNA, 28 bp, Homo sapiens
  source 1..28: mol_type = genomic DNA
ataactttgtcaaagttaaattataggc

SEQ ID NO: 5915 - DNA, 29 bp, Homo sapiens
  source 1..29: mol_type = genomic DNA
ataactttgtcaaagttaaattataggct

SEQ ID NO: 5916 - DNA, 30 bp, Homo sapiens
  source 1..30: mol_type = genomic DNA
ataactttgtcaaagttaaattataggcta

SEQ ID NO: 5917 - DNA, 31 bp, Homo sapiens
  source 1..31: mol_type = genomic DNA
ataactttgtcaaagttaaattataggctaa

SEQ ID NO: 5918 - DNA, 34 bp, Homo sapiens
  source 1..34: mol_type = genomic DNA
ataactttgtcaaagttaaattataggctaaatc

SEQ ID NO: 5919 - DNA, 16 bp, Homo sapiens
  source 1..16: mol_type = genomic DNA
ataagctatcgggccc

SEQ ID NO: 5920 - DNA, 17 bp, Homo sapiens
  source 1..17: mol_type = genomic DNA
ataagctatcgggccca

SEQ ID NO: 5921 - DNA, 18 bp, Homo sapiens
  source 1..18: mol_type = genomic DNA
ataagctatcgggcccat

SEQ ID NO: 5922 - DNA, 19 bp, Homo sapiens
  source 1..19: mol_type = genomic DNA
ataagctatcgggcccata

SEQ ID NO: 5923 - DNA, 20 bp, Homo sapiens
  source 1..20: mol_type = genomic DNA
ataagctatcgggcccatac

SEQ ID NO: 5924 - DNA, 21 bp, Homo sapiens
  source 1..21: mol_type = genomic DNA
ataagctatcgggcccatacc

SEQ ID NO: 5925 - DNA, 22 bp, Homo sapiens
  source 1..22: mol_type = genomic DNA
ataagctatcgggcccataccc

SEQ ID NO: 5926 - DNA, 23 bp, Homo sapiens
  source 1..23: mol_type = genomic DNA
ataagctatcgggcccatacccc

SEQ ID NO: 5927 - DNA, 24 bp, Homo sapiens
  source 1..24: mol_type = genomic DNA
ataagctatcgggcccataccccg

SEQ ID NO: 5928 - DNA, 25 bp, Homo sapiens
  source 1..25: mol_type = genomic DNA
ataagctatcgggcccataccccga

SEQ ID NO: 5929 - DNA, 26 bp, Homo sapiens
  source 1..26: mol_type = genomic DNA
ataagctatcgggcccataccccgaa

SEQ ID NO: 5930 - DNA, 27 bp, Homo sapiens
  source 1..27: mol_type = genomic DNA
ataagctatcgggcccataccccgaaa

SEQ ID NO: 5931 - DNA, 28 bp, Homo sapiens
  source 1..28: mol_type = genomic DNA
ataagctatcgggcccataccccgaaaa

SEQ ID NO: 5932 - DNA, 29 bp, Homo sapiens
  source 1..29: mol_type = genomic DNA
ataagctatcgggcccataccccgaaaat

SEQ ID NO: 5933 - DNA, 30 bp, Homo sapiens
  source 1..30: mol_type = genomic DNA
ataagctatcgggcccataccccgaaaatg

SEQ ID NO: 5934 - DNA, 32 bp, Homo sapiens
  source 1..32: mol_type = genomic DNA
ataagctatcgggcccataccccgaaaatgtt

SEQ ID NO: 5935 - DNA, 33 bp, Homo sapiens
  source 1..33: mol_type = genomic DNA
ataagctatcgggcccataccccgaaaatgttg

SEQ ID NO: 5936 - DNA, 35 bp, Homo sapiens
  source 1..35: mol_type = genomic DNA
ataagctatcgggcccataccccgaaaatgttggt

SEQ ID NO: 5937 - DNA, 36 bp, Homo sapiens
  source 1..36: mol_type = genomic DNA
ataagctatcgggcccataccccgaaaatgttggtt

SEQ ID NO: 5938 - DNA, 37 bp, Homo sapiens
  source 1..37: mol_type = genomic DNA
ataagctatcgggcccataccccgaaaatgttggtta

SEQ ID NO: 5939 - DNA, 38 bp, Homo sapiens
  source 1..38: mol_type = genomic DNA
ataagctatcgggcccataccccgaaaatgttggttat

SEQ ID NO: 5940 - DNA, 40 bp, Homo sapiens
  source 1..40: mol_type = genomic DNA
ataagctatcgggcccataccccgaaaatgttggttatac

SEQ ID NO: 5941 - DNA, 24 bp, Homo sapiens
  source 1..24: mol_type = genomic DNA
ataaggcatcagcctccggagctg

SEQ ID NO: 5942 - DNA, 17 bp, Homo sapiens
  source 1..17: mol_type = genomic DNA
ataataggagcttaaac

SEQ ID NO: 5943 - DNA, 18 bp, Homo sapiens
  source 1..18: mol_type = genomic DNA
ataataggagcttaaacc

SEQ ID NO: 5944 - DNA, 19 bp, Homo sapiens
  source 1..19: mol_type = genomic DNA
ataataggagcttaaaccc

SEQ ID NO: 5945 - DNA, 20 bp, Homo sapiens
  source 1..20: mol_type = genomic DNA
ataataggagcttaaacccc

SEQ ID NO: 5946 - DNA, 21 bp, Homo sapiens
  source 1..21: mol_type = genomic DNA
ataataggagcttaaaccccc

SEQ ID NO: 5947 - DNA, 22 bp, Homo sapiens
  source 1..22: mol_type = genomic DNA
ataataggagcttaaaccccct

SEQ ID NO: 5948 - DNA, 23 bp, Homo sapiens
  source 1..23: mol_type = genomic DNA
ataataggagcttaaaccccctt

SEQ ID NO: 5949 - DNA, 24 bp, Homo sapiens
  source 1..24: mol_type = genomic DNA
ataataggagcttaaaccccctta

SEQ ID NO: 5950 - DNA, 25 bp, Homo sapiens
  source 1..25: mol_type = genomic DNA
ataataggagcttaaacccccttat

SEQ ID NO: 5951 - DNA, 26 bp, Homo sapiens
  source 1..26: mol_type = genomic DNA
ataataggagcttaaacccccttatt

SEQ ID NO: 5952 - DNA, 28 bp, Homo sapiens
  source 1..28: mol_type = genomic DNA
ataataggagcttaaacccccttatttc

SEQ ID NO: 5953 - DNA, 29 bp, Homo sapiens
  source 1..29: mol_type = genomic DNA
ataataggagcttaaacccccttatttct

SEQ ID NO: 5954 - DNA, 30 bp, Homo sapiens
  source 1..30: mol_type = genomic DNA
ataataggagcttaaacccccttatttcta

SEQ ID NO: 5955 - DNA, 31 bp, Homo sapiens
  source 1..31: mol_type = genomic DNA
ataataggagcttaaacccccttatttctac

SEQ ID NO: 5956 - DNA, 32 bp, Homo sapiens
  source 1..32: mol_type = genomic DNA
ataataggagcttaaacccccttatttctacc

SEQ ID NO: 5957 - DNA, 33 bp, Homo sapiens
  source 1..33: mol_type = genomic DNA
ataataggagcttaaacccccttatttctacca

SEQ ID NO: 5958 - DNA, 18 bp, Homo sapiens
  source 1..18: mol_type = genomic DNA
ataatcatatttaccaac

SEQ ID NO: 5959 - DNA, 19 bp, Homo sapiens
  source 1..19: mol_type = genomic DNA
ataatcatatttaccaacc

SEQ ID NO: 5960 - DNA, 20 bp, Homo sapiens
  source 1..20: mol_type = genomic DNA
ataatcatatttaccaacca

SEQ ID NO: 5961 - DNA, 16 bp, Homo sapiens
  source 1..16: mol_type = genomic DNA
ataatctgaaggtcct

SEQ ID NO: 5962 - DNA, 17 bp, Homo sapiens
  source 1..17: mol_type = genomic DNA
ataatctgaaggtcctg

SEQ ID NO: 5963 - DNA, 18 bp, Homo sapiens
  source 1..18: mol_type = genomic DNA
ataatctgaaggtcctga

SEQ ID NO: 5964 - DNA, 20 bp, Homo sapiens
  source 1..20: mol_type = genomic DNA
ataatctgaaggtcctgagt

SEQ ID NO: 5965 - DNA, 39 bp, Homo sapiens
  source 1..39: mol_type = genomic DNA
ataatctgaaggtcctgagttcgaacctcagagggggca

SEQ ID NO: 5966 - DNA, 40 bp, Homo sapiens
  source 1..40: mol_type = genomic DNA
ataatctgaaggtcctgagttcgaacctcagagggggcac

SEQ ID NO: 5967 - DNA, 41 bp, Homo sapiens
  source 1..41: mol_type = genomic DNA
ataatctgaaggtcctgagttcgaacctcagagggggcacc

SEQ ID NO: 5968 - DNA, 42 bp, Homo sapiens
  source 1..42: mol_type = genomic DNA
ataatctgaaggtcctgagttcgaacctcagagggggcacca

SEQ ID NO: 5969 - DNA, 42 bp, Homo sapiens
  source 1..42: mol_type = genomic DNA
ataatctgaaggtcctgagttcgagcctcagagagggcacca

SEQ ID NO: 5970 - DNA, 20 bp, Homo sapiens
  source 1..20: mol_type = genomic DNA
ataatctgaaggtcgtgagt

SEQ ID NO: 5971 - DNA, 21 bp, Homo sapiens
  source 1..21: mol_type = genomic DNA
ataatctgaaggtcgtgagtt

SEQ ID NO: 5972 - DNA, 23 bp, Homo sapiens
  source 1..23: mol_type = genomic DNA
ataatctgaaggtcgtgagttcg

SEQ ID NO: 5973 - DNA, 37 bp, Homo sapiens
  source 1..37: mol_type = genomic DNA
ataatctgaaggtcgtgagttcgagcctcacacgggg

SEQ ID NO: 5974 - DNA, 39 bp, Homo sapiens
  source 1..39: mol_type = genomic DNA
ataatctgaaggtcgtgagttcgagcctcacacggggca

SEQ ID NO: 5975 - DNA, 40 bp, Homo sapiens
  source 1..40: mol_type = genomic DNA
ataatctgaaggtcgtgagttcgagcctcacacggggcac

SEQ ID NO: 5976 - DNA, 41 bp, Homo sapiens
  source 1..41: mol_type = genomic DNA
ataatctgaaggtcgtgagttcgagcctcacacggggcacc

SEQ ID NO: 5977 - DNA, 42 bp, Homo sapiens
  source 1..42: mol_type = genomic DNA
ataatctgaaggtcgtgagttcgagcctcacacggggcacca

SEQ ID NO: 5978 - DNA, 40 bp, Homo sapiens
  source 1..40: mol_type = genomic DNA
ataatctgaaggtcgtgagttcgatcctcacacggggcac

SEQ ID NO: 5979 - DNA, 41 bp, Homo sapiens
  source 1..41: mol_type = genomic DNA
ataatctgaaggtcgtgagttcgatcctcacacggggcacc

SEQ ID NO: 5980 - DNA, 42 bp, Homo sapiens
  source 1..42: mol_type = genomic DNA
ataatctgaaggtcgtgagttcgatcctcacacggggcacca

SEQ ID NO: 5981 - DNA, 16 bp, Homo sapiens
  source 1..16: mol_type = genomic DNA
ataatgccgaggttgt

SEQ ID NO: 5982 - DNA, 17 bp, Homo sapiens
  source 1..17: mol_type = genomic DNA
ataatgccgaggttgtg

SEQ ID NO: 5983 - DNA, 18 bp, Homo sapiens
  source 1..18: mol_type = genomic DNA
ataatgccgaggttgtga

SEQ ID NO: 5984 - DNA, 22 bp, Homo sapiens
  source 1..22: mol_type = genomic DNA
ataatgccgaggttgtgagttc

SEQ ID NO: 5985 - DNA, 23 bp, Homo sapiens
  source 1..23: mol_type = genomic DNA
ataatgccgaggttgtgagttcg

SEQ ID NO: 5986 - DNA, 24 bp, Homo sapiens
  source 1..24: mol_type = genomic DNA
ataatgccgaggttgtgagttcga

SEQ ID NO: 5987 - DNA, 34 bp, Homo sapiens
  source 1..34: mol_type = genomic DNA
ataatgccgaggttgtgagttcgagcctcacctg

SEQ ID NO: 5988 - DNA, 41 bp, Homo sapiens
  source 1..41: mol_type = genomic DNA
ataatgccgaggttgtgagttcgagcctcacctggagcacc

SEQ ID NO: 5989 - DNA, 18 bp, Homo sapiens
  source 1..18: mol_type = genomic DNA
atacaacgatggtttttc

SEQ ID NO: 5990 - DNA, 19 bp, Homo sapiens
  source 1..19: mol_type = genomic DNA
atacaacgatggtttttca

SEQ ID NO: 5991 - DNA, 20 bp, Homo sapiens
  source 1..20: mol_type = genomic DNA
atacaacgatggtttttcat

SEQ ID NO: 5992 - DNA, 22 bp, Homo sapiens
  source 1..22: mol_type = genomic DNA
atacaacgatggtttttcatat

SEQ ID NO: 5993 - DNA, 23 bp, Homo sapiens
  source 1..23: mol_type = genomic DNA
atacaacgatggtttttcatatc

SEQ ID NO: 5994 - DNA, 31 bp, Homo sapiens
  source 1..31: mol_type = genomic DNA
atacaacgatggtttttcatatcattggtcg

SEQ ID NO: 5995 - DNA, 32 bp, Homo sapiens
  source 1..32: mol_type = genomic DNA
atacaacgatggtttttcatatcattggtcgt

SEQ ID NO: 5996 - DNA, 37 bp, Homo sapiens
  source 1..37: mol_type = genomic DNA
atacaacgatggtttttcatatcattggtcgtggttg

SEQ ID NO: 5997 - DNA, 38 bp, Homo sapiens
  source 1..38: mol_type = genomic DNA
atacaacgatggtttttcatatcattggtcgtggttgt

SEQ ID NO: 5998 - DNA, 39 bp, Homo sapiens
  source 1..39: mol_type = genomic DNA
atacaacgatggtttttcatatcattggtcgtggttgta

SEQ ID NO: 5999 - DNA, 41 bp, Homo sapiens
  source 1..41: mol_type = genomic DNA
atacaacgatggtttttcatatcattggtcgtggttgtagt

SEQ ID NO: 6000 - DNA, 42 bp, Homo sapiens
  source 1..42: mol_type = genomic DNA
atacaacgatggtttttcatatcattggtcgtggttgtagtc

SEQ ID NO: 6001 - DNA, 43 bp, Homo sapiens
  source 1..43: mol_type = genomic DNA
atacaacgatggtttttcatatcattggtcgtggttgtagtcc

SEQ ID NO: 6002 - DNA, 44 bp, Homo sapiens
  source 1..44: mol_type = genomic DNA
atacaacgatggtttttcatatcattggtcgtggttgtagtccg

SEQ ID NO: 6003 - DNA, 47 bp, Homo sapiens
  source 1..47: mol_type = genomic DNA
atacaacgatggtttttcatatcattggtcgtggttgtagtccgtgc

SEQ ID NO: 6004 - DNA, 48 bp, Homo sapiens
  source 1..48: mol_type = genomic DNA
atacaacgatggtttttcatatcattggtcgtggttgtagtccgtgcg

SEQ ID NO: 6005 - DNA, 20 bp, Homo sapiens
  source 1..20: mol_type = genomic DNA
atacaccagtcttgtaaacc

SEQ ID NO: 6006 - DNA, 22 bp, Homo sapiens
  source 1..22: mol_type = genomic DNA
atacactgaaaatgtttagacg

SEQ ID NO: 6007 - DNA, 25 bp, Homo sapiens
  source 1..25: mol_type = genomic DNA
atacactgaaaatgtttagacgggc

SEQ ID NO: 6008 - DNA, 26 bp, Homo sapiens
  source 1..26: mol_type = genomic DNA
atacactgaaaatgtttagacgggct

SEQ ID NO: 6009 - DNA, 27 bp, Homo sapiens
  source 1..27: mol_type = genomic DNA
atacactgaaaatgtttagacgggctc

SEQ ID NO: 6010 - DNA, 28 bp, Homo sapiens
  source 1..28: mol_type = genomic DNA
atacactgaaaatgtttagacgggctca

SEQ ID NO: 6011 - DNA, 29 bp, Homo sapiens
  source 1..29: mol_type = genomic DNA
atacactgaaaatgtttagacgggctcac

SEQ ID NO: 6012 - DNA, 30 bp, Homo sapiens
  source 1..30: mol_type = genomic DNA
atacactgaaaatgtttagacgggctcaca

SEQ ID NO: 6013 - DNA, 32 bp, Homo sapiens
  source 1..32: mol_type = genomic DNA
atacactgaaaatgtttagacgggctcacatc

SEQ ID NO: 6014 - DNA, 35 bp, Homo sapiens
  source 1..35: mol_type = genomic DNA
atacactgaaaatgtttagacgggctcacatcacc

SEQ ID NO: 6015 - DNA, 36 bp, Homo sapiens
  source 1..36: mol_type = genomic DNA
atacactgaaaatgtttagacgggctcacatcaccc

SEQ ID NO: 6016 - DNA, 44 bp, Homo sapiens
  source 1..44: mol_type = genomic DNA
atacactgaaaatgtttagacgggctcacatcaccccataaaca

SEQ ID NO: 6017 - DNA, 46 bp, Homo sapiens
  source 1..46: mol_type = genomic DNA
atacactgaaaatgtttagacgggctcacatcaccccataaacacc

SEQ ID NO: 6018 - DNA, 47 bp, Homo sapiens
  source 1..47: mol_type = genomic DNA
atacactgaaaatgtttagacgggctcacatcaccccataaacacca

SEQ ID NO: 6019 - DNA, 16 bp, Homo sapiens
  source 1..16: mol_type = genomic DNA
atacagaccaagagcc

SEQ ID NO: 6020 - DNA, 17 bp, Homo sapiens
  source 1..17: mol_type = genomic DNA
atacagaccaagagcct

SEQ ID NO: 6021 - DNA, 18 bp, Homo sapiens
  source 1..18: mol_type = genomic DNA
atacagaccaagagcctt

SEQ ID NO: 6022 - DNA, 19 bp, Homo sapiens
  source 1..19: mol_type = genomic DNA
atacagaccaagagccttc

SEQ ID NO: 6023 - DNA, 20 bp, Homo sapiens
  source 1..20: mol_type = genomic DNA
atacagaccaagagccttca

SEQ ID NO: 6024 - DNA, 21 bp, Homo sapiens
  source 1..21: mol_type = genomic DNA
atacagaccaagagccttcaa

SEQ ID NO: 6025 - DNA, 22 bp, Homo sapiens
  source 1..22: mol_type = genomic DNA
atacagaccaagagccttcaaa

SEQ ID NO: 6026 - DNA, 25 bp, Homo sapiens
  source 1..25: mol_type = genomic DNA
atacagaccaagagccttcaaagcc

SEQ ID NO: 6027 - DNA, 26 bp, Homo sapiens
  source 1..26: mol_type = genomic DNA
atacagaccaagagccttcaaagccc

SEQ ID NO: 6028 - DNA, 29 bp, Homo sapiens
  source 1..29: mol_type = genomic DNA
atacagaccaagagccttcaaagccctca

SEQ ID NO: 6029 - DNA, 32 bp, Homo sapiens
  source 1..32: mol_type = genomic DNA
atacagaccaagagccttcaaagccctcagta

SEQ ID NO: 6030 - DNA, 20 bp, Homo sapiens
  source 1..20: mol_type = genomic DNA
ataccccgaaaatgttggtt

SEQ ID NO: 6031 - DNA, 26 bp, Homo sapiens
  source 1..26: mol_type = genomic DNA
ataccccgaaaatgttggttataccc

SEQ ID NO: 6032 - DNA, 34 bp, Homo sapiens
  source 1..34: mol_type = genomic DNA
ataccccgaaaatgttggttatacccttcccgta

SEQ ID NO: 6033 - DNA, 37 bp, Homo sapiens
  source 1..37: mol_type = genomic DNA
ataccccgaaaatgttggttatacccttcccgtacta

SEQ ID NO: 6034 - DNA, 38 bp, Homo sapiens
  source 1..38: mol_type = genomic DNA
ataccccgaaaatgttggttatacccttcccgtactac

SEQ ID NO: 6035 - DNA, 39 bp, Homo sapiens
  source 1..39: mol_type = genomic DNA
ataccccgaaaatgttggttatacccttcccgtactacc

SEQ ID NO: 6036 - DNA, 40 bp, Homo sapiens
  source 1..40: mol_type = genomic DNA
ataccccgaaaatgttggttatacccttcccgtactacca

SEQ ID NO: 6037 - DNA, 16 bp, Homo sapiens
  source 1..16: mol_type = genomic DNA
atacccttcccgtact

SEQ ID NO: 6038 - DNA, 17 bp, Homo sapiens
  source 1..17: mol_type = genomic DNA
atacccttcccgtacta

SEQ ID NO: 6039 - DNA, 18 bp, Homo sapiens
  source 1..18: mol_type = genomic DNA
atacccttcccgtactac

SEQ ID NO: 6040 - DNA, 19 bp, Homo sapiens
  source 1..19: mol_type = genomic DNA
atacccttcccgtactacc

SEQ ID NO: 6041 - DNA, 20 bp, Homo sapiens
  source 1..20: mol_type = genomic DNA
atacccttcccgtactacca

SEQ ID NO: 6042 - DNA, 16 bp, Homo sapiens
  source 1..16: mol_type = genomic DNA
atacttaatttctgcc

SEQ ID NO: 6043 - DNA, 17 bp, Homo sapiens
  source 1..17: mol_type = genomic DNA
atacttaatttctgcca

SEQ ID NO: 6044 - DNA, 18 bp, Homo sapiens
  source 1..18: mol_type = genomic DNA
atagagtaaataatagga

SEQ ID NO: 6045 - DNA, 19 bp, Homo sapiens
  source 1..19: mol_type = genomic DNA
atagagtaaataataggag

SEQ ID NO: 6046 - DNA, 20 bp, Homo sapiens
  source 1..20: mol_type = genomic DNA
atagagtaaataataggagc

SEQ ID NO: 6047 - DNA, 21 bp, Homo sapiens
  source 1..21: mol_type = genomic DNA
atagagtaaataataggagct

SEQ ID NO: 6048 - DNA, 22 bp, Homo sapiens
  source 1..22: mol_type = genomic DNA
atagagtaaataataggagctt

SEQ ID NO: 6049 - DNA, 23 bp, Homo sapiens
  source 1..23: mol_type = genomic DNA
atagagtaaataataggagctta

SEQ ID NO: 6050 - DNA, 24 bp, Homo sapiens
  source 1..24: mol_type = genomic DNA
atagagtaaataataggagcttaa

SEQ ID NO: 6051 - DNA, 26 bp, Homo sapiens
  source 1..26: mol_type = genomic DNA
atagagtaaataataggagcttaaac

SEQ ID NO: 6052 - DNA, 27 bp, Homo sapiens
  source 1..27: mol_type = genomic DNA
atagagtaaataataggagcttaaacc

SEQ ID NO: 6053 - DNA, 28 bp, Homo sapiens
  source 1..28: mol_type = genomic DNA
atagagtaaataataggagcttaaaccc

SEQ ID NO: 6054 - DNA, 29 bp, Homo sapiens
  source 1..29: mol_type = genomic DNA
atagagtaaataataggagcttaaacccc

SEQ ID NO: 6055 - DNA, 30 bp, Homo sapiens
  source 1..30: mol_type = genomic DNA
atagagtaaataataggagcttaaaccccc

SEQ ID NO: 6056 - DNA, 31 bp, Homo sapiens
  source 1..31: mol_type = genomic DNA
atagagtaaataataggagcttaaaccccct

SEQ ID NO: 6057 - DNA, 32 bp, Homo sapiens
  source 1..32: mol_type = genomic DNA
atagagtaaataataggagcttaaaccccctt

SEQ ID NO: 6058 - DNA, 33 bp, Homo sapiens
  source 1..33: mol_type = genomic DNA
atagagtaaataataggagcttaaaccccctta

SEQ ID NO: 6059 - DNA, 34 bp, Homo sapiens
  source 1..34: mol_type = genomic DNA
atagagtaaataataggagcttaaacccccttat

SEQ ID NO: 6060 - DNA, 35 bp, Homo sapiens
  source 1..35: mol_type = genomic DNA
atagagtaaataataggagcttaaacccccttatt

SEQ ID NO: 6061 - DNA, 36 bp, Homo sapiens
  source 1..36: mol_type = genomic DNA
atagagtaaataataggagcttaaacccccttattt

SEQ ID NO: 6062 - DNA, 37 bp, Homo sapiens
  source 1..37: mol_type = genomic DNA
atagagtaaataataggagcttaaacccccttatttc

SEQ ID NO: 6063 - DNA, 38 bp, Homo sapiens
  source 1..38: mol_type = genomic DNA
atagagtaaataataggagcttaaacccccttatttct

SEQ ID NO: 6064 - DNA, 39 bp, Homo sapiens
  source 1..39: mol_type = genomic DNA
atagagtaaataataggagcttaaacccccttatttcta

SEQ ID NO: 6065 - DNA, 41 bp, Homo sapiens
  source 1..41: mol_type = genomic DNA
atagagtaaataataggagcttaaacccccttatttctacc

SEQ ID NO: 6066 - DNA, 21 bp, Homo sapiens
  source 1..21: mol_type = genomic DNA
atagcgcattggacttctaat

SEQ ID NO: 6067 - DNA, 36 bp, Homo sapiens
  source 1..36: mol_type = genomic DNA
atagcgcattggacttctaattcaaaggttgtgggt

SEQ ID NO: 6068 - DNA, 26 bp, Homo sapiens
  source 1..26: mol_type = genomic DNA
atagctcaggggtagagcatttgact

SEQ ID NO: 6069 - DNA, 27 bp, Homo sapiens
  source 1..27: mol_type = genomic DNA
atagctcaggggtagagcatttgactg

SEQ ID NO: 6070 - DNA, 28 bp, Homo sapiens
  source 1..28: mol_type = genomic DNA
atagctcaggggtagagcatttgactgc

SEQ ID NO: 6071 - DNA, 20 bp, Homo sapiens
  source 1..20: mol_type = genomic DNA
atagctcaggggttagagca

SEQ ID NO: 6072 - DNA, 26 bp, Homo sapiens
  source 1..26: mol_type = genomic DNA
atagctcaggggttagagcactggtc

SEQ ID NO: 6073 - DNA, 27 bp, Homo sapiens
  source 1..27: mol_type = genomic DNA
atagctcaggggttagagcactggtct

SEQ ID NO: 6074 - DNA, 28 bp, Homo sapiens
  source 1..28: mol_type = genomic DNA
atagctcaggggttagagcactggtctt

SEQ ID NO: 6075 - DNA, 30 bp, Homo sapiens
  source 1..30: mol_type = genomic DNA
atagctcaggggttagagcactggtcttgt

SEQ ID NO: 6076 - DNA, 27 bp, Homo sapiens
  source 1..27: mol_type = genomic DNA
atagctcaggtggtagagcatttgact

SEQ ID NO: 6077 - DNA, 26 bp, Homo sapiens
  source 1..26: mol_type = genomic DNA
atagctcagtcagtagagcatcagac

SEQ ID NO: 6078 - DNA, 16 bp, Homo sapiens
  source 1..16: mol_type = genomic DNA
atagctcagtcggtag

SEQ ID NO: 6079 - DNA, 17 bp, Homo sapiens
  source 1..17: mol_type = genomic DNA
atagctcagtcggtaga

SEQ ID NO: 6080 - DNA, 18 bp, Homo sapiens
  source 1..18: mol_type = genomic DNA
atagctcagtcggtagag

SEQ ID NO: 6081 - DNA, 19 bp, Homo sapiens
  source 1..19: mol_type = genomic DNA
atagctcagtcggtagagc

SEQ ID NO: 6082 - DNA, 22 bp, Homo sapiens
  source 1..22: mol_type = genomic DNA
atagctcagtcggtagagcatc

SEQ ID NO: 6083 - DNA, 23 bp, Homo sapiens
  source 1..23: mol_type = genomic DNA
atagctcagtcggtagagcatca

SEQ ID NO: 6084 - DNA, 25 bp, Homo sapiens
  source 1..25: mol_type = genomic DNA
atagctcagtcggtagagcatcaga

SEQ ID NO: 6085 - DNA, 26 bp, Homo sapiens
  source 1..26: mol_type = genomic DNA
atagctcagtcggtagagcatcagac

SEQ ID NO: 6086 - DNA, 27 bp, Homo sapiens
  source 1..27: mol_type = genomic DNA
atagctcagtcggtagagcatcagact

SEQ ID NO: 6087 - DNA, 28 bp, Homo sapiens
  source 1..28: mol_type = genomic DNA
atagctcagtcggtagagcatcagactt

SEQ ID NO: 6088 - DNA, 29 bp, Homo sapiens
  source 1..29: mol_type = genomic DNA
atagctcagtcggtagagcatcagacttt

SEQ ID NO: 6089 - DNA, 30 bp, Homo sapiens
  source 1..30: mol_type = genomic DNA
atagctcagtcggtagagcatcagactttt

SEQ ID NO: 6090 - DNA, 28 bp, Homo sapiens
  source 1..28: mol_type = genomic DNA
atagctcagtgggtagagcatttgactg

SEQ ID NO: 6091 - DNA, 16 bp, Homo sapiens
  source 1..16: mol_type = genomic DNA
atagctcagtggtaga

SEQ ID NO: 6092 - DNA, 25 bp, Homo sapiens
  source 1..25: mol_type = genomic DNA
atagctcagtggtagagcatttgac

SEQ ID NO: 6093 - DNA, 26 bp, Homo sapiens
  source 1..26: mol_type = genomic DNA
atagctcagtggtagagcatttgact

SEQ ID NO: 6094 - DNA, 27 bp, Homo sapiens
  source 1..27: mol_type = genomic DNA
atagctcagtggtagagcatttgactg

SEQ ID NO: 6095 - DNA, 28 bp, Homo sapiens
  source 1..28: mol_type = genomic DNA
atagctcagtggtagagcatttgactgc

SEQ ID NO: 6096 - DNA, 29 bp, Homo sapiens
  source 1..29: mol_type = genomic DNA
atagctcagtggtagagcatttgactgca

SEQ ID NO: 6097 - DNA, 27 bp, Homo sapiens
  source 1..27: mol_type = genomic DNA
atagctcagtggttagagcactggtct

SEQ ID NO: 6098 - DNA, 16 bp, Homo sapiens
  source 1..16: mol_type = genomic DNA
atagctcagttgggag

SEQ ID NO: 6099 - DNA, 16 bp, Homo sapiens
  source 1..16: mol_type = genomic DNA
atagctcagttggtag

SEQ ID NO: 6100 - DNA, 26 bp, Homo sapiens
  source 1..26: mol_type = genomic DNA
atagctcagttggtagagcatcagac

SEQ ID NO: 6101 - DNA, 27 bp, Homo sapiens
  source 1..27: mol_type = genomic DNA
atagctcagttggtagagcatcagact

SEQ ID NO: 6102 - DNA, 31 bp, Homo sapiens
  source 1..31: mol_type = genomic DNA
atagctcagttggtagagcggaggactgtag

SEQ ID NO: 6103 - DNA, 16 bp, Homo sapiens
  source 1..16: mol_type = genomic DNA
atagctgccttccaag

SEQ ID NO: 6104 - DNA, 30 bp, Homo sapiens
  source 1..30: mol_type = genomic DNA
atagctgccttccaagcagttgacccgggt

SEQ ID NO: 6105 - DNA, 32 bp, Homo sapiens
  source 1..32: mol_type = genomic DNA
atagctgccttccaagcagttgacccgggttc

SEQ ID NO: 6106 - DNA, 16 bp, Homo sapiens
  source 1..16: mol_type = genomic DNA
ataggagcttaaaccc

SEQ ID NO: 6107 - DNA, 17 bp, Homo sapiens
  source 1..17: mol_type = genomic DNA
ataggagcttaaacccc

SEQ ID NO: 6108 - DNA, 18 bp, Homo sapiens
  source 1..18: mol_type = genomic DNA
ataggagcttaaaccccc

SEQ ID NO: 6109 - DNA, 19 bp, Homo sapiens
  source 1..19: mol_type = genomic DNA
ataggagcttaaaccccct

SEQ ID NO: 6110 - DNA, 21 bp, Homo sapiens
  source 1..21: mol_type = genomic DNA
ataggagcttaaaccccctta

SEQ ID NO: 6111 - DNA, 26 bp, Homo sapiens
  source 1..26: mol_type = genomic DNA
ataggagcttaaacccccttatttct

SEQ ID NO: 6112 - DNA, 27 bp, Homo sapiens
  source 1..27: mol_type = genomic DNA
ataggagcttaaacccccttatttcta

SEQ ID NO: 6113 - DNA, 28 bp, Homo sapiens
  source 1..28: mol_type = genomic DNA
ataggagcttaaacccccttatttctac

SEQ ID NO: 6114 - DNA, 29 bp, Homo sapiens
  source 1..29: mol_type = genomic DNA
ataggagcttaaacccccttatttctacc

SEQ ID NO: 6115 - DNA, 30 bp, Homo sapiens
  source 1..30: mol_type = genomic DNA
ataggagcttaaacccccttatttctacca

SEQ ID NO: 6116 - DNA, 26 bp, Homo sapiens
  source 1..26: mol_type = genomic DNA
ataggctaaatcctatatatcttacc

SEQ ID NO: 6117 - DNA, 27 bp, Homo sapiens
  source 1..27: mol_type = genomic DNA
ataggctaaatcctatatatcttacca

SEQ ID NO: 6118 - DNA, 16 bp, Homo sapiens
  source 1..16: mol_type = genomic DNA
ataggtggcacggaga

SEQ ID NO: 6119 - DNA, 17 bp, Homo sapiens
  source 1..17: mol_type = genomic DNA
ataggtggcacggagaa

SEQ ID NO: 6120 - DNA, 18 bp, Homo sapiens
  source 1..18: mol_type = genomic DNA
ataggtggcacggagaat

SEQ ID NO: 6121 - DNA, 20 bp, Homo sapiens
  source 1..20: mol_type = genomic DNA
ataggtggcacggagaattt

SEQ ID NO: 6122 - DNA, 21 bp, Homo sapiens
  source 1..21: mol_type = genomic DNA
ataggtggcacggagaatttt

SEQ ID NO: 6123 - DNA, 22 bp, Homo sapiens
  source 1..22: mol_type = genomic DNA
ataggtggcacggagaattttg

SEQ ID NO: 6124 - DNA, 37 bp, Homo sapiens
  source 1..37: mol_type = genomic DNA
ataggtggcacggagaattttggattctcagggatgg

SEQ ID NO: 6125 - DNA, 16 bp, Homo sapiens
  source 1..16: mol_type = genomic DNA
atagtaccgttaactt

SEQ ID NO: 6126 - DNA, 17 bp, Homo sapiens
  source 1..17: mol_type = genomic DNA
atagtaccgttaacttc

SEQ ID NO: 6127 - DNA, 18 bp, Homo sapiens
  source 1..18: mol_type = genomic DNA
atagtaccgttaacttcc

SEQ ID NO: 6128 - DNA, 19 bp, Homo sapiens
  source 1..19: mol_type = genomic DNA
atagtaccgttaacttcca

SEQ ID NO: 6129 - DNA, 22 bp, Homo sapiens
  source 1..22: mol_type = genomic DNA
atagtaccgttaacttccaatt

SEQ ID NO: 6130 - DNA, 23 bp, Homo sapiens
  source 1..23: mol_type = genomic DNA
atagtaccgttaacttccaatta

SEQ ID NO: 6131 - DNA, 33 bp, Homo sapiens
  source 1..33: mol_type = genomic DNA
atagtaccgttaacttccaattaactagttttg

SEQ ID NO: 6132 - DNA, 35 bp, Homo sapiens
  source 1..35: mol_type = genomic DNA
atagtaccgttaacttccaattaactagttttgac

SEQ ID NO: 6133 - DNA, 36 bp, Homo sapiens
  source 1..36: mol_type = genomic DNA
atagtaccgttaacttccaattaactagttttgaca

SEQ ID NO: 6134 - DNA, 37 bp, Homo sapiens
  source 1..37: mol_type = genomic DNA
atagtaccgttaacttccaattaactagttttgacaa

SEQ ID NO: 6135 - DNA, 38 bp, Homo sapiens
  source 1..38: mol_type = genomic DNA
atagtaccgttaacttccaattaactagttttgacaac

SEQ ID NO: 6136 - DNA, 22 bp, Homo sapiens
  source 1..22: mol_type = genomic DNA
atagtggtgagcatagctgcct

SEQ ID NO: 6137 - DNA, 25 bp, Homo sapiens
  source 1..25: mol_type = genomic DNA
atagtggtgagcatagctgccttcc

SEQ ID NO: 6138 - DNA, 42 bp, Homo sapiens
  source 1..42: mol_type = genomic DNA
atagtggtgagcatagctgccttccaagcagttgacccgggt

SEQ ID NO: 6139 - DNA, 17 bp, Homo sapiens
  source 1..17: mol_type = genomic DNA
atagtggtgagtatccc

SEQ ID NO: 6140 - DNA, 21 bp, Homo sapiens
  source 1..21: mol_type = genomic DNA
atagtggtgagtatccccgcc

SEQ ID NO: 6141 - DNA, 23 bp, Homo sapiens
  source 1..23: mol_type = genomic DNA
atagtggtgagtatccccgcctg

SEQ ID NO: 6142 - DNA, 24 bp, Homo sapiens
  source 1..24: mol_type = genomic DNA
atagtggtgagtatccccgcctgt

SEQ ID NO: 6143 - DNA, 25 bp, Homo sapiens
  source 1..25: mol_type = genomic DNA
atagtggtgagtatccccgcctgtc

SEQ ID NO: 6144 - DNA, 28 bp, Homo sapiens
  source 1..28: mol_type = genomic DNA
atagtggtgagtatccccgcctgtcacg

SEQ ID NO: 6145 - DNA, 19 bp, Homo sapiens
  source 1..19: mol_type = genomic DNA
atagtggttagcatagctg

SEQ ID NO: 6146 - DNA, 20 bp, Homo sapiens
  source 1..20: mol_type = genomic DNA
atagtggttagcatagctgc

SEQ ID NO: 6147 - DNA, 22 bp, Homo sapiens
  source 1..22: mol_type = genomic DNA
atagtggttagcatagctgcct

SEQ ID NO: 6148 - DNA, 16 bp, Homo sapiens
  source 1..16: mol_type = genomic DNA
atagtggttagtactc

SEQ ID NO: 6149 - DNA, 17 bp, Homo sapiens
  source 1..17: mol_type = genomic DNA
atagtggttagtactct

SEQ ID NO: 6150 - DNA, 18 bp, Homo sapiens
  source 1..18: mol_type = genomic DNA
atagtggttagtactctg

SEQ ID NO: 6151 - DNA, 19 bp, Homo sapiens
  source 1..19: mol_type = genomic DNA
atagtggttagtactctgc

SEQ ID NO: 6152 - DNA, 20 bp, Homo sapiens
  source 1..20: mol_type = genomic DNA
atagtggttagtactctgcg

SEQ ID NO: 6153 - DNA, 21 bp, Homo sapiens
  source 1..21: mol_type = genomic DNA
atagtggttagtactctgcgt

SEQ ID NO: 6154 - DNA, 22 bp, Homo sapiens
  source 1..22: mol_type = genomic DNA
atagtggttagtactctgcgtt

SEQ ID NO: 6155 - DNA, 23 bp, Homo sapiens
  source 1..23: mol_type = genomic DNA
atagtggttagtactctgcgttg

SEQ ID NO: 6156 - DNA, 24 bp, Homo sapiens
  source 1..24: mol_type = genomic DNA
atagtggttagtactctgcgttgt

SEQ ID NO: 6157 - DNA, 25 bp, Homo sapiens
  source 1..25: mol_type = genomic DNA
atagtggttagtactctgcgttgtg

SEQ ID NO: 6158 - DNA, 28 bp, Homo sapiens
  source 1..28: mol_type = genomic DNA
atagtggttagtactctgcgttgtggcc

SEQ ID NO: 6159 - DNA, 29 bp, Homo sapiens
  source 1..29: mol_type = genomic DNA
atagtggttagtactctgcgttgtggccg

SEQ ID NO: 6160 - DNA, 38 bp, Homo sapiens
  source 1..38: mol_type = genomic DNA
atagtggttagtactctgcgttgtggccgcagcaacct

SEQ ID NO: 6161 - DNA, 24 bp, Homo sapiens
  source 1..24: mol_type = genomic DNA
atagtggttagtatccccgcctgt

SEQ ID NO: 6162 - DNA, 28 bp, Homo sapiens
  source 1..28: mol_type = genomic DNA
atagtggttagtatccccgcctgtcacg

SEQ ID NO: 6163 - DNA, 16 bp, Homo sapiens
  source 1..16: mol_type = genomic DNA
atagtgtagcggttat

SEQ ID NO: 6164 - DNA, 17 bp, Homo sapiens
  source 1..17: mol_type = genomic DNA
atagtgtagcggttatc

SEQ ID NO: 6165 - DNA, 25 bp, Homo sapiens
  source 1..25: mol_type = genomic DNA
atagtgtagcggttatcacgtctgc

SEQ ID NO: 6166 - DNA, 28 bp, Homo sapiens
  source 1..28: mol_type = genomic DNA
atagtgtagcggttatcacgtctgcttt

SEQ ID NO: 6167 - DNA, 17 bp, Homo sapiens
  source 1..17: mol_type = genomic DNA
atagtgtagtggttatc

SEQ ID NO: 6168 - DNA, 23 bp, Homo sapiens
  source 1..23: mol_type = genomic DNA
atagtgtagtggttatcacgtct

SEQ ID NO: 6169 - DNA, 25 bp, Homo sapiens
  source 1..25: mol_type = genomic DNA
atagtgtagtggttatcacgtctgc

SEQ ID NO: 6170 - DNA, 26 bp, Homo sapiens
  source 1..26: mol_type = genomic DNA
atagtgtagtggttatcacgtctgct

SEQ ID NO: 6171 - DNA, 27 bp, Homo sapiens
  source 1..27: mol_type = genomic DNA
atagtgtagtggttatcacgtctgctt

SEQ ID NO: 6172 - DNA, 28 bp, Homo sapiens
  source 1..28: mol_type = genomic DNA
atagtgtagtggttatcacgtctgcttt

SEQ ID NO: 6173 - DNA, 29 bp, Homo sapiens
  source 1..29: mol_type = genomic DNA
atagtgtagtggttatcacgtctgcttta

SEQ ID NO: 6174 - DNA, 30 bp, Homo sapiens
  source 1..30: mol_type = genomic DNA
atagtgtagtggttatcacgtctgctttac

SEQ ID NO: 6175 - DNA, 27 bp, Homo sapiens
  source 1..27: mol_type = genomic DNA
atagtttaaacaaaacgaatgatttcg

SEQ ID NO: 6176 - DNA, 30 bp, Homo sapiens
  source 1..30: mol_type = genomic DNA
atagtttaaacaaaacgaatgatttcgact

SEQ ID NO: 6177 - DNA, 31 bp, Homo sapiens
  source 1..31: mol_type = genomic DNA
atagtttaaacaaaacgaatgatttcgactc

SEQ ID NO: 6178 - DNA, 18 bp, Homo sapiens
  source 1..18: mol_type = genomic DNA
atagtttaaattagaatc

SEQ ID NO: 6179 - DNA, 27 bp, Homo sapiens
  source 1..27: mol_type = genomic DNA
atagtttaaattagaatcttagctttg

SEQ ID NO: 6180 - DNA, 28 bp, Homo sapiens
  source 1..28: mol_type = genomic DNA
atagtttaaattagaatcttagctttgg

SEQ ID NO: 6181 - DNA, 28 bp, Homo sapiens
  source 1..28: mol_type = genomic DNA
atagtttaaccaaaacatcagattgtga

SEQ ID NO: 6182 - DNA, 30 bp, Homo sapiens
  source 1..30: mol_type = genomic DNA
atagtttaaccaaaacatcagattgtgaat

SEQ ID NO: 6183 - DNA, 31 bp, Homo sapiens
  source 1..31: mol_type = genomic DNA
atagtttaaccaaaacatcagattgtgaatc

SEQ ID NO: 6184 - DNA, 32 bp, Homo sapiens
  source 1..32: mol_type = genomic DNA
atagtttaaccaaaacatcagattgtgaatct

SEQ ID NO: 6185 - DNA, 34 bp, Homo sapiens
  source 1..34: mol_type = genomic DNA
atagtttaaccaaaacatcagattgtgaatctga

SEQ ID NO: 6186 - DNA, 36 bp, Homo sapiens
  source 1..36: mol_type = genomic DNA
atagtttaaccaaaacatcagattgtgaatctgaca

SEQ ID NO: 6187 - DNA, 45 bp, Homo sapiens
  source 1..45: mol_type = genomic DNA
atagtttaaccaaaacatcagattgtgaatctgacaacagaggct

SEQ ID NO: 6188 - DNA, 32 bp, Homo sapiens
  source 1..32: mol_type = genomic DNA
atatagtttaaacaaaacgaatgatttcgact

SEQ ID NO: 6189 - DNA, 35 bp, Homo sapiens
  source 1..35: mol_type = genomic DNA
atatagtttaaacaaaacgaatgatttcgactcat

SEQ ID NO: 6190 - DNA, 28 bp, Homo sapiens
  source 1..28: mol_type = genomic DNA
atatagtttaaccaaaacatcagattgt

SEQ ID NO: 6191 - DNA, 29 bp, Homo sapiens
  source 1..29: mol_type = genomic DNA
atatagtttaaccaaaacatcagattgtg

SEQ ID NO: 6192 - DNA, 30 bp, Homo sapiens
  source 1..30: mol_type = genomic DNA
atatagtttaaccaaaacatcagattgtga

SEQ ID NO: 6193 - DNA, 32 bp, Homo sapiens
  source 1..32: mol_type = genomic DNA
atatagtttaaccaaaacatcagattgtgaat

SEQ ID NO: 6194 - DNA, 33 bp, Homo sapiens
  source 1..33: mol_type = genomic DNA
atatagtttaaccaaaacatcagattgtgaatc

SEQ ID NO: 6195 - DNA, 36 bp, Homo sapiens
  source 1..36: mol_type = genomic DNA
atatagtttaaccaaaacatcagattgtgaatctga

SEQ ID NO: 6196 - DNA, 38 bp, Homo sapiens
  source 1..38: mol_type = genomic DNA
atatagtttaaccaaaacatcagattgtgaatctgaca

SEQ ID NO: 6197 - DNA, 17 bp, Homo sapiens
  source 1..17: mol_type = genomic DNA
atatcattggtcgtggt

SEQ ID NO: 6198 - DNA, 19 bp, Homo sapiens
  source 1..19: mol_type = genomic DNA
atatcattggtcgtggttg

SEQ ID NO: 6199 - DNA, 20 bp, Homo sapiens
  source 1..20: mol_type = genomic DNA
atatcattggtcgtggttgt

SEQ ID NO: 6200 - DNA, 21 bp, Homo sapiens
  source 1..21: mol_type = genomic DNA
atatcattggtcgtggttgta

SEQ ID NO: 6201 - DNA, 23 bp, Homo sapiens
  source 1..23: mol_type = genomic DNA
atatcattggtcgtggttgtagt

SEQ ID NO: 6202 - DNA, 24 bp, Homo sapiens
  source 1..24: mol_type = genomic DNA
atatcattggtcgtggttgtagtc

SEQ ID NO: 6203 - DNA, 25 bp, Homo sapiens
  source 1..25: mol_type = genomic DNA
atatcattggtcgtggttgtagtcc

SEQ ID NO: 6204 - DNA, 26 bp, Homo sapiens
  source 1..26: mol_type = genomic DNA
atatcattggtcgtggttgtagtccg

SEQ ID NO: 6205 - DNA, 27 bp, Homo sapiens
  source 1..27: mol_type = genomic DNA
atatcattggtcgtggttgtagtccgt

SEQ ID NO: 6206 - DNA, 28 bp, Homo sapiens
  source 1..28: mol_type = genomic DNA
atatcattggtcgtggttgtagtccgtg

SEQ ID NO: 6207 - DNA, 29 bp, Homo sapiens
  source 1..29: mol_type = genomic DNA
atatcattggtcgtggttgtagtccgtgc

SEQ ID NO: 6208 - DNA, 30 bp, Homo sapiens
  source 1..30: mol_type = genomic DNA
atatcattggtcgtggttgtagtccgtgcg

SEQ ID NO: 6209 - DNA, 31 bp, Homo sapiens
  source 1..31: mol_type = genomic DNA
atatcattggtcgtggttgtagtccgtgcga

SEQ ID NO: 6210 - DNA, 32 bp, Homo sapiens
  source 1..32: mol_type = genomic DNA
atatcattggtcgtggttgtagtccgtgcgag

SEQ ID NO: 6211 - DNA, 33 bp, Homo sapiens
  source 1..33: mol_type = genomic DNA
atatcattggtcgtggttgtagtccgtgcgaga

SEQ ID NO: 6212 - DNA, 34 bp, Homo sapiens
  source 1..34: mol_type = genomic DNA
atatcattggtcgtggttgtagtccgtgcgagaa

SEQ ID NO: 6213 - DNA, 35 bp, Homo sapiens
  source 1..35: mol_type = genomic DNA
atatcattggtcgtggttgtagtccgtgcgagaat

SEQ ID NO: 6214 - DNA, 36 bp, Homo sapiens
  source 1..36: mol_type = genomic DNA
atatcattggtcgtggttgtagtccgtgcgagaata

SEQ ID NO: 6215 - DNA, 37 bp, Homo sapiens
  source 1..37: mol_type = genomic DNA
atatcattggtcgtggttgtagtccgtgcgagaatac

SEQ ID NO: 6216 - DNA, 38 bp, Homo sapiens
  source 1..38: mol_type = genomic DNA
atatcattggtcgtggttgtagtccgtgcgagaatacc

SEQ ID NO: 6217 - DNA, 39 bp, Homo sapiens
  source 1..39: mol_type = genomic DNA
atatcattggtcgtggttgtagtccgtgcgagaatacca

SEQ ID NO: 6218 - DNA, 30 bp, Homo sapiens
  source 1..30: mol_type = genomic DNA
atatccgcgtgggttcgaaccccacttctg

SEQ ID NO: 6219 - DNA, 22 bp, Homo sapiens
  source 1..22: mol_type = genomic DNA
atatggtctagcggttaggatt

SEQ ID NO: 6220 - DNA, 24 bp, Homo sapiens
  source 1..24: mol_type = genomic DNA
atatggtctagcggttaggattcc

SEQ ID NO: 6221 - DNA, 25 bp, Homo sapiens
  source 1..25: mol_type = genomic DNA
atatggtctagcggttaggattcct

SEQ ID NO: 6222 - DNA, 26 bp, Homo sapiens
  source 1..26: mol_type = genomic DNA
atatggtctagcggttaggattcctg

SEQ ID NO: 6223 - DNA, 27 bp, Homo sapiens
  source 1..27: mol_type = genomic DNA
atatggtctagcggttaggattcctgg

SEQ ID NO: 6224 - DNA, 28 bp, Homo sapiens
  source 1..28: mol_type = genomic DNA
atatggtctagcggttaggattcctggt

SEQ ID NO: 6225 - DNA, 29 bp, Homo sapiens
  source 1..29: mol_type = genomic DNA
atatggtctagcggttaggattcctggtt

SEQ ID NO: 6226 - DNA, 30 bp, Homo sapiens
  source 1..30: mol_type = genomic DNA
atatggtctagcggttaggattcctggttt

SEQ ID NO: 6227 - DNA, 31 bp, Homo sapiens
  source 1..31: mol_type = genomic DNA
atatggtctagcggttaggattcctggtttt

SEQ ID NO: 6228 - DNA, 32 bp, Homo sapiens
  source 1..32: mol_type = genomic DNA
atatggtctagcggttaggattcctggttttc

SEQ ID NO: 6229 - DNA, 33 bp, Homo sapiens
  source 1..33: mol_type = genomic DNA
atatggtctagcggttaggattcctggttttca

SEQ ID NO: 6230 - DNA, 34 bp, Homo sapiens
  source 1..34: mol_type = genomic DNA
atatggtctagcggttaggattcctggttttcac

SEQ ID NO: 6231 - DNA, 35 bp, Homo sapiens
  source 1..35: mol_type = genomic DNA
atatggtctagcggttaggattcctggttttcacc

SEQ ID NO: 6232 - DNA, 36 bp, Homo sapiens
  source 1..36: mol_type = genomic DNA
atatggtctagcggttaggattcctggttttcaccc

SEQ ID NO: 6233 - DNA, 37 bp, Homo sapiens
  source 1..37: mol_type = genomic DNA
atatggtctagcggttaggattcctggttttcaccca

SEQ ID NO: 6234 - DNA, 16 bp, Homo sapiens
  source 1..16: mol_type = genomic DNA
atatgtccgcgtgggt

SEQ ID NO: 6235 - DNA, 17 bp, Homo sapiens
  source 1..17: mol_type = genomic DNA
atatgtccgcgtgggtt

SEQ ID NO: 6236 - DNA, 19 bp, Homo sapiens
  source 1..19: mol_type = genomic DNA
atatgtccgcgtgggttcg

SEQ ID NO: 6237 - DNA, 25 bp, Homo sapiens
  source 1..25: mol_type = genomic DNA
atatgtccgcgtgggttcgaacccc

SEQ ID NO: 6238 - DNA, 26 bp, Homo sapiens
  source 1..26: mol_type = genomic DNA
atatgtccgcgtgggttcgaacccca

SEQ ID NO: 6239 - DNA, 31 bp, Homo sapiens
  source 1..31: mol_type = genomic DNA
atatgtccgcgtgggttcgaaccccactcct

SEQ ID NO: 6240 - DNA, 32 bp, Homo sapiens
  source 1..32: mol_type = genomic DNA
atatgtccgcgtgggttcgaaccccactcctg

SEQ ID NO: 6241 - DNA, 37 bp, Homo sapiens
  source 1..37: mol_type = genomic DNA
atatgtccgcgtgggttcgaaccccactcctggtacc

SEQ ID NO: 6242 - DNA, 16 bp, Homo sapiens
  source 1..16: mol_type = genomic DNA
atatgtctgataaaag

SEQ ID NO: 6243 - DNA, 21 bp, Homo sapiens
  source 1..21: mol_type = genomic DNA
atatgtctgataaaagagtta

SEQ ID NO: 6244 - DNA, 22 bp, Homo sapiens
  source 1..22: mol_type = genomic DNA
atatgtctgataaaagagttac

SEQ ID NO: 6245 - DNA, 23 bp, Homo sapiens
  source 1..23: mol_type = genomic DNA
atatgtctgataaaagagttact

SEQ ID NO: 6246 - DNA, 46 bp, Homo sapiens
  source 1..46: mol_type = genomic DNA
atatgtctgataaaagagttactttgatagagtaaataataggagc

SEQ ID NO: 6247 - DNA, 16 bp, Homo sapiens
  source 1..16: mol_type = genomic DNA
atattgaattgcaaat

SEQ ID NO: 6248 - DNA, 17 bp, Homo sapiens
  source 1..17: mol_type = genomic DNA
atattgaattgcaaatt

SEQ ID NO: 6249 - DNA, 18 bp, Homo sapiens
  source 1..18: mol_type = genomic DNA
atattgaattgcaaattc

SEQ ID NO: 6250 - DNA, 19 bp, Homo sapiens
  source 1..19: mol_type = genomic DNA
atattgaattgcaaattcg

SEQ ID NO: 6251 - DNA, 29 bp, Homo sapiens
  source 1..29: mol_type = genomic DNA
atattgaattgcaaattcgaagaagcagc

SEQ ID NO: 6252 - DNA, 30 bp, Homo sapiens
  source 1..30: mol_type = genomic DNA
atattgaattgcaaattcgaagaagcagct

SEQ ID NO: 6253 - DNA, 32 bp, Homo sapiens
  source 1..32: mol_type = genomic DNA
atattgaattgcaaattcgaagaagcagcttc

SEQ ID NO: 6254 - DNA, 39 bp, Homo sapiens
  source 1..39: mol_type = genomic DNA
atattgaattgcaaattcgaagaagcagcttcaaacctg

SEQ ID NO: 6255 - DNA, 45 bp, Homo sapiens
  source 1..45: mol_type = genomic DNA
atattgaattgcaaattcgaagaagcagcttcaaacctgccgggg

SEQ ID NO: 6256 - DNA, 46 bp, Homo sapiens
  source 1..46: mol_type = genomic DNA
atattgaattgcaaattcgaagaagcagcttcaaacctgccggggc

SEQ ID NO: 6257 - DNA, 47 bp, Homo sapiens
  source 1..47: mol_type = genomic DNA
atattgaattgcaaattcgaagaagcagcttcaaacctgccggggct

SEQ ID NO: 6258 - DNA, 48 bp, Homo sapiens
  source 1..48: mol_type = genomic DNA
atattgaattgcaaattcgaagaagcagcttcaaacctgccggggctt

SEQ ID NO: 6259 - DNA, 36 bp, Homo sapiens
  source 1..36: mol_type = genomic DNA
atcaagaggtccccggttcaaatccgggtgccccct

SEQ ID NO: 6260 - DNA, 37 bp, Homo sapiens
  source 1..37: mol_type = genomic DNA
atcaagaggtccccggttcaaatccgggtgccccctc

SEQ ID NO: 6261 - DNA, 38 bp, Homo sapiens
  source 1..38: mol_type = genomic DNA
atcaagaggtccccggttcaaatccgggtgccccctcc

SEQ ID NO: 6262 - DNA, 17 bp, Homo sapiens
  source 1..17: mol_type = genomic DNA
atcaagaggtccctggt

SEQ ID NO: 6263 - DNA, 19 bp, Homo sapiens
  source 1..19: mol_type = genomic DNA
atcaagaggtccctggttc

SEQ ID NO: 6264 - DNA, 30 bp, Homo sapiens
  source 1..30: mol_type = genomic DNA
atcaagaggtccctggttcaaatccgggtg

SEQ ID NO: 6265 - DNA, 38 bp, Homo sapiens
  source 1..38: mol_type = genomic DNA
atcaagaggtccctggttcaaatccgggtgccccctcc

SEQ ID NO: 6266 - DNA, 16 bp, Homo sapiens
  source 1..16: mol_type = genomic DNA
atcaccccataaacac

SEQ ID NO: 6267 - DNA, 17 bp, Homo sapiens
  source 1..17: mol_type = genomic DNA
atcaccccataaacacc

SEQ ID NO: 6268 - DNA, 18 bp, Homo sapiens
  source 1..18: mol_type = genomic DNA
atcaccccataaacacca

SEQ ID NO: 6269 - DNA, 16 bp, Homo sapiens
  source 1..16: mol_type = genomic DNA
atcacgtcggggtcac

SEQ ID NO: 6270 - DNA, 17 bp, Homo sapiens
  source 1..17: mol_type = genomic DNA
atcacgtcggggtcacc

SEQ ID NO: 6271 - DNA, 18 bp, Homo sapiens
  source 1..18: mol_type = genomic DNA
atcacgtcggggtcacca

SEQ ID NO: 6272 - DNA, 19 bp, Homo sapiens
  source 1..19: mol_type = genomic DNA
atcacgtctgctttacacg

SEQ ID NO: 6273 - DNA, 21 bp, Homo sapiens
  source 1..21: mol_type = genomic DNA
atcacgtctgctttacacgca

SEQ ID NO: 6274 - DNA, 31 bp, Homo sapiens
  source 1..31: mol_type = genomic DNA
atcacgtctgctttacacgcagaaggtcctg

SEQ ID NO: 6275 - DNA, 16 bp, Homo sapiens
  source 1..16: mol_type = genomic DNA
atcacgttcgcctcac

SEQ ID NO: 6276 - DNA, 17 bp, Homo sapiens
  source 1..17: mol_type = genomic DNA
atcacgttcgcctcaca

SEQ ID NO: 6277 - DNA, 19 bp, Homo sapiens
  source 1..19: mol_type = genomic DNA
atcacgttcgcctcacacg

SEQ ID NO: 6278 - DNA, 20 bp, Homo sapiens
  source 1..20: mol_type = genomic DNA
atcacgttcgcctcacacgc

SEQ ID NO: 6279 - DNA, 18 bp, Homo sapiens
  source 1..18: mol_type = genomic DNA
atcagaagattccaggtt

SEQ ID NO: 6280 - DNA, 22 bp, Homo sapiens
  source 1..22: mol_type = genomic DNA
atcagaagattccaggttcgac

SEQ ID NO: 6281 - DNA, 23 bp, Homo sapiens
  source 1..23: mol_type = genomic DNA
atcagaagattccaggttcgact

SEQ ID NO: 6282 - DNA, 27 bp, Homo sapiens
  source 1..27: mol_type = genomic DNA
atcagaagattccaggttcgactcctg

SEQ ID NO: 6283 - DNA, 30 bp, Homo sapiens
  source 1..30: mol_type = genomic DNA
atcagaagattccaggttcgactcctggct

SEQ ID NO: 6284 - DNA, 33 bp, Homo sapiens
  source 1..33: mol_type = genomic DNA
atcagaagattccaggttcgactcctggctggc

SEQ ID NO: 6285 - DNA, 34 bp, Homo sapiens
  source 1..34: mol_type = genomic DNA
atcagaagattccaggttcgactcctggctggct

SEQ ID NO: 6286 - DNA, 35 bp, Homo sapiens
  source 1..35: mol_type = genomic DNA
atcagaagattccaggttcgactcctggctggctc

SEQ ID NO: 6287 - DNA, 36 bp, Homo sapiens
  source 1..36: mol_type = genomic DNA
atcagaagattccaggttcgactcctggctggctcg

SEQ ID NO: 6288 - DNA, 37 bp, Homo sapiens
  source 1..37: mol_type = genomic DNA
atcagaagattccaggttcgactcctggctggctcgc

SEQ ID NO: 6289 - DNA, 38 bp, Homo sapiens
  source 1..38: mol_type = genomic DNA
atcagaagattccaggttcgactcctggctggctcgcc

SEQ ID NO: 6290 - DNA, 39 bp, Homo sapiens
  source 1..39: mol_type = genomic DNA
atcagaagattccaggttcgactcctggctggctcgcca

SEQ ID NO: 6291 - DNA, 19 bp, Homo sapiens
  source 1..19: mol_type = genomic DNA
atcagaagattctaggttc

SEQ ID NO: 6292 - DNA, 22 bp, Homo sapiens
  source 1..22: mol_type = genomic DNA
atcagaagattctaggttcgac

SEQ ID NO: 6293 - DNA, 23 bp, Homo sapiens
  source 1..23: mol_type = genomic DNA
atcagaagattctaggttcgact

SEQ ID NO: 6294 - DNA, 25 bp, Homo sapiens
  source 1..25: mol_type = genomic DNA
atcagaagattctaggttcgactcc

SEQ ID NO: 6295 - DNA, 27 bp, Homo sapiens
  source 1..27: mol_type = genomic DNA
atcagaagattctaggttcgactcctg

SEQ ID NO: 6296 - DNA, 29 bp, Homo sapiens
  source 1..29: mol_type = genomic DNA
atcagaagattctaggttcgactcctggc

SEQ ID NO: 6297 - DNA, 33 bp, Homo sapiens
  source 1..33: mol_type = genomic DNA
atcagaagattctaggttcgactcctggctggc

SEQ ID NO: 6298 - DNA, 35 bp, Homo sapiens
  source 1..35: mol_type = genomic DNA
atcagaagattctaggttcgactcctggctggctc

SEQ ID NO: 6299 - DNA, 36 bp, Homo sapiens
  source 1..36: mol_type = genomic DNA
atcagaagattctaggttcgactcctggctggctcg

SEQ ID NO: 6300 - DNA, 37 bp, Homo sapiens
  source 1..37: mol_type = genomic DNA
atcagaagattctaggttcgactcctggctggctcgc

SEQ ID NO: 6301 - DNA, 38 bp, Homo sapiens
  source 1..38: mol_type = genomic DNA
atcagaagattctaggttcgactcctggctggctcgcc

SEQ ID NO: 6302 - DNA, 39 bp, Homo sapiens
  source 1..39: mol_type = genomic DNA
atcagaagattctaggttcgactcctggctggctcgcca

SEQ ID NO: 6303 - DNA, 17 bp, Homo sapiens
  source 1..17: mol_type = genomic DNA
atcagaagattgagggt

SEQ ID NO: 6304 - DNA, 19 bp, Homo sapiens
  source 1..19: mol_type = genomic DNA
atcagaagattgagggttc

SEQ ID NO: 6305 - DNA, 20 bp, Homo sapiens
  source 1..20: mol_type = genomic DNA
atcagaagattgagggttcg

SEQ ID NO: 6306 - DNA, 38 bp, Homo sapiens
  source 1..38: mol_type = genomic DNA
atcagaagattgagggttcgaatccctccgtggttacc

SEQ ID NO: 6307 - DNA, 38 bp, Homo sapiens
  source 1..38: mol_type = genomic DNA
atcagaagattgagggttcgaatcccttcgtggttacc

SEQ ID NO: 6308 - DNA, 36 bp, Homo sapiens
  source 1..36: mol_type = genomic DNA
atcagaagattgagggttcgaatcccttcgtggttg

SEQ ID NO: 6309 - DNA, 37 bp, Homo sapiens
  source 1..37: mol_type = genomic DNA
atcagaagattgagggttcgaatcccttcgtggttgc

SEQ ID NO: 6310 - DNA, 38 bp, Homo sapiens
  source 1..38: mol_type = genomic DNA
atcagaagattgagggttcgaatcccttcgtggttgcc

SEQ ID NO: 6311 - DNA, 39 bp, Homo sapiens
  source 1..39: mol_type = genomic DNA
atcagaagattgagggttcgaatcccttcgtggttgcca

SEQ ID NO: 6312 - DNA, 24 bp, Homo sapiens
  source 1..24: mol_type = genomic DNA
atcagaagattgagggttcgagtc

SEQ ID NO: 6313 - DNA, 34 bp, Homo sapiens
  source 1..34: mol_type = genomic DNA
atcagaagattgagggttcgagtcccttcgtggt

SEQ ID NO: 6314 - DNA, 35 bp, Homo sapiens
  source 1..35: mol_type = genomic DNA
atcagaagattgagggttcgagtcccttcgtggtc

SEQ ID NO: 6315 - DNA, 36 bp, Homo sapiens
  source 1..36: mol_type = genomic DNA
atcagaagattgagggttcgagtcccttcgtggtcg

SEQ ID NO: 6316 - DNA, 37 bp, Homo sapiens
  source 1..37: mol_type = genomic DNA
atcagaagattgagggttcgagtcccttcgtggtcgc

SEQ ID NO: 6317 - DNA, 38 bp, Homo sapiens
  source 1..38: mol_type = genomic DNA
atcagaagattgagggttcgagtcccttcgtggtcgcc

SEQ ID NO: 6318 - DNA, 39 bp, Homo sapiens
  source 1..39: mol_type = genomic DNA
atcagaagattgagggttcgagtcccttcgtggtcgcca

SEQ ID NO: 6319 - DNA, 19 bp, Homo sapiens
  source 1..19: mol_type = genomic DNA
atcagaagattgcaggttc

SEQ ID NO: 6320 - DNA, 20 bp, Homo sapiens
  source 1..20: mol_type = genomic DNA
atcagaagattgcaggttcg

SEQ ID NO: 6321 - DNA, 27 bp, Homo sapiens
  source 1..27: mol_type = genomic DNA
atcagaagattgcaggttcgagtcctg

SEQ ID NO: 6322 - DNA, 33 bp, Homo sapiens
  source 1..33: mol_type = genomic DNA
atcagaagattgcaggttcgagtcctgccgcgg

SEQ ID NO: 6323 - DNA, 35 bp, Homo sapiens
  source 1..35: mol_type = genomic DNA
atcagaagattgcaggttcgagtcctgccgcggtc

SEQ ID NO: 6324 - DNA, 36 bp, Homo sapiens
  source 1..36: mol_type = genomic DNA
atcagaagattgcaggttcgagtcctgccgcggtcg

SEQ ID NO: 6325 - DNA, 37 bp, Homo sapiens
  source 1..37: mol_type = genomic DNA
atcagaagattgcaggttcgagtcctgccgcggtcgc

SEQ ID NO: 6326 - DNA, 38 bp, Homo sapiens
  source 1..38: mol_type = genomic DNA
atcagaagattgcaggttcgagtcctgccgcggtcgcc

SEQ ID NO: 6327 - DNA, 39 bp, Homo sapiens
  source 1..39: mol_type = genomic DNA
atcagaagattgcaggttcgagtcctgccgcggtcgcca

SEQ ID NO: 6328 - DNA, 16 bp, Homo sapiens
  source 1..16: mol_type = genomic DNA
atcagaaggctgcgtg

SEQ ID NO: 6329 - DNA, 19 bp, Homo sapiens
  source 1..19: mol_type = genomic DNA
atcagaaggctgcgtgttc

SEQ ID NO: 6330 - DNA, 20 bp, Homo sapiens
  source 1..20: mol_type = genomic DNA
atcagaaggctgcgtgttcg

SEQ ID NO: 6331 - DNA, 33 bp, Homo sapiens
  source 1..33: mol_type = genomic DNA
atcagaaggctgcgtgttcgaatcacgtcgggg

SEQ ID NO: 6332 - DNA, 34 bp, Homo sapiens
  source 1..34: mol_type = genomic DNA
atcagaaggctgcgtgttcgaatcacgtcggggt

SEQ ID NO: 6333 - DNA, 35 bp, Homo sapiens
  source 1..35: mol_type = genomic DNA
atcagaaggctgcgtgttcgaatcacgtcggggtc

SEQ ID NO: 6334 - DNA, 36 bp, Homo sapiens
  source 1..36: mol_type = genomic DNA
atcagaaggctgcgtgttcgaatcacgtcggggtca

SEQ ID NO: 6335 - DNA, 37 bp, Homo sapiens
  source 1..37: mol_type = genomic DNA
atcagaaggctgcgtgttcgaatcacgtcggggtcac

SEQ ID NO: 6336 - DNA, 38 bp, Homo sapiens
  source 1..38: mol_type = genomic DNA
atcagaaggctgcgtgttcgaatcacgtcggggtcacc

SEQ ID NO: 6337 - DNA, 39 bp, Homo sapiens
  source 1..39: mol_type = genomic DNA
atcagaaggctgcgtgttcgaatcacgtcggggtcacca

SEQ ID NO: 6338 - DNA, 17 bp, Homo sapiens
  source 1..17: mol_type = genomic DNA
atcagaaggttgcgtgt

SEQ ID NO: 6339 - DNA, 18 bp, Homo sapiens
  source 1..18: mol_type = genomic DNA
atcagaaggttgcgtgtt

SEQ ID NO: 6340 - DNA, 19 bp, Homo sapiens
  source 1..19: mol_type = genomic DNA
atcagaaggttgcgtgttc

SEQ ID NO: 6341 - DNA, 20 bp, Homo sapiens
  source 1..20: mol_type = genomic DNA
atcagaaggttgcgtgttca

SEQ ID NO: 6342 - DNA, 33 bp, Homo sapiens
  source 1..33: mol_type = genomic DNA
atcagaaggttgcgtgttcaaatcacgtcgggg

SEQ ID NO: 6343 - DNA, 35 bp, Homo sapiens
  source 1..35: mol_type = genomic DNA
atcagaaggttgcgtgttcaaatcacgtcggggtc

SEQ ID NO: 6344 - DNA, 36 bp, Homo sapiens
  source 1..36: mol_type = genomic DNA
atcagaaggttgcgtgttcaaatcacgtcggggtca

SEQ ID NO: 6345 - DNA, 37 bp, Homo sapiens
  source 1..37: mol_type = genomic DNA
atcagaaggttgcgtgttcaaatcacgtcggggtcac

SEQ ID NO: 6346 - DNA, 38 bp, Homo sapiens
  source 1..38: mol_type = genomic DNA
atcagaaggttgcgtgttcaaatcacgtcggggtcacc

SEQ ID NO: 6347 - DNA, 39 bp, Homo sapiens
  source 1..39: mol_type = genomic DNA
atcagaaggttgcgtgttcaaatcacgtcggggtcacca

SEQ ID NO: 6348 - DNA, 32 bp, Homo sapiens
  source 1..32: mol_type = genomic DNA
atcagaaggttgcgtgttcaagtcacgtcggg

SEQ ID NO: 6349 - DNA, 33 bp, Homo sapiens
  source 1..33: mol_type = genomic DNA
atcagaaggttgcgtgttcaagtcacgtcgggg

SEQ ID NO: 6350 - DNA, 34 bp, Homo sapiens
  source 1..34: mol_type = genomic DNA
atcagaaggttgcgtgttcaagtcacgtcggggt

SEQ ID NO: 6351 - DNA, 35 bp, Homo sapiens
  source 1..35: mol_type = genomic DNA
atcagaaggttgcgtgttcaagtcacgtcggggtc

SEQ ID NO: 6352 - DNA, 36 bp, Homo sapiens
  source 1..36: mol_type = genomic DNA
atcagaaggttgcgtgttcaagtcacgtcggggtca

SEQ ID NO: 6353 - DNA, 37 bp, Homo sapiens
  source 1..37: mol_type = genomic DNA
atcagaaggttgcgtgttcaagtcacgtcggggtcac

SEQ ID NO: 6354 - DNA, 38 bp, Homo sapiens
  source 1..38: mol_type = genomic DNA
atcagaaggttgcgtgttcaagtcacgtcggggtcacc

SEQ ID NO: 6355 - DNA, 39 bp, Homo sapiens
  source 1..39: mol_type = genomic DNA
atcagaaggttgcgtgttcaagtcacgtcggggtcacca

SEQ ID NO: 6356 - DNA, 16 bp, Homo sapiens
  source 1..16: mol_type = genomic DNA
atcagattgtgaatct

SEQ ID NO: 6357 - DNA, 17 bp, Homo sapiens
  source 1..17: mol_type = genomic DNA
atcagattgtgaatctg

SEQ ID NO: 6358 - DNA, 18 bp, Homo sapiens
  source 1..18: mol_type = genomic DNA
atcagattgtgaatctga

SEQ ID NO: 6359 - DNA, 19 bp, Homo sapiens
  source 1..19: mol_type = genomic DNA
atcagattgtgaatctgac

SEQ ID NO: 6360 - DNA, 20 bp, Homo sapiens
  source 1..20: mol_type = genomic DNA
atcagattgtgaatctgaca

SEQ ID NO: 6361 - DNA, 22 bp, Homo sapiens
  source 1..22: mol_type = genomic DNA
atcagattgtgaatctgacaac

SEQ ID NO: 6362 - DNA, 24 bp, Homo sapiens
  source 1..24: mol_type = genomic DNA
atcagattgtgaatctgacaacag

SEQ ID NO: 6363 - DNA, 25 bp, Homo sapiens
  source 1..25: mol_type = genomic DNA
atcagattgtgaatctgacaacaga

SEQ ID NO: 6364 - DNA, 26 bp, Homo sapiens
  source 1..26: mol_type = genomic DNA
atcagattgtgaatctgacaacagag

SEQ ID NO: 6365 - DNA, 27 bp, Homo sapiens
  source 1..27: mol_type = genomic DNA
atcagattgtgaatctgacaacagagg

SEQ ID NO: 6366 - DNA, 28 bp, Homo sapiens
  source 1..28: mol_type = genomic DNA
atcagattgtgaatctgacaacagaggc

SEQ ID NO: 6367 - DNA, 29 bp, Homo sapiens
  source 1..29: mol_type = genomic DNA
atcagattgtgaatctgacaacagaggct

SEQ ID NO: 6368 - DNA, 30 bp, Homo sapiens
  source 1..30: mol_type = genomic DNA
atcagattgtgaatctgacaacagaggctt

SEQ ID NO: 6369 - DNA, 31 bp, Homo sapiens
  source 1..31: mol_type = genomic DNA
atcagattgtgaatctgacaacagaggctta

SEQ ID NO: 6370 - DNA, 32 bp, Homo sapiens
  source 1..32: mol_type = genomic DNA
atcagattgtgaatctgacaacagaggcttac

SEQ ID NO: 6371 - DNA, 33 bp, Homo sapiens
  source 1..33: mol_type = genomic DNA
atcagattgtgaatctgacaacagaggcttacg

SEQ ID NO: 6372 - DNA, 34 bp, Homo sapiens
  source 1..34: mol_type = genomic DNA
atcagattgtgaatctgacaacagaggcttacga

SEQ ID NO: 6373 - DNA, 35 bp, Homo sapiens
  source 1..35: mol_type = genomic DNA
atcagattgtgaatctgacaacagaggcttacgac

SEQ ID NO: 6374 - DNA, 36 bp, Homo sapiens
  source 1..36: mol_type = genomic DNA
atcagattgtgaatctgacaacagaggcttacgacc

SEQ ID NO: 6375 - DNA, 37 bp, Homo sapiens
  source 1..37: mol_type = genomic DNA
atcagattgtgaatctgacaacagaggcttacgaccc

SEQ ID NO: 6376 - DNA, 38 bp, Homo sapiens
  source 1..38: mol_type = genomic DNA
atcagattgtgaatctgacaacagaggcttacgacccc

SEQ ID NO: 6377 - DNA, 39 bp, Homo sapiens
  source 1..39: mol_type = genomic DNA
atcagattgtgaatctgacaacagaggcttacgacccct

SEQ ID NO: 6378 - DNA, 40 bp, Homo sapiens
  source 1..40: mol_type = genomic DNA
atcagattgtgaatctgacaacagaggcttacgacccctt

SEQ ID NO: 6379 - DNA, 41 bp, Homo sapiens
  source 1..41: mol_type = genomic DNA
atcagattgtgaatctgacaacagaggcttacgacccctta

SEQ ID NO: 6380 - DNA, 42 bp, Homo sapiens
  source 1..42: mol_type = genomic DNA
atcagattgtgaatctgacaacagaggcttacgaccccttat

SEQ ID NO: 6381 - DNA, 43 bp, Homo sapiens
  source 1..43: mol_type = genomic DNA
atcagattgtgaatctgacaacagaggcttacgaccccttatt

SEQ ID NO: 6382 - DNA, 47 bp, Homo sapiens
  source 1..47: mol_type = genomic DNA
atcagattgtgaatctgacaacagaggcttacgaccccttatttacc

SEQ ID NO: 6383 - DNA, 48 bp, Homo sapiens
  source 1..48: mol_type = genomic DNA
atcagattgtgaatctgacaacagaggcttacgaccccttatttaccc

SEQ ID NO: 6384 - DNA, 25 bp, Homo sapiens
  source 1..25: mol_type = genomic DNA
atcagcctccggagctggggattgt

SEQ ID NO: 6385 - DNA, 16 bp, Homo sapiens
  source 1..16: mol_type = genomic DNA
atcatatttaccaacc

SEQ ID NO: 6386 - DNA, 17 bp, Homo sapiens
  source 1..17: mol_type = genomic DNA
atcatatttaccaacca

SEQ ID NO: 6387 - DNA, 23 bp, Homo sapiens
  source 1..23: mol_type = genomic DNA
atcatgcaagattcccattcttg

SEQ ID NO: 6388 - DNA, 33 bp, Homo sapiens
  source 1..33: mol_type = genomic DNA
atcatgcaagattcccattcttgcgacccgggt

SEQ ID NO: 6389 - DNA, 34 bp, Homo sapiens
  source 1..34: mol_type = genomic DNA
atcatgcaagattcccattcttgcgacccgggtt

SEQ ID NO: 6390 - DNA, 36 bp, Homo sapiens
  source 1..36: mol_type = genomic DNA
atcatgcaagattcccattcttgcgacccgggttcg

SEQ ID NO: 6391 - DNA, 17 bp, Homo sapiens
  source 1..17: mol_type = genomic DNA
atcattggtcgtggttg

SEQ ID NO: 6392 - DNA, 18 bp, Homo sapiens
  source 1..18: mol_type = genomic DNA
atcattggtcgtggttgt

SEQ ID NO: 6393 - DNA, 19 bp, Homo sapiens
  source 1..19: mol_type = genomic DNA
atcattggtcgtggttgta

SEQ ID NO: 6394 - DNA, 20 bp, Homo sapiens
  source 1..20: mol_type = genomic DNA
atcattggtcgtggttgtag

SEQ ID NO: 6395 - DNA, 21 bp, Homo sapiens
  source 1..21: mol_type = genomic DNA
atcattggtcgtggttgtagt

SEQ ID NO: 6396 - DNA, 22 bp, Homo sapiens
  source 1..22: mol_type = genomic DNA
atcattggtcgtggttgtagtc

SEQ ID NO: 6397 - DNA, 23 bp, Homo sapiens
  source 1..23: mol_type = genomic DNA
atcattggtcgtggttgtagtcc

SEQ ID NO: 6398 - DNA, 24 bp, Homo sapiens
  source 1..24: mol_type = genomic DNA
atcattggtcgtggttgtagtccg

SEQ ID NO: 6399 - DNA, 25 bp, Homo sapiens
  source 1..25: mol_type = genomic DNA
atcattggtcgtggttgtagtccgt

SEQ ID NO: 6400 - DNA, 26 bp, Homo sapiens
  source 1..26: mol_type = genomic DNA
atcattggtcgtggttgtagtccgtg

SEQ ID NO: 6401 - DNA, 27 bp, Homo sapiens
  source 1..27: mol_type = genomic DNA
atcattggtcgtggttgtagtccgtgc

SEQ ID NO: 6402 - DNA, 28 bp, Homo sapiens
  source 1..28: mol_type = genomic DNA
atcattggtcgtggttgtagtccgtgcg

SEQ ID NO: 6403 - DNA, 29 bp, Homo sapiens
  source 1..29: mol_type = genomic DNA
atcattggtcgtggttgtagtccgtgcga

SEQ ID NO: 6404 - DNA, 30 bp, Homo sapiens
  source 1..30: mol_type = genomic DNA
atcattggtcgtggttgtagtccgtgcgag

SEQ ID NO: 6405 - DNA, 31 bp, Homo sapiens
  source 1..31: mol_type = genomic DNA
atcattggtcgtggttgtagtccgtgcgaga

SEQ ID NO: 6406 - DNA, 32 bp, Homo sapiens
  source 1..32: mol_type = genomic DNA
atcattggtcgtggttgtagtccgtgcgagaa

SEQ ID NO: 6407 - DNA, 33 bp, Homo sapiens
  source 1..33: mol_type = genomic DNA
atcattggtcgtggttgtagtccgtgcgagaat

SEQ ID NO: 6408 - DNA, 34 bp, Homo sapiens
  source 1..34: mol_type = genomic DNA
atcattggtcgtggttgtagtccgtgcgagaata

SEQ ID NO: 6409 - DNA, 35 bp, Homo sapiens
  source 1..35: mol_type = genomic DNA
atcattggtcgtggttgtagtccgtgcgagaatac

SEQ ID NO: 6410 - DNA, 36 bp, Homo sapiens
  source 1..36: mol_type = genomic DNA
atcattggtcgtggttgtagtccgtgcgagaatacc

SEQ ID NO: 6411 - DNA, 37 bp, Homo sapiens
  source 1..37: mol_type = genomic DNA
atcattggtcgtggttgtagtccgtgcgagaatacca

SEQ ID NO: 6412 - DNA, 16 bp, Homo sapiens
  source 1..16: mol_type = genomic DNA
atccaatggacatatg

SEQ ID NO: 6413 - DNA, 17 bp, Homo sapiens
  source 1..17: mol_type = genomic DNA
atccaatggacatatgt

SEQ ID NO: 6414 - DNA, 39 bp, Homo sapiens
  source 1..39: mol_type = genomic DNA
atccaatggacatatgtccgcgtgggttcgaaccccact

SEQ ID NO: 6415 - DNA, 48 bp, Homo sapiens
  source 1..48: mol_type = genomic DNA
atccaatggacatatgtccgcgtgggttcgaaccccactcctggtacc

SEQ ID NO: 6416 - DNA, 36 bp, Homo sapiens
  source 1..36: mol_type = genomic DNA
atccaatggggtctccccgcgcaggttcgaaccctg

SEQ ID NO: 6417 - DNA, 36 bp, Homo sapiens
  source 1..36: mol_type = genomic DNA
atccagaggttccgggttcgagtcccggcagagatg

SEQ ID NO: 6418 - DNA, 37 bp, Homo sapiens
  source 1..37: mol_type = genomic DNA
atccagaggttccgggttcgagtcccggcagagatgc

SEQ ID NO: 6419 - DNA, 38 bp, Homo sapiens
  source 1..38: mol_type = genomic DNA
atccagaggttccgggttcgagtcccggcagagatgcc

SEQ ID NO: 6420 - DNA, 39 bp, Homo sapiens
  source 1..39: mol_type = genomic DNA
atccagaggttccgggttcgagtcccggcagagatgcca

SEQ ID NO: 6421 - DNA, 17 bp, Homo sapiens
  source 1..17: mol_type = genomic DNA
atccagcgatccgagtt

SEQ ID NO: 6422 - DNA, 18 bp, Homo sapiens
  source 1..18: mol_type = genomic DNA
atccagcgatccgagttc

SEQ ID NO: 6423 - DNA, 19 bp, Homo sapiens
  source 1..19: mol_type = genomic DNA
atccagcgatccgagttca

SEQ ID NO: 6424 - DNA, 21 bp, Homo sapiens
  source 1..21: mol_type = genomic DNA
atccagcgatccgagttcaaa

SEQ ID NO: 6425 - DNA, 22 bp, Homo sapiens
  source 1..22: mol_type = genomic DNA
atccagcgatccgagttcaaat

SEQ ID NO: 6426 - DNA, 23 bp, Homo sapiens
  source 1..23: mol_type = genomic DNA
atccagcgatccgagttcaaatc

SEQ ID NO: 6427 - DNA, 24 bp, Homo sapiens
  source 1..24: mol_type = genomic DNA
atccagcgatccgagttcaaatct

SEQ ID NO: 6428 - DNA, 35 bp, Homo sapiens
  source 1..35: mol_type = genomic DNA
atccagcgatccgagttcaaatctcggtggaacct

SEQ ID NO: 6429 - DNA, 36 bp, Homo sapiens
  source 1..36: mol_type = genomic DNA
atccagcgatccgagttcaaatctcggtggaacctc

SEQ ID NO: 6430 - DNA, 37 bp, Homo sapiens
  source 1..37: mol_type = genomic DNA
atccagcgatccgagttcaaatctcggtggaacctcc

SEQ ID NO: 6431 - DNA, 38 bp, Homo sapiens
  source 1..38: mol_type = genomic DNA
atccagcgatccgagttcaaatctcggtggaacctcca

SEQ ID NO: 6432 - DNA, 32 bp, Homo sapiens
  source 1..32: mol_type = genomic DNA
atccagcgatccgagttcaaatctcggtggga

SEQ ID NO: 6433 - DNA, 33 bp, Homo sapiens
  source 1..33: mol_type = genomic DNA
atccagcgatccgagttcaaatctcggtgggac

SEQ ID NO: 6434 - DNA, 35 bp, Homo sapiens
  source 1..35: mol_type = genomic DNA
atccagcgatccgagttcaaatctcggtgggacct

SEQ ID NO: 6435 - DNA, 36 bp, Homo sapiens
  source 1..36: mol_type = genomic DNA
atccagcgatccgagttcaaatctcggtgggacctc

SEQ ID NO: 6436 - DNA, 37 bp, Homo sapiens
  source 1..37: mol_type = genomic DNA
atccagcgatccgagttcaaatctcggtgggacctcc

SEQ ID NO: 6437 - DNA, 21 bp, Homo sapiens
  source 1..21: mol_type = genomic DNA
atccagcgatccgagttcgag

SEQ ID NO: 6438 - DNA, 22 bp, Homo sapiens
  source 1..22: mol_type = genomic DNA
atccagcgatccgagttcgagt

SEQ ID NO: 6439 - DNA, 23 bp, Homo sapiens
  source 1..23: mol_type = genomic DNA
atccagcgatccgagttcgagtc

SEQ ID NO: 6440 - DNA, 24 bp, Homo sapiens
  source 1..24: mol_type = genomic DNA
atccagcgatccgagttcgagtct

SEQ ID NO: 6441 - DNA, 35 bp, Homo sapiens
  source 1..35: mol_type = genomic DNA
atccagcgatccgagttcgagtctcggtggaacct

SEQ ID NO: 6442 - DNA, 36 bp, Homo sapiens
  source 1..36: mol_type = genomic DNA
atccagcgatccgagttcgagtctcggtggaacctc

SEQ ID NO: 6443 - DNA, 37 bp, Homo sapiens
  source 1..37: mol_type = genomic DNA
atccagcgatccgagttcgagtctcggtggaacctcc

SEQ ID NO: 6444 - DNA, 16 bp, Homo sapiens
  source 1..16: mol_type = genomic DNA
atccaggtgccccctc

SEQ ID NO: 6445 - DNA, 17 bp, Homo sapiens
  source 1..17: mol_type = genomic DNA
atccaggtgccccctcc

SEQ ID NO: 6446 - DNA, 18 bp, Homo sapiens
  source 1..18: mol_type = genomic DNA
atccaggtgccccctcca

SEQ ID NO: 6447 - DNA, 27 bp, Homo sapiens
  source 1..27: mol_type = genomic DNA
atccattggggtctccccgcgcaggtt

SEQ ID NO: 6448 - DNA, 39 bp, Homo sapiens
  source 1..39: mol_type = genomic DNA
atccattggggtctccccgcgcaggttcgaatcctgccg

SEQ ID NO: 6449 - DNA, 47 bp, Homo sapiens
  source 1..47: mol_type = genomic DNA
atccattggggtctccccgcgcaggttcgaatcctgccgactacgcc

SEQ ID NO: 6450 - DNA, 48 bp, Homo sapiens
  source 1..48: mol_type = genomic DNA
atccattggggtctccccgcgcaggttcgaatcctgccgactacgcca

SEQ ID NO: 6451 - DNA, 22 bp, Homo sapiens
  source 1..22: mol_type = genomic DNA
atccattggggtttccccgcgc

SEQ ID NO: 6452 - DNA, 38 bp, Homo sapiens
  source 1..38: mol_type = genomic DNA
atccattggggtttccccgcgcaggttcgaatcctgcc

SEQ ID NO: 6453 - DNA, 42 bp, Homo sapiens
  source 1..42: mol_type = genomic DNA
atccattggggtttccccgcgcaggttcgaatcctgccgact

SEQ ID NO: 6454 - DNA, 46 bp, Homo sapiens
  source 1..46: mol_type = genomic DNA
atccattggggtttccccgcgcaggttcgaatcctgccgactacgc

SEQ ID NO: 6455 - DNA, 47 bp, Homo sapiens
  source 1..47: mol_type = genomic DNA
atccattggggtttccccgcgcaggttcgaatcctgccgactacgcc

SEQ ID NO: 6456 - DNA, 47 bp, Homo sapiens; identical to SEQ ID NO: 6455
  source 1..47: mol_type = genomic DNA

SEQ ID NO: 6457 - DNA, 16 bp, Homo sapiens
  source 1..16: mol_type = genomic DNA
atccattggtcttagg

SEQ ID NO: 6458 - DNA, 17 bp, Homo sapiens
  source 1..17: mol_type = genomic DNA
atccattggtcttaggc

SEQ ID NO: 6459 - DNA, 18 bp, Homo sapiens
  source 1..18: mol_type = genomic DNA
atccattggtcttaggcc

SEQ ID NO: 6460 - DNA, 19 bp, Homo sapiens
  source 1..19: mol_type = genomic DNA
atccattggtcttaggccc

SEQ ID NO: 6461 - DNA, 20 bp, Homo sapiens
  source 1..20: mol_type = genomic DNA
atccattggtcttaggcccc

SEQ ID NO: 6462 - DNA, 21 bp, Homo sapiens
  source 1..21: mol_type = genomic DNA
atccattggtcttaggcccca

SEQ ID NO: 6463 - DNA, 24 bp, Homo sapiens
  source 1..24: mol_type = genomic DNA
atccattggtcttaggccccaaaa

SEQ ID NO: 6464 - DNA, 25 bp, Homo sapiens
  source 1..25: mol_type = genomic DNA
atccattggtcttaggccccaaaaa

SEQ ID NO: 6465 - DNA, 26 bp, Homo sapiens
  source 1..26: mol_type = genomic DNA
atccattggtcttaggccccaaaaat

SEQ ID NO: 6466 - DNA, 27 bp, Homo sapiens
  source 1..27: mol_type = genomic DNA
atccattggtcttaggccccaaaaatt

SEQ ID NO: 6467 - DNA, 28 bp, Homo sapiens
  source 1..28: mol_type = genomic DNA
atccattggtcttaggccccaaaaattt

SEQ ID NO: 6468 - DNA, 29 bp, Homo sapiens
  source 1..29: mol_type = genomic DNA
atccattggtcttaggccccaaaaatttt

SEQ ID NO: 6469 - DNA, 30 bp, Homo sapiens
  source 1..30: mol_type = genomic DNA
atccattggtcttaggccccaaaaattttg

SEQ ID NO: 6470 - DNA, 31 bp, Homo sapiens
  source 1..31: mol_type = genomic DNA
atccattggtcttaggccccaaaaattttgg

SEQ ID NO: 6471 - DNA, 32 bp, Homo sapiens
  source 1..32: mol_type = genomic DNA
atccattggtcttaggccccaaaaattttggt

SEQ ID NO: 6472 - DNA, 33 bp, Homo sapiens
  source 1..33: mol_type = genomic DNA
atccattggtcttaggccccaaaaattttggtg

SEQ ID NO: 6473 - DNA, 34 bp, Homo sapiens
  source 1..34: mol_type = genomic DNA
atccattggtcttaggccccaaaaattttggtgc

SEQ ID NO: 6474 - DNA, 35 bp, Homo sapiens
  source 1..35: mol_type = genomic DNA
atccattggtcttaggccccaaaaattttggtgca

SEQ ID NO: 6475 - DNA, 38 bp, Homo sapiens
  source 1..38: mol_type = genomic DNA
atccattggtcttaggccccaaaaattttggtgcaact

SEQ ID NO: 6476 - DNA, 39 bp, Homo sapiens
  source 1..39: mol_type = genomic DNA
atccattggtcttaggccccaaaaattttggtgcaactc

SEQ ID NO: 6477 - DNA, 40 bp, Homo sapiens
  source 1..40: mol_type = genomic DNA
atccattggtcttaggccccaaaaattttggtgcaactcc

SEQ ID NO: 6478 - DNA, 45 bp, Homo sapiens
  source 1..45: mol_type = genomic DNA
atccattggtcttaggccccaaaaattttggtgcaactccaaata

SEQ ID NO: 6479 - DNA, 48 bp, Homo sapiens
  source 1..48: mol_type = genomic DNA
atccattggtcttaggccccaaaaattttggtgcaactccaaataaaa

SEQ ID NO: 6480 - DNA, 47 bp, Homo sapiens
  source 1..47: mol_type = genomic DNA
atccattgtgctctgcacgcgtgggttcgaatcccatcctcgtcgcc

SEQ ID NO: 6481 - DNA, 39 bp, Homo sapiens
  source 1..39: mol_type = genomic DNA
atccattgtgctttgcacgcgtgggttcgaatcccatcc

SEQ ID NO: 6482 - DNA, 40 bp, Homo sapiens
  source 1..40: mol_type = genomic DNA
atccattgtgctttgcacgcgtgggttcgaatcccatcct

SEQ ID NO: 6483 - DNA, 46 bp, Homo sapiens
  source 1..46: mol_type = genomic DNA
atccattgtgctttgcacgcgtgggttcgaatcccatcctcgtcgc

SEQ ID NO: 6484 - DNA, 47 bp, Homo sapiens
  source 1..47: mol_type = genomic DNA
atccattgtgctttgcacgcgtgggttcgaatcccatcctcgtcgcc

SEQ ID NO: 6485 - DNA, 48 bp, Homo sapiens
  source 1..48: mol_type = genomic DNA
atccattgtgctttgcacgcgtgggttcgaatcccatcctcgtcgcca

SEQ ID NO: 6486 - DNA, 16 bp, Homo sapiens
  source 1..16: mol_type = genomic DNA
atcccaccactgccac

SEQ ID NO: 6487 - DNA, 17 bp, Homo sapiens
  source 1..17: mol_type = genomic DNA
atcccaccactgccacc

SEQ ID NO: 6488 - DNA, 18 bp, Homo sapiens
  source 1..18: mol_type = genomic DNA
atcccaccactgccacca

SEQ ID NO: 6489 - DNA, 17 bp, Homo sapiens
  source 1..17: mol_type = genomic DNA
atcccaccagagtcgcc

SEQ ID NO: 6490 - DNA, 18 bp, Homo sapiens
  source 1..18: mol_type = genomic DNA
atcccaccagagtcgcca

SEQ ID NO: 6491 - DNA, 16 bp, Homo sapiens
  source 1..16: mol_type = genomic DNA
atcccaccctcgtcgc

SEQ ID NO: 6492 - DNA, 17 bp, Homo sapiens
  source 1..17: mol_type = genomic DNA
atcccaccctcgtcgcc

SEQ ID NO: 6493 - DNA, 18 bp, Homo sapiens
  source 1..18: mol_type = genomic DNA
atcccaccctcgtcgcca

SEQ ID NO: 6494 - DNA, 16 bp, Homo sapiens
  source 1..16: mol_type = genomic DNA
atcccaccgctgccac

SEQ ID NO: 6495 - DNA, 17 bp, Homo sapiens
  source 1..17: mol_type = genomic DNA
atcccaccgctgccacc

SEQ ID NO: 6496 - DNA, 18 bp, Homo sapiens
  source 1..18: mol_type = genomic DNA
atcccaccgctgccacca

SEQ ID NO: 6497 - DNA, 17 bp, Homo sapiens
  source 1..17: mol_type = genomic DNA
atcccaccttcgtcgcc

SEQ ID NO: 6498 - DNA, 18 bp, Homo sapiens
  source 1..18: mol_type = genomic DNA
atcccaccttcgtcgcca

SEQ ID NO: 6499 - DNA, 16 bp, Homo sapiens
  source 1..16: mol_type = genomic DNA
atcccactcctgacac

SEQ ID NO: 6500 - DNA, 17 bp, Homo sapiens
  source 1..17: mol_type = genomic DNA
atcccactcctgacacc

SEQ ID NO: 6501 - DNA, 18 bp, Homo sapiens
  source 1..18: mol_type = genomic DNA
atcccactcctgacacca

SEQ ID NO: 6502 - DNA, 18 bp, Homo sapiens
  source 1..18: mol_type = genomic DNA
atcccactgctgccacca

SEQ ID NO: 6503 - DNA, 16 bp, Homo sapiens
  source 1..16: mol_type = genomic DNA
atcccacttctgacac

SEQ ID NO: 6504 - DNA, 17 bp, Homo sapiens
  source 1..17: mol_type = genomic DNA
atcccacttctgacacc

SEQ ID NO: 6505 - DNA, 18 bp, Homo sapiens
  source 1..18: mol_type = genomic DNA
atcccacttctgacacca

SEQ ID NO: 6506 - DNA, 16 bp, Homo sapiens
  source 1..16: mol_type = genomic DNA
atcccagcggggcctc

SEQ ID NO: 6507 - DNA, 17 bp, Homo sapiens
  source 1..17: mol_type = genomic DNA
atcccagcggggcctcc

SEQ ID NO: 6508 - DNA, 18 bp, Homo sapiens
  source 1..18: mol_type = genomic DNA
atcccagcggggcctcca

SEQ ID NO: 6509 - DNA, 16 bp, Homo sapiens
  source 1..16: mol_type = genomic DNA
atcccagcggtgcctc

SEQ ID NO: 6510 - DNA, 17 bp, Homo sapiens
  source 1..17: mol_type = genomic DNA
atcccagcggtgcctcc

SEQ ID NO: 6511 - DNA, 18 bp, Homo sapiens
  source 1..18: mol_type = genomic DNA
atcccagcggtgcctcca

SEQ ID NO: 6512 - DNA, 32 bp, Homo sapiens
  source 1..32: mol_type = genomic DNA
atcccagggtcgtgggttcgagccccacgttg

SEQ ID NO: 6513 - DNA, 38 bp, Homo sapiens
  source 1..38: mol_type = genomic DNA
atcccagggtcgtgggttcgagccccacgttgggcgcc

SEQ ID NO: 6514 - DNA, 16 bp, Homo sapiens
  source 1..16: mol_type = genomic DNA
atcccagtagagcctc

SEQ ID NO: 6515 - DNA, 17 bp, Homo sapiens
  source 1..17: mol_type = genomic DNA
atcccagtagagcctcc

SEQ ID NO: 6516 - DNA, 18 bp, Homo sapiens
  source 1..18: mol_type = genomic DNA
atcccagtagagcctcca

SEQ ID NO: 6517 - DNA, 16 bp, Homo sapiens
  source 1..16: mol_type = genomic DNA
atcccatcctcgtcgc

SEQ ID NO: 6518 - DNA, 17 bp, Homo sapiens
  source 1..17: mol_type = genomic DNA
atcccatcctcgtcgcc

SEQ ID NO: 6519 - DNA, 18 bp, Homo sapiens
  source 1..18: mol_type = genomic DNA
atcccatcctcgtcgcca

SEQ ID NO: 6520 - DNA, 19 bp, Homo sapiens
  source 1..19: mol_type = genomic DNA
atccccagcatctccacca

SEQ ID NO: 6521 - DNA, 19 bp, Homo sapiens
  source 1..19: mol_type = genomic DNA
atccccagtacctccacca

SEQ ID NO: 6522 - DNA, 28 bp, Homo sapiens
  source 1..28: mol_type = genomic DNA
atccccgcctgtcacgcgggagaccggg

SEQ ID NO: 6523 - DNA, 16 bp, Homo sapiens
  source 1..16: mol_type = genomic DNA
atccccggcacctcca

SEQ ID NO: 6524 - DNA, 17 bp, Homo sapiens
  source 1..17: mol_type = genomic DNA
atccccggcacctccac

SEQ ID NO: 6525 - DNA, 18 bp, Homo sapiens
  source 1..18: mol_type = genomic DNA
atccccggcacctccacc

SEQ ID NO: 6526 - DNA, 19 bp, Homo sapiens
  source 1..19: mol_type = genomic DNA
atccccggcacctccacca

SEQ ID NO: 6527 - DNA, 16 bp, Homo sapiens
  source 1..16: mol_type = genomic DNA
atccccggcatctcca

SEQ ID NO: 6528 - DNA, 17 bp, Homo sapiens
  source 1..17: mol_type = genomic DNA
atccccggcatctccac

SEQ ID NO: 6529 - DNA, 18 bp, Homo sapiens
  source 1..18: mol_type = genomic DNA
atccccggcatctccacc

SEQ ID NO: 6530 - DNA, 19 bp, Homo sapiens
  source 1..19: mol_type = genomic DNA
atccccggcatctccacca

SEQ ID NO: 6531 - DNA, 16 bp, Homo sapiens
  source 1..16: mol_type = genomic DNA
atccccgtacgggcca

SEQ ID NO: 6532 - DNA, 18 bp, Homo sapiens
  source 1..18: mol_type = genomic DNA
atccccgtacgggccacc

SEQ ID NO: 6533 - DNA, 19 bp, Homo sapiens
  source 1..19: mol_type = genomic DNA
atccccgtacgggccacca

SEQ ID NO: 6534 - DNA, 16 bp, Homo sapiens
  source 1..16: mol_type = genomic DNA
atcccggacgagcccc

SEQ ID NO: 6535 - DNA, 17 bp, Homo sapiens
  source 1..17: mol_type = genomic DNA
atcccggacgagccccc

SEQ ID NO: 6536 - DNA, 18 bp, Homo sapiens
  source 1..18: mol_type = genomic DNA
atcccggacgagccccca

SEQ ID NO: 6537 - DNA, 17 bp, Homo sapiens
  source 1..17: mol_type = genomic DNA
atcccgggcggaaacac

SEQ ID NO: 6538 - DNA, 18 bp, Homo sapiens
  source 1..18: mol_type = genomic DNA
atcccgggcggaaacacc

SEQ ID NO: 6539 - DNA, 19 bp, Homo sapiens
  source 1..19: mol_type = genomic DNA
atcccgggcggaaacacca

SEQ ID NO: 6540 - DNA, 16 bp, Homo sapiens
  source 1..16: mol_type = genomic DNA
atcccgggtttcggca

SEQ ID NO: 6541 - DNA, 17 bp, Homo sapiens
  source 1..17: mol_type = genomic DNA
atcccgggtttcggcac

SEQ ID NO: 6542 - DNA, 18 bp, Homo sapiens
  source 1..18: mol_type = genomic DNA
atcccgggtttcggcacc

SEQ ID NO: 6543 - DNA, 19 bp, Homo sapiens
  source 1..19: mol_type = genomic DNA
atcccgggtttcggcacca

SEQ ID NO: 6544 - DNA, 17 bp, Homo sapiens
  source 1..17: mol_type = genomic DNA
atccctccgtggttacc

SEQ ID NO: 6545 - DNA, 18 bp, Homo sapiens
  source 1..18: mol_type = genomic DNA
atccctccgtggttacca

SEQ ID NO: 6546 - DNA, 34 bp, Homo sapiens
  source 1..34: mol_type = genomic DNA
atccctggtggtctagtggttaggattcggcgct

SEQ ID NO: 6547 - DNA, 35 bp, Homo sapiens
  source 1..35: mol_type = genomic DNA
atccctggtggtctagtggttaggattcggcgctc

SEQ ID NO: 6548 - DNA, 36 bp, Homo sapiens
  source 1..36: mol_type = genomic DNA
atccctggtggtctagtggttaggattcggcgctct

SEQ ID NO: 6549 - DNA, 16 bp, Homo sapiens
  source 1..16: mol_type = genomic DNA
atccgagtcacggcac

SEQ ID NO: 6550 - DNA, 17 bp, Homo sapiens
  source 1..17: mol_type = genomic DNA
atccgagtcacggcacc

SEQ ID NO: 6551 - DNA, 18 bp, Homo sapiens
  source 1..18: mol_type = genomic DNA
atccgagtcacggcacca

SEQ ID NO: 6552 - DNA, 27 bp, Homo sapiens
  source 1..27: mol_type = genomic DNA
atccgagttcaaatctcggtgggacct

SEQ ID NO: 6553 - DNA, 28 bp, Homo sapiens
  source 1..28: mol_type = genomic DNA
atccgagttcaaatctcggtgggacctc

SEQ ID NO: 6554 - DNA, 28 bp, Homo sapiens
  source 1..28: mol_type = genomic DNA
atccgagttcgaatctcggtgggacctc

SEQ ID NO: 6555 - DNA, 28 bp, Homo sapiens
  source 1..28: mol_type = genomic DNA
atccgcgtgggttcgaaccccacttctg

SEQ ID NO: 6556 - DNA, 29 bp, Homo sapiens
  source 1..29: mol_type = genomic DNA
atccgcgtgggttcgaaccccacttctgg

SEQ ID NO: 6557 - DNA, 33 bp, Homo sapiens
  source 1..33: mol_type = genomic DNA
atccgcgtgggttcgaaccccacttctggtacc

SEQ ID NO: 6558 - DNA, 16 bp, Homo sapiens
  source 1..16: mol_type = genomic DNA
atccggctcgaaggac

SEQ ID NO: 6559 - DNA, 17 bp, Homo sapiens
  source 1..17: mol_type = genomic DNA
atccggctcgaaggacc

SEQ ID NO: 6560 - DNA, 18 bp, Homo sapiens
  source 1..18: mol_type = genomic DNA
atccggctcgaaggacca

SEQ ID NO: 6561 - DNA, 16 bp, Homo sapiens
  source 1..16: mol_type = genomic DNA
atccggctcggaggac

SEQ ID NO: 6562 - DNA, 17 bp, Homo sapiens
  source 1..17: mol_type = genomic DNA
atccggctcggaggacc

SEQ ID NO: 6563 - DNA, 18 bp, Homo sapiens
  source 1..18: mol_type = genomic DNA
atccggctcggaggacca

SEQ ID NO: 6564 - DNA, 16 bp, Homo sapiens
  source 1..16: mol_type = genomic DNA
atccgggtgccccctc

SEQ ID NO: 6565 - DNA, 17 bp, Homo sapiens
  source 1..17: mol_type = genomic DNA
atccgggtgccccctcc

SEQ ID NO: 6566 - DNA, 18 bp, Homo sapiens
  source 1..18: mol_type = genomic DNA
atccgggtgccccctcca

SEQ ID NO: 6567 - DNA, 16 bp, Homo sapiens
  source 1..16: mol_type = genomic DNA
atcctatatatcttac

SEQ ID NO: 6568 - DNA, 17 bp, Homo sapiens
  source 1..17: mol_type = genomic DNA
atcctatatatcttacc

SEQ ID NO: 6569 - DNA, 18 bp, Homo sapiens
  source 1..18: mol_type = genomic DNA
atcctatatatcttacca

SEQ ID NO: 6570 - DNA, 19 bp, Homo sapiens
  source 1..19: mol_type = genomic DNA
atcctcacctggagcacca

SEQ ID NO: 6571 - DNA, 16 bp, Homo sapiens
  source 1..16: mol_type = genomic DNA
atcctgccgactacgc

SEQ ID NO: 6572 - DNA, 17 bp, Homo sapiens
  source 1..17: mol_type = genomic DNA
atcctgccgactacgcc

SEQ ID NO: 6573 - DNA, 18 bp, Homo sapiens
  source 1..18: mol_type = genomic DNA
atcctgccgactacgcca

SEQ ID NO: 6574 - DNA, 17 bp, Homo sapiens
  source 1..17: mol_type = genomic DNA
atcctgctcacagcgcc

SEQ ID NO: 6575 - DNA, 18 bp, Homo sapiens
  source 1..18: mol_type = genomic DNA
atcctgctcacagcgcca

SEQ ID NO: 6576 - DNA, 26 bp, Homo sapiens
  source 1..26: mol_type = genomic DNA
atcctgggttcgaatcccagcggggc

SEQ ID NO: 6577 - DNA, 27 bp, Homo sapiens
  source 1..27: mol_type = genomic DNA
atcctgggttcgaatcccagcggggcc

SEQ ID NO: 6578 - DNA, 28 bp, Homo sapiens
  source 1..28: mol_type = genomic DNA
atcctgggttcgaatcccagcggggcct

SEQ ID NO: 6579 - DNA, 29 bp, Homo sapiens
  source 1..29: mol_type = genomic DNA
atcctgggttcgaatcccagcggggcctc

SEQ ID NO: 6580 - DNA, 30 bp, Homo sapiens
  source 1..30: mol_type = genomic DNA
atcctgggttcgaatcccagcggggcctcc

SEQ ID NO: 6581 - DNA, 25 bp, Homo sapiens
  source 1..25: mol_type = genomic DNA
atcctgggttcgaatcccagcggtg

SEQ ID NO: 6582 - DNA, 30 bp, Homo sapiens
  source 1..30: mol_type = genomic DNA
atcctgggttcgaatcccagcggtgcctcc

SEQ ID NO: 6583 - DNA, 17 bp, Homo sapiens
  source 1..17: mol_type = genomic DNA
atcctgtcggctacgcc

SEQ ID NO: 6584 - DNA, 18 bp, Homo sapiens
  source 1..18: mol_type = genomic DNA
atcctgtcggctacgcca

SEQ ID NO: 6585 - DNA, 16 bp, Homo sapiens
  source 1..16: mol_type = genomic DNA
atcctgttcgtgacgc

SEQ ID NO: 6586 - DNA, 17 bp, Homo sapiens
  source 1..17: mol_type = genomic DNA
atcctgttcgtgacgcc

SEQ ID NO: 6587 - DNA, 18 bp, Homo sapiens
  source 1..18: mol_type = genomic DNA
atcctgttcgtgacgcca

SEQ ID NO: 6588 - DNA, 19 bp, Homo sapiens
  source 1..19: mol_type = genomic DNA
atccttaggtcgctggttc

SEQ ID NO: 6589 - DNA, 20 bp, Homo sapiens
  source 1..20: mol_type = genomic DNA
atccttaggtcgctggttcg

SEQ ID NO: 6590 - DNA, 21 bp, Homo sapiens
  source 1..21: mol_type = genomic DNA
atccttaggtcgctggttcga

SEQ ID NO: 6591 - DNA, 23 bp, Homo sapiens
  source 1..23: mol_type = genomic DNA
atccttaggtcgctggttcgaat

SEQ ID NO: 6592 - DNA, 31 bp, Homo sapiens
  source 1..31: mol_type = genomic DNA
atccttaggtcgctggttcgaatccggctcg

SEQ ID NO: 6593 - DNA, 22 bp, Homo sapiens
  source 1..22: mol_type = genomic DNA
atccttaggtcgctggttcgat

SEQ ID NO: 6594 - DNA, 23 bp, Homo sapiens
  source 1..23: mol_type = genomic DNA
atccttaggtcgctggttcgatt

SEQ ID NO: 6595 - DNA, 24 bp, Homo sapiens
  source 1..24: mol_type = genomic DNA
atccttaggtcgctggttcgattc

SEQ ID NO: 6596 - DNA, 31 bp, Homo sapiens
  source 1..31: mol_type = genomic DNA
atccttaggtcgctggttcgattccggctcg

SEQ ID NO: 6597 - DNA, 17 bp, Homo sapiens
  source 1..17: mol_type = genomic DNA
atcgaaaccatcctctg

SEQ ID NO: 6598 - DNA, 19 bp, Homo sapiens
  source 1..19: mol_type = genomic DNA
atcgaaaccatcctctgct

SEQ ID NO: 6599 - DNA, 20 bp, Homo sapiens
  source 1..20: mol_type = genomic DNA
atcgaaaccatcctctgcta

SEQ ID NO: 6600 - DNA, 21 bp, Homo sapiens
  source 1..21: mol_type = genomic DNA
atcgaaaccatcctctgctac

SEQ ID NO: 6601 - DNA, 22 bp, Homo sapiens
  source 1..22: mol_type = genomic DNA
atcgaaaccatcctctgctacc

SEQ ID NO: 6602 - DNA, 23 bp, Homo sapiens
  source 1..23: mol_type = genomic DNA
atcgaaaccatcctctgctacca

SEQ ID NO: 6603 - DNA, 23 bp, Homo sapiens
  source 1..23: mol_type = genomic DNA
atcgatgcccgcatcctccacca

SEQ ID NO: 6604 - DNA, 20 bp, Homo sapiens
  source 1..20: mol_type = genomic DNA
atcgcataaaacttaaaact

SEQ ID NO: 6605 - DNA, 21 bp, Homo sapiens
  source 1..21: mol_type = genomic DNA
atcgcataaaacttaaaactt

SEQ ID NO: 6606 - DNA, 23 bp, Homo sapiens
  source 1..23: mol_type = genomic DNA
atcgcataaaacttaaaacttta

SEQ ID NO: 6607 - DNA, 25 bp, Homo sapiens
  source 1..25: mol_type = genomic DNA
atcgcataaaacttaaaactttaca

SEQ ID NO: 6608 - DNA, 26 bp, Homo sapiens
  source 1..26: mol_type = genomic DNA
atcgcataaaacttaaaactttacag

SEQ ID NO: 6609 - DNA, 31 bp, Homo sapiens
  source 1..31: mol_type = genomic DNA
atcgcataaaacttaaaactttacagtcaga

SEQ ID NO: 6610 - DNA, 32 bp, Homo sapiens
  source 1..32: mol_type = genomic DNA
atcgcataaaacttaaaactttacagtcagag

SEQ ID NO: 6611 - DNA, 33 bp, Homo sapiens
  source 1..33: mol_type = genomic DNA
atcgcataaaacttaaaactttacagtcagagg

SEQ ID NO: 6612 - DNA, 35 bp, Homo sapiens
  source 1..35: mol_type = genomic DNA
atcgcataaaacttaaaactttacagtcagaggtt

SEQ ID NO: 6613 - DNA, 36 bp, Homo sapiens
  source 1..36: mol_type = genomic DNA
atcgcataaaacttaaaactttacagtcagaggttc

SEQ ID NO: 6614 - DNA, 16 bp, Homo sapiens
  source 1..16: mol_type = genomic DNA
atcgggcccatacccc

SEQ ID NO: 6615 - DNA, 17 bp, Homo sapiens
  source 1..17: mol_type = genomic DNA
atcgggcccataccccg

SEQ ID NO: 6616 - DNA, 18 bp, Homo sapiens
  source 1..18: mol_type = genomic DNA
atcgggcccataccccga

SEQ ID NO: 6617 - DNA, 19 bp, Homo sapiens
  source 1..19: mol_type = genomic DNA
atcgggcccataccccgaa

SEQ ID NO: 6618 - DNA, 20 bp, Homo sapiens
  source 1..20: mol_type = genomic DNA
atcgggcccataccccgaaa

SEQ ID NO: 6619 - DNA, 21 bp, Homo sapiens
  source 1..21: mol_type = genomic DNA
atcgggcccataccccgaaaa

SEQ ID NO: 6620 - DNA, 27 bp, Homo sapiens
  source 1..27: mol_type = genomic DNA
atcgggcccataccccgaaaatgttgg

SEQ ID NO: 6621 - DNA, 29 bp, Homo sapiens
  source 1..29: mol_type = genomic DNA
atcgggcccataccccgaaaatgttggtt

SEQ ID NO: 6622 - DNA, 30 bp, Homo sapiens
  source 1..30: mol_type = genomic DNA
atcgggcccataccccgaaaatgttggtta

SEQ ID NO: 6623 - DNA, 31 bp, Homo sapiens
  source 1..31: mol_type = genomic DNA
atcgggcccataccccgaaaatgttggttat

SEQ ID NO: 6624 - DNA, 32 bp, Homo sapiens
  source 1..32: mol_type = genomic DNA
atcgggcccataccccgaaaatgttggttata

SEQ ID NO: 6625 - DNA, 33 bp, Homo sapiens
  source 1..33: mol_type = genomic DNA
atcgggcccataccccgaaaatgttggttatac

SEQ ID NO: 6626 - DNA, 34 bp, Homo sapiens
  source 1..34: mol_type = genomic DNA
atcgggcccataccccgaaaatgttggttatacc

SEQ ID NO: 6627 - DNA, 35 bp, Homo sapiens
  source 1..35: mol_type = genomic DNA
atcgggcccataccccgaaaatgttggttataccc

SEQ ID NO: 6628 - DNA, 48 bp, Homo sapiens
  source 1..48: mol_type = genomic DNA
atcgggcccataccccgaaaatgttggttatacccttcccgtactacc

SEQ ID NO: 6629 - DNA, 19 bp, Homo sapiens
  source 1..19: mol_type = genomic DNA
atcggttagcgcgcggtac

SEQ ID NO: 6630 - DNA, 20 bp, Homo sapiens
  source 1..20: mol_type = genomic DNA
atcggttagcgcgcggtact

SEQ ID NO: 6631 - DNA, 23 bp, Homo sapiens
  source 1..23: mol_type = genomic DNA
atcggttagcgcgttcggctgtt

SEQ ID NO: 6632 - DNA, 26 bp, Homo sapiens
  source 1..26: mol_type = genomic DNA
atcggttagcgcgttcggctgttaac

SEQ ID NO: 6633 - DNA, 27 bp, Homo sapiens
  source 1..27: mol_type = genomic DNA
atcggttagcgcgttcggctgttaacc

SEQ ID NO: 6634 - DNA, 18 bp, Homo sapiens
  source 1..18: mol_type = genomic DNA
atcgtatagtggttagta

SEQ ID NO: 6635 - DNA, 20 bp, Homo sapiens
  source 1..20: mol_type = genomic DNA
atcgtatagtggttagtact

SEQ ID NO: 6636 - DNA, 21 bp, Homo sapiens
  source 1..21: mol_type = genomic DNA
atcgtatagtggttagtactc

SEQ ID NO: 6637 - DNA, 22 bp, Homo sapiens
  source 1..22: mol_type = genomic DNA
atcgtatagtggttagtactct

SEQ ID NO: 6638 - DNA, 23 bp, Homo sapiens
  source 1..23: mol_type = genomic DNA
atcgtatagtggttagtactctg

SEQ ID NO: 6639 - DNA, 24 bp, Homo sapiens
  source 1..24: mol_type = genomic DNA
atcgtatagtggttagtactctgc

SEQ ID NO: 6640 - DNA, 25 bp, Homo sapiens
  source 1..25: mol_type = genomic DNA
atcgtatagtggttagtactctgcg

SEQ ID NO: 6641 - DNA, 26 bp, Homo sapiens
  source 1..26: mol_type = genomic DNA
atcgtatagtggttagtactctgcgt

SEQ ID NO: 6642 - DNA, 27 bp, Homo sapiens
  source 1..27: mol_type = genomic DNA
atcgtatagtggttagtactctgcgtt

SEQ ID NO: 6643 - DNA, 28 bp, Homo sapiens
  source 1..28: mol_type = genomic DNA
atcgtatagtggttagtactctgcgttg

SEQ ID NO: 6644 - DNA, 29 bp, Homo sapiens
  source 1..29: mol_type = genomic DNA
atcgtatagtggttagtactctgcgttgt

SEQ ID NO: 6645 - DNA, 30 bp, Homo sapiens
  source 1..30: mol_type = genomic DNA
atcgtatagtggttagtactctgcgttgtg

SEQ ID NO: 6646 - DNA, 43 bp, Homo sapiens
  source 1..43: mol_type = genomic DNA
atcgtatagtggttagtactctgcgttgtggccgcagcaacct

SEQ ID NO: 6647 - DNA, 18 bp, Homo sapiens
  source 1..18: mol_type = genomic DNA
atctaaagacaggggtta

SEQ ID NO: 6648 - DNA, 19 bp, Homo sapiens
  source 1..19: mol_type = genomic DNA
atctaaagacaggggttag

SEQ ID NO: 6649 - DNA, 23 bp, Homo sapiens
  source 1..23: mol_type = genomic DNA
atctaaagacaggggttaggcct

SEQ ID NO: 6650 - DNA, 24 bp, Homo sapiens
  source 1..24: mol_type = genomic DNA
atctaaagacaggggttaggcctc

SEQ ID NO: 6651 - DNA, 27 bp, Homo sapiens
  source 1..27: mol_type = genomic DNA
atctaaagacaggggttaggcctcttt

SEQ ID NO: 6652 - DNA, 28 bp, Homo sapiens
  source 1..28: mol_type = genomic DNA
atctaaagacaggggttaggcctctttt

SEQ ID NO: 6653 - DNA, 32 bp, Homo sapiens
  source 1..32: mol_type = genomic DNA
atctaaagacaggggttaggcctctttttacc

SEQ ID NO: 6654 - DNA, 33 bp, Homo sapiens
  source 1..33: mol_type = genomic DNA
atctaaagacaggggttaggcctctttttacca

SEQ ID NO: 6655 - DNA, 35 bp, Homo sapiens
  source 1..35: mol_type = genomic DNA
atctaaagacaggggttaggcctctttttaccacc

SEQ ID NO: 6656 - DNA, 36 bp, Homo sapiens
  source 1..36: mol_type = genomic DNA
atctaaagacaggggttaggcctctttttaccacca

SEQ ID NO: 6657 - DNA, 19 bp, Homo sapiens
  source 1..19: mol_type = genomic DNA
atctaaaggtccctggttc

SEQ ID NO: 6658 - DNA, 23 bp, Homo sapiens
  source 1..23: mol_type = genomic DNA
atctaaaggtccctggttcaatc

SEQ ID NO: 6659 - DNA, 36 bp, Homo sapiens
  source 1..36: mol_type = genomic DNA
atctaaaggtccctggttcaatcccgggtttcggca

SEQ ID NO: 6660 - DNA, 37 bp, Homo sapiens
  source 1..37: mol_type = genomic DNA
atctaaaggtccctggttcaatcccgggtttcggcac

SEQ ID NO: 6661 - DNA, 38 bp, Homo sapiens
  source 1..38: mol_type = genomic DNA
atctaaaggtccctggttcaatcccgggtttcggcacc

SEQ ID NO: 6662 - DNA, 39 bp, Homo sapiens
  source 1..39: mol_type = genomic DNA
atctaaaggtccctggttcaatcccgggtttcggcacca

SEQ ID NO: 6663 - DNA, 20 bp, Homo sapiens
  source 1..20: mol_type = genomic DNA
atctaaaggtccctggttcg

SEQ ID NO: 6664 - DNA, 21 bp, Homo sapiens
  source 1..21: mol_type = genomic DNA
atctaaaggtccctggttcga

SEQ ID NO: 6665 - DNA, 22 bp, Homo sapiens
  source 1..22: mol_type = genomic DNA
atctaaaggtccctggttcgat

SEQ ID NO: 6666 - DNA, 23 bp, Homo sapiens
  source 1..23: mol_type = genomic DNA
atctaaaggtccctggttcgatc

SEQ ID NO: 6667 - DNA, 24 bp, Homo sapiens
  source 1..24: mol_type = genomic DNA
atctaaaggtccctggttcgatcc

SEQ ID NO: 6668 - DNA, 25 bp, Homo sapiens
  source 1..25: mol_type = genomic DNA
atctaaaggtccctggttcgatccc

SEQ ID NO: 6669 - DNA, 30 bp, Homo sapiens
  source 1..30: mol_type = genomic DNA
atctaaaggtccctggttcgatcccgggtt

SEQ ID NO: 6670 - DNA, 31 bp, Homo sapiens
  source 1..31: mol_type = genomic DNA
atctaaaggtccctggttcgatcccgggttt

SEQ ID NO: 6671 - DNA, 34 bp, Homo sapiens
  source 1..34: mol_type = genomic DNA
atctaaaggtccctggttcgatcccgggtttcgg

SEQ ID NO: 6672 - DNA, 35 bp, Homo sapiens
  source 1..35: mol_type = genomic DNA
atctaaaggtccctggttcgatcccgggtttcggc

SEQ ID NO: 6673 - DNA, 36 bp, Homo sapiens
  source 1..36: mol_type = genomic DNA
atctaaaggtccctggttcgatcccgggtttcggca

SEQ ID NO: 6674 - DNA, 37 bp, Homo sapiens
  source 1..37: mol_type = genomic DNA
atctaaaggtccctggttcgatcccgggtttcggcac

SEQ ID NO: 6675 - DNA, 38 bp, Homo sapiens
  source 1..38: mol_type = genomic DNA
atctaaaggtccctggttcgatcccgggtttcggcacc

SEQ ID NO: 6676 - DNA, 39 bp, Homo sapiens
  source 1..39: mol_type = genomic DNA
atctaaaggtccctggttcgatcccgggtttcggcacca

SEQ ID NO: 6677 - DNA, 19 bp, Homo sapiens
  source 1..19: mol_type = genomic DNA
atctcagggtcgtgggttc

SEQ ID NO: 6678 - DNA, 34 bp, Homo sapiens
  source 1..34: mol_type = genomic DNA
atctcagggtcgtgggttcgagccccacgttggg

SEQ ID NO: 6679 - DNA, 35 bp, Homo sapiens
  source 1..35: mol_type = genomic DNA
atctcagggtcgtgggttcgagccccacgttgggc

SEQ ID NO: 6680 - DNA, 37 bp, Homo sapiens
  source 1..37: mol_type = genomic DNA
atctcagggtcgtgggttcgagccccacgttgggcgc

SEQ ID NO: 6681 - DNA, 38 bp, Homo sapiens
  source 1..38: mol_type = genomic DNA
atctcagggtcgtgggttcgagccccacgttgggcgcc

SEQ ID NO: 6682 - DNA, 39 bp, Homo sapiens
  source 1..39: mol_type = genomic DNA
atctcagggtcgtgggttcgagccccacgttgggcgcca

SEQ ID NO: 6683 - DNA, 16 bp, Homo sapiens
  source 1..16: mol_type = genomic DNA
atctcgctggggcctc

SEQ ID NO: 6684 - DNA, 17 bp, Homo sapiens
  source 1..17: mol_type = genomic DNA
atctcgctggggcctcc

SEQ ID NO: 6685 - DNA, 18 bp, Homo sapiens
  source 1..18: mol_type = genomic DNA
atctcgctggggcctcca

SEQ ID NO: 6686 - DNA, 16 bp, Homo sapiens
  source 1..16: mol_type = genomic DNA
atctcggtggaacctc

SEQ ID NO: 6687 - DNA, 17 bp, Homo sapiens
  source 1..17: mol_type = genomic DNA
atctcggtggaacctcc

SEQ ID NO: 6688 - DNA, 18 bp, Homo sapiens
  source 1..18: mol_type = genomic DNA
atctcggtggaacctcca

SEQ ID NO: 6689 - DNA, 16 bp, Homo sapiens
  source 1..16: mol_type = genomic DNA
atctcggtgggacccc

SEQ ID NO: 6690 - DNA, 17 bp, Homo sapiens
  source 1..17: mol_type = genomic DNA
atctcggtgggaccccc

SEQ ID NO: 6691 - DNA, 16 bp, Homo sapiens
  source 1..16: mol_type = genomic DNA
atctcggtgggacctc

SEQ ID NO: 6692 - DNA, 17 bp, Homo sapiens
  source 1..17: mol_type = genomic DNA
atctcggtgggacctcc

SEQ ID NO: 6693 - DNA, 18 bp, Homo sapiens
  source 1..18: mol_type = genomic DNA
atctcggtgggacctcca

SEQ ID NO: 6694 - DNA, 17 bp, Homo sapiens
  source 1..17: mol_type = genomic DNA
atctcggtggtacctcc

SEQ ID NO: 6695 - DNA, 18 bp, Homo sapiens
  source 1..18: mol_type = genomic DNA
atctcggtggtacctcca

SEQ ID NO: 6696 - DNA, 17 bp, Homo sapiens
  source 1..17: mol_type = genomic DNA
atctgaaggtcctgagt

SEQ ID NO: 6697 - DNA, 19 bp, Homo sapiens
  source 1..19: mol_type = genomic DNA
atctgaaggtcctgagttc

SEQ ID NO: 6698 - DNA, 20 bp, Homo sapiens
  source 1..20: mol_type = genomic DNA
atctgaaggtcctgagttcg

SEQ ID NO: 6699 - DNA, 33 bp, Homo sapiens
  source 1..33: mol_type = genomic DNA
atctgaaggtcctgagttcgaacctcagagggg

SEQ ID NO: 6700 - DNA, 34 bp, Homo sapiens
  source 1..34: mol_type = genomic DNA
atctgaaggtcctgagttcgaacctcagaggggg

SEQ ID NO: 6701 - DNA, 35 bp, Homo sapiens
  source 1..35: mol_type = genomic DNA
atctgaaggtcctgagttcgaacctcagagggggc

SEQ ID NO: 6702 - DNA, 36 bp, Homo sapiens
  source 1..36: mol_type = genomic DNA
atctgaaggtcctgagttcgaacctcagagggggca

SEQ ID NO: 6703 - DNA, 37 bp, Homo sapiens
  source 1..37: mol_type = genomic DNA
atctgaaggtcctgagttcgaacctcagagggggcac

SEQ ID NO: 6704 - DNA, 38 bp, Homo sapiens
  source 1..38: mol_type = genomic DNA
atctgaaggtcctgagttcgaacctcagagggggcacc

SEQ ID NO: 6705 - DNA, 39 bp, Homo sapiens
  source 1..39: mol_type = genomic DNA
atctgaaggtcctgagttcgaacctcagagggggcacca

SEQ ID NO: 6706 - DNA, 35 bp, Homo sapiens
  source 1..35: mol_type = genomic DNA
atctgaaggtcctgagttcgagcctcagagagggc

SEQ ID NO: 6707 - DNA, 36 bp, Homo sapiens
  source 1..36: mol_type = genomic DNA
atctgaaggtcctgagttcgagcctcagagagggca

SEQ ID NO: 6708 - DNA, 37 bp, Homo sapiens
  source 1..37: mol_type = genomic DNA
atctgaaggtcctgagttcgagcctcagagagggcac

SEQ ID NO: 6709 - DNA, 38 bp, Homo sapiens
  source 1..38: mol_type = genomic DNA
atctgaaggtcctgagttcgagcctcagagagggcacc

SEQ ID NO: 6710 - DNA, 18 bp, Homo sapiens
  source 1..18: mol_type = genomic DNA
atctgaaggtcgtgagtt

SEQ ID NO: 6711 - DNA, 19 bp, Homo sapiens
  source 1..19: mol_type = genomic DNA
atctgaaggtcgtgagttc

SEQ ID NO: 6712 - DNA, 20 bp, Homo sapiens
  source 1..20: mol_type = genomic DNA
atctgaaggtcgtgagttcg

SEQ ID NO: 6713 - DNA, 33 bp, Homo sapiens
  source 1..33: mol_type = genomic DNA
atctgaaggtcgtgagttcgagcctcacacggg

SEQ ID NO: 6714 - DNA, 34 bp, Homo sapiens
  source 1..34: mol_type = genomic DNA
atctgaaggtcgtgagttcgagcctcacacgggg

SEQ ID NO: 6715 - DNA, 35 bp, Homo sapiens
  source 1..35: mol_type = genomic DNA
atctgaaggtcgtgagttcgagcctcacacggggc

SEQ ID NO: 6716 - DNA, 36 bp, Homo sapiens
  source 1..36: mol_type = genomic DNA
atctgaaggtcgtgagttcgagcctcacacggggca

SEQ ID NO: 6717 - DNA, 37 bp, Homo sapiens
  source 1..37: mol_type = genomic DNA
atctgaaggtcgtgagttcgagcctcacacggggcac

SEQ ID NO: 6718 - DNA, 38 bp, Homo sapiens
  source 1..38: mol_type = genomic DNA
atctgaaggtcgtgagttcgagcctcacacggggcacc

SEQ ID NO: 6719 - DNA, 39 bp, Homo sapiens
  source 1..39: mol_type = genomic DNA
atctgaaggtcgtgagttcgagcctcacacggggcacca

SEQ ID NO: 6720 - DNA, 33 bp, Homo sapiens
  source 1..33: mol_type = genomic DNA
atctgaaggtcgtgagttcgatcctcacacggg

SEQ ID NO: 6721 - DNA, 34 bp, Homo sapiens
  source 1..34: mol_type = genomic DNA
atctgaaggtcgtgagttcgatcctcacacgggg

SEQ ID NO: 6722 - DNA, 35 bp, Homo sapiens
  source 1..35: mol_type = genomic DNA
atctgaaggtcgtgagttcgatcctcacacggggc

SEQ ID NO: 6723 - DNA, 36 bp, Homo sapiens
  source 1..36: mol_type = genomic DNA
atctgaaggtcgtgagttcgatcctcacacggggca

SEQ ID NO: 6724 - DNA, 37 bp, Homo sapiens
  source 1..37: mol_type = genomic DNA
atctgaaggtcgtgagttcgatcctcacacggggcac

SEQ ID NO: 6725 - DNA, 38 bp, Homo sapiens
  source 1..38: mol_type = genomic DNA
atctgaaggtcgtgagttcgatcctcacacggggcacc

SEQ ID NO: 6726 - DNA, 39 bp, Homo sapiens
  source 1..39: mol_type = genomic DNA
atctgaaggtcgtgagttcgatcctcacacggggcacca

SEQ ID NO: 6727 - DNA, 21 bp, Homo sapiens
  source 1..21: mol_type = genomic DNA
atctgacaacagaggcttacg

SEQ ID NO: 6728 - DNA, 23 bp, Homo sapiens
  source 1..23: mol_type = genomic DNA
atctgacaacagaggcttacgac

SEQ ID NO: 6729 - DNA, 24 bp, Homo sapiens
  source 1..24: mol_type = genomic DNA
atctgacaacagaggcttacgacc

SEQ ID NO: 6730 - DNA, 25 bp, Homo sapiens
  source 1..25: mol_type = genomic DNA
atctgacaacagaggcttacgaccc

SEQ ID NO: 6731 - DNA, 26 bp, Homo sapiens
  source 1..26: mol_type = genomic DNA
atctgacaacagaggcttacgacccc

SEQ ID NO: 6732 - DNA, 27 bp, Homo sapiens
  source 1..27: mol_type = genomic DNA
atctgacaacagaggcttacgacccct

SEQ ID NO: 6733 - DNA, 28 bp, Homo sapiens
  source 1..28: mol_type = genomic DNA
atctgacaacagaggcttacgacccctt

SEQ ID NO: 6734 - DNA, 29 bp, Homo sapiens
  source 1..29: mol_type = genomic DNA
atctgacaacagaggcttacgacccctta

SEQ ID NO: 6735 - DNA, 31 bp, Homo sapiens
  source 1..31: mol_type = genomic DNA
atctgacaacagaggcttacgaccccttatt

SEQ ID NO: 6736 - DNA, 34 bp, Homo sapiens
  source 1..34: mol_type = genomic DNA
atctgacaacagaggcttacgaccccttatttac

SEQ ID NO: 6737 - DNA, 35 bp, Homo sapiens
  source 1..35: mol_type = genomic DNA
atctgacaacagaggcttacgaccccttatttacc

SEQ ID NO: 6738 - DNA, 36 bp, Homo sapiens
  source 1..36: mol_type = genomic DNA
atctgacaacagaggcttacgaccccttatttaccc

SEQ ID NO: 6739 - DNA, 37 bp, Homo sapiens
  source 1..37: mol_type = genomic DNA
atctgacaacagaggcttacgaccccttatttacccc

SEQ ID NO: 6740 - DNA, 38 bp, Homo sapiens
  source 1..38: mol_type = genomic DNA
atctgacaacagaggcttacgaccccttatttacccca

SEQ ID NO: 6741 - DNA, 20 bp, Homo sapiens
  source 1..20: mol_type = genomic DNA
atctgagggtccagggttca

SEQ ID NO: 6742 - DNA, 28 bp, Homo sapiens
  source 1..28: mol_type = genomic DNA
atctgagggtccagggttcaagtccctg

SEQ ID NO: 6743 - DNA, 38 bp, Homo sapiens
  source 1..38: mol_type = genomic DNA
atctgagggtccagggttcaagtccctgtccaggcgcc

SEQ ID NO: 6744 - DNA, 39 bp, Homo sapiens
  source 1..39: mol_type = genomic DNA
atctgagggtccagggttcaagtccctgtccaggcgcca

SEQ ID NO: 6745 - DNA, 38 bp, Homo sapiens
  source 1..38: mol_type = genomic DNA
atctgagggtccagggttcaagtccctgttcaggcacc

SEQ ID NO: 6746 - DNA, 38 bp, Homo sapiens
  source 1..38: mol_type = genomic DNA
atctgagggtccagggttcaagtccctgttcaggcgcc

SEQ ID NO: 6747 - DNA, 39 bp, Homo sapiens
  source 1..39: mol_type = genomic DNA
atctgagggtccagggttcaagtccctgttcaggcgcca

SEQ ID NO: 6748 - DNA, 33 bp, Homo sapiens
  source 1..33: mol_type = genomic DNA
atctgagggtccagggttcaagtccctgttcgg

SEQ ID NO: 6749 - DNA, 34 bp, Homo sapiens
  source 1..34: mol_type = genomic DNA
atctgagggtccagggttcaagtccctgttcggg

SEQ ID NO: 6750 - DNA, 35 bp, Homo sapiens
  source 1..35: mol_type = genomic DNA
atctgagggtccagggttcaagtccctgttcgggc

SEQ ID NO: 6751 - DNA, 36 bp, Homo sapiens
  source 1..36: mol_type = genomic DNA
atctgagggtccagggttcaagtccctgttcgggcg

SEQ ID NO: 6752 - DNA, 37 bp, Homo sapiens
  source 1..37: mol_type = genomic DNA
atctgagggtccagggttcaagtccctgttcgggcgc

SEQ ID NO: 6753 - DNA, 38 bp, Homo sapiens
  source 1..38: mol_type = genomic DNA
atctgagggtccagggttcaagtccctgttcgggcgcc

SEQ ID NO: 6754 - DNA, 39 bp, Homo sapiens
  source 1..39: mol_type = genomic DNA
atctgagggtccagggttcaagtccctgttcgggcgcca

SEQ ID NO: 6755 - DNA, 26 bp, Homo sapiens
  source 1..26: mol_type = genomic DNA
atctgagggtccagggttcatgtccc

SEQ ID NO: 6756 - DNA, 19 bp, Homo sapiens
  source 1..19: mol_type = genomic DNA
atctgagggtccagggttt

SEQ ID NO: 6757 - DNA, 17 bp, Homo sapiens
  source 1..17: mol_type = genomic DNA
atcttagctttgggtgc

SEQ ID NO: 6758 - DNA, 27 bp, Homo sapiens
  source 1..27: mol_type = genomic DNA
atcttagctttgggtgctaatggtgga

SEQ ID NO: 6759 - DNA, 28 bp, Homo sapiens
  source 1..28: mol_type = genomic DNA
atcttagctttgggtgctaatggtggag

SEQ ID NO: 6760 - DNA, 30 bp, Homo sapiens
  source 1..30: mol_type = genomic DNA
atcttagctttgggtgctaatggtggagtt

SEQ ID NO: 6761 - DNA, 31 bp, Homo sapiens
  source 1..31: mol_type = genomic DNA
atcttagctttgggtgctaatggtggagtta

SEQ ID NO: 6762 - DNA, 32 bp, Homo sapiens
  source 1..32: mol_type = genomic DNA
atcttagctttgggtgctaatggtggagttaa

SEQ ID NO: 6763 - DNA, 33 bp, Homo sapiens
  source 1..33: mol_type = genomic DNA
atcttagctttgggtgctaatggtggagttaaa

SEQ ID NO: 6764 - DNA, 34 bp, Homo sapiens
  source 1..34: mol_type = genomic DNA
atcttagctttgggtgctaatggtggagttaaag

SEQ ID NO: 6765 - DNA, 35 bp, Homo sapiens
  source 1..35: mol_type = genomic DNA
atcttagctttgggtgctaatggtggagttaaaga

SEQ ID NO: 6766 - DNA, 36 bp, Homo sapiens
  source 1..36: mol_type = genomic DNA
atcttagctttgggtgctaatggtggagttaaagac

SEQ ID NO: 6767 - DNA, 37 bp, Homo sapiens
  source 1..37: mol_type = genomic DNA
atcttagctttgggtgctaatggtggagttaaagact

SEQ ID NO: 6768 - DNA, 44 bp, Homo sapiens
  source 1..44: mol_type = genomic DNA
atcttagctttgggtgctaatggtggagttaaagactttttctc

SEQ ID NO: 6769 - DNA, 48 bp, Homo sapiens
  source 1..48: mol_type = genomic DNA
atcttagctttgggtgctaatggtggagttaaagactttttctctgac

SEQ ID NO: 6770 - DNA, 19 bp, Homo sapiens
  source 1..19: mol_type = genomic DNA
atgaaaacctttttccaag

SEQ ID NO: 6771 - DNA, 21 bp, Homo sapiens
  source 1..21: mol_type = genomic DNA
atgaaaacctttttccaagga

SEQ ID NO: 6772 - DNA, 22 bp, Homo sapiens
  source 1..22: mol_type = genomic DNA
atgaaaacctttttccaaggac

SEQ ID NO: 6773 - DNA, 23 bp, Homo sapiens
  source 1..23: mol_type = genomic DNA
atgaaaacctttttccaaggaca

SEQ ID NO: 6774 - DNA, 24 bp, Homo sapiens
  source 1..24: mol_type = genomic DNA
atgaaaacctttttccaaggacac

SEQ ID NO: 6775 - DNA, 25 bp, Homo sapiens
  source 1..25: mol_type = genomic DNA
atgaaaacctttttccaaggacacc

SEQ ID NO: 6776 - DNA, 26 bp, Homo sapiens
  source 1..26: mol_type = genomic DNA
atgaaaacctttttccaaggacacca

SEQ ID NO: 6777 - DNA, 16 bp, Homo sapiens
  source 1..16: mol_type = genomic DNA
atgagactcttaatct

SEQ ID NO: 6778 - DNA, 17 bp, Homo sapiens
  source 1..17: mol_type = genomic DNA
atgagactcttaatctc

SEQ ID NO: 6779 - DNA, 32 bp, Homo sapiens
  source 1..32: mol_type = genomic DNA
atgagactcttaatctcagggtcgtgggttcg

SEQ ID NO: 6780 - DNA, 16 bp, Homo sapiens
  source 1..16: mol_type = genomic DNA
atgaggccccgggttc

SEQ ID NO: 6781 - DNA, 22 bp, Homo sapiens
  source 1..22: mol_type = genomic DNA
atgaggccccgggttcaatccc

SEQ ID NO: 6782 - DNA, 23 bp, Homo sapiens
  source 1..23: mol_type = genomic DNA
atgaggccccgggttcaatcccc

SEQ ID NO: 6783 - DNA, 27 bp, Homo sapiens
  source 1..27: mol_type = genomic DNA
atgaggccccgggttcaatccccggca

SEQ ID NO: 6784 - DNA, 36 bp, Homo sapiens
  source 1..36: mol_type = genomic DNA
atgaggccccgggttcaatccccggcatctccacca

SEQ ID NO: 6785 - DNA, 26 bp, Homo sapiens
  source 1..26: mol_type = genomic DNA
atgaggccccgggttcgatccccggc

SEQ ID NO: 6786 - DNA, 27 bp, Homo sapiens
  source 1..27: mol_type = genomic DNA
atgaggccccgggttcgatccccggca

SEQ ID NO: 6787 - DNA, 28 bp, Homo sapiens
  source 1..28: mol_type = genomic DNA
atgaggccccgggttcgatccccggcat

SEQ ID NO: 6788 - DNA, 29 bp, Homo sapiens
  source 1..29: mol_type = genomic DNA
atgaggccccgggttcgatccccggcatc

SEQ ID NO: 6789 - DNA, 35 bp, Homo sapiens
  source 1..35: mol_type = genomic DNA
atgaggccccgggttcgatccccggcatctccacc

SEQ ID NO: 6790 - DNA, 36 bp, Homo sapiens
  source 1..36: mol_type = genomic DNA
atgaggccccgggttcgatccccggcatctccacca

SEQ ID NO: 6791 - DNA, 16 bp, Homo sapiens
  source 1..16: mol_type = genomic DNA
atgaggtcccgggttc

SEQ ID NO: 6792 - DNA, 17 bp, Homo sapiens
  source 1..17: mol_type = genomic DNA
atgaggtcccgggttcg

SEQ ID NO: 6793 - DNA, 22 bp, Homo sapiens
  source 1..22: mol_type = genomic DNA
atgaggtcccgggttcgatccc

SEQ ID NO: 6794 - DNA, 32 bp, Homo sapiens
  source 1..32: mol_type = genomic DNA
atgaggtcccgggttcgatccccagcatctcc

SEQ ID NO: 6795 - DNA, 33 bp, Homo sapiens
  source 1..33: mol_type = genomic DNA
atgaggtcccgggttcgatccccagcatctcca

SEQ ID NO: 6796 - DNA, 35 bp, Homo sapiens
  source 1..35: mol_type = genomic DNA
atgaggtcccgggttcgatccccagcatctccacc

SEQ ID NO: 6797 - DNA, 36 bp, Homo sapiens
  source 1..36: mol_type = genomic DNA
atgaggtcccgggttcgatccccagcatctccacca

SEQ ID NO: 6798 - DNA, 26 bp, Homo sapiens
  source 1..26: mol_type = genomic DNA
atgaggtcccgggttcgatccccggc

SEQ ID NO: 6799 - DNA, 18 bp, Homo sapiens
  source 1..18: mol_type = genomic DNA
atgataatcatatttacc

SEQ ID NO: 6800 - DNA, 19 bp, Homo sapiens
  source 1..19: mol_type = genomic DNA
atgataatcatatttacca

SEQ ID NO: 6801 - DNA, 20 bp, Homo sapiens
  source 1..20: mol_type = genomic DNA
atgataatcatatttaccaa

SEQ ID NO: 6802 - DNA, 21 bp, Homo sapiens
  source 1..21: mol_type = genomic DNA
atgataatcatatttaccaac

SEQ ID NO: 6803 - DNA, 22 bp, Homo sapiens
  source 1..22: mol_type = genomic DNA
atgataatcatatttaccaacc

SEQ ID NO: 6804 - DNA, 23 bp, Homo sapiens
  source 1..23: mol_type = genomic DNA
atgataatcatatttaccaacca

SEQ ID NO: 6805 - DNA, 16 bp, Homo sapiens
  source 1..16: mol_type = genomic DNA
atgattctcgcttcgg

SEQ ID NO: 6806 - DNA, 20 bp, Homo sapiens
  source 1..20: mol_type = genomic DNA
atgattctcgcttcgggtgc

SEQ ID NO: 6807 - DNA, 32 bp, Homo sapiens
  source 1..32: mol_type = genomic DNA
atgattctcgcttcgggtgcgagaggtcccgg

SEQ ID NO: 6808 - DNA, 16 bp, Homo sapiens
  source 1..16: mol_type = genomic DNA
atgattctcgctttgg

SEQ ID NO: 6809 - DNA, 19 bp, Homo sapiens
  source 1..19: mol_type = genomic DNA
atgattctcgctttgggtg

SEQ ID NO: 6810 - DNA, 32 bp, Homo sapiens
  source 1..32: mol_type = genomic DNA
atgattctcgctttgggtgcgagaggtcccgg

SEQ ID NO: 6811 - DNA, 24 bp, Homo sapiens
  source 1..24: mol_type = genomic DNA
atgattctcggtttgggtccgaga

SEQ ID NO: 6812 - DNA, 32 bp, Homo sapiens
  source 1..32: mol_type = genomic DNA
atgattctcggtttgggtccgagaggtcccgg

SEQ ID NO: 6813 - DNA, 16 bp, Homo sapiens
  source 1..16: mol_type = genomic DNA
atgatttcgactcatt

SEQ ID NO: 6814 - DNA, 20 bp, Homo sapiens
  source 1..20: mol_type = genomic DNA
atgatttcgactcattaaat

SEQ ID NO: 6815 - DNA, 25 bp, Homo sapiens
  source 1..25: mol_type = genomic DNA
atgatttcgactcattaaattatga

SEQ ID NO: 6816 - DNA, 26 bp, Homo sapiens
  source 1..26: mol_type = genomic DNA
atgatttcgactcattaaattatgat

SEQ ID NO: 6817 - DNA, 27 bp, Homo sapiens
  source 1..27: mol_type = genomic DNA
atgatttcgactcattaaattatgata

SEQ ID NO: 6818 - DNA, 28 bp, Homo sapiens
  source 1..28: mol_type = genomic DNA
atgatttcgactcattaaattatgataa

SEQ ID NO: 6819 - DNA, 29 bp, Homo sapiens
  source 1..29: mol_type = genomic DNA
atgatttcgactcattaaattatgataat

SEQ ID NO: 6820 - DNA, 30 bp, Homo sapiens
  source 1..30: mol_type = genomic DNA
atgatttcgactcattaaattatgataatc

SEQ ID NO: 6821 - DNA, 31 bp, Homo sapiens
  source 1..31: mol_type = genomic DNA
atgatttcgactcattaaattatgataatca

SEQ ID NO: 6822 - DNA, 41 bp, Homo sapiens
  source 1..41: mol_type = genomic DNA
atgatttcgactcattaaattatgataatcatatttaccaa

SEQ ID NO: 6823 - DNA, 42 bp, Homo sapiens
  source 1..42: mol_type = genomic DNA
atgatttcgactcattaaattatgataatcatatttaccaac

SEQ ID NO: 6824 - DNA, 43 bp, Homo sapiens
  source 1..43: mol_type = genomic DNA
atgatttcgactcattaaattatgataatcatatttaccaacc

SEQ ID NO: 6825 - DNA, 44 bp, Homo sapiens
  source 1..44: mol_type = genomic DNA
atgatttcgactcattaaattatgataatcatatttaccaacca

SEQ ID NO: 6826 - DNA, 30 bp, Homo sapiens
  source 1..30: mol_type = genomic DNA
atgcaagattcccattcttgcgacccgggt

SEQ ID NO: 6827 - DNA, 17 bp, Homo sapiens
  source 1..17: mol_type = genomic DNA
atgcagagtggggtttt

SEQ ID NO: 6828 - DNA, 18 bp, Homo sapiens
  source 1..18: mol_type = genomic DNA
atgcagagtggggttttg

SEQ ID NO: 6829 - DNA, 19 bp, Homo sapiens
  source 1..19: mol_type = genomic DNA
atgcagagtggggttttgc

SEQ ID NO: 6830 - DNA, 24 bp, Homo sapiens
  source 1..24: mol_type = genomic DNA
atgcagagtggggttttgcagtcc

SEQ ID NO: 6831 - DNA, 25 bp, Homo sapiens
  source 1..25: mol_type = genomic DNA
atgcagagtggggttttgcagtcct

SEQ ID NO: 6832 - DNA, 27 bp, Homo sapiens
  source 1..27: mol_type = genomic DNA
atgcagagtggggttttgcagtcctta

SEQ ID NO: 6833 - DNA, 28 bp, Homo sapiens
  source 1..28: mol_type = genomic DNA
atgcagagtggggttttgcagtccttac

SEQ ID NO: 6834 - DNA, 29 bp, Homo sapiens
  source 1..29: mol_type = genomic DNA
atgcagagtggggttttgcagtccttacc

SEQ ID NO: 6835 - DNA, 30 bp, Homo sapiens
  source 1..30: mol_type = genomic DNA
atgcagagtggggttttgcagtccttacca

SEQ ID NO: 6836 - DNA, 16 bp, Homo sapiens
  source 1..16: mol_type = genomic DNA
atgcccccatgtctaa

SEQ ID NO: 6837 - DNA, 17 bp, Homo sapiens
  source 1..17: mol_type = genomic DNA
atgcccccatgtctaac

SEQ ID NO: 6838 - DNA, 19 bp, Homo sapiens
  source 1..19: mol_type = genomic DNA
atgcccccatgtctaacaa

SEQ ID NO: 6839 - DNA, 20 bp, Homo sapiens
  source 1..20: mol_type = genomic DNA
atgcccccatgtctaacaac

SEQ ID NO: 6840 - DNA, 21 bp, Homo sapiens
  source 1..21: mol_type = genomic DNA
atgcccccatgtctaacaaca

SEQ ID NO: 6841 - DNA, 24 bp, Homo sapiens
  source 1..24: mol_type = genomic DNA
atgcccccatgtctaacaacatgg

SEQ ID NO: 6842 - DNA, 25 bp, Homo sapiens
  source 1..25: mol_type = genomic DNA
atgcccccatgtctaacaacatggc

SEQ ID NO: 6843 - DNA, 26 bp, Homo sapiens
  source 1..26: mol_type = genomic DNA
atgcccccatgtctaacaacatggct

SEQ ID NO: 6844 - DNA, 27 bp, Homo sapiens
  source 1..27: mol_type = genomic DNA
atgcccccatgtctaacaacatggctt

SEQ ID NO: 6845 - DNA, 28 bp, Homo sapiens
  source 1..28: mol_type = genomic DNA
atgcccccatgtctaacaacatggcttt

SEQ ID NO: 6846 - DNA, 29 bp, Homo sapiens
  source 1..29: mol_type = genomic DNA
atgcccccatgtctaacaacatggctttc

SEQ ID NO: 6847 - DNA, 30 bp, Homo sapiens
  source 1..30: mol_type = genomic DNA
atgcccccatgtctaacaacatggctttct

SEQ ID NO: 6848 - DNA, 31 bp, Homo sapiens
  source 1..31: mol_type = genomic DNA
atgcccccatgtctaacaacatggctttctc

SEQ ID NO: 6849 - DNA, 32 bp, Homo sapiens
  source 1..32: mol_type = genomic DNA
atgcccccatgtctaacaacatggctttctca

SEQ ID NO: 6850 - DNA, 33 bp, Homo sapiens
  source 1..33: mol_type = genomic DNA
atgcccccatgtctaacaacatggctttctcac

SEQ ID NO: 6851 - DNA, 34 bp, Homo sapiens
  source 1..34: mol_type = genomic DNA
atgcccccatgtctaacaacatggctttctcacc

SEQ ID NO: 6852 - DNA, 35 bp, Homo sapiens
  source 1..35: mol_type = genomic DNA
atgcccccatgtctaacaacatggctttctcacca

SEQ ID NO: 6853 - DNA, 19 bp, Homo sapiens
  source 1..19: mol_type = genomic DNA
atgcccgcatcctccacca

SEQ ID NO: 6854 - DNA, 19 bp, Homo sapiens
  source 1..19: mol_type = genomic DNA
atgccgaggttgtgagttc

SEQ ID NO: 6855 - DNA, 25 bp, Homo sapiens
  source 1..25: mol_type = genomic DNA
atgccgaggttgtgagttcgagcct

SEQ ID NO: 6856 - DNA, 32 bp, Homo sapiens
  source 1..32: mol_type = genomic DNA
atgccgaggttgtgagttcgagcctcacctgg

SEQ ID NO: 6857 - DNA, 33 bp, Homo sapiens
  source 1..33: mol_type = genomic DNA
atgccgaggttgtgagttcgagcctcacctgga

SEQ ID NO: 6858 - DNA, 38 bp, Homo sapiens
  source 1..38: mol_type = genomic DNA
atgccgaggttgtgagttcgagcctcacctggagcacc

SEQ ID NO: 6859 - DNA, 22 bp, Homo sapiens
  source 1..22: mol_type = genomic DNA
atgccgaggttgtgagttcgat

SEQ ID NO: 6860 - DNA, 23 bp, Homo sapiens
  source 1..23: mol_type = genomic DNA
atgccgaggttgtgagttcgatc

SEQ ID NO: 6861 - DNA, 24 bp, Homo sapiens
  source 1..24: mol_type = genomic DNA
atgccgaggttgtgagttcgatcc

SEQ ID NO: 6862 - DNA, 25 bp, Homo sapiens
  source 1..25: mol_type = genomic DNA
atgccgaggttgtgagttcgatcct

SEQ ID NO: 6863 - DNA, 21 bp, Homo sapiens
  source 1..21: mol_type = genomic DNA
atgctttgcacgtatgaggcc

SEQ ID NO: 6864 - DNA, 24 bp, Homo sapiens
  source 1..24: mol_type = genomic DNA
atgctttgcacgtatgaggccccg

SEQ ID NO: 6865 - DNA, 25 bp, Homo sapiens
  source 1..25: mol_type = genomic DNA
atgctttgcacgtatgaggccccgg

SEQ ID NO: 6866 - DNA, 26 bp, Homo sapiens
  source 1..26: mol_type = genomic DNA
atgctttgcacgtatgaggccccggg

SEQ ID NO: 6867 - DNA, 38 bp, Homo sapiens
  source 1..38: mol_type = genomic DNA
atgctttgcacgtatgaggccccgggttcaatccccgg

SEQ ID NO: 6868 - DNA, 24 bp, Homo sapiens
  source 1..24: mol_type = genomic DNA
atggacatatgtccgcgtgggttc

SEQ ID NO: 6869 - DNA, 29 bp, Homo sapiens
  source 1..29: mol_type = genomic DNA
atggacatatgtccgcgtgggttcgaacc

SEQ ID NO: 6870 - DNA, 30 bp, Homo sapiens
  source 1..30: mol_type = genomic DNA
atggacatatgtccgcgtgggttcgaaccc

SEQ ID NO: 6871 - DNA, 16 bp, Homo sapiens
  source 1..16: mol_type = genomic DNA
atggacgagcgcgctg

SEQ ID NO: 6872 - DNA, 18 bp, Homo sapiens
  source 1..18: mol_type = genomic DNA
atggacgagcgcgctgga

SEQ ID NO: 6873 - DNA, 19 bp, Homo sapiens
  source 1..19: mol_type = genomic DNA
atggacgagcgcgctggac

SEQ ID NO: 6874 - DNA, 23 bp, Homo sapiens
  source 1..23: mol_type = genomic DNA
atggacgagcgcgctggacttct

SEQ ID NO: 6875 - DNA, 23 bp, Homo sapiens
  source 1..23: mol_type = genomic DNA
atggactgctaatccattgtgct

SEQ ID NO: 6876 - DNA, 37 bp, Homo sapiens
  source 1..37: mol_type = genomic DNA
atggactgctaatccattgtgctctgcacgcgtgggt

SEQ ID NO: 6877 - DNA, 37 bp, Homo sapiens
  source 1..37: mol_type = genomic DNA
atggactgctaatccattgtgctttgcacgcgtgggt

SEQ ID NO: 6878 - DNA, 16 bp, Homo sapiens
  source 1..16: mol_type = genomic DNA
atggaggccatggggt

SEQ ID NO: 6879 - DNA, 17 bp, Homo sapiens
  source 1..17: mol_type = genomic DNA
atggaggccatggggtt

SEQ ID NO: 6880 - DNA, 18 bp, Homo sapiens
  source 1..18: mol_type = genomic DNA
atggaggccatggggttg

SEQ ID NO: 6881 - DNA, 20 bp, Homo sapiens
  source 1..20: mol_type = genomic DNA
atggaggccatggggttggc

SEQ ID NO: 6882 - DNA, 16 bp, Homo sapiens
  source 1..16: mol_type = genomic DNA
atggaggcgtgggttc

SEQ ID NO: 6883 - DNA, 17 bp, Homo sapiens
  source 1..17: mol_type = genomic DNA
atggaggcgtgggttcg

SEQ ID NO: 6884 - DNA, 19 bp, Homo sapiens
  source 1..19: mol_type = genomic DNA
atggaggcgtgggttcgaa

SEQ ID NO: 6885 - DNA, 22 bp, Homo sapiens
  source 1..22: mol_type = genomic DNA
atggaggcgtgggttcgaatcc

SEQ ID NO: 6886 - DNA, 23 bp, Homo sapiens
  source 1..23: mol_type = genomic DNA
atggaggcgtgggttcgaatccc

SEQ ID NO: 6887 - DNA, 24 bp, Homo sapiens
  source 1..24: mol_type = genomic DNA
atggaggcgtgggttcgaatccca

SEQ ID NO: 6888 - DNA, 26 bp, Homo sapiens
  source 1..26: mol_type = genomic DNA
atggaggcgtgggttcgaatcccact

SEQ ID NO: 6889 - DNA, 30 bp, Homo sapiens
  source 1..30: mol_type = genomic DNA
atggaggcgtgggttcgaatcccacttctg

SEQ ID NO: 6890 - DNA, 33 bp, Homo sapiens
  source 1..33: mol_type = genomic DNA
atggaggcgtgggttcgaatcccacttctgaca

SEQ ID NO: 6891 - DNA, 34 bp, Homo sapiens
  source 1..34: mol_type = genomic DNA
atggaggcgtgggttcgaatcccacttctgacac

SEQ ID NO: 6892 - DNA, 35 bp, Homo sapiens
  source 1..35: mol_type = genomic DNA
atggaggcgtgggttcgaatcccacttctgacacc

SEQ ID NO: 6893 - DNA, 36 bp, Homo sapiens
  source 1..36: mol_type = genomic DNA
atggaggcgtgggttcgaatcccacttctgacacca

SEQ ID NO: 6894 - DNA, 17 bp, Homo sapiens
  source 1..17: mol_type = genomic DNA
atggataacgcgtctga

SEQ ID NO: 6895 - DNA, 19 bp, Homo sapiens
  source 1..19: mol_type = genomic DNA
atggataacgcgtctgact

SEQ ID NO: 6896 - DNA, 16 bp, Homo sapiens
  source 1..16: mol_type = genomic DNA
atggataaggcactgg

SEQ ID NO: 6897 - DNA, 17 bp, Homo sapiens
  source 1..17: mol_type = genomic DNA
atggataaggcactggc

SEQ ID NO: 6898 - DNA, 18 bp, Homo sapiens
  source 1..18: mol_type = genomic DNA
atggataaggcactggcc

SEQ ID NO: 6899 - DNA, 21 bp, Homo sapiens
  source 1..21: mol_type = genomic DNA
atggataaggcactggcctcc

SEQ ID NO: 6900 - DNA, 16 bp, Homo sapiens
  source 1..16: mol_type = genomic DNA
atggataaggcatcag

SEQ ID NO: 6901 - DNA, 17 bp, Homo sapiens
  source 1..17: mol_type = genomic DNA
atggataaggcatcagc

SEQ ID NO: 6902 - DNA, 18 bp, Homo sapiens
  source 1..18: mol_type = genomic DNA
atggataaggcatcagcc

SEQ ID NO: 6903 - DNA, 19 bp, Homo sapiens
  source 1..19: mol_type = genomic DNA
atggataaggcatcagcct

SEQ ID NO: 6904 - DNA, 20 bp, Homo sapiens
  source 1..20: mol_type = genomic DNA
atggataaggcatcagcctc

SEQ ID NO: 6905 - DNA, 21 bp, Homo sapiens
  source 1..21: mol_type = genomic DNA
atggataaggcatcagcctcc

SEQ ID NO: 6906 - DNA, 22 bp, Homo sapiens
  source 1..22: mol_type = genomic DNA
atggataaggcatcagcctccg

SEQ ID NO: 6907 - DNA, 28 bp, Homo sapiens
  source 1..28: mol_type = genomic DNA
atggataaggcatcagcctccggagctg

SEQ ID NO: 6908 - DNA, 29 bp, Homo sapiens
  source 1..29: mol_type = genomic DNA
atggataaggcatcagcctccggagctgg

SEQ ID NO: 6909 - DNA, 31 bp, Homo sapiens
  source 1..31: mol_type = genomic DNA
atggataaggcatcagcctccggagctgggg

SEQ ID NO: 6910 - DNA, 36 bp, Homo sapiens
  source 1..36: mol_type = genomic DNA
atggataaggcatcagcctccggagctggggattgt

SEQ ID NO: 6911 - DNA, 16 bp, Homo sapiens
  source 1..16: mol_type = genomic DNA
atggataaggcattgg

SEQ ID NO: 6912 - DNA, 17 bp, Homo sapiens
  source 1..17: mol_type = genomic DNA
atggataaggcattggc

SEQ ID NO: 6913 - DNA, 18 bp, Homo sapiens
  source 1..18: mol_type = genomic DNA
atggataaggcattggcc

SEQ ID NO: 6914 - DNA, 19 bp, Homo sapiens
  source 1..19: mol_type = genomic DNA
atggataaggcattggcct

SEQ ID NO: 6915 - DNA, 21 bp, Homo sapiens
  source 1..21: mol_type = genomic DNA
atggataaggcattggcctcc

SEQ ID NO: 6916 - DNA, 29 bp, Homo sapiens
  source 1..29: mol_type = genomic DNA
atggataaggcattggcctcctaagccag

SEQ ID NO: 6917 - DNA, 16 bp, Homo sapiens
  source 1..16: mol_type = genomic DNA
atggataaggcgtctg

SEQ ID NO: 6918 - DNA, 17 bp, Homo sapiens
  source 1..17: mol_type = genomic DNA
atggataaggcgtctga

SEQ ID NO: 6919 - DNA, 18 bp, Homo sapiens
  source 1..18: mol_type = genomic DNA
atggataaggcgtctgac

SEQ ID NO: 6920 - DNA, 19 bp, Homo sapiens
  source 1..19: mol_type = genomic DNA
atggataaggcgtctgact

SEQ ID NO: 6921 - DNA, 22 bp, Homo sapiens
  source 1..22: mol_type = genomic DNA
atggataaggcgtctgacttcg

SEQ ID NO: 6922 - DNA, 19 bp, Homo sapiens
  source 1..19: mol_type = genomic DNA
atggataaggcgtctgatt

SEQ ID NO: 6923 - DNA, 21 bp, Homo sapiens
  source 1..21: mol_type = genomic DNA
atggataaggcgtctgattcc

SEQ ID NO: 6924 - DNA, 16 bp, Homo sapiens
  source 1..16: mol_type = genomic DNA
atggatagcgcattgg

SEQ ID NO: 6925 - DNA, 17 bp, Homo sapiens
  source 1..17: mol_type = genomic DNA
atggatagcgcattgga

SEQ ID NO: 6926 - DNA, 18 bp, Homo sapiens
  source 1..18: mol_type = genomic DNA
atggatagcgcattggac

SEQ ID NO: 6927 - DNA, 19 bp, Homo sapiens
  source 1..19: mol_type = genomic DNA
atggatagcgcattggact

SEQ ID NO: 6928 - DNA, 21 bp, Homo sapiens
  source 1..21: mol_type = genomic DNA
atggatagcgcattggacttc

SEQ ID NO: 6929 - DNA, 22 bp, Homo sapiens
  source 1..22: mol_type = genomic DNA
atggatagcgcattggacttct

SEQ ID NO: 6930 - DNA, 26 bp, Homo sapiens
  source 1..26: mol_type = genomic DNA
atggatagcgcattggacttctaatt

SEQ ID NO: 6931 - DNA, 23 bp, Homo sapiens
  source 1..23: mol_type = genomic DNA
atggatcgaaaccatcctctgct

SEQ ID NO: 6932 - DNA, 25 bp, Homo sapiens
  source 1..25: mol_type = genomic DNA
atggatcgaaaccatcctctgctac

SEQ ID NO: 6933 - DNA, 26 bp, Homo sapiens
  source 1..26: mol_type = genomic DNA
atggatcgaaaccatcctctgctacc

SEQ ID NO: 6934 - DNA, 27 bp, Homo sapiens
  source 1..27: mol_type = genomic DNA
atggatcgaaaccatcctctgctacca

SEQ ID NO: 6935 - DNA, 23 bp, Homo sapiens
  source 1..23: mol_type = genomic DNA
atggattcatatccgcgtgggtt

SEQ ID NO: 6936 - DNA, 16 bp, Homo sapiens
  source 1..16: mol_type = genomic DNA
atggcagagcccggta

SEQ ID NO: 6937 - DNA, 17 bp, Homo sapiens
  source 1..17: mol_type = genomic DNA
atggcagagcccggtaa

SEQ ID NO: 6938 - DNA, 18 bp, Homo sapiens
  source 1..18: mol_type = genomic DNA
atggcagagcccggtaat

SEQ ID NO: 6939 - DNA, 19 bp, Homo sapiens
  source 1..19: mol_type = genomic DNA
atggcagagcccggtaatc

SEQ ID NO: 6940 - DNA, 20 bp, Homo sapiens
  source 1..20: mol_type = genomic DNA
atggcagagcccggtaatcg

SEQ ID NO: 6941 - DNA, 24 bp, Homo sapiens
  source 1..24: mol_type = genomic DNA
atggcagagcccggtaatcgcata

SEQ ID NO: 6942 - DNA, 27 bp, Homo sapiens
  source 1..27: mol_type = genomic DNA
atggcagagcccggtaatcgcataaaa

SEQ ID NO: 6943 - DNA, 35 bp, Homo sapiens
  source 1..35: mol_type = genomic DNA
atggcagagcccggtaatcgcataaaacttaaaac

SEQ ID NO: 6944 - DNA, 36 bp, Homo sapiens
  source 1..36: mol_type = genomic DNA
atggcagagcccggtaatcgcataaaacttaaaact

SEQ ID NO: 6945 - DNA, 37 bp, Homo sapiens
  source 1..37: mol_type = genomic DNA
atggcagagcccggtaatcgcataaaacttaaaactt

SEQ ID NO: 6946 - DNA, 16 bp, Homo sapiens
  source 1..16: mol_type = genomic DNA
atggccgagcggtcta

SEQ ID NO: 6947 - DNA, 20 bp, Homo sapiens
  source 1..20: mol_type = genomic DNA
atggccgagcggtctaaggc

SEQ ID NO: 6948 - DNA, 20 bp, Homo sapiens
  source 1..20: mol_type = genomic DNA
atggccgagtggtctaaggc

SEQ ID NO: 6949 - DNA, 17 bp, Homo sapiens
  source 1..17: mol_type = genomic DNA
atggccgagtggttaag

SEQ ID NO: 6950 - DNA, 21 bp, Homo sapiens
  source 1..21: mol_type = genomic DNA
atggcgtgggttcgaatccca

SEQ ID NO: 6951 - DNA, 27 bp, Homo sapiens
  source 1..27: mol_type = genomic DNA
atggcgtgggttcgaatcccaccgctg

SEQ ID NO: 6952 - DNA, 32 bp, Homo sapiens
  source 1..32: mol_type = genomic DNA
atggcgtgggttcgaatcccaccgctgccacc

SEQ ID NO: 6953 - DNA, 22 bp, Homo sapiens
  source 1..22: mol_type = genomic DNA
atggctgagtgaagcattggac

SEQ ID NO: 6954 - DNA, 23 bp, Homo sapiens
  source 1..23: mol_type = genomic DNA
atggctgagtgaagcattggact

SEQ ID NO: 6955 - DNA, 24 bp, Homo sapiens
  source 1..24: mol_type = genomic DNA
atggctgagtgaagcattggactg

SEQ ID NO: 6956 - DNA, 25 bp, Homo sapiens
  source 1..25: mol_type = genomic DNA
atggctgagtgaagcattggactgt

SEQ ID NO: 6957 - DNA, 26 bp, Homo sapiens
  source 1..26: mol_type = genomic DNA
atggctgagtgaagcattggactgta

SEQ ID NO: 6958 - DNA, 27 bp, Homo sapiens
  source 1..27: mol_type = genomic DNA
atggctgagtgaagcattggactgtaa

SEQ ID NO: 6959 - DNA, 28 bp, Homo sapiens
  source 1..28: mol_type = genomic DNA
atggctgagtgaagcattggactgtaaa

SEQ ID NO: 6960 - DNA, 18 bp, Homo sapiens
  source 1..18: mol_type = genomic DNA
atggctgagtggttaagg

SEQ ID NO: 6961 - DNA, 16 bp, Homo sapiens
  source 1..16: mol_type = genomic DNA
atgggactcttaatcc

SEQ ID NO: 6962 - DNA, 17 bp, Homo sapiens
  source 1..17: mol_type = genomic DNA
atgggactcttaatccc

SEQ ID NO: 6963 - DNA, 25 bp, Homo sapiens
  source 1..25: mol_type = genomic DNA
atgggactcttaatcccagggtcgt

SEQ ID NO: 6964 - DNA, 28 bp, Homo sapiens
  source 1..28: mol_type = genomic DNA
atgggactcttaatcccagggtcgtggg

SEQ ID NO: 6965 - DNA, 30 bp, Homo sapiens
  source 1..30: mol_type = genomic DNA
atgggactcttaatcccagggtcgtgggtt

SEQ ID NO: 6966 - DNA, 17 bp, Homo sapiens
  source 1..17: mol_type = genomic DNA
atgggactcttaatctc

SEQ ID NO: 6967 - DNA, 23 bp, Homo sapiens
  source 1..23: mol_type = genomic DNA
atggggtctccccgcgcaggttc

SEQ ID NO: 6968 - DNA, 19 bp, Homo sapiens
  source 1..19: mol_type = genomic DNA
atggggtgtgataggtggc

SEQ ID NO: 6969 - DNA, 20 bp, Homo sapiens
  source 1..20: mol_type = genomic DNA
atggggtgtgataggtggca

SEQ ID NO: 6970 - DNA, 22 bp, Homo sapiens
  source 1..22: mol_type = genomic DNA
atggggtgtgataggtggcacg

SEQ ID NO: 6971 - DNA, 25 bp, Homo sapiens
  source 1..25: mol_type = genomic DNA
atggggtgtgataggtggcacggag

SEQ ID NO: 6972 - DNA, 26 bp, Homo sapiens
  source 1..26: mol_type = genomic DNA
atggggtgtgataggtggcacggaga

SEQ ID NO: 6973 - DNA, 27 bp, Homo sapiens
  source 1..27: mol_type = genomic DNA
atggggtgtgataggtggcacggagaa

SEQ ID NO: 6974 - DNA, 28 bp, Homo sapiens
  source 1..28: mol_type = genomic DNA
atggggtgtgataggtggcacggagaat

SEQ ID NO: 6975 - DNA, 29 bp, Homo sapiens
  source 1..29: mol_type = genomic DNA
atggggtgtgataggtggcacggagaatt

SEQ ID NO: 6976 - DNA, 30 bp, Homo sapiens
  source 1..30: mol_type = genomic DNA
atggggtgtgataggtggcacggagaattt

SEQ ID NO: 6977 - DNA, 31 bp, Homo sapiens
  source 1..31: mol_type = genomic DNA
atggggtgtgataggtggcacggagaatttt

SEQ ID NO: 6978 - DNA, 32 bp, Homo sapiens
  source 1..32: mol_type = genomic DNA
atggggtgtgataggtggcacggagaattttg

SEQ ID NO: 6979 - DNA, 33 bp, Homo sapiens
  source 1..33: mol_type = genomic DNA
atggggtgtgataggtggcacggagaattttgg

SEQ ID NO: 6980 - DNA, 16 bp, Homo sapiens
  source 1..16: mol_type = genomic DNA
atggggttggcttgaa

SEQ ID NO: 6981 - DNA, 16 bp, Homo sapiens
  source 1..16: mol_type = genomic DNA
atgggtggttcagtgg

SEQ ID NO: 6982 - DNA, 17 bp, Homo sapiens
  source 1..17: mol_type = genomic DNA
atgggtggttcagtggt

SEQ ID NO: 6983 - DNA, 18 bp, Homo sapiens
  source 1..18: mol_type = genomic DNA
atgggtggttcagtggta

SEQ ID NO: 6984 - DNA, 19 bp, Homo sapiens
  source 1..19: mol_type = genomic DNA
atgggtggttcagtggtag

SEQ ID NO: 6985 - DNA, 20 bp, Homo sapiens
  source 1..20: mol_type = genomic DNA
atgggtggttcagtggtaga

SEQ ID NO: 6986 - DNA, 21 bp, Homo sapiens
  source 1..21: mol_type = genomic DNA
atgggtggttcagtggtagaa

SEQ ID NO: 6987 - DNA, 22 bp, Homo sapiens
  source 1..22: mol_type = genomic DNA
atgggtggttcagtggtagaat

SEQ ID NO: 6988 - DNA, 23 bp, Homo sapiens
  source 1..23: mol_type = genomic DNA
atgggtggttcagtggtagaatt

SEQ ID NO: 6989 - DNA, 24 bp, Homo sapiens
  source 1..24: mol_type = genomic DNA
atgggtggttcagtggtagaattc

SEQ ID NO: 6990 - DNA, 25 bp, Homo sapiens
  source 1..25: mol_type = genomic DNA
atgggtggttcagtggtagaattct

SEQ ID NO: 6991 - DNA, 26 bp, Homo sapiens
  source 1..26: mol_type = genomic DNA
atgggtggttcagtggtagaattctc

SEQ ID NO: 6992 - DNA, 27 bp, Homo sapiens
  source 1..27: mol_type = genomic DNA
atgggtggttcagtggtagaattctcg

SEQ ID NO: 6993 - DNA, 28 bp, Homo sapiens
  source 1..28: mol_type = genomic DNA
atgggtggttcagtggtagaattctcgc

SEQ ID NO: 6994 - DNA, 29 bp, Homo sapiens
  source 1..29: mol_type = genomic DNA
atgggtggttcagtggtagaattctcgcc

SEQ ID NO: 6995 - DNA, 30 bp, Homo sapiens
  source 1..30: mol_type = genomic DNA
atgggtggttcagtggtagaattctcgcct

SEQ ID NO: 6996 - DNA, 31 bp, Homo sapiens
  source 1..31: mol_type = genomic DNA
atgggtggttcagtggtagaattctcgcctg

SEQ ID NO: 6997 - DNA, 32 bp, Homo sapiens
  source 1..32: mol_type = genomic DNA
atgggtggttcagtggtagaattctcgcctgc

SEQ ID NO: 6998 - DNA, 33 bp, Homo sapiens
  source 1..33: mol_type = genomic DNA
atgggtggttcagtggtagaattctcgcctgcc

SEQ ID NO: 6999 - DNA, 34 bp, Homo sapiens
  source 1..34: mol_type = genomic DNA
atgggtggttcagtggtagaattctcgcctgcca

SEQ ID NO: 7000 - DNA, 35 bp, Homo sapiens
  source 1..35: mol_type = genomic DNA
atgggtggttcagtggtagaattctcgcctgccac

SEQ ID NO: 7001 - DNA, 36 bp, Homo sapiens
  source 1..36: mol_type = genomic DNA
atgggtggttcagtggtagaattctcgcctgccacg

SEQ ID NO: 7002 - DNA, 37 bp, Homo sapiens
  source 1..37: mol_type = genomic DNA
atgggtggttcagtggtagaattctcgcctgccacgc

SEQ ID NO: 7003 - DNA, 38 bp, Homo sapiens
  source 1..38: mol_type = genomic DNA
atgggtggttcagtggtagaattctcgcctgccacgcg

SEQ ID NO: 7004 - DNA, 39 bp, Homo sapiens
  source 1..39: mol_type = genomic DNA
atgggtggttcagtggtagaattctcgcctgccacgcgg

SEQ ID NO: 7005 - DNA, 40 bp, Homo sapiens
  source 1..40: mol_type = genomic DNA
atgggtggttcagtggtagaattctcgcctgccacgcggg

SEQ ID NO: 7006 - DNA, 41 bp, Homo sapiens
  source 1..41: mol_type = genomic DNA
atgggtggttcagtggtagaattctcgcctgccacgcggga

SEQ ID NO: 7007 - DNA, 42 bp, Homo sapiens
  source 1..42: mol_type = genomic DNA
atgggtggttcagtggtagaattctcgcctgccacgcgggag

SEQ ID NO: 7008 - DNA, 43 bp, Homo sapiens
  source 1..43: mol_type = genomic DNA
atgggtggttcagtggtagaattctcgcctgccacgcgggagg

SEQ ID NO: 7009 - DNA, 44 bp, Homo sapiens
  source 1..44: mol_type = genomic DNA
atgggtggttcagtggtagaattctcgcctgccacgcgggaggc

SEQ ID NO: 7010 - DNA, 45 bp, Homo sapiens
  source 1..45: mol_type = genomic DNA
atgggtggttcagtggtagaattctcgcctgccacgcgggaggcc

SEQ ID NO: 7011 - DNA, 46 bp, Homo sapiens
  source 1..46: mol_type = genomic DNA
atgggtggttcagtggtagaattctcgcctgccacgcgggaggccc

SEQ ID NO: 7012 - DNA, 47 bp, Homo sapiens
  source 1..47: mol_type = genomic DNA
atgggtggttcagtggtagaattctcgcctgccacgcgggaggcccg

SEQ ID NO: 7013 - DNA, 23 bp, Homo sapiens
  source 1..23: mol_type = genomic DNA
atgggttcgattctcatagtcct

SEQ ID NO: 7014 - DNA, 25 bp, Homo sapiens
  source 1..25: mol_type = genomic DNA
atgggttcgattctcatagtcctag

SEQ ID NO: 7015 - DNA, 26 bp, Homo sapiens
  source 1..26: mol_type = genomic DNA
atgggttcgattctcatagtcctagc

SEQ ID NO: 7016 - DNA, 27 bp, Homo sapiens
  source 1..27: mol_type = genomic DNA
atgggttcgattctcatagtcctagcc

SEQ ID NO: 7017 - DNA, 28 bp, Homo sapiens
  source 1..28: mol_type = genomic DNA
atgggttcgattctcatagtcctagcca

SEQ ID NO: 7018 - DNA, 16 bp, Homo sapiens
  source 1..16: mol_type = genomic DNA
atggtaagcactctgg

SEQ ID NO: 7019 - DNA, 17 bp, Homo sapiens
  source 1..17: mol_type = genomic DNA
atggtaagcactctgga

SEQ ID NO: 7020 - DNA, 19 bp, Homo sapiens
  source 1..19: mol_type = genomic DNA
atggtaagcactctggact

SEQ ID NO: 7021 - DNA, 24 bp, Homo sapiens
  source 1..24: mol_type = genomic DNA
atggtaagcactctggactctgaa

SEQ ID NO: 7022 - DNA, 28 bp, Homo sapiens
  source 1..28: mol_type = genomic DNA
atggtaagcactctggactctgaatcca

SEQ ID NO: 7023 - DNA, 16 bp, Homo sapiens
  source 1..16: mol_type = genomic DNA
atggtagagcgctcgc

SEQ ID NO: 7024 - DNA, 17 bp, Homo sapiens
  source 1..17: mol_type = genomic DNA
atggtagagcgctcgct

SEQ ID NO: 7025 - DNA, 19 bp, Homo sapiens
  source 1..19: mol_type = genomic DNA
atggtcagcactctggact

SEQ ID NO: 7026 - DNA, 19 bp, Homo sapiens
  source 1..19: mol_type = genomic DNA
atggtctagcggttaggat

SEQ ID NO: 7027 - DNA, 20 bp, Homo sapiens
  source 1..20: mol_type = genomic DNA
atggtctagcggttaggatt

SEQ ID NO: 7028 - DNA, 22 bp, Homo sapiens
  source 1..22: mol_type = genomic DNA
atggtctagcggttaggattcc

SEQ ID NO: 7029 - DNA, 23 bp, Homo sapiens
  source 1..23: mol_type = genomic DNA
atggtctagcggttaggattcct

SEQ ID NO: 7030 - DNA, 24 bp, Homo sapiens
  source 1..24: mol_type = genomic DNA
atggtctagcggttaggattcctg

SEQ ID NO: 7031 - DNA, 25 bp, Homo sapiens
  source 1..25: mol_type = genomic DNA
atggtctagcggttaggattcctgg

SEQ ID NO: 7032 - DNA, 26 bp, Homo sapiens
  source 1..26: mol_type = genomic DNA
atggtctagcggttaggattcctggt

SEQ ID NO: 7033 - DNA, 27 bp, Homo sapiens
  source 1..27: mol_type = genomic DNA
atggtctagcggttaggattcctggtt

SEQ ID NO: 7034 - DNA, 28 bp, Homo sapiens
  source 1..28: mol_type = genomic DNA
atggtctagcggttaggattcctggttt

SEQ ID NO: 7035 - DNA, 29 bp, Homo sapiens
  source 1..29: mol_type = genomic DNA
atggtctagcggttaggattcctggtttt

SEQ ID NO: 7036 - DNA, 30 bp, Homo sapiens
  source 1..30: mol_type = genomic DNA
atggtctagcggttaggattcctggttttc

SEQ ID NO: 7037 - DNA, 31 bp, Homo sapiens
  source 1..31: mol_type = genomic DNA
atggtctagcggttaggattcctggttttca

SEQ ID NO: 7038 - DNA, 32 bp, Homo sapiens
  source 1..32: mol_type = genomic DNA
atggtctagcggttaggattcctggttttcac

SEQ ID NO: 7039 - DNA, 35 bp, Homo sapiens
  source 1..35: mol_type = genomic DNA
atggtctagcggttaggattcctggttttcaccca

SEQ ID NO: 7040 - DNA, 38 bp, Homo sapiens
  source 1..38: mol_type = genomic DNA
atggtctagcggttaggattcctggttttcacccaggc

SEQ ID NO: 7041 - DNA, 16 bp, Homo sapiens
  source 1..16: mol_type = genomic DNA
atggtgagcactctgg

SEQ ID NO: 7042 - DNA, 17 bp, Homo sapiens
  source 1..17: mol_type = genomic DNA
atggtgagcactctgga

SEQ ID NO: 7043 - DNA, 18 bp, Homo sapiens
  source 1..18: mol_type = genomic DNA
atggtgagcactctggac

SEQ ID NO: 7044 - DNA, 19 bp, Homo sapiens
  source 1..19: mol_type = genomic DNA
atggtgagcactctggact

SEQ ID NO: 7045 - DNA, 20 bp, Homo sapiens
  source 1..20: mol_type = genomic DNA
atggtgagcactctggactc

SEQ ID NO: 7046 - DNA, 21 bp, Homo sapiens
  source 1..21: mol_type = genomic DNA
atggtgagcactctggactct

SEQ ID NO: 7047 - DNA, 22 bp, Homo sapiens
  source 1..22: mol_type = genomic DNA
atggtgagcactctggactctg

SEQ ID NO: 7048 - DNA, 23 bp, Homo sapiens
  source 1..23: mol_type = genomic DNA
atggtgagcactctggactctga

SEQ ID NO: 7049 - DNA, 26 bp, Homo sapiens
  source 1..26: mol_type = genomic DNA
atggtgagcactctggactctgaatc

SEQ ID NO: 7050 - DNA, 27 bp, Homo sapiens
  source 1..27: mol_type = genomic DNA
atggtgagcactctggactctgaatcc

SEQ ID NO: 7051 - DNA, 28 bp, Homo sapiens
  source 1..28: mol_type = genomic DNA
atggtgagcactctggactctgaatcca

SEQ ID NO: 7052 - DNA, 30 bp, Homo sapiens
  source 1..30: mol_type = genomic DNA
atggtgagcactctggactctgaatccagc

SEQ ID NO: 7053 - DNA, 31 bp, Homo sapiens
  source 1..31: mol_type = genomic DNA
atggtgagcactctggactctgaatccagcg

SEQ ID NO: 7054 - DNA, 35 bp, Homo sapiens
  source 1..35: mol_type = genomic DNA
atggtgagcactctggactctgaatccagcgatcc

SEQ ID NO: 7055 - DNA, 17 bp, Homo sapiens
  source 1..17: mol_type = genomic DNA
atggtgagcactttgga

SEQ ID NO: 7056 - DNA, 16 bp, Homo sapiens
  source 1..16: mol_type = genomic DNA
atggtggagttaaaga

SEQ ID NO: 7057 - DNA, 17 bp, Homo sapiens
  source 1..17: mol_type = genomic DNA
atggtggagttaaagac

SEQ ID NO: 7058 - DNA, 18 bp, Homo sapiens
  source 1..18: mol_type = genomic DNA
atggtggagttaaagact

SEQ ID NO: 7059 - DNA, 19 bp, Homo sapiens
  source 1..19: mol_type = genomic DNA
atggtggagttaaagactt

SEQ ID NO: 7060 - DNA, 20 bp, Homo sapiens
  source 1..20: mol_type = genomic DNA
atggtggagttaaagacttt

SEQ ID NO: 7061 - DNA, 21 bp, Homo sapiens
  source 1..21: mol_type = genomic DNA
atggtggagttaaagactttt

SEQ ID NO: 7062 - DNA, 22 bp, Homo sapiens
  source 1..22: mol_type = genomic DNA
atggtggagttaaagacttttt

SEQ ID NO: 7063 - DNA, 25 bp, Homo sapiens
  source 1..25: mol_type = genomic DNA
atggtggagttaaagactttttctc

SEQ ID NO: 7064 - DNA, 26 bp, Homo sapiens
  source 1..26: mol_type = genomic DNA
atggtggagttaaagactttttctct

SEQ ID NO: 7065 - DNA, 27 bp, Homo sapiens
  source 1..27: mol_type = genomic DNA
atggtggagttaaagactttttctctg

SEQ ID NO: 7066 - DNA, 28 bp, Homo sapiens
  source 1..28: mol_type = genomic DNA
atggtggagttaaagactttttctctga

SEQ ID NO: 7067 - DNA, 29 bp, Homo sapiens
  source 1..29: mol_type = genomic DNA
atggtggagttaaagactttttctctgac

SEQ ID NO: 7068 - DNA, 30 bp, Homo sapiens
  source 1..30: mol_type = genomic DNA
atggtggagttaaagactttttctctgacc

SEQ ID NO: 7069 - DNA, 31 bp, Homo sapiens
  source 1..31: mol_type = genomic DNA
atggtggagttaaagactttttctctgacca

SEQ ID NO: 7070 - DNA, 25 bp, Homo sapiens
  source 1..25: mol_type = genomic DNA
atggtggttcagtggtagaattctc

SEQ ID NO: 7071 - DNA, 27 bp, Homo sapiens
  source 1..27: mol_type = genomic DNA
atggtggttcagtggtagaattctcgc

SEQ ID NO: 7072 - DNA, 29 bp, Homo sapiens
  source 1..29: mol_type = genomic DNA
atggtggttcagtggtagaattctcgcct

SEQ ID NO: 7073 - DNA, 27 bp, Homo sapiens
  source 1..27: mol_type = genomic DNA
atggtgtaatggtaagcactctggact

SEQ ID NO: 7074 - DNA, 27 bp, Homo sapiens
  source 1..27: mol_type = genomic DNA
atggtgtaatggtcagcactctggact

SEQ ID NO: 7075 - DNA, 17 bp, Homo sapiens
  source 1..17: mol_type = genomic DNA
atggtgtaatggtgagc

SEQ ID NO: 7076 - DNA, 25 bp, Homo sapiens
  source 1..25: mol_type = genomic DNA
atggtgtaatggtgagcactctgga

SEQ ID NO: 7077 - DNA, 26 bp, Homo sapiens
  source 1..26: mol_type = genomic DNA
atggtgtaatggtgagcactctggac

SEQ ID NO: 7078 - DNA, 28 bp, Homo sapiens
  source 1..28: mol_type = genomic DNA
atggtgtaatggtgagcactctggactc

SEQ ID NO: 7079 - DNA, 29 bp, Homo sapiens
  source 1..29: mol_type = genomic DNA
atggtgtaatggtgagcactctggactct

SEQ ID NO: 7080 - DNA, 30 bp, Homo sapiens
  source 1..30: mol_type = genomic DNA
atggtgtaatggtgagcactctggactctg

SEQ ID NO: 7081 - DNA, 29 bp, Homo sapiens
  source 1..29: mol_type = genomic DNA
atggtgtaatggtgagcactttggactct

SEQ ID NO: 7082 - DNA, 17 bp, Homo sapiens
  source 1..17: mol_type = genomic DNA
atggtgtaatggttagc

SEQ ID NO: 7083 - DNA, 18 bp, Homo sapiens
  source 1..18: mol_type = genomic DNA
atggtgtaatggttagca

SEQ ID NO: 7084 - DNA, 21 bp, Homo sapiens
  source 1..21: mol_type = genomic DNA
atggtgtaatggttagcactc

SEQ ID NO: 7085 - DNA, 23 bp, Homo sapiens
  source 1..23: mol_type = genomic DNA
atggtgtaatggttagcactctg

SEQ ID NO: 7086 - DNA, 24 bp, Homo sapiens
  source 1..24: mol_type = genomic DNA
atggtgtaatggttagcactctgg

SEQ ID NO: 7087 - DNA, 25 bp, Homo sapiens
  source 1..25: mol_type = genomic DNA
atggtgtaatggttagcactctgga

SEQ ID NO: 7088 - DNA, 26 bp, Homo sapiens
  source 1..26: mol_type = genomic DNA
atggtgtaatggttagcactctggac

SEQ ID NO: 7089 - DNA, 27 bp, Homo sapiens
  source 1..27: mol_type = genomic DNA
atggtgtaatggttagcactctggact

SEQ ID NO: 7090 - DNA, 28 bp, Homo sapiens
  source 1..28: mol_type = genomic DNA
atggtgtaatggttagcactctggactc

SEQ ID NO: 7091 - DNA, 29 bp, Homo sapiens
  source 1..29: mol_type = genomic DNA
atggtgtaatggttagcactctggactct

SEQ ID NO: 7092 - DNA, 30 bp, Homo sapiens
  source 1..30: mol_type = genomic DNA
atggtgtaatggttagcactctggactctg

SEQ ID NO: 7093 - DNA, 31 bp, Homo sapiens
  source 1..31: mol_type = genomic DNA
atggtgtaatggttagcactctggactctga

SEQ ID NO: 7094 - DNA, 32 bp, Homo sapiens
  source 1..32: mol_type = genomic DNA
atggtgtaatggttagcactctggactctgaa

SEQ ID NO: 7095 - DNA, 34 bp, Homo sapiens
  source 1..34: mol_type = genomic DNA
atggtgtaatggttagcactctggactctgaatc

SEQ ID NO: 7096 - DNA, 28 bp, Homo sapiens
  source 1..28: mol_type = genomic DNA
atggtgtaatggttagcactctggactt

SEQ ID NO: 7097 - DNA, 30 bp, Homo sapiens
  source 1..30: mol_type = genomic DNA
atggtgtaatggttagcactctggactttg

SEQ ID NO: 7098 - DNA, 16 bp, Homo sapiens
  source 1..16: mol_type = genomic DNA
atggttagcactctgg

SEQ ID NO: 7099 - DNA, 17 bp, Homo sapiens
  source 1..17: mol_type = genomic DNA
atggttagcactctgga

SEQ ID NO: 7100 - DNA, 18 bp, Homo sapiens
  source 1..18: mol_type = genomic DNA
atggttagcactctggac

SEQ ID NO: 7101 - DNA, 19 bp, Homo sapiens
  source 1..19: mol_type = genomic DNA
atggttagcactctggact

SEQ ID NO: 7102 - DNA, 20 bp, Homo sapiens
  source 1..20: mol_type = genomic DNA
atggttagcactctggactc

SEQ ID NO: 7103 - DNA, 21 bp, Homo sapiens
  source 1..21: mol_type = genomic DNA
atggttagcactctggactct

SEQ ID NO: 7104 - DNA, 22 bp, Homo sapiens
  source 1..22: mol_type = genomic DNA
atggttagcactctggactctg

SEQ ID NO: 7105 - DNA, 23 bp, Homo sapiens
  source 1..23: mol_type = genomic DNA
atggttagcactctggactctga

SEQ ID NO: 7106 - DNA, 24 bp, Homo sapiens
  source 1..24: mol_type = genomic DNA
atggttagcactctggactctgaa

SEQ ID NO: 7107 - DNA, 25 bp, Homo sapiens
  source 1..25: mol_type = genomic DNA
atggttagcactctggactctgaat

SEQ ID NO: 7108 - DNA, 26 bp, Homo sapiens
  source 1..26: mol_type = genomic DNA
atggttagcactctggactctgaatc

SEQ ID NO: 7109 - DNA, 27 bp, Homo sapiens
  source 1..27: mol_type = genomic DNA
atggttagcactctggactctgaatcc

SEQ ID NO: 7110 - DNA, 28 bp, Homo sapiens
  source 1..28: mol_type = genomic DNA
atggttagcactctggactctgaatcca

SEQ ID NO: 7111 - DNA, 30 bp, Homo sapiens
  source 1..30: mol_type = genomic DNA
atggttagcactctggactctgaatccagc

SEQ ID NO: 7112 - DNA, 31 bp, Homo sapiens
  source 1..31: mol_type = genomic DNA
atggttagcactctggactctgaatccagcg

SEQ ID NO: 7113 - DNA, 34 bp, Homo sapiens
  source 1..34: mol_type = genomic DNA
atggttagcactctggactctgaatccagcgatc

SEQ ID NO: 7114 - DNA, 35 bp, Homo sapiens
  source 1..35: mol_type = genomic DNA
atggttagcactctggactctgaatccagcgatcc

SEQ ID NO: 7115 - DNA, 37 bp, Homo sapiens
  source 1..37: mol_type = genomic DNA
atggttagcactctggactctgaatccagcgatccga

SEQ ID NO: 7116 - DNA, 38 bp, Homo sapiens
  source 1..38: mol_type = genomic DNA
atggttagcactctggactctgaatccagcgatccgag

SEQ ID NO: 7117 - DNA, 39 bp, Homo sapiens
  source 1..39: mol_type = genomic DNA
atggttagcactctggactctgaatccagcgatccgagt

SEQ ID NO: 7118 - DNA, 41 bp, Homo sapiens
  source 1..41: mol_type = genomic DNA
atggttagcactctggactctgaatccagcgatccgagttc

SEQ ID NO: 7119 - DNA, 42 bp, Homo sapiens
  source 1..42: mol_type = genomic DNA
atggttagcactctggactctgaatccagcgatccgagttca

SEQ ID NO: 7120 - DNA, 20 bp, Homo sapiens
  source 1..20: mol_type = genomic DNA
atggttagcactctggactt

SEQ ID NO: 7121 - DNA, 22 bp, Homo sapiens
  source 1..22: mol_type = genomic DNA
atggttagcactctggactttg

SEQ ID NO: 7122 - DNA, 23 bp, Homo sapiens
  source 1..23: mol_type = genomic DNA
atggttagcactctggactttga

SEQ ID NO: 7123 - DNA, 24 bp, Homo sapiens
  source 1..24: mol_type = genomic DNA
atggttagcactctggactttgaa

SEQ ID NO: 7124 - DNA, 25 bp, Homo sapiens
  source 1..25: mol_type = genomic DNA
atggttagcactctggactttgaat

SEQ ID NO: 7125 - DNA, 26 bp, Homo sapiens
  source 1..26: mol_type = genomic DNA
atggttagcactctggactttgaatc

SEQ ID NO: 7126 - DNA, 27 bp, Homo sapiens
  source 1..27: mol_type = genomic DNA
atggttagcactctggactttgaatcc

SEQ ID NO: 7127 - DNA, 28 bp, Homo sapiens
  source 1..28: mol_type = genomic DNA
atggttagcactctggactttgaatcca

SEQ ID NO: 7128 - DNA, 30 bp, Homo sapiens
  source 1..30: mol_type = genomic DNA
atggttagcactctggactttgaatccagc

SEQ ID NO: 7129 - DNA, 42 bp, Homo sapiens
  source 1..42: mol_type = genomic DNA
atggttagcactctggactttgaatccagcgatccgagttca

SEQ ID NO: 7130 - DNA, 22 bp, Homo sapiens
  source 1..22: mol_type = genomic DNA
atggtttttcatatcattggtc

SEQ ID NO: 7131 - DNA, 23 bp, Homo sapiens
  source 1..23: mol_type = genomic DNA
atggtttttcatatcattggtcg

SEQ ID NO: 7132 - DNA, 24 bp, Homo sapiens
  source 1..24: mol_type = genomic DNA
atggtttttcatatcattggtcgt

SEQ ID NO: 7133 - DNA, 25 bp, Homo sapiens
  source 1..25: mol_type = genomic DNA
atggtttttcatatcattggtcgtg

SEQ ID NO: 7134 - DNA, 26 bp, Homo sapiens
  source 1..26: mol_type = genomic DNA
atggtttttcatatcattggtcgtgg

SEQ ID NO: 7135 - DNA, 27 bp, Homo sapiens
  source 1..27: mol_type = genomic DNA
atggtttttcatatcattggtcgtggt

SEQ ID NO: 7136 - DNA, 28 bp, Homo sapiens
  source 1..28: mol_type = genomic DNA
atggtttttcatatcattggtcgtggtt

SEQ ID NO: 7137 - DNA, 29 bp, Homo sapiens
  source 1..29: mol_type = genomic DNA
atggtttttcatatcattggtcgtggttg

SEQ ID NO: 7138 - DNA, 30 bp, Homo sapiens
  source 1..30: mol_type = genomic DNA
atggtttttcatatcattggtcgtggttgt

SEQ ID NO: 7139 - DNA, 31 bp, Homo sapiens
  source 1..31: mol_type = genomic DNA
atggtttttcatatcattggtcgtggttgta

SEQ ID NO: 7140 - DNA, 32 bp, Homo sapiens
  source 1..32: mol_type = genomic DNA
atggtttttcatatcattggtcgtggttgtag

SEQ ID NO: 7141 - DNA, 33 bp, Homo sapiens
  source 1..33: mol_type = genomic DNA
atggtttttcatatcattggtcgtggttgtagt

SEQ ID NO: 7142 - DNA, 34 bp, Homo sapiens
  source 1..34: mol_type = genomic DNA
atggtttttcatatcattggtcgtggttgtagtc

SEQ ID NO: 7143 - DNA, 35 bp, Homo sapiens
  source 1..35: mol_type = genomic DNA
atggtttttcatatcattggtcgtggttgtagtcc

SEQ ID NO: 7144 - DNA, 36 bp, Homo sapiens
  source 1..36: mol_type = genomic DNA
atggtttttcatatcattggtcgtggttgtagtccg

SEQ ID NO: 7145 - DNA, 37 bp, Homo sapiens
  source 1..37: mol_type = genomic DNA
atggtttttcatatcattggtcgtggttgtagtccgt

SEQ ID NO: 7146 - DNA, 38 bp, Homo sapiens
  source 1..38: mol_type = genomic DNA
atggtttttcatatcattggtcgtggttgtagtccgtg

SEQ ID NO: 7147 - DNA, 39 bp, Homo sapiens
  source 1..39: mol_type = genomic DNA
atggtttttcatatcattggtcgtggttgtagtccgtgc

SEQ ID NO: 7148 - DNA, 40 bp, Homo sapiens
  source 1..40: mol_type = genomic DNA
atggtttttcatatcattggtcgtggttgtagtccgtgcg

SEQ ID NO: 7149 - DNA, 41 bp, Homo sapiens
  source 1..41: mol_type = genomic DNA
atggtttttcatatcattggtcgtggttgtagtccgtgcga

SEQ ID NO: 7150 - DNA, 42 bp, Homo sapiens
  source 1..42: mol_type = genomic DNA
atggtttttcatatcattggtcgtggttgtagtccgtgcgag

SEQ ID NO: 7151 - DNA, 43 bp, Homo sapiens
  source 1..43: mol_type = genomic DNA
atggtttttcatatcattggtcgtggttgtagtccgtgcgaga

SEQ ID NO: 7152 - DNA, 44 bp, Homo sapiens
  source 1..44: mol_type = genomic DNA
atggtttttcatatcattggtcgtggttgtagtccgtgcgagaa

SEQ ID NO: 7153 - DNA, 45 bp, Homo sapiens
  source 1..45: mol_type = genomic DNA
atggtttttcatatcattggtcgtggttgtagtccgtgcgagaat

SEQ ID NO: 7154 - DNA, 46 bp, Homo sapiens
  source 1..46: mol_type = genomic DNA
atggtttttcatatcattggtcgtggttgtagtccgtgcgagaata

SEQ ID NO: 7155 - DNA, 47 bp, Homo sapiens
  source 1..47: mol_type = genomic DNA
atggtttttcatatcattggtcgtggttgtagtccgtgcgagaatac

SEQ ID NO: 7156 - DNA, 48 bp, Homo sapiens
  source 1..48: mol_type = genomic DNA
atggtttttcatatcattggtcgtggttgtagtccgtgcgagaatacc

SEQ ID NO: 7157 - DNA, 16 bp, Homo sapiens
  source 1..16: mol_type = genomic DNA
atgtagctcagtggta

SEQ ID NO: 7158 - DNA, 17 bp, Homo sapiens
  source 1..17: mol_type = genomic DNA
atgtagctcagtggtag

SEQ ID NO: 7159 - DNA, 18 bp, Homo sapiens
  source 1..18: mol_type = genomic DNA
atgtagctcagtggtaga

SEQ ID NO: 7160 - DNA, 19 bp, Homo sapiens
  source 1..19: mol_type = genomic DNA
atgtagctcagtggtagag

SEQ ID NO: 7161 - DNA, 16 bp, Homo sapiens
  source 1..16: mol_type = genomic DNA
atgtagcttacctcct

SEQ ID NO: 7162 - DNA, 26 bp, Homo sapiens
  source 1..26: mol_type = genomic DNA
atgtagcttacctcctcaaagcaata

SEQ ID NO: 7163 - DNA, 30 bp, Homo sapiens
  source 1..30: mol_type = genomic DNA
atgtagcttacctcctcaaagcaatacact

SEQ ID NO: 7164 - DNA, 31 bp, Homo sapiens
  source 1..31: mol_type = genomic DNA
atgtagcttacctcctcaaagcaatacactg

SEQ ID NO: 7165 - DNA, 32 bp, Homo sapiens
  source 1..32: mol_type = genomic DNA
atgtagcttacctcctcaaagcaatacactga

SEQ ID NO: 7166 - DNA, 33 bp, Homo sapiens
  source 1..33: mol_type = genomic DNA
atgtagcttacctcctcaaagcaatacactgaa

SEQ ID NO: 7167 - DNA, 21 bp, Homo sapiens
  source 1..21: mol_type = genomic DNA
atgtatgaggtcccgggttcg

SEQ ID NO: 7168 - DNA, 16 bp, Homo sapiens
  source 1..16: mol_type = genomic DNA
atgtccgcgtgggttc

SEQ ID NO: 7169 - DNA, 17 bp, Homo sapiens
  source 1..17: mol_type = genomic DNA
atgtccgcgtgggttcg

SEQ ID NO: 7170 - DNA, 23 bp, Homo sapiens
  source 1..23: mol_type = genomic DNA
atgtccgcgtgggttcgaacccc

SEQ ID NO: 7171 - DNA, 24 bp, Homo sapiens
  source 1..24: mol_type = genomic DNA
atgtccgcgtgggttcgaacccca

SEQ ID NO: 7172 - DNA, 26 bp, Homo sapiens
  source 1..26: mol_type = genomic DNA
atgtccgcgtgggttcgaaccccact

SEQ ID NO: 7173 - DNA, 30 bp, Homo sapiens
  source 1..30: mol_type = genomic DNA
atgtccgcgtgggttcgaaccccactcctg

SEQ ID NO: 7174 - DNA, 31 bp, Homo sapiens
  source 1..31: mol_type = genomic DNA
atgtccgcgtgggttcgaaccccactcctgg

SEQ ID NO: 7175 - DNA, 32 bp, Homo sapiens
  source 1..32: mol_type = genomic DNA
atgtccgcgtgggttcgaaccccactcctggt

SEQ ID NO: 7176 - DNA, 33 bp, Homo sapiens
  source 1..33: mol_type = genomic DNA
atgtccgcgtgggttcgaaccccactcctggta

SEQ ID NO: 7177 - DNA, 34 bp, Homo sapiens
  source 1..34: mol_type = genomic DNA
atgtccgcgtgggttcgaaccccactcctggtac

SEQ ID NO: 7178 - DNA, 35 bp, Homo sapiens
  source 1..35: mol_type = genomic DNA
atgtccgcgtgggttcgaaccccactcctggtacc

SEQ ID NO: 7179 - DNA, 36 bp, Homo sapiens
  source 1..36: mol_type = genomic DNA
atgtccgcgtgggttcgaaccccactcctggtacca

SEQ ID NO: 7180 - DNA, 16 bp, Homo sapiens
  source 1..16: mol_type = genomic DNA
atgtctaacaacatgg

SEQ ID NO: 7181 - DNA, 17 bp, Homo sapiens
  source 1..17: mol_type = genomic DNA
atgtctaacaacatggc

SEQ ID NO: 7182 - DNA, 18 bp, Homo sapiens
  source 1..18: mol_type = genomic DNA
atgtctaacaacatggct

SEQ ID NO: 7183 - DNA, 19 bp, Homo sapiens
  source 1..19: mol_type = genomic DNA
atgtctaacaacatggctt

SEQ ID NO: 7184 - DNA, 20 bp, Homo sapiens
  source 1..20: mol_type = genomic DNA
atgtctaacaacatggcttt

SEQ ID NO: 7185 - DNA, 21 bp, Homo sapiens
  source 1..21: mol_type = genomic DNA
atgtctaacaacatggctttc

SEQ ID NO: 7186 - DNA, 22 bp, Homo sapiens
  source 1..22: mol_type = genomic DNA
atgtctaacaacatggctttct

SEQ ID NO: 7187 - DNA, 23 bp, Homo sapiens
  source 1..23: mol_type = genomic DNA
atgtctaacaacatggctttctc

SEQ ID NO: 7188 - DNA, 24 bp, Homo sapiens
  source 1..24: mol_type = genomic DNA
atgtctaacaacatggctttctca

SEQ ID NO: 7189 - DNA, 25 bp, Homo sapiens
  source 1..25: mol_type = genomic DNA
atgtctaacaacatggctttctcac

SEQ ID NO: 7190 - DNA, 26 bp, Homo sapiens
  source 1..26: mol_type = genomic DNA
atgtctaacaacatggctttctcacc

SEQ ID NO: 7191 - DNA, 27 bp, Homo sapiens
  source 1..27: mol_type = genomic DNA
atgtctaacaacatggctttctcacca

SEQ ID NO: 7192 - DNA, 21 bp, Homo sapiens
  source 1..21: mol_type = genomic DNA
atgtctgataaaagagttact

SEQ ID NO: 7193 - DNA, 26 bp, Homo sapiens
  source 1..26: mol_type = genomic DNA
atgtctgataaaagagttactttgat

SEQ ID NO: 7194 - DNA, 29 bp, Homo sapiens
  source 1..29: mol_type = genomic DNA
atgtctgataaaagagttactttgataga

SEQ ID NO: 7195 - DNA, 45 bp, Homo sapiens
  source 1..45: mol_type = genomic DNA
atgtctgataaaagagttactttgatagagtaaataataggagct

SEQ ID NO: 7196 - DNA, 16 bp, Homo sapiens
  source 1..16: mol_type = genomic DNA
atgttggttataccct

SEQ ID NO: 7197 - DNA, 21 bp, Homo sapiens
  source 1..21: mol_type = genomic DNA
atgttggttatacccttcccg

SEQ ID NO: 7198 - DNA, 23 bp, Homo sapiens
  source 1..23: mol_type = genomic DNA
atgttggttatacccttcccgta

SEQ ID NO: 7199 - DNA, 24 bp, Homo sapiens
  source 1..24: mol_type = genomic DNA
atgttggttatacccttcccgtac

SEQ ID NO: 7200 - DNA, 25 bp, Homo sapiens
  source 1..25: mol_type = genomic DNA
atgttggttatacccttcccgtact

SEQ ID NO: 7201 - DNA, 26 bp, Homo sapiens
  source 1..26: mol_type = genomic DNA
atgttggttatacccttcccgtacta

SEQ ID NO: 7202 - DNA, 27 bp, Homo sapiens
  source 1..27: mol_type = genomic DNA
atgttggttatacccttcccgtactac

SEQ ID NO: 7203 - DNA, 28 bp, Homo sapiens
  source 1..28: mol_type = genomic DNA
atgttggttatacccttcccgtactacc

SEQ ID NO: 7204 - DNA, 29 bp, Homo sapiens
  source 1..29: mol_type = genomic DNA
atgttggttatacccttcccgtactacca

SEQ ID NO: 7205 - DNA, 16 bp, Homo sapiens
  source 1..16: mol_type = genomic DNA
atgtttagacgggctc

SEQ ID NO: 7206 - DNA, 17 bp, Homo sapiens
  source 1..17: mol_type = genomic DNA
atgtttagacgggctca

SEQ ID NO: 7207 - DNA, 18 bp, Homo sapiens
  source 1..18: mol_type = genomic DNA
atgtttagacgggctcac

SEQ ID NO: 7208 - DNA, 19 bp, Homo sapiens
  source 1..19: mol_type = genomic DNA
atgtttagacgggctcaca

SEQ ID NO: 7209 - DNA, 20 bp, Homo sapiens
  source 1..20: mol_type = genomic DNA
atgtttagacgggctcacat

SEQ ID NO: 7210 - DNA, 21 bp, Homo sapiens
  source 1..21: mol_type = genomic DNA
atgtttagacgggctcacatc

SEQ ID NO: 7211 - DNA, 22 bp, Homo sapiens
  source 1..22: mol_type = genomic DNA
atgtttagacgggctcacatca

SEQ ID NO: 7212 - DNA, 23 bp, Homo sapiens
  source 1..23: mol_type = genomic DNA
atgtttagacgggctcacatcac

SEQ ID NO: 7213 - DNA, 24 bp, Homo sapiens
  source 1..24: mol_type = genomic DNA
atgtttagacgggctcacatcacc

SEQ ID NO: 7214 - DNA, 25 bp, Homo sapiens
  source 1..25: mol_type = genomic DNA
atgtttagacgggctcacatcaccc

SEQ ID NO: 7215 - DNA, 26 bp, Homo sapiens
  source 1..26: mol_type = genomic DNA
atgtttagacgggctcacatcacccc

SEQ ID NO: 7216 - DNA, 27 bp, Homo sapiens
  source 1..27: mol_type = genomic DNA
atgtttagacgggctcacatcacccca

SEQ ID NO: 7217 - DNA, 28 bp, Homo sapiens
  source 1..28: mol_type = genomic DNA
atgtttagacgggctcacatcaccccat

SEQ ID NO: 7218 - DNA, 29 bp, Homo sapiens
  source 1..29: mol_type = genomic DNA
atgtttagacgggctcacatcaccccata

SEQ ID NO: 7219 - DNA, 30 bp, Homo sapiens
  source 1..30: mol_type = genomic DNA
atgtttagacgggctcacatcaccccataa

SEQ ID NO: 7220 - DNA, 31 bp, Homo sapiens
  source 1..31: mol_type = genomic DNA
atgtttagacgggctcacatcaccccataaa

SEQ ID NO: 7221 - DNA, 32 bp, Homo sapiens
  source 1..32: mol_type = genomic DNA
atgtttagacgggctcacatcaccccataaac

SEQ ID NO: 7222 - DNA, 33 bp, Homo sapiens
  source 1..33: mol_type = genomic DNA
atgtttagacgggctcacatcaccccataaaca

SEQ ID NO: 7223 - DNA, 34 bp, Homo sapiens
  source 1..34: mol_type = genomic DNA
atgtttagacgggctcacatcaccccataaacac

SEQ ID NO: 7224 - DNA, 35 bp, Homo sapiens
  source 1..35: mol_type = genomic DNA
atgtttagacgggctcacatcaccccataaacacc

SEQ ID NO: 7225 - DNA, 36 bp, Homo sapiens
  source 1..36: mol_type = genomic DNA
atgtttagacgggctcacatcaccccataaacacca

SEQ ID NO: 7226 - DNA, 16 bp, Homo sapiens
  source 1..16: mol_type = genomic DNA
attaaagtggctgatt

SEQ ID NO: 7227 - DNA, 17 bp, Homo sapiens
  source 1..17: mol_type = genomic DNA
attaaagtggctgattt

SEQ ID NO: 7228 - DNA, 18 bp, Homo sapiens
  source 1..18: mol_type = genomic DNA
attaaagtggctgatttg

SEQ ID NO: 7229 - DNA, 19 bp, Homo sapiens
  source 1..19: mol_type = genomic DNA
attaaagtggctgatttgc

SEQ ID NO: 7230 - DNA, 16 bp, Homo sapiens
  source 1..16: mol_type = genomic DNA
attaaattatgataat

SEQ ID NO: 7231 - DNA, 17 bp, Homo sapiens
  source 1..17: mol_type = genomic DNA
attaaattatgataatc

SEQ ID NO: 7232 - DNA, 26 bp, Homo sapiens
  source 1..26: mol_type = genomic DNA
attaaattatgataatcatatttacc

SEQ ID NO: 7233 - DNA, 28 bp, Homo sapiens
  source 1..28: mol_type = genomic DNA
attaaattatgataatcatatttaccaa

SEQ ID NO: 7234 - DNA, 29 bp, Homo sapiens
  source 1..29: mol_type = genomic DNA
attaaattatgataatcatatttaccaac

SEQ ID NO: 7235 - DNA, 30 bp, Homo sapiens
  source 1..30: mol_type = genomic DNA
attaaattatgataatcatatttaccaacc

SEQ ID NO: 7236 - DNA, 31 bp, Homo sapiens
  source 1..31: mol_type = genomic DNA
attaaattatgataatcatatttaccaacca

SEQ ID NO: 7237 - DNA, 31 bp, Homo sapiens
  source 1..31: mol_type = genomic DNA
attaaccttttaagttaaagattaagagaac

SEQ ID NO: 7238 - DNA, 32 bp, Homo sapiens
  source 1..32: mol_type = genomic DNA
attaaccttttaagttaaagattaagagaacc

SEQ ID NO: 7239 - DNA, 37 bp, Homo sapiens
  source 1..37: mol_type = genomic DNA
attaaccttttaagttaaagattaagagaaccaacac

SEQ ID NO: 7240 - DNA, 39 bp, Homo sapiens
  source 1..39: mol_type = genomic DNA
attaaccttttaagttaaagattaagagaaccaacacct

SEQ ID NO: 7241 - DNA, 16 bp, Homo sapiens
  source 1..16: mol_type = genomic DNA
attaactagttttgac

SEQ ID NO: 7242 - DNA, 17 bp, Homo sapiens
  source 1..17: mol_type = genomic DNA
attaactagttttgaca

SEQ ID NO: 7243 - DNA, 18 bp, Homo sapiens
  source 1..18: mol_type = genomic DNA
attaactagttttgacaa

SEQ ID NO: 7244 - DNA, 19 bp, Homo sapiens
  source 1..19: mol_type = genomic DNA
attaactagttttgacaac

SEQ ID NO: 7245 - DNA, 20 bp, Homo sapiens
  source 1..20: mol_type = genomic DNA
attaactagttttgacaaca

SEQ ID NO: 7246 - DNA, 32 bp, Homo sapiens
  source 1..32: mol_type = genomic DNA
attaactagttttgacaacattcaaaaaagag

SEQ ID NO: 7247 - DNA, 33 bp, Homo sapiens
  source 1..33: mol_type = genomic DNA
attaactagttttgacaacattcaaaaaagagt

SEQ ID NO: 7248 - DNA, 34 bp, Homo sapiens
  source 1..34: mol_type = genomic DNA
attaactagttttgacaacattcaaaaaagagta

SEQ ID NO: 7249 - DNA, 35 bp, Homo sapiens
  source 1..35: mol_type = genomic DNA
attaactagttttgacaacattcaaaaaagagtac

SEQ ID NO: 7250 - DNA, 36 bp, Homo sapiens
  source 1..36: mol_type = genomic DNA
attaactagttttgacaacattcaaaaaagagtacc

SEQ ID NO: 7251 - DNA, 37 bp, Homo sapiens
  source 1..37: mol_type = genomic DNA
attaactagttttgacaacattcaaaaaagagtacca

SEQ ID NO: 7252 - DNA, 17 bp, Homo sapiens
  source 1..17: mol_type = genomic DNA
attaagagaaccaacac

SEQ ID NO: 7253 - DNA, 18 bp, Homo sapiens
  source 1..18: mol_type = genomic DNA
attaagagaaccaacacc

SEQ ID NO: 7254 - DNA, 19 bp, Homo sapiens
  source 1..19: mol_type = genomic DNA
attaagagaaccaacacct

SEQ ID NO: 7255 - DNA, 20 bp, Homo sapiens
  source 1..20: mol_type = genomic DNA
attaagagaaccaacacctc

SEQ ID NO: 7256 - DNA, 21 bp, Homo sapiens
  source 1..21: mol_type = genomic DNA
attaagagaaccaacacctct

SEQ ID NO: 7257 - DNA, 24 bp, Homo sapiens
  source 1..24: mol_type = genomic DNA
attaagagaaccaacacctcttta

SEQ ID NO: 7258 - DNA, 26 bp, Homo sapiens
  source 1..26: mol_type = genomic DNA
attaagagaaccaacacctctttaca

SEQ ID NO: 7259 - DNA, 28 bp, Homo sapiens
  source 1..28: mol_type = genomic DNA
attaagagaaccaacacctctttacagt

SEQ ID NO: 7260 - DNA, 29 bp, Homo sapiens
  source 1..29: mol_type = genomic DNA
attaagagaaccaacacctctttacagtg

SEQ ID NO: 7261 - DNA, 30 bp, Homo sapiens
  source 1..30: mol_type = genomic DNA
attaagagaaccaacacctctttacagtga

SEQ ID NO: 7262 - DNA, 31 bp, Homo sapiens
  source 1..31: mol_type = genomic DNA
attaagagaaccaacacctctttacagtgac

SEQ ID NO: 7263 - DNA, 32 bp, Homo sapiens
  source 1..32: mol_type = genomic DNA
attaagagaaccaacacctctttacagtgacc

SEQ ID NO: 7264 - DNA, 33 bp, Homo sapiens
  source 1..33: mol_type = genomic DNA
attaagagaaccaacacctctttacagtgacca

SEQ ID NO: 7265 - DNA, 16 bp, Homo sapiens
  source 1..16: mol_type = genomic DNA
attagaatcttagctt

SEQ ID NO: 7266 - DNA, 17 bp, Homo sapiens
  source 1..17: mol_type = genomic DNA
attagaatcttagcttt

SEQ ID NO: 7267 - DNA, 18 bp, Homo sapiens
  source 1..18: mol_type = genomic DNA
attagaatcttagctttg

SEQ ID NO: 7268 - DNA, 19 bp, Homo sapiens
  source 1..19: mol_type = genomic DNA
attagaatcttagctttgg

SEQ ID NO: 7269 - DNA, 24 bp, Homo sapiens
  source 1..24: mol_type = genomic DNA
attagaatcttagctttgggtgct

SEQ ID NO: 7270 - DNA, 26 bp, Homo sapiens
  source 1..26: mol_type = genomic DNA
attagaatcttagctttgggtgctaa

SEQ ID NO: 7271 - DNA, 34 bp, Homo sapiens
  source 1..34: mol_type = genomic DNA
attagaatcttagctttgggtgctaatggtggag

SEQ ID NO: 7272 - DNA, 35 bp, Homo sapiens
  source 1..35: mol_type = genomic DNA
attagaatcttagctttgggtgctaatggtggagt

SEQ ID NO: 7273 - DNA, 36 bp, Homo sapiens
  source 1..36: mol_type = genomic DNA
attagaatcttagctttgggtgctaatggtggagtt

SEQ ID NO: 7274 - DNA, 37 bp, Homo sapiens
  source 1..37: mol_type = genomic DNA
attagaatcttagctttgggtgctaatggtggagtta

SEQ ID NO: 7275 - DNA, 38 bp, Homo sapiens
  source 1..38: mol_type = genomic DNA
attagaatcttagctttgggtgctaatggtggagttaa

SEQ ID NO: 7276 - DNA, 40 bp, Homo sapiens
  source 1..40: mol_type = genomic DNA
attagaatcttagctttgggtgctaatggtggagttaaag

SEQ ID NO: 7277 - DNA, 42 bp, Homo sapiens
  source 1..42: mol_type = genomic DNA
attagaatcttagctttgggtgctaatggtggagttaaagac

SEQ ID NO: 7278 - DNA, 43 bp, Homo sapiens
  source 1..43: mol_type = genomic DNA
attagaatcttagctttgggtgctaatggtggagttaaagact

SEQ ID NO: 7279 - DNA, 19 bp, Homo sapiens
  source 1..19: mol_type = genomic DNA
attagctcaaatggtagag

SEQ ID NO: 7280 - DNA, 18 bp, Homo sapiens
  source 1..18: mol_type = genomic DNA
attagggtgcttagctgt

SEQ ID NO: 7281 - DNA, 19 bp, Homo sapiens
  source 1..19: mol_type = genomic DNA
attagggtgcttagctgtt

SEQ ID NO: 7282 - DNA, 20 bp, Homo sapiens
  source 1..20: mol_type = genomic DNA
attagggtgcttagctgtta

SEQ ID NO: 7283 - DNA, 22 bp, Homo sapiens
  source 1..22: mol_type = genomic DNA
attagggtgcttagctgttaac

SEQ ID NO: 7284 - DNA, 23 bp, Homo sapiens
  source 1..23: mol_type = genomic DNA
attagggtgcttagctgttaact

SEQ ID NO: 7285 - DNA, 24 bp, Homo sapiens
  source 1..24: mol_type = genomic DNA
attagggtgcttagctgttaacta

SEQ ID NO: 7286 - DNA, 25 bp, Homo sapiens
  source 1..25: mol_type = genomic DNA
attagggtgcttagctgttaactaa

SEQ ID NO: 7287 - DNA, 26 bp, Homo sapiens
  source 1..26: mol_type = genomic DNA
attagggtgcttagctgttaactaag

SEQ ID NO: 7288 - DNA, 36 bp, Homo sapiens
  source 1..36: mol_type = genomic DNA
attagggtgcttagctgttaactaagtgtttgtggg

SEQ ID NO: 7289 - DNA, 38 bp, Homo sapiens
  source 1..38: mol_type = genomic DNA
attagggtgcttagctgttaactaagtgtttgtgggtt

SEQ ID NO: 7290 - DNA, 39 bp, Homo sapiens
  source 1..39: mol_type = genomic DNA
attagggtgcttagctgttaactaagtgtttgtgggttt

SEQ ID NO: 7291 - DNA, 47 bp, Homo sapiens
  source 1..47: mol_type = genomic DNA
attagggtgcttagctgttaactaagtgtttgtgggtttaagtccca

SEQ ID NO: 7292 - DNA, 48 bp, Homo sapiens
  source 1..48: mol_type = genomic DNA
attagggtgcttagctgttaactaagtgtttgtgggtttaagtcccat

SEQ ID NO: 7293 - DNA, 16 bp, Homo sapiens
  source 1..16: mol_type = genomic DNA
attataggctaaatcc

SEQ ID NO: 7294 - DNA, 17 bp, Homo sapiens
  source 1..17: mol_type = genomic DNA
attataggctaaatcct

SEQ ID NO: 7295 - DNA, 29 bp, Homo sapiens
  source 1..29: mol_type = genomic DNA
attataggctaaatcctatatatcttacc

SEQ ID NO: 7296 - DNA, 21 bp, Homo sapiens
  source 1..21: mol_type = genomic DNA
attatgataatcatatttacc

SEQ ID NO: 7297 - DNA, 24 bp, Homo sapiens
  source 1..24: mol_type = genomic DNA
attatgataatcatatttaccaac

SEQ ID NO: 7298 - DNA, 25 bp, Homo sapiens
  source 1..25: mol_type = genomic DNA
attatgataatcatatttaccaacc

SEQ ID NO: 7299 - DNA, 26 bp, Homo sapiens
  source 1..26: mol_type = genomic DNA
attatgataatcatatttaccaacca

SEQ ID NO: 7300 - DNA, 16 bp, Homo sapiens
  source 1..16: mol_type = genomic DNA
attcaaaaaagagtac

SEQ ID NO: 7301 - DNA, 17 bp, Homo sapiens
  source 1..17: mol_type = genomic DNA
attcaaaaaagagtacc

SEQ ID NO: 7302 - DNA, 18 bp, Homo sapiens
  source 1..18: mol_type = genomic DNA
attcaaaaaagagtacca

SEQ ID NO: 7303 - DNA, 18 bp, Homo sapiens
  source 1..18: mol_type = genomic DNA
attcaaaggttccgggtt

SEQ ID NO: 7304 - DNA, 19 bp, Homo sapiens
  source 1..19: mol_type = genomic DNA
attcaaaggttccgggttc

SEQ ID NO: 7305 - DNA, 20 bp, Homo sapiens
  source 1..20: mol_type = genomic DNA
attcaaaggttccgggttcg

SEQ ID NO: 7306 - DNA, 21 bp, Homo sapiens
  source 1..21: mol_type = genomic DNA
attcaaaggttccgggttcga

SEQ ID NO: 7307 - DNA, 22 bp, Homo sapiens
  source 1..22: mol_type = genomic DNA
attcaaaggttccgggttcgag

SEQ ID NO: 7308 - DNA, 23 bp, Homo sapiens
  source 1..23: mol_type = genomic DNA
attcaaaggttccgggttcgagt

SEQ ID NO: 7309 - DNA, 33 bp, Homo sapiens
  source 1..33: mol_type = genomic DNA
attcaaaggttccgggttcgagtcccggcggag

SEQ ID NO: 7310 - DNA, 34 bp, Homo sapiens
  source 1..34: mol_type = genomic DNA
attcaaaggttccgggttcgagtcccggcggagt

SEQ ID NO: 7311 - DNA, 35 bp, Homo sapiens
  source 1..35: mol_type = genomic DNA
attcaaaggttccgggttcgagtcccggcggagtc

SEQ ID NO: 7312 - DNA, 36 bp, Homo sapiens
  source 1..36: mol_type = genomic DNA
attcaaaggttccgggttcgagtcccggcggagtcg

SEQ ID NO: 7313 - DNA, 37 bp, Homo sapiens
  source 1..37: mol_type = genomic DNA
attcaaaggttccgggttcgagtcccggcggagtcgc

SEQ ID NO: 7314 - DNA, 38 bp, Homo sapiens
  source 1..38: mol_type = genomic DNA
attcaaaggttccgggttcgagtcccggcggagtcgcc

SEQ ID NO: 7315 - DNA, 39 bp, Homo sapiens
  source 1..39: mol_type = genomic DNA
attcaaaggttccgggttcgagtcccggcggagtcgcca

SEQ ID NO: 7316 - DNA, 18 bp, Homo sapiens
  source 1..18: mol_type = genomic DNA
attcaaaggttgtgggtt

SEQ ID NO: 7317 - DNA, 34 bp, Homo sapiens
  source 1..34: mol_type = genomic DNA
attcaaaggttgtgggttcgaatcccaccagagt

SEQ ID NO: 7318 - DNA, 37 bp, Homo sapiens
  source 1..37: mol_type = genomic DNA
attcaaaggttgtgggttcgaatcccaccagagtcgc

SEQ ID NO: 7319 - DNA, 38 bp, Homo sapiens
  source 1..38: mol_type = genomic DNA
attcaaaggttgtgggttcgaatcccaccagagtcgcc

SEQ ID NO: 7320 - DNA, 39 bp, Homo sapiens
  source 1..39: mol_type = genomic DNA
attcaaaggttgtgggttcgaatcccaccagagtcgcca

SEQ ID NO: 7321 - DNA, 37 bp, Homo sapiens
  source 1..37: mol_type = genomic DNA
attcaaaggttgtgggttcgagtcccaccagagtcgc

SEQ ID NO: 7322 - DNA, 38 bp, Homo sapiens
  source 1..38: mol_type = genomic DNA
attcaaaggttgtgggttcgagtcccaccagagtcgcc

SEQ ID NO: 7323 - DNA, 39 bp, Homo sapiens
  source 1..39: mol_type = genomic DNA
attcaaaggttgtgggttcgagtcccaccagagtcgcca

SEQ ID NO: 7324 - DNA, 16 bp, Homo sapiens
  source 1..16: mol_type = genomic DNA
attccaggttcgactc

SEQ ID NO: 7325 - DNA, 19 bp, Homo sapiens
  source 1..19: mol_type = genomic DNA
attccaggttcgactcctg

SEQ ID NO: 7326 - DNA, 22 bp, Homo sapiens
  source 1..22: mol_type = genomic DNA
attccaggttcgactcctggct

SEQ ID NO: 7327 - DNA, 28 bp, Homo sapiens
  source 1..28: mol_type = genomic DNA
attccaggttcgactcctggctggctcg

SEQ ID NO: 7328 - DNA, 29 bp, Homo sapiens
  source 1..29: mol_type = genomic DNA
attccaggttcgactcctggctggctcgc

SEQ ID NO: 7329 - DNA, 30 bp, Homo sapiens
  source 1..30: mol_type = genomic DNA
attccaggttcgactcctggctggctcgcc

SEQ ID NO: 7330 - DNA, 31 bp, Homo sapiens
  source 1..31: mol_type = genomic DNA
attccaggttcgactcctggctggctcgcca

SEQ ID NO: 7331 - DNA, 17 bp, Homo sapiens
  source 1..17: mol_type = genomic DNA
attcccattcttgcgac

SEQ ID NO: 7332 - DNA, 23 bp, Homo sapiens
  source 1..23: mol_type = genomic DNA
attcccattcttgcgacccgggt

SEQ ID NO: 7333 - DNA, 44 bp, Homo sapiens
  source 1..44: mol_type = genomic DNA
attcccattcttgcgacccgggttcgattcccgggcggcgcacc

SEQ ID NO: 7334 - DNA, 16 bp, Homo sapiens
  source 1..16: mol_type = genomic DNA
attccccgacggggag

SEQ ID NO: 7335 - DNA, 17 bp, Homo sapiens
  source 1..17: mol_type = genomic DNA
attccccgacggggagc

SEQ ID NO: 7336 - DNA, 18 bp, Homo sapiens
  source 1..18: mol_type = genomic DNA
attccccgacggggagcc

SEQ ID NO: 7337 - DNA, 19 bp, Homo sapiens
  source 1..19: mol_type = genomic DNA
attccccgacggggagcca

SEQ ID NO: 7338 - DNA, 16 bp, Homo sapiens
  source 1..16: mol_type = genomic DNA
attcccggccaacgca

SEQ ID NO: 7339 - DNA, 17 bp, Homo sapiens
  source 1..17: mol_type = genomic DNA
attcccggccaacgcac

SEQ ID NO: 7340 - DNA, 18 bp, Homo sapiens
  source 1..18: mol_type = genomic DNA
attcccggccaacgcacc

SEQ ID NO: 7341 - DNA, 19 bp, Homo sapiens
  source 1..19: mol_type = genomic DNA
attcccggccaacgcacca

SEQ ID NO: 7342 - DNA, 18 bp, Homo sapiens
  source 1..18: mol_type = genomic DNA
attcccggccaatgcacc

SEQ ID NO: 7343 - DNA, 19 bp, Homo sapiens
  source 1..19: mol_type = genomic DNA
attcccggccaatgcacca

SEQ ID NO: 7344 - DNA, 17 bp, Homo sapiens
  source 1..17: mol_type = genomic DNA
attcccggccagggaac

SEQ ID NO: 7345 - DNA, 18 bp, Homo sapiens
  source 1..18: mol_type = genomic DNA
attcccggccagggaacc

SEQ ID NO: 7346 - DNA, 19 bp, Homo sapiens
  source 1..19: mol_type = genomic DNA
attcccggcccatgcacca

SEQ ID NO: 7347 - DNA, 16 bp, Homo sapiens
  source 1..16: mol_type = genomic DNA
attcccgggcggcgca

SEQ ID NO: 7348 - DNA, 17 bp, Homo sapiens
  source 1..17: mol_type = genomic DNA
attcccgggcggcgcac

SEQ ID NO: 7349 - DNA, 18 bp, Homo sapiens
  source 1..18: mol_type = genomic DNA
attcccgggcggcgcacc

SEQ ID NO: 7350 - DNA, 19 bp, Homo sapiens
  source 1..19: mol_type = genomic DNA
attcccgggcggcgcacca

SEQ ID NO: 7351 - DNA, 16 bp, Homo sapiens
  source 1..16: mol_type = genomic DNA
attcccggtcagggaa

SEQ ID NO: 7352 - DNA, 17 bp, Homo sapiens
  source 1..17: mol_type = genomic DNA
attcccggtcagggaac

SEQ ID NO: 7353 - DNA, 18 bp, Homo sapiens
  source 1..18: mol_type = genomic DNA
attcccggtcagggaacc

SEQ ID NO: 7354 - DNA, 19 bp, Homo sapiens
  source 1..19: mol_type = genomic DNA
attcccggtcagggaacca

SEQ ID NO: 7355 - DNA, 18 bp, Homo sapiens
  source 1..18: mol_type = genomic DNA
attcccggtcatggaacc

SEQ ID NO: 7356 - DNA, 16 bp, Homo sapiens
  source 1..16: mol_type = genomic DNA
attccggatcagaaga

SEQ ID NO: 7357 - DNA, 20 bp, Homo sapiens
  source 1..20: mol_type = genomic DNA
attccggatcagaagattga

SEQ ID NO: 7358 - DNA, 21 bp, Homo sapiens
  source 1..21: mol_type = genomic DNA
attccggatcagaagattgag

SEQ ID NO: 7359 - DNA, 24 bp, Homo sapiens
  source 1..24: mol_type = genomic DNA
attccggatcagaagattgagggt

SEQ ID NO: 7360 - DNA, 44 bp, Homo sapiens
  source 1..44: mol_type = genomic DNA
attccggatcagaagattgagggttcgagtcccttcgtggtcgc

SEQ ID NO: 7361 - DNA, 45 bp, Homo sapiens
  source 1..45: mol_type = genomic DNA
attccggatcagaagattgagggttcgagtcccttcgtggtcgcc

SEQ ID NO: 7362 - DNA, 17 bp, Homo sapiens
  source 1..17: mol_type = genomic DNA
attccggctcgaaggac

SEQ ID NO: 7363 - DNA, 18 bp, Homo sapiens
  source 1..18: mol_type = genomic DNA
attccggctcgaaggacc

SEQ ID NO: 7364 - DNA, 19 bp, Homo sapiens
  source 1..19: mol_type = genomic DNA
attccggctcgaaggacca

SEQ ID NO: 7365 - DNA, 18 bp, Homo sapiens
  source 1..18: mol_type = genomic DNA
attcctcttcttaacacc

SEQ ID NO: 7366 - DNA, 27 bp, Homo sapiens
  source 1..27: mol_type = genomic DNA
attcctggttttcacccaggcggcccg

SEQ ID NO: 7367 - DNA, 31 bp, Homo sapiens
  source 1..31: mol_type = genomic DNA
attcctggttttcacccaggcggcccgggtt

SEQ ID NO: 7368 - DNA, 37 bp, Homo sapiens
  source 1..37: mol_type = genomic DNA
attcctggttttcacccaggcggcccgggttcgactc

SEQ ID NO: 7369 - DNA, 39 bp, Homo sapiens
  source 1..39: mol_type = genomic DNA
attcctggttttcacccaggcggcccgggttcgactccc

SEQ ID NO: 7370 - DNA, 45 bp, Homo sapiens
  source 1..45: mol_type = genomic DNA
attcctggttttcacccaggcggcccgggttcgactcccggtgtg

SEQ ID NO: 7371 - DNA, 16 bp, Homo sapiens
  source 1..16: mol_type = genomic DNA
attccttccttttttg

SEQ ID NO: 7372 - DNA, 17 bp, Homo sapiens
  source 1..17: mol_type = genomic DNA
attccttccttttttgc

SEQ ID NO: 7373 - DNA, 18 bp, Homo sapiens
  source 1..18: mol_type = genomic DNA
attccttccttttttgcc

SEQ ID NO: 7374 - DNA, 19 bp, Homo sapiens
  source 1..19: mol_type = genomic DNA
attccttccttttttgcca

SEQ ID NO: 7375 - DNA, 17 bp, Homo sapiens
  source 1..17: mol_type = genomic DNA
attcgaagaagcagctt

SEQ ID NO: 7376 - DNA, 18 bp, Homo sapiens
  source 1..18: mol_type = genomic DNA
attcgaagaagcagcttc

SEQ ID NO: 7377 - DNA, 25 bp, Homo sapiens
  source 1..25: mol_type = genomic DNA
attcgaagaagcagcttcaaacctg

SEQ ID NO: 7378 - DNA, 26 bp, Homo sapiens
  source 1..26: mol_type = genomic DNA
attcgaagaagcagcttcaaacctgc

SEQ ID NO: 7379 - DNA, 32 bp, Homo sapiens
  source 1..32: mol_type = genomic DNA
attcgaagaagcagcttcaaacctgccggggc

SEQ ID NO: 7380 - DNA, 33 bp, Homo sapiens
  source 1..33: mol_type = genomic DNA
attcgaagaagcagcttcaaacctgccggggct

SEQ ID NO: 7381 - DNA, 34 bp, Homo sapiens
  source 1..34: mol_type = genomic DNA
attcgaagaagcagcttcaaacctgccggggctt

SEQ ID NO: 7382 - DNA, 35 bp, Homo sapiens
  source 1..35: mol_type = genomic DNA
attcgaagaagcagcttcaaacctgccggggcttc

SEQ ID NO: 7383 - DNA, 36 bp, Homo sapiens
  source 1..36: mol_type = genomic DNA
attcgaagaagcagcttcaaacctgccggggcttcc

SEQ ID NO: 7384 - DNA, 37 bp, Homo sapiens
  source 1..37: mol_type = genomic DNA
attcgaagaagcagcttcaaacctgccggggcttcca

SEQ ID NO: 7385 - DNA, 17 bp, Homo sapiens
  source 1..17: mol_type = genomic DNA
attcgcctcacacgcga

SEQ ID NO: 7386 - DNA, 16 bp, Homo sapiens
  source 1..16: mol_type = genomic DNA
attcggcgctctcacc

SEQ ID NO: 7387 - DNA, 17 bp, Homo sapiens
  source 1..17: mol_type = genomic DNA
attcggcgctctcaccg

SEQ ID NO: 7388 - DNA, 18 bp, Homo sapiens
  source 1..18: mol_type = genomic DNA
attcggcgctctcaccgc

SEQ ID NO: 7389 - DNA, 19 bp, Homo sapiens
  source 1..19: mol_type = genomic DNA
attcggcgctctcaccgcc

SEQ ID NO: 7390 - DNA, 25 bp, Homo sapiens
  source 1..25: mol_type = genomic DNA
attcggcgctctcaccgccgcggcc

SEQ ID NO: 7391 - DNA, 26 bp, Homo sapiens
  source 1..26: mol_type = genomic DNA
attcggcgctctcaccgccgcggccc

SEQ ID NO: 7392 - DNA, 27 bp, Homo sapiens
  source 1..27: mol_type = genomic DNA
attcggcgctctcaccgccgcggcccg

SEQ ID NO: 7393 - DNA, 28 bp, Homo sapiens
  source 1..28: mol_type = genomic DNA
attcggcgctctcaccgccgcggcccgg

SEQ ID NO: 7394 - DNA, 29 bp, Homo sapiens
  source 1..29: mol_type = genomic DNA
attcggcgctctcaccgccgcggcccggg

SEQ ID NO: 7395 - DNA, 30 bp, Homo sapiens
  source 1..30: mol_type = genomic DNA
attcggcgctctcaccgccgcggcccgggt

SEQ ID NO: 7396 - DNA, 31 bp, Homo sapiens
  source 1..31: mol_type = genomic DNA
attcggcgctctcaccgccgcggcccgggtt

SEQ ID NO: 7397 - DNA, 32 bp, Homo sapiens
  source 1..32: mol_type = genomic DNA
attcggcgctctcaccgccgcggcccgggttc

SEQ ID NO: 7398 - DNA, 33 bp, Homo sapiens
  source 1..33: mol_type = genomic DNA
attcggcgctctcaccgccgcggcccgggttcg

SEQ ID NO: 7399 - DNA, 34 bp, Homo sapiens
  source 1..34: mol_type = genomic DNA
attcggcgctctcaccgccgcggcccgggttcga

SEQ ID NO: 7400 - DNA, 35 bp, Homo sapiens
  source 1..35: mol_type = genomic DNA
attcggcgctctcaccgccgcggcccgggttcgat

SEQ ID NO: 7401 - DNA, 36 bp, Homo sapiens
  source 1..36: mol_type = genomic DNA
attcggcgctctcaccgccgcggcccgggttcgatt

SEQ ID NO: 7402 - DNA, 37 bp, Homo sapiens
  source 1..37: mol_type = genomic DNA
attcggcgctctcaccgccgcggcccgggttcgattc

SEQ ID NO: 7403 - DNA, 38 bp, Homo sapiens
  source 1..38: mol_type = genomic DNA
attcggcgctctcaccgccgcggcccgggttcgattcc

SEQ ID NO: 7404 - DNA, 39 bp, Homo sapiens
  source 1..39: mol_type = genomic DNA
attcggcgctctcaccgccgcggcccgggttcgattccc

SEQ ID NO: 7405 - DNA, 40 bp, Homo sapiens
  source 1..40: mol_type = genomic DNA
attcggcgctctcaccgccgcggcccgggttcgattcccg

SEQ ID NO: 7406 - DNA, 43 bp, Homo sapiens
  source 1..43: mol_type = genomic DNA
attcggcgctctcaccgccgcggcccgggttcgattcccggtc

SEQ ID NO: 7407 - DNA, 44 bp, Homo sapiens
  source 1..44: mol_type = genomic DNA
attcggcgctctcaccgccgcggcccgggttcgattcccggtca

SEQ ID NO: 7408 - DNA, 48 bp, Homo sapiens
  source 1..48: mol_type = genomic DNA
attcggcgctctcaccgccgcggcccgggttcgattcccggtcaggga

SEQ ID NO: 7409 - DNA, 28 bp, Homo sapiens
  source 1..28: mol_type = genomic DNA
attcggcgctttcaccgccgcggcccgg

SEQ ID NO: 7410 - DNA, 17 bp, Homo sapiens
  source 1..17: mol_type = genomic DNA
attcggtgctgaaagag

SEQ ID NO: 7411 - DNA, 16 bp, Homo sapiens
  source 1..16: mol_type = genomic DNA
attctaggttcgactc

SEQ ID NO: 7412 - DNA, 17 bp, Homo sapiens
  source 1..17: mol_type = genomic DNA
attctaggttcgactcc

SEQ ID NO: 7413 - DNA, 21 bp, Homo sapiens
  source 1..21: mol_type = genomic DNA
attctaggttcgactcctggc

SEQ ID NO: 7414 - DNA, 27 bp, Homo sapiens
  source 1..27: mol_type = genomic DNA
attctaggttcgactcctggctggctc

SEQ ID NO: 7415 - DNA, 28 bp, Homo sapiens
  source 1..28: mol_type = genomic DNA
attctaggttcgactcctggctggctcg

SEQ ID NO: 7416 - DNA, 29 bp, Homo sapiens
  source 1..29: mol_type = genomic DNA
attctaggttcgactcctggctggctcgc

SEQ ID NO: 7417 - DNA, 30 bp, Homo sapiens
  source 1..30: mol_type = genomic DNA
attctaggttcgactcctggctggctcgcc

SEQ ID NO: 7418 - DNA, 31 bp, Homo sapiens
  source 1..31: mol_type = genomic DNA
attctaggttcgactcctggctggctcgcca

SEQ ID NO: 7419 - DNA, 17 bp, Homo sapiens
  source 1..17: mol_type = genomic DNA
attctcagggatgggtt

SEQ ID NO: 7420 - DNA, 21 bp, Homo sapiens
  source 1..21: mol_type = genomic DNA
attctcagggatgggttcgat

SEQ ID NO: 7421 - DNA, 27 bp, Homo sapiens
  source 1..27: mol_type = genomic DNA
attctcagggatgggttcgattctcat

SEQ ID NO: 7422 - DNA, 29 bp, Homo sapiens
  source 1..29: mol_type = genomic DNA
attctcagggatgggttcgattctcatag

SEQ ID NO: 7423 - DNA, 33 bp, Homo sapiens
  source 1..33: mol_type = genomic DNA
attctcagggatgggttcgattctcatagtcct

SEQ ID NO: 7424 - DNA, 35 bp, Homo sapiens
  source 1..35: mol_type = genomic DNA
attctcagggatgggttcgattctcatagtcctag

SEQ ID NO: 7425 - DNA, 36 bp, Homo sapiens
  source 1..36: mol_type = genomic DNA
attctcagggatgggttcgattctcatagtcctagc

SEQ ID NO: 7426 - DNA, 37 bp, Homo sapiens
  source 1..37: mol_type = genomic DNA
attctcagggatgggttcgattctcatagtcctagcc

SEQ ID NO: 7427 - DNA, 38 bp, Homo sapiens
  source 1..38: mol_type = genomic DNA
attctcagggatgggttcgattctcatagtcctagcca

SEQ ID NO: 7428 - DNA, 16 bp, Homo sapiens
  source 1..16: mol_type = genomic DNA
attctcatagtcctag

SEQ ID NO: 7429 - DNA, 17 bp, Homo sapiens
  source 1..17: mol_type = genomic DNA
attctcatagtcctagc

SEQ ID NO: 7430 - DNA, 18 bp, Homo sapiens
  source 1..18: mol_type = genomic DNA
attctcatagtcctagcc

SEQ ID NO: 7431 - DNA, 19 bp, Homo sapiens
  source 1..19: mol_type = genomic DNA
attctcatagtcctagcca

SEQ ID NO: 7432 - DNA, 16 bp, Homo sapiens
  source 1..16: mol_type = genomic DNA
attctcgcctgccacg

SEQ ID NO: 7433 - DNA, 17 bp, Homo sapiens
  source 1..17: mol_type = genomic DNA
attctcgcctgccacgc

SEQ ID NO: 7434 - DNA, 21 bp, Homo sapiens
  source 1..21: mol_type = genomic DNA
attctcgcctgccacgcggga

SEQ ID NO: 7435 - DNA, 24 bp, Homo sapiens
  source 1..24: mol_type = genomic DNA
attctcgcctgccacgcgggaggc

SEQ ID NO: 7436 - DNA, 28 bp, Homo sapiens
  source 1..28: mol_type = genomic DNA
attctcgcctgccacgcgggaggcccgg

SEQ ID NO: 7437 - DNA, 29 bp, Homo sapiens
  source 1..29: mol_type = genomic DNA
attctcgcctgccacgcgggaggcccggg

SEQ ID NO: 7438 - DNA, 30 bp, Homo sapiens
  source 1..30: mol_type = genomic DNA
attctcgcctgccacgcgggaggcccgggt

SEQ ID NO: 7439 - DNA, 31 bp, Homo sapiens
  source 1..31: mol_type = genomic DNA
attctcgcctgccacgcgggaggcccgggtt

SEQ ID NO: 7440 - DNA, 33 bp, Homo sapiens
  source 1..33: mol_type = genomic DNA
attctcgcctgccacgcgggaggcccgggttcg

SEQ ID NO: 7441 - DNA, 17 bp, Homo sapiens
  source 1..17: mol_type = genomic DNA
attctcgctggggcctc

SEQ ID NO: 7442 - DNA, 18 bp, Homo sapiens
  source 1..18: mol_type = genomic DNA
attctcgctggggcctcc

SEQ ID NO: 7443 - DNA, 21 bp, Homo sapiens
  source 1..21: mol_type = genomic DNA
attctcggtttgggtccgaga

SEQ ID NO: 7444 - DNA, 17 bp, Homo sapiens
  source 1..17: mol_type = genomic DNA
attcttgcgacccgggt

SEQ ID NO: 7445 - DNA, 18 bp, Homo sapiens
  source 1..18: mol_type = genomic DNA
attcttgcgacccgggtt

SEQ ID NO: 7446 - DNA, 19 bp, Homo sapiens
  source 1..19: mol_type = genomic DNA
attcttgcgacccgggttc

SEQ ID NO: 7447 - DNA, 20 bp, Homo sapiens
  source 1..20: mol_type = genomic DNA
attcttgcgacccgggttcg

SEQ ID NO: 7448 - DNA, 21 bp, Homo sapiens
  source 1..21: mol_type = genomic DNA
attcttgcgacccgggttcga

SEQ ID NO: 7449 - DNA, 22 bp, Homo sapiens
  source 1..22: mol_type = genomic DNA
attcttgcgacccgggttcgat

SEQ ID NO: 7450 - DNA, 23 bp, Homo sapiens
  source 1..23: mol_type = genomic DNA
attcttgcgacccgggttcgatt

SEQ ID NO: 7451 - DNA, 26 bp, Homo sapiens
  source 1..26: mol_type = genomic DNA
attcttgcgacccgggttcgattccc

SEQ ID NO: 7452 - DNA, 30 bp, Homo sapiens
  source 1..30: mol_type = genomic DNA
attcttgcgacccgggttcgattcccgggc

SEQ ID NO: 7453 - DNA, 31 bp, Homo sapiens
  source 1..31: mol_type = genomic DNA
attcttgcgacccgggttcgattcccgggcg

SEQ ID NO: 7454 - DNA, 32 bp, Homo sapiens
  source 1..32: mol_type = genomic DNA
attcttgcgacccgggttcgattcccgggcgg

SEQ ID NO: 7455 - DNA, 33 bp, Homo sapiens
  source 1..33: mol_type = genomic DNA
attcttgcgacccgggttcgattcccgggcggc

SEQ ID NO: 7456 - DNA, 34 bp, Homo sapiens
  source 1..34: mol_type = genomic DNA
attcttgcgacccgggttcgattcccgggcggcg

SEQ ID NO: 7457 - DNA, 35 bp, Homo sapiens
  source 1..35: mol_type = genomic DNA
attcttgcgacccgggttcgattcccgggcggcgc

SEQ ID NO: 7458 - DNA, 36 bp, Homo sapiens
  source 1..36: mol_type = genomic DNA
attcttgcgacccgggttcgattcccgggcggcgca

SEQ ID NO: 7459 - DNA, 37 bp, Homo sapiens
  source 1..37: mol_type = genomic DNA
attcttgcgacccgggttcgattcccgggcggcgcac

SEQ ID NO: 7460 - DNA, 38 bp, Homo sapiens
  source 1..38: mol_type = genomic DNA
attcttgcgacccgggttcgattcccgggcggcgcacc

SEQ ID NO: 7461 - DNA, 39 bp, Homo sapiens
  source 1..39: mol_type = genomic DNA
attcttgcgacccgggttcgattcccgggcggcgcacca

SEQ ID NO: 7462 - DNA, 33 bp, Homo sapiens
  source 1..33: mol_type = genomic DNA
attgaagccagttgattagggtgcttagctgtt

SEQ ID NO: 7463 - DNA, 16 bp, Homo sapiens
  source 1..16: mol_type = genomic DNA
attgaattgcaaattc

SEQ ID NO: 7464 - DNA, 28 bp, Homo sapiens
  source 1..28: mol_type = genomic DNA
attgaattgcaaattcgaagaagcagct

SEQ ID NO: 7465 - DNA, 44 bp, Homo sapiens
  source 1..44: mol_type = genomic DNA
attgaattgcaaattcgaagaagcagcttcaaacctgccggggc

SEQ ID NO: 7466 - DNA, 45 bp, Homo sapiens
  source 1..45: mol_type = genomic DNA
attgaattgcaaattcgaagaagcagcttcaaacctgccggggct

SEQ ID NO: 7467 - DNA, 46 bp, Homo sapiens
  source 1..46: mol_type = genomic DNA
attgaattgcaaattcgaagaagcagcttcaaacctgccggggctt

SEQ ID NO: 7468 - DNA, 47 bp, Homo sapiens
  source 1..47: mol_type = genomic DNA
attgaattgcaaattcgaagaagcagcttcaaacctgccggggcttc

SEQ ID NO: 7469 - DNA, 19 bp, Homo sapiens
  source 1..19: mol_type = genomic DNA
attgagggttcgaatccct

SEQ ID NO: 7470 - DNA, 30 bp, Homo sapiens
  source 1..30: mol_type = genomic DNA
attgagggttcgaatcccttcgtggttgcc

SEQ ID NO: 7471 - DNA, 31 bp, Homo sapiens
  source 1..31: mol_type = genomic DNA
attgagggttcgaatcccttcgtggttgcca

SEQ ID NO: 7472 - DNA, 16 bp, Homo sapiens
  source 1..16: mol_type = genomic DNA
attgagggttcgagtc

SEQ ID NO: 7473 - DNA, 18 bp, Homo sapiens
  source 1..18: mol_type = genomic DNA
attgagggttcgagtccc

SEQ ID NO: 7474 - DNA, 19 bp, Homo sapiens
  source 1..19: mol_type = genomic DNA
attgagggttcgagtccct

SEQ ID NO: 7475 - DNA, 28 bp, Homo sapiens
  source 1..28: mol_type = genomic DNA
attgagggttcgagtcccttcgtggtcg

SEQ ID NO: 7476 - DNA, 29 bp, Homo sapiens
  source 1..29: mol_type = genomic DNA
attgagggttcgagtcccttcgtggtcgc

SEQ ID NO: 7477 - DNA, 30 bp, Homo sapiens
  source 1..30: mol_type = genomic DNA
attgagggttcgagtcccttcgtggtcgcc

SEQ ID NO: 7478 - DNA, 31 bp, Homo sapiens
  source 1..31: mol_type = genomic DNA
attgagggttcgagtcccttcgtggtcgcca

SEQ ID NO: 7479 - DNA, 18 bp, Homo sapiens
  source 1..18: mol_type = genomic DNA
attgcaaattcgaagaag

SEQ ID NO: 7480 - DNA, 23 bp, Homo sapiens
  source 1..23: mol_type = genomic DNA
attgcaaattcgaagaagcagct

SEQ ID NO: 7481 - DNA, 32 bp, Homo sapiens
  source 1..32: mol_type = genomic DNA
attgcaaattcgaagaagcagcttcaaacctg

SEQ ID NO: 7482 - DNA, 39 bp, Homo sapiens
  source 1..39: mol_type = genomic DNA
attgcaaattcgaagaagcagcttcaaacctgccggggc

SEQ ID NO: 7483 - DNA, 40 bp, Homo sapiens
  source 1..40: mol_type = genomic DNA
attgcaaattcgaagaagcagcttcaaacctgccggggct

SEQ ID NO: 7484 - DNA, 41 bp, Homo sapiens
  source 1..41: mol_type = genomic DNA
attgcaaattcgaagaagcagcttcaaacctgccggggctt

SEQ ID NO: 7485 - DNA, 42 bp, Homo sapiens
  source 1..42: mol_type = genomic DNA
attgcaaattcgaagaagcagcttcaaacctgccggggcttc

SEQ ID NO: 7486 - DNA, 43 bp, Homo sapiens
  source 1..43: mol_type = genomic DNA
attgcaaattcgaagaagcagcttcaaacctgccggggcttcc

SEQ ID NO: 7487 - DNA, 44 bp, Homo sapiens
  source 1..44: mol_type = genomic DNA
attgcaaattcgaagaagcagcttcaaacctgccggggcttcca

SEQ ID NO: 7488 - DNA, 19 bp, Homo sapiens
  source 1..19: mol_type = genomic DNA
attgcaggttcgagtcctg

SEQ ID NO: 7489 - DNA, 27 bp, Homo sapiens
  source 1..27: mol_type = genomic DNA
attgcaggttcgagtcctgccgcggtc

SEQ ID NO: 7490 - DNA, 30 bp, Homo sapiens
  source 1..30: mol_type = genomic DNA
attgcaggttcgagtcctgccgcggtcgcc

SEQ ID NO: 7491 - DNA, 31 bp, Homo sapiens
  source 1..31: mol_type = genomic DNA
attgcaggttcgagtcctgccgcggtcgcca

SEQ ID NO: 7492 - DNA, 27 bp, Homo sapiens
  source 1..27: mol_type = genomic DNA
attggactgtaaatctaaagacagggg

SEQ ID NO: 7493 - DNA, 28 bp, Homo sapiens
  source 1..28: mol_type = genomic DNA
attggactgtaaatctaaagacaggggt

SEQ ID NO: 7494 - DNA, 29 bp, Homo sapiens
  source 1..29: mol_type = genomic DNA
attggactgtaaatctaaagacaggggtt

SEQ ID NO: 7495 - DNA, 30 bp, Homo sapiens
  source 1..30: mol_type = genomic DNA
attggactgtaaatctaaagacaggggtta

SEQ ID NO: 7496 - DNA, 31 bp, Homo sapiens
  source 1..31: mol_type = genomic DNA
attggactgtaaatctaaagacaggggttag

SEQ ID NO: 7497 - DNA, 32 bp, Homo sapiens
  source 1..32: mol_type = genomic DNA
attggactgtaaatctaaagacaggggttagg

SEQ ID NO: 7498 - DNA, 33 bp, Homo sapiens
  source 1..33: mol_type = genomic DNA
attggactgtaaatctaaagacaggggttaggc

SEQ ID NO: 7499 - DNA, 34 bp, Homo sapiens
  source 1..34: mol_type = genomic DNA
attggactgtaaatctaaagacaggggttaggcc

SEQ ID NO: 7500 - DNA, 35 bp, Homo sapiens
  source 1..35: mol_type = genomic DNA
attggactgtaaatctaaagacaggggttaggcct

SEQ ID NO: 7501 - DNA, 36 bp, Homo sapiens
  source 1..36: mol_type = genomic DNA
attggactgtaaatctaaagacaggggttaggcctc

SEQ ID NO: 7502 - DNA, 37 bp, Homo sapiens
  source 1..37: mol_type = genomic DNA
attggactgtaaatctaaagacaggggttaggcctct

SEQ ID NO: 7503 - DNA, 38 bp, Homo sapiens
  source 1..38: mol_type = genomic DNA
attggactgtaaatctaaagacaggggttaggcctctt

SEQ ID NO: 7504 - DNA, 39 bp, Homo sapiens
  source 1..39: mol_type = genomic DNA
attggactgtaaatctaaagacaggggttaggcctcttt

SEQ ID NO: 7505 - DNA, 41 bp, Homo sapiens
  source 1..41: mol_type = genomic DNA
attggactgtaaatctaaagacaggggttaggcctcttttt

SEQ ID NO: 7506 - DNA, 42 bp, Homo sapiens
  source 1..42: mol_type = genomic DNA
attggactgtaaatctaaagacaggggttaggcctcttttta

SEQ ID NO: 7507 - DNA, 44 bp, Homo sapiens
  source 1..44: mol_type = genomic DNA
attggactgtaaatctaaagacaggggttaggcctctttttacc

SEQ ID NO: 7508 - DNA, 47 bp, Homo sapiens
  source 1..47: mol_type = genomic DNA
attggactgtaaatctaaagacaggggttaggcctctttttaccacc

SEQ ID NO: 7509 - DNA, 48 bp, Homo sapiens
  source 1..48: mol_type = genomic DNA
attggactgtaaatctaaagacaggggttaggcctctttttaccacca

SEQ ID NO: 7510 - DNA, 22 bp, Homo sapiens
  source 1..22: mol_type = genomic DNA
attggggtttccccgcgcaggt

SEQ ID NO: 7511 - DNA, 23 bp, Homo sapiens
  source 1..23: mol_type = genomic DNA
attggggtttccccgcgcaggtt

SEQ ID NO: 7512 - DNA, 24 bp, Homo sapiens
  source 1..24: mol_type = genomic DNA
attggggtttccccgcgcaggttc

SEQ ID NO: 7513 - DNA, 25 bp, Homo sapiens
  source 1..25: mol_type = genomic DNA
attggggtttccccgcgcaggttcg

SEQ ID NO: 7514 - DNA, 32 bp, Homo sapiens
  source 1..32: mol_type = genomic DNA
attggggtttccccgcgcaggttcgaatcctg

SEQ ID NO: 7515 - DNA, 16 bp, Homo sapiens
  source 1..16: mol_type = genomic DNA
attggtcgtggttgta

SEQ ID NO: 7516 - DNA, 17 bp, Homo sapiens
  source 1..17: mol_type = genomic DNA
attggtcgtggttgtag

SEQ ID NO: 7517 - DNA, 18 bp, Homo sapiens
  source 1..18: mol_type = genomic DNA
attggtcgtggttgtagt

SEQ ID NO: 7518 - DNA, 19 bp, Homo sapiens
  source 1..19: mol_type = genomic DNA
attggtcgtggttgtagtc

SEQ ID NO: 7519 - DNA, 20 bp, Homo sapiens
  source 1..20: mol_type = genomic DNA
attggtcgtggttgtagtcc

SEQ ID NO: 7520 - DNA, 21 bp, Homo sapiens
  source 1..21: mol_type = genomic DNA
attggtcgtggttgtagtccg

SEQ ID NO: 7521 - DNA, 22 bp, Homo sapiens
  source 1..22: mol_type = genomic DNA
attggtcgtggttgtagtccgt

SEQ ID NO: 7522 - DNA, 23 bp, Homo sapiens
  source 1..23: mol_type = genomic DNA
attggtcgtggttgtagtccgtg

SEQ ID NO: 7523 - DNA, 24 bp, Homo sapiens
  source 1..24: mol_type = genomic DNA
attggtcgtggttgtagtccgtgc

SEQ ID NO: 7524 - DNA, 25 bp, Homo sapiens
  source 1..25: mol_type = genomic DNA
attggtcgtggttgtagtccgtgcg

SEQ ID NO: 7525 - DNA, 26 bp, Homo sapiens
  source 1..26: mol_type = genomic DNA
attggtcgtggttgtagtccgtgcga

SEQ ID NO: 7526 - DNA, 27 bp, Homo sapiens
  source 1..27: mol_type = genomic DNA
attggtcgtggttgtagtccgtgcgag

SEQ ID NO: 7527 - DNA, 28 bp, Homo sapiens
  source 1..28: mol_type = genomic DNA
attggtcgtggttgtagtccgtgcgaga

SEQ ID NO: 7528 - DNA, 29 bp, Homo sapiens
  source 1..29: mol_type = genomic DNA
attggtcgtggttgtagtccgtgcgagaa

SEQ ID NO: 7529 - DNA, 30 bp, Homo sapiens
  source 1..30: mol_type = genomic DNA
attggtcgtggttgtagtccgtgcgagaat

SEQ ID NO: 7530 - DNA, 31 bp, Homo sapiens
  source 1..31: mol_type = genomic DNA
attggtcgtggttgtagtccgtgcgagaata

SEQ ID NO: 7531 - DNA, 32 bp, Homo sapiens
  source 1..32: mol_type = genomic DNA
attggtcgtggttgtagtccgtgcgagaatac

SEQ ID NO: 7532 - DNA, 33 bp, Homo sapiens
  source 1..33: mol_type = genomic DNA
attggtcgtggttgtagtccgtgcgagaatacc

SEQ ID NO: 7533 - DNA, 34 bp, Homo sapiens
  source 1..34: mol_type = genomic DNA
attggtcgtggttgtagtccgtgcgagaatacca

SEQ ID NO: 7534 - DNA, 16 bp, Homo sapiens
  source 1..16: mol_type = genomic DNA
attggtcttaggcccc

SEQ ID NO: 7535 - DNA, 17 bp, Homo sapiens
  source 1..17: mol_type = genomic DNA
attggtcttaggcccca

SEQ ID NO: 7536 - DNA, 29 bp, Homo sapiens
  source 1..29: mol_type = genomic DNA
attggtcttaggccccaaaaattttggtg

SEQ ID NO: 7537 - DNA, 35 bp, Homo sapiens
  source 1..35: mol_type = genomic DNA
attggtcttaggccccaaaaattttggtgcaactc

SEQ ID NO: 7538 - DNA, 36 bp, Homo sapiens
  source 1..36: mol_type = genomic DNA
attggtcttaggccccaaaaattttggtgcaactcc

SEQ ID NO: 7539 - DNA, 39 bp, Homo sapiens
  source 1..39: mol_type = genomic DNA
attggtcttaggccccaaaaattttggtgcaactccaaa

SEQ ID NO: 7540 - DNA, 41 bp, Homo sapiens
  source 1..41: mol_type = genomic DNA
attggtcttaggccccaaaaattttggtgcaactccaaata

SEQ ID NO: 7541 - DNA, 28 bp, Homo sapiens
  source 1..28: mol_type = genomic DNA
attggtggttcaatggtagaattctcgc

SEQ ID NO: 7542 - DNA, 30 bp, Homo sapiens
  source 1..30: mol_type = genomic DNA
attggtggttcaatggtagaattctcgcct

SEQ ID NO: 7543 - DNA, 16 bp, Homo sapiens
  source 1..16: mol_type = genomic DNA
attggtggttcagtgg

SEQ ID NO: 7544 - DNA, 17 bp, Homo sapiens
  source 1..17: mol_type = genomic DNA
attggtggttcagtggt

SEQ ID NO: 7545 - DNA, 18 bp, Homo sapiens
  source 1..18: mol_type = genomic DNA
attggtggttcagtggta

SEQ ID NO: 7546 - DNA, 19 bp, Homo sapiens
  source 1..19: mol_type = genomic DNA
attggtggttcagtggtag

SEQ ID NO: 7547 - DNA, 20 bp, Homo sapiens
  source 1..20: mol_type = genomic DNA
attggtggttcagtggtaga

SEQ ID NO: 7548 - DNA, 21 bp, Homo sapiens
  source 1..21: mol_type = genomic DNA
attggtggttcagtggtagaa

SEQ ID NO: 7549 - DNA, 22 bp, Homo sapiens
  source 1..22: mol_type = genomic DNA
attggtggttcagtggtagaat

SEQ ID NO: 7550 - DNA, 23 bp, Homo sapiens
  source 1..23: mol_type = genomic DNA
attggtggttcagtggtagaatt

SEQ ID NO: 7551 - DNA, 24 bp, Homo sapiens
  source 1..24: mol_type = genomic DNA
attggtggttcagtggtagaattc

SEQ ID NO: 7552 - DNA, 25 bp, Homo sapiens
  source 1..25: mol_type = genomic DNA
attggtggttcagtggtagaattct

SEQ ID NO: 7553 - DNA, 26 bp, Homo sapiens
  source 1..26: mol_type = genomic DNA
attggtggttcagtggtagaattctc

SEQ ID NO: 7554 - DNA, 27 bp, Homo sapiens
  source 1..27: mol_type = genomic DNA
attggtggttcagtggtagaattctcg

SEQ ID NO: 7555 - DNA, 28 bp, Homo sapiens
  source 1..28: mol_type = genomic DNA
attggtggttcagtggtagaattctcgc

SEQ ID NO: 7556 - DNA, 29 bp, Homo sapiens
  source 1..29: mol_type = genomic DNA
attggtggttcagtggtagaattctcgcc

SEQ ID NO: 7557 - DNA, 30 bp, Homo sapiens
  source 1..30: mol_type = genomic DNA
attggtggttcagtggtagaattctcgcct

SEQ ID NO: 7558 - DNA, 31 bp, Homo sapiens
  source 1..31: mol_type = genomic DNA
attggtggttcagtggtagaattctcgcctc

SEQ ID NO: 7559 - DNA, 32 bp, Homo sapiens
  source 1..32: mol_type = genomic DNA
attggtggttcagtggtagaattctcgcctcc

SEQ ID NO: 7560 - DNA, 33 bp, Homo sapiens
  source 1..33: mol_type = genomic DNA
attggtggttcagtggtagaattctcgcctccc

SEQ ID NO: 7561 - DNA, 34 bp, Homo sapiens
  source 1..34: mol_type = genomic DNA
attggtggttcagtggtagaattctcgcctccca

SEQ ID NO: 7562 - DNA, 35 bp, Homo sapiens
  source 1..35: mol_type = genomic DNA
attggtggttcagtggtagaattctcgcctcccac

SEQ ID NO: 7563 - DNA, 31 bp, Homo sapiens
  source 1..31: mol_type = genomic DNA
attggtggttcagtggtagaattctcgcctg

SEQ ID NO: 7564 - DNA, 32 bp, Homo sapiens
  source 1..32: mol_type = genomic DNA
attggtggttcagtggtagaattctcgcctgc

SEQ ID NO: 7565 - DNA, 33 bp, Homo sapiens
  source 1..33: mol_type = genomic DNA
attggtggttcagtggtagaattctcgcctgcc

SEQ ID NO: 7566 - DNA, 34 bp, Homo sapiens
  source 1..34: mol_type = genomic DNA
attggtggttcagtggtagaattctcgcctgcca

SEQ ID NO: 7567 - DNA, 35 bp, Homo sapiens
  source 1..35: mol_type = genomic DNA
attggtggttcagtggtagaattctcgcctgccac

SEQ ID NO: 7568 - DNA, 36 bp, Homo sapiens
  source 1..36: mol_type = genomic DNA
attggtggttcagtggtagaattctcgcctgccacg

SEQ ID NO: 7569 - DNA, 37 bp, Homo sapiens
  source 1..37: mol_type = genomic DNA
attggtggttcagtggtagaattctcgcctgccacgc

SEQ ID NO: 7570 - DNA, 38 bp, Homo sapiens
  source 1..38: mol_type = genomic DNA
attggtggttcagtggtagaattctcgcctgccacgcg

SEQ ID NO: 7571 - DNA, 39 bp, Homo sapiens
  source 1..39: mol_type = genomic DNA
attggtggttcagtggtagaattctcgcctgccacgcgg

SEQ ID NO: 7572 - DNA, 40 bp, Homo sapiens
  source 1..40: mol_type = genomic DNA
attggtggttcagtggtagaattctcgcctgccacgcggg

SEQ ID NO: 7573 - DNA, 41 bp, Homo sapiens
  source 1..41: mol_type = genomic DNA
attggtggttcagtggtagaattctcgcctgccacgcggga

SEQ ID NO: 7574 - DNA, 42 bp, Homo sapiens
  source 1..42: mol_type = genomic DNA
attggtggttcagtggtagaattctcgcctgccacgcgggag

SEQ ID NO: 7575 - DNA, 43 bp, Homo sapiens
  source 1..43: mol_type = genomic DNA
attggtggttcagtggtagaattctcgcctgccacgcgggagg

SEQ ID NO: 7576 - DNA, 44 bp, Homo sapiens
  source 1..44: mol_type = genomic DNA
attggtggttcagtggtagaattctcgcctgccacgcgggaggc

SEQ ID NO: 7577 - DNA, 45 bp, Homo sapiens
  source 1..45: mol_type = genomic DNA
attggtggttcagtggtagaattctcgcctgccacgcgggaggcc

SEQ ID NO: 7578 - DNA, 46 bp, Homo sapiens
  source 1..46: mol_type = genomic DNA
attggtggttcagtggtagaattctcgcctgccacgcgggaggccc

SEQ ID NO: 7579 - DNA, 47 bp, Homo sapiens
  source 1..47: mol_type = genomic DNA
attggtggttcagtggtagaattctcgcctgccacgcgggaggcccg

SEQ ID NO: 7580 - DNA, 48 bp, Homo sapiens
  source 1..48: mol_type = genomic DNA
attggtggttcagtggtagaattctcgcctgccacgcgggaggcccgg

SEQ ID NO: 7581 - DNA, 35 bp, Homo sapiens
  source 1..35: mol_type = genomic DNA
attggtggttcagtggtagaattctcgcctgccat

SEQ ID NO: 7582 - DNA, 16 bp, Homo sapiens
  source 1..16: mol_type = genomic DNA
attgtgaatctgacaa

SEQ ID NO: 7583 - DNA, 17 bp, Homo sapiens
  source 1..17: mol_type = genomic DNA
attgtgaatctgacaac

SEQ ID NO: 7584 - DNA, 18 bp, Homo sapiens
  source 1..18: mol_type = genomic DNA
attgtgaatctgacaaca

SEQ ID NO: 7585 - DNA, 19 bp, Homo sapiens
  source 1..19: mol_type = genomic DNA
attgtgaatctgacaacag

SEQ ID NO: 7586 - DNA, 20 bp, Homo sapiens
  source 1..20: mol_type = genomic DNA
attgtgaatctgacaacaga

SEQ ID NO: 7587 - DNA, 21 bp, Homo sapiens
  source 1..21: mol_type = genomic DNA
attgtgaatctgacaacagag

SEQ ID NO: 7588 - DNA, 22 bp, Homo sapiens
  source 1..22: mol_type = genomic DNA
attgtgaatctgacaacagagg

SEQ ID NO: 7589 - DNA, 23 bp, Homo sapiens
  source 1..23: mol_type = genomic DNA
attgtgaatctgacaacagaggc

SEQ ID NO: 7590 - DNA, 24 bp, Homo sapiens
  source 1..24: mol_type = genomic DNA
attgtgaatctgacaacagaggct

SEQ ID NO: 7591 - DNA, 25 bp, Homo sapiens
  source 1..25: mol_type = genomic DNA
attgtgaatctgacaacagaggctt

SEQ ID NO: 7592 - DNA, 26 bp, Homo sapiens
  source 1..26: mol_type = genomic DNA
attgtgaatctgacaacagaggctta

SEQ ID NO: 7593 - DNA, 27 bp, Homo sapiens
  source 1..27: mol_type = genomic DNA
attgtgaatctgacaacagaggcttac

SEQ ID NO: 7594 - DNA, 28 bp, Homo sapiens
  source 1..28: mol_type = genomic DNA
attgtgaatctgacaacagaggcttacg

SEQ ID NO: 7595 - DNA, 29 bp, Homo sapiens
  source 1..29: mol_type = genomic DNA
attgtgaatctgacaacagaggcttacga

SEQ ID NO: 7596 - DNA, 30 bp, Homo sapiens
  source 1..30: mol_type = genomic DNA
attgtgaatctgacaacagaggcttacgac

SEQ ID NO: 7597 - DNA, 31 bp, Homo sapiens
  source 1..31: mol_type = genomic DNA
attgtgaatctgacaacagaggcttacgacc

SEQ ID NO: 7598 - DNA, 32 bp, Homo sapiens
  source 1..32: mol_type = genomic DNA
attgtgaatctgacaacagaggcttacgaccc

SEQ ID NO: 7599 - DNA, 33 bp, Homo sapiens
  source 1..33: mol_type = genomic DNA
attgtgaatctgacaacagaggcttacgacccc

SEQ ID NO: 7600 - DNA, 34 bp, Homo sapiens
  source 1..34: mol_type = genomic DNA
attgtgaatctgacaacagaggcttacgacccct

SEQ ID NO: 7601 - DNA, 35 bp, Homo sapiens
  source 1..35: mol_type = genomic DNA
attgtgaatctgacaacagaggcttacgacccctt

SEQ ID NO: 7602 - DNA, 36 bp, Homo sapiens
  source 1..36: mol_type = genomic DNA
attgtgaatctgacaacagaggcttacgacccctta

SEQ ID NO: 7603 - DNA, 37 bp, Homo sapiens
  source 1..37: mol_type = genomic DNA
attgtgaatctgacaacagaggcttacgaccccttat

SEQ ID NO: 7604 - DNA, 38 bp, Homo sapiens
  source 1..38: mol_type = genomic DNA
attgtgaatctgacaacagaggcttacgaccccttatt

SEQ ID NO: 7605 - DNA, 39 bp, Homo sapiens
  source 1..39: mol_type = genomic DNA
attgtgaatctgacaacagaggcttacgaccccttattt

SEQ ID NO: 7606 - DNA, 40 bp, Homo sapiens
  source 1..40: mol_type = genomic DNA
attgtgaatctgacaacagaggcttacgaccccttattta

SEQ ID NO: 7607 - DNA, 41 bp, Homo sapiens
  source 1..41: mol_type = genomic DNA
attgtgaatctgacaacagaggcttacgaccccttatttac

SEQ ID NO: 7608 - DNA, 42 bp, Homo sapiens
  source 1..42: mol_type = genomic DNA
attgtgaatctgacaacagaggcttacgaccccttatttacc

SEQ ID NO: 7609 - DNA, 43 bp, Homo sapiens
  source 1..43: mol_type = genomic DNA
attgtgaatctgacaacagaggcttacgaccccttatttaccc

SEQ ID NO: 7610 - DNA, 44 bp, Homo sapiens
  source 1..44: mol_type = genomic DNA
attgtgaatctgacaacagaggcttacgaccccttatttacccc

SEQ ID NO: 7611 - DNA, 45 bp, Homo sapiens
  source 1..45: mol_type = genomic DNA
attgtgaatctgacaacagaggcttacgaccccttatttacccca

SEQ ID NO: 7612 - DNA, 21 bp, Homo sapiens
  source 1..21: mol_type = genomic DNA
attgtgctctgcacgcgtggg

SEQ ID NO: 7613 - DNA, 22 bp, Homo sapiens
  source 1..22: mol_type = genomic DNA
attgtgctctgcacgcgtgggt

SEQ ID NO: 7614 - DNA, 32 bp, Homo sapiens
  source 1..32: mol_type = genomic DNA
attgtgctctgcacgcgtgggttcgaatccca

SEQ ID NO: 7615 - DNA, 43 bp, Homo sapiens
  source 1..43: mol_type = genomic DNA
attgtgctctgcacgcgtgggttcgaatcccatcctcgtcgcc

SEQ ID NO: 7616 - DNA, 44 bp, Homo sapiens
  source 1..44: mol_type = genomic DNA
attgtgctctgcacgcgtgggttcgaatcccatcctcgtcgcca

SEQ ID NO: 7617 - DNA, 21 bp, Homo sapiens
  source 1..21: mol_type = genomic DNA
attgtgctttgcacgcgtggg

SEQ ID NO: 7618 - DNA, 24 bp, Homo sapiens
  source 1..24: mol_type = genomic DNA
attgtgctttgcacgcgtgggttc

SEQ ID NO: 7619 - DNA, 25 bp, Homo sapiens
  source 1..25: mol_type = genomic DNA
attgtgctttgcacgcgtgggttcg

SEQ ID NO: 7620 - DNA, 42 bp, Homo sapiens
  source 1..42: mol_type = genomic DNA
attgtgctttgcacgcgtgggttcgaatcccatcctcgtcgc

SEQ ID NO: 7621 - DNA, 43 bp, Homo sapiens
  source 1..43: mol_type = genomic DNA
attgtgctttgcacgcgtgggttcgaatcccatcctcgtcgcc

SEQ ID NO: 7622 - DNA, 44 bp, Homo sapiens
  source 1..44: mol_type = genomic DNA
attgtgctttgcacgcgtgggttcgaatcccatcctcgtcgcca

SEQ ID NO: 7623 - DNA, 28 bp, Homo sapiens
  source 1..28: mol_type = genomic DNA
attgtgggttcgagtcccacctggggtg

SEQ ID NO: 7624 - DNA, 28 bp, Homo sapiens
  source 1..28: mol_type = genomic DNA
attgtgggttcgagtcccatctggggtg

SEQ ID NO: 7625 - DNA, 29 bp, Homo sapiens
  source 1..29: mol_type = genomic DNA
attgtgggttcgagtcccatctggggtgc

SEQ ID NO: 7626 - DNA, 30 bp, Homo sapiens
  source 1..30: mol_type = genomic DNA
attgtgggttcgagtcccatctggggtgcc

SEQ ID NO: 7627 - DNA, 31 bp, Homo sapiens
  source 1..31: mol_type = genomic DNA
attgtgggttcgagtcccatctggggtgcca

SEQ ID NO: 7628 - DNA, 28 bp, Homo sapiens
  source 1..28: mol_type = genomic DNA
attgtgggttcgagtcccatctgggtcg

SEQ ID NO: 7629 - DNA, 29 bp, Homo sapiens
  source 1..29: mol_type = genomic DNA
attgtgggttcgagtcccatctgggtcgc

SEQ ID NO: 7630 - DNA, 30 bp, Homo sapiens
  source 1..30: mol_type = genomic DNA
attgtgggttcgagtcccatctgggtcgcc

SEQ ID NO: 7631 - DNA, 31 bp, Homo sapiens
  source 1..31: mol_type = genomic DNA
attgtgggttcgagtcccatctgggtcgcca

SEQ ID NO: 7632 - DNA, 19 bp, Homo sapiens
  source 1..19: mol_type = genomic DNA
atttaggttaaatacagac

SEQ ID NO: 7633 - DNA, 20 bp, Homo sapiens
  source 1..20: mol_type = genomic DNA
atttaggttaaatacagacc

SEQ ID NO: 7634 - DNA, 27 bp, Homo sapiens
  source 1..27: mol_type = genomic DNA
atttaggttaaatacagaccaagagcc

SEQ ID NO: 7635 - DNA, 40 bp, Homo sapiens
  source 1..40: mol_type = genomic DNA
atttaggttaaatacagaccaagagccttcaaagccctca

SEQ ID NO: 7636 - DNA, 16 bp, Homo sapiens
  source 1..16: mol_type = genomic DNA
atttcaacttaacttg

SEQ ID NO: 7637 - DNA, 18 bp, Homo sapiens
  source 1..18: mol_type = genomic DNA
atttcaacttaacttgac

SEQ ID NO: 7638 - DNA, 19 bp, Homo sapiens
  source 1..19: mol_type = genomic DNA
atttcaacttaacttgacc

SEQ ID NO: 7639 - DNA, 20 bp, Homo sapiens
  source 1..20: mol_type = genomic DNA
atttcaacttaacttgaccg

SEQ ID NO: 7640 - DNA, 22 bp, Homo sapiens
  source 1..22: mol_type = genomic DNA
atttcaacttaacttgaccgct

SEQ ID NO: 7641 - DNA, 23 bp, Homo sapiens
  source 1..23: mol_type = genomic DNA
atttcaacttaacttgaccgctc

SEQ ID NO: 7642 - DNA, 24 bp, Homo sapiens
  source 1..24: mol_type = genomic DNA
atttcaacttaacttgaccgctct

SEQ ID NO: 7643 - DNA, 25 bp, Homo sapiens
  source 1..25: mol_type = genomic DNA
atttcaacttaacttgaccgctctg

SEQ ID NO: 7644 - DNA, 26 bp, Homo sapiens
  source 1..26: mol_type = genomic DNA
atttcaacttaacttgaccgctctga

SEQ ID NO: 7645 - DNA, 27 bp, Homo sapiens
  source 1..27: mol_type = genomic DNA
atttcaacttaacttgaccgctctgac

SEQ ID NO: 7646 - DNA, 28 bp, Homo sapiens
  source 1..28: mol_type = genomic DNA
atttcaacttaacttgaccgctctgacc

SEQ ID NO: 7647 - DNA, 29 bp, Homo sapiens
  source 1..29: mol_type = genomic DNA
atttcaacttaacttgaccgctctgacca

SEQ ID NO: 7648 - DNA, 16 bp, Homo sapiens
  source 1..16: mol_type = genomic DNA
atttcataactttgtc

SEQ ID NO: 7649 - DNA, 17 bp, Homo sapiens
  source 1..17: mol_type = genomic DNA
atttcataactttgtca

SEQ ID NO: 7650 - DNA, 18 bp, Homo sapiens
  source 1..18: mol_type = genomic DNA
atttcataactttgtcaa

SEQ ID NO: 7651 - DNA, 19 bp, Homo sapiens
  source 1..19: mol_type = genomic DNA
atttcataactttgtcaaa

SEQ ID NO: 7652 - DNA, 20 bp, Homo sapiens
  source 1..20: mol_type = genomic DNA
atttcataactttgtcaaag

SEQ ID NO: 7653 - DNA, 21 bp, Homo sapiens
  source 1..21: mol_type = genomic DNA
atttcataactttgtcaaagt

SEQ ID NO: 7654 - DNA, 33 bp, Homo sapiens
  source 1..33: mol_type = genomic DNA
atttcataactttgtcaaagttaaattataggc

SEQ ID NO: 7655 - DNA, 34 bp, Homo sapiens
  source 1..34: mol_type = genomic DNA
atttcataactttgtcaaagttaaattataggct

SEQ ID NO: 7656 - DNA, 35 bp, Homo sapiens
  source 1..35: mol_type = genomic DNA
atttcataactttgtcaaagttaaattataggcta

SEQ ID NO: 7657 - DNA, 36 bp, Homo sapiens
  source 1..36: mol_type = genomic DNA
atttcataactttgtcaaagttaaattataggctaa

SEQ ID NO: 7658 - DNA, 37 bp, Homo sapiens
  source 1..37: mol_type = genomic DNA
atttcataactttgtcaaagttaaattataggctaaa

SEQ ID NO: 7659 - DNA, 39 bp, Homo sapiens
  source 1..39: mol_type = genomic DNA
atttcataactttgtcaaagttaaattataggctaaatc

SEQ ID NO: 7660 - DNA, 16 bp, Homo sapiens
  source 1..16: mol_type = genomic DNA
atttcgactcattaaa

SEQ ID NO: 7661 - DNA, 17 bp, Homo sapiens
  source 1..17: mol_type = genomic DNA
atttcgactcattaaat

SEQ ID NO: 7662 - DNA, 18 bp, Homo sapiens
  source 1..18: mol_type = genomic DNA
atttcgactcattaaatt

SEQ ID NO: 7663 - DNA, 20 bp, Homo sapiens
  source 1..20: mol_type = genomic DNA
atttcgactcattaaattat

SEQ ID NO: 7664 - DNA, 21 bp, Homo sapiens
  source 1..21: mol_type = genomic DNA
atttcgactcattaaattatg

SEQ ID NO: 7665 - DNA, 22 bp, Homo sapiens
  source 1..22: mol_type = genomic DNA
atttcgactcattaaattatga

SEQ ID NO: 7666 - DNA, 23 bp, Homo sapiens
  source 1..23: mol_type = genomic DNA
atttcgactcattaaattatgat

SEQ ID NO: 7667 - DNA, 24 bp, Homo sapiens
  source 1..24: mol_type = genomic DNA
atttcgactcattaaattatgata

SEQ ID NO: 7668 - DNA, 25 bp, Homo sapiens
  source 1..25: mol_type = genomic DNA
atttcgactcattaaattatgataa

SEQ ID NO: 7669 - DNA, 26 bp, Homo sapiens
  source 1..26: mol_type = genomic DNA
atttcgactcattaaattatgataat

SEQ ID NO: 7670 - DNA, 30 bp, Homo sapiens
  source 1..30: mol_type = genomic DNA
atttcgactcattaaattatgataatcata

SEQ ID NO: 7671 - DNA, 34 bp, Homo sapiens
  source 1..34: mol_type = genomic DNA
atttcgactcattaaattatgataatcatattta

SEQ ID NO: 7672 - DNA, 35 bp, Homo sapiens
  source 1..35: mol_type = genomic DNA
atttcgactcattaaattatgataatcatatttac

SEQ ID NO: 7673 - DNA, 36 bp, Homo sapiens
  source 1..36: mol_type = genomic DNA
atttcgactcattaaattatgataatcatatttacc

SEQ ID NO: 7674 - DNA, 37 bp, Homo sapiens
  source 1..37: mol_type = genomic DNA
atttcgactcattaaattatgataatcatatttacca

SEQ ID NO: 7675 - DNA, 38 bp, Homo sapiens
  source 1..38: mol_type = genomic DNA
atttcgactcattaaattatgataatcatatttaccaa

SEQ ID NO: 7676 - DNA, 39 bp, Homo sapiens
  source 1..39: mol_type = genomic DNA
atttcgactcattaaattatgataatcatatttaccaac

SEQ ID NO: 7677 - DNA, 40 bp, Homo sapiens
  source 1..40: mol_type = genomic DNA
atttcgactcattaaattatgataatcatatttaccaacc

SEQ ID NO: 7678 - DNA, 41 bp, Homo sapiens
  source 1..41: mol_type = genomic DNA
atttcgactcattaaattatgataatcatatttaccaacca

SEQ ID NO: 7679 - DNA, 17 bp, Homo sapiens
  source 1..17: mol_type = genomic DNA
atttcgatggcgtgggt

SEQ ID NO: 7680 - DNA, 18 bp, Homo sapiens
  source 1..18: mol_type = genomic DNA
atttcgatggcgtgggtt

SEQ ID NO: 7681 - DNA, 27 bp, Homo sapiens
  source 1..27: mol_type = genomic DNA
atttcgatggcgtgggttcgaatccca

SEQ ID NO: 7682 - DNA, 30 bp, Homo sapiens
  source 1..30: mol_type = genomic DNA
atttcgatggcgtgggttcgaatcccaccg

SEQ ID NO: 7683 - DNA, 33 bp, Homo sapiens
  source 1..33: mol_type = genomic DNA
atttcgatggcgtgggttcgaatcccaccgctg

SEQ ID NO: 7684 - DNA, 38 bp, Homo sapiens
  source 1..38: mol_type = genomic DNA
atttcgatggcgtgggttcgaatcccaccgctgccacc

SEQ ID NO: 7685 - DNA, 39 bp, Homo sapiens
  source 1..39: mol_type = genomic DNA
atttcgatggcgtgggttcgaatcccaccgctgccacca

SEQ ID NO: 7686 - DNA, 17 bp, Homo sapiens
  source 1..17: mol_type = genomic DNA
atttgcgttcagttgat

SEQ ID NO: 7687 - DNA, 18 bp, Homo sapiens
  source 1..18: mol_type = genomic DNA
attttcatattgaattgc

SEQ ID NO: 7688 - DNA, 19 bp, Homo sapiens
  source 1..19: mol_type = genomic DNA
attttcatattgaattgca

SEQ ID NO: 7689 - DNA, 24 bp, Homo sapiens
  source 1..24: mol_type = genomic DNA
attttcatattgaattgcaaattc

SEQ ID NO: 7690 - DNA, 26 bp, Homo sapiens
  source 1..26: mol_type = genomic DNA
attttcatattgaattgcaaattcga

SEQ ID NO: 7691 - DNA, 40 bp, Homo sapiens
  source 1..40: mol_type = genomic DNA
attttggattctcagggatgggttcgattctcatagtcct

SEQ ID NO: 7692 - DNA, 43 bp, Homo sapiens
  source 1..43: mol_type = genomic DNA
attttggattctcagggatgggttcgattctcatagtcctagc

SEQ ID NO: 7693 - DNA, 44 bp, Homo sapiens
  source 1..44: mol_type = genomic DNA
attttggattctcagggatgggttcgattctcatagtcctagcc

SEQ ID NO: 7694 - DNA, 45 bp, Homo sapiens
  source 1..45: mol_type = genomic DNA
attttggattctcagggatgggttcgattctcatagtcctagcca

SEQ ID NO: 7695 - DNA, 16 bp, Homo sapiens
  source 1..16: mol_type = genomic DNA
attttggtgcaactcc

SEQ ID NO: 7696 - DNA, 17 bp, Homo sapiens
  source 1..17: mol_type = genomic DNA
attttggtgcaactcca

SEQ ID NO: 7697 - DNA, 18 bp, Homo sapiens
  source 1..18: mol_type = genomic DNA
attttggtgcaactccaa

SEQ ID NO: 7698 - DNA, 20 bp, Homo sapiens
  source 1..20: mol_type = genomic DNA
attttggtgcaactccaaat

SEQ ID NO: 7699 - DNA, 21 bp, Homo sapiens
  source 1..21: mol_type = genomic DNA
attttggtgcaactccaaata

SEQ ID NO: 7700 - DNA, 28 bp, Homo sapiens
  source 1..28: mol_type = genomic DNA
attttggtgcaactccaaataaaagtac

SEQ ID NO: 7701 - DNA, 29 bp, Homo sapiens
  source 1..29: mol_type = genomic DNA
attttggtgcaactccaaataaaagtacc

SEQ ID NO: 7702 - DNA, 30 bp, Homo sapiens
  source 1..30: mol_type = genomic DNA
attttggtgcaactccaaataaaagtacca

SEQ ID NO: 7703 - DNA, 16 bp, Homo sapiens
  source 1..16: mol_type = genomic DNA
caaaaattttggtgca

SEQ ID NO: 7704 - DNA, 17 bp, Homo sapiens
  source 1..17: mol_type = genomic DNA
caaaaattttggtgcaa

SEQ ID NO: 7705 - DNA, 18 bp, Homo sapiens
  source 1..18: mol_type = genomic DNA
caaaaattttggtgcaac

SEQ ID NO: 7706 - DNA, 19 bp, Homo sapiens
  source 1..19: mol_type = genomic DNA
caaaaattttggtgcaact

SEQ ID NO: 7707 - DNA, 20 bp, Homo sapiens
  source 1..20: mol_type = genomic DNA
caaaaattttggtgcaactc

SEQ ID NO: 7708 - DNA, 21 bp, Homo sapiens
  source 1..21: mol_type = genomic DNA
caaaaattttggtgcaactcc

SEQ ID NO: 7709 - DNA, 22 bp, Homo sapiens
  source 1..22: mol_type = genomic DNA
caaaaattttggtgcaactcca

SEQ ID NO: 7710 - DNA, 25 bp, Homo sapiens
  source 1..25: mol_type = genomic DNA
caaaaattttggtgcaactccaaat

SEQ ID NO: 7711 - DNA, 26 bp, Homo sapiens
  source 1..26: mol_type = genomic DNA
caaaaattttggtgcaactccaaata

SEQ ID NO: 7712 - DNA, 31 bp, Homo sapiens
  source 1..31: mol_type = genomic DNA
caaaaattttggtgcaactccaaataaaagt

SEQ ID NO: 7713 - DNA, 32 bp, Homo sapiens
  source 1..32: mol_type = genomic DNA
caaaaattttggtgcaactccaaataaaagta

SEQ ID NO: 7714 - DNA, 33 bp, Homo sapiens
  source 1..33: mol_type = genomic DNA
caaaaattttggtgcaactccaaataaaagtac

SEQ ID NO: 7715 - DNA, 34 bp, Homo sapiens
  source 1..34: mol_type = genomic DNA
caaaaattttggtgcaactccaaataaaagtacc

SEQ ID NO: 7716 - DNA, 35 bp, Homo sapiens
  source 1..35: mol_type = genomic DNA
caaaaattttggtgcaactccaaataaaagtacca

SEQ ID NO: 7717 - DNA, 16 bp, Homo sapiens
  source 1..16: mol_type = genomic DNA
caaaacatcagattgt

SEQ ID NO: 7718 - DNA, 17 bp, Homo sapiens
  source 1..17: mol_type = genomic DNA
caaaacatcagattgtg

SEQ ID NO: 7719 - DNA, 18 bp, Homo sapiens
  source 1..18: mol_type = genomic DNA
caaaacatcagattgtga

SEQ ID NO: 7720 - DNA, 19 bp, Homo sapiens
  source 1..19: mol_type = genomic DNA
caaaacatcagattgtgaa

SEQ ID NO: 7721 - DNA, 20 bp, Homo sapiens
  source 1..20: mol_type = genomic DNA
caaaacatcagattgtgaat

SEQ ID NO: 7722 - DNA, 21 bp, Homo sapiens
  source 1..21: mol_type = genomic DNA
caaaacatcagattgtgaatc

SEQ ID NO: 7723 - DNA, 22 bp, Homo sapiens
  source 1..22: mol_type = genomic DNA
caaaacatcagattgtgaatct

SEQ ID NO: 7724 - DNA, 23 bp, Homo sapiens
  source 1..23: mol_type = genomic DNA
caaaacatcagattgtgaatctg

SEQ ID NO: 7725 - DNA, 24 bp, Homo sapiens
  source 1..24: mol_type = genomic DNA
caaaacatcagattgtgaatctga

SEQ ID NO: 7726 - DNA, 25 bp, Homo sapiens
  source 1..25: mol_type = genomic DNA
caaaacatcagattgtgaatctgac

SEQ ID NO: 7727 - DNA, 26 bp, Homo sapiens
  source 1..26: mol_type = genomic DNA
caaaacatcagattgtgaatctgaca

SEQ ID NO: 7728 - DNA, 28 bp, Homo sapiens
  source 1..28: mol_type = genomic DNA
caaaacatcagattgtgaatctgacaac

SEQ ID NO: 7729 - DNA, 29 bp, Homo sapiens
  source 1..29: mol_type = genomic DNA
caaaacatcagattgtgaatctgacaaca

SEQ ID NO: 7730 - DNA, 30 bp, Homo sapiens
  source 1..30: mol_type = genomic DNA
caaaacatcagattgtgaatctgacaacag

SEQ ID NO: 7731 - DNA, 31 bp, Homo sapiens
  source 1..31: mol_type = genomic DNA
caaaacatcagattgtgaatctgacaacaga

SEQ ID NO: 7732 - DNA, 32 bp, Homo sapiens
  source 1..32: mol_type = genomic DNA
caaaacatcagattgtgaatctgacaacagag

SEQ ID NO: 7733 - DNA, 33 bp, Homo sapiens
  source 1..33: mol_type = genomic DNA
caaaacatcagattgtgaatctgacaacagagg

SEQ ID NO: 7734 - DNA, 34 bp, Homo sapiens
  source 1..34: mol_type = genomic DNA
caaaacatcagattgtgaatctgacaacagaggc

SEQ ID NO: 7735 - DNA, 35 bp, Homo sapiens
  source 1..35: mol_type = genomic DNA
caaaacatcagattgtgaatctgacaacagaggct

SEQ ID NO: 7736 - DNA, 36 bp, Homo sapiens
  source 1..36: mol_type = genomic DNA
caaaacatcagattgtgaatctgacaacagaggctt

SEQ ID NO: 7737 - DNA, 37 bp, Homo sapiens
  source 1..37: mol_type = genomic DNA
caaaacatcagattgtgaatctgacaacagaggctta

SEQ ID NO: 7738 - DNA, 38 bp, Homo sapiens
  source 1..38: mol_type = genomic DNA
caaaacatcagattgtgaatctgacaacagaggcttac

SEQ ID NO: 7739 - DNA, 39 bp, Homo sapiens
  source 1..39: mol_type = genomic DNA
caaaacatcagattgtgaatctgacaacagaggcttacg

SEQ ID NO: 7740 - DNA, 40 bp, Homo sapiens
  source 1..40: mol_type = genomic DNA
caaaacatcagattgtgaatctgacaacagaggcttacga

SEQ ID NO: 7741 - DNA, 41 bp, Homo sapiens
  source 1..41: mol_type = genomic DNA
caaaacatcagattgtgaatctgacaacagaggcttacgac

SEQ ID NO: 7742 - DNA, 42 bp, Homo sapiens
  source 1..42: mol_type = genomic DNA
caaaacatcagattgtgaatctgacaacagaggcttacgacc

SEQ ID NO: 7743 - DNA, 43 bp, Homo sapiens
  source 1..43: mol_type = genomic DNA
caaaacatcagattgtgaatctgacaacagaggcttacgaccc

SEQ ID NO: 7744 - DNA, 44 bp, Homo sapiens
  source 1..44: mol_type = genomic DNA
caaaacatcagattgtgaatctgacaacagaggcttacgacccc

SEQ ID NO: 7745 - DNA, 45 bp, Homo sapiens
  source 1..45: mol_type = genomic DNA
caaaacatcagattgtgaatctgacaacagaggcttacgacccct

SEQ ID NO: 7746 - DNA, 46 bp, Homo sapiens
  source 1..46: mol_type = genomic DNA
caaaacatcagattgtgaatctgacaacagaggcttacgacccctt

SEQ ID NO: 7747 - DNA, 47 bp, Homo sapiens
  source 1..47: mol_type = genomic DNA
caaaacatcagattgtgaatctgacaacagaggcttacgacccctta

SEQ ID NO: 7748 - DNA, 48 bp, Homo sapiens
  source 1..48: mol_type = genomic DNA
caaaacatcagattgtgaatctgacaacagaggcttacgaccccttat

SEQ ID NO: 7749 - DNA, 16 bp, Homo sapiens
  source 1..16: mol_type = genomic DNA
caaaacgaatgatttc

SEQ ID NO: 7750 - DNA, 17 bp, Homo sapiens
  source 1..17: mol_type = genomic DNA
caaaacgaatgatttcg

SEQ ID NO: 7751 - DNA, 19 bp, Homo sapiens
  source 1..19: mol_type = genomic DNA
caaaacgaatgatttcgac

SEQ ID NO: 7752 - DNA, 20 bp, Homo sapiens
  source 1..20: mol_type = genomic DNA
caaaacgaatgatttcgact

SEQ ID NO: 7753 - DNA, 21 bp, Homo sapiens
  source 1..21: mol_type = genomic DNA
caaaacgaatgatttcgactc

SEQ ID NO: 7754 - DNA, 22 bp, Homo sapiens
  source 1..22: mol_type = genomic DNA
caaaacgaatgatttcgactca

SEQ ID NO: 7755 - DNA, 23 bp, Homo sapiens
  source 1..23: mol_type = genomic DNA
caaaacgaatgatttcgactcat

SEQ ID NO: 7756 - DNA, 24 bp, Homo sapiens
  source 1..24: mol_type = genomic DNA
caaaacgaatgatttcgactcatt

SEQ ID NO: 7757 - DNA, 25 bp, Homo sapiens
  source 1..25: mol_type = genomic DNA
caaaacgaatgatttcgactcatta

SEQ ID NO: 7758 - DNA, 27 bp, Homo sapiens
  source 1..27: mol_type = genomic DNA
caaaacgaatgatttcgactcattaaa

SEQ ID NO: 7759 - DNA, 29 bp, Homo sapiens
  source 1..29: mol_type = genomic DNA
caaaacgaatgatttcgactcattaaatt

SEQ ID NO: 7760 - DNA, 30 bp, Homo sapiens
  source 1..30: mol_type = genomic DNA
caaaacgaatgatttcgactcattaaatta

SEQ ID NO: 7761 - DNA, 32 bp, Homo sapiens
  source 1..32: mol_type = genomic DNA
caaaacgaatgatttcgactcattaaattatg

SEQ ID NO: 7762 - DNA, 33 bp, Homo sapiens
  source 1..33: mol_type = genomic DNA
caaaacgaatgatttcgactcattaaattatga

SEQ ID NO: 7763 - DNA, 34 bp, Homo sapiens
  source 1..34: mol_type = genomic DNA
caaaacgaatgatttcgactcattaaattatgat

SEQ ID NO: 7764 - DNA, 35 bp, Homo sapiens
  source 1..35: mol_type = genomic DNA
caaaacgaatgatttcgactcattaaattatgata

SEQ ID NO: 7765 - DNA, 16 bp, Homo sapiens
  source 1..16: mol_type = genomic DNA
caaacctgccggggct

SEQ ID NO: 7766 - DNA, 17 bp, Homo sapiens
  source 1..17: mol_type = genomic DNA
caaacctgccggggctt

SEQ ID NO: 7767 - DNA, 18 bp, Homo sapiens
  source 1..18: mol_type = genomic DNA
caaacctgccggggcttc

SEQ ID NO: 7768 - DNA, 19 bp, Homo sapiens
  source 1..19: mol_type = genomic DNA
caaacctgccggggcttcc

SEQ ID NO: 7769 - DNA, 20 bp, Homo sapiens
  source 1..20: mol_type = genomic DNA
caaacctgccggggcttcca

SEQ ID NO: 7770 - DNA, 16 bp, Homo sapiens
  source 1..16: mol_type = genomic DNA
caaagcaatacactga

SEQ ID NO: 7771 - DNA, 17 bp, Homo sapiens
  source 1..17: mol_type = genomic DNA
caaagcaatacactgaa

SEQ ID NO: 7772 - DNA, 18 bp, Homo sapiens
  source 1..18: mol_type = genomic DNA
caaagcaatacactgaaa

SEQ ID NO: 7773 - DNA, 28 bp, Homo sapiens
  source 1..28: mol_type = genomic DNA
caaagcaatacactgaaaatgtttagac

SEQ ID NO: 7774 - DNA, 30 bp, Homo sapiens
  source 1..30: mol_type = genomic DNA
caaagcaatacactgaaaatgtttagacgg

SEQ ID NO: 7775 - DNA, 32 bp, Homo sapiens
  source 1..32: mol_type = genomic DNA
caaagcaatacactgaaaatgtttagacgggc

SEQ ID NO: 7776 - DNA, 33 bp, Homo sapiens
  source 1..33: mol_type = genomic DNA
caaagcaatacactgaaaatgtttagacgggct

SEQ ID NO: 7777 - DNA, 34 bp, Homo sapiens
  source 1..34: mol_type = genomic DNA
caaagcaatacactgaaaatgtttagacgggctc

SEQ ID NO: 7778 - DNA, 35 bp, Homo sapiens
  source 1..35: mol_type = genomic DNA
caaagcaatacactgaaaatgtttagacgggctca

SEQ ID NO: 7779 - DNA, 36 bp, Homo sapiens
  source 1..36: mol_type = genomic DNA
caaagcaatacactgaaaatgtttagacgggctcac

SEQ ID NO: 7780 - DNA, 37 bp, Homo sapiens
  source 1..37: mol_type = genomic DNA
caaagcaatacactgaaaatgtttagacgggctcaca

SEQ ID NO: 7781 - DNA, 38 bp, Homo sapiens
  source 1..38: mol_type = genomic DNA
caaagcaatacactgaaaatgtttagacgggctcacat

SEQ ID NO: 7782 - DNA, 43 bp, Homo sapiens
  source 1..43: mol_type = genomic DNA
caaagcaatacactgaaaatgtttagacgggctcacatcaccc

SEQ ID NO: 7783 - DNA, 16 bp, Homo sapiens
  source 1..16: mol_type = genomic DNA
caaagcacccaactta

SEQ ID NO: 7784 - DNA, 17 bp, Homo sapiens
  source 1..17: mol_type = genomic DNA
caaagcacccaacttac

SEQ ID NO: 7785 - DNA, 18 bp, Homo sapiens
  source 1..18: mol_type = genomic DNA
caaagcacccaacttaca

SEQ ID NO: 7786 - DNA, 19 bp, Homo sapiens
  source 1..19: mol_type = genomic DNA
caaagcacccaacttacac

SEQ ID NO: 7787 - DNA, 20 bp, Homo sapiens
  source 1..20: mol_type = genomic DNA
caaagcacccaacttacact

SEQ ID NO: 7788 - DNA, 21 bp, Homo sapiens
  source 1..21: mol_type = genomic DNA
caaagcacccaacttacactt

SEQ ID NO: 7789 - DNA, 22 bp, Homo sapiens
  source 1..22: mol_type = genomic DNA
caaagcacccaacttacactta

SEQ ID NO: 7790 - DNA, 23 bp, Homo sapiens
  source 1..23: mol_type = genomic DNA
caaagcacccaacttacacttag

SEQ ID NO: 7791 - DNA, 24 bp, Homo sapiens
  source 1..24: mol_type = genomic DNA
caaagcacccaacttacacttagg

SEQ ID NO: 7792 - DNA, 25 bp, Homo sapiens
  source 1..25: mol_type = genomic DNA
caaagcacccaacttacacttagga

SEQ ID NO: 7793 - DNA, 26 bp, Homo sapiens
  source 1..26: mol_type = genomic DNA
caaagcacccaacttacacttaggag

SEQ ID NO: 7794 - DNA, 28 bp, Homo sapiens
  source 1..28: mol_type = genomic DNA
caaagcacccaacttacacttaggagat

SEQ ID NO: 7795 - DNA, 29 bp, Homo sapiens
  source 1..29: mol_type = genomic DNA
caaagcacccaacttacacttaggagatt

SEQ ID NO: 7796 - DNA, 30 bp, Homo sapiens
  source 1..30: mol_type = genomic DNA
caaagcacccaacttacacttaggagattt

SEQ ID NO: 7797 - DNA, 31 bp, Homo sapiens
  source 1..31: mol_type = genomic DNA
caaagcacccaacttacacttaggagatttc

SEQ ID NO: 7798 - DNA, 32 bp, Homo sapiens
  source 1..32: mol_type = genomic DNA
caaagcacccaacttacacttaggagatttca

SEQ ID NO: 7799 - DNA, 33 bp, Homo sapiens
  source 1..33: mol_type = genomic DNA
caaagcacccaacttacacttaggagatttcaa

SEQ ID NO: 7800 - DNA, 34 bp, Homo sapiens
  source 1..34: mol_type = genomic DNA
caaagcacccaacttacacttaggagatttcaac

SEQ ID NO: 7801 - DNA, 35 bp, Homo sapiens
  source 1..35: mol_type = genomic DNA
caaagcacccaacttacacttaggagatttcaact

SEQ ID NO: 7802 - DNA, 36 bp, Homo sapiens
  source 1..36: mol_type = genomic DNA
caaagcacccaacttacacttaggagatttcaactt

SEQ ID NO: 7803 - DNA, 37 bp, Homo sapiens
  source 1..37: mol_type = genomic DNA
caaagcacccaacttacacttaggagatttcaactta

SEQ ID NO: 7804 - DNA, 38 bp, Homo sapiens
  source 1..38: mol_type = genomic DNA
caaagcacccaacttacacttaggagatttcaacttaa

SEQ ID NO: 7805 - DNA, 39 bp, Homo sapiens
  source 1..39: mol_type = genomic DNA
caaagcacccaacttacacttaggagatttcaacttaac

SEQ ID NO: 7806 - DNA, 40 bp, Homo sapiens
  source 1..40: mol_type = genomic DNA
caaagcacccaacttacacttaggagatttcaacttaact

SEQ ID NO: 7807 - DNA, 44 bp, Homo sapiens
  source 1..44: mol_type = genomic DNA
caaagcacccaacttacacttaggagatttcaacttaacttgac

SEQ ID NO: 7808 - DNA, 45 bp, Homo sapiens
  source 1..45: mol_type = genomic DNA
caaagcacccaacttacacttaggagatttcaacttaacttgacc

SEQ ID NO: 7809 - DNA, 46 bp, Homo sapiens
  source 1..46: mol_type = genomic DNA
caaagcacccaacttacacttaggagatttcaacttaacttgaccg

SEQ ID NO: 7810 - DNA, 35 bp, Homo sapiens
  source 1..35: mol_type = genomic DNA
caaagccctcagtaagttgcaatacttaatttctg

SEQ ID NO: 7811 - DNA, 37 bp, Homo sapiens
  source 1..37: mol_type = genomic DNA
caaagccctcagtaagttgcaatacttaatttctgcc

SEQ ID NO: 7812 - DNA, 38 bp, Homo sapiens
  source 1..38: mol_type = genomic DNA
caaagccctcagtaagttgcaatacttaatttctgcca

SEQ ID NO: 7813 - DNA, 31 bp, Homo sapiens
  source 1..31: mol_type = genomic DNA
caaaggttccgggttcgagtcccggcggagt

SEQ ID NO: 7814 - DNA, 32 bp, Homo sapiens
  source 1..32: mol_type = genomic DNA
caaaggttccgggttcgagtcccggcggagtc

SEQ ID NO: 7815 - DNA, 34 bp, Homo sapiens
  source 1..34: mol_type = genomic DNA
caaaggttccgggttcgagtcccggcggagtcgc

SEQ ID NO: 7816 - DNA, 35 bp, Homo sapiens
  source 1..35: mol_type = genomic DNA
caaaggttccgggttcgagtcccggcggagtcgcc

SEQ ID NO: 7817 - DNA, 36 bp, Homo sapiens
  source 1..36: mol_type = genomic DNA
caaaggttccgggttcgagtcccggcggagtcgcca

SEQ ID NO: 7818 - DNA, 34 bp, Homo sapiens
  source 1..34: mol_type = genomic DNA
caaaggttgtgggttcgaatcccaccagagtcgc

SEQ ID NO: 7819 - DNA, 35 bp, Homo sapiens
  source 1..35: mol_type = genomic DNA
caaaggttgtgggttcgaatcccaccagagtcgcc

SEQ ID NO: 7820 - DNA, 36 bp, Homo sapiens
  source 1..36: mol_type = genomic DNA
caaaggttgtgggttcgaatcccaccagagtcgcca

SEQ ID NO: 7821 - DNA, 35 bp, Homo sapiens
  source 1..35: mol_type = genomic DNA
caaaggttgtgggttcgagtcccaccagagtcgcc

SEQ ID NO: 7822 - DNA, 36 bp, Homo sapiens
  source 1..36: mol_type = genomic DNA
caaaggttgtgggttcgagtcccaccagagtcgcca

SEQ ID NO: 7823 - DNA, 18 bp, Homo sapiens
  source 1..18: mol_type = genomic DNA
caaagttaaattataggc

SEQ ID NO: 7824 - DNA, 19 bp, Homo sapiens
  source 1..19: mol_type = genomic DNA
caaagttaaattataggct

SEQ ID NO: 7825 - DNA, 21 bp, Homo sapiens
  source 1..21: mol_type = genomic DNA
caaagttaaattataggctaa

SEQ ID NO: 7826 - DNA, 24 bp, Homo sapiens
  source 1..24: mol_type = genomic DNA
caaagttaaattataggctaaatc

SEQ ID NO: 7827 - DNA, 25 bp, Homo sapiens
  source 1..25: mol_type = genomic DNA
caaagttaaattataggctaaatcc

SEQ ID NO: 7828 - DNA, 26 bp, Homo sapiens
  source 1..26: mol_type = genomic DNA
caaagttaaattataggctaaatcct

SEQ ID NO: 7829 - DNA, 29 bp, Homo sapiens
  source 1..29: mol_type = genomic DNA
caaagttaaattataggctaaatcctata

SEQ ID NO: 7830 - DNA, 31 bp, Homo sapiens
  source 1..31: mol_type = genomic DNA
caaagttaaattataggctaaatcctatata

SEQ ID NO: 7831 - DNA, 35 bp, Homo sapiens
  source 1..35: mol_type = genomic DNA
caaagttaaattataggctaaatcctatatatctt

SEQ ID NO: 7832 - DNA, 20 bp, Homo sapiens
  source 1..20: mol_type = genomic DNA
caaatcacgtcggggtcacc

SEQ ID NO: 7833 - DNA, 21 bp, Homo sapiens
  source 1..21: mol_type = genomic DNA
caaatcacgtcggggtcacca

SEQ ID NO: 7834 - DNA, 16 bp, Homo sapiens
  source 1..16: mol_type = genomic DNA
caaatcccggacgagc

SEQ ID NO: 7835 - DNA, 17 bp, Homo sapiens
  source 1..17: mol_type = genomic DNA
caaatcccggacgagcc

SEQ ID NO: 7836 - DNA, 18 bp, Homo sapiens
  source 1..18: mol_type = genomic DNA
caaatcccggacgagccc

SEQ ID NO: 7837 - DNA, 19 bp, Homo sapiens
  source 1..19: mol_type = genomic DNA
caaatcccggacgagcccc

SEQ ID NO: 7838 - DNA, 20 bp, Homo sapiens
  source 1..20: mol_type = genomic DNA
caaatcccggacgagccccc

SEQ ID NO: 7839 - DNA, 21 bp, Homo sapiens
  source 1..21: mol_type = genomic DNA
caaatcccggacgagccccca

SEQ ID NO: 7840 - DNA, 19 bp, Homo sapiens
  source 1..19: mol_type = genomic DNA
caaatccgggtgccccctc

SEQ ID NO: 7841 - DNA, 20 bp, Homo sapiens
  source 1..20: mol_type = genomic DNA
caaatccgggtgccccctcc

SEQ ID NO: 7842 - DNA, 18 bp, Homo sapiens
  source 1..18: mol_type = genomic DNA
caaatctcgctggggcct

SEQ ID NO: 7843 - DNA, 19 bp, Homo sapiens
  source 1..19: mol_type = genomic DNA
caaatctcgctggggcctc

SEQ ID NO: 7844 - DNA, 20 bp, Homo sapiens
  source 1..20: mol_type = genomic DNA
caaatctcgctggggcctcc

SEQ ID NO: 7845 - DNA, 17 bp, Homo sapiens
  source 1..17: mol_type = genomic DNA
caaatctcggtggaacc

SEQ ID NO: 7846 - DNA, 18 bp, Homo sapiens
  source 1..18: mol_type = genomic DNA
caaatctcggtggaacct

SEQ ID NO: 7847 - DNA, 19 bp, Homo sapiens
  source 1..19: mol_type = genomic DNA
caaatctcggtggaacctc

SEQ ID NO: 7848 - DNA, 20 bp, Homo sapiens
  source 1..20: mol_type = genomic DNA
caaatctcggtggaacctcc

SEQ ID NO: 7849 - DNA, 21 bp, Homo sapiens
  source 1..21: mol_type = genomic DNA
caaatctcggtggaacctcca

SEQ ID NO: 7850 - DNA, 17 bp, Homo sapiens
  source 1..17: mol_type = genomic DNA
caaatctcggtgggacc

SEQ ID NO: 7851 - DNA, 18 bp, Homo sapiens
  source 1..18: mol_type = genomic DNA
caaatctcggtgggacct

SEQ ID NO: 7852 - DNA, 19 bp, Homo sapiens
  source 1..19: mol_type = genomic DNA
caaatctcggtgggacctc

SEQ ID NO: 7853 - DNA, 17 bp, Homo sapiens
  source 1..17: mol_type = genomic DNA
caaatggtagagcgctc

SEQ ID NO: 7854 - DNA, 19 bp, Homo sapiens
  source 1..19: mol_type = genomic DNA
caaatggtagagcgctcgc

SEQ ID NO: 7855 - DNA, 21 bp, Homo sapiens
  source 1..21: mol_type = genomic DNA
caaatggtagagcgctcgctt

SEQ ID NO: 7856 - DNA, 17 bp, Homo sapiens
  source 1..17: mol_type = genomic DNA
caaattcgaagaagcag

SEQ ID NO: 7857 - DNA, 18 bp, Homo sapiens
  source 1..18: mol_type = genomic DNA
caaattcgaagaagcagc

SEQ ID NO: 7858 - DNA, 20 bp, Homo sapiens
  source 1..20: mol_type = genomic DNA
caaattcgaagaagcagctt

SEQ ID NO: 7859 - DNA, 21 bp, Homo sapiens
  source 1..21: mol_type = genomic DNA
caaattcgaagaagcagcttc

SEQ ID NO: 7860 - DNA, 28 bp, Homo sapiens
  source 1..28: mol_type = genomic DNA
caaattcgaagaagcagcttcaaacctg

SEQ ID NO: 7861 - DNA, 31 bp, Homo sapiens
  source 1..31: mol_type = genomic DNA
caaattcgaagaagcagcttcaaacctgccg

SEQ ID NO: 7862 - DNA, 35 bp, Homo sapiens
  source 1..35: mol_type = genomic DNA
caaattcgaagaagcagcttcaaacctgccggggc

SEQ ID NO: 7863 - DNA, 36 bp, Homo sapiens
  source 1..36: mol_type = genomic DNA
caaattcgaagaagcagcttcaaacctgccggggct

SEQ ID NO: 7864 - DNA, 37 bp, Homo sapiens
  source 1..37: mol_type = genomic DNA
caaattcgaagaagcagcttcaaacctgccggggctt

SEQ ID NO: 7865 - DNA, 38 bp, Homo sapiens
  source 1..38: mol_type = genomic DNA
caaattcgaagaagcagcttcaaacctgccggggcttc

SEQ ID NO: 7866 - DNA, 39 bp, Homo sapiens
  source 1..39: mol_type = genomic DNA
caaattcgaagaagcagcttcaaacctgccggggcttcc

SEQ ID NO: 7867 - DNA, 40 bp, Homo sapiens
  source 1..40: mol_type = genomic DNA
caaattcgaagaagcagcttcaaacctgccggggcttcca

SEQ ID NO: 7868 - DNA, 16 bp, Homo sapiens
  source 1..16: mol_type = genomic DNA
caacacctctttacag

SEQ ID NO: 7869 - DNA, 17 bp, Homo sapiens
  source 1..17: mol_type = genomic DNA
caacacctctttacagt

SEQ ID NO: 7870 - DNA, 19 bp, Homo sapiens
  source 1..19: mol_type = genomic DNA
caacacctctttacagtga

SEQ ID NO: 7871 - DNA, 20 bp, Homo sapiens
  source 1..20: mol_type = genomic DNA
caacacctctttacagtgac

SEQ ID NO: 7872 - DNA, 21 bp, Homo sapiens
  source 1..21: mol_type = genomic DNA
caacacctctttacagtgacc

SEQ ID NO: 7873 - DNA, 22 bp, Homo sapiens
  source 1..22: mol_type = genomic DNA
caacacctctttacagtgacca

SEQ ID NO: 7874 - DNA, 17 bp, Homo sapiens
  source 1..17: mol_type = genomic DNA
caacagaggcttacgac

SEQ ID NO: 7875 - DNA, 18 bp, Homo sapiens
  source 1..18: mol_type = genomic DNA
caacagaggcttacgacc

SEQ ID NO: 7876 - DNA, 19 bp, Homo sapiens
  source 1..19: mol_type = genomic DNA
caacagaggcttacgaccc

SEQ ID NO: 7877 - DNA, 21 bp, Homo sapiens
  source 1..21: mol_type = genomic DNA
caacagaggcttacgacccct

SEQ ID NO: 7878 - DNA, 23 bp, Homo sapiens
  source 1..23: mol_type = genomic DNA
caacagaggcttacgacccctta

SEQ ID NO: 7879 - DNA, 28 bp, Homo sapiens
  source 1..28: mol_type = genomic DNA
caacagaggcttacgaccccttatttac

SEQ ID NO: 7880 - DNA, 29 bp, Homo sapiens
  source 1..29: mol_type = genomic DNA
caacagaggcttacgaccccttatttacc

SEQ ID NO: 7881 - DNA, 30 bp, Homo sapiens
  source 1..30: mol_type = genomic DNA
caacagaggcttacgaccccttatttaccc

SEQ ID NO: 7882 - DNA, 31 bp, Homo sapiens
  source 1..31: mol_type = genomic DNA
caacagaggcttacgaccccttatttacccc

SEQ ID NO: 7883 - DNA, 32 bp, Homo sapiens
  source 1..32: mol_type = genomic DNA
caacagaggcttacgaccccttatttacccca

SEQ ID NO: 7884 - DNA, 16 bp, Homo sapiens
  source 1..16: mol_type = genomic DNA
caacatggctttctca

SEQ ID NO: 7885 - DNA, 17 bp, Homo sapiens
  source 1..17: mol_type = genomic DNA
caacatggctttctcac

SEQ ID NO: 7886 - DNA, 18 bp, Homo sapiens
  source 1..18: mol_type = genomic DNA
caacatggctttctcacc

SEQ ID NO: 7887 - DNA, 19 bp, Homo sapiens
  source 1..19: mol_type = genomic DNA
caacatggctttctcacca

SEQ ID NO: 7888 - DNA, 18 bp, Homo sapiens
  source 1..18: mol_type = genomic DNA
caacattcaaaaaagagt

SEQ ID NO: 7889 - DNA, 19 bp, Homo sapiens
  source 1..19: mol_type = genomic DNA
caacattcaaaaaagagta

SEQ ID NO: 7890 - DNA, 20 bp, Homo sapiens
  source 1..20: mol_type = genomic DNA
caacattcaaaaaagagtac

SEQ ID NO: 7891 - DNA, 21 bp, Homo sapiens
  source 1..21: mol_type = genomic DNA
caacattcaaaaaagagtacc

SEQ ID NO: 7892 - DNA, 22 bp, Homo sapiens
  source 1..22: mol_type = genomic DNA
caacattcaaaaaagagtacca

SEQ ID NO: 7893 - DNA, 28 bp, Homo sapiens
  source 1..28: mol_type = genomic DNA
caacctcggttcgaatccgagtcacggc

SEQ ID NO: 7894 - DNA, 29 bp, Homo sapiens
  source 1..29: mol_type = genomic DNA
caacctcggttcgaatccgagtcacggca

SEQ ID NO: 7895 - DNA, 30 bp, Homo sapiens
  source 1..30: mol_type = genomic DNA
caacctcggttcgaatccgagtcacggcac

SEQ ID NO: 7896 - DNA, 31 bp, Homo sapiens
  source 1..31: mol_type = genomic DNA
caacctcggttcgaatccgagtcacggcacc

SEQ ID NO: 7897 - DNA, 16 bp, Homo sapiens
  source 1..16: mol_type = genomic DNA
caacgatggtttttca

SEQ ID NO: 7898 - DNA, 17 bp, Homo sapiens
  source 1..17: mol_type = genomic DNA
caacgatggtttttcat

SEQ ID NO: 7899 - DNA, 19 bp, Homo sapiens
  source 1..19: mol_type = genomic DNA
caacgatggtttttcatat

SEQ ID NO: 7900 - DNA, 20 bp, Homo sapiens
  source 1..20: mol_type = genomic DNA
caacgatggtttttcatatc

SEQ ID NO: 7901 - DNA, 27 bp, Homo sapiens
  source 1..27: mol_type = genomic DNA
caacgatggtttttcatatcattggtc

SEQ ID NO: 7902 - DNA, 29 bp, Homo sapiens
  source 1..29: mol_type = genomic DNA
caacgatggtttttcatatcattggtcgt

SEQ ID NO: 7903 - DNA, 30 bp, Homo sapiens
  source 1..30: mol_type = genomic DNA
caacgatggtttttcatatcattggtcgtg

SEQ ID NO: 7904 - DNA, 34 bp, Homo sapiens
  source 1..34: mol_type = genomic DNA
caacgatggtttttcatatcattggtcgtggttg

SEQ ID NO: 7905 - DNA, 35 bp, Homo sapiens
  source 1..35: mol_type = genomic DNA
caacgatggtttttcatatcattggtcgtggttgt

SEQ ID NO: 7906 - DNA, 36 bp, Homo sapiens
  source 1..36: mol_type = genomic DNA
caacgatggtttttcatatcattggtcgtggttgta

SEQ ID NO: 7907 - DNA, 37 bp, Homo sapiens
  source 1..37: mol_type = genomic DNA
caacgatggtttttcatatcattggtcgtggttgtag

SEQ ID NO: 7908 - DNA, 38 bp, Homo sapiens
  source 1..38: mol_type = genomic DNA
caacgatggtttttcatatcattggtcgtggttgtagt

SEQ ID NO: 7909 - DNA, 39 bp, Homo sapiens
  source 1..39: mol_type = genomic DNA
caacgatggtttttcatatcattggtcgtggttgtagtc

SEQ ID NO: 7910 - DNA, 40 bp, Homo sapiens
  source 1..40: mol_type = genomic DNA
caacgatggtttttcatatcattggtcgtggttgtagtcc

SEQ ID NO: 7911 - DNA, 41 bp, Homo sapiens
  source 1..41: mol_type = genomic DNA
caacgatggtttttcatatcattggtcgtggttgtagtccg

SEQ ID NO: 7912 - DNA, 42 bp, Homo sapiens
  source 1..42: mol_type = genomic DNA
caacgatggtttttcatatcattggtcgtggttgtagtccgt

SEQ ID NO: 7913 - DNA, 43 bp, Homo sapiens
  source 1..43: mol_type = genomic DNA
caacgatggtttttcatatcattggtcgtggttgtagtccgtg

SEQ ID NO: 7914 - DNA, 44 bp, Homo sapiens
  source 1..44: mol_type = genomic DNA
caacgatggtttttcatatcattggtcgtggttgtagtccgtgc

SEQ ID NO: 7915 - DNA, 47 bp, Homo sapiens
  source 1..47: mol_type = genomic DNA
caacgatggtttttcatatcattggtcgtggttgtagtccgtgcgag

SEQ ID NO: 7916 - DNA, 48 bp, Homo sapiens
  source 1..48: mol_type = genomic DNA
caacgatggtttttcatatcattggtcgtggttgtagtccgtgcgaga

SEQ ID NO: 7917 - DNA, 20 bp, Homo sapiens
  source 1..20: mol_type = genomic DNA
caacggtagcgcgtctgact

SEQ ID NO: 7918 - DNA, 16 bp, Homo sapiens
  source 1..16: mol_type = genomic DNA
caactccaaataaaag

SEQ ID NO: 7919 - DNA, 17 bp, Homo sapiens
  source 1..17: mol_type = genomic DNA
caactccaaataaaagt

SEQ ID NO: 7920 - DNA, 18 bp, Homo sapiens
  source 1..18: mol_type = genomic DNA
caactccaaataaaagta

SEQ ID NO: 7921 - DNA, 19 bp, Homo sapiens
  source 1..19: mol_type = genomic DNA
caactccaaataaaagtac

SEQ ID NO: 7922 - DNA, 20 bp, Homo sapiens
  source 1..20: mol_type = genomic DNA
caactccaaataaaagtacc

SEQ ID NO: 7923 - DNA, 21 bp, Homo sapiens
  source 1..21: mol_type = genomic DNA
caactccaaataaaagtacca

SEQ ID NO: 7924 - DNA, 16 bp, Homo sapiens
  source 1..16: mol_type = genomic DNA
caacttaacttgaccg

SEQ ID NO: 7925 - DNA, 17 bp, Homo sapiens
  source 1..17: mol_type = genomic DNA
caacttaacttgaccgc

SEQ ID NO: 7926 - DNA, 18 bp, Homo sapiens
  source 1..18: mol_type = genomic DNA
caacttaacttgaccgct

SEQ ID NO: 7927 - DNA, 19 bp, Homo sapiens
  source 1..19: mol_type = genomic DNA
caacttaacttgaccgctc

SEQ ID NO: 7928 - DNA, 20 bp, Homo sapiens
  source 1..20: mol_type = genomic DNA
caacttaacttgaccgctct

SEQ ID NO: 7929 - DNA, 21 bp, Homo sapiens
  source 1..21: mol_type = genomic DNA
caacttaacttgaccgctctg

SEQ ID NO: 7930 - DNA, 22 bp, Homo sapiens
  source 1..22: mol_type = genomic DNA
caacttaacttgaccgctctga

SEQ ID NO: 7931 - DNA, 23 bp, Homo sapiens
  source 1..23: mol_type = genomic DNA
caacttaacttgaccgctctgac

SEQ ID NO: 7932 - DNA, 24 bp, Homo sapiens
  source 1..24: mol_type = genomic DNA
caacttaacttgaccgctctgacc

SEQ ID NO: 7933 - DNA, 25 bp, Homo sapiens
  source 1..25: mol_type = genomic DNA
caacttaacttgaccgctctgacca

SEQ ID NO: 7934 - DNA, 16 bp, Homo sapiens
  source 1..16: mol_type = genomic DNA
caacttacacttagga

SEQ ID NO: 7935 - DNA, 17 bp, Homo sapiens
  source 1..17: mol_type = genomic DNA
caacttacacttaggag

SEQ ID NO: 7936 - DNA, 18 bp, Homo sapiens
  source 1..18: mol_type = genomic DNA
caacttacacttaggaga

SEQ ID NO: 7937 - DNA, 19 bp, Homo sapiens
  source 1..19: mol_type = genomic DNA
caacttacacttaggagat

SEQ ID NO: 7938 - DNA, 20 bp, Homo sapiens
  source 1..20: mol_type = genomic DNA
caacttacacttaggagatt

SEQ ID NO: 7939 - DNA, 21 bp, Homo sapiens
  source 1..21: mol_type = genomic DNA
caacttacacttaggagattt

SEQ ID NO: 7940 - DNA, 22 bp, Homo sapiens
  source 1..22: mol_type = genomic DNA
caacttacacttaggagatttc

SEQ ID NO: 7941 - DNA, 23 bp, Homo sapiens
  source 1..23: mol_type = genomic DNA
caacttacacttaggagatttca

SEQ ID NO: 7942 - DNA, 24 bp, Homo sapiens
  source 1..24: mol_type = genomic DNA
caacttacacttaggagatttcaa

SEQ ID NO: 7943 - DNA, 25 bp, Homo sapiens
  source 1..25: mol_type = genomic DNA
caacttacacttaggagatttcaac

SEQ ID NO: 7944 - DNA, 26 bp, Homo sapiens
  source 1..26: mol_type = genomic DNA
caacttacacttaggagatttcaact

SEQ ID NO: 7945 - DNA, 27 bp, Homo sapiens
  source 1..27: mol_type = genomic DNA
caacttacacttaggagatttcaactt

SEQ ID NO: 7946 - DNA, 28 bp, Homo sapiens
  source 1..28: mol_type = genomic DNA
caacttacacttaggagatttcaactta

SEQ ID NO: 7947 - DNA, 29 bp, Homo sapiens
  source 1..29: mol_type = genomic DNA
caacttacacttaggagatttcaacttaa

SEQ ID NO: 7948 - DNA, 30 bp, Homo sapiens
  source 1..30: mol_type = genomic DNA
caacttacacttaggagatttcaacttaac

SEQ ID NO: 7949 - DNA, 31 bp, Homo sapiens
  source 1..31: mol_type = genomic DNA
caacttacacttaggagatttcaacttaact

SEQ ID NO: 7950 - DNA, 32 bp, Homo sapiens
  source 1..32: mol_type = genomic DNA
caacttacacttaggagatttcaacttaactt

SEQ ID NO: 7951 - DNA, 33 bp, Homo sapiens
  source 1..33: mol_type = genomic DNA
caacttacacttaggagatttcaacttaacttg

SEQ ID NO: 7952 - DNA, 34 bp, Homo sapiens
  source 1..34: mol_type = genomic DNA
caacttacacttaggagatttcaacttaacttga

SEQ ID NO: 7953 - DNA, 35 bp, Homo sapiens
  source 1..35: mol_type = genomic DNA
caacttacacttaggagatttcaacttaacttgac

SEQ ID NO: 7954 - DNA, 36 bp, Homo sapiens
  source 1..36: mol_type = genomic DNA
caacttacacttaggagatttcaacttaacttgacc

SEQ ID NO: 7955 - DNA, 37 bp, Homo sapiens
  source 1..37: mol_type = genomic DNA
caacttacacttaggagatttcaacttaacttgaccg

SEQ ID NO: 7956 - DNA, 38 bp, Homo sapiens
  source 1..38: mol_type = genomic DNA
caacttacacttaggagatttcaacttaacttgaccgc

SEQ ID NO: 7957 - DNA, 39 bp, Homo sapiens
  source 1..39: mol_type = genomic DNA
caacttacacttaggagatttcaacttaacttgaccgct

SEQ ID NO: 7958 - DNA, 40 bp, Homo sapiens
  source 1..40: mol_type = genomic DNA
caacttacacttaggagatttcaacttaacttgaccgctc

SEQ ID NO: 7959 - DNA, 41 bp, Homo sapiens
  source 1..41: mol_type = genomic DNA
caacttacacttaggagatttcaacttaacttgaccgctct

SEQ ID NO: 7960 - DNA, 42 bp, Homo sapiens
  source 1..42: mol_type = genomic DNA
caacttacacttaggagatttcaacttaacttgaccgctctg

SEQ ID NO: 7961 - DNA, 43 bp, Homo sapiens
  source 1..43: mol_type = genomic DNA
caacttacacttaggagatttcaacttaacttgaccgctctga

SEQ ID NO: 7962 - DNA, 44 bp, Homo sapiens
  source 1..44: mol_type = genomic DNA
caacttacacttaggagatttcaacttaacttgaccgctctgac

SEQ ID NO: 7963 - DNA, 45 bp, Homo sapiens
  source 1..45: mol_type = genomic DNA
caacttacacttaggagatttcaacttaacttgaccgctctgacc

SEQ ID NO: 7964 - DNA, 46 bp, Homo sapiens
  source 1..46: mol_type = genomic DNA
caacttacacttaggagatttcaacttaacttgaccgctctgacca

SEQ ID NO: 7965 - DNA, 16 bp, Homo sapiens
  source 1..16: mol_type = genomic DNA
caagaactgctaactc

SEQ ID NO: 7966 - DNA, 17 bp, Homo sapiens
  source 1..17: mol_type = genomic DNA
caagaactgctaactca

SEQ ID NO: 7967 - DNA, 18 bp, Homo sapiens
  source 1..18: mol_type = genomic DNA
caagaactgctaactcat

SEQ ID NO: 7968 - DNA, 19 bp, Homo sapiens
  source 1..19: mol_type = genomic DNA
caagaactgctaactcatg

SEQ ID NO: 7969 - DNA, 20 bp, Homo sapiens
  source 1..20: mol_type = genomic DNA
caagaactgctaactcatgc

SEQ ID NO: 7970 - DNA, 21 bp, Homo sapiens
  source 1..21: mol_type = genomic DNA
caagaactgctaactcatgcc

SEQ ID NO: 7971 - DNA, 22 bp, Homo sapiens
  source 1..22: mol_type = genomic DNA
caagaactgctaactcatgccc

SEQ ID NO: 7972 - DNA, 23 bp, Homo sapiens
  source 1..23: mol_type = genomic DNA
caagaactgctaactcatgcccc

SEQ ID NO: 7973 - DNA, 24 bp, Homo sapiens
  source 1..24: mol_type = genomic DNA
caagaactgctaactcatgccccc

SEQ ID NO: 7974 - DNA, 25 bp, Homo sapiens
  source 1..25: mol_type = genomic DNA
caagaactgctaactcatgccccca

SEQ ID NO: 7975 - DNA, 26 bp, Homo sapiens
  source 1..26: mol_type = genomic DNA
caagaactgctaactcatgcccccat

SEQ ID NO: 7976 - DNA, 27 bp, Homo sapiens
  source 1..27: mol_type = genomic DNA
caagaactgctaactcatgcccccatg

SEQ ID NO: 7977 - DNA, 28 bp, Homo sapiens
  source 1..28: mol_type = genomic DNA
caagaactgctaactcatgcccccatgt

SEQ ID NO: 7978 - DNA, 29 bp, Homo sapiens
  source 1..29: mol_type = genomic DNA
caagaactgctaactcatgcccccatgtc

SEQ ID NO: 7979 - DNA, 30 bp, Homo sapiens
  source 1..30: mol_type = genomic DNA
caagaactgctaactcatgcccccatgtct

SEQ ID NO: 7980 - DNA, 31 bp, Homo sapiens
  source 1..31: mol_type = genomic DNA
caagaactgctaactcatgcccccatgtcta

SEQ ID NO: 7981 - DNA, 32 bp, Homo sapiens
  source 1..32: mol_type = genomic DNA
caagaactgctaactcatgcccccatgtctaa

SEQ ID NO: 7982 - DNA, 33 bp, Homo sapiens
  source 1..33: mol_type = genomic DNA
caagaactgctaactcatgcccccatgtctaac

SEQ ID NO: 7983 - DNA, 34 bp, Homo sapiens
  source 1..34: mol_type = genomic DNA
caagaactgctaactcatgcccccatgtctaaca

SEQ ID NO: 7984 - DNA, 35 bp, Homo sapiens
  source 1..35: mol_type = genomic DNA
caagaactgctaactcatgcccccatgtctaacaa

SEQ ID NO: 7985 - DNA, 36 bp, Homo sapiens
  source 1..36: mol_type = genomic DNA
caagaactgctaactcatgcccccatgtctaacaac

SEQ ID NO: 7986 - DNA, 37 bp, Homo sapiens
  source 1..37: mol_type = genomic DNA
caagaactgctaactcatgcccccatgtctaacaaca

SEQ ID NO: 7987 - DNA, 38 bp, Homo sapiens
  source 1..38: mol_type = genomic DNA
caagaactgctaactcatgcccccatgtctaacaacat

SEQ ID NO: 7988 - DNA, 39 bp, Homo sapiens
  source 1..39: mol_type = genomic DNA
caagaactgctaactcatgcccccatgtctaacaacatg

SEQ ID NO: 7989 - DNA, 40 bp, Homo sapiens
  source 1..40: mol_type = genomic DNA
caagaactgctaactcatgcccccatgtctaacaacatgg

SEQ ID NO: 7990 - DNA, 41 bp, Homo sapiens
  source 1..41: mol_type = genomic DNA
caagaactgctaactcatgcccccatgtctaacaacatggc

SEQ ID NO: 7991 - DNA, 42 bp, Homo sapiens
  source 1..42: mol_type = genomic DNA
caagaactgctaactcatgcccccatgtctaacaacatggct

SEQ ID NO: 7992 - DNA, 43 bp, Homo sapiens
  source 1..43: mol_type = genomic DNA
caagaactgctaactcatgcccccatgtctaacaacatggctt

SEQ ID NO: 7993 - DNA, 44 bp, Homo sapiens
  source 1..44: mol_type = genomic DNA
caagaactgctaactcatgcccccatgtctaacaacatggcttt

SEQ ID NO: 7994 - DNA, 45 bp, Homo sapiens
  source 1..45: mol_type = genomic DNA
caagaactgctaactcatgcccccatgtctaacaacatggctttc

SEQ ID NO: 7995 - DNA, 46 bp, Homo sapiens
  source 1..46: mol_type = genomic DNA
caagaactgctaactcatgcccccatgtctaacaacatggctttct

SEQ ID NO: 7996 - DNA, 47 bp, Homo sapiens
  source 1..47: mol_type = genomic DNA
caagaactgctaactcatgcccccatgtctaacaacatggctttctc

SEQ ID NO: 7997 - DNA, 48 bp, Homo sapiens
  source 1..48: mol_type = genomic DNA
caagaactgctaactcatgcccccatgtctaacaacatggctttctca

SEQ ID NO: 7998 - DNA, 17 bp, Homo sapiens
  source 1..17: mol_type = genomic DNA
caagagccttcaaagcc

SEQ ID NO: 7999 - DNA, 20 bp, Homo sapiens
  source 1..20: mol_type = genomic DNA
caagagccttcaaagccctc

SEQ ID NO: 8000 - DNA, 29 bp, Homo sapiens
  source 1..29: mol_type = genomic DNA
caagagccttcaaagccctcagtaagttg

SEQ ID NO: 8001 - DNA, 30 bp, Homo sapiens
  source 1..30: mol_type = genomic DNA
caagagccttcaaagccctcagtaagttgc

SEQ ID NO: 8002 - DNA, 35 bp, Homo sapiens
  source 1..35: mol_type = genomic DNA
caagagccttcaaagccctcagtaagttgcaatac

SEQ ID NO: 8003 - DNA, 47 bp, Homo sapiens
  source 1..47: mol_type = genomic DNA
caagagccttcaaagccctcagtaagttgcaatacttaatttctgcc

SEQ ID NO: 8004 - DNA, 17 bp, Homo sapiens
  source 1..17: mol_type = genomic DNA
caagaggtccccggttc

SEQ ID NO: 8005 - DNA, 18 bp, Homo sapiens
  source 1..18: mol_type = genomic DNA
caagaggtccccggttca

SEQ ID NO: 8006 - DNA, 34 bp, Homo sapiens
  source 1..34: mol_type = genomic DNA
caagaggtccccggttcaaatccgggtgccccct

SEQ ID NO: 8007 - DNA, 35 bp, Homo sapiens
  source 1..35: mol_type = genomic DNA
caagaggtccccggttcaaatccgggtgccccctc

SEQ ID NO: 8008 - DNA, 36 bp, Homo sapiens
  source 1..36: mol_type = genomic DNA
caagaggtccccggttcaaatccgggtgccccctcc

SEQ ID NO: 8009 - DNA, 16 bp, Homo sapiens
  source 1..16: mol_type = genomic DNA
caagaggtccctggtt

SEQ ID NO: 8010 - DNA, 17 bp, Homo sapiens
  source 1..17: mol_type = genomic DNA
caagaggtccctggttc

SEQ ID NO: 8011 - DNA, 25 bp, Homo sapiens
  source 1..25: mol_type = genomic DNA
caagaggtccctggttcaaatccgg

SEQ ID NO: 8012 - DNA, 34 bp, Homo sapiens
  source 1..34: mol_type = genomic DNA
caagaggtccctggttcaaatccgggtgccccct

SEQ ID NO: 8013 - DNA, 27 bp, Homo sapiens
  source 1..27: mol_type = genomic DNA
caagattcccattcttgcgacccgggt

SEQ ID NO: 8014 - DNA, 16 bp, Homo sapiens
  source 1..16: mol_type = genomic DNA
caagcagttgacccgg

SEQ ID NO: 8015 - DNA, 17 bp, Homo sapiens
  source 1..17: mol_type = genomic DNA
caagcagttgacccggg

SEQ ID NO: 8016 - DNA, 18 bp, Homo sapiens
  source 1..18: mol_type = genomic DNA
caagcagttgacccgggt

SEQ ID NO: 8017 - DNA, 19 bp, Homo sapiens
  source 1..19: mol_type = genomic DNA
caagcagttgacccgggtt

SEQ ID NO: 8018 - DNA, 20 bp, Homo sapiens
  source 1..20: mol_type = genomic DNA
caagcagttgacccgggttc

SEQ ID NO: 8019 - DNA, 21 bp, Homo sapiens
  source 1..21: mol_type = genomic DNA
caagcagttgacccgggttcg

SEQ ID NO: 8020 - DNA, 22 bp, Homo sapiens
  source 1..22: mol_type = genomic DNA
caagcagttgacccgggttcga

SEQ ID NO: 8021 - DNA, 23 bp, Homo sapiens
  source 1..23: mol_type = genomic DNA
caagcagttgacccgggttcgat

SEQ ID NO: 8022 - DNA, 24 bp, Homo sapiens
  source 1..24: mol_type = genomic DNA
caagcagttgacccgggttcgatt

SEQ ID NO: 8023 - DNA, 26 bp, Homo sapiens
  source 1..26: mol_type = genomic DNA
caagcagttgacccgggttcgattcc

SEQ ID NO: 8024 - DNA, 28 bp, Homo sapiens
  source 1..28: mol_type = genomic DNA
caagcagttgacccgggttcgattcccg

SEQ ID NO: 8025 - DNA, 31 bp, Homo sapiens
  source 1..31: mol_type = genomic DNA
caagcagttgacccgggttcgattcccggcc

SEQ ID NO: 8026 - DNA, 34 bp, Homo sapiens
  source 1..34: mol_type = genomic DNA
caagcagttgacccgggttcgattcccggccaac

SEQ ID NO: 8027 - DNA, 35 bp, Homo sapiens
  source 1..35: mol_type = genomic DNA
caagcagttgacccgggttcgattcccggccaacg

SEQ ID NO: 8028 - DNA, 36 bp, Homo sapiens
  source 1..36: mol_type = genomic DNA
caagcagttgacccgggttcgattcccggccaacgc

SEQ ID NO: 8029 - DNA, 37 bp, Homo sapiens
  source 1..37: mol_type = genomic DNA
caagcagttgacccgggttcgattcccggccaacgca

SEQ ID NO: 8030 - DNA, 39 bp, Homo sapiens
  source 1..39: mol_type = genomic DNA
caagcagttgacccgggttcgattcccggccaacgcacc

SEQ ID NO: 8031 - DNA, 16 bp, Homo sapiens
  source 1..16: mol_type = genomic DNA
caaggtcgcgggttcg

SEQ ID NO: 8032 - DNA, 30 bp, Homo sapiens
  source 1..30: mol_type = genomic DNA
caaggtcgcgggttcgaaccccgtacgggc

SEQ ID NO: 8033 - DNA, 31 bp, Homo sapiens
  source 1..31: mol_type = genomic DNA
caaggtcgcgggttcgaaccccgtacgggcc

SEQ ID NO: 8034 - DNA, 34 bp, Homo sapiens
  source 1..34: mol_type = genomic DNA
caaggtcgcgggttcgaaccccgtacgggccacc

SEQ ID NO: 8035 - DNA, 35 bp, Homo sapiens
  source 1..35: mol_type = genomic DNA
caaggtcgcgggttcgaaccccgtacgggccacca

SEQ ID NO: 8036 - DNA, 30 bp, Homo sapiens
  source 1..30: mol_type = genomic DNA
caaggtcgcgggttcgatccccgtacgggc

SEQ ID NO: 8037 - DNA, 31 bp, Homo sapiens
  source 1..31: mol_type = genomic DNA
caaggtcgcgggttcgatccccgtacgggcc

SEQ ID NO: 8038 - DNA, 32 bp, Homo sapiens
  source 1..32: mol_type = genomic DNA
caaggtcgcgggttcgatccccgtacgggcca

SEQ ID NO: 8039 - DNA, 34 bp, Homo sapiens
  source 1..34: mol_type = genomic DNA
caaggtcgcgggttcgatccccgtacgggccacc

SEQ ID NO: 8040 - DNA, 35 bp, Homo sapiens
  source 1..35: mol_type = genomic DNA
caaggtcgcgggttcgatccccgtacgggccacca

SEQ ID NO: 8041 - DNA, 34 bp, Homo sapiens
  source 1..34: mol_type = genomic DNA
caaggtcgcgggttcgatccccgtactggccacc

SEQ ID NO: 8042 - DNA, 35 bp, Homo sapiens
  source 1..35: mol_type = genomic DNA
caaggtcgcgggttcgatccccgtactggccacca

SEQ ID NO: 8043 - DNA, 20 bp, Homo sapiens
  source 1..20: mol_type = genomic DNA
caagtcacgtcggggtcacc

SEQ ID NO: 8044 - DNA, 17 bp, Homo sapiens
  source 1..17: mol_type = genomic DNA
caagtccctgttcgggc

SEQ ID NO: 8045 - DNA, 18 bp, Homo sapiens
  source 1..18: mol_type = genomic DNA
caagtccctgttcgggcg

SEQ ID NO: 8046 - DNA, 19 bp, Homo sapiens
  source 1..19: mol_type = genomic DNA
caagtccctgttcgggcgc

SEQ ID NO: 8047 - DNA, 20 bp, Homo sapiens
  source 1..20: mol_type = genomic DNA
caagtccctgttcgggcgcc

SEQ ID NO: 8048 - DNA, 21 bp, Homo sapiens
  source 1..21: mol_type = genomic DNA
caagtccctgttcgggcgcca

SEQ ID NO: 8049 - DNA, 16 bp, Homo sapiens
  source 1..16: mol_type = genomic DNA
caagttctggtctcca

SEQ ID NO: 8050 - DNA, 17 bp, Homo sapiens
  source 1..17: mol_type = genomic DNA
caagttctggtctccaa

SEQ ID NO: 8051 - DNA, 18 bp, Homo sapiens
  source 1..18: mol_type = genomic DNA
caagttctggtctccaat

SEQ ID NO: 8052 - DNA, 19 bp, Homo sapiens
  source 1..19: mol_type = genomic DNA
caagttctggtctccaatg

SEQ ID NO: 8053 - DNA, 30 bp, Homo sapiens
  source 1..30: mol_type = genomic DNA
caagttctggtctccaatggaggcgtgggt

SEQ ID NO: 8054 - DNA, 31 bp, Homo sapiens
  source 1..31: mol_type = genomic DNA
caagttctggtctccaatggaggcgtgggtt

SEQ ID NO: 8055 - DNA, 16 bp, Homo sapiens
  source 1..16: mol_type = genomic DNA
caagttctggtctccg

SEQ ID NO: 8056 - DNA, 17 bp, Homo sapiens
  source 1..17: mol_type = genomic DNA
caagttctggtctccgg

SEQ ID NO: 8057 - DNA, 18 bp, Homo sapiens
  source 1..18: mol_type = genomic DNA
caagttctggtctccgga

SEQ ID NO: 8058 - DNA, 19 bp, Homo sapiens
  source 1..19: mol_type = genomic DNA
caagttctggtctccggat

SEQ ID NO: 8059 - DNA, 20 bp, Homo sapiens
  source 1..20: mol_type = genomic DNA
caagttctggtctccggatg

SEQ ID NO: 8060 - DNA, 22 bp, Homo sapiens
  source 1..22: mol_type = genomic DNA
caagttctggtctccggatgga

SEQ ID NO: 8061 - DNA, 30 bp, Homo sapiens
  source 1..30: mol_type = genomic DNA
caagttctggtctccggatggaggcgtggg

SEQ ID NO: 8062 - DNA, 31 bp, Homo sapiens
  source 1..31: mol_type = genomic DNA
caagttctggtctccggatggaggcgtgggt

SEQ ID NO: 8063 - DNA, 32 bp, Homo sapiens
  source 1..32: mol_type = genomic DNA
caagttctggtctccggatggaggcgtgggtt

SEQ ID NO: 8064 - DNA, 23 bp, Homo sapiens
  source 1..23: mol_type = genomic DNA
caatacactgaaaatgtttagac

SEQ ID NO: 8065 - DNA, 24 bp, Homo sapiens
  source 1..24: mol_type = genomic DNA
caatacactgaaaatgtttagacg

SEQ ID NO: 8066 - DNA, 25 bp, Homo sapiens
  source 1..25: mol_type = genomic DNA
caatacactgaaaatgtttagacgg

SEQ ID NO: 8067 - DNA, 27 bp, Homo sapiens
  source 1..27: mol_type = genomic DNA
caatacactgaaaatgtttagacgggc

SEQ ID NO: 8068 - DNA, 28 bp, Homo sapiens
  source 1..28: mol_type = genomic DNA
caatacactgaaaatgtttagacgggct

SEQ ID NO: 8069 - DNA, 29 bp, Homo sapiens
  source 1..29: mol_type = genomic DNA
caatacactgaaaatgtttagacgggctc

SEQ ID NO: 8070 - DNA, 30 bp, Homo sapiens
  source 1..30: mol_type = genomic DNA
caatacactgaaaatgtttagacgggctca

SEQ ID NO: 8071 - DNA, 31 bp, Homo sapiens
  source 1..31: mol_type = genomic DNA
caatacactgaaaatgtttagacgggctcac

SEQ ID NO: 8072 - DNA, 32 bp, Homo sapiens
  source 1..32: mol_type = genomic DNA
caatacactgaaaatgtttagacgggctcaca

SEQ ID NO: 8073 - DNA, 33 bp, Homo sapiens
  source 1..33: mol_type = genomic DNA
caatacactgaaaatgtttagacgggctcacat

SEQ ID NO: 8074 - DNA, 34 bp, Homo sapiens
  source 1..34: mol_type = genomic DNA
caatacactgaaaatgtttagacgggctcacatc

SEQ ID NO: 8075 - DNA, 37 bp, Homo sapiens
  source 1..37: mol_type = genomic DNA
caatacactgaaaatgtttagacgggctcacatcacc

SEQ ID NO: 8076 - DNA, 38 bp, Homo sapiens
  source 1..38: mol_type = genomic DNA
caatacactgaaaatgtttagacgggctcacatcaccc

SEQ ID NO: 8077 - DNA, 39 bp, Homo sapiens
  source 1..39: mol_type = genomic DNA
caatacactgaaaatgtttagacgggctcacatcacccc

SEQ ID NO: 8078 - DNA, 46 bp, Homo sapiens
  source 1..46: mol_type = genomic DNA
caatacactgaaaatgtttagacgggctcacatcaccccataaaca

SEQ ID NO: 8079 - DNA, 48 bp, Homo sapiens
  source 1..48: mol_type = genomic DNA
caatacactgaaaatgtttagacgggctcacatcaccccataaacacc

SEQ ID NO: 8080 - DNA, 17 bp, Homo sapiens
  source 1..17: mol_type = genomic DNA
caatacttaatttctgc

SEQ ID NO: 8081 - DNA, 18 bp, Homo sapiens
  source 1..18: mol_type = genomic DNA
caatacttaatttctgcc

SEQ ID NO: 8082 - DNA, 19 bp, Homo sapiens
  source 1..19: mol_type = genomic DNA
caatacttaatttctgcca

SEQ ID NO: 8083 - DNA, 16 bp, Homo sapiens
  source 1..16: mol_type = genomic DNA
caatccccggcacctc

SEQ ID NO: 8084 - DNA, 20 bp, Homo sapiens
  source 1..20: mol_type = genomic DNA
caatccccggcacctccacc

SEQ ID NO: 8085 - DNA, 21 bp, Homo sapiens
  source 1..21: mol_type = genomic DNA
caatccccggcacctccacca

SEQ ID NO: 8086 - DNA, 20 bp, Homo sapiens
  source 1..20: mol_type = genomic DNA
caatccccggcatctccacc

SEQ ID NO: 8087 - DNA, 21 bp, Homo sapiens
  source 1..21: mol_type = genomic DNA
caatccccggcatctccacca

SEQ ID NO: 8088 - DNA, 21 bp, Homo sapiens
  source 1..21: mol_type = genomic DNA
caatcggttagcgcgcggtac

SEQ ID NO: 8089 - DNA, 22 bp, Homo sapiens
  source 1..22: mol_type = genomic DNA
caatcggttagcgcgcggtact

SEQ ID NO: 8090 - DNA, 24 bp, Homo sapiens
  source 1..24: mol_type = genomic DNA
caatcggttagcgcgcggtactta

SEQ ID NO: 8091 - DNA, 44 bp, Homo sapiens
  source 1..44: mol_type = genomic DNA
caatggacaggtgtccgcgtgggttcgagccccactcccggtac

SEQ ID NO: 8092 - DNA, 24 bp, Homo sapiens
  source 1..24: mol_type = genomic DNA
caatggacatatgtccgcgtgggt

SEQ ID NO: 8093 - DNA, 25 bp, Homo sapiens
  source 1..25: mol_type = genomic DNA
caatggacatatgtccgcgtgggtt

SEQ ID NO: 8094 - DNA, 26 bp, Homo sapiens
  source 1..26: mol_type = genomic DNA
caatggacatatgtccgcgtgggttc

SEQ ID NO: 8095 - DNA, 27 bp, Homo sapiens
  source 1..27: mol_type = genomic DNA
caatggacatatgtccgcgtgggttcg

SEQ ID NO: 8096 - DNA, 44 bp, Homo sapiens
  source 1..44: mol_type = genomic DNA
caatggacatatgtccgcgtgggttcgaaccccactcctggtac

SEQ ID NO: 8097 - DNA, 45 bp, Homo sapiens
  source 1..45: mol_type = genomic DNA
caatggacatatgtccgcgtgggttcgaaccccactcctggtacc

SEQ ID NO: 8098 - DNA, 46 bp, Homo sapiens
  source 1..46: mol_type = genomic DNA
caatggacatatgtccgcgtgggttcgaaccccactcctggtacca

SEQ ID NO: 8099 - DNA, 17 bp, Homo sapiens
  source 1..17: mol_type = genomic DNA
caatggacgagcgcgct

SEQ ID NO: 8100 - DNA, 20 bp, Homo sapiens
  source 1..20: mol_type = genomic DNA
caatggacgagcgcgctgga

SEQ ID NO: 8101 - DNA, 16 bp, Homo sapiens
  source 1..16: mol_type = genomic DNA
caatggaggcgtgggt

SEQ ID NO: 8102 - DNA, 17 bp, Homo sapiens
  source 1..17: mol_type = genomic DNA
caatggaggcgtgggtt

SEQ ID NO: 8103 - DNA, 18 bp, Homo sapiens
  source 1..18: mol_type = genomic DNA
caatggaggcgtgggttc

SEQ ID NO: 8104 - DNA, 32 bp, Homo sapiens
  source 1..32: mol_type = genomic DNA
caatggaggcgtgggttcgaatcccacttctg

SEQ ID NO: 8105 - DNA, 35 bp, Homo sapiens
  source 1..35: mol_type = genomic DNA
caatggaggcgtgggttcgaatcccacttctgaca

SEQ ID NO: 8106 - DNA, 36 bp, Homo sapiens
  source 1..36: mol_type = genomic DNA
caatggaggcgtgggttcgaatcccacttctgacac

SEQ ID NO: 8107 - DNA, 37 bp, Homo sapiens
  source 1..37: mol_type = genomic DNA
caatggaggcgtgggttcgaatcccacttctgacacc

SEQ ID NO: 8108 - DNA, 38 bp, Homo sapiens
  source 1..38: mol_type = genomic DNA
caatggaggcgtgggttcgaatcccacttctgacacca

SEQ ID NO: 8109 - DNA, 19 bp, Homo sapiens
  source 1..19: mol_type = genomic DNA
caatggataacgcgtctga

SEQ ID NO: 8110 - DNA, 21 bp, Homo sapiens
  source 1..21: mol_type = genomic DNA
caatggataacgcgtctgact

SEQ ID NO: 8111 - DNA, 16 bp, Homo sapiens
  source 1..16: mol_type = genomic DNA
caatggatagcgcatt

SEQ ID NO: 8112 - DNA, 17 bp, Homo sapiens
  source 1..17: mol_type = genomic DNA
caatggatagcgcattg

SEQ ID NO: 8113 - DNA, 18 bp, Homo sapiens
  source 1..18: mol_type = genomic DNA
caatggatagcgcattgg

SEQ ID NO: 8114 - DNA, 19 bp, Homo sapiens
  source 1..19: mol_type = genomic DNA
caatggatagcgcattgga

SEQ ID NO: 8115 - DNA, 20 bp, Homo sapiens
  source 1..20: mol_type = genomic DNA
caatggatagcgcattggac

SEQ ID NO: 8116 - DNA, 21 bp, Homo sapiens
  source 1..21: mol_type = genomic DNA
caatggatagcgcattggact

SEQ ID NO: 8117 - DNA, 43 bp, Homo sapiens
  source 1..43: mol_type = genomic DNA
caatggattcatatccgcgtgggttcgaaccccacttctggta

SEQ ID NO: 8118 - DNA, 45 bp, Homo sapiens
  source 1..45: mol_type = genomic DNA
caatgggctggtgcccgcgtgggttcgaaccccactctcggtacc

SEQ ID NO: 8119 - DNA, 23 bp, Homo sapiens
  source 1..23: mol_type = genomic DNA
caatggggtctccccgcgcaggt

SEQ ID NO: 8120 - DNA, 33 bp, Homo sapiens
  source 1..33: mol_type = genomic DNA
caatggggtctccccgcgcaggttcgaaccctg

SEQ ID NO: 8121 - DNA, 20 bp, Homo sapiens
  source 1..20: mol_type = genomic DNA
caatggtagaattctcgcct

SEQ ID NO: 8122 - DNA, 18 bp, Homo sapiens
  source 1..18: mol_type = genomic DNA
caattaactagttttgac

SEQ ID NO: 8123 - DNA, 19 bp, Homo sapiens
  source 1..19: mol_type = genomic DNA
caattaactagttttgaca

SEQ ID NO: 8124 - DNA, 20 bp, Homo sapiens
  source 1..20: mol_type = genomic DNA
caattaactagttttgacaa

SEQ ID NO: 8125 - DNA, 21 bp, Homo sapiens
  source 1..21: mol_type = genomic DNA
caattaactagttttgacaac

SEQ ID NO: 8126 - DNA, 22 bp, Homo sapiens
  source 1..22: mol_type = genomic DNA
caattaactagttttgacaaca

SEQ ID NO: 8127 - DNA, 25 bp, Homo sapiens
  source 1..25: mol_type = genomic DNA
caattaactagttttgacaacattc

SEQ ID NO: 8128 - DNA, 30 bp, Homo sapiens
  source 1..30: mol_type = genomic DNA
caattaactagttttgacaacattcaaaaa

SEQ ID NO: 8129 - DNA, 32 bp, Homo sapiens
  source 1..32: mol_type = genomic DNA
caattaactagttttgacaacattcaaaaaag

SEQ ID NO: 8130 - DNA, 34 bp, Homo sapiens
  source 1..34: mol_type = genomic DNA
caattaactagttttgacaacattcaaaaaagag

SEQ ID NO: 8131 - DNA, 35 bp, Homo sapiens
  source 1..35: mol_type = genomic DNA
caattaactagttttgacaacattcaaaaaagagt

SEQ ID NO: 8132 - DNA, 36 bp, Homo sapiens
  source 1..36: mol_type = genomic DNA
caattaactagttttgacaacattcaaaaaagagta

SEQ ID NO: 8133 - DNA, 37 bp, Homo sapiens
  source 1..37: mol_type = genomic DNA
caattaactagttttgacaacattcaaaaaagagtac

SEQ ID NO: 8134 - DNA, 38 bp, Homo sapiens
  source 1..38: mol_type = genomic DNA
caattaactagttttgacaacattcaaaaaagagtacc

SEQ ID NO: 8135 - DNA, 39 bp, Homo sapiens
  source 1..39: mol_type = genomic DNA
caattaactagttttgacaacattcaaaaaagagtacca

SEQ ID NO: 8136 - DNA, 19 bp, Homo sapiens
  source 1..19: mol_type = genomic DNA
caattccccgacggggagc

SEQ ID NO: 8137 - DNA, 20 bp, Homo sapiens
  source 1..20: mol_type = genomic DNA
caattccccgacggggagcc

SEQ ID NO: 8138 - DNA, 21 bp, Homo sapiens
  source 1..21: mol_type = genomic DNA
caattccccgacggggagcca

SEQ ID NO: 8139 - DNA, 20 bp, Homo sapiens
  source 1..20: mol_type = genomic DNA
caattcctcttcttaacacc

SEQ ID NO: 8140 - DNA, 18 bp, Homo sapiens
  source 1..18: mol_type = genomic DNA
caattctcgctggggcct

SEQ ID NO: 8141 - DNA, 16 bp, Homo sapiens
  source 1..16: mol_type = genomic DNA
cacaaagcacccaact

SEQ ID NO: 8142 - DNA, 17 bp, Homo sapiens
  source 1..17: mol_type = genomic DNA
cacaaagcacccaactt

SEQ ID NO: 8143 - DNA, 18 bp, Homo sapiens
  source 1..18: mol_type = genomic DNA
cacaaagcacccaactta

SEQ ID NO: 8144 - DNA, 19 bp, Homo sapiens
  source 1..19: mol_type = genomic DNA
cacaaagcacccaacttac

SEQ ID NO: 8145 - DNA, 20 bp, Homo sapiens
  source 1..20: mol_type = genomic DNA
cacaaagcacccaacttaca

SEQ ID NO: 8146 - DNA, 21 bp, Homo sapiens
  source 1..21: mol_type = genomic DNA
cacaaagcacccaacttacac

SEQ ID NO: 8147 - DNA, 22 bp, Homo sapiens
  source 1..22: mol_type = genomic DNA
cacaaagcacccaacttacact

SEQ ID NO: 8148 - DNA, 23 bp, Homo sapiens
  source 1..23: mol_type = genomic DNA
cacaaagcacccaacttacactt

SEQ ID NO: 8149 - DNA, 24 bp, Homo sapiens
  source 1..24: mol_type = genomic DNA
cacaaagcacccaacttacactta

SEQ ID NO: 8150 - DNA, 25 bp, Homo sapiens
  source 1..25: mol_type = genomic DNA
cacaaagcacccaacttacacttag

SEQ ID NO: 8151 - DNA, 26 bp, Homo sapiens
  source 1..26: mol_type = genomic DNA
cacaaagcacccaacttacacttagg

SEQ ID NO: 8152 - DNA, 27 bp, Homo sapiens
  source 1..27: mol_type = genomic DNA
cacaaagcacccaacttacacttagga

SEQ ID NO: 8153 - DNA, 28 bp, Homo sapiens
  source 1..28: mol_type = genomic DNA
cacaaagcacccaacttacacttaggag

SEQ ID NO: 8154 - DNA, 29 bp, Homo sapiens
  source 1..29: mol_type = genomic DNA
cacaaagcacccaacttacacttaggaga

SEQ ID NO: 8155 - DNA, 30 bp, Homo sapiens
  source 1..30: mol_type = genomic DNA
cacaaagcacccaacttacacttaggagat

SEQ ID NO: 8156 - DNA, 31 bp, Homo sapiens
  source 1..31: mol_type = genomic DNA
cacaaagcacccaacttacacttaggagatt

SEQ ID NO: 8157 - DNA, 32 bp, Homo sapiens
  source 1..32: mol_type = genomic DNA
cacaaagcacccaacttacacttaggagattt

SEQ ID NO: 8158 - DNA, 33 bp, Homo sapiens
  source 1..33: mol_type = genomic DNA
cacaaagcacccaacttacacttaggagatttc

SEQ ID NO: 8159 - DNA, 34 bp, Homo sapiens
  source 1..34: mol_type = genomic DNA
cacaaagcacccaacttacacttaggagatttca

SEQ ID NO: 8160 - DNA, 35 bp, Homo sapiens
  source 1..35: mol_type = genomic DNA
cacaaagcacccaacttacacttaggagatttcaa

SEQ ID NO: 8161 - DNA, 36 bp, Homo sapiens
  source 1..36: mol_type = genomic DNA
cacaaagcacccaacttacacttaggagatttcaac

SEQ ID NO: 8162 - DNA, 37 bp, Homo sapiens
  source 1..37: mol_type = genomic DNA
cacaaagcacccaacttacacttaggagatttcaact

SEQ ID NO: 8163 - DNA, 38 bp, Homo sapiens
  source 1..38: mol_type = genomic DNA
cacaaagcacccaacttacacttaggagatttcaactt

SEQ ID NO: 8164 - DNA, 39 bp, Homo sapiens
  source 1..39: mol_type = genomic DNA
cacaaagcacccaacttacacttaggagatttcaactta

SEQ ID NO: 8165 - DNA, 40 bp, Homo sapiens
  source 1..40: mol_type = genomic DNA
cacaaagcacccaacttacacttaggagatttcaacttaa

SEQ ID NO: 8166 - DNA, 41 bp, Homo sapiens
  source 1..41: mol_type = genomic DNA
cacaaagcacccaacttacacttaggagatttcaacttaac

SEQ ID NO: 8167 - DNA, 42 bp, Homo sapiens
  source 1..42: mol_type = genomic DNA
cacaaagcacccaacttacacttaggagatttcaacttaact

SEQ ID NO: 8168 - DNA, 48 bp, Homo sapiens
  source 1..48: mol_type = genomic DNA
cacaaagcacccaacttacacttaggagatttcaacttaacttgaccg

SEQ ID NO: 8169 - DNA, 16 bp, Homo sapiens
  source 1..16: mol_type = genomic DNA
cacaagaactgctaac

SEQ ID NO: 8170 - DNA, 17 bp, Homo sapiens
  source 1..17: mol_type = genomic DNA
cacaagaactgctaact

SEQ ID NO: 8171 - DNA, 18 bp, Homo sapiens
  source 1..18: mol_type = genomic DNA
cacaagaactgctaactc

SEQ ID NO: 8172 - DNA, 19 bp, Homo sapiens
  source 1..19: mol_type = genomic DNA
cacaagaactgctaactca

SEQ ID NO: 8173 - DNA, 20 bp, Homo sapiens
  source 1..20: mol_type = genomic DNA
cacaagaactgctaactcat

SEQ ID NO: 8174 - DNA, 21 bp, Homo sapiens
  source 1..21: mol_type = genomic DNA
cacaagaactgctaactcatg

SEQ ID NO: 8175 - DNA, 22 bp, Homo sapiens
  source 1..22: mol_type = genomic DNA
cacaagaactgctaactcatgc

SEQ ID NO: 8176 - DNA, 23 bp, Homo sapiens
  source 1..23: mol_type = genomic DNA
cacaagaactgctaactcatgcc

SEQ ID NO: 8177 - DNA, 24 bp, Homo sapiens
  source 1..24: mol_type = genomic DNA
cacaagaactgctaactcatgccc

SEQ ID NO: 8178 - DNA, 25 bp, Homo sapiens
  source 1..25: mol_type = genomic DNA
cacaagaactgctaactcatgcccc

SEQ ID NO: 8179 - DNA, 26 bp, Homo sapiens
  source 1..26: mol_type = genomic DNA
cacaagaactgctaactcatgccccc

SEQ ID NO: 8180 - DNA, 27 bp, Homo sapiens
  source 1..27: mol_type = genomic DNA
cacaagaactgctaactcatgccccca

SEQ ID NO: 8181 - DNA, 28 bp, Homo sapiens
  source 1..28: mol_type = genomic DNA
cacaagaactgctaactcatgcccccat

SEQ ID NO: 8182 - DNA, 29 bp, Homo sapiens
  source 1..29: mol_type = genomic DNA
cacaagaactgctaactcatgcccccatg

SEQ ID NO: 8183 - DNA, 30 bp, Homo sapiens
  source 1..30: mol_type = genomic DNA
cacaagaactgctaactcatgcccccatgt

SEQ ID NO: 8184 - DNA, 31 bp, Homo sapiens
  source 1..31: mol_type = genomic DNA
cacaagaactgctaactcatgcccccatgtc

SEQ ID NO: 8185 - DNA, 32 bp, Homo sapiens
  source 1..32: mol_type = genomic DNA
cacaagaactgctaactcatgcccccatgtct

SEQ ID NO: 8186 - DNA, 33 bp, Homo sapiens
  source 1..33: mol_type = genomic DNA
cacaagaactgctaactcatgcccccatgtcta

SEQ ID NO: 8187 - DNA, 34 bp, Homo sapiens
  source 1..34: mol_type = genomic DNA
cacaagaactgctaactcatgcccccatgtctaa

SEQ ID NO: 8188 - DNA, 35 bp, Homo sapiens
  source 1..35: mol_type = genomic DNA
cacaagaactgctaactcatgcccccatgtctaac

SEQ ID NO: 8189 - DNA, 36 bp, Homo sapiens
  source 1..36: mol_type = genomic DNA
cacaagaactgctaactcatgcccccatgtctaaca

SEQ ID NO: 8190 - DNA, 37 bp, Homo sapiens
  source 1..37: mol_type = genomic DNA
cacaagaactgctaactcatgcccccatgtctaacaa

SEQ ID NO: 8191 - DNA, 38 bp, Homo sapiens
  source 1..38: mol_type = genomic DNA
cacaagaactgctaactcatgcccccatgtctaacaac

SEQ ID NO: 8192 - DNA, 39 bp, Homo sapiens
  source 1..39: mol_type = genomic DNA
cacaagaactgctaactcatgcccccatgtctaacaaca

SEQ ID NO: 8193 - DNA, 40 bp, Homo sapiens
  source 1..40: mol_type = genomic DNA
cacaagaactgctaactcatgcccccatgtctaacaacat

SEQ ID NO: 8194 - DNA, 41 bp, Homo sapiens
  source 1..41: mol_type = genomic DNA
cacaagaactgctaactcatgcccccatgtctaacaacatg

SEQ ID NO: 8195 - DNA, 42 bp, Homo sapiens
  source 1..42: mol_type = genomic DNA
cacaagaactgctaactcatgcccccatgtctaacaacatgg

SEQ ID NO: 8196 - DNA, 43 bp, Homo sapiens
  source 1..43: mol_type = genomic DNA
cacaagaactgctaactcatgcccccatgtctaacaacatggc

SEQ ID NO: 8197 - DNA, 44 bp, Homo sapiens
  source 1..44: mol_type = genomic DNA
cacaagaactgctaactcatgcccccatgtctaacaacatggct

SEQ ID NO: 8198 - DNA, 45 bp, Homo sapiens
  source 1..45: mol_type = genomic DNA
cacaagaactgctaactcatgcccccatgtctaacaacatggctt

SEQ ID NO: 8199 - DNA, 46 bp, Homo sapiens
  source 1..46: mol_type = genomic DNA
cacaagaactgctaactcatgcccccatgtctaacaacatggcttt

SEQ ID NO: 8200 - DNA, 47 bp, Homo sapiens
  source 1..47: mol_type = genomic DNA
cacaagaactgctaactcatgcccccatgtctaacaacatggctttc

SEQ ID NO: 8201 - DNA, 48 bp, Homo sapiens
  source 1..48: mol_type = genomic DNA
cacaagaactgctaactcatgcccccatgtctaacaacatggctttct

SEQ ID NO: 8202 - DNA, 24 bp, Homo sapiens
  source 1..24: mol_type = genomic DNA
cacacgcgaaaggtccccggttcg

SEQ ID NO: 8203 - DNA, 42 bp, Homo sapiens
  source 1..42: mol_type = genomic DNA
cacacgcgaaaggtccccggttcgaaaccgggcggaaacacc

SEQ ID NO: 8204 - DNA, 32 bp, Homo sapiens
  source 1..32: mol_type = genomic DNA
cacacgtgggttcgaatcccatcctcgtcgcc

SEQ ID NO: 8205 - DNA, 33 bp, Homo sapiens
  source 1..33: mol_type = genomic DNA
cacacgtgggttcgaatcccatcctcgtcgcca

SEQ ID NO: 8206 - DNA, 28 bp, Homo sapiens
  source 1..28: mol_type = genomic DNA
cacaggttcgaatcctgttcgtgacgcc

SEQ ID NO: 8207 - DNA, 29 bp, Homo sapiens
  source 1..29: mol_type = genomic DNA
cacaggttcgaatcctgttcgtgacgcca

SEQ ID NO: 8208 - DNA, 16 bp, Homo sapiens
  source 1..16: mol_type = genomic DNA
cacatcaccccataaa

SEQ ID NO: 8209 - DNA, 17 bp, Homo sapiens
  source 1..17: mol_type = genomic DNA
cacatcaccccataaac

SEQ ID NO: 8210 - DNA, 18 bp, Homo sapiens
  source 1..18: mol_type = genomic DNA
cacatcaccccataaaca

SEQ ID NO: 8211 - DNA, 19 bp, Homo sapiens
  source 1..19: mol_type = genomic DNA
cacatcaccccataaacac

SEQ ID NO: 8212 - DNA, 20 bp, Homo sapiens
  source 1..20: mol_type = genomic DNA
cacatcaccccataaacacc

SEQ ID NO: 8213 - DNA, 21 bp, Homo sapiens
  source 1..21: mol_type = genomic DNA
cacatcaccccataaacacca

SEQ ID NO: 8214 - DNA, 19 bp, Homo sapiens
  source 1..19: mol_type = genomic DNA
cacatggtctagcggttag

SEQ ID NO: 8215 - DNA, 22 bp, Homo sapiens
  source 1..22: mol_type = genomic DNA
cacatggtctagcggttaggat

SEQ ID NO: 8216 - DNA, 23 bp, Homo sapiens
  source 1..23: mol_type = genomic DNA
cacatggtctagcggttaggatt

SEQ ID NO: 8217 - DNA, 24 bp, Homo sapiens
  source 1..24: mol_type = genomic DNA
cacatggtctagcggttaggattc

SEQ ID NO: 8218 - DNA, 25 bp, Homo sapiens
  source 1..25: mol_type = genomic DNA
cacatggtctagcggttaggattcc

SEQ ID NO: 8219 - DNA, 26 bp, Homo sapiens
  source 1..26: mol_type = genomic DNA
cacatggtctagcggttaggattcct

SEQ ID NO: 8220 - DNA, 27 bp, Homo sapiens
  source 1..27: mol_type = genomic DNA
cacatggtctagcggttaggattcctg

SEQ ID NO: 8221 - DNA, 28 bp, Homo sapiens
  source 1..28: mol_type = genomic DNA
cacatggtctagcggttaggattcctgg

SEQ ID NO: 8222 - DNA, 29 bp, Homo sapiens
  source 1..29: mol_type = genomic DNA
cacatggtctagcggttaggattcctggt

SEQ ID NO: 8223 - DNA, 30 bp, Homo sapiens
  source 1..30: mol_type = genomic DNA
cacatggtctagcggttaggattcctggtt

SEQ ID NO: 8224 - DNA, 31 bp, Homo sapiens
  source 1..31: mol_type = genomic DNA
cacatggtctagcggttaggattcctggttt

SEQ ID NO: 8225 - DNA, 32 bp, Homo sapiens
  source 1..32: mol_type = genomic DNA
cacatggtctagcggttaggattcctggtttt

SEQ ID NO: 8226 - DNA, 33 bp, Homo sapiens
  source 1..33: mol_type = genomic DNA
cacatggtctagcggttaggattcctggttttc

SEQ ID NO: 8227 - DNA, 34 bp, Homo sapiens
  source 1..34: mol_type = genomic DNA
cacatggtctagcggttaggattcctggttttca

SEQ ID NO: 8228 - DNA, 35 bp, Homo sapiens
  source 1..35: mol_type = genomic DNA
cacatggtctagcggttaggattcctggttttcac

SEQ ID NO: 8229 - DNA, 36 bp, Homo sapiens
  source 1..36: mol_type = genomic DNA
cacatggtctagcggttaggattcctggttttcacc

SEQ ID NO: 8230 - DNA, 37 bp, Homo sapiens
  source 1..37: mol_type = genomic DNA
cacatggtctagcggttaggattcctggttttcaccc

SEQ ID NO: 8231 - DNA, 38 bp, Homo sapiens
  source 1..38: mol_type = genomic DNA
cacatggtctagcggttaggattcctggttttcaccca

SEQ ID NO: 8232 - DNA, 39 bp, Homo sapiens
  source 1..39: mol_type = genomic DNA
cacatggtctagcggttaggattcctggttttcacccag

SEQ ID NO: 8233 - DNA, 17 bp, Homo sapiens
  source 1..17: mol_type = genomic DNA
cacattcgcctcacacg

SEQ ID NO: 8234 - DNA, 46 bp, Homo sapiens
  source 1..46: mol_type = genomic DNA
caccagtcttgtaaaccggagatgaaaacctttttccaaggacacc

SEQ ID NO: 8235 - DNA, 47 bp, Homo sapiens
  source 1..47: mol_type = genomic DNA
caccagtcttgtaaaccggagatgaaaacctttttccaaggacacca

SEQ ID NO: 8236 - DNA, 16 bp, Homo sapiens
  source 1..16: mol_type = genomic DNA
cacccaacttacactt

SEQ ID NO: 8237 - DNA, 17 bp, Homo sapiens
  source 1..17: mol_type = genomic DNA
cacccaacttacactta

SEQ ID NO: 8238 - DNA, 20 bp, Homo sapiens
  source 1..20: mol_type = genomic DNA
cacccaacttacacttagga

SEQ ID NO: 8239 - DNA, 21 bp, Homo sapiens
  source 1..21: mol_type = genomic DNA
cacccaacttacacttaggag

SEQ ID NO: 8240 - DNA, 22 bp, Homo sapiens
  source 1..22: mol_type = genomic DNA
cacccaacttacacttaggaga

SEQ ID NO: 8241 - DNA, 24 bp, Homo sapiens
  source 1..24: mol_type = genomic DNA
cacccaacttacacttaggagatt

SEQ ID NO: 8242 - DNA, 26 bp, Homo sapiens
  source 1..26: mol_type = genomic DNA
cacccaacttacacttaggagatttc

SEQ ID NO: 8243 - DNA, 27 bp, Homo sapiens
  source 1..27: mol_type = genomic DNA
cacccaacttacacttaggagatttca

SEQ ID NO: 8244 - DNA, 28 bp, Homo sapiens
  source 1..28: mol_type = genomic DNA
cacccaacttacacttaggagatttcaa

SEQ ID NO: 8245 - DNA, 29 bp, Homo sapiens
  source 1..29: mol_type = genomic DNA
cacccaacttacacttaggagatttcaac

SEQ ID NO: 8246 - DNA, 30 bp, Homo sapiens
  source 1..30: mol_type = genomic DNA
cacccaacttacacttaggagatttcaact

SEQ ID NO: 8247 - DNA, 31 bp, Homo sapiens
  source 1..31: mol_type = genomic DNA
cacccaacttacacttaggagatttcaactt

SEQ ID NO: 8248 - DNA, 32 bp, Homo sapiens
  source 1..32: mol_type = genomic DNA
cacccaacttacacttaggagatttcaactta

SEQ ID NO: 8249 - DNA, 33 bp, Homo sapiens
  source 1..33: mol_type = genomic DNA
cacccaacttacacttaggagatttcaacttaa

SEQ ID NO: 8250 - DNA, 34 bp, Homo sapiens
  source 1..34: mol_type = genomic DNA
cacccaacttacacttaggagatttcaacttaac

SEQ ID NO: 8251 - DNA, 40 bp, Homo sapiens
  source 1..40: mol_type = genomic DNA
cacccaacttacacttaggagatttcaacttaacttgacc

SEQ ID NO: 8252 - DNA, 41 bp, Homo sapiens
  source 1..41: mol_type = genomic DNA
cacccaacttacacttaggagatttcaacttaacttgaccg

SEQ ID NO: 8253 - DNA, 42 bp, Homo sapiens
  source 1..42: mol_type = genomic DNA
cacccaacttacacttaggagatttcaacttaacttgaccgc

SEQ ID NO: 8254 - DNA, 43 bp, Homo sapiens
  source 1..43: mol_type = genomic DNA
cacccaacttacacttaggagatttcaacttaacttgaccgct

SEQ ID NO: 8255 - DNA, 44 bp, Homo sapiens
  source 1..44: mol_type = genomic DNA
cacccaacttacacttaggagatttcaacttaacttgaccgctc

SEQ ID NO: 8256 - DNA, 45 bp, Homo sapiens
  source 1..45: mol_type = genomic DNA
cacccaacttacacttaggagatttcaacttaacttgaccgctct

SEQ ID NO: 8257 - DNA, 46 bp, Homo sapiens
  source 1..46: mol_type = genomic DNA
cacccaacttacacttaggagatttcaacttaacttgaccgctctg

SEQ ID NO: 8258 - DNA, 47 bp, Homo sapiens
  source 1..47: mol_type = genomic DNA
cacccaacttacacttaggagatttcaacttaacttgaccgctctga

SEQ ID NO: 8259 - DNA, 48 bp, Homo sapiens
  source 1..48: mol_type = genomic DNA
cacccaacttacacttaggagatttcaacttaacttgaccgctctgac

SEQ ID NO: 8260 - DNA, 20 bp, Homo sapiens
  source 1..20: mol_type = genomic DNA
cacccaggcggcccgggttc

SEQ ID NO: 8261 - DNA, 21 bp, Homo sapiens
  source 1..21: mol_type = genomic DNA
cacccaggcggcccgggttcg

SEQ ID NO: 8262 - DNA, 23 bp, Homo sapiens
  source 1..23: mol_type = genomic DNA
cacccaggcggcccgggttcgac

SEQ ID NO: 8263 - DNA, 24 bp, Homo sapiens
  source 1..24: mol_type = genomic DNA
cacccaggcggcccgggttcgact

SEQ ID NO: 8264 - DNA, 25 bp, Homo sapiens
  source 1..25: mol_type = genomic DNA
cacccaggcggcccgggttcgactc

SEQ ID NO: 8265 - DNA, 28 bp, Homo sapiens
  source 1..28: mol_type = genomic DNA
cacccaggcggcccgggttcgactcccg

SEQ ID NO: 8266 - DNA, 29 bp, Homo sapiens
  source 1..29: mol_type = genomic DNA
cacccaggcggcccgggttcgactcccgg

SEQ ID NO: 8267 - DNA, 30 bp, Homo sapiens
  source 1..30: mol_type = genomic DNA
cacccaggcggcccgggttcgactcccggt

SEQ ID NO: 8268 - DNA, 31 bp, Homo sapiens
  source 1..31: mol_type = genomic DNA
cacccaggcggcccgggttcgactcccggtg

SEQ ID NO: 8269 - DNA, 33 bp, Homo sapiens
  source 1..33: mol_type = genomic DNA
cacccaggcggcccgggttcgactcccggtgtg

SEQ ID NO: 8270 - DNA, 34 bp, Homo sapiens
  source 1..34: mol_type = genomic DNA
cacccaggcggcccgggttcgactcccggtgtgg

SEQ ID NO: 8271 - DNA, 35 bp, Homo sapiens
  source 1..35: mol_type = genomic DNA
cacccaggcggcccgggttcgactcccggtgtggg

SEQ ID NO: 8272 - DNA, 36 bp, Homo sapiens
  source 1..36: mol_type = genomic DNA
cacccaggcggcccgggttcgactcccggtgtggga

SEQ ID NO: 8273 - DNA, 37 bp, Homo sapiens
  source 1..37: mol_type = genomic DNA
cacccaggcggcccgggttcgactcccggtgtgggaa

SEQ ID NO: 8274 - DNA, 38 bp, Homo sapiens
  source 1..38: mol_type = genomic DNA
cacccaggcggcccgggttcgactcccggtgtgggaac

SEQ ID NO: 8275 - DNA, 39 bp, Homo sapiens
  source 1..39: mol_type = genomic DNA
cacccaggcggcccgggttcgactcccggtgtgggaacc

SEQ ID NO: 8276 - DNA, 40 bp, Homo sapiens
  source 1..40: mol_type = genomic DNA
cacccaggcggcccgggttcgactcccggtgtgggaacca

SEQ ID NO: 8277 - DNA, 29 bp, Homo sapiens
  source 1..29: mol_type = genomic DNA
cacccaggtggcccgggttcgactcccgg

SEQ ID NO: 8278 - DNA, 30 bp, Homo sapiens
  source 1..30: mol_type = genomic DNA
cacccaggtggcccgggttcgactcccggt

SEQ ID NO: 8279 - DNA, 31 bp, Homo sapiens
  source 1..31: mol_type = genomic DNA
cacccaggtggcccgggttcgactcccggta

SEQ ID NO: 8280 - DNA, 33 bp, Homo sapiens
  source 1..33: mol_type = genomic DNA
cacccaggtggcccgggttcgactcccggtatg

SEQ ID NO: 8281 - DNA, 34 bp, Homo sapiens
  source 1..34: mol_type = genomic DNA
cacccaggtggcccgggttcgactcccggtatgg

SEQ ID NO: 8282 - DNA, 35 bp, Homo sapiens
  source 1..35: mol_type = genomic DNA
cacccaggtggcccgggttcgactcccggtatggg

SEQ ID NO: 8283 - DNA, 37 bp, Homo sapiens
  source 1..37: mol_type = genomic DNA
cacccaggtggcccgggttcgactcccggtatgggaa

SEQ ID NO: 8284 - DNA, 38 bp, Homo sapiens
  source 1..38: mol_type = genomic DNA
cacccaggtggcccgggttcgactcccggtatgggaac

SEQ ID NO: 8285 - DNA, 39 bp, Homo sapiens
  source 1..39: mol_type = genomic DNA
cacccaggtggcccgggttcgactcccggtatgggaacc

SEQ ID NO: 8286 - DNA, 40 bp, Homo sapiens
  source 1..40: mol_type = genomic DNA
cacccaggtggcccgggttcgactcccggtatgggaacca

SEQ ID NO: 8287 - DNA, 16 bp, Homo sapiens
  source 1..16: mol_type = genomic DNA
caccccataaacacca

SEQ ID NO: 8288 - DNA, 16 bp, Homo sapiens
  source 1..16: mol_type = genomic DNA
caccgccgcggcccgg

SEQ ID NO: 8289 - DNA, 17 bp, Homo sapiens
  source 1..17: mol_type = genomic DNA
caccgccgcggcccggg

SEQ ID NO: 8290 - DNA, 18 bp, Homo sapiens
  source 1..18: mol_type = genomic DNA
caccgccgcggcccgggt

SEQ ID NO: 8291 - DNA, 19 bp, Homo sapiens
  source 1..19: mol_type = genomic DNA
caccgccgcggcccgggtt

SEQ ID NO: 8292 - DNA, 20 bp, Homo sapiens
  source 1..20: mol_type = genomic DNA
caccgccgcggcccgggttc

SEQ ID NO: 8293 - DNA, 21 bp, Homo sapiens
  source 1..21: mol_type = genomic DNA
caccgccgcggcccgggttcg

SEQ ID NO: 8294 - DNA, 22 bp, Homo sapiens
  source 1..22: mol_type = genomic DNA
caccgccgcggcccgggttcga

SEQ ID NO: 8295 - DNA, 23 bp, Homo sapiens
  source 1..23: mol_type = genomic DNA
caccgccgcggcccgggttcgat

SEQ ID NO: 8296 - DNA, 24 bp, Homo sapiens
  source 1..24: mol_type = genomic DNA
caccgccgcggcccgggttcgatt

SEQ ID NO: 8297 - DNA, 25 bp, Homo sapiens
  source 1..25: mol_type = genomic DNA
caccgccgcggcccgggttcgattc

SEQ ID NO: 8298 - DNA, 28 bp, Homo sapiens
  source 1..28: mol_type = genomic DNA
caccgccgcggcccgggttcgattcccg

SEQ ID NO: 8299 - DNA, 29 bp, Homo sapiens
  source 1..29: mol_type = genomic DNA
caccgccgcggcccgggttcgattcccgg

SEQ ID NO: 8300 - DNA, 30 bp, Homo sapiens
  source 1..30: mol_type = genomic DNA
caccgccgcggcccgggttcgattcccggc

SEQ ID NO: 8301 - DNA, 31 bp, Homo sapiens
  source 1..31: mol_type = genomic DNA
caccgccgcggcccgggttcgattcccggcc

SEQ ID NO: 8302 - DNA, 34 bp, Homo sapiens
  source 1..34: mol_type = genomic DNA
caccgccgcggcccgggttcgattcccggccagg

SEQ ID NO: 8303 - DNA, 39 bp, Homo sapiens
  source 1..39: mol_type = genomic DNA
caccgccgcggcccgggttcgattcccggccagggaacc

SEQ ID NO: 8304 - DNA, 40 bp, Homo sapiens
  source 1..40: mol_type = genomic DNA
caccgccgcggcccgggttcgattcccggccagggaacca

SEQ ID NO: 8305 - DNA, 30 bp, Homo sapiens
  source 1..30: mol_type = genomic DNA
caccgccgcggcccgggttcgattcccggt

SEQ ID NO: 8306 - DNA, 31 bp, Homo sapiens
  source 1..31: mol_type = genomic DNA
caccgccgcggcccgggttcgattcccggtc

SEQ ID NO: 8307 - DNA, 32 bp, Homo sapiens
  source 1..32: mol_type = genomic DNA
caccgccgcggcccgggttcgattcccggtca

SEQ ID NO: 8308 - DNA, 33 bp, Homo sapiens
  source 1..33: mol_type = genomic DNA
caccgccgcggcccgggttcgattcccggtcag

SEQ ID NO: 8309 - DNA, 34 bp, Homo sapiens
  source 1..34: mol_type = genomic DNA
caccgccgcggcccgggttcgattcccggtcagg

SEQ ID NO: 8310 - DNA, 35 bp, Homo sapiens
  source 1..35: mol_type = genomic DNA
caccgccgcggcccgggttcgattcccggtcaggg

SEQ ID NO: 8311 - DNA, 36 bp, Homo sapiens
  source 1..36: mol_type = genomic DNA
caccgccgcggcccgggttcgattcccggtcaggga

SEQ ID NO: 8312 - DNA, 37 bp, Homo sapiens
  source 1..37: mol_type = genomic DNA
caccgccgcggcccgggttcgattcccggtcagggaa

SEQ ID NO: 8313 - DNA, 38 bp, Homo sapiens
  source 1..38: mol_type = genomic DNA
caccgccgcggcccgggttcgattcccggtcagggaac

SEQ ID NO: 8314 - DNA, 39 bp, Homo sapiens
  source 1..39: mol_type = genomic DNA
caccgccgcggcccgggttcgattcccggtcagggaacc

SEQ ID NO: 8315 - DNA, 40 bp, Homo sapiens
  source 1..40: mol_type = genomic DNA
caccgccgcggcccgggttcgattcccggtcagggaacca

SEQ ID NO: 8316 - DNA, 16 bp, Homo sapiens
  source 1..16: mol_type = genomic DNA
cacctctttacagtga

SEQ ID NO: 8317 - DNA, 17 bp, Homo sapiens
  source 1..17: mol_type = genomic DNA
cacctctttacagtgac

SEQ ID NO: 8318 - DNA, 18 bp, Homo sapiens
  source 1..18: mol_type = genomic DNA
cacctctttacagtgacc

SEQ ID NO: 8319 - DNA, 19 bp, Homo sapiens
  source 1..19: mol_type = genomic DNA
cacctctttacagtgacca

SEQ ID NO: 8320 - DNA, 18 bp, Homo sapiens
  source 1..18: mol_type = genomic DNA
cacgaggccccgggttca

SEQ ID NO: 8321 - DNA, 30 bp, Homo sapiens
  source 1..30: mol_type = genomic DNA
cacgaggccccgggttcaatccccggcacc

SEQ ID NO: 8322 - DNA, 31 bp, Homo sapiens
  source 1..31: mol_type = genomic DNA
cacgaggccccgggttcaatccccggcacct

SEQ ID NO: 8323 - DNA, 36 bp, Homo sapiens
  source 1..36: mol_type = genomic DNA
cacgaggccccgggttcaatccccggcacctccacc

SEQ ID NO: 8324 - DNA, 16 bp, Homo sapiens
  source 1..16: mol_type = genomic DNA
cacgcagaaggtcctg

SEQ ID NO: 8325 - DNA, 23 bp, Homo sapiens
  source 1..23: mol_type = genomic DNA
cacgcagaaggtcctgggttcga

SEQ ID NO: 8326 - DNA, 32 bp, Homo sapiens
  source 1..32: mol_type = genomic DNA
cacgcagaaggtcctgggttcgagccccagtg

SEQ ID NO: 8327 - DNA, 36 bp, Homo sapiens
  source 1..36: mol_type = genomic DNA
cacgcagaaggtcctgggttcgagccccagtggaac

SEQ ID NO: 8328 - DNA, 39 bp, Homo sapiens
  source 1..39: mol_type = genomic DNA
cacgcagaaggtcctgggttcgagccccagtggaaccac

SEQ ID NO: 8329 - DNA, 40 bp, Homo sapiens
  source 1..40: mol_type = genomic DNA
cacgcagaaggtcctgggttcgagccccagtggaaccacc

SEQ ID NO: 8330 - DNA, 41 bp, Homo sapiens
  source 1..41: mol_type = genomic DNA
cacgcagaaggtcctgggttcgagccccagtggaaccacca

SEQ ID NO: 8331 - DNA, 16 bp, Homo sapiens
  source 1..16: mol_type = genomic DNA
cacgcgaaaggtcccc

SEQ ID NO: 8332 - DNA, 17 bp, Homo sapiens
  source 1..17: mol_type = genomic DNA
cacgcgaaaggtccccg

SEQ ID NO: 8333 - DNA, 18 bp, Homo sapiens
  source 1..18: mol_type = genomic DNA
cacgcgaaaggtccccgg

SEQ ID NO: 8334 - DNA, 19 bp, Homo sapiens
  source 1..19: mol_type = genomic DNA
cacgcgaaaggtccccggt

SEQ ID NO: 8335 - DNA, 22 bp, Homo sapiens
  source 1..22: mol_type = genomic DNA
cacgcgaaaggtccccggttcg

SEQ ID NO: 8336 - DNA, 23 bp, Homo sapiens
  source 1..23: mol_type = genomic DNA
cacgcgaaaggtccccggttcga

SEQ ID NO: 8337 - DNA, 32 bp, Homo sapiens
  source 1..32: mol_type = genomic DNA
cacgcgaaaggtccccggttcgaaaccgggca

SEQ ID NO: 8338 - DNA, 32 bp, Homo sapiens
  source 1..32: mol_type = genomic DNA
cacgcgaaaggtccccggttcgaaaccgggcg

SEQ ID NO: 8339 - DNA, 34 bp, Homo sapiens
  source 1..34: mol_type = genomic DNA
cacgcgaaaggtccccggttcgaaaccgggcgga

SEQ ID NO: 8340 - DNA, 40 bp, Homo sapiens
  source 1..40: mol_type = genomic DNA
cacgcgaaaggtccccggttcgaaaccgggcggaaacacc

SEQ ID NO: 8341 - DNA, 41 bp, Homo sapiens
  source 1..41: mol_type = genomic DNA
cacgcgaaaggtccccggttcgaaaccgggcggaaacacca

SEQ ID NO: 8342 - DNA, 31 bp, Homo sapiens
  source 1..31: mol_type = genomic DNA
cacgcgggagacccgggttcaattcccggcc

SEQ ID NO: 8343 - DNA, 39 bp, Homo sapiens
  source 1..39: mol_type = genomic DNA
cacgcgggagacccgggttcaattcccggccaatgcacc

SEQ ID NO: 8344 - DNA, 40 bp, Homo sapiens
  source 1..40: mol_type = genomic DNA
cacgcgggagacccgggttcaattcccggccaatgcacca

SEQ ID NO: 8345 - DNA, 16 bp, Homo sapiens
  source 1..16: mol_type = genomic DNA
cacgcgggagaccggg

SEQ ID NO: 8346 - DNA, 17 bp, Homo sapiens
  source 1..17: mol_type = genomic DNA
cacgcgggagaccgggg

SEQ ID NO: 8347 - DNA, 19 bp, Homo sapiens
  source 1..19: mol_type = genomic DNA
cacgcgggagaccggggtt

SEQ ID NO: 8348 - DNA, 29 bp, Homo sapiens
  source 1..29: mol_type = genomic DNA
cacgcgggagaccggggttcaattccccg

SEQ ID NO: 8349 - DNA, 30 bp, Homo sapiens
  source 1..30: mol_type = genomic DNA
cacgcgggagaccggggttcaattccccga

SEQ ID NO: 8350 - DNA, 31 bp, Homo sapiens
  source 1..31: mol_type = genomic DNA
cacgcgggagaccggggttcaattccccgac

SEQ ID NO: 8351 - DNA, 32 bp, Homo sapiens
  source 1..32: mol_type = genomic DNA
cacgcgggagaccggggttcaattccccgacg

SEQ ID NO: 8352 - DNA, 33 bp, Homo sapiens
  source 1..33: mol_type = genomic DNA
cacgcgggagaccggggttcaattccccgacgg

SEQ ID NO: 8353 - DNA, 34 bp, Homo sapiens
  source 1..34: mol_type = genomic DNA
cacgcgggagaccggggttcaattccccgacggg

SEQ ID NO: 8354 - DNA, 35 bp, Homo sapiens
  source 1..35: mol_type = genomic DNA
cacgcgggagaccggggttcaattccccgacgggg

SEQ ID NO: 8355 - DNA, 36 bp, Homo sapiens
  source 1..36: mol_type = genomic DNA
cacgcgggagaccggggttcaattccccgacgggga

SEQ ID NO: 8356 - DNA, 37 bp, Homo sapiens
  source 1..37: mol_type = genomic DNA
cacgcgggagaccggggttcaattccccgacggggag

SEQ ID NO: 8357 - DNA, 38 bp, Homo sapiens
  source 1..38: mol_type = genomic DNA
cacgcgggagaccggggttcaattccccgacggggagc

SEQ ID NO: 8358 - DNA, 39 bp, Homo sapiens
  source 1..39: mol_type = genomic DNA
cacgcgggagaccggggttcaattccccgacggggagcc

SEQ ID NO: 8359 - DNA, 40 bp, Homo sapiens
  source 1..40: mol_type = genomic DNA
cacgcgggagaccggggttcaattccccgacggggagcca

SEQ ID NO: 8360 - DNA, 21 bp, Homo sapiens
  source 1..21: mol_type = genomic DNA
cacgcgggagaccggggttcg

SEQ ID NO: 8361 - DNA, 23 bp, Homo sapiens
  source 1..23: mol_type = genomic DNA
cacgcgggagaccggggttcgat

SEQ ID NO: 8362 - DNA, 24 bp, Homo sapiens
  source 1..24: mol_type = genomic DNA
cacgcgggagaccggggttcgatt

SEQ ID NO: 8363 - DNA, 37 bp, Homo sapiens
  source 1..37: mol_type = genomic DNA
cacgcgggagaccggggttcgattccccaacggggag

SEQ ID NO: 8364 - DNA, 29 bp, Homo sapiens
  source 1..29: mol_type = genomic DNA
cacgcgggagaccggggttcgattccccg

SEQ ID NO: 8365 - DNA, 30 bp, Homo sapiens
  source 1..30: mol_type = genomic DNA
cacgcgggagaccggggttcgattccccga

SEQ ID NO: 8366 - DNA, 31 bp, Homo sapiens
  source 1..31: mol_type = genomic DNA
cacgcgggagaccggggttcgattccccgac

SEQ ID NO: 8367 - DNA, 32 bp, Homo sapiens
  source 1..32: mol_type = genomic DNA
cacgcgggagaccggggttcgattccccgacg

SEQ ID NO: 8368 - DNA, 33 bp, Homo sapiens
  source 1..33: mol_type = genomic DNA
cacgcgggagaccggggttcgattccccgacgg

SEQ ID NO: 8369 - DNA, 34 bp, Homo sapiens
  source 1..34: mol_type = genomic DNA
cacgcgggagaccggggttcgattccccgacggg

SEQ ID NO: 8370 - DNA, 35 bp, Homo sapiens
  source 1..35: mol_type = genomic DNA
cacgcgggagaccggggttcgattccccgacgggg

SEQ ID NO: 8371 - DNA, 36 bp, Homo sapiens
  source 1..36: mol_type = genomic DNA
cacgcgggagaccggggttcgattccccgacgggga

SEQ ID NO: 8372 - DNA, 37 bp, Homo sapiens
  source 1..37: mol_type = genomic DNA
cacgcgggagaccggggttcgattccccgacggggag

SEQ ID NO: 8373 - DNA, 38 bp, Homo sapiens
  source 1..38: mol_type = genomic DNA
cacgcgggagaccggggttcgattccccgacggggagc

SEQ ID NO: 8374 - DNA, 39 bp, Homo sapiens
  source 1..39: mol_type = genomic DNA
cacgcgggagaccggggttcgattccccgacggggagcc

SEQ ID NO: 8375 - DNA, 40 bp, Homo sapiens
  source 1..40: mol_type = genomic DNA
cacgcgggagaccggggttcgattccccgacggggagcca

SEQ ID NO: 8376 - DNA, 16 bp, Homo sapiens
  source 1..16: mol_type = genomic DNA
cacgcgggaggcccgg

SEQ ID NO: 8377 - DNA, 17 bp, Homo sapiens
  source 1..17: mol_type = genomic DNA
cacgcgggaggcccggg

SEQ ID NO: 8378 - DNA, 18 bp, Homo sapiens
  source 1..18: mol_type = genomic DNA
cacgcgggaggcccgggt

SEQ ID NO: 8379 - DNA, 21 bp, Homo sapiens
  source 1..21: mol_type = genomic DNA
cacgcgggaggcccgggttcg

SEQ ID NO: 8380 - DNA, 29 bp, Homo sapiens
  source 1..29: mol_type = genomic DNA
cacgcgggaggcccgggttcgattcccgg

SEQ ID NO: 8381 - DNA, 30 bp, Homo sapiens
  source 1..30: mol_type = genomic DNA
cacgcgggaggcccgggttcgattcccggc

SEQ ID NO: 8382 - DNA, 31 bp, Homo sapiens
  source 1..31: mol_type = genomic DNA
cacgcgggaggcccgggttcgattcccggcc

SEQ ID NO: 8383 - DNA, 32 bp, Homo sapiens
  source 1..32: mol_type = genomic DNA
cacgcgggaggcccgggttcgattcccggcca

SEQ ID NO: 8384 - DNA, 33 bp, Homo sapiens
  source 1..33: mol_type = genomic DNA
cacgcgggaggcccgggttcgattcccggccaa

SEQ ID NO: 8385 - DNA, 35 bp, Homo sapiens
  source 1..35: mol_type = genomic DNA
cacgcgggaggcccgggttcgattcccggccaatg

SEQ ID NO: 8386 - DNA, 36 bp, Homo sapiens
  source 1..36: mol_type = genomic DNA
cacgcgggaggcccgggttcgattcccggccaatgc

SEQ ID NO: 8387 - DNA, 37 bp, Homo sapiens
  source 1..37: mol_type = genomic DNA
cacgcgggaggcccgggttcgattcccggccaatgca

SEQ ID NO: 8388 - DNA, 38 bp, Homo sapiens
  source 1..38: mol_type = genomic DNA
cacgcgggaggcccgggttcgattcccggccaatgcac

SEQ ID NO: 8389 - DNA, 39 bp, Homo sapiens
  source 1..39: mol_type = genomic DNA
cacgcgggaggcccgggttcgattcccggccaatgcacc

SEQ ID NO: 8390 - DNA, 40 bp, Homo sapiens
  source 1..40: mol_type = genomic DNA
cacgcgggaggcccgggttcgattcccggccaatgcacca

SEQ ID NO: 8391 - DNA, 35 bp, Homo sapiens
  source 1..35: mol_type = genomic DNA
cacgcgggaggcccgggttcgattcccggcccatg

SEQ ID NO: 8392 - DNA, 39 bp, Homo sapiens
  source 1..39: mol_type = genomic DNA
cacgcgggaggcccgggttcgattcccggcccatgcacc

SEQ ID NO: 8393 - DNA, 32 bp, Homo sapiens
  source 1..32: mol_type = genomic DNA
cacgcgtgggttcgaatcccaccctcgtcgcc

SEQ ID NO: 8394 - DNA, 32 bp, Homo sapiens
  source 1..32: mol_type = genomic DNA
cacgcgtgggttcgaatcccaccttcgtcgcc

SEQ ID NO: 8395 - DNA, 28 bp, Homo sapiens
  source 1..28: mol_type = genomic DNA
cacgcgtgggttcgaatcccatcctcgt

SEQ ID NO: 8396 - DNA, 30 bp, Homo sapiens
  source 1..30: mol_type = genomic DNA
cacgcgtgggttcgaatcccatcctcgtcg

SEQ ID NO: 8397 - DNA, 31 bp, Homo sapiens
  source 1..31: mol_type = genomic DNA
cacgcgtgggttcgaatcccatcctcgtcgc

SEQ ID NO: 8398 - DNA, 32 bp, Homo sapiens
  source 1..32: mol_type = genomic DNA
cacgcgtgggttcgaatcccatcctcgtcgcc

SEQ ID NO: 8399 - DNA, 33 bp, Homo sapiens
  source 1..33: mol_type = genomic DNA
cacgcgtgggttcgaatcccatcctcgtcgcca

SEQ ID NO: 8400 - DNA, 34 bp, Homo sapiens
  source 1..34: mol_type = genomic DNA
cacggagaattttggattctcagggatgggttcg

SEQ ID NO: 8401 - DNA, 25 bp, Homo sapiens
  source 1..25: mol_type = genomic DNA
cacgggttcgaaccccgtccgtgcc

SEQ ID NO: 8402 - DNA, 26 bp, Homo sapiens
  source 1..26: mol_type = genomic DNA
cacgggttcgaaccccgtccgtgcct

SEQ ID NO: 8403 - DNA, 27 bp, Homo sapiens
  source 1..27: mol_type = genomic DNA
cacgggttcgaaccccgtccgtgcctc

SEQ ID NO: 8404 - DNA, 28 bp, Homo sapiens
  source 1..28: mol_type = genomic DNA
cacgggttcgaaccccgtccgtgcctcc

SEQ ID NO: 8405 - DNA, 18 bp, Homo sapiens
  source 1..18: mol_type = genomic DNA
cacgtatgaggccccggg

SEQ ID NO: 8406 - DNA, 30 bp, Homo sapiens
  source 1..30: mol_type = genomic DNA
cacgtatgaggccccgggttcaatccccgg

SEQ ID NO: 8407 - DNA, 32 bp, Homo sapiens
  source 1..32: mol_type = genomic DNA
cacgtatgaggccccgggttcaatccccggca

SEQ ID NO: 8408 - DNA, 16 bp, Homo sapiens
  source 1..16: mol_type = genomic DNA
cacgtcggggtcacca

SEQ ID NO: 8409 - DNA, 17 bp, Homo sapiens
  source 1..17: mol_type = genomic DNA
cacgtctgctttacacg

SEQ ID NO: 8410 - DNA, 16 bp, Homo sapiens
  source 1..16: mol_type = genomic DNA
cacgtggcctaatgga

SEQ ID NO: 8411 - DNA, 17 bp, Homo sapiens
  source 1..17: mol_type = genomic DNA
cacgttcgcctcacacg

SEQ ID NO: 8412 - DNA, 19 bp, Homo sapiens
  source 1..19: mol_type = genomic DNA
cacgttcgcctcacacgcg

SEQ ID NO: 8413 - DNA, 20 bp, Homo sapiens
  source 1..20: mol_type = genomic DNA
cacgttcgcctcacacgcga

SEQ ID NO: 8414 - DNA, 32 bp, Homo sapiens
  source 1..32: mol_type = genomic DNA
cacgttcgcctcacacgcgaaaggtccccggt

SEQ ID NO: 8415 - DNA, 16 bp, Homo sapiens
  source 1..16: mol_type = genomic DNA
cactctggactctgaa

SEQ ID NO: 8416 - DNA, 17 bp, Homo sapiens
  source 1..17: mol_type = genomic DNA
cactctggactctgaat

SEQ ID NO: 8417 - DNA, 18 bp, Homo sapiens
  source 1..18: mol_type = genomic DNA
cactctggactctgaatc

SEQ ID NO: 8418 - DNA, 19 bp, Homo sapiens
  source 1..19: mol_type = genomic DNA
cactctggactctgaatcc

SEQ ID NO: 8419 - DNA, 20 bp, Homo sapiens
  source 1..20: mol_type = genomic DNA
cactctggactctgaatcca

SEQ ID NO: 8420 - DNA, 21 bp, Homo sapiens
  source 1..21: mol_type = genomic DNA
cactctggactctgaatccag

SEQ ID NO: 8421 - DNA, 22 bp, Homo sapiens
  source 1..22: mol_type = genomic DNA
cactctggactctgaatccagc

SEQ ID NO: 8422 - DNA, 23 bp, Homo sapiens
  source 1..23: mol_type = genomic DNA
cactctggactctgaatccagcg

SEQ ID NO: 8423 - DNA, 24 bp, Homo sapiens
  source 1..24: mol_type = genomic DNA
cactctggactctgaatccagcga

SEQ ID NO: 8424 - DNA, 25 bp, Homo sapiens
  source 1..25: mol_type = genomic DNA
cactctggactctgaatccagcgat

SEQ ID NO: 8425 - DNA, 27 bp, Homo sapiens
  source 1..27: mol_type = genomic DNA
cactctggactctgaatccagcgatcc

SEQ ID NO: 8426 - DNA, 28 bp, Homo sapiens
  source 1..28: mol_type = genomic DNA
cactctggactctgaatccagcgatccg

SEQ ID NO: 8427 - DNA, 29 bp, Homo sapiens
  source 1..29: mol_type = genomic DNA
cactctggactctgaatccagcgatccga

SEQ ID NO: 8428 - DNA, 30 bp, Homo sapiens
  source 1..30: mol_type = genomic DNA
cactctggactctgaatccagcgatccgag

SEQ ID NO: 8429 - DNA, 31 bp, Homo sapiens
  source 1..31: mol_type = genomic DNA
cactctggactctgaatccagcgatccgagt

SEQ ID NO: 8430 - DNA, 32 bp, Homo sapiens
  source 1..32: mol_type = genomic DNA
cactctggactctgaatccagcgatccgagtt

SEQ ID NO: 8431 - DNA, 33 bp, Homo sapiens
  source 1..33: mol_type = genomic DNA
cactctggactctgaatccagcgatccgagttc

SEQ ID NO: 8432 - DNA, 34 bp, Homo sapiens
  source 1..34: mol_type = genomic DNA
cactctggactctgaatccagcgatccgagttca

SEQ ID NO: 8433 - DNA, 36 bp, Homo sapiens
  source 1..36: mol_type = genomic DNA
cactctggactctgaatccagcgatccgagttcgag

SEQ ID NO: 8434 - DNA, 16 bp, Homo sapiens
  source 1..16: mol_type = genomic DNA
cactctggactttgaa

SEQ ID NO: 8435 - DNA, 17 bp, Homo sapiens
  source 1..17: mol_type = genomic DNA
cactctggactttgaat

SEQ ID NO: 8436 - DNA, 18 bp, Homo sapiens
  source 1..18: mol_type = genomic DNA
cactctggactttgaatc

SEQ ID NO: 8437 - DNA, 19 bp, Homo sapiens
  source 1..19: mol_type = genomic DNA
cactctggactttgaatcc

SEQ ID NO: 8438 - DNA, 20 bp, Homo sapiens
  source 1..20: mol_type = genomic DNA
cactctggactttgaatcca

SEQ ID NO: 8439 - DNA, 22 bp, Homo sapiens
  source 1..22: mol_type = genomic DNA
cactctggactttgaatccagc

SEQ ID NO: 8440 - DNA, 30 bp, Homo sapiens
  source 1..30: mol_type = genomic DNA
cactctggactttgaatccagcaatccgag

SEQ ID NO: 8441 - DNA, 29 bp, Homo sapiens
  source 1..29: mol_type = genomic DNA
cactctggactttgaatccagcgatccga

SEQ ID NO: 8442 - DNA, 30 bp, Homo sapiens
  source 1..30: mol_type = genomic DNA
cactctggactttgaatccagcgatccgag

SEQ ID NO: 8443 - DNA, 31 bp, Homo sapiens
  source 1..31: mol_type = genomic DNA
cactctggactttgaatccagcgatccgagt

SEQ ID NO: 8444 - DNA, 32 bp, Homo sapiens
  source 1..32: mol_type = genomic DNA
cactctggactttgaatccagcgatccgagtt

SEQ ID NO: 8445 - DNA, 33 bp, Homo sapiens
  source 1..33: mol_type = genomic DNA
cactctggactttgaatccagcgatccgagttc

SEQ ID NO: 8446 - DNA, 19 bp, Homo sapiens
  source 1..19: mol_type = genomic DNA
cactgaaaatgtttagacg

SEQ ID NO: 8447 - DNA, 20 bp, Homo sapiens
  source 1..20: mol_type = genomic DNA
cactgaaaatgtttagacgg

SEQ ID NO: 8448 - DNA, 22 bp, Homo sapiens
  source 1..22: mol_type = genomic DNA
cactgaaaatgtttagacgggc

SEQ ID NO: 8449 - DNA, 23 bp, Homo sapiens
  source 1..23: mol_type = genomic DNA
cactgaaaatgtttagacgggct

SEQ ID NO: 8450 - DNA, 24 bp, Homo sapiens
  source 1..24: mol_type = genomic DNA
cactgaaaatgtttagacgggctc

SEQ ID NO: 8451 - DNA, 25 bp, Homo sapiens
  source 1..25: mol_type = genomic DNA
cactgaaaatgtttagacgggctca

SEQ ID NO: 8452 - DNA, 26 bp, Homo sapiens
  source 1..26: mol_type = genomic DNA
cactgaaaatgtttagacgggctcac

SEQ ID NO: 8453 - DNA, 27 bp, Homo sapiens
  source 1..27: mol_type = genomic DNA
cactgaaaatgtttagacgggctcaca

SEQ ID NO: 8454 - DNA, 28 bp, Homo sapiens
  source 1..28: mol_type = genomic DNA
cactgaaaatgtttagacgggctcacat

SEQ ID NO: 8455 - DNA, 29 bp, Homo sapiens
  source 1..29: mol_type = genomic DNA
cactgaaaatgtttagacgggctcacatc

SEQ ID NO: 8456 - DNA, 30 bp, Homo sapiens
  source 1..30: mol_type = genomic DNA
cactgaaaatgtttagacgggctcacatca

SEQ ID NO: 8457 - DNA, 32 bp, Homo sapiens
  source 1..32: mol_type = genomic DNA
cactgaaaatgtttagacgggctcacatcacc

SEQ ID NO: 8458 - DNA, 33 bp, Homo sapiens
  source 1..33: mol_type = genomic DNA
cactgaaaatgtttagacgggctcacatcaccc

SEQ ID NO: 8459 - DNA, 34 bp, Homo sapiens
  source 1..34: mol_type = genomic DNA
cactgaaaatgtttagacgggctcacatcacccc

SEQ ID NO: 8460 - DNA, 41 bp, Homo sapiens
  source 1..41: mol_type = genomic DNA
cactgaaaatgtttagacgggctcacatcaccccataaaca

SEQ ID NO: 8461 - DNA, 43 bp, Homo sapiens
  source 1..43: mol_type = genomic DNA
cactgaaaatgtttagacgggctcacatcaccccataaacacc

SEQ ID NO: 8462 - DNA, 44 bp, Homo sapiens
  source 1..44: mol_type = genomic DNA
cactgaaaatgtttagacgggctcacatcaccccataaacacca

SEQ ID NO: 8463 - DNA, 17 bp, Homo sapiens
  source 1..17: mol_type = genomic DNA
cactggtcttgtaaacc

SEQ ID NO: 8464 - DNA, 16 bp, Homo sapiens
  source 1..16: mol_type = genomic DNA
cactgtaaagctaact

SEQ ID NO: 8465 - DNA, 17 bp, Homo sapiens
  source 1..17: mol_type = genomic DNA
cactgtaaagctaactt

SEQ ID NO: 8466 - DNA, 18 bp, Homo sapiens
  source 1..18: mol_type = genomic DNA
cactgtaaagctaactta

SEQ ID NO: 8467 - DNA, 19 bp, Homo sapiens
  source 1..19: mol_type = genomic DNA
cactgtaaagctaacttag

SEQ ID NO: 8468 - DNA, 20 bp, Homo sapiens
  source 1..20: mol_type = genomic DNA
cactgtaaagctaacttagc

SEQ ID NO: 8469 - DNA, 21 bp, Homo sapiens
  source 1..21: mol_type = genomic DNA
cactgtaaagctaacttagca

SEQ ID NO: 8470 - DNA, 22 bp, Homo sapiens
  source 1..22: mol_type = genomic DNA
cactgtaaagctaacttagcat

SEQ ID NO: 8471 - DNA, 23 bp, Homo sapiens
  source 1..23: mol_type = genomic DNA
cactgtaaagctaacttagcatt

SEQ ID NO: 8472 - DNA, 24 bp, Homo sapiens
  source 1..24: mol_type = genomic DNA
cactgtaaagctaacttagcatta

SEQ ID NO: 8473 - DNA, 25 bp, Homo sapiens
  source 1..25: mol_type = genomic DNA
cactgtaaagctaacttagcattaa

SEQ ID NO: 8474 - DNA, 26 bp, Homo sapiens
  source 1..26: mol_type = genomic DNA
cactgtaaagctaacttagcattaac

SEQ ID NO: 8475 - DNA, 27 bp, Homo sapiens
  source 1..27: mol_type = genomic DNA
cactgtaaagctaacttagcattaacc

SEQ ID NO: 8476 - DNA, 28 bp, Homo sapiens
  source 1..28: mol_type = genomic DNA
cactgtaaagctaacttagcattaacct

SEQ ID NO: 8477 - DNA, 29 bp, Homo sapiens
  source 1..29: mol_type = genomic DNA
cactgtaaagctaacttagcattaacctt

SEQ ID NO: 8478 - DNA, 30 bp, Homo sapiens
  source 1..30: mol_type = genomic DNA
cactgtaaagctaacttagcattaaccttt

SEQ ID NO: 8479 - DNA, 31 bp, Homo sapiens
  source 1..31: mol_type = genomic DNA
cactgtaaagctaacttagcattaacctttt

SEQ ID NO: 8480 - DNA, 32 bp, Homo sapiens
  source 1..32: mol_type = genomic DNA
cactgtaaagctaacttagcattaacctttta

SEQ ID NO: 8481 - DNA, 33 bp, Homo sapiens
  source 1..33: mol_type = genomic DNA
cactgtaaagctaacttagcattaaccttttaa

SEQ ID NO: 8482 - DNA, 34 bp, Homo sapiens
  source 1..34: mol_type = genomic DNA
cactgtaaagctaacttagcattaaccttttaag

SEQ ID NO: 8483 - DNA, 35 bp, Homo sapiens
  source 1..35: mol_type = genomic DNA
cactgtaaagctaacttagcattaaccttttaagt

SEQ ID NO: 8484 - DNA, 36 bp, Homo sapiens
  source 1..36: mol_type = genomic DNA
cactgtaaagctaacttagcattaaccttttaagtt

SEQ ID NO: 8485 - DNA, 37 bp, Homo sapiens
  source 1..37: mol_type = genomic DNA
cactgtaaagctaacttagcattaaccttttaagtta

SEQ ID NO: 8486 - DNA, 38 bp, Homo sapiens
  source 1..38: mol_type = genomic DNA
cactgtaaagctaacttagcattaaccttttaagttaa

SEQ ID NO: 8487 - DNA, 39 bp, Homo sapiens
  source 1..39: mol_type = genomic DNA
cactgtaaagctaacttagcattaaccttttaagttaaa

SEQ ID NO: 8488 - DNA, 40 bp, Homo sapiens
  source 1..40: mol_type = genomic DNA
cactgtaaagctaacttagcattaaccttttaagttaaag

SEQ ID NO: 8489 - DNA, 41 bp, Homo sapiens
  source 1..41: mol_type = genomic DNA
cactgtaaagctaacttagcattaaccttttaagttaaaga

SEQ ID NO: 8490 - DNA, 42 bp, Homo sapiens
  source 1..42: mol_type = genomic DNA
cactgtaaagctaacttagcattaaccttttaagttaaagat

SEQ ID NO: 8491 - DNA, 43 bp, Homo sapiens
  source 1..43: mol_type = genomic DNA
cactgtaaagctaacttagcattaaccttttaagttaaagatt

SEQ ID NO: 8492 - DNA, 44 bp, Homo sapiens
  source 1..44: mol_type = genomic DNA
cactgtaaagctaacttagcattaaccttttaagttaaagatta

SEQ ID NO: 8493 - DNA, 45 bp, Homo sapiens
  source 1..45: mol_type = genomic DNA
cactgtaaagctaacttagcattaaccttttaagttaaagattaa

SEQ ID NO: 8494 - DNA, 46 bp, Homo sapiens
  source 1..46: mol_type = genomic DNA
cactgtaaagctaacttagcattaaccttttaagttaaagattaag

SEQ ID NO: 8495 - DNA, 47 bp, Homo sapiens
  source 1..47: mol_type = genomic DNA
cactgtaaagctaacttagcattaaccttttaagttaaagattaaga

SEQ ID NO: 8496 - DNA, 48 bp, Homo sapiens
  source 1..48: mol_type = genomic DNA
cactgtaaagctaacttagcattaaccttttaagttaaagattaagag

SEQ ID NO: 8497 - DNA, 16 bp, Homo sapiens
  source 1..16: mol_type = genomic DNA
cacttaggagatttca

SEQ ID NO: 8498 - DNA, 17 bp, Homo sapiens
  source 1..17: mol_type = genomic DNA
cacttaggagatttcaa

SEQ ID NO: 8499 - DNA, 18 bp, Homo sapiens
  source 1..18: mol_type = genomic DNA
cacttaggagatttcaac

SEQ ID NO: 8500 - DNA, 19 bp, Homo sapiens
  source 1..19: mol_type = genomic DNA
cacttaggagatttcaact

SEQ ID NO: 8501 - DNA, 20 bp, Homo sapiens
  source 1..20: mol_type = genomic DNA
cacttaggagatttcaactt

SEQ ID NO: 8502 - DNA, 21 bp, Homo sapiens
  source 1..21: mol_type = genomic DNA
cacttaggagatttcaactta

SEQ ID NO: 8503 - DNA, 22 bp, Homo sapiens
  source 1..22: mol_type = genomic DNA
cacttaggagatttcaacttaa

SEQ ID NO: 8504 - DNA, 23 bp, Homo sapiens
  source 1..23: mol_type = genomic DNA
cacttaggagatttcaacttaac

SEQ ID NO: 8505 - DNA, 24 bp, Homo sapiens
  source 1..24: mol_type = genomic DNA
cacttaggagatttcaacttaact

SEQ ID NO: 8506 - DNA, 25 bp, Homo sapiens
  source 1..25: mol_type = genomic DNA
cacttaggagatttcaacttaactt

SEQ ID NO: 8507 - DNA, 26 bp, Homo sapiens
  source 1..26: mol_type = genomic DNA
cacttaggagatttcaacttaacttg

SEQ ID NO: 8508 - DNA, 27 bp, Homo sapiens
  source 1..27: mol_type = genomic DNA
cacttaggagatttcaacttaacttga

SEQ ID NO: 8509 - DNA, 28 bp, Homo sapiens
  source 1..28: mol_type = genomic DNA
cacttaggagatttcaacttaacttgac

SEQ ID NO: 8510 - DNA, 29 bp, Homo sapiens
  source 1..29: mol_type = genomic DNA
cacttaggagatttcaacttaacttgacc

SEQ ID NO: 8511 - DNA, 30 bp, Homo sapiens
  source 1..30: mol_type = genomic DNA
cacttaggagatttcaacttaacttgaccg

SEQ ID NO: 8512 - DNA, 31 bp, Homo sapiens
  source 1..31: mol_type = genomic DNA
cacttaggagatttcaacttaacttgaccgc

SEQ ID NO: 8513 - DNA, 32 bp, Homo sapiens
  source 1..32: mol_type = genomic DNA
cacttaggagatttcaacttaacttgaccgct

SEQ ID NO: 8514 - DNA, 33 bp, Homo sapiens
  source 1..33: mol_type = genomic DNA
cacttaggagatttcaacttaacttgaccgctc

SEQ ID NO: 8515 - DNA, 34 bp, Homo sapiens
  source 1..34: mol_type = genomic DNA
cacttaggagatttcaacttaacttgaccgctct

SEQ ID NO: 8516 - DNA, 35 bp, Homo sapiens
  source 1..35: mol_type = genomic DNA
cacttaggagatttcaacttaacttgaccgctctg

SEQ ID NO: 8517 - DNA, 36 bp, Homo sapiens
  source 1..36: mol_type = genomic DNA
cacttaggagatttcaacttaacttgaccgctctga

SEQ ID NO: 8518 - DNA, 37 bp, Homo sapiens
  source 1..37: mol_type = genomic DNA
cacttaggagatttcaacttaacttgaccgctctgac

SEQ ID NO: 8519 - DNA, 38 bp, Homo sapiens
  source 1..38: mol_type = genomic DNA
cacttaggagatttcaacttaacttgaccgctctgacc

SEQ ID NO: 8520 - DNA, 39 bp, Homo sapiens
  source 1..39: mol_type = genomic DNA
cacttaggagatttcaacttaacttgaccgctctgacca

SEQ ID NO: 8521 - DNA, 16 bp, Homo sapiens
  source 1..16: mol_type = genomic DNA
cagaagattccaggtt

SEQ ID NO: 8522 - DNA, 17 bp, Homo sapiens
  source 1..17: mol_type = genomic DNA
cagaagattccaggttc

SEQ ID NO: 8523 - DNA, 18 bp, Homo sapiens
  source 1..18: mol_type = genomic DNA
cagaagattccaggttcg

SEQ ID NO: 8524 - DNA, 25 bp, Homo sapiens
  source 1..25: mol_type = genomic DNA
cagaagattccaggttcgactcctg

SEQ ID NO: 8525 - DNA, 27 bp, Homo sapiens
  source 1..27: mol_type = genomic DNA
cagaagattccaggttcgactcctggc

SEQ ID NO: 8526 - DNA, 28 bp, Homo sapiens
  source 1..28: mol_type = genomic DNA
cagaagattccaggttcgactcctggct

SEQ ID NO: 8527 - DNA, 31 bp, Homo sapiens
  source 1..31: mol_type = genomic DNA
cagaagattccaggttcgactcctggctggc

SEQ ID NO: 8528 - DNA, 32 bp, Homo sapiens
  source 1..32: mol_type = genomic DNA
cagaagattccaggttcgactcctggctggct

SEQ ID NO: 8529 - DNA, 33 bp, Homo sapiens
  source 1..33: mol_type = genomic DNA
cagaagattccaggttcgactcctggctggctc

SEQ ID NO: 8530 - DNA, 34 bp, Homo sapiens
  source 1..34: mol_type = genomic DNA
cagaagattccaggttcgactcctggctggctcg

SEQ ID NO: 8531 - DNA, 35 bp, Homo sapiens
  source 1..35: mol_type = genomic DNA
cagaagattccaggttcgactcctggctggctcgc

SEQ ID NO: 8532 - DNA, 36 bp, Homo sapiens
  source 1..36: mol_type = genomic DNA
cagaagattccaggttcgactcctggctggctcgcc

SEQ ID NO: 8533 - DNA, 37 bp, Homo sapiens
  source 1..37: mol_type = genomic DNA
cagaagattccaggttcgactcctggctggctcgcca

SEQ ID NO: 8534 - DNA, 16 bp, Homo sapiens
  source 1..16: mol_type = genomic DNA
cagaagattctaggtt

SEQ ID NO: 8535 - DNA, 17 bp, Homo sapiens
  source 1..17: mol_type = genomic DNA
cagaagattctaggttc

SEQ ID NO: 8536 - DNA, 18 bp, Homo sapiens
  source 1..18: mol_type = genomic DNA
cagaagattctaggttcg

SEQ ID NO: 8537 - DNA, 21 bp, Homo sapiens
  source 1..21: mol_type = genomic DNA
cagaagattctaggttcgact

SEQ ID NO: 8538 - DNA, 27 bp, Homo sapiens
  source 1..27: mol_type = genomic DNA
cagaagattctaggttcgactcctggc

SEQ ID NO: 8539 - DNA, 28 bp, Homo sapiens
  source 1..28: mol_type = genomic DNA
cagaagattctaggttcgactcctggct

SEQ ID NO: 8540 - DNA, 29 bp, Homo sapiens
  source 1..29: mol_type = genomic DNA
cagaagattctaggttcgactcctggctg

SEQ ID NO: 8541 - DNA, 31 bp, Homo sapiens
  source 1..31: mol_type = genomic DNA
cagaagattctaggttcgactcctggctggc

SEQ ID NO: 8542 - DNA, 32 bp, Homo sapiens
  source 1..32: mol_type = genomic DNA
cagaagattctaggttcgactcctggctggct

SEQ ID NO: 8543 - DNA, 33 bp, Homo sapiens
  source 1..33: mol_type = genomic DNA
cagaagattctaggttcgactcctggctggctc

SEQ ID NO: 8544 - DNA, 34 bp, Homo sapiens
  source 1..34: mol_type = genomic DNA
cagaagattctaggttcgactcctggctggctcg

SEQ ID NO: 8545 - DNA, 35 bp, Homo sapiens
  source 1..35: mol_type = genomic DNA
cagaagattctaggttcgactcctggctggctcgc

SEQ ID NO: 8546 - DNA, 36 bp, Homo sapiens
  source 1..36: mol_type = genomic DNA
cagaagattctaggttcgactcctggctggctcgcc

SEQ ID NO: 8547 - DNA, 37 bp, Homo sapiens
  source 1..37: mol_type = genomic DNA
cagaagattctaggttcgactcctggctggctcgcca

SEQ ID NO: 8548 - DNA, 16 bp, Homo sapiens
  source 1..16: mol_type = genomic DNA
cagaagattgagggtt

SEQ ID NO: 8549 - DNA, 17 bp, Homo sapiens
  source 1..17: mol_type = genomic DNA
cagaagattgagggttc

SEQ ID NO: 8550 - DNA, 18 bp, Homo sapiens
  source 1..18: mol_type = genomic DNA
cagaagattgagggttcg

SEQ ID NO: 8551 - DNA, 34 bp, Homo sapiens
  source 1..34: mol_type = genomic DNA
cagaagattgagggttcgaatccctccgtggtta

SEQ ID NO: 8552 - DNA, 36 bp, Homo sapiens
  source 1..36: mol_type = genomic DNA
cagaagattgagggttcgaatccctccgtggttacc

SEQ ID NO: 8553 - DNA, 34 bp, Homo sapiens
  source 1..34: mol_type = genomic DNA
cagaagattgagggttcgaatcccttcgtggtta

SEQ ID NO: 8554 - DNA, 36 bp, Homo sapiens
  source 1..36: mol_type = genomic DNA
cagaagattgagggttcgaatcccttcgtggttacc

SEQ ID NO: 8555 - DNA, 34 bp, Homo sapiens
  source 1..34: mol_type = genomic DNA
cagaagattgagggttcgaatcccttcgtggttg

SEQ ID NO: 8556 - DNA, 35 bp, Homo sapiens
  source 1..35: mol_type = genomic DNA
cagaagattgagggttcgaatcccttcgtggttgc

SEQ ID NO: 8557 - DNA, 36 bp, Homo sapiens
  source 1..36: mol_type = genomic DNA
cagaagattgagggttcgaatcccttcgtggttgcc

SEQ ID NO: 8558 - DNA, 37 bp, Homo sapiens
  source 1..37: mol_type = genomic DNA
cagaagattgagggttcgaatcccttcgtggttgcca

SEQ ID NO: 8559 - DNA, 24 bp, Homo sapiens
  source 1..24: mol_type = genomic DNA
cagaagattgagggttcgagtccc

SEQ ID NO: 8560 - DNA, 27 bp, Homo sapiens
  source 1..27: mol_type = genomic DNA
cagaagattgagggttcgagtcccttc

SEQ ID NO: 8561 - DNA, 28 bp, Homo sapiens
  source 1..28: mol_type = genomic DNA
cagaagattgagggttcgagtcccttcg

SEQ ID NO: 8562 - DNA, 32 bp, Homo sapiens
  source 1..32: mol_type = genomic DNA
cagaagattgagggttcgagtcccttcgtggt

SEQ ID NO: 8563 - DNA, 33 bp, Homo sapiens
  source 1..33: mol_type = genomic DNA
cagaagattgagggttcgagtcccttcgtggtc

SEQ ID NO: 8564 - DNA, 34 bp, Homo sapiens
  source 1..34: mol_type = genomic DNA
cagaagattgagggttcgagtcccttcgtggtcg

SEQ ID NO: 8565 - DNA, 35 bp, Homo sapiens
  source 1..35: mol_type = genomic DNA
cagaagattgagggttcgagtcccttcgtggtcgc

SEQ ID NO: 8566 - DNA, 36 bp, Homo sapiens
  source 1..36: mol_type = genomic DNA
cagaagattgagggttcgagtcccttcgtggtcgcc

SEQ ID NO: 8567 - DNA, 37 bp, Homo sapiens
  source 1..37: mol_type = genomic DNA
cagaagattgagggttcgagtcccttcgtggtcgcca

SEQ ID NO: 8568 - DNA, 16 bp, Homo sapiens
  source 1..16: mol_type = genomic DNA
cagaagattgcaggtt

SEQ ID NO: 8569 - DNA, 17 bp, Homo sapiens
  source 1..17: mol_type = genomic DNA
cagaagattgcaggttc

SEQ ID NO: 8570 - DNA, 18 bp, Homo sapiens
  source 1..18: mol_type = genomic DNA
cagaagattgcaggttcg

SEQ ID NO: 8571 - DNA, 22 bp, Homo sapiens
  source 1..22: mol_type = genomic DNA
cagaagattgcaggttcgagtc

SEQ ID NO: 8572 - DNA, 24 bp, Homo sapiens
  source 1..24: mol_type = genomic DNA
cagaagattgcaggttcgagtcct

SEQ ID NO: 8573 - DNA, 33 bp, Homo sapiens
  source 1..33: mol_type = genomic DNA
cagaagattgcaggttcgagtcctgccgcggtc

SEQ ID NO: 8574 - DNA, 34 bp, Homo sapiens
  source 1..34: mol_type = genomic DNA
cagaagattgcaggttcgagtcctgccgcggtcg

SEQ ID NO: 8575 - DNA, 35 bp, Homo sapiens
  source 1..35: mol_type = genomic DNA
cagaagattgcaggttcgagtcctgccgcggtcgc

SEQ ID NO: 8576 - DNA, 36 bp, Homo sapiens
  source 1..36: mol_type = genomic DNA
cagaagattgcaggttcgagtcctgccgcggtcgcc

SEQ ID NO: 8577 - DNA, 37 bp, Homo sapiens
  source 1..37: mol_type = genomic DNA
cagaagattgcaggttcgagtcctgccgcggtcgcca

SEQ ID NO: 8578 - DNA, 17 bp, Homo sapiens
  source 1..17: mol_type = genomic DNA
cagaaggctgcgtgttc

SEQ ID NO: 8579 - DNA, 18 bp, Homo sapiens
  source 1..18: mol_type = genomic DNA
cagaaggctgcgtgttcg

SEQ ID NO: 8580 - DNA, 32 bp, Homo sapiens
  source 1..32: mol_type = genomic DNA
cagaaggctgcgtgttcgaatcacgtcggggt

SEQ ID NO: 8581 - DNA, 33 bp, Homo sapiens
  source 1..33: mol_type = genomic DNA
cagaaggctgcgtgttcgaatcacgtcggggtc

SEQ ID NO: 8582 - DNA, 35 bp, Homo sapiens
  source 1..35: mol_type = genomic DNA
cagaaggctgcgtgttcgaatcacgtcggggtcac

SEQ ID NO: 8583 - DNA, 36 bp, Homo sapiens
  source 1..36: mol_type = genomic DNA
cagaaggctgcgtgttcgaatcacgtcggggtcacc

SEQ ID NO: 8584 - DNA, 37 bp, Homo sapiens
  source 1..37: mol_type = genomic DNA
cagaaggctgcgtgttcgaatcacgtcggggtcacca

SEQ ID NO: 8585 - DNA, 17 bp, Homo sapiens
  source 1..17: mol_type = genomic DNA
cagaaggtcctgggttc

SEQ ID NO: 8586 - DNA, 24 bp, Homo sapiens
  source 1..24: mol_type = genomic DNA
cagaaggtcctgggttcgagcccc

SEQ ID NO: 8587 - DNA, 32 bp, Homo sapiens
  source 1..32: mol_type = genomic DNA
cagaaggtcctgggttcgagccccagtggaac

SEQ ID NO: 8588 - DNA, 33 bp, Homo sapiens
  source 1..33: mol_type = genomic DNA
cagaaggtcctgggttcgagccccagtggaacc

SEQ ID NO: 8589 - DNA, 34 bp, Homo sapiens
  source 1..34: mol_type = genomic DNA
cagaaggtcctgggttcgagccccagtggaacca

SEQ ID NO: 8590 - DNA, 35 bp, Homo sapiens
  source 1..35: mol_type = genomic DNA
cagaaggtcctgggttcgagccccagtggaaccac

SEQ ID NO: 8591 - DNA, 36 bp, Homo sapiens
  source 1..36: mol_type = genomic DNA
cagaaggtcctgggttcgagccccagtggaaccacc

SEQ ID NO: 8592 - DNA, 37 bp, Homo sapiens
  source 1..37: mol_type = genomic DNA
cagaaggtcctgggttcgagccccagtggaaccacca

SEQ ID NO: 8593 - DNA, 17 bp, Homo sapiens
  source 1..17: mol_type = genomic DNA
cagaaggttgcgtgttc

SEQ ID NO: 8594 - DNA, 34 bp, Homo sapiens
  source 1..34: mol_type = genomic DNA
cagaaggttgcgtgttcaaatcacgtcggggtca

SEQ ID NO: 8595 - DNA, 35 bp, Homo sapiens
  source 1..35: mol_type = genomic DNA
cagaaggttgcgtgttcaaatcacgtcggggtcac

SEQ ID NO: 8596 - DNA, 36 bp, Homo sapiens
  source 1..36: mol_type = genomic DNA
cagaaggttgcgtgttcaaatcacgtcggggtcacc

SEQ ID NO: 8597 - DNA, 37 bp, Homo sapiens
  source 1..37: mol_type = genomic DNA
cagaaggttgcgtgttcaaatcacgtcggggtcacca

SEQ ID NO: 8598 - DNA, 31 bp, Homo sapiens
  source 1..31: mol_type = genomic DNA
cagaaggttgcgtgttcaagtcacgtcgggg

SEQ ID NO: 8599 - DNA, 33 bp, Homo sapiens
  source 1..33: mol_type = genomic DNA
cagaaggttgcgtgttcaagtcacgtcggggtc

SEQ ID NO: 8600 - DNA, 35 bp, Homo sapiens
  source 1..35: mol_type = genomic DNA
cagaaggttgcgtgttcaagtcacgtcggggtcac

SEQ ID NO: 8601 - DNA, 36 bp, Homo sapiens
  source 1..36: mol_type = genomic DNA
cagaaggttgcgtgttcaagtcacgtcggggtcacc

SEQ ID NO: 8602 - DNA, 37 bp, Homo sapiens
  source 1..37: mol_type = genomic DNA
cagaaggttgcgtgttcaagtcacgtcggggtcacca

SEQ ID NO: 8603 - DNA, 16 bp, Homo sapiens
  source 1..16: mol_type = genomic DNA
cagaatggccgagtgg

SEQ ID NO: 8604 - DNA, 21 bp, Homo sapiens
  source 1..21: mol_type = genomic DNA
cagaatggccgagtggttaag

SEQ ID NO: 8605 - DNA, 16 bp, Homo sapiens
  source 1..16: mol_type = genomic DNA
cagaccaagagccttc

SEQ ID NO: 8606 - DNA, 17 bp, Homo sapiens
  source 1..17: mol_type = genomic DNA
cagaccaagagccttca

SEQ ID NO: 8607 - DNA, 18 bp, Homo sapiens
  source 1..18: mol_type = genomic DNA
cagaccaagagccttcaa

SEQ ID NO: 8608 - DNA, 19 bp, Homo sapiens
  source 1..19: mol_type = genomic DNA
cagaccaagagccttcaaa

SEQ ID NO: 8609 - DNA, 20 bp, Homo sapiens
  source 1..20: mol_type = genomic DNA
cagaccaagagccttcaaag

SEQ ID NO: 8610 - DNA, 22 bp, Homo sapiens
  source 1..22: mol_type = genomic DNA
cagaccaagagccttcaaagcc

SEQ ID NO: 8611 - DNA, 23 bp, Homo sapiens
  source 1..23: mol_type = genomic DNA
cagaccaagagccttcaaagccc

SEQ ID NO: 8612 - DNA, 25 bp, Homo sapiens
  source 1..25: mol_type = genomic DNA
cagaccaagagccttcaaagccctc

SEQ ID NO: 8613 - DNA, 26 bp, Homo sapiens
  source 1..26: mol_type = genomic DNA
cagaccaagagccttcaaagccctca

SEQ ID NO: 8614 - DNA, 28 bp, Homo sapiens
  source 1..28: mol_type = genomic DNA
cagaccaagagccttcaaagccctcagt

SEQ ID NO: 8615 - DNA, 29 bp, Homo sapiens
  source 1..29: mol_type = genomic DNA
cagaccaagagccttcaaagccctcagta

SEQ ID NO: 8616 - DNA, 31 bp, Homo sapiens
  source 1..31: mol_type = genomic DNA
cagaccaagagccttcaaagccctcagtaag

SEQ ID NO: 8617 - DNA, 32 bp, Homo sapiens
  source 1..32: mol_type = genomic DNA
cagaccaagagccttcaaagccctcagtaagt

SEQ ID NO: 8618 - DNA, 35 bp, Homo sapiens
  source 1..35: mol_type = genomic DNA
cagaccaagagccttcaaagccctcagtaagttgc

SEQ ID NO: 8619 - DNA, 40 bp, Homo sapiens
  source 1..40: mol_type = genomic DNA
cagaccaagagccttcaaagccctcagtaagttgcaatac

SEQ ID NO: 8620 - DNA, 36 bp, Homo sapiens
  source 1..36: mol_type = genomic DNA
cagactcaagttctggtctccaatggaggcgtgggt

SEQ ID NO: 8621 - DNA, 24 bp, Homo sapiens
  source 1..24: mol_type = genomic DNA
cagactcaagttctggtctccgga

SEQ ID NO: 8622 - DNA, 29 bp, Homo sapiens
  source 1..29: mol_type = genomic DNA
cagacttttaatctgagggtccagggttc

SEQ ID NO: 8623 - DNA, 16 bp, Homo sapiens
  source 1..16: mol_type = genomic DNA
cagagaatagtttaaa

SEQ ID NO: 8624 - DNA, 17 bp, Homo sapiens
  source 1..17: mol_type = genomic DNA
cagagaatagtttaaat

SEQ ID NO: 8625 - DNA, 18 bp, Homo sapiens
  source 1..18: mol_type = genomic DNA
cagagaatagtttaaatt

SEQ ID NO: 8626 - DNA, 19 bp, Homo sapiens
  source 1..19: mol_type = genomic DNA
cagagaatagtttaaatta

SEQ ID NO: 8627 - DNA, 20 bp, Homo sapiens
  source 1..20: mol_type = genomic DNA
cagagaatagtttaaattag

SEQ ID NO: 8628 - DNA, 21 bp, Homo sapiens
  source 1..21: mol_type = genomic DNA
cagagaatagtttaaattaga

SEQ ID NO: 8629 - DNA, 22 bp, Homo sapiens
  source 1..22: mol_type = genomic DNA
cagagaatagtttaaattagaa

SEQ ID NO: 8630 - DNA, 23 bp, Homo sapiens
  source 1..23: mol_type = genomic DNA
cagagaatagtttaaattagaat

SEQ ID NO: 8631 - DNA, 24 bp, Homo sapiens
  source 1..24: mol_type = genomic DNA
cagagaatagtttaaattagaatc

SEQ ID NO: 8632 - DNA, 25 bp, Homo sapiens
  source 1..25: mol_type = genomic DNA
cagagaatagtttaaattagaatct

SEQ ID NO: 8633 - DNA, 26 bp, Homo sapiens
  source 1..26: mol_type = genomic DNA
cagagaatagtttaaattagaatctt

SEQ ID NO: 8634 - DNA, 27 bp, Homo sapiens
  source 1..27: mol_type = genomic DNA
cagagaatagtttaaattagaatctta

SEQ ID NO: 8635 - DNA, 28 bp, Homo sapiens
  source 1..28: mol_type = genomic DNA
cagagaatagtttaaattagaatcttag

SEQ ID NO: 8636 - DNA, 29 bp, Homo sapiens
  source 1..29: mol_type = genomic DNA
cagagaatagtttaaattagaatcttagc

SEQ ID NO: 8637 - DNA, 30 bp, Homo sapiens
  source 1..30: mol_type = genomic DNA
cagagaatagtttaaattagaatcttagct

SEQ ID NO: 8638 - DNA, 31 bp, Homo sapiens
  source 1..31: mol_type = genomic DNA
cagagaatagtttaaattagaatcttagctt

SEQ ID NO: 8639 - DNA, 32 bp, Homo sapiens
  source 1..32: mol_type = genomic DNA
cagagaatagtttaaattagaatcttagcttt

SEQ ID NO: 8640 - DNA, 33 bp, Homo sapiens
  source 1..33: mol_type = genomic DNA
cagagaatagtttaaattagaatcttagctttg

SEQ ID NO: 8641 - DNA, 34 bp, Homo sapiens
  source 1..34: mol_type = genomic DNA
cagagaatagtttaaattagaatcttagctttgg

SEQ ID NO: 8642 - DNA, 35 bp, Homo sapiens
  source 1..35: mol_type = genomic DNA
cagagaatagtttaaattagaatcttagctttggg

SEQ ID NO: 8643 - DNA, 37 bp, Homo sapiens
  source 1..37: mol_type = genomic DNA
cagagaatagtttaaattagaatcttagctttgggtg

SEQ ID NO: 8644 - DNA, 38 bp, Homo sapiens
  source 1..38: mol_type = genomic DNA
cagagaatagtttaaattagaatcttagctttgggtgc

SEQ ID NO: 8645 - DNA, 39 bp, Homo sapiens
  source 1..39: mol_type = genomic DNA
cagagaatagtttaaattagaatcttagctttgggtgct

SEQ ID NO: 8646 - DNA, 40 bp, Homo sapiens
  source 1..40: mol_type = genomic DNA
cagagaatagtttaaattagaatcttagctttgggtgcta

SEQ ID NO: 8647 - DNA, 41 bp, Homo sapiens
  source 1..41: mol_type = genomic DNA
cagagaatagtttaaattagaatcttagctttgggtgctaa

SEQ ID NO: 8648 - DNA, 42 bp, Homo sapiens
  source 1..42: mol_type = genomic DNA
cagagaatagtttaaattagaatcttagctttgggtgctaat

SEQ ID NO: 8649 - DNA, 43 bp, Homo sapiens
  source 1..43: mol_type = genomic DNA
cagagaatagtttaaattagaatcttagctttgggtgctaatg

SEQ ID NO: 8650 - DNA, 44 bp, Homo sapiens
  source 1..44: mol_type = genomic DNA
cagagaatagtttaaattagaatcttagctttgggtgctaatgg

SEQ ID NO: 8651 - DNA, 45 bp, Homo sapiens
  source 1..45: mol_type = genomic DNA
cagagaatagtttaaattagaatcttagctttgggtgctaatggt

SEQ ID NO: 8652 - DNA, 46 bp, Homo sapiens
  source 1..46: mol_type = genomic DNA
cagagaatagtttaaattagaatcttagctttgggtgctaatggtg

SEQ ID NO: 8653 - DNA, 47 bp, Homo sapiens
  source 1..47: mol_type = genomic DNA
cagagaatagtttaaattagaatcttagctttgggtgctaatggtgg

SEQ ID NO: 8654 - DNA, 48 bp, Homo sapiens
  source 1..48: mol_type = genomic DNA
cagagaatagtttaaattagaatcttagctttgggtgctaatggtgga

SEQ ID NO: 8655 - DNA, 16 bp, Homo sapiens
  source 1..16: mol_type = genomic DNA
cagagcatttgactgc

SEQ ID NO: 8656 - DNA, 16 bp, Homo sapiens
  source 1..16: mol_type = genomic DNA
cagagcccggtaatcg

SEQ ID NO: 8657 - DNA, 17 bp, Homo sapiens
  source 1..17: mol_type = genomic DNA
cagagcccggtaatcgc

SEQ ID NO: 8658 - DNA, 20 bp, Homo sapiens
  source 1..20: mol_type = genomic DNA
cagagcccggtaatcgcata

SEQ ID NO: 8659 - DNA, 21 bp, Homo sapiens
  source 1..21: mol_type = genomic DNA
cagagcccggtaatcgcataa

SEQ ID NO: 8660 - DNA, 22 bp, Homo sapiens
  source 1..22: mol_type = genomic DNA
cagagcccggtaatcgcataaa

SEQ ID NO: 8661 - DNA, 23 bp, Homo sapiens
  source 1..23: mol_type = genomic DNA
cagagcccggtaatcgcataaaa

SEQ ID NO: 8662 - DNA, 24 bp, Homo sapiens
  source 1..24: mol_type = genomic DNA
cagagcccggtaatcgcataaaac

SEQ ID NO: 8663 - DNA, 25 bp, Homo sapiens
  source 1..25: mol_type = genomic DNA
cagagcccggtaatcgcataaaact

SEQ ID NO: 8664 - DNA, 27 bp, Homo sapiens
  source 1..27: mol_type = genomic DNA
cagagcccggtaatcgcataaaactta

SEQ ID NO: 8665 - DNA, 28 bp, Homo sapiens
  source 1..28: mol_type = genomic DNA
cagagcccggtaatcgcataaaacttaa

SEQ ID NO: 8666 - DNA, 29 bp, Homo sapiens
  source 1..29: mol_type = genomic DNA
cagagcccggtaatcgcataaaacttaaa

SEQ ID NO: 8667 - DNA, 30 bp, Homo sapiens
  source 1..30: mol_type = genomic DNA
cagagcccggtaatcgcataaaacttaaaa

SEQ ID NO: 8668 - DNA, 31 bp, Homo sapiens
  source 1..31: mol_type = genomic DNA
cagagcccggtaatcgcataaaacttaaaac

SEQ ID NO: 8669 - DNA, 32 bp, Homo sapiens
  source 1..32: mol_type = genomic DNA
cagagcccggtaatcgcataaaacttaaaact

SEQ ID NO: 8670 - DNA, 33 bp, Homo sapiens
  source 1..33: mol_type = genomic DNA
cagagcccggtaatcgcataaaacttaaaactt

SEQ ID NO: 8671 - DNA, 34 bp, Homo sapiens
  source 1..34: mol_type = genomic DNA
cagagcccggtaatcgcataaaacttaaaacttt

SEQ ID NO: 8672 - DNA, 36 bp, Homo sapiens
  source 1..36: mol_type = genomic DNA
cagagcccggtaatcgcataaaacttaaaactttac

SEQ ID NO: 8673 - DNA, 37 bp, Homo sapiens
  source 1..37: mol_type = genomic DNA
cagagcccggtaatcgcataaaacttaaaactttaca

SEQ ID NO: 8674 - DNA, 16 bp, Homo sapiens
  source 1..16: mol_type = genomic DNA
cagaggcttacgaccc

SEQ ID NO: 8675 - DNA, 17 bp, Homo sapiens
  source 1..17: mol_type = genomic DNA
cagaggcttacgacccc

SEQ ID NO: 8676 - DNA, 18 bp, Homo sapiens
  source 1..18: mol_type = genomic DNA
cagaggcttacgacccct

SEQ ID NO: 8677 - DNA, 20 bp, Homo sapiens
  source 1..20: mol_type = genomic DNA
cagaggcttacgacccctta

SEQ ID NO: 8678 - DNA, 25 bp, Homo sapiens
  source 1..25: mol_type = genomic DNA
cagaggcttacgaccccttatttac

SEQ ID NO: 8679 - DNA, 26 bp, Homo sapiens
  source 1..26: mol_type = genomic DNA
cagaggcttacgaccccttatttacc

SEQ ID NO: 8680 - DNA, 27 bp, Homo sapiens
  source 1..27: mol_type = genomic DNA
cagaggcttacgaccccttatttaccc

SEQ ID NO: 8681 - DNA, 28 bp, Homo sapiens
  source 1..28: mol_type = genomic DNA
cagaggcttacgaccccttatttacccc

SEQ ID NO: 8682 - DNA, 29 bp, Homo sapiens
  source 1..29: mol_type = genomic DNA
cagaggcttacgaccccttatttacccca

SEQ ID NO: 8683 - DNA, 16 bp, Homo sapiens
  source 1..16: mol_type = genomic DNA
cagaggtcaatggatc

SEQ ID NO: 8684 - DNA, 16 bp, Homo sapiens
  source 1..16: mol_type = genomic DNA
cagaggtcgatggatc

SEQ ID NO: 8685 - DNA, 17 bp, Homo sapiens
  source 1..17: mol_type = genomic DNA
cagaggtcgatggatcg

SEQ ID NO: 8686 - DNA, 18 bp, Homo sapiens
  source 1..18: mol_type = genomic DNA
cagaggtcgatggatcga

SEQ ID NO: 8687 - DNA, 20 bp, Homo sapiens
  source 1..20: mol_type = genomic DNA
cagaggtcgatggatcgaaa

SEQ ID NO: 8688 - DNA, 21 bp, Homo sapiens
  source 1..21: mol_type = genomic DNA
cagaggtcgatggatcgaaac

SEQ ID NO: 8689 - DNA, 22 bp, Homo sapiens
  source 1..22: mol_type = genomic DNA
cagaggtcgatggatcgaaacc

SEQ ID NO: 8690 - DNA, 23 bp, Homo sapiens
  source 1..23: mol_type = genomic DNA
cagaggtcgatggatcgaaacca

SEQ ID NO: 8691 - DNA, 24 bp, Homo sapiens
  source 1..24: mol_type = genomic DNA
cagaggtcgatggatcgaaaccat

SEQ ID NO: 8692 - DNA, 27 bp, Homo sapiens
  source 1..27: mol_type = genomic DNA
cagaggtcgatggatcgaaaccatcct

SEQ ID NO: 8693 - DNA, 28 bp, Homo sapiens
  source 1..28: mol_type = genomic DNA
cagaggtcgatggatcgaaaccatcctc

SEQ ID NO: 8694 - DNA, 17 bp, Homo sapiens
  source 1..17: mol_type = genomic DNA
cagaggttcaattcctc

SEQ ID NO: 8695 - DNA, 16 bp, Homo sapiens
  source 1..16: mol_type = genomic DNA
cagaggttccgggttc

SEQ ID NO: 8696 - DNA, 17 bp, Homo sapiens
  source 1..17: mol_type = genomic DNA
cagaggttccgggttcg

SEQ ID NO: 8697 - DNA, 26 bp, Homo sapiens
  source 1..26: mol_type = genomic DNA
cagaggttccgggttcgagtcccggc

SEQ ID NO: 8698 - DNA, 32 bp, Homo sapiens
  source 1..32: mol_type = genomic DNA
cagaggttccgggttcgagtcccggcagagat

SEQ ID NO: 8699 - DNA, 33 bp, Homo sapiens
  source 1..33: mol_type = genomic DNA
cagaggttccgggttcgagtcccggcagagatg

SEQ ID NO: 8700 - DNA, 34 bp, Homo sapiens
  source 1..34: mol_type = genomic DNA
cagaggttccgggttcgagtcccggcagagatgc

SEQ ID NO: 8701 - DNA, 35 bp, Homo sapiens
  source 1..35: mol_type = genomic DNA
cagaggttccgggttcgagtcccggcagagatgcc

SEQ ID NO: 8702 - DNA, 36 bp, Homo sapiens
  source 1..36: mol_type = genomic DNA
cagaggttccgggttcgagtcccggcagagatgcca

SEQ ID NO: 8703 - DNA, 17 bp, Homo sapiens
  source 1..17: mol_type = genomic DNA
cagagtggcgcagcgga

SEQ ID NO: 8704 - DNA, 18 bp, Homo sapiens
  source 1..18: mol_type = genomic DNA
cagagtggcgcagcggaa

SEQ ID NO: 8705 - DNA, 19 bp, Homo sapiens
  source 1..19: mol_type = genomic DNA
cagagtggcgcagcggaag

SEQ ID NO: 8706 - DNA, 20 bp, Homo sapiens
  source 1..20: mol_type = genomic DNA
cagagtggcgcagcggaagc

SEQ ID NO: 8707 - DNA, 21 bp, Homo sapiens
  source 1..21: mol_type = genomic DNA
cagagtggcgcagcggaagcg

SEQ ID NO: 8708 - DNA, 25 bp, Homo sapiens
  source 1..25: mol_type = genomic DNA
cagagtggcgcagcggaagcgtgct

SEQ ID NO: 8709 - DNA, 26 bp, Homo sapiens
  source 1..26: mol_type = genomic DNA
cagagtggcgcagcggaagcgtgctg

SEQ ID NO: 8710 - DNA, 27 bp, Homo sapiens
  source 1..27: mol_type = genomic DNA
cagagtggcgcagcggaagcgtgctgg

SEQ ID NO: 8711 - DNA, 28 bp, Homo sapiens
  source 1..28: mol_type = genomic DNA
cagagtggcgcagcggaagcgtgctggg

SEQ ID NO: 8712 - DNA, 29 bp, Homo sapiens
  source 1..29: mol_type = genomic DNA
cagagtggcgcagcggaagcgtgctgggc

SEQ ID NO: 8713 - DNA, 30 bp, Homo sapiens
  source 1..30: mol_type = genomic DNA
cagagtggcgcagcggaagcgtgctgggcc

SEQ ID NO: 8714 - DNA, 31 bp, Homo sapiens
  source 1..31: mol_type = genomic DNA
cagagtggcgcagcggaagcgtgctgggccc

SEQ ID NO: 8715 - DNA, 32 bp, Homo sapiens
  source 1..32: mol_type = genomic DNA
cagagtggcgcagcggaagcgtgctgggccca

SEQ ID NO: 8716 - DNA, 33 bp, Homo sapiens
  source 1..33: mol_type = genomic DNA
cagagtggcgcagcggaagcgtgctgggcccat

SEQ ID NO: 8717 - DNA, 34 bp, Homo sapiens
  source 1..34: mol_type = genomic DNA
cagagtggcgcagcggaagcgtgctgggcccata

SEQ ID NO: 8718 - DNA, 38 bp, Homo sapiens
  source 1..38: mol_type = genomic DNA
cagagtggcgcagcggaagcgtgctgggcccataaccc

SEQ ID NO: 8719 - DNA, 40 bp, Homo sapiens
  source 1..40: mol_type = genomic DNA
cagagtggcgcagcggaagcgtgctgggcccataacccag

SEQ ID NO: 8720 - DNA, 47 bp, Homo sapiens
  source 1..47: mol_type = genomic DNA
cagagtggcgcagcggaagcgtgctgggcccataacccagaggtcga

SEQ ID NO: 8721 - DNA, 16 bp, Homo sapiens
  source 1..16: mol_type = genomic DNA
cagagtggggttttgc

SEQ ID NO: 8722 - DNA, 17 bp, Homo sapiens
  source 1..17: mol_type = genomic DNA
cagagtggggttttgca

SEQ ID NO: 8723 - DNA, 20 bp, Homo sapiens
  source 1..20: mol_type = genomic DNA
cagagtggggttttgcagtc

SEQ ID NO: 8724 - DNA, 21 bp, Homo sapiens
  source 1..21: mol_type = genomic DNA
cagagtggggttttgcagtcc

SEQ ID NO: 8725 - DNA, 22 bp, Homo sapiens
  source 1..22: mol_type = genomic DNA
cagagtggggttttgcagtcct

SEQ ID NO: 8726 - DNA, 23 bp, Homo sapiens
  source 1..23: mol_type = genomic DNA
cagagtggggttttgcagtcctt

SEQ ID NO: 8727 - DNA, 24 bp, Homo sapiens
  source 1..24: mol_type = genomic DNA
cagagtggggttttgcagtcctta

SEQ ID NO: 8728 - DNA, 25 bp, Homo sapiens
  source 1..25: mol_type = genomic DNA
cagagtggggttttgcagtccttac

SEQ ID NO: 8729 - DNA, 26 bp, Homo sapiens
  source 1..26: mol_type = genomic DNA
cagagtggggttttgcagtccttacc

SEQ ID NO: 8730 - DNA, 27 bp, Homo sapiens
  source 1..27: mol_type = genomic DNA
cagagtggggttttgcagtccttacca

SEQ ID NO: 8731 - DNA, 29 bp, Homo sapiens
  source 1..29: mol_type = genomic DNA
cagagtggtgcagcggaagcgtgctgggc

SEQ ID NO: 8732 - DNA, 16 bp, Homo sapiens
  source 1..16: mol_type = genomic DNA
cagagtgtagcttaac

SEQ ID NO: 8733 - DNA, 17 bp, Homo sapiens
  source 1..17: mol_type = genomic DNA
cagagtgtagcttaaca

SEQ ID NO: 8734 - DNA, 18 bp, Homo sapiens
  source 1..18: mol_type = genomic DNA
cagagtgtagcttaacac

SEQ ID NO: 8735 - DNA, 19 bp, Homo sapiens
  source 1..19: mol_type = genomic DNA
cagagtgtagcttaacaca

SEQ ID NO: 8736 - DNA, 20 bp, Homo sapiens
  source 1..20: mol_type = genomic DNA
cagagtgtagcttaacacaa

SEQ ID NO: 8737 - DNA, 21 bp, Homo sapiens
  source 1..21: mol_type = genomic DNA
cagagtgtagcttaacacaaa

SEQ ID NO: 8738 - DNA, 22 bp, Homo sapiens
  source 1..22: mol_type = genomic DNA
cagagtgtagcttaacacaaag

SEQ ID NO: 8739 - DNA, 23 bp, Homo sapiens
  source 1..23: mol_type = genomic DNA
cagagtgtagcttaacacaaagc

SEQ ID NO: 8740 - DNA, 24 bp, Homo sapiens
  source 1..24: mol_type = genomic DNA
cagagtgtagcttaacacaaagca

SEQ ID NO: 8741 - DNA, 25 bp, Homo sapiens
  source 1..25: mol_type = genomic DNA
cagagtgtagcttaacacaaagcac

SEQ ID NO: 8742 - DNA, 26 bp, Homo sapiens
  source 1..26: mol_type = genomic DNA
cagagtgtagcttaacacaaagcacc

SEQ ID NO: 8743 - DNA, 27 bp, Homo sapiens
  source 1..27: mol_type = genomic DNA
cagagtgtagcttaacacaaagcaccc

SEQ ID NO: 8744 - DNA, 28 bp, Homo sapiens
  source 1..28: mol_type = genomic DNA
cagagtgtagcttaacacaaagcaccca

SEQ ID NO: 8745 - DNA, 29 bp, Homo sapiens
  source 1..29: mol_type = genomic DNA
cagagtgtagcttaacacaaagcacccaa

SEQ ID NO: 8746 - DNA, 30 bp, Homo sapiens
  source 1..30: mol_type = genomic DNA
cagagtgtagcttaacacaaagcacccaac

SEQ ID NO: 8747 - DNA, 31 bp, Homo sapiens
  source 1..31: mol_type = genomic DNA
cagagtgtagcttaacacaaagcacccaact

SEQ ID NO: 8748 - DNA, 32 bp, Homo sapiens
  source 1..32: mol_type = genomic DNA
cagagtgtagcttaacacaaagcacccaactt

SEQ ID NO: 8749 - DNA, 33 bp, Homo sapiens
  source 1..33: mol_type = genomic DNA
cagagtgtagcttaacacaaagcacccaactta

SEQ ID NO: 8750 - DNA, 34 bp, Homo sapiens
  source 1..34: mol_type = genomic DNA
cagagtgtagcttaacacaaagcacccaacttac

SEQ ID NO: 8751 - DNA, 35 bp, Homo sapiens
  source 1..35: mol_type = genomic DNA
cagagtgtagcttaacacaaagcacccaacttaca

SEQ ID NO: 8752 - DNA, 36 bp, Homo sapiens
  source 1..36: mol_type = genomic DNA
cagagtgtagcttaacacaaagcacccaacttacac

SEQ ID NO: 8753 - DNA, 37 bp, Homo sapiens
  source 1..37: mol_type = genomic DNA
cagagtgtagcttaacacaaagcacccaacttacact

SEQ ID NO: 8754 - DNA, 38 bp, Homo sapiens
  source 1..38: mol_type = genomic DNA
cagagtgtagcttaacacaaagcacccaacttacactt

SEQ ID NO: 8755 - DNA, 39 bp, Homo sapiens
  source 1..39: mol_type = genomic DNA
cagagtgtagcttaacacaaagcacccaacttacactta

SEQ ID NO: 8756 - DNA, 40 bp, Homo sapiens
  source 1..40: mol_type = genomic DNA
cagagtgtagcttaacacaaagcacccaacttacacttag

SEQ ID NO: 8757 - DNA, 41 bp, Homo sapiens
  source 1..41: mol_type = genomic DNA
cagagtgtagcttaacacaaagcacccaacttacacttagg

SEQ ID NO: 8758 - DNA, 42 bp, Homo sapiens
  source 1..42: mol_type = genomic DNA
cagagtgtagcttaacacaaagcacccaacttacacttagga

SEQ ID NO: 8759 - DNA, 43 bp, Homo sapiens
  source 1..43: mol_type = genomic DNA
cagagtgtagcttaacacaaagcacccaacttacacttaggag

SEQ ID NO: 8760 - DNA, 44 bp, Homo sapiens
  source 1..44: mol_type = genomic DNA
cagagtgtagcttaacacaaagcacccaacttacacttaggaga

SEQ ID NO: 8761 - DNA, 45 bp, Homo sapiens
  source 1..45: mol_type = genomic DNA
cagagtgtagcttaacacaaagcacccaacttacacttaggagat

SEQ ID NO: 8762 - DNA, 46 bp, Homo sapiens
  source 1..46: mol_type = genomic DNA
cagagtgtagcttaacacaaagcacccaacttacacttaggagatt

SEQ ID NO: 8763 - DNA, 47 bp, Homo sapiens
  source 1..47: mol_type = genomic DNA
cagagtgtagcttaacacaaagcacccaacttacacttaggagattt

SEQ ID NO: 8764 - DNA, 48 bp, Homo sapiens
  source 1..48: mol_type = genomic DNA
cagagtgtagcttaacacaaagcacccaacttacacttaggagatttc

SEQ ID NO: 8765 - DNA, 18 bp, Homo sapiens
  source 1..18: mol_type = genomic DNA
cagatcaagaggtccccg

SEQ ID NO: 8766 - DNA, 17 bp, Homo sapiens
  source 1..17: mol_type = genomic DNA
cagatcagaaggctgcg

SEQ ID NO: 8767 - DNA, 41 bp, Homo sapiens
  source 1..41: mol_type = genomic DNA
cagatcagaaggctgcgtgttcgaatcacgtcggggtcacc

SEQ ID NO: 8768 - DNA, 18 bp, Homo sapiens
  source 1..18: mol_type = genomic DNA
cagatcagaaggttgcgt

SEQ ID NO: 8769 - DNA, 16 bp, Homo sapiens
  source 1..16: mol_type = genomic DNA
cagattgtgaatctga

SEQ ID NO: 8770 - DNA, 17 bp, Homo sapiens
  source 1..17: mol_type = genomic DNA
cagattgtgaatctgac

SEQ ID NO: 8771 - DNA, 18 bp, Homo sapiens
  source 1..18: mol_type = genomic DNA
cagattgtgaatctgaca

SEQ ID NO: 8772 - DNA, 19 bp, Homo sapiens
  source 1..19: mol_type = genomic DNA
cagattgtgaatctgacaa

SEQ ID NO: 8773 - DNA, 20 bp, Homo sapiens
  source 1..20: mol_type = genomic DNA
cagattgtgaatctgacaac

SEQ ID NO: 8774 - DNA, 21 bp, Homo sapiens
  source 1..21: mol_type = genomic DNA
cagattgtgaatctgacaaca

SEQ ID NO: 8775 - DNA, 22 bp, Homo sapiens
  source 1..22: mol_type = genomic DNA
cagattgtgaatctgacaacag

SEQ ID NO: 8776 - DNA, 23 bp, Homo sapiens
  source 1..23: mol_type = genomic DNA
cagattgtgaatctgacaacaga

SEQ ID NO: 8777 - DNA, 24 bp, Homo sapiens
  source 1..24: mol_type = genomic DNA
cagattgtgaatctgacaacagag

SEQ ID NO: 8778 - DNA, 25 bp, Homo sapiens
  source 1..25: mol_type = genomic DNA
cagattgtgaatctgacaacagagg

SEQ ID NO: 8779 - DNA, 26 bp, Homo sapiens
  source 1..26: mol_type = genomic DNA
cagattgtgaatctgacaacagaggc

SEQ ID NO: 8780 - DNA, 27 bp, Homo sapiens
  source 1..27: mol_type = genomic DNA
cagattgtgaatctgacaacagaggct

SEQ ID NO: 8781 - DNA, 28 bp, Homo sapiens
  source 1..28: mol_type = genomic DNA
cagattgtgaatctgacaacagaggctt

SEQ ID NO: 8782 - DNA, 29 bp, Homo sapiens
  source 1..29: mol_type = genomic DNA
cagattgtgaatctgacaacagaggctta

SEQ ID NO: 8783 - DNA, 30 bp, Homo sapiens
  source 1..30: mol_type = genomic DNA
cagattgtgaatctgacaacagaggcttac

SEQ ID NO: 8784 - DNA, 31 bp, Homo sapiens
  source 1..31: mol_type = genomic DNA
cagattgtgaatctgacaacagaggcttacg

SEQ ID NO: 8785 - DNA, 32 bp, Homo sapiens
  source 1..32: mol_type = genomic DNA
cagattgtgaatctgacaacagaggcttacga

SEQ ID NO: 8786 - DNA, 33 bp, Homo sapiens
  source 1..33: mol_type = genomic DNA
cagattgtgaatctgacaacagaggcttacgac

SEQ ID NO: 8787 - DNA, 34 bp, Homo sapiens
  source 1..34: mol_type = genomic DNA
cagattgtgaatctgacaacagaggcttacgacc

SEQ ID NO: 8788 - DNA, 35 bp, Homo sapiens
  source 1..35: mol_type = genomic DNA
cagattgtgaatctgacaacagaggcttacgaccc

SEQ ID NO: 8789 - DNA, 36 bp, Homo sapiens
  source 1..36: mol_type = genomic DNA
cagattgtgaatctgacaacagaggcttacgacccc

SEQ ID NO: 8790 - DNA, 37 bp, Homo sapiens
  source 1..37: mol_type = genomic DNA
cagattgtgaatctgacaacagaggcttacgacccct

SEQ ID NO: 8791 - DNA, 38 bp, Homo sapiens
  source 1..38: mol_type = genomic DNA
cagattgtgaatctgacaacagaggcttacgacccctt

SEQ ID NO: 8792 - DNA, 39 bp, Homo sapiens
  source 1..39: mol_type = genomic DNA
cagattgtgaatctgacaacagaggcttacgacccctta

SEQ ID NO: 8793 - DNA, 40 bp, Homo sapiens
  source 1..40: mol_type = genomic DNA
cagattgtgaatctgacaacagaggcttacgaccccttat

SEQ ID NO: 8794 - DNA, 41 bp, Homo sapiens
  source 1..41: mol_type = genomic DNA
cagattgtgaatctgacaacagaggcttacgaccccttatt

SEQ ID NO: 8795 - DNA, 42 bp, Homo sapiens
  source 1..42: mol_type = genomic DNA
cagattgtgaatctgacaacagaggcttacgaccccttattt

SEQ ID NO: 8796 - DNA, 43 bp, Homo sapiens
  source 1..43: mol_type = genomic DNA
cagattgtgaatctgacaacagaggcttacgaccccttattta

SEQ ID NO: 8797 - DNA, 44 bp, Homo sapiens
  source 1..44: mol_type = genomic DNA
cagattgtgaatctgacaacagaggcttacgaccccttatttac

SEQ ID NO: 8798 - DNA, 45 bp, Homo sapiens
  source 1..45: mol_type = genomic DNA
cagattgtgaatctgacaacagaggcttacgaccccttatttacc

SEQ ID NO: 8799 - DNA, 46 bp, Homo sapiens
  source 1..46: mol_type = genomic DNA
cagattgtgaatctgacaacagaggcttacgaccccttatttaccc

SEQ ID NO: 8800 - DNA, 47 bp, Homo sapiens
  source 1..47: mol_type = genomic DNA
cagattgtgaatctgacaacagaggcttacgaccccttatttacccc

SEQ ID NO: 8801 - DNA, 48 bp, Homo sapiens
  source 1..48: mol_type = genomic DNA
cagattgtgaatctgacaacagaggcttacgaccccttatttacccca

SEQ ID NO: 8802 - DNA, 25 bp, Homo sapiens
  source 1..25: mol_type = genomic DNA
cagcaacctcggttcgaatccgagt

SEQ ID NO: 8803 - DNA, 29 bp, Homo sapiens
  source 1..29: mol_type = genomic DNA
cagcaacctcggttcgaatccgagtcacg

SEQ ID NO: 8804 - DNA, 30 bp, Homo sapiens
  source 1..30: mol_type = genomic DNA
cagcaacctcggttcgaatccgagtcacgg

SEQ ID NO: 8805 - DNA, 31 bp, Homo sapiens
  source 1..31: mol_type = genomic DNA
cagcaacctcggttcgaatccgagtcacggc

SEQ ID NO: 8806 - DNA, 32 bp, Homo sapiens
  source 1..32: mol_type = genomic DNA
cagcaacctcggttcgaatccgagtcacggca

SEQ ID NO: 8807 - DNA, 33 bp, Homo sapiens
  source 1..33: mol_type = genomic DNA
cagcaacctcggttcgaatccgagtcacggcac

SEQ ID NO: 8808 - DNA, 34 bp, Homo sapiens
  source 1..34: mol_type = genomic DNA
cagcaacctcggttcgaatccgagtcacggcacc

SEQ ID NO: 8809 - DNA, 35 bp, Homo sapiens
  source 1..35: mol_type = genomic DNA
cagcaacctcggttcgaatccgagtcacggcacca

SEQ ID NO: 8810 - DNA, 30 bp, Homo sapiens
  source 1..30: mol_type = genomic DNA
cagcaatccgagttcgaatctcggtgggac

SEQ ID NO: 8811 - DNA, 31 bp, Homo sapiens
  source 1..31: mol_type = genomic DNA
cagcaatccgagttcgaatctcggtgggacc

SEQ ID NO: 8812 - DNA, 32 bp, Homo sapiens
  source 1..32: mol_type = genomic DNA
cagcaatccgagttcgaatctcggtgggacct

SEQ ID NO: 8813 - DNA, 33 bp, Homo sapiens
  source 1..33: mol_type = genomic DNA
cagcaatccgagttcgaatctcggtgggacctc

SEQ ID NO: 8814 - DNA, 34 bp, Homo sapiens
  source 1..34: mol_type = genomic DNA
cagcaatccgagttcgaatctcggtgggacctcc

SEQ ID NO: 8815 - DNA, 18 bp, Homo sapiens
  source 1..18: mol_type = genomic DNA
cagcactctggactctga

SEQ ID NO: 8816 - DNA, 22 bp, Homo sapiens
  source 1..22: mol_type = genomic DNA
cagcactctggactctgaatcc

SEQ ID NO: 8817 - DNA, 24 bp, Homo sapiens
  source 1..24: mol_type = genomic DNA
cagcactctggactctgaatccag

SEQ ID NO: 8818 - DNA, 25 bp, Homo sapiens
  source 1..25: mol_type = genomic DNA
cagcactctggactctgaatccagc

SEQ ID NO: 8819 - DNA, 33 bp, Homo sapiens
  source 1..33: mol_type = genomic DNA
cagcactctggactctgaatccagcgatccgag

SEQ ID NO: 8820 - DNA, 37 bp, Homo sapiens
  source 1..37: mol_type = genomic DNA
cagcactctggactctgaatccagcgatccgagttca

SEQ ID NO: 8821 - DNA, 32 bp, Homo sapiens
  source 1..32: mol_type = genomic DNA
cagcagagtggcgcagcggaagcgtgctgggc

SEQ ID NO: 8822 - DNA, 35 bp, Homo sapiens
  source 1..35: mol_type = genomic DNA
cagcagagtggcgcagcggaagcgtgctgggccca

SEQ ID NO: 8823 - DNA, 23 bp, Homo sapiens
  source 1..23: mol_type = genomic DNA
cagcctccggagctggggattgt

SEQ ID NO: 8824 - DNA, 27 bp, Homo sapiens
  source 1..27: mol_type = genomic DNA
cagcctccggagctggggattgtgggt

SEQ ID NO: 8825 - DNA, 16 bp, Homo sapiens
  source 1..16: mol_type = genomic DNA
cagcgatccgagttca

SEQ ID NO: 8826 - DNA, 22 bp, Homo sapiens
  source 1..22: mol_type = genomic DNA
cagcgatccgagttcaaatctc

SEQ ID NO: 8827 - DNA, 23 bp, Homo sapiens
  source 1..23: mol_type = genomic DNA
cagcgatccgagttcaaatctcg

SEQ ID NO: 8828 - DNA, 26 bp, Homo sapiens
  source 1..26: mol_type = genomic DNA
cagcgatccgagttcaaatctcggtg

SEQ ID NO: 8829 - DNA, 30 bp, Homo sapiens
  source 1..30: mol_type = genomic DNA
cagcgatccgagttcaaatctcggtggaac

SEQ ID NO: 8830 - DNA, 31 bp, Homo sapiens
  source 1..31: mol_type = genomic DNA
cagcgatccgagttcaaatctcggtggaacc

SEQ ID NO: 8831 - DNA, 32 bp, Homo sapiens
  source 1..32: mol_type = genomic DNA
cagcgatccgagttcaaatctcggtggaacct

SEQ ID NO: 8832 - DNA, 33 bp, Homo sapiens
  source 1..33: mol_type = genomic DNA
cagcgatccgagttcaaatctcggtggaacctc

SEQ ID NO: 8833 - DNA, 34 bp, Homo sapiens
  source 1..34: mol_type = genomic DNA
cagcgatccgagttcaaatctcggtggaacctcc

SEQ ID NO: 8834 - DNA, 35 bp, Homo sapiens
  source 1..35: mol_type = genomic DNA
cagcgatccgagttcaaatctcggtggaacctcca

SEQ ID NO: 8835 - DNA, 30 bp, Homo sapiens
  source 1..30: mol_type = genomic DNA
cagcgatccgagttcaaatctcggtgggac

SEQ ID NO: 8836 - DNA, 31 bp, Homo sapiens
  source 1..31: mol_type = genomic DNA
cagcgatccgagttcaaatctcggtgggacc

SEQ ID NO: 8837 - DNA, 32 bp, Homo sapiens
  source 1..32: mol_type = genomic DNA
cagcgatccgagttcaaatctcggtgggacct

SEQ ID NO: 8838 - DNA, 33 bp, Homo sapiens
  source 1..33: mol_type = genomic DNA
cagcgatccgagttcaaatctcggtgggacctc

SEQ ID NO: 8839 - DNA, 34 bp, Homo sapiens
  source 1..34: mol_type = genomic DNA
cagcgatccgagttcaaatctcggtgggacctcc

SEQ ID NO: 8840 - DNA, 31 bp, Homo sapiens
  source 1..31: mol_type = genomic DNA
cagcgatccgagttcaagtctcggtggaacc

SEQ ID NO: 8841 - DNA, 16 bp, Homo sapiens
  source 1..16: mol_type = genomic DNA
cagcgatccgagttcg

SEQ ID NO: 8842 - DNA, 22 bp, Homo sapiens
  source 1..22: mol_type = genomic DNA
cagcgatccgagttcgagtctc

SEQ ID NO: 8843 - DNA, 30 bp, Homo sapiens
  source 1..30: mol_type = genomic DNA
cagcgatccgagttcgagtctcggtggaac

SEQ ID NO: 8844 - DNA, 31 bp, Homo sapiens
  source 1..31: mol_type = genomic DNA
cagcgatccgagttcgagtctcggtggaacc

SEQ ID NO: 8845 - DNA, 32 bp, Homo sapiens
  source 1..32: mol_type = genomic DNA
cagcgatccgagttcgagtctcggtggaacct

SEQ ID NO: 8846 - DNA, 33 bp, Homo sapiens
  source 1..33: mol_type = genomic DNA
cagcgatccgagttcgagtctcggtggaacctc

SEQ ID NO: 8847 - DNA, 34 bp, Homo sapiens
  source 1..34: mol_type = genomic DNA
cagcgatccgagttcgagtctcggtggaacctcc

SEQ ID NO: 8848 - DNA, 18 bp, Homo sapiens
  source 1..18: mol_type = genomic DNA
cagcggaagcgtgctggg

SEQ ID NO: 8849 - DNA, 19 bp, Homo sapiens
  source 1..19: mol_type = genomic DNA
cagcggaagcgtgctgggc

SEQ ID NO: 8850 - DNA, 20 bp, Homo sapiens
  source 1..20: mol_type = genomic DNA
cagcggaagcgtgctgggcc

SEQ ID NO: 8851 - DNA, 21 bp, Homo sapiens
  source 1..21: mol_type = genomic DNA
cagcggaagcgtgctgggccc

SEQ ID NO: 8852 - DNA, 22 bp, Homo sapiens
  source 1..22: mol_type = genomic DNA
cagcggaagcgtgctgggccca

SEQ ID NO: 8853 - DNA, 23 bp, Homo sapiens
  source 1..23: mol_type = genomic DNA
cagcggaagcgtgctgggcccat

SEQ ID NO: 8854 - DNA, 25 bp, Homo sapiens
  source 1..25: mol_type = genomic DNA
cagcggaagcgtgctgggcccataa

SEQ ID NO: 8855 - DNA, 26 bp, Homo sapiens
  source 1..26: mol_type = genomic DNA
cagcggaagcgtgctgggcccataac

SEQ ID NO: 8856 - DNA, 28 bp, Homo sapiens
  source 1..28: mol_type = genomic DNA
cagcggaagcgtgctgggcccataaccc

SEQ ID NO: 8857 - DNA, 29 bp, Homo sapiens
  source 1..29: mol_type = genomic DNA
cagcggaagcgtgctgggcccataaccca

SEQ ID NO: 8858 - DNA, 31 bp, Homo sapiens
  source 1..31: mol_type = genomic DNA
cagcggaagcgtgctgggcccataacccaga

SEQ ID NO: 8859 - DNA, 36 bp, Homo sapiens
  source 1..36: mol_type = genomic DNA
cagcggaagcgtgctgggcccataacccagaggtcg

SEQ ID NO: 8860 - DNA, 38 bp, Homo sapiens
  source 1..38: mol_type = genomic DNA
cagcggaagcgtgctgggcccataacccagaggtcgat

SEQ ID NO: 8861 - DNA, 41 bp, Homo sapiens
  source 1..41: mol_type = genomic DNA
cagcggaagcgtgctgggcccataacccagaggtcgatgga

SEQ ID NO: 8862 - DNA, 42 bp, Homo sapiens
  source 1..42: mol_type = genomic DNA
cagcggaagcgtgctgggcccataacccagaggtcgatggat

SEQ ID NO: 8863 - DNA, 19 bp, Homo sapiens
  source 1..19: mol_type = genomic DNA
cagctaaataagctatcgg

SEQ ID NO: 8864 - DNA, 20 bp, Homo sapiens
  source 1..20: mol_type = genomic DNA
cagctaaataagctatcggg

SEQ ID NO: 8865 - DNA, 21 bp, Homo sapiens
  source 1..21: mol_type = genomic DNA
cagctaaataagctatcgggc

SEQ ID NO: 8866 - DNA, 22 bp, Homo sapiens
  source 1..22: mol_type = genomic DNA
cagctaaataagctatcgggcc

SEQ ID NO: 8867 - DNA, 23 bp, Homo sapiens
  source 1..23: mol_type = genomic DNA
cagctaaataagctatcgggccc

SEQ ID NO: 8868 - DNA, 24 bp, Homo sapiens
  source 1..24: mol_type = genomic DNA
cagctaaataagctatcgggccca

SEQ ID NO: 8869 - DNA, 25 bp, Homo sapiens
  source 1..25: mol_type = genomic DNA
cagctaaataagctatcgggcccat

SEQ ID NO: 8870 - DNA, 26 bp, Homo sapiens
  source 1..26: mol_type = genomic DNA
cagctaaataagctatcgggcccata

SEQ ID NO: 8871 - DNA, 27 bp, Homo sapiens
  source 1..27: mol_type = genomic DNA
cagctaaataagctatcgggcccatac

SEQ ID NO: 8872 - DNA, 28 bp, Homo sapiens
  source 1..28: mol_type = genomic DNA
cagctaaataagctatcgggcccatacc

SEQ ID NO: 8873 - DNA, 29 bp, Homo sapiens
  source 1..29: mol_type = genomic DNA
cagctaaataagctatcgggcccataccc

SEQ ID NO: 8874 - DNA, 30 bp, Homo sapiens
  source 1..30: mol_type = genomic DNA
cagctaaataagctatcgggcccatacccc

SEQ ID NO: 8875 - DNA, 32 bp, Homo sapiens
  source 1..32: mol_type = genomic DNA
cagctaaataagctatcgggcccataccccga

SEQ ID NO: 8876 - DNA, 33 bp, Homo sapiens
  source 1..33: mol_type = genomic DNA
cagctaaataagctatcgggcccataccccgaa

SEQ ID NO: 8877 - DNA, 34 bp, Homo sapiens
  source 1..34: mol_type = genomic DNA
cagctaaataagctatcgggcccataccccgaaa

SEQ ID NO: 8878 - DNA, 38 bp, Homo sapiens
  source 1..38: mol_type = genomic DNA
cagctaaataagctatcgggcccataccccgaaaatgt

SEQ ID NO: 8879 - DNA, 39 bp, Homo sapiens
  source 1..39: mol_type = genomic DNA
cagctaaataagctatcgggcccataccccgaaaatgtt

SEQ ID NO: 8880 - DNA, 41 bp, Homo sapiens
  source 1..41: mol_type = genomic DNA
cagctaaataagctatcgggcccataccccgaaaatgttgg

SEQ ID NO: 8881 - DNA, 42 bp, Homo sapiens
  source 1..42: mol_type = genomic DNA
cagctaaataagctatcgggcccataccccgaaaatgttggt

SEQ ID NO: 8882 - DNA, 43 bp, Homo sapiens
  source 1..43: mol_type = genomic DNA
cagctaaataagctatcgggcccataccccgaaaatgttggtt

SEQ ID NO: 8883 - DNA, 44 bp, Homo sapiens
  source 1..44: mol_type = genomic DNA
cagctaaataagctatcgggcccataccccgaaaatgttggtta

SEQ ID NO: 8884 - DNA, 45 bp, Homo sapiens
  source 1..45: mol_type = genomic DNA
cagctaaataagctatcgggcccataccccgaaaatgttggttat

SEQ ID NO: 8885 - DNA, 30 bp, Homo sapiens
  source 1..30: mol_type = genomic DNA
cagctagctcagtcggtagagcatgagact

SEQ ID NO: 8886 - DNA, 31 bp, Homo sapiens
  source 1..31: mol_type = genomic DNA
cagctagctcagtcggtagagcatgagactc

SEQ ID NO: 8887 - DNA, 32 bp, Homo sapiens
  source 1..32: mol_type = genomic DNA
cagctagctcagtcggtagagcatgagactct

SEQ ID NO: 8888 - DNA, 16 bp, Homo sapiens
  source 1..16: mol_type = genomic DNA
cagctatccattggtc

SEQ ID NO: 8889 - DNA, 17 bp, Homo sapiens
  source 1..17: mol_type = genomic DNA
cagctatccattggtct

SEQ ID NO: 8890 - DNA, 18 bp, Homo sapiens
  source 1..18: mol_type = genomic DNA
cagctatccattggtctt

SEQ ID NO: 8891 - DNA, 19 bp, Homo sapiens
  source 1..19: mol_type = genomic DNA
cagctatccattggtctta

SEQ ID NO: 8892 - DNA, 20 bp, Homo sapiens
  source 1..20: mol_type = genomic DNA
cagctatccattggtcttag

SEQ ID NO: 8893 - DNA, 23 bp, Homo sapiens
  source 1..23: mol_type = genomic DNA
cagctatccattggtcttaggcc

SEQ ID NO: 8894 - DNA, 24 bp, Homo sapiens
  source 1..24: mol_type = genomic DNA
cagctatccattggtcttaggccc

SEQ ID NO: 8895 - DNA, 25 bp, Homo sapiens
  source 1..25: mol_type = genomic DNA
cagctatccattggtcttaggcccc

SEQ ID NO: 8896 - DNA, 28 bp, Homo sapiens
  source 1..28: mol_type = genomic DNA
cagctatccattggtcttaggccccaaa

SEQ ID NO: 8897 - DNA, 29 bp, Homo sapiens
  source 1..29: mol_type = genomic DNA
cagctatccattggtcttaggccccaaaa

SEQ ID NO: 8898 - DNA, 30 bp, Homo sapiens
  source 1..30: mol_type = genomic DNA
cagctatccattggtcttaggccccaaaaa

SEQ ID NO: 8899 - DNA, 16 bp, Homo sapiens
  source 1..16: mol_type = genomic DNA
cagctgcctttcaagc

SEQ ID NO: 8900 - DNA, 19 bp, Homo sapiens
  source 1..19: mol_type = genomic DNA
cagctggtagagcggagga

SEQ ID NO: 8901 - DNA, 22 bp, Homo sapiens
  source 1..22: mol_type = genomic DNA
cagctggtagagcggaggactg

SEQ ID NO: 8902 - DNA, 24 bp, Homo sapiens
  source 1..24: mol_type = genomic DNA
cagctggtagagcggaggactgta

SEQ ID NO: 8903 - DNA, 25 bp, Homo sapiens
  source 1..25: mol_type = genomic DNA
cagctggtagagcggaggactgtag

SEQ ID NO: 8904 - DNA, 16 bp, Homo sapiens
  source 1..16: mol_type = genomic DNA
cagcttcaaacctgcc

SEQ ID NO: 8905 - DNA, 18 bp, Homo sapiens
  source 1..18: mol_type = genomic DNA
cagcttcaaacctgccgg

SEQ ID NO: 8906 - DNA, 20 bp, Homo sapiens
  source 1..20: mol_type = genomic DNA
cagcttcaaacctgccgggg

SEQ ID NO: 8907 - DNA, 21 bp, Homo sapiens
  source 1..21: mol_type = genomic DNA
cagcttcaaacctgccggggc

SEQ ID NO: 8908 - DNA, 22 bp, Homo sapiens
  source 1..22: mol_type = genomic DNA
cagcttcaaacctgccggggct

SEQ ID NO: 8909 - DNA, 23 bp, Homo sapiens
  source 1..23: mol_type = genomic DNA
cagcttcaaacctgccggggctt

SEQ ID NO: 8910 - DNA, 24 bp, Homo sapiens
  source 1..24: mol_type = genomic DNA
cagcttcaaacctgccggggcttc

SEQ ID NO: 8911 - DNA, 25 bp, Homo sapiens
  source 1..25: mol_type = genomic DNA
cagcttcaaacctgccggggcttcc

SEQ ID NO: 8912 - DNA, 26 bp, Homo sapiens
  source 1..26: mol_type = genomic DNA
cagcttcaaacctgccggggcttcca

SEQ ID NO: 8913 - DNA, 16 bp, Homo sapiens
  source 1..16: mol_type = genomic DNA
cagctttggggggttc

SEQ ID NO: 8914 - DNA, 17 bp, Homo sapiens
  source 1..17: mol_type = genomic DNA
cagctttggggggttcg

SEQ ID NO: 8915 - DNA, 18 bp, Homo sapiens
  source 1..18: mol_type = genomic DNA
cagctttggggggttcga

SEQ ID NO: 8916 - DNA, 19 bp, Homo sapiens
  source 1..19: mol_type = genomic DNA
cagctttggggggttcgat

SEQ ID NO: 8917 - DNA, 22 bp, Homo sapiens
  source 1..22: mol_type = genomic DNA
cagctttggggggttcgattcc

SEQ ID NO: 8918 - DNA, 23 bp, Homo sapiens
  source 1..23: mol_type = genomic DNA
cagctttggggggttcgattcct

SEQ ID NO: 8919 - DNA, 26 bp, Homo sapiens
  source 1..26: mol_type = genomic DNA
cagctttggggggttcgattccttcc

SEQ ID NO: 8920 - DNA, 27 bp, Homo sapiens
  source 1..27: mol_type = genomic DNA
cagctttggggggttcgattccttcct

SEQ ID NO: 8921 - DNA, 28 bp, Homo sapiens
  source 1..28: mol_type = genomic DNA
cagctttggggggttcgattccttcctt

SEQ ID NO: 8922 - DNA, 29 bp, Homo sapiens
  source 1..29: mol_type = genomic DNA
cagctttggggggttcgattccttccttt

SEQ ID NO: 8923 - DNA, 30 bp, Homo sapiens
  source 1..30: mol_type = genomic DNA
cagctttggggggttcgattccttcctttt

SEQ ID NO: 8924 - DNA, 33 bp, Homo sapiens
  source 1..33: mol_type = genomic DNA
cagctttggggggttcgattccttccttttttg

SEQ ID NO: 8925 - DNA, 34 bp, Homo sapiens
  source 1..34: mol_type = genomic DNA
cagctttggggggttcgattccttccttttttgc

SEQ ID NO: 8926 - DNA, 35 bp, Homo sapiens
  source 1..35: mol_type = genomic DNA
cagctttggggggttcgattccttccttttttgcc

SEQ ID NO: 8927 - DNA, 36 bp, Homo sapiens
  source 1..36: mol_type = genomic DNA
cagctttggggggttcgattccttccttttttgcca

SEQ ID NO: 8928 - DNA, 16 bp, Homo sapiens
  source 1..16: mol_type = genomic DNA
caggagatcctgggtt

SEQ ID NO: 8929 - DNA, 17 bp, Homo sapiens
  source 1..17: mol_type = genomic DNA
caggagatcctgggttc

SEQ ID NO: 8930 - DNA, 18 bp, Homo sapiens
  source 1..18: mol_type = genomic DNA
caggagatcctgggttcg

SEQ ID NO: 8931 - DNA, 27 bp, Homo sapiens
  source 1..27: mol_type = genomic DNA
caggagatcctgggttcgaatcccagc

SEQ ID NO: 8932 - DNA, 28 bp, Homo sapiens
  source 1..28: mol_type = genomic DNA
caggagatcctgggttcgaatcccagcg

SEQ ID NO: 8933 - DNA, 34 bp, Homo sapiens
  source 1..34: mol_type = genomic DNA
caggagatcctgggttcgaatcccagcgaggcct

SEQ ID NO: 8934 - DNA, 35 bp, Homo sapiens
  source 1..35: mol_type = genomic DNA
caggagatcctgggttcgaatcccagcgaggcctc

SEQ ID NO: 8935 - DNA, 36 bp, Homo sapiens
  source 1..36: mol_type = genomic DNA
caggagatcctgggttcgaatcccagcgaggcctcc

SEQ ID NO: 8936 - DNA, 29 bp, Homo sapiens
  source 1..29: mol_type = genomic DNA
caggagatcctgggttcgaatcccagcgg

SEQ ID NO: 8937 - DNA, 30 bp, Homo sapiens
  source 1..30: mol_type = genomic DNA
caggagatcctgggttcgaatcccagcggg

SEQ ID NO: 8938 - DNA, 31 bp, Homo sapiens
  source 1..31: mol_type = genomic DNA
caggagatcctgggttcgaatcccagcgggg

SEQ ID NO: 8939 - DNA, 32 bp, Homo sapiens
  source 1..32: mol_type = genomic DNA
caggagatcctgggttcgaatcccagcggggc

SEQ ID NO: 8940 - DNA, 33 bp, Homo sapiens
  source 1..33: mol_type = genomic DNA
caggagatcctgggttcgaatcccagcggggcc

SEQ ID NO: 8941 - DNA, 34 bp, Homo sapiens
  source 1..34: mol_type = genomic DNA
caggagatcctgggttcgaatcccagcggggcct

SEQ ID NO: 8942 - DNA, 35 bp, Homo sapiens
  source 1..35: mol_type = genomic DNA
caggagatcctgggttcgaatcccagcggggcctc

SEQ ID NO: 8943 - DNA, 36 bp, Homo sapiens
  source 1..36: mol_type = genomic DNA
caggagatcctgggttcgaatcccagcggggcctcc

SEQ ID NO: 8944 - DNA, 37 bp, Homo sapiens
  source 1..37: mol_type = genomic DNA
caggagatcctgggttcgaatcccagcggggcctcca

SEQ ID NO: 8945 - DNA, 30 bp, Homo sapiens
  source 1..30: mol_type = genomic DNA
caggagatcctgggttcgaatcccagcggt

SEQ ID NO: 8946 - DNA, 31 bp, Homo sapiens
  source 1..31: mol_type = genomic DNA
caggagatcctgggttcgaatcccagcggtg

SEQ ID NO: 8947 - DNA, 32 bp, Homo sapiens
  source 1..32: mol_type = genomic DNA
caggagatcctgggttcgaatcccagcggtgc

SEQ ID NO: 8948 - DNA, 33 bp, Homo sapiens
  source 1..33: mol_type = genomic DNA
caggagatcctgggttcgaatcccagcggtgcc

SEQ ID NO: 8949 - DNA, 34 bp, Homo sapiens
  source 1..34: mol_type = genomic DNA
caggagatcctgggttcgaatcccagcggtgcct

SEQ ID NO: 8950 - DNA, 35 bp, Homo sapiens
  source 1..35: mol_type = genomic DNA
caggagatcctgggttcgaatcccagcggtgcctc

SEQ ID NO: 8951 - DNA, 36 bp, Homo sapiens
  source 1..36: mol_type = genomic DNA
caggagatcctgggttcgaatcccagcggtgcctcc

SEQ ID NO: 8952 - DNA, 37 bp, Homo sapiens
  source 1..37: mol_type = genomic DNA
caggagatcctgggttcgaatcccagcggtgcctcca

SEQ ID NO: 8953 - DNA, 34 bp, Homo sapiens
  source 1..34: mol_type = genomic DNA
caggagatcctgggttcgaatcccagtagagcct

SEQ ID NO: 8954 - DNA, 35 bp, Homo sapiens
  source 1..35: mol_type = genomic DNA
caggagatcctgggttcgaatcccagtagagcctc

SEQ ID NO: 8955 - DNA, 36 bp, Homo sapiens
  source 1..36: mol_type = genomic DNA
caggagatcctgggttcgaatcccagtagagcctcc

SEQ ID NO: 8956 - DNA, 34 bp, Homo sapiens
  source 1..34: mol_type = genomic DNA
caggagatcctgggttcgactcccagcggggcct

SEQ ID NO: 8957 - DNA, 36 bp, Homo sapiens
  source 1..36: mol_type = genomic DNA
caggagatcctgggttcgactcccagcggggcctcc

SEQ ID NO: 8958 - DNA, 31 bp, Homo sapiens
  source 1..31: mol_type = genomic DNA
caggagatcctgggttcgactcccagtgggg

SEQ ID NO: 8959 - DNA, 34 bp, Homo sapiens
  source 1..34: mol_type = genomic DNA
caggagatcctgggttcgactcccagtggggcct

SEQ ID NO: 8960 - DNA, 36 bp, Homo sapiens
  source 1..36: mol_type = genomic DNA
caggagatcctgggttcgactcccagtggggcctcc

SEQ ID NO: 8961 - DNA, 16 bp, Homo sapiens
  source 1..16: mol_type = genomic DNA
caggatggccgagcgg

SEQ ID NO: 8962 - DNA, 18 bp, Homo sapiens
  source 1..18: mol_type = genomic DNA
caggatggccgagcggtc

SEQ ID NO: 8963 - DNA, 19 bp, Homo sapiens
  source 1..19: mol_type = genomic DNA
caggatggccgagcggtct

SEQ ID NO: 8964 - DNA, 20 bp, Homo sapiens
  source 1..20: mol_type = genomic DNA
caggatggccgagcggtcta

SEQ ID NO: 8965 - DNA, 21 bp, Homo sapiens
  source 1..21: mol_type = genomic DNA
caggatggccgagcggtctaa

SEQ ID NO: 8966 - DNA, 22 bp, Homo sapiens
  source 1..22: mol_type = genomic DNA
caggatggccgagcggtctaag

SEQ ID NO: 8967 - DNA, 23 bp, Homo sapiens
  source 1..23: mol_type = genomic DNA
caggatggccgagcggtctaagg

SEQ ID NO: 8968 - DNA, 24 bp, Homo sapiens
  source 1..24: mol_type = genomic DNA
caggatggccgagcggtctaaggc

SEQ ID NO: 8969 - DNA, 29 bp, Homo sapiens
  source 1..29: mol_type = genomic DNA
caggatggccgagcggtctaaggcgctgc

SEQ ID NO: 8970 - DNA, 30 bp, Homo sapiens
  source 1..30: mol_type = genomic DNA
caggatggccgagcggtctaaggcgctgcg

SEQ ID NO: 8971 - DNA, 31 bp, Homo sapiens
  source 1..31: mol_type = genomic DNA
caggatggccgagcggtctaaggcgctgcgt

SEQ ID NO: 8972 - DNA, 32 bp, Homo sapiens
  source 1..32: mol_type = genomic DNA
caggatggccgagcggtctaaggcgctgcgtt

SEQ ID NO: 8973 - DNA, 33 bp, Homo sapiens
  source 1..33: mol_type = genomic DNA
caggatggccgagcggtctaaggcgctgcgttc

SEQ ID NO: 8974 - DNA, 34 bp, Homo sapiens
  source 1..34: mol_type = genomic DNA
caggatggccgagcggtctaaggcgctgcgttca

SEQ ID NO: 8975 - DNA, 35 bp, Homo sapiens
  source 1..35: mol_type = genomic DNA
caggatggccgagcggtctaaggcgctgcgttcag

SEQ ID NO: 8976 - DNA, 16 bp, Homo sapiens
  source 1..16: mol_type = genomic DNA
caggatggccgagtgg

SEQ ID NO: 8977 - DNA, 19 bp, Homo sapiens
  source 1..19: mol_type = genomic DNA
caggatggccgagtggtct

SEQ ID NO: 8978 - DNA, 20 bp, Homo sapiens
  source 1..20: mol_type = genomic DNA
caggatggccgagtggtcta

SEQ ID NO: 8979 - DNA, 22 bp, Homo sapiens
  source 1..22: mol_type = genomic DNA
caggatggccgagtggtctaag

SEQ ID NO: 8980 - DNA, 24 bp, Homo sapiens
  source 1..24: mol_type = genomic DNA
caggatggccgagtggtctaaggc

SEQ ID NO: 8981 - DNA, 27 bp, Homo sapiens
  source 1..27: mol_type = genomic DNA
caggatggccgagtggtctaaggcgcc

SEQ ID NO: 8982 - DNA, 31 bp, Homo sapiens
  source 1..31: mol_type = genomic DNA
caggatggccgagtggtctaaggcgccagac

SEQ ID NO: 8983 - DNA, 33 bp, Homo sapiens
  source 1..33: mol_type = genomic DNA
caggatggccgagtggtctaaggcgccagactc

SEQ ID NO: 8984 - DNA, 34 bp, Homo sapiens
  source 1..34: mol_type = genomic DNA
caggatggccgagtggtctaaggcgccagactca

SEQ ID NO: 8985 - DNA, 35 bp, Homo sapiens
  source 1..35: mol_type = genomic DNA
caggatggccgagtggtctaaggcgccagactcaa

SEQ ID NO: 8986 - DNA, 36 bp, Homo sapiens
  source 1..36: mol_type = genomic DNA
caggatggccgagtggtctaaggcgccagactcaag

SEQ ID NO: 8987 - DNA, 21 bp, Homo sapiens
  source 1..21: mol_type = genomic DNA
caggatggccgagtggttaag

SEQ ID NO: 8988 - DNA, 22 bp, Homo sapiens
  source 1..22: mol_type = genomic DNA
caggatggccgagtggttaagg

SEQ ID NO: 8989 - DNA, 23 bp, Homo sapiens
  source 1..23: mol_type = genomic DNA
caggatggccgagtggttaaggc

SEQ ID NO: 8990 - DNA, 34 bp, Homo sapiens
  source 1..34: mol_type = genomic DNA
caggatggccgagtggttaaggcgttggacttaa

SEQ ID NO: 8991 - DNA, 16 bp, Homo sapiens
  source 1..16: mol_type = genomic DNA
caggcggcccgggttc

SEQ ID NO: 8992 - DNA, 17 bp, Homo sapiens
  source 1..17: mol_type = genomic DNA
caggcggcccgggttcg

SEQ ID NO: 8993 - DNA, 19 bp, Homo sapiens
  source 1..19: mol_type = genomic DNA
caggcggcccgggttcgac

SEQ ID NO: 8994 - DNA, 20 bp, Homo sapiens
  source 1..20: mol_type = genomic DNA
caggcggcccgggttcgact

SEQ ID NO: 8995 - DNA, 21 bp, Homo sapiens
  source 1..21: mol_type = genomic DNA
caggcggcccgggttcgactc

SEQ ID NO: 8996 - DNA, 22 bp, Homo sapiens
  source 1..22: mol_type = genomic DNA
caggcggcccgggttcgactcc

SEQ ID NO: 8997 - DNA, 23 bp, Homo sapiens
  source 1..23: mol_type = genomic DNA
caggcggcccgggttcgactccc

SEQ ID NO: 8998 - DNA, 24 bp, Homo sapiens
  source 1..24: mol_type = genomic DNA
caggcggcccgggttcgactcccg

SEQ ID NO: 8999 - DNA, 25 bp, Homo sapiens
  source 1..25: mol_type = genomic DNA
caggcggcccgggttcgactcccgg

SEQ ID NO: 9000 - DNA, 26 bp, Homo sapiens
  source 1..26: mol_type = genomic DNA
caggcggcccgggttcgactcccggt

SEQ ID NO: 9001 - DNA, 27 bp, Homo sapiens
  source 1..27: mol_type = genomic DNA
caggcggcccgggttcgactcccggtg

SEQ ID NO: 9002 - DNA, 28 bp, Homo sapiens
  source 1..28: mol_type = genomic DNA
caggcggcccgggttcgactcccggtgt

SEQ ID NO: 9003 - DNA, 29 bp, Homo sapiens
  source 1..29: mol_type = genomic DNA
caggcggcccgggttcgactcccggtgtg

SEQ ID NO: 9004 - DNA, 30 bp, Homo sapiens
  source 1..30: mol_type = genomic DNA
caggcggcccgggttcgactcccggtgtgg

SEQ ID NO: 9005 - DNA, 31 bp, Homo sapiens
  source 1..31: mol_type = genomic DNA
caggcggcccgggttcgactcccggtgtggg

SEQ ID NO: 9006 - DNA, 32 bp, Homo sapiens
  source 1..32: mol_type = genomic DNA
caggcggcccgggttcgactcccggtgtggga

SEQ ID NO: 9007 - DNA, 33 bp, Homo sapiens
  source 1..33: mol_type = genomic DNA
caggcggcccgggttcgactcccggtgtgggaa

SEQ ID NO: 9008 - DNA, 34 bp, Homo sapiens
  source 1..34: mol_type = genomic DNA
caggcggcccgggttcgactcccggtgtgggaac

SEQ ID NO: 9009 - DNA, 35 bp, Homo sapiens
  source 1..35: mol_type = genomic DNA
caggcggcccgggttcgactcccggtgtgggaacc

SEQ ID NO: 9010 - DNA, 36 bp, Homo sapiens
  source 1..36: mol_type = genomic DNA
caggcggcccgggttcgactcccggtgtgggaacca

SEQ ID NO: 9011 - DNA, 16 bp, Homo sapiens
  source 1..16: mol_type = genomic DNA
cagggatgggttcgat

SEQ ID NO: 9012 - DNA, 17 bp, Homo sapiens
  source 1..17: mol_type = genomic DNA
cagggatgggttcgatt

SEQ ID NO: 9013 - DNA, 18 bp, Homo sapiens
  source 1..18: mol_type = genomic DNA
cagggatgggttcgattc

SEQ ID NO: 9014 - DNA, 19 bp, Homo sapiens
  source 1..19: mol_type = genomic DNA
cagggatgggttcgattct

SEQ ID NO: 9015 - DNA, 20 bp, Homo sapiens
  source 1..20: mol_type = genomic DNA
cagggatgggttcgattctc

SEQ ID NO: 9016 - DNA, 26 bp, Homo sapiens
  source 1..26: mol_type = genomic DNA
cagggatgggttcgattctcatagtc

SEQ ID NO: 9017 - DNA, 27 bp, Homo sapiens
  source 1..27: mol_type = genomic DNA
cagggatgggttcgattctcatagtcc

SEQ ID NO: 9018 - DNA, 28 bp, Homo sapiens
  source 1..28: mol_type = genomic DNA
cagggatgggttcgattctcatagtcct

SEQ ID NO: 9019 - DNA, 29 bp, Homo sapiens
  source 1..29: mol_type = genomic DNA
cagggatgggttcgattctcatagtccta

SEQ ID NO: 9020 - DNA, 30 bp, Homo sapiens
  source 1..30: mol_type = genomic DNA
cagggatgggttcgattctcatagtcctag

SEQ ID NO: 9021 - DNA, 31 bp, Homo sapiens
  source 1..31: mol_type = genomic DNA
cagggatgggttcgattctcatagtcctagc

SEQ ID NO: 9022 - DNA, 32 bp, Homo sapiens
  source 1..32: mol_type = genomic DNA
cagggatgggttcgattctcatagtcctagcc

SEQ ID NO: 9023 - DNA, 33 bp, Homo sapiens
  source 1..33: mol_type = genomic DNA
cagggatgggttcgattctcatagtcctagcca

SEQ ID NO: 9024 - DNA, 16 bp, Homo sapiens
  source 1..16: mol_type = genomic DNA
cagggattgtgggttc

SEQ ID NO: 9025 - DNA, 17 bp, Homo sapiens
  source 1..17: mol_type = genomic DNA
cagggattgtgggttcg

SEQ ID NO: 9026 - DNA, 23 bp, Homo sapiens
  source 1..23: mol_type = genomic DNA
cagggattgtgggttcgagtccc

SEQ ID NO: 9027 - DNA, 30 bp, Homo sapiens
  source 1..30: mol_type = genomic DNA
cagggattgtgggttcgagtcccacccggg

SEQ ID NO: 9028 - DNA, 32 bp, Homo sapiens
  source 1..32: mol_type = genomic DNA
cagggattgtgggttcgagtcccacccggggt

SEQ ID NO: 9029 - DNA, 33 bp, Homo sapiens
  source 1..33: mol_type = genomic DNA
cagggattgtgggttcgagtcccacccggggta

SEQ ID NO: 9030 - DNA, 34 bp, Homo sapiens
  source 1..34: mol_type = genomic DNA
cagggattgtgggttcgagtcccacccggggtac

SEQ ID NO: 9031 - DNA, 35 bp, Homo sapiens
  source 1..35: mol_type = genomic DNA
cagggattgtgggttcgagtcccacccggggtacc

SEQ ID NO: 9032 - DNA, 36 bp, Homo sapiens
  source 1..36: mol_type = genomic DNA
cagggattgtgggttcgagtcccacccggggtacca

SEQ ID NO: 9033 - DNA, 33 bp, Homo sapiens
  source 1..33: mol_type = genomic DNA
cagggattgtgggttcgagtcccacctggggta

SEQ ID NO: 9034 - DNA, 34 bp, Homo sapiens
  source 1..34: mol_type = genomic DNA
cagggattgtgggttcgagtcccacctggggtac

SEQ ID NO: 9035 - DNA, 35 bp, Homo sapiens
  source 1..35: mol_type = genomic DNA
cagggattgtgggttcgagtcccacctggggtacc

SEQ ID NO: 9036 - DNA, 36 bp, Homo sapiens
  source 1..36: mol_type = genomic DNA
cagggattgtgggttcgagtcccacctggggtacca

SEQ ID NO: 9037 - DNA, 33 bp, Homo sapiens
  source 1..33: mol_type = genomic DNA
cagggattgtgggttcgagtcccacctggggtg

SEQ ID NO: 9038 - DNA, 34 bp, Homo sapiens
  source 1..34: mol_type = genomic DNA
cagggattgtgggttcgagtcccacctggggtgc

SEQ ID NO: 9039 - DNA, 35 bp, Homo sapiens
  source 1..35: mol_type = genomic DNA
cagggattgtgggttcgagtcccacctggggtgcc

SEQ ID NO: 9040 - DNA, 36 bp, Homo sapiens
  source 1..36: mol_type = genomic DNA
cagggattgtgggttcgagtcccacctggggtgcca

SEQ ID NO: 9041 - DNA, 26 bp, Homo sapiens
  source 1..26: mol_type = genomic DNA
cagggattgtgggttcgagtcccatc

SEQ ID NO: 9042 - DNA, 30 bp, Homo sapiens
  source 1..30: mol_type = genomic DNA
cagggattgtgggttcgagtcccatctggg

SEQ ID NO: 9043 - DNA, 31 bp, Homo sapiens
  source 1..31: mol_type = genomic DNA
cagggattgtgggttcgagtcccatctgggg

SEQ ID NO: 9044 - DNA, 32 bp, Homo sapiens
  source 1..32: mol_type = genomic DNA
cagggattgtgggttcgagtcccatctggggt

SEQ ID NO: 9045 - DNA, 33 bp, Homo sapiens
  source 1..33: mol_type = genomic DNA
cagggattgtgggttcgagtcccatctggggtg

SEQ ID NO: 9046 - DNA, 34 bp, Homo sapiens
  source 1..34: mol_type = genomic DNA
cagggattgtgggttcgagtcccatctggggtgc

SEQ ID NO: 9047 - DNA, 35 bp, Homo sapiens
  source 1..35: mol_type = genomic DNA
cagggattgtgggttcgagtcccatctggggtgcc

SEQ ID NO: 9048 - DNA, 36 bp, Homo sapiens
  source 1..36: mol_type = genomic DNA
cagggattgtgggttcgagtcccatctggggtgcca

SEQ ID NO: 9049 - DNA, 16 bp, Homo sapiens
  source 1..16: mol_type = genomic DNA
caggggtagagcattt

SEQ ID NO: 9050 - DNA, 20 bp, Homo sapiens
  source 1..20: mol_type = genomic DNA
caggggtagagcatttgact

SEQ ID NO: 9051 - DNA, 21 bp, Homo sapiens
  source 1..21: mol_type = genomic DNA
caggggtagagcatttgactg

SEQ ID NO: 9052 - DNA, 22 bp, Homo sapiens
  source 1..22: mol_type = genomic DNA
caggggtagagcatttgactgc

SEQ ID NO: 9053 - DNA, 16 bp, Homo sapiens
  source 1..16: mol_type = genomic DNA
caggggtcgcgagttc

SEQ ID NO: 9054 - DNA, 17 bp, Homo sapiens
  source 1..17: mol_type = genomic DNA
caggggtcgcgagttca

SEQ ID NO: 9055 - DNA, 30 bp, Homo sapiens
  source 1..30: mol_type = genomic DNA
caggggtcgcgagttcaaatctcgctgggg

SEQ ID NO: 9056 - DNA, 31 bp, Homo sapiens
  source 1..31: mol_type = genomic DNA
caggggtcgcgagttcaaatctcgctggggc

SEQ ID NO: 9057 - DNA, 32 bp, Homo sapiens
  source 1..32: mol_type = genomic DNA
caggggtcgcgagttcaaatctcgctggggcc

SEQ ID NO: 9058 - DNA, 33 bp, Homo sapiens
  source 1..33: mol_type = genomic DNA
caggggtcgcgagttcaaatctcgctggggcct

SEQ ID NO: 9059 - DNA, 34 bp, Homo sapiens
  source 1..34: mol_type = genomic DNA
caggggtcgcgagttcaaatctcgctggggcctc

SEQ ID NO: 9060 - DNA, 35 bp, Homo sapiens
  source 1..35: mol_type = genomic DNA
caggggtcgcgagttcaaatctcgctggggcctcc

SEQ ID NO: 9061 - DNA, 31 bp, Homo sapiens
  source 1..31: mol_type = genomic DNA
caggggtcgcgagttcaattctcgctggggc

SEQ ID NO: 9062 - DNA, 32 bp, Homo sapiens
  source 1..32: mol_type = genomic DNA
caggggtcgcgagttcaattctcgctggggcc

SEQ ID NO: 9063 - DNA, 33 bp, Homo sapiens
  source 1..33: mol_type = genomic DNA
caggggtcgcgagttcaattctcgctggggcct

SEQ ID NO: 9064 - DNA, 34 bp, Homo sapiens
  source 1..34: mol_type = genomic DNA
caggggtcgcgagttcaattctcgctggggcctc

SEQ ID NO: 9065 - DNA, 35 bp, Homo sapiens
  source 1..35: mol_type = genomic DNA
caggggtcgcgagttcaattctcgctggggcctcc

SEQ ID NO: 9066 - DNA, 32 bp, Homo sapiens
  source 1..32: mol_type = genomic DNA
caggggtcgcgagttcgatcctcgctggggcc

SEQ ID NO: 9067 - DNA, 33 bp, Homo sapiens
  source 1..33: mol_type = genomic DNA
caggggtcgcgagttcgatcctcgctggggcct

SEQ ID NO: 9068 - DNA, 34 bp, Homo sapiens
  source 1..34: mol_type = genomic DNA
caggggtcgcgagttcgatcctcgctggggcctc

SEQ ID NO: 9069 - DNA, 35 bp, Homo sapiens
  source 1..35: mol_type = genomic DNA
caggggtcgcgagttcgatcctcgctggggcctcc

SEQ ID NO: 9070 - DNA, 16 bp, Homo sapiens
  source 1..16: mol_type = genomic DNA
caggggttagagcact

SEQ ID NO: 9071 - DNA, 17 bp, Homo sapiens
  source 1..17: mol_type = genomic DNA
caggggttagagcactg

SEQ ID NO: 9072 - DNA, 18 bp, Homo sapiens
  source 1..18: mol_type = genomic DNA
caggggttagagcactgg

SEQ ID NO: 9073 - DNA, 19 bp, Homo sapiens
  source 1..19: mol_type = genomic DNA
caggggttagagcactggt

SEQ ID NO: 9074 - DNA, 20 bp, Homo sapiens
  source 1..20: mol_type = genomic DNA
caggggttagagcactggtc

SEQ ID NO: 9075 - DNA, 21 bp, Homo sapiens
  source 1..21: mol_type = genomic DNA
caggggttagagcactggtct

SEQ ID NO: 9076 - DNA, 16 bp, Homo sapiens
  source 1..16: mol_type = genomic DNA
caggggttaggcctct

SEQ ID NO: 9077 - DNA, 23 bp, Homo sapiens
  source 1..23: mol_type = genomic DNA
caggggttaggcctctttttacc

SEQ ID NO: 9078 - DNA, 26 bp, Homo sapiens
  source 1..26: mol_type = genomic DNA
caggggttaggcctctttttaccacc

SEQ ID NO: 9079 - DNA, 27 bp, Homo sapiens
  source 1..27: mol_type = genomic DNA
caggggttaggcctctttttaccacca

SEQ ID NO: 9080 - DNA, 16 bp, Homo sapiens
  source 1..16: mol_type = genomic DNA
cagggtcgtgggttcg

SEQ ID NO: 9081 - DNA, 21 bp, Homo sapiens
  source 1..21: mol_type = genomic DNA
cagggtcgtgggttcgagccc

SEQ ID NO: 9082 - DNA, 28 bp, Homo sapiens
  source 1..28: mol_type = genomic DNA
cagggtcgtgggttcgagccccacgttg

SEQ ID NO: 9083 - DNA, 29 bp, Homo sapiens
  source 1..29: mol_type = genomic DNA
cagggtcgtgggttcgagccccacgttgg

SEQ ID NO: 9084 - DNA, 30 bp, Homo sapiens
  source 1..30: mol_type = genomic DNA
cagggtcgtgggttcgagccccacgttggg

SEQ ID NO: 9085 - DNA, 31 bp, Homo sapiens
  source 1..31: mol_type = genomic DNA
cagggtcgtgggttcgagccccacgttgggc

SEQ ID NO: 9086 - DNA, 32 bp, Homo sapiens
  source 1..32: mol_type = genomic DNA
cagggtcgtgggttcgagccccacgttgggcg

SEQ ID NO: 9087 - DNA, 33 bp, Homo sapiens
  source 1..33: mol_type = genomic DNA
cagggtcgtgggttcgagccccacgttgggcgc

SEQ ID NO: 9088 - DNA, 34 bp, Homo sapiens
  source 1..34: mol_type = genomic DNA
cagggtcgtgggttcgagccccacgttgggcgcc

SEQ ID NO: 9089 - DNA, 35 bp, Homo sapiens
  source 1..35: mol_type = genomic DNA
cagggtcgtgggttcgagccccacgttgggcgcca

SEQ ID NO: 9090 - DNA, 25 bp, Homo sapiens
  source 1..25: mol_type = genomic DNA
cagggttcaagtccctgttcgggcg

SEQ ID NO: 9091 - DNA, 26 bp, Homo sapiens
  source 1..26: mol_type = genomic DNA
cagggttcaagtccctgttcgggcgc

SEQ ID NO: 9092 - DNA, 27 bp, Homo sapiens
  source 1..27: mol_type = genomic DNA
cagggttcaagtccctgttcgggcgcc

SEQ ID NO: 9093 - DNA, 28 bp, Homo sapiens
  source 1..28: mol_type = genomic DNA
cagggttcaagtccctgttcgggcgcca

SEQ ID NO: 9094 - DNA, 16 bp, Homo sapiens
  source 1..16: mol_type = genomic DNA
caggtcgcagtctccc

SEQ ID NO: 9095 - DNA, 17 bp, Homo sapiens
  source 1..17: mol_type = genomic DNA
caggtcgcagtctcccc

SEQ ID NO: 9096 - DNA, 16 bp, Homo sapiens
  source 1..16: mol_type = genomic DNA
caggtggcccgggttc

SEQ ID NO: 9097 - DNA, 27 bp, Homo sapiens
  source 1..27: mol_type = genomic DNA
caggtggcccgggttcgactcccggta

SEQ ID NO: 9098 - DNA, 30 bp, Homo sapiens
  source 1..30: mol_type = genomic DNA
caggtggcccgggttcgactcccggtatgg

SEQ ID NO: 9099 - DNA, 31 bp, Homo sapiens
  source 1..31: mol_type = genomic DNA
caggtggcccgggttcgactcccggtatggg

SEQ ID NO: 9100 - DNA, 32 bp, Homo sapiens
  source 1..32: mol_type = genomic DNA
caggtggcccgggttcgactcccggtatggga

SEQ ID NO: 9101 - DNA, 33 bp, Homo sapiens
  source 1..33: mol_type = genomic DNA
caggtggcccgggttcgactcccggtatgggaa

SEQ ID NO: 9102 - DNA, 34 bp, Homo sapiens
  source 1..34: mol_type = genomic DNA
caggtggcccgggttcgactcccggtatgggaac

SEQ ID NO: 9103 - DNA, 35 bp, Homo sapiens
  source 1..35: mol_type = genomic DNA
caggtggcccgggttcgactcccggtatgggaacc

SEQ ID NO: 9104 - DNA, 36 bp, Homo sapiens
  source 1..36: mol_type = genomic DNA
caggtggcccgggttcgactcccggtatgggaacca

SEQ ID NO: 9105 - DNA, 26 bp, Homo sapiens
  source 1..26: mol_type = genomic DNA
caggttcgaaccctgctcgctgcgcc

SEQ ID NO: 9106 - DNA, 27 bp, Homo sapiens
  source 1..27: mol_type = genomic DNA
caggttcgaaccctgctcgctgcgcca

SEQ ID NO: 9107 - DNA, 27 bp, Homo sapiens
  source 1..27: mol_type = genomic DNA
caggttcgaatcctgccgactacgcca

SEQ ID NO: 9108 - DNA, 26 bp, Homo sapiens
  source 1..26: mol_type = genomic DNA
caggttcgaatcctgttcgtgacgcc

SEQ ID NO: 9109 - DNA, 27 bp, Homo sapiens
  source 1..27: mol_type = genomic DNA
caggttcgaatcctgttcgtgacgcca

SEQ ID NO: 9110 - DNA, 17 bp, Homo sapiens
  source 1..17: mol_type = genomic DNA
caggttcgactcctggc

SEQ ID NO: 9111 - DNA, 23 bp, Homo sapiens
  source 1..23: mol_type = genomic DNA
caggttcgactcctggctggctc

SEQ ID NO: 9112 - DNA, 24 bp, Homo sapiens
  source 1..24: mol_type = genomic DNA
caggttcgactcctggctggctcg

SEQ ID NO: 9113 - DNA, 26 bp, Homo sapiens
  source 1..26: mol_type = genomic DNA
caggttcgactcctggctggctcgcc

SEQ ID NO: 9114 - DNA, 27 bp, Homo sapiens
  source 1..27: mol_type = genomic DNA
caggttcgagtcctgccgcggtcgcca

SEQ ID NO: 9115 - DNA, 30 bp, Homo sapiens
  source 1..30: mol_type = genomic DNA
cagtaaggtcagctaaataagctatcgggc

SEQ ID NO: 9116 - DNA, 31 bp, Homo sapiens
  source 1..31: mol_type = genomic DNA
cagtaaggtcagctaaataagctatcgggcc

SEQ ID NO: 9117 - DNA, 32 bp, Homo sapiens
  source 1..32: mol_type = genomic DNA
cagtaaggtcagctaaataagctatcgggccc

SEQ ID NO: 9118 - DNA, 33 bp, Homo sapiens
  source 1..33: mol_type = genomic DNA
cagtaaggtcagctaaataagctatcgggccca

SEQ ID NO: 9119 - DNA, 16 bp, Homo sapiens
  source 1..16: mol_type = genomic DNA
cagtaagttgcaatac

SEQ ID NO: 9120 - DNA, 17 bp, Homo sapiens
  source 1..17: mol_type = genomic DNA
cagtaagttgcaatact

SEQ ID NO: 9121 - DNA, 18 bp, Homo sapiens
  source 1..18: mol_type = genomic DNA
cagtaagttgcaatactt

SEQ ID NO: 9122 - DNA, 19 bp, Homo sapiens
  source 1..19: mol_type = genomic DNA
cagtaagttgcaatactta

SEQ ID NO: 9123 - DNA, 24 bp, Homo sapiens
  source 1..24: mol_type = genomic DNA
cagtaagttgcaatacttaatttc

SEQ ID NO: 9124 - DNA, 25 bp, Homo sapiens
  source 1..25: mol_type = genomic DNA
cagtaagttgcaatacttaatttct

SEQ ID NO: 9125 - DNA, 26 bp, Homo sapiens
  source 1..26: mol_type = genomic DNA
cagtaagttgcaatacttaatttctg

SEQ ID NO: 9126 - DNA, 27 bp, Homo sapiens
  source 1..27: mol_type = genomic DNA
cagtaagttgcaatacttaatttctgc

SEQ ID NO: 9127 - DNA, 28 bp, Homo sapiens
  source 1..28: mol_type = genomic DNA
cagtaagttgcaatacttaatttctgcc

SEQ ID NO: 9128 - DNA, 29 bp, Homo sapiens
  source 1..29: mol_type = genomic DNA
cagtaagttgcaatacttaatttctgcca

SEQ ID NO: 9129 - DNA, 16 bp, Homo sapiens
  source 1..16: mol_type = genomic DNA
cagtagagcatcagac

SEQ ID NO: 9130 - DNA, 20 bp, Homo sapiens
  source 1..20: mol_type = genomic DNA
cagtaggtagcgcgtcagtc

SEQ ID NO: 9131 - DNA, 21 bp, Homo sapiens
  source 1..21: mol_type = genomic DNA
cagtaggtagcgcgtcagtct

SEQ ID NO: 9132 - DNA, 29 bp, Homo sapiens
  source 1..29: mol_type = genomic DNA
cagtaggtagcgcgtcagtctcataatct

SEQ ID NO: 9133 - DNA, 17 bp, Homo sapiens
  source 1..17: mol_type = genomic DNA
cagtcagaggttcaatt

SEQ ID NO: 9134 - DNA, 18 bp, Homo sapiens
  source 1..18: mol_type = genomic DNA
cagtcagaggttcaattc

SEQ ID NO: 9135 - DNA, 19 bp, Homo sapiens
  source 1..19: mol_type = genomic DNA
cagtcagaggttcaattcc

SEQ ID NO: 9136 - DNA, 21 bp, Homo sapiens
  source 1..21: mol_type = genomic DNA
cagtcagaggttcaattcctc

SEQ ID NO: 9137 - DNA, 22 bp, Homo sapiens
  source 1..22: mol_type = genomic DNA
cagtcagaggttcaattcctct

SEQ ID NO: 9138 - DNA, 24 bp, Homo sapiens
  source 1..24: mol_type = genomic DNA
cagtcagaggttcaattcctcttc

SEQ ID NO: 9139 - DNA, 31 bp, Homo sapiens
  source 1..31: mol_type = genomic DNA
cagtcagaggttcaattcctcttcttaacac

SEQ ID NO: 9140 - DNA, 32 bp, Homo sapiens
  source 1..32: mol_type = genomic DNA
cagtcagaggttcaattcctcttcttaacacc

SEQ ID NO: 9141 - DNA, 16 bp, Homo sapiens
  source 1..16: mol_type = genomic DNA
cagtcagtagagcatc

SEQ ID NO: 9142 - DNA, 17 bp, Homo sapiens
  source 1..17: mol_type = genomic DNA
cagtcagtagagcatca

SEQ ID NO: 9143 - DNA, 20 bp, Homo sapiens
  source 1..20: mol_type = genomic DNA
cagtcagtagagcatcagac

SEQ ID NO: 9144 - DNA, 21 bp, Homo sapiens
  source 1..21: mol_type = genomic DNA
cagtcagtagagcatcagact

SEQ ID NO: 9145 - DNA, 16 bp, Homo sapiens
  source 1..16: mol_type = genomic DNA
cagtcatttcgatggc

SEQ ID NO: 9146 - DNA, 22 bp, Homo sapiens
  source 1..22: mol_type = genomic DNA
cagtcatttcgatggcgtgggt

SEQ ID NO: 9147 - DNA, 38 bp, Homo sapiens
  source 1..38: mol_type = genomic DNA
cagtcatttcgatggcgtgggttcgaatcccaccgctg

SEQ ID NO: 9148 - DNA, 40 bp, Homo sapiens
  source 1..40: mol_type = genomic DNA
cagtcatttcgatggcgtgggttcgaatcccaccgctgcc

SEQ ID NO: 9149 - DNA, 41 bp, Homo sapiens
  source 1..41: mol_type = genomic DNA
cagtcatttcgatggcgtgggttcgaatcccaccgctgcca

SEQ ID NO: 9150 - DNA, 42 bp, Homo sapiens
  source 1..42: mol_type = genomic DNA
cagtcatttcgatggcgtgggttcgaatcccaccgctgccac

SEQ ID NO: 9151 - DNA, 43 bp, Homo sapiens
  source 1..43: mol_type = genomic DNA
cagtcatttcgatggcgtgggttcgaatcccaccgctgccacc

SEQ ID NO: 9152 - DNA, 44 bp, Homo sapiens
  source 1..44: mol_type = genomic DNA
cagtcatttcgatggcgtgggttcgaatcccaccgctgccacca

SEQ ID NO: 9153 - DNA, 20 bp, Homo sapiens
  source 1..20: mol_type = genomic DNA
cagtcgatagagcatgagac

SEQ ID NO: 9154 - DNA, 16 bp, Homo sapiens
  source 1..16: mol_type = genomic DNA
cagtcggtagagcata

SEQ ID NO: 9155 - DNA, 20 bp, Homo sapiens
  source 1..20: mol_type = genomic DNA
cagtcggtagagcataagac

SEQ ID NO: 9156 - DNA, 21 bp, Homo sapiens
  source 1..21: mol_type = genomic DNA
cagtcggtagagcataagact

SEQ ID NO: 9157 - DNA, 22 bp, Homo sapiens
  source 1..22: mol_type = genomic DNA
cagtcggtagagcataagactc

SEQ ID NO: 9158 - DNA, 16 bp, Homo sapiens
  source 1..16: mol_type = genomic DNA
cagtcggtagagcatc

SEQ ID NO: 9159 - DNA, 17 bp, Homo sapiens
  source 1..17: mol_type = genomic DNA
cagtcggtagagcatca

SEQ ID NO: 9160 - DNA, 18 bp, Homo sapiens
  source 1..18: mol_type = genomic DNA
cagtcggtagagcatcag

SEQ ID NO: 9161 - DNA, 19 bp, Homo sapiens
  source 1..19: mol_type = genomic DNA
cagtcggtagagcatcaga

SEQ ID NO: 9162 - DNA, 20 bp, Homo sapiens
  source 1..20: mol_type = genomic DNA
cagtcggtagagcatcagac

SEQ ID NO: 9163 - DNA, 21 bp, Homo sapiens
  source 1..21: mol_type = genomic DNA
cagtcggtagagcatcagact

SEQ ID NO: 9164 - DNA, 22 bp, Homo sapiens
  source 1..22: mol_type = genomic DNA
cagtcggtagagcatcagactt

SEQ ID NO: 9165 - DNA, 23 bp, Homo sapiens
  source 1..23: mol_type = genomic DNA
cagtcggtagagcatcagacttt

SEQ ID NO: 9166 - DNA, 24 bp, Homo sapiens
  source 1..24: mol_type = genomic DNA
cagtcggtagagcatcagactttt

SEQ ID NO: 9167 - DNA, 28 bp, Homo sapiens
  source 1..28: mol_type = genomic DNA
cagtcggtagagcatcagacttttaatc

SEQ ID NO: 9168 - DNA, 29 bp, Homo sapiens
  source 1..29: mol_type = genomic DNA
cagtcggtagagcatcagacttttaatct

SEQ ID NO: 9169 - DNA, 30 bp, Homo sapiens
  source 1..30: mol_type = genomic DNA
cagtcggtagagcatcagacttttaatctg

SEQ ID NO: 9170 - DNA, 16 bp, Homo sapiens
  source 1..16: mol_type = genomic DNA
cagtcggtagagcatg

SEQ ID NO: 9171 - DNA, 17 bp, Homo sapiens
  source 1..17: mol_type = genomic DNA
cagtcggtagagcatga

SEQ ID NO: 9172 - DNA, 18 bp, Homo sapiens
  source 1..18: mol_type = genomic DNA
cagtcggtagagcatgag

SEQ ID NO: 9173 - DNA, 19 bp, Homo sapiens
  source 1..19: mol_type = genomic DNA
cagtcggtagagcatgaga

SEQ ID NO: 9174 - DNA, 20 bp, Homo sapiens
  source 1..20: mol_type = genomic DNA
cagtcggtagagcatgagac

SEQ ID NO: 9175 - DNA, 21 bp, Homo sapiens
  source 1..21: mol_type = genomic DNA
cagtcggtagagcatgagacc

SEQ ID NO: 9176 - DNA, 22 bp, Homo sapiens
  source 1..22: mol_type = genomic DNA
cagtcggtagagcatgagaccc

SEQ ID NO: 9177 - DNA, 23 bp, Homo sapiens
  source 1..23: mol_type = genomic DNA
cagtcggtagagcatgagaccct

SEQ ID NO: 9178 - DNA, 24 bp, Homo sapiens
  source 1..24: mol_type = genomic DNA
cagtcggtagagcatgagaccctt

SEQ ID NO: 9179 - DNA, 26 bp, Homo sapiens
  source 1..26: mol_type = genomic DNA
cagtcggtagagcatgagacccttaa

SEQ ID NO: 9180 - DNA, 27 bp, Homo sapiens
  source 1..27: mol_type = genomic DNA
cagtcggtagagcatgagacccttaat

SEQ ID NO: 9181 - DNA, 28 bp, Homo sapiens
  source 1..28: mol_type = genomic DNA
cagtcggtagagcatgagacccttaatc

SEQ ID NO: 9182 - DNA, 30 bp, Homo sapiens
  source 1..30: mol_type = genomic DNA
cagtcggtagagcatgagacccttaatctc

SEQ ID NO: 9183 - DNA, 31 bp, Homo sapiens
  source 1..31: mol_type = genomic DNA
cagtcggtagagcatgagacccttaatctca

SEQ ID NO: 9184 - DNA, 21 bp, Homo sapiens
  source 1..21: mol_type = genomic DNA
cagtcggtagagcatgagact

SEQ ID NO: 9185 - DNA, 22 bp, Homo sapiens
  source 1..22: mol_type = genomic DNA
cagtcggtagagcatgagactc

SEQ ID NO: 9186 - DNA, 23 bp, Homo sapiens
  source 1..23: mol_type = genomic DNA
cagtcggtagagcatgagactct

SEQ ID NO: 9187 - DNA, 24 bp, Homo sapiens
  source 1..24: mol_type = genomic DNA
cagtcggtagagcatgagactctt

SEQ ID NO: 9188 - DNA, 25 bp, Homo sapiens
  source 1..25: mol_type = genomic DNA
cagtcggtagagcatgagactctta

SEQ ID NO: 9189 - DNA, 26 bp, Homo sapiens
  source 1..26: mol_type = genomic DNA
cagtcggtagagcatgagactcttaa

SEQ ID NO: 9190 - DNA, 27 bp, Homo sapiens
  source 1..27: mol_type = genomic DNA
cagtcggtagagcatgagactcttaat

SEQ ID NO: 9191 - DNA, 28 bp, Homo sapiens
  source 1..28: mol_type = genomic DNA
cagtcggtagagcatgagactcttaatc

SEQ ID NO: 9192 - DNA, 29 bp, Homo sapiens
  source 1..29: mol_type = genomic DNA
cagtcggtagagcatgagactcttaatct

SEQ ID NO: 9193 - DNA, 30 bp, Homo sapiens
  source 1..30: mol_type = genomic DNA
cagtcggtagagcatgagactcttaatctc

SEQ ID NO: 9194 - DNA, 31 bp, Homo sapiens
  source 1..31: mol_type = genomic DNA
cagtcggtagagcatgagactcttaatctca

SEQ ID NO: 9195 - DNA, 37 bp, Homo sapiens
  source 1..37: mol_type = genomic DNA
cagtcggtagagcatgagactcttaatctcagggtcg

SEQ ID NO: 9196 - DNA, 38 bp, Homo sapiens
  source 1..38: mol_type = genomic DNA
cagtcggtagagcatgagactcttaatctcagggtcgt

SEQ ID NO: 9197 - DNA, 39 bp, Homo sapiens
  source 1..39: mol_type = genomic DNA
cagtcggtagagcatgagactcttaatctcagggtcgtg

SEQ ID NO: 9198 - DNA, 40 bp, Homo sapiens
  source 1..40: mol_type = genomic DNA
cagtcggtagagcatgagactcttaatctcagggtcgtgg

SEQ ID NO: 9199 - DNA, 41 bp, Homo sapiens
  source 1..41: mol_type = genomic DNA
cagtcggtagagcatgagactcttaatctcagggtcgtggg

SEQ ID NO: 9200 - DNA, 42 bp, Homo sapiens
  source 1..42: mol_type = genomic DNA
cagtcggtagagcatgagactcttaatctcagggtcgtgggt

SEQ ID NO: 9201 - DNA, 43 bp, Homo sapiens
  source 1..43: mol_type = genomic DNA
cagtcggtagagcatgagactcttaatctcagggtcgtgggtt

SEQ ID NO: 9202 - DNA, 44 bp, Homo sapiens
  source 1..44: mol_type = genomic DNA
cagtcggtagagcatgagactcttaatctcagggtcgtgggttc

SEQ ID NO: 9203 - DNA, 45 bp, Homo sapiens
  source 1..45: mol_type = genomic DNA
cagtcggtagagcatgagactcttaatctcagggtcgtgggttcg

SEQ ID NO: 9204 - DNA, 17 bp, Homo sapiens
  source 1..17: mol_type = genomic DNA
cagtcggtagagcatgg

SEQ ID NO: 9205 - DNA, 18 bp, Homo sapiens
  source 1..18: mol_type = genomic DNA
cagtcggtagagcatggg

SEQ ID NO: 9206 - DNA, 19 bp, Homo sapiens
  source 1..19: mol_type = genomic DNA
cagtcggtagagcatggga

SEQ ID NO: 9207 - DNA, 20 bp, Homo sapiens
  source 1..20: mol_type = genomic DNA
cagtcggtagagcatgggac

SEQ ID NO: 9208 - DNA, 21 bp, Homo sapiens
  source 1..21: mol_type = genomic DNA
cagtcggtagagcatgggact

SEQ ID NO: 9209 - DNA, 22 bp, Homo sapiens
  source 1..22: mol_type = genomic DNA
cagtcggtagagcatgggactc

SEQ ID NO: 9210 - DNA, 23 bp, Homo sapiens
  source 1..23: mol_type = genomic DNA
cagtcggtagagcatgggactct

SEQ ID NO: 9211 - DNA, 24 bp, Homo sapiens
  source 1..24: mol_type = genomic DNA
cagtcggtagagcatgggactctt

SEQ ID NO: 9212 - DNA, 25 bp, Homo sapiens
  source 1..25: mol_type = genomic DNA
cagtcggtagagcatgggactctta

SEQ ID NO: 9213 - DNA, 26 bp, Homo sapiens
  source 1..26: mol_type = genomic DNA
cagtcggtagagcatgggactcttaa

SEQ ID NO: 9214 - DNA, 27 bp, Homo sapiens
  source 1..27: mol_type = genomic DNA
cagtcggtagagcatgggactcttaat

SEQ ID NO: 9215 - DNA, 28 bp, Homo sapiens
  source 1..28: mol_type = genomic DNA
cagtcggtagagcatgggactcttaatc

SEQ ID NO: 9216 - DNA, 29 bp, Homo sapiens
  source 1..29: mol_type = genomic DNA
cagtcggtagagcatgggactcttaatcc

SEQ ID NO: 9217 - DNA, 30 bp, Homo sapiens
  source 1..30: mol_type = genomic DNA
cagtcggtagagcatgggactcttaatccc

SEQ ID NO: 9218 - DNA, 31 bp, Homo sapiens
  source 1..31: mol_type = genomic DNA
cagtcggtagagcatgggactcttaatccca

SEQ ID NO: 9219 - DNA, 37 bp, Homo sapiens
  source 1..37: mol_type = genomic DNA
cagtcggtagagcatgggactcttaatcccagggtcg

SEQ ID NO: 9220 - DNA, 38 bp, Homo sapiens
  source 1..38: mol_type = genomic DNA
cagtcggtagagcatgggactcttaatcccagggtcgt

SEQ ID NO: 9221 - DNA, 39 bp, Homo sapiens
  source 1..39: mol_type = genomic DNA
cagtcggtagagcatgggactcttaatcccagggtcgtg

SEQ ID NO: 9222 - DNA, 40 bp, Homo sapiens
  source 1..40: mol_type = genomic DNA
cagtcggtagagcatgggactcttaatcccagggtcgtgg

SEQ ID NO: 9223 - DNA, 41 bp, Homo sapiens
  source 1..41: mol_type = genomic DNA
cagtcggtagagcatgggactcttaatcccagggtcgtggg

SEQ ID NO: 9224 - DNA, 42 bp, Homo sapiens
  source 1..42: mol_type = genomic DNA
cagtcggtagagcatgggactcttaatcccagggtcgtgggt

SEQ ID NO: 9225 - DNA, 43 bp, Homo sapiens
  source 1..43: mol_type = genomic DNA
cagtcggtagagcatgggactcttaatcccagggtcgtgggtt

SEQ ID NO: 9226 - DNA, 45 bp, Homo sapiens
  source 1..45: mol_type = genomic DNA
cagtcggtagagcatgggactcttaatcccagggtcgtgggttcg

SEQ ID NO: 9227 - DNA, 29 bp, Homo sapiens
  source 1..29: mol_type = genomic DNA
cagtcggtagagcatgggactcttaatct

SEQ ID NO: 9228 - DNA, 30 bp, Homo sapiens
  source 1..30: mol_type = genomic DNA
cagtcggtagagcatgggactcttaatctc

SEQ ID NO: 9229 - DNA, 31 bp, Homo sapiens
  source 1..31: mol_type = genomic DNA
cagtcggtagagcatgggactcttaatctca

SEQ ID NO: 9230 - DNA, 38 bp, Homo sapiens
  source 1..38: mol_type = genomic DNA
cagtcggtagagcatgggactcttaatctcagggtcgt

SEQ ID NO: 9231 - DNA, 40 bp, Homo sapiens
  source 1..40: mol_type = genomic DNA
cagtcggtagagcatgggactcttaatctcagggtcgtgg

SEQ ID NO: 9232 - DNA, 16 bp, Homo sapiens
  source 1..16: mol_type = genomic DNA
cagtcggtggagcatg

SEQ ID NO: 9233 - DNA, 17 bp, Homo sapiens
  source 1..17: mol_type = genomic DNA
cagtcggtggagcatgg

SEQ ID NO: 9234 - DNA, 19 bp, Homo sapiens
  source 1..19: mol_type = genomic DNA
cagtcggtggagcatggga

SEQ ID NO: 9235 - DNA, 20 bp, Homo sapiens
  source 1..20: mol_type = genomic DNA
cagtcggtggagcatgggac

SEQ ID NO: 9236 - DNA, 21 bp, Homo sapiens
  source 1..21: mol_type = genomic DNA
cagtcggtggagcatgggact

SEQ ID NO: 9237 - DNA, 17 bp, Homo sapiens
  source 1..17: mol_type = genomic DNA
cagtctcataatctgaa

SEQ ID NO: 9238 - DNA, 23 bp, Homo sapiens
  source 1..23: mol_type = genomic DNA
cagtctcataatctgaaggtcct

SEQ ID NO: 9239 - DNA, 24 bp, Homo sapiens
  source 1..24: mol_type = genomic DNA
cagtctcataatctgaaggtcctg

SEQ ID NO: 9240 - DNA, 27 bp, Homo sapiens
  source 1..27: mol_type = genomic DNA
cagtctcataatctgaaggtcctgagt

SEQ ID NO: 9241 - DNA, 24 bp, Homo sapiens
  source 1..24: mol_type = genomic DNA
cagtctcataatctgaaggtcgtg

SEQ ID NO: 9242 - DNA, 27 bp, Homo sapiens
  source 1..27: mol_type = genomic DNA
cagtctcataatctgaaggtcgtgagt

SEQ ID NO: 9243 - DNA, 16 bp, Homo sapiens
  source 1..16: mol_type = genomic DNA
cagtctcccctggagg

SEQ ID NO: 9244 - DNA, 25 bp, Homo sapiens
  source 1..25: mol_type = genomic DNA
cagtctcccctggaggcgtgggttc

SEQ ID NO: 9245 - DNA, 44 bp, Homo sapiens
  source 1..44: mol_type = genomic DNA
cagtctcccctggaggcgtgggttcgaatcccactcctgacacc

SEQ ID NO: 9246 - DNA, 44 bp, Homo sapiens
  source 1..44: mol_type = genomic DNA
cagtctcccctggaggcgtgggttcgaatcccacttctgacacc

SEQ ID NO: 9247 - DNA, 16 bp, Homo sapiens
  source 1..16: mol_type = genomic DNA
cagtctcttcggaggc

SEQ ID NO: 9248 - DNA, 22 bp, Homo sapiens
  source 1..22: mol_type = genomic DNA
cagtctcttcggaggcgtgggt

SEQ ID NO: 9249 - DNA, 40 bp, Homo sapiens
  source 1..40: mol_type = genomic DNA
cagtctcttcggaggcgtgggttcgaatcccaccgctgcc

SEQ ID NO: 9250 - DNA, 43 bp, Homo sapiens
  source 1..43: mol_type = genomic DNA
cagtctcttcggaggcgtgggttcgaatcccaccgctgccacc

SEQ ID NO: 9251 - DNA, 44 bp, Homo sapiens
  source 1..44: mol_type = genomic DNA
cagtctcttcggaggcgtgggttcgaatcccaccgctgccacca

SEQ ID NO: 9252 - DNA, 16 bp, Homo sapiens
  source 1..16: mol_type = genomic DNA
cagtctcttcgggggc

SEQ ID NO: 9253 - DNA, 22 bp, Homo sapiens
  source 1..22: mol_type = genomic DNA
cagtctcttcgggggcgtgggt

SEQ ID NO: 9254 - DNA, 23 bp, Homo sapiens
  source 1..23: mol_type = genomic DNA
cagtctcttcgggggcgtgggtt

SEQ ID NO: 9255 - DNA, 24 bp, Homo sapiens
  source 1..24: mol_type = genomic DNA
cagtctcttcgggggcgtgggttc

SEQ ID NO: 9256 - DNA, 25 bp, Homo sapiens
  source 1..25: mol_type = genomic DNA
cagtctcttcgggggcgtgggttcg

SEQ ID NO: 9257 - DNA, 39 bp, Homo sapiens
  source 1..39: mol_type = genomic DNA
cagtctcttcgggggcgtgggttcgaatcccaccgctgc

SEQ ID NO: 9258 - DNA, 40 bp, Homo sapiens
  source 1..40: mol_type = genomic DNA
cagtctcttcgggggcgtgggttcgaatcccaccgctgcc

SEQ ID NO: 9259 - DNA, 41 bp, Homo sapiens
  source 1..41: mol_type = genomic DNA
cagtctcttcgggggcgtgggttcgaatcccaccgctgcca

SEQ ID NO: 9260 - DNA, 42 bp, Homo sapiens
  source 1..42: mol_type = genomic DNA
cagtctcttcgggggcgtgggttcgaatcccaccgctgccac

SEQ ID NO: 9261 - DNA, 43 bp, Homo sapiens
  source 1..43: mol_type = genomic DNA
cagtctcttcgggggcgtgggttcgaatcccaccgctgccacc

SEQ ID NO: 9262 - DNA, 44 bp, Homo sapiens
  source 1..44: mol_type = genomic DNA
cagtctcttcgggggcgtgggttcgaatcccaccgctgccacca

SEQ ID NO: 9263 - DNA, 26 bp, Homo sapiens
  source 1..26: mol_type = genomic DNA
cagtcttgtaaaccggagatgaaaac

SEQ ID NO: 9264 - DNA, 27 bp, Homo sapiens
  source 1..27: mol_type = genomic DNA
cagtcttgtaaaccggagatgaaaacc

SEQ ID NO: 9265 - DNA, 28 bp, Homo sapiens
  source 1..28: mol_type = genomic DNA
cagtcttgtaaaccggagatgaaaacct

SEQ ID NO: 9266 - DNA, 44 bp, Homo sapiens
  source 1..44: mol_type = genomic DNA
cagtcttgtaaaccggagatgaaaacctttttccaaggacacca

SEQ ID NO: 9267 - DNA, 16 bp, Homo sapiens
  source 1..16: mol_type = genomic DNA
cagtggcctaatggat

SEQ ID NO: 9268 - DNA, 27 bp, Homo sapiens
  source 1..27: mol_type = genomic DNA
cagtggcctaatggataaggcatcagc

SEQ ID NO: 9269 - DNA, 30 bp, Homo sapiens
  source 1..30: mol_type = genomic DNA
cagtggcctaatggataaggcatcagcctc

SEQ ID NO: 9270 - DNA, 31 bp, Homo sapiens
  source 1..31: mol_type = genomic DNA
cagtggcctaatggataaggcatcagcctcc

SEQ ID NO: 9271 - DNA, 32 bp, Homo sapiens
  source 1..32: mol_type = genomic DNA
cagtggcctaatggataaggcatcagcctccg

SEQ ID NO: 9272 - DNA, 25 bp, Homo sapiens
  source 1..25: mol_type = genomic DNA
cagtggcctaatggataaggcattg

SEQ ID NO: 9273 - DNA, 24 bp, Homo sapiens
  source 1..24: mol_type = genomic DNA
cagtggcgcaatcggttagcgcgc

SEQ ID NO: 9274 - DNA, 19 bp, Homo sapiens
  source 1..19: mol_type = genomic DNA
cagtggcgcaatggataac

SEQ ID NO: 9275 - DNA, 16 bp, Homo sapiens
  source 1..16: mol_type = genomic DNA
cagtgggtagagcatc

SEQ ID NO: 9276 - DNA, 17 bp, Homo sapiens
  source 1..17: mol_type = genomic DNA
cagtgggtagagcatca

SEQ ID NO: 9277 - DNA, 20 bp, Homo sapiens
  source 1..20: mol_type = genomic DNA
cagtgggtagagcatcagac

SEQ ID NO: 9278 - DNA, 16 bp, Homo sapiens
  source 1..16: mol_type = genomic DNA
cagtgggtagagcatt

SEQ ID NO: 9279 - DNA, 16 bp, Homo sapiens
  source 1..16: mol_type = genomic DNA
cagtggtagaattctc

SEQ ID NO: 9280 - DNA, 17 bp, Homo sapiens
  source 1..17: mol_type = genomic DNA
cagtggtagaattctcg

SEQ ID NO: 9281 - DNA, 18 bp, Homo sapiens
  source 1..18: mol_type = genomic DNA
cagtggtagaattctcgc

SEQ ID NO: 9282 - DNA, 19 bp, Homo sapiens
  source 1..19: mol_type = genomic DNA
cagtggtagaattctcgcc

SEQ ID NO: 9283 - DNA, 20 bp, Homo sapiens
  source 1..20: mol_type = genomic DNA
cagtggtagaattctcgcct

SEQ ID NO: 9284 - DNA, 21 bp, Homo sapiens
  source 1..21: mol_type = genomic DNA
cagtggtagaattctcgcctc

SEQ ID NO: 9285 - DNA, 23 bp, Homo sapiens
  source 1..23: mol_type = genomic DNA
cagtggtagaattctcgcctccc

SEQ ID NO: 9286 - DNA, 24 bp, Homo sapiens
  source 1..24: mol_type = genomic DNA
cagtggtagaattctcgcctccca

SEQ ID NO: 9287 - DNA, 21 bp, Homo sapiens
  source 1..21: mol_type = genomic DNA
cagtggtagaattctcgcctg

SEQ ID NO: 9288 - DNA, 22 bp, Homo sapiens
  source 1..22: mol_type = genomic DNA
cagtggtagaattctcgcctgc

SEQ ID NO: 9289 - DNA, 23 bp, Homo sapiens
  source 1..23: mol_type = genomic DNA
cagtggtagaattctcgcctgcc

SEQ ID NO: 9290 - DNA, 24 bp, Homo sapiens
  source 1..24: mol_type = genomic DNA
cagtggtagaattctcgcctgcca

SEQ ID NO: 9291 - DNA, 25 bp, Homo sapiens
  source 1..25: mol_type = genomic DNA
cagtggtagaattctcgcctgccac

SEQ ID NO: 9292 - DNA, 26 bp, Homo sapiens
  source 1..26: mol_type = genomic DNA
cagtggtagaattctcgcctgccacg

SEQ ID NO: 9293 - DNA, 27 bp, Homo sapiens
  source 1..27: mol_type = genomic DNA
cagtggtagaattctcgcctgccacgc

SEQ ID NO: 9294 - DNA, 28 bp, Homo sapiens
  source 1..28: mol_type = genomic DNA
cagtggtagaattctcgcctgccacgcg

SEQ ID NO: 9295 - DNA, 31 bp, Homo sapiens
  source 1..31: mol_type = genomic DNA
cagtggtagaattctcgcctgccacgcggga

SEQ ID NO: 9296 - DNA, 32 bp, Homo sapiens
  source 1..32: mol_type = genomic DNA
cagtggtagaattctcgcctgccacgcgggag

SEQ ID NO: 9297 - DNA, 34 bp, Homo sapiens
  source 1..34: mol_type = genomic DNA
cagtggtagaattctcgcctgccacgcgggaggc

SEQ ID NO: 9298 - DNA, 35 bp, Homo sapiens
  source 1..35: mol_type = genomic DNA
cagtggtagaattctcgcctgccacgcgggaggcc

SEQ ID NO: 9299 - DNA, 36 bp, Homo sapiens
  source 1..36: mol_type = genomic DNA
cagtggtagaattctcgcctgccacgcgggaggccc

SEQ ID NO: 9300 - DNA, 38 bp, Homo sapiens
  source 1..38: mol_type = genomic DNA
cagtggtagaattctcgcctgccacgcgggaggcccgg

SEQ ID NO: 9301 - DNA, 39 bp, Homo sapiens
  source 1..39: mol_type = genomic DNA
cagtggtagaattctcgcctgccacgcgggaggcccggg

SEQ ID NO: 9302 - DNA, 40 bp, Homo sapiens
  source 1..40: mol_type = genomic DNA
cagtggtagaattctcgcctgccacgcgggaggcccgggt

SEQ ID NO: 9303 - DNA, 42 bp, Homo sapiens
  source 1..42: mol_type = genomic DNA
cagtggtagaattctcgcctgccacgcgggaggcccgggttc

SEQ ID NO: 9304 - DNA, 20 bp, Homo sapiens
  source 1..20: mol_type = genomic DNA
cagtggtagaattcttgcct

SEQ ID NO: 9305 - DNA, 16 bp, Homo sapiens
  source 1..16: mol_type = genomic DNA
cagtggtagagcattt

SEQ ID NO: 9306 - DNA, 17 bp, Homo sapiens
  source 1..17: mol_type = genomic DNA
cagtggtagagcatttg

SEQ ID NO: 9307 - DNA, 18 bp, Homo sapiens
  source 1..18: mol_type = genomic DNA
cagtggtagagcatttga

SEQ ID NO: 9308 - DNA, 19 bp, Homo sapiens
  source 1..19: mol_type = genomic DNA
cagtggtagagcatttgac

SEQ ID NO: 9309 - DNA, 20 bp, Homo sapiens
  source 1..20: mol_type = genomic DNA
cagtggtagagcatttgact

SEQ ID NO: 9310 - DNA, 21 bp, Homo sapiens
  source 1..21: mol_type = genomic DNA
cagtggtagagcatttgactg

SEQ ID NO: 9311 - DNA, 22 bp, Homo sapiens
  source 1..22: mol_type = genomic DNA
cagtggtagagcatttgactgc

SEQ ID NO: 9312 - DNA, 23 bp, Homo sapiens
  source 1..23: mol_type = genomic DNA
cagtggtagagcatttgactgca

SEQ ID NO: 9313 - DNA, 30 bp, Homo sapiens
  source 1..30: mol_type = genomic DNA
cagtggtagagcatttgactgcagatcaag

SEQ ID NO: 9314 - DNA, 16 bp, Homo sapiens
  source 1..16: mol_type = genomic DNA
cagtggtagagcgcat

SEQ ID NO: 9315 - DNA, 18 bp, Homo sapiens
  source 1..18: mol_type = genomic DNA
cagtggtagagcgcatgc

SEQ ID NO: 9316 - DNA, 19 bp, Homo sapiens
  source 1..19: mol_type = genomic DNA
cagtggtagagcgcatgct

SEQ ID NO: 9317 - DNA, 20 bp, Homo sapiens
  source 1..20: mol_type = genomic DNA
cagtggtagagcgcatgctt

SEQ ID NO: 9318 - DNA, 42 bp, Homo sapiens
  source 1..42: mol_type = genomic DNA
cagtggtagagcgcatgctttgcatgtatgaggccccgggtt

SEQ ID NO: 9319 - DNA, 19 bp, Homo sapiens
  source 1..19: mol_type = genomic DNA
cagtggtagagcgcgtgct

SEQ ID NO: 9320 - DNA, 42 bp, Homo sapiens
  source 1..42: mol_type = genomic DNA
cagtggtagagcgcgtgcttcgcatgtacgaggccccgggtt

SEQ ID NO: 9321 - DNA, 16 bp, Homo sapiens
  source 1..16: mol_type = genomic DNA
cagttgacccgggttc

SEQ ID NO: 9322 - DNA, 17 bp, Homo sapiens
  source 1..17: mol_type = genomic DNA
cagttgacccgggttcg

SEQ ID NO: 9323 - DNA, 24 bp, Homo sapiens
  source 1..24: mol_type = genomic DNA
cagttgacccgggttcgattcccg

SEQ ID NO: 9324 - DNA, 26 bp, Homo sapiens
  source 1..26: mol_type = genomic DNA
cagttgacccgggttcgattcccggc

SEQ ID NO: 9325 - DNA, 27 bp, Homo sapiens
  source 1..27: mol_type = genomic DNA
cagttgacccgggttcgattcccggcc

SEQ ID NO: 9326 - DNA, 28 bp, Homo sapiens
  source 1..28: mol_type = genomic DNA
cagttgacccgggttcgattcccggcca

SEQ ID NO: 9327 - DNA, 29 bp, Homo sapiens
  source 1..29: mol_type = genomic DNA
cagttgacccgggttcgattcccggccaa

SEQ ID NO: 9328 - DNA, 30 bp, Homo sapiens
  source 1..30: mol_type = genomic DNA
cagttgacccgggttcgattcccggccaac

SEQ ID NO: 9329 - DNA, 31 bp, Homo sapiens
  source 1..31: mol_type = genomic DNA
cagttgacccgggttcgattcccggccaacg

SEQ ID NO: 9330 - DNA, 35 bp, Homo sapiens
  source 1..35: mol_type = genomic DNA
cagttgacccgggttcgattcccggccaacgcacc

SEQ ID NO: 9331 - DNA, 16 bp, Homo sapiens
  source 1..16: mol_type = genomic DNA
cagttgatgcagagtg

SEQ ID NO: 9332 - DNA, 17 bp, Homo sapiens
  source 1..17: mol_type = genomic DNA
cagttgatgcagagtgg

SEQ ID NO: 9333 - DNA, 18 bp, Homo sapiens
  source 1..18: mol_type = genomic DNA
cagttgatgcagagtggg

SEQ ID NO: 9334 - DNA, 21 bp, Homo sapiens
  source 1..21: mol_type = genomic DNA
cagttgatgcagagtggggtt

SEQ ID NO: 9335 - DNA, 23 bp, Homo sapiens
  source 1..23: mol_type = genomic DNA
cagttgatgcagagtggggtttt

SEQ ID NO: 9336 - DNA, 25 bp, Homo sapiens
  source 1..25: mol_type = genomic DNA
cagttgatgcagagtggggttttgc

SEQ ID NO: 9337 - DNA, 26 bp, Homo sapiens
  source 1..26: mol_type = genomic DNA
cagttgatgcagagtggggttttgca

SEQ ID NO: 9338 - DNA, 29 bp, Homo sapiens
  source 1..29: mol_type = genomic DNA
cagttgatgcagagtggggttttgcagtc

SEQ ID NO: 9339 - DNA, 30 bp, Homo sapiens
  source 1..30: mol_type = genomic DNA
cagttgatgcagagtggggttttgcagtcc

SEQ ID NO: 9340 - DNA, 31 bp, Homo sapiens
  source 1..31: mol_type = genomic DNA
cagttgatgcagagtggggttttgcagtcct

SEQ ID NO: 9341 - DNA, 32 bp, Homo sapiens
  source 1..32: mol_type = genomic DNA
cagttgatgcagagtggggttttgcagtcctt

SEQ ID NO: 9342 - DNA, 33 bp, Homo sapiens
  source 1..33: mol_type = genomic DNA
cagttgatgcagagtggggttttgcagtcctta

SEQ ID NO: 9343 - DNA, 34 bp, Homo sapiens
  source 1..34: mol_type = genomic DNA
cagttgatgcagagtggggttttgcagtccttac

SEQ ID NO: 9344 - DNA, 35 bp, Homo sapiens
  source 1..35: mol_type = genomic DNA
cagttgatgcagagtggggttttgcagtccttacc

SEQ ID NO: 9345 - DNA, 36 bp, Homo sapiens
  source 1..36: mol_type = genomic DNA
cagttgatgcagagtggggttttgcagtccttacca

SEQ ID NO: 9346 - DNA, 19 bp, Homo sapiens
  source 1..19: mol_type = genomic DNA
cagttgattagggtgctta

SEQ ID NO: 9347 - DNA, 21 bp, Homo sapiens
  source 1..21: mol_type = genomic DNA
cagttgattagggtgcttagc

SEQ ID NO: 9348 - DNA, 24 bp, Homo sapiens
  source 1..24: mol_type = genomic DNA
cagttgattagggtgcttagctgt

SEQ ID NO: 9349 - DNA, 25 bp, Homo sapiens
  source 1..25: mol_type = genomic DNA
cagttgattagggtgcttagctgtt

SEQ ID NO: 9350 - DNA, 27 bp, Homo sapiens
  source 1..27: mol_type = genomic DNA
cagttgattagggtgcttagctgttaa

SEQ ID NO: 9351 - DNA, 28 bp, Homo sapiens
  source 1..28: mol_type = genomic DNA
cagttgattagggtgcttagctgttaac

SEQ ID NO: 9352 - DNA, 36 bp, Homo sapiens
  source 1..36: mol_type = genomic DNA
cagttgattagggtgcttagctgttaactaagtgtt

SEQ ID NO: 9353 - DNA, 43 bp, Homo sapiens
  source 1..43: mol_type = genomic DNA
cagttgattagggtgcttagctgttaactaagtgtttgtgggt

SEQ ID NO: 9354 - DNA, 44 bp, Homo sapiens
  source 1..44: mol_type = genomic DNA
cagttgattagggtgcttagctgttaactaagtgtttgtgggtt

SEQ ID NO: 9355 - DNA, 45 bp, Homo sapiens
  source 1..45: mol_type = genomic DNA
cagttgattagggtgcttagctgttaactaagtgtttgtgggttt

SEQ ID NO: 9356 - DNA, 16 bp, Homo sapiens
  source 1..16: mol_type = genomic DNA
cagttggtagagcatc

SEQ ID NO: 9357 - DNA, 17 bp, Homo sapiens
  source 1..17: mol_type = genomic DNA
cagttggtagagcatca

SEQ ID NO: 9358 - DNA, 19 bp, Homo sapiens
  source 1..19: mol_type = genomic DNA
cagttggtagagcatcaga

SEQ ID NO: 9359 - DNA, 20 bp, Homo sapiens
  source 1..20: mol_type = genomic DNA
cagttggtagagcatcagac

SEQ ID NO: 9360 - DNA, 21 bp, Homo sapiens
  source 1..21: mol_type = genomic DNA
cagttggtagagcatcagact

SEQ ID NO: 9361 - DNA, 20 bp, Homo sapiens
  source 1..20: mol_type = genomic DNA
cagttggtagagcatgggac

SEQ ID NO: 9362 - DNA, 22 bp, Homo sapiens
  source 1..22: mol_type = genomic DNA
cagttggtagagcggaggactg

SEQ ID NO: 9363 - DNA, 24 bp, Homo sapiens
  source 1..24: mol_type = genomic DNA
cagttggtagagcggaggactgta

SEQ ID NO: 9364 - DNA, 21 bp, Homo sapiens
  source 1..21: mol_type = genomic DNA
cagttggttagagcgtggtgc

SEQ ID NO: 9365 - DNA, 16 bp, Homo sapiens
  source 1..16: mol_type = genomic DNA
cataaaacttaaaact

SEQ ID NO: 9366 - DNA, 17 bp, Homo sapiens
  source 1..17: mol_type = genomic DNA
cataaaacttaaaactt

SEQ ID NO: 9367 - DNA, 18 bp, Homo sapiens
  source 1..18: mol_type = genomic DNA
cataaaacttaaaacttt

SEQ ID NO: 9368 - DNA, 19 bp, Homo sapiens
  source 1..19: mol_type = genomic DNA
cataaaacttaaaacttta

SEQ ID NO: 9369 - DNA, 24 bp, Homo sapiens
  source 1..24: mol_type = genomic DNA
cataaaacttaaaactttacagtc

SEQ ID NO: 9370 - DNA, 26 bp, Homo sapiens
  source 1..26: mol_type = genomic DNA
cataaaacttaaaactttacagtcag

SEQ ID NO: 9371 - DNA, 27 bp, Homo sapiens
  source 1..27: mol_type = genomic DNA
cataaaacttaaaactttacagtcaga

SEQ ID NO: 9372 - DNA, 28 bp, Homo sapiens
  source 1..28: mol_type = genomic DNA
cataaaacttaaaactttacagtcagag

SEQ ID NO: 9373 - DNA, 29 bp, Homo sapiens
  source 1..29: mol_type = genomic DNA
cataaaacttaaaactttacagtcagagg

SEQ ID NO: 9374 - DNA, 30 bp, Homo sapiens
  source 1..30: mol_type = genomic DNA
cataaaacttaaaactttacagtcagaggt

SEQ ID NO: 9375 - DNA, 31 bp, Homo sapiens
  source 1..31: mol_type = genomic DNA
cataaaacttaaaactttacagtcagaggtt

SEQ ID NO: 9376 - DNA, 32 bp, Homo sapiens
  source 1..32: mol_type = genomic DNA
cataaaacttaaaactttacagtcagaggttc

SEQ ID NO: 9377 - DNA, 33 bp, Homo sapiens
  source 1..33: mol_type = genomic DNA
cataaaacttaaaactttacagtcagaggttca

SEQ ID NO: 9378 - DNA, 43 bp, Homo sapiens
  source 1..43: mol_type = genomic DNA
cataaaacttaaaactttacagtcagaggttcaattcctcttc

SEQ ID NO: 9379 - DNA, 17 bp, Homo sapiens
  source 1..17: mol_type = genomic DNA
cataacccagaggtcga

SEQ ID NO: 9380 - DNA, 18 bp, Homo sapiens
  source 1..18: mol_type = genomic DNA
cataacccagaggtcgat

SEQ ID NO: 9381 - DNA, 19 bp, Homo sapiens
  source 1..19: mol_type = genomic DNA
cataacccagaggtcgatg

SEQ ID NO: 9382 - DNA, 22 bp, Homo sapiens
  source 1..22: mol_type = genomic DNA
cataacccagaggtcgatggat

SEQ ID NO: 9383 - DNA, 23 bp, Homo sapiens
  source 1..23: mol_type = genomic DNA
cataacccagaggtcgatggatc

SEQ ID NO: 9384 - DNA, 24 bp, Homo sapiens
  source 1..24: mol_type = genomic DNA
cataacccagaggtcgatggatcg

SEQ ID NO: 9385 - DNA, 25 bp, Homo sapiens
  source 1..25: mol_type = genomic DNA
cataacccagaggtcgatggatcga

SEQ ID NO: 9386 - DNA, 26 bp, Homo sapiens
  source 1..26: mol_type = genomic DNA
cataacccagaggtcgatggatcgaa

SEQ ID NO: 9387 - DNA, 29 bp, Homo sapiens
  source 1..29: mol_type = genomic DNA
cataacccagaggtcgatggatcgaaacc

SEQ ID NO: 9388 - DNA, 35 bp, Homo sapiens
  source 1..35: mol_type = genomic DNA
cataacccagaggtcgatggatcgaaaccatcctc

SEQ ID NO: 9389 - DNA, 36 bp, Homo sapiens
  source 1..36: mol_type = genomic DNA
cataacccagaggtcgatggatcgaaaccatcctct

SEQ ID NO: 9390 - DNA, 16 bp, Homo sapiens
  source 1..16: mol_type = genomic DNA
cataactttgtcaaag

SEQ ID NO: 9391 - DNA, 17 bp, Homo sapiens
  source 1..17: mol_type = genomic DNA
cataactttgtcaaagt

SEQ ID NO: 9392 - DNA, 19 bp, Homo sapiens
  source 1..19: mol_type = genomic DNA
cataactttgtcaaagtta

SEQ ID NO: 9393 - DNA, 29 bp, Homo sapiens
  source 1..29: mol_type = genomic DNA
cataactttgtcaaagttaaattataggc

SEQ ID NO: 9394 - DNA, 30 bp, Homo sapiens
  source 1..30: mol_type = genomic DNA
cataactttgtcaaagttaaattataggct

SEQ ID NO: 9395 - DNA, 31 bp, Homo sapiens
  source 1..31: mol_type = genomic DNA
cataactttgtcaaagttaaattataggcta

SEQ ID NO: 9396 - DNA, 32 bp, Homo sapiens
  source 1..32: mol_type = genomic DNA
cataactttgtcaaagttaaattataggctaa

SEQ ID NO: 9397 - DNA, 33 bp, Homo sapiens
  source 1..33: mol_type = genomic DNA
cataactttgtcaaagttaaattataggctaaa

SEQ ID NO: 9398 - DNA, 17 bp, Homo sapiens
  source 1..17: mol_type = genomic DNA
cataatctgaaagtcct

SEQ ID NO: 9399 - DNA, 16 bp, Homo sapiens
  source 1..16: mol_type = genomic DNA
cataatctgaaggtcc

SEQ ID NO: 9400 - DNA, 17 bp, Homo sapiens
  source 1..17: mol_type = genomic DNA
cataatctgaaggtcct

SEQ ID NO: 9401 - DNA, 18 bp, Homo sapiens
  source 1..18: mol_type = genomic DNA
cataatctgaaggtcctg

SEQ ID NO: 9402 - DNA, 19 bp, Homo sapiens
  source 1..19: mol_type = genomic DNA
cataatctgaaggtcctga

SEQ ID NO: 9403 - DNA, 20 bp, Homo sapiens
  source 1..20: mol_type = genomic DNA
cataatctgaaggtcctgag

SEQ ID NO: 9404 - DNA, 21 bp, Homo sapiens
  source 1..21: mol_type = genomic DNA
cataatctgaaggtcctgagt

SEQ ID NO: 9405 - DNA, 22 bp, Homo sapiens
  source 1..22: mol_type = genomic DNA
cataatctgaaggtcctgagtt

SEQ ID NO: 9406 - DNA, 23 bp, Homo sapiens
  source 1..23: mol_type = genomic DNA
cataatctgaaggtcctgagttc

SEQ ID NO: 9407 - DNA, 24 bp, Homo sapiens
  source 1..24: mol_type = genomic DNA
cataatctgaaggtcctgagttcg

SEQ ID NO: 9408 - DNA, 30 bp, Homo sapiens
  source 1..30: mol_type = genomic DNA
cataatctgaaggtcctgagttcgaacctc

SEQ ID NO: 9409 - DNA, 31 bp, Homo sapiens
  source 1..31: mol_type = genomic DNA
cataatctgaaggtcctgagttcgaacctca

SEQ ID NO: 9410 - DNA, 36 bp, Homo sapiens
  source 1..36: mol_type = genomic DNA
cataatctgaaggtcctgagttcgaacctcagaggg

SEQ ID NO: 9411 - DNA, 37 bp, Homo sapiens
  source 1..37: mol_type = genomic DNA
cataatctgaaggtcctgagttcgaacctcagagggg

SEQ ID NO: 9412 - DNA, 38 bp, Homo sapiens
  source 1..38: mol_type = genomic DNA
cataatctgaaggtcctgagttcgaacctcagaggggg

SEQ ID NO: 9413 - DNA, 40 bp, Homo sapiens
  source 1..40: mol_type = genomic DNA
cataatctgaaggtcctgagttcgaacctcagagggggca

SEQ ID NO: 9414 - DNA, 41 bp, Homo sapiens
  source 1..41: mol_type = genomic DNA
cataatctgaaggtcctgagttcgaacctcagagggggcac

SEQ ID NO: 9415 - DNA, 42 bp, Homo sapiens
  source 1..42: mol_type = genomic DNA
cataatctgaaggtcctgagttcgaacctcagagggggcacc

SEQ ID NO: 9416 - DNA, 43 bp, Homo sapiens
  source 1..43: mol_type = genomic DNA
cataatctgaaggtcctgagttcgaacctcagagggggcacca

SEQ ID NO: 9417 - DNA, 28 bp, Homo sapiens
  source 1..28: mol_type = genomic DNA
cataatctgaaggtcctgagttcgagcc

SEQ ID NO: 9418 - DNA, 16 bp, Homo sapiens
  source 1..16: mol_type = genomic DNA
cataatctgaaggtcg

SEQ ID NO: 9419 - DNA, 18 bp, Homo sapiens
  source 1..18: mol_type = genomic DNA
cataatctgaaggtcgtg

SEQ ID NO: 9420 - DNA, 19 bp, Homo sapiens
  source 1..19: mol_type = genomic DNA
cataatctgaaggtcgtga

SEQ ID NO: 9421 - DNA, 20 bp, Homo sapiens
  source 1..20: mol_type = genomic DNA
cataatctgaaggtcgtgag

SEQ ID NO: 9422 - DNA, 21 bp, Homo sapiens
  source 1..21: mol_type = genomic DNA
cataatctgaaggtcgtgagt

SEQ ID NO: 9423 - DNA, 22 bp, Homo sapiens
  source 1..22: mol_type = genomic DNA
cataatctgaaggtcgtgagtt

SEQ ID NO: 9424 - DNA, 23 bp, Homo sapiens
  source 1..23: mol_type = genomic DNA
cataatctgaaggtcgtgagttc

SEQ ID NO: 9425 - DNA, 24 bp, Homo sapiens
  source 1..24: mol_type = genomic DNA
cataatctgaaggtcgtgagttcg

SEQ ID NO: 9426 - DNA, 29 bp, Homo sapiens
  source 1..29: mol_type = genomic DNA
cataatctgaaggtcgtgagttcgagcct

SEQ ID NO: 9427 - DNA, 35 bp, Homo sapiens
  source 1..35: mol_type = genomic DNA
cataatctgaaggtcgtgagttcgagcctcacacg

SEQ ID NO: 9428 - DNA, 37 bp, Homo sapiens
  source 1..37: mol_type = genomic DNA
cataatctgaaggtcgtgagttcgagcctcacacggg

SEQ ID NO: 9429 - DNA, 40 bp, Homo sapiens
  source 1..40: mol_type = genomic DNA
cataatctgaaggtcgtgagttcgagcctcacacggggca

SEQ ID NO: 9430 - DNA, 41 bp, Homo sapiens
  source 1..41: mol_type = genomic DNA
cataatctgaaggtcgtgagttcgagcctcacacggggcac

SEQ ID NO: 9431 - DNA, 42 bp, Homo sapiens
  source 1..42: mol_type = genomic DNA
cataatctgaaggtcgtgagttcgagcctcacacggggcacc

SEQ ID NO: 9432 - DNA, 43 bp, Homo sapiens
  source 1..43: mol_type = genomic DNA
cataatctgaaggtcgtgagttcgagcctcacacggggcacca

SEQ ID NO: 9433 - DNA, 37 bp, Homo sapiens
  source 1..37: mol_type = genomic DNA
cataatctgaaggtcgtgagttcgatcctcacacggg

SEQ ID NO: 9434 - DNA, 41 bp, Homo sapiens
  source 1..41: mol_type = genomic DNA
cataatctgaaggtcgtgagttcgatcctcacacggggcac

SEQ ID NO: 9435 - DNA, 42 bp, Homo sapiens
  source 1..42: mol_type = genomic DNA
cataatctgaaggtcgtgagttcgatcctcacacggggcacc

SEQ ID NO: 9436 - DNA, 43 bp, Homo sapiens
  source 1..43: mol_type = genomic DNA
cataatctgaaggtcgtgagttcgatcctcacacggggcacca

SEQ ID NO: 9437 - DNA, 22 bp, Homo sapiens
  source 1..22: mol_type = genomic DNA
cataccccgaaaatgttggtta

SEQ ID NO: 9438 - DNA, 23 bp, Homo sapiens
  source 1..23: mol_type = genomic DNA
cataccccgaaaatgttggttat

SEQ ID NO: 9439 - DNA, 35 bp, Homo sapiens
  source 1..35: mol_type = genomic DNA
cataccccgaaaatgttggttatacccttcccgta

SEQ ID NO: 9440 - DNA, 37 bp, Homo sapiens
  source 1..37: mol_type = genomic DNA
cataccccgaaaatgttggttatacccttcccgtact

SEQ ID NO: 9441 - DNA, 38 bp, Homo sapiens
  source 1..38: mol_type = genomic DNA
cataccccgaaaatgttggttatacccttcccgtacta

SEQ ID NO: 9442 - DNA, 40 bp, Homo sapiens
  source 1..40: mol_type = genomic DNA
cataccccgaaaatgttggttatacccttcccgtactacc

SEQ ID NO: 9443 - DNA, 41 bp, Homo sapiens
  source 1..41: mol_type = genomic DNA
cataccccgaaaatgttggttatacccttcccgtactacca

SEQ ID NO: 9444 - DNA, 28 bp, Homo sapiens
  source 1..28: mol_type = genomic DNA
catagctcaggggttagagcactggtct

SEQ ID NO: 9445 - DNA, 23 bp, Homo sapiens
  source 1..23: mol_type = genomic DNA
catagctgccttccaagcagttg

SEQ ID NO: 9446 - DNA, 29 bp, Homo sapiens
  source 1..29: mol_type = genomic DNA
catagctgccttccaagcagttgacccgg

SEQ ID NO: 9447 - DNA, 31 bp, Homo sapiens
  source 1..31: mol_type = genomic DNA
catagctgccttccaagcagttgacccgggt

SEQ ID NO: 9448 - DNA, 25 bp, Homo sapiens
  source 1..25: mol_type = genomic DNA
catagtgtagcggttatcacgtctg

SEQ ID NO: 9449 - DNA, 28 bp, Homo sapiens
  source 1..28: mol_type = genomic DNA
catagtgtagcggttatcacgtctgctt

SEQ ID NO: 9450 - DNA, 18 bp, Homo sapiens
  source 1..18: mol_type = genomic DNA
catagtgtagtggttatc

SEQ ID NO: 9451 - DNA, 27 bp, Homo sapiens
  source 1..27: mol_type = genomic DNA
catagtgtagtggttatcacgtctgct

SEQ ID NO: 9452 - DNA, 28 bp, Homo sapiens
  source 1..28: mol_type = genomic DNA
catagtgtagtggttatcacgtctgctt

SEQ ID NO: 9453 - DNA, 29 bp, Homo sapiens
  source 1..29: mol_type = genomic DNA
catagtgtagtggttatcacgtctgcttt

SEQ ID NO: 9454 - DNA, 30 bp, Homo sapiens
  source 1..30: mol_type = genomic DNA
catagtgtagtggttatcacgtctgcttta

SEQ ID NO: 9455 - DNA, 31 bp, Homo sapiens
  source 1..31: mol_type = genomic DNA
catagtgtagtggttatcacgtctgctttac

SEQ ID NO: 9456 - DNA, 19 bp, Homo sapiens
  source 1..19: mol_type = genomic DNA
catatcattggtcgtggtt

SEQ ID NO: 9457 - DNA, 20 bp, Homo sapiens
  source 1..20: mol_type = genomic DNA
catatcattggtcgtggttg

SEQ ID NO: 9458 - DNA, 21 bp, Homo sapiens
  source 1..21: mol_type = genomic DNA
catatcattggtcgtggttgt

SEQ ID NO: 9459 - DNA, 22 bp, Homo sapiens
  source 1..22: mol_type = genomic DNA
catatcattggtcgtggttgta

SEQ ID NO: 9460 - DNA, 24 bp, Homo sapiens
  source 1..24: mol_type = genomic DNA
catatcattggtcgtggttgtagt

SEQ ID NO: 9461 - DNA, 25 bp, Homo sapiens
  source 1..25: mol_type = genomic DNA
catatcattggtcgtggttgtagtc

SEQ ID NO: 9462 - DNA, 26 bp, Homo sapiens
  source 1..26: mol_type = genomic DNA
catatcattggtcgtggttgtagtcc

SEQ ID NO: 9463 - DNA, 27 bp, Homo sapiens
  source 1..27: mol_type = genomic DNA
catatcattggtcgtggttgtagtccg

SEQ ID NO: 9464 - DNA, 28 bp, Homo sapiens
  source 1..28: mol_type = genomic DNA
catatcattggtcgtggttgtagtccgt

SEQ ID NO: 9465 - DNA, 29 bp, Homo sapiens
  source 1..29: mol_type = genomic DNA
catatcattggtcgtggttgtagtccgtg

SEQ ID NO: 9466 - DNA, 30 bp, Homo sapiens
  source 1..30: mol_type = genomic DNA
catatcattggtcgtggttgtagtccgtgc

SEQ ID NO: 9467 - DNA, 31 bp, Homo sapiens
  source 1..31: mol_type = genomic DNA
catatcattggtcgtggttgtagtccgtgcg

SEQ ID NO: 9468 - DNA, 32 bp, Homo sapiens
  source 1..32: mol_type = genomic DNA
catatcattggtcgtggttgtagtccgtgcga

SEQ ID NO: 9469 - DNA, 33 bp, Homo sapiens
  source 1..33: mol_type = genomic DNA
catatcattggtcgtggttgtagtccgtgcgag

SEQ ID NO: 9470 - DNA, 34 bp, Homo sapiens
  source 1..34: mol_type = genomic DNA
catatcattggtcgtggttgtagtccgtgcgaga

SEQ ID NO: 9471 - DNA, 35 bp, Homo sapiens
  source 1..35: mol_type = genomic DNA
catatcattggtcgtggttgtagtccgtgcgagaa

SEQ ID NO: 9472 - DNA, 36 bp, Homo sapiens
  source 1..36: mol_type = genomic DNA
catatcattggtcgtggttgtagtccgtgcgagaat

SEQ ID NO: 9473 - DNA, 37 bp, Homo sapiens
  source 1..37: mol_type = genomic DNA
catatcattggtcgtggttgtagtccgtgcgagaata

SEQ ID NO: 9474 - DNA, 38 bp, Homo sapiens
  source 1..38: mol_type = genomic DNA
catatcattggtcgtggttgtagtccgtgcgagaatac

SEQ ID NO: 9475 - DNA, 39 bp, Homo sapiens
  source 1..39: mol_type = genomic DNA
catatcattggtcgtggttgtagtccgtgcgagaatacc

SEQ ID NO: 9476 - DNA, 40 bp, Homo sapiens
  source 1..40: mol_type = genomic DNA
catatcattggtcgtggttgtagtccgtgcgagaatacca

SEQ ID NO: 9477 - DNA, 22 bp, Homo sapiens
  source 1..22: mol_type = genomic DNA
catatggtctagcggttaggat

SEQ ID NO: 9478 - DNA, 23 bp, Homo sapiens
  source 1..23: mol_type = genomic DNA
catatggtctagcggttaggatt

SEQ ID NO: 9479 - DNA, 25 bp, Homo sapiens
  source 1..25: mol_type = genomic DNA
catatggtctagcggttaggattcc

SEQ ID NO: 9480 - DNA, 26 bp, Homo sapiens
  source 1..26: mol_type = genomic DNA
catatggtctagcggttaggattcct

SEQ ID NO: 9481 - DNA, 27 bp, Homo sapiens
  source 1..27: mol_type = genomic DNA
catatggtctagcggttaggattcctg

SEQ ID NO: 9482 - DNA, 28 bp, Homo sapiens
  source 1..28: mol_type = genomic DNA
catatggtctagcggttaggattcctgg

SEQ ID NO: 9483 - DNA, 29 bp, Homo sapiens
  source 1..29: mol_type = genomic DNA
catatggtctagcggttaggattcctggt

SEQ ID NO: 9484 - DNA, 30 bp, Homo sapiens
  source 1..30: mol_type = genomic DNA
catatggtctagcggttaggattcctggtt

SEQ ID NO: 9485 - DNA, 31 bp, Homo sapiens
  source 1..31: mol_type = genomic DNA
catatggtctagcggttaggattcctggttt

SEQ ID NO: 9486 - DNA, 32 bp, Homo sapiens
  source 1..32: mol_type = genomic DNA
catatggtctagcggttaggattcctggtttt

SEQ ID NO: 9487 - DNA, 33 bp, Homo sapiens
  source 1..33: mol_type = genomic DNA
catatggtctagcggttaggattcctggttttc

SEQ ID NO: 9488 - DNA, 34 bp, Homo sapiens
  source 1..34: mol_type = genomic DNA
catatggtctagcggttaggattcctggttttca

SEQ ID NO: 9489 - DNA, 35 bp, Homo sapiens
  source 1..35: mol_type = genomic DNA
catatggtctagcggttaggattcctggttttcac

SEQ ID NO: 9490 - DNA, 36 bp, Homo sapiens
  source 1..36: mol_type = genomic DNA
catatggtctagcggttaggattcctggttttcacc

SEQ ID NO: 9491 - DNA, 37 bp, Homo sapiens
  source 1..37: mol_type = genomic DNA
catatggtctagcggttaggattcctggttttcaccc

SEQ ID NO: 9492 - DNA, 16 bp, Homo sapiens
  source 1..16: mol_type = genomic DNA
catatgtccgcgtggg

SEQ ID NO: 9493 - DNA, 17 bp, Homo sapiens
  source 1..17: mol_type = genomic DNA
catatgtccgcgtgggt

SEQ ID NO: 9494 - DNA, 18 bp, Homo sapiens
  source 1..18: mol_type = genomic DNA
catatgtccgcgtgggtt

SEQ ID NO: 9495 - DNA, 20 bp, Homo sapiens
  source 1..20: mol_type = genomic DNA
catatgtccgcgtgggttcg

SEQ ID NO: 9496 - DNA, 26 bp, Homo sapiens
  source 1..26: mol_type = genomic DNA
catatgtccgcgtgggttcgaacccc

SEQ ID NO: 9497 - DNA, 27 bp, Homo sapiens
  source 1..27: mol_type = genomic DNA
catatgtccgcgtgggttcgaacccca

SEQ ID NO: 9498 - DNA, 29 bp, Homo sapiens
  source 1..29: mol_type = genomic DNA
catatgtccgcgtgggttcgaaccccact

SEQ ID NO: 9499 - DNA, 31 bp, Homo sapiens
  source 1..31: mol_type = genomic DNA
catatgtccgcgtgggttcgaaccccactcc

SEQ ID NO: 9500 - DNA, 33 bp, Homo sapiens
  source 1..33: mol_type = genomic DNA
catatgtccgcgtgggttcgaaccccactcctg

SEQ ID NO: 9501 - DNA, 36 bp, Homo sapiens
  source 1..36: mol_type = genomic DNA
catatgtccgcgtgggttcgaaccccactcctggta

SEQ ID NO: 9502 - DNA, 37 bp, Homo sapiens
  source 1..37: mol_type = genomic DNA
catatgtccgcgtgggttcgaaccccactcctggtac

SEQ ID NO: 9503 - DNA, 38 bp, Homo sapiens
  source 1..38: mol_type = genomic DNA
catatgtccgcgtgggttcgaaccccactcctggtacc

SEQ ID NO: 9504 - DNA, 16 bp, Homo sapiens
  source 1..16: mol_type = genomic DNA
catattgaattgcaaa

SEQ ID NO: 9505 - DNA, 17 bp, Homo sapiens
  source 1..17: mol_type = genomic DNA
catattgaattgcaaat

SEQ ID NO: 9506 - DNA, 18 bp, Homo sapiens
  source 1..18: mol_type = genomic DNA
catattgaattgcaaatt

SEQ ID NO: 9507 - DNA, 19 bp, Homo sapiens
  source 1..19: mol_type = genomic DNA
catattgaattgcaaattc

SEQ ID NO: 9508 - DNA, 22 bp, Homo sapiens
  source 1..22: mol_type = genomic DNA
catattgaattgcaaattcgaa

SEQ ID NO: 9509 - DNA, 24 bp, Homo sapiens
  source 1..24: mol_type = genomic DNA
catattgaattgcaaattcgaaga

SEQ ID NO: 9510 - DNA, 31 bp, Homo sapiens
  source 1..31: mol_type = genomic DNA
catattgaattgcaaattcgaagaagcagct

SEQ ID NO: 9511 - DNA, 33 bp, Homo sapiens
  source 1..33: mol_type = genomic DNA
catattgaattgcaaattcgaagaagcagcttc

SEQ ID NO: 9512 - DNA, 47 bp, Homo sapiens
  source 1..47: mol_type = genomic DNA
catattgaattgcaaattcgaagaagcagcttcaaacctgccggggc

SEQ ID NO: 9513 - DNA, 48 bp, Homo sapiens
  source 1..48: mol_type = genomic DNA
catattgaattgcaaattcgaagaagcagcttcaaacctgccggggct

SEQ ID NO: 9514 - DNA, 16 bp, Homo sapiens
  source 1..16: mol_type = genomic DNA
catcaccccataaaca

SEQ ID NO: 9515 - DNA, 17 bp, Homo sapiens
  source 1..17: mol_type = genomic DNA
catcaccccataaacac

SEQ ID NO: 9516 - DNA, 18 bp, Homo sapiens
  source 1..18: mol_type = genomic DNA
catcaccccataaacacc

SEQ ID NO: 9517 - DNA, 19 bp, Homo sapiens
  source 1..19: mol_type = genomic DNA
catcaccccataaacacca

SEQ ID NO: 9518 - DNA, 16 bp, Homo sapiens
  source 1..16: mol_type = genomic DNA
catcagattgtgaatc

SEQ ID NO: 9519 - DNA, 17 bp, Homo sapiens
  source 1..17: mol_type = genomic DNA
catcagattgtgaatct

SEQ ID NO: 9520 - DNA, 18 bp, Homo sapiens
  source 1..18: mol_type = genomic DNA
catcagattgtgaatctg

SEQ ID NO: 9521 - DNA, 19 bp, Homo sapiens
  source 1..19: mol_type = genomic DNA
catcagattgtgaatctga

SEQ ID NO: 9522 - DNA, 20 bp, Homo sapiens
  source 1..20: mol_type = genomic DNA
catcagattgtgaatctgac

SEQ ID NO: 9523 - DNA, 21 bp, Homo sapiens
  source 1..21: mol_type = genomic DNA
catcagattgtgaatctgaca

SEQ ID NO: 9524 - DNA, 22 bp, Homo sapiens
  source 1..22: mol_type = genomic DNA
catcagattgtgaatctgacaa

SEQ ID NO: 9525 - DNA, 23 bp, Homo sapiens
  source 1..23: mol_type = genomic DNA
catcagattgtgaatctgacaac

SEQ ID NO: 9526 - DNA, 24 bp, Homo sapiens
  source 1..24: mol_type = genomic DNA
catcagattgtgaatctgacaaca

SEQ ID NO: 9527 - DNA, 25 bp, Homo sapiens
  source 1..25: mol_type = genomic DNA
catcagattgtgaatctgacaacag

SEQ ID NO: 9528 - DNA, 26 bp, Homo sapiens
  source 1..26: mol_type = genomic DNA
catcagattgtgaatctgacaacaga

SEQ ID NO: 9529 - DNA, 27 bp, Homo sapiens
  source 1..27: mol_type = genomic DNA
catcagattgtgaatctgacaacagag

SEQ ID NO: 9530 - DNA, 28 bp, Homo sapiens
  source 1..28: mol_type = genomic DNA
catcagattgtgaatctgacaacagagg

SEQ ID NO: 9531 - DNA, 29 bp, Homo sapiens
  source 1..29: mol_type = genomic DNA
catcagattgtgaatctgacaacagaggc

SEQ ID NO: 9532 - DNA, 30 bp, Homo sapiens
  source 1..30: mol_type = genomic DNA
catcagattgtgaatctgacaacagaggct

SEQ ID NO: 9533 - DNA, 31 bp, Homo sapiens
  source 1..31: mol_type = genomic DNA
catcagattgtgaatctgacaacagaggctt

SEQ ID NO: 9534 - DNA, 32 bp, Homo sapiens
  source 1..32: mol_type = genomic DNA
catcagattgtgaatctgacaacagaggctta

SEQ ID NO: 9535 - DNA, 33 bp, Homo sapiens
  source 1..33: mol_type = genomic DNA
catcagattgtgaatctgacaacagaggcttac

SEQ ID NO: 9536 - DNA, 34 bp, Homo sapiens
  source 1..34: mol_type = genomic DNA
catcagattgtgaatctgacaacagaggcttacg

SEQ ID NO: 9537 - DNA, 35 bp, Homo sapiens
  source 1..35: mol_type = genomic DNA
catcagattgtgaatctgacaacagaggcttacga

SEQ ID NO: 9538 - DNA, 36 bp, Homo sapiens
  source 1..36: mol_type = genomic DNA
catcagattgtgaatctgacaacagaggcttacgac

SEQ ID NO: 9539 - DNA, 37 bp, Homo sapiens
  source 1..37: mol_type = genomic DNA
catcagattgtgaatctgacaacagaggcttacgacc

SEQ ID NO: 9540 - DNA, 38 bp, Homo sapiens
  source 1..38: mol_type = genomic DNA
catcagattgtgaatctgacaacagaggcttacgaccc

SEQ ID NO: 9541 - DNA, 39 bp, Homo sapiens
  source 1..39: mol_type = genomic DNA
catcagattgtgaatctgacaacagaggcttacgacccc

SEQ ID NO: 9542 - DNA, 40 bp, Homo sapiens
  source 1..40: mol_type = genomic DNA
catcagattgtgaatctgacaacagaggcttacgacccct

SEQ ID NO: 9543 - DNA, 41 bp, Homo sapiens
  source 1..41: mol_type = genomic DNA
catcagattgtgaatctgacaacagaggcttacgacccctt

SEQ ID NO: 9544 - DNA, 42 bp, Homo sapiens
  source 1..42: mol_type = genomic DNA
catcagattgtgaatctgacaacagaggcttacgacccctta

SEQ ID NO: 9545 - DNA, 43 bp, Homo sapiens
  source 1..43: mol_type = genomic DNA
catcagattgtgaatctgacaacagaggcttacgaccccttat

SEQ ID NO: 9546 - DNA, 44 bp, Homo sapiens
  source 1..44: mol_type = genomic DNA
catcagattgtgaatctgacaacagaggcttacgaccccttatt

SEQ ID NO: 9547 - DNA, 47 bp, Homo sapiens
  source 1..47: mol_type = genomic DNA
catcagattgtgaatctgacaacagaggcttacgaccccttatttac

SEQ ID NO: 9548 - DNA, 48 bp, Homo sapiens
  source 1..48: mol_type = genomic DNA
catcagattgtgaatctgacaacagaggcttacgaccccttatttacc

SEQ ID NO: 9549 - DNA, 18 bp, Homo sapiens
  source 1..18: mol_type = genomic DNA
catcagcctccggagctg

SEQ ID NO: 9550 - DNA, 26 bp, Homo sapiens
  source 1..26: mol_type = genomic DNA
catcagcctccggagctggggattgt

SEQ ID NO: 9551 - DNA, 16 bp, Homo sapiens
  source 1..16: mol_type = genomic DNA
catgagacccttaatc

SEQ ID NO: 9552 - DNA, 16 bp, Homo sapiens
  source 1..16: mol_type = genomic DNA
catgagactcttaatc

SEQ ID NO: 9553 - DNA, 17 bp, Homo sapiens
  source 1..17: mol_type = genomic DNA
catgagactcttaatct

SEQ ID NO: 9554 - DNA, 18 bp, Homo sapiens
  source 1..18: mol_type = genomic DNA
catgagactcttaatctc

SEQ ID NO: 9555 - DNA, 39 bp, Homo sapiens
  source 1..39: mol_type = genomic DNA
catgagactcttaatctcagggtcgtgggttcgagcccc

SEQ ID NO: 9556 - DNA, 17 bp, Homo sapiens
  source 1..17: mol_type = genomic DNA
catgaggtcccgggttc

SEQ ID NO: 9557 - DNA, 33 bp, Homo sapiens
  source 1..33: mol_type = genomic DNA
catgaggtcccgggttcgatccccagcatctcc

SEQ ID NO: 9558 - DNA, 35 bp, Homo sapiens
  source 1..35: mol_type = genomic DNA
catgaggtcccgggttcgatccccagcatctccac

SEQ ID NO: 9559 - DNA, 36 bp, Homo sapiens
  source 1..36: mol_type = genomic DNA
catgaggtcccgggttcgatccccagcatctccacc

SEQ ID NO: 9560 - DNA, 37 bp, Homo sapiens
  source 1..37: mol_type = genomic DNA
catgaggtcccgggttcgatccccagcatctccacca

SEQ ID NO: 9561 - DNA, 28 bp, Homo sapiens
  source 1..28: mol_type = genomic DNA
catgatcgtatagtggttagtactctgc

SEQ ID NO: 9562 - DNA, 16 bp, Homo sapiens
  source 1..16: mol_type = genomic DNA
catgcaagattcccat

SEQ ID NO: 9563 - DNA, 18 bp, Homo sapiens
  source 1..18: mol_type = genomic DNA
catgcaagattcccattc

SEQ ID NO: 9564 - DNA, 29 bp, Homo sapiens
  source 1..29: mol_type = genomic DNA
catgcaagattcccattcttgcgacccgg

SEQ ID NO: 9565 - DNA, 31 bp, Homo sapiens
  source 1..31: mol_type = genomic DNA
catgcaagattcccattcttgcgacccgggt

SEQ ID NO: 9566 - DNA, 16 bp, Homo sapiens
  source 1..16: mol_type = genomic DNA
catgcccccatgtcta

SEQ ID NO: 9567 - DNA, 17 bp, Homo sapiens
  source 1..17: mol_type = genomic DNA
catgcccccatgtctaa

SEQ ID NO: 9568 - DNA, 18 bp, Homo sapiens
  source 1..18: mol_type = genomic DNA
catgcccccatgtctaac

SEQ ID NO: 9569 - DNA, 19 bp, Homo sapiens
  source 1..19: mol_type = genomic DNA
catgcccccatgtctaaca

SEQ ID NO: 9570 - DNA, 20 bp, Homo sapiens
  source 1..20: mol_type = genomic DNA
catgcccccatgtctaacaa

SEQ ID NO: 9571 - DNA, 21 bp, Homo sapiens
  source 1..21: mol_type = genomic DNA
catgcccccatgtctaacaac

SEQ ID NO: 9572 - DNA, 22 bp, Homo sapiens
  source 1..22: mol_type = genomic DNA
catgcccccatgtctaacaaca

SEQ ID NO: 9573 - DNA, 24 bp, Homo sapiens
  source 1..24: mol_type = genomic DNA
catgcccccatgtctaacaacatg

SEQ ID NO: 9574 - DNA, 25 bp, Homo sapiens
  source 1..25: mol_type = genomic DNA
catgcccccatgtctaacaacatgg

SEQ ID NO: 9575 - DNA, 26 bp, Homo sapiens
  source 1..26: mol_type = genomic DNA
catgcccccatgtctaacaacatggc

SEQ ID NO: 9576 - DNA, 27 bp, Homo sapiens
  source 1..27: mol_type = genomic DNA
catgcccccatgtctaacaacatggct

SEQ ID NO: 9577 - DNA, 28 bp, Homo sapiens
  source 1..28: mol_type = genomic DNA
catgcccccatgtctaacaacatggctt

SEQ ID NO: 9578 - DNA, 29 bp, Homo sapiens
  source 1..29: mol_type = genomic DNA
catgcccccatgtctaacaacatggcttt

SEQ ID NO: 9579 - DNA, 30 bp, Homo sapiens
  source 1..30: mol_type = genomic DNA
catgcccccatgtctaacaacatggctttc

SEQ ID NO: 9580 - DNA, 31 bp, Homo sapiens
  source 1..31: mol_type = genomic DNA
catgcccccatgtctaacaacatggctttct

SEQ ID NO: 9581 - DNA, 32 bp, Homo sapiens
  source 1..32: mol_type = genomic DNA
catgcccccatgtctaacaacatggctttctc

SEQ ID NO: 9582 - DNA, 33 bp, Homo sapiens
  source 1..33: mol_type = genomic DNA
catgcccccatgtctaacaacatggctttctca

SEQ ID NO: 9583 - DNA, 34 bp, Homo sapiens
  source 1..34: mol_type = genomic DNA
catgcccccatgtctaacaacatggctttctcac

SEQ ID NO: 9584 - DNA, 35 bp, Homo sapiens
  source 1..35: mol_type = genomic DNA
catgcccccatgtctaacaacatggctttctcacc

SEQ ID NO: 9585 - DNA, 36 bp, Homo sapiens
  source 1..36: mol_type = genomic DNA
catgcccccatgtctaacaacatggctttctcacca

SEQ ID NO: 9586 - DNA, 18 bp, Homo sapiens
  source 1..18: mol_type = genomic DNA
catggaggccatggggtt

SEQ ID NO: 9587 - DNA, 19 bp, Homo sapiens
  source 1..19: mol_type = genomic DNA
catggaggccatggggttg

SEQ ID NO: 9588 - DNA, 20 bp, Homo sapiens
  source 1..20: mol_type = genomic DNA
catggaggccatggggttgg

SEQ ID NO: 9589 - DNA, 21 bp, Homo sapiens
  source 1..21: mol_type = genomic DNA
catggaggccatggggttggc

SEQ ID NO: 9590 - DNA, 25 bp, Homo sapiens
  source 1..25: mol_type = genomic DNA
catggaggccatggggttggcttga

SEQ ID NO: 9591 - DNA, 16 bp, Homo sapiens
  source 1..16: mol_type = genomic DNA
catggaggcgtgggtt

SEQ ID NO: 9592 - DNA, 34 bp, Homo sapiens
  source 1..34: mol_type = genomic DNA
catggaggcgtgggttcgaatcccacttctgaca

SEQ ID NO: 9593 - DNA, 36 bp, Homo sapiens
  source 1..36: mol_type = genomic DNA
catggaggcgtgggttcgaatcccacttctgacacc

SEQ ID NO: 9594 - DNA, 16 bp, Homo sapiens
  source 1..16: mol_type = genomic DNA
catggctttctcacca

SEQ ID NO: 9595 - DNA, 16 bp, Homo sapiens
  source 1..16: mol_type = genomic DNA
catgggactcttaatc

SEQ ID NO: 9596 - DNA, 17 bp, Homo sapiens
  source 1..17: mol_type = genomic DNA
catgggactcttaatcc

SEQ ID NO: 9597 - DNA, 18 bp, Homo sapiens
  source 1..18: mol_type = genomic DNA
catgggactcttaatccc

SEQ ID NO: 9598 - DNA, 26 bp, Homo sapiens
  source 1..26: mol_type = genomic DNA
catgggactcttaatcccagggtcgt

SEQ ID NO: 9599 - DNA, 31 bp, Homo sapiens
  source 1..31: mol_type = genomic DNA
catgggactcttaatcccagggtcgtgggtt

SEQ ID NO: 9600 - DNA, 32 bp, Homo sapiens
  source 1..32: mol_type = genomic DNA
catgggactcttaatcccagggtcgtgggttc

SEQ ID NO: 9601 - DNA, 36 bp, Homo sapiens
  source 1..36: mol_type = genomic DNA
catgggactcttaatcccagggtcgtgggttcgagc

SEQ ID NO: 9602 - DNA, 17 bp, Homo sapiens
  source 1..17: mol_type = genomic DNA
catgggactcttaatct

SEQ ID NO: 9603 - DNA, 18 bp, Homo sapiens
  source 1..18: mol_type = genomic DNA
catgggactcttaatctc

SEQ ID NO: 9604 - DNA, 16 bp, Homo sapiens
  source 1..16: mol_type = genomic DNA
catggggttggcttga

SEQ ID NO: 9605 - DNA, 20 bp, Homo sapiens
  source 1..20: mol_type = genomic DNA
catggggttggcttgaaacc

SEQ ID NO: 9606 - DNA, 24 bp, Homo sapiens
  source 1..24: mol_type = genomic DNA
catggggttggcttgaaaccagct

SEQ ID NO: 9607 - DNA, 27 bp, Homo sapiens
  source 1..27: mol_type = genomic DNA
catggggttggcttgaaaccagctttg

SEQ ID NO: 9608 - DNA, 35 bp, Homo sapiens
  source 1..35: mol_type = genomic DNA
catggggttggcttgaaaccagctttggggggttc

SEQ ID NO: 9609 - DNA, 17 bp, Homo sapiens
  source 1..17: mol_type = genomic DNA
catgggtggttcagtgg

SEQ ID NO: 9610 - DNA, 19 bp, Homo sapiens
  source 1..19: mol_type = genomic DNA
catgggtggttcagtggta

SEQ ID NO: 9611 - DNA, 20 bp, Homo sapiens
  source 1..20: mol_type = genomic DNA
catgggtggttcagtggtag

SEQ ID NO: 9612 - DNA, 21 bp, Homo sapiens
  source 1..21: mol_type = genomic DNA
catgggtggttcagtggtaga

SEQ ID NO: 9613 - DNA, 22 bp, Homo sapiens
  source 1..22: mol_type = genomic DNA
catgggtggttcagtggtagaa

SEQ ID NO: 9614 - DNA, 24 bp, Homo sapiens
  source 1..24: mol_type = genomic DNA
catgggtggttcagtggtagaatt

SEQ ID NO: 9615 - DNA, 25 bp, Homo sapiens
  source 1..25: mol_type = genomic DNA
catgggtggttcagtggtagaattc

SEQ ID NO: 9616 - DNA, 26 bp, Homo sapiens
  source 1..26: mol_type = genomic DNA
catgggtggttcagtggtagaattct

SEQ ID NO: 9617 - DNA, 27 bp, Homo sapiens
  source 1..27: mol_type = genomic DNA
catgggtggttcagtggtagaattctc

SEQ ID NO: 9618 - DNA, 28 bp, Homo sapiens
  source 1..28: mol_type = genomic DNA
catgggtggttcagtggtagaattctcg

SEQ ID NO: 9619 - DNA, 29 bp, Homo sapiens
  source 1..29: mol_type = genomic DNA
catgggtggttcagtggtagaattctcgc

SEQ ID NO: 9620 - DNA, 30 bp, Homo sapiens
  source 1..30: mol_type = genomic DNA
catgggtggttcagtggtagaattctcgcc

SEQ ID NO: 9621 - DNA, 31 bp, Homo sapiens
  source 1..31: mol_type = genomic DNA
catgggtggttcagtggtagaattctcgcct

SEQ ID NO: 9622 - DNA, 32 bp, Homo sapiens
  source 1..32: mol_type = genomic DNA
catgggtggttcagtggtagaattctcgcctg

SEQ ID NO: 9623 - DNA, 33 bp, Homo sapiens
  source 1..33: mol_type = genomic DNA
catgggtggttcagtggtagaattctcgcctgc

SEQ ID NO: 9624 - DNA, 34 bp, Homo sapiens
  source 1..34: mol_type = genomic DNA
catgggtggttcagtggtagaattctcgcctgcc

SEQ ID NO: 9625 - DNA, 35 bp, Homo sapiens
  source 1..35: mol_type = genomic DNA
catgggtggttcagtggtagaattctcgcctgcca

SEQ ID NO: 9626 - DNA, 36 bp, Homo sapiens
  source 1..36: mol_type = genomic DNA
catgggtggttcagtggtagaattctcgcctgccac

SEQ ID NO: 9627 - DNA, 37 bp, Homo sapiens
  source 1..37: mol_type = genomic DNA
catgggtggttcagtggtagaattctcgcctgccacg

SEQ ID NO: 9628 - DNA, 39 bp, Homo sapiens
  source 1..39: mol_type = genomic DNA
catgggtggttcagtggtagaattctcgcctgccacgcg

SEQ ID NO: 9629 - DNA, 40 bp, Homo sapiens
  source 1..40: mol_type = genomic DNA
catgggtggttcagtggtagaattctcgcctgccacgcgg

SEQ ID NO: 9630 - DNA, 42 bp, Homo sapiens
  source 1..42: mol_type = genomic DNA
catgggtggttcagtggtagaattctcgcctgccacgcggga

SEQ ID NO: 9631 - DNA, 46 bp, Homo sapiens
  source 1..46: mol_type = genomic DNA
catgggtggttcagtggtagaattctcgcctgccacgcgggaggcc

SEQ ID NO: 9632 - DNA, 48 bp, Homo sapiens
  source 1..48: mol_type = genomic DNA
catgggtggttcagtggtagaattctcgcctgccacgcgggaggcccg

SEQ ID NO: 9633 - DNA, 20 bp, Homo sapiens
  source 1..20: mol_type = genomic DNA
catggtctagcggttaggat

SEQ ID NO: 9634 - DNA, 21 bp, Homo sapiens
  source 1..21: mol_type = genomic DNA
catggtctagcggttaggatt

SEQ ID NO: 9635 - DNA, 23 bp, Homo sapiens
  source 1..23: mol_type = genomic DNA
catggtctagcggttaggattcc

SEQ ID NO: 9636 - DNA, 24 bp, Homo sapiens
  source 1..24: mol_type = genomic DNA
catggtctagcggttaggattcct

SEQ ID NO: 9637 - DNA, 25 bp, Homo sapiens
  source 1..25: mol_type = genomic DNA
catggtctagcggttaggattcctg

SEQ ID NO: 9638 - DNA, 26 bp, Homo sapiens
  source 1..26: mol_type = genomic DNA
catggtctagcggttaggattcctgg

SEQ ID NO: 9639 - DNA, 27 bp, Homo sapiens
  source 1..27: mol_type = genomic DNA
catggtctagcggttaggattcctggt

SEQ ID NO: 9640 - DNA, 28 bp, Homo sapiens
  source 1..28: mol_type = genomic DNA
catggtctagcggttaggattcctggtt

SEQ ID NO: 9641 - DNA, 29 bp, Homo sapiens
  source 1..29: mol_type = genomic DNA
catggtctagcggttaggattcctggttt

SEQ ID NO: 9642 - DNA, 30 bp, Homo sapiens
  source 1..30: mol_type = genomic DNA
catggtctagcggttaggattcctggtttt

SEQ ID NO: 9643 - DNA, 31 bp, Homo sapiens
  source 1..31: mol_type = genomic DNA
catggtctagcggttaggattcctggttttc

SEQ ID NO: 9644 - DNA, 32 bp, Homo sapiens
  source 1..32: mol_type = genomic DNA
catggtctagcggttaggattcctggttttca

SEQ ID NO: 9645 - DNA, 33 bp, Homo sapiens
  source 1..33: mol_type = genomic DNA
catggtctagcggttaggattcctggttttcac

SEQ ID NO: 9646 - DNA, 26 bp, Homo sapiens
  source 1..26: mol_type = genomic DNA
catggtgtaatggtgagcactctgga

SEQ ID NO: 9647 - DNA, 29 bp, Homo sapiens
  source 1..29: mol_type = genomic DNA
catggtgtaatggtgagcactctggactc

SEQ ID NO: 9648 - DNA, 30 bp, Homo sapiens
  source 1..30: mol_type = genomic DNA
catggtgtaatggtgagcactctggactct

SEQ ID NO: 9649 - DNA, 31 bp, Homo sapiens
  source 1..31: mol_type = genomic DNA
catggtgtaatggtgagcactctggactctg

SEQ ID NO: 9650 - DNA, 24 bp, Homo sapiens
  source 1..24: mol_type = genomic DNA
catggtgtaatggttagcactctg

SEQ ID NO: 9651 - DNA, 26 bp, Homo sapiens
  source 1..26: mol_type = genomic DNA
catggtgtaatggttagcactctgga

SEQ ID NO: 9652 - DNA, 27 bp, Homo sapiens
  source 1..27: mol_type = genomic DNA
catggtgtaatggttagcactctggac

SEQ ID NO: 9653 - DNA, 28 bp, Homo sapiens
  source 1..28: mol_type = genomic DNA
catggtgtaatggttagcactctggact

SEQ ID NO: 9654 - DNA, 29 bp, Homo sapiens
  source 1..29: mol_type = genomic DNA
catggtgtaatggttagcactctggactc

SEQ ID NO: 9655 - DNA, 30 bp, Homo sapiens
  source 1..30: mol_type = genomic DNA
catggtgtaatggttagcactctggactct

SEQ ID NO: 9656 - DNA, 31 bp, Homo sapiens
  source 1..31: mol_type = genomic DNA
catggtgtaatggttagcactctggactctg

SEQ ID NO: 9657 - DNA, 32 bp, Homo sapiens
  source 1..32: mol_type = genomic DNA
catggtgtaatggttagcactctggactctga

SEQ ID NO: 9658 - DNA, 33 bp, Homo sapiens
  source 1..33: mol_type = genomic DNA
catggtgtaatggttagcactctggactctgaa

SEQ ID NO: 9659 - DNA, 31 bp, Homo sapiens
  source 1..31: mol_type = genomic DNA
catggtgtaatggttagcactctggactttg

SEQ ID NO: 9660 - DNA, 18 bp, Homo sapiens
  source 1..18: mol_type = genomic DNA
catgtctaacaacatggc

SEQ ID NO: 9661 - DNA, 19 bp, Homo sapiens
  source 1..19: mol_type = genomic DNA
catgtctaacaacatggct

SEQ ID NO: 9662 - DNA, 20 bp, Homo sapiens
  source 1..20: mol_type = genomic DNA
catgtctaacaacatggctt

SEQ ID NO: 9663 - DNA, 22 bp, Homo sapiens
  source 1..22: mol_type = genomic DNA
catgtctaacaacatggctttc

SEQ ID NO: 9664 - DNA, 23 bp, Homo sapiens
  source 1..23: mol_type = genomic DNA
catgtctaacaacatggctttct

SEQ ID NO: 9665 - DNA, 24 bp, Homo sapiens
  source 1..24: mol_type = genomic DNA
catgtctaacaacatggctttctc

SEQ ID NO: 9666 - DNA, 25 bp, Homo sapiens
  source 1..25: mol_type = genomic DNA
catgtctaacaacatggctttctca

SEQ ID NO: 9667 - DNA, 26 bp, Homo sapiens
  source 1..26: mol_type = genomic DNA
catgtctaacaacatggctttctcac

SEQ ID NO: 9668 - DNA, 27 bp, Homo sapiens
  source 1..27: mol_type = genomic DNA
catgtctaacaacatggctttctcacc

SEQ ID NO: 9669 - DNA, 28 bp, Homo sapiens
  source 1..28: mol_type = genomic DNA
catgtctaacaacatggctttctcacca

SEQ ID NO: 9670 - DNA, 16 bp, Homo sapiens
  source 1..16: mol_type = genomic DNA
cattaaattatgataa

SEQ ID NO: 9671 - DNA, 21 bp, Homo sapiens
  source 1..21: mol_type = genomic DNA
cattaaattatgataatcata

SEQ ID NO: 9672 - DNA, 23 bp, Homo sapiens
  source 1..23: mol_type = genomic DNA
cattaaattatgataatcatatt

SEQ ID NO: 9673 - DNA, 25 bp, Homo sapiens
  source 1..25: mol_type = genomic DNA
cattaaattatgataatcatattta

SEQ ID NO: 9674 - DNA, 26 bp, Homo sapiens
  source 1..26: mol_type = genomic DNA
cattaaattatgataatcatatttac

SEQ ID NO: 9675 - DNA, 27 bp, Homo sapiens
  source 1..27: mol_type = genomic DNA
cattaaattatgataatcatatttacc

SEQ ID NO: 9676 - DNA, 29 bp, Homo sapiens
  source 1..29: mol_type = genomic DNA
cattaaattatgataatcatatttaccaa

SEQ ID NO: 9677 - DNA, 30 bp, Homo sapiens
  source 1..30: mol_type = genomic DNA
cattaaattatgataatcatatttaccaac

SEQ ID NO: 9678 - DNA, 31 bp, Homo sapiens
  source 1..31: mol_type = genomic DNA
cattaaattatgataatcatatttaccaacc

SEQ ID NO: 9679 - DNA, 32 bp, Homo sapiens
  source 1..32: mol_type = genomic DNA
cattaaattatgataatcatatttaccaacca

SEQ ID NO: 9680 - DNA, 19 bp, Homo sapiens
  source 1..19: mol_type = genomic DNA
cattaaccttttaagttaa

SEQ ID NO: 9681 - DNA, 23 bp, Homo sapiens
  source 1..23: mol_type = genomic DNA
cattaaccttttaagttaaagat

SEQ ID NO: 9682 - DNA, 26 bp, Homo sapiens
  source 1..26: mol_type = genomic DNA
cattaaccttttaagttaaagattaa

SEQ ID NO: 9683 - DNA, 32 bp, Homo sapiens
  source 1..32: mol_type = genomic DNA
cattaaccttttaagttaaagattaagagaac

SEQ ID NO: 9684 - DNA, 33 bp, Homo sapiens
  source 1..33: mol_type = genomic DNA
cattaaccttttaagttaaagattaagagaacc

SEQ ID NO: 9685 - DNA, 34 bp, Homo sapiens
  source 1..34: mol_type = genomic DNA
cattaaccttttaagttaaagattaagagaacca

SEQ ID NO: 9686 - DNA, 36 bp, Homo sapiens
  source 1..36: mol_type = genomic DNA
cattaaccttttaagttaaagattaagagaaccaac

SEQ ID NO: 9687 - DNA, 38 bp, Homo sapiens
  source 1..38: mol_type = genomic DNA
cattaaccttttaagttaaagattaagagaaccaacac

SEQ ID NO: 9688 - DNA, 39 bp, Homo sapiens
  source 1..39: mol_type = genomic DNA
cattaaccttttaagttaaagattaagagaaccaacacc

SEQ ID NO: 9689 - DNA, 40 bp, Homo sapiens
  source 1..40: mol_type = genomic DNA
cattaaccttttaagttaaagattaagagaaccaacacct

SEQ ID NO: 9690 - DNA, 16 bp, Homo sapiens
  source 1..16: mol_type = genomic DNA
cattcaaaaaagagta

SEQ ID NO: 9691 - DNA, 17 bp, Homo sapiens
  source 1..17: mol_type = genomic DNA
cattcaaaaaagagtac

SEQ ID NO: 9692 - DNA, 18 bp, Homo sapiens
  source 1..18: mol_type = genomic DNA
cattcaaaaaagagtacc

SEQ ID NO: 9693 - DNA, 19 bp, Homo sapiens
  source 1..19: mol_type = genomic DNA
cattcaaaaaagagtacca

SEQ ID NO: 9694 - DNA, 18 bp, Homo sapiens
  source 1..18: mol_type = genomic DNA
cattcgcctcacacgcga

SEQ ID NO: 9695 - DNA, 28 bp, Homo sapiens
  source 1..28: mol_type = genomic DNA
cattcggctgttaaccgaaaggttggtg

SEQ ID NO: 9696 - DNA, 16 bp, Homo sapiens
  source 1..16: mol_type = genomic DNA
cattcttgcgacccgg

SEQ ID NO: 9697 - DNA, 17 bp, Homo sapiens
  source 1..17: mol_type = genomic DNA
cattcttgcgacccggg

SEQ ID NO: 9698 - DNA, 18 bp, Homo sapiens
  source 1..18: mol_type = genomic DNA
cattcttgcgacccgggt

SEQ ID NO: 9699 - DNA, 19 bp, Homo sapiens
  source 1..19: mol_type = genomic DNA
cattcttgcgacccgggtt

SEQ ID NO: 9700 - DNA, 20 bp, Homo sapiens
  source 1..20: mol_type = genomic DNA
cattcttgcgacccgggttc

SEQ ID NO: 9701 - DNA, 21 bp, Homo sapiens
  source 1..21: mol_type = genomic DNA
cattcttgcgacccgggttcg

SEQ ID NO: 9702 - DNA, 22 bp, Homo sapiens
  source 1..22: mol_type = genomic DNA
cattcttgcgacccgggttcga

SEQ ID NO: 9703 - DNA, 23 bp, Homo sapiens
  source 1..23: mol_type = genomic DNA
cattcttgcgacccgggttcgat

SEQ ID NO: 9704 - DNA, 24 bp, Homo sapiens
  source 1..24: mol_type = genomic DNA
cattcttgcgacccgggttcgatt

SEQ ID NO: 9705 - DNA, 31 bp, Homo sapiens
  source 1..31: mol_type = genomic DNA
cattcttgcgacccgggttcgattcccgggc

SEQ ID NO: 9706 - DNA, 32 bp, Homo sapiens
  source 1..32: mol_type = genomic DNA
cattcttgcgacccgggttcgattcccgggcg

SEQ ID NO: 9707 - DNA, 33 bp, Homo sapiens
  source 1..33: mol_type = genomic DNA
cattcttgcgacccgggttcgattcccgggcgg

SEQ ID NO: 9708 - DNA, 34 bp, Homo sapiens
  source 1..34: mol_type = genomic DNA
cattcttgcgacccgggttcgattcccgggcggc

SEQ ID NO: 9709 - DNA, 35 bp, Homo sapiens
  source 1..35: mol_type = genomic DNA
cattcttgcgacccgggttcgattcccgggcggcg

SEQ ID NO: 9710 - DNA, 36 bp, Homo sapiens
  source 1..36: mol_type = genomic DNA
cattcttgcgacccgggttcgattcccgggcggcgc

SEQ ID NO: 9711 - DNA, 37 bp, Homo sapiens
  source 1..37: mol_type = genomic DNA
cattcttgcgacccgggttcgattcccgggcggcgca

SEQ ID NO: 9712 - DNA, 38 bp, Homo sapiens
  source 1..38: mol_type = genomic DNA
cattcttgcgacccgggttcgattcccgggcggcgcac

SEQ ID NO: 9713 - DNA, 39 bp, Homo sapiens
  source 1..39: mol_type = genomic DNA
cattcttgcgacccgggttcgattcccgggcggcgcacc

SEQ ID NO: 9714 - DNA, 40 bp, Homo sapiens
  source 1..40: mol_type = genomic DNA
cattcttgcgacccgggttcgattcccgggcggcgcacca

SEQ ID NO: 9715 - DNA, 16 bp, Homo sapiens
  source 1..16: mol_type = genomic DNA
cattggactgtaaatc

SEQ ID NO: 9716 - DNA, 17 bp, Homo sapiens
  source 1..17: mol_type = genomic DNA
cattggactgtaaatct

SEQ ID NO: 9717 - DNA, 18 bp, Homo sapiens
  source 1..18: mol_type = genomic DNA
cattggactgtaaatcta

SEQ ID NO: 9718 - DNA, 19 bp, Homo sapiens
  source 1..19: mol_type = genomic DNA
cattggactgtaaatctaa

SEQ ID NO: 9719 - DNA, 20 bp, Homo sapiens
  source 1..20: mol_type = genomic DNA
cattggactgtaaatctaaa

SEQ ID NO: 9720 - DNA, 22 bp, Homo sapiens
  source 1..22: mol_type = genomic DNA
cattggactgtaaatctaaaga

SEQ ID NO: 9721 - DNA, 26 bp, Homo sapiens
  source 1..26: mol_type = genomic DNA
cattggactgtaaatctaaagacagg

SEQ ID NO: 9722 - DNA, 32 bp, Homo sapiens
  source 1..32: mol_type = genomic DNA
cattggactgtaaatctaaagacaggggttag

SEQ ID NO: 9723 - DNA, 34 bp, Homo sapiens
  source 1..34: mol_type = genomic DNA
cattggactgtaaatctaaagacaggggttaggc

SEQ ID NO: 9724 - DNA, 35 bp, Homo sapiens
  source 1..35: mol_type = genomic DNA
cattggactgtaaatctaaagacaggggttaggcc

SEQ ID NO: 9725 - DNA, 36 bp, Homo sapiens
  source 1..36: mol_type = genomic DNA
cattggactgtaaatctaaagacaggggttaggcct

SEQ ID NO: 9726 - DNA, 37 bp, Homo sapiens
  source 1..37: mol_type = genomic DNA
cattggactgtaaatctaaagacaggggttaggcctc

SEQ ID NO: 9727 - DNA, 38 bp, Homo sapiens
  source 1..38: mol_type = genomic DNA
cattggactgtaaatctaaagacaggggttaggcctct

SEQ ID NO: 9728 - DNA, 41 bp, Homo sapiens
  source 1..41: mol_type = genomic DNA
cattggactgtaaatctaaagacaggggttaggcctctttt

SEQ ID NO: 9729 - DNA, 45 bp, Homo sapiens
  source 1..45: mol_type = genomic DNA
cattggactgtaaatctaaagacaggggttaggcctctttttacc

SEQ ID NO: 9730 - DNA, 48 bp, Homo sapiens
  source 1..48: mol_type = genomic DNA
cattggactgtaaatctaaagacaggggttaggcctctttttaccacc

SEQ ID NO: 9731 - DNA, 19 bp, Homo sapiens
  source 1..19: mol_type = genomic DNA
cattggacttctaattcaa

SEQ ID NO: 9732 - DNA, 17 bp, Homo sapiens
  source 1..17: mol_type = genomic DNA
cattggcctcctaagcc

SEQ ID NO: 9733 - DNA, 22 bp, Homo sapiens
  source 1..22: mol_type = genomic DNA
cattggggtctccccgcgcagg

SEQ ID NO: 9734 - DNA, 23 bp, Homo sapiens
  source 1..23: mol_type = genomic DNA
cattggggtctccccgcgcaggt

SEQ ID NO: 9735 - DNA, 24 bp, Homo sapiens
  source 1..24: mol_type = genomic DNA
cattggggtctccccgcgcaggtt

SEQ ID NO: 9736 - DNA, 19 bp, Homo sapiens
  source 1..19: mol_type = genomic DNA
cattggggtttccccgcgc

SEQ ID NO: 9737 - DNA, 20 bp, Homo sapiens
  source 1..20: mol_type = genomic DNA
cattggggtttccccgcgca

SEQ ID NO: 9738 - DNA, 21 bp, Homo sapiens
  source 1..21: mol_type = genomic DNA
cattggggtttccccgcgcag

SEQ ID NO: 9739 - DNA, 22 bp, Homo sapiens
  source 1..22: mol_type = genomic DNA
cattggggtttccccgcgcagg

SEQ ID NO: 9740 - DNA, 23 bp, Homo sapiens
  source 1..23: mol_type = genomic DNA
cattggggtttccccgcgcaggt

SEQ ID NO: 9741 - DNA, 24 bp, Homo sapiens
  source 1..24: mol_type = genomic DNA
cattggggtttccccgcgcaggtt

SEQ ID NO: 9742 - DNA, 25 bp, Homo sapiens
  source 1..25: mol_type = genomic DNA
cattggggtttccccgcgcaggttc

SEQ ID NO: 9743 - DNA, 26 bp, Homo sapiens
  source 1..26: mol_type = genomic DNA
cattggggtttccccgcgcaggttcg

SEQ ID NO: 9744 - DNA, 33 bp, Homo sapiens
  source 1..33: mol_type = genomic DNA
cattggggtttccccgcgcaggttcgaatcctg

SEQ ID NO: 9745 - DNA, 38 bp, Homo sapiens
  source 1..38: mol_type = genomic DNA
cattggggtttccccgcgcaggttcgaatcctgccgac

SEQ ID NO: 9746 - DNA, 39 bp, Homo sapiens
  source 1..39: mol_type = genomic DNA
cattggggtttccccgcgcaggttcgaatcctgccgact

SEQ ID NO: 9747 - DNA, 43 bp, Homo sapiens
  source 1..43: mol_type = genomic DNA
cattggggtttccccgcgcaggttcgaatcctgccgactacgc

SEQ ID NO: 9748 - DNA, 44 bp, Homo sapiens
  source 1..44: mol_type = genomic DNA
cattggggtttccccgcgcaggttcgaatcctgccgactacgcc

SEQ ID NO: 9749 - DNA, 16 bp, Homo sapiens
  source 1..16: mol_type = genomic DNA
cattggtcgtggttgt

SEQ ID NO: 9750 - DNA, 17 bp, Homo sapiens
  source 1..17: mol_type = genomic DNA
cattggtcgtggttgta

SEQ ID NO: 9751 - DNA, 18 bp, Homo sapiens
  source 1..18: mol_type = genomic DNA
cattggtcgtggttgtag

SEQ ID NO: 9752 - DNA, 19 bp, Homo sapiens
  source 1..19: mol_type = genomic DNA
cattggtcgtggttgtagt

SEQ ID NO: 9753 - DNA, 20 bp, Homo sapiens
  source 1..20: mol_type = genomic DNA
cattggtcgtggttgtagtc

SEQ ID NO: 9754 - DNA, 21 bp, Homo sapiens
  source 1..21: mol_type = genomic DNA
cattggtcgtggttgtagtcc

SEQ ID NO: 9755 - DNA, 22 bp, Homo sapiens
  source 1..22: mol_type = genomic DNA
cattggtcgtggttgtagtccg

SEQ ID NO: 9756 - DNA, 23 bp, Homo sapiens
  source 1..23: mol_type = genomic DNA
cattggtcgtggttgtagtccgt

SEQ ID NO: 9757 - DNA, 24 bp, Homo sapiens
  source 1..24: mol_type = genomic DNA
cattggtcgtggttgtagtccgtg

SEQ ID NO: 9758 - DNA, 25 bp, Homo sapiens
  source 1..25: mol_type = genomic DNA
cattggtcgtggttgtagtccgtgc

SEQ ID NO: 9759 - DNA, 26 bp, Homo sapiens
  source 1..26: mol_type = genomic DNA
cattggtcgtggttgtagtccgtgcg

SEQ ID NO: 9760 - DNA, 27 bp, Homo sapiens
  source 1..27: mol_type = genomic DNA
cattggtcgtggttgtagtccgtgcga

SEQ ID NO: 9761 - DNA, 28 bp, Homo sapiens
  source 1..28: mol_type = genomic DNA
cattggtcgtggttgtagtccgtgcgag

SEQ ID NO: 9762 - DNA, 29 bp, Homo sapiens
  source 1..29: mol_type = genomic DNA
cattggtcgtggttgtagtccgtgcgaga

SEQ ID NO: 9763 - DNA, 30 bp, Homo sapiens
  source 1..30: mol_type = genomic DNA
cattggtcgtggttgtagtccgtgcgagaa

SEQ ID NO: 9764 - DNA, 31 bp, Homo sapiens
  source 1..31: mol_type = genomic DNA
cattggtcgtggttgtagtccgtgcgagaat

SEQ ID NO: 9765 - DNA, 32 bp, Homo sapiens
  source 1..32: mol_type = genomic DNA
cattggtcgtggttgtagtccgtgcgagaata

SEQ ID NO: 9766 - DNA, 33 bp, Homo sapiens
  source 1..33: mol_type = genomic DNA
cattggtcgtggttgtagtccgtgcgagaatac

SEQ ID NO: 9767 - DNA, 34 bp, Homo sapiens
  source 1..34: mol_type = genomic DNA
cattggtcgtggttgtagtccgtgcgagaatacc

SEQ ID NO: 9768 - DNA, 35 bp, Homo sapiens
  source 1..35: mol_type = genomic DNA
cattggtcgtggttgtagtccgtgcgagaatacca

SEQ ID NO: 9769 - DNA, 16 bp, Homo sapiens
  source 1..16: mol_type = genomic DNA
cattggtcttaggccc

SEQ ID NO: 9770 - DNA, 17 bp, Homo sapiens
  source 1..17: mol_type = genomic DNA
cattggtcttaggcccc

SEQ ID NO: 9771 - DNA, 19 bp, Homo sapiens
  source 1..19: mol_type = genomic DNA
cattggtcttaggccccaa

SEQ ID NO: 9772 - DNA, 22 bp, Homo sapiens
  source 1..22: mol_type = genomic DNA
cattggtcttaggccccaaaaa

SEQ ID NO: 9773 - DNA, 23 bp, Homo sapiens
  source 1..23: mol_type = genomic DNA
cattggtcttaggccccaaaaat

SEQ ID NO: 9774 - DNA, 30 bp, Homo sapiens
  source 1..30: mol_type = genomic DNA
cattggtcttaggccccaaaaattttggtg

SEQ ID NO: 9775 - DNA, 31 bp, Homo sapiens
  source 1..31: mol_type = genomic DNA
cattggtcttaggccccaaaaattttggtgc

SEQ ID NO: 9776 - DNA, 32 bp, Homo sapiens
  source 1..32: mol_type = genomic DNA
cattggtcttaggccccaaaaattttggtgca

SEQ ID NO: 9777 - DNA, 33 bp, Homo sapiens
  source 1..33: mol_type = genomic DNA
cattggtcttaggccccaaaaattttggtgcaa

SEQ ID NO: 9778 - DNA, 35 bp, Homo sapiens
  source 1..35: mol_type = genomic DNA
cattggtcttaggccccaaaaattttggtgcaact

SEQ ID NO: 9779 - DNA, 36 bp, Homo sapiens
  source 1..36: mol_type = genomic DNA
cattggtcttaggccccaaaaattttggtgcaactc

SEQ ID NO: 9780 - DNA, 37 bp, Homo sapiens
  source 1..37: mol_type = genomic DNA
cattggtcttaggccccaaaaattttggtgcaactcc

SEQ ID NO: 9781 - DNA, 40 bp, Homo sapiens
  source 1..40: mol_type = genomic DNA
cattggtcttaggccccaaaaattttggtgcaactccaaa

SEQ ID NO: 9782 - DNA, 41 bp, Homo sapiens
  source 1..41: mol_type = genomic DNA
cattggtcttaggccccaaaaattttggtgcaactccaaat

SEQ ID NO: 9783 - DNA, 42 bp, Homo sapiens
  source 1..42: mol_type = genomic DNA
cattggtcttaggccccaaaaattttggtgcaactccaaata

SEQ ID NO: 9784 - DNA, 30 bp, Homo sapiens
  source 1..30: mol_type = genomic DNA
cattggtggttcaatggtagaattctcgcc

SEQ ID NO: 9785 - DNA, 17 bp, Homo sapiens
  source 1..17: mol_type = genomic DNA
cattggtggttcagtgg

SEQ ID NO: 9786 - DNA, 19 bp, Homo sapiens
  source 1..19: mol_type = genomic DNA
cattggtggttcagtggta

SEQ ID NO: 9787 - DNA, 20 bp, Homo sapiens
  source 1..20: mol_type = genomic DNA
cattggtggttcagtggtag

SEQ ID NO: 9788 - DNA, 21 bp, Homo sapiens
  source 1..21: mol_type = genomic DNA
cattggtggttcagtggtaga

SEQ ID NO: 9789 - DNA, 22 bp, Homo sapiens
  source 1..22: mol_type = genomic DNA
cattggtggttcagtggtagaa

SEQ ID NO: 9790 - DNA, 23 bp, Homo sapiens
  source 1..23: mol_type = genomic DNA
cattggtggttcagtggtagaat

SEQ ID NO: 9791 - DNA, 24 bp, Homo sapiens
  source 1..24: mol_type = genomic DNA
cattggtggttcagtggtagaatt

SEQ ID NO: 9792 - DNA, 25 bp, Homo sapiens
  source 1..25: mol_type = genomic DNA
cattggtggttcagtggtagaattc

SEQ ID NO: 9793 - DNA, 26 bp, Homo sapiens
  source 1..26: mol_type = genomic DNA
cattggtggttcagtggtagaattct

SEQ ID NO: 9794 - DNA, 27 bp, Homo sapiens
  source 1..27: mol_type = genomic DNA
cattggtggttcagtggtagaattctc

SEQ ID NO: 9795 - DNA, 28 bp, Homo sapiens
  source 1..28: mol_type = genomic DNA
cattggtggttcagtggtagaattctcg

SEQ ID NO: 9796 - DNA, 29 bp, Homo sapiens
  source 1..29: mol_type = genomic DNA
cattggtggttcagtggtagaattctcgc

SEQ ID NO: 9797 - DNA, 30 bp, Homo sapiens
  source 1..30: mol_type = genomic DNA
cattggtggttcagtggtagaattctcgcc

SEQ ID NO: 9798 - DNA, 31 bp, Homo sapiens
  source 1..31: mol_type = genomic DNA
cattggtggttcagtggtagaattctcgcct

SEQ ID NO: 9799 - DNA, 32 bp, Homo sapiens
  source 1..32: mol_type = genomic DNA
cattggtggttcagtggtagaattctcgcctc

SEQ ID NO: 9800 - DNA, 33 bp, Homo sapiens
  source 1..33: mol_type = genomic DNA
cattggtggttcagtggtagaattctcgcctcc

SEQ ID NO: 9801 - DNA, 34 bp, Homo sapiens
  source 1..34: mol_type = genomic DNA
cattggtggttcagtggtagaattctcgcctccc

SEQ ID NO: 9802 - DNA, 35 bp, Homo sapiens
  source 1..35: mol_type = genomic DNA
cattggtggttcagtggtagaattctcgcctccca

SEQ ID NO: 9803 - DNA, 36 bp, Homo sapiens
  source 1..36: mol_type = genomic DNA
cattggtggttcagtggtagaattctcgcctcccac

SEQ ID NO: 9804 - DNA, 32 bp, Homo sapiens
  source 1..32: mol_type = genomic DNA
cattggtggttcagtggtagaattctcgcctg

SEQ ID NO: 9805 - DNA, 33 bp, Homo sapiens
  source 1..33: mol_type = genomic DNA
cattggtggttcagtggtagaattctcgcctgc

SEQ ID NO: 9806 - DNA, 34 bp, Homo sapiens
  source 1..34: mol_type = genomic DNA
cattggtggttcagtggtagaattctcgcctgcc

SEQ ID NO: 9807 - DNA, 35 bp, Homo sapiens
  source 1..35: mol_type = genomic DNA
cattggtggttcagtggtagaattctcgcctgcca

SEQ ID NO: 9808 - DNA, 36 bp, Homo sapiens
  source 1..36: mol_type = genomic DNA
cattggtggttcagtggtagaattctcgcctgccac

SEQ ID NO: 9809 - DNA, 37 bp, Homo sapiens
  source 1..37: mol_type = genomic DNA
cattggtggttcagtggtagaattctcgcctgccacg

SEQ ID NO: 9810 - DNA, 38 bp, Homo sapiens
  source 1..38: mol_type = genomic DNA
cattggtggttcagtggtagaattctcgcctgccacgc

SEQ ID NO: 9811 - DNA, 39 bp, Homo sapiens
  source 1..39: mol_type = genomic DNA
cattggtggttcagtggtagaattctcgcctgccacgcg

SEQ ID NO: 9812 - DNA, 42 bp, Homo sapiens
  source 1..42: mol_type = genomic DNA
cattggtggttcagtggtagaattctcgcctgccacgcggga

SEQ ID NO: 9813 - DNA, 43 bp, Homo sapiens
  source 1..43: mol_type = genomic DNA
cattggtggttcagtggtagaattctcgcctgccacgcgggag

SEQ ID NO: 9814 - DNA, 47 bp, Homo sapiens
  source 1..47: mol_type = genomic DNA
cattggtggttcagtggtagaattctcgcctgccacgcgggaggccc

SEQ ID NO: 9815 - DNA, 48 bp, Homo sapiens
  source 1..48: mol_type = genomic DNA
cattggtggttcagtggtagaattctcgcctgccacgcgggaggcccg

SEQ ID NO: 9816 - DNA, 44 bp, Homo sapiens
  source 1..44: mol_type = genomic DNA
cattgtgctctgcacgcgtgggttcgaatcccatcctcgtcgcc

SEQ ID NO: 9817 - DNA, 45 bp, Homo sapiens
  source 1..45: mol_type = genomic DNA
cattgtgctctgcacgcgtgggttcgaatcccatcctcgtcgcca

SEQ ID NO: 9818 - DNA, 23 bp, Homo sapiens
  source 1..23: mol_type = genomic DNA
cattgtgctttgcacgcgtgggt

SEQ ID NO: 9819 - DNA, 24 bp, Homo sapiens
  source 1..24: mol_type = genomic DNA
cattgtgctttgcacgcgtgggtt

SEQ ID NO: 9820 - DNA, 25 bp, Homo sapiens
  source 1..25: mol_type = genomic DNA
cattgtgctttgcacgcgtgggttc

SEQ ID NO: 9821 - DNA, 43 bp, Homo sapiens
  source 1..43: mol_type = genomic DNA
cattgtgctttgcacgcgtgggttcgaatcccatcctcgtcgc

SEQ ID NO: 9822 - DNA, 44 bp, Homo sapiens
  source 1..44: mol_type = genomic DNA
cattgtgctttgcacgcgtgggttcgaatcccatcctcgtcgcc

SEQ ID NO: 9823 - DNA, 45 bp, Homo sapiens
  source 1..45: mol_type = genomic DNA
cattgtgctttgcacgcgtgggttcgaatcccatcctcgtcgcca

SEQ ID NO: 9824 - DNA, 16 bp, Homo sapiens
  source 1..16: mol_type = genomic DNA
catttcataactttgt

SEQ ID NO: 9825 - DNA, 17 bp, Homo sapiens
  source 1..17: mol_type = genomic DNA
catttcataactttgtc

SEQ ID NO: 9826 - DNA, 18 bp, Homo sapiens
  source 1..18: mol_type = genomic DNA
catttcataactttgtca

SEQ ID NO: 9827 - DNA, 19 bp, Homo sapiens
  source 1..19: mol_type = genomic DNA
catttcataactttgtcaa

SEQ ID NO: 9828 - DNA, 20 bp, Homo sapiens
  source 1..20: mol_type = genomic DNA
catttcataactttgtcaaa

SEQ ID NO: 9829 - DNA, 21 bp, Homo sapiens
  source 1..21: mol_type = genomic DNA
catttcataactttgtcaaag

SEQ ID NO: 9830 - DNA, 22 bp, Homo sapiens
  source 1..22: mol_type = genomic DNA
catttcataactttgtcaaagt

SEQ ID NO: 9831 - DNA, 27 bp, Homo sapiens
  source 1..27: mol_type = genomic DNA
catttcataactttgtcaaagttaaat

SEQ ID NO: 9832 - DNA, 32 bp, Homo sapiens
  source 1..32: mol_type = genomic DNA
catttcataactttgtcaaagttaaattatag

SEQ ID NO: 9833 - DNA, 34 bp, Homo sapiens
  source 1..34: mol_type = genomic DNA
catttcataactttgtcaaagttaaattataggc

SEQ ID NO: 9834 - DNA, 35 bp, Homo sapiens
  source 1..35: mol_type = genomic DNA
catttcataactttgtcaaagttaaattataggct

SEQ ID NO: 9835 - DNA, 36 bp, Homo sapiens
  source 1..36: mol_type = genomic DNA
catttcataactttgtcaaagttaaattataggcta

SEQ ID NO: 9836 - DNA, 37 bp, Homo sapiens
  source 1..37: mol_type = genomic DNA
catttcataactttgtcaaagttaaattataggctaa

SEQ ID NO: 9837 - DNA, 38 bp, Homo sapiens
  source 1..38: mol_type = genomic DNA
catttcataactttgtcaaagttaaattataggctaaa

SEQ ID NO: 9838 - DNA, 39 bp, Homo sapiens
  source 1..39: mol_type = genomic DNA
catttcataactttgtcaaagttaaattataggctaaat

SEQ ID NO: 9839 - DNA, 40 bp, Homo sapiens
  source 1..40: mol_type = genomic DNA
catttcataactttgtcaaagttaaattataggctaaatc

SEQ ID NO: 9840 - DNA, 41 bp, Homo sapiens
  source 1..41: mol_type = genomic DNA
catttcataactttgtcaaagttaaattataggctaaatcc

SEQ ID NO: 9841 - DNA, 42 bp, Homo sapiens
  source 1..42: mol_type = genomic DNA
catttcataactttgtcaaagttaaattataggctaaatcct

SEQ ID NO: 9842 - DNA, 47 bp, Homo sapiens
  source 1..47: mol_type = genomic DNA
catttcataactttgtcaaagttaaattataggctaaatcctatata

SEQ ID NO: 9843 - DNA, 18 bp, Homo sapiens
  source 1..18: mol_type = genomic DNA
catttcgatggcgtgggt

SEQ ID NO: 9844 - DNA, 20 bp, Homo sapiens
  source 1..20: mol_type = genomic DNA
catttcgatggcgtgggttc

SEQ ID NO: 9845 - DNA, 21 bp, Homo sapiens
  source 1..21: mol_type = genomic DNA
catttcgatggcgtgggttcg

SEQ ID NO: 9846 - DNA, 34 bp, Homo sapiens
  source 1..34: mol_type = genomic DNA
catttcgatggcgtgggttcgaatcccaccgctg

SEQ ID NO: 9847 - DNA, 16 bp, Homo sapiens
  source 1..16: mol_type = genomic DNA
catttgactgcagatc

SEQ ID NO: 9848 - DNA, 17 bp, Homo sapiens
  source 1..17: mol_type = genomic DNA
catttgactgcagatca

SEQ ID NO: 9849 - DNA, 30 bp, Homo sapiens
  source 1..30: mol_type = genomic DNA
catttgactgcagatcaaaaggtccctggt

SEQ ID NO: 9850 - DNA, 27 bp, Homo sapiens
  source 1..27: mol_type = genomic DNA
catttgactgcagatcaagaggtcccc

SEQ ID NO: 9851 - DNA, 32 bp, Homo sapiens
  source 1..32: mol_type = genomic DNA
catttgactgcagatcaagaggtccccggttc

SEQ ID NO: 9852 - DNA, 21 bp, Homo sapiens
  source 1..21: mol_type = genomic DNA
ccaaaaattttggtgcaactc

SEQ ID NO: 9853 - DNA, 22 bp, Homo sapiens
  source 1..22: mol_type = genomic DNA
ccaaaaattttggtgcaactcc

SEQ ID NO: 9854 - DNA, 25 bp, Homo sapiens
  source 1..25: mol_type = genomic DNA
ccaaaaattttggtgcaactccaaa

SEQ ID NO: 9855 - DNA, 26 bp, Homo sapiens
  source 1..26: mol_type = genomic DNA
ccaaaaattttggtgcaactccaaat

SEQ ID NO: 9856 - DNA, 27 bp, Homo sapiens
  source 1..27: mol_type = genomic DNA
ccaaaaattttggtgcaactccaaata

SEQ ID NO: 9857 - DNA, 31 bp, Homo sapiens
  source 1..31: mol_type = genomic DNA
ccaaaaattttggtgcaactccaaataaaag

SEQ ID NO: 9858 - DNA, 32 bp, Homo sapiens
  source 1..32: mol_type = genomic DNA
ccaaaaattttggtgcaactccaaataaaagt

SEQ ID NO: 9859 - DNA, 33 bp, Homo sapiens
  source 1..33: mol_type = genomic DNA
ccaaaaattttggtgcaactccaaataaaagta

SEQ ID NO: 9860 - DNA, 34 bp, Homo sapiens
  source 1..34: mol_type = genomic DNA
ccaaaaattttggtgcaactccaaataaaagtac

SEQ ID NO: 9861 - DNA, 35 bp, Homo sapiens
  source 1..35: mol_type = genomic DNA
ccaaaaattttggtgcaactccaaataaaagtacc

SEQ ID NO: 9862 - DNA, 36 bp, Homo sapiens
  source 1..36: mol_type = genomic DNA
ccaaaaattttggtgcaactccaaataaaagtacca

SEQ ID NO: 9863 - DNA, 17 bp, Homo sapiens
  source 1..17: mol_type = genomic DNA
ccaaaacatcagattgt

SEQ ID NO: 9864 - DNA, 18 bp, Homo sapiens
  source 1..18: mol_type = genomic DNA
ccaaaacatcagattgtg

SEQ ID NO: 9865 - DNA, 19 bp, Homo sapiens
  source 1..19: mol_type = genomic DNA
ccaaaacatcagattgtga

SEQ ID NO: 9866 - DNA, 20 bp, Homo sapiens
  source 1..20: mol_type = genomic DNA
ccaaaacatcagattgtgaa

SEQ ID NO: 9867 - DNA, 21 bp, Homo sapiens
  source 1..21: mol_type = genomic DNA
ccaaaacatcagattgtgaat

SEQ ID NO: 9868 - DNA, 22 bp, Homo sapiens
  source 1..22: mol_type = genomic DNA
ccaaaacatcagattgtgaatc

SEQ ID NO: 9869 - DNA, 23 bp, Homo sapiens
  source 1..23: mol_type = genomic DNA
ccaaaacatcagattgtgaatct

SEQ ID NO: 9870 - DNA, 24 bp, Homo sapiens
  source 1..24: mol_type = genomic DNA
ccaaaacatcagattgtgaatctg

SEQ ID NO: 9871 - DNA, 25 bp, Homo sapiens
  source 1..25: mol_type = genomic DNA
ccaaaacatcagattgtgaatctga

SEQ ID NO: 9872 - DNA, 26 bp, Homo sapiens
  source 1..26: mol_type = genomic DNA
ccaaaacatcagattgtgaatctgac

SEQ ID NO: 9873 - DNA, 27 bp, Homo sapiens
  source 1..27: mol_type = genomic DNA
ccaaaacatcagattgtgaatctgaca

SEQ ID NO: 9874 - DNA, 28 bp, Homo sapiens
  source 1..28: mol_type = genomic DNA
ccaaaacatcagattgtgaatctgacaa

SEQ ID NO: 9875 - DNA, 29 bp, Homo sapiens
  source 1..29: mol_type = genomic DNA
ccaaaacatcagattgtgaatctgacaac

SEQ ID NO: 9876 - DNA, 30 bp, Homo sapiens
  source 1..30: mol_type = genomic DNA
ccaaaacatcagattgtgaatctgacaaca

SEQ ID NO: 9877 - DNA, 31 bp, Homo sapiens
  source 1..31: mol_type = genomic DNA
ccaaaacatcagattgtgaatctgacaacag

SEQ ID NO: 9878 - DNA, 32 bp, Homo sapiens
  source 1..32: mol_type = genomic DNA
ccaaaacatcagattgtgaatctgacaacaga

SEQ ID NO: 9879 - DNA, 33 bp, Homo sapiens
  source 1..33: mol_type = genomic DNA
ccaaaacatcagattgtgaatctgacaacagag

SEQ ID NO: 9880 - DNA, 34 bp, Homo sapiens
  source 1..34: mol_type = genomic DNA
ccaaaacatcagattgtgaatctgacaacagagg

SEQ ID NO: 9881 - DNA, 35 bp, Homo sapiens
  source 1..35: mol_type = genomic DNA
ccaaaacatcagattgtgaatctgacaacagaggc

SEQ ID NO: 9882 - DNA, 36 bp, Homo sapiens
  source 1..36: mol_type = genomic DNA
ccaaaacatcagattgtgaatctgacaacagaggct

SEQ ID NO: 9883 - DNA, 37 bp, Homo sapiens
  source 1..37: mol_type = genomic DNA
ccaaaacatcagattgtgaatctgacaacagaggctt

SEQ ID NO: 9884 - DNA, 38 bp, Homo sapiens
  source 1..38: mol_type = genomic DNA
ccaaaacatcagattgtgaatctgacaacagaggctta

SEQ ID NO: 9885 - DNA, 39 bp, Homo sapiens
  source 1..39: mol_type = genomic DNA
ccaaaacatcagattgtgaatctgacaacagaggcttac

SEQ ID NO: 9886 - DNA, 40 bp, Homo sapiens
  source 1..40: mol_type = genomic DNA
ccaaaacatcagattgtgaatctgacaacagaggcttacg

SEQ ID NO: 9887 - DNA, 41 bp, Homo sapiens
  source 1..41: mol_type = genomic DNA
ccaaaacatcagattgtgaatctgacaacagaggcttacga

SEQ ID NO: 9888 - DNA, 42 bp, Homo sapiens
  source 1..42: mol_type = genomic DNA
ccaaaacatcagattgtgaatctgacaacagaggcttacgac

SEQ ID NO: 9889 - DNA, 43 bp, Homo sapiens
  source 1..43: mol_type = genomic DNA
ccaaaacatcagattgtgaatctgacaacagaggcttacgacc

SEQ ID NO: 9890 - DNA, 44 bp, Homo sapiens
  source 1..44: mol_type = genomic DNA
ccaaaacatcagattgtgaatctgacaacagaggcttacgaccc

SEQ ID NO: 9891 - DNA, 45 bp, Homo sapiens
  source 1..45: mol_type = genomic DNA
ccaaaacatcagattgtgaatctgacaacagaggcttacgacccc

SEQ ID NO: 9892 - DNA, 46 bp, Homo sapiens
  source 1..46: mol_type = genomic DNA
ccaaaacatcagattgtgaatctgacaacagaggcttacgacccct

SEQ ID NO: 9893 - DNA, 47 bp, Homo sapiens
  source 1..47: mol_type = genomic DNA
ccaaaacatcagattgtgaatctgacaacagaggcttacgacccctt

SEQ ID NO: 9894 - DNA, 48 bp, Homo sapiens
  source 1..48: mol_type = genomic DNA
ccaaaacatcagattgtgaatctgacaacagaggcttacgacccctta

SEQ ID NO: 9895 - DNA, 16 bp, Homo sapiens
  source 1..16: mol_type = genomic DNA
ccaaataaaagtacca

SEQ ID NO: 9896 - DNA, 16 bp, Homo sapiens
  source 1..16: mol_type = genomic DNA
ccaacacctctttaca

SEQ ID NO: 9897 - DNA, 17 bp, Homo sapiens
  source 1..17: mol_type = genomic DNA
ccaacacctctttacag

SEQ ID NO: 9898 - DNA, 18 bp, Homo sapiens
  source 1..18: mol_type = genomic DNA
ccaacacctctttacagt

SEQ ID NO: 9899 - DNA, 19 bp, Homo sapiens
  source 1..19: mol_type = genomic DNA
ccaacacctctttacagtg

SEQ ID NO: 9900 - DNA, 20 bp, Homo sapiens
  source 1..20: mol_type = genomic DNA
ccaacacctctttacagtga

SEQ ID NO: 9901 - DNA, 21 bp, Homo sapiens
  source 1..21: mol_type = genomic DNA
ccaacacctctttacagtgac

SEQ ID NO: 9902 - DNA, 22 bp, Homo sapiens
  source 1..22: mol_type = genomic DNA
ccaacacctctttacagtgacc

SEQ ID NO: 9903 - DNA, 23 bp, Homo sapiens
  source 1..23: mol_type = genomic DNA
ccaacacctctttacagtgacca

SEQ ID NO: 9904 - DNA, 16 bp, Homo sapiens
  source 1..16: mol_type = genomic DNA
ccaacttacacttagg

SEQ ID NO: 9905 - DNA, 17 bp, Homo sapiens
  source 1..17: mol_type = genomic DNA
ccaacttacacttagga

SEQ ID NO: 9906 - DNA, 18 bp, Homo sapiens
  source 1..18: mol_type = genomic DNA
ccaacttacacttaggag

SEQ ID NO: 9907 - DNA, 19 bp, Homo sapiens
  source 1..19: mol_type = genomic DNA
ccaacttacacttaggaga

SEQ ID NO: 9908 - DNA, 20 bp, Homo sapiens
  source 1..20: mol_type = genomic DNA
ccaacttacacttaggagat

SEQ ID NO: 9909 - DNA, 21 bp, Homo sapiens
  source 1..21: mol_type = genomic DNA
ccaacttacacttaggagatt

SEQ ID NO: 9910 - DNA, 22 bp, Homo sapiens
  source 1..22: mol_type = genomic DNA
ccaacttacacttaggagattt

SEQ ID NO: 9911 - DNA, 23 bp, Homo sapiens
  source 1..23: mol_type = genomic DNA
ccaacttacacttaggagatttc

SEQ ID NO: 9912 - DNA, 24 bp, Homo sapiens
  source 1..24: mol_type = genomic DNA
ccaacttacacttaggagatttca

SEQ ID NO: 9913 - DNA, 25 bp, Homo sapiens
  source 1..25: mol_type = genomic DNA
ccaacttacacttaggagatttcaa

SEQ ID NO: 9914 - DNA, 26 bp, Homo sapiens
  source 1..26: mol_type = genomic DNA
ccaacttacacttaggagatttcaac

SEQ ID NO: 9915 - DNA, 27 bp, Homo sapiens
  source 1..27: mol_type = genomic DNA
ccaacttacacttaggagatttcaact

SEQ ID NO: 9916 - DNA, 28 bp, Homo sapiens
  source 1..28: mol_type = genomic DNA
ccaacttacacttaggagatttcaactt

SEQ ID NO: 9917 - DNA, 29 bp, Homo sapiens
  source 1..29: mol_type = genomic DNA
ccaacttacacttaggagatttcaactta

SEQ ID NO: 9918 - DNA, 30 bp, Homo sapiens
  source 1..30: mol_type = genomic DNA
ccaacttacacttaggagatttcaacttaa

SEQ ID NO: 9919 - DNA, 31 bp, Homo sapiens
  source 1..31: mol_type = genomic DNA
ccaacttacacttaggagatttcaacttaac

SEQ ID NO: 9920 - DNA, 32 bp, Homo sapiens
  source 1..32: mol_type = genomic DNA
ccaacttacacttaggagatttcaacttaact

SEQ ID NO: 9921 - DNA, 33 bp, Homo sapiens
  source 1..33: mol_type = genomic DNA
ccaacttacacttaggagatttcaacttaactt

SEQ ID NO: 9922 - DNA, 34 bp, Homo sapiens
  source 1..34: mol_type = genomic DNA
ccaacttacacttaggagatttcaacttaacttg

SEQ ID NO: 9923 - DNA, 35 bp, Homo sapiens
  source 1..35: mol_type = genomic DNA
ccaacttacacttaggagatttcaacttaacttga

SEQ ID NO: 9924 - DNA, 36 bp, Homo sapiens
  source 1..36: mol_type = genomic DNA
ccaacttacacttaggagatttcaacttaacttgac

SEQ ID NO: 9925 - DNA, 37 bp, Homo sapiens
  source 1..37: mol_type = genomic DNA
ccaacttacacttaggagatttcaacttaacttgacc

SEQ ID NO: 9926 - DNA, 38 bp, Homo sapiens
  source 1..38: mol_type = genomic DNA
ccaacttacacttaggagatttcaacttaacttgaccg

SEQ ID NO: 9927 - DNA, 39 bp, Homo sapiens
  source 1..39: mol_type = genomic DNA
ccaacttacacttaggagatttcaacttaacttgaccgc

SEQ ID NO: 9928 - DNA, 40 bp, Homo sapiens
  source 1..40: mol_type = genomic DNA
ccaacttacacttaggagatttcaacttaacttgaccgct

SEQ ID NO: 9929 - DNA, 41 bp, Homo sapiens
  source 1..41: mol_type = genomic DNA
ccaacttacacttaggagatttcaacttaacttgaccgctc

SEQ ID NO: 9930 - DNA, 42 bp, Homo sapiens
  source 1..42: mol_type = genomic DNA
ccaacttacacttaggagatttcaacttaacttgaccgctct

SEQ ID NO: 9931 - DNA, 43 bp, Homo sapiens
  source 1..43: mol_type = genomic DNA
ccaacttacacttaggagatttcaacttaacttgaccgctctg

SEQ ID NO: 9932 - DNA, 44 bp, Homo sapiens
  source 1..44: mol_type = genomic DNA
ccaacttacacttaggagatttcaacttaacttgaccgctctga

SEQ ID NO: 9933 - DNA, 45 bp, Homo sapiens
  source 1..45: mol_type = genomic DNA
ccaacttacacttaggagatttcaacttaacttgaccgctctgac

SEQ ID NO: 9934 - DNA, 46 bp, Homo sapiens
  source 1..46: mol_type = genomic DNA
ccaacttacacttaggagatttcaacttaacttgaccgctctgacc

SEQ ID NO: 9935 - DNA, 47 bp, Homo sapiens
  source 1..47: mol_type = genomic DNA
ccaacttacacttaggagatttcaacttaacttgaccgctctgacca

SEQ ID NO: 9936 - DNA, 31 bp, Homo sapiens
  source 1..31: mol_type = genomic DNA
ccaagagccttcaaagccctcagtaagttgc

SEQ ID NO: 9937 - DNA, 36 bp, Homo sapiens
  source 1..36: mol_type = genomic DNA
ccaagaggtcccgggttcaaatcccggacgagcccc

SEQ ID NO: 9938 - DNA, 17 bp, Homo sapiens
  source 1..17: mol_type = genomic DNA
ccaagcagttgacccgg

SEQ ID NO: 9939 - DNA, 18 bp, Homo sapiens
  source 1..18: mol_type = genomic DNA
ccaagcagttgacccggg

SEQ ID NO: 9940 - DNA, 19 bp, Homo sapiens
  source 1..19: mol_type = genomic DNA
ccaagcagttgacccgggt

SEQ ID NO: 9941 - DNA, 21 bp, Homo sapiens
  source 1..21: mol_type = genomic DNA
ccaagcagttgacccgggttc

SEQ ID NO: 9942 - DNA, 23 bp, Homo sapiens
  source 1..23: mol_type = genomic DNA
ccaagcagttgacccgggttcga

SEQ ID NO: 9943 - DNA, 31 bp, Homo sapiens
  source 1..31: mol_type = genomic DNA
ccaagcagttgacccgggttcgattcccggc

SEQ ID NO: 9944 - DNA, 32 bp, Homo sapiens
  source 1..32: mol_type = genomic DNA
ccaagcagttgacccgggttcgattcccggcc

SEQ ID NO: 9945 - DNA, 36 bp, Homo sapiens
  source 1..36: mol_type = genomic DNA
ccaagcagttgacccgggttcgattcccggccaacg

SEQ ID NO: 9946 - DNA, 40 bp, Homo sapiens
  source 1..40: mol_type = genomic DNA
ccaagcagttgacccgggttcgattcccggccaacgcacc

SEQ ID NO: 9947 - DNA, 16 bp, Homo sapiens
  source 1..16: mol_type = genomic DNA
ccaaggtcgcgggttc

SEQ ID NO: 9948 - DNA, 17 bp, Homo sapiens
  source 1..17: mol_type = genomic DNA
ccaaggtcgcgggttcg

SEQ ID NO: 9949 - DNA, 31 bp, Homo sapiens
  source 1..31: mol_type = genomic DNA
ccaaggtcgcgggttcgaaccccgtacgggc

SEQ ID NO: 9950 - DNA, 35 bp, Homo sapiens
  source 1..35: mol_type = genomic DNA
ccaaggtcgcgggttcgaaccccgtacgggccacc

SEQ ID NO: 9951 - DNA, 20 bp, Homo sapiens
  source 1..20: mol_type = genomic DNA
ccaaggtcgcgggttcgatc

SEQ ID NO: 9952 - DNA, 31 bp, Homo sapiens
  source 1..31: mol_type = genomic DNA
ccaaggtcgcgggttcgatccccgtacgggc

SEQ ID NO: 9953 - DNA, 32 bp, Homo sapiens
  source 1..32: mol_type = genomic DNA
ccaaggtcgcgggttcgatccccgtacgggcc

SEQ ID NO: 9954 - DNA, 33 bp, Homo sapiens
  source 1..33: mol_type = genomic DNA
ccaaggtcgcgggttcgatccccgtacgggcca

SEQ ID NO: 9955 - DNA, 34 bp, Homo sapiens
  source 1..34: mol_type = genomic DNA
ccaaggtcgcgggttcgatccccgtacgggccac

SEQ ID NO: 9956 - DNA, 35 bp, Homo sapiens
  source 1..35: mol_type = genomic DNA
ccaaggtcgcgggttcgatccccgtacgggccacc

SEQ ID NO: 9957 - DNA, 36 bp, Homo sapiens
  source 1..36: mol_type = genomic DNA
ccaaggtcgcgggttcgatccccgtacgggccacca

SEQ ID NO: 9958 - DNA, 35 bp, Homo sapiens
  source 1..35: mol_type = genomic DNA
ccaaggtcgcgggttcgatccccgtactggccacc

SEQ ID NO: 9959 - DNA, 36 bp, Homo sapiens
  source 1..36: mol_type = genomic DNA
ccaaggtcgcgggttcgatccccgtactggccacca

SEQ ID NO: 9960 - DNA, 25 bp, Homo sapiens
  source 1..25: mol_type = genomic DNA
ccaatggacatatgtccgcgtgggt

SEQ ID NO: 9961 - DNA, 17 bp, Homo sapiens
  source 1..17: mol_type = genomic DNA
ccaatggaggcgtgggt

SEQ ID NO: 9962 - DNA, 18 bp, Homo sapiens
  source 1..18: mol_type = genomic DNA
ccaatggaggcgtgggtt

SEQ ID NO: 9963 - DNA, 29 bp, Homo sapiens
  source 1..29: mol_type = genomic DNA
ccaatggaggcgtgggttcgaatcccact

SEQ ID NO: 9964 - DNA, 33 bp, Homo sapiens
  source 1..33: mol_type = genomic DNA
ccaatggaggcgtgggttcgaatcccacttctg

SEQ ID NO: 9965 - DNA, 36 bp, Homo sapiens
  source 1..36: mol_type = genomic DNA
ccaatggaggcgtgggttcgaatcccacttctgaca

SEQ ID NO: 9966 - DNA, 37 bp, Homo sapiens
  source 1..37: mol_type = genomic DNA
ccaatggaggcgtgggttcgaatcccacttctgacac

SEQ ID NO: 9967 - DNA, 38 bp, Homo sapiens
  source 1..38: mol_type = genomic DNA
ccaatggaggcgtgggttcgaatcccacttctgacacc

SEQ ID NO: 9968 - DNA, 39 bp, Homo sapiens
  source 1..39: mol_type = genomic DNA
ccaatggaggcgtgggttcgaatcccacttctgacacca

SEQ ID NO: 9969 - DNA, 19 bp, Homo sapiens
  source 1..19: mol_type = genomic DNA
ccaattaactagttttgac

SEQ ID NO: 9970 - DNA, 22 bp, Homo sapiens
  source 1..22: mol_type = genomic DNA
ccaattaactagttttgacaac

SEQ ID NO: 9971 - DNA, 23 bp, Homo sapiens
  source 1..23: mol_type = genomic DNA
ccaattaactagttttgacaaca

SEQ ID NO: 9972 - DNA, 35 bp, Homo sapiens
  source 1..35: mol_type = genomic DNA
ccaattaactagttttgacaacattcaaaaaagag

SEQ ID NO: 9973 - DNA, 37 bp, Homo sapiens
  source 1..37: mol_type = genomic DNA
ccaattaactagttttgacaacattcaaaaaagagta

SEQ ID NO: 9974 - DNA, 38 bp, Homo sapiens
  source 1..38: mol_type = genomic DNA
ccaattaactagttttgacaacattcaaaaaagagtac

SEQ ID NO: 9975 - DNA, 39 bp, Homo sapiens
  source 1..39: mol_type = genomic DNA
ccaattaactagttttgacaacattcaaaaaagagtacc

SEQ ID NO: 9976 - DNA, 40 bp, Homo sapiens
  source 1..40: mol_type = genomic DNA
ccaattaactagttttgacaacattcaaaaaagagtacca

SEQ ID NO: 9977 - DNA, 16 bp, Homo sapiens
  source 1..16: mol_type = genomic DNA
ccacatggtctagcgg

SEQ ID NO: 9978 - DNA, 17 bp, Homo sapiens
  source 1..17: mol_type = genomic DNA
ccacatggtctagcggt

SEQ ID NO: 9979 - DNA, 20 bp, Homo sapiens
  source 1..20: mol_type = genomic DNA
ccacatggtctagcggttag

SEQ ID NO: 9980 - DNA, 23 bp, Homo sapiens
  source 1..23: mol_type = genomic DNA
ccacatggtctagcggttaggat

SEQ ID NO: 9981 - DNA, 24 bp, Homo sapiens
  source 1..24: mol_type = genomic DNA
ccacatggtctagcggttaggatt

SEQ ID NO: 9982 - DNA, 25 bp, Homo sapiens
  source 1..25: mol_type = genomic DNA
ccacatggtctagcggttaggattc

SEQ ID NO: 9983 - DNA, 26 bp, Homo sapiens
  source 1..26: mol_type = genomic DNA
ccacatggtctagcggttaggattcc

SEQ ID NO: 9984 - DNA, 27 bp, Homo sapiens
  source 1..27: mol_type = genomic DNA
ccacatggtctagcggttaggattcct

SEQ ID NO: 9985 - DNA, 28 bp, Homo sapiens
  source 1..28: mol_type = genomic DNA
ccacatggtctagcggttaggattcctg

SEQ ID NO: 9986 - DNA, 29 bp, Homo sapiens
  source 1..29: mol_type = genomic DNA
ccacatggtctagcggttaggattcctgg

SEQ ID NO: 9987 - DNA, 30 bp, Homo sapiens
  source 1..30: mol_type = genomic DNA
ccacatggtctagcggttaggattcctggt

SEQ ID NO: 9988 - DNA, 31 bp, Homo sapiens
  source 1..31: mol_type = genomic DNA
ccacatggtctagcggttaggattcctggtt

SEQ ID NO: 9989 - DNA, 32 bp, Homo sapiens
  source 1..32: mol_type = genomic DNA
ccacatggtctagcggttaggattcctggttt

SEQ ID NO: 9990 - DNA, 33 bp, Homo sapiens
  source 1..33: mol_type = genomic DNA
ccacatggtctagcggttaggattcctggtttt

SEQ ID NO: 9991 - DNA, 34 bp, Homo sapiens
  source 1..34: mol_type = genomic DNA
ccacatggtctagcggttaggattcctggttttc

SEQ ID NO: 9992 - DNA, 35 bp, Homo sapiens
  source 1..35: mol_type = genomic DNA
ccacatggtctagcggttaggattcctggttttca

SEQ ID NO: 9993 - DNA, 36 bp, Homo sapiens
  source 1..36: mol_type = genomic DNA
ccacatggtctagcggttaggattcctggttttcac

SEQ ID NO: 9994 - DNA, 37 bp, Homo sapiens
  source 1..37: mol_type = genomic DNA
ccacatggtctagcggttaggattcctggttttcacc

SEQ ID NO: 9995 - DNA, 38 bp, Homo sapiens
  source 1..38: mol_type = genomic DNA
ccacatggtctagcggttaggattcctggttttcaccc

SEQ ID NO: 9996 - DNA, 39 bp, Homo sapiens
  source 1..39: mol_type = genomic DNA
ccacatggtctagcggttaggattcctggttttcaccca

SEQ ID NO: 9997 - DNA, 40 bp, Homo sapiens
  source 1..40: mol_type = genomic DNA
ccacatggtctagcggttaggattcctggttttcacccag

SEQ ID NO: 9998 - DNA, 48 bp, Homo sapiens
  source 1..48: mol_type = genomic DNA
ccacatggtctagcggttaggattcctggttttcacccaggcggcccg

SEQ ID NO: 9999 - DNA, 16 bp, Homo sapiens
  source 1..16: mol_type = genomic DNA
ccacccagggacgcca

SEQ ID NO: 10000 - DNA, 40 bp, Homo sapiens
  source 1..40: mol_type = genomic DNA
ccacgcgggagacccgggttcaattcccggccaatgcacc

SEQ ID NO: 10001 - DNA, 16 bp, Homo sapiens
  source 1..16: mol_type = genomic DNA
ccacgcgggaggcccg

SEQ ID NO: 10002 - DNA, 17 bp, Homo sapiens
  source 1..17: mol_type = genomic DNA
ccacgcgggaggcccgg

SEQ ID NO: 10003 - DNA, 18 bp, Homo sapiens
  source 1..18: mol_type = genomic DNA
ccacgcgggaggcccggg

SEQ ID NO: 10004 - DNA, 19 bp, Homo sapiens
  source 1..19: mol_type = genomic DNA
ccacgcgggaggcccgggt

SEQ ID NO: 10005 - DNA, 22 bp, Homo sapiens
  source 1..22: mol_type = genomic DNA
ccacgcgggaggcccgggttcg

SEQ ID NO: 10006 - DNA, 32 bp, Homo sapiens
  source 1..32: mol_type = genomic DNA
ccacgcgggaggcccgggttcgattcccggcc

SEQ ID NO: 10007 - DNA, 33 bp, Homo sapiens
  source 1..33: mol_type = genomic DNA
ccacgcgggaggcccgggttcgattcccggcca

SEQ ID NO: 10008 - DNA, 35 bp, Homo sapiens
  source 1..35: mol_type = genomic DNA
ccacgcgggaggcccgggttcgattcccggccaat

SEQ ID NO: 10009 - DNA, 36 bp, Homo sapiens
  source 1..36: mol_type = genomic DNA
ccacgcgggaggcccgggttcgattcccggccaatg

SEQ ID NO: 10010 - DNA, 37 bp, Homo sapiens
  source 1..37: mol_type = genomic DNA
ccacgcgggaggcccgggttcgattcccggccaatgc

SEQ ID NO: 10011 - DNA, 38 bp, Homo sapiens
  source 1..38: mol_type = genomic DNA
ccacgcgggaggcccgggttcgattcccggccaatgca

SEQ ID NO: 10012 - DNA, 40 bp, Homo sapiens
  source 1..40: mol_type = genomic DNA
ccacgcgggaggcccgggttcgattcccggccaatgcacc

SEQ ID NO: 10013 - DNA, 41 bp, Homo sapiens
  source 1..41: mol_type = genomic DNA
ccacgcgggaggcccgggttcgattcccggccaatgcacca

SEQ ID NO: 10014 - DNA, 36 bp, Homo sapiens
  source 1..36: mol_type = genomic DNA
ccacgcgggaggcccgggttcgattcccggcccatg

SEQ ID NO: 10015 - DNA, 40 bp, Homo sapiens
  source 1..40: mol_type = genomic DNA
ccacgcgggaggcccgggttcgattcccggcccatgcacc

SEQ ID NO: 10016 - DNA, 41 bp, Homo sapiens
  source 1..41: mol_type = genomic DNA
ccacgcgggaggcccgggttcgattcccggcccatgcacca

SEQ ID NO: 10017 - DNA, 17 bp, Homo sapiens
  source 1..17: mol_type = genomic DNA
ccacgtggcctaatgga

SEQ ID NO: 10018 - DNA, 16 bp, Homo sapiens
  source 1..16: mol_type = genomic DNA
ccactgtaaagctaac

SEQ ID NO: 10019 - DNA, 17 bp, Homo sapiens
  source 1..17: mol_type = genomic DNA
ccactgtaaagctaact

SEQ ID NO: 10020 - DNA, 18 bp, Homo sapiens
  source 1..18: mol_type = genomic DNA
ccactgtaaagctaactt

SEQ ID NO: 10021 - DNA, 20 bp, Homo sapiens
  source 1..20: mol_type = genomic DNA
ccactgtaaagctaacttag

SEQ ID NO: 10022 - DNA, 21 bp, Homo sapiens
  source 1..21: mol_type = genomic DNA
ccactgtaaagctaacttagc

SEQ ID NO: 10023 - DNA, 22 bp, Homo sapiens
  source 1..22: mol_type = genomic DNA
ccactgtaaagctaacttagca

SEQ ID NO: 10024 - DNA, 24 bp, Homo sapiens
  source 1..24: mol_type = genomic DNA
ccactgtaaagctaacttagcatt

SEQ ID NO: 10025 - DNA, 25 bp, Homo sapiens
  source 1..25: mol_type = genomic DNA
ccactgtaaagctaacttagcatta

SEQ ID NO: 10026 - DNA, 27 bp, Homo sapiens
  source 1..27: mol_type = genomic DNA
ccactgtaaagctaacttagcattaac

SEQ ID NO: 10027 - DNA, 28 bp, Homo sapiens
  source 1..28: mol_type = genomic DNA
ccactgtaaagctaacttagcattaacc

SEQ ID NO: 10028 - DNA, 29 bp, Homo sapiens
  source 1..29: mol_type = genomic DNA
ccactgtaaagctaacttagcattaacct

SEQ ID NO: 10029 - DNA, 30 bp, Homo sapiens
  source 1..30: mol_type = genomic DNA
ccactgtaaagctaacttagcattaacctt

SEQ ID NO: 10030 - DNA, 31 bp, Homo sapiens
  source 1..31: mol_type = genomic DNA
ccactgtaaagctaacttagcattaaccttt

SEQ ID NO: 10031 - DNA, 32 bp, Homo sapiens
  source 1..32: mol_type = genomic DNA
ccactgtaaagctaacttagcattaacctttt

SEQ ID NO: 10032 - DNA, 33 bp, Homo sapiens
  source 1..33: mol_type = genomic DNA
ccactgtaaagctaacttagcattaacctttta

SEQ ID NO: 10033 - DNA, 34 bp, Homo sapiens
  source 1..34: mol_type = genomic DNA
ccactgtaaagctaacttagcattaaccttttaa

SEQ ID NO: 10034 - DNA, 35 bp, Homo sapiens
  source 1..35: mol_type = genomic DNA
ccactgtaaagctaacttagcattaaccttttaag

SEQ ID NO: 10035 - DNA, 36 bp, Homo sapiens
  source 1..36: mol_type = genomic DNA
ccactgtaaagctaacttagcattaaccttttaagt

SEQ ID NO: 10036 - DNA, 46 bp, Homo sapiens
  source 1..46: mol_type = genomic DNA
ccactgtaaagctaacttagcattaaccttttaagttaaagattaa

SEQ ID NO: 10037 - DNA, 48 bp, Homo sapiens
  source 1..48: mol_type = genomic DNA
ccactgtaaagctaacttagcattaaccttttaagttaaagattaaga

SEQ ID NO: 10038 - DNA, 16 bp, Homo sapiens
  source 1..16: mol_type = genomic DNA
ccagaggtcgatggat

SEQ ID NO: 10039 - DNA, 17 bp, Homo sapiens
  source 1..17: mol_type = genomic DNA
ccagaggtcgatggatc

SEQ ID NO: 10040 - DNA, 18 bp, Homo sapiens
  source 1..18: mol_type = genomic DNA
ccagaggtcgatggatcg

SEQ ID NO: 10041 - DNA, 22 bp, Homo sapiens
  source 1..22: mol_type = genomic DNA
ccagaggtcgatggatcgaaac

SEQ ID NO: 10042 - DNA, 23 bp, Homo sapiens
  source 1..23: mol_type = genomic DNA
ccagaggtcgatggatcgaaacc

SEQ ID NO: 10043 - DNA, 24 bp, Homo sapiens
  source 1..24: mol_type = genomic DNA
ccagaggtcgatggatcgaaacca

SEQ ID NO: 10044 - DNA, 25 bp, Homo sapiens
  source 1..25: mol_type = genomic DNA
ccagaggtcgatggatcgaaaccat

SEQ ID NO: 10045 - DNA, 16 bp, Homo sapiens
  source 1..16: mol_type = genomic DNA
ccagaggttccgggtt

SEQ ID NO: 10046 - DNA, 17 bp, Homo sapiens
  source 1..17: mol_type = genomic DNA
ccagaggttccgggttc

SEQ ID NO: 10047 - DNA, 18 bp, Homo sapiens
  source 1..18: mol_type = genomic DNA
ccagaggttccgggttcg

SEQ ID NO: 10048 - DNA, 34 bp, Homo sapiens
  source 1..34: mol_type = genomic DNA
ccagaggttccgggttcgagtcccggcagagatg

SEQ ID NO: 10049 - DNA, 35 bp, Homo sapiens
  source 1..35: mol_type = genomic DNA
ccagaggttccgggttcgagtcccggcagagatgc

SEQ ID NO: 10050 - DNA, 36 bp, Homo sapiens
  source 1..36: mol_type = genomic DNA
ccagaggttccgggttcgagtcccggcagagatgcc

SEQ ID NO: 10051 - DNA, 37 bp, Homo sapiens
  source 1..37: mol_type = genomic DNA
ccagaggttccgggttcgagtcccggcagagatgcca

SEQ ID NO: 10052 - DNA, 17 bp, Homo sapiens
  source 1..17: mol_type = genomic DNA
ccagagtgtagcttaac

SEQ ID NO: 10053 - DNA, 20 bp, Homo sapiens
  source 1..20: mol_type = genomic DNA
ccagagtgtagcttaacaca

SEQ ID NO: 10054 - DNA, 22 bp, Homo sapiens
  source 1..22: mol_type = genomic DNA
ccagagtgtagcttaacacaaa

SEQ ID NO: 10055 - DNA, 27 bp, Homo sapiens
  source 1..27: mol_type = genomic DNA
ccagagtgtagcttaacacaaagcacc

SEQ ID NO: 10056 - DNA, 28 bp, Homo sapiens
  source 1..28: mol_type = genomic DNA
ccagagtgtagcttaacacaaagcaccc

SEQ ID NO: 10057 - DNA, 29 bp, Homo sapiens
  source 1..29: mol_type = genomic DNA
ccagagtgtagcttaacacaaagcaccca

SEQ ID NO: 10058 - DNA, 30 bp, Homo sapiens
  source 1..30: mol_type = genomic DNA
ccagagtgtagcttaacacaaagcacccaa

SEQ ID NO: 10059 - DNA, 31 bp, Homo sapiens
  source 1..31: mol_type = genomic DNA
ccagagtgtagcttaacacaaagcacccaac

SEQ ID NO: 10060 - DNA, 32 bp, Homo sapiens
  source 1..32: mol_type = genomic DNA
ccagagtgtagcttaacacaaagcacccaact

SEQ ID NO: 10061 - DNA, 33 bp, Homo sapiens
  source 1..33: mol_type = genomic DNA
ccagagtgtagcttaacacaaagcacccaactt

SEQ ID NO: 10062 - DNA, 34 bp, Homo sapiens
  source 1..34: mol_type = genomic DNA
ccagagtgtagcttaacacaaagcacccaactta

SEQ ID NO: 10063 - DNA, 17 bp, Homo sapiens
  source 1..17: mol_type = genomic DNA
ccagatcagaaggctgc

SEQ ID NO: 10064 - DNA, 19 bp, Homo sapiens
  source 1..19: mol_type = genomic DNA
ccagatcagaaggctgcgt

SEQ ID NO: 10065 - DNA, 20 bp, Homo sapiens
  source 1..20: mol_type = genomic DNA
ccagatcagaaggctgcgtg

SEQ ID NO: 10066 - DNA, 22 bp, Homo sapiens
  source 1..22: mol_type = genomic DNA
ccagatcagaaggctgcgtgtt

SEQ ID NO: 10067 - DNA, 23 bp, Homo sapiens
  source 1..23: mol_type = genomic DNA
ccagatcagaaggctgcgtgttc

SEQ ID NO: 10068 - DNA, 24 bp, Homo sapiens
  source 1..24: mol_type = genomic DNA
ccagatcagaaggctgcgtgttcg

SEQ ID NO: 10069 - DNA, 29 bp, Homo sapiens
  source 1..29: mol_type = genomic DNA
ccagatcagaaggctgcgtgttcgaatca

SEQ ID NO: 10070 - DNA, 33 bp, Homo sapiens
  source 1..33: mol_type = genomic DNA
ccagatcagaaggctgcgtgttcgaatcacgtc

SEQ ID NO: 10071 - DNA, 39 bp, Homo sapiens
  source 1..39: mol_type = genomic DNA
ccagatcagaaggctgcgtgttcgaatcacgtcggggtc

SEQ ID NO: 10072 - DNA, 17 bp, Homo sapiens
  source 1..17: mol_type = genomic DNA
ccagatcagaaggttgc

SEQ ID NO: 10073 - DNA, 20 bp, Homo sapiens
  source 1..20: mol_type = genomic DNA
ccagatcagaaggttgcgtg

SEQ ID NO: 10074 - DNA, 23 bp, Homo sapiens
  source 1..23: mol_type = genomic DNA
ccagatcagaaggttgcgtgttc

SEQ ID NO: 10075 - DNA, 24 bp, Homo sapiens
  source 1..24: mol_type = genomic DNA
ccagatcagaaggttgcgtgttca

SEQ ID NO: 10076 - DNA, 29 bp, Homo sapiens
  source 1..29: mol_type = genomic DNA
ccagatcagaaggttgcgtgttcaaatca

SEQ ID NO: 10077 - DNA, 17 bp, Homo sapiens
  source 1..17: mol_type = genomic DNA
ccagcaatccgagttcg

SEQ ID NO: 10078 - DNA, 31 bp, Homo sapiens
  source 1..31: mol_type = genomic DNA
ccagcaatccgagttcgaatctcggtgggac

SEQ ID NO: 10079 - DNA, 33 bp, Homo sapiens
  source 1..33: mol_type = genomic DNA
ccagcaatccgagttcgaatctcggtgggacct

SEQ ID NO: 10080 - DNA, 34 bp, Homo sapiens
  source 1..34: mol_type = genomic DNA
ccagcaatccgagttcgaatctcggtgggacctc

SEQ ID NO: 10081 - DNA, 35 bp, Homo sapiens
  source 1..35: mol_type = genomic DNA
ccagcaatccgagttcgaatctcggtgggacctcc

SEQ ID NO: 10082 - DNA, 16 bp, Homo sapiens
  source 1..16: mol_type = genomic DNA
ccagcgatccgagttc

SEQ ID NO: 10083 - DNA, 17 bp, Homo sapiens
  source 1..17: mol_type = genomic DNA
ccagcgatccgagttca

SEQ ID NO: 10084 - DNA, 21 bp, Homo sapiens
  source 1..21: mol_type = genomic DNA
ccagcgatccgagttcaaatc

SEQ ID NO: 10085 - DNA, 27 bp, Homo sapiens
  source 1..27: mol_type = genomic DNA
ccagcgatccgagttcaaatctcggtg

SEQ ID NO: 10086 - DNA, 31 bp, Homo sapiens
  source 1..31: mol_type = genomic DNA
ccagcgatccgagttcaaatctcggtggaac

SEQ ID NO: 10087 - DNA, 32 bp, Homo sapiens
  source 1..32: mol_type = genomic DNA
ccagcgatccgagttcaaatctcggtggaacc

SEQ ID NO: 10088 - DNA, 33 bp, Homo sapiens
  source 1..33: mol_type = genomic DNA
ccagcgatccgagttcaaatctcggtggaacct

SEQ ID NO: 10089 - DNA, 34 bp, Homo sapiens
  source 1..34: mol_type = genomic DNA
ccagcgatccgagttcaaatctcggtggaacctc

SEQ ID NO: 10090 - DNA, 35 bp, Homo sapiens
  source 1..35: mol_type = genomic DNA
ccagcgatccgagttcaaatctcggtggaacctcc

SEQ ID NO: 10091 - DNA, 36 bp, Homo sapiens
  source 1..36: mol_type = genomic DNA
ccagcgatccgagttcaaatctcggtggaacctcca

SEQ ID NO: 10092 - DNA, 31 bp, Homo sapiens
  source 1..31: mol_type = genomic DNA
ccagcgatccgagttcaaatctcggtgggac

SEQ ID NO: 10093 - DNA, 32 bp, Homo sapiens
  source 1..32: mol_type = genomic DNA
ccagcgatccgagttcaaatctcggtgggacc

SEQ ID NO: 10094 - DNA, 33 bp, Homo sapiens
  source 1..33: mol_type = genomic DNA
ccagcgatccgagttcaaatctcggtgggacct

SEQ ID NO: 10095 - DNA, 34 bp, Homo sapiens
  source 1..34: mol_type = genomic DNA
ccagcgatccgagttcaaatctcggtgggacctc

SEQ ID NO: 10096 - DNA, 35 bp, Homo sapiens
  source 1..35: mol_type = genomic DNA
ccagcgatccgagttcaaatctcggtgggacctcc

SEQ ID NO: 10097 - DNA, 34 bp, Homo sapiens
  source 1..34: mol_type = genomic DNA
ccagcgatccgagttcaagtctcggtggaacctc

SEQ ID NO: 10098 - DNA, 17 bp, Homo sapiens
  source 1..17: mol_type = genomic DNA
ccagcgatccgagttcg

SEQ ID NO: 10099 - DNA, 23 bp, Homo sapiens
  source 1..23: mol_type = genomic DNA
ccagcgatccgagttcgagtctc

SEQ ID NO: 10100 - DNA, 33 bp, Homo sapiens
  source 1..33: mol_type = genomic DNA
ccagcgatccgagttcgagtctcggtggaacct

SEQ ID NO: 10101 - DNA, 34 bp, Homo sapiens
  source 1..34: mol_type = genomic DNA
ccagcgatccgagttcgagtctcggtggaacctc

SEQ ID NO: 10102 - DNA, 35 bp, Homo sapiens
  source 1..35: mol_type = genomic DNA
ccagcgatccgagttcgagtctcggtggaacctcc

SEQ ID NO: 10103 - DNA, 30 bp, Homo sapiens
  source 1..30: mol_type = genomic DNA
ccagctagctcagtcggtagagcatgagac

SEQ ID NO: 10104 - DNA, 31 bp, Homo sapiens
  source 1..31: mol_type = genomic DNA
ccagctagctcagtcggtagagcatgagact

SEQ ID NO: 10105 - DNA, 32 bp, Homo sapiens
  source 1..32: mol_type = genomic DNA
ccagctagctcagtcggtagagcatgagactc

SEQ ID NO: 10106 - DNA, 40 bp, Homo sapiens
  source 1..40: mol_type = genomic DNA
ccagctagctcagtcggtagagcatgagactcttaatctc

SEQ ID NO: 10107 - DNA, 16 bp, Homo sapiens
  source 1..16: mol_type = genomic DNA
ccagctttggggggtt

SEQ ID NO: 10108 - DNA, 17 bp, Homo sapiens
  source 1..17: mol_type = genomic DNA
ccagctttggggggttc

SEQ ID NO: 10109 - DNA, 18 bp, Homo sapiens
  source 1..18: mol_type = genomic DNA
ccagctttggggggttcg

SEQ ID NO: 10110 - DNA, 27 bp, Homo sapiens
  source 1..27: mol_type = genomic DNA
ccagctttggggggttcgattccttcc

SEQ ID NO: 10111 - DNA, 28 bp, Homo sapiens
  source 1..28: mol_type = genomic DNA
ccagctttggggggttcgattccttcct

SEQ ID NO: 10112 - DNA, 29 bp, Homo sapiens
  source 1..29: mol_type = genomic DNA
ccagctttggggggttcgattccttcctt

SEQ ID NO: 10113 - DNA, 30 bp, Homo sapiens
  source 1..30: mol_type = genomic DNA
ccagctttggggggttcgattccttccttt

SEQ ID NO: 10114 - DNA, 31 bp, Homo sapiens
  source 1..31: mol_type = genomic DNA
ccagctttggggggttcgattccttcctttt

SEQ ID NO: 10115 - DNA, 35 bp, Homo sapiens
  source 1..35: mol_type = genomic DNA
ccagctttggggggttcgattccttccttttttgc

SEQ ID NO: 10116 - DNA, 36 bp, Homo sapiens
  source 1..36: mol_type = genomic DNA
ccagctttggggggttcgattccttccttttttgcc

SEQ ID NO: 10117 - DNA, 37 bp, Homo sapiens
  source 1..37: mol_type = genomic DNA
ccagctttggggggttcgattccttccttttttgcca

SEQ ID NO: 10118 - DNA, 18 bp, Homo sapiens
  source 1..18: mol_type = genomic DNA
ccaggatggccgagtggt

SEQ ID NO: 10119 - DNA, 19 bp, Homo sapiens
  source 1..19: mol_type = genomic DNA
ccaggatggccgagtggtt

SEQ ID NO: 10120 - DNA, 22 bp, Homo sapiens
  source 1..22: mol_type = genomic DNA
ccaggatggccgagtggttaag

SEQ ID NO: 10121 - DNA, 24 bp, Homo sapiens
  source 1..24: mol_type = genomic DNA
ccaggatggccgagtggttaaggc

SEQ ID NO: 10122 - DNA, 33 bp, Homo sapiens
  source 1..33: mol_type = genomic DNA
ccaggatggccgagtggttaaggcgttggactt

SEQ ID NO: 10123 - DNA, 17 bp, Homo sapiens
  source 1..17: mol_type = genomic DNA
ccaggcggcccgggttc

SEQ ID NO: 10124 - DNA, 22 bp, Homo sapiens
  source 1..22: mol_type = genomic DNA
ccaggcggcccgggttcgactc

SEQ ID NO: 10125 - DNA, 26 bp, Homo sapiens
  source 1..26: mol_type = genomic DNA
ccaggcggcccgggttcgactcccgg

SEQ ID NO: 10126 - DNA, 27 bp, Homo sapiens
  source 1..27: mol_type = genomic DNA
ccaggcggcccgggttcgactcccggt

SEQ ID NO: 10127 - DNA, 28 bp, Homo sapiens
  source 1..28: mol_type = genomic DNA
ccaggcggcccgggttcgactcccggtg

SEQ ID NO: 10128 - DNA, 29 bp, Homo sapiens
  source 1..29: mol_type = genomic DNA
ccaggcggcccgggttcgactcccggtgt

SEQ ID NO: 10129 - DNA, 30 bp, Homo sapiens
  source 1..30: mol_type = genomic DNA
ccaggcggcccgggttcgactcccggtgtg

SEQ ID NO: 10130 - DNA, 31 bp, Homo sapiens
  source 1..31: mol_type = genomic DNA
ccaggcggcccgggttcgactcccggtgtgg

SEQ ID NO: 10131 - DNA, 32 bp, Homo sapiens
  source 1..32: mol_type = genomic DNA
ccaggcggcccgggttcgactcccggtgtggg

SEQ ID NO: 10132 - DNA, 33 bp, Homo sapiens
  source 1..33: mol_type = genomic DNA
ccaggcggcccgggttcgactcccggtgtggga

SEQ ID NO: 10133 - DNA, 34 bp, Homo sapiens
  source 1..34: mol_type = genomic DNA
ccaggcggcccgggttcgactcccggtgtgggaa

SEQ ID NO: 10134 - DNA, 35 bp, Homo sapiens
  source 1..35: mol_type = genomic DNA
ccaggcggcccgggttcgactcccggtgtgggaac

SEQ ID NO: 10135 - DNA, 36 bp, Homo sapiens
  source 1..36: mol_type = genomic DNA
ccaggcggcccgggttcgactcccggtgtgggaacc

SEQ ID NO: 10136 - DNA, 37 bp, Homo sapiens
  source 1..37: mol_type = genomic DNA
ccaggcggcccgggttcgactcccggtgtgggaacca

SEQ ID NO: 10137 - DNA, 16 bp, Homo sapiens
  source 1..16: mol_type = genomic DNA
ccagggattgtgggtt

SEQ ID NO: 10138 - DNA, 17 bp, Homo sapiens
  source 1..17: mol_type = genomic DNA
ccagggattgtgggttc

SEQ ID NO: 10139 - DNA, 18 bp, Homo sapiens
  source 1..18: mol_type = genomic DNA
ccagggattgtgggttcg

SEQ ID NO: 10140 - DNA, 34 bp, Homo sapiens
  source 1..34: mol_type = genomic DNA
ccagggattgtgggttcgagtcccacccggggta

SEQ ID NO: 10141 - DNA, 36 bp, Homo sapiens
  source 1..36: mol_type = genomic DNA
ccagggattgtgggttcgagtcccacccggggtacc

SEQ ID NO: 10142 - DNA, 37 bp, Homo sapiens
  source 1..37: mol_type = genomic DNA
ccagggattgtgggttcgagtcccacccggggtacca

SEQ ID NO: 10143 - DNA, 36 bp, Homo sapiens
  source 1..36: mol_type = genomic DNA
ccagggattgtgggttcgagtcccacctggggtacc

SEQ ID NO: 10144 - DNA, 36 bp, Homo sapiens
  source 1..36: mol_type = genomic DNA
ccagggattgtgggttcgagtcccacctggggtgcc

SEQ ID NO: 10145 - DNA, 37 bp, Homo sapiens
  source 1..37: mol_type = genomic DNA
ccagggattgtgggttcgagtcccacctggggtgcca

SEQ ID NO: 10146 - DNA, 27 bp, Homo sapiens
  source 1..27: mol_type = genomic DNA
ccagggattgtgggttcgagtcccatc

SEQ ID NO: 10147 - DNA, 34 bp, Homo sapiens
  source 1..34: mol_type = genomic DNA
ccagggattgtgggttcgagtcccatctggggtg

SEQ ID NO: 10148 - DNA, 35 bp, Homo sapiens
  source 1..35: mol_type = genomic DNA
ccagggattgtgggttcgagtcccatctggggtgc

SEQ ID NO: 10149 - DNA, 36 bp, Homo sapiens
  source 1..36: mol_type = genomic DNA
ccagggattgtgggttcgagtcccatctggggtgcc

SEQ ID NO: 10150 - DNA, 37 bp, Homo sapiens
  source 1..37: mol_type = genomic DNA
ccagggattgtgggttcgagtcccatctggggtgcca

SEQ ID NO: 10151 - DNA, 16 bp, Homo sapiens
  source 1..16: mol_type = genomic DNA
ccaggggtcgcgagtt

SEQ ID NO: 10152 - DNA, 17 bp, Homo sapiens
  source 1..17: mol_type = genomic DNA
ccaggggtcgcgagttc

SEQ ID NO: 10153 - DNA, 18 bp, Homo sapiens
  source 1..18: mol_type = genomic DNA
ccaggggtcgcgagttca

SEQ ID NO: 10154 - DNA, 32 bp, Homo sapiens
  source 1..32: mol_type = genomic DNA
ccaggggtcgcgagttcaaatctcgctggggc

SEQ ID NO: 10155 - DNA, 33 bp, Homo sapiens
  source 1..33: mol_type = genomic DNA
ccaggggtcgcgagttcaaatctcgctggggcc

SEQ ID NO: 10156 - DNA, 34 bp, Homo sapiens
  source 1..34: mol_type = genomic DNA
ccaggggtcgcgagttcaaatctcgctggggcct

SEQ ID NO: 10157 - DNA, 35 bp, Homo sapiens
  source 1..35: mol_type = genomic DNA
ccaggggtcgcgagttcaaatctcgctggggcctc

SEQ ID NO: 10158 - DNA, 36 bp, Homo sapiens
  source 1..36: mol_type = genomic DNA
ccaggggtcgcgagttcaaatctcgctggggcctcc

SEQ ID NO: 10159 - DNA, 37 bp, Homo sapiens
  source 1..37: mol_type = genomic DNA
ccaggggtcgcgagttcaaatctcgctggggcctcca

SEQ ID NO: 10160 - DNA, 34 bp, Homo sapiens
  source 1..34: mol_type = genomic DNA
ccaggggtcgcgagttcaattctcgctggggcct

SEQ ID NO: 10161 - DNA, 35 bp, Homo sapiens
  source 1..35: mol_type = genomic DNA
ccaggggtcgcgagttcaattctcgctggggcctc

SEQ ID NO: 10162 - DNA, 36 bp, Homo sapiens
  source 1..36: mol_type = genomic DNA
ccaggggtcgcgagttcaattctcgctggggcctcc

SEQ ID NO: 10163 - DNA, 37 bp, Homo sapiens
  source 1..37: mol_type = genomic DNA
ccaggggtcgcgagttcaattctcgctggggcctcca

SEQ ID NO: 10164 - DNA, 34 bp, Homo sapiens
  source 1..34: mol_type = genomic DNA
ccaggggtcgcgagttcgatcctcgctggggcct

SEQ ID NO: 10165 - DNA, 36 bp, Homo sapiens
  source 1..36: mol_type = genomic DNA
ccaggggtcgcgagttcgatcctcgctggggcctcc

SEQ ID NO: 10166 - DNA, 16 bp, Homo sapiens
  source 1..16: mol_type = genomic DNA
ccagggtcgtgggttc

SEQ ID NO: 10167 - DNA, 17 bp, Homo sapiens
  source 1..17: mol_type = genomic DNA
ccagggtcgtgggttcg

SEQ ID NO: 10168 - DNA, 29 bp, Homo sapiens
  source 1..29: mol_type = genomic DNA
ccagggtcgtgggttcgagccccacgttg

SEQ ID NO: 10169 - DNA, 32 bp, Homo sapiens
  source 1..32: mol_type = genomic DNA
ccagggtcgtgggttcgagccccacgttgggc

SEQ ID NO: 10170 - DNA, 33 bp, Homo sapiens
  source 1..33: mol_type = genomic DNA
ccagggtcgtgggttcgagccccacgttgggcg

SEQ ID NO: 10171 - DNA, 34 bp, Homo sapiens
  source 1..34: mol_type = genomic DNA
ccagggtcgtgggttcgagccccacgttgggcgc

SEQ ID NO: 10172 - DNA, 35 bp, Homo sapiens
  source 1..35: mol_type = genomic DNA
ccagggtcgtgggttcgagccccacgttgggcgcc

SEQ ID NO: 10173 - DNA, 36 bp, Homo sapiens
  source 1..36: mol_type = genomic DNA
ccagggtcgtgggttcgagccccacgttgggcgcca

SEQ ID NO: 10174 - DNA, 26 bp, Homo sapiens
  source 1..26: mol_type = genomic DNA
ccagggttcaagtccctgtccaggcg

SEQ ID NO: 10175 - DNA, 28 bp, Homo sapiens
  source 1..28: mol_type = genomic DNA
ccagggttcaagtccctgtccaggcgcc

SEQ ID NO: 10176 - DNA, 25 bp, Homo sapiens
  source 1..25: mol_type = genomic DNA
ccagggttcaagtccctgttcaggc

SEQ ID NO: 10177 - DNA, 26 bp, Homo sapiens
  source 1..26: mol_type = genomic DNA
ccagggttcaagtccctgttcaggcg

SEQ ID NO: 10178 - DNA, 24 bp, Homo sapiens
  source 1..24: mol_type = genomic DNA
ccagggttcaagtccctgttcggg

SEQ ID NO: 10179 - DNA, 25 bp, Homo sapiens
  source 1..25: mol_type = genomic DNA
ccagggttcaagtccctgttcgggc

SEQ ID NO: 10180 - DNA, 26 bp, Homo sapiens
  source 1..26: mol_type = genomic DNA
ccagggttcaagtccctgttcgggcg

SEQ ID NO: 10181 - DNA, 27 bp, Homo sapiens
  source 1..27: mol_type = genomic DNA
ccagggttcaagtccctgttcgggcgc

SEQ ID NO: 10182 - DNA, 28 bp, Homo sapiens
  source 1..28: mol_type = genomic DNA
ccagggttcaagtccctgttcgggcgcc

SEQ ID NO: 10183 - DNA, 29 bp, Homo sapiens
  source 1..29: mol_type = genomic DNA
ccagggttcaagtccctgttcgggcgcca

SEQ ID NO: 10184 - DNA, 27 bp, Homo sapiens
  source 1..27: mol_type = genomic DNA
ccaggtggcccgggttcgactcccggt

SEQ ID NO: 10185 - DNA, 28 bp, Homo sapiens
  source 1..28: mol_type = genomic DNA
ccaggtggcccgggttcgactcccggta

SEQ ID NO: 10186 - DNA, 29 bp, Homo sapiens
  source 1..29: mol_type = genomic DNA
ccaggtggcccgggttcgactcccggtat

SEQ ID NO: 10187 - DNA, 30 bp, Homo sapiens
  source 1..30: mol_type = genomic DNA
ccaggtggcccgggttcgactcccggtatg

SEQ ID NO: 10188 - DNA, 31 bp, Homo sapiens
  source 1..31: mol_type = genomic DNA
ccaggtggcccgggttcgactcccggtatgg

SEQ ID NO: 10189 - DNA, 32 bp, Homo sapiens
  source 1..32: mol_type = genomic DNA
ccaggtggcccgggttcgactcccggtatggg

SEQ ID NO: 10190 - DNA, 33 bp, Homo sapiens
  source 1..33: mol_type = genomic DNA
ccaggtggcccgggttcgactcccggtatggga

SEQ ID NO: 10191 - DNA, 34 bp, Homo sapiens
  source 1..34: mol_type = genomic DNA
ccaggtggcccgggttcgactcccggtatgggaa

SEQ ID NO: 10192 - DNA, 35 bp, Homo sapiens
  source 1..35: mol_type = genomic DNA
ccaggtggcccgggttcgactcccggtatgggaac

SEQ ID NO: 10193 - DNA, 36 bp, Homo sapiens
  source 1..36: mol_type = genomic DNA
ccaggtggcccgggttcgactcccggtatgggaacc

SEQ ID NO: 10194 - DNA, 37 bp, Homo sapiens
  source 1..37: mol_type = genomic DNA
ccaggtggcccgggttcgactcccggtatgggaacca

SEQ ID NO: 10195 - DNA, 16 bp, Homo sapiens
  source 1..16: mol_type = genomic DNA
ccaggttcgactcctg

SEQ ID NO: 10196 - DNA, 27 bp, Homo sapiens
  source 1..27: mol_type = genomic DNA
ccaggttcgactcctggctggctcgcc

SEQ ID NO: 10197 - DNA, 44 bp, Homo sapiens
  source 1..44: mol_type = genomic DNA
ccagtctcttcggaggcgtgggttcgaatcccaccgctgccacc

SEQ ID NO: 10198 - DNA, 16 bp, Homo sapiens
  source 1..16: mol_type = genomic DNA
ccagtctcttcggggg

SEQ ID NO: 10199 - DNA, 23 bp, Homo sapiens
  source 1..23: mol_type = genomic DNA
ccagtctcttcgggggcgtgggt

SEQ ID NO: 10200 - DNA, 24 bp, Homo sapiens
  source 1..24: mol_type = genomic DNA
ccagtctcttcgggggcgtgggtt

SEQ ID NO: 10201 - DNA, 41 bp, Homo sapiens
  source 1..41: mol_type = genomic DNA
ccagtctcttcgggggcgtgggttcgaatcccaccgctgcc

SEQ ID NO: 10202 - DNA, 42 bp, Homo sapiens
  source 1..42: mol_type = genomic DNA
ccagtctcttcgggggcgtgggttcgaatcccaccgctgcca

SEQ ID NO: 10203 - DNA, 43 bp, Homo sapiens
  source 1..43: mol_type = genomic DNA
ccagtctcttcgggggcgtgggttcgaatcccaccgctgccac

SEQ ID NO: 10204 - DNA, 44 bp, Homo sapiens
  source 1..44: mol_type = genomic DNA
ccagtctcttcgggggcgtgggttcgaatcccaccgctgccacc

SEQ ID NO: 10205 - DNA, 27 bp, Homo sapiens
  source 1..27: mol_type = genomic DNA
ccagtcttgtaaaccggagatgaaaac

SEQ ID NO: 10206 - DNA, 16 bp, Homo sapiens
  source 1..16: mol_type = genomic DNA
ccagtggcctaatgga

SEQ ID NO: 10207 - DNA, 17 bp, Homo sapiens
  source 1..17: mol_type = genomic DNA
ccagtggcctaatggat

SEQ ID NO: 10208 - DNA, 31 bp, Homo sapiens
  source 1..31: mol_type = genomic DNA
ccagtggcctaatggataaggcatcagcctc

SEQ ID NO: 10209 - DNA, 32 bp, Homo sapiens
  source 1..32: mol_type = genomic DNA
ccagtggcctaatggataaggcatcagcctcc

SEQ ID NO: 10210 - DNA, 33 bp, Homo sapiens
  source 1..33: mol_type = genomic DNA
ccagtggcctaatggataaggcatcagcctccg

SEQ ID NO: 10211 - DNA, 33 bp, Homo sapiens
  source 1..33: mol_type = genomic DNA
ccagtggcgcaatcggttagcgcgcggtactta

SEQ ID NO: 10212 - DNA, 16 bp, Homo sapiens
  source 1..16: mol_type = genomic DNA
ccagtggcgcaatgga

SEQ ID NO: 10213 - DNA, 20 bp, Homo sapiens
  source 1..20: mol_type = genomic DNA
ccagtggcgcaatggataac

SEQ ID NO: 10214 - DNA, 25 bp, Homo sapiens
  source 1..25: mol_type = genomic DNA
ccagttgattagggtgcttagctgt

SEQ ID NO: 10215 - DNA, 26 bp, Homo sapiens
  source 1..26: mol_type = genomic DNA
ccagttgattagggtgcttagctgtt

SEQ ID NO: 10216 - DNA, 45 bp, Homo sapiens
  source 1..45: mol_type = genomic DNA
ccagttgattagggtgcttagctgttaactaagtgtttgtgggtt

SEQ ID NO: 10217 - DNA, 20 bp, Homo sapiens
  source 1..20: mol_type = genomic DNA
ccataacccagaggtcgatg

SEQ ID NO: 10218 - DNA, 22 bp, Homo sapiens
  source 1..22: mol_type = genomic DNA
ccataacccagaggtcgatgga

SEQ ID NO: 10219 - DNA, 23 bp, Homo sapiens
  source 1..23: mol_type = genomic DNA
ccataacccagaggtcgatggat

SEQ ID NO: 10220 - DNA, 25 bp, Homo sapiens
  source 1..25: mol_type = genomic DNA
ccataacccagaggtcgatggatcg

SEQ ID NO: 10221 - DNA, 41 bp, Homo sapiens
  source 1..41: mol_type = genomic DNA
ccataccccgaaaatgttggttatacccttcccgtactacc

SEQ ID NO: 10222 - DNA, 42 bp, Homo sapiens
  source 1..42: mol_type = genomic DNA
ccataccccgaaaatgttggttatacccttcccgtactacca

SEQ ID NO: 10223 - DNA, 25 bp, Homo sapiens
  source 1..25: mol_type = genomic DNA
ccatagctcaggggttagagcactg

SEQ ID NO: 10224 - DNA, 28 bp, Homo sapiens
  source 1..28: mol_type = genomic DNA
ccatagctcaggggttagagcactggtc

SEQ ID NO: 10225 - DNA, 25 bp, Homo sapiens
  source 1..25: mol_type = genomic DNA
ccatagctcagtggttagagcactg

SEQ ID NO: 10226 - DNA, 19 bp, Homo sapiens
  source 1..19: mol_type = genomic DNA
ccatagtgtagcggttatc

SEQ ID NO: 10227 - DNA, 27 bp, Homo sapiens
  source 1..27: mol_type = genomic DNA
ccatagtgtagcggttatcacgtctgc

SEQ ID NO: 10228 - DNA, 30 bp, Homo sapiens
  source 1..30: mol_type = genomic DNA
ccatagtgtagcggttatcacgtctgcttt

SEQ ID NO: 10229 - DNA, 32 bp, Homo sapiens
  source 1..32: mol_type = genomic DNA
ccatagtgtagcggttatcacgtctgctttac

SEQ ID NO: 10230 - DNA, 19 bp, Homo sapiens
  source 1..19: mol_type = genomic DNA
ccatagtgtagtggttatc

SEQ ID NO: 10231 - DNA, 28 bp, Homo sapiens
  source 1..28: mol_type = genomic DNA
ccatagtgtagtggttatcacatctgct

SEQ ID NO: 10232 - DNA, 29 bp, Homo sapiens
  source 1..29: mol_type = genomic DNA
ccatagtgtagtggttatcacatctgctt

SEQ ID NO: 10233 - DNA, 26 bp, Homo sapiens
  source 1..26: mol_type = genomic DNA
ccatagtgtagtggttatcacgtctg

SEQ ID NO: 10234 - DNA, 27 bp, Homo sapiens
  source 1..27: mol_type = genomic DNA
ccatagtgtagtggttatcacgtctgc

SEQ ID NO: 10235 - DNA, 28 bp, Homo sapiens
  source 1..28: mol_type = genomic DNA
ccatagtgtagtggttatcacgtctgct

SEQ ID NO: 10236 - DNA, 29 bp, Homo sapiens
  source 1..29: mol_type = genomic DNA
ccatagtgtagtggttatcacgtctgctt

SEQ ID NO: 10237 - DNA, 30 bp, Homo sapiens
  source 1..30: mol_type = genomic DNA
ccatagtgtagtggttatcacgtctgcttt

SEQ ID NO: 10238 - DNA, 31 bp, Homo sapiens
  source 1..31: mol_type = genomic DNA
ccatagtgtagtggttatcacgtctgcttta

SEQ ID NO: 10239 - DNA, 32 bp, Homo sapiens
  source 1..32: mol_type = genomic DNA
ccatagtgtagtggttatcacgtctgctttac

SEQ ID NO: 10240 - DNA, 23 bp, Homo sapiens
  source 1..23: mol_type = genomic DNA
ccatatggtctagcggttaggat

SEQ ID NO: 10241 - DNA, 24 bp, Homo sapiens
  source 1..24: mol_type = genomic DNA
ccatatggtctagcggttaggatt

SEQ ID NO: 10242 - DNA, 25 bp, Homo sapiens
  source 1..25: mol_type = genomic DNA
ccatatggtctagcggttaggattc

SEQ ID NO: 10243 - DNA, 26 bp, Homo sapiens
  source 1..26: mol_type = genomic DNA
ccatatggtctagcggttaggattcc

SEQ ID NO: 10244 - DNA, 27 bp, Homo sapiens
  source 1..27: mol_type = genomic DNA
ccatatggtctagcggttaggattcct

SEQ ID NO: 10245 - DNA, 28 bp, Homo sapiens
  source 1..28: mol_type = genomic DNA
ccatatggtctagcggttaggattcctg

SEQ ID NO: 10246 - DNA, 29 bp, Homo sapiens
  source 1..29: mol_type = genomic DNA
ccatatggtctagcggttaggattcctgg

SEQ ID NO: 10247 - DNA, 30 bp, Homo sapiens
  source 1..30: mol_type = genomic DNA
ccatatggtctagcggttaggattcctggt

SEQ ID NO: 10248 - DNA, 31 bp, Homo sapiens
  source 1..31: mol_type = genomic DNA
ccatatggtctagcggttaggattcctggtt

SEQ ID NO: 10249 - DNA, 32 bp, Homo sapiens
  source 1..32: mol_type = genomic DNA
ccatatggtctagcggttaggattcctggttt

SEQ ID NO: 10250 - DNA, 33 bp, Homo sapiens
  source 1..33: mol_type = genomic DNA
ccatatggtctagcggttaggattcctggtttt

SEQ ID NO: 10251 - DNA, 34 bp, Homo sapiens
  source 1..34: mol_type = genomic DNA
ccatatggtctagcggttaggattcctggttttc

SEQ ID NO: 10252 - DNA, 35 bp, Homo sapiens
  source 1..35: mol_type = genomic DNA
ccatatggtctagcggttaggattcctggttttca

SEQ ID NO: 10253 - DNA, 36 bp, Homo sapiens
  source 1..36: mol_type = genomic DNA
ccatatggtctagcggttaggattcctggttttcac

SEQ ID NO: 10254 - DNA, 37 bp, Homo sapiens
  source 1..37: mol_type = genomic DNA
ccatatggtctagcggttaggattcctggttttcacc

SEQ ID NO: 10255 - DNA, 38 bp, Homo sapiens
  source 1..38: mol_type = genomic DNA
ccatatggtctagcggttaggattcctggttttcaccc

SEQ ID NO: 10256 - DNA, 39 bp, Homo sapiens
  source 1..39: mol_type = genomic DNA
ccatatggtctagcggttaggattcctggttttcaccca

SEQ ID NO: 10257 - DNA, 40 bp, Homo sapiens
  source 1..40: mol_type = genomic DNA
ccatatggtctagcggttaggattcctggttttcacccag

SEQ ID NO: 10258 - DNA, 16 bp, Homo sapiens
  source 1..16: mol_type = genomic DNA
ccatcctctgctacca

SEQ ID NO: 10259 - DNA, 27 bp, Homo sapiens
  source 1..27: mol_type = genomic DNA
ccatgatcgtatagtggttagtactct

SEQ ID NO: 10260 - DNA, 28 bp, Homo sapiens
  source 1..28: mol_type = genomic DNA
ccatgatcgtatagtggttagtactctg

SEQ ID NO: 10261 - DNA, 29 bp, Homo sapiens
  source 1..29: mol_type = genomic DNA
ccatgatcgtatagtggttagtactctgc

SEQ ID NO: 10262 - DNA, 30 bp, Homo sapiens
  source 1..30: mol_type = genomic DNA
ccatgatcgtatagtggttagtactctgcg

SEQ ID NO: 10263 - DNA, 37 bp, Homo sapiens
  source 1..37: mol_type = genomic DNA
ccatggggttggcttgaaaccagctttggggggttcg

SEQ ID NO: 10264 - DNA, 25 bp, Homo sapiens
  source 1..25: mol_type = genomic DNA
ccatggtgtaatggtgagcactctg

SEQ ID NO: 10265 - DNA, 29 bp, Homo sapiens
  source 1..29: mol_type = genomic DNA
ccatggtgtaatggtgagcactctggact

SEQ ID NO: 10266 - DNA, 31 bp, Homo sapiens
  source 1..31: mol_type = genomic DNA
ccatggtgtaatggtgagcactctggactct

SEQ ID NO: 10267 - DNA, 32 bp, Homo sapiens
  source 1..32: mol_type = genomic DNA
ccatggtgtaatggtgagcactctggactctg

SEQ ID NO: 10268 - DNA, 33 bp, Homo sapiens
  source 1..33: mol_type = genomic DNA
ccatggtgtaatggtgagcactctggactctga

SEQ ID NO: 10269 - DNA, 38 bp, Homo sapiens
  source 1..38: mol_type = genomic DNA
ccatggtgtaatggtgagcactctggactctgaatcca

SEQ ID NO: 10270 - DNA, 24 bp, Homo sapiens
  source 1..24: mol_type = genomic DNA
ccatggtgtaatggttagcactct

SEQ ID NO: 10271 - DNA, 25 bp, Homo sapiens
  source 1..25: mol_type = genomic DNA
ccatggtgtaatggttagcactctg

SEQ ID NO: 10272 - DNA, 26 bp, Homo sapiens
  source 1..26: mol_type = genomic DNA
ccatggtgtaatggttagcactctgg

SEQ ID NO: 10273 - DNA, 28 bp, Homo sapiens
  source 1..28: mol_type = genomic DNA
ccatggtgtaatggttagcactctggac

SEQ ID NO: 10274 - DNA, 29 bp, Homo sapiens
  source 1..29: mol_type = genomic DNA
ccatggtgtaatggttagcactctggact

SEQ ID NO: 10275 - DNA, 30 bp, Homo sapiens
  source 1..30: mol_type = genomic DNA
ccatggtgtaatggttagcactctggactc

SEQ ID NO: 10276 - DNA, 31 bp, Homo sapiens
  source 1..31: mol_type = genomic DNA
ccatggtgtaatggttagcactctggactct

SEQ ID NO: 10277 - DNA, 32 bp, Homo sapiens
  source 1..32: mol_type = genomic DNA
ccatggtgtaatggttagcactctggactctg

SEQ ID NO: 10278 - DNA, 33 bp, Homo sapiens
  source 1..33: mol_type = genomic DNA
ccatggtgtaatggttagcactctggactctga

SEQ ID NO: 10279 - DNA, 34 bp, Homo sapiens
  source 1..34: mol_type = genomic DNA
ccatggtgtaatggttagcactctggactctgaa

SEQ ID NO: 10280 - DNA, 32 bp, Homo sapiens
  source 1..32: mol_type = genomic DNA
ccatggtgtaatggttagcactctggactttg

SEQ ID NO: 10281 - DNA, 37 bp, Homo sapiens
  source 1..37: mol_type = genomic DNA
ccatggtgtaatggttagcactctggactttgaatcc

SEQ ID NO: 10282 - DNA, 25 bp, Homo sapiens
  source 1..25: mol_type = genomic DNA
ccatgtctaacaacatggctttctc

SEQ ID NO: 10283 - DNA, 27 bp, Homo sapiens
  source 1..27: mol_type = genomic DNA
ccatgtctaacaacatggctttctcac

SEQ ID NO: 10284 - DNA, 28 bp, Homo sapiens
  source 1..28: mol_type = genomic DNA
ccatgtctaacaacatggctttctcacc

SEQ ID NO: 10285 - DNA, 29 bp, Homo sapiens
  source 1..29: mol_type = genomic DNA
ccatgtctaacaacatggctttctcacca

SEQ ID NO: 10286 - DNA, 16 bp, Homo sapiens
  source 1..16: mol_type = genomic DNA
ccattcttgcgacccg

SEQ ID NO: 10287 - DNA, 17 bp, Homo sapiens
  source 1..17: mol_type = genomic DNA
ccattcttgcgacccgg

SEQ ID NO: 10288 - DNA, 18 bp, Homo sapiens
  source 1..18: mol_type = genomic DNA
ccattcttgcgacccggg

SEQ ID NO: 10289 - DNA, 19 bp, Homo sapiens
  source 1..19: mol_type = genomic DNA
ccattcttgcgacccgggt

SEQ ID NO: 10290 - DNA, 20 bp, Homo sapiens
  source 1..20: mol_type = genomic DNA
ccattcttgcgacccgggtt

SEQ ID NO: 10291 - DNA, 34 bp, Homo sapiens
  source 1..34: mol_type = genomic DNA
ccattcttgcgacccgggttcgattcccgggcgg

SEQ ID NO: 10292 - DNA, 35 bp, Homo sapiens
  source 1..35: mol_type = genomic DNA
ccattcttgcgacccgggttcgattcccgggcggc

SEQ ID NO: 10293 - DNA, 36 bp, Homo sapiens
  source 1..36: mol_type = genomic DNA
ccattcttgcgacccgggttcgattcccgggcggcg

SEQ ID NO: 10294 - DNA, 37 bp, Homo sapiens
  source 1..37: mol_type = genomic DNA
ccattcttgcgacccgggttcgattcccgggcggcgc

SEQ ID NO: 10295 - DNA, 38 bp, Homo sapiens
  source 1..38: mol_type = genomic DNA
ccattcttgcgacccgggttcgattcccgggcggcgca

SEQ ID NO: 10296 - DNA, 39 bp, Homo sapiens
  source 1..39: mol_type = genomic DNA
ccattcttgcgacccgggttcgattcccgggcggcgcac

SEQ ID NO: 10297 - DNA, 40 bp, Homo sapiens
  source 1..40: mol_type = genomic DNA
ccattcttgcgacccgggttcgattcccgggcggcgcacc

SEQ ID NO: 10298 - DNA, 41 bp, Homo sapiens
  source 1..41: mol_type = genomic DNA
ccattcttgcgacccgggttcgattcccgggcggcgcacca

SEQ ID NO: 10299 - DNA, 24 bp, Homo sapiens
  source 1..24: mol_type = genomic DNA
ccattggggtttccccgcgcaggt

SEQ ID NO: 10300 - DNA, 16 bp, Homo sapiens
  source 1..16: mol_type = genomic DNA
ccattggtcttaggcc

SEQ ID NO: 10301 - DNA, 17 bp, Homo sapiens
  source 1..17: mol_type = genomic DNA
ccattggtcttaggccc

SEQ ID NO: 10302 - DNA, 18 bp, Homo sapiens
  source 1..18: mol_type = genomic DNA
ccattggtcttaggcccc

SEQ ID NO: 10303 - DNA, 19 bp, Homo sapiens
  source 1..19: mol_type = genomic DNA
ccattggtcttaggcccca

SEQ ID NO: 10304 - DNA, 22 bp, Homo sapiens
  source 1..22: mol_type = genomic DNA
ccattggtcttaggccccaaaa

SEQ ID NO: 10305 - DNA, 23 bp, Homo sapiens
  source 1..23: mol_type = genomic DNA
ccattggtcttaggccccaaaaa

SEQ ID NO: 10306 - DNA, 24 bp, Homo sapiens
  source 1..24: mol_type = genomic DNA
ccattggtcttaggccccaaaaat

SEQ ID NO: 10307 - DNA, 29 bp, Homo sapiens
  source 1..29: mol_type = genomic DNA
ccattggtcttaggccccaaaaattttgg

SEQ ID NO: 10308 - DNA, 37 bp, Homo sapiens
  source 1..37: mol_type = genomic DNA
ccattggtcttaggccccaaaaattttggtgcaactc

SEQ ID NO: 10309 - DNA, 38 bp, Homo sapiens
  source 1..38: mol_type = genomic DNA
ccattggtcttaggccccaaaaattttggtgcaactcc

SEQ ID NO: 10310 - DNA, 39 bp, Homo sapiens
  source 1..39: mol_type = genomic DNA
ccattggtcttaggccccaaaaattttggtgcaactcca

SEQ ID NO: 10311 - DNA, 41 bp, Homo sapiens
  source 1..41: mol_type = genomic DNA
ccattggtcttaggccccaaaaattttggtgcaactccaaa

SEQ ID NO: 10312 - DNA, 43 bp, Homo sapiens
  source 1..43: mol_type = genomic DNA
ccattggtcttaggccccaaaaattttggtgcaactccaaata

SEQ ID NO: 10313 - DNA, 19 bp, Homo sapiens
  source 1..19: mol_type = genomic DNA
ccattgtgctctgcacgcg

SEQ ID NO: 10314 - DNA, 45 bp, Homo sapiens
  source 1..45: mol_type = genomic DNA
ccattgtgctctgcacgcgtgggttcgaatcccatcctcgtcgcc

SEQ ID NO: 10315 - DNA, 24 bp, Homo sapiens
  source 1..24: mol_type = genomic DNA
ccattgtgctttgcacgcgtgggt

SEQ ID NO: 10316 - DNA, 44 bp, Homo sapiens
  source 1..44: mol_type = genomic DNA
ccattgtgctttgcacgcgtgggttcgaatcccatcctcgtcgc

SEQ ID NO: 10317 - DNA, 45 bp, Homo sapiens
  source 1..45: mol_type = genomic DNA
ccattgtgctttgcacgcgtgggttcgaatcccatcctcgtcgcc

SEQ ID NO: 10318 - DNA, 46 bp, Homo sapiens
  source 1..46: mol_type = genomic DNA
ccattgtgctttgcacgcgtgggttcgaatcccatcctcgtcgcca

SEQ ID NO: 10319 - DNA, 18 bp, Homo sapiens
  source 1..18: mol_type = genomic DNA
ccatttcataactttgtc

SEQ ID NO: 10320 - DNA, 19 bp, Homo sapiens
  source 1..19: mol_type = genomic DNA
ccatttcataactttgtca

SEQ ID NO: 10321 - DNA, 21 bp, Homo sapiens
  source 1..21: mol_type = genomic DNA
ccatttcataactttgtcaaa

SEQ ID NO: 10322 - DNA, 22 bp, Homo sapiens
  source 1..22: mol_type = genomic DNA
ccatttcataactttgtcaaag

SEQ ID NO: 10323 - DNA, 33 bp, Homo sapiens
  source 1..33: mol_type = genomic DNA
ccatttcataactttgtcaaagttaaattatag

SEQ ID NO: 10324 - DNA, 35 bp, Homo sapiens
  source 1..35: mol_type = genomic DNA
ccatttcataactttgtcaaagttaaattataggc

SEQ ID NO: 10325 - DNA, 36 bp, Homo sapiens
  source 1..36: mol_type = genomic DNA
ccatttcataactttgtcaaagttaaattataggct

SEQ ID NO: 10326 - DNA, 37 bp, Homo sapiens
  source 1..37: mol_type = genomic DNA
ccatttcataactttgtcaaagttaaattataggcta

SEQ ID NO: 10327 - DNA, 38 bp, Homo sapiens
  source 1..38: mol_type = genomic DNA
ccatttcataactttgtcaaagttaaattataggctaa

SEQ ID NO: 10328 - DNA, 39 bp, Homo sapiens
  source 1..39: mol_type = genomic DNA
ccatttcataactttgtcaaagttaaattataggctaaa

SEQ ID NO: 10329 - DNA, 22 bp, Homo sapiens
  source 1..22: mol_type = genomic DNA
cccaaaaattttggtgcaactc

SEQ ID NO: 10330 - DNA, 23 bp, Homo sapiens
  source 1..23: mol_type = genomic DNA
cccaaaaattttggtgcaactcc

SEQ ID NO: 10331 - DNA, 26 bp, Homo sapiens
  source 1..26: mol_type = genomic DNA
cccaaaaattttggtgcaactccaaa

SEQ ID NO: 10332 - DNA, 27 bp, Homo sapiens
  source 1..27: mol_type = genomic DNA
cccaaaaattttggtgcaactccaaat

SEQ ID NO: 10333 - DNA, 28 bp, Homo sapiens
  source 1..28: mol_type = genomic DNA
cccaaaaattttggtgcaactccaaata

SEQ ID NO: 10334 - DNA, 33 bp, Homo sapiens
  source 1..33: mol_type = genomic DNA
cccaaaaattttggtgcaactccaaataaaagt

SEQ ID NO: 10335 - DNA, 34 bp, Homo sapiens
  source 1..34: mol_type = genomic DNA
cccaaaaattttggtgcaactccaaataaaagta

SEQ ID NO: 10336 - DNA, 35 bp, Homo sapiens
  source 1..35: mol_type = genomic DNA
cccaaaaattttggtgcaactccaaataaaagtac

SEQ ID NO: 10337 - DNA, 36 bp, Homo sapiens
  source 1..36: mol_type = genomic DNA
cccaaaaattttggtgcaactccaaataaaagtacc

SEQ ID NO: 10338 - DNA, 37 bp, Homo sapiens
  source 1..37: mol_type = genomic DNA
cccaaaaattttggtgcaactccaaataaaagtacca

SEQ ID NO: 10339 - DNA, 16 bp, Homo sapiens
  source 1..16: mol_type = genomic DNA
cccaacttacacttag

SEQ ID NO: 10340 - DNA, 18 bp, Homo sapiens
  source 1..18: mol_type = genomic DNA
cccaacttacacttagga

SEQ ID NO: 10341 - DNA, 19 bp, Homo sapiens
  source 1..19: mol_type = genomic DNA
cccaacttacacttaggag

SEQ ID NO: 10342 - DNA, 20 bp, Homo sapiens
  source 1..20: mol_type = genomic DNA
cccaacttacacttaggaga

SEQ ID NO: 10343 - DNA, 21 bp, Homo sapiens
  source 1..21: mol_type = genomic DNA
cccaacttacacttaggagat

SEQ ID NO: 10344 - DNA, 22 bp, Homo sapiens
  source 1..22: mol_type = genomic DNA
cccaacttacacttaggagatt

SEQ ID NO: 10345 - DNA, 24 bp, Homo sapiens
  source 1..24: mol_type = genomic DNA
cccaacttacacttaggagatttc

SEQ ID NO: 10346 - DNA, 25 bp, Homo sapiens
  source 1..25: mol_type = genomic DNA
cccaacttacacttaggagatttca

SEQ ID NO: 10347 - DNA, 26 bp, Homo sapiens
  source 1..26: mol_type = genomic DNA
cccaacttacacttaggagatttcaa

SEQ ID NO: 10348 - DNA, 27 bp, Homo sapiens
  source 1..27: mol_type = genomic DNA
cccaacttacacttaggagatttcaac

SEQ ID NO: 10349 - DNA, 28 bp, Homo sapiens
  source 1..28: mol_type = genomic DNA
cccaacttacacttaggagatttcaact

SEQ ID NO: 10350 - DNA, 29 bp, Homo sapiens
  source 1..29: mol_type = genomic DNA
cccaacttacacttaggagatttcaactt

SEQ ID NO: 10351 - DNA, 30 bp, Homo sapiens
  source 1..30: mol_type = genomic DNA
cccaacttacacttaggagatttcaactta

SEQ ID NO: 10352 - DNA, 31 bp, Homo sapiens
  source 1..31: mol_type = genomic DNA
cccaacttacacttaggagatttcaacttaa

SEQ ID NO: 10353 - DNA, 32 bp, Homo sapiens
  source 1..32: mol_type = genomic DNA
cccaacttacacttaggagatttcaacttaac

SEQ ID NO: 10354 - DNA, 34 bp, Homo sapiens
  source 1..34: mol_type = genomic DNA
cccaacttacacttaggagatttcaacttaactt

SEQ ID NO: 10355 - DNA, 35 bp, Homo sapiens
  source 1..35: mol_type = genomic DNA
cccaacttacacttaggagatttcaacttaacttg

SEQ ID NO: 10356 - DNA, 37 bp, Homo sapiens
  source 1..37: mol_type = genomic DNA
cccaacttacacttaggagatttcaacttaacttgac

SEQ ID NO: 10357 - DNA, 38 bp, Homo sapiens
  source 1..38: mol_type = genomic DNA
cccaacttacacttaggagatttcaacttaacttgacc

SEQ ID NO: 10358 - DNA, 39 bp, Homo sapiens
  source 1..39: mol_type = genomic DNA
cccaacttacacttaggagatttcaacttaacttgaccg

SEQ ID NO: 10359 - DNA, 40 bp, Homo sapiens
  source 1..40: mol_type = genomic DNA
cccaacttacacttaggagatttcaacttaacttgaccgc

SEQ ID NO: 10360 - DNA, 41 bp, Homo sapiens
  source 1..41: mol_type = genomic DNA
cccaacttacacttaggagatttcaacttaacttgaccgct

SEQ ID NO: 10361 - DNA, 42 bp, Homo sapiens
  source 1..42: mol_type = genomic DNA
cccaacttacacttaggagatttcaacttaacttgaccgctc

SEQ ID NO: 10362 - DNA, 43 bp, Homo sapiens
  source 1..43: mol_type = genomic DNA
cccaacttacacttaggagatttcaacttaacttgaccgctct

SEQ ID NO: 10363 - DNA, 44 bp, Homo sapiens
  source 1..44: mol_type = genomic DNA
cccaacttacacttaggagatttcaacttaacttgaccgctctg

SEQ ID NO: 10364 - DNA, 45 bp, Homo sapiens
  source 1..45: mol_type = genomic DNA
cccaacttacacttaggagatttcaacttaacttgaccgctctga

SEQ ID NO: 10365 - DNA, 46 bp, Homo sapiens
  source 1..46: mol_type = genomic DNA
cccaacttacacttaggagatttcaacttaacttgaccgctctgac

SEQ ID NO: 10366 - DNA, 47 bp, Homo sapiens
  source 1..47: mol_type = genomic DNA
cccaacttacacttaggagatttcaacttaacttgaccgctctgacc

SEQ ID NO: 10367 - DNA, 48 bp, Homo sapiens
  source 1..48: mol_type = genomic DNA
cccaacttacacttaggagatttcaacttaacttgaccgctctgacca

SEQ ID NO: 10368 - DNA, 16 bp, Homo sapiens
  source 1..16: mol_type = genomic DNA
cccaatacctccacca

SEQ ID NO: 10369 - DNA, 16 bp, Homo sapiens
  source 1..16: mol_type = genomic DNA
cccacatggtctagcg

SEQ ID NO: 10370 - DNA, 25 bp, Homo sapiens
  source 1..25: mol_type = genomic DNA
cccacatggtctagcggttaggatt

SEQ ID NO: 10371 - DNA, 26 bp, Homo sapiens
  source 1..26: mol_type = genomic DNA
cccacatggtctagcggttaggattc

SEQ ID NO: 10372 - DNA, 27 bp, Homo sapiens
  source 1..27: mol_type = genomic DNA
cccacatggtctagcggttaggattcc

SEQ ID NO: 10373 - DNA, 28 bp, Homo sapiens
  source 1..28: mol_type = genomic DNA
cccacatggtctagcggttaggattcct

SEQ ID NO: 10374 - DNA, 29 bp, Homo sapiens
  source 1..29: mol_type = genomic DNA
cccacatggtctagcggttaggattcctg

SEQ ID NO: 10375 - DNA, 30 bp, Homo sapiens
  source 1..30: mol_type = genomic DNA
cccacatggtctagcggttaggattcctgg

SEQ ID NO: 10376 - DNA, 31 bp, Homo sapiens
  source 1..31: mol_type = genomic DNA
cccacatggtctagcggttaggattcctggt

SEQ ID NO: 10377 - DNA, 32 bp, Homo sapiens
  source 1..32: mol_type = genomic DNA
cccacatggtctagcggttaggattcctggtt

SEQ ID NO: 10378 - DNA, 33 bp, Homo sapiens
  source 1..33: mol_type = genomic DNA
cccacatggtctagcggttaggattcctggttt

SEQ ID NO: 10379 - DNA, 34 bp, Homo sapiens
  source 1..34: mol_type = genomic DNA
cccacatggtctagcggttaggattcctggtttt

SEQ ID NO: 10380 - DNA, 35 bp, Homo sapiens
  source 1..35: mol_type = genomic DNA
cccacatggtctagcggttaggattcctggttttc

SEQ ID NO: 10381 - DNA, 36 bp, Homo sapiens
  source 1..36: mol_type = genomic DNA
cccacatggtctagcggttaggattcctggttttca

SEQ ID NO: 10382 - DNA, 37 bp, Homo sapiens
  source 1..37: mol_type = genomic DNA
cccacatggtctagcggttaggattcctggttttcac

SEQ ID NO: 10383 - DNA, 38 bp, Homo sapiens
  source 1..38: mol_type = genomic DNA
cccacatggtctagcggttaggattcctggttttcacc

SEQ ID NO: 10384 - DNA, 39 bp, Homo sapiens
  source 1..39: mol_type = genomic DNA
cccacatggtctagcggttaggattcctggttttcaccc

SEQ ID NO: 10385 - DNA, 40 bp, Homo sapiens
  source 1..40: mol_type = genomic DNA
cccacatggtctagcggttaggattcctggttttcaccca

SEQ ID NO: 10386 - DNA, 41 bp, Homo sapiens
  source 1..41: mol_type = genomic DNA
cccacatggtctagcggttaggattcctggttttcacccag

SEQ ID NO: 10387 - DNA, 16 bp, Homo sapiens
  source 1..16: mol_type = genomic DNA
cccaccactgccacca

SEQ ID NO: 10388 - DNA, 16 bp, Homo sapiens
  source 1..16: mol_type = genomic DNA
cccaccagagtcgcca

SEQ ID NO: 10389 - DNA, 16 bp, Homo sapiens
  source 1..16: mol_type = genomic DNA
cccacccagggacgcc

SEQ ID NO: 10390 - DNA, 17 bp, Homo sapiens
  source 1..17: mol_type = genomic DNA
cccacccagggacgcca

SEQ ID NO: 10391 - DNA, 16 bp, Homo sapiens
  source 1..16: mol_type = genomic DNA
cccaccctcgtcgcca

SEQ ID NO: 10392 - DNA, 16 bp, Homo sapiens
  source 1..16: mol_type = genomic DNA
cccaccgctgccacca

SEQ ID NO: 10393 - DNA, 16 bp, Homo sapiens
  source 1..16: mol_type = genomic DNA
cccacctggggtgcca

SEQ ID NO: 10394 - DNA, 16 bp, Homo sapiens
  source 1..16: mol_type = genomic DNA
cccaccttcgtcgcca

SEQ ID NO: 10395 - DNA, 42 bp, Homo sapiens
  source 1..42: mol_type = genomic DNA
cccacgcgggagacccgggttcaattcccggccaatgcacca

SEQ ID NO: 10396 - DNA, 16 bp, Homo sapiens
  source 1..16: mol_type = genomic DNA
cccacgttgggcgcca

SEQ ID NO: 10397 - DNA, 16 bp, Homo sapiens
  source 1..16: mol_type = genomic DNA
cccactcctgacacca

SEQ ID NO: 10398 - DNA, 16 bp, Homo sapiens
  source 1..16: mol_type = genomic DNA
cccactcctggtacca

SEQ ID NO: 10399 - DNA, 16 bp, Homo sapiens
  source 1..16: mol_type = genomic DNA
cccacttctgacacca

SEQ ID NO: 10400 - DNA, 16 bp, Homo sapiens
  source 1..16: mol_type = genomic DNA
cccagaggtcgatgga

SEQ ID NO: 10401 - DNA, 17 bp, Homo sapiens
  source 1..17: mol_type = genomic DNA
cccagaggtcgatggat

SEQ ID NO: 10402 - DNA, 18 bp, Homo sapiens
  source 1..18: mol_type = genomic DNA
cccagaggtcgatggatc

SEQ ID NO: 10403 - DNA, 19 bp, Homo sapiens
  source 1..19: mol_type = genomic DNA
cccagaggtcgatggatcg

SEQ ID NO: 10404 - DNA, 20 bp, Homo sapiens
  source 1..20: mol_type = genomic DNA
cccagaggtcgatggatcga

SEQ ID NO: 10405 - DNA, 21 bp, Homo sapiens
  source 1..21: mol_type = genomic DNA
cccagaggtcgatggatcgaa

SEQ ID NO: 10406 - DNA, 22 bp, Homo sapiens
  source 1..22: mol_type = genomic DNA
cccagaggtcgatggatcgaaa

SEQ ID NO: 10407 - DNA, 23 bp, Homo sapiens
  source 1..23: mol_type = genomic DNA
cccagaggtcgatggatcgaaac

SEQ ID NO: 10408 - DNA, 24 bp, Homo sapiens
  source 1..24: mol_type = genomic DNA
cccagaggtcgatggatcgaaacc

SEQ ID NO: 10409 - DNA, 16 bp, Homo sapiens
  source 1..16: mol_type = genomic DNA
cccagcatctccacca

SEQ ID NO: 10410 - DNA, 16 bp, Homo sapiens
  source 1..16: mol_type = genomic DNA
cccagcggggcctcca

SEQ ID NO: 10411 - DNA, 16 bp, Homo sapiens
  source 1..16: mol_type = genomic DNA
cccagcggtgcctcca

SEQ ID NO: 10412 - DNA, 27 bp, Homo sapiens
  source 1..27: mol_type = genomic DNA
cccaggcggcccgggttcgactcccgg

SEQ ID NO: 10413 - DNA, 28 bp, Homo sapiens
  source 1..28: mol_type = genomic DNA
cccaggcggcccgggttcgactcccggt

SEQ ID NO: 10414 - DNA, 29 bp, Homo sapiens
  source 1..29: mol_type = genomic DNA
cccaggcggcccgggttcgactcccggtg

SEQ ID NO: 10415 - DNA, 30 bp, Homo sapiens
  source 1..30: mol_type = genomic DNA
cccaggcggcccgggttcgactcccggtgt

SEQ ID NO: 10416 - DNA, 31 bp, Homo sapiens
  source 1..31: mol_type = genomic DNA
cccaggcggcccgggttcgactcccggtgtg

SEQ ID NO: 10417 - DNA, 32 bp, Homo sapiens
  source 1..32: mol_type = genomic DNA
cccaggcggcccgggttcgactcccggtgtgg

SEQ ID NO: 10418 - DNA, 33 bp, Homo sapiens
  source 1..33: mol_type = genomic DNA
cccaggcggcccgggttcgactcccggtgtggg

SEQ ID NO: 10419 - DNA, 34 bp, Homo sapiens
  source 1..34: mol_type = genomic DNA
cccaggcggcccgggttcgactcccggtgtggga

SEQ ID NO: 10420 - DNA, 35 bp, Homo sapiens
  source 1..35: mol_type = genomic DNA
cccaggcggcccgggttcgactcccggtgtgggaa

SEQ ID NO: 10421 - DNA, 36 bp, Homo sapiens
  source 1..36: mol_type = genomic DNA
cccaggcggcccgggttcgactcccggtgtgggaac

SEQ ID NO: 10422 - DNA, 37 bp, Homo sapiens
  source 1..37: mol_type = genomic DNA
cccaggcggcccgggttcgactcccggtgtgggaacc

SEQ ID NO: 10423 - DNA, 38 bp, Homo sapiens
  source 1..38: mol_type = genomic DNA
cccaggcggcccgggttcgactcccggtgtgggaacca

SEQ ID NO: 10424 - DNA, 17 bp, Homo sapiens
  source 1..17: mol_type = genomic DNA
cccagggtcgtgggttc

SEQ ID NO: 10425 - DNA, 34 bp, Homo sapiens
  source 1..34: mol_type = genomic DNA
cccagggtcgtgggttcgagccccacgttgggcg

SEQ ID NO: 10426 - DNA, 36 bp, Homo sapiens
  source 1..36: mol_type = genomic DNA
cccagggtcgtgggttcgagccccacgttgggcgcc

SEQ ID NO: 10427 - DNA, 26 bp, Homo sapiens
  source 1..26: mol_type = genomic DNA
cccaggtggcccgggttcgactcccg

SEQ ID NO: 10428 - DNA, 31 bp, Homo sapiens
  source 1..31: mol_type = genomic DNA
cccaggtggcccgggttcgactcccggtatg

SEQ ID NO: 10429 - DNA, 32 bp, Homo sapiens
  source 1..32: mol_type = genomic DNA
cccaggtggcccgggttcgactcccggtatgg

SEQ ID NO: 10430 - DNA, 35 bp, Homo sapiens
  source 1..35: mol_type = genomic DNA
cccaggtggcccgggttcgactcccggtatgggaa

SEQ ID NO: 10431 - DNA, 36 bp, Homo sapiens
  source 1..36: mol_type = genomic DNA
cccaggtggcccgggttcgactcccggtatgggaac

SEQ ID NO: 10432 - DNA, 37 bp, Homo sapiens
  source 1..37: mol_type = genomic DNA
cccaggtggcccgggttcgactcccggtatgggaacc

SEQ ID NO: 10433 - DNA, 38 bp, Homo sapiens
  source 1..38: mol_type = genomic DNA
cccaggtggcccgggttcgactcccggtatgggaacca

SEQ ID NO: 10434 - DNA, 16 bp, Homo sapiens
  source 1..16: mol_type = genomic DNA
cccagtagagcctcca

SEQ ID NO: 10435 - DNA, 16 bp, Homo sapiens
  source 1..16: mol_type = genomic DNA
cccagtggaaccacca

SEQ ID NO: 10436 - DNA, 16 bp, Homo sapiens
  source 1..16: mol_type = genomic DNA
cccagtggcctaatgg

SEQ ID NO: 10437 - DNA, 17 bp, Homo sapiens
  source 1..17: mol_type = genomic DNA
cccagtggcctaatgga

SEQ ID NO: 10438 - DNA, 21 bp, Homo sapiens
  source 1..21: mol_type = genomic DNA
cccagtggcctaatggataag

SEQ ID NO: 10439 - DNA, 27 bp, Homo sapiens
  source 1..27: mol_type = genomic DNA
cccagtggcctaatggataaggcactg

SEQ ID NO: 10440 - DNA, 31 bp, Homo sapiens
  source 1..31: mol_type = genomic DNA
cccagtggcctaatggataaggcatcagcct

SEQ ID NO: 10441 - DNA, 32 bp, Homo sapiens
  source 1..32: mol_type = genomic DNA
cccagtggcctaatggataaggcatcagcctc

SEQ ID NO: 10442 - DNA, 33 bp, Homo sapiens
  source 1..33: mol_type = genomic DNA
cccagtggcctaatggataaggcatcagcctcc

SEQ ID NO: 10443 - DNA, 34 bp, Homo sapiens
  source 1..34: mol_type = genomic DNA
cccagtggcctaatggataaggcatcagcctccg

SEQ ID NO: 10444 - DNA, 27 bp, Homo sapiens
  source 1..27: mol_type = genomic DNA
cccagtggcctaatggataaggcattg

SEQ ID NO: 10445 - DNA, 19 bp, Homo sapiens
  source 1..19: mol_type = genomic DNA
cccataacccagaggtcga

SEQ ID NO: 10446 - DNA, 20 bp, Homo sapiens
  source 1..20: mol_type = genomic DNA
cccataacccagaggtcgat

SEQ ID NO: 10447 - DNA, 21 bp, Homo sapiens
  source 1..21: mol_type = genomic DNA
cccataacccagaggtcgatg

SEQ ID NO: 10448 - DNA, 24 bp, Homo sapiens
  source 1..24: mol_type = genomic DNA
cccataacccagaggtcgatggat

SEQ ID NO: 10449 - DNA, 25 bp, Homo sapiens
  source 1..25: mol_type = genomic DNA
cccataacccagaggtcgatggatc

SEQ ID NO: 10450 - DNA, 17 bp, Homo sapiens
  source 1..17: mol_type = genomic DNA
cccataccccgaaaatg

SEQ ID NO: 10451 - DNA, 18 bp, Homo sapiens
  source 1..18: mol_type = genomic DNA
cccataccccgaaaatgt

SEQ ID NO: 10452 - DNA, 19 bp, Homo sapiens
  source 1..19: mol_type = genomic DNA
cccataccccgaaaatgtt

SEQ ID NO: 10453 - DNA, 20 bp, Homo sapiens
  source 1..20: mol_type = genomic DNA
cccataccccgaaaatgttg

SEQ ID NO: 10454 - DNA, 21 bp, Homo sapiens
  source 1..21: mol_type = genomic DNA
cccataccccgaaaatgttgg

SEQ ID NO: 10455 - DNA, 22 bp, Homo sapiens
  source 1..22: mol_type = genomic DNA
cccataccccgaaaatgttggt

SEQ ID NO: 10456 - DNA, 23 bp, Homo sapiens
  source 1..23: mol_type = genomic DNA
cccataccccgaaaatgttggtt

SEQ ID NO: 10457 - DNA, 24 bp, Homo sapiens
  source 1..24: mol_type = genomic DNA
cccataccccgaaaatgttggtta

SEQ ID NO: 10458 - DNA, 26 bp, Homo sapiens
  source 1..26: mol_type = genomic DNA
cccataccccgaaaatgttggttata

SEQ ID NO: 10459 - DNA, 28 bp, Homo sapiens
  source 1..28: mol_type = genomic DNA
cccataccccgaaaatgttggttatacc

SEQ ID NO: 10460 - DNA, 29 bp, Homo sapiens
  source 1..29: mol_type = genomic DNA
cccataccccgaaaatgttggttataccc

SEQ ID NO: 10461 - DNA, 30 bp, Homo sapiens
  source 1..30: mol_type = genomic DNA
cccataccccgaaaatgttggttataccct

SEQ ID NO: 10462 - DNA, 31 bp, Homo sapiens
  source 1..31: mol_type = genomic DNA
cccataccccgaaaatgttggttataccctt

SEQ ID NO: 10463 - DNA, 33 bp, Homo sapiens
  source 1..33: mol_type = genomic DNA
cccataccccgaaaatgttggttatacccttcc

SEQ ID NO: 10464 - DNA, 34 bp, Homo sapiens
  source 1..34: mol_type = genomic DNA
cccataccccgaaaatgttggttatacccttccc

SEQ ID NO: 10465 - DNA, 35 bp, Homo sapiens
  source 1..35: mol_type = genomic DNA
cccataccccgaaaatgttggttatacccttcccg

SEQ ID NO: 10466 - DNA, 36 bp, Homo sapiens
  source 1..36: mol_type = genomic DNA
cccataccccgaaaatgttggttatacccttcccgt

SEQ ID NO: 10467 - DNA, 37 bp, Homo sapiens
  source 1..37: mol_type = genomic DNA
cccataccccgaaaatgttggttatacccttcccgta

SEQ ID NO: 10468 - DNA, 38 bp, Homo sapiens
  source 1..38: mol_type = genomic DNA
cccataccccgaaaatgttggttatacccttcccgtac

SEQ ID NO: 10469 - DNA, 39 bp, Homo sapiens
  source 1..39: mol_type = genomic DNA
cccataccccgaaaatgttggttatacccttcccgtact

SEQ ID NO: 10470 - DNA, 40 bp, Homo sapiens
  source 1..40: mol_type = genomic DNA
cccataccccgaaaatgttggttatacccttcccgtacta

SEQ ID NO: 10471 - DNA, 41 bp, Homo sapiens
  source 1..41: mol_type = genomic DNA
cccataccccgaaaatgttggttatacccttcccgtactac

SEQ ID NO: 10472 - DNA, 42 bp, Homo sapiens
  source 1..42: mol_type = genomic DNA
cccataccccgaaaatgttggttatacccttcccgtactacc

SEQ ID NO: 10473 - DNA, 43 bp, Homo sapiens
  source 1..43: mol_type = genomic DNA
cccataccccgaaaatgttggttatacccttcccgtactacca

SEQ ID NO: 10474 - DNA, 16 bp, Homo sapiens
  source 1..16: mol_type = genomic DNA
cccatatggtctagcg

SEQ ID NO: 10475 - DNA, 25 bp, Homo sapiens
  source 1..25: mol_type = genomic DNA
cccatatggtctagcggttaggatt

SEQ ID NO: 10476 - DNA, 27 bp, Homo sapiens
  source 1..27: mol_type = genomic DNA
cccatatggtctagcggttaggattcc

SEQ ID NO: 10477 - DNA, 28 bp, Homo sapiens
  source 1..28: mol_type = genomic DNA
cccatatggtctagcggttaggattcct

SEQ ID NO: 10478 - DNA, 29 bp, Homo sapiens
  source 1..29: mol_type = genomic DNA
cccatatggtctagcggttaggattcctg

SEQ ID NO: 10479 - DNA, 30 bp, Homo sapiens
  source 1..30: mol_type = genomic DNA
cccatatggtctagcggttaggattcctgg

SEQ ID NO: 10480 - DNA, 31 bp, Homo sapiens
  source 1..31: mol_type = genomic DNA
cccatatggtctagcggttaggattcctggt

SEQ ID NO: 10481 - DNA, 32 bp, Homo sapiens
  source 1..32: mol_type = genomic DNA
cccatatggtctagcggttaggattcctggtt

SEQ ID NO: 10482 - DNA, 33 bp, Homo sapiens
  source 1..33: mol_type = genomic DNA
cccatatggtctagcggttaggattcctggttt

SEQ ID NO: 10483 - DNA, 34 bp, Homo sapiens
  source 1..34: mol_type = genomic DNA
cccatatggtctagcggttaggattcctggtttt

SEQ ID NO: 10484 - DNA, 35 bp, Homo sapiens
  source 1..35: mol_type = genomic DNA
cccatatggtctagcggttaggattcctggttttc

SEQ ID NO: 10485 - DNA, 36 bp, Homo sapiens
  source 1..36: mol_type = genomic DNA
cccatatggtctagcggttaggattcctggttttca

SEQ ID NO: 10486 - DNA, 16 bp, Homo sapiens
  source 1..16: mol_type = genomic DNA
cccatcctcgtcgcca

SEQ ID NO: 10487 - DNA, 16 bp, Homo sapiens
  source 1..16: mol_type = genomic DNA
cccatctggggtgcca

SEQ ID NO: 10488 - DNA, 16 bp, Homo sapiens
  source 1..16: mol_type = genomic DNA
cccatctgggtcgcca

SEQ ID NO: 10489 - DNA, 32 bp, Homo sapiens
  source 1..32: mol_type = genomic DNA
cccatggtgtaatggtcagcactctggactct

SEQ ID NO: 10490 - DNA, 33 bp, Homo sapiens
  source 1..33: mol_type = genomic DNA
cccatggtgtaatggtcagcactctggactctg

SEQ ID NO: 10491 - DNA, 26 bp, Homo sapiens
  source 1..26: mol_type = genomic DNA
cccatggtgtaatggttagcactctg

SEQ ID NO: 10492 - DNA, 27 bp, Homo sapiens
  source 1..27: mol_type = genomic DNA
cccatggtgtaatggttagcactctgg

SEQ ID NO: 10493 - DNA, 28 bp, Homo sapiens
  source 1..28: mol_type = genomic DNA
cccatggtgtaatggttagcactctgga

SEQ ID NO: 10494 - DNA, 29 bp, Homo sapiens
  source 1..29: mol_type = genomic DNA
cccatggtgtaatggttagcactctggac

SEQ ID NO: 10495 - DNA, 30 bp, Homo sapiens
  source 1..30: mol_type = genomic DNA
cccatggtgtaatggttagcactctggact

SEQ ID NO: 10496 - DNA, 33 bp, Homo sapiens
  source 1..33: mol_type = genomic DNA
cccatggtgtaatggttagcactctggactttg

SEQ ID NO: 10497 - DNA, 34 bp, Homo sapiens
  source 1..34: mol_type = genomic DNA
cccatggtgtaatggttagcactctggactttga

SEQ ID NO: 10498 - DNA, 35 bp, Homo sapiens
  source 1..35: mol_type = genomic DNA
cccatggtgtaatggttagcactctggactttgaa

SEQ ID NO: 10499 - DNA, 38 bp, Homo sapiens
  source 1..38: mol_type = genomic DNA
cccatggtgtaatggttagcactctggactttgaatcc

SEQ ID NO: 10500 - DNA, 21 bp, Homo sapiens
  source 1..21: mol_type = genomic DNA
cccatgtctaacaacatggct

SEQ ID NO: 10501 - DNA, 28 bp, Homo sapiens
  source 1..28: mol_type = genomic DNA
cccatgtctaacaacatggctttctcac

SEQ ID NO: 10502 - DNA, 29 bp, Homo sapiens
  source 1..29: mol_type = genomic DNA
cccatgtctaacaacatggctttctcacc

SEQ ID NO: 10503 - DNA, 30 bp, Homo sapiens
  source 1..30: mol_type = genomic DNA
cccatgtctaacaacatggctttctcacca

SEQ ID NO: 10504 - DNA, 16 bp, Homo sapiens
  source 1..16: mol_type = genomic DNA
cccattcttgcgaccc

SEQ ID NO: 10505 - DNA, 17 bp, Homo sapiens
  source 1..17: mol_type = genomic DNA
cccattcttgcgacccg

SEQ ID NO: 10506 - DNA, 18 bp, Homo sapiens
  source 1..18: mol_type = genomic DNA
cccattcttgcgacccgg

SEQ ID NO: 10507 - DNA, 19 bp, Homo sapiens
  source 1..19: mol_type = genomic DNA
cccattcttgcgacccggg

SEQ ID NO: 10508 - DNA, 20 bp, Homo sapiens
  source 1..20: mol_type = genomic DNA
cccattcttgcgacccgggt

SEQ ID NO: 10509 - DNA, 21 bp, Homo sapiens
  source 1..21: mol_type = genomic DNA
cccattcttgcgacccgggtt

SEQ ID NO: 10510 - DNA, 22 bp, Homo sapiens
  source 1..22: mol_type = genomic DNA
cccattcttgcgacccgggttc

SEQ ID NO: 10511 - DNA, 23 bp, Homo sapiens
  source 1..23: mol_type = genomic DNA
cccattcttgcgacccgggttcg

SEQ ID NO: 10512 - DNA, 24 bp, Homo sapiens
  source 1..24: mol_type = genomic DNA
cccattcttgcgacccgggttcga

SEQ ID NO: 10513 - DNA, 25 bp, Homo sapiens
  source 1..25: mol_type = genomic DNA
cccattcttgcgacccgggttcgat

SEQ ID NO: 10514 - DNA, 26 bp, Homo sapiens
  source 1..26: mol_type = genomic DNA
cccattcttgcgacccgggttcgatt

SEQ ID NO: 10515 - DNA, 27 bp, Homo sapiens
  source 1..27: mol_type = genomic DNA
cccattcttgcgacccgggttcgattc

SEQ ID NO: 10516 - DNA, 28 bp, Homo sapiens
  source 1..28: mol_type = genomic DNA
cccattcttgcgacccgggttcgattcc

SEQ ID NO: 10517 - DNA, 29 bp, Homo sapiens
  source 1..29: mol_type = genomic DNA
cccattcttgcgacccgggttcgattccc

SEQ ID NO: 10518 - DNA, 30 bp, Homo sapiens
  source 1..30: mol_type = genomic DNA
cccattcttgcgacccgggttcgattcccg

SEQ ID NO: 10519 - DNA, 34 bp, Homo sapiens
  source 1..34: mol_type = genomic DNA
cccattcttgcgacccgggttcgattcccgggcg

SEQ ID NO: 10520 - DNA, 35 bp, Homo sapiens
  source 1..35: mol_type = genomic DNA
cccattcttgcgacccgggttcgattcccgggcgg

SEQ ID NO: 10521 - DNA, 36 bp, Homo sapiens
  source 1..36: mol_type = genomic DNA
cccattcttgcgacccgggttcgattcccgggcggc

SEQ ID NO: 10522 - DNA, 37 bp, Homo sapiens
  source 1..37: mol_type = genomic DNA
cccattcttgcgacccgggttcgattcccgggcggcg

SEQ ID NO: 10523 - DNA, 38 bp, Homo sapiens
  source 1..38: mol_type = genomic DNA
cccattcttgcgacccgggttcgattcccgggcggcgc

SEQ ID NO: 10524 - DNA, 39 bp, Homo sapiens
  source 1..39: mol_type = genomic DNA
cccattcttgcgacccgggttcgattcccgggcggcgca

SEQ ID NO: 10525 - DNA, 40 bp, Homo sapiens
  source 1..40: mol_type = genomic DNA
cccattcttgcgacccgggttcgattcccgggcggcgcac

SEQ ID NO: 10526 - DNA, 41 bp, Homo sapiens
  source 1..41: mol_type = genomic DNA
cccattcttgcgacccgggttcgattcccgggcggcgcacc

SEQ ID NO: 10527 - DNA, 42 bp, Homo sapiens
  source 1..42: mol_type = genomic DNA
cccattcttgcgacccgggttcgattcccgggcggcgcacca

SEQ ID NO: 10528 - DNA, 16 bp, Homo sapiens
  source 1..16: mol_type = genomic DNA
cccattggtctagcca

SEQ ID NO: 10529 - DNA, 24 bp, Homo sapiens
  source 1..24: mol_type = genomic DNA
ccccaaaaattttggtgcaactcc

SEQ ID NO: 10530 - DNA, 25 bp, Homo sapiens
  source 1..25: mol_type = genomic DNA
ccccaaaaattttggtgcaactcca

SEQ ID NO: 10531 - DNA, 26 bp, Homo sapiens
  source 1..26: mol_type = genomic DNA
ccccaaaaattttggtgcaactccaa

SEQ ID NO: 10532 - DNA, 27 bp, Homo sapiens
  source 1..27: mol_type = genomic DNA
ccccaaaaattttggtgcaactccaaa

SEQ ID NO: 10533 - DNA, 28 bp, Homo sapiens
  source 1..28: mol_type = genomic DNA
ccccaaaaattttggtgcaactccaaat

SEQ ID NO: 10534 - DNA, 29 bp, Homo sapiens
  source 1..29: mol_type = genomic DNA
ccccaaaaattttggtgcaactccaaata

SEQ ID NO: 10535 - DNA, 33 bp, Homo sapiens
  source 1..33: mol_type = genomic DNA
ccccaaaaattttggtgcaactccaaataaaag

SEQ ID NO: 10536 - DNA, 34 bp, Homo sapiens
  source 1..34: mol_type = genomic DNA
ccccaaaaattttggtgcaactccaaataaaagt

SEQ ID NO: 10537 - DNA, 35 bp, Homo sapiens
  source 1..35: mol_type = genomic DNA
ccccaaaaattttggtgcaactccaaataaaagta

SEQ ID NO: 10538 - DNA, 36 bp, Homo sapiens
  source 1..36: mol_type = genomic DNA
ccccaaaaattttggtgcaactccaaataaaagtac

SEQ ID NO: 10539 - DNA, 37 bp, Homo sapiens
  source 1..37: mol_type = genomic DNA
ccccaaaaattttggtgcaactccaaataaaagtacc

SEQ ID NO: 10540 - DNA, 38 bp, Homo sapiens
  source 1..38: mol_type = genomic DNA
ccccaaaaattttggtgcaactccaaataaaagtacca

SEQ ID NO: 10541 - DNA, 16 bp, Homo sapiens
  source 1..16: mol_type = genomic DNA
ccccacattgggcgcc

SEQ ID NO: 10542 - DNA, 16 bp, Homo sapiens
  source 1..16: mol_type = genomic DNA
ccccacgttgggcgcc

SEQ ID NO: 10543 - DNA, 17 bp, Homo sapiens
  source 1..17: mol_type = genomic DNA
ccccacgttgggcgcca

SEQ ID NO: 10544 - DNA, 16 bp, Homo sapiens
  source 1..16: mol_type = genomic DNA
ccccactcctggtacc

SEQ ID NO: 10545 - DNA, 17 bp, Homo sapiens
  source 1..17: mol_type = genomic DNA
ccccactcctggtacca

SEQ ID NO: 10546 - DNA, 16 bp, Homo sapiens
  source 1..16: mol_type = genomic DNA
ccccacttctggtacc

SEQ ID NO: 10547 - DNA, 17 bp, Homo sapiens
  source 1..17: mol_type = genomic DNA
ccccacttctggtacca

SEQ ID NO: 10548 - DNA, 16 bp, Homo sapiens
  source 1..16: mol_type = genomic DNA
ccccagcatctccacc

SEQ ID NO: 10549 - DNA, 17 bp, Homo sapiens
  source 1..17: mol_type = genomic DNA
ccccagcatctccacca

SEQ ID NO: 10550 - DNA, 17 bp, Homo sapiens
  source 1..17: mol_type = genomic DNA
ccccagtacctccacca

SEQ ID NO: 10551 - DNA, 16 bp, Homo sapiens
  source 1..16: mol_type = genomic DNA
ccccagtggaaccacc

SEQ ID NO: 10552 - DNA, 17 bp, Homo sapiens
  source 1..17: mol_type = genomic DNA
ccccagtggaaccacca

SEQ ID NO: 10553 - DNA, 18 bp, Homo sapiens
  source 1..18: mol_type = genomic DNA
ccccagtggcctaatgga

SEQ ID NO: 10554 - DNA, 33 bp, Homo sapiens
  source 1..33: mol_type = genomic DNA
ccccatggtgtaatggtcagcactctggactct

SEQ ID NO: 10555 - DNA, 34 bp, Homo sapiens
  source 1..34: mol_type = genomic DNA
ccccatggtgtaatggtcagcactctggactctg

SEQ ID NO: 10556 - DNA, 27 bp, Homo sapiens
  source 1..27: mol_type = genomic DNA
ccccatggtgtaatggttagcactctg

SEQ ID NO: 10557 - DNA, 28 bp, Homo sapiens
  source 1..28: mol_type = genomic DNA
ccccatggtgtaatggttagcactctgg

SEQ ID NO: 10558 - DNA, 29 bp, Homo sapiens
  source 1..29: mol_type = genomic DNA
ccccatggtgtaatggttagcactctgga

SEQ ID NO: 10559 - DNA, 30 bp, Homo sapiens
  source 1..30: mol_type = genomic DNA
ccccatggtgtaatggttagcactctggac

SEQ ID NO: 10560 - DNA, 31 bp, Homo sapiens
  source 1..31: mol_type = genomic DNA
ccccatggtgtaatggttagcactctggact

SEQ ID NO: 10561 - DNA, 34 bp, Homo sapiens
  source 1..34: mol_type = genomic DNA
ccccatggtgtaatggttagcactctggactttg

SEQ ID NO: 10562 - DNA, 35 bp, Homo sapiens
  source 1..35: mol_type = genomic DNA
ccccatggtgtaatggttagcactctggactttga

SEQ ID NO: 10563 - DNA, 39 bp, Homo sapiens
  source 1..39: mol_type = genomic DNA
ccccatggtgtaatggttagcactctggactttgaatcc

SEQ ID NO: 10564 - DNA, 16 bp, Homo sapiens
  source 1..16: mol_type = genomic DNA
ccccatgtctaacaac

SEQ ID NO: 10565 - DNA, 17 bp, Homo sapiens
  source 1..17: mol_type = genomic DNA
ccccatgtctaacaaca

SEQ ID NO: 10566 - DNA, 21 bp, Homo sapiens
  source 1..21: mol_type = genomic DNA
ccccatgtctaacaacatggc

SEQ ID NO: 10567 - DNA, 22 bp, Homo sapiens
  source 1..22: mol_type = genomic DNA
ccccatgtctaacaacatggct

SEQ ID NO: 10568 - DNA, 29 bp, Homo sapiens
  source 1..29: mol_type = genomic DNA
ccccatgtctaacaacatggctttctcac

SEQ ID NO: 10569 - DNA, 30 bp, Homo sapiens
  source 1..30: mol_type = genomic DNA
ccccatgtctaacaacatggctttctcacc

SEQ ID NO: 10570 - DNA, 31 bp, Homo sapiens
  source 1..31: mol_type = genomic DNA
ccccatgtctaacaacatggctttctcacca

SEQ ID NO: 10571 - DNA, 16 bp, Homo sapiens
  source 1..16: mol_type = genomic DNA
cccccatgtctaacaa

SEQ ID NO: 10572 - DNA, 17 bp, Homo sapiens
  source 1..17: mol_type = genomic DNA
cccccatgtctaacaac

SEQ ID NO: 10573 - DNA, 18 bp, Homo sapiens
  source 1..18: mol_type = genomic DNA
cccccatgtctaacaaca

SEQ ID NO: 10574 - DNA, 21 bp, Homo sapiens
  source 1..21: mol_type = genomic DNA
cccccatgtctaacaacatgg

SEQ ID NO: 10575 - DNA, 22 bp, Homo sapiens
  source 1..22: mol_type = genomic DNA
cccccatgtctaacaacatggc

SEQ ID NO: 10576 - DNA, 23 bp, Homo sapiens
  source 1..23: mol_type = genomic DNA
cccccatgtctaacaacatggct

SEQ ID NO: 10577 - DNA, 24 bp, Homo sapiens
  source 1..24: mol_type = genomic DNA
cccccatgtctaacaacatggctt

SEQ ID NO: 10578 - DNA, 27 bp, Homo sapiens
  source 1..27: mol_type = genomic DNA
cccccatgtctaacaacatggctttct

SEQ ID NO: 10579 - DNA, 29 bp, Homo sapiens
  source 1..29: mol_type = genomic DNA
cccccatgtctaacaacatggctttctca

SEQ ID NO: 10580 - DNA, 30 bp, Homo sapiens
  source 1..30: mol_type = genomic DNA
cccccatgtctaacaacatggctttctcac

SEQ ID NO: 10581 - DNA, 31 bp, Homo sapiens
  source 1..31: mol_type = genomic DNA
cccccatgtctaacaacatggctttctcacc

SEQ ID NO: 10582 - DNA, 32 bp, Homo sapiens
  source 1..32: mol_type = genomic DNA
cccccatgtctaacaacatggctttctcacca

SEQ ID NO: 10583 - DNA, 17 bp, Homo sapiens
  source 1..17: mol_type = genomic DNA
cccccggctcctccacc

SEQ ID NO: 10584 - DNA, 18 bp, Homo sapiens
  source 1..18: mol_type = genomic DNA
cccccggctcctccacca

SEQ ID NO: 10585 - DNA, 16 bp, Homo sapiens
  source 1..16: mol_type = genomic DNA
cccccttatttctacc

SEQ ID NO: 10586 - DNA, 17 bp, Homo sapiens
  source 1..17: mol_type = genomic DNA
cccccttatttctacca

SEQ ID NO: 10587 - DNA, 16 bp, Homo sapiens
  source 1..16: mol_type = genomic DNA
ccccgaaaatgttggt

SEQ ID NO: 10588 - DNA, 18 bp, Homo sapiens
  source 1..18: mol_type = genomic DNA
ccccgaaaatgttggtta

SEQ ID NO: 10589 - DNA, 19 bp, Homo sapiens
  source 1..19: mol_type = genomic DNA
ccccgaaaatgttggttat

SEQ ID NO: 10590 - DNA, 20 bp, Homo sapiens
  source 1..20: mol_type = genomic DNA
ccccgaaaatgttggttata

SEQ ID NO: 10591 - DNA, 21 bp, Homo sapiens
  source 1..21: mol_type = genomic DNA
ccccgaaaatgttggttatac

SEQ ID NO: 10592 - DNA, 24 bp, Homo sapiens
  source 1..24: mol_type = genomic DNA
ccccgaaaatgttggttataccct

SEQ ID NO: 10593 - DNA, 26 bp, Homo sapiens
  source 1..26: mol_type = genomic DNA
ccccgaaaatgttggttatacccttc

SEQ ID NO: 10594 - DNA, 28 bp, Homo sapiens
  source 1..28: mol_type = genomic DNA
ccccgaaaatgttggttatacccttccc

SEQ ID NO: 10595 - DNA, 32 bp, Homo sapiens
  source 1..32: mol_type = genomic DNA
ccccgaaaatgttggttatacccttcccgtac

SEQ ID NO: 10596 - DNA, 33 bp, Homo sapiens
  source 1..33: mol_type = genomic DNA
ccccgaaaatgttggttatacccttcccgtact

SEQ ID NO: 10597 - DNA, 34 bp, Homo sapiens
  source 1..34: mol_type = genomic DNA
ccccgaaaatgttggttatacccttcccgtacta

SEQ ID NO: 10598 - DNA, 35 bp, Homo sapiens
  source 1..35: mol_type = genomic DNA
ccccgaaaatgttggttatacccttcccgtactac

SEQ ID NO: 10599 - DNA, 36 bp, Homo sapiens
  source 1..36: mol_type = genomic DNA
ccccgaaaatgttggttatacccttcccgtactacc

SEQ ID NO: 10600 - DNA, 37 bp, Homo sapiens
  source 1..37: mol_type = genomic DNA
ccccgaaaatgttggttatacccttcccgtactacca

SEQ ID NO: 10601 - DNA, 16 bp, Homo sapiens
  source 1..16: mol_type = genomic DNA
ccccgacggggagcca

SEQ ID NO: 10602 - DNA, 23 bp, Homo sapiens
  source 1..23: mol_type = genomic DNA
ccccgcacaggttcgaatcctgt

SEQ ID NO: 10603 - DNA, 24 bp, Homo sapiens
  source 1..24: mol_type = genomic DNA
ccccgcctgtcacgcgggagaccg

SEQ ID NO: 10604 - DNA, 21 bp, Homo sapiens
  source 1..21: mol_type = genomic DNA
ccccgcgcaggttcgaaccct

SEQ ID NO: 10605 - DNA, 22 bp, Homo sapiens
  source 1..22: mol_type = genomic DNA
ccccgcgcaggttcgaaccctg

SEQ ID NO: 10606 - DNA, 33 bp, Homo sapiens
  source 1..33: mol_type = genomic DNA
ccccgcgcaggttcgaaccctgctcgctgcgcc

SEQ ID NO: 10607 - DNA, 18 bp, Homo sapiens
  source 1..18: mol_type = genomic DNA
ccccgcgcaggttcgaat

SEQ ID NO: 10608 - DNA, 19 bp, Homo sapiens
  source 1..19: mol_type = genomic DNA
ccccgcgcaggttcgaatc

SEQ ID NO: 10609 - DNA, 20 bp, Homo sapiens
  source 1..20: mol_type = genomic DNA
ccccgcgcaggttcgaatcc

SEQ ID NO: 10610 - DNA, 21 bp, Homo sapiens
  source 1..21: mol_type = genomic DNA
ccccgcgcaggttcgaatcct

SEQ ID NO: 10611 - DNA, 22 bp, Homo sapiens
  source 1..22: mol_type = genomic DNA
ccccgcgcaggttcgaatcctg

SEQ ID NO: 10612 - DNA, 23 bp, Homo sapiens
  source 1..23: mol_type = genomic DNA
ccccgcgcaggttcgaatcctgc

SEQ ID NO: 10613 - DNA, 24 bp, Homo sapiens
  source 1..24: mol_type = genomic DNA
ccccgcgcaggttcgaatcctgcc

SEQ ID NO: 10614 - DNA, 25 bp, Homo sapiens
  source 1..25: mol_type = genomic DNA
ccccgcgcaggttcgaatcctgccg

SEQ ID NO: 10615 - DNA, 33 bp, Homo sapiens
  source 1..33: mol_type = genomic DNA
ccccgcgcaggttcgaatcctgccgactacgcc

SEQ ID NO: 10616 - DNA, 34 bp, Homo sapiens
  source 1..34: mol_type = genomic DNA
ccccgcgcaggttcgaatcctgccgactacgcca

SEQ ID NO: 10617 - DNA, 24 bp, Homo sapiens
  source 1..24: mol_type = genomic DNA
ccccgcgcaggttcgaatcctgct

SEQ ID NO: 10618 - DNA, 33 bp, Homo sapiens
  source 1..33: mol_type = genomic DNA
ccccgcgcaggttcgaatcctgctcacagcgcc

SEQ ID NO: 10619 - DNA, 34 bp, Homo sapiens
  source 1..34: mol_type = genomic DNA
ccccgcgcaggttcgaatcctgctcacagcgcca

SEQ ID NO: 10620 - DNA, 16 bp, Homo sapiens
  source 1..16: mol_type = genomic DNA
ccccggcacctccacc

SEQ ID NO: 10621 - DNA, 17 bp, Homo sapiens
  source 1..17: mol_type = genomic DNA
ccccggcacctccacca

SEQ ID NO: 10622 - DNA, 16 bp, Homo sapiens
  source 1..16: mol_type = genomic DNA
ccccggcatctccacc

SEQ ID NO: 10623 - DNA, 17 bp, Homo sapiens
  source 1..17: mol_type = genomic DNA
ccccggcatctccacca

SEQ ID NO: 10624 - DNA, 16 bp, Homo sapiens
  source 1..16: mol_type = genomic DNA
ccccggctcctccacc

SEQ ID NO: 10625 - DNA, 16 bp, Homo sapiens
  source 1..16: mol_type = genomic DNA
ccccgggttcaatccc

SEQ ID NO: 10626 - DNA, 26 bp, Homo sapiens
  source 1..26: mol_type = genomic DNA
ccccgggttcaatccccggcacctcc

SEQ ID NO: 10627 - DNA, 29 bp, Homo sapiens
  source 1..29: mol_type = genomic DNA
ccccgggttcaatccccggcacctccacc

SEQ ID NO: 10628 - DNA, 30 bp, Homo sapiens
  source 1..30: mol_type = genomic DNA
ccccgggttcaatccccggcacctccacca

SEQ ID NO: 10629 - DNA, 29 bp, Homo sapiens
  source 1..29: mol_type = genomic DNA
ccccgggttcaatccccggcatctccacc

SEQ ID NO: 10630 - DNA, 30 bp, Homo sapiens
  source 1..30: mol_type = genomic DNA
ccccgggttcaatccccggcatctccacca

SEQ ID NO: 10631 - DNA, 17 bp, Homo sapiens
  source 1..17: mol_type = genomic DNA
ccccgggttcgaccccc

SEQ ID NO: 10632 - DNA, 27 bp, Homo sapiens
  source 1..27: mol_type = genomic DNA
ccccgggttcgacccccggctcctcca

SEQ ID NO: 10633 - DNA, 29 bp, Homo sapiens
  source 1..29: mol_type = genomic DNA
ccccgggttcgacccccggctcctccacc

SEQ ID NO: 10634 - DNA, 20 bp, Homo sapiens
  source 1..20: mol_type = genomic DNA
ccccgggttcgatccccggc

SEQ ID NO: 10635 - DNA, 28 bp, Homo sapiens
  source 1..28: mol_type = genomic DNA
ccccgggttcgatccccggcatctccac

SEQ ID NO: 10636 - DNA, 29 bp, Homo sapiens
  source 1..29: mol_type = genomic DNA
ccccgggttcgatccccggcatctccacc

SEQ ID NO: 10637 - DNA, 30 bp, Homo sapiens
  source 1..30: mol_type = genomic DNA
ccccgggttcgatccccggcatctccacca

SEQ ID NO: 10638 - DNA, 29 bp, Homo sapiens
  source 1..29: mol_type = genomic DNA
ccccggttcaaatccgggtgccccctcca

SEQ ID NO: 10639 - DNA, 22 bp, Homo sapiens
  source 1..22: mol_type = genomic DNA
ccccggttcgaaaccgggcgga

SEQ ID NO: 10640 - DNA, 25 bp, Homo sapiens
  source 1..25: mol_type = genomic DNA
ccccggttcgaaaccgggcggaaac

SEQ ID NO: 10641 - DNA, 26 bp, Homo sapiens
  source 1..26: mol_type = genomic DNA
ccccggttcgaaaccgggcggaaaca

SEQ ID NO: 10642 - DNA, 29 bp, Homo sapiens
  source 1..29: mol_type = genomic DNA
ccccggttcgaaaccgggcggaaacacca

SEQ ID NO: 10643 - DNA, 16 bp, Homo sapiens
  source 1..16: mol_type = genomic DNA
ccccgtacgggccacc

SEQ ID NO: 10644 - DNA, 17 bp, Homo sapiens
  source 1..17: mol_type = genomic DNA
ccccgtacgggccacca

SEQ ID NO: 10645 - DNA, 16 bp, Homo sapiens
  source 1..16: mol_type = genomic DNA
ccccgtactggccacc

SEQ ID NO: 10646 - DNA, 17 bp, Homo sapiens
  source 1..17: mol_type = genomic DNA
ccccgtactggccacca

SEQ ID NO: 10647 - DNA, 16 bp, Homo sapiens
  source 1..16: mol_type = genomic DNA
ccccgtccgtgcctcc

SEQ ID NO: 10648 - DNA, 17 bp, Homo sapiens
  source 1..17: mol_type = genomic DNA
ccccgtccgtgcctcca

SEQ ID NO: 10649 - DNA, 35 bp, Homo sapiens
  source 1..35: mol_type = genomic DNA
cccctggaggcgtgggttcgaatcccacttctgac

SEQ ID NO: 10650 - DNA, 36 bp, Homo sapiens
  source 1..36: mol_type = genomic DNA
cccctggaggcgtgggttcgaatcccacttctgaca

SEQ ID NO: 10651 - DNA, 39 bp, Homo sapiens
  source 1..39: mol_type = genomic DNA
cccctggaggcgtgggttcgaatcccacttctgacacca

SEQ ID NO: 10652 - DNA, 23 bp, Homo sapiens
  source 1..23: mol_type = genomic DNA
cccctgtggtctagtggttagga

SEQ ID NO: 10653 - DNA, 16 bp, Homo sapiens
  source 1..16: mol_type = genomic DNA
ccccttatttacccca

SEQ ID NO: 10654 - DNA, 16 bp, Homo sapiens
  source 1..16: mol_type = genomic DNA
ccccttatttctacca

SEQ ID NO: 10655 - DNA, 16 bp, Homo sapiens
  source 1..16: mol_type = genomic DNA
cccgaaaatgttggtt

SEQ ID NO: 10656 - DNA, 17 bp, Homo sapiens
  source 1..17: mol_type = genomic DNA
cccgaaaatgttggtta

SEQ ID NO: 10657 - DNA, 18 bp, Homo sapiens
  source 1..18: mol_type = genomic DNA
cccgaaaatgttggttat

SEQ ID NO: 10658 - DNA, 19 bp, Homo sapiens
  source 1..19: mol_type = genomic DNA
cccgaaaatgttggttata

SEQ ID NO: 10659 - DNA, 20 bp, Homo sapiens
  source 1..20: mol_type = genomic DNA
cccgaaaatgttggttatac

SEQ ID NO: 10660 - DNA, 21 bp, Homo sapiens
  source 1..21: mol_type = genomic DNA
cccgaaaatgttggttatacc

SEQ ID NO: 10661 - DNA, 22 bp, Homo sapiens
  source 1..22: mol_type = genomic DNA
cccgaaaatgttggttataccc

SEQ ID NO: 10662 - DNA, 23 bp, Homo sapiens
  source 1..23: mol_type = genomic DNA
cccgaaaatgttggttataccct

SEQ ID NO: 10663 - DNA, 25 bp, Homo sapiens
  source 1..25: mol_type = genomic DNA
cccgaaaatgttggttatacccttc

SEQ ID NO: 10664 - DNA, 26 bp, Homo sapiens
  source 1..26: mol_type = genomic DNA
cccgaaaatgttggttatacccttcc

SEQ ID NO: 10665 - DNA, 27 bp, Homo sapiens
  source 1..27: mol_type = genomic DNA
cccgaaaatgttggttatacccttccc

SEQ ID NO: 10666 - DNA, 28 bp, Homo sapiens
  source 1..28: mol_type = genomic DNA
cccgaaaatgttggttatacccttcccg

SEQ ID NO: 10667 - DNA, 29 bp, Homo sapiens
  source 1..29: mol_type = genomic DNA
cccgaaaatgttggttatacccttcccgt

SEQ ID NO: 10668 - DNA, 30 bp, Homo sapiens
  source 1..30: mol_type = genomic DNA
cccgaaaatgttggttatacccttcccgta

SEQ ID NO: 10669 - DNA, 31 bp, Homo sapiens
  source 1..31: mol_type = genomic DNA
cccgaaaatgttggttatacccttcccgtac

SEQ ID NO: 10670 - DNA, 32 bp, Homo sapiens
  source 1..32: mol_type = genomic DNA
cccgaaaatgttggttatacccttcccgtact

SEQ ID NO: 10671 - DNA, 33 bp, Homo sapiens
  source 1..33: mol_type = genomic DNA
cccgaaaatgttggttatacccttcccgtacta

SEQ ID NO: 10672 - DNA, 34 bp, Homo sapiens
  source 1..34: mol_type = genomic DNA
cccgaaaatgttggttatacccttcccgtactac

SEQ ID NO: 10673 - DNA, 35 bp, Homo sapiens
  source 1..35: mol_type = genomic DNA
cccgaaaatgttggttatacccttcccgtactacc

SEQ ID NO: 10674 - DNA, 36 bp, Homo sapiens
  source 1..36: mol_type = genomic DNA
cccgaaaatgttggttatacccttcccgtactacca

SEQ ID NO: 10675 - DNA, 33 bp, Homo sapiens
  source 1..33: mol_type = genomic DNA
cccgcacaggttcgaatcctgttcgtgacgcca

SEQ ID NO: 10676 - DNA, 16 bp, Homo sapiens
  source 1..16: mol_type = genomic DNA
cccgcatcctccacca

SEQ ID NO: 10677 - DNA, 16 bp, Homo sapiens
  source 1..16: mol_type = genomic DNA
cccgcattctccacca

SEQ ID NO: 10678 - DNA, 26 bp, Homo sapiens
  source 1..26: mol_type = genomic DNA
cccgcctgtcacgcgggagaccgggg

SEQ ID NO: 10679 - DNA, 48 bp, Homo sapiens
  source 1..48: mol_type = genomic DNA
cccgcctgtcacgcgggagaccggggttcaattccccgacggggagcc

SEQ ID NO: 10680 - DNA, 48 bp, Homo sapiens
  source 1..48: mol_type = genomic DNA
cccgcctgtcacgcgggagaccggggttcgattccccgacggggagcc

SEQ ID NO: 10681 - DNA, 17 bp, Homo sapiens
  source 1..17: mol_type = genomic DNA
cccgcgcaggttcgaac

SEQ ID NO: 10682 - DNA, 21 bp, Homo sapiens
  source 1..21: mol_type = genomic DNA
cccgcgcaggttcgaaccctg

SEQ ID NO: 10683 - DNA, 32 bp, Homo sapiens
  source 1..32: mol_type = genomic DNA
cccgcgcaggttcgaaccctgctcgctgcgcc

SEQ ID NO: 10684 - DNA, 21 bp, Homo sapiens
  source 1..21: mol_type = genomic DNA
cccgcgcaggttcgaatcctg

SEQ ID NO: 10685 - DNA, 32 bp, Homo sapiens
  source 1..32: mol_type = genomic DNA
cccgcgcaggttcgaatcctgccgactacgcc

SEQ ID NO: 10686 - DNA, 33 bp, Homo sapiens
  source 1..33: mol_type = genomic DNA
cccgcgcaggttcgaatcctgccgactacgcca

SEQ ID NO: 10687 - DNA, 32 bp, Homo sapiens
  source 1..32: mol_type = genomic DNA
cccgcgcaggttcgaatcctgctcacagcgcc

SEQ ID NO: 10688 - DNA, 16 bp, Homo sapiens
  source 1..16: mol_type = genomic DNA
cccggacgagccccca

SEQ ID NO: 10689 - DNA, 16 bp, Homo sapiens
  source 1..16: mol_type = genomic DNA
cccggatagctcagtc

SEQ ID NO: 10690 - DNA, 17 bp, Homo sapiens
  source 1..17: mol_type = genomic DNA
cccggatagctcagtcg

SEQ ID NO: 10691 - DNA, 18 bp, Homo sapiens
  source 1..18: mol_type = genomic DNA
cccggatagctcagtcgg

SEQ ID NO: 10692 - DNA, 21 bp, Homo sapiens
  source 1..21: mol_type = genomic DNA
cccggatagctcagtcggtag

SEQ ID NO: 10693 - DNA, 22 bp, Homo sapiens
  source 1..22: mol_type = genomic DNA
cccggatagctcagtcggtaga

SEQ ID NO: 10694 - DNA, 23 bp, Homo sapiens
  source 1..23: mol_type = genomic DNA
cccggatagctcagtcggtagag

SEQ ID NO: 10695 - DNA, 24 bp, Homo sapiens
  source 1..24: mol_type = genomic DNA
cccggatagctcagtcggtagagc

SEQ ID NO: 10696 - DNA, 25 bp, Homo sapiens
  source 1..25: mol_type = genomic DNA
cccggatagctcagtcggtagagca

SEQ ID NO: 10697 - DNA, 26 bp, Homo sapiens
  source 1..26: mol_type = genomic DNA
cccggatagctcagtcggtagagcat

SEQ ID NO: 10698 - DNA, 27 bp, Homo sapiens
  source 1..27: mol_type = genomic DNA
cccggatagctcagtcggtagagcatc

SEQ ID NO: 10699 - DNA, 28 bp, Homo sapiens
  source 1..28: mol_type = genomic DNA
cccggatagctcagtcggtagagcatca

SEQ ID NO: 10700 - DNA, 29 bp, Homo sapiens
  source 1..29: mol_type = genomic DNA
cccggatagctcagtcggtagagcatcag

SEQ ID NO: 10701 - DNA, 30 bp, Homo sapiens
  source 1..30: mol_type = genomic DNA
cccggatagctcagtcggtagagcatcaga

SEQ ID NO: 10702 - DNA, 31 bp, Homo sapiens
  source 1..31: mol_type = genomic DNA
cccggatagctcagtcggtagagcatcagac

SEQ ID NO: 10703 - DNA, 32 bp, Homo sapiens
  source 1..32: mol_type = genomic DNA
cccggatagctcagtcggtagagcatcagact

SEQ ID NO: 10704 - DNA, 33 bp, Homo sapiens
  source 1..33: mol_type = genomic DNA
cccggatagctcagtcggtagagcatcagactt

SEQ ID NO: 10705 - DNA, 34 bp, Homo sapiens
  source 1..34: mol_type = genomic DNA
cccggatagctcagtcggtagagcatcagacttt

SEQ ID NO: 10706 - DNA, 35 bp, Homo sapiens
  source 1..35: mol_type = genomic DNA
cccggatagctcagtcggtagagcatcagactttt

SEQ ID NO: 10707 - DNA, 16 bp, Homo sapiens
  source 1..16: mol_type = genomic DNA
cccggcacctccacca

SEQ ID NO: 10708 - DNA, 16 bp, Homo sapiens
  source 1..16: mol_type = genomic DNA
cccggcatctccacca

SEQ ID NO: 10709 - DNA, 16 bp, Homo sapiens
  source 1..16: mol_type = genomic DNA
cccggccaacgcacca

SEQ ID NO: 10710 - DNA, 16 bp, Homo sapiens
  source 1..16: mol_type = genomic DNA
cccggccaatgcacca

SEQ ID NO: 10711 - DNA, 16 bp, Homo sapiens
  source 1..16: mol_type = genomic DNA
cccggccagggaacca

SEQ ID NO: 10712 - DNA, 16 bp, Homo sapiens
  source 1..16: mol_type = genomic DNA
cccggcccatgcacca

SEQ ID NO: 10713 - DNA, 16 bp, Homo sapiens
  source 1..16: mol_type = genomic DNA
cccggcggagtcgcca

SEQ ID NO: 10714 - DNA, 16 bp, Homo sapiens
  source 1..16: mol_type = genomic DNA
cccggctagctcagtc

SEQ ID NO: 10715 - DNA, 17 bp, Homo sapiens
  source 1..17: mol_type = genomic DNA
cccggctagctcagtcg

SEQ ID NO: 10716 - DNA, 18 bp, Homo sapiens
  source 1..18: mol_type = genomic DNA
cccggctagctcagtcgg

SEQ ID NO: 10717 - DNA, 24 bp, Homo sapiens
  source 1..24: mol_type = genomic DNA
cccggctagctcagtcggtagagc

SEQ ID NO: 10718 - DNA, 25 bp, Homo sapiens
  source 1..25: mol_type = genomic DNA
cccggctagctcagtcggtagagca

SEQ ID NO: 10719 - DNA, 26 bp, Homo sapiens
  source 1..26: mol_type = genomic DNA
cccggctagctcagtcggtagagcat

SEQ ID NO: 10720 - DNA, 27 bp, Homo sapiens
  source 1..27: mol_type = genomic DNA
cccggctagctcagtcggtagagcatg

SEQ ID NO: 10721 - DNA, 28 bp, Homo sapiens
  source 1..28: mol_type = genomic DNA
cccggctagctcagtcggtagagcatga

SEQ ID NO: 10722 - DNA, 29 bp, Homo sapiens
  source 1..29: mol_type = genomic DNA
cccggctagctcagtcggtagagcatgag

SEQ ID NO: 10723 - DNA, 30 bp, Homo sapiens
  source 1..30: mol_type = genomic DNA
cccggctagctcagtcggtagagcatgaga

SEQ ID NO: 10724 - DNA, 31 bp, Homo sapiens
  source 1..31: mol_type = genomic DNA
cccggctagctcagtcggtagagcatgagac

SEQ ID NO: 10725 - DNA, 32 bp, Homo sapiens
  source 1..32: mol_type = genomic DNA
cccggctagctcagtcggtagagcatgagacc

SEQ ID NO: 10726 - DNA, 33 bp, Homo sapiens
  source 1..33: mol_type = genomic DNA
cccggctagctcagtcggtagagcatgagaccc

SEQ ID NO: 10727 - DNA, 34 bp, Homo sapiens
  source 1..34: mol_type = genomic DNA
cccggctagctcagtcggtagagcatgagaccct

SEQ ID NO: 10728 - DNA, 32 bp, Homo sapiens
  source 1..32: mol_type = genomic DNA
cccggctagctcagtcggtagagcatgagact

SEQ ID NO: 10729 - DNA, 33 bp, Homo sapiens
  source 1..33: mol_type = genomic DNA
cccggctagctcagtcggtagagcatgagactc

SEQ ID NO: 10730 - DNA, 34 bp, Homo sapiens
  source 1..34: mol_type = genomic DNA
cccggctagctcagtcggtagagcatgagactct

SEQ ID NO: 10731 - DNA, 35 bp, Homo sapiens
  source 1..35: mol_type = genomic DNA
cccggctagctcagtcggtagagcatgagactctt

SEQ ID NO: 10732 - DNA, 36 bp, Homo sapiens
  source 1..36: mol_type = genomic DNA
cccggctagctcagtcggtagagcatgagactctta

SEQ ID NO: 10733 - DNA, 37 bp, Homo sapiens
  source 1..37: mol_type = genomic DNA
cccggctagctcagtcggtagagcatgagactcttaa

SEQ ID NO: 10734 - DNA, 38 bp, Homo sapiens
  source 1..38: mol_type = genomic DNA
cccggctagctcagtcggtagagcatgagactcttaat

SEQ ID NO: 10735 - DNA, 39 bp, Homo sapiens
  source 1..39: mol_type = genomic DNA
cccggctagctcagtcggtagagcatgagactcttaatc

SEQ ID NO: 10736 - DNA, 40 bp, Homo sapiens
  source 1..40: mol_type = genomic DNA
cccggctagctcagtcggtagagcatgagactcttaatct

SEQ ID NO: 10737 - DNA, 41 bp, Homo sapiens
  source 1..41: mol_type = genomic DNA
cccggctagctcagtcggtagagcatgagactcttaatctc

SEQ ID NO: 10738 - DNA, 42 bp, Homo sapiens
  source 1..42: mol_type = genomic DNA
cccggctagctcagtcggtagagcatgagactcttaatctca

SEQ ID NO: 10739 - DNA, 48 bp, Homo sapiens
  source 1..48: mol_type = genomic DNA
cccggctagctcagtcggtagagcatgagactcttaatctcagggtcg

SEQ ID NO: 10740 - DNA, 28 bp, Homo sapiens
  source 1..28: mol_type = genomic DNA
cccggctagctcagtcggtagagcatgg

SEQ ID NO: 10741 - DNA, 29 bp, Homo sapiens
  source 1..29: mol_type = genomic DNA
cccggctagctcagtcggtagagcatggg

SEQ ID NO: 10742 - DNA, 30 bp, Homo sapiens
  source 1..30: mol_type = genomic DNA
cccggctagctcagtcggtagagcatggga

SEQ ID NO: 10743 - DNA, 31 bp, Homo sapiens
  source 1..31: mol_type = genomic DNA
cccggctagctcagtcggtagagcatgggac

SEQ ID NO: 10744 - DNA, 32 bp, Homo sapiens
  source 1..32: mol_type = genomic DNA
cccggctagctcagtcggtagagcatgggact

SEQ ID NO: 10745 - DNA, 33 bp, Homo sapiens
  source 1..33: mol_type = genomic DNA
cccggctagctcagtcggtagagcatgggactc

SEQ ID NO: 10746 - DNA, 34 bp, Homo sapiens
  source 1..34: mol_type = genomic DNA
cccggctagctcagtcggtagagcatgggactct

SEQ ID NO: 10747 - DNA, 35 bp, Homo sapiens
  source 1..35: mol_type = genomic DNA
cccggctagctcagtcggtagagcatgggactctt

SEQ ID NO: 10748 - DNA, 36 bp, Homo sapiens
  source 1..36: mol_type = genomic DNA
cccggctagctcagtcggtagagcatgggactctta

SEQ ID NO: 10749 - DNA, 40 bp, Homo sapiens
  source 1..40: mol_type = genomic DNA
cccggctagctcagtcggtagagcatgggactcttaatcc

SEQ ID NO: 10750 - DNA, 41 bp, Homo sapiens
  source 1..41: mol_type = genomic DNA
cccggctagctcagtcggtagagcatgggactcttaatccc

SEQ ID NO: 10751 - DNA, 42 bp, Homo sapiens
  source 1..42: mol_type = genomic DNA
cccggctagctcagtcggtagagcatgggactcttaatccca

SEQ ID NO: 10752 - DNA, 48 bp, Homo sapiens
  source 1..48: mol_type = genomic DNA
cccggctagctcagtcggtagagcatgggactcttaatcccagggtcg

SEQ ID NO: 10753 - DNA, 40 bp, Homo sapiens
  source 1..40: mol_type = genomic DNA
cccggctagctcagtcggtagagcatgggactcttaatct

SEQ ID NO: 10754 - DNA, 16 bp, Homo sapiens
  source 1..16: mol_type = genomic DNA
cccggctcctccacca

SEQ ID NO: 10755 - DNA, 16 bp, Homo sapiens
  source 1..16: mol_type = genomic DNA
cccgggcggaaacacc

SEQ ID NO: 10756 - DNA, 17 bp, Homo sapiens
  source 1..17: mol_type = genomic DNA
cccgggcggaaacacca

SEQ ID NO: 10757 - DNA, 16 bp, Homo sapiens
  source 1..16: mol_type = genomic DNA
cccgggcggcgcacca

SEQ ID NO: 10758 - DNA, 26 bp, Homo sapiens
  source 1..26: mol_type = genomic DNA
cccgggttcaaatcccggacgagccc

SEQ ID NO: 10759 - DNA, 27 bp, Homo sapiens
  source 1..27: mol_type = genomic DNA
cccgggttcaaatcccggacgagcccc

SEQ ID NO: 10760 - DNA, 28 bp, Homo sapiens
  source 1..28: mol_type = genomic DNA
cccgggttcaaatcccggacgagccccc

SEQ ID NO: 10761 - DNA, 29 bp, Homo sapiens
  source 1..29: mol_type = genomic DNA
cccgggttcaaatcccggacgagccccca

SEQ ID NO: 10762 - DNA, 29 bp, Homo sapiens
  source 1..29: mol_type = genomic DNA
cccgggttcaatccccggcacctccacca

SEQ ID NO: 10763 - DNA, 28 bp, Homo sapiens
  source 1..28: mol_type = genomic DNA
cccgggttcaatccccggcatctccacc

SEQ ID NO: 10764 - DNA, 29 bp, Homo sapiens
  source 1..29: mol_type = genomic DNA
cccgggttcaatccccggcatctccacca

SEQ ID NO: 10765 - DNA, 16 bp, Homo sapiens
  source 1..16: mol_type = genomic DNA
cccgggttcgactccc

SEQ ID NO: 10766 - DNA, 28 bp, Homo sapiens
  source 1..28: mol_type = genomic DNA
cccgggttcgactcccggtatgggaacc

SEQ ID NO: 10767 - DNA, 27 bp, Homo sapiens
  source 1..27: mol_type = genomic DNA
cccgggttcgactcccggtgtgggaac

SEQ ID NO: 10768 - DNA, 28 bp, Homo sapiens
  source 1..28: mol_type = genomic DNA
cccgggttcgactcccggtgtgggaacc

SEQ ID NO: 10769 - DNA, 29 bp, Homo sapiens
  source 1..29: mol_type = genomic DNA
cccgggttcgactcccggtgtgggaacca

SEQ ID NO: 10770 - DNA, 26 bp, Homo sapiens
  source 1..26: mol_type = genomic DNA
cccgggttcgatccccagcatctcca

SEQ ID NO: 10771 - DNA, 27 bp, Homo sapiens
  source 1..27: mol_type = genomic DNA
cccgggttcgatccccagcatctccac

SEQ ID NO: 10772 - DNA, 28 bp, Homo sapiens
  source 1..28: mol_type = genomic DNA
cccgggttcgatccccagcatctccacc

SEQ ID NO: 10773 - DNA, 29 bp, Homo sapiens
  source 1..29: mol_type = genomic DNA
cccgggttcgatccccagcatctccacca

SEQ ID NO: 10774 - DNA, 27 bp, Homo sapiens
  source 1..27: mol_type = genomic DNA
cccgggttcgatccccggcatctccac

SEQ ID NO: 10775 - DNA, 28 bp, Homo sapiens
  source 1..28: mol_type = genomic DNA
cccgggttcgatccccggcatctccacc

SEQ ID NO: 10776 - DNA, 16 bp, Homo sapiens
  source 1..16: mol_type = genomic DNA
cccgggttcgattccc

SEQ ID NO: 10777 - DNA, 24 bp, Homo sapiens
  source 1..24: mol_type = genomic DNA
cccgggttcgattcccggccaatg

SEQ ID NO: 10778 - DNA, 27 bp, Homo sapiens
  source 1..27: mol_type = genomic DNA
cccgggttcgattcccggccaatgcac

SEQ ID NO: 10779 - DNA, 25 bp, Homo sapiens
  source 1..25: mol_type = genomic DNA
cccgggttcgattcccggtcaggga

SEQ ID NO: 10780 - DNA, 27 bp, Homo sapiens
  source 1..27: mol_type = genomic DNA
cccgggttcgattcccggtcagggaac

SEQ ID NO: 10781 - DNA, 28 bp, Homo sapiens
  source 1..28: mol_type = genomic DNA
cccgggttcgattcccggtcagggaacc

SEQ ID NO: 10782 - DNA, 29 bp, Homo sapiens
  source 1..29: mol_type = genomic DNA
cccgggttcgattcccggtcagggaacca

SEQ ID NO: 10783 - DNA, 16 bp, Homo sapiens
  source 1..16: mol_type = genomic DNA
cccgggtttcggcacc

SEQ ID NO: 10784 - DNA, 17 bp, Homo sapiens
  source 1..17: mol_type = genomic DNA
cccgggtttcggcacca

SEQ ID NO: 10785 - DNA, 16 bp, Homo sapiens
  source 1..16: mol_type = genomic DNA
cccggtaatcgcataa

SEQ ID NO: 10786 - DNA, 17 bp, Homo sapiens
  source 1..17: mol_type = genomic DNA
cccggtaatcgcataaa

SEQ ID NO: 10787 - DNA, 18 bp, Homo sapiens
  source 1..18: mol_type = genomic DNA
cccggtaatcgcataaaa

SEQ ID NO: 10788 - DNA, 19 bp, Homo sapiens
  source 1..19: mol_type = genomic DNA
cccggtaatcgcataaaac

SEQ ID NO: 10789 - DNA, 20 bp, Homo sapiens
  source 1..20: mol_type = genomic DNA
cccggtaatcgcataaaact

SEQ ID NO: 10790 - DNA, 21 bp, Homo sapiens
  source 1..21: mol_type = genomic DNA
cccggtaatcgcataaaactt

SEQ ID NO: 10791 - DNA, 22 bp, Homo sapiens
  source 1..22: mol_type = genomic DNA
cccggtaatcgcataaaactta

SEQ ID NO: 10792 - DNA, 23 bp, Homo sapiens
  source 1..23: mol_type = genomic DNA
cccggtaatcgcataaaacttaa

SEQ ID NO: 10793 - DNA, 24 bp, Homo sapiens
  source 1..24: mol_type = genomic DNA
cccggtaatcgcataaaacttaaa

SEQ ID NO: 10794 - DNA, 25 bp, Homo sapiens
  source 1..25: mol_type = genomic DNA
cccggtaatcgcataaaacttaaaa

SEQ ID NO: 10795 - DNA, 26 bp, Homo sapiens
  source 1..26: mol_type = genomic DNA
cccggtaatcgcataaaacttaaaac

SEQ ID NO: 10796 - DNA, 27 bp, Homo sapiens
  source 1..27: mol_type = genomic DNA
cccggtaatcgcataaaacttaaaact

SEQ ID NO: 10797 - DNA, 28 bp, Homo sapiens
  source 1..28: mol_type = genomic DNA
cccggtaatcgcataaaacttaaaactt

SEQ ID NO: 10798 - DNA, 29 bp, Homo sapiens
  source 1..29: mol_type = genomic DNA
cccggtaatcgcataaaacttaaaacttt

SEQ ID NO: 10799 - DNA, 31 bp, Homo sapiens
  source 1..31: mol_type = genomic DNA
cccggtaatcgcataaaacttaaaactttac

SEQ ID NO: 10800 - DNA, 32 bp, Homo sapiens
  source 1..32: mol_type = genomic DNA
cccggtaatcgcataaaacttaaaactttaca

SEQ ID NO: 10801 - DNA, 35 bp, Homo sapiens
  source 1..35: mol_type = genomic DNA
cccggtaatcgcataaaacttaaaactttacagtc

SEQ ID NO: 10802 - DNA, 37 bp, Homo sapiens
  source 1..37: mol_type = genomic DNA
cccggtaatcgcataaaacttaaaactttacagtcag

SEQ ID NO: 10803 - DNA, 38 bp, Homo sapiens
  source 1..38: mol_type = genomic DNA
cccggtaatcgcataaaacttaaaactttacagtcaga

SEQ ID NO: 10804 - DNA, 43 bp, Homo sapiens
  source 1..43: mol_type = genomic DNA
cccggtaatcgcataaaacttaaaactttacagtcagaggttc

SEQ ID NO: 10805 - DNA, 44 bp, Homo sapiens
  source 1..44: mol_type = genomic DNA
cccggtaatcgcataaaacttaaaactttacagtcagaggttca

SEQ ID NO: 10806 - DNA, 16 bp, Homo sapiens
  source 1..16: mol_type = genomic DNA
cccggtatgggaacca

SEQ ID NO: 10807 - DNA, 16 bp, Homo sapiens
  source 1..16: mol_type = genomic DNA
cccggtcagggaacca

SEQ ID NO: 10808 - DNA, 17 bp, Homo sapiens
  source 1..17: mol_type = genomic DNA
cccggtggcctaatgga

SEQ ID NO: 10809 - DNA, 34 bp, Homo sapiens
  source 1..34: mol_type = genomic DNA
cccggtggcctaatggataaggcattggcctcct

SEQ ID NO: 10810 - DNA, 16 bp, Homo sapiens
  source 1..16: mol_type = genomic DNA
cccggtgtgggaacca

SEQ ID NO: 10811 - DNA, 16 bp, Homo sapiens
  source 1..16: mol_type = genomic DNA
cccgtacgggccacca

SEQ ID NO: 10812 - DNA, 16 bp, Homo sapiens
  source 1..16: mol_type = genomic DNA
cccgtactggccacca

SEQ ID NO: 10813 - DNA, 16 bp, Homo sapiens
  source 1..16: mol_type = genomic DNA
cccgtccgtgcctcca

SEQ ID NO: 10814 - DNA, 30 bp, Homo sapiens
  source 1..30: mol_type = genomic DNA
ccctatagctcaggggttagagcactggtc

SEQ ID NO: 10815 - DNA, 31 bp, Homo sapiens
  source 1..31: mol_type = genomic DNA
ccctatagctcaggggttagagcactggtct

SEQ ID NO: 10816 - DNA, 32 bp, Homo sapiens
  source 1..32: mol_type = genomic DNA
ccctatagctcaggggttagagcactggtctt

SEQ ID NO: 10817 - DNA, 33 bp, Homo sapiens
  source 1..33: mol_type = genomic DNA
ccctatagctcaggggttagagcactggtcttg

SEQ ID NO: 10818 - DNA, 34 bp, Homo sapiens
  source 1..34: mol_type = genomic DNA
ccctatagctcaggggttagagcactggtcttgt

SEQ ID NO: 10819 - DNA, 16 bp, Homo sapiens
  source 1..16: mol_type = genomic DNA
ccctcagtaagttgca

SEQ ID NO: 10820 - DNA, 17 bp, Homo sapiens
  source 1..17: mol_type = genomic DNA
ccctcagtaagttgcaa

SEQ ID NO: 10821 - DNA, 18 bp, Homo sapiens
  source 1..18: mol_type = genomic DNA
ccctcagtaagttgcaat

SEQ ID NO: 10822 - DNA, 19 bp, Homo sapiens
  source 1..19: mol_type = genomic DNA
ccctcagtaagttgcaata

SEQ ID NO: 10823 - DNA, 20 bp, Homo sapiens
  source 1..20: mol_type = genomic DNA
ccctcagtaagttgcaatac

SEQ ID NO: 10824 - DNA, 21 bp, Homo sapiens
  source 1..21: mol_type = genomic DNA
ccctcagtaagttgcaatact

SEQ ID NO: 10825 - DNA, 22 bp, Homo sapiens
  source 1..22: mol_type = genomic DNA
ccctcagtaagttgcaatactt

SEQ ID NO: 10826 - DNA, 28 bp, Homo sapiens
  source 1..28: mol_type = genomic DNA
ccctcagtaagttgcaatacttaatttc

SEQ ID NO: 10827 - DNA, 30 bp, Homo sapiens
  source 1..30: mol_type = genomic DNA
ccctcagtaagttgcaatacttaatttctg

SEQ ID NO: 10828 - DNA, 31 bp, Homo sapiens
  source 1..31: mol_type = genomic DNA
ccctcagtaagttgcaatacttaatttctgc

SEQ ID NO: 10829 - DNA, 32 bp, Homo sapiens
  source 1..32: mol_type = genomic DNA
ccctcagtaagttgcaatacttaatttctgcc

SEQ ID NO: 10830 - DNA, 33 bp, Homo sapiens
  source 1..33: mol_type = genomic DNA
ccctcagtaagttgcaatacttaatttctgcca

SEQ ID NO: 10831 - DNA, 16 bp, Homo sapiens
  source 1..16: mol_type = genomic DNA
ccctccgtggttacca

SEQ ID NO: 10832 - DNA, 16 bp, Homo sapiens
  source 1..16: mol_type = genomic DNA
ccctgctcgctgcgcc

SEQ ID NO: 10833 - DNA, 17 bp, Homo sapiens
  source 1..17: mol_type = genomic DNA
ccctgctcgctgcgcca

SEQ ID NO: 10834 - DNA, 16 bp, Homo sapiens
  source 1..16: mol_type = genomic DNA
ccctggaggcgtgggt

SEQ ID NO: 10835 - DNA, 37 bp, Homo sapiens
  source 1..37: mol_type = genomic DNA
ccctggaggcgtgggttcgaatcccacttctgacacc

SEQ ID NO: 10836 - DNA, 33 bp, Homo sapiens
  source 1..33: mol_type = genomic DNA
ccctggcggtctagtggttaggattcggcgctc

SEQ ID NO: 10837 - DNA, 16 bp, Homo sapiens
  source 1..16: mol_type = genomic DNA
ccctggtggtctagtg

SEQ ID NO: 10838 - DNA, 18 bp, Homo sapiens
  source 1..18: mol_type = genomic DNA
ccctggtggtctagtggc

SEQ ID NO: 10839 - DNA, 19 bp, Homo sapiens
  source 1..19: mol_type = genomic DNA
ccctggtggtctagtggct

SEQ ID NO: 10840 - DNA, 26 bp, Homo sapiens
  source 1..26: mol_type = genomic DNA
ccctggtggtctagtggctaggattc

SEQ ID NO: 10841 - DNA, 27 bp, Homo sapiens
  source 1..27: mol_type = genomic DNA
ccctggtggtctagtggctaggattcg

SEQ ID NO: 10842 - DNA, 28 bp, Homo sapiens
  source 1..28: mol_type = genomic DNA
ccctggtggtctagtggctaggattcgg

SEQ ID NO: 10843 - DNA, 29 bp, Homo sapiens
  source 1..29: mol_type = genomic DNA
ccctggtggtctagtggctaggattcggc

SEQ ID NO: 10844 - DNA, 30 bp, Homo sapiens
  source 1..30: mol_type = genomic DNA
ccctggtggtctagtggctaggattcggcg

SEQ ID NO: 10845 - DNA, 31 bp, Homo sapiens
  source 1..31: mol_type = genomic DNA
ccctggtggtctagtggctaggattcggcgc

SEQ ID NO: 10846 - DNA, 32 bp, Homo sapiens
  source 1..32: mol_type = genomic DNA
ccctggtggtctagtggctaggattcggcgct

SEQ ID NO: 10847 - DNA, 33 bp, Homo sapiens
  source 1..33: mol_type = genomic DNA
ccctggtggtctagtggctaggattcggcgctt

SEQ ID NO: 10848 - DNA, 34 bp, Homo sapiens
  source 1..34: mol_type = genomic DNA
ccctggtggtctagtggctaggattcggcgcttt

SEQ ID NO: 10849 - DNA, 35 bp, Homo sapiens
  source 1..35: mol_type = genomic DNA
ccctggtggtctagtggctaggattcggcgctttc

SEQ ID NO: 10850 - DNA, 36 bp, Homo sapiens
  source 1..36: mol_type = genomic DNA
ccctggtggtctagtggctaggattcggcgctttca

SEQ ID NO: 10851 - DNA, 37 bp, Homo sapiens
  source 1..37: mol_type = genomic DNA
ccctggtggtctagtggctaggattcggcgctttcac

SEQ ID NO: 10852 - DNA, 38 bp, Homo sapiens
  source 1..38: mol_type = genomic DNA
ccctggtggtctagtggctaggattcggcgctttcacc

SEQ ID NO: 10853 - DNA, 39 bp, Homo sapiens
  source 1..39: mol_type = genomic DNA
ccctggtggtctagtggctaggattcggcgctttcaccg

SEQ ID NO: 10854 - DNA, 18 bp, Homo sapiens
  source 1..18: mol_type = genomic DNA
ccctggtggtctagtggt

SEQ ID NO: 10855 - DNA, 23 bp, Homo sapiens
  source 1..23: mol_type = genomic DNA
ccctggtggtctagtggttagga

SEQ ID NO: 10856 - DNA, 24 bp, Homo sapiens
  source 1..24: mol_type = genomic DNA
ccctggtggtctagtggttaggat

SEQ ID NO: 10857 - DNA, 25 bp, Homo sapiens
  source 1..25: mol_type = genomic DNA
ccctggtggtctagtggttaggatt

SEQ ID NO: 10858 - DNA, 26 bp, Homo sapiens
  source 1..26: mol_type = genomic DNA
ccctggtggtctagtggttaggattc

SEQ ID NO: 10859 - DNA, 27 bp, Homo sapiens
  source 1..27: mol_type = genomic DNA
ccctggtggtctagtggttaggattcg

SEQ ID NO: 10860 - DNA, 28 bp, Homo sapiens
  source 1..28: mol_type = genomic DNA
ccctggtggtctagtggttaggattcgg

SEQ ID NO: 10861 - DNA, 29 bp, Homo sapiens
  source 1..29: mol_type = genomic DNA
ccctggtggtctagtggttaggattcggc

SEQ ID NO: 10862 - DNA, 30 bp, Homo sapiens
  source 1..30: mol_type = genomic DNA
ccctggtggtctagtggttaggattcggcg

SEQ ID NO: 10863 - DNA, 31 bp, Homo sapiens
  source 1..31: mol_type = genomic DNA
ccctggtggtctagtggttaggattcggcgc

SEQ ID NO: 10864 - DNA, 32 bp, Homo sapiens
  source 1..32: mol_type = genomic DNA
ccctggtggtctagtggttaggattcggcgct

SEQ ID NO: 10865 - DNA, 33 bp, Homo sapiens
  source 1..33: mol_type = genomic DNA
ccctggtggtctagtggttaggattcggcgctc

SEQ ID NO: 10866 - DNA, 34 bp, Homo sapiens
  source 1..34: mol_type = genomic DNA
ccctggtggtctagtggttaggattcggcgctct

SEQ ID NO: 10867 - DNA, 35 bp, Homo sapiens
  source 1..35: mol_type = genomic DNA
ccctggtggtctagtggttaggattcggcgctctc

SEQ ID NO: 10868 - DNA, 36 bp, Homo sapiens
  source 1..36: mol_type = genomic DNA
ccctggtggtctagtggttaggattcggcgctctca

SEQ ID NO: 10869 - DNA, 37 bp, Homo sapiens
  source 1..37: mol_type = genomic DNA
ccctggtggtctagtggttaggattcggcgctctcac

SEQ ID NO: 10870 - DNA, 38 bp, Homo sapiens
  source 1..38: mol_type = genomic DNA
ccctggtggtctagtggttaggattcggcgctctcacc

SEQ ID NO: 10871 - DNA, 39 bp, Homo sapiens
  source 1..39: mol_type = genomic DNA
ccctggtggtctagtggttaggattcggcgctctcaccg

SEQ ID NO: 10872 - DNA, 41 bp, Homo sapiens
  source 1..41: mol_type = genomic DNA
ccctggtggtctagtggttaggattcggcgctctcaccgcc

SEQ ID NO: 10873 - DNA, 48 bp, Homo sapiens
  source 1..48: mol_type = genomic DNA
ccctggtggtctagtggttaggattcggcgctctcaccgccgcggccc

SEQ ID NO: 10874 - DNA, 28 bp, Homo sapiens
  source 1..28: mol_type = genomic DNA
ccctggttcaaatccgggtgccccctcc

SEQ ID NO: 10875 - DNA, 26 bp, Homo sapiens
  source 1..26: mol_type = genomic DNA
ccctggttcaatcccgggtttcggca

SEQ ID NO: 10876 - DNA, 27 bp, Homo sapiens
  source 1..27: mol_type = genomic DNA
ccctggttcaatcccgggtttcggcac

SEQ ID NO: 10877 - DNA, 29 bp, Homo sapiens
  source 1..29: mol_type = genomic DNA
ccctggttcaatcccgggtttcggcacca

SEQ ID NO: 10878 - DNA, 16 bp, Homo sapiens
  source 1..16: mol_type = genomic DNA
ccctggttcgatcccg

SEQ ID NO: 10879 - DNA, 25 bp, Homo sapiens
  source 1..25: mol_type = genomic DNA
ccctggttcgatcccgggtttcggc

SEQ ID NO: 10880 - DNA, 26 bp, Homo sapiens
  source 1..26: mol_type = genomic DNA
ccctggttcgatcccgggtttcggca

SEQ ID NO: 10881 - DNA, 27 bp, Homo sapiens
  source 1..27: mol_type = genomic DNA
ccctggttcgatcccgggtttcggcac

SEQ ID NO: 10882 - DNA, 28 bp, Homo sapiens
  source 1..28: mol_type = genomic DNA
ccctggttcgatcccgggtttcggcacc

SEQ ID NO: 10883 - DNA, 29 bp, Homo sapiens
  source 1..29: mol_type = genomic DNA
ccctggttcgatcccgggtttcggcacca

SEQ ID NO: 10884 - DNA, 17 bp, Homo sapiens
  source 1..17: mol_type = genomic DNA
ccctgtggtctagtggc

SEQ ID NO: 10885 - DNA, 16 bp, Homo sapiens
  source 1..16: mol_type = genomic DNA
ccctgttcgggcgcca

SEQ ID NO: 10886 - DNA, 16 bp, Homo sapiens
  source 1..16: mol_type = genomic DNA
cccttcccgtactacc

SEQ ID NO: 10887 - DNA, 17 bp, Homo sapiens
  source 1..17: mol_type = genomic DNA
cccttcccgtactacca

SEQ ID NO: 10888 - DNA, 16 bp, Homo sapiens
  source 1..16: mol_type = genomic DNA
cccttcgtggtcgcca

SEQ ID NO: 10889 - DNA, 16 bp, Homo sapiens
  source 1..16: mol_type = genomic DNA
cccttcgtggttgcca

SEQ ID NO: 10890 - DNA, 16 bp, Homo sapiens
  source 1..16: mol_type = genomic DNA
ccgaaaatgttggtta

SEQ ID NO: 10891 - DNA, 17 bp, Homo sapiens
  source 1..17: mol_type = genomic DNA
ccgaaaatgttggttat

SEQ ID NO: 10892 - DNA, 18 bp, Homo sapiens
  source 1..18: mol_type = genomic DNA
ccgaaaatgttggttata

SEQ ID NO: 10893 - DNA, 19 bp, Homo sapiens
  source 1..19: mol_type = genomic DNA
ccgaaaatgttggttatac

SEQ ID NO: 10894 - DNA, 20 bp, Homo sapiens
  source 1..20: mol_type = genomic DNA
ccgaaaatgttggttatacc

SEQ ID NO: 10895 - DNA, 21 bp, Homo sapiens
  source 1..21: mol_type = genomic DNA
ccgaaaatgttggttataccc

SEQ ID NO: 10896 - DNA, 22 bp, Homo sapiens
  source 1..22: mol_type = genomic DNA
ccgaaaatgttggttataccct

SEQ ID NO: 10897 - DNA, 23 bp, Homo sapiens
  source 1..23: mol_type = genomic DNA
ccgaaaatgttggttataccctt

SEQ ID NO: 10898 - DNA, 24 bp, Homo sapiens
  source 1..24: mol_type = genomic DNA
ccgaaaatgttggttatacccttc

SEQ ID NO: 10899 - DNA, 25 bp, Homo sapiens
  source 1..25: mol_type = genomic DNA
ccgaaaatgttggttatacccttcc

SEQ ID NO: 10900 - DNA, 26 bp, Homo sapiens
  source 1..26: mol_type = genomic DNA
ccgaaaatgttggttatacccttccc

SEQ ID NO: 10901 - DNA, 27 bp, Homo sapiens
  source 1..27: mol_type = genomic DNA
ccgaaaatgttggttatacccttcccg

SEQ ID NO: 10902 - DNA, 28 bp, Homo sapiens
  source 1..28: mol_type = genomic DNA
ccgaaaatgttggttatacccttcccgt

SEQ ID NO: 10903 - DNA, 29 bp, Homo sapiens
  source 1..29: mol_type = genomic DNA
ccgaaaatgttggttatacccttcccgta

SEQ ID NO: 10904 - DNA, 30 bp, Homo sapiens
  source 1..30: mol_type = genomic DNA
ccgaaaatgttggttatacccttcccgtac

SEQ ID NO: 10905 - DNA, 31 bp, Homo sapiens
  source 1..31: mol_type = genomic DNA
ccgaaaatgttggttatacccttcccgtact

SEQ ID NO: 10906 - DNA, 32 bp, Homo sapiens
  source 1..32: mol_type = genomic DNA
ccgaaaatgttggttatacccttcccgtacta

SEQ ID NO: 10907 - DNA, 33 bp, Homo sapiens
  source 1..33: mol_type = genomic DNA
ccgaaaatgttggttatacccttcccgtactac

SEQ ID NO: 10908 - DNA, 34 bp, Homo sapiens
  source 1..34: mol_type = genomic DNA
ccgaaaatgttggttatacccttcccgtactacc

SEQ ID NO: 10909 - DNA, 35 bp, Homo sapiens
  source 1..35: mol_type = genomic DNA
ccgaaaatgttggttatacccttcccgtactacca

SEQ ID NO: 10910 - DNA, 37 bp, Homo sapiens
  source 1..37: mol_type = genomic DNA
ccgaaagattggtggttcgagcccacccagggacgcc

SEQ ID NO: 10911 - DNA, 17 bp, Homo sapiens
  source 1..17: mol_type = genomic DNA
ccgaaaggttggtggtt

SEQ ID NO: 10912 - DNA, 18 bp, Homo sapiens
  source 1..18: mol_type = genomic DNA
ccgaaaggttggtggttc

SEQ ID NO: 10913 - DNA, 19 bp, Homo sapiens
  source 1..19: mol_type = genomic DNA
ccgaaaggttggtggttcg

SEQ ID NO: 10914 - DNA, 34 bp, Homo sapiens
  source 1..34: mol_type = genomic DNA
ccgaaaggttggtggttcgagcccacccagggac

SEQ ID NO: 10915 - DNA, 35 bp, Homo sapiens
  source 1..35: mol_type = genomic DNA
ccgaaaggttggtggttcgagcccacccagggacg

SEQ ID NO: 10916 - DNA, 36 bp, Homo sapiens
  source 1..36: mol_type = genomic DNA
ccgaaaggttggtggttcgagcccacccagggacgc

SEQ ID NO: 10917 - DNA, 37 bp, Homo sapiens
  source 1..37: mol_type = genomic DNA
ccgaaaggttggtggttcgagcccacccagggacgcc

SEQ ID NO: 10918 - DNA, 38 bp, Homo sapiens
  source 1..38: mol_type = genomic DNA
ccgaaaggttggtggttcgagcccacccagggacgcca

SEQ ID NO: 10919 - DNA, 37 bp, Homo sapiens
  source 1..37: mol_type = genomic DNA
ccgaaaggttggtggttcgatcccacccagggacgcc

SEQ ID NO: 10920 - DNA, 38 bp, Homo sapiens
  source 1..38: mol_type = genomic DNA
ccgaaaggttggtggttcgatcccacccagggacgcca

SEQ ID NO: 10921 - DNA, 18 bp, Homo sapiens
  source 1..18: mol_type = genomic DNA
ccgaaatagctcagttgg

SEQ ID NO: 10922 - DNA, 22 bp, Homo sapiens
  source 1..22: mol_type = genomic DNA
ccgaaatagctcagttgggaga

SEQ ID NO: 10923 - DNA, 16 bp, Homo sapiens
  source 1..16: mol_type = genomic DNA
ccgaagatcacgggtt

SEQ ID NO: 10924 - DNA, 34 bp, Homo sapiens
  source 1..34: mol_type = genomic DNA
ccgaagatcacgggttcgaaccccgtccgtgcct

SEQ ID NO: 10925 - DNA, 35 bp, Homo sapiens
  source 1..35: mol_type = genomic DNA
ccgaagatcacgggttcgaaccccgtccgtgcctc

SEQ ID NO: 10926 - DNA, 36 bp, Homo sapiens
  source 1..36: mol_type = genomic DNA
ccgaagatcacgggttcgaaccccgtccgtgcctcc

SEQ ID NO: 10927 - DNA, 37 bp, Homo sapiens
  source 1..37: mol_type = genomic DNA
ccgaagatcacgggttcgaaccccgtccgtgcctcca

SEQ ID NO: 10928 - DNA, 16 bp, Homo sapiens
  source 1..16: mol_type = genomic DNA
ccgaagatcgcgggtt

SEQ ID NO: 10929 - DNA, 17 bp, Homo sapiens
  source 1..17: mol_type = genomic DNA
ccgaagatcgcgggttc

SEQ ID NO: 10930 - DNA, 28 bp, Homo sapiens
  source 1..28: mol_type = genomic DNA
ccgaagatcgcgggttcgaaccccgtcc

SEQ ID NO: 10931 - DNA, 31 bp, Homo sapiens
  source 1..31: mol_type = genomic DNA
ccgaagatcgcgggttcgaaccccgtccgtg

SEQ ID NO: 10932 - DNA, 33 bp, Homo sapiens
  source 1..33: mol_type = genomic DNA
ccgaagatcgcgggttcgaaccccgtccgtgcc

SEQ ID NO: 10933 - DNA, 34 bp, Homo sapiens
  source 1..34: mol_type = genomic DNA
ccgaagatcgcgggttcgaaccccgtccgtgcct

SEQ ID NO: 10934 - DNA, 35 bp, Homo sapiens
  source 1..35: mol_type = genomic DNA
ccgaagatcgcgggttcgaaccccgtccgtgcctc

SEQ ID NO: 10935 - DNA, 36 bp, Homo sapiens
  source 1..36: mol_type = genomic DNA
ccgaagatcgcgggttcgaaccccgtccgtgcctcc

SEQ ID NO: 10936 - DNA, 37 bp, Homo sapiens
  source 1..37: mol_type = genomic DNA
ccgaagatcgcgggttcgaaccccgtccgtgcctcca

SEQ ID NO: 10937 - DNA, 33 bp, Homo sapiens
  source 1..33: mol_type = genomic DNA
ccgagaggtcccgggttcaaatcccggacgagc

SEQ ID NO: 10938 - DNA, 35 bp, Homo sapiens
  source 1..35: mol_type = genomic DNA
ccgagaggtcccgggttcaaatcccggacgagccc

SEQ ID NO: 10939 - DNA, 36 bp, Homo sapiens
  source 1..36: mol_type = genomic DNA
ccgagaggtcccgggttcaaatcccggacgagcccc

SEQ ID NO: 10940 - DNA, 37 bp, Homo sapiens
  source 1..37: mol_type = genomic DNA
ccgagaggtcccgggttcaaatcccggacgagccccc

SEQ ID NO: 10941 - DNA, 38 bp, Homo sapiens
  source 1..38: mol_type = genomic DNA
ccgagaggtcccgggttcaaatcccggacgagccccca

SEQ ID NO: 10942 - DNA, 16 bp, Homo sapiens
  source 1..16: mol_type = genomic DNA
ccgagcggtctaaggc

SEQ ID NO: 10943 - DNA, 21 bp, Homo sapiens
  source 1..21: mol_type = genomic DNA
ccgagcggtctaaggcgctgc

SEQ ID NO: 10944 - DNA, 16 bp, Homo sapiens
  source 1..16: mol_type = genomic DNA
ccgaggtgattttcat

SEQ ID NO: 10945 - DNA, 17 bp, Homo sapiens
  source 1..17: mol_type = genomic DNA
ccgaggtgattttcata

SEQ ID NO: 10946 - DNA, 18 bp, Homo sapiens
  source 1..18: mol_type = genomic DNA
ccgaggtgattttcatat

SEQ ID NO: 10947 - DNA, 19 bp, Homo sapiens
  source 1..19: mol_type = genomic DNA
ccgaggtgattttcatatt

SEQ ID NO: 10948 - DNA, 20 bp, Homo sapiens
  source 1..20: mol_type = genomic DNA
ccgaggtgattttcatattg

SEQ ID NO: 10949 - DNA, 21 bp, Homo sapiens
  source 1..21: mol_type = genomic DNA
ccgaggtgattttcatattga

SEQ ID NO: 10950 - DNA, 22 bp, Homo sapiens
  source 1..22: mol_type = genomic DNA
ccgaggtgattttcatattgaa

SEQ ID NO: 10951 - DNA, 23 bp, Homo sapiens
  source 1..23: mol_type = genomic DNA
ccgaggtgattttcatattgaat

SEQ ID NO: 10952 - DNA, 24 bp, Homo sapiens
  source 1..24: mol_type = genomic DNA
ccgaggtgattttcatattgaatt

SEQ ID NO: 10953 - DNA, 25 bp, Homo sapiens
  source 1..25: mol_type = genomic DNA
ccgaggtgattttcatattgaattg

SEQ ID NO: 10954 - DNA, 26 bp, Homo sapiens
  source 1..26: mol_type = genomic DNA
ccgaggtgattttcatattgaattgc

SEQ ID NO: 10955 - DNA, 27 bp, Homo sapiens
  source 1..27: mol_type = genomic DNA
ccgaggtgattttcatattgaattgca

SEQ ID NO: 10956 - DNA, 28 bp, Homo sapiens
  source 1..28: mol_type = genomic DNA
ccgaggtgattttcatattgaattgcaa

SEQ ID NO: 10957 - DNA, 29 bp, Homo sapiens
  source 1..29: mol_type = genomic DNA
ccgaggtgattttcatattgaattgcaaa

SEQ ID NO: 10958 - DNA, 30 bp, Homo sapiens
  source 1..30: mol_type = genomic DNA
ccgaggtgattttcatattgaattgcaaat

SEQ ID NO: 10959 - DNA, 31 bp, Homo sapiens
  source 1..31: mol_type = genomic DNA
ccgaggtgattttcatattgaattgcaaatt

SEQ ID NO: 10960 - DNA, 32 bp, Homo sapiens
  source 1..32: mol_type = genomic DNA
ccgaggtgattttcatattgaattgcaaattc

SEQ ID NO: 10961 - DNA, 33 bp, Homo sapiens
  source 1..33: mol_type = genomic DNA
ccgaggtgattttcatattgaattgcaaattcg

SEQ ID NO: 10962 - DNA, 34 bp, Homo sapiens
  source 1..34: mol_type = genomic DNA
ccgaggtgattttcatattgaattgcaaattcga

SEQ ID NO: 10963 - DNA, 36 bp, Homo sapiens
  source 1..36: mol_type = genomic DNA
ccgaggtgattttcatattgaattgcaaattcgaag

SEQ ID NO: 10964 - DNA, 38 bp, Homo sapiens
  source 1..38: mol_type = genomic DNA
ccgaggtgattttcatattgaattgcaaattcgaagaa

SEQ ID NO: 10965 - DNA, 39 bp, Homo sapiens
  source 1..39: mol_type = genomic DNA
ccgaggtgattttcatattgaattgcaaattcgaagaag

SEQ ID NO: 10966 - DNA, 40 bp, Homo sapiens
  source 1..40: mol_type = genomic DNA
ccgaggtgattttcatattgaattgcaaattcgaagaagc

SEQ ID NO: 10967 - DNA, 45 bp, Homo sapiens
  source 1..45: mol_type = genomic DNA
ccgaggtgattttcatattgaattgcaaattcgaagaagcagctt

SEQ ID NO: 10968 - DNA, 46 bp, Homo sapiens
  source 1..46: mol_type = genomic DNA
ccgaggtgattttcatattgaattgcaaattcgaagaagcagcttc

SEQ ID NO: 10969 - DNA, 16 bp, Homo sapiens
  source 1..16: mol_type = genomic DNA
ccgaggttgtgagttc

SEQ ID NO: 10970 - DNA, 17 bp, Homo sapiens
  source 1..17: mol_type = genomic DNA
ccgaggttgtgagttcg

SEQ ID NO: 10971 - DNA, 35 bp, Homo sapiens
  source 1..35: mol_type = genomic DNA
ccgaggttgtgagttcgagcctcacctggagcacc

SEQ ID NO: 10972 - DNA, 36 bp, Homo sapiens
  source 1..36: mol_type = genomic DNA
ccgaggttgtgagttcgagcctcacctggagcacca

SEQ ID NO: 10973 - DNA, 16 bp, Homo sapiens
  source 1..16: mol_type = genomic DNA
ccgagtcacggcacca

SEQ ID NO: 10974 - DNA, 16 bp, Homo sapiens
  source 1..16: mol_type = genomic DNA
ccgagtggtctaaggc

SEQ ID NO: 10975 - DNA, 25 bp, Homo sapiens
  source 1..25: mol_type = genomic DNA
ccgagtggtctaaggcgccagactc

SEQ ID NO: 10976 - DNA, 26 bp, Homo sapiens
  source 1..26: mol_type = genomic DNA
ccgagttcgagtctcggtggaacctc

SEQ ID NO: 10977 - DNA, 16 bp, Homo sapiens
  source 1..16: mol_type = genomic DNA
ccgcacgttgggcgcc

SEQ ID NO: 10978 - DNA, 16 bp, Homo sapiens
  source 1..16: mol_type = genomic DNA
ccgcagcaacctcggt

SEQ ID NO: 10979 - DNA, 17 bp, Homo sapiens
  source 1..17: mol_type = genomic DNA
ccgcagcaacctcggtt

SEQ ID NO: 10980 - DNA, 18 bp, Homo sapiens
  source 1..18: mol_type = genomic DNA
ccgcagcaacctcggttc

SEQ ID NO: 10981 - DNA, 19 bp, Homo sapiens
  source 1..19: mol_type = genomic DNA
ccgcagcaacctcggttcg

SEQ ID NO: 10982 - DNA, 23 bp, Homo sapiens
  source 1..23: mol_type = genomic DNA
ccgcagcaacctcggttcgaatc

SEQ ID NO: 10983 - DNA, 28 bp, Homo sapiens
  source 1..28: mol_type = genomic DNA
ccgcagcaacctcggttcgaatccgagt

SEQ ID NO: 10984 - DNA, 29 bp, Homo sapiens
  source 1..29: mol_type = genomic DNA
ccgcagcaacctcggttcgaatccgagtc

SEQ ID NO: 10985 - DNA, 32 bp, Homo sapiens
  source 1..32: mol_type = genomic DNA
ccgcagcaacctcggttcgaatccgagtcacg

SEQ ID NO: 10986 - DNA, 33 bp, Homo sapiens
  source 1..33: mol_type = genomic DNA
ccgcagcaacctcggttcgaatccgagtcacgg

SEQ ID NO: 10987 - DNA, 34 bp, Homo sapiens
  source 1..34: mol_type = genomic DNA
ccgcagcaacctcggttcgaatccgagtcacggc

SEQ ID NO: 10988 - DNA, 35 bp, Homo sapiens
  source 1..35: mol_type = genomic DNA
ccgcagcaacctcggttcgaatccgagtcacggca

SEQ ID NO: 10989 - DNA, 36 bp, Homo sapiens
  source 1..36: mol_type = genomic DNA
ccgcagcaacctcggttcgaatccgagtcacggcac

SEQ ID NO: 10990 - DNA, 37 bp, Homo sapiens
  source 1..37: mol_type = genomic DNA
ccgcagcaacctcggttcgaatccgagtcacggcacc

SEQ ID NO: 10991 - DNA, 38 bp, Homo sapiens
  source 1..38: mol_type = genomic DNA
ccgcagcaacctcggttcgaatccgagtcacggcacca

SEQ ID NO: 10992 - DNA, 16 bp, Homo sapiens
  source 1..16: mol_type = genomic DNA
ccgccgcggcccgggt

SEQ ID NO: 10993 - DNA, 17 bp, Homo sapiens
  source 1..17: mol_type = genomic DNA
ccgccgcggcccgggtt

SEQ ID NO: 10994 - DNA, 18 bp, Homo sapiens
  source 1..18: mol_type = genomic DNA
ccgccgcggcccgggttc

SEQ ID NO: 10995 - DNA, 19 bp, Homo sapiens
  source 1..19: mol_type = genomic DNA
ccgccgcggcccgggttcg

SEQ ID NO: 10996 - DNA, 20 bp, Homo sapiens
  source 1..20: mol_type = genomic DNA
ccgccgcggcccgggttcga

SEQ ID NO: 10997 - DNA, 21 bp, Homo sapiens
  source 1..21: mol_type = genomic DNA
ccgccgcggcccgggttcgat

SEQ ID NO: 10998 - DNA, 22 bp, Homo sapiens
  source 1..22: mol_type = genomic DNA
ccgccgcggcccgggttcgatt

SEQ ID NO: 10999 - DNA, 23 bp, Homo sapiens
  source 1..23: mol_type = genomic DNA
ccgccgcggcccgggttcgattc

SEQ ID NO: 11000 - DNA, 24 bp, Homo sapiens
  source 1..24: mol_type = genomic DNA
ccgccgcggcccgggttcgattcc

SEQ ID NO: 11001 - DNA, 25 bp, Homo sapiens
  source 1..25: mol_type = genomic DNA
ccgccgcggcccgggttcgattccc

SEQ ID NO: 11002 - DNA, 26 bp, Homo sapiens
  source 1..26: mol_type = genomic DNA
ccgccgcggcccgggttcgattcccg

SEQ ID NO: 11003 - DNA, 27 bp, Homo sapiens
  source 1..27: mol_type = genomic DNA
ccgccgcggcccgggttcgattcccgg

SEQ ID NO: 11004 - DNA, 32 bp, Homo sapiens
  source 1..32: mol_type = genomic DNA
ccgccgcggcccgggttcgattcccggccagg

SEQ ID NO: 11005 - DNA, 37 bp, Homo sapiens
  source 1..37: mol_type = genomic DNA
ccgccgcggcccgggttcgattcccggccagggaacc

SEQ ID NO: 11006 - DNA, 28 bp, Homo sapiens
  source 1..28: mol_type = genomic DNA
ccgccgcggcccgggttcgattcccggt

SEQ ID NO: 11007 - DNA, 29 bp, Homo sapiens
  source 1..29: mol_type = genomic DNA
ccgccgcggcccgggttcgattcccggtc

SEQ ID NO: 11008 - DNA, 30 bp, Homo sapiens
  source 1..30: mol_type = genomic DNA
ccgccgcggcccgggttcgattcccggtca

SEQ ID NO: 11009 - DNA, 31 bp, Homo sapiens
  source 1..31: mol_type = genomic DNA
ccgccgcggcccgggttcgattcccggtcag

SEQ ID NO: 11010 - DNA, 32 bp, Homo sapiens
  source 1..32: mol_type = genomic DNA
ccgccgcggcccgggttcgattcccggtcagg

SEQ ID NO: 11011 - DNA, 33 bp, Homo sapiens
  source 1..33: mol_type = genomic DNA
ccgccgcggcccgggttcgattcccggtcaggg

SEQ ID NO: 11012 - DNA, 34 bp, Homo sapiens
  source 1..34: mol_type = genomic DNA
ccgccgcggcccgggttcgattcccggtcaggga

SEQ ID NO: 11013 - DNA, 35 bp, Homo sapiens
  source 1..35: mol_type = genomic DNA
ccgccgcggcccgggttcgattcccggtcagggaa

SEQ ID NO: 11014 - DNA, 36 bp, Homo sapiens
  source 1..36: mol_type = genomic DNA
ccgccgcggcccgggttcgattcccggtcagggaac

SEQ ID NO: 11015 - DNA, 37 bp, Homo sapiens
  source 1..37: mol_type = genomic DNA
ccgccgcggcccgggttcgattcccggtcagggaacc

SEQ ID NO: 11016 - DNA, 38 bp, Homo sapiens
  source 1..38: mol_type = genomic DNA
ccgccgcggcccgggttcgattcccggtcagggaacca

SEQ ID NO: 11017 - DNA, 27 bp, Homo sapiens
  source 1..27: mol_type = genomic DNA
ccgcctgtcacgcgggagaccggggtt

SEQ ID NO: 11018 - DNA, 46 bp, Homo sapiens
  source 1..46: mol_type = genomic DNA
ccgcctgtcacgcgggagaccggggttcaattccccgacggggagc

SEQ ID NO: 11019 - DNA, 47 bp, Homo sapiens
  source 1..47: mol_type = genomic DNA
ccgcctgtcacgcgggagaccggggttcaattccccgacggggagcc

SEQ ID NO: 11020 - DNA, 48 bp, Homo sapiens
  source 1..48: mol_type = genomic DNA
ccgcctgtcacgcgggagaccggggttcaattccccgacggggagcca

SEQ ID NO: 11021 - DNA, 42 bp, Homo sapiens
  source 1..42: mol_type = genomic DNA
ccgcctgtcacgcgggagaccggggttcgattccccgacggg

SEQ ID NO: 11022 - DNA, 43 bp, Homo sapiens
  source 1..43: mol_type = genomic DNA
ccgcctgtcacgcgggagaccggggttcgattccccgacgggg

SEQ ID NO: 11023 - DNA, 45 bp, Homo sapiens
  source 1..45: mol_type = genomic DNA
ccgcctgtcacgcgggagaccggggttcgattccccgacggggag

SEQ ID NO: 11024 - DNA, 46 bp, Homo sapiens
  source 1..46: mol_type = genomic DNA
ccgcctgtcacgcgggagaccggggttcgattccccgacggggagc

SEQ ID NO: 11025 - DNA, 47 bp, Homo sapiens
  source 1..47: mol_type = genomic DNA
ccgcctgtcacgcgggagaccggggttcgattccccgacggggagcc

SEQ ID NO: 11026 - DNA, 48 bp, Homo sapiens
  source 1..48: mol_type = genomic DNA
ccgcctgtcacgcgggagaccggggttcgattccccgacggggagcca

SEQ ID NO: 11027 - DNA, 17 bp, Homo sapiens
  source 1..17: mol_type = genomic DNA
ccgcgcaggttcgaacc

SEQ ID NO: 11028 - DNA, 19 bp, Homo sapiens
  source 1..19: mol_type = genomic DNA
ccgcgcaggttcgaaccct

SEQ ID NO: 11029 - DNA, 20 bp, Homo sapiens
  source 1..20: mol_type = genomic DNA
ccgcgcaggttcgaaccctg

SEQ ID NO: 11030 - DNA, 18 bp, Homo sapiens
  source 1..18: mol_type = genomic DNA
ccgcgcaggttcgaatcc

SEQ ID NO: 11031 - DNA, 20 bp, Homo sapiens
  source 1..20: mol_type = genomic DNA
ccgcgcaggttcgaatcctg

SEQ ID NO: 11032 - DNA, 32 bp, Homo sapiens
  source 1..32: mol_type = genomic DNA
ccgcgcaggttcgaatcctgccgactacgcca

SEQ ID NO: 11033 - DNA, 16 bp, Homo sapiens
  source 1..16: mol_type = genomic DNA
ccgcggcccgggttcg

SEQ ID NO: 11034 - DNA, 17 bp, Homo sapiens
  source 1..17: mol_type = genomic DNA
ccgcggcccgggttcga

SEQ ID NO: 11035 - DNA, 18 bp, Homo sapiens
  source 1..18: mol_type = genomic DNA
ccgcggcccgggttcgat

SEQ ID NO: 11036 - DNA, 20 bp, Homo sapiens
  source 1..20: mol_type = genomic DNA
ccgcggcccgggttcgattc

SEQ ID NO: 11037 - DNA, 22 bp, Homo sapiens
  source 1..22: mol_type = genomic DNA
ccgcggcccgggttcgattccc

SEQ ID NO: 11038 - DNA, 23 bp, Homo sapiens
  source 1..23: mol_type = genomic DNA
ccgcggcccgggttcgattcccg

SEQ ID NO: 11039 - DNA, 24 bp, Homo sapiens
  source 1..24: mol_type = genomic DNA
ccgcggcccgggttcgattcccgg

SEQ ID NO: 11040 - DNA, 25 bp, Homo sapiens
  source 1..25: mol_type = genomic DNA
ccgcggcccgggttcgattcccggt

SEQ ID NO: 11041 - DNA, 26 bp, Homo sapiens
  source 1..26: mol_type = genomic DNA
ccgcggcccgggttcgattcccggtc

SEQ ID NO: 11042 - DNA, 27 bp, Homo sapiens
  source 1..27: mol_type = genomic DNA
ccgcggcccgggttcgattcccggtca

SEQ ID NO: 11043 - DNA, 28 bp, Homo sapiens
  source 1..28: mol_type = genomic DNA
ccgcggcccgggttcgattcccggtcag

SEQ ID NO: 11044 - DNA, 29 bp, Homo sapiens
  source 1..29: mol_type = genomic DNA
ccgcggcccgggttcgattcccggtcagg

SEQ ID NO: 11045 - DNA, 30 bp, Homo sapiens
  source 1..30: mol_type = genomic DNA
ccgcggcccgggttcgattcccggtcaggg

SEQ ID NO: 11046 - DNA, 32 bp, Homo sapiens
  source 1..32: mol_type = genomic DNA
ccgcggcccgggttcgattcccggtcagggaa

SEQ ID NO: 11047 - DNA, 33 bp, Homo sapiens
  source 1..33: mol_type = genomic DNA
ccgcggcccgggttcgattcccggtcagggaac

SEQ ID NO: 11048 - DNA, 34 bp, Homo sapiens
  source 1..34: mol_type = genomic DNA
ccgcggcccgggttcgattcccggtcagggaacc

SEQ ID NO: 11049 - DNA, 35 bp, Homo sapiens
  source 1..35: mol_type = genomic DNA
ccgcggcccgggttcgattcccggtcagggaacca

SEQ ID NO: 11050 - DNA, 17 bp, Homo sapiens
  source 1..17: mol_type = genomic DNA
ccgcgtggcctaatgga

SEQ ID NO: 11051 - DNA, 21 bp, Homo sapiens
  source 1..21: mol_type = genomic DNA
ccgcgtggcctaatggataag

SEQ ID NO: 11052 - DNA, 28 bp, Homo sapiens
  source 1..28: mol_type = genomic DNA
ccgcgtggcctaatggataaggcgtctg

SEQ ID NO: 11053 - DNA, 31 bp, Homo sapiens
  source 1..31: mol_type = genomic DNA
ccgcgtggcctaatggataaggcgtctgact

SEQ ID NO: 11054 - DNA, 33 bp, Homo sapiens
  source 1..33: mol_type = genomic DNA
ccgcgtggcctaatggataaggcgtctgacttc

SEQ ID NO: 11055 - DNA, 34 bp, Homo sapiens
  source 1..34: mol_type = genomic DNA
ccgcgtggcctaatggataaggcgtctgacttcg

SEQ ID NO: 11056 - DNA, 34 bp, Homo sapiens
  source 1..34: mol_type = genomic DNA
ccgcgtggcctaatggataaggcgtctgattccg

SEQ ID NO: 11057 - DNA, 26 bp, Homo sapiens
  source 1..26: mol_type = genomic DNA
ccgcgtgggttcgaaccccactcctg

SEQ ID NO: 11058 - DNA, 30 bp, Homo sapiens
  source 1..30: mol_type = genomic DNA
ccgcgtgggttcgaaccccactcctggtac

SEQ ID NO: 11059 - DNA, 31 bp, Homo sapiens
  source 1..31: mol_type = genomic DNA
ccgcgtgggttcgaaccccactcctggtacc

SEQ ID NO: 11060 - DNA, 19 bp, Homo sapiens
  source 1..19: mol_type = genomic DNA
ccgctggtgtagtggtatc

SEQ ID NO: 11061 - DNA, 20 bp, Homo sapiens
  source 1..20: mol_type = genomic DNA
ccgctggtgtagtggtatca

SEQ ID NO: 11062 - DNA, 22 bp, Homo sapiens
  source 1..22: mol_type = genomic DNA
ccgctggtgtagtggtatcatg

SEQ ID NO: 11063 - DNA, 23 bp, Homo sapiens
  source 1..23: mol_type = genomic DNA
ccgctggtgtagtggtatcatgc

SEQ ID NO: 11064 - DNA, 24 bp, Homo sapiens
  source 1..24: mol_type = genomic DNA
ccgctggtgtagtggtatcatgca

SEQ ID NO: 11065 - DNA, 25 bp, Homo sapiens
  source 1..25: mol_type = genomic DNA
ccgctggtgtagtggtatcatgcaa

SEQ ID NO: 11066 - DNA, 26 bp, Homo sapiens
  source 1..26: mol_type = genomic DNA
ccgctggtgtagtggtatcatgcaag

SEQ ID NO: 11067 - DNA, 27 bp, Homo sapiens
  source 1..27: mol_type = genomic DNA
ccgctggtgtagtggtatcatgcaaga

SEQ ID NO: 11068 - DNA, 28 bp, Homo sapiens
  source 1..28: mol_type = genomic DNA
ccgctggtgtagtggtatcatgcaagat

SEQ ID NO: 11069 - DNA, 29 bp, Homo sapiens
  source 1..29: mol_type = genomic DNA
ccgctggtgtagtggtatcatgcaagatt

SEQ ID NO: 11070 - DNA, 30 bp, Homo sapiens
  source 1..30: mol_type = genomic DNA
ccgctggtgtagtggtatcatgcaagattc

SEQ ID NO: 11071 - DNA, 31 bp, Homo sapiens
  source 1..31: mol_type = genomic DNA
ccgctggtgtagtggtatcatgcaagattcc

SEQ ID NO: 11072 - DNA, 32 bp, Homo sapiens
  source 1..32: mol_type = genomic DNA
ccgctggtgtagtggtatcatgcaagattccc

SEQ ID NO: 11073 - DNA, 33 bp, Homo sapiens
  source 1..33: mol_type = genomic DNA
ccgctggtgtagtggtatcatgcaagattccca

SEQ ID NO: 11074 - DNA, 34 bp, Homo sapiens
  source 1..34: mol_type = genomic DNA
ccgctggtgtagtggtatcatgcaagattcccat

SEQ ID NO: 11075 - DNA, 36 bp, Homo sapiens
  source 1..36: mol_type = genomic DNA
ccgctggtgtagtggtatcatgcaagattcccattc

SEQ ID NO: 11076 - DNA, 37 bp, Homo sapiens
  source 1..37: mol_type = genomic DNA
ccgctggtgtagtggtatcatgcaagattcccattct

SEQ ID NO: 11077 - DNA, 39 bp, Homo sapiens
  source 1..39: mol_type = genomic DNA
ccgctggtgtagtggtatcatgcaagattcccattcttg

SEQ ID NO: 11078 - DNA, 41 bp, Homo sapiens
  source 1..41: mol_type = genomic DNA
ccgctggtgtagtggtatcatgcaagattcccattcttgcg

SEQ ID NO: 11079 - DNA, 46 bp, Homo sapiens
  source 1..46: mol_type = genomic DNA
ccgctggtgtagtggtatcatgcaagattcccattcttgcgacccg

SEQ ID NO: 11080 - DNA, 47 bp, Homo sapiens
  source 1..47: mol_type = genomic DNA
ccgctggtgtagtggtatcatgcaagattcccattcttgcgacccgg

SEQ ID NO: 11081 - DNA, 48 bp, Homo sapiens
  source 1..48: mol_type = genomic DNA
ccgctggtgtagtggtatcatgcaagattcccattcttgcgacccggg

SEQ ID NO: 11082 - DNA, 16 bp, Homo sapiens
  source 1..16: mol_type = genomic DNA
ccggagatgaaaacct

SEQ ID NO: 11083 - DNA, 17 bp, Homo sapiens
  source 1..17: mol_type = genomic DNA
ccggagatgaaaacctt

SEQ ID NO: 11084 - DNA, 18 bp, Homo sapiens
  source 1..18: mol_type = genomic DNA
ccggagatgaaaaccttt

SEQ ID NO: 11085 - DNA, 19 bp, Homo sapiens
  source 1..19: mol_type = genomic DNA
ccggagatgaaaacctttt

SEQ ID NO: 11086 - DNA, 20 bp, Homo sapiens
  source 1..20: mol_type = genomic DNA
ccggagatgaaaaccttttt

SEQ ID NO: 11087 - DNA, 21 bp, Homo sapiens
  source 1..21: mol_type = genomic DNA
ccggagatgaaaacctttttc

SEQ ID NO: 11088 - DNA, 22 bp, Homo sapiens
  source 1..22: mol_type = genomic DNA
ccggagatgaaaacctttttcc

SEQ ID NO: 11089 - DNA, 23 bp, Homo sapiens
  source 1..23: mol_type = genomic DNA
ccggagatgaaaacctttttcca

SEQ ID NO: 11090 - DNA, 24 bp, Homo sapiens
  source 1..24: mol_type = genomic DNA
ccggagatgaaaacctttttccaa

SEQ ID NO: 11091 - DNA, 25 bp, Homo sapiens
  source 1..25: mol_type = genomic DNA
ccggagatgaaaacctttttccaag

SEQ ID NO: 11092 - DNA, 26 bp, Homo sapiens
  source 1..26: mol_type = genomic DNA
ccggagatgaaaacctttttccaagg

SEQ ID NO: 11093 - DNA, 27 bp, Homo sapiens
  source 1..27: mol_type = genomic DNA
ccggagatgaaaacctttttccaagga

SEQ ID NO: 11094 - DNA, 28 bp, Homo sapiens
  source 1..28: mol_type = genomic DNA
ccggagatgaaaacctttttccaaggac

SEQ ID NO: 11095 - DNA, 29 bp, Homo sapiens
  source 1..29: mol_type = genomic DNA
ccggagatgaaaacctttttccaaggaca

SEQ ID NO: 11096 - DNA, 30 bp, Homo sapiens
  source 1..30: mol_type = genomic DNA
ccggagatgaaaacctttttccaaggacac

SEQ ID NO: 11097 - DNA, 31 bp, Homo sapiens
  source 1..31: mol_type = genomic DNA
ccggagatgaaaacctttttccaaggacacc

SEQ ID NO: 11098 - DNA, 32 bp, Homo sapiens
  source 1..32: mol_type = genomic DNA
ccggagatgaaaacctttttccaaggacacca

SEQ ID NO: 11099 - DNA, 17 bp, Homo sapiens
  source 1..17: mol_type = genomic DNA
ccggagctggggattgt

SEQ ID NO: 11100 - DNA, 31 bp, Homo sapiens
  source 1..31: mol_type = genomic DNA
ccggagctggggattgtgggttcgagtccca

SEQ ID NO: 11101 - DNA, 33 bp, Homo sapiens
  source 1..33: mol_type = genomic DNA
ccggagctggggattgtgggttcgagtcccatc

SEQ ID NO: 11102 - DNA, 16 bp, Homo sapiens
  source 1..16: mol_type = genomic DNA
ccggatagctcagtcg

SEQ ID NO: 11103 - DNA, 17 bp, Homo sapiens
  source 1..17: mol_type = genomic DNA
ccggatagctcagtcgg

SEQ ID NO: 11104 - DNA, 18 bp, Homo sapiens
  source 1..18: mol_type = genomic DNA
ccggatagctcagtcggt

SEQ ID NO: 11105 - DNA, 19 bp, Homo sapiens
  source 1..19: mol_type = genomic DNA
ccggatagctcagtcggta

SEQ ID NO: 11106 - DNA, 20 bp, Homo sapiens
  source 1..20: mol_type = genomic DNA
ccggatagctcagtcggtag

SEQ ID NO: 11107 - DNA, 21 bp, Homo sapiens
  source 1..21: mol_type = genomic DNA
ccggatagctcagtcggtaga

SEQ ID NO: 11108 - DNA, 22 bp, Homo sapiens
  source 1..22: mol_type = genomic DNA
ccggatagctcagtcggtagag

SEQ ID NO: 11109 - DNA, 23 bp, Homo sapiens
  source 1..23: mol_type = genomic DNA
ccggatagctcagtcggtagagc

SEQ ID NO: 11110 - DNA, 24 bp, Homo sapiens
  source 1..24: mol_type = genomic DNA
ccggatagctcagtcggtagagca

SEQ ID NO: 11111 - DNA, 25 bp, Homo sapiens
  source 1..25: mol_type = genomic DNA
ccggatagctcagtcggtagagcat

SEQ ID NO: 11112 - DNA, 26 bp, Homo sapiens
  source 1..26: mol_type = genomic DNA
ccggatagctcagtcggtagagcatc

SEQ ID NO: 11113 - DNA, 27 bp, Homo sapiens
  source 1..27: mol_type = genomic DNA
ccggatagctcagtcggtagagcatca

SEQ ID NO: 11114 - DNA, 28 bp, Homo sapiens
  source 1..28: mol_type = genomic DNA
ccggatagctcagtcggtagagcatcag

SEQ ID NO: 11115 - DNA, 29 bp, Homo sapiens
  source 1..29: mol_type = genomic DNA
ccggatagctcagtcggtagagcatcaga

SEQ ID NO: 11116 - DNA, 30 bp, Homo sapiens
  source 1..30: mol_type = genomic DNA
ccggatagctcagtcggtagagcatcagac

SEQ ID NO: 11117 - DNA, 31 bp, Homo sapiens
  source 1..31: mol_type = genomic DNA
ccggatagctcagtcggtagagcatcagact

SEQ ID NO: 11118 - DNA, 32 bp, Homo sapiens
  source 1..32: mol_type = genomic DNA
ccggatagctcagtcggtagagcatcagactt

SEQ ID NO: 11119 - DNA, 33 bp, Homo sapiens
  source 1..33: mol_type = genomic DNA
ccggatagctcagtcggtagagcatcagacttt

SEQ ID NO: 11120 - DNA, 34 bp, Homo sapiens
  source 1..34: mol_type = genomic DNA
ccggatagctcagtcggtagagcatcagactttt

SEQ ID NO: 11121 - DNA, 39 bp, Homo sapiens
  source 1..39: mol_type = genomic DNA
ccggatagctcagtcggtagagcatcagacttttaatct

SEQ ID NO: 11122 - DNA, 16 bp, Homo sapiens
  source 1..16: mol_type = genomic DNA
ccggatcagaagattg

SEQ ID NO: 11123 - DNA, 17 bp, Homo sapiens
  source 1..17: mol_type = genomic DNA
ccggatcagaagattga

SEQ ID NO: 11124 - DNA, 18 bp, Homo sapiens
  source 1..18: mol_type = genomic DNA
ccggatcagaagattgag

SEQ ID NO: 11125 - DNA, 19 bp, Homo sapiens
  source 1..19: mol_type = genomic DNA
ccggatcagaagattgagg

SEQ ID NO: 11126 - DNA, 20 bp, Homo sapiens
  source 1..20: mol_type = genomic DNA
ccggatcagaagattgaggg

SEQ ID NO: 11127 - DNA, 21 bp, Homo sapiens
  source 1..21: mol_type = genomic DNA
ccggatcagaagattgagggt

SEQ ID NO: 11128 - DNA, 22 bp, Homo sapiens
  source 1..22: mol_type = genomic DNA
ccggatcagaagattgagggtt

SEQ ID NO: 11129 - DNA, 23 bp, Homo sapiens
  source 1..23: mol_type = genomic DNA
ccggatcagaagattgagggttc

SEQ ID NO: 11130 - DNA, 24 bp, Homo sapiens
  source 1..24: mol_type = genomic DNA
ccggatcagaagattgagggttcg

SEQ ID NO: 11131 - DNA, 30 bp, Homo sapiens
  source 1..30: mol_type = genomic DNA
ccggatcagaagattgagggttcgagtccc

SEQ ID NO: 11132 - DNA, 31 bp, Homo sapiens
  source 1..31: mol_type = genomic DNA
ccggatcagaagattgagggttcgagtccct

SEQ ID NO: 11133 - DNA, 42 bp, Homo sapiens
  source 1..42: mol_type = genomic DNA
ccggatcagaagattgagggttcgagtcccttcgtggtcgcc

SEQ ID NO: 11134 - DNA, 16 bp, Homo sapiens
  source 1..16: mol_type = genomic DNA
ccggatggaggcgtgg

SEQ ID NO: 11135 - DNA, 17 bp, Homo sapiens
  source 1..17: mol_type = genomic DNA
ccggatggaggcgtggg

SEQ ID NO: 11136 - DNA, 18 bp, Homo sapiens
  source 1..18: mol_type = genomic DNA
ccggatggaggcgtgggt

SEQ ID NO: 11137 - DNA, 19 bp, Homo sapiens
  source 1..19: mol_type = genomic DNA
ccggatggaggcgtgggtt

SEQ ID NO: 11138 - DNA, 20 bp, Homo sapiens
  source 1..20: mol_type = genomic DNA
ccggatggaggcgtgggttc

SEQ ID NO: 11139 - DNA, 21 bp, Homo sapiens
  source 1..21: mol_type = genomic DNA
ccggatggaggcgtgggttcg

SEQ ID NO: 11140 - DNA, 28 bp, Homo sapiens
  source 1..28: mol_type = genomic DNA
ccggatggaggcgtgggttcgaatccca

SEQ ID NO: 11141 - DNA, 30 bp, Homo sapiens
  source 1..30: mol_type = genomic DNA
ccggatggaggcgtgggttcgaatcccact

SEQ ID NO: 11142 - DNA, 34 bp, Homo sapiens
  source 1..34: mol_type = genomic DNA
ccggatggaggcgtgggttcgaatcccacttctg

SEQ ID NO: 11143 - DNA, 37 bp, Homo sapiens
  source 1..37: mol_type = genomic DNA
ccggatggaggcgtgggttcgaatcccacttctgaca

SEQ ID NO: 11144 - DNA, 38 bp, Homo sapiens
  source 1..38: mol_type = genomic DNA
ccggatggaggcgtgggttcgaatcccacttctgacac

SEQ ID NO: 11145 - DNA, 39 bp, Homo sapiens
  source 1..39: mol_type = genomic DNA
ccggatggaggcgtgggttcgaatcccacttctgacacc

SEQ ID NO: 11146 - DNA, 16 bp, Homo sapiens
  source 1..16: mol_type = genomic DNA
ccggctagctcagtcg

SEQ ID NO: 11147 - DNA, 32 bp, Homo sapiens
  source 1..32: mol_type = genomic DNA
ccggctagctcagtcgatagagcatgagactc

SEQ ID NO: 11148 - DNA, 17 bp, Homo sapiens
  source 1..17: mol_type = genomic DNA
ccggctagctcagtcgg

SEQ ID NO: 11149 - DNA, 20 bp, Homo sapiens
  source 1..20: mol_type = genomic DNA
ccggctagctcagtcggtag

SEQ ID NO: 11150 - DNA, 21 bp, Homo sapiens
  source 1..21: mol_type = genomic DNA
ccggctagctcagtcggtaga

SEQ ID NO: 11151 - DNA, 22 bp, Homo sapiens
  source 1..22: mol_type = genomic DNA
ccggctagctcagtcggtagag

SEQ ID NO: 11152 - DNA, 23 bp, Homo sapiens
  source 1..23: mol_type = genomic DNA
ccggctagctcagtcggtagagc

SEQ ID NO: 11153 - DNA, 24 bp, Homo sapiens
  source 1..24: mol_type = genomic DNA
ccggctagctcagtcggtagagca

SEQ ID NO: 11154 - DNA, 25 bp, Homo sapiens
  source 1..25: mol_type = genomic DNA
ccggctagctcagtcggtagagcat

SEQ ID NO: 11155 - DNA, 26 bp, Homo sapiens
  source 1..26: mol_type = genomic DNA
ccggctagctcagtcggtagagcatg

SEQ ID NO: 11156 - DNA, 27 bp, Homo sapiens
  source 1..27: mol_type = genomic DNA
ccggctagctcagtcggtagagcatga

SEQ ID NO: 11157 - DNA, 28 bp, Homo sapiens
  source 1..28: mol_type = genomic DNA
ccggctagctcagtcggtagagcatgag

SEQ ID NO: 11158 - DNA, 29 bp, Homo sapiens
  source 1..29: mol_type = genomic DNA
ccggctagctcagtcggtagagcatgaga

SEQ ID NO: 11159 - DNA, 30 bp, Homo sapiens
  source 1..30: mol_type = genomic DNA
ccggctagctcagtcggtagagcatgagac

SEQ ID NO: 11160 - DNA, 31 bp, Homo sapiens
  source 1..31: mol_type = genomic DNA
ccggctagctcagtcggtagagcatgagacc

SEQ ID NO: 11161 - DNA, 32 bp, Homo sapiens
  source 1..32: mol_type = genomic DNA
ccggctagctcagtcggtagagcatgagaccc

SEQ ID NO: 11162 - DNA, 33 bp, Homo sapiens
  source 1..33: mol_type = genomic DNA
ccggctagctcagtcggtagagcatgagaccct

SEQ ID NO: 11163 - DNA, 34 bp, Homo sapiens
  source 1..34: mol_type = genomic DNA
ccggctagctcagtcggtagagcatgagaccctt

SEQ ID NO: 11164 - DNA, 39 bp, Homo sapiens
  source 1..39: mol_type = genomic DNA
ccggctagctcagtcggtagagcatgagacccttaatct

SEQ ID NO: 11165 - DNA, 31 bp, Homo sapiens
  source 1..31: mol_type = genomic DNA
ccggctagctcagtcggtagagcatgagact

SEQ ID NO: 11166 - DNA, 32 bp, Homo sapiens
  source 1..32: mol_type = genomic DNA
ccggctagctcagtcggtagagcatgagactc

SEQ ID NO: 11167 - DNA, 33 bp, Homo sapiens
  source 1..33: mol_type = genomic DNA
ccggctagctcagtcggtagagcatgagactct

SEQ ID NO: 11168 - DNA, 34 bp, Homo sapiens
  source 1..34: mol_type = genomic DNA
ccggctagctcagtcggtagagcatgagactctt

SEQ ID NO: 11169 - DNA, 35 bp, Homo sapiens
  source 1..35: mol_type = genomic DNA
ccggctagctcagtcggtagagcatgagactctta

SEQ ID NO: 11170 - DNA, 36 bp, Homo sapiens
  source 1..36: mol_type = genomic DNA
ccggctagctcagtcggtagagcatgagactcttaa

SEQ ID NO: 11171 - DNA, 37 bp, Homo sapiens
  source 1..37: mol_type = genomic DNA
ccggctagctcagtcggtagagcatgagactcttaat

SEQ ID NO: 11172 - DNA, 38 bp, Homo sapiens
  source 1..38: mol_type = genomic DNA
ccggctagctcagtcggtagagcatgagactcttaatc

SEQ ID NO: 11173 - DNA, 39 bp, Homo sapiens
  source 1..39: mol_type = genomic DNA
ccggctagctcagtcggtagagcatgagactcttaatct

SEQ ID NO: 11174 - DNA, 40 bp, Homo sapiens
  source 1..40: mol_type = genomic DNA
ccggctagctcagtcggtagagcatgagactcttaatctc

SEQ ID NO: 11175 - DNA, 41 bp, Homo sapiens
  source 1..41: mol_type = genomic DNA
ccggctagctcagtcggtagagcatgagactcttaatctca

SEQ ID NO: 11176 - DNA, 27 bp, Homo sapiens
  source 1..27: mol_type = genomic DNA
ccggctagctcagtcggtagagcatgg

SEQ ID NO: 11177 - DNA, 28 bp, Homo sapiens
  source 1..28: mol_type = genomic DNA
ccggctagctcagtcggtagagcatggg

SEQ ID NO: 11178 - DNA, 29 bp, Homo sapiens
  source 1..29: mol_type = genomic DNA
ccggctagctcagtcggtagagcatggga

SEQ ID NO: 11179 - DNA, 30 bp, Homo sapiens
  source 1..30: mol_type = genomic DNA
ccggctagctcagtcggtagagcatgggac

SEQ ID NO: 11180 - DNA, 31 bp, Homo sapiens
  source 1..31: mol_type = genomic DNA
ccggctagctcagtcggtagagcatgggact

SEQ ID NO: 11181 - DNA, 32 bp, Homo sapiens
  source 1..32: mol_type = genomic DNA
ccggctagctcagtcggtagagcatgggactc

SEQ ID NO: 11182 - DNA, 33 bp, Homo sapiens
  source 1..33: mol_type = genomic DNA
ccggctagctcagtcggtagagcatgggactct

SEQ ID NO: 11183 - DNA, 34 bp, Homo sapiens
  source 1..34: mol_type = genomic DNA
ccggctagctcagtcggtagagcatgggactctt

SEQ ID NO: 11184 - DNA, 35 bp, Homo sapiens
  source 1..35: mol_type = genomic DNA
ccggctagctcagtcggtagagcatgggactctta

SEQ ID NO: 11185 - DNA, 36 bp, Homo sapiens
  source 1..36: mol_type = genomic DNA
ccggctagctcagtcggtagagcatgggactcttaa

SEQ ID NO: 11186 - DNA, 37 bp, Homo sapiens
  source 1..37: mol_type = genomic DNA
ccggctagctcagtcggtagagcatgggactcttaat

SEQ ID NO: 11187 - DNA, 38 bp, Homo sapiens
  source 1..38: mol_type = genomic DNA
ccggctagctcagtcggtagagcatgggactcttaatc

SEQ ID NO: 11188 - DNA, 39 bp, Homo sapiens
  source 1..39: mol_type = genomic DNA
ccggctagctcagtcggtagagcatgggactcttaatcc

SEQ ID NO: 11189 - DNA, 40 bp, Homo sapiens
  source 1..40: mol_type = genomic DNA
ccggctagctcagtcggtagagcatgggactcttaatccc

SEQ ID NO: 11190 - DNA, 41 bp, Homo sapiens
  source 1..41: mol_type = genomic DNA
ccggctagctcagtcggtagagcatgggactcttaatccca

SEQ ID NO: 11191 - DNA, 47 bp, Homo sapiens
  source 1..47: mol_type = genomic DNA
ccggctagctcagtcggtagagcatgggactcttaatcccagggtcg

SEQ ID NO: 11192 - DNA, 39 bp, Homo sapiens
  source 1..39: mol_type = genomic DNA
ccggctagctcagtcggtagagcatgggactcttaatct

SEQ ID NO: 11193 - DNA, 16 bp, Homo sapiens
  source 1..16: mol_type = genomic DNA
ccggctcgaaggacca

SEQ ID NO: 11194 - DNA, 16 bp, Homo sapiens
  source 1..16: mol_type = genomic DNA
ccggctcggaggacca

SEQ ID NO: 11195 - DNA, 16 bp, Homo sapiens
  source 1..16: mol_type = genomic DNA
ccgggcagaagcacca

SEQ ID NO: 11196 - DNA, 16 bp, Homo sapiens
  source 1..16: mol_type = genomic DNA
ccgggcggaaacacca

SEQ ID NO: 11197 - DNA, 26 bp, Homo sapiens
  source 1..26: mol_type = genomic DNA
ccggggttcaagtccctgttcgggcg

SEQ ID NO: 11198 - DNA, 27 bp, Homo sapiens
  source 1..27: mol_type = genomic DNA
ccggggttcaagtccctgttcgggcgc

SEQ ID NO: 11199 - DNA, 26 bp, Homo sapiens
  source 1..26: mol_type = genomic DNA
ccggggttcaattccccgacggggag

SEQ ID NO: 11200 - DNA, 27 bp, Homo sapiens
  source 1..27: mol_type = genomic DNA
ccggggttcaattccccgacggggagc

SEQ ID NO: 11201 - DNA, 28 bp, Homo sapiens
  source 1..28: mol_type = genomic DNA
ccggggttcaattccccgacggggagcc

SEQ ID NO: 11202 - DNA, 29 bp, Homo sapiens
  source 1..29: mol_type = genomic DNA
ccggggttcaattccccgacggggagcca

SEQ ID NO: 11203 - DNA, 16 bp, Homo sapiens
  source 1..16: mol_type = genomic DNA
ccggggttcgattccc

SEQ ID NO: 11204 - DNA, 23 bp, Homo sapiens
  source 1..23: mol_type = genomic DNA
ccggggttcgattccccgacggg

SEQ ID NO: 11205 - DNA, 24 bp, Homo sapiens
  source 1..24: mol_type = genomic DNA
ccggggttcgattccccgacgggg

SEQ ID NO: 11206 - DNA, 26 bp, Homo sapiens
  source 1..26: mol_type = genomic DNA
ccggggttcgattccccgacggggag

SEQ ID NO: 11207 - DNA, 27 bp, Homo sapiens
  source 1..27: mol_type = genomic DNA
ccggggttcgattccccgacggggagc

SEQ ID NO: 11208 - DNA, 28 bp, Homo sapiens
  source 1..28: mol_type = genomic DNA
ccggggttcgattccccgacggggagcc

SEQ ID NO: 11209 - DNA, 29 bp, Homo sapiens
  source 1..29: mol_type = genomic DNA
ccggggttcgattccccgacggggagcca

SEQ ID NO: 11210 - DNA, 16 bp, Homo sapiens
  source 1..16: mol_type = genomic DNA
ccgggtgccccctcca

SEQ ID NO: 11211 - DNA, 16 bp, Homo sapiens
  source 1..16: mol_type = genomic DNA
ccgggttcgactcccg

SEQ ID NO: 11212 - DNA, 22 bp, Homo sapiens
  source 1..22: mol_type = genomic DNA
ccgggttcgactcccggtgtgg

SEQ ID NO: 11213 - DNA, 26 bp, Homo sapiens
  source 1..26: mol_type = genomic DNA
ccgggttcgactcccggtgtgggaac

SEQ ID NO: 11214 - DNA, 27 bp, Homo sapiens
  source 1..27: mol_type = genomic DNA
ccgggttcgactcccggtgtgggaacc

SEQ ID NO: 11215 - DNA, 28 bp, Homo sapiens
  source 1..28: mol_type = genomic DNA
ccgggttcgactcccggtgtgggaacca

SEQ ID NO: 11216 - DNA, 27 bp, Homo sapiens
  source 1..27: mol_type = genomic DNA
ccgggttcgagtcccggcggagtcgcc

SEQ ID NO: 11217 - DNA, 28 bp, Homo sapiens
  source 1..28: mol_type = genomic DNA
ccgggttcgagtcccggcggagtcgcca

SEQ ID NO: 11218 - DNA, 27 bp, Homo sapiens
  source 1..27: mol_type = genomic DNA
ccgggttcgatccccggcatctccacc

SEQ ID NO: 11219 - DNA, 28 bp, Homo sapiens
  source 1..28: mol_type = genomic DNA
ccgggttcgatccccggcatctccacca

SEQ ID NO: 11220 - DNA, 22 bp, Homo sapiens
  source 1..22: mol_type = genomic DNA
ccgggttcgattcccgggcggc

SEQ ID NO: 11221 - DNA, 23 bp, Homo sapiens
  source 1..23: mol_type = genomic DNA
ccgggttcgattcccgggcggcg

SEQ ID NO: 11222 - DNA, 25 bp, Homo sapiens
  source 1..25: mol_type = genomic DNA
ccgggttcgattcccgggcggcgca

SEQ ID NO: 11223 - DNA, 26 bp, Homo sapiens
  source 1..26: mol_type = genomic DNA
ccgggttcgattcccgggcggcgcac

SEQ ID NO: 11224 - DNA, 27 bp, Homo sapiens
  source 1..27: mol_type = genomic DNA
ccgggttcgattcccgggcggcgcacc

SEQ ID NO: 11225 - DNA, 28 bp, Homo sapiens
  source 1..28: mol_type = genomic DNA
ccgggttcgattcccgggcggcgcacca

SEQ ID NO: 11226 - DNA, 27 bp, Homo sapiens
  source 1..27: mol_type = genomic DNA
ccgggttcgattcccggtcagggaacc

SEQ ID NO: 11227 - DNA, 28 bp, Homo sapiens
  source 1..28: mol_type = genomic DNA
ccgggttcgattcccggtcagggaacca

SEQ ID NO: 11228 - DNA, 16 bp, Homo sapiens
  source 1..16: mol_type = genomic DNA
ccgggtttcggcacca

SEQ ID NO: 11229 - DNA, 16 bp, Homo sapiens
  source 1..16: mol_type = genomic DNA
ccggtaatcgcataaa

SEQ ID NO: 11230 - DNA, 17 bp, Homo sapiens
  source 1..17: mol_type = genomic DNA
ccggtaatcgcataaaa

SEQ ID NO: 11231 - DNA, 18 bp, Homo sapiens
  source 1..18: mol_type = genomic DNA
ccggtaatcgcataaaac

SEQ ID NO: 11232 - DNA, 19 bp, Homo sapiens
  source 1..19: mol_type = genomic DNA
ccggtaatcgcataaaact

SEQ ID NO: 11233 - DNA, 20 bp, Homo sapiens
  source 1..20: mol_type = genomic DNA
ccggtaatcgcataaaactt

SEQ ID NO: 11234 - DNA, 21 bp, Homo sapiens
  source 1..21: mol_type = genomic DNA
ccggtaatcgcataaaactta

SEQ ID NO: 11235 - DNA, 22 bp, Homo sapiens
  source 1..22: mol_type = genomic DNA
ccggtaatcgcataaaacttaa

SEQ ID NO: 11236 - DNA, 23 bp, Homo sapiens
  source 1..23: mol_type = genomic DNA
ccggtaatcgcataaaacttaaa

SEQ ID NO: 11237 - DNA, 24 bp, Homo sapiens
  source 1..24: mol_type = genomic DNA
ccggtaatcgcataaaacttaaaa

SEQ ID NO: 11238 - DNA, 25 bp, Homo sapiens
  source 1..25: mol_type = genomic DNA
ccggtaatcgcataaaacttaaaac

SEQ ID NO: 11239 - DNA, 26 bp, Homo sapiens
  source 1..26: mol_type = genomic DNA
ccggtaatcgcataaaacttaaaact

SEQ ID NO: 11240 - DNA, 27 bp, Homo sapiens
  source 1..27: mol_type = genomic DNA
ccggtaatcgcataaaacttaaaactt

SEQ ID NO: 11241 - DNA, 28 bp, Homo sapiens
  source 1..28: mol_type = genomic DNA
ccggtaatcgcataaaacttaaaacttt

SEQ ID NO: 11242 - DNA, 30 bp, Homo sapiens
  source 1..30: mol_type = genomic DNA
ccggtaatcgcataaaacttaaaactttac

SEQ ID NO: 11243 - DNA, 31 bp, Homo sapiens
  source 1..31: mol_type = genomic DNA
ccggtaatcgcataaaacttaaaactttaca

SEQ ID NO: 11244 - DNA, 32 bp, Homo sapiens
  source 1..32: mol_type = genomic DNA
ccggtaatcgcataaaacttaaaactttacag

SEQ ID NO: 11245 - DNA, 33 bp, Homo sapiens
  source 1..33: mol_type = genomic DNA
ccggtaatcgcataaaacttaaaactttacagt

SEQ ID NO: 11246 - DNA, 34 bp, Homo sapiens
  source 1..34: mol_type = genomic DNA
ccggtaatcgcataaaacttaaaactttacagtc

SEQ ID NO: 11247 - DNA, 35 bp, Homo sapiens
  source 1..35: mol_type = genomic DNA
ccggtaatcgcataaaacttaaaactttacagtca

SEQ ID NO: 11248 - DNA, 36 bp, Homo sapiens
  source 1..36: mol_type = genomic DNA
ccggtaatcgcataaaacttaaaactttacagtcag

SEQ ID NO: 11249 - DNA, 37 bp, Homo sapiens
  source 1..37: mol_type = genomic DNA
ccggtaatcgcataaaacttaaaactttacagtcaga

SEQ ID NO: 11250 - DNA, 38 bp, Homo sapiens
  source 1..38: mol_type = genomic DNA
ccggtaatcgcataaaacttaaaactttacagtcagag

SEQ ID NO: 11251 - DNA, 40 bp, Homo sapiens
  source 1..40: mol_type = genomic DNA
ccggtaatcgcataaaacttaaaactttacagtcagaggt

SEQ ID NO: 11252 - DNA, 42 bp, Homo sapiens
  source 1..42: mol_type = genomic DNA
ccggtaatcgcataaaacttaaaactttacagtcagaggttc

SEQ ID NO: 11253 - DNA, 43 bp, Homo sapiens
  source 1..43: mol_type = genomic DNA
ccggtaatcgcataaaacttaaaactttacagtcagaggttca

SEQ ID NO: 11254 - DNA, 16 bp, Homo sapiens
  source 1..16: mol_type = genomic DNA
ccggtggcctaatgga

SEQ ID NO: 11255 - DNA, 18 bp, Homo sapiens
  source 1..18: mol_type = genomic DNA
ccggttagctcagtcggc

SEQ ID NO: 11256 - DNA, 17 bp, Homo sapiens
  source 1..17: mol_type = genomic DNA
ccggttagctcagttgg

SEQ ID NO: 11257 - DNA, 31 bp, Homo sapiens
  source 1..31: mol_type = genomic DNA
ccggttagctcagttggttagagcgtggtgc

SEQ ID NO: 11258 - DNA, 17 bp, Homo sapiens
  source 1..17: mol_type = genomic DNA
ccggttcaaatccgggt

SEQ ID NO: 11259 - DNA, 17 bp, Homo sapiens
  source 1..17: mol_type = genomic DNA
ccggttcgaaaccgggc

SEQ ID NO: 11260 - DNA, 18 bp, Homo sapiens
  source 1..18: mol_type = genomic DNA
ccggttcgaaaccgggcg

SEQ ID NO: 11261 - DNA, 20 bp, Homo sapiens
  source 1..20: mol_type = genomic DNA
ccggttcgaaaccgggcgga

SEQ ID NO: 11262 - DNA, 22 bp, Homo sapiens
  source 1..22: mol_type = genomic DNA
ccggttcgaaaccgggcggaaa

SEQ ID NO: 11263 - DNA, 23 bp, Homo sapiens
  source 1..23: mol_type = genomic DNA
ccggttcgaaaccgggcggaaac

SEQ ID NO: 11264 - DNA, 24 bp, Homo sapiens
  source 1..24: mol_type = genomic DNA
ccggttcgaaaccgggcggaaaca

SEQ ID NO: 11265 - DNA, 26 bp, Homo sapiens
  source 1..26: mol_type = genomic DNA
ccggttcgaaaccgggcggaaacacc

SEQ ID NO: 11266 - DNA, 17 bp, Homo sapiens
  source 1..17: mol_type = genomic DNA
ccggttcgatcccgggc

SEQ ID NO: 11267 - DNA, 23 bp, Homo sapiens
  source 1..23: mol_type = genomic DNA
ccggttcgatcccgggcggaaac

SEQ ID NO: 11268 - DNA, 17 bp, Homo sapiens
  source 1..17: mol_type = genomic DNA
ccgtagtggagtggtta

SEQ ID NO: 11269 - DNA, 19 bp, Homo sapiens
  source 1..19: mol_type = genomic DNA
ccgtagtggagtggttatc

SEQ ID NO: 11270 - DNA, 28 bp, Homo sapiens
  source 1..28: mol_type = genomic DNA
ccgtagtggagtggttatcacgttcgcc

SEQ ID NO: 11271 - DNA, 29 bp, Homo sapiens
  source 1..29: mol_type = genomic DNA
ccgtagtggagtggttatcacgttcgcct

SEQ ID NO: 11272 - DNA, 19 bp, Homo sapiens
  source 1..19: mol_type = genomic DNA
ccgtagtgtagcggttatc

SEQ ID NO: 11273 - DNA, 24 bp, Homo sapiens
  source 1..24: mol_type = genomic DNA
ccgtagtgtagcggttatcacatt

SEQ ID NO: 11274 - DNA, 28 bp, Homo sapiens
  source 1..28: mol_type = genomic DNA
ccgtagtgtagcggttatcacattcgcc

SEQ ID NO: 11275 - DNA, 29 bp, Homo sapiens
  source 1..29: mol_type = genomic DNA
ccgtagtgtagcggttatcacattcgcct

SEQ ID NO: 11276 - DNA, 30 bp, Homo sapiens
  source 1..30: mol_type = genomic DNA
ccgtagtgtagcggttatcacattcgcctc

SEQ ID NO: 11277 - DNA, 31 bp, Homo sapiens
  source 1..31: mol_type = genomic DNA
ccgtagtgtagcggttatcacattcgcctca

SEQ ID NO: 11278 - DNA, 32 bp, Homo sapiens
  source 1..32: mol_type = genomic DNA
ccgtagtgtagcggttatcacattcgcctcac

SEQ ID NO: 11279 - DNA, 16 bp, Homo sapiens
  source 1..16: mol_type = genomic DNA
ccgtagtgtagtggtc

SEQ ID NO: 11280 - DNA, 18 bp, Homo sapiens
  source 1..18: mol_type = genomic DNA
ccgtagtgtagtggtcat

SEQ ID NO: 11281 - DNA, 19 bp, Homo sapiens
  source 1..19: mol_type = genomic DNA
ccgtagtgtagtggtcatc

SEQ ID NO: 11282 - DNA, 20 bp, Homo sapiens
  source 1..20: mol_type = genomic DNA
ccgtagtgtagtggtcatca

SEQ ID NO: 11283 - DNA, 27 bp, Homo sapiens
  source 1..27: mol_type = genomic DNA
ccgtagtgtagtggtcatcacgttcgc

SEQ ID NO: 11284 - DNA, 28 bp, Homo sapiens
  source 1..28: mol_type = genomic DNA
ccgtagtgtagtggtcatcacgttcgcc

SEQ ID NO: 11285 - DNA, 29 bp, Homo sapiens
  source 1..29: mol_type = genomic DNA
ccgtagtgtagtggtcatcacgttcgcct

SEQ ID NO: 11286 - DNA, 16 bp, Homo sapiens
  source 1..16: mol_type = genomic DNA
ccgtagtgtagtggtt

SEQ ID NO: 11287 - DNA, 18 bp, Homo sapiens
  source 1..18: mol_type = genomic DNA
ccgtagtgtagtggttat

SEQ ID NO: 11288 - DNA, 19 bp, Homo sapiens
  source 1..19: mol_type = genomic DNA
ccgtagtgtagtggttatc

SEQ ID NO: 11289 - DNA, 20 bp, Homo sapiens
  source 1..20: mol_type = genomic DNA
ccgtagtgtagtggttatca

SEQ ID NO: 11290 - DNA, 22 bp, Homo sapiens
  source 1..22: mol_type = genomic DNA
ccgtagtgtagtggttatcacg

SEQ ID NO: 11291 - DNA, 26 bp, Homo sapiens
  source 1..26: mol_type = genomic DNA
ccgtagtgtagtggttatcacgttcg

SEQ ID NO: 11292 - DNA, 27 bp, Homo sapiens
  source 1..27: mol_type = genomic DNA
ccgtagtgtagtggttatcacgttcgc

SEQ ID NO: 11293 - DNA, 28 bp, Homo sapiens
  source 1..28: mol_type = genomic DNA
ccgtagtgtagtggttatcacgttcgcc

SEQ ID NO: 11294 - DNA, 29 bp, Homo sapiens
  source 1..29: mol_type = genomic DNA
ccgtagtgtagtggttatcacgttcgcct

SEQ ID NO: 11295 - DNA, 30 bp, Homo sapiens
  source 1..30: mol_type = genomic DNA
ccgtagtgtagtggttatcacgttcgcctc

SEQ ID NO: 11296 - DNA, 31 bp, Homo sapiens
  source 1..31: mol_type = genomic DNA
ccgtagtgtagtggttatcacgttcgcctca

SEQ ID NO: 11297 - DNA, 32 bp, Homo sapiens
  source 1..32: mol_type = genomic DNA
ccgtagtgtagtggttatcacgttcgcctcac

SEQ ID NO: 11298 - DNA, 33 bp, Homo sapiens
  source 1..33: mol_type = genomic DNA
ccgtagtgtagtggttatcacgttcgcctcaca

SEQ ID NO: 11299 - DNA, 34 bp, Homo sapiens
  source 1..34: mol_type = genomic DNA
ccgtagtgtagtggttatcacgttcgcctcacac

SEQ ID NO: 11300 - DNA, 35 bp, Homo sapiens
  source 1..35: mol_type = genomic DNA
ccgtagtgtagtggttatcacgttcgcctcacacg

SEQ ID NO: 11301 - DNA, 38 bp, Homo sapiens
  source 1..38: mol_type = genomic DNA
ccgtagtgtagtggttatcacgttcgcctcacacgcga

SEQ ID NO: 11302 - DNA, 48 bp, Homo sapiens
  source 1..48: mol_type = genomic DNA
ccgtagtgtagtggttatcacgttcgcctcacacgcgaaaggtccccg

SEQ ID NO: 11303 - DNA, 19 bp, Homo sapiens
  source 1..19: mol_type = genomic DNA
ccgtagtgtagtggttatt

SEQ ID NO: 11304 - DNA, 16 bp, Homo sapiens
  source 1..16: mol_type = genomic DNA
ccgtgatcgtatagtg

SEQ ID NO: 11305 - DNA, 20 bp, Homo sapiens
  source 1..20: mol_type = genomic DNA
ccgtgatcgtatagtggtta

SEQ ID NO: 11306 - DNA, 21 bp, Homo sapiens
  source 1..21: mol_type = genomic DNA
ccgtgatcgtatagtggttag

SEQ ID NO: 11307 - DNA, 22 bp, Homo sapiens
  source 1..22: mol_type = genomic DNA
ccgtgatcgtatagtggttagt

SEQ ID NO: 11308 - DNA, 23 bp, Homo sapiens
  source 1..23: mol_type = genomic DNA
ccgtgatcgtatagtggttagta

SEQ ID NO: 11309 - DNA, 24 bp, Homo sapiens
  source 1..24: mol_type = genomic DNA
ccgtgatcgtatagtggttagtac

SEQ ID NO: 11310 - DNA, 25 bp, Homo sapiens
  source 1..25: mol_type = genomic DNA
ccgtgatcgtatagtggttagtact

SEQ ID NO: 11311 - DNA, 26 bp, Homo sapiens
  source 1..26: mol_type = genomic DNA
ccgtgatcgtatagtggttagtactc

SEQ ID NO: 11312 - DNA, 27 bp, Homo sapiens
  source 1..27: mol_type = genomic DNA
ccgtgatcgtatagtggttagtactct

SEQ ID NO: 11313 - DNA, 28 bp, Homo sapiens
  source 1..28: mol_type = genomic DNA
ccgtgatcgtatagtggttagtactctg

SEQ ID NO: 11314 - DNA, 29 bp, Homo sapiens
  source 1..29: mol_type = genomic DNA
ccgtgatcgtatagtggttagtactctgc

SEQ ID NO: 11315 - DNA, 30 bp, Homo sapiens
  source 1..30: mol_type = genomic DNA
ccgtgatcgtatagtggttagtactctgcg

SEQ ID NO: 11316 - DNA, 31 bp, Homo sapiens
  source 1..31: mol_type = genomic DNA
ccgtgatcgtatagtggttagtactctgcgt

SEQ ID NO: 11317 - DNA, 32 bp, Homo sapiens
  source 1..32: mol_type = genomic DNA
ccgtgatcgtatagtggttagtactctgcgtt

SEQ ID NO: 11318 - DNA, 33 bp, Homo sapiens
  source 1..33: mol_type = genomic DNA
ccgtgatcgtatagtggttagtactctgcgttg

SEQ ID NO: 11319 - DNA, 34 bp, Homo sapiens
  source 1..34: mol_type = genomic DNA
ccgtgatcgtatagtggttagtactctgcgttgt

SEQ ID NO: 11320 - DNA, 35 bp, Homo sapiens
  source 1..35: mol_type = genomic DNA
ccgtgatcgtatagtggttagtactctgcgttgtg

SEQ ID NO: 11321 - DNA, 36 bp, Homo sapiens
  source 1..36: mol_type = genomic DNA
ccgtgatcgtatagtggttagtactctgcgttgtgg

SEQ ID NO: 11322 - DNA, 37 bp, Homo sapiens
  source 1..37: mol_type = genomic DNA
ccgtgatcgtatagtggttagtactctgcgttgtggc

SEQ ID NO: 11323 - DNA, 38 bp, Homo sapiens
  source 1..38: mol_type = genomic DNA
ccgtgatcgtatagtggttagtactctgcgttgtggcc

SEQ ID NO: 11324 - DNA, 39 bp, Homo sapiens
  source 1..39: mol_type = genomic DNA
ccgtgatcgtatagtggttagtactctgcgttgtggccg

SEQ ID NO: 11325 - DNA, 40 bp, Homo sapiens
  source 1..40: mol_type = genomic DNA
ccgtgatcgtatagtggttagtactctgcgttgtggccgc

SEQ ID NO: 11326 - DNA, 41 bp, Homo sapiens
  source 1..41: mol_type = genomic DNA
ccgtgatcgtatagtggttagtactctgcgttgtggccgca

SEQ ID NO: 11327 - DNA, 44 bp, Homo sapiens
  source 1..44: mol_type = genomic DNA
ccgtgatcgtatagtggttagtactctgcgttgtggccgcagca

SEQ ID NO: 11328 - DNA, 47 bp, Homo sapiens
  source 1..47: mol_type = genomic DNA
ccgtgatcgtatagtggttagtactctgcgttgtggccgcagcaacc

SEQ ID NO: 11329 - DNA, 48 bp, Homo sapiens
  source 1..48: mol_type = genomic DNA
ccgtgatcgtatagtggttagtactctgcgttgtggccgcagcaacct

SEQ ID NO: 11330 - DNA, 16 bp, Homo sapiens
  source 1..16: mol_type = genomic DNA
ccgtgcgagaatacca

SEQ ID NO: 11331 - DNA, 25 bp, Homo sapiens
  source 1..25: mol_type = genomic DNA
ccgtggcgcaatggatagcgcattg

SEQ ID NO: 11332 - DNA, 29 bp, Homo sapiens
  source 1..29: mol_type = genomic DNA
ccgtggcgcaatggatagcgcattggact

SEQ ID NO: 11333 - DNA, 32 bp, Homo sapiens
  source 1..32: mol_type = genomic DNA
ccgtggcgcaatggatagcgcattggacttct

SEQ ID NO: 11334 - DNA, 17 bp, Homo sapiens
  source 1..17: mol_type = genomic DNA
ccgttaacttccaatta

SEQ ID NO: 11335 - DNA, 20 bp, Homo sapiens
  source 1..20: mol_type = genomic DNA
ccgttaacttccaattaact

SEQ ID NO: 11336 - DNA, 29 bp, Homo sapiens
  source 1..29: mol_type = genomic DNA
ccgttaacttccaattaactagttttgac

SEQ ID NO: 11337 - DNA, 30 bp, Homo sapiens
  source 1..30: mol_type = genomic DNA
ccgttaacttccaattaactagttttgaca

SEQ ID NO: 11338 - DNA, 31 bp, Homo sapiens
  source 1..31: mol_type = genomic DNA
ccgttaacttccaattaactagttttgacaa

SEQ ID NO: 11339 - DNA, 32 bp, Homo sapiens
  source 1..32: mol_type = genomic DNA
ccgttaacttccaattaactagttttgacaac

SEQ ID NO: 11340 - DNA, 33 bp, Homo sapiens
  source 1..33: mol_type = genomic DNA
ccgttaacttccaattaactagttttgacaaca

SEQ ID NO: 11341 - DNA, 34 bp, Homo sapiens
  source 1..34: mol_type = genomic DNA
ccgttaacttccaattaactagttttgacaacat

SEQ ID NO: 11342 - DNA, 48 bp, Homo sapiens
  source 1..48: mol_type = genomic DNA
ccgttaacttccaattaactagttttgacaacattcaaaaaagagtac

SEQ ID NO: 11343 - DNA, 40 bp, Homo sapiens
  source 1..40: mol_type = genomic DNA
cctaagccagggattgtgggttcgagtcccacccggggta

SEQ ID NO: 11344 - DNA, 42 bp, Homo sapiens
  source 1..42: mol_type = genomic DNA
cctaagccagggattgtgggttcgagtcccacccggggtacc

SEQ ID NO: 11345 - DNA, 42 bp, Homo sapiens
  source 1..42: mol_type = genomic DNA
cctaagccagggattgtgggttcgagtcccacctggggtgcc

SEQ ID NO: 11346 - DNA, 38 bp, Homo sapiens
  source 1..38: mol_type = genomic DNA
cctaagccagggattgtgggttcgagtcccatctgggg

SEQ ID NO: 11347 - DNA, 42 bp, Homo sapiens
  source 1..42: mol_type = genomic DNA
cctaagccagggattgtgggttcgagtcccatctggggtgcc

SEQ ID NO: 11348 - DNA, 43 bp, Homo sapiens
  source 1..43: mol_type = genomic DNA
cctaagccagggattgtgggttcgagtcccatctggggtgcca

SEQ ID NO: 11349 - DNA, 19 bp, Homo sapiens
  source 1..19: mol_type = genomic DNA
cctaatggataaggcactg

SEQ ID NO: 11350 - DNA, 21 bp, Homo sapiens
  source 1..21: mol_type = genomic DNA
cctaatggataaggcactggc

SEQ ID NO: 11351 - DNA, 23 bp, Homo sapiens
  source 1..23: mol_type = genomic DNA
cctaatggataaggcatcagcct

SEQ ID NO: 11352 - DNA, 26 bp, Homo sapiens
  source 1..26: mol_type = genomic DNA
cctaatggataaggcatcagcctccg

SEQ ID NO: 11353 - DNA, 32 bp, Homo sapiens
  source 1..32: mol_type = genomic DNA
cctaatggataaggcatcagcctccggagctg

SEQ ID NO: 11354 - DNA, 19 bp, Homo sapiens
  source 1..19: mol_type = genomic DNA
cctaatggataaggcattg

SEQ ID NO: 11355 - DNA, 21 bp, Homo sapiens
  source 1..21: mol_type = genomic DNA
cctaatggataaggcgtctga

SEQ ID NO: 11356 - DNA, 29 bp, Homo sapiens
  source 1..29: mol_type = genomic DNA
cctatagctcaggggttagagcactggtc

SEQ ID NO: 11357 - DNA, 30 bp, Homo sapiens
  source 1..30: mol_type = genomic DNA
cctatagctcaggggttagagcactggtct

SEQ ID NO: 11358 - DNA, 32 bp, Homo sapiens
  source 1..32: mol_type = genomic DNA
cctatagctcaggggttagagcactggtcttg

SEQ ID NO: 11359 - DNA, 33 bp, Homo sapiens
  source 1..33: mol_type = genomic DNA
cctatagctcaggggttagagcactggtcttgt

SEQ ID NO: 11360 - DNA, 16 bp, Homo sapiens
  source 1..16: mol_type = genomic DNA
cctatatatcttacca

SEQ ID NO: 11361 - DNA, 16 bp, Homo sapiens
  source 1..16: mol_type = genomic DNA
cctcaaagcaatacac

SEQ ID NO: 11362 - DNA, 18 bp, Homo sapiens
  source 1..18: mol_type = genomic DNA
cctcaaagcaatacactg

SEQ ID NO: 11363 - DNA, 19 bp, Homo sapiens
  source 1..19: mol_type = genomic DNA
cctcaaagcaatacactga

SEQ ID NO: 11364 - DNA, 35 bp, Homo sapiens
  source 1..35: mol_type = genomic DNA
cctcaaagcaatacactgaaaatgtttagacgggc

SEQ ID NO: 11365 - DNA, 36 bp, Homo sapiens
  source 1..36: mol_type = genomic DNA
cctcaaagcaatacactgaaaatgtttagacgggct

SEQ ID NO: 11366 - DNA, 37 bp, Homo sapiens
  source 1..37: mol_type = genomic DNA
cctcaaagcaatacactgaaaatgtttagacgggctc

SEQ ID NO: 11367 - DNA, 38 bp, Homo sapiens
  source 1..38: mol_type = genomic DNA
cctcaaagcaatacactgaaaatgtttagacgggctca

SEQ ID NO: 11368 - DNA, 22 bp, Homo sapiens
  source 1..22: mol_type = genomic DNA
cctcacacgcgaaaggtccccg

SEQ ID NO: 11369 - DNA, 17 bp, Homo sapiens
  source 1..17: mol_type = genomic DNA
cctcacacggggcacca

SEQ ID NO: 11370 - DNA, 16 bp, Homo sapiens
  source 1..16: mol_type = genomic DNA
cctcacctggagcacc

SEQ ID NO: 11371 - DNA, 17 bp, Homo sapiens
  source 1..17: mol_type = genomic DNA
cctcacctggagcacca

SEQ ID NO: 11372 - DNA, 16 bp, Homo sapiens
  source 1..16: mol_type = genomic DNA
cctcagagggggcacc

SEQ ID NO: 11373 - DNA, 17 bp, Homo sapiens
  source 1..17: mol_type = genomic DNA
cctcagagggggcacca

SEQ ID NO: 11374 - DNA, 17 bp, Homo sapiens
  source 1..17: mol_type = genomic DNA
cctcagtaagttgcaat

SEQ ID NO: 11375 - DNA, 18 bp, Homo sapiens
  source 1..18: mol_type = genomic DNA
cctcagtaagttgcaata

SEQ ID NO: 11376 - DNA, 19 bp, Homo sapiens
  source 1..19: mol_type = genomic DNA
cctcagtaagttgcaatac

SEQ ID NO: 11377 - DNA, 20 bp, Homo sapiens
  source 1..20: mol_type = genomic DNA
cctcagtaagttgcaatact

SEQ ID NO: 11378 - DNA, 22 bp, Homo sapiens
  source 1..22: mol_type = genomic DNA
cctcagtaagttgcaatactta

SEQ ID NO: 11379 - DNA, 23 bp, Homo sapiens
  source 1..23: mol_type = genomic DNA
cctcagtaagttgcaatacttaa

SEQ ID NO: 11380 - DNA, 24 bp, Homo sapiens
  source 1..24: mol_type = genomic DNA
cctcagtaagttgcaatacttaat

SEQ ID NO: 11381 - DNA, 27 bp, Homo sapiens
  source 1..27: mol_type = genomic DNA
cctcagtaagttgcaatacttaatttc

SEQ ID NO: 11382 - DNA, 28 bp, Homo sapiens
  source 1..28: mol_type = genomic DNA
cctcagtaagttgcaatacttaatttct

SEQ ID NO: 11383 - DNA, 29 bp, Homo sapiens
  source 1..29: mol_type = genomic DNA
cctcagtaagttgcaatacttaatttctg

SEQ ID NO: 11384 - DNA, 30 bp, Homo sapiens
  source 1..30: mol_type = genomic DNA
cctcagtaagttgcaatacttaatttctgc

SEQ ID NO: 11385 - DNA, 31 bp, Homo sapiens
  source 1..31: mol_type = genomic DNA
cctcagtaagttgcaatacttaatttctgcc

SEQ ID NO: 11386 - DNA, 32 bp, Homo sapiens
  source 1..32: mol_type = genomic DNA
cctcagtaagttgcaatacttaatttctgcca

SEQ ID NO: 11387 - DNA, 16 bp, Homo sapiens
  source 1..16: mol_type = genomic DNA
cctcctaagccaggga

SEQ ID NO: 11388 - DNA, 37 bp, Homo sapiens
  source 1..37: mol_type = genomic DNA
cctcctaagccagggattgtgggttcgagtcccacct

SEQ ID NO: 11389 - DNA, 16 bp, Homo sapiens
  source 1..16: mol_type = genomic DNA
cctcctcaaagcaata

SEQ ID NO: 11390 - DNA, 17 bp, Homo sapiens
  source 1..17: mol_type = genomic DNA
cctcctcaaagcaatac

SEQ ID NO: 11391 - DNA, 18 bp, Homo sapiens
  source 1..18: mol_type = genomic DNA
cctcctcaaagcaataca

SEQ ID NO: 11392 - DNA, 20 bp, Homo sapiens
  source 1..20: mol_type = genomic DNA
cctcctcaaagcaatacact

SEQ ID NO: 11393 - DNA, 21 bp, Homo sapiens
  source 1..21: mol_type = genomic DNA
cctcctcaaagcaatacactg

SEQ ID NO: 11394 - DNA, 22 bp, Homo sapiens
  source 1..22: mol_type = genomic DNA
cctcctcaaagcaatacactga

SEQ ID NO: 11395 - DNA, 23 bp, Homo sapiens
  source 1..23: mol_type = genomic DNA
cctcctcaaagcaatacactgaa

SEQ ID NO: 11396 - DNA, 39 bp, Homo sapiens
  source 1..39: mol_type = genomic DNA
cctcctcaaagcaatacactgaaaatgtttagacgggct

SEQ ID NO: 11397 - DNA, 16 bp, Homo sapiens
  source 1..16: mol_type = genomic DNA
cctcgctggggcctcc

SEQ ID NO: 11398 - DNA, 17 bp, Homo sapiens
  source 1..17: mol_type = genomic DNA
cctcgctggggcctcca

SEQ ID NO: 11399 - DNA, 16 bp, Homo sapiens
  source 1..16: mol_type = genomic DNA
cctcggttcgaatccg

SEQ ID NO: 11400 - DNA, 26 bp, Homo sapiens
  source 1..26: mol_type = genomic DNA
cctcggttcgaatccgagtcacggca

SEQ ID NO: 11401 - DNA, 27 bp, Homo sapiens
  source 1..27: mol_type = genomic DNA
cctcggttcgaatccgagtcacggcac

SEQ ID NO: 11402 - DNA, 30 bp, Homo sapiens
  source 1..30: mol_type = genomic DNA
cctcgtggcgcaacggtagcgcgtctgact

SEQ ID NO: 11403 - DNA, 32 bp, Homo sapiens
  source 1..32: mol_type = genomic DNA
cctcgtggcgcaacggtagcgcgtctgactcc

SEQ ID NO: 11404 - DNA, 16 bp, Homo sapiens
  source 1..16: mol_type = genomic DNA
cctcgtggcgcaatgg

SEQ ID NO: 11405 - DNA, 18 bp, Homo sapiens
  source 1..18: mol_type = genomic DNA
cctcgttagcgcagtagg

SEQ ID NO: 11406 - DNA, 21 bp, Homo sapiens
  source 1..21: mol_type = genomic DNA
cctcgttagtatagtggtgag

SEQ ID NO: 11407 - DNA, 25 bp, Homo sapiens
  source 1..25: mol_type = genomic DNA
cctcgttagtatagtggtgagtatc

SEQ ID NO: 11408 - DNA, 27 bp, Homo sapiens
  source 1..27: mol_type = genomic DNA
cctcgttagtatagtggtgagtatccc

SEQ ID NO: 11409 - DNA, 28 bp, Homo sapiens
  source 1..28: mol_type = genomic DNA
cctcgttagtatagtggtgagtatcccc

SEQ ID NO: 11410 - DNA, 29 bp, Homo sapiens
  source 1..29: mol_type = genomic DNA
cctcgttagtatagtggtgagtatccccg

SEQ ID NO: 11411 - DNA, 31 bp, Homo sapiens
  source 1..31: mol_type = genomic DNA
cctcgttagtatagtggtgagtatccccgcc

SEQ ID NO: 11412 - DNA, 32 bp, Homo sapiens
  source 1..32: mol_type = genomic DNA
cctcgttagtatagtggtgagtatccccgcct

SEQ ID NO: 11413 - DNA, 33 bp, Homo sapiens
  source 1..33: mol_type = genomic DNA
cctcgttagtatagtggtgagtatccccgcctg

SEQ ID NO: 11414 - DNA, 34 bp, Homo sapiens
  source 1..34: mol_type = genomic DNA
cctcgttagtatagtggtgagtatccccgcctgt

SEQ ID NO: 11415 - DNA, 35 bp, Homo sapiens
  source 1..35: mol_type = genomic DNA
cctcgttagtatagtggtgagtatccccgcctgtc

SEQ ID NO: 11416 - DNA, 38 bp, Homo sapiens
  source 1..38: mol_type = genomic DNA
cctcgttagtatagtggtgagtatccccgcctgtcacg

SEQ ID NO: 11417 - DNA, 40 bp, Homo sapiens
  source 1..40: mol_type = genomic DNA
cctcgttagtatagtggtgagtatccccgcctgtcacgcg

SEQ ID NO: 11418 - DNA, 27 bp, Homo sapiens
  source 1..27: mol_type = genomic DNA
cctcgttagtatagtggttagtatccc

SEQ ID NO: 11419 - DNA, 28 bp, Homo sapiens
  source 1..28: mol_type = genomic DNA
cctcgttagtatagtggttagtatcccc

SEQ ID NO: 11420 - DNA, 32 bp, Homo sapiens
  source 1..32: mol_type = genomic DNA
cctcgttagtatagtggttagtatccccgcct

SEQ ID NO: 11421 - DNA, 34 bp, Homo sapiens
  source 1..34: mol_type = genomic DNA
cctcgttagtatagtggttagtatccccgcctgt

SEQ ID NO: 11422 - DNA, 35 bp, Homo sapiens
  source 1..35: mol_type = genomic DNA
cctcgttagtatagtggttagtatccccgcctgtc

SEQ ID NO: 11423 - DNA, 17 bp, Homo sapiens
  source 1..17: mol_type = genomic DNA
cctcttagcgcagcggg

SEQ ID NO: 11424 - DNA, 16 bp, Homo sapiens
  source 1..16: mol_type = genomic DNA
cctcttcttaacacca

SEQ ID NO: 11425 - DNA, 16 bp, Homo sapiens
  source 1..16: mol_type = genomic DNA
cctctttacagtgacc

SEQ ID NO: 11426 - DNA, 17 bp, Homo sapiens
  source 1..17: mol_type = genomic DNA
cctctttacagtgacca

SEQ ID NO: 11427 - DNA, 16 bp, Homo sapiens
  source 1..16: mol_type = genomic DNA
cctctttttaccacca

SEQ ID NO: 11428 - DNA, 25 bp, Homo sapiens
  source 1..25: mol_type = genomic DNA
cctgagttcgaacctcagagggggc

SEQ ID NO: 11429 - DNA, 26 bp, Homo sapiens
  source 1..26: mol_type = genomic DNA
cctgagttcgaacctcagagggggca

SEQ ID NO: 11430 - DNA, 16 bp, Homo sapiens
  source 1..16: mol_type = genomic DNA
cctgagttcgagcctc

SEQ ID NO: 11431 - DNA, 18 bp, Homo sapiens
  source 1..18: mol_type = genomic DNA
cctgccacgcgggaggcc

SEQ ID NO: 11432 - DNA, 19 bp, Homo sapiens
  source 1..19: mol_type = genomic DNA
cctgccacgcgggaggccc

SEQ ID NO: 11433 - DNA, 20 bp, Homo sapiens
  source 1..20: mol_type = genomic DNA
cctgccacgcgggaggcccg

SEQ ID NO: 11434 - DNA, 21 bp, Homo sapiens
  source 1..21: mol_type = genomic DNA
cctgccacgcgggaggcccgg

SEQ ID NO: 11435 - DNA, 22 bp, Homo sapiens
  source 1..22: mol_type = genomic DNA
cctgccacgcgggaggcccggg

SEQ ID NO: 11436 - DNA, 23 bp, Homo sapiens
  source 1..23: mol_type = genomic DNA
cctgccacgcgggaggcccgggt

SEQ ID NO: 11437 - DNA, 25 bp, Homo sapiens
  source 1..25: mol_type = genomic DNA
cctgccacgcgggaggcccgggttc

SEQ ID NO: 11438 - DNA, 16 bp, Homo sapiens
  source 1..16: mol_type = genomic DNA
cctgccgactacgcca

SEQ ID NO: 11439 - DNA, 16 bp, Homo sapiens
  source 1..16: mol_type = genomic DNA
cctgccgcggtcgcca

SEQ ID NO: 11440 - DNA, 16 bp, Homo sapiens
  source 1..16: mol_type = genomic DNA
cctgccggggcttcca

SEQ ID NO: 11441 - DNA, 16 bp, Homo sapiens
  source 1..16: mol_type = genomic DNA
cctgctcacagcgcca

SEQ ID NO: 11442 - DNA, 16 bp, Homo sapiens
  source 1..16: mol_type = genomic DNA
cctgctcgctgcgcca

SEQ ID NO: 11443 - DNA, 16 bp, Homo sapiens
  source 1..16: mol_type = genomic DNA
cctggaggcgtgggtt

SEQ ID NO: 11444 - DNA, 35 bp, Homo sapiens
  source 1..35: mol_type = genomic DNA
cctggaggcgtgggttcgaatcccacttctgacac

SEQ ID NO: 11445 - DNA, 36 bp, Homo sapiens
  source 1..36: mol_type = genomic DNA
cctggaggcgtgggttcgaatcccacttctgacacc

SEQ ID NO: 11446 - DNA, 31 bp, Homo sapiens
  source 1..31: mol_type = genomic DNA
cctggcggtctagtggttaggattcggcgct

SEQ ID NO: 11447 - DNA, 32 bp, Homo sapiens
  source 1..32: mol_type = genomic DNA
cctggcggtctagtggttaggattcggcgctc

SEQ ID NO: 11448 - DNA, 33 bp, Homo sapiens
  source 1..33: mol_type = genomic DNA
cctggcggtctagtggttaggattcggcgctct

SEQ ID NO: 11449 - DNA, 34 bp, Homo sapiens
  source 1..34: mol_type = genomic DNA
cctggcggtctagtggttaggattcggcgctctc

SEQ ID NO: 11450 - DNA, 16 bp, Homo sapiens
  source 1..16: mol_type = genomic DNA
cctggctggctcgcca

SEQ ID NO: 11451 - DNA, 27 bp, Homo sapiens
  source 1..27: mol_type = genomic DNA
cctgggtagctcagtcggtagagcatc

SEQ ID NO: 11452 - DNA, 31 bp, Homo sapiens
  source 1..31: mol_type = genomic DNA
cctgggtagctcagtcggtagagcatcagac

SEQ ID NO: 11453 - DNA, 24 bp, Homo sapiens
  source 1..24: mol_type = genomic DNA
cctgggttcgaatcccagcggggc

SEQ ID NO: 11454 - DNA, 25 bp, Homo sapiens
  source 1..25: mol_type = genomic DNA
cctgggttcgaatcccagcggggcc

SEQ ID NO: 11455 - DNA, 26 bp, Homo sapiens
  source 1..26: mol_type = genomic DNA
cctgggttcgaatcccagcggggcct

SEQ ID NO: 11456 - DNA, 27 bp, Homo sapiens
  source 1..27: mol_type = genomic DNA
cctgggttcgaatcccagcggggcctc

SEQ ID NO: 11457 - DNA, 28 bp, Homo sapiens
  source 1..28: mol_type = genomic DNA
cctgggttcgaatcccagcggggcctcc

SEQ ID NO: 11458 - DNA, 29 bp, Homo sapiens
  source 1..29: mol_type = genomic DNA
cctgggttcgaatcccagcggggcctcca

SEQ ID NO: 11459 - DNA, 23 bp, Homo sapiens
  source 1..23: mol_type = genomic DNA
cctgggttcgaatcccagcggtg

SEQ ID NO: 11460 - DNA, 24 bp, Homo sapiens
  source 1..24: mol_type = genomic DNA
cctgggttcgaatcccagcggtgc

SEQ ID NO: 11461 - DNA, 25 bp, Homo sapiens
  source 1..25: mol_type = genomic DNA
cctgggttcgaatcccagcggtgcc

SEQ ID NO: 11462 - DNA, 26 bp, Homo sapiens
  source 1..26: mol_type = genomic DNA
cctgggttcgaatcccagcggtgcct

SEQ ID NO: 11463 - DNA, 27 bp, Homo sapiens
  source 1..27: mol_type = genomic DNA
cctgggttcgaatcccagcggtgcctc

SEQ ID NO: 11464 - DNA, 28 bp, Homo sapiens
  source 1..28: mol_type = genomic DNA
cctgggttcgaatcccagcggtgcctcc

SEQ ID NO: 11465 - DNA, 29 bp, Homo sapiens
  source 1..29: mol_type = genomic DNA
cctgggttcgaatcccagcggtgcctcca

SEQ ID NO: 11466 - DNA, 26 bp, Homo sapiens
  source 1..26: mol_type = genomic DNA
cctgggttcgagccccagtggaacca

SEQ ID NO: 11467 - DNA, 28 bp, Homo sapiens
  source 1..28: mol_type = genomic DNA
cctgggttcgagccccagtggaaccacc

SEQ ID NO: 11468 - DNA, 16 bp, Homo sapiens
  source 1..16: mol_type = genomic DNA
cctggtggtctagtgg

SEQ ID NO: 11469 - DNA, 17 bp, Homo sapiens
  source 1..17: mol_type = genomic DNA
cctggtggtctagtggc

SEQ ID NO: 11470 - DNA, 19 bp, Homo sapiens
  source 1..19: mol_type = genomic DNA
cctggtggtctagtggcta

SEQ ID NO: 11471 - DNA, 20 bp, Homo sapiens
  source 1..20: mol_type = genomic DNA
cctggtggtctagtggctag

SEQ ID NO: 11472 - DNA, 23 bp, Homo sapiens
  source 1..23: mol_type = genomic DNA
cctggtggtctagtggctaggat

SEQ ID NO: 11473 - DNA, 25 bp, Homo sapiens
  source 1..25: mol_type = genomic DNA
cctggtggtctagtggctaggattc

SEQ ID NO: 11474 - DNA, 26 bp, Homo sapiens
  source 1..26: mol_type = genomic DNA
cctggtggtctagtggctaggattcg

SEQ ID NO: 11475 - DNA, 27 bp, Homo sapiens
  source 1..27: mol_type = genomic DNA
cctggtggtctagtggctaggattcgg

SEQ ID NO: 11476 - DNA, 28 bp, Homo sapiens
  source 1..28: mol_type = genomic DNA
cctggtggtctagtggctaggattcggc

SEQ ID NO: 11477 - DNA, 29 bp, Homo sapiens
  source 1..29: mol_type = genomic DNA
cctggtggtctagtggctaggattcggcg

SEQ ID NO: 11478 - DNA, 30 bp, Homo sapiens
  source 1..30: mol_type = genomic DNA
cctggtggtctagtggctaggattcggcgc

SEQ ID NO: 11479 - DNA, 31 bp, Homo sapiens
  source 1..31: mol_type = genomic DNA
cctggtggtctagtggctaggattcggcgct

SEQ ID NO: 11480 - DNA, 32 bp, Homo sapiens
  source 1..32: mol_type = genomic DNA
cctggtggtctagtggctaggattcggcgctt

SEQ ID NO: 11481 - DNA, 33 bp, Homo sapiens
  source 1..33: mol_type = genomic DNA
cctggtggtctagtggctaggattcggcgcttt

SEQ ID NO: 11482 - DNA, 34 bp, Homo sapiens
  source 1..34: mol_type = genomic DNA
cctggtggtctagtggctaggattcggcgctttc

SEQ ID NO: 11483 - DNA, 35 bp, Homo sapiens
  source 1..35: mol_type = genomic DNA
cctggtggtctagtggctaggattcggcgctttca

SEQ ID NO: 11484 - DNA, 36 bp, Homo sapiens
  source 1..36: mol_type = genomic DNA
cctggtggtctagtggctaggattcggcgctttcac

SEQ ID NO: 11485 - DNA, 37 bp, Homo sapiens
  source 1..37: mol_type = genomic DNA
cctggtggtctagtggctaggattcggcgctttcacc

SEQ ID NO: 11486 - DNA, 20 bp, Homo sapiens
  source 1..20: mol_type = genomic DNA
cctggtggtctagtggttag

SEQ ID NO: 11487 - DNA, 21 bp, Homo sapiens
  source 1..21: mol_type = genomic DNA
cctggtggtctagtggttagg

SEQ ID NO: 11488 - DNA, 22 bp, Homo sapiens
  source 1..22: mol_type = genomic DNA
cctggtggtctagtggttagga

SEQ ID NO: 11489 - DNA, 23 bp, Homo sapiens
  source 1..23: mol_type = genomic DNA
cctggtggtctagtggttaggat

SEQ ID NO: 11490 - DNA, 24 bp, Homo sapiens
  source 1..24: mol_type = genomic DNA
cctggtggtctagtggttaggatt

SEQ ID NO: 11491 - DNA, 25 bp, Homo sapiens
  source 1..25: mol_type = genomic DNA
cctggtggtctagtggttaggattc

SEQ ID NO: 11492 - DNA, 26 bp, Homo sapiens
  source 1..26: mol_type = genomic DNA
cctggtggtctagtggttaggattcg

SEQ ID NO: 11493 - DNA, 27 bp, Homo sapiens
  source 1..27: mol_type = genomic DNA
cctggtggtctagtggttaggattcgg

SEQ ID NO: 11494 - DNA, 28 bp, Homo sapiens
  source 1..28: mol_type = genomic DNA
cctggtggtctagtggttaggattcggc

SEQ ID NO: 11495 - DNA, 29 bp, Homo sapiens
  source 1..29: mol_type = genomic DNA
cctggtggtctagtggttaggattcggcg

SEQ ID NO: 11496 - DNA, 30 bp, Homo sapiens
  source 1..30: mol_type = genomic DNA
cctggtggtctagtggttaggattcggcgc

SEQ ID NO: 11497 - DNA, 31 bp, Homo sapiens
  source 1..31: mol_type = genomic DNA
cctggtggtctagtggttaggattcggcgct

SEQ ID NO: 11498 - DNA, 32 bp, Homo sapiens
  source 1..32: mol_type = genomic DNA
cctggtggtctagtggttaggattcggcgctc

SEQ ID NO: 11499 - DNA, 33 bp, Homo sapiens
  source 1..33: mol_type = genomic DNA
cctggtggtctagtggttaggattcggcgctct

SEQ ID NO: 11500 - DNA, 34 bp, Homo sapiens
  source 1..34: mol_type = genomic DNA
cctggtggtctagtggttaggattcggcgctctc

SEQ ID NO: 11501 - DNA, 35 bp, Homo sapiens
  source 1..35: mol_type = genomic DNA
cctggtggtctagtggttaggattcggcgctctca

SEQ ID NO: 11502 - DNA, 36 bp, Homo sapiens
  source 1..36: mol_type = genomic DNA
cctggtggtctagtggttaggattcggcgctctcac

SEQ ID NO: 11503 - DNA, 37 bp, Homo sapiens
  source 1..37: mol_type = genomic DNA
cctggtggtctagtggttaggattcggcgctctcacc

SEQ ID NO: 11504 - DNA, 38 bp, Homo sapiens
  source 1..38: mol_type = genomic DNA
cctggtggtctagtggttaggattcggcgctctcaccg

SEQ ID NO: 11505 - DNA, 39 bp, Homo sapiens
  source 1..39: mol_type = genomic DNA
cctggtggtctagtggttaggattcggcgctctcaccgc

SEQ ID NO: 11506 - DNA, 40 bp, Homo sapiens
  source 1..40: mol_type = genomic DNA
cctggtggtctagtggttaggattcggcgctctcaccgcc

SEQ ID NO: 11507 - DNA, 48 bp, Homo sapiens
  source 1..48: mol_type = genomic DNA
cctggtggtctagtggttaggattcggcgctctcaccgccgcggcccg

SEQ ID NO: 11508 - DNA, 25 bp, Homo sapiens
  source 1..25: mol_type = genomic DNA
cctggttcgatcccgggtttcggca

SEQ ID NO: 11509 - DNA, 26 bp, Homo sapiens
  source 1..26: mol_type = genomic DNA
cctggttcgatcccgggtttcggcac

SEQ ID NO: 11510 - DNA, 28 bp, Homo sapiens
  source 1..28: mol_type = genomic DNA
cctggttcgatcccgggtttcggcacca

SEQ ID NO: 11511 - DNA, 29 bp, Homo sapiens
  source 1..29: mol_type = genomic DNA
cctggttttcacccaggcggcccgggttc

SEQ ID NO: 11512 - DNA, 38 bp, Homo sapiens
  source 1..38: mol_type = genomic DNA
cctggttttcacccaggcggcccgggttcgactcccgg

SEQ ID NO: 11513 - DNA, 48 bp, Homo sapiens
  source 1..48: mol_type = genomic DNA
cctggttttcacccaggcggcccgggttcgactcccggtgtgggaacc

SEQ ID NO: 11514 - DNA, 16 bp, Homo sapiens
  source 1..16: mol_type = genomic DNA
cctgtcacgcgggaga

SEQ ID NO: 11515 - DNA, 18 bp, Homo sapiens
  source 1..18: mol_type = genomic DNA
cctgtcacgcgggagacc

SEQ ID NO: 11516 - DNA, 19 bp, Homo sapiens
  source 1..19: mol_type = genomic DNA
cctgtcacgcgggagaccg

SEQ ID NO: 11517 - DNA, 21 bp, Homo sapiens
  source 1..21: mol_type = genomic DNA
cctgtcacgcgggagaccggg

SEQ ID NO: 11518 - DNA, 23 bp, Homo sapiens
  source 1..23: mol_type = genomic DNA
cctgtcacgcgggagaccggggt

SEQ ID NO: 11519 - DNA, 33 bp, Homo sapiens
  source 1..33: mol_type = genomic DNA
cctgtcacgcgggagaccggggttcaattcccc

SEQ ID NO: 11520 - DNA, 35 bp, Homo sapiens
  source 1..35: mol_type = genomic DNA
cctgtcacgcgggagaccggggttcaattccccga

SEQ ID NO: 11521 - DNA, 39 bp, Homo sapiens
  source 1..39: mol_type = genomic DNA
cctgtcacgcgggagaccggggttcaattccccgacggg

SEQ ID NO: 11522 - DNA, 43 bp, Homo sapiens
  source 1..43: mol_type = genomic DNA
cctgtcacgcgggagaccggggttcaattccccgacggggagc

SEQ ID NO: 11523 - DNA, 44 bp, Homo sapiens
  source 1..44: mol_type = genomic DNA
cctgtcacgcgggagaccggggttcaattccccgacggggagcc

SEQ ID NO: 11524 - DNA, 45 bp, Homo sapiens
  source 1..45: mol_type = genomic DNA
cctgtcacgcgggagaccggggttcaattccccgacggggagcca

SEQ ID NO: 11525 - DNA, 34 bp, Homo sapiens
  source 1..34: mol_type = genomic DNA
cctgtcacgcgggagaccggggttcgattccccg

SEQ ID NO: 11526 - DNA, 38 bp, Homo sapiens
  source 1..38: mol_type = genomic DNA
cctgtcacgcgggagaccggggttcgattccccgacgg

SEQ ID NO: 11527 - DNA, 39 bp, Homo sapiens
  source 1..39: mol_type = genomic DNA
cctgtcacgcgggagaccggggttcgattccccgacggg

SEQ ID NO: 11528 - DNA, 40 bp, Homo sapiens
  source 1..40: mol_type = genomic DNA
cctgtcacgcgggagaccggggttcgattccccgacgggg

SEQ ID NO: 11529 - DNA, 41 bp, Homo sapiens
  source 1..41: mol_type = genomic DNA
cctgtcacgcgggagaccggggttcgattccccgacgggga

SEQ ID NO: 11530 - DNA, 42 bp, Homo sapiens
  source 1..42: mol_type = genomic DNA
cctgtcacgcgggagaccggggttcgattccccgacggggag

SEQ ID NO: 11531 - DNA, 43 bp, Homo sapiens
  source 1..43: mol_type = genomic DNA
cctgtcacgcgggagaccggggttcgattccccgacggggagc

SEQ ID NO: 11532 - DNA, 44 bp, Homo sapiens
  source 1..44: mol_type = genomic DNA
cctgtcacgcgggagaccggggttcgattccccgacggggagcc

SEQ ID NO: 11533 - DNA, 45 bp, Homo sapiens
  source 1..45: mol_type = genomic DNA
cctgtcacgcgggagaccggggttcgattccccgacggggagcca

SEQ ID NO: 11534 - DNA, 16 bp, Homo sapiens
  source 1..16: mol_type = genomic DNA
cctgtggtctagtggc

SEQ ID NO: 11535 - DNA, 17 bp, Homo sapiens
  source 1..17: mol_type = genomic DNA
cctgtggtctagtggct

SEQ ID NO: 11536 - DNA, 20 bp, Homo sapiens
  source 1..20: mol_type = genomic DNA
cctgtggtctagtggttagg

SEQ ID NO: 11537 - DNA, 16 bp, Homo sapiens
  source 1..16: mol_type = genomic DNA
cctgttcgtgacgcca

SEQ ID NO: 11538 - DNA, 19 bp, Homo sapiens
  source 1..19: mol_type = genomic DNA
ccttagcgcagtaggcagc

SEQ ID NO: 11539 - DNA, 18 bp, Homo sapiens
  source 1..18: mol_type = genomic DNA
ccttaggtcgctggttcg

SEQ ID NO: 11540 - DNA, 35 bp, Homo sapiens
  source 1..35: mol_type = genomic DNA
ccttaggtcgctggttcgaatccggctcgaaggac

SEQ ID NO: 11541 - DNA, 36 bp, Homo sapiens
  source 1..36: mol_type = genomic DNA
ccttaggtcgctggttcgaatccggctcgaaggacc

SEQ ID NO: 11542 - DNA, 35 bp, Homo sapiens
  source 1..35: mol_type = genomic DNA
ccttaggtcgctggttcgaatccggctcggaggac

SEQ ID NO: 11543 - DNA, 36 bp, Homo sapiens
  source 1..36: mol_type = genomic DNA
ccttaggtcgctggttcgaatccggctcggaggacc

SEQ ID NO: 11544 - DNA, 32 bp, Homo sapiens
  source 1..32: mol_type = genomic DNA
ccttaggtcgctggttcgattccggctcgaag

SEQ ID NO: 11545 - DNA, 35 bp, Homo sapiens
  source 1..35: mol_type = genomic DNA
ccttaggtcgctggttcgattccggctcgaaggac

SEQ ID NO: 11546 - DNA, 36 bp, Homo sapiens
  source 1..36: mol_type = genomic DNA
ccttaggtcgctggttcgattccggctcgaaggacc

SEQ ID NO: 11547 - DNA, 23 bp, Homo sapiens
  source 1..23: mol_type = genomic DNA
ccttcaaagccctcagtaagttg

SEQ ID NO: 11548 - DNA, 40 bp, Homo sapiens
  source 1..40: mol_type = genomic DNA
ccttcaaagccctcagtaagttgcaatacttaatttctgc

SEQ ID NO: 11549 - DNA, 41 bp, Homo sapiens
  source 1..41: mol_type = genomic DNA
ccttcaaagccctcagtaagttgcaatacttaatttctgcc

SEQ ID NO: 11550 - DNA, 42 bp, Homo sapiens
  source 1..42: mol_type = genomic DNA
ccttcaaagccctcagtaagttgcaatacttaatttctgcca

SEQ ID NO: 11551 - DNA, 19 bp, Homo sapiens
  source 1..19: mol_type = genomic DNA
ccttccaagcagttgaccc

SEQ ID NO: 11552 - DNA, 20 bp, Homo sapiens
  source 1..20: mol_type = genomic DNA
ccttccaagcagttgacccg

SEQ ID NO: 11553 - DNA, 21 bp, Homo sapiens
  source 1..21: mol_type = genomic DNA
ccttccaagcagttgacccgg

SEQ ID NO: 11554 - DNA, 22 bp, Homo sapiens
  source 1..22: mol_type = genomic DNA
ccttccaagcagttgacccggg

SEQ ID NO: 11555 - DNA, 23 bp, Homo sapiens
  source 1..23: mol_type = genomic DNA
ccttccaagcagttgacccgggt

SEQ ID NO: 11556 - DNA, 24 bp, Homo sapiens
  source 1..24: mol_type = genomic DNA
ccttccaagcagttgacccgggtt

SEQ ID NO: 11557 - DNA, 25 bp, Homo sapiens
  source 1..25: mol_type = genomic DNA
ccttccaagcagttgacccgggttc

SEQ ID NO: 11558 - DNA, 36 bp, Homo sapiens
  source 1..36: mol_type = genomic DNA
ccttccaagcagttgacccgggttcgattcccggcc

SEQ ID NO: 11559 - DNA, 39 bp, Homo sapiens
  source 1..39: mol_type = genomic DNA
ccttccaagcagttgacccgggttcgattcccggccaac

SEQ ID NO: 11560 - DNA, 44 bp, Homo sapiens
  source 1..44: mol_type = genomic DNA
ccttccaagcagttgacccgggttcgattcccggccaacgcacc

SEQ ID NO: 11561 - DNA, 16 bp, Homo sapiens
  source 1..16: mol_type = genomic DNA
ccttcccgtactacca

SEQ ID NO: 11562 - DNA, 16 bp, Homo sapiens
  source 1..16: mol_type = genomic DNA
ccttccttttttgcca

SEQ ID NO: 11563 - DNA, 16 bp, Homo sapiens
  source 1..16: mol_type = genomic DNA
ccttcgatagctcagc

SEQ ID NO: 11564 - DNA, 17 bp, Homo sapiens
  source 1..17: mol_type = genomic DNA
ccttcgatagctcagct

SEQ ID NO: 11565 - DNA, 18 bp, Homo sapiens
  source 1..18: mol_type = genomic DNA
ccttcgatagctcagctg

SEQ ID NO: 11566 - DNA, 19 bp, Homo sapiens
  source 1..19: mol_type = genomic DNA
ccttcgatagctcagctgg

SEQ ID NO: 11567 - DNA, 20 bp, Homo sapiens
  source 1..20: mol_type = genomic DNA
ccttcgatagctcagctggt

SEQ ID NO: 11568 - DNA, 23 bp, Homo sapiens
  source 1..23: mol_type = genomic DNA
ccttcgatagctcagctggtaga

SEQ ID NO: 11569 - DNA, 25 bp, Homo sapiens
  source 1..25: mol_type = genomic DNA
ccttcgatagctcagctggtagagc

SEQ ID NO: 11570 - DNA, 32 bp, Homo sapiens
  source 1..32: mol_type = genomic DNA
ccttcgatagctcagctggtagagcggaggac

SEQ ID NO: 11571 - DNA, 33 bp, Homo sapiens
  source 1..33: mol_type = genomic DNA
ccttcgatagctcagctggtagagcggaggact

SEQ ID NO: 11572 - DNA, 34 bp, Homo sapiens
  source 1..34: mol_type = genomic DNA
ccttcgatagctcagctggtagagcggaggactg

SEQ ID NO: 11573 - DNA, 35 bp, Homo sapiens
  source 1..35: mol_type = genomic DNA
ccttcgatagctcagctggtagagcggaggactgt

SEQ ID NO: 11574 - DNA, 36 bp, Homo sapiens
  source 1..36: mol_type = genomic DNA
ccttcgatagctcagctggtagagcggaggactgta

SEQ ID NO: 11575 - DNA, 37 bp, Homo sapiens
  source 1..37: mol_type = genomic DNA
ccttcgatagctcagctggtagagcggaggactgtag

SEQ ID NO: 11576 - DNA, 19 bp, Homo sapiens
  source 1..19: mol_type = genomic DNA
ccttcgatagctcagttgg

SEQ ID NO: 11577 - DNA, 22 bp, Homo sapiens
  source 1..22: mol_type = genomic DNA
ccttcgatagctcagttggtag

SEQ ID NO: 11578 - DNA, 23 bp, Homo sapiens
  source 1..23: mol_type = genomic DNA
ccttcgatagctcagttggtaga

SEQ ID NO: 11579 - DNA, 25 bp, Homo sapiens
  source 1..25: mol_type = genomic DNA
ccttcgatagctcagttggtagagc

SEQ ID NO: 11580 - DNA, 32 bp, Homo sapiens
  source 1..32: mol_type = genomic DNA
ccttcgatagctcagttggtagagcggaggac

SEQ ID NO: 11581 - DNA, 33 bp, Homo sapiens
  source 1..33: mol_type = genomic DNA
ccttcgatagctcagttggtagagcggaggact

SEQ ID NO: 11582 - DNA, 34 bp, Homo sapiens
  source 1..34: mol_type = genomic DNA
ccttcgatagctcagttggtagagcggaggactg

SEQ ID NO: 11583 - DNA, 35 bp, Homo sapiens
  source 1..35: mol_type = genomic DNA
ccttcgatagctcagttggtagagcggaggactgt

SEQ ID NO: 11584 - DNA, 36 bp, Homo sapiens
  source 1..36: mol_type = genomic DNA
ccttcgatagctcagttggtagagcggaggactgta

SEQ ID NO: 11585 - DNA, 16 bp, Homo sapiens
  source 1..16: mol_type = genomic DNA
ccttgtagtataaact

SEQ ID NO: 11586 - DNA, 29 bp, Homo sapiens
  source 1..29: mol_type = genomic DNA
ccttgtagtataaactaatacaccagtct

SEQ ID NO: 11587 - DNA, 21 bp, Homo sapiens
  source 1..21: mol_type = genomic DNA
ccttttaagttaaagattaag

SEQ ID NO: 11588 - DNA, 25 bp, Homo sapiens
  source 1..25: mol_type = genomic DNA
ccttttaagttaaagattaagagaa

SEQ ID NO: 11589 - DNA, 26 bp, Homo sapiens
  source 1..26: mol_type = genomic DNA
ccttttaagttaaagattaagagaac

SEQ ID NO: 11590 - DNA, 27 bp, Homo sapiens
  source 1..27: mol_type = genomic DNA
ccttttaagttaaagattaagagaacc

SEQ ID NO: 11591 - DNA, 28 bp, Homo sapiens
  source 1..28: mol_type = genomic DNA
ccttttaagttaaagattaagagaacca

SEQ ID NO: 11592 - DNA, 29 bp, Homo sapiens
  source 1..29: mol_type = genomic DNA
ccttttaagttaaagattaagagaaccaa

SEQ ID NO: 11593 - DNA, 30 bp, Homo sapiens
  source 1..30: mol_type = genomic DNA
ccttttaagttaaagattaagagaaccaac

SEQ ID NO: 11594 - DNA, 31 bp, Homo sapiens
  source 1..31: mol_type = genomic DNA
ccttttaagttaaagattaagagaaccaaca

SEQ ID NO: 11595 - DNA, 32 bp, Homo sapiens
  source 1..32: mol_type = genomic DNA
ccttttaagttaaagattaagagaaccaacac

SEQ ID NO: 11596 - DNA, 33 bp, Homo sapiens
  source 1..33: mol_type = genomic DNA
ccttttaagttaaagattaagagaaccaacacc

SEQ ID NO: 11597 - DNA, 34 bp, Homo sapiens
  source 1..34: mol_type = genomic DNA
ccttttaagttaaagattaagagaaccaacacct

SEQ ID NO: 11598 - DNA, 35 bp, Homo sapiens
  source 1..35: mol_type = genomic DNA
ccttttaagttaaagattaagagaaccaacacctc

SEQ ID NO: 11599 - DNA, 36 bp, Homo sapiens
  source 1..36: mol_type = genomic DNA
ccttttaagttaaagattaagagaaccaacacctct

SEQ ID NO: 11600 - DNA, 38 bp, Homo sapiens
  source 1..38: mol_type = genomic DNA
ccttttaagttaaagattaagagaaccaacacctcttt

SEQ ID NO: 11601 - DNA, 39 bp, Homo sapiens
  source 1..39: mol_type = genomic DNA
ccttttaagttaaagattaagagaaccaacacctcttta

SEQ ID NO: 11602 - DNA, 44 bp, Homo sapiens
  source 1..44: mol_type = genomic DNA
ccttttaagttaaagattaagagaaccaacacctctttacagtg

SEQ ID NO: 11603 - DNA, 45 bp, Homo sapiens
  source 1..45: mol_type = genomic DNA
ccttttaagttaaagattaagagaaccaacacctctttacagtga

SEQ ID NO: 11604 - DNA, 46 bp, Homo sapiens
  source 1..46: mol_type = genomic DNA
ccttttaagttaaagattaagagaaccaacacctctttacagtgac

SEQ ID NO: 11605 - DNA, 47 bp, Homo sapiens
  source 1..47: mol_type = genomic DNA
ccttttaagttaaagattaagagaaccaacacctctttacagtgacc

SEQ ID NO: 11606 - DNA, 48 bp, Homo sapiens
  source 1..48: mol_type = genomic DNA
ccttttaagttaaagattaagagaaccaacacctctttacagtgacca

SEQ ID NO: 11607 - DNA, 16 bp, Homo sapiens
  source 1..16: mol_type = genomic DNA
cctttttccaaggaca

SEQ ID NO: 11608 - DNA, 17 bp, Homo sapiens
  source 1..17: mol_type = genomic DNA
cctttttccaaggacac

SEQ ID NO: 11609 - DNA, 18 bp, Homo sapiens
  source 1..18: mol_type = genomic DNA
cctttttccaaggacacc

SEQ ID NO: 11610 - DNA, 19 bp, Homo sapiens
  source 1..19: mol_type = genomic DNA
cctttttccaaggacacca

SEQ ID NO: 11611 - DNA, 18 bp, Homo sapiens
  source 1..18: mol_type = genomic DNA
cgaaaaagtcatggaggc

SEQ ID NO: 11612 - DNA, 19 bp, Homo sapiens
  source 1..19: mol_type = genomic DNA
cgaaaaagtcatggaggcc

SEQ ID NO: 11613 - DNA, 16 bp, Homo sapiens
  source 1..16: mol_type = genomic DNA
cgaaaatgttggttat

SEQ ID NO: 11614 - DNA, 17 bp, Homo sapiens
  source 1..17: mol_type = genomic DNA
cgaaaatgttggttata

SEQ ID NO: 11615 - DNA, 18 bp, Homo sapiens
  source 1..18: mol_type = genomic DNA
cgaaaatgttggttatac

SEQ ID NO: 11616 - DNA, 19 bp, Homo sapiens
  source 1..19: mol_type = genomic DNA
cgaaaatgttggttatacc

SEQ ID NO: 11617 - DNA, 20 bp, Homo sapiens
  source 1..20: mol_type = genomic DNA
cgaaaatgttggttataccc

SEQ ID NO: 11618 - DNA, 21 bp, Homo sapiens
  source 1..21: mol_type = genomic DNA
cgaaaatgttggttataccct

SEQ ID NO: 11619 - DNA, 22 bp, Homo sapiens
  source 1..22: mol_type = genomic DNA
cgaaaatgttggttataccctt

SEQ ID NO: 11620 - DNA, 23 bp, Homo sapiens
  source 1..23: mol_type = genomic DNA
cgaaaatgttggttatacccttc

SEQ ID NO: 11621 - DNA, 24 bp, Homo sapiens
  source 1..24: mol_type = genomic DNA
cgaaaatgttggttatacccttcc

SEQ ID NO: 11622 - DNA, 25 bp, Homo sapiens
  source 1..25: mol_type = genomic DNA
cgaaaatgttggttatacccttccc

SEQ ID NO: 11623 - DNA, 26 bp, Homo sapiens
  source 1..26: mol_type = genomic DNA
cgaaaatgttggttatacccttcccg

SEQ ID NO: 11624 - DNA, 27 bp, Homo sapiens
  source 1..27: mol_type = genomic DNA
cgaaaatgttggttatacccttcccgt

SEQ ID NO: 11625 - DNA, 28 bp, Homo sapiens
  source 1..28: mol_type = genomic DNA
cgaaaatgttggttatacccttcccgta

SEQ ID NO: 11626 - DNA, 29 bp, Homo sapiens
  source 1..29: mol_type = genomic DNA
cgaaaatgttggttatacccttcccgtac

SEQ ID NO: 11627 - DNA, 30 bp, Homo sapiens
  source 1..30: mol_type = genomic DNA
cgaaaatgttggttatacccttcccgtact

SEQ ID NO: 11628 - DNA, 31 bp, Homo sapiens
  source 1..31: mol_type = genomic DNA
cgaaaatgttggttatacccttcccgtacta

SEQ ID NO: 11629 - DNA, 32 bp, Homo sapiens
  source 1..32: mol_type = genomic DNA
cgaaaatgttggttatacccttcccgtactac

SEQ ID NO: 11630 - DNA, 33 bp, Homo sapiens
  source 1..33: mol_type = genomic DNA
cgaaaatgttggttatacccttcccgtactacc

SEQ ID NO: 11631 - DNA, 34 bp, Homo sapiens
  source 1..34: mol_type = genomic DNA
cgaaaatgttggttatacccttcccgtactacca

SEQ ID NO: 11632 - DNA, 16 bp, Homo sapiens
  source 1..16: mol_type = genomic DNA
cgaaaccatcctctgc

SEQ ID NO: 11633 - DNA, 17 bp, Homo sapiens
  source 1..17: mol_type = genomic DNA
cgaaaccatcctctgct

SEQ ID NO: 11634 - DNA, 19 bp, Homo sapiens
  source 1..19: mol_type = genomic DNA
cgaaaccatcctctgctac

SEQ ID NO: 11635 - DNA, 20 bp, Homo sapiens
  source 1..20: mol_type = genomic DNA
cgaaaccatcctctgctacc

SEQ ID NO: 11636 - DNA, 21 bp, Homo sapiens
  source 1..21: mol_type = genomic DNA
cgaaaccatcctctgctacca

SEQ ID NO: 11637 - DNA, 21 bp, Homo sapiens
  source 1..21: mol_type = genomic DNA
cgaaaccgggcagaagcacca

SEQ ID NO: 11638 - DNA, 17 bp, Homo sapiens
  source 1..17: mol_type = genomic DNA
cgaaaccgggcggaaac

SEQ ID NO: 11639 - DNA, 19 bp, Homo sapiens
  source 1..19: mol_type = genomic DNA
cgaaaccgggcggaaacac

SEQ ID NO: 11640 - DNA, 20 bp, Homo sapiens
  source 1..20: mol_type = genomic DNA
cgaaaccgggcggaaacacc

SEQ ID NO: 11641 - DNA, 21 bp, Homo sapiens
  source 1..21: mol_type = genomic DNA
cgaaaccgggcggaaacacca

SEQ ID NO: 11642 - DNA, 36 bp, Homo sapiens
  source 1..36: mol_type = genomic DNA
cgaaagattggtggttcgagcccacccagggacgcc

SEQ ID NO: 11643 - DNA, 17 bp, Homo sapiens
  source 1..17: mol_type = genomic DNA
cgaaaggtccccggttc

SEQ ID NO: 11644 - DNA, 18 bp, Homo sapiens
  source 1..18: mol_type = genomic DNA
cgaaaggtccccggttcg

SEQ ID NO: 11645 - DNA, 36 bp, Homo sapiens
  source 1..36: mol_type = genomic DNA
cgaaaggtccccggttcgaaaccgggcagaagcacc

SEQ ID NO: 11646 - DNA, 28 bp, Homo sapiens
  source 1..28: mol_type = genomic DNA
cgaaaggtccccggttcgaaaccgggcg

SEQ ID NO: 11647 - DNA, 33 bp, Homo sapiens
  source 1..33: mol_type = genomic DNA
cgaaaggtccccggttcgaaaccgggcggaaac

SEQ ID NO: 11648 - DNA, 34 bp, Homo sapiens
  source 1..34: mol_type = genomic DNA
cgaaaggtccccggttcgaaaccgggcggaaaca

SEQ ID NO: 11649 - DNA, 35 bp, Homo sapiens
  source 1..35: mol_type = genomic DNA
cgaaaggtccccggttcgaaaccgggcggaaacac

SEQ ID NO: 11650 - DNA, 36 bp, Homo sapiens
  source 1..36: mol_type = genomic DNA
cgaaaggtccccggttcgaaaccgggcggaaacacc

SEQ ID NO: 11651 - DNA, 37 bp, Homo sapiens
  source 1..37: mol_type = genomic DNA
cgaaaggtccccggttcgaaaccgggcggaaacacca

SEQ ID NO: 11652 - DNA, 16 bp, Homo sapiens
  source 1..16: mol_type = genomic DNA
cgaaaggttggtggtt

SEQ ID NO: 11653 - DNA, 17 bp, Homo sapiens
  source 1..17: mol_type = genomic DNA
cgaaaggttggtggttc

SEQ ID NO: 11654 - DNA, 18 bp, Homo sapiens
  source 1..18: mol_type = genomic DNA
cgaaaggttggtggttcg

SEQ ID NO: 11655 - DNA, 33 bp, Homo sapiens
  source 1..33: mol_type = genomic DNA
cgaaaggttggtggttcgagcccacccagggac

SEQ ID NO: 11656 - DNA, 34 bp, Homo sapiens
  source 1..34: mol_type = genomic DNA
cgaaaggttggtggttcgagcccacccagggacg

SEQ ID NO: 11657 - DNA, 35 bp, Homo sapiens
  source 1..35: mol_type = genomic DNA
cgaaaggttggtggttcgagcccacccagggacgc

SEQ ID NO: 11658 - DNA, 36 bp, Homo sapiens
  source 1..36: mol_type = genomic DNA
cgaaaggttggtggttcgagcccacccagggacgcc

SEQ ID NO: 11659 - DNA, 37 bp, Homo sapiens
  source 1..37: mol_type = genomic DNA
cgaaaggttggtggttcgagcccacccagggacgcca

SEQ ID NO: 11660 - DNA, 36 bp, Homo sapiens
  source 1..36: mol_type = genomic DNA
cgaaaggttggtggttcgatcccacccagggacgcc

SEQ ID NO: 11661 - DNA, 37 bp, Homo sapiens
  source 1..37: mol_type = genomic DNA
cgaaaggttggtggttcgatcccacccagggacgcca

SEQ ID NO: 11662 - DNA, 17 bp, Homo sapiens
  source 1..17: mol_type = genomic DNA
cgaaatagctcagttgg

SEQ ID NO: 11663 - DNA, 17 bp, Homo sapiens
  source 1..17: mol_type = genomic DNA
cgaaccccgtccgtgcc

SEQ ID NO: 11664 - DNA, 18 bp, Homo sapiens
  source 1..18: mol_type = genomic DNA
cgaaccccgtccgtgcct

SEQ ID NO: 11665 - DNA, 19 bp, Homo sapiens
  source 1..19: mol_type = genomic DNA
cgaaccccgtccgtgcctc

SEQ ID NO: 11666 - DNA, 20 bp, Homo sapiens
  source 1..20: mol_type = genomic DNA
cgaaccccgtccgtgcctcc

SEQ ID NO: 11667 - DNA, 21 bp, Homo sapiens
  source 1..21: mol_type = genomic DNA
cgaaccccgtccgtgcctcca

SEQ ID NO: 11668 - DNA, 21 bp, Homo sapiens
  source 1..21: mol_type = genomic DNA
cgaaccctgctcgctgcgcca

SEQ ID NO: 11669 - DNA, 20 bp, Homo sapiens
  source 1..20: mol_type = genomic DNA
cgaacctcagagggggcacc

SEQ ID NO: 11670 - DNA, 20 bp, Homo sapiens
  source 1..20: mol_type = genomic DNA
cgaagaagcagcttcaaacc

SEQ ID NO: 11671 - DNA, 28 bp, Homo sapiens
  source 1..28: mol_type = genomic DNA
cgaagaagcagcttcaaacctgccgggg

SEQ ID NO: 11672 - DNA, 29 bp, Homo sapiens
  source 1..29: mol_type = genomic DNA
cgaagaagcagcttcaaacctgccggggc

SEQ ID NO: 11673 - DNA, 30 bp, Homo sapiens
  source 1..30: mol_type = genomic DNA
cgaagaagcagcttcaaacctgccggggct

SEQ ID NO: 11674 - DNA, 31 bp, Homo sapiens
  source 1..31: mol_type = genomic DNA
cgaagaagcagcttcaaacctgccggggctt

SEQ ID NO: 11675 - DNA, 32 bp, Homo sapiens
  source 1..32: mol_type = genomic DNA
cgaagaagcagcttcaaacctgccggggcttc

SEQ ID NO: 11676 - DNA, 33 bp, Homo sapiens
  source 1..33: mol_type = genomic DNA
cgaagaagcagcttcaaacctgccggggcttcc

SEQ ID NO: 11677 - DNA, 34 bp, Homo sapiens
  source 1..34: mol_type = genomic DNA
cgaagaagcagcttcaaacctgccggggcttcca

SEQ ID NO: 11678 - DNA, 16 bp, Homo sapiens
  source 1..16: mol_type = genomic DNA
cgaagatcacgggttc

SEQ ID NO: 11679 - DNA, 17 bp, Homo sapiens
  source 1..17: mol_type = genomic DNA
cgaagatcacgggttcg

SEQ ID NO: 11680 - DNA, 32 bp, Homo sapiens
  source 1..32: mol_type = genomic DNA
cgaagatcacgggttcgaaccccgtccgtgcc

SEQ ID NO: 11681 - DNA, 33 bp, Homo sapiens
  source 1..33: mol_type = genomic DNA
cgaagatcacgggttcgaaccccgtccgtgcct

SEQ ID NO: 11682 - DNA, 34 bp, Homo sapiens
  source 1..34: mol_type = genomic DNA
cgaagatcacgggttcgaaccccgtccgtgcctc

SEQ ID NO: 11683 - DNA, 35 bp, Homo sapiens
  source 1..35: mol_type = genomic DNA
cgaagatcacgggttcgaaccccgtccgtgcctcc

SEQ ID NO: 11684 - DNA, 16 bp, Homo sapiens
  source 1..16: mol_type = genomic DNA
cgaagatcgcgggttc

SEQ ID NO: 11685 - DNA, 17 bp, Homo sapiens
  source 1..17: mol_type = genomic DNA
cgaagatcgcgggttcg

SEQ ID NO: 11686 - DNA, 32 bp, Homo sapiens
  source 1..32: mol_type = genomic DNA
cgaagatcgcgggttcgaaccccgtccgtgcc

SEQ ID NO: 11687 - DNA, 33 bp, Homo sapiens
  source 1..33: mol_type = genomic DNA
cgaagatcgcgggttcgaaccccgtccgtgcct

SEQ ID NO: 11688 - DNA, 34 bp, Homo sapiens
  source 1..34: mol_type = genomic DNA
cgaagatcgcgggttcgaaccccgtccgtgcctc

SEQ ID NO: 11689 - DNA, 35 bp, Homo sapiens
  source 1..35: mol_type = genomic DNA
cgaagatcgcgggttcgaaccccgtccgtgcctcc

SEQ ID NO: 11690 - DNA, 18 bp, Homo sapiens
  source 1..18: mol_type = genomic DNA
cgaatcacgtcggggtca

SEQ ID NO: 11691 - DNA, 20 bp, Homo sapiens
  source 1..20: mol_type = genomic DNA
cgaatcacgtcggggtcacc

SEQ ID NO: 11692 - DNA, 21 bp, Homo sapiens
  source 1..21: mol_type = genomic DNA
cgaatcacgtcggggtcacca

SEQ ID NO: 11693 - DNA, 17 bp, Homo sapiens
  source 1..17: mol_type = genomic DNA
cgaatcccaccgctgcc

SEQ ID NO: 11694 - DNA, 18 bp, Homo sapiens
  source 1..18: mol_type = genomic DNA
cgaatcccaccgctgcca

SEQ ID NO: 11695 - DNA, 20 bp, Homo sapiens
  source 1..20: mol_type = genomic DNA
cgaatcccaccgctgccacc

SEQ ID NO: 11696 - DNA, 21 bp, Homo sapiens
  source 1..21: mol_type = genomic DNA
cgaatcccaccgctgccacca

SEQ ID NO: 11697 - DNA, 17 bp, Homo sapiens
  source 1..17: mol_type = genomic DNA
cgaatcccactcctgac

SEQ ID NO: 11698 - DNA, 20 bp, Homo sapiens
  source 1..20: mol_type = genomic DNA
cgaatcccactcctgacacc

SEQ ID NO: 11699 - DNA, 21 bp, Homo sapiens
  source 1..21: mol_type = genomic DNA
cgaatcccactcctgacacca

SEQ ID NO: 11700 - DNA, 18 bp, Homo sapiens
  source 1..18: mol_type = genomic DNA
cgaatcccacttctgaca

SEQ ID NO: 11701 - DNA, 19 bp, Homo sapiens
  source 1..19: mol_type = genomic DNA
cgaatcccacttctgacac

SEQ ID NO: 11702 - DNA, 20 bp, Homo sapiens
  source 1..20: mol_type = genomic DNA
cgaatcccacttctgacacc

SEQ ID NO: 11703 - DNA, 21 bp, Homo sapiens
  source 1..21: mol_type = genomic DNA
cgaatcccacttctgacacca

SEQ ID NO: 11704 - DNA, 17 bp, Homo sapiens
  source 1..17: mol_type = genomic DNA
cgaatcccagcggggcc

SEQ ID NO: 11705 - DNA, 20 bp, Homo sapiens
  source 1..20: mol_type = genomic DNA
cgaatcccagcggtgcctcc

SEQ ID NO: 11706 - DNA, 21 bp, Homo sapiens
  source 1..21: mol_type = genomic DNA
cgaatcccagcggtgcctcca

SEQ ID NO: 11707 - DNA, 20 bp, Homo sapiens
  source 1..20: mol_type = genomic DNA
cgaatcccagtagagcctcc

SEQ ID NO: 11708 - DNA, 19 bp, Homo sapiens
  source 1..19: mol_type = genomic DNA
cgaatcccatcctcgtcgc

SEQ ID NO: 11709 - DNA, 20 bp, Homo sapiens
  source 1..20: mol_type = genomic DNA
cgaatcccatcctcgtcgcc

SEQ ID NO: 11710 - DNA, 21 bp, Homo sapiens
  source 1..21: mol_type = genomic DNA
cgaatcccatcctcgtcgcca

SEQ ID NO: 11711 - DNA, 17 bp, Homo sapiens
  source 1..17: mol_type = genomic DNA
cgaatccgagtcacggc

SEQ ID NO: 11712 - DNA, 18 bp, Homo sapiens
  source 1..18: mol_type = genomic DNA
cgaatccgagtcacggca

SEQ ID NO: 11713 - DNA, 19 bp, Homo sapiens
  source 1..19: mol_type = genomic DNA
cgaatccgagtcacggcac

SEQ ID NO: 11714 - DNA, 20 bp, Homo sapiens
  source 1..20: mol_type = genomic DNA
cgaatccgagtcacggcacc

SEQ ID NO: 11715 - DNA, 21 bp, Homo sapiens
  source 1..21: mol_type = genomic DNA
cgaatccgagtcacggcacca

SEQ ID NO: 11716 - DNA, 20 bp, Homo sapiens
  source 1..20: mol_type = genomic DNA
cgaatccggctcgaaggacc

SEQ ID NO: 11717 - DNA, 21 bp, Homo sapiens
  source 1..21: mol_type = genomic DNA
cgaatccggctcgaaggacca

SEQ ID NO: 11718 - DNA, 20 bp, Homo sapiens
  source 1..20: mol_type = genomic DNA
cgaatccggctcggaggacc

SEQ ID NO: 11719 - DNA, 20 bp, Homo sapiens
  source 1..20: mol_type = genomic DNA
cgaatcctgccgactacgcc

SEQ ID NO: 11720 - DNA, 21 bp, Homo sapiens
  source 1..21: mol_type = genomic DNA
cgaatcctgccgactacgcca

SEQ ID NO: 11721 - DNA, 21 bp, Homo sapiens
  source 1..21: mol_type = genomic DNA
cgaatcctgctcacagcgcca

SEQ ID NO: 11722 - DNA, 18 bp, Homo sapiens
  source 1..18: mol_type = genomic DNA
cgaatcctgttcgtgacg

SEQ ID NO: 11723 - DNA, 20 bp, Homo sapiens
  source 1..20: mol_type = genomic DNA
cgaatcctgttcgtgacgcc

SEQ ID NO: 11724 - DNA, 21 bp, Homo sapiens
  source 1..21: mol_type = genomic DNA
cgaatcctgttcgtgacgcca

SEQ ID NO: 11725 - DNA, 16 bp, Homo sapiens
  source 1..16: mol_type = genomic DNA
cgaatgatttcgactc

SEQ ID NO: 11726 - DNA, 17 bp, Homo sapiens
  source 1..17: mol_type = genomic DNA
cgaatgatttcgactca

SEQ ID NO: 11727 - DNA, 18 bp, Homo sapiens
  source 1..18: mol_type = genomic DNA
cgaatgatttcgactcat

SEQ ID NO: 11728 - DNA, 19 bp, Homo sapiens
  source 1..19: mol_type = genomic DNA
cgaatgatttcgactcatt

SEQ ID NO: 11729 - DNA, 20 bp, Homo sapiens
  source 1..20: mol_type = genomic DNA
cgaatgatttcgactcatta

SEQ ID NO: 11730 - DNA, 21 bp, Homo sapiens
  source 1..21: mol_type = genomic DNA
cgaatgatttcgactcattaa

SEQ ID NO: 11731 - DNA, 22 bp, Homo sapiens
  source 1..22: mol_type = genomic DNA
cgaatgatttcgactcattaaa

SEQ ID NO: 11732 - DNA, 23 bp, Homo sapiens
  source 1..23: mol_type = genomic DNA
cgaatgatttcgactcattaaat

SEQ ID NO: 11733 - DNA, 30 bp, Homo sapiens
  source 1..30: mol_type = genomic DNA
cgaatgatttcgactcattaaattatgata

SEQ ID NO: 11734 - DNA, 31 bp, Homo sapiens
  source 1..31: mol_type = genomic DNA
cgaatgatttcgactcattaaattatgataa

SEQ ID NO: 11735 - DNA, 33 bp, Homo sapiens
  source 1..33: mol_type = genomic DNA
cgaatgatttcgactcattaaattatgataatc

SEQ ID NO: 11736 - DNA, 40 bp, Homo sapiens
  source 1..40: mol_type = genomic DNA
cgaatgatttcgactcattaaattatgataatcatattta

SEQ ID NO: 11737 - DNA, 41 bp, Homo sapiens
  source 1..41: mol_type = genomic DNA
cgaatgatttcgactcattaaattatgataatcatatttac

SEQ ID NO: 11738 - DNA, 42 bp, Homo sapiens
  source 1..42: mol_type = genomic DNA
cgaatgatttcgactcattaaattatgataatcatatttacc

SEQ ID NO: 11739 - DNA, 46 bp, Homo sapiens
  source 1..46: mol_type = genomic DNA
cgaatgatttcgactcattaaattatgataatcatatttaccaacc

SEQ ID NO: 11740 - DNA, 47 bp, Homo sapiens
  source 1..47: mol_type = genomic DNA
cgaatgatttcgactcattaaattatgataatcatatttaccaacca

SEQ ID NO: 11741 - DNA, 34 bp, Homo sapiens
  source 1..34: mol_type = genomic DNA
cgacccagtggcctaatggataaggcatcagcct

SEQ ID NO: 11742 - DNA, 16 bp, Homo sapiens
  source 1..16: mol_type = genomic DNA
cgaccccttatttacc

SEQ ID NO: 11743 - DNA, 17 bp, Homo sapiens
  source 1..17: mol_type = genomic DNA
cgaccccttatttaccc

SEQ ID NO: 11744 - DNA, 18 bp, Homo sapiens
  source 1..18: mol_type = genomic DNA
cgaccccttatttacccc

SEQ ID NO: 11745 - DNA, 19 bp, Homo sapiens
  source 1..19: mol_type = genomic DNA
cgaccccttatttacccca

SEQ ID NO: 11746 - DNA, 31 bp, Homo sapiens
  source 1..31: mol_type = genomic DNA
cgacccgggttcgattcccgggcggcgcacc

SEQ ID NO: 11747 - DNA, 17 bp, Homo sapiens
  source 1..17: mol_type = genomic DNA
cgactcattaaattatg

SEQ ID NO: 11748 - DNA, 19 bp, Homo sapiens
  source 1..19: mol_type = genomic DNA
cgactcattaaattatgat

SEQ ID NO: 11749 - DNA, 23 bp, Homo sapiens
  source 1..23: mol_type = genomic DNA
cgactcattaaattatgataatc

SEQ ID NO: 11750 - DNA, 30 bp, Homo sapiens
  source 1..30: mol_type = genomic DNA
cgactcattaaattatgataatcatattta

SEQ ID NO: 11751 - DNA, 31 bp, Homo sapiens
  source 1..31: mol_type = genomic DNA
cgactcattaaattatgataatcatatttac

SEQ ID NO: 11752 - DNA, 32 bp, Homo sapiens
  source 1..32: mol_type = genomic DNA
cgactcattaaattatgataatcatatttacc

SEQ ID NO: 11753 - DNA, 34 bp, Homo sapiens
  source 1..34: mol_type = genomic DNA
cgactcattaaattatgataatcatatttaccaa

SEQ ID NO: 11754 - DNA, 35 bp, Homo sapiens
  source 1..35: mol_type = genomic DNA
cgactcattaaattatgataatcatatttaccaac

SEQ ID NO: 11755 - DNA, 36 bp, Homo sapiens
  source 1..36: mol_type = genomic DNA
cgactcattaaattatgataatcatatttaccaacc

SEQ ID NO: 11756 - DNA, 37 bp, Homo sapiens
  source 1..37: mol_type = genomic DNA
cgactcattaaattatgataatcatatttaccaacca

SEQ ID NO: 11757 - DNA, 19 bp, Homo sapiens
  source 1..19: mol_type = genomic DNA
cgactcccggtatgggaac

SEQ ID NO: 11758 - DNA, 20 bp, Homo sapiens
  source 1..20: mol_type = genomic DNA
cgactcccggtatgggaacc

SEQ ID NO: 11759 - DNA, 16 bp, Homo sapiens
  source 1..16: mol_type = genomic DNA
cgactcccggtgtggg

SEQ ID NO: 11760 - DNA, 17 bp, Homo sapiens
  source 1..17: mol_type = genomic DNA
cgactcccggtgtggga

SEQ ID NO: 11761 - DNA, 18 bp, Homo sapiens
  source 1..18: mol_type = genomic DNA
cgactcccggtgtgggaa

SEQ ID NO: 11762 - DNA, 19 bp, Homo sapiens
  source 1..19: mol_type = genomic DNA
cgactcccggtgtgggaac

SEQ ID NO: 11763 - DNA, 20 bp, Homo sapiens
  source 1..20: mol_type = genomic DNA
cgactcccggtgtgggaacc

SEQ ID NO: 11764 - DNA, 21 bp, Homo sapiens
  source 1..21: mol_type = genomic DNA
cgactcccggtgtgggaacca

SEQ ID NO: 11765 - DNA, 16 bp, Homo sapiens
  source 1..16: mol_type = genomic DNA
cgactcctggctggct

SEQ ID NO: 11766 - DNA, 17 bp, Homo sapiens
  source 1..17: mol_type = genomic DNA
cgactcctggctggctc

SEQ ID NO: 11767 - DNA, 18 bp, Homo sapiens
  source 1..18: mol_type = genomic DNA
cgactcctggctggctcg

SEQ ID NO: 11768 - DNA, 19 bp, Homo sapiens
  source 1..19: mol_type = genomic DNA
cgactcctggctggctcgc

SEQ ID NO: 11769 - DNA, 20 bp, Homo sapiens
  source 1..20: mol_type = genomic DNA
cgactcctggctggctcgcc

SEQ ID NO: 11770 - DNA, 21 bp, Homo sapiens
  source 1..21: mol_type = genomic DNA
cgactcctggctggctcgcca

SEQ ID NO: 11771 - DNA, 20 bp, Homo sapiens
  source 1..20: mol_type = genomic DNA
cgagaaagctcacaagaact

SEQ ID NO: 11772 - DNA, 21 bp, Homo sapiens
  source 1..21: mol_type = genomic DNA
cgagaaagctcacaagaactg

SEQ ID NO: 11773 - DNA, 22 bp, Homo sapiens
  source 1..22: mol_type = genomic DNA
cgagaaagctcacaagaactgc

SEQ ID NO: 11774 - DNA, 23 bp, Homo sapiens
  source 1..23: mol_type = genomic DNA
cgagaaagctcacaagaactgct

SEQ ID NO: 11775 - DNA, 24 bp, Homo sapiens
  source 1..24: mol_type = genomic DNA
cgagaaagctcacaagaactgcta

SEQ ID NO: 11776 - DNA, 26 bp, Homo sapiens
  source 1..26: mol_type = genomic DNA
cgagaaagctcacaagaactgctaac

SEQ ID NO: 11777 - DNA, 27 bp, Homo sapiens
  source 1..27: mol_type = genomic DNA
cgagaaagctcacaagaactgctaact

SEQ ID NO: 11778 - DNA, 28 bp, Homo sapiens
  source 1..28: mol_type = genomic DNA
cgagaaagctcacaagaactgctaactc

SEQ ID NO: 11779 - DNA, 16 bp, Homo sapiens
  source 1..16: mol_type = genomic DNA
cgagaggtagcgggat

SEQ ID NO: 11780 - DNA, 17 bp, Homo sapiens
  source 1..17: mol_type = genomic DNA
cgagaggtagcgggatc

SEQ ID NO: 11781 - DNA, 18 bp, Homo sapiens
  source 1..18: mol_type = genomic DNA
cgagaggtagcgggatcg

SEQ ID NO: 11782 - DNA, 17 bp, Homo sapiens
  source 1..17: mol_type = genomic DNA
cgagaggtagtgggatc

SEQ ID NO: 11783 - DNA, 17 bp, Homo sapiens
  source 1..17: mol_type = genomic DNA
cgagaggtcccgggttc

SEQ ID NO: 11784 - DNA, 18 bp, Homo sapiens
  source 1..18: mol_type = genomic DNA
cgagaggtcccgggttca

SEQ ID NO: 11785 - DNA, 31 bp, Homo sapiens
  source 1..31: mol_type = genomic DNA
cgagaggtcccgggttcaaatcccggacgag

SEQ ID NO: 11786 - DNA, 32 bp, Homo sapiens
  source 1..32: mol_type = genomic DNA
cgagaggtcccgggttcaaatcccggacgagc

SEQ ID NO: 11787 - DNA, 33 bp, Homo sapiens
  source 1..33: mol_type = genomic DNA
cgagaggtcccgggttcaaatcccggacgagcc

SEQ ID NO: 11788 - DNA, 34 bp, Homo sapiens
  source 1..34: mol_type = genomic DNA
cgagaggtcccgggttcaaatcccggacgagccc

SEQ ID NO: 11789 - DNA, 35 bp, Homo sapiens
  source 1..35: mol_type = genomic DNA
cgagaggtcccgggttcaaatcccggacgagcccc

SEQ ID NO: 11790 - DNA, 36 bp, Homo sapiens
  source 1..36: mol_type = genomic DNA
cgagaggtcccgggttcaaatcccggacgagccccc

SEQ ID NO: 11791 - DNA, 37 bp, Homo sapiens
  source 1..37: mol_type = genomic DNA
cgagaggtcccgggttcaaatcccggacgagccccca

SEQ ID NO: 11792 - DNA, 17 bp, Homo sapiens
  source 1..17: mol_type = genomic DNA
cgagccccacgttgggc

SEQ ID NO: 11793 - DNA, 18 bp, Homo sapiens
  source 1..18: mol_type = genomic DNA
cgagccccacgttgggcg

SEQ ID NO: 11794 - DNA, 19 bp, Homo sapiens
  source 1..19: mol_type = genomic DNA
cgagccccacgttgggcgc

SEQ ID NO: 11795 - DNA, 20 bp, Homo sapiens
  source 1..20: mol_type = genomic DNA
cgagccccacgttgggcgcc

SEQ ID NO: 11796 - DNA, 21 bp, Homo sapiens
  source 1..21: mol_type = genomic DNA
cgagccccacgttgggcgcca

SEQ ID NO: 11797 - DNA, 19 bp, Homo sapiens
  source 1..19: mol_type = genomic DNA
cgagccccagtggaaccac

SEQ ID NO: 11798 - DNA, 20 bp, Homo sapiens
  source 1..20: mol_type = genomic DNA
cgagccccagtggaaccacc

SEQ ID NO: 11799 - DNA, 21 bp, Homo sapiens
  source 1..21: mol_type = genomic DNA
cgagccccagtggaaccacca

SEQ ID NO: 11800 - DNA, 20 bp, Homo sapiens
  source 1..20: mol_type = genomic DNA
cgagcctcacctggagcacc

SEQ ID NO: 11801 - DNA, 18 bp, Homo sapiens
  source 1..18: mol_type = genomic DNA
cgagcgcgctggacttct

SEQ ID NO: 11802 - DNA, 30 bp, Homo sapiens
  source 1..30: mol_type = genomic DNA
cgagcggtctaaggcgctgcgttcaggtcg

SEQ ID NO: 11803 - DNA, 29 bp, Homo sapiens
  source 1..29: mol_type = genomic DNA
cgagcggtctaaggcgctggattaaggct

SEQ ID NO: 11804 - DNA, 16 bp, Homo sapiens
  source 1..16: mol_type = genomic DNA
cgaggccccgggttca

SEQ ID NO: 11805 - DNA, 29 bp, Homo sapiens
  source 1..29: mol_type = genomic DNA
cgaggccccgggttcaatccccggcacct

SEQ ID NO: 11806 - DNA, 19 bp, Homo sapiens
  source 1..19: mol_type = genomic DNA
cgaggtgattttcatattg

SEQ ID NO: 11807 - DNA, 20 bp, Homo sapiens
  source 1..20: mol_type = genomic DNA
cgaggtgattttcatattga

SEQ ID NO: 11808 - DNA, 23 bp, Homo sapiens
  source 1..23: mol_type = genomic DNA
cgaggtgattttcatattgaatt

SEQ ID NO: 11809 - DNA, 24 bp, Homo sapiens
  source 1..24: mol_type = genomic DNA
cgaggtgattttcatattgaattg

SEQ ID NO: 11810 - DNA, 25 bp, Homo sapiens
  source 1..25: mol_type = genomic DNA
cgaggtgattttcatattgaattgc

SEQ ID NO: 11811 - DNA, 26 bp, Homo sapiens
  source 1..26: mol_type = genomic DNA
cgaggtgattttcatattgaattgca

SEQ ID NO: 11812 - DNA, 31 bp, Homo sapiens
  source 1..31: mol_type = genomic DNA
cgaggtgattttcatattgaattgcaaattc

SEQ ID NO: 11813 - DNA, 16 bp, Homo sapiens
  source 1..16: mol_type = genomic DNA
cgaggtggccgagtgg

SEQ ID NO: 11814 - DNA, 21 bp, Homo sapiens
  source 1..21: mol_type = genomic DNA
cgaggtggccgagtggttaag

SEQ ID NO: 11815 - DNA, 16 bp, Homo sapiens
  source 1..16: mol_type = genomic DNA
cgaggttgtgagttcg

SEQ ID NO: 11816 - DNA, 33 bp, Homo sapiens
  source 1..33: mol_type = genomic DNA
cgaggttgtgagttcgagcctcacctggagcac

SEQ ID NO: 11817 - DNA, 34 bp, Homo sapiens
  source 1..34: mol_type = genomic DNA
cgaggttgtgagttcgagcctcacctggagcacc

SEQ ID NO: 11818 - DNA, 35 bp, Homo sapiens
  source 1..35: mol_type = genomic DNA
cgaggttgtgagttcgagcctcacctggagcacca

SEQ ID NO: 11819 - DNA, 16 bp, Homo sapiens
  source 1..16: mol_type = genomic DNA
cgagtcccacccgggg

SEQ ID NO: 11820 - DNA, 16 bp, Homo sapiens
  source 1..16: mol_type = genomic DNA
cgagtcccatctgggg

SEQ ID NO: 11821 - DNA, 20 bp, Homo sapiens
  source 1..20: mol_type = genomic DNA
cgagtcccatctggggtgcc

SEQ ID NO: 11822 - DNA, 18 bp, Homo sapiens
  source 1..18: mol_type = genomic DNA
cgagtcccggcggagtcg

SEQ ID NO: 11823 - DNA, 17 bp, Homo sapiens
  source 1..17: mol_type = genomic DNA
cgagtcctgccgcggtc

SEQ ID NO: 11824 - DNA, 18 bp, Homo sapiens
  source 1..18: mol_type = genomic DNA
cgagtcctgccgcggtcg

SEQ ID NO: 11825 - DNA, 20 bp, Homo sapiens
  source 1..20: mol_type = genomic DNA
cgagtcctgccgcggtcgcc

SEQ ID NO: 11826 - DNA, 21 bp, Homo sapiens
  source 1..21: mol_type = genomic DNA
cgagtcctgccgcggtcgcca

SEQ ID NO: 11827 - DNA, 18 bp, Homo sapiens
  source 1..18: mol_type = genomic DNA
cgagtctcggtggaacct

SEQ ID NO: 11828 - DNA, 21 bp, Homo sapiens
  source 1..21: mol_type = genomic DNA
cgagtctcggtggaacctcca

SEQ ID NO: 11829 - DNA, 22 bp, Homo sapiens
  source 1..22: mol_type = genomic DNA
cgagttcaaatctcgctggggc

SEQ ID NO: 11830 - DNA, 23 bp, Homo sapiens
  source 1..23: mol_type = genomic DNA
cgagttcaaatctcgctggggcc

SEQ ID NO: 11831 - DNA, 24 bp, Homo sapiens
  source 1..24: mol_type = genomic DNA
cgagttcaaatctcgctggggcct

SEQ ID NO: 11832 - DNA, 25 bp, Homo sapiens
  source 1..25: mol_type = genomic DNA
cgagttcaaatctcgctggggcctc

SEQ ID NO: 11833 - DNA, 26 bp, Homo sapiens
  source 1..26: mol_type = genomic DNA
cgagttcaaatctcgctggggcctcc

SEQ ID NO: 11834 - DNA, 22 bp, Homo sapiens
  source 1..22: mol_type = genomic DNA
cgagttcaaatctcggtggaac

SEQ ID NO: 11835 - DNA, 23 bp, Homo sapiens
  source 1..23: mol_type = genomic DNA
cgagttcaaatctcggtggaacc

SEQ ID NO: 11836 - DNA, 24 bp, Homo sapiens
  source 1..24: mol_type = genomic DNA
cgagttcaaatctcggtggaacct

SEQ ID NO: 11837 - DNA, 25 bp, Homo sapiens
  source 1..25: mol_type = genomic DNA
cgagttcaaatctcggtggaacctc

SEQ ID NO: 11838 - DNA, 26 bp, Homo sapiens
  source 1..26: mol_type = genomic DNA
cgagttcaaatctcggtggaacctcc

SEQ ID NO: 11839 - DNA, 22 bp, Homo sapiens
  source 1..22: mol_type = genomic DNA
cgagttcaaatctcggtgggac

SEQ ID NO: 11840 - DNA, 23 bp, Homo sapiens
  source 1..23: mol_type = genomic DNA
cgagttcaaatctcggtgggacc

SEQ ID NO: 11841 - DNA, 24 bp, Homo sapiens
  source 1..24: mol_type = genomic DNA
cgagttcaaatctcggtgggacct

SEQ ID NO: 11842 - DNA, 25 bp, Homo sapiens
  source 1..25: mol_type = genomic DNA
cgagttcaaatctcggtgggacctc

SEQ ID NO: 11843 - DNA, 26 bp, Homo sapiens
  source 1..26: mol_type = genomic DNA
cgagttcaaatctcggtgggacctcc

SEQ ID NO: 11844 - DNA, 23 bp, Homo sapiens
  source 1..23: mol_type = genomic DNA
cgagttcaattctcgctggggcc

SEQ ID NO: 11845 - DNA, 25 bp, Homo sapiens
  source 1..25: mol_type = genomic DNA
cgagttcaattctcgctggggcctc

SEQ ID NO: 11846 - DNA, 24 bp, Homo sapiens
  source 1..24: mol_type = genomic DNA
cgagttcgaatctcggtgggacct

SEQ ID NO: 11847 - DNA, 25 bp, Homo sapiens
  source 1..25: mol_type = genomic DNA
cgagttcgaatctcggtgggacctc

SEQ ID NO: 11848 - DNA, 23 bp, Homo sapiens
  source 1..23: mol_type = genomic DNA
cgagttcgagtctcggtggaacc

SEQ ID NO: 11849 - DNA, 24 bp, Homo sapiens
  source 1..24: mol_type = genomic DNA
cgagttcgagtctcggtggaacct

SEQ ID NO: 11850 - DNA, 25 bp, Homo sapiens
  source 1..25: mol_type = genomic DNA
cgagttcgagtctcggtggaacctc

SEQ ID NO: 11851 - DNA, 26 bp, Homo sapiens
  source 1..26: mol_type = genomic DNA
cgagttcgagtctcggtggaacctcc

SEQ ID NO: 11852 - DNA, 27 bp, Homo sapiens
  source 1..27: mol_type = genomic DNA
cgagttcgagtctcggtggaacctcca

SEQ ID NO: 11853 - DNA, 26 bp, Homo sapiens
  source 1..26: mol_type = genomic DNA
cgagttcgatcctcgctggggcctcc

SEQ ID NO: 11854 - DNA, 18 bp, Homo sapiens
  source 1..18: mol_type = genomic DNA
cgatagagcatgagactc

SEQ ID NO: 11855 - DNA, 28 bp, Homo sapiens
  source 1..28: mol_type = genomic DNA
cgatagctcagctggtagagcggaggac

SEQ ID NO: 11856 - DNA, 20 bp, Homo sapiens
  source 1..20: mol_type = genomic DNA
cgatccccagcatctccacc

SEQ ID NO: 11857 - DNA, 21 bp, Homo sapiens
  source 1..21: mol_type = genomic DNA
cgatccccagcatctccacca

SEQ ID NO: 11858 - DNA, 16 bp, Homo sapiens
  source 1..16: mol_type = genomic DNA
cgatccccagtacctc

SEQ ID NO: 11859 - DNA, 16 bp, Homo sapiens
  source 1..16: mol_type = genomic DNA
cgatccccggcacctc

SEQ ID NO: 11860 - DNA, 20 bp, Homo sapiens
  source 1..20: mol_type = genomic DNA
cgatccccggcacctccacc

SEQ ID NO: 11861 - DNA, 21 bp, Homo sapiens
  source 1..21: mol_type = genomic DNA
cgatccccggcacctccacca

SEQ ID NO: 11862 - DNA, 18 bp, Homo sapiens
  source 1..18: mol_type = genomic DNA
cgatccccggcatctcca

SEQ ID NO: 11863 - DNA, 19 bp, Homo sapiens
  source 1..19: mol_type = genomic DNA
cgatccccggcatctccac

SEQ ID NO: 11864 - DNA, 20 bp, Homo sapiens
  source 1..20: mol_type = genomic DNA
cgatccccggcatctccacc

SEQ ID NO: 11865 - DNA, 21 bp, Homo sapiens
  source 1..21: mol_type = genomic DNA
cgatccccggcatctccacca

SEQ ID NO: 11866 - DNA, 17 bp, Homo sapiens
  source 1..17: mol_type = genomic DNA
cgatccccgtacgggcc

SEQ ID NO: 11867 - DNA, 20 bp, Homo sapiens
  source 1..20: mol_type = genomic DNA
cgatccccgtacgggccacc

SEQ ID NO: 11868 - DNA, 21 bp, Homo sapiens
  source 1..21: mol_type = genomic DNA
cgatccccgtacgggccacca

SEQ ID NO: 11869 - DNA, 19 bp, Homo sapiens
  source 1..19: mol_type = genomic DNA
cgatccccgtactggccac

SEQ ID NO: 11870 - DNA, 21 bp, Homo sapiens
  source 1..21: mol_type = genomic DNA
cgatcccgggcggaaacacca

SEQ ID NO: 11871 - DNA, 18 bp, Homo sapiens
  source 1..18: mol_type = genomic DNA
cgatcccgggtttcggca

SEQ ID NO: 11872 - DNA, 19 bp, Homo sapiens
  source 1..19: mol_type = genomic DNA
cgatcccgggtttcggcac

SEQ ID NO: 11873 - DNA, 21 bp, Homo sapiens
  source 1..21: mol_type = genomic DNA
cgatcccgggtttcggcacca

SEQ ID NO: 11874 - DNA, 22 bp, Homo sapiens
  source 1..22: mol_type = genomic DNA
cgatccgagttcaaatctcggt

SEQ ID NO: 11875 - DNA, 23 bp, Homo sapiens
  source 1..23: mol_type = genomic DNA
cgatccgagttcaaatctcggtg

SEQ ID NO: 11876 - DNA, 29 bp, Homo sapiens
  source 1..29: mol_type = genomic DNA
cgatccgagttcaaatctcggtgggacct

SEQ ID NO: 11877 - DNA, 30 bp, Homo sapiens
  source 1..30: mol_type = genomic DNA
cgatccgagttcaaatctcggtgggacctc

SEQ ID NO: 11878 - DNA, 23 bp, Homo sapiens
  source 1..23: mol_type = genomic DNA
cgatccgagttcgagtctcggtg

SEQ ID NO: 11879 - DNA, 18 bp, Homo sapiens
  source 1..18: mol_type = genomic DNA
cgatgcccgcatcctcca

SEQ ID NO: 11880 - DNA, 20 bp, Homo sapiens
  source 1..20: mol_type = genomic DNA
cgatgcccgcatcctccacc

SEQ ID NO: 11881 - DNA, 21 bp, Homo sapiens
  source 1..21: mol_type = genomic DNA
cgatgcccgcatcctccacca

SEQ ID NO: 11882 - DNA, 17 bp, Homo sapiens
  source 1..17: mol_type = genomic DNA
cgatggatcgaaaccat

SEQ ID NO: 11883 - DNA, 25 bp, Homo sapiens
  source 1..25: mol_type = genomic DNA
cgatggatcgaaaccatcctctgct

SEQ ID NO: 11884 - DNA, 26 bp, Homo sapiens
  source 1..26: mol_type = genomic DNA
cgatggatcgaaaccatcctctgcta

SEQ ID NO: 11885 - DNA, 27 bp, Homo sapiens
  source 1..27: mol_type = genomic DNA
cgatggatcgaaaccatcctctgctac

SEQ ID NO: 11886 - DNA, 28 bp, Homo sapiens
  source 1..28: mol_type = genomic DNA
cgatggatcgaaaccatcctctgctacc

SEQ ID NO: 11887 - DNA, 29 bp, Homo sapiens
  source 1..29: mol_type = genomic DNA
cgatggatcgaaaccatcctctgctacca

SEQ ID NO: 11888 - DNA, 19 bp, Homo sapiens
  source 1..19: mol_type = genomic DNA
cgatggccgagtggttaag

SEQ ID NO: 11889 - DNA, 24 bp, Homo sapiens
  source 1..24: mol_type = genomic DNA
cgatggccgagtggttaaggcgtt

SEQ ID NO: 11890 - DNA, 16 bp, Homo sapiens
  source 1..16: mol_type = genomic DNA
cgatggcgtgggttcg

SEQ ID NO: 11891 - DNA, 29 bp, Homo sapiens
  source 1..29: mol_type = genomic DNA
cgatggcgtgggttcgaatcccaccgctg

SEQ ID NO: 11892 - DNA, 23 bp, Homo sapiens
  source 1..23: mol_type = genomic DNA
cgatggtttttcatatcattggt

SEQ ID NO: 11893 - DNA, 24 bp, Homo sapiens
  source 1..24: mol_type = genomic DNA
cgatggtttttcatatcattggtc

SEQ ID NO: 11894 - DNA, 25 bp, Homo sapiens
  source 1..25: mol_type = genomic DNA
cgatggtttttcatatcattggtcg

SEQ ID NO: 11895 - DNA, 26 bp, Homo sapiens
  source 1..26: mol_type = genomic DNA
cgatggtttttcatatcattggtcgt

SEQ ID NO: 11896 - DNA, 27 bp, Homo sapiens
  source 1..27: mol_type = genomic DNA
cgatggtttttcatatcattggtcgtg

SEQ ID NO: 11897 - DNA, 30 bp, Homo sapiens
  source 1..30: mol_type = genomic DNA
cgatggtttttcatatcattggtcgtggtt

SEQ ID NO: 11898 - DNA, 31 bp, Homo sapiens
  source 1..31: mol_type = genomic DNA
cgatggtttttcatatcattggtcgtggttg

SEQ ID NO: 11899 - DNA, 32 bp, Homo sapiens
  source 1..32: mol_type = genomic DNA
cgatggtttttcatatcattggtcgtggttgt

SEQ ID NO: 11900 - DNA, 33 bp, Homo sapiens
  source 1..33: mol_type = genomic DNA
cgatggtttttcatatcattggtcgtggttgta

SEQ ID NO: 11901 - DNA, 34 bp, Homo sapiens
  source 1..34: mol_type = genomic DNA
cgatggtttttcatatcattggtcgtggttgtag

SEQ ID NO: 11902 - DNA, 35 bp, Homo sapiens
  source 1..35: mol_type = genomic DNA
cgatggtttttcatatcattggtcgtggttgtagt

SEQ ID NO: 11903 - DNA, 36 bp, Homo sapiens
  source 1..36: mol_type = genomic DNA
cgatggtttttcatatcattggtcgtggttgtagtc

SEQ ID NO: 11904 - DNA, 37 bp, Homo sapiens
  source 1..37: mol_type = genomic DNA
cgatggtttttcatatcattggtcgtggttgtagtcc

SEQ ID NO: 11905 - DNA, 38 bp, Homo sapiens
  source 1..38: mol_type = genomic DNA
cgatggtttttcatatcattggtcgtggttgtagtccg

SEQ ID NO: 11906 - DNA, 39 bp, Homo sapiens
  source 1..39: mol_type = genomic DNA
cgatggtttttcatatcattggtcgtggttgtagtccgt

SEQ ID NO: 11907 - DNA, 46 bp, Homo sapiens
  source 1..46: mol_type = genomic DNA
cgatggtttttcatatcattggtcgtggttgtagtccgtgcgagaa

SEQ ID NO: 11908 - DNA, 47 bp, Homo sapiens
  source 1..47: mol_type = genomic DNA
cgatggtttttcatatcattggtcgtggttgtagtccgtgcgagaat

SEQ ID NO: 11909 - DNA, 48 bp, Homo sapiens
  source 1..48: mol_type = genomic DNA
cgatggtttttcatatcattggtcgtggttgtagtccgtgcgagaata

SEQ ID NO: 11910 - DNA, 18 bp, Homo sapiens
  source 1..18: mol_type = genomic DNA
cgattccccgacggggag

SEQ ID NO: 11911 - DNA, 19 bp, Homo sapiens
  source 1..19: mol_type = genomic DNA
cgattccccgacggggagc

SEQ ID NO: 11912 - DNA, 20 bp, Homo sapiens
  source 1..20: mol_type = genomic DNA
cgattccccgacggggagcc

SEQ ID NO: 11913 - DNA, 21 bp, Homo sapiens
  source 1..21: mol_type = genomic DNA
cgattccccgacggggagcca

SEQ ID NO: 11914 - DNA, 16 bp, Homo sapiens
  source 1..16: mol_type = genomic DNA
cgattcccggccaacg

SEQ ID NO: 11915 - DNA, 18 bp, Homo sapiens
  source 1..18: mol_type = genomic DNA
cgattcccggccaacgca

SEQ ID NO: 11916 - DNA, 19 bp, Homo sapiens
  source 1..19: mol_type = genomic DNA
cgattcccggccaacgcac

SEQ ID NO: 11917 - DNA, 20 bp, Homo sapiens
  source 1..20: mol_type = genomic DNA
cgattcccggccaacgcacc

SEQ ID NO: 11918 - DNA, 21 bp, Homo sapiens
  source 1..21: mol_type = genomic DNA
cgattcccggccaacgcacca

SEQ ID NO: 11919 - DNA, 16 bp, Homo sapiens
  source 1..16: mol_type = genomic DNA
cgattcccggccaatg

SEQ ID NO: 11920 - DNA, 20 bp, Homo sapiens
  source 1..20: mol_type = genomic DNA
cgattcccggccaatgcacc

SEQ ID NO: 11921 - DNA, 21 bp, Homo sapiens
  source 1..21: mol_type = genomic DNA
cgattcccggccaatgcacca

SEQ ID NO: 11922 - DNA, 21 bp, Homo sapiens
  source 1..21: mol_type = genomic DNA
cgattcccggcccatgcacca

SEQ ID NO: 11923 - DNA, 16 bp, Homo sapiens
  source 1..16: mol_type = genomic DNA
cgattcccgggcggcg

SEQ ID NO: 11924 - DNA, 17 bp, Homo sapiens
  source 1..17: mol_type = genomic DNA
cgattcccgggcggcgc

SEQ ID NO: 11925 - DNA, 19 bp, Homo sapiens
  source 1..19: mol_type = genomic DNA
cgattcccgggcggcgcac

SEQ ID NO: 11926 - DNA, 20 bp, Homo sapiens
  source 1..20: mol_type = genomic DNA
cgattcccgggcggcgcacc

SEQ ID NO: 11927 - DNA, 21 bp, Homo sapiens
  source 1..21: mol_type = genomic DNA
cgattcccgggcggcgcacca

SEQ ID NO: 11928 - DNA, 20 bp, Homo sapiens
  source 1..20: mol_type = genomic DNA
cgattcccggtcaggaaacc

SEQ ID NO: 11929 - DNA, 19 bp, Homo sapiens
  source 1..19: mol_type = genomic DNA
cgattcccggtcagggaac

SEQ ID NO: 11930 - DNA, 20 bp, Homo sapiens
  source 1..20: mol_type = genomic DNA
cgattcccggtcagggaacc

SEQ ID NO: 11931 - DNA, 21 bp, Homo sapiens
  source 1..21: mol_type = genomic DNA
cgattcccggtcagggaacca

SEQ ID NO: 11932 - DNA, 19 bp, Homo sapiens
  source 1..19: mol_type = genomic DNA
cgattccggctcgaaggac

SEQ ID NO: 11933 - DNA, 20 bp, Homo sapiens
  source 1..20: mol_type = genomic DNA
cgattccggctcgaaggacc

SEQ ID NO: 11934 - DNA, 21 bp, Homo sapiens
  source 1..21: mol_type = genomic DNA
cgattccggctcgaaggacca

SEQ ID NO: 11935 - DNA, 20 bp, Homo sapiens
  source 1..20: mol_type = genomic DNA
cgattccttccttttttgcc

SEQ ID NO: 11936 - DNA, 21 bp, Homo sapiens
  source 1..21: mol_type = genomic DNA
cgattccttccttttttgcca

SEQ ID NO: 11937 - DNA, 18 bp, Homo sapiens
  source 1..18: mol_type = genomic DNA
cgattctcatagtcctag

SEQ ID NO: 11938 - DNA, 19 bp, Homo sapiens
  source 1..19: mol_type = genomic DNA
cgattctcatagtcctagc

SEQ ID NO: 11939 - DNA, 20 bp, Homo sapiens
  source 1..20: mol_type = genomic DNA
cgattctcatagtcctagcc

SEQ ID NO: 11940 - DNA, 21 bp, Homo sapiens
  source 1..21: mol_type = genomic DNA
cgattctcatagtcctagcca

SEQ ID NO: 11941 - DNA, 22 bp, Homo sapiens
  source 1..22: mol_type = genomic DNA
cgcaatggacgagcgcgctgga

SEQ ID NO: 11942 - DNA, 19 bp, Homo sapiens
  source 1..19: mol_type = genomic DNA
cgcaatggatagcgcattg

SEQ ID NO: 11943 - DNA, 21 bp, Homo sapiens
  source 1..21: mol_type = genomic DNA
cgcaatggatagcgcattgga

SEQ ID NO: 11944 - DNA, 25 bp, Homo sapiens
  source 1..25: mol_type = genomic DNA
cgcaatggatagcgcattggacttc

SEQ ID NO: 11945 - DNA, 32 bp, Homo sapiens
  source 1..32: mol_type = genomic DNA
cgcactggtggttcagtggtagaattctcgcc

SEQ ID NO: 11946 - DNA, 19 bp, Homo sapiens
  source 1..19: mol_type = genomic DNA
cgcagaaggtcctgggttc

SEQ ID NO: 11947 - DNA, 35 bp, Homo sapiens
  source 1..35: mol_type = genomic DNA
cgcagaaggtcctgggttcaagccccagtggaacc

SEQ ID NO: 11948 - DNA, 38 bp, Homo sapiens
  source 1..38: mol_type = genomic DNA
cgcagaaggtcctgggttcaagccccagtggaaccacc

SEQ ID NO: 11949 - DNA, 28 bp, Homo sapiens
  source 1..28: mol_type = genomic DNA
cgcagaaggtcctgggttcgagccccag

SEQ ID NO: 11950 - DNA, 33 bp, Homo sapiens
  source 1..33: mol_type = genomic DNA
cgcagaaggtcctgggttcgagccccagtggaa

SEQ ID NO: 11951 - DNA, 34 bp, Homo sapiens
  source 1..34: mol_type = genomic DNA
cgcagaaggtcctgggttcgagccccagtggaac

SEQ ID NO: 11952 - DNA, 35 bp, Homo sapiens
  source 1..35: mol_type = genomic DNA
cgcagaaggtcctgggttcgagccccagtggaacc

SEQ ID NO: 11953 - DNA, 36 bp, Homo sapiens
  source 1..36: mol_type = genomic DNA
cgcagaaggtcctgggttcgagccccagtggaacca

SEQ ID NO: 11954 - DNA, 37 bp, Homo sapiens
  source 1..37: mol_type = genomic DNA
cgcagaaggtcctgggttcgagccccagtggaaccac

SEQ ID NO: 11955 - DNA, 38 bp, Homo sapiens
  source 1..38: mol_type = genomic DNA
cgcagaaggtcctgggttcgagccccagtggaaccacc

SEQ ID NO: 11956 - DNA, 39 bp, Homo sapiens
  source 1..39: mol_type = genomic DNA
cgcagaaggtcctgggttcgagccccagtggaaccacca

SEQ ID NO: 11957 - DNA, 17 bp, Homo sapiens
  source 1..17: mol_type = genomic DNA
cgcagcaacctcggttc

SEQ ID NO: 11958 - DNA, 18 bp, Homo sapiens
  source 1..18: mol_type = genomic DNA
cgcagcaacctcggttcg

SEQ ID NO: 11959 - DNA, 26 bp, Homo sapiens
  source 1..26: mol_type = genomic DNA
cgcagcaacctcggttcgaatccgag

SEQ ID NO: 11960 - DNA, 27 bp, Homo sapiens
  source 1..27: mol_type = genomic DNA
cgcagcaacctcggttcgaatccgagt

SEQ ID NO: 11961 - DNA, 29 bp, Homo sapiens
  source 1..29: mol_type = genomic DNA
cgcagcaacctcggttcgaatccgagtca

SEQ ID NO: 11962 - DNA, 31 bp, Homo sapiens
  source 1..31: mol_type = genomic DNA
cgcagcaacctcggttcgaatccgagtcacg

SEQ ID NO: 11963 - DNA, 32 bp, Homo sapiens
  source 1..32: mol_type = genomic DNA
cgcagcaacctcggttcgaatccgagtcacgg

SEQ ID NO: 11964 - DNA, 33 bp, Homo sapiens
  source 1..33: mol_type = genomic DNA
cgcagcaacctcggttcgaatccgagtcacggc

SEQ ID NO: 11965 - DNA, 34 bp, Homo sapiens
  source 1..34: mol_type = genomic DNA
cgcagcaacctcggttcgaatccgagtcacggca

SEQ ID NO: 11966 - DNA, 35 bp, Homo sapiens
  source 1..35: mol_type = genomic DNA
cgcagcaacctcggttcgaatccgagtcacggcac

SEQ ID NO: 11967 - DNA, 36 bp, Homo sapiens
  source 1..36: mol_type = genomic DNA
cgcagcaacctcggttcgaatccgagtcacggcacc

SEQ ID NO: 11968 - DNA, 37 bp, Homo sapiens
  source 1..37: mol_type = genomic DNA
cgcagcaacctcggttcgaatccgagtcacggcacca

SEQ ID NO: 11969 - DNA, 20 bp, Homo sapiens
  source 1..20: mol_type = genomic DNA
cgcagcggaagcgtgctggg

SEQ ID NO: 11970 - DNA, 21 bp, Homo sapiens
  source 1..21: mol_type = genomic DNA
cgcagcggaagcgtgctgggc

SEQ ID NO: 11971 - DNA, 22 bp, Homo sapiens
  source 1..22: mol_type = genomic DNA
cgcagcggaagcgtgctgggcc

SEQ ID NO: 11972 - DNA, 23 bp, Homo sapiens
  source 1..23: mol_type = genomic DNA
cgcagcggaagcgtgctgggccc

SEQ ID NO: 11973 - DNA, 24 bp, Homo sapiens
  source 1..24: mol_type = genomic DNA
cgcagcggaagcgtgctgggccca

SEQ ID NO: 11974 - DNA, 25 bp, Homo sapiens
  source 1..25: mol_type = genomic DNA
cgcagcggaagcgtgctgggcccat

SEQ ID NO: 11975 - DNA, 30 bp, Homo sapiens
  source 1..30: mol_type = genomic DNA
cgcagcggaagcgtgctgggcccataaccc

SEQ ID NO: 11976 - DNA, 43 bp, Homo sapiens
  source 1..43: mol_type = genomic DNA
cgcagcggaagcgtgctgggcccataacccagaggtcgatgga

SEQ ID NO: 11977 - DNA, 44 bp, Homo sapiens
  source 1..44: mol_type = genomic DNA
cgcagcggaagcgtgctgggcccataacccagaggtcgatggat

SEQ ID NO: 11978 - DNA, 17 bp, Homo sapiens
  source 1..17: mol_type = genomic DNA
cgcaggttcgaaccctg

SEQ ID NO: 11979 - DNA, 27 bp, Homo sapiens
  source 1..27: mol_type = genomic DNA
cgcaggttcgaaccctgctcgctgcgc

SEQ ID NO: 11980 - DNA, 17 bp, Homo sapiens
  source 1..17: mol_type = genomic DNA
cgcaggttcgaatcctg

SEQ ID NO: 11981 - DNA, 18 bp, Homo sapiens
  source 1..18: mol_type = genomic DNA
cgcataaaacttaaaact

SEQ ID NO: 11982 - DNA, 19 bp, Homo sapiens
  source 1..19: mol_type = genomic DNA
cgcataaaacttaaaactt

SEQ ID NO: 11983 - DNA, 20 bp, Homo sapiens
  source 1..20: mol_type = genomic DNA
cgcataaaacttaaaacttt

SEQ ID NO: 11984 - DNA, 21 bp, Homo sapiens
  source 1..21: mol_type = genomic DNA
cgcataaaacttaaaacttta

SEQ ID NO: 11985 - DNA, 22 bp, Homo sapiens
  source 1..22: mol_type = genomic DNA
cgcataaaacttaaaactttac

SEQ ID NO: 11986 - DNA, 23 bp, Homo sapiens
  source 1..23: mol_type = genomic DNA
cgcataaaacttaaaactttaca

SEQ ID NO: 11987 - DNA, 24 bp, Homo sapiens
  source 1..24: mol_type = genomic DNA
cgcataaaacttaaaactttacag

SEQ ID NO: 11988 - DNA, 26 bp, Homo sapiens
  source 1..26: mol_type = genomic DNA
cgcataaaacttaaaactttacagtc

SEQ ID NO: 11989 - DNA, 28 bp, Homo sapiens
  source 1..28: mol_type = genomic DNA
cgcataaaacttaaaactttacagtcag

SEQ ID NO: 11990 - DNA, 29 bp, Homo sapiens
  source 1..29: mol_type = genomic DNA
cgcataaaacttaaaactttacagtcaga

SEQ ID NO: 11991 - DNA, 30 bp, Homo sapiens
  source 1..30: mol_type = genomic DNA
cgcataaaacttaaaactttacagtcagag

SEQ ID NO: 11992 - DNA, 31 bp, Homo sapiens
  source 1..31: mol_type = genomic DNA
cgcataaaacttaaaactttacagtcagagg

SEQ ID NO: 11993 - DNA, 32 bp, Homo sapiens
  source 1..32: mol_type = genomic DNA
cgcataaaacttaaaactttacagtcagaggt

SEQ ID NO: 11994 - DNA, 33 bp, Homo sapiens
  source 1..33: mol_type = genomic DNA
cgcataaaacttaaaactttacagtcagaggtt

SEQ ID NO: 11995 - DNA, 34 bp, Homo sapiens
  source 1..34: mol_type = genomic DNA
cgcataaaacttaaaactttacagtcagaggttc

SEQ ID NO: 11996 - DNA, 35 bp, Homo sapiens
  source 1..35: mol_type = genomic DNA
cgcataaaacttaaaactttacagtcagaggttca

SEQ ID NO: 11997 - DNA, 45 bp, Homo sapiens
  source 1..45: mol_type = genomic DNA
cgcataaaacttaaaactttacagtcagaggttcaattcctcttc

SEQ ID NO: 11998 - DNA, 32 bp, Homo sapiens
  source 1..32: mol_type = genomic DNA
cgcatgggtggttcagtggtagaattctcgcc

SEQ ID NO: 11999 - DNA, 33 bp, Homo sapiens
  source 1..33: mol_type = genomic DNA
cgcatgggtggttcagtggtagaattctcgcct

SEQ ID NO: 12000 - DNA, 34 bp, Homo sapiens
  source 1..34: mol_type = genomic DNA
cgcatgggtggttcagtggtagaattctcgcctg

SEQ ID NO: 12001 - DNA, 35 bp, Homo sapiens
  source 1..35: mol_type = genomic DNA
cgcatgggtggttcagtggtagaattctcgcctgc

SEQ ID NO: 12002 - DNA, 36 bp, Homo sapiens
  source 1..36: mol_type = genomic DNA
cgcatgggtggttcagtggtagaattctcgcctgcc

SEQ ID NO: 12003 - DNA, 30 bp, Homo sapiens
  source 1..30: mol_type = genomic DNA
cgcattcggctgttaaccgaaaggttggtg

SEQ ID NO: 12004 - DNA, 16 bp, Homo sapiens
  source 1..16: mol_type = genomic DNA
cgcattggacttctaa

SEQ ID NO: 12005 - DNA, 17 bp, Homo sapiens
  source 1..17: mol_type = genomic DNA
cgcattggacttctaat

SEQ ID NO: 12006 - DNA, 18 bp, Homo sapiens
  source 1..18: mol_type = genomic DNA
cgcattggacttctaatt

SEQ ID NO: 12007 - DNA, 21 bp, Homo sapiens
  source 1..21: mol_type = genomic DNA
cgcattggacttctaattcaa

SEQ ID NO: 12008 - DNA, 19 bp, Homo sapiens
  source 1..19: mol_type = genomic DNA
cgcattggtggttcagtgg

SEQ ID NO: 12009 - DNA, 29 bp, Homo sapiens
  source 1..29: mol_type = genomic DNA
cgcattggtggttcagtggtagaattctc

SEQ ID NO: 12010 - DNA, 31 bp, Homo sapiens
  source 1..31: mol_type = genomic DNA
cgcattggtggttcagtggtagaattctcgc

SEQ ID NO: 12011 - DNA, 32 bp, Homo sapiens
  source 1..32: mol_type = genomic DNA
cgcattggtggttcagtggtagaattctcgcc

SEQ ID NO: 12012 - DNA, 33 bp, Homo sapiens
  source 1..33: mol_type = genomic DNA
cgcattggtggttcagtggtagaattctcgcct

SEQ ID NO: 12013 - DNA, 34 bp, Homo sapiens
  source 1..34: mol_type = genomic DNA
cgcattggtggttcagtggtagaattctcgcctg

SEQ ID NO: 12014 - DNA, 35 bp, Homo sapiens
  source 1..35: mol_type = genomic DNA
cgcattggtggttcagtggtagaattctcgcctgc

SEQ ID NO: 12015 - DNA, 36 bp, Homo sapiens
  source 1..36: mol_type = genomic DNA
cgcattggtggttcagtggtagaattctcgcctgcc

SEQ ID NO: 12016 - DNA, 37 bp, Homo sapiens
  source 1..37: mol_type = genomic DNA
cgcattggtggttcagtggtagaattctcgcctgcca

SEQ ID NO: 12017 - DNA, 38 bp, Homo sapiens
  source 1..38: mol_type = genomic DNA
cgcattggtggttcagtggtagaattctcgcctgccac

SEQ ID NO: 12018 - DNA, 39 bp, Homo sapiens
  source 1..39: mol_type = genomic DNA
cgcattggtggttcagtggtagaattctcgcctgccacg

SEQ ID NO: 12019 - DNA, 16 bp, Homo sapiens
  source 1..16: mol_type = genomic DNA
cgccaaggtcgcgggt

SEQ ID NO: 12020 - DNA, 17 bp, Homo sapiens
  source 1..17: mol_type = genomic DNA
cgccaaggtcgcgggtt

SEQ ID NO: 12021 - DNA, 18 bp, Homo sapiens
  source 1..18: mol_type = genomic DNA
cgccaaggtcgcgggttc

SEQ ID NO: 12022 - DNA, 33 bp, Homo sapiens
  source 1..33: mol_type = genomic DNA
cgccaaggtcgcgggttcgaaccccgtacgggc

SEQ ID NO: 12023 - DNA, 37 bp, Homo sapiens
  source 1..37: mol_type = genomic DNA
cgccaaggtcgcgggttcgaaccccgtacgggccacc

SEQ ID NO: 12024 - DNA, 38 bp, Homo sapiens
  source 1..38: mol_type = genomic DNA
cgccaaggtcgcgggttcgaaccccgtacgggccacca

SEQ ID NO: 12025 - DNA, 28 bp, Homo sapiens
  source 1..28: mol_type = genomic DNA
cgccaaggtcgcgggttcgatccccgta

SEQ ID NO: 12026 - DNA, 30 bp, Homo sapiens
  source 1..30: mol_type = genomic DNA
cgccaaggtcgcgggttcgatccccgtacg

SEQ ID NO: 12027 - DNA, 32 bp, Homo sapiens
  source 1..32: mol_type = genomic DNA
cgccaaggtcgcgggttcgatccccgtacggg

SEQ ID NO: 12028 - DNA, 33 bp, Homo sapiens
  source 1..33: mol_type = genomic DNA
cgccaaggtcgcgggttcgatccccgtacgggc

SEQ ID NO: 12029 - DNA, 35 bp, Homo sapiens
  source 1..35: mol_type = genomic DNA
cgccaaggtcgcgggttcgatccccgtacgggcca

SEQ ID NO: 12030 - DNA, 37 bp, Homo sapiens
  source 1..37: mol_type = genomic DNA
cgccaaggtcgcgggttcgatccccgtacgggccacc

SEQ ID NO: 12031 - DNA, 38 bp, Homo sapiens
  source 1..38: mol_type = genomic DNA
cgccaaggtcgcgggttcgatccccgtacgggccacca

SEQ ID NO: 12032 - DNA, 32 bp, Homo sapiens
  source 1..32: mol_type = genomic DNA
cgccaaggtcgcgggttcgatccccgtactgg

SEQ ID NO: 12033 - DNA, 37 bp, Homo sapiens
  source 1..37: mol_type = genomic DNA
cgccaaggtcgcgggttcgatccccgtactggccacc

SEQ ID NO: 12034 - DNA, 16 bp, Homo sapiens
  source 1..16: mol_type = genomic DNA
cgcccggatagctcag

SEQ ID NO: 12035 - DNA, 19 bp, Homo sapiens
  source 1..19: mol_type = genomic DNA
cgcccggatagctcagtcg

SEQ ID NO: 12036 - DNA, 20 bp, Homo sapiens
  source 1..20: mol_type = genomic DNA
cgcccggatagctcagtcgg

SEQ ID NO: 12037 - DNA, 22 bp, Homo sapiens
  source 1..22: mol_type = genomic DNA
cgcccggatagctcagtcggta

SEQ ID NO: 12038 - DNA, 23 bp, Homo sapiens
  source 1..23: mol_type = genomic DNA
cgcccggatagctcagtcggtag

SEQ ID NO: 12039 - DNA, 24 bp, Homo sapiens
  source 1..24: mol_type = genomic DNA
cgcccggatagctcagtcggtaga

SEQ ID NO: 12040 - DNA, 32 bp, Homo sapiens
  source 1..32: mol_type = genomic DNA
cgcccggatagctcagtcggtagagcatcaga

SEQ ID NO: 12041 - DNA, 33 bp, Homo sapiens
  source 1..33: mol_type = genomic DNA
cgcccggatagctcagtcggtagagcatcagac

SEQ ID NO: 12042 - DNA, 34 bp, Homo sapiens
  source 1..34: mol_type = genomic DNA
cgcccggatagctcagtcggtagagcatcagact

SEQ ID NO: 12043 - DNA, 36 bp, Homo sapiens
  source 1..36: mol_type = genomic DNA
cgcccggatagctcagtcggtagagcatcagacttt

SEQ ID NO: 12044 - DNA, 37 bp, Homo sapiens
  source 1..37: mol_type = genomic DNA
cgcccggatagctcagtcggtagagcatcagactttt

SEQ ID NO: 12045 - DNA, 16 bp, Homo sapiens
  source 1..16: mol_type = genomic DNA
cgcccggctagctcag

SEQ ID NO: 12046 - DNA, 17 bp, Homo sapiens
  source 1..17: mol_type = genomic DNA
cgcccggctagctcagt

SEQ ID NO: 12047 - DNA, 33 bp, Homo sapiens
  source 1..33: mol_type = genomic DNA
cgcccggctagctcagtcggtagagcatgagac

SEQ ID NO: 12048 - DNA, 34 bp, Homo sapiens
  source 1..34: mol_type = genomic DNA
cgcccggctagctcagtcggtagagcatgagact

SEQ ID NO: 12049 - DNA, 35 bp, Homo sapiens
  source 1..35: mol_type = genomic DNA
cgcccggctagctcagtcggtagagcatgagactc

SEQ ID NO: 12050 - DNA, 36 bp, Homo sapiens
  source 1..36: mol_type = genomic DNA
cgcccggctagctcagtcggtagagcatgagactct

SEQ ID NO: 12051 - DNA, 42 bp, Homo sapiens
  source 1..42: mol_type = genomic DNA
cgcccggctagctcagtcggtagagcatgagactcttaatct

SEQ ID NO: 12052 - DNA, 30 bp, Homo sapiens
  source 1..30: mol_type = genomic DNA
cgcccggctagctcagtcggtagagcatgg

SEQ ID NO: 12053 - DNA, 33 bp, Homo sapiens
  source 1..33: mol_type = genomic DNA
cgcccggctagctcagtcggtagagcatgggac

SEQ ID NO: 12054 - DNA, 34 bp, Homo sapiens
  source 1..34: mol_type = genomic DNA
cgcccggctagctcagtcggtagagcatgggact

SEQ ID NO: 12055 - DNA, 35 bp, Homo sapiens
  source 1..35: mol_type = genomic DNA
cgcccggctagctcagtcggtagagcatgggactc

SEQ ID NO: 12056 - DNA, 36 bp, Homo sapiens
  source 1..36: mol_type = genomic DNA
cgcccggctagctcagtcggtagagcatgggactct

SEQ ID NO: 12057 - DNA, 37 bp, Homo sapiens
  source 1..37: mol_type = genomic DNA
cgcccggctagctcagtcggtagagcatgggactctt

SEQ ID NO: 12058 - DNA, 38 bp, Homo sapiens
  source 1..38: mol_type = genomic DNA
cgcccggctagctcagtcggtagagcatgggactctta

SEQ ID NO: 12059 - DNA, 42 bp, Homo sapiens
  source 1..42: mol_type = genomic DNA
cgcccggctagctcagtcggtagagcatgggactcttaatcc

SEQ ID NO: 12060 - DNA, 16 bp, Homo sapiens
  source 1..16: mol_type = genomic DNA
cgccgcggcccgggtt

SEQ ID NO: 12061 - DNA, 17 bp, Homo sapiens
  source 1..17: mol_type = genomic DNA
cgccgcggcccgggttc

SEQ ID NO: 12062 - DNA, 18 bp, Homo sapiens
  source 1..18: mol_type = genomic DNA
cgccgcggcccgggttcg

SEQ ID NO: 12063 - DNA, 21 bp, Homo sapiens
  source 1..21: mol_type = genomic DNA
cgccgcggcccgggttcgatt

SEQ ID NO: 12064 - DNA, 24 bp, Homo sapiens
  source 1..24: mol_type = genomic DNA
cgccgcggcccgggttcgattccc

SEQ ID NO: 12065 - DNA, 25 bp, Homo sapiens
  source 1..25: mol_type = genomic DNA
cgccgcggcccgggttcgattcccg

SEQ ID NO: 12066 - DNA, 26 bp, Homo sapiens
  source 1..26: mol_type = genomic DNA
cgccgcggcccgggttcgattcccgg

SEQ ID NO: 12067 - DNA, 27 bp, Homo sapiens
  source 1..27: mol_type = genomic DNA
cgccgcggcccgggttcgattcccggc

SEQ ID NO: 12068 - DNA, 31 bp, Homo sapiens
  source 1..31: mol_type = genomic DNA
cgccgcggcccgggttcgattcccggccagg

SEQ ID NO: 12069 - DNA, 36 bp, Homo sapiens
  source 1..36: mol_type = genomic DNA
cgccgcggcccgggttcgattcccggccagggaacc

SEQ ID NO: 12070 - DNA, 27 bp, Homo sapiens
  source 1..27: mol_type = genomic DNA
cgccgcggcccgggttcgattcccggt

SEQ ID NO: 12071 - DNA, 28 bp, Homo sapiens
  source 1..28: mol_type = genomic DNA
cgccgcggcccgggttcgattcccggtc

SEQ ID NO: 12072 - DNA, 29 bp, Homo sapiens
  source 1..29: mol_type = genomic DNA
cgccgcggcccgggttcgattcccggtca

SEQ ID NO: 12073 - DNA, 30 bp, Homo sapiens
  source 1..30: mol_type = genomic DNA
cgccgcggcccgggttcgattcccggtcag

SEQ ID NO: 12074 - DNA, 31 bp, Homo sapiens
  source 1..31: mol_type = genomic DNA
cgccgcggcccgggttcgattcccggtcagg

SEQ ID NO: 12075 - DNA, 35 bp, Homo sapiens
  source 1..35: mol_type = genomic DNA
cgccgcggcccgggttcgattcccggtcaggaaac

SEQ ID NO: 12076 - DNA, 32 bp, Homo sapiens
  source 1..32: mol_type = genomic DNA
cgccgcggcccgggttcgattcccggtcaggg

SEQ ID NO: 12077 - DNA, 33 bp, Homo sapiens
  source 1..33: mol_type = genomic DNA
cgccgcggcccgggttcgattcccggtcaggga

SEQ ID NO: 12078 - DNA, 34 bp, Homo sapiens
  source 1..34: mol_type = genomic DNA
cgccgcggcccgggttcgattcccggtcagggaa

SEQ ID NO: 12079 - DNA, 35 bp, Homo sapiens
  source 1..35: mol_type = genomic DNA
cgccgcggcccgggttcgattcccggtcagggaac

SEQ ID NO: 12080 - DNA, 36 bp, Homo sapiens
  source 1..36: mol_type = genomic DNA
cgccgcggcccgggttcgattcccggtcagggaacc

SEQ ID NO: 12081 - DNA, 37 bp, Homo sapiens
  source 1..37: mol_type = genomic DNA
cgccgcggcccgggttcgattcccggtcagggaacca

SEQ ID NO: 12082 - DNA, 16 bp, Homo sapiens
  source 1..16: mol_type = genomic DNA
cgccgctggtgtagtg

SEQ ID NO: 12083 - DNA, 17 bp, Homo sapiens
  source 1..17: mol_type = genomic DNA
cgccgctggtgtagtgg

SEQ ID NO: 12084 - DNA, 19 bp, Homo sapiens
  source 1..19: mol_type = genomic DNA
cgccgctggtgtagtggta

SEQ ID NO: 12085 - DNA, 21 bp, Homo sapiens
  source 1..21: mol_type = genomic DNA
cgccgctggtgtagtggtatc

SEQ ID NO: 12086 - DNA, 25 bp, Homo sapiens
  source 1..25: mol_type = genomic DNA
cgccgctggtgtagtggtatcatgc

SEQ ID NO: 12087 - DNA, 26 bp, Homo sapiens
  source 1..26: mol_type = genomic DNA
cgccgctggtgtagtggtatcatgca

SEQ ID NO: 12088 - DNA, 27 bp, Homo sapiens
  source 1..27: mol_type = genomic DNA
cgccgctggtgtagtggtatcatgcaa

SEQ ID NO: 12089 - DNA, 28 bp, Homo sapiens
  source 1..28: mol_type = genomic DNA
cgccgctggtgtagtggtatcatgcaag

SEQ ID NO: 12090 - DNA, 29 bp, Homo sapiens
  source 1..29: mol_type = genomic DNA
cgccgctggtgtagtggtatcatgcaaga

SEQ ID NO: 12091 - DNA, 30 bp, Homo sapiens
  source 1..30: mol_type = genomic DNA
cgccgctggtgtagtggtatcatgcaagat

SEQ ID NO: 12092 - DNA, 31 bp, Homo sapiens
  source 1..31: mol_type = genomic DNA
cgccgctggtgtagtggtatcatgcaagatt

SEQ ID NO: 12093 - DNA, 32 bp, Homo sapiens
  source 1..32: mol_type = genomic DNA
cgccgctggtgtagtggtatcatgcaagattc

SEQ ID NO: 12094 - DNA, 33 bp, Homo sapiens
  source 1..33: mol_type = genomic DNA
cgccgctggtgtagtggtatcatgcaagattcc

SEQ ID NO: 12095 - DNA, 34 bp, Homo sapiens
  source 1..34: mol_type = genomic DNA
cgccgctggtgtagtggtatcatgcaagattccc

SEQ ID NO: 12096 - DNA, 35 bp, Homo sapiens
  source 1..35: mol_type = genomic DNA
cgccgctggtgtagtggtatcatgcaagattccca

SEQ ID NO: 12097 - DNA, 37 bp, Homo sapiens
  source 1..37: mol_type = genomic DNA
cgccgctggtgtagtggtatcatgcaagattcccatt

SEQ ID NO: 12098 - DNA, 38 bp, Homo sapiens
  source 1..38: mol_type = genomic DNA
cgccgctggtgtagtggtatcatgcaagattcccattc

SEQ ID NO: 12099 - DNA, 39 bp, Homo sapiens
  source 1..39: mol_type = genomic DNA
cgccgctggtgtagtggtatcatgcaagattcccattct

SEQ ID NO: 12100 - DNA, 43 bp, Homo sapiens
  source 1..43: mol_type = genomic DNA
cgccgctggtgtagtggtatcatgcaagattcccattcttgcg

SEQ ID NO: 12101 - DNA, 47 bp, Homo sapiens
  source 1..47: mol_type = genomic DNA
cgccgctggtgtagtggtatcatgcaagattcccattcttgcgaccc

SEQ ID NO: 12102 - DNA, 48 bp, Homo sapiens
  source 1..48: mol_type = genomic DNA
cgccgctggtgtagtggtatcatgcaagattcccattcttgcgacccg

SEQ ID NO: 12103 - DNA, 22 bp, Homo sapiens
  source 1..22: mol_type = genomic DNA
cgccgtgatcgtatagtggtta

SEQ ID NO: 12104 - DNA, 24 bp, Homo sapiens
  source 1..24: mol_type = genomic DNA
cgccgtgatcgtatagtggttagt

SEQ ID NO: 12105 - DNA, 29 bp, Homo sapiens
  source 1..29: mol_type = genomic DNA
cgccgtgatcgtatagtggttagtactct

SEQ ID NO: 12106 - DNA, 31 bp, Homo sapiens
  source 1..31: mol_type = genomic DNA
cgccgtgatcgtatagtggttagtactctgc

SEQ ID NO: 12107 - DNA, 32 bp, Homo sapiens
  source 1..32: mol_type = genomic DNA
cgccgtgatcgtatagtggttagtactctgcg

SEQ ID NO: 12108 - DNA, 33 bp, Homo sapiens
  source 1..33: mol_type = genomic DNA
cgccgtgatcgtatagtggttagtactctgcgt

SEQ ID NO: 12109 - DNA, 34 bp, Homo sapiens
  source 1..34: mol_type = genomic DNA
cgccgtgatcgtatagtggttagtactctgcgtt

SEQ ID NO: 12110 - DNA, 35 bp, Homo sapiens
  source 1..35: mol_type = genomic DNA
cgccgtgatcgtatagtggttagtactctgcgttg

SEQ ID NO: 12111 - DNA, 36 bp, Homo sapiens
  source 1..36: mol_type = genomic DNA
cgccgtgatcgtatagtggttagtactctgcgttgt

SEQ ID NO: 12112 - DNA, 37 bp, Homo sapiens
  source 1..37: mol_type = genomic DNA
cgccgtgatcgtatagtggttagtactctgcgttgtg

SEQ ID NO: 12113 - DNA, 16 bp, Homo sapiens
  source 1..16: mol_type = genomic DNA
cgcctgccacgcggga

SEQ ID NO: 12114 - DNA, 21 bp, Homo sapiens
  source 1..21: mol_type = genomic DNA
cgcctgccacgcgggaggccc

SEQ ID NO: 12115 - DNA, 22 bp, Homo sapiens
  source 1..22: mol_type = genomic DNA
cgcctgccacgcgggaggcccg

SEQ ID NO: 12116 - DNA, 24 bp, Homo sapiens
  source 1..24: mol_type = genomic DNA
cgcctgccacgcgggaggcccggg

SEQ ID NO: 12117 - DNA, 25 bp, Homo sapiens
  source 1..25: mol_type = genomic DNA
cgcctgccacgcgggaggcccgggt

SEQ ID NO: 12118 - DNA, 26 bp, Homo sapiens
  source 1..26: mol_type = genomic DNA
cgcctgccacgcgggaggcccgggtt

SEQ ID NO: 12119 - DNA, 28 bp, Homo sapiens
  source 1..28: mol_type = genomic DNA
cgcctgccacgcgggaggcccgggttcg

SEQ ID NO: 12120 - DNA, 45 bp, Homo sapiens
  source 1..45: mol_type = genomic DNA
cgcctgccacgcgggaggcccgggttcgattcccggccaatgcac

SEQ ID NO: 12121 - DNA, 46 bp, Homo sapiens
  source 1..46: mol_type = genomic DNA
cgcctgccacgcgggaggcccgggttcgattcccggccaatgcacc

SEQ ID NO: 12122 - DNA, 47 bp, Homo sapiens
  source 1..47: mol_type = genomic DNA
cgcctgccacgcgggaggcccgggttcgattcccggccaatgcacca

SEQ ID NO: 12123 - DNA, 16 bp, Homo sapiens
  source 1..16: mol_type = genomic DNA
cgcctgtcacgcggga

SEQ ID NO: 12124 - DNA, 19 bp, Homo sapiens
  source 1..19: mol_type = genomic DNA
cgcctgtcacgcgggagac

SEQ ID NO: 12125 - DNA, 20 bp, Homo sapiens
  source 1..20: mol_type = genomic DNA
cgcctgtcacgcgggagacc

SEQ ID NO: 12126 - DNA, 22 bp, Homo sapiens
  source 1..22: mol_type = genomic DNA
cgcctgtcacgcgggagaccgg

SEQ ID NO: 12127 - DNA, 25 bp, Homo sapiens
  source 1..25: mol_type = genomic DNA
cgcctgtcacgcgggagaccggggt

SEQ ID NO: 12128 - DNA, 40 bp, Homo sapiens
  source 1..40: mol_type = genomic DNA
cgcctgtcacgcgggagaccggggttcaattccccgacgg

SEQ ID NO: 12129 - DNA, 41 bp, Homo sapiens
  source 1..41: mol_type = genomic DNA
cgcctgtcacgcgggagaccggggttcaattccccgacggg

SEQ ID NO: 12130 - DNA, 42 bp, Homo sapiens
  source 1..42: mol_type = genomic DNA
cgcctgtcacgcgggagaccggggttcaattccccgacgggg

SEQ ID NO: 12131 - DNA, 44 bp, Homo sapiens
  source 1..44: mol_type = genomic DNA
cgcctgtcacgcgggagaccggggttcaattccccgacggggag

SEQ ID NO: 12132 - DNA, 45 bp, Homo sapiens
  source 1..45: mol_type = genomic DNA
cgcctgtcacgcgggagaccggggttcaattccccgacggggagc

SEQ ID NO: 12133 - DNA, 46 bp, Homo sapiens
  source 1..46: mol_type = genomic DNA
cgcctgtcacgcgggagaccggggttcaattccccgacggggagcc

SEQ ID NO: 12134 - DNA, 47 bp, Homo sapiens
  source 1..47: mol_type = genomic DNA
cgcctgtcacgcgggagaccggggttcaattccccgacggggagcca

SEQ ID NO: 12135 - DNA, 37 bp, Homo sapiens
  source 1..37: mol_type = genomic DNA
cgcctgtcacgcgggagaccggggttcgattccccga

SEQ ID NO: 12136 - DNA, 38 bp, Homo sapiens
  source 1..38: mol_type = genomic DNA
cgcctgtcacgcgggagaccggggttcgattccccgac

SEQ ID NO: 12137 - DNA, 39 bp, Homo sapiens
  source 1..39: mol_type = genomic DNA
cgcctgtcacgcgggagaccggggttcgattccccgacg

SEQ ID NO: 12138 - DNA, 40 bp, Homo sapiens
  source 1..40: mol_type = genomic DNA
cgcctgtcacgcgggagaccggggttcgattccccgacgg

SEQ ID NO: 12139 - DNA, 41 bp, Homo sapiens
  source 1..41: mol_type = genomic DNA
cgcctgtcacgcgggagaccggggttcgattccccgacggg

SEQ ID NO: 12140 - DNA, 42 bp, Homo sapiens
  source 1..42: mol_type = genomic DNA
cgcctgtcacgcgggagaccggggttcgattccccgacgggg

SEQ ID NO: 12141 - DNA, 43 bp, Homo sapiens
  source 1..43: mol_type = genomic DNA
cgcctgtcacgcgggagaccggggttcgattccccgacgggga

SEQ ID NO: 12142 - DNA, 44 bp, Homo sapiens
  source 1..44: mol_type = genomic DNA
cgcctgtcacgcgggagaccggggttcgattccccgacggggag

SEQ ID NO: 12143 - DNA, 45 bp, Homo sapiens
  source 1..45: mol_type = genomic DNA
cgcctgtcacgcgggagaccggggttcgattccccgacggggagc

SEQ ID NO: 12144 - DNA, 46 bp, Homo sapiens
  source 1..46: mol_type = genomic DNA
cgcctgtcacgcgggagaccggggttcgattccccgacggggagcc

SEQ ID NO: 12145 - DNA, 47 bp, Homo sapiens
  source 1..47: mol_type = genomic DNA
cgcctgtcacgcgggagaccggggttcgattccccgacggggagcca

SEQ ID NO: 12146 - DNA, 16 bp, Homo sapiens
  source 1..16: mol_type = genomic DNA
cgcgaaaggtccccgg

SEQ ID NO: 12147 - DNA, 17 bp, Homo sapiens
  source 1..17: mol_type = genomic DNA
cgcgaaaggtccccggt

SEQ ID NO: 12148 - DNA, 19 bp, Homo sapiens
  source 1..19: mol_type = genomic DNA
cgcgaaaggtccccggttc

SEQ ID NO: 12149 - DNA, 20 bp, Homo sapiens
  source 1..20: mol_type = genomic DNA
cgcgaaaggtccccggttcg

SEQ ID NO: 12150 - DNA, 34 bp, Homo sapiens
  source 1..34: mol_type = genomic DNA
cgcgaaaggtccccggttcgaaaccgggcagaag

SEQ ID NO: 12151 - DNA, 38 bp, Homo sapiens
  source 1..38: mol_type = genomic DNA
cgcgaaaggtccccggttcgaaaccgggcagaagcacc

SEQ ID NO: 12152 - DNA, 30 bp, Homo sapiens
  source 1..30: mol_type = genomic DNA
cgcgaaaggtccccggttcgaaaccgggcg

SEQ ID NO: 12153 - DNA, 32 bp, Homo sapiens
  source 1..32: mol_type = genomic DNA
cgcgaaaggtccccggttcgaaaccgggcgga

SEQ ID NO: 12154 - DNA, 34 bp, Homo sapiens
  source 1..34: mol_type = genomic DNA
cgcgaaaggtccccggttcgaaaccgggcggaaa

SEQ ID NO: 12155 - DNA, 35 bp, Homo sapiens
  source 1..35: mol_type = genomic DNA
cgcgaaaggtccccggttcgaaaccgggcggaaac

SEQ ID NO: 12156 - DNA, 36 bp, Homo sapiens
  source 1..36: mol_type = genomic DNA
cgcgaaaggtccccggttcgaaaccgggcggaaaca

SEQ ID NO: 12157 - DNA, 37 bp, Homo sapiens
  source 1..37: mol_type = genomic DNA
cgcgaaaggtccccggttcgaaaccgggcggaaacac

SEQ ID NO: 12158 - DNA, 38 bp, Homo sapiens
  source 1..38: mol_type = genomic DNA
cgcgaaaggtccccggttcgaaaccgggcggaaacacc

SEQ ID NO: 12159 - DNA, 39 bp, Homo sapiens
  source 1..39: mol_type = genomic DNA
cgcgaaaggtccccggttcgaaaccgggcggaaacacca

SEQ ID NO: 12160 - DNA, 36 bp, Homo sapiens
  source 1..36: mol_type = genomic DNA
cgcgaaaggtccccggttcgaaactgggcggaaaca

SEQ ID NO: 12161 - DNA, 38 bp, Homo sapiens
  source 1..38: mol_type = genomic DNA
cgcgaaaggtccccggttcgaaactgggcggaaacacc

SEQ ID NO: 12162 - DNA, 34 bp, Homo sapiens
  source 1..34: mol_type = genomic DNA
cgcgaaaggtccccggttcgatcccgggcggaaa

SEQ ID NO: 12163 - DNA, 36 bp, Homo sapiens
  source 1..36: mol_type = genomic DNA
cgcgaaaggtccccggttcgatcccgggcggaaaca

SEQ ID NO: 12164 - DNA, 38 bp, Homo sapiens
  source 1..38: mol_type = genomic DNA
cgcgaaaggtccccggttcgatcccgggcggaaacacc

SEQ ID NO: 12165 - DNA, 24 bp, Homo sapiens
  source 1..24: mol_type = genomic DNA
cgcgagttcaaatctcgctggggc

SEQ ID NO: 12166 - DNA, 25 bp, Homo sapiens
  source 1..25: mol_type = genomic DNA
cgcgagttcaaatctcgctggggcc

SEQ ID NO: 12167 - DNA, 26 bp, Homo sapiens
  source 1..26: mol_type = genomic DNA
cgcgagttcaaatctcgctggggcct

SEQ ID NO: 12168 - DNA, 27 bp, Homo sapiens
  source 1..27: mol_type = genomic DNA
cgcgagttcaaatctcgctggggcctc

SEQ ID NO: 12169 - DNA, 28 bp, Homo sapiens
  source 1..28: mol_type = genomic DNA
cgcgagttcaaatctcgctggggcctcc

SEQ ID NO: 12170 - DNA, 29 bp, Homo sapiens
  source 1..29: mol_type = genomic DNA
cgcgagttcaaatctcgctggggcctcca

SEQ ID NO: 12171 - DNA, 25 bp, Homo sapiens
  source 1..25: mol_type = genomic DNA
cgcgagttcaattctcgctggggcc

SEQ ID NO: 12172 - DNA, 26 bp, Homo sapiens
  source 1..26: mol_type = genomic DNA
cgcgagttcaattctcgctggggcct

SEQ ID NO: 12173 - DNA, 27 bp, Homo sapiens
  source 1..27: mol_type = genomic DNA
cgcgagttcaattctcgctggggcctc

SEQ ID NO: 12174 - DNA, 28 bp, Homo sapiens
  source 1..28: mol_type = genomic DNA
cgcgagttcaattctcgctggggcctcc

SEQ ID NO: 12175 - DNA, 24 bp, Homo sapiens
  source 1..24: mol_type = genomic DNA
cgcgagttcgatcctcgctggggc

SEQ ID NO: 12176 - DNA, 26 bp, Homo sapiens
  source 1..26: mol_type = genomic DNA
cgcgagttcgatcctcgctggggcct

SEQ ID NO: 12177 - DNA, 27 bp, Homo sapiens
  source 1..27: mol_type = genomic DNA
cgcgagttcgatcctcgctggggcctc

SEQ ID NO: 12178 - DNA, 19 bp, Homo sapiens
  source 1..19: mol_type = genomic DNA
cgcgcaggttcgaaccctg

SEQ ID NO: 12179 - DNA, 19 bp, Homo sapiens
  source 1..19: mol_type = genomic DNA
cgcgcaggttcgaatcctg

SEQ ID NO: 12180 - DNA, 33 bp, Homo sapiens
  source 1..33: mol_type = genomic DNA
cgcgccgctggtgtagtggtatcatgcaagatt

SEQ ID NO: 12181 - DNA, 37 bp, Homo sapiens
  source 1..37: mol_type = genomic DNA
cgcgccgctggtgtagtggtatcatgcaagattccca

SEQ ID NO: 12182 - DNA, 29 bp, Homo sapiens
  source 1..29: mol_type = genomic DNA
cgcgcggtacttataatgccgaggttgtg

SEQ ID NO: 12183 - DNA, 17 bp, Homo sapiens
  source 1..17: mol_type = genomic DNA
cgcggcccgggttcgat

SEQ ID NO: 12184 - DNA, 19 bp, Homo sapiens
  source 1..19: mol_type = genomic DNA
cgcggcccgggttcgattc

SEQ ID NO: 12185 - DNA, 20 bp, Homo sapiens
  source 1..20: mol_type = genomic DNA
cgcggcccgggttcgattcc

SEQ ID NO: 12186 - DNA, 21 bp, Homo sapiens
  source 1..21: mol_type = genomic DNA
cgcggcccgggttcgattccc

SEQ ID NO: 12187 - DNA, 24 bp, Homo sapiens
  source 1..24: mol_type = genomic DNA
cgcggcccgggttcgattcccggt

SEQ ID NO: 12188 - DNA, 25 bp, Homo sapiens
  source 1..25: mol_type = genomic DNA
cgcggcccgggttcgattcccggtc

SEQ ID NO: 12189 - DNA, 26 bp, Homo sapiens
  source 1..26: mol_type = genomic DNA
cgcggcccgggttcgattcccggtca

SEQ ID NO: 12190 - DNA, 27 bp, Homo sapiens
  source 1..27: mol_type = genomic DNA
cgcggcccgggttcgattcccggtcag

SEQ ID NO: 12191 - DNA, 28 bp, Homo sapiens
  source 1..28: mol_type = genomic DNA
cgcggcccgggttcgattcccggtcagg

SEQ ID NO: 12192 - DNA, 29 bp, Homo sapiens
  source 1..29: mol_type = genomic DNA
cgcggcccgggttcgattcccggtcaggg

SEQ ID NO: 12193 - DNA, 31 bp, Homo sapiens
  source 1..31: mol_type = genomic DNA
cgcggcccgggttcgattcccggtcagggaa

SEQ ID NO: 12194 - DNA, 32 bp, Homo sapiens
  source 1..32: mol_type = genomic DNA
cgcggcccgggttcgattcccggtcagggaac

SEQ ID NO: 12195 - DNA, 33 bp, Homo sapiens
  source 1..33: mol_type = genomic DNA
cgcggcccgggttcgattcccggtcagggaacc

SEQ ID NO: 12196 - DNA, 34 bp, Homo sapiens
  source 1..34: mol_type = genomic DNA
cgcggcccgggttcgattcccggtcagggaacca

SEQ ID NO: 12197 - DNA, 36 bp, Homo sapiens
  source 1..36: mol_type = genomic DNA
cgcgggagacccgggttcaattcccggccaatgcac

SEQ ID NO: 12198 - DNA, 37 bp, Homo sapiens
  source 1..37: mol_type = genomic DNA
cgcgggagacccgggttcaattcccggccaatgcacc

SEQ ID NO: 12199 - DNA, 38 bp, Homo sapiens
  source 1..38: mol_type = genomic DNA
cgcgggagacccgggttcaattcccggccaatgcacca

SEQ ID NO: 12200 - DNA, 18 bp, Homo sapiens
  source 1..18: mol_type = genomic DNA
cgcgggagaccggggttc

SEQ ID NO: 12201 - DNA, 26 bp, Homo sapiens
  source 1..26: mol_type = genomic DNA
cgcgggagaccggggttcaattcccc

SEQ ID NO: 12202 - DNA, 27 bp, Homo sapiens
  source 1..27: mol_type = genomic DNA
cgcgggagaccggggttcaattccccg

SEQ ID NO: 12203 - DNA, 28 bp, Homo sapiens
  source 1..28: mol_type = genomic DNA
cgcgggagaccggggttcaattccccga

SEQ ID NO: 12204 - DNA, 29 bp, Homo sapiens
  source 1..29: mol_type = genomic DNA
cgcgggagaccggggttcaattccccgac

SEQ ID NO: 12205 - DNA, 30 bp, Homo sapiens
  source 1..30: mol_type = genomic DNA
cgcgggagaccggggttcaattccccgacg

SEQ ID NO: 12206 - DNA, 31 bp, Homo sapiens
  source 1..31: mol_type = genomic DNA
cgcgggagaccggggttcaattccccgacgg

SEQ ID NO: 12207 - DNA, 32 bp, Homo sapiens
  source 1..32: mol_type = genomic DNA
cgcgggagaccggggttcaattccccgacggg

SEQ ID NO: 12208 - DNA, 33 bp, Homo sapiens
  source 1..33: mol_type = genomic DNA
cgcgggagaccggggttcaattccccgacgggg

SEQ ID NO: 12209 - DNA, 34 bp, Homo sapiens
  source 1..34: mol_type = genomic DNA
cgcgggagaccggggttcaattccccgacgggga

SEQ ID NO: 12210 - DNA, 35 bp, Homo sapiens
  source 1..35: mol_type = genomic DNA
cgcgggagaccggggttcaattccccgacggggag

SEQ ID NO: 12211 - DNA, 36 bp, Homo sapiens
  source 1..36: mol_type = genomic DNA
cgcgggagaccggggttcaattccccgacggggagc

SEQ ID NO: 12212 - DNA, 37 bp, Homo sapiens
  source 1..37: mol_type = genomic DNA
cgcgggagaccggggttcaattccccgacggggagcc

SEQ ID NO: 12213 - DNA, 38 bp, Homo sapiens
  source 1..38: mol_type = genomic DNA
cgcgggagaccggggttcaattccccgacggggagcca

SEQ ID NO: 12214 - DNA, 19 bp, Homo sapiens
  source 1..19: mol_type = genomic DNA
cgcgggagaccggggttcg

SEQ ID NO: 12215 - DNA, 21 bp, Homo sapiens
  source 1..21: mol_type = genomic DNA
cgcgggagaccggggttcgat

SEQ ID NO: 12216 - DNA, 23 bp, Homo sapiens
  source 1..23: mol_type = genomic DNA
cgcgggagaccggggttcgattc

SEQ ID NO: 12217 - DNA, 37 bp, Homo sapiens
  source 1..37: mol_type = genomic DNA
cgcgggagaccggggttcgattccccaacggggagcc

SEQ ID NO: 12218 - DNA, 38 bp, Homo sapiens
  source 1..38: mol_type = genomic DNA
cgcgggagaccggggttcgattccccaacggggagcca

SEQ ID NO: 12219 - DNA, 27 bp, Homo sapiens
  source 1..27: mol_type = genomic DNA
cgcgggagaccggggttcgattccccg

SEQ ID NO: 12220 - DNA, 28 bp, Homo sapiens
  source 1..28: mol_type = genomic DNA
cgcgggagaccggggttcgattccccga

SEQ ID NO: 12221 - DNA, 29 bp, Homo sapiens
  source 1..29: mol_type = genomic DNA
cgcgggagaccggggttcgattccccgac

SEQ ID NO: 12222 - DNA, 30 bp, Homo sapiens
  source 1..30: mol_type = genomic DNA
cgcgggagaccggggttcgattccccgacg

SEQ ID NO: 12223 - DNA, 31 bp, Homo sapiens
  source 1..31: mol_type = genomic DNA
cgcgggagaccggggttcgattccccgacgg

SEQ ID NO: 12224 - DNA, 32 bp, Homo sapiens
  source 1..32: mol_type = genomic DNA
cgcgggagaccggggttcgattccccgacggg

SEQ ID NO: 12225 - DNA, 33 bp, Homo sapiens
  source 1..33: mol_type = genomic DNA
cgcgggagaccggggttcgattccccgacgggg

SEQ ID NO: 12226 - DNA, 34 bp, Homo sapiens
  source 1..34: mol_type = genomic DNA
cgcgggagaccggggttcgattccccgacgggga

SEQ ID NO: 12227 - DNA, 35 bp, Homo sapiens
  source 1..35: mol_type = genomic DNA
cgcgggagaccggggttcgattccccgacggggag

SEQ ID NO: 12228 - DNA, 36 bp, Homo sapiens
  source 1..36: mol_type = genomic DNA
cgcgggagaccggggttcgattccccgacggggagc

SEQ ID NO: 12229 - DNA, 37 bp, Homo sapiens
  source 1..37: mol_type = genomic DNA
cgcgggagaccggggttcgattccccgacggggagcc

SEQ ID NO: 12230 - DNA, 38 bp, Homo sapiens
  source 1..38: mol_type = genomic DNA
cgcgggagaccggggttcgattccccgacggggagcca

SEQ ID NO: 12231 - DNA, 16 bp, Homo sapiens
  source 1..16: mol_type = genomic DNA
cgcgggaggcccgggt

SEQ ID NO: 12232 - DNA, 17 bp, Homo sapiens
  source 1..17: mol_type = genomic DNA
cgcgggaggcccgggtt

SEQ ID NO: 12233 - DNA, 18 bp, Homo sapiens
  source 1..18: mol_type = genomic DNA
cgcgggaggcccgggttc

SEQ ID NO: 12234 - DNA, 19 bp, Homo sapiens
  source 1..19: mol_type = genomic DNA
cgcgggaggcccgggttcg

SEQ ID NO: 12235 - DNA, 22 bp, Homo sapiens
  source 1..22: mol_type = genomic DNA
cgcgggaggcccgggttcgatt

SEQ ID NO: 12236 - DNA, 26 bp, Homo sapiens
  source 1..26: mol_type = genomic DNA
cgcgggaggcccgggttcgattcccg

SEQ ID NO: 12237 - DNA, 28 bp, Homo sapiens
  source 1..28: mol_type = genomic DNA
cgcgggaggcccgggttcgattcccggc

SEQ ID NO: 12238 - DNA, 29 bp, Homo sapiens
  source 1..29: mol_type = genomic DNA
cgcgggaggcccgggttcgattcccggcc

SEQ ID NO: 12239 - DNA, 31 bp, Homo sapiens
  source 1..31: mol_type = genomic DNA
cgcgggaggcccgggttcgattcccggccaa

SEQ ID NO: 12240 - DNA, 32 bp, Homo sapiens
  source 1..32: mol_type = genomic DNA
cgcgggaggcccgggttcgattcccggccaat

SEQ ID NO: 12241 - DNA, 33 bp, Homo sapiens
  source 1..33: mol_type = genomic DNA
cgcgggaggcccgggttcgattcccggccaatg

SEQ ID NO: 12242 - DNA, 34 bp, Homo sapiens
  source 1..34: mol_type = genomic DNA
cgcgggaggcccgggttcgattcccggccaatgc

SEQ ID NO: 12243 - DNA, 35 bp, Homo sapiens
  source 1..35: mol_type = genomic DNA
cgcgggaggcccgggttcgattcccggccaatgca

SEQ ID NO: 12244 - DNA, 36 bp, Homo sapiens
  source 1..36: mol_type = genomic DNA
cgcgggaggcccgggttcgattcccggccaatgcac

SEQ ID NO: 12245 - DNA, 37 bp, Homo sapiens
  source 1..37: mol_type = genomic DNA
cgcgggaggcccgggttcgattcccggccaatgcacc

SEQ ID NO: 12246 - DNA, 38 bp, Homo sapiens
  source 1..38: mol_type = genomic DNA
cgcgggaggcccgggttcgattcccggccaatgcacca

SEQ ID NO: 12247 - DNA, 31 bp, Homo sapiens
  source 1..31: mol_type = genomic DNA
cgcgggaggcccgggttcgattcccggccca

SEQ ID NO: 12248 - DNA, 32 bp, Homo sapiens
  source 1..32: mol_type = genomic DNA
cgcgggaggcccgggttcgattcccggcccat

SEQ ID NO: 12249 - DNA, 33 bp, Homo sapiens
  source 1..33: mol_type = genomic DNA
cgcgggaggcccgggttcgattcccggcccatg

SEQ ID NO: 12250 - DNA, 34 bp, Homo sapiens
  source 1..34: mol_type = genomic DNA
cgcgggaggcccgggttcgattcccggcccatgc

SEQ ID NO: 12251 - DNA, 37 bp, Homo sapiens
  source 1..37: mol_type = genomic DNA
cgcgggaggcccgggttcgattcccggcccatgcacc

SEQ ID NO: 12252 - DNA, 38 bp, Homo sapiens
  source 1..38: mol_type = genomic DNA
cgcgggaggcccgggttcgattcccggcccatgcacca

SEQ ID NO: 12253 - DNA, 17 bp, Homo sapiens
  source 1..17: mol_type = genomic DNA
cgcgggttcgaaccccg

SEQ ID NO: 12254 - DNA, 24 bp, Homo sapiens
  source 1..24: mol_type = genomic DNA
cgcgggttcgaaccccgtacgggc

SEQ ID NO: 12255 - DNA, 25 bp, Homo sapiens
  source 1..25: mol_type = genomic DNA
cgcgggttcgaaccccgtacgggcc

SEQ ID NO: 12256 - DNA, 26 bp, Homo sapiens
  source 1..26: mol_type = genomic DNA
cgcgggttcgaaccccgtacgggcca

SEQ ID NO: 12257 - DNA, 27 bp, Homo sapiens
  source 1..27: mol_type = genomic DNA
cgcgggttcgaaccccgtacgggccac

SEQ ID NO: 12258 - DNA, 25 bp, Homo sapiens
  source 1..25: mol_type = genomic DNA
cgcgggttcgaaccccgtccgtgcc

SEQ ID NO: 12259 - DNA, 27 bp, Homo sapiens
  source 1..27: mol_type = genomic DNA
cgcgggttcgaaccccgtccgtgcctc

SEQ ID NO: 12260 - DNA, 29 bp, Homo sapiens
  source 1..29: mol_type = genomic DNA
cgcgggttcgaaccccgtccgtgcctcca

SEQ ID NO: 12261 - DNA, 17 bp, Homo sapiens
  source 1..17: mol_type = genomic DNA
cgcgggttcgatccccg

SEQ ID NO: 12262 - DNA, 24 bp, Homo sapiens
  source 1..24: mol_type = genomic DNA
cgcgggttcgatccccgtacgggc

SEQ ID NO: 12263 - DNA, 25 bp, Homo sapiens
  source 1..25: mol_type = genomic DNA
cgcgggttcgatccccgtacgggcc

SEQ ID NO: 12264 - DNA, 26 bp, Homo sapiens
  source 1..26: mol_type = genomic DNA
cgcgggttcgatccccgtacgggcca

SEQ ID NO: 12265 - DNA, 27 bp, Homo sapiens
  source 1..27: mol_type = genomic DNA
cgcgggttcgatccccgtacgggccac

SEQ ID NO: 12266 - DNA, 28 bp, Homo sapiens
  source 1..28: mol_type = genomic DNA
cgcgggttcgatccccgtacgggccacc

SEQ ID NO: 12267 - DNA, 29 bp, Homo sapiens
  source 1..29: mol_type = genomic DNA
cgcgggttcgatccccgtacgggccacca

SEQ ID NO: 12268 - DNA, 20 bp, Homo sapiens
  source 1..20: mol_type = genomic DNA
cgcggtggccaagtggtaag

SEQ ID NO: 12269 - DNA, 22 bp, Homo sapiens
  source 1..22: mol_type = genomic DNA
cgcggtggccaagtggtaaggc

SEQ ID NO: 12270 - DNA, 26 bp, Homo sapiens
  source 1..26: mol_type = genomic DNA
cgcggtggccaagtggtaaggcgtcg

SEQ ID NO: 12271 - DNA, 18 bp, Homo sapiens
  source 1..18: mol_type = genomic DNA
cgcgtcagtctcataatc

SEQ ID NO: 12272 - DNA, 22 bp, Homo sapiens
  source 1..22: mol_type = genomic DNA
cgcgtcagtctcataatctgaa

SEQ ID NO: 12273 - DNA, 29 bp, Homo sapiens
  source 1..29: mol_type = genomic DNA
cgcgtcagtctcataatctgaaggtcctg

SEQ ID NO: 12274 - DNA, 16 bp, Homo sapiens
  source 1..16: mol_type = genomic DNA
cgcgtggcctaatgga

SEQ ID NO: 12275 - DNA, 20 bp, Homo sapiens
  source 1..20: mol_type = genomic DNA
cgcgtggcctaatggataag

SEQ ID NO: 12276 - DNA, 27 bp, Homo sapiens
  source 1..27: mol_type = genomic DNA
cgcgtggcctaatggataaggcgtctg

SEQ ID NO: 12277 - DNA, 30 bp, Homo sapiens
  source 1..30: mol_type = genomic DNA
cgcgtggcctaatggataaggcgtctgact

SEQ ID NO: 12278 - DNA, 32 bp, Homo sapiens
  source 1..32: mol_type = genomic DNA
cgcgtggcctaatggataaggcgtctgacttc

SEQ ID NO: 12279 - DNA, 33 bp, Homo sapiens
  source 1..33: mol_type = genomic DNA
cgcgtggcctaatggataaggcgtctgacttcg

SEQ ID NO: 12280 - DNA, 31 bp, Homo sapiens
  source 1..31: mol_type = genomic DNA
cgcgtggcctaatggataaggcgtctgattc

SEQ ID NO: 12281 - DNA, 32 bp, Homo sapiens
  source 1..32: mol_type = genomic DNA
cgcgtggcctaatggataaggcgtctgattcc

SEQ ID NO: 12282 - DNA, 33 bp, Homo sapiens
  source 1..33: mol_type = genomic DNA
cgcgtggcctaatggataaggcgtctgattccg

SEQ ID NO: 12283 - DNA, 29 bp, Homo sapiens
  source 1..29: mol_type = genomic DNA
cgcgtgggttcgaaccccactcctggtac

SEQ ID NO: 12284 - DNA, 30 bp, Homo sapiens
  source 1..30: mol_type = genomic DNA
cgcgtgggttcgaaccccactcctggtacc

SEQ ID NO: 12285 - DNA, 29 bp, Homo sapiens
  source 1..29: mol_type = genomic DNA
cgcgtgggttcgaaccccacttctggtac

SEQ ID NO: 12286 - DNA, 30 bp, Homo sapiens
  source 1..30: mol_type = genomic DNA
cgcgtgggttcgaatcccaccctcgtcgcc

SEQ ID NO: 12287 - DNA, 28 bp, Homo sapiens
  source 1..28: mol_type = genomic DNA
cgcgtgggttcgaatcccatcctcgtcg

SEQ ID NO: 12288 - DNA, 29 bp, Homo sapiens
  source 1..29: mol_type = genomic DNA
cgcgtgggttcgaatcccatcctcgtcgc

SEQ ID NO: 12289 - DNA, 30 bp, Homo sapiens
  source 1..30: mol_type = genomic DNA
cgcgtgggttcgaatcccatcctcgtcgcc

SEQ ID NO: 12290 - DNA, 31 bp, Homo sapiens
  source 1..31: mol_type = genomic DNA
cgcgtgggttcgaatcccatcctcgtcgcca

SEQ ID NO: 12291 - DNA, 16 bp, Homo sapiens
  source 1..16: mol_type = genomic DNA
cgctctcaccgccgcg

SEQ ID NO: 12292 - DNA, 18 bp, Homo sapiens
  source 1..18: mol_type = genomic DNA
cgctctcaccgccgcggc

SEQ ID NO: 12293 - DNA, 19 bp, Homo sapiens
  source 1..19: mol_type = genomic DNA
cgctctcaccgccgcggcc

SEQ ID NO: 12294 - DNA, 20 bp, Homo sapiens
  source 1..20: mol_type = genomic DNA
cgctctcaccgccgcggccc

SEQ ID NO: 12295 - DNA, 21 bp, Homo sapiens
  source 1..21: mol_type = genomic DNA
cgctctcaccgccgcggcccg

SEQ ID NO: 12296 - DNA, 23 bp, Homo sapiens
  source 1..23: mol_type = genomic DNA
cgctctcaccgccgcggcccggg

SEQ ID NO: 12297 - DNA, 24 bp, Homo sapiens
  source 1..24: mol_type = genomic DNA
cgctctcaccgccgcggcccgggt

SEQ ID NO: 12298 - DNA, 25 bp, Homo sapiens
  source 1..25: mol_type = genomic DNA
cgctctcaccgccgcggcccgggtt

SEQ ID NO: 12299 - DNA, 26 bp, Homo sapiens
  source 1..26: mol_type = genomic DNA
cgctctcaccgccgcggcccgggttc

SEQ ID NO: 12300 - DNA, 27 bp, Homo sapiens
  source 1..27: mol_type = genomic DNA
cgctctcaccgccgcggcccgggttcg

SEQ ID NO: 12301 - DNA, 29 bp, Homo sapiens
  source 1..29: mol_type = genomic DNA
cgctctcaccgccgcggcccgggttcgat

SEQ ID NO: 12302 - DNA, 31 bp, Homo sapiens
  source 1..31: mol_type = genomic DNA
cgctctcaccgccgcggcccgggttcgattc

SEQ ID NO: 12303 - DNA, 34 bp, Homo sapiens
  source 1..34: mol_type = genomic DNA
cgctctcaccgccgcggcccgggttcgattcccg

SEQ ID NO: 12304 - DNA, 40 bp, Homo sapiens
  source 1..40: mol_type = genomic DNA
cgctctcaccgccgcggcccgggttcgattcccggtcagg

SEQ ID NO: 12305 - DNA, 43 bp, Homo sapiens
  source 1..43: mol_type = genomic DNA
cgctctcaccgccgcggcccgggttcgattcccggtcagggaa

SEQ ID NO: 12306 - DNA, 44 bp, Homo sapiens
  source 1..44: mol_type = genomic DNA
cgctctcaccgccgcggcccgggttcgattcccggtcagggaac

SEQ ID NO: 12307 - DNA, 45 bp, Homo sapiens
  source 1..45: mol_type = genomic DNA
cgctctcaccgccgcggcccgggttcgattcccggtcagggaacc

SEQ ID NO: 12308 - DNA, 46 bp, Homo sapiens
  source 1..46: mol_type = genomic DNA
cgctctcaccgccgcggcccgggttcgattcccggtcagggaacca

SEQ ID NO: 12309 - DNA, 18 bp, Homo sapiens
  source 1..18: mol_type = genomic DNA
cgctggtgtagtggtatc

SEQ ID NO: 12310 - DNA, 23 bp, Homo sapiens
  source 1..23: mol_type = genomic DNA
cgctggtgtagtggtatcatgca

SEQ ID NO: 12311 - DNA, 25 bp, Homo sapiens
  source 1..25: mol_type = genomic DNA
cgctggtgtagtggtatcatgcaag

SEQ ID NO: 12312 - DNA, 26 bp, Homo sapiens
  source 1..26: mol_type = genomic DNA
cgctggtgtagtggtatcatgcaaga

SEQ ID NO: 12313 - DNA, 27 bp, Homo sapiens
  source 1..27: mol_type = genomic DNA
cgctggtgtagtggtatcatgcaagat

SEQ ID NO: 12314 - DNA, 28 bp, Homo sapiens
  source 1..28: mol_type = genomic DNA
cgctggtgtagtggtatcatgcaagatt

SEQ ID NO: 12315 - DNA, 29 bp, Homo sapiens
  source 1..29: mol_type = genomic DNA
cgctggtgtagtggtatcatgcaagattc

SEQ ID NO: 12316 - DNA, 30 bp, Homo sapiens
  source 1..30: mol_type = genomic DNA
cgctggtgtagtggtatcatgcaagattcc

SEQ ID NO: 12317 - DNA, 31 bp, Homo sapiens
  source 1..31: mol_type = genomic DNA
cgctggtgtagtggtatcatgcaagattccc

SEQ ID NO: 12318 - DNA, 32 bp, Homo sapiens
  source 1..32: mol_type = genomic DNA
cgctggtgtagtggtatcatgcaagattccca

SEQ ID NO: 12319 - DNA, 46 bp, Homo sapiens
  source 1..46: mol_type = genomic DNA
cgctggtgtagtggtatcatgcaagattcccattcttgcgacccgg

SEQ ID NO: 12320 - DNA, 47 bp, Homo sapiens
  source 1..47: mol_type = genomic DNA
cgctggtgtagtggtatcatgcaagattcccattcttgcgacccggg

SEQ ID NO: 12321 - DNA, 48 bp, Homo sapiens
  source 1..48: mol_type = genomic DNA
cgctggtgtagtggtatcatgcaagattcccattcttgcgacccgggt

SEQ ID NO: 12322 - DNA, 26 bp, Homo sapiens
  source 1..26: mol_type = genomic DNA
cgctggttcgaatccggctcgaagga

SEQ ID NO: 12323 - DNA, 27 bp, Homo sapiens
  source 1..27: mol_type = genomic DNA
cgctggttcgaatccggctcgaaggac

SEQ ID NO: 12324 - DNA, 28 bp, Homo sapiens
  source 1..28: mol_type = genomic DNA
cgctggttcgaatccggctcgaaggacc

SEQ ID NO: 12325 - DNA, 29 bp, Homo sapiens
  source 1..29: mol_type = genomic DNA
cgctggttcgaatccggctcgaaggacca

SEQ ID NO: 12326 - DNA, 25 bp, Homo sapiens
  source 1..25: mol_type = genomic DNA
cgctggttcgaatccggctcggagg

SEQ ID NO: 12327 - DNA, 26 bp, Homo sapiens
  source 1..26: mol_type = genomic DNA
cgctggttcgaatccggctcggagga

SEQ ID NO: 12328 - DNA, 27 bp, Homo sapiens
  source 1..27: mol_type = genomic DNA
cgctggttcgaatccggctcggaggac

SEQ ID NO: 12329 - DNA, 28 bp, Homo sapiens
  source 1..28: mol_type = genomic DNA
cgctggttcgaatccggctcggaggacc

SEQ ID NO: 12330 - DNA, 29 bp, Homo sapiens
  source 1..29: mol_type = genomic DNA
cgctggttcgaatccggctcggaggacca

SEQ ID NO: 12331 - DNA, 28 bp, Homo sapiens
  source 1..28: mol_type = genomic DNA
cgctggttcgattccagctcgaaggacc

SEQ ID NO: 12332 - DNA, 29 bp, Homo sapiens
  source 1..29: mol_type = genomic DNA
cgctggttcgattccagctcgaaggacca

SEQ ID NO: 12333 - DNA, 18 bp, Homo sapiens
  source 1..18: mol_type = genomic DNA
cgctggttcgattccggc

SEQ ID NO: 12334 - DNA, 24 bp, Homo sapiens
  source 1..24: mol_type = genomic DNA
cgctggttcgattccggctcgaag

SEQ ID NO: 12335 - DNA, 25 bp, Homo sapiens
  source 1..25: mol_type = genomic DNA
cgctggttcgattccggctcgaagg

SEQ ID NO: 12336 - DNA, 26 bp, Homo sapiens
  source 1..26: mol_type = genomic DNA
cgctggttcgattccggctcgaagga

SEQ ID NO: 12337 - DNA, 27 bp, Homo sapiens
  source 1..27: mol_type = genomic DNA
cgctggttcgattccggctcgaaggac

SEQ ID NO: 12338 - DNA, 28 bp, Homo sapiens
  source 1..28: mol_type = genomic DNA
cgctggttcgattccggctcgaaggacc

SEQ ID NO: 12339 - DNA, 29 bp, Homo sapiens
  source 1..29: mol_type = genomic DNA
cgctggttcgattccggctcgaaggacca

SEQ ID NO: 12340 - DNA, 22 bp, Homo sapiens
  source 1..22: mol_type = genomic DNA
cgcttcgggtgcgagaggtccc

SEQ ID NO: 12341 - DNA, 33 bp, Homo sapiens
  source 1..33: mol_type = genomic DNA
cgcttctgtagtgtagtggttatcacgttcgcc

SEQ ID NO: 12342 - DNA, 34 bp, Homo sapiens
  source 1..34: mol_type = genomic DNA
cgcttctgtagtgtagtggttatcacgttcgcct

SEQ ID NO: 12343 - DNA, 35 bp, Homo sapiens
  source 1..35: mol_type = genomic DNA
cgcttctgtagtgtagtggttatcacgttcgcctc

SEQ ID NO: 12344 - DNA, 46 bp, Homo sapiens
  source 1..46: mol_type = genomic DNA
cgctttcaccgccgcggcccgggttcgattcccggtcagggaacca

SEQ ID NO: 12345 - DNA, 16 bp, Homo sapiens
  source 1..16: mol_type = genomic DNA
cggaagcgtgctgggc

SEQ ID NO: 12346 - DNA, 17 bp, Homo sapiens
  source 1..17: mol_type = genomic DNA
cggaagcgtgctgggcc

SEQ ID NO: 12347 - DNA, 18 bp, Homo sapiens
  source 1..18: mol_type = genomic DNA
cggaagcgtgctgggccc

SEQ ID NO: 12348 - DNA, 19 bp, Homo sapiens
  source 1..19: mol_type = genomic DNA
cggaagcgtgctgggccca

SEQ ID NO: 12349 - DNA, 20 bp, Homo sapiens
  source 1..20: mol_type = genomic DNA
cggaagcgtgctgggcccat

SEQ ID NO: 12350 - DNA, 22 bp, Homo sapiens
  source 1..22: mol_type = genomic DNA
cggaagcgtgctgggcccataa

SEQ ID NO: 12351 - DNA, 23 bp, Homo sapiens
  source 1..23: mol_type = genomic DNA
cggaagcgtgctgggcccataac

SEQ ID NO: 12352 - DNA, 24 bp, Homo sapiens
  source 1..24: mol_type = genomic DNA
cggaagcgtgctgggcccataacc

SEQ ID NO: 12353 - DNA, 25 bp, Homo sapiens
  source 1..25: mol_type = genomic DNA
cggaagcgtgctgggcccataaccc

SEQ ID NO: 12354 - DNA, 26 bp, Homo sapiens
  source 1..26: mol_type = genomic DNA
cggaagcgtgctgggcccataaccca

SEQ ID NO: 12355 - DNA, 27 bp, Homo sapiens
  source 1..27: mol_type = genomic DNA
cggaagcgtgctgggcccataacccag

SEQ ID NO: 12356 - DNA, 28 bp, Homo sapiens
  source 1..28: mol_type = genomic DNA
cggaagcgtgctgggcccataacccaga

SEQ ID NO: 12357 - DNA, 29 bp, Homo sapiens
  source 1..29: mol_type = genomic DNA
cggaagcgtgctgggcccataacccagag

SEQ ID NO: 12358 - DNA, 32 bp, Homo sapiens
  source 1..32: mol_type = genomic DNA
cggaagcgtgctgggcccataacccagaggtc

SEQ ID NO: 12359 - DNA, 33 bp, Homo sapiens
  source 1..33: mol_type = genomic DNA
cggaagcgtgctgggcccataacccagaggtcg

SEQ ID NO: 12360 - DNA, 34 bp, Homo sapiens
  source 1..34: mol_type = genomic DNA
cggaagcgtgctgggcccataacccagaggtcga

SEQ ID NO: 12361 - DNA, 35 bp, Homo sapiens
  source 1..35: mol_type = genomic DNA
cggaagcgtgctgggcccataacccagaggtcgat

SEQ ID NO: 12362 - DNA, 36 bp, Homo sapiens
  source 1..36: mol_type = genomic DNA
cggaagcgtgctgggcccataacccagaggtcgatg

SEQ ID NO: 12363 - DNA, 37 bp, Homo sapiens
  source 1..37: mol_type = genomic DNA
cggaagcgtgctgggcccataacccagaggtcgatgg

SEQ ID NO: 12364 - DNA, 38 bp, Homo sapiens
  source 1..38: mol_type = genomic DNA
cggaagcgtgctgggcccataacccagaggtcgatgga

SEQ ID NO: 12365 - DNA, 39 bp, Homo sapiens
  source 1..39: mol_type = genomic DNA
cggaagcgtgctgggcccataacccagaggtcgatggat

SEQ ID NO: 12366 - DNA, 40 bp, Homo sapiens
  source 1..40: mol_type = genomic DNA
cggaagcgtgctgggcccataacccagaggtcgatggatc

SEQ ID NO: 12367 - DNA, 41 bp, Homo sapiens
  source 1..41: mol_type = genomic DNA
cggaagcgtgctgggcccataacccagaggtcgatggatcg

SEQ ID NO: 12368 - DNA, 41 bp, Homo sapiens
  source 1..41: mol_type = genomic DNA
cggaagcgtgctgggcccataacccagaggtcgatggatct

SEQ ID NO: 12369 - DNA, 32 bp, Homo sapiens
  source 1..32: mol_type = genomic DNA
cggagaattttggattctcagggatgggttcg

SEQ ID NO: 12370 - DNA, 34 bp, Homo sapiens
  source 1..34: mol_type = genomic DNA
cggagaattttggattctcagggatgggttcgat

SEQ ID NO: 12371 - DNA, 48 bp, Homo sapiens
  source 1..48: mol_type = genomic DNA
cggagaattttggattctcagggatgggttcgattctcatagtcctag

SEQ ID NO: 12372 - DNA, 16 bp, Homo sapiens
  source 1..16: mol_type = genomic DNA
cggagatgaaaacctt

SEQ ID NO: 12373 - DNA, 17 bp, Homo sapiens
  source 1..17: mol_type = genomic DNA
cggagatgaaaaccttt

SEQ ID NO: 12374 - DNA, 18 bp, Homo sapiens
  source 1..18: mol_type = genomic DNA
cggagatgaaaacctttt

SEQ ID NO: 12375 - DNA, 20 bp, Homo sapiens
  source 1..20: mol_type = genomic DNA
cggagatgaaaacctttttc

SEQ ID NO: 12376 - DNA, 21 bp, Homo sapiens
  source 1..21: mol_type = genomic DNA
cggagatgaaaacctttttcc

SEQ ID NO: 12377 - DNA, 22 bp, Homo sapiens
  source 1..22: mol_type = genomic DNA
cggagatgaaaacctttttcca

SEQ ID NO: 12378 - DNA, 24 bp, Homo sapiens
  source 1..24: mol_type = genomic DNA
cggagatgaaaacctttttccaag

SEQ ID NO: 12379 - DNA, 25 bp, Homo sapiens
  source 1..25: mol_type = genomic DNA
cggagatgaaaacctttttccaagg

SEQ ID NO: 12380 - DNA, 26 bp, Homo sapiens
  source 1..26: mol_type = genomic DNA
cggagatgaaaacctttttccaagga

SEQ ID NO: 12381 - DNA, 27 bp, Homo sapiens
  source 1..27: mol_type = genomic DNA
cggagatgaaaacctttttccaaggac

SEQ ID NO: 12382 - DNA, 28 bp, Homo sapiens
  source 1..28: mol_type = genomic DNA
cggagatgaaaacctttttccaaggaca

SEQ ID NO: 12383 - DNA, 29 bp, Homo sapiens
  source 1..29: mol_type = genomic DNA
cggagatgaaaacctttttccaaggacac

SEQ ID NO: 12384 - DNA, 30 bp, Homo sapiens
  source 1..30: mol_type = genomic DNA
cggagatgaaaacctttttccaaggacacc

SEQ ID NO: 12385 - DNA, 31 bp, Homo sapiens
  source 1..31: mol_type = genomic DNA
cggagatgaaaacctttttccaaggacacca

SEQ ID NO: 12386 - DNA, 16 bp, Homo sapiens
  source 1..16: mol_type = genomic DNA
cggagctggggattgt

SEQ ID NO: 12387 - DNA, 23 bp, Homo sapiens
  source 1..23: mol_type = genomic DNA
cggagctggggattgtgggttcg

SEQ ID NO: 12388 - DNA, 30 bp, Homo sapiens
  source 1..30: mol_type = genomic DNA
cggagctggggattgtgggttcgagtccca

SEQ ID NO: 12389 - DNA, 32 bp, Homo sapiens
  source 1..32: mol_type = genomic DNA
cggagctggggattgtgggttcgagtcccatc

SEQ ID NO: 12390 - DNA, 33 bp, Homo sapiens
  source 1..33: mol_type = genomic DNA
cggagctggggattgtgggttcgagtcccatct

SEQ ID NO: 12391 - DNA, 41 bp, Homo sapiens
  source 1..41: mol_type = genomic DNA
cggagctggggattgtgggttcgagtcccatctgggtcgcc

SEQ ID NO: 12392 - DNA, 25 bp, Homo sapiens
  source 1..25: mol_type = genomic DNA
cggaggcgtgggttcgaatcccacc

SEQ ID NO: 12393 - DNA, 26 bp, Homo sapiens
  source 1..26: mol_type = genomic DNA
cggaggcgtgggttcgaatcccaccg

SEQ ID NO: 12394 - DNA, 29 bp, Homo sapiens
  source 1..29: mol_type = genomic DNA
cggaggcgtgggttcgaatcccaccgctg

SEQ ID NO: 12395 - DNA, 16 bp, Homo sapiens
  source 1..16: mol_type = genomic DNA
cggatagctcagtcgg

SEQ ID NO: 12396 - DNA, 17 bp, Homo sapiens
  source 1..17: mol_type = genomic DNA
cggatagctcagtcggt

SEQ ID NO: 12397 - DNA, 18 bp, Homo sapiens
  source 1..18: mol_type = genomic DNA
cggatagctcagtcggta

SEQ ID NO: 12398 - DNA, 19 bp, Homo sapiens
  source 1..19: mol_type = genomic DNA
cggatagctcagtcggtag

SEQ ID NO: 12399 - DNA, 20 bp, Homo sapiens
  source 1..20: mol_type = genomic DNA
cggatagctcagtcggtaga

SEQ ID NO: 12400 - DNA, 21 bp, Homo sapiens
  source 1..21: mol_type = genomic DNA
cggatagctcagtcggtagag

SEQ ID NO: 12401 - DNA, 22 bp, Homo sapiens
  source 1..22: mol_type = genomic DNA
cggatagctcagtcggtagagc

SEQ ID NO: 12402 - DNA, 23 bp, Homo sapiens
  source 1..23: mol_type = genomic DNA
cggatagctcagtcggtagagca

SEQ ID NO: 12403 - DNA, 24 bp, Homo sapiens
  source 1..24: mol_type = genomic DNA
cggatagctcagtcggtagagcat

SEQ ID NO: 12404 - DNA, 25 bp, Homo sapiens
  source 1..25: mol_type = genomic DNA
cggatagctcagtcggtagagcatc

SEQ ID NO: 12405 - DNA, 26 bp, Homo sapiens
  source 1..26: mol_type = genomic DNA
cggatagctcagtcggtagagcatca

SEQ ID NO: 12406 - DNA, 27 bp, Homo sapiens
  source 1..27: mol_type = genomic DNA
cggatagctcagtcggtagagcatcag

SEQ ID NO: 12407 - DNA, 28 bp, Homo sapiens
  source 1..28: mol_type = genomic DNA
cggatagctcagtcggtagagcatcaga

SEQ ID NO: 12408 - DNA, 29 bp, Homo sapiens
  source 1..29: mol_type = genomic DNA
cggatagctcagtcggtagagcatcagac

SEQ ID NO: 12409 - DNA, 30 bp, Homo sapiens
  source 1..30: mol_type = genomic DNA
cggatagctcagtcggtagagcatcagact

SEQ ID NO: 12410 - DNA, 31 bp, Homo sapiens
  source 1..31: mol_type = genomic DNA
cggatagctcagtcggtagagcatcagactt

SEQ ID NO: 12411 - DNA, 32 bp, Homo sapiens
  source 1..32: mol_type = genomic DNA
cggatagctcagtcggtagagcatcagacttt

SEQ ID NO: 12412 - DNA, 33 bp, Homo sapiens
  source 1..33: mol_type = genomic DNA
cggatagctcagtcggtagagcatcagactttt

SEQ ID NO: 12413 - DNA, 39 bp, Homo sapiens
  source 1..39: mol_type = genomic DNA
cggatagctcagtcggtagagcatcagacttttaatctg

SEQ ID NO: 12414 - DNA, 16 bp, Homo sapiens
  source 1..16: mol_type = genomic DNA
cggatcagaagattcc

SEQ ID NO: 12415 - DNA, 22 bp, Homo sapiens
  source 1..22: mol_type = genomic DNA
cggatcagaagattccaggttc

SEQ ID NO: 12416 - DNA, 30 bp, Homo sapiens
  source 1..30: mol_type = genomic DNA
cggatcagaagattccaggttcgactcctg

SEQ ID NO: 12417 - DNA, 33 bp, Homo sapiens
  source 1..33: mol_type = genomic DNA
cggatcagaagattccaggttcgactcctggct

SEQ ID NO: 12418 - DNA, 22 bp, Homo sapiens
  source 1..22: mol_type = genomic DNA
cggatcagaagattctaggttc

SEQ ID NO: 12419 - DNA, 41 bp, Homo sapiens
  source 1..41: mol_type = genomic DNA
cggatcagaagattctaggttcgactcctggctggctcgcc

SEQ ID NO: 12420 - DNA, 16 bp, Homo sapiens
  source 1..16: mol_type = genomic DNA
cggatcagaagattga

SEQ ID NO: 12421 - DNA, 18 bp, Homo sapiens
  source 1..18: mol_type = genomic DNA
cggatcagaagattgagg

SEQ ID NO: 12422 - DNA, 20 bp, Homo sapiens
  source 1..20: mol_type = genomic DNA
cggatcagaagattgagggt

SEQ ID NO: 12423 - DNA, 22 bp, Homo sapiens
  source 1..22: mol_type = genomic DNA
cggatcagaagattgagggttc

SEQ ID NO: 12424 - DNA, 23 bp, Homo sapiens
  source 1..23: mol_type = genomic DNA
cggatcagaagattgagggttcg

SEQ ID NO: 12425 - DNA, 30 bp, Homo sapiens
  source 1..30: mol_type = genomic DNA
cggatcagaagattgagggttcgagtccct

SEQ ID NO: 12426 - DNA, 41 bp, Homo sapiens
  source 1..41: mol_type = genomic DNA
cggatcagaagattgagggttcgagtcccttcgtggtcgcc

SEQ ID NO: 12427 - DNA, 16 bp, Homo sapiens
  source 1..16: mol_type = genomic DNA
cggatcagaagattgc

SEQ ID NO: 12428 - DNA, 18 bp, Homo sapiens
  source 1..18: mol_type = genomic DNA
cggatcagaagattgcag

SEQ ID NO: 12429 - DNA, 22 bp, Homo sapiens
  source 1..22: mol_type = genomic DNA
cggatcagaagattgcaggttc

SEQ ID NO: 12430 - DNA, 23 bp, Homo sapiens
  source 1..23: mol_type = genomic DNA
cggatcagaagattgcaggttcg

SEQ ID NO: 12431 - DNA, 41 bp, Homo sapiens
  source 1..41: mol_type = genomic DNA
cggatcagaagattgcaggttcgagtcctgccgcggtcgcc

SEQ ID NO: 12432 - DNA, 16 bp, Homo sapiens
  source 1..16: mol_type = genomic DNA
cggatggaggcgtggg

SEQ ID NO: 12433 - DNA, 17 bp, Homo sapiens
  source 1..17: mol_type = genomic DNA
cggatggaggcgtgggt

SEQ ID NO: 12434 - DNA, 18 bp, Homo sapiens
  source 1..18: mol_type = genomic DNA
cggatggaggcgtgggtt

SEQ ID NO: 12435 - DNA, 26 bp, Homo sapiens
  source 1..26: mol_type = genomic DNA
cggatggaggcgtgggttcgaatccc

SEQ ID NO: 12436 - DNA, 27 bp, Homo sapiens
  source 1..27: mol_type = genomic DNA
cggatggaggcgtgggttcgaatccca

SEQ ID NO: 12437 - DNA, 28 bp, Homo sapiens
  source 1..28: mol_type = genomic DNA
cggatggaggcgtgggttcgaatcccac

SEQ ID NO: 12438 - DNA, 29 bp, Homo sapiens
  source 1..29: mol_type = genomic DNA
cggatggaggcgtgggttcgaatcccact

SEQ ID NO: 12439 - DNA, 31 bp, Homo sapiens
  source 1..31: mol_type = genomic DNA
cggatggaggcgtgggttcgaatcccacttc

SEQ ID NO: 12440 - DNA, 32 bp, Homo sapiens
  source 1..32: mol_type = genomic DNA
cggatggaggcgtgggttcgaatcccacttct

SEQ ID NO: 12441 - DNA, 33 bp, Homo sapiens
  source 1..33: mol_type = genomic DNA
cggatggaggcgtgggttcgaatcccacttctg

SEQ ID NO: 12442 - DNA, 36 bp, Homo sapiens
  source 1..36: mol_type = genomic DNA
cggatggaggcgtgggttcgaatcccacttctgaca

SEQ ID NO: 12443 - DNA, 37 bp, Homo sapiens
  source 1..37: mol_type = genomic DNA
cggatggaggcgtgggttcgaatcccacttctgacac

SEQ ID NO: 12444 - DNA, 38 bp, Homo sapiens
  source 1..38: mol_type = genomic DNA
cggatggaggcgtgggttcgaatcccacttctgacacc

SEQ ID NO: 12445 - DNA, 16 bp, Homo sapiens
  source 1..16: mol_type = genomic DNA
cggcccgggttcgact

SEQ ID NO: 12446 - DNA, 17 bp, Homo sapiens
  source 1..17: mol_type = genomic DNA
cggcccgggttcgactc

SEQ ID NO: 12447 - DNA, 18 bp, Homo sapiens
  source 1..18: mol_type = genomic DNA
cggcccgggttcgactcc

SEQ ID NO: 12448 - DNA, 20 bp, Homo sapiens
  source 1..20: mol_type = genomic DNA
cggcccgggttcgactcccg

SEQ ID NO: 12449 - DNA, 21 bp, Homo sapiens
  source 1..21: mol_type = genomic DNA
cggcccgggttcgactcccgg

SEQ ID NO: 12450 - DNA, 22 bp, Homo sapiens
  source 1..22: mol_type = genomic DNA
cggcccgggttcgactcccggt

SEQ ID NO: 12451 - DNA, 23 bp, Homo sapiens
  source 1..23: mol_type = genomic DNA
cggcccgggttcgactcccggtg

SEQ ID NO: 12452 - DNA, 24 bp, Homo sapiens
  source 1..24: mol_type = genomic DNA
cggcccgggttcgactcccggtgt

SEQ ID NO: 12453 - DNA, 25 bp, Homo sapiens
  source 1..25: mol_type = genomic DNA
cggcccgggttcgactcccggtgtg

SEQ ID NO: 12454 - DNA, 26 bp, Homo sapiens
  source 1..26: mol_type = genomic DNA
cggcccgggttcgactcccggtgtgg

SEQ ID NO: 12455 - DNA, 28 bp, Homo sapiens
  source 1..28: mol_type = genomic DNA
cggcccgggttcgactcccggtgtggga

SEQ ID NO: 12456 - DNA, 30 bp, Homo sapiens
  source 1..30: mol_type = genomic DNA
cggcccgggttcgactcccggtgtgggaac

SEQ ID NO: 12457 - DNA, 31 bp, Homo sapiens
  source 1..31: mol_type = genomic DNA
cggcccgggttcgactcccggtgtgggaacc

SEQ ID NO: 12458 - DNA, 32 bp, Homo sapiens
  source 1..32: mol_type = genomic DNA
cggcccgggttcgactcccggtgtgggaacca

SEQ ID NO: 12459 - DNA, 17 bp, Homo sapiens
  source 1..17: mol_type = genomic DNA
cggcccgggttcgattc

SEQ ID NO: 12460 - DNA, 18 bp, Homo sapiens
  source 1..18: mol_type = genomic DNA
cggcccgggttcgattcc

SEQ ID NO: 12461 - DNA, 19 bp, Homo sapiens
  source 1..19: mol_type = genomic DNA
cggcccgggttcgattccc

SEQ ID NO: 12462 - DNA, 20 bp, Homo sapiens
  source 1..20: mol_type = genomic DNA
cggcccgggttcgattcccg

SEQ ID NO: 12463 - DNA, 21 bp, Homo sapiens
  source 1..21: mol_type = genomic DNA
cggcccgggttcgattcccgg

SEQ ID NO: 12464 - DNA, 22 bp, Homo sapiens
  source 1..22: mol_type = genomic DNA
cggcccgggttcgattcccggt

SEQ ID NO: 12465 - DNA, 23 bp, Homo sapiens
  source 1..23: mol_type = genomic DNA
cggcccgggttcgattcccggtc

SEQ ID NO: 12466 - DNA, 29 bp, Homo sapiens
  source 1..29: mol_type = genomic DNA
cggcccgggttcgattcccggtcagggaa

SEQ ID NO: 12467 - DNA, 30 bp, Homo sapiens
  source 1..30: mol_type = genomic DNA
cggcccgggttcgattcccggtcagggaac

SEQ ID NO: 12468 - DNA, 31 bp, Homo sapiens
  source 1..31: mol_type = genomic DNA
cggcccgggttcgattcccggtcagggaacc

SEQ ID NO: 12469 - DNA, 32 bp, Homo sapiens
  source 1..32: mol_type = genomic DNA
cggcccgggttcgattcccggtcagggaacca

SEQ ID NO: 12470 - DNA, 16 bp, Homo sapiens
  source 1..16: mol_type = genomic DNA
cggcgctctcaccgcc

SEQ ID NO: 12471 - DNA, 22 bp, Homo sapiens
  source 1..22: mol_type = genomic DNA
cggcgctctcaccgccgcggcc

SEQ ID NO: 12472 - DNA, 23 bp, Homo sapiens
  source 1..23: mol_type = genomic DNA
cggcgctctcaccgccgcggccc

SEQ ID NO: 12473 - DNA, 24 bp, Homo sapiens
  source 1..24: mol_type = genomic DNA
cggcgctctcaccgccgcggcccg

SEQ ID NO: 12474 - DNA, 26 bp, Homo sapiens
  source 1..26: mol_type = genomic DNA
cggcgctctcaccgccgcggcccggg

SEQ ID NO: 12475 - DNA, 27 bp, Homo sapiens
  source 1..27: mol_type = genomic DNA
cggcgctctcaccgccgcggcccgggt

SEQ ID NO: 12476 - DNA, 28 bp, Homo sapiens
  source 1..28: mol_type = genomic DNA
cggcgctctcaccgccgcggcccgggtt

SEQ ID NO: 12477 - DNA, 29 bp, Homo sapiens
  source 1..29: mol_type = genomic DNA
cggcgctctcaccgccgcggcccgggttc

SEQ ID NO: 12478 - DNA, 33 bp, Homo sapiens
  source 1..33: mol_type = genomic DNA
cggcgctctcaccgccgcggcccgggttcgatt

SEQ ID NO: 12479 - DNA, 38 bp, Homo sapiens
  source 1..38: mol_type = genomic DNA
cggcgctctcaccgccgcggcccgggttcgattcccgg

SEQ ID NO: 12480 - DNA, 39 bp, Homo sapiens
  source 1..39: mol_type = genomic DNA
cggcgctctcaccgccgcggcccgggttcgattcccggt

SEQ ID NO: 12481 - DNA, 46 bp, Homo sapiens
  source 1..46: mol_type = genomic DNA
cggcgctctcaccgccgcggcccgggttcgattcccggtcagggaa

SEQ ID NO: 12482 - DNA, 47 bp, Homo sapiens
  source 1..47: mol_type = genomic DNA
cggcgctctcaccgccgcggcccgggttcgattcccggtcagggaac

SEQ ID NO: 12483 - DNA, 48 bp, Homo sapiens
  source 1..48: mol_type = genomic DNA
cggcgctctcaccgccgcggcccgggttcgattcccggtcagggaacc

SEQ ID NO: 12484 - DNA, 30 bp, Homo sapiens
  source 1..30: mol_type = genomic DNA
cggctagctcagtcgatagagcatgagact

SEQ ID NO: 12485 - DNA, 32 bp, Homo sapiens
  source 1..32: mol_type = genomic DNA
cggctagctcagtcgatagagcatgagactct

SEQ ID NO: 12486 - DNA, 16 bp, Homo sapiens
  source 1..16: mol_type = genomic DNA
cggctagctcagtcgg

SEQ ID NO: 12487 - DNA, 17 bp, Homo sapiens
  source 1..17: mol_type = genomic DNA
cggctagctcagtcggt

SEQ ID NO: 12488 - DNA, 18 bp, Homo sapiens
  source 1..18: mol_type = genomic DNA
cggctagctcagtcggta

SEQ ID NO: 12489 - DNA, 19 bp, Homo sapiens
  source 1..19: mol_type = genomic DNA
cggctagctcagtcggtag

SEQ ID NO: 12490 - DNA, 20 bp, Homo sapiens
  source 1..20: mol_type = genomic DNA
cggctagctcagtcggtaga

SEQ ID NO: 12491 - DNA, 21 bp, Homo sapiens
  source 1..21: mol_type = genomic DNA
cggctagctcagtcggtagag

SEQ ID NO: 12492 - DNA, 22 bp, Homo sapiens
  source 1..22: mol_type = genomic DNA
cggctagctcagtcggtagagc

SEQ ID NO: 12493 - DNA, 23 bp, Homo sapiens
  source 1..23: mol_type = genomic DNA
cggctagctcagtcggtagagca

SEQ ID NO: 12494 - DNA, 24 bp, Homo sapiens
  source 1..24: mol_type = genomic DNA
cggctagctcagtcggtagagcat

SEQ ID NO: 12495 - DNA, 25 bp, Homo sapiens
  source 1..25: mol_type = genomic DNA
cggctagctcagtcggtagagcatg

SEQ ID NO: 12496 - DNA, 26 bp, Homo sapiens
  source 1..26: mol_type = genomic DNA
cggctagctcagtcggtagagcatga

SEQ ID NO: 12497 - DNA, 27 bp, Homo sapiens
  source 1..27: mol_type = genomic DNA
cggctagctcagtcggtagagcatgag

SEQ ID NO: 12498 - DNA, 28 bp, Homo sapiens
  source 1..28: mol_type = genomic DNA
cggctagctcagtcggtagagcatgaga

SEQ ID NO: 12499 - DNA, 29 bp, Homo sapiens
  source 1..29: mol_type = genomic DNA
cggctagctcagtcggtagagcatgagac

SEQ ID NO: 12500 - DNA, 30 bp, Homo sapiens
  source 1..30: mol_type = genomic DNA
cggctagctcagtcggtagagcatgagacc

SEQ ID NO: 12501 - DNA, 31 bp, Homo sapiens
  source 1..31: mol_type = genomic DNA
cggctagctcagtcggtagagcatgagaccc

SEQ ID NO: 12502 - DNA, 32 bp, Homo sapiens
  source 1..32: mol_type = genomic DNA
cggctagctcagtcggtagagcatgagaccct

SEQ ID NO: 12503 - DNA, 33 bp, Homo sapiens
  source 1..33: mol_type = genomic DNA
cggctagctcagtcggtagagcatgagaccctt

SEQ ID NO: 12504 - DNA, 30 bp, Homo sapiens
  source 1..30: mol_type = genomic DNA
cggctagctcagtcggtagagcatgagact

SEQ ID NO: 12505 - DNA, 31 bp, Homo sapiens
  source 1..31: mol_type = genomic DNA
cggctagctcagtcggtagagcatgagactc

SEQ ID NO: 12506 - DNA, 32 bp, Homo sapiens
  source 1..32: mol_type = genomic DNA
cggctagctcagtcggtagagcatgagactct

SEQ ID NO: 12507 - DNA, 33 bp, Homo sapiens
  source 1..33: mol_type = genomic DNA
cggctagctcagtcggtagagcatgagactctt

SEQ ID NO: 12508 - DNA, 34 bp, Homo sapiens
  source 1..34: mol_type = genomic DNA
cggctagctcagtcggtagagcatgagactctta

SEQ ID NO: 12509 - DNA, 35 bp, Homo sapiens
  source 1..35: mol_type = genomic DNA
cggctagctcagtcggtagagcatgagactcttaa

SEQ ID NO: 12510 - DNA, 36 bp, Homo sapiens
  source 1..36: mol_type = genomic DNA
cggctagctcagtcggtagagcatgagactcttaat

SEQ ID NO: 12511 - DNA, 37 bp, Homo sapiens
  source 1..37: mol_type = genomic DNA
cggctagctcagtcggtagagcatgagactcttaatc

SEQ ID NO: 12512 - DNA, 38 bp, Homo sapiens
  source 1..38: mol_type = genomic DNA
cggctagctcagtcggtagagcatgagactcttaatct

SEQ ID NO: 12513 - DNA, 39 bp, Homo sapiens
  source 1..39: mol_type = genomic DNA
cggctagctcagtcggtagagcatgagactcttaatctc

SEQ ID NO: 12514 - DNA, 40 bp, Homo sapiens
  source 1..40: mol_type = genomic DNA
cggctagctcagtcggtagagcatgagactcttaatctca

SEQ ID NO: 12515 - DNA, 46 bp, Homo sapiens
  source 1..46: mol_type = genomic DNA
cggctagctcagtcggtagagcatgagactcttaatctcagggtcg

SEQ ID NO: 12516 - DNA, 48 bp, Homo sapiens
  source 1..48: mol_type = genomic DNA
cggctagctcagtcggtagagcatgagactcttaatctcagggtcgtg

SEQ ID NO: 12517 - DNA, 26 bp, Homo sapiens
  source 1..26: mol_type = genomic DNA
cggctagctcagtcggtagagcatgg

SEQ ID NO: 12518 - DNA, 27 bp, Homo sapiens
  source 1..27: mol_type = genomic DNA
cggctagctcagtcggtagagcatggg

SEQ ID NO: 12519 - DNA, 28 bp, Homo sapiens
  source 1..28: mol_type = genomic DNA
cggctagctcagtcggtagagcatggga

SEQ ID NO: 12520 - DNA, 29 bp, Homo sapiens
  source 1..29: mol_type = genomic DNA
cggctagctcagtcggtagagcatgggac

SEQ ID NO: 12521 - DNA, 30 bp, Homo sapiens
  source 1..30: mol_type = genomic DNA
cggctagctcagtcggtagagcatgggact

SEQ ID NO: 12522 - DNA, 31 bp, Homo sapiens
  source 1..31: mol_type = genomic DNA
cggctagctcagtcggtagagcatgggactc

SEQ ID NO: 12523 - DNA, 32 bp, Homo sapiens
  source 1..32: mol_type = genomic DNA
cggctagctcagtcggtagagcatgggactct

SEQ ID NO: 12524 - DNA, 33 bp, Homo sapiens
  source 1..33: mol_type = genomic DNA
cggctagctcagtcggtagagcatgggactctt

SEQ ID NO: 12525 - DNA, 34 bp, Homo sapiens
  source 1..34: mol_type = genomic DNA
cggctagctcagtcggtagagcatgggactctta

SEQ ID NO: 12526 - DNA, 35 bp, Homo sapiens
  source 1..35: mol_type = genomic DNA
cggctagctcagtcggtagagcatgggactcttaa

SEQ ID NO: 12527 - DNA, 36 bp, Homo sapiens
  source 1..36: mol_type = genomic DNA
cggctagctcagtcggtagagcatgggactcttaat

SEQ ID NO: 12528 - DNA, 37 bp, Homo sapiens
  source 1..37: mol_type = genomic DNA
cggctagctcagtcggtagagcatgggactcttaatc

SEQ ID NO: 12529 - DNA, 38 bp, Homo sapiens
  source 1..38: mol_type = genomic DNA
cggctagctcagtcggtagagcatgggactcttaatcc

SEQ ID NO: 12530 - DNA, 39 bp, Homo sapiens
  source 1..39: mol_type = genomic DNA
cggctagctcagtcggtagagcatgggactcttaatccc

SEQ ID NO: 12531 - DNA, 40 bp, Homo sapiens
  source 1..40: mol_type = genomic DNA
cggctagctcagtcggtagagcatgggactcttaatccca

SEQ ID NO: 12532 - DNA, 47 bp, Homo sapiens
  source 1..47: mol_type = genomic DNA
cggctagctcagtcggtagagcatgggactcttaatcccagggtcgt

SEQ ID NO: 12533 - DNA, 48 bp, Homo sapiens
  source 1..48: mol_type = genomic DNA
cggctagctcagtcggtagagcatgggactcttaatcccagggtcgtg

SEQ ID NO: 12534 - DNA, 38 bp, Homo sapiens
  source 1..38: mol_type = genomic DNA
cggctagctcagtcggtagagcatgggactcttaatct

SEQ ID NO: 12535 - DNA, 33 bp, Homo sapiens
  source 1..33: mol_type = genomic DNA
cggctcgttggtctaggggtatgattctcgctt

SEQ ID NO: 12536 - DNA, 22 bp, Homo sapiens
  source 1..22: mol_type = genomic DNA
cggctgttaaccgaaaggttgg

SEQ ID NO: 12537 - DNA, 23 bp, Homo sapiens
  source 1..23: mol_type = genomic DNA
cggctgttaaccgaaaggttggt

SEQ ID NO: 12538 - DNA, 27 bp, Homo sapiens
  source 1..27: mol_type = genomic DNA
cggctgttaaccgaaaggttggtggtt

SEQ ID NO: 12539 - DNA, 46 bp, Homo sapiens
  source 1..46: mol_type = genomic DNA
cggctgttaaccgaaaggttggtggttcgagcccacccagggacgc

SEQ ID NO: 12540 - DNA, 47 bp, Homo sapiens
  source 1..47: mol_type = genomic DNA
cggctgttaaccgaaaggttggtggttcgagcccacccagggacgcc

SEQ ID NO: 12541 - DNA, 30 bp, Homo sapiens
  source 1..30: mol_type = genomic DNA
cgggagacccgggttcaattcccggccaat

SEQ ID NO: 12542 - DNA, 16 bp, Homo sapiens
  source 1..16: mol_type = genomic DNA
cgggagaccggggttc

SEQ ID NO: 12543 - DNA, 27 bp, Homo sapiens
  source 1..27: mol_type = genomic DNA
cgggagaccggggttcaattccccgac

SEQ ID NO: 12544 - DNA, 28 bp, Homo sapiens
  source 1..28: mol_type = genomic DNA
cgggagaccggggttcaattccccgacg

SEQ ID NO: 12545 - DNA, 29 bp, Homo sapiens
  source 1..29: mol_type = genomic DNA
cgggagaccggggttcaattccccgacgg

SEQ ID NO: 12546 - DNA, 30 bp, Homo sapiens
  source 1..30: mol_type = genomic DNA
cgggagaccggggttcaattccccgacggg

SEQ ID NO: 12547 - DNA, 31 bp, Homo sapiens
  source 1..31: mol_type = genomic DNA
cgggagaccggggttcaattccccgacgggg

SEQ ID NO: 12548 - DNA, 32 bp, Homo sapiens
  source 1..32: mol_type = genomic DNA
cgggagaccggggttcaattccccgacgggga

SEQ ID NO: 12549 - DNA, 33 bp, Homo sapiens
  source 1..33: mol_type = genomic DNA
cgggagaccggggttcaattccccgacggggag

SEQ ID NO: 12550 - DNA, 34 bp, Homo sapiens
  source 1..34: mol_type = genomic DNA
cgggagaccggggttcaattccccgacggggagc

SEQ ID NO: 12551 - DNA, 35 bp, Homo sapiens
  source 1..35: mol_type = genomic DNA
cgggagaccggggttcaattccccgacggggagcc

SEQ ID NO: 12552 - DNA, 36 bp, Homo sapiens
  source 1..36: mol_type = genomic DNA
cgggagaccggggttcaattccccgacggggagcca

SEQ ID NO: 12553 - DNA, 17 bp, Homo sapiens
  source 1..17: mol_type = genomic DNA
cgggagaccggggttcg

SEQ ID NO: 12554 - DNA, 21 bp, Homo sapiens
  source 1..21: mol_type = genomic DNA
cgggagaccggggttcgattc

SEQ ID NO: 12555 - DNA, 26 bp, Homo sapiens
  source 1..26: mol_type = genomic DNA
cgggagaccggggttcgattccccga

SEQ ID NO: 12556 - DNA, 27 bp, Homo sapiens
  source 1..27: mol_type = genomic DNA
cgggagaccggggttcgattccccgac

SEQ ID NO: 12557 - DNA, 28 bp, Homo sapiens
  source 1..28: mol_type = genomic DNA
cgggagaccggggttcgattccccgacg

SEQ ID NO: 12558 - DNA, 29 bp, Homo sapiens
  source 1..29: mol_type = genomic DNA
cgggagaccggggttcgattccccgacgg

SEQ ID NO: 12559 - DNA, 30 bp, Homo sapiens
  source 1..30: mol_type = genomic DNA
cgggagaccggggttcgattccccgacggg

SEQ ID NO: 12560 - DNA, 31 bp, Homo sapiens
  source 1..31: mol_type = genomic DNA
cgggagaccggggttcgattccccgacgggg

SEQ ID NO: 12561 - DNA, 32 bp, Homo sapiens
  source 1..32: mol_type = genomic DNA
cgggagaccggggttcgattccccgacgggga

SEQ ID NO: 12562 - DNA, 33 bp, Homo sapiens
  source 1..33: mol_type = genomic DNA
cgggagaccggggttcgattccccgacggggag

SEQ ID NO: 12563 - DNA, 34 bp, Homo sapiens
  source 1..34: mol_type = genomic DNA
cgggagaccggggttcgattccccgacggggagc

SEQ ID NO: 12564 - DNA, 35 bp, Homo sapiens
  source 1..35: mol_type = genomic DNA
cgggagaccggggttcgattccccgacggggagcc

SEQ ID NO: 12565 - DNA, 36 bp, Homo sapiens
  source 1..36: mol_type = genomic DNA
cgggagaccggggttcgattccccgacggggagcca

SEQ ID NO: 12566 - DNA, 16 bp, Homo sapiens
  source 1..16: mol_type = genomic DNA
cgggaggcccgggttc

SEQ ID NO: 12567 - DNA, 17 bp, Homo sapiens
  source 1..17: mol_type = genomic DNA
cgggaggcccgggttcg

SEQ ID NO: 12568 - DNA, 25 bp, Homo sapiens
  source 1..25: mol_type = genomic DNA
cgggaggcccgggttcgattcccgg

SEQ ID NO: 12569 - DNA, 26 bp, Homo sapiens
  source 1..26: mol_type = genomic DNA
cgggaggcccgggttcgattcccggc

SEQ ID NO: 12570 - DNA, 27 bp, Homo sapiens
  source 1..27: mol_type = genomic DNA
cgggaggcccgggttcgattcccggcc

SEQ ID NO: 12571 - DNA, 28 bp, Homo sapiens
  source 1..28: mol_type = genomic DNA
cgggaggcccgggttcgattcccggcca

SEQ ID NO: 12572 - DNA, 30 bp, Homo sapiens
  source 1..30: mol_type = genomic DNA
cgggaggcccgggttcgattcccggccaat

SEQ ID NO: 12573 - DNA, 31 bp, Homo sapiens
  source 1..31: mol_type = genomic DNA
cgggaggcccgggttcgattcccggccaatg

SEQ ID NO: 12574 - DNA, 32 bp, Homo sapiens
  source 1..32: mol_type = genomic DNA
cgggaggcccgggttcgattcccggccaatgc

SEQ ID NO: 12575 - DNA, 33 bp, Homo sapiens
  source 1..33: mol_type = genomic DNA
cgggaggcccgggttcgattcccggccaatgca

SEQ ID NO: 12576 - DNA, 34 bp, Homo sapiens
  source 1..34: mol_type = genomic DNA
cgggaggcccgggttcgattcccggccaatgcac

SEQ ID NO: 12577 - DNA, 35 bp, Homo sapiens
  source 1..35: mol_type = genomic DNA
cgggaggcccgggttcgattcccggccaatgcacc

SEQ ID NO: 12578 - DNA, 36 bp, Homo sapiens
  source 1..36: mol_type = genomic DNA
cgggaggcccgggttcgattcccggccaatgcacca

SEQ ID NO: 12579 - DNA, 28 bp, Homo sapiens
  source 1..28: mol_type = genomic DNA
cgggaggcccgggttcgattcccggccc

SEQ ID NO: 12580 - DNA, 31 bp, Homo sapiens
  source 1..31: mol_type = genomic DNA
cgggaggcccgggttcgattcccggcccatg

SEQ ID NO: 12581 - DNA, 35 bp, Homo sapiens
  source 1..35: mol_type = genomic DNA
cgggaggcccgggttcgattcccggcccatgcacc

SEQ ID NO: 12582 - DNA, 36 bp, Homo sapiens
  source 1..36: mol_type = genomic DNA
cgggaggcccgggttcgattcccggcccatgcacca

SEQ ID NO: 12583 - DNA, 27 bp, Homo sapiens
  source 1..27: mol_type = genomic DNA
cgggatcgatgcccgcattctccacca

SEQ ID NO: 12584 - DNA, 16 bp, Homo sapiens
  source 1..16: mol_type = genomic DNA
cgggcccataccccga

SEQ ID NO: 12585 - DNA, 17 bp, Homo sapiens
  source 1..17: mol_type = genomic DNA
cgggcccataccccgaa

SEQ ID NO: 12586 - DNA, 18 bp, Homo sapiens
  source 1..18: mol_type = genomic DNA
cgggcccataccccgaaa

SEQ ID NO: 12587 - DNA, 19 bp, Homo sapiens
  source 1..19: mol_type = genomic DNA
cgggcccataccccgaaaa

SEQ ID NO: 12588 - DNA, 23 bp, Homo sapiens
  source 1..23: mol_type = genomic DNA
cgggcccataccccgaaaatgtt

SEQ ID NO: 12589 - DNA, 24 bp, Homo sapiens
  source 1..24: mol_type = genomic DNA
cgggcccataccccgaaaatgttg

SEQ ID NO: 12590 - DNA, 25 bp, Homo sapiens
  source 1..25: mol_type = genomic DNA
cgggcccataccccgaaaatgttgg

SEQ ID NO: 12591 - DNA, 26 bp, Homo sapiens
  source 1..26: mol_type = genomic DNA
cgggcccataccccgaaaatgttggt

SEQ ID NO: 12592 - DNA, 27 bp, Homo sapiens
  source 1..27: mol_type = genomic DNA
cgggcccataccccgaaaatgttggtt

SEQ ID NO: 12593 - DNA, 28 bp, Homo sapiens
  source 1..28: mol_type = genomic DNA
cgggcccataccccgaaaatgttggtta

SEQ ID NO: 12594 - DNA, 29 bp, Homo sapiens
  source 1..29: mol_type = genomic DNA
cgggcccataccccgaaaatgttggttat

SEQ ID NO: 12595 - DNA, 30 bp, Homo sapiens
  source 1..30: mol_type = genomic DNA
cgggcccataccccgaaaatgttggttata

SEQ ID NO: 12596 - DNA, 31 bp, Homo sapiens
  source 1..31: mol_type = genomic DNA
cgggcccataccccgaaaatgttggttatac

SEQ ID NO: 12597 - DNA, 32 bp, Homo sapiens
  source 1..32: mol_type = genomic DNA
cgggcccataccccgaaaatgttggttatacc

SEQ ID NO: 12598 - DNA, 33 bp, Homo sapiens
  source 1..33: mol_type = genomic DNA
cgggcccataccccgaaaatgttggttataccc

SEQ ID NO: 12599 - DNA, 36 bp, Homo sapiens
  source 1..36: mol_type = genomic DNA
cgggcccataccccgaaaatgttggttatacccttc

SEQ ID NO: 12600 - DNA, 37 bp, Homo sapiens
  source 1..37: mol_type = genomic DNA
cgggcccataccccgaaaatgttggttatacccttcc

SEQ ID NO: 12601 - DNA, 39 bp, Homo sapiens
  source 1..39: mol_type = genomic DNA
cgggcccataccccgaaaatgttggttatacccttcccg

SEQ ID NO: 12602 - DNA, 41 bp, Homo sapiens
  source 1..41: mol_type = genomic DNA
cgggcccataccccgaaaatgttggttatacccttcccgta

SEQ ID NO: 12603 - DNA, 42 bp, Homo sapiens
  source 1..42: mol_type = genomic DNA
cgggcccataccccgaaaatgttggttatacccttcccgtac

SEQ ID NO: 12604 - DNA, 43 bp, Homo sapiens
  source 1..43: mol_type = genomic DNA
cgggcccataccccgaaaatgttggttatacccttcccgtact

SEQ ID NO: 12605 - DNA, 46 bp, Homo sapiens
  source 1..46: mol_type = genomic DNA
cgggcccataccccgaaaatgttggttatacccttcccgtactacc

SEQ ID NO: 12606 - DNA, 47 bp, Homo sapiens
  source 1..47: mol_type = genomic DNA
cgggcccataccccgaaaatgttggttatacccttcccgtactacca

SEQ ID NO: 12607 - DNA, 16 bp, Homo sapiens
  source 1..16: mol_type = genomic DNA
cgggctcacatcaccc

SEQ ID NO: 12608 - DNA, 17 bp, Homo sapiens
  source 1..17: mol_type = genomic DNA
cgggctcacatcacccc

SEQ ID NO: 12609 - DNA, 18 bp, Homo sapiens
  source 1..18: mol_type = genomic DNA
cgggctcacatcacccca

SEQ ID NO: 12610 - DNA, 20 bp, Homo sapiens
  source 1..20: mol_type = genomic DNA
cgggctcacatcaccccata

SEQ ID NO: 12611 - DNA, 21 bp, Homo sapiens
  source 1..21: mol_type = genomic DNA
cgggctcacatcaccccataa

SEQ ID NO: 12612 - DNA, 22 bp, Homo sapiens
  source 1..22: mol_type = genomic DNA
cgggctcacatcaccccataaa

SEQ ID NO: 12613 - DNA, 23 bp, Homo sapiens
  source 1..23: mol_type = genomic DNA
cgggctcacatcaccccataaac

SEQ ID NO: 12614 - DNA, 24 bp, Homo sapiens
  source 1..24: mol_type = genomic DNA
cgggctcacatcaccccataaaca

SEQ ID NO: 12615 - DNA, 25 bp, Homo sapiens
  source 1..25: mol_type = genomic DNA
cgggctcacatcaccccataaacac

SEQ ID NO: 12616 - DNA, 26 bp, Homo sapiens
  source 1..26: mol_type = genomic DNA
cgggctcacatcaccccataaacacc

SEQ ID NO: 12617 - DNA, 27 bp, Homo sapiens
  source 1..27: mol_type = genomic DNA
cgggctcacatcaccccataaacacca

SEQ ID NO: 12618 - DNA, 23 bp, Homo sapiens
  source 1..23: mol_type = genomic DNA
cggggatgtagctcagtggtaga

SEQ ID NO: 12619 - DNA, 16 bp, Homo sapiens
  source 1..16: mol_type = genomic DNA
cgggggcgtgggttcg

SEQ ID NO: 12620 - DNA, 25 bp, Homo sapiens
  source 1..25: mol_type = genomic DNA
cgggggcgtgggttcgaatcccacc

SEQ ID NO: 12621 - DNA, 29 bp, Homo sapiens
  source 1..29: mol_type = genomic DNA
cgggggcgtgggttcgaatcccaccgctg

SEQ ID NO: 12622 - DNA, 33 bp, Homo sapiens
  source 1..33: mol_type = genomic DNA
cgggggtatagctcagtggtagagcatttgact

SEQ ID NO: 12623 - DNA, 34 bp, Homo sapiens
  source 1..34: mol_type = genomic DNA
cgggggtatagctcagtggtagagcatttgactg

SEQ ID NO: 12624 - DNA, 35 bp, Homo sapiens
  source 1..35: mol_type = genomic DNA
cgggggtatagctcagtggtagagcatttgactgc

SEQ ID NO: 12625 - DNA, 35 bp, Homo sapiens
  source 1..35: mol_type = genomic DNA
cgggggtgtagctcagtggtagagcatttgactgc

SEQ ID NO: 12626 - DNA, 26 bp, Homo sapiens
  source 1..26: mol_type = genomic DNA
cggggttcaattccccgacggggagc

SEQ ID NO: 12627 - DNA, 27 bp, Homo sapiens
  source 1..27: mol_type = genomic DNA
cggggttcaattccccgacggggagcc

SEQ ID NO: 12628 - DNA, 19 bp, Homo sapiens
  source 1..19: mol_type = genomic DNA
cggggttcgattccccgac

SEQ ID NO: 12629 - DNA, 22 bp, Homo sapiens
  source 1..22: mol_type = genomic DNA
cggggttcgattccccgacggg

SEQ ID NO: 12630 - DNA, 25 bp, Homo sapiens
  source 1..25: mol_type = genomic DNA
cggggttcgattccccgacggggag

SEQ ID NO: 12631 - DNA, 26 bp, Homo sapiens
  source 1..26: mol_type = genomic DNA
cggggttcgattccccgacggggagc

SEQ ID NO: 12632 - DNA, 27 bp, Homo sapiens
  source 1..27: mol_type = genomic DNA
cggggttcgattccccgacggggagcc

SEQ ID NO: 12633 - DNA, 28 bp, Homo sapiens
  source 1..28: mol_type = genomic DNA
cggggttcgattccccgacggggagcca

SEQ ID NO: 12634 - DNA, 16 bp, Homo sapiens
  source 1..16: mol_type = genomic DNA
cgggtgcgagaggtcc

SEQ ID NO: 12635 - DNA, 17 bp, Homo sapiens
  source 1..17: mol_type = genomic DNA
cgggtgcgagaggtccc

SEQ ID NO: 12636 - DNA, 18 bp, Homo sapiens
  source 1..18: mol_type = genomic DNA
cgggtgcgagaggtcccg

SEQ ID NO: 12637 - DNA, 22 bp, Homo sapiens
  source 1..22: mol_type = genomic DNA
cgggtgtgagaggtcccgggtt

SEQ ID NO: 12638 - DNA, 17 bp, Homo sapiens
  source 1..17: mol_type = genomic DNA
cgggttcaaatcccgga

SEQ ID NO: 12639 - DNA, 18 bp, Homo sapiens
  source 1..18: mol_type = genomic DNA
cgggttcaaatcccggac

SEQ ID NO: 12640 - DNA, 19 bp, Homo sapiens
  source 1..19: mol_type = genomic DNA
cgggttcaaatcccggacg

SEQ ID NO: 12641 - DNA, 20 bp, Homo sapiens
  source 1..20: mol_type = genomic DNA
cgggttcaaatcccggacga

SEQ ID NO: 12642 - DNA, 21 bp, Homo sapiens
  source 1..21: mol_type = genomic DNA
cgggttcaaatcccggacgag

SEQ ID NO: 12643 - DNA, 22 bp, Homo sapiens
  source 1..22: mol_type = genomic DNA
cgggttcaaatcccggacgagc

SEQ ID NO: 12644 - DNA, 23 bp, Homo sapiens
  source 1..23: mol_type = genomic DNA
cgggttcaaatcccggacgagcc

SEQ ID NO: 12645 - DNA, 24 bp, Homo sapiens
  source 1..24: mol_type = genomic DNA
cgggttcaaatcccggacgagccc

SEQ ID NO: 12646 - DNA, 25 bp, Homo sapiens
  source 1..25: mol_type = genomic DNA
cgggttcaaatcccggacgagcccc

SEQ ID NO: 12647 - DNA, 26 bp, Homo sapiens
  source 1..26: mol_type = genomic DNA
cgggttcaaatcccggacgagccccc

SEQ ID NO: 12648 - DNA, 17 bp, Homo sapiens
  source 1..17: mol_type = genomic DNA
cgggttcaatccccggc

SEQ ID NO: 12649 - DNA, 22 bp, Homo sapiens
  source 1..22: mol_type = genomic DNA
cgggttcgaaccccgtacgggc

SEQ ID NO: 12650 - DNA, 23 bp, Homo sapiens
  source 1..23: mol_type = genomic DNA
cgggttcgaaccccgtacgggcc

SEQ ID NO: 12651 - DNA, 25 bp, Homo sapiens
  source 1..25: mol_type = genomic DNA
cgggttcgaaccccgtacgggccac

SEQ ID NO: 12652 - DNA, 26 bp, Homo sapiens
  source 1..26: mol_type = genomic DNA
cgggttcgaaccccgtacgggccacc

SEQ ID NO: 12653 - DNA, 22 bp, Homo sapiens
  source 1..22: mol_type = genomic DNA
cgggttcgaaccccgtccgtgc

SEQ ID NO: 12654 - DNA, 23 bp, Homo sapiens
  source 1..23: mol_type = genomic DNA
cgggttcgaaccccgtccgtgcc

SEQ ID NO: 12655 - DNA, 24 bp, Homo sapiens
  source 1..24: mol_type = genomic DNA
cgggttcgaaccccgtccgtgcct

SEQ ID NO: 12656 - DNA, 25 bp, Homo sapiens
  source 1..25: mol_type = genomic DNA
cgggttcgaaccccgtccgtgcctc

SEQ ID NO: 12657 - DNA, 26 bp, Homo sapiens
  source 1..26: mol_type = genomic DNA
cgggttcgaaccccgtccgtgcctcc

SEQ ID NO: 12658 - DNA, 23 bp, Homo sapiens
  source 1..23: mol_type = genomic DNA
cgggttcgactcccggtatggga

SEQ ID NO: 12659 - DNA, 24 bp, Homo sapiens
  source 1..24: mol_type = genomic DNA
cgggttcgactcccggtatgggaa

SEQ ID NO: 12660 - DNA, 25 bp, Homo sapiens
  source 1..25: mol_type = genomic DNA
cgggttcgactcccggtatgggaac

SEQ ID NO: 12661 - DNA, 26 bp, Homo sapiens
  source 1..26: mol_type = genomic DNA
cgggttcgactcccggtatgggaacc

SEQ ID NO: 12662 - DNA, 27 bp, Homo sapiens
  source 1..27: mol_type = genomic DNA
cgggttcgactcccggtatgggaacca

SEQ ID NO: 12663 - DNA, 18 bp, Homo sapiens
  source 1..18: mol_type = genomic DNA
cgggttcgactcccggtg

SEQ ID NO: 12664 - DNA, 19 bp, Homo sapiens
  source 1..19: mol_type = genomic DNA
cgggttcgactcccggtgt

SEQ ID NO: 12665 - DNA, 21 bp, Homo sapiens
  source 1..21: mol_type = genomic DNA
cgggttcgactcccggtgtgg

SEQ ID NO: 12666 - DNA, 22 bp, Homo sapiens
  source 1..22: mol_type = genomic DNA
cgggttcgactcccggtgtggg

SEQ ID NO: 12667 - DNA, 23 bp, Homo sapiens
  source 1..23: mol_type = genomic DNA
cgggttcgactcccggtgtggga

SEQ ID NO: 12668 - DNA, 24 bp, Homo sapiens
  source 1..24: mol_type = genomic DNA
cgggttcgactcccggtgtgggaa

SEQ ID NO: 12669 - DNA, 25 bp, Homo sapiens
  source 1..25: mol_type = genomic DNA
cgggttcgactcccggtgtgggaac

SEQ ID NO: 12670 - DNA, 26 bp, Homo sapiens
  source 1..26: mol_type = genomic DNA
cgggttcgactcccggtgtgggaacc

SEQ ID NO: 12671 - DNA, 27 bp, Homo sapiens
  source 1..27: mol_type = genomic DNA
cgggttcgactcccggtgtgggaacca

SEQ ID NO: 12672 - DNA, 26 bp, Homo sapiens
  source 1..26: mol_type = genomic DNA
cgggttcgagtcccggcggagtcgcc

SEQ ID NO: 12673 - DNA, 24 bp, Homo sapiens
  source 1..24: mol_type = genomic DNA
cgggttcgatccccagcatctcca

SEQ ID NO: 12674 - DNA, 17 bp, Homo sapiens
  source 1..17: mol_type = genomic DNA
cgggttcgatccccggc

SEQ ID NO: 12675 - DNA, 20 bp, Homo sapiens
  source 1..20: mol_type = genomic DNA
cgggttcgatccccggcatc

SEQ ID NO: 12676 - DNA, 22 bp, Homo sapiens
  source 1..22: mol_type = genomic DNA
cgggttcgatccccggcatctc

SEQ ID NO: 12677 - DNA, 23 bp, Homo sapiens
  source 1..23: mol_type = genomic DNA
cgggttcgatccccggcatctcc

SEQ ID NO: 12678 - DNA, 25 bp, Homo sapiens
  source 1..25: mol_type = genomic DNA
cgggttcgatccccggcatctccac

SEQ ID NO: 12679 - DNA, 26 bp, Homo sapiens
  source 1..26: mol_type = genomic DNA
cgggttcgatccccggcatctccacc

SEQ ID NO: 12680 - DNA, 27 bp, Homo sapiens
  source 1..27: mol_type = genomic DNA
cgggttcgatccccggcatctccacca

SEQ ID NO: 12681 - DNA, 22 bp, Homo sapiens
  source 1..22: mol_type = genomic DNA
cgggttcgatccccgtacgggc

SEQ ID NO: 12682 - DNA, 23 bp, Homo sapiens
  source 1..23: mol_type = genomic DNA
cgggttcgatccccgtacgggcc

SEQ ID NO: 12683 - DNA, 24 bp, Homo sapiens
  source 1..24: mol_type = genomic DNA
cgggttcgatccccgtacgggcca

SEQ ID NO: 12684 - DNA, 25 bp, Homo sapiens
  source 1..25: mol_type = genomic DNA
cgggttcgatccccgtacgggccac

SEQ ID NO: 12685 - DNA, 26 bp, Homo sapiens
  source 1..26: mol_type = genomic DNA
cgggttcgatccccgtacgggccacc

SEQ ID NO: 12686 - DNA, 27 bp, Homo sapiens
  source 1..27: mol_type = genomic DNA
cgggttcgatccccgtacgggccacca

SEQ ID NO: 12687 - DNA, 25 bp, Homo sapiens
  source 1..25: mol_type = genomic DNA
cgggttcgattcccggccaacgcac

SEQ ID NO: 12688 - DNA, 18 bp, Homo sapiens
  source 1..18: mol_type = genomic DNA
cgggttcgattcccgggc

SEQ ID NO: 12689 - DNA, 21 bp, Homo sapiens
  source 1..21: mol_type = genomic DNA
cgggttcgattcccgggcggc

SEQ ID NO: 12690 - DNA, 22 bp, Homo sapiens
  source 1..22: mol_type = genomic DNA
cgggttcgattcccgggcggcg

SEQ ID NO: 12691 - DNA, 23 bp, Homo sapiens
  source 1..23: mol_type = genomic DNA
cgggttcgattcccgggcggcgc

SEQ ID NO: 12692 - DNA, 24 bp, Homo sapiens
  source 1..24: mol_type = genomic DNA
cgggttcgattcccgggcggcgca

SEQ ID NO: 12693 - DNA, 25 bp, Homo sapiens
  source 1..25: mol_type = genomic DNA
cgggttcgattcccgggcggcgcac

SEQ ID NO: 12694 - DNA, 27 bp, Homo sapiens
  source 1..27: mol_type = genomic DNA
cgggttcgattcccgggcggcgcacca

SEQ ID NO: 12695 - DNA, 21 bp, Homo sapiens
  source 1..21: mol_type = genomic DNA
cgggttcgattcccggtcagg

SEQ ID NO: 12696 - DNA, 22 bp, Homo sapiens
  source 1..22: mol_type = genomic DNA
cgggttcgattcccggtcaggg

SEQ ID NO: 12697 - DNA, 23 bp, Homo sapiens
  source 1..23: mol_type = genomic DNA
cgggttcgattcccggtcaggga

SEQ ID NO: 12698 - DNA, 24 bp, Homo sapiens
  source 1..24: mol_type = genomic DNA
cgggttcgattcccggtcagggaa

SEQ ID NO: 12699 - DNA, 25 bp, Homo sapiens
  source 1..25: mol_type = genomic DNA
cgggttcgattcccggtcagggaac

SEQ ID NO: 12700 - DNA, 26 bp, Homo sapiens
  source 1..26: mol_type = genomic DNA
cgggttcgattcccggtcagggaacc

SEQ ID NO: 12701 - DNA, 27 bp, Homo sapiens
  source 1..27: mol_type = genomic DNA
cgggttcgattcccggtcagggaacca

SEQ ID NO: 12702 - DNA, 33 bp, Homo sapiens
  source 1..33: mol_type = genomic DNA
cggtaaaatggctgagtgaagcattggactgta

SEQ ID NO: 12703 - DNA, 16 bp, Homo sapiens
  source 1..16: mol_type = genomic DNA
cggtaatcgcataaaa

SEQ ID NO: 12704 - DNA, 17 bp, Homo sapiens
  source 1..17: mol_type = genomic DNA
cggtaatcgcataaaac

SEQ ID NO: 12705 - DNA, 18 bp, Homo sapiens
  source 1..18: mol_type = genomic DNA
cggtaatcgcataaaact

SEQ ID NO: 12706 - DNA, 19 bp, Homo sapiens
  source 1..19: mol_type = genomic DNA
cggtaatcgcataaaactt

SEQ ID NO: 12707 - DNA, 20 bp, Homo sapiens
  source 1..20: mol_type = genomic DNA
cggtaatcgcataaaactta

SEQ ID NO: 12708 - DNA, 21 bp, Homo sapiens
  source 1..21: mol_type = genomic DNA
cggtaatcgcataaaacttaa

SEQ ID NO: 12709 - DNA, 22 bp, Homo sapiens
  source 1..22: mol_type = genomic DNA
cggtaatcgcataaaacttaaa

SEQ ID NO: 12710 - DNA, 23 bp, Homo sapiens
  source 1..23: mol_type = genomic DNA
cggtaatcgcataaaacttaaaa

SEQ ID NO: 12711 - DNA, 24 bp, Homo sapiens
  source 1..24: mol_type = genomic DNA
cggtaatcgcataaaacttaaaac

SEQ ID NO: 12712 - DNA, 25 bp, Homo sapiens
  source 1..25: mol_type = genomic DNA
cggtaatcgcataaaacttaaaact

SEQ ID NO: 12713 - DNA, 26 bp, Homo sapiens
  source 1..26: mol_type = genomic DNA
cggtaatcgcataaaacttaaaactt

SEQ ID NO: 12714 - DNA, 27 bp, Homo sapiens
  source 1..27: mol_type = genomic DNA
cggtaatcgcataaaacttaaaacttt

SEQ ID NO: 12715 - DNA, 28 bp, Homo sapiens
  source 1..28: mol_type = genomic DNA
cggtaatcgcataaaacttaaaacttta

SEQ ID NO: 12716 - DNA, 29 bp, Homo sapiens
  source 1..29: mol_type = genomic DNA
cggtaatcgcataaaacttaaaactttac

SEQ ID NO: 12717 - DNA, 30 bp, Homo sapiens
  source 1..30: mol_type = genomic DNA
cggtaatcgcataaaacttaaaactttaca

SEQ ID NO: 12718 - DNA, 31 bp, Homo sapiens
  source 1..31: mol_type = genomic DNA
cggtaatcgcataaaacttaaaactttacag

SEQ ID NO: 12719 - DNA, 32 bp, Homo sapiens
  source 1..32: mol_type = genomic DNA
cggtaatcgcataaaacttaaaactttacagt

SEQ ID NO: 12720 - DNA, 33 bp, Homo sapiens
  source 1..33: mol_type = genomic DNA
cggtaatcgcataaaacttaaaactttacagtc

SEQ ID NO: 12721 - DNA, 34 bp, Homo sapiens
  source 1..34: mol_type = genomic DNA
cggtaatcgcataaaacttaaaactttacagtca

SEQ ID NO: 12722 - DNA, 35 bp, Homo sapiens
  source 1..35: mol_type = genomic DNA
cggtaatcgcataaaacttaaaactttacagtcag

SEQ ID NO: 12723 - DNA, 36 bp, Homo sapiens
  source 1..36: mol_type = genomic DNA
cggtaatcgcataaaacttaaaactttacagtcaga

SEQ ID NO: 12724 - DNA, 37 bp, Homo sapiens
  source 1..37: mol_type = genomic DNA
cggtaatcgcataaaacttaaaactttacagtcagag

SEQ ID NO: 12725 - DNA, 38 bp, Homo sapiens
  source 1..38: mol_type = genomic DNA
cggtaatcgcataaaacttaaaactttacagtcagagg

SEQ ID NO: 12726 - DNA, 39 bp, Homo sapiens
  source 1..39: mol_type = genomic DNA
cggtaatcgcataaaacttaaaactttacagtcagaggt

SEQ ID NO: 12727 - DNA, 40 bp, Homo sapiens
  source 1..40: mol_type = genomic DNA
cggtaatcgcataaaacttaaaactttacagtcagaggtt

SEQ ID NO: 12728 - DNA, 41 bp, Homo sapiens
  source 1..41: mol_type = genomic DNA
cggtaatcgcataaaacttaaaactttacagtcagaggttc

SEQ ID NO: 12729 - DNA, 42 bp, Homo sapiens
  source 1..42: mol_type = genomic DNA
cggtaatcgcataaaacttaaaactttacagtcagaggttca

SEQ ID NO: 12730 - DNA, 16 bp, Homo sapiens
  source 1..16: mol_type = genomic DNA
cggtagagcatcagac

SEQ ID NO: 12731 - DNA, 17 bp, Homo sapiens
  source 1..17: mol_type = genomic DNA
cggtagagcatcagact

SEQ ID NO: 12732 - DNA, 18 bp, Homo sapiens
  source 1..18: mol_type = genomic DNA
cggtagagcatcagactt

SEQ ID NO: 12733 - DNA, 19 bp, Homo sapiens
  source 1..19: mol_type = genomic DNA
cggtagagcatcagacttt

SEQ ID NO: 12734 - DNA, 20 bp, Homo sapiens
  source 1..20: mol_type = genomic DNA
cggtagagcatcagactttt

SEQ ID NO: 12735 - DNA, 24 bp, Homo sapiens
  source 1..24: mol_type = genomic DNA
cggtagagcatcagacttttaatc

SEQ ID NO: 12736 - DNA, 16 bp, Homo sapiens
  source 1..16: mol_type = genomic DNA
cggtagagcatgagac

SEQ ID NO: 12737 - DNA, 17 bp, Homo sapiens
  source 1..17: mol_type = genomic DNA
cggtagagcatgagacc

SEQ ID NO: 12738 - DNA, 18 bp, Homo sapiens
  source 1..18: mol_type = genomic DNA
cggtagagcatgagaccc

SEQ ID NO: 12739 - DNA, 22 bp, Homo sapiens
  source 1..22: mol_type = genomic DNA
cggtagagcatgagacccttaa

SEQ ID NO: 12740 - DNA, 24 bp, Homo sapiens
  source 1..24: mol_type = genomic DNA
cggtagagcatgagacccttaatc

SEQ ID NO: 12741 - DNA, 25 bp, Homo sapiens
  source 1..25: mol_type = genomic DNA
cggtagagcatgagacccttaatct

SEQ ID NO: 12742 - DNA, 17 bp, Homo sapiens
  source 1..17: mol_type = genomic DNA
cggtagagcatgagact

SEQ ID NO: 12743 - DNA, 18 bp, Homo sapiens
  source 1..18: mol_type = genomic DNA
cggtagagcatgagactc

SEQ ID NO: 12744 - DNA, 19 bp, Homo sapiens
  source 1..19: mol_type = genomic DNA
cggtagagcatgagactct

SEQ ID NO: 12745 - DNA, 20 bp, Homo sapiens
  source 1..20: mol_type = genomic DNA
cggtagagcatgagactctt

SEQ ID NO: 12746 - DNA, 22 bp, Homo sapiens
  source 1..22: mol_type = genomic DNA
cggtagagcatgagactcttaa

SEQ ID NO: 12747 - DNA, 24 bp, Homo sapiens
  source 1..24: mol_type = genomic DNA
cggtagagcatgagactcttaatc

SEQ ID NO: 12748 - DNA, 25 bp, Homo sapiens
  source 1..25: mol_type = genomic DNA
cggtagagcatgagactcttaatct

SEQ ID NO: 12749 - DNA, 26 bp, Homo sapiens
  source 1..26: mol_type = genomic DNA
cggtagagcatgagactcttaatctc

SEQ ID NO: 12750 - DNA, 35 bp, Homo sapiens
  source 1..35: mol_type = genomic DNA
cggtagagcatgagactcttaatctcagggtcgtg

SEQ ID NO: 12751 - DNA, 36 bp, Homo sapiens
  source 1..36: mol_type = genomic DNA
cggtagagcatgagactcttaatctcagggtcgtgg

SEQ ID NO: 12752 - DNA, 38 bp, Homo sapiens
  source 1..38: mol_type = genomic DNA
cggtagagcatgagactcttaatctcagggtcgtgggt

SEQ ID NO: 12753 - DNA, 39 bp, Homo sapiens
  source 1..39: mol_type = genomic DNA
cggtagagcatgagactcttaatctcagggtcgtgggtt

SEQ ID NO: 12754 - DNA, 40 bp, Homo sapiens
  source 1..40: mol_type = genomic DNA
cggtagagcatgagactcttaatctcagggtcgtgggttc

SEQ ID NO: 12755 - DNA, 16 bp, Homo sapiens
  source 1..16: mol_type = genomic DNA
cggtagagcatgggac

SEQ ID NO: 12756 - DNA, 17 bp, Homo sapiens
  source 1..17: mol_type = genomic DNA
cggtagagcatgggact

SEQ ID NO: 12757 - DNA, 18 bp, Homo sapiens
  source 1..18: mol_type = genomic DNA
cggtagagcatgggactc

SEQ ID NO: 12758 - DNA, 19 bp, Homo sapiens
  source 1..19: mol_type = genomic DNA
cggtagagcatgggactct

SEQ ID NO: 12759 - DNA, 20 bp, Homo sapiens
  source 1..20: mol_type = genomic DNA
cggtagagcatgggactctt

SEQ ID NO: 12760 - DNA, 22 bp, Homo sapiens
  source 1..22: mol_type = genomic DNA
cggtagagcatgggactcttaa

SEQ ID NO: 12761 - DNA, 24 bp, Homo sapiens
  source 1..24: mol_type = genomic DNA
cggtagagcatgggactcttaatc

SEQ ID NO: 12762 - DNA, 25 bp, Homo sapiens
  source 1..25: mol_type = genomic DNA
cggtagagcatgggactcttaatcc

SEQ ID NO: 12763 - DNA, 26 bp, Homo sapiens
  source 1..26: mol_type = genomic DNA
cggtagagcatgggactcttaatccc

SEQ ID NO: 12764 - DNA, 34 bp, Homo sapiens
  source 1..34: mol_type = genomic DNA
cggtagagcatgggactcttaatcccagggtcgt

SEQ ID NO: 12765 - DNA, 35 bp, Homo sapiens
  source 1..35: mol_type = genomic DNA
cggtagagcatgggactcttaatcccagggtcgtg

SEQ ID NO: 12766 - DNA, 36 bp, Homo sapiens
  source 1..36: mol_type = genomic DNA
cggtagagcatgggactcttaatcccagggtcgtgg

SEQ ID NO: 12767 - DNA, 39 bp, Homo sapiens
  source 1..39: mol_type = genomic DNA
cggtagagcatgggactcttaatcccagggtcgtgggtt

SEQ ID NO: 12768 - DNA, 40 bp, Homo sapiens
  source 1..40: mol_type = genomic DNA
cggtagagcatgggactcttaatcccagggtcgtgggttc

SEQ ID NO: 12769 - DNA, 46 bp, Homo sapiens
  source 1..46: mol_type = genomic DNA
cggtagagcatgggactcttaatcccagggtcgtgggttcgagccc

SEQ ID NO: 12770 - DNA, 26 bp, Homo sapiens
  source 1..26: mol_type = genomic DNA
cggtagagcatgggactcttaatctc

SEQ ID NO: 12771 - DNA, 17 bp, Homo sapiens
  source 1..17: mol_type = genomic DNA
cggtagagcatttgact

SEQ ID NO: 12772 - DNA, 19 bp, Homo sapiens
  source 1..19: mol_type = genomic DNA
cggtagagcatttgactgc

SEQ ID NO: 12773 - DNA, 17 bp, Homo sapiens
  source 1..17: mol_type = genomic DNA
cggtagcgcgtctgact

SEQ ID NO: 12774 - DNA, 30 bp, Homo sapiens
  source 1..30: mol_type = genomic DNA
cggtcccatggtgtaatggttagcactctg

SEQ ID NO: 12775 - DNA, 16 bp, Homo sapiens
  source 1..16: mol_type = genomic DNA
cggtctaaggcgctgc

SEQ ID NO: 12776 - DNA, 17 bp, Homo sapiens
  source 1..17: mol_type = genomic DNA
cggtctaaggcgctgcg

SEQ ID NO: 12777 - DNA, 19 bp, Homo sapiens
  source 1..19: mol_type = genomic DNA
cggtctaaggcgctgcgtt

SEQ ID NO: 12778 - DNA, 20 bp, Homo sapiens
  source 1..20: mol_type = genomic DNA
cggtctaaggcgctgcgttc

SEQ ID NO: 12779 - DNA, 17 bp, Homo sapiens
  source 1..17: mol_type = genomic DNA
cggtctaaggcgctgga

SEQ ID NO: 12780 - DNA, 32 bp, Homo sapiens
  source 1..32: mol_type = genomic DNA
cggtggcctaatggataaggcattggcctcct

SEQ ID NO: 12781 - DNA, 17 bp, Homo sapiens
  source 1..17: mol_type = genomic DNA
cggttagcgccttcggc

SEQ ID NO: 12782 - DNA, 17 bp, Homo sapiens
  source 1..17: mol_type = genomic DNA
cggttagcgcgcggtac

SEQ ID NO: 12783 - DNA, 18 bp, Homo sapiens
  source 1..18: mol_type = genomic DNA
cggttagcgcgcggtact

SEQ ID NO: 12784 - DNA, 20 bp, Homo sapiens
  source 1..20: mol_type = genomic DNA
cggttagcgcgcggtactta

SEQ ID NO: 12785 - DNA, 24 bp, Homo sapiens
  source 1..24: mol_type = genomic DNA
cggttagcgcgttcggctgttaac

SEQ ID NO: 12786 - DNA, 25 bp, Homo sapiens
  source 1..25: mol_type = genomic DNA
cggttagcgcgttcggctgttaacc

SEQ ID NO: 12787 - DNA, 17 bp, Homo sapiens
  source 1..17: mol_type = genomic DNA
cggttagctcagtcggc

SEQ ID NO: 12788 - DNA, 23 bp, Homo sapiens
  source 1..23: mol_type = genomic DNA
cggttagctcagtcggctagagc

SEQ ID NO: 12789 - DNA, 16 bp, Homo sapiens
  source 1..16: mol_type = genomic DNA
cggttagctcagttgg

SEQ ID NO: 12790 - DNA, 21 bp, Homo sapiens
  source 1..21: mol_type = genomic DNA
cggttagctcagttggttaga

SEQ ID NO: 12791 - DNA, 23 bp, Homo sapiens
  source 1..23: mol_type = genomic DNA
cggttagctcagttggttagagc

SEQ ID NO: 12792 - DNA, 31 bp, Homo sapiens
  source 1..31: mol_type = genomic DNA
cggttagctcagttggttagagcgtggtgct

SEQ ID NO: 12793 - DNA, 16 bp, Homo sapiens
  source 1..16: mol_type = genomic DNA
cggttaggattcctgg

SEQ ID NO: 12794 - DNA, 17 bp, Homo sapiens
  source 1..17: mol_type = genomic DNA
cggttaggattcctggt

SEQ ID NO: 12795 - DNA, 18 bp, Homo sapiens
  source 1..18: mol_type = genomic DNA
cggttaggattcctggtt

SEQ ID NO: 12796 - DNA, 19 bp, Homo sapiens
  source 1..19: mol_type = genomic DNA
cggttaggattcctggttt

SEQ ID NO: 12797 - DNA, 20 bp, Homo sapiens
  source 1..20: mol_type = genomic DNA
cggttaggattcctggtttt

SEQ ID NO: 12798 - DNA, 21 bp, Homo sapiens
  source 1..21: mol_type = genomic DNA
cggttaggattcctggttttc

SEQ ID NO: 12799 - DNA, 22 bp, Homo sapiens
  source 1..22: mol_type = genomic DNA
cggttaggattcctggttttca

SEQ ID NO: 12800 - DNA, 23 bp, Homo sapiens
  source 1..23: mol_type = genomic DNA
cggttaggattcctggttttcac

SEQ ID NO: 12801 - DNA, 27 bp, Homo sapiens
  source 1..27: mol_type = genomic DNA
cggttaggattcctggttttcacccag

SEQ ID NO: 12802 - DNA, 28 bp, Homo sapiens
  source 1..28: mol_type = genomic DNA
cggttaggattcctggttttcacccagg

SEQ ID NO: 12803 - DNA, 29 bp, Homo sapiens
  source 1..29: mol_type = genomic DNA
cggttaggattcctggttttcacccaggc

SEQ ID NO: 12804 - DNA, 34 bp, Homo sapiens
  source 1..34: mol_type = genomic DNA
cggttaggattcctggttttcacccaggcggccc

SEQ ID NO: 12805 - DNA, 30 bp, Homo sapiens
  source 1..30: mol_type = genomic DNA
cggttaggattcctggttttcacccaggtg

SEQ ID NO: 12806 - DNA, 34 bp, Homo sapiens
  source 1..34: mol_type = genomic DNA
cggttaggattcctggttttcacccaggtggccc

SEQ ID NO: 12807 - DNA, 17 bp, Homo sapiens
  source 1..17: mol_type = genomic DNA
cggttatcacattcgcc

SEQ ID NO: 12808 - DNA, 21 bp, Homo sapiens
  source 1..21: mol_type = genomic DNA
cggttatcacattcgcctcac

SEQ ID NO: 12809 - DNA, 22 bp, Homo sapiens
  source 1..22: mol_type = genomic DNA
cggttatcacattcgcctcaca

SEQ ID NO: 12810 - DNA, 23 bp, Homo sapiens
  source 1..23: mol_type = genomic DNA
cggttatcacattcgcctcacac

SEQ ID NO: 12811 - DNA, 16 bp, Homo sapiens
  source 1..16: mol_type = genomic DNA
cggttatcacgtctgc

SEQ ID NO: 12812 - DNA, 17 bp, Homo sapiens
  source 1..17: mol_type = genomic DNA
cggttatcacgtctgct

SEQ ID NO: 12813 - DNA, 18 bp, Homo sapiens
  source 1..18: mol_type = genomic DNA
cggttatcacgtctgctt

SEQ ID NO: 12814 - DNA, 19 bp, Homo sapiens
  source 1..19: mol_type = genomic DNA
cggttatcacgtctgcttt

SEQ ID NO: 12815 - DNA, 21 bp, Homo sapiens
  source 1..21: mol_type = genomic DNA
cggttatcacgtctgctttac

SEQ ID NO: 12816 - DNA, 23 bp, Homo sapiens
  source 1..23: mol_type = genomic DNA
cggttatcacgtctgctttacac

SEQ ID NO: 12817 - DNA, 24 bp, Homo sapiens
  source 1..24: mol_type = genomic DNA
cggttatcacgtctgctttacacg

SEQ ID NO: 12818 - DNA, 25 bp, Homo sapiens
  source 1..25: mol_type = genomic DNA
cggttatcacgtctgctttacacgc

SEQ ID NO: 12819 - DNA, 19 bp, Homo sapiens
  source 1..19: mol_type = genomic DNA
cggttcaaatccgggtgcc

SEQ ID NO: 12820 - DNA, 20 bp, Homo sapiens
  source 1..20: mol_type = genomic DNA
cggttcaaatccgggtgccc

SEQ ID NO: 12821 - DNA, 33 bp, Homo sapiens
  source 1..33: mol_type = genomic DNA
cggttccatagtgtagtggttatcacgtctgct

SEQ ID NO: 12822 - DNA, 34 bp, Homo sapiens
  source 1..34: mol_type = genomic DNA
cggttccatagtgtagtggttatcacgtctgctt

SEQ ID NO: 12823 - DNA, 35 bp, Homo sapiens
  source 1..35: mol_type = genomic DNA
cggttccatagtgtagtggttatcacgtctgcttt

SEQ ID NO: 12824 - DNA, 34 bp, Homo sapiens
  source 1..34: mol_type = genomic DNA
cggttccatggtgtaatggttagcactctggact

SEQ ID NO: 12825 - DNA, 41 bp, Homo sapiens
  source 1..41: mol_type = genomic DNA
cggttccatggtgtaatggttagcactctggactctgaatc

SEQ ID NO: 12826 - DNA, 16 bp, Homo sapiens
  source 1..16: mol_type = genomic DNA
cggttcgaaaccgggc

SEQ ID NO: 12827 - DNA, 17 bp, Homo sapiens
  source 1..17: mol_type = genomic DNA
cggttcgaaaccgggcg

SEQ ID NO: 12828 - DNA, 19 bp, Homo sapiens
  source 1..19: mol_type = genomic DNA
cggttcgaaaccgggcgga

SEQ ID NO: 12829 - DNA, 20 bp, Homo sapiens
  source 1..20: mol_type = genomic DNA
cggttcgaaaccgggcggaa

SEQ ID NO: 12830 - DNA, 21 bp, Homo sapiens
  source 1..21: mol_type = genomic DNA
cggttcgaaaccgggcggaaa

SEQ ID NO: 12831 - DNA, 22 bp, Homo sapiens
  source 1..22: mol_type = genomic DNA
cggttcgaaaccgggcggaaac

SEQ ID NO: 12832 - DNA, 23 bp, Homo sapiens
  source 1..23: mol_type = genomic DNA
cggttcgaaaccgggcggaaaca

SEQ ID NO: 12833 - DNA, 25 bp, Homo sapiens
  source 1..25: mol_type = genomic DNA
cggttcgaaaccgggcggaaacacc

SEQ ID NO: 12834 - DNA, 20 bp, Homo sapiens
  source 1..20: mol_type = genomic DNA
cggttcgaatccgagtcacg

SEQ ID NO: 12835 - DNA, 22 bp, Homo sapiens
  source 1..22: mol_type = genomic DNA
cggttcgaatccgagtcacggc

SEQ ID NO: 12836 - DNA, 23 bp, Homo sapiens
  source 1..23: mol_type = genomic DNA
cggttcgaatccgagtcacggca

SEQ ID NO: 12837 - DNA, 24 bp, Homo sapiens
  source 1..24: mol_type = genomic DNA
cggttcgaatccgagtcacggcac

SEQ ID NO: 12838 - DNA, 25 bp, Homo sapiens
  source 1..25: mol_type = genomic DNA
cggttcgaatccgagtcacggcacc

SEQ ID NO: 12839 - DNA, 20 bp, Homo sapiens
  source 1..20: mol_type = genomic DNA
cggttcgatcccgggcggaa

SEQ ID NO: 12840 - DNA, 21 bp, Homo sapiens
  source 1..21: mol_type = genomic DNA
cggtttgggtccgagaggtcc

SEQ ID NO: 12841 - DNA, 21 bp, Homo sapiens
  source 1..21: mol_type = genomic DNA
cgtaaaccgaagatcacgggt

SEQ ID NO: 12842 - DNA, 40 bp, Homo sapiens
  source 1..40: mol_type = genomic DNA
cgtaaaccgaagatcacgggttcgaaccccgtccgtgcct

SEQ ID NO: 12843 - DNA, 42 bp, Homo sapiens
  source 1..42: mol_type = genomic DNA
cgtaaaccgaagatcacgggttcgaaccccgtccgtgcctcc

SEQ ID NO: 12844 - DNA, 21 bp, Homo sapiens
  source 1..21: mol_type = genomic DNA
cgtaaaccgaagatcgcgggt

SEQ ID NO: 12845 - DNA, 22 bp, Homo sapiens
  source 1..22: mol_type = genomic DNA
cgtaaaccgaagatcgcgggtt

SEQ ID NO: 12846 - DNA, 41 bp, Homo sapiens
  source 1..41: mol_type = genomic DNA
cgtaaaccgaagatcgcgggttcgaaccccgtccgtgcctc

SEQ ID NO: 12847 - DNA, 16 bp, Homo sapiens
  source 1..16: mol_type = genomic DNA
cgtagtcgtggccgag

SEQ ID NO: 12848 - DNA, 17 bp, Homo sapiens
  source 1..17: mol_type = genomic DNA
cgtagtcgtggccgagt

SEQ ID NO: 12849 - DNA, 18 bp, Homo sapiens
  source 1..18: mol_type = genomic DNA
cgtagtcgtggccgagtg

SEQ ID NO: 12850 - DNA, 19 bp, Homo sapiens
  source 1..19: mol_type = genomic DNA
cgtagtcgtggccgagtgg

SEQ ID NO: 12851 - DNA, 21 bp, Homo sapiens
  source 1..21: mol_type = genomic DNA
cgtagtcgtggccgagtggtt

SEQ ID NO: 12852 - DNA, 22 bp, Homo sapiens
  source 1..22: mol_type = genomic DNA
cgtagtcgtggccgagtggtta

SEQ ID NO: 12853 - DNA, 23 bp, Homo sapiens
  source 1..23: mol_type = genomic DNA
cgtagtcgtggccgagtggttaa

SEQ ID NO: 12854 - DNA, 24 bp, Homo sapiens
  source 1..24: mol_type = genomic DNA
cgtagtcgtggccgagtggttaag

SEQ ID NO: 12855 - DNA, 18 bp, Homo sapiens
  source 1..18: mol_type = genomic DNA
cgtagtgtagcggttatc

SEQ ID NO: 12856 - DNA, 20 bp, Homo sapiens
  source 1..20: mol_type = genomic DNA
cgtagtgtagcggttatcac

SEQ ID NO: 12857 - DNA, 21 bp, Homo sapiens
  source 1..21: mol_type = genomic DNA
cgtagtgtagcggttatcaca

SEQ ID NO: 12858 - DNA, 23 bp, Homo sapiens
  source 1..23: mol_type = genomic DNA
cgtagtgtagcggttatcacatt

SEQ ID NO: 12859 - DNA, 24 bp, Homo sapiens
  source 1..24: mol_type = genomic DNA
cgtagtgtagcggttatcacattc

SEQ ID NO: 12860 - DNA, 16 bp, Homo sapiens
  source 1..16: mol_type = genomic DNA
cgtagtgtagtggtca

SEQ ID NO: 12861 - DNA, 17 bp, Homo sapiens
  source 1..17: mol_type = genomic DNA
cgtagtgtagtggtcat

SEQ ID NO: 12862 - DNA, 18 bp, Homo sapiens
  source 1..18: mol_type = genomic DNA
cgtagtgtagtggtcatc

SEQ ID NO: 12863 - DNA, 19 bp, Homo sapiens
  source 1..19: mol_type = genomic DNA
cgtagtgtagtggtcatca

SEQ ID NO: 12864 - DNA, 27 bp, Homo sapiens
  source 1..27: mol_type = genomic DNA
cgtagtgtagtggtcatcacgttcgcc

SEQ ID NO: 12865 - DNA, 28 bp, Homo sapiens
  source 1..28: mol_type = genomic DNA
cgtagtgtagtggtcatcacgttcgcct

SEQ ID NO: 12866 - DNA, 17 bp, Homo sapiens
  source 1..17: mol_type = genomic DNA
cgtagtgtagtggttat

SEQ ID NO: 12867 - DNA, 18 bp, Homo sapiens
  source 1..18: mol_type = genomic DNA
cgtagtgtagtggttatc

SEQ ID NO: 12868 - DNA, 19 bp, Homo sapiens
  source 1..19: mol_type = genomic DNA
cgtagtgtagtggttatca

SEQ ID NO: 12869 - DNA, 20 bp, Homo sapiens
  source 1..20: mol_type = genomic DNA
cgtagtgtagtggttatcac

SEQ ID NO: 12870 - DNA, 21 bp, Homo sapiens
  source 1..21: mol_type = genomic DNA
cgtagtgtagtggttatcacg

SEQ ID NO: 12871 - DNA, 26 bp, Homo sapiens
  source 1..26: mol_type = genomic DNA
cgtagtgtagtggttatcacgttcgc

SEQ ID NO: 12872 - DNA, 27 bp, Homo sapiens
  source 1..27: mol_type = genomic DNA
cgtagtgtagtggttatcacgttcgcc

SEQ ID NO: 12873 - DNA, 28 bp, Homo sapiens
  source 1..28: mol_type = genomic DNA
cgtagtgtagtggttatcacgttcgcct

SEQ ID NO: 12874 - DNA, 29 bp, Homo sapiens
  source 1..29: mol_type = genomic DNA
cgtagtgtagtggttatcacgttcgcctc

SEQ ID NO: 12875 - DNA, 30 bp, Homo sapiens
  source 1..30: mol_type = genomic DNA
cgtagtgtagtggttatcacgttcgcctca

SEQ ID NO: 12876 - DNA, 31 bp, Homo sapiens
  source 1..31: mol_type = genomic DNA
cgtagtgtagtggttatcacgttcgcctcac

SEQ ID NO: 12877 - DNA, 16 bp, Homo sapiens
  source 1..16: mol_type = genomic DNA
cgtatagtggttagta

SEQ ID NO: 12878 - DNA, 17 bp, Homo sapiens
  source 1..17: mol_type = genomic DNA
cgtatagtggttagtac

SEQ ID NO: 12879 - DNA, 18 bp, Homo sapiens
  source 1..18: mol_type = genomic DNA
cgtatagtggttagtact

SEQ ID NO: 12880 - DNA, 19 bp, Homo sapiens
  source 1..19: mol_type = genomic DNA
cgtatagtggttagtactc

SEQ ID NO: 12881 - DNA, 20 bp, Homo sapiens
  source 1..20: mol_type = genomic DNA
cgtatagtggttagtactct

SEQ ID NO: 12882 - DNA, 21 bp, Homo sapiens
  source 1..21: mol_type = genomic DNA
cgtatagtggttagtactctg

SEQ ID NO: 12883 - DNA, 22 bp, Homo sapiens
  source 1..22: mol_type = genomic DNA
cgtatagtggttagtactctgc

SEQ ID NO: 12884 - DNA, 23 bp, Homo sapiens
  source 1..23: mol_type = genomic DNA
cgtatagtggttagtactctgcg

SEQ ID NO: 12885 - DNA, 24 bp, Homo sapiens
  source 1..24: mol_type = genomic DNA
cgtatagtggttagtactctgcgt

SEQ ID NO: 12886 - DNA, 25 bp, Homo sapiens
  source 1..25: mol_type = genomic DNA
cgtatagtggttagtactctgcgtt

SEQ ID NO: 12887 - DNA, 26 bp, Homo sapiens
  source 1..26: mol_type = genomic DNA
cgtatagtggttagtactctgcgttg

SEQ ID NO: 12888 - DNA, 27 bp, Homo sapiens
  source 1..27: mol_type = genomic DNA
cgtatagtggttagtactctgcgttgt

SEQ ID NO: 12889 - DNA, 28 bp, Homo sapiens
  source 1..28: mol_type = genomic DNA
cgtatagtggttagtactctgcgttgtg

SEQ ID NO: 12890 - DNA, 31 bp, Homo sapiens
  source 1..31: mol_type = genomic DNA
cgtatagtggttagtactctgcgttgtggcc

SEQ ID NO: 12891 - DNA, 33 bp, Homo sapiens
  source 1..33: mol_type = genomic DNA
cgtatagtggttagtactctgcgttgtggccgc

SEQ ID NO: 12892 - DNA, 40 bp, Homo sapiens
  source 1..40: mol_type = genomic DNA
cgtatagtggttagtactctgcgttgtggccgcagcaacc

SEQ ID NO: 12893 - DNA, 41 bp, Homo sapiens
  source 1..41: mol_type = genomic DNA
cgtatagtggttagtactctgcgttgtggccgcagcaacct

SEQ ID NO: 12894 - DNA, 45 bp, Homo sapiens
  source 1..45: mol_type = genomic DNA
cgtatagtggttagtactctgcgttgtggccgcagcaacctcggt

SEQ ID NO: 12895 - DNA, 16 bp, Homo sapiens
  source 1..16: mol_type = genomic DNA
cgtatgaggccccggg

SEQ ID NO: 12896 - DNA, 17 bp, Homo sapiens
  source 1..17: mol_type = genomic DNA
cgtatgaggccccgggt

SEQ ID NO: 12897 - DNA, 18 bp, Homo sapiens
  source 1..18: mol_type = genomic DNA
cgtatgaggccccgggtt

SEQ ID NO: 12898 - DNA, 25 bp, Homo sapiens
  source 1..25: mol_type = genomic DNA
cgtatgaggccccgggttcaatccc

SEQ ID NO: 12899 - DNA, 29 bp, Homo sapiens
  source 1..29: mol_type = genomic DNA
cgtatgaggccccgggttcaatccccggc

SEQ ID NO: 12900 - DNA, 30 bp, Homo sapiens
  source 1..30: mol_type = genomic DNA
cgtatgaggccccgggttcaatccccggca

SEQ ID NO: 12901 - DNA, 34 bp, Homo sapiens
  source 1..34: mol_type = genomic DNA
cgtatgaggccccgggttcaatccccggcatctc

SEQ ID NO: 12902 - DNA, 36 bp, Homo sapiens
  source 1..36: mol_type = genomic DNA
cgtatgaggccccgggttcaatccccggcatctcca

SEQ ID NO: 12903 - DNA, 37 bp, Homo sapiens
  source 1..37: mol_type = genomic DNA
cgtatgaggccccgggttcaatccccggcatctccac

SEQ ID NO: 12904 - DNA, 38 bp, Homo sapiens
  source 1..38: mol_type = genomic DNA
cgtatgaggccccgggttcaatccccggcatctccacc

SEQ ID NO: 12905 - DNA, 17 bp, Homo sapiens
  source 1..17: mol_type = genomic DNA
cgtcaggatggccgagc

SEQ ID NO: 12906 - DNA, 18 bp, Homo sapiens
  source 1..18: mol_type = genomic DNA
cgtcaggatggccgagtg

SEQ ID NO: 12907 - DNA, 28 bp, Homo sapiens
  source 1..28: mol_type = genomic DNA
cgtcagtctcataatctgaaggtcgtga

SEQ ID NO: 12908 - DNA, 21 bp, Homo sapiens
  source 1..21: mol_type = genomic DNA
cgtctctgtggcgcaatggac

SEQ ID NO: 12909 - DNA, 18 bp, Homo sapiens
  source 1..18: mol_type = genomic DNA
cgtctgattccggatcag

SEQ ID NO: 12910 - DNA, 17 bp, Homo sapiens
  source 1..17: mol_type = genomic DNA
cgtgagttcgagcctca

SEQ ID NO: 12911 - DNA, 26 bp, Homo sapiens
  source 1..26: mol_type = genomic DNA
cgtgagttcgagcctcacacggggca

SEQ ID NO: 12912 - DNA, 27 bp, Homo sapiens
  source 1..27: mol_type = genomic DNA
cgtgagttcgagcctcacacggggcac

SEQ ID NO: 12913 - DNA, 29 bp, Homo sapiens
  source 1..29: mol_type = genomic DNA
cgtgagttcgagcctcacacggggcacca

SEQ ID NO: 12914 - DNA, 25 bp, Homo sapiens
  source 1..25: mol_type = genomic DNA
cgtgagttcgatcctcacacggggc

SEQ ID NO: 12915 - DNA, 26 bp, Homo sapiens
  source 1..26: mol_type = genomic DNA
cgtgagttcgatcctcacacggggca

SEQ ID NO: 12916 - DNA, 16 bp, Homo sapiens
  source 1..16: mol_type = genomic DNA
cgtgatcgtatagtgg

SEQ ID NO: 12917 - DNA, 19 bp, Homo sapiens
  source 1..19: mol_type = genomic DNA
cgtgatcgtatagtggtta

SEQ ID NO: 12918 - DNA, 20 bp, Homo sapiens
  source 1..20: mol_type = genomic DNA
cgtgatcgtatagtggttag

SEQ ID NO: 12919 - DNA, 21 bp, Homo sapiens
  source 1..21: mol_type = genomic DNA
cgtgatcgtatagtggttagt

SEQ ID NO: 12920 - DNA, 22 bp, Homo sapiens
  source 1..22: mol_type = genomic DNA
cgtgatcgtatagtggttagta

SEQ ID NO: 12921 - DNA, 23 bp, Homo sapiens
  source 1..23: mol_type = genomic DNA
cgtgatcgtatagtggttagtac

SEQ ID NO: 12922 - DNA, 24 bp, Homo sapiens
  source 1..24: mol_type = genomic DNA
cgtgatcgtatagtggttagtact

SEQ ID NO: 12923 - DNA, 25 bp, Homo sapiens
  source 1..25: mol_type = genomic DNA
cgtgatcgtatagtggttagtactc

SEQ ID NO: 12924 - DNA, 26 bp, Homo sapiens
  source 1..26: mol_type = genomic DNA
cgtgatcgtatagtggttagtactct

SEQ ID NO: 12925 - DNA, 27 bp, Homo sapiens
  source 1..27: mol_type = genomic DNA
cgtgatcgtatagtggttagtactctg

SEQ ID NO: 12926 - DNA, 28 bp, Homo sapiens
  source 1..28: mol_type = genomic DNA
cgtgatcgtatagtggttagtactctgc

SEQ ID NO: 12927 - DNA, 29 bp, Homo sapiens
  source 1..29: mol_type = genomic DNA
cgtgatcgtatagtggttagtactctgcg

SEQ ID NO: 12928 - DNA, 30 bp, Homo sapiens
  source 1..30: mol_type = genomic DNA
cgtgatcgtatagtggttagtactctgcgt

SEQ ID NO: 12929 - DNA, 31 bp, Homo sapiens
  source 1..31: mol_type = genomic DNA
cgtgatcgtatagtggttagtactctgcgtt

SEQ ID NO: 12930 - DNA, 32 bp, Homo sapiens
  source 1..32: mol_type = genomic DNA
cgtgatcgtatagtggttagtactctgcgttg

SEQ ID NO: 12931 - DNA, 33 bp, Homo sapiens
  source 1..33: mol_type = genomic DNA
cgtgatcgtatagtggttagtactctgcgttgt

SEQ ID NO: 12932 - DNA, 34 bp, Homo sapiens
  source 1..34: mol_type = genomic DNA
cgtgatcgtatagtggttagtactctgcgttgtg

SEQ ID NO: 12933 - DNA, 35 bp, Homo sapiens
  source 1..35: mol_type = genomic DNA
cgtgatcgtatagtggttagtactctgcgttgtgg

SEQ ID NO: 12934 - DNA, 36 bp, Homo sapiens
  source 1..36: mol_type = genomic DNA
cgtgatcgtatagtggttagtactctgcgttgtggc

SEQ ID NO: 12935 - DNA, 37 bp, Homo sapiens
  source 1..37: mol_type = genomic DNA
cgtgatcgtatagtggttagtactctgcgttgtggcc

SEQ ID NO: 12936 - DNA, 38 bp, Homo sapiens
  source 1..38: mol_type = genomic DNA
cgtgatcgtatagtggttagtactctgcgttgtggccg

SEQ ID NO: 12937 - DNA, 42 bp, Homo sapiens
  source 1..42: mol_type = genomic DNA
cgtgatcgtatagtggttagtactctgcgttgtggccgcagc

SEQ ID NO: 12938 - DNA, 46 bp, Homo sapiens
  source 1..46: mol_type = genomic DNA
cgtgatcgtatagtggttagtactctgcgttgtggccgcagcaacc

SEQ ID NO: 12939 - DNA, 47 bp, Homo sapiens
  source 1..47: mol_type = genomic DNA
cgtgatcgtatagtggttagtactctgcgttgtggccgcagcaacct

SEQ ID NO: 12940 - DNA, 19 bp, Homo sapiens
  source 1..19: mol_type = genomic DNA
cgtgctgggcccataaccc

SEQ ID NO: 12941 - DNA, 21 bp, Homo sapiens
  source 1..21: mol_type = genomic DNA
cgtgctgggcccataacccag

SEQ ID NO: 12942 - DNA, 22 bp, Homo sapiens
  source 1..22: mol_type = genomic DNA
cgtgctgggcccataacccaga

SEQ ID NO: 12943 - DNA, 27 bp, Homo sapiens
  source 1..27: mol_type = genomic DNA
cgtgctgggcccataacccagaggtcg

SEQ ID NO: 12944 - DNA, 28 bp, Homo sapiens
  source 1..28: mol_type = genomic DNA
cgtgctgggcccataacccagaggtcga

SEQ ID NO: 12945 - DNA, 29 bp, Homo sapiens
  source 1..29: mol_type = genomic DNA
cgtgctgggcccataacccagaggtcgat

SEQ ID NO: 12946 - DNA, 30 bp, Homo sapiens
  source 1..30: mol_type = genomic DNA
cgtgctgggcccataacccagaggtcgatg

SEQ ID NO: 12947 - DNA, 31 bp, Homo sapiens
  source 1..31: mol_type = genomic DNA
cgtgctgggcccataacccagaggtcgatgg

SEQ ID NO: 12948 - DNA, 32 bp, Homo sapiens
  source 1..32: mol_type = genomic DNA
cgtgctgggcccataacccagaggtcgatgga

SEQ ID NO: 12949 - DNA, 33 bp, Homo sapiens
  source 1..33: mol_type = genomic DNA
cgtgctgggcccataacccagaggtcgatggat

SEQ ID NO: 12950 - DNA, 34 bp, Homo sapiens
  source 1..34: mol_type = genomic DNA
cgtgctgggcccataacccagaggtcgatggatc

SEQ ID NO: 12951 - DNA, 35 bp, Homo sapiens
  source 1..35: mol_type = genomic DNA
cgtgctgggcccataacccagaggtcgatggatcg

SEQ ID NO: 12952 - DNA, 40 bp, Homo sapiens
  source 1..40: mol_type = genomic DNA
cgtgctgggcccataacccagaggtcgatggatcgaaacc

SEQ ID NO: 12953 - DNA, 16 bp, Homo sapiens
  source 1..16: mol_type = genomic DNA
cgtggccgagcggtct

SEQ ID NO: 12954 - DNA, 17 bp, Homo sapiens
  source 1..17: mol_type = genomic DNA
cgtggccgagcggtcta

SEQ ID NO: 12955 - DNA, 19 bp, Homo sapiens
  source 1..19: mol_type = genomic DNA
cgtggccgagcggtctaag

SEQ ID NO: 12956 - DNA, 27 bp, Homo sapiens
  source 1..27: mol_type = genomic DNA
cgtggccgagtggtctaaggcgctgga

SEQ ID NO: 12957 - DNA, 31 bp, Homo sapiens
  source 1..31: mol_type = genomic DNA
cgtggccgagtggtctaaggcgctggattta

SEQ ID NO: 12958 - DNA, 18 bp, Homo sapiens
  source 1..18: mol_type = genomic DNA
cgtggccgagtggttaag

SEQ ID NO: 12959 - DNA, 19 bp, Homo sapiens
  source 1..19: mol_type = genomic DNA
cgtggccgagtggttaagg

SEQ ID NO: 12960 - DNA, 18 bp, Homo sapiens
  source 1..18: mol_type = genomic DNA
cgtggcctaatggataag

SEQ ID NO: 12961 - DNA, 30 bp, Homo sapiens
  source 1..30: mol_type = genomic DNA
cgtggcctaatggataaggcgtctgattcc

SEQ ID NO: 12962 - DNA, 31 bp, Homo sapiens
  source 1..31: mol_type = genomic DNA
cgtggcctaatggataaggcgtctgattccg

SEQ ID NO: 12963 - DNA, 27 bp, Homo sapiens
  source 1..27: mol_type = genomic DNA
cgtggcgcaatggatagcgcattggac

SEQ ID NO: 12964 - DNA, 27 bp, Homo sapiens
  source 1..27: mol_type = genomic DNA
cgtgggttcgaaccccactcctggtac

SEQ ID NO: 12965 - DNA, 16 bp, Homo sapiens
  source 1..16: mol_type = genomic DNA
cgtgggttcgaatccc

SEQ ID NO: 12966 - DNA, 17 bp, Homo sapiens
  source 1..17: mol_type = genomic DNA
cgtgggttcgaatccca

SEQ ID NO: 12967 - DNA, 28 bp, Homo sapiens
  source 1..28: mol_type = genomic DNA
cgtgggttcgaatcccaccctcgtcgcc

SEQ ID NO: 12968 - DNA, 25 bp, Homo sapiens
  source 1..25: mol_type = genomic DNA
cgtgggttcgaatcccacttctgac

SEQ ID NO: 12969 - DNA, 25 bp, Homo sapiens
  source 1..25: mol_type = genomic DNA
cgtgggttcgaatcccatcctcgtc

SEQ ID NO: 12970 - DNA, 27 bp, Homo sapiens
  source 1..27: mol_type = genomic DNA
cgtgggttcgaatcccatcctcgtcgc

SEQ ID NO: 12971 - DNA, 28 bp, Homo sapiens
  source 1..28: mol_type = genomic DNA
cgtgggttcgaatcccatcctcgtcgcc

SEQ ID NO: 12972 - DNA, 29 bp, Homo sapiens
  source 1..29: mol_type = genomic DNA
cgtgggttcgaatcccatcctcgtcgcca

SEQ ID NO: 12973 - DNA, 24 bp, Homo sapiens
  source 1..24: mol_type = genomic DNA
cgtgggttcgagccccacgttggg

SEQ ID NO: 12974 - DNA, 25 bp, Homo sapiens
  source 1..25: mol_type = genomic DNA
cgtgggttcgagccccacgttgggc

SEQ ID NO: 12975 - DNA, 26 bp, Homo sapiens
  source 1..26: mol_type = genomic DNA
cgtgggttcgagccccacgttgggcg

SEQ ID NO: 12976 - DNA, 27 bp, Homo sapiens
  source 1..27: mol_type = genomic DNA
cgtgggttcgagccccacgttgggcgc

SEQ ID NO: 12977 - DNA, 28 bp, Homo sapiens
  source 1..28: mol_type = genomic DNA
cgtgggttcgagccccacgttgggcgcc

SEQ ID NO: 12978 - DNA, 29 bp, Homo sapiens
  source 1..29: mol_type = genomic DNA
cgtgggttcgagccccacgttgggcgcca

SEQ ID NO: 12979 - DNA, 31 bp, Homo sapiens
  source 1..31: mol_type = genomic DNA
cgtggtggtctagtggctaggattcggcgct

SEQ ID NO: 12980 - DNA, 34 bp, Homo sapiens
  source 1..34: mol_type = genomic DNA
cgtggtggtctagtggctaggattcggcgctttc

SEQ ID NO: 12981 - DNA, 16 bp, Homo sapiens
  source 1..16: mol_type = genomic DNA
cgtggttgtagtccgt

SEQ ID NO: 12982 - DNA, 17 bp, Homo sapiens
  source 1..17: mol_type = genomic DNA
cgtggttgtagtccgtg

SEQ ID NO: 12983 - DNA, 18 bp, Homo sapiens
  source 1..18: mol_type = genomic DNA
cgtggttgtagtccgtgc

SEQ ID NO: 12984 - DNA, 19 bp, Homo sapiens
  source 1..19: mol_type = genomic DNA
cgtggttgtagtccgtgcg

SEQ ID NO: 12985 - DNA, 20 bp, Homo sapiens
  source 1..20: mol_type = genomic DNA
cgtggttgtagtccgtgcga

SEQ ID NO: 12986 - DNA, 21 bp, Homo sapiens
  source 1..21: mol_type = genomic DNA
cgtggttgtagtccgtgcgag

SEQ ID NO: 12987 - DNA, 22 bp, Homo sapiens
  source 1..22: mol_type = genomic DNA
cgtggttgtagtccgtgcgaga

SEQ ID NO: 12988 - DNA, 23 bp, Homo sapiens
  source 1..23: mol_type = genomic DNA
cgtggttgtagtccgtgcgagaa

SEQ ID NO: 12989 - DNA, 24 bp, Homo sapiens
  source 1..24: mol_type = genomic DNA
cgtggttgtagtccgtgcgagaat

SEQ ID NO: 12990 - DNA, 25 bp, Homo sapiens
  source 1..25: mol_type = genomic DNA
cgtggttgtagtccgtgcgagaata

SEQ ID NO: 12991 - DNA, 26 bp, Homo sapiens
  source 1..26: mol_type = genomic DNA
cgtggttgtagtccgtgcgagaatac

SEQ ID NO: 12992 - DNA, 27 bp, Homo sapiens
  source 1..27: mol_type = genomic DNA
cgtggttgtagtccgtgcgagaatacc

SEQ ID NO: 12993 - DNA, 28 bp, Homo sapiens
  source 1..28: mol_type = genomic DNA
cgtggttgtagtccgtgcgagaatacca

SEQ ID NO: 12994 - DNA, 26 bp, Homo sapiens
  source 1..26: mol_type = genomic DNA
cgtgttcaaatcacgtcggggtcacc

SEQ ID NO: 12995 - DNA, 22 bp, Homo sapiens
  source 1..22: mol_type = genomic DNA
cgtgttcaagtcacgtcggggt

SEQ ID NO: 12996 - DNA, 26 bp, Homo sapiens
  source 1..26: mol_type = genomic DNA
cgtgttcaagtcacgtcggggtcacc

SEQ ID NO: 12997 - DNA, 27 bp, Homo sapiens
  source 1..27: mol_type = genomic DNA
cgtgttcaagtcacgtcggggtcacca

SEQ ID NO: 12998 - DNA, 23 bp, Homo sapiens
  source 1..23: mol_type = genomic DNA
cgtgttcgaatcacgtcggggtc

SEQ ID NO: 12999 - DNA, 26 bp, Homo sapiens
  source 1..26: mol_type = genomic DNA
cgtgttcgaatcacgtcggggtcacc

SEQ ID NO: 13000 - DNA, 16 bp, Homo sapiens
  source 1..16: mol_type = genomic DNA
cgttaacttccaatta

SEQ ID NO: 13001 - DNA, 28 bp, Homo sapiens
  source 1..28: mol_type = genomic DNA
cgttaacttccaattaactagttttgac

SEQ ID NO: 13002 - DNA, 29 bp, Homo sapiens
  source 1..29: mol_type = genomic DNA
cgttaacttccaattaactagttttgaca

SEQ ID NO: 13003 - DNA, 30 bp, Homo sapiens
  source 1..30: mol_type = genomic DNA
cgttaacttccaattaactagttttgacaa

SEQ ID NO: 13004 - DNA, 31 bp, Homo sapiens
  source 1..31: mol_type = genomic DNA
cgttaacttccaattaactagttttgacaac

SEQ ID NO: 13005 - DNA, 32 bp, Homo sapiens
  source 1..32: mol_type = genomic DNA
cgttaacttccaattaactagttttgacaaca

SEQ ID NO: 13006 - DNA, 21 bp, Homo sapiens
  source 1..21: mol_type = genomic DNA
cgttaagatggcagagcccgg

SEQ ID NO: 13007 - DNA, 18 bp, Homo sapiens
  source 1..18: mol_type = genomic DNA
cgttagcgcagtaggcag

SEQ ID NO: 13008 - DNA, 19 bp, Homo sapiens
  source 1..19: mol_type = genomic DNA
cgttagcgcagtaggtagc

SEQ ID NO: 13009 - DNA, 19 bp, Homo sapiens
  source 1..19: mol_type = genomic DNA
cgttagtatagtggtgagt

SEQ ID NO: 13010 - DNA, 21 bp, Homo sapiens
  source 1..21: mol_type = genomic DNA
cgttagtatagtggtgagtat

SEQ ID NO: 13011 - DNA, 24 bp, Homo sapiens
  source 1..24: mol_type = genomic DNA
cgttagtatagtggtgagtatccc

SEQ ID NO: 13012 - DNA, 25 bp, Homo sapiens
  source 1..25: mol_type = genomic DNA
cgttagtatagtggtgagtatcccc

SEQ ID NO: 13013 - DNA, 27 bp, Homo sapiens
  source 1..27: mol_type = genomic DNA
cgttagtatagtggtgagtatccccgc

SEQ ID NO: 13014 - DNA, 28 bp, Homo sapiens
  source 1..28: mol_type = genomic DNA
cgttagtatagtggtgagtatccccgcc

SEQ ID NO: 13015 - DNA, 29 bp, Homo sapiens
  source 1..29: mol_type = genomic DNA
cgttagtatagtggtgagtatccccgcct

SEQ ID NO: 13016 - DNA, 31 bp, Homo sapiens
  source 1..31: mol_type = genomic DNA
cgttagtatagtggtgagtatccccgcctgt

SEQ ID NO: 13017 - DNA, 32 bp, Homo sapiens
  source 1..32: mol_type = genomic DNA
cgttagtatagtggtgagtatccccgcctgtc

SEQ ID NO: 13018 - DNA, 38 bp, Homo sapiens
  source 1..38: mol_type = genomic DNA
cgttagtatagtggtgagtatccccgcctgtcacgcgg

SEQ ID NO: 13019 - DNA, 28 bp, Homo sapiens
  source 1..28: mol_type = genomic DNA
cgttagtatagtggttagtatccccgcc

SEQ ID NO: 13020 - DNA, 31 bp, Homo sapiens
  source 1..31: mol_type = genomic DNA
cgttagtatagtggttagtatccccgcctgt

SEQ ID NO: 13021 - DNA, 32 bp, Homo sapiens
  source 1..32: mol_type = genomic DNA
cgttagtatagtggttagtatccccgcctgtc

SEQ ID NO: 13022 - DNA, 16 bp, Homo sapiens
  source 1..16: mol_type = genomic DNA
cgttcaggtcgcagtc

SEQ ID NO: 13023 - DNA, 17 bp, Homo sapiens
  source 1..17: mol_type = genomic DNA
cgttcaggtcgcagtct

SEQ ID NO: 13024 - DNA, 18 bp, Homo sapiens
  source 1..18: mol_type = genomic DNA
cgttcaggtcgcagtctc

SEQ ID NO: 13025 - DNA, 19 bp, Homo sapiens
  source 1..19: mol_type = genomic DNA
cgttcaggtcgcagtctcc

SEQ ID NO: 13026 - DNA, 20 bp, Homo sapiens
  source 1..20: mol_type = genomic DNA
cgttcaggtcgcagtctccc

SEQ ID NO: 13027 - DNA, 20 bp, Homo sapiens
  source 1..20: mol_type = genomic DNA
cgttcagttgatgcagagtg

SEQ ID NO: 13028 - DNA, 23 bp, Homo sapiens
  source 1..23: mol_type = genomic DNA
cgttcagttgatgcagagtgggg

SEQ ID NO: 13029 - DNA, 24 bp, Homo sapiens
  source 1..24: mol_type = genomic DNA
cgttcagttgatgcagagtggggt

SEQ ID NO: 13030 - DNA, 25 bp, Homo sapiens
  source 1..25: mol_type = genomic DNA
cgttcagttgatgcagagtggggtt

SEQ ID NO: 13031 - DNA, 34 bp, Homo sapiens
  source 1..34: mol_type = genomic DNA
cgttcagttgatgcagagtggggttttgcagtcc

SEQ ID NO: 13032 - DNA, 35 bp, Homo sapiens
  source 1..35: mol_type = genomic DNA
cgttcagttgatgcagagtggggttttgcagtcct

SEQ ID NO: 13033 - DNA, 36 bp, Homo sapiens
  source 1..36: mol_type = genomic DNA
cgttcagttgatgcagagtggggttttgcagtcctt

SEQ ID NO: 13034 - DNA, 37 bp, Homo sapiens
  source 1..37: mol_type = genomic DNA
cgttcagttgatgcagagtggggttttgcagtcctta

SEQ ID NO: 13035 - DNA, 38 bp, Homo sapiens
  source 1..38: mol_type = genomic DNA
cgttcagttgatgcagagtggggttttgcagtccttac

SEQ ID NO: 13036 - DNA, 39 bp, Homo sapiens
  source 1..39: mol_type = genomic DNA
cgttcagttgatgcagagtggggttttgcagtccttacc

SEQ ID NO: 13037 - DNA, 40 bp, Homo sapiens
  source 1..40: mol_type = genomic DNA
cgttcagttgatgcagagtggggttttgcagtccttacca

SEQ ID NO: 13038 - DNA, 16 bp, Homo sapiens
  source 1..16: mol_type = genomic DNA
cgttccgctgttaacc

SEQ ID NO: 13039 - DNA, 16 bp, Homo sapiens
  source 1..16: mol_type = genomic DNA
cgttggtctaggggta

SEQ ID NO: 13040 - DNA, 23 bp, Homo sapiens
  source 1..23: mol_type = genomic DNA
cgttggtctaggggtatgattct

SEQ ID NO: 13041 - DNA, 24 bp, Homo sapiens
  source 1..24: mol_type = genomic DNA
cgttggtctaggggtatgattctc

SEQ ID NO: 13042 - DNA, 25 bp, Homo sapiens
  source 1..25: mol_type = genomic DNA
cgttggtctaggggtatgattctcg

SEQ ID NO: 13043 - DNA, 27 bp, Homo sapiens
  source 1..27: mol_type = genomic DNA
cgttggtctaggggtatgattctcgct

SEQ ID NO: 13044 - DNA, 28 bp, Homo sapiens
  source 1..28: mol_type = genomic DNA
cgttggtctaggggtatgattctcgctt

SEQ ID NO: 13045 - DNA, 29 bp, Homo sapiens
  source 1..29: mol_type = genomic DNA
cgttggtctaggggtatgattctcgcttc

SEQ ID NO: 13046 - DNA, 31 bp, Homo sapiens
  source 1..31: mol_type = genomic DNA
cgttggtctaggggtatgattctcgcttcgg

SEQ ID NO: 13047 - DNA, 31 bp, Homo sapiens
  source 1..31: mol_type = genomic DNA
cgttggtctaggggtatgattctcgctttgg

SEQ ID NO: 13048 - DNA, 34 bp, Homo sapiens
  source 1..34: mol_type = genomic DNA
cgttggtctaggggtatgattctcgctttgggtg

SEQ ID NO: 13049 - DNA, 31 bp, Homo sapiens
  source 1..31: mol_type = genomic DNA
cgttggtctaggggtatgattctcggtttgg

SEQ ID NO: 13050 - DNA, 27 bp, Homo sapiens
  source 1..27: mol_type = genomic DNA
cgttggtctagtggtatgattctcgct

SEQ ID NO: 13051 - DNA, 16 bp, Homo sapiens
  source 1..16: mol_type = genomic DNA
cgttggtggtatagtg

SEQ ID NO: 13052 - DNA, 24 bp, Homo sapiens
  source 1..24: mol_type = genomic DNA
cgttggtggtatagtggtaagcat

SEQ ID NO: 13053 - DNA, 28 bp, Homo sapiens
  source 1..28: mol_type = genomic DNA
cgttggtggtatagtggtaagcatagct

SEQ ID NO: 13054 - DNA, 29 bp, Homo sapiens
  source 1..29: mol_type = genomic DNA
cgttggtggtatagtggtaagcatagctg

SEQ ID NO: 13055 - DNA, 30 bp, Homo sapiens
  source 1..30: mol_type = genomic DNA
cgttggtggtatagtggtaagcatagctgc

SEQ ID NO: 13056 - DNA, 31 bp, Homo sapiens
  source 1..31: mol_type = genomic DNA
cgttggtggtatagtggtaagcatagctgcc

SEQ ID NO: 13057 - DNA, 32 bp, Homo sapiens
  source 1..32: mol_type = genomic DNA
cgttggtggtatagtggtaagcatagctgcct

SEQ ID NO: 13058 - DNA, 27 bp, Homo sapiens
  source 1..27: mol_type = genomic DNA
cgttggtggtatagtggtgagcatagc

SEQ ID NO: 13059 - DNA, 28 bp, Homo sapiens
  source 1..28: mol_type = genomic DNA
cgttggtggtatagtggtgagcatagct

SEQ ID NO: 13060 - DNA, 29 bp, Homo sapiens
  source 1..29: mol_type = genomic DNA
cgttggtggtatagtggtgagcatagctg

SEQ ID NO: 13061 - DNA, 30 bp, Homo sapiens
  source 1..30: mol_type = genomic DNA
cgttggtggtatagtggtgagcatagctgc

SEQ ID NO: 13062 - DNA, 31 bp, Homo sapiens
  source 1..31: mol_type = genomic DNA
cgttggtggtatagtggtgagcatagctgcc

SEQ ID NO: 13063 - DNA, 32 bp, Homo sapiens
  source 1..32: mol_type = genomic DNA
cgttggtggtatagtggtgagcatagctgcct

SEQ ID NO: 13064 - DNA, 34 bp, Homo sapiens
  source 1..34: mol_type = genomic DNA
cgttggtggtatagtggtgagcatagctgccttc

SEQ ID NO: 13065 - DNA, 35 bp, Homo sapiens
  source 1..35: mol_type = genomic DNA
cgttggtggtatagtggtgagcatagctgccttcc

SEQ ID NO: 13066 - DNA, 27 bp, Homo sapiens
  source 1..27: mol_type = genomic DNA
cgttggtggtatagtggttagcatagc

SEQ ID NO: 13067 - DNA, 28 bp, Homo sapiens
  source 1..28: mol_type = genomic DNA
cgttggtggtatagtggttagcatagct

SEQ ID NO: 13068 - DNA, 30 bp, Homo sapiens
  source 1..30: mol_type = genomic DNA
cgttggtggtatagtggttagcatagctgc

SEQ ID NO: 13069 - DNA, 31 bp, Homo sapiens
  source 1..31: mol_type = genomic DNA
cgttggtggtatagtggttagcatagctgcc

SEQ ID NO: 13070 - DNA, 32 bp, Homo sapiens
  source 1..32: mol_type = genomic DNA
cgttggtggtatagtggttagcatagctgcct

SEQ ID NO: 13071 - DNA, 35 bp, Homo sapiens
  source 1..35: mol_type = genomic DNA
cgttggtggtatagtggttagcatagctgccttcc

SEQ ID NO: 13072 - DNA, 31 bp, Homo sapiens
  source 1..31: mol_type = genomic DNA
cgttggtggtttagtggtagaattctcgcct

SEQ ID NO: 13073 - DNA, 21 bp, Homo sapiens
  source 1..21: mol_type = genomic DNA
cgtttatgtagcttacctcct

SEQ ID NO: 13074 - DNA, 34 bp, Homo sapiens
  source 1..34: mol_type = genomic DNA
cgtttccgtagtggagtggttatcacgttcgcct

SEQ ID NO: 13075 - DNA, 33 bp, Homo sapiens
  source 1..33: mol_type = genomic DNA
cgtttccgtagtgtagtggtcatcacgttcgcc

SEQ ID NO: 13076 - DNA, 34 bp, Homo sapiens
  source 1..34: mol_type = genomic DNA
cgtttccgtagtgtagtggtcatcacgttcgcct

SEQ ID NO: 13077 - DNA, 33 bp, Homo sapiens
  source 1..33: mol_type = genomic DNA
cgtttccgtagtgtagtggttatcacgttcgcc

SEQ ID NO: 13078 - DNA, 34 bp, Homo sapiens
  source 1..34: mol_type = genomic DNA
cgtttccgtagtgtagtggttatcacgttcgcct

SEQ ID NO: 13079 - DNA, 35 bp, Homo sapiens
  source 1..35: mol_type = genomic DNA
cgtttccgtagtgtagtggttatcacgttcgcctc

SEQ ID NO: 13080 - DNA, 36 bp, Homo sapiens
  source 1..36: mol_type = genomic DNA
cgtttccgtagtgtagtggttatcacgttcgcctca

SEQ ID NO: 13081 - DNA, 37 bp, Homo sapiens
  source 1..37: mol_type = genomic DNA
cgtttccgtagtgtagtggttatcacgttcgcctcac

SEQ ID NO: 13082 - DNA, 19 bp, Homo sapiens
  source 1..19: mol_type = genomic DNA
ctaaagacaggggttaggc

SEQ ID NO: 13083 - DNA, 20 bp, Homo sapiens
  source 1..20: mol_type = genomic DNA
ctaaagacaggggttaggcc

SEQ ID NO: 13084 - DNA, 21 bp, Homo sapiens
  source 1..21: mol_type = genomic DNA
ctaaagacaggggttaggcct

SEQ ID NO: 13085 - DNA, 22 bp, Homo sapiens
  source 1..22: mol_type = genomic DNA
ctaaagacaggggttaggcctc

SEQ ID NO: 13086 - DNA, 23 bp, Homo sapiens
  source 1..23: mol_type = genomic DNA
ctaaagacaggggttaggcctct

SEQ ID NO: 13087 - DNA, 25 bp, Homo sapiens
  source 1..25: mol_type = genomic DNA
ctaaagacaggggttaggcctcttt

SEQ ID NO: 13088 - DNA, 26 bp, Homo sapiens
  source 1..26: mol_type = genomic DNA
ctaaagacaggggttaggcctctttt

SEQ ID NO: 13089 - DNA, 27 bp, Homo sapiens
  source 1..27: mol_type = genomic DNA
ctaaagacaggggttaggcctcttttt

SEQ ID NO: 13090 - DNA, 28 bp, Homo sapiens
  source 1..28: mol_type = genomic DNA
ctaaagacaggggttaggcctcttttta

SEQ ID NO: 13091 - DNA, 30 bp, Homo sapiens
  source 1..30: mol_type = genomic DNA
ctaaagacaggggttaggcctctttttacc

SEQ ID NO: 13092 - DNA, 31 bp, Homo sapiens
  source 1..31: mol_type = genomic DNA
ctaaagacaggggttaggcctctttttacca

SEQ ID NO: 13093 - DNA, 32 bp, Homo sapiens
  source 1..32: mol_type = genomic DNA
ctaaagacaggggttaggcctctttttaccac

SEQ ID NO: 13094 - DNA, 33 bp, Homo sapiens
  source 1..33: mol_type = genomic DNA
ctaaagacaggggttaggcctctttttaccacc

SEQ ID NO: 13095 - DNA, 34 bp, Homo sapiens
  source 1..34: mol_type = genomic DNA
ctaaagacaggggttaggcctctttttaccacca

SEQ ID NO: 13096 - DNA, 17 bp, Homo sapiens
  source 1..17: mol_type = genomic DNA
ctaaaggtccctggttc

SEQ ID NO: 13097 - DNA, 35 bp, Homo sapiens
  source 1..35: mol_type = genomic DNA
ctaaaggtccctggttcaatcccgggtttcggcac

SEQ ID NO: 13098 - DNA, 18 bp, Homo sapiens
  source 1..18: mol_type = genomic DNA
ctaaaggtccctggttcg

SEQ ID NO: 13099 - DNA, 33 bp, Homo sapiens
  source 1..33: mol_type = genomic DNA
ctaaaggtccctggttcgatcccgggtttcggc

SEQ ID NO: 13100 - DNA, 34 bp, Homo sapiens
  source 1..34: mol_type = genomic DNA
ctaaaggtccctggttcgatcccgggtttcggca

SEQ ID NO: 13101 - DNA, 35 bp, Homo sapiens
  source 1..35: mol_type = genomic DNA
ctaaaggtccctggttcgatcccgggtttcggcac

SEQ ID NO: 13102 - DNA, 36 bp, Homo sapiens
  source 1..36: mol_type = genomic DNA
ctaaaggtccctggttcgatcccgggtttcggcacc

SEQ ID NO: 13103 - DNA, 37 bp, Homo sapiens
  source 1..37: mol_type = genomic DNA
ctaaaggtccctggttcgatcccgggtttcggcacca

SEQ ID NO: 13104 - DNA, 16 bp, Homo sapiens
  source 1..16: mol_type = genomic DNA
ctaaataagctatcgg

SEQ ID NO: 13105 - DNA, 17 bp, Homo sapiens
  source 1..17: mol_type = genomic DNA
ctaaataagctatcggg

SEQ ID NO: 13106 - DNA, 18 bp, Homo sapiens
  source 1..18: mol_type = genomic DNA
ctaaataagctatcgggc

SEQ ID NO: 13107 - DNA, 19 bp, Homo sapiens
  source 1..19: mol_type = genomic DNA
ctaaataagctatcgggcc

SEQ ID NO: 13108 - DNA, 20 bp, Homo sapiens
  source 1..20: mol_type = genomic DNA
ctaaataagctatcgggccc

SEQ ID NO: 13109 - DNA, 21 bp, Homo sapiens
  source 1..21: mol_type = genomic DNA
ctaaataagctatcgggccca

SEQ ID NO: 13110 - DNA, 22 bp, Homo sapiens
  source 1..22: mol_type = genomic DNA
ctaaataagctatcgggcccat

SEQ ID NO: 13111 - DNA, 23 bp, Homo sapiens
  source 1..23: mol_type = genomic DNA
ctaaataagctatcgggcccata

SEQ ID NO: 13112 - DNA, 24 bp, Homo sapiens
  source 1..24: mol_type = genomic DNA
ctaaataagctatcgggcccatac

SEQ ID NO: 13113 - DNA, 25 bp, Homo sapiens
  source 1..25: mol_type = genomic DNA
ctaaataagctatcgggcccatacc

SEQ ID NO: 13114 - DNA, 26 bp, Homo sapiens
  source 1..26: mol_type = genomic DNA
ctaaataagctatcgggcccataccc

SEQ ID NO: 13115 - DNA, 27 bp, Homo sapiens
  source 1..27: mol_type = genomic DNA
ctaaataagctatcgggcccatacccc

SEQ ID NO: 13116 - DNA, 28 bp, Homo sapiens
  source 1..28: mol_type = genomic DNA
ctaaataagctatcgggcccataccccg

SEQ ID NO: 13117 - DNA, 29 bp, Homo sapiens
  source 1..29: mol_type = genomic DNA
ctaaataagctatcgggcccataccccga

SEQ ID NO: 13118 - DNA, 30 bp, Homo sapiens
  source 1..30: mol_type = genomic DNA
ctaaataagctatcgggcccataccccgaa

SEQ ID NO: 13119 - DNA, 31 bp, Homo sapiens
  source 1..31: mol_type = genomic DNA
ctaaataagctatcgggcccataccccgaaa

SEQ ID NO: 13120 - DNA, 32 bp, Homo sapiens
  source 1..32: mol_type = genomic DNA
ctaaataagctatcgggcccataccccgaaaa

SEQ ID NO: 13121 - DNA, 36 bp, Homo sapiens
  source 1..36: mol_type = genomic DNA
ctaaataagctatcgggcccataccccgaaaatgtt

SEQ ID NO: 13122 - DNA, 40 bp, Homo sapiens
  source 1..40: mol_type = genomic DNA
ctaaataagctatcgggcccataccccgaaaatgttggtt

SEQ ID NO: 13123 - DNA, 41 bp, Homo sapiens
  source 1..41: mol_type = genomic DNA
ctaaataagctatcgggcccataccccgaaaatgttggtta

SEQ ID NO: 13124 - DNA, 42 bp, Homo sapiens
  source 1..42: mol_type = genomic DNA
ctaaataagctatcgggcccataccccgaaaatgttggttat

SEQ ID NO: 13125 - DNA, 16 bp, Homo sapiens
  source 1..16: mol_type = genomic DNA
ctaaatcctatatatc

SEQ ID NO: 13126 - DNA, 17 bp, Homo sapiens
  source 1..17: mol_type = genomic DNA
ctaaatcctatatatct

SEQ ID NO: 13127 - DNA, 21 bp, Homo sapiens
  source 1..21: mol_type = genomic DNA
ctaaatcctatatatcttacc

SEQ ID NO: 13128 - DNA, 22 bp, Homo sapiens
  source 1..22: mol_type = genomic DNA
ctaaatcctatatatcttacca

SEQ ID NO: 13129 - DNA, 16 bp, Homo sapiens
  source 1..16: mol_type = genomic DNA
ctaacaacatggcttt

SEQ ID NO: 13130 - DNA, 17 bp, Homo sapiens
  source 1..17: mol_type = genomic DNA
ctaacaacatggctttc

SEQ ID NO: 13131 - DNA, 18 bp, Homo sapiens
  source 1..18: mol_type = genomic DNA
ctaacaacatggctttct

SEQ ID NO: 13132 - DNA, 19 bp, Homo sapiens
  source 1..19: mol_type = genomic DNA
ctaacaacatggctttctc

SEQ ID NO: 13133 - DNA, 20 bp, Homo sapiens
  source 1..20: mol_type = genomic DNA
ctaacaacatggctttctca

SEQ ID NO: 13134 - DNA, 21 bp, Homo sapiens
  source 1..21: mol_type = genomic DNA
ctaacaacatggctttctcac

SEQ ID NO: 13135 - DNA, 22 bp, Homo sapiens
  source 1..22: mol_type = genomic DNA
ctaacaacatggctttctcacc

SEQ ID NO: 13136 - DNA, 23 bp, Homo sapiens
  source 1..23: mol_type = genomic DNA
ctaacaacatggctttctcacca

SEQ ID NO: 13137 - DNA, 16 bp, Homo sapiens
  source 1..16: mol_type = genomic DNA
ctaactcatgccccca

SEQ ID NO: 13138 - DNA, 18 bp, Homo sapiens
  source 1..18: mol_type = genomic DNA
ctaactcatgcccccatg

SEQ ID NO: 13139 - DNA, 19 bp, Homo sapiens
  source 1..19: mol_type = genomic DNA
ctaactcatgcccccatgt

SEQ ID NO: 13140 - DNA, 20 bp, Homo sapiens
  source 1..20: mol_type = genomic DNA
ctaactcatgcccccatgtc

SEQ ID NO: 13141 - DNA, 21 bp, Homo sapiens
  source 1..21: mol_type = genomic DNA
ctaactcatgcccccatgtct

SEQ ID NO: 13142 - DNA, 22 bp, Homo sapiens
  source 1..22: mol_type = genomic DNA
ctaactcatgcccccatgtcta

SEQ ID NO: 13143 - DNA, 23 bp, Homo sapiens
  source 1..23: mol_type = genomic DNA
ctaactcatgcccccatgtctaa

SEQ ID NO: 13144 - DNA, 24 bp, Homo sapiens
  source 1..24: mol_type = genomic DNA
ctaactcatgcccccatgtctaac

SEQ ID NO: 13145 - DNA, 25 bp, Homo sapiens
  source 1..25: mol_type = genomic DNA
ctaactcatgcccccatgtctaaca

SEQ ID NO: 13146 - DNA, 27 bp, Homo sapiens
  source 1..27: mol_type = genomic DNA
ctaactcatgcccccatgtctaacaac

SEQ ID NO: 13147 - DNA, 28 bp, Homo sapiens
  source 1..28: mol_type = genomic DNA
ctaactcatgcccccatgtctaacaaca

SEQ ID NO: 13148 - DNA, 29 bp, Homo sapiens
  source 1..29: mol_type = genomic DNA
ctaactcatgcccccatgtctaacaacat

SEQ ID NO: 13149 - DNA, 30 bp, Homo sapiens
  source 1..30: mol_type = genomic DNA
ctaactcatgcccccatgtctaacaacatg

SEQ ID NO: 13150 - DNA, 31 bp, Homo sapiens
  source 1..31: mol_type = genomic DNA
ctaactcatgcccccatgtctaacaacatgg

SEQ ID NO: 13151 - DNA, 32 bp, Homo sapiens
  source 1..32: mol_type = genomic DNA
ctaactcatgcccccatgtctaacaacatggc

SEQ ID NO: 13152 - DNA, 33 bp, Homo sapiens
  source 1..33: mol_type = genomic DNA
ctaactcatgcccccatgtctaacaacatggct

SEQ ID NO: 13153 - DNA, 34 bp, Homo sapiens
  source 1..34: mol_type = genomic DNA
ctaactcatgcccccatgtctaacaacatggctt

SEQ ID NO: 13154 - DNA, 35 bp, Homo sapiens
  source 1..35: mol_type = genomic DNA
ctaactcatgcccccatgtctaacaacatggcttt

SEQ ID NO: 13155 - DNA, 36 bp, Homo sapiens
  source 1..36: mol_type = genomic DNA
ctaactcatgcccccatgtctaacaacatggctttc

SEQ ID NO: 13156 - DNA, 37 bp, Homo sapiens
  source 1..37: mol_type = genomic DNA
ctaactcatgcccccatgtctaacaacatggctttct

SEQ ID NO: 13157 - DNA, 38 bp, Homo sapiens
  source 1..38: mol_type = genomic DNA
ctaactcatgcccccatgtctaacaacatggctttctc

SEQ ID NO: 13158 - DNA, 39 bp, Homo sapiens
  source 1..39: mol_type = genomic DNA
ctaactcatgcccccatgtctaacaacatggctttctca

SEQ ID NO: 13159 - DNA, 40 bp, Homo sapiens
  source 1..40: mol_type = genomic DNA
ctaactcatgcccccatgtctaacaacatggctttctcac

SEQ ID NO: 13160 - DNA, 41 bp, Homo sapiens
  source 1..41: mol_type = genomic DNA
ctaactcatgcccccatgtctaacaacatggctttctcacc

SEQ ID NO: 13161 - DNA, 42 bp, Homo sapiens
  source 1..42: mol_type = genomic DNA
ctaactcatgcccccatgtctaacaacatggctttctcacca

SEQ ID NO: 13162 - DNA, 17 bp, Homo sapiens
  source 1..17: mol_type = genomic DNA
ctaacttagcattaacc

SEQ ID NO: 13163 - DNA, 25 bp, Homo sapiens
  source 1..25: mol_type = genomic DNA
ctaacttagcattaaccttttaagt

SEQ ID NO: 13164 - DNA, 27 bp, Homo sapiens
  source 1..27: mol_type = genomic DNA
ctaacttagcattaaccttttaagtta

SEQ ID NO: 13165 - DNA, 28 bp, Homo sapiens
  source 1..28: mol_type = genomic DNA
ctaacttagcattaaccttttaagttaa

SEQ ID NO: 13166 - DNA, 38 bp, Homo sapiens
  source 1..38: mol_type = genomic DNA
ctaacttagcattaaccttttaagttaaagattaagag

SEQ ID NO: 13167 - DNA, 42 bp, Homo sapiens
  source 1..42: mol_type = genomic DNA
ctaacttagcattaaccttttaagttaaagattaagagaacc

SEQ ID NO: 13168 - DNA, 16 bp, Homo sapiens
  source 1..16: mol_type = genomic DNA
ctaagccagggattgt

SEQ ID NO: 13169 - DNA, 18 bp, Homo sapiens
  source 1..18: mol_type = genomic DNA
ctaagccagggattgtgg

SEQ ID NO: 13170 - DNA, 19 bp, Homo sapiens
  source 1..19: mol_type = genomic DNA
ctaagccagggattgtggg

SEQ ID NO: 13171 - DNA, 20 bp, Homo sapiens
  source 1..20: mol_type = genomic DNA
ctaagccagggattgtgggt

SEQ ID NO: 13172 - DNA, 21 bp, Homo sapiens
  source 1..21: mol_type = genomic DNA
ctaagccagggattgtgggtt

SEQ ID NO: 13173 - DNA, 22 bp, Homo sapiens
  source 1..22: mol_type = genomic DNA
ctaagccagggattgtgggttc

SEQ ID NO: 13174 - DNA, 23 bp, Homo sapiens
  source 1..23: mol_type = genomic DNA
ctaagccagggattgtgggttcg

SEQ ID NO: 13175 - DNA, 27 bp, Homo sapiens
  source 1..27: mol_type = genomic DNA
ctaagccagggattgtgggttcgagtc

SEQ ID NO: 13176 - DNA, 30 bp, Homo sapiens
  source 1..30: mol_type = genomic DNA
ctaagccagggattgtgggttcgagtccca

SEQ ID NO: 13177 - DNA, 39 bp, Homo sapiens
  source 1..39: mol_type = genomic DNA
ctaagccagggattgtgggttcgagtcccacccggggta

SEQ ID NO: 13178 - DNA, 41 bp, Homo sapiens
  source 1..41: mol_type = genomic DNA
ctaagccagggattgtgggttcgagtcccacccggggtacc

SEQ ID NO: 13179 - DNA, 42 bp, Homo sapiens
  source 1..42: mol_type = genomic DNA
ctaagccagggattgtgggttcgagtcccacccggggtacca

SEQ ID NO: 13180 - DNA, 41 bp, Homo sapiens
  source 1..41: mol_type = genomic DNA
ctaagccagggattgtgggttcgagtcccacctggggtacc

SEQ ID NO: 13181 - DNA, 41 bp, Homo sapiens
  source 1..41: mol_type = genomic DNA
ctaagccagggattgtgggttcgagtcccacctggggtgcc

SEQ ID NO: 13182 - DNA, 42 bp, Homo sapiens
  source 1..42: mol_type = genomic DNA
ctaagccagggattgtgggttcgagtcccacctggggtgcca

SEQ ID NO: 13183 - DNA, 31 bp, Homo sapiens
  source 1..31: mol_type = genomic DNA
ctaagccagggattgtgggttcgagtcccat

SEQ ID NO: 13184 - DNA, 32 bp, Homo sapiens
  source 1..32: mol_type = genomic DNA
ctaagccagggattgtgggttcgagtcccatc

SEQ ID NO: 13185 - DNA, 39 bp, Homo sapiens
  source 1..39: mol_type = genomic DNA
ctaagccagggattgtgggttcgagtcccatctggggtg

SEQ ID NO: 13186 - DNA, 41 bp, Homo sapiens
  source 1..41: mol_type = genomic DNA
ctaagccagggattgtgggttcgagtcccatctggggtgcc

SEQ ID NO: 13187 - DNA, 42 bp, Homo sapiens
  source 1..42: mol_type = genomic DNA
ctaagccagggattgtgggttcgagtcccatctggggtgcca

SEQ ID NO: 13188 - DNA, 18 bp, Homo sapiens
  source 1..18: mol_type = genomic DNA
ctaaggcgctgcgttcag

SEQ ID NO: 13189 - DNA, 21 bp, Homo sapiens
  source 1..21: mol_type = genomic DNA
ctaaggcgctggattaaggct

SEQ ID NO: 13190 - DNA, 23 bp, Homo sapiens
  source 1..23: mol_type = genomic DNA
ctaaggcgctggattaaggctcc

SEQ ID NO: 13191 - DNA, 21 bp, Homo sapiens
  source 1..21: mol_type = genomic DNA
ctaaggcgctggatttaggct

SEQ ID NO: 13192 - DNA, 17 bp, Homo sapiens
  source 1..17: mol_type = genomic DNA
ctaagtgtttgtgggtt

SEQ ID NO: 13193 - DNA, 18 bp, Homo sapiens
  source 1..18: mol_type = genomic DNA
ctaagtgtttgtgggttt

SEQ ID NO: 13194 - DNA, 19 bp, Homo sapiens
  source 1..19: mol_type = genomic DNA
ctaagtgtttgtgggttta

SEQ ID NO: 13195 - DNA, 20 bp, Homo sapiens
  source 1..20: mol_type = genomic DNA
ctaagtgtttgtgggtttaa

SEQ ID NO: 13196 - DNA, 22 bp, Homo sapiens
  source 1..22: mol_type = genomic DNA
ctaagtgtttgtgggtttaagt

SEQ ID NO: 13197 - DNA, 25 bp, Homo sapiens
  source 1..25: mol_type = genomic DNA
ctaagtgtttgtgggtttaagtccc

SEQ ID NO: 13198 - DNA, 28 bp, Homo sapiens
  source 1..28: mol_type = genomic DNA
ctaagtgtttgtgggtttaagtcccatt

SEQ ID NO: 13199 - DNA, 29 bp, Homo sapiens
  source 1..29: mol_type = genomic DNA
ctaagtgtttgtgggtttaagtcccattg

SEQ ID NO: 13200 - DNA, 31 bp, Homo sapiens
  source 1..31: mol_type = genomic DNA
ctaagtgtttgtgggtttaagtcccattggt

SEQ ID NO: 13201 - DNA, 32 bp, Homo sapiens
  source 1..32: mol_type = genomic DNA
ctaagtgtttgtgggtttaagtcccattggtc

SEQ ID NO: 13202 - DNA, 33 bp, Homo sapiens
  source 1..33: mol_type = genomic DNA
ctaagtgtttgtgggtttaagtcccattggtct

SEQ ID NO: 13203 - DNA, 34 bp, Homo sapiens
  source 1..34: mol_type = genomic DNA
ctaagtgtttgtgggtttaagtcccattggtcta

SEQ ID NO: 13204 - DNA, 35 bp, Homo sapiens
  source 1..35: mol_type = genomic DNA
ctaagtgtttgtgggtttaagtcccattggtctag

SEQ ID NO: 13205 - DNA, 36 bp, Homo sapiens
  source 1..36: mol_type = genomic DNA
ctaagtgtttgtgggtttaagtcccattggtctagc

SEQ ID NO: 13206 - DNA, 37 bp, Homo sapiens
  source 1..37: mol_type = genomic DNA
ctaagtgtttgtgggtttaagtcccattggtctagcc

SEQ ID NO: 13207 - DNA, 38 bp, Homo sapiens
  source 1..38: mol_type = genomic DNA
ctaagtgtttgtgggtttaagtcccattggtctagcca

SEQ ID NO: 13208 - DNA, 19 bp, Homo sapiens
  source 1..19: mol_type = genomic DNA
ctaatacaccagtcttgta

SEQ ID NO: 13209 - DNA, 30 bp, Homo sapiens
  source 1..30: mol_type = genomic DNA
ctaatacaccagtcttgtaaaccggagatg

SEQ ID NO: 13210 - DNA, 35 bp, Homo sapiens
  source 1..35: mol_type = genomic DNA
ctaatacaccagtcttgtaaaccggagatgaaaac

SEQ ID NO: 13211 - DNA, 22 bp, Homo sapiens
  source 1..22: mol_type = genomic DNA
ctaatccagaggttccgggttc

SEQ ID NO: 13212 - DNA, 39 bp, Homo sapiens
  source 1..39: mol_type = genomic DNA
ctaatccagaggttccgggttcgagtcccggcagagatg

SEQ ID NO: 13213 - DNA, 40 bp, Homo sapiens
  source 1..40: mol_type = genomic DNA
ctaatccagaggttccgggttcgagtcccggcagagatgc

SEQ ID NO: 13214 - DNA, 41 bp, Homo sapiens
  source 1..41: mol_type = genomic DNA
ctaatccagaggttccgggttcgagtcccggcagagatgcc

SEQ ID NO: 13215 - DNA, 42 bp, Homo sapiens
  source 1..42: mol_type = genomic DNA
ctaatccagaggttccgggttcgagtcccggcagagatgcca

SEQ ID NO: 13216 - DNA, 16 bp, Homo sapiens
  source 1..16: mol_type = genomic DNA
ctaatccattgtgctt

SEQ ID NO: 13217 - DNA, 16 bp, Homo sapiens
  source 1..16: mol_type = genomic DNA
ctaatggataaggcac

SEQ ID NO: 13218 - DNA, 17 bp, Homo sapiens
  source 1..17: mol_type = genomic DNA
ctaatggataaggcact

SEQ ID NO: 13219 - DNA, 18 bp, Homo sapiens
  source 1..18: mol_type = genomic DNA
ctaatggataaggcactg

SEQ ID NO: 13220 - DNA, 20 bp, Homo sapiens
  source 1..20: mol_type = genomic DNA
ctaatggataaggcactggc

SEQ ID NO: 13221 - DNA, 16 bp, Homo sapiens
  source 1..16: mol_type = genomic DNA
ctaatggataaggcat

SEQ ID NO: 13222 - DNA, 17 bp, Homo sapiens
  source 1..17: mol_type = genomic DNA
ctaatggataaggcatc

SEQ ID NO: 13223 - DNA, 18 bp, Homo sapiens
  source 1..18: mol_type = genomic DNA
ctaatggataaggcatca

SEQ ID NO: 13224 - DNA, 19 bp, Homo sapiens
  source 1..19: mol_type = genomic DNA
ctaatggataaggcatcag

SEQ ID NO: 13225 - DNA, 22 bp, Homo sapiens
  source 1..22: mol_type = genomic DNA
ctaatggataaggcatcagcct

SEQ ID NO: 13226 - DNA, 23 bp, Homo sapiens
  source 1..23: mol_type = genomic DNA
ctaatggataaggcatcagcctc

SEQ ID NO: 13227 - DNA, 24 bp, Homo sapiens
  source 1..24: mol_type = genomic DNA
ctaatggataaggcatcagcctcc

SEQ ID NO: 13228 - DNA, 25 bp, Homo sapiens
  source 1..25: mol_type = genomic DNA
ctaatggataaggcatcagcctccg

SEQ ID NO: 13229 - DNA, 31 bp, Homo sapiens
  source 1..31: mol_type = genomic DNA
ctaatggataaggcatcagcctccggagctg

SEQ ID NO: 13230 - DNA, 32 bp, Homo sapiens
  source 1..32: mol_type = genomic DNA
ctaatggataaggcatcagcctccggagctgg

SEQ ID NO: 13231 - DNA, 17 bp, Homo sapiens
  source 1..17: mol_type = genomic DNA
ctaatggataaggcatt

SEQ ID NO: 13232 - DNA, 18 bp, Homo sapiens
  source 1..18: mol_type = genomic DNA
ctaatggataaggcattg

SEQ ID NO: 13233 - DNA, 19 bp, Homo sapiens
  source 1..19: mol_type = genomic DNA
ctaatggataaggcattgg

SEQ ID NO: 13234 - DNA, 20 bp, Homo sapiens
  source 1..20: mol_type = genomic DNA
ctaatggataaggcattggc

SEQ ID NO: 13235 - DNA, 22 bp, Homo sapiens
  source 1..22: mol_type = genomic DNA
ctaatggataaggcattggcct

SEQ ID NO: 13236 - DNA, 31 bp, Homo sapiens
  source 1..31: mol_type = genomic DNA
ctaatggataaggcattggcctcctaagcca

SEQ ID NO: 13237 - DNA, 17 bp, Homo sapiens
  source 1..17: mol_type = genomic DNA
ctaatggataaggcgtc

SEQ ID NO: 13238 - DNA, 20 bp, Homo sapiens
  source 1..20: mol_type = genomic DNA
ctaatggataaggcgtctga

SEQ ID NO: 13239 - DNA, 22 bp, Homo sapiens
  source 1..22: mol_type = genomic DNA
ctaatggataaggcgtctgact

SEQ ID NO: 13240 - DNA, 16 bp, Homo sapiens
  source 1..16: mol_type = genomic DNA
ctaatggtggagttaa

SEQ ID NO: 13241 - DNA, 17 bp, Homo sapiens
  source 1..17: mol_type = genomic DNA
ctaatggtggagttaaa

SEQ ID NO: 13242 - DNA, 18 bp, Homo sapiens
  source 1..18: mol_type = genomic DNA
ctaatggtggagttaaag

SEQ ID NO: 13243 - DNA, 19 bp, Homo sapiens
  source 1..19: mol_type = genomic DNA
ctaatggtggagttaaaga

SEQ ID NO: 13244 - DNA, 20 bp, Homo sapiens
  source 1..20: mol_type = genomic DNA
ctaatggtggagttaaagac

SEQ ID NO: 13245 - DNA, 21 bp, Homo sapiens
  source 1..21: mol_type = genomic DNA
ctaatggtggagttaaagact

SEQ ID NO: 13246 - DNA, 22 bp, Homo sapiens
  source 1..22: mol_type = genomic DNA
ctaatggtggagttaaagactt

SEQ ID NO: 13247 - DNA, 23 bp, Homo sapiens
  source 1..23: mol_type = genomic DNA
ctaatggtggagttaaagacttt

SEQ ID NO: 13248 - DNA, 24 bp, Homo sapiens
  source 1..24: mol_type = genomic DNA
ctaatggtggagttaaagactttt

SEQ ID NO: 13249 - DNA, 25 bp, Homo sapiens
  source 1..25: mol_type = genomic DNA
ctaatggtggagttaaagacttttt

SEQ ID NO: 13250 - DNA, 26 bp, Homo sapiens
  source 1..26: mol_type = genomic DNA
ctaatggtggagttaaagactttttc

SEQ ID NO: 13251 - DNA, 28 bp, Homo sapiens
  source 1..28: mol_type = genomic DNA
ctaatggtggagttaaagactttttctc

SEQ ID NO: 13252 - DNA, 29 bp, Homo sapiens
  source 1..29: mol_type = genomic DNA
ctaatggtggagttaaagactttttctct

SEQ ID NO: 13253 - DNA, 30 bp, Homo sapiens
  source 1..30: mol_type = genomic DNA
ctaatggtggagttaaagactttttctctg

SEQ ID NO: 13254 - DNA, 31 bp, Homo sapiens
  source 1..31: mol_type = genomic DNA
ctaatggtggagttaaagactttttctctga

SEQ ID NO: 13255 - DNA, 32 bp, Homo sapiens
  source 1..32: mol_type = genomic DNA
ctaatggtggagttaaagactttttctctgac

SEQ ID NO: 13256 - DNA, 33 bp, Homo sapiens
  source 1..33: mol_type = genomic DNA
ctaatggtggagttaaagactttttctctgacc

SEQ ID NO: 13257 - DNA, 34 bp, Homo sapiens
  source 1..34: mol_type = genomic DNA
ctaatggtggagttaaagactttttctctgacca

SEQ ID NO: 13258 - DNA, 17 bp, Homo sapiens
  source 1..17: mol_type = genomic DNA
ctaattcaaaggttccg

SEQ ID NO: 13259 - DNA, 18 bp, Homo sapiens
  source 1..18: mol_type = genomic DNA
ctaattcaaaggttccgg

SEQ ID NO: 13260 - DNA, 20 bp, Homo sapiens
  source 1..20: mol_type = genomic DNA
ctaattcaaaggttccgggt

SEQ ID NO: 13261 - DNA, 41 bp, Homo sapiens
  source 1..41: mol_type = genomic DNA
ctaattcaaaggttccgggttcgagtcccggcggagtcgcc

SEQ ID NO: 13262 - DNA, 42 bp, Homo sapiens
  source 1..42: mol_type = genomic DNA
ctaattcaaaggttccgggttcgagtcccggcggagtcgcca

SEQ ID NO: 13263 - DNA, 41 bp, Homo sapiens
  source 1..41: mol_type = genomic DNA
ctaattcaaaggttgtgggttcgaatcccaccagagtcgcc

SEQ ID NO: 13264 - DNA, 42 bp, Homo sapiens
  source 1..42: mol_type = genomic DNA
ctaattcaaaggttgtgggttcgaatcccaccagagtcgcca

SEQ ID NO: 13265 - DNA, 41 bp, Homo sapiens
  source 1..41: mol_type = genomic DNA
ctaattcaaaggttgtgggttcgagtcccaccagagtcgcc

SEQ ID NO: 13266 - DNA, 42 bp, Homo sapiens
  source 1..42: mol_type = genomic DNA
ctaattcaaaggttgtgggttcgagtcccaccagagtcgcca

SEQ ID NO: 13267 - DNA, 17 bp, Homo sapiens
  source 1..17: mol_type = genomic DNA
ctagcggttaggattcc

SEQ ID NO: 13268 - DNA, 18 bp, Homo sapiens
  source 1..18: mol_type = genomic DNA
ctagcggttaggattcct

SEQ ID NO: 13269 - DNA, 19 bp, Homo sapiens
  source 1..19: mol_type = genomic DNA
ctagcggttaggattcctg

SEQ ID NO: 13270 - DNA, 21 bp, Homo sapiens
  source 1..21: mol_type = genomic DNA
ctagcggttaggattcctggt

SEQ ID NO: 13271 - DNA, 22 bp, Homo sapiens
  source 1..22: mol_type = genomic DNA
ctagcggttaggattcctggtt

SEQ ID NO: 13272 - DNA, 23 bp, Homo sapiens
  source 1..23: mol_type = genomic DNA
ctagcggttaggattcctggttt

SEQ ID NO: 13273 - DNA, 24 bp, Homo sapiens
  source 1..24: mol_type = genomic DNA
ctagcggttaggattcctggtttt

SEQ ID NO: 13274 - DNA, 25 bp, Homo sapiens
  source 1..25: mol_type = genomic DNA
ctagcggttaggattcctggttttc

SEQ ID NO: 13275 - DNA, 26 bp, Homo sapiens
  source 1..26: mol_type = genomic DNA
ctagcggttaggattcctggttttca

SEQ ID NO: 13276 - DNA, 43 bp, Homo sapiens
  source 1..43: mol_type = genomic DNA
ctagcggttaggattcctggttttcacccaggcggcccgggtt

SEQ ID NO: 13277 - DNA, 34 bp, Homo sapiens
  source 1..34: mol_type = genomic DNA
ctagcggttaggattcctggttttcacccaggtg

SEQ ID NO: 13278 - DNA, 17 bp, Homo sapiens
  source 1..17: mol_type = genomic DNA
ctagctcagccggtaga

SEQ ID NO: 13279 - DNA, 16 bp, Homo sapiens
  source 1..16: mol_type = genomic DNA
ctagctcagtcggtag

SEQ ID NO: 13280 - DNA, 17 bp, Homo sapiens
  source 1..17: mol_type = genomic DNA
ctagctcagtcggtaga

SEQ ID NO: 13281 - DNA, 18 bp, Homo sapiens
  source 1..18: mol_type = genomic DNA
ctagctcagtcggtagag

SEQ ID NO: 13282 - DNA, 19 bp, Homo sapiens
  source 1..19: mol_type = genomic DNA
ctagctcagtcggtagagc

SEQ ID NO: 13283 - DNA, 22 bp, Homo sapiens
  source 1..22: mol_type = genomic DNA
ctagctcagtcggtagagcatg

SEQ ID NO: 13284 - DNA, 26 bp, Homo sapiens
  source 1..26: mol_type = genomic DNA
ctagctcagtcggtagagcatgagac

SEQ ID NO: 13285 - DNA, 27 bp, Homo sapiens
  source 1..27: mol_type = genomic DNA
ctagctcagtcggtagagcatgagacc

SEQ ID NO: 13286 - DNA, 28 bp, Homo sapiens
  source 1..28: mol_type = genomic DNA
ctagctcagtcggtagagcatgagaccc

SEQ ID NO: 13287 - DNA, 29 bp, Homo sapiens
  source 1..29: mol_type = genomic DNA
ctagctcagtcggtagagcatgagaccct

SEQ ID NO: 13288 - DNA, 27 bp, Homo sapiens
  source 1..27: mol_type = genomic DNA
ctagctcagtcggtagagcatgagact

SEQ ID NO: 13289 - DNA, 28 bp, Homo sapiens
  source 1..28: mol_type = genomic DNA
ctagctcagtcggtagagcatgagactc

SEQ ID NO: 13290 - DNA, 29 bp, Homo sapiens
  source 1..29: mol_type = genomic DNA
ctagctcagtcggtagagcatgagactct

SEQ ID NO: 13291 - DNA, 30 bp, Homo sapiens
  source 1..30: mol_type = genomic DNA
ctagctcagtcggtagagcatgagactctt

SEQ ID NO: 13292 - DNA, 31 bp, Homo sapiens
  source 1..31: mol_type = genomic DNA
ctagctcagtcggtagagcatgagactctta

SEQ ID NO: 13293 - DNA, 32 bp, Homo sapiens
  source 1..32: mol_type = genomic DNA
ctagctcagtcggtagagcatgagactcttaa

SEQ ID NO: 13294 - DNA, 33 bp, Homo sapiens
  source 1..33: mol_type = genomic DNA
ctagctcagtcggtagagcatgagactcttaat

SEQ ID NO: 13295 - DNA, 34 bp, Homo sapiens
  source 1..34: mol_type = genomic DNA
ctagctcagtcggtagagcatgagactcttaatc

SEQ ID NO: 13296 - DNA, 46 bp, Homo sapiens
  source 1..46: mol_type = genomic DNA
ctagctcagtcggtagagcatgagactcttaatctcagggtcgtgg

SEQ ID NO: 13297 - DNA, 48 bp, Homo sapiens
  source 1..48: mol_type = genomic DNA
ctagctcagtcggtagagcatgagactcttaatctcagggtcgtgggt

SEQ ID NO: 13298 - DNA, 25 bp, Homo sapiens
  source 1..25: mol_type = genomic DNA
ctagctcagtcggtagagcatggga

SEQ ID NO: 13299 - DNA, 26 bp, Homo sapiens
  source 1..26: mol_type = genomic DNA
ctagctcagtcggtagagcatgggac

SEQ ID NO: 13300 - DNA, 27 bp, Homo sapiens
  source 1..27: mol_type = genomic DNA
ctagctcagtcggtagagcatgggact

SEQ ID NO: 13301 - DNA, 28 bp, Homo sapiens
  source 1..28: mol_type = genomic DNA
ctagctcagtcggtagagcatgggactc

SEQ ID NO: 13302 - DNA, 29 bp, Homo sapiens
  source 1..29: mol_type = genomic DNA
ctagctcagtcggtagagcatgggactct

SEQ ID NO: 13303 - DNA, 30 bp, Homo sapiens
  source 1..30: mol_type = genomic DNA
ctagctcagtcggtagagcatgggactctt

SEQ ID NO: 13304 - DNA, 32 bp, Homo sapiens
  source 1..32: mol_type = genomic DNA
ctagctcagtcggtagagcatgggactcttaa

SEQ ID NO: 13305 - DNA, 43 bp, Homo sapiens
  source 1..43: mol_type = genomic DNA
ctagctcagtcggtagagcatgggactcttaatcccagggtcg

SEQ ID NO: 13306 - DNA, 44 bp, Homo sapiens
  source 1..44: mol_type = genomic DNA
ctagctcagtcggtagagcatgggactcttaatcccagggtcgt

SEQ ID NO: 13307 - DNA, 46 bp, Homo sapiens
  source 1..46: mol_type = genomic DNA
ctagctcagtcggtagagcatgggactcttaatcccagggtcgtgg

SEQ ID NO: 13308 - DNA, 48 bp, Homo sapiens
  source 1..48: mol_type = genomic DNA
ctagctcagtcggtagagcatgggactcttaatcccagggtcgtgggt

SEQ ID NO: 13309 - DNA, 22 bp, Homo sapiens
  source 1..22: mol_type = genomic DNA
ctaggatggggtgtgataggtg

SEQ ID NO: 13310 - DNA, 31 bp, Homo sapiens
  source 1..31: mol_type = genomic DNA
ctaggatggggtgtgataggtggcacggaga

SEQ ID NO: 13311 - DNA, 32 bp, Homo sapiens
  source 1..32: mol_type = genomic DNA
ctaggatggggtgtgataggtggcacggagaa

SEQ ID NO: 13312 - DNA, 33 bp, Homo sapiens
  source 1..33: mol_type = genomic DNA
ctaggatggggtgtgataggtggcacggagaat

SEQ ID NO: 13313 - DNA, 34 bp, Homo sapiens
  source 1..34: mol_type = genomic DNA
ctaggatggggtgtgataggtggcacggagaatt

SEQ ID NO: 13314 - DNA, 35 bp, Homo sapiens
  source 1..35: mol_type = genomic DNA
ctaggatggggtgtgataggtggcacggagaattt

SEQ ID NO: 13315 - DNA, 36 bp, Homo sapiens
  source 1..36: mol_type = genomic DNA
ctaggatggggtgtgataggtggcacggagaatttt

SEQ ID NO: 13316 - DNA, 37 bp, Homo sapiens
  source 1..37: mol_type = genomic DNA
ctaggatggggtgtgataggtggcacggagaattttg

SEQ ID NO: 13317 - DNA, 16 bp, Homo sapiens
  source 1..16: mol_type = genomic DNA
ctaggattcggcgctt

SEQ ID NO: 13318 - DNA, 18 bp, Homo sapiens
  source 1..18: mol_type = genomic DNA
ctaggattcggcgctttc

SEQ ID NO: 13319 - DNA, 21 bp, Homo sapiens
  source 1..21: mol_type = genomic DNA
ctaggattcggcgctttcacc

SEQ ID NO: 13320 - DNA, 22 bp, Homo sapiens
  source 1..22: mol_type = genomic DNA
ctaggattcggcgctttcaccg

SEQ ID NO: 13321 - DNA, 37 bp, Homo sapiens
  source 1..37: mol_type = genomic DNA
ctaggattcggcgctttcaccgccgcggcccgggttc

SEQ ID NO: 13322 - DNA, 16 bp, Homo sapiens
  source 1..16: mol_type = genomic DNA
ctaggggtatgattct

SEQ ID NO: 13323 - DNA, 17 bp, Homo sapiens
  source 1..17: mol_type = genomic DNA
ctaggggtatgattctc

SEQ ID NO: 13324 - DNA, 18 bp, Homo sapiens
  source 1..18: mol_type = genomic DNA
ctaggggtatgattctcg

SEQ ID NO: 13325 - DNA, 19 bp, Homo sapiens
  source 1..19: mol_type = genomic DNA
ctaggggtatgattctcgc

SEQ ID NO: 13326 - DNA, 20 bp, Homo sapiens
  source 1..20: mol_type = genomic DNA
ctaggggtatgattctcgct

SEQ ID NO: 13327 - DNA, 21 bp, Homo sapiens
  source 1..21: mol_type = genomic DNA
ctaggggtatgattctcgctt

SEQ ID NO: 13328 - DNA, 24 bp, Homo sapiens
  source 1..24: mol_type = genomic DNA
ctaggggtatgattctcgcttcgg

SEQ ID NO: 13329 - DNA, 24 bp, Homo sapiens
  source 1..24: mol_type = genomic DNA
ctaggggtatgattctcgctttgg

SEQ ID NO: 13330 - DNA, 20 bp, Homo sapiens
  source 1..20: mol_type = genomic DNA
ctaggggtatgattctcggt

SEQ ID NO: 13331 - DNA, 21 bp, Homo sapiens
  source 1..21: mol_type = genomic DNA
ctaggggtatgattctcggtt

SEQ ID NO: 13332 - DNA, 23 bp, Homo sapiens
  source 1..23: mol_type = genomic DNA
ctaggggtatgattctcggtttg

SEQ ID NO: 13333 - DNA, 24 bp, Homo sapiens
  source 1..24: mol_type = genomic DNA
ctaggggtatgattctcggtttgg

SEQ ID NO: 13334 - DNA, 24 bp, Homo sapiens
  source 1..24: mol_type = genomic DNA
ctaggttcgactcctggctggctc

SEQ ID NO: 13335 - DNA, 27 bp, Homo sapiens
  source 1..27: mol_type = genomic DNA
ctaggttcgactcctggctggctcgcc

SEQ ID NO: 13336 - DNA, 28 bp, Homo sapiens
  source 1..28: mol_type = genomic DNA
ctaggttcgactcctggctggctcgcca

SEQ ID NO: 13337 - DNA, 16 bp, Homo sapiens
  source 1..16: mol_type = genomic DNA
ctagtggctaggattc

SEQ ID NO: 13338 - DNA, 17 bp, Homo sapiens
  source 1..17: mol_type = genomic DNA
ctagtggctaggattcg

SEQ ID NO: 13339 - DNA, 19 bp, Homo sapiens
  source 1..19: mol_type = genomic DNA
ctagtggctaggattcggc

SEQ ID NO: 13340 - DNA, 20 bp, Homo sapiens
  source 1..20: mol_type = genomic DNA
ctagtggctaggattcggcg

SEQ ID NO: 13341 - DNA, 21 bp, Homo sapiens
  source 1..21: mol_type = genomic DNA
ctagtggctaggattcggcgc

SEQ ID NO: 13342 - DNA, 22 bp, Homo sapiens
  source 1..22: mol_type = genomic DNA
ctagtggctaggattcggcgct

SEQ ID NO: 13343 - DNA, 24 bp, Homo sapiens
  source 1..24: mol_type = genomic DNA
ctagtggctaggattcggcgcttt

SEQ ID NO: 13344 - DNA, 25 bp, Homo sapiens
  source 1..25: mol_type = genomic DNA
ctagtggctaggattcggcgctttc

SEQ ID NO: 13345 - DNA, 27 bp, Homo sapiens
  source 1..27: mol_type = genomic DNA
ctagtggctaggattcggcgctttcac

SEQ ID NO: 13346 - DNA, 28 bp, Homo sapiens
  source 1..28: mol_type = genomic DNA
ctagtggctaggattcggcgctttcacc

SEQ ID NO: 13347 - DNA, 29 bp, Homo sapiens
  source 1..29: mol_type = genomic DNA
ctagtggctaggattcggcgctttcaccg

SEQ ID NO: 13348 - DNA, 21 bp, Homo sapiens
  source 1..21: mol_type = genomic DNA
ctagtggtatgattctcgctt

SEQ ID NO: 13349 - DNA, 16 bp, Homo sapiens
  source 1..16: mol_type = genomic DNA
ctagtggttaggattc

SEQ ID NO: 13350 - DNA, 17 bp, Homo sapiens
  source 1..17: mol_type = genomic DNA
ctagtggttaggattcg

SEQ ID NO: 13351 - DNA, 18 bp, Homo sapiens
  source 1..18: mol_type = genomic DNA
ctagtggttaggattcgg

SEQ ID NO: 13352 - DNA, 19 bp, Homo sapiens
  source 1..19: mol_type = genomic DNA
ctagtggttaggattcggc

SEQ ID NO: 13353 - DNA, 20 bp, Homo sapiens
  source 1..20: mol_type = genomic DNA
ctagtggttaggattcggcg

SEQ ID NO: 13354 - DNA, 21 bp, Homo sapiens
  source 1..21: mol_type = genomic DNA
ctagtggttaggattcggcgc

SEQ ID NO: 13355 - DNA, 22 bp, Homo sapiens
  source 1..22: mol_type = genomic DNA
ctagtggttaggattcggcgct

SEQ ID NO: 13356 - DNA, 23 bp, Homo sapiens
  source 1..23: mol_type = genomic DNA
ctagtggttaggattcggcgctc

SEQ ID NO: 13357 - DNA, 24 bp, Homo sapiens
  source 1..24: mol_type = genomic DNA
ctagtggttaggattcggcgctct

SEQ ID NO: 13358 - DNA, 25 bp, Homo sapiens
  source 1..25: mol_type = genomic DNA
ctagtggttaggattcggcgctctc

SEQ ID NO: 13359 - DNA, 26 bp, Homo sapiens
  source 1..26: mol_type = genomic DNA
ctagtggttaggattcggcgctctca

SEQ ID NO: 13360 - DNA, 27 bp, Homo sapiens
  source 1..27: mol_type = genomic DNA
ctagtggttaggattcggcgctctcac

SEQ ID NO: 13361 - DNA, 28 bp, Homo sapiens
  source 1..28: mol_type = genomic DNA
ctagtggttaggattcggcgctctcacc

SEQ ID NO: 13362 - DNA, 29 bp, Homo sapiens
  source 1..29: mol_type = genomic DNA
ctagtggttaggattcggcgctctcaccg

SEQ ID NO: 13363 - DNA, 31 bp, Homo sapiens
  source 1..31: mol_type = genomic DNA
ctagtggttaggattcggcgctctcaccgcc

SEQ ID NO: 13364 - DNA, 32 bp, Homo sapiens
  source 1..32: mol_type = genomic DNA
ctagtggttaggattcggcgctctcaccgccg

SEQ ID NO: 13365 - DNA, 38 bp, Homo sapiens
  source 1..38: mol_type = genomic DNA
ctagtggttaggattcggcgctctcaccgccgcggccc

SEQ ID NO: 13366 - DNA, 39 bp, Homo sapiens
  source 1..39: mol_type = genomic DNA
ctagtggttaggattcggcgctctcaccgccgcggcccg

SEQ ID NO: 13367 - DNA, 42 bp, Homo sapiens
  source 1..42: mol_type = genomic DNA
ctagtggttaggattcggcgctctcaccgccgcggcccgggt

SEQ ID NO: 13368 - DNA, 43 bp, Homo sapiens
  source 1..43: mol_type = genomic DNA
ctagtggttaggattcggcgctctcaccgccgcggcccgggtt

SEQ ID NO: 13369 - DNA, 44 bp, Homo sapiens
  source 1..44: mol_type = genomic DNA
ctagtggttaggattcggcgctctcaccgccgcggcccgggttc

SEQ ID NO: 13370 - DNA, 18 bp, Homo sapiens
  source 1..18: mol_type = genomic DNA
ctagttttgacaacattc

SEQ ID NO: 13371 - DNA, 23 bp, Homo sapiens
  source 1..23: mol_type = genomic DNA
ctagttttgacaacattcaaaaa

SEQ ID NO: 13372 - DNA, 25 bp, Homo sapiens
  source 1..25: mol_type = genomic DNA
ctagttttgacaacattcaaaaaag

SEQ ID NO: 13373 - DNA, 27 bp, Homo sapiens
  source 1..27: mol_type = genomic DNA
ctagttttgacaacattcaaaaaagag

SEQ ID NO: 13374 - DNA, 28 bp, Homo sapiens
  source 1..28: mol_type = genomic DNA
ctagttttgacaacattcaaaaaagagt

SEQ ID NO: 13375 - DNA, 29 bp, Homo sapiens
  source 1..29: mol_type = genomic DNA
ctagttttgacaacattcaaaaaagagta

SEQ ID NO: 13376 - DNA, 30 bp, Homo sapiens
  source 1..30: mol_type = genomic DNA
ctagttttgacaacattcaaaaaagagtac

SEQ ID NO: 13377 - DNA, 31 bp, Homo sapiens
  source 1..31: mol_type = genomic DNA
ctagttttgacaacattcaaaaaagagtacc

SEQ ID NO: 13378 - DNA, 32 bp, Homo sapiens
  source 1..32: mol_type = genomic DNA
ctagttttgacaacattcaaaaaagagtacca

SEQ ID NO: 13379 - DNA, 28 bp, Homo sapiens
  source 1..28: mol_type = genomic DNA
ctatagctcaggggttagagcactggtc

SEQ ID NO: 13380 - DNA, 29 bp, Homo sapiens
  source 1..29: mol_type = genomic DNA
ctatagctcaggggttagagcactggtct

SEQ ID NO: 13381 - DNA, 16 bp, Homo sapiens
  source 1..16: mol_type = genomic DNA
ctatccattggtctta

SEQ ID NO: 13382 - DNA, 17 bp, Homo sapiens
  source 1..17: mol_type = genomic DNA
ctatccattggtcttag

SEQ ID NO: 13383 - DNA, 18 bp, Homo sapiens
  source 1..18: mol_type = genomic DNA
ctatccattggtcttagg

SEQ ID NO: 13384 - DNA, 19 bp, Homo sapiens
  source 1..19: mol_type = genomic DNA
ctatccattggtcttaggc

SEQ ID NO: 13385 - DNA, 20 bp, Homo sapiens
  source 1..20: mol_type = genomic DNA
ctatccattggtcttaggcc

SEQ ID NO: 13386 - DNA, 21 bp, Homo sapiens
  source 1..21: mol_type = genomic DNA
ctatccattggtcttaggccc

SEQ ID NO: 13387 - DNA, 22 bp, Homo sapiens
  source 1..22: mol_type = genomic DNA
ctatccattggtcttaggcccc

SEQ ID NO: 13388 - DNA, 23 bp, Homo sapiens
  source 1..23: mol_type = genomic DNA
ctatccattggtcttaggcccca

SEQ ID NO: 13389 - DNA, 25 bp, Homo sapiens
  source 1..25: mol_type = genomic DNA
ctatccattggtcttaggccccaaa

SEQ ID NO: 13390 - DNA, 26 bp, Homo sapiens
  source 1..26: mol_type = genomic DNA
ctatccattggtcttaggccccaaaa

SEQ ID NO: 13391 - DNA, 27 bp, Homo sapiens
  source 1..27: mol_type = genomic DNA
ctatccattggtcttaggccccaaaaa

SEQ ID NO: 13392 - DNA, 28 bp, Homo sapiens
  source 1..28: mol_type = genomic DNA
ctatccattggtcttaggccccaaaaat

SEQ ID NO: 13393 - DNA, 29 bp, Homo sapiens
  source 1..29: mol_type = genomic DNA
ctatccattggtcttaggccccaaaaatt

SEQ ID NO: 13394 - DNA, 32 bp, Homo sapiens
  source 1..32: mol_type = genomic DNA
ctatccattggtcttaggccccaaaaattttg

SEQ ID NO: 13395 - DNA, 33 bp, Homo sapiens
  source 1..33: mol_type = genomic DNA
ctatccattggtcttaggccccaaaaattttgg

SEQ ID NO: 13396 - DNA, 35 bp, Homo sapiens
  source 1..35: mol_type = genomic DNA
ctatccattggtcttaggccccaaaaattttggtg

SEQ ID NO: 13397 - DNA, 37 bp, Homo sapiens
  source 1..37: mol_type = genomic DNA
ctatccattggtcttaggccccaaaaattttggtgca

SEQ ID NO: 13398 - DNA, 47 bp, Homo sapiens
  source 1..47: mol_type = genomic DNA
ctatccattggtcttaggccccaaaaattttggtgcaactccaaata

SEQ ID NO: 13399 - DNA, 16 bp, Homo sapiens
  source 1..16: mol_type = genomic DNA
ctatcgggcccatacc

SEQ ID NO: 13400 - DNA, 17 bp, Homo sapiens
  source 1..17: mol_type = genomic DNA
ctatcgggcccataccc

SEQ ID NO: 13401 - DNA, 18 bp, Homo sapiens
  source 1..18: mol_type = genomic DNA
ctatcgggcccatacccc

SEQ ID NO: 13402 - DNA, 19 bp, Homo sapiens
  source 1..19: mol_type = genomic DNA
ctatcgggcccataccccg

SEQ ID NO: 13403 - DNA, 20 bp, Homo sapiens
  source 1..20: mol_type = genomic DNA
ctatcgggcccataccccga

SEQ ID NO: 13404 - DNA, 21 bp, Homo sapiens
  source 1..21: mol_type = genomic DNA
ctatcgggcccataccccgaa

SEQ ID NO: 13405 - DNA, 22 bp, Homo sapiens
  source 1..22: mol_type = genomic DNA
ctatcgggcccataccccgaaa

SEQ ID NO: 13406 - DNA, 23 bp, Homo sapiens
  source 1..23: mol_type = genomic DNA
ctatcgggcccataccccgaaaa

SEQ ID NO: 13407 - DNA, 24 bp, Homo sapiens
  source 1..24: mol_type = genomic DNA
ctatcgggcccataccccgaaaat

SEQ ID NO: 13408 - DNA, 25 bp, Homo sapiens
  source 1..25: mol_type = genomic DNA
ctatcgggcccataccccgaaaatg

SEQ ID NO: 13409 - DNA, 26 bp, Homo sapiens
  source 1..26: mol_type = genomic DNA
ctatcgggcccataccccgaaaatgt

SEQ ID NO: 13410 - DNA, 27 bp, Homo sapiens
  source 1..27: mol_type = genomic DNA
ctatcgggcccataccccgaaaatgtt

SEQ ID NO: 13411 - DNA, 28 bp, Homo sapiens
  source 1..28: mol_type = genomic DNA
ctatcgggcccataccccgaaaatgttg

SEQ ID NO: 13412 - DNA, 29 bp, Homo sapiens
  source 1..29: mol_type = genomic DNA
ctatcgggcccataccccgaaaatgttgg

SEQ ID NO: 13413 - DNA, 30 bp, Homo sapiens
  source 1..30: mol_type = genomic DNA
ctatcgggcccataccccgaaaatgttggt

SEQ ID NO: 13414 - DNA, 31 bp, Homo sapiens
  source 1..31: mol_type = genomic DNA
ctatcgggcccataccccgaaaatgttggtt

SEQ ID NO: 13415 - DNA, 32 bp, Homo sapiens
  source 1..32: mol_type = genomic DNA
ctatcgggcccataccccgaaaatgttggtta

SEQ ID NO: 13416 - DNA, 33 bp, Homo sapiens
  source 1..33: mol_type = genomic DNA
ctatcgggcccataccccgaaaatgttggttat

SEQ ID NO: 13417 - DNA, 34 bp, Homo sapiens
  source 1..34: mol_type = genomic DNA
ctatcgggcccataccccgaaaatgttggttata

SEQ ID NO: 13418 - DNA, 35 bp, Homo sapiens
  source 1..35: mol_type = genomic DNA
ctatcgggcccataccccgaaaatgttggttatac

SEQ ID NO: 13419 - DNA, 36 bp, Homo sapiens
  source 1..36: mol_type = genomic DNA
ctatcgggcccataccccgaaaatgttggttatacc

SEQ ID NO: 13420 - DNA, 37 bp, Homo sapiens
  source 1..37: mol_type = genomic DNA
ctatcgggcccataccccgaaaatgttggttataccc

SEQ ID NO: 13421 - DNA, 38 bp, Homo sapiens
  source 1..38: mol_type = genomic DNA
ctatcgggcccataccccgaaaatgttggttataccct

SEQ ID NO: 13422 - DNA, 40 bp, Homo sapiens
  source 1..40: mol_type = genomic DNA
ctatcgggcccataccccgaaaatgttggttatacccttc

SEQ ID NO: 13423 - DNA, 42 bp, Homo sapiens
  source 1..42: mol_type = genomic DNA
ctatcgggcccataccccgaaaatgttggttatacccttccc

SEQ ID NO: 13424 - DNA, 46 bp, Homo sapiens
  source 1..46: mol_type = genomic DNA
ctatcgggcccataccccgaaaatgttggttatacccttcccgtac

SEQ ID NO: 13425 - DNA, 47 bp, Homo sapiens
  source 1..47: mol_type = genomic DNA
ctatcgggcccataccccgaaaatgttggttatacccttcccgtact

SEQ ID NO: 13426 - DNA, 16 bp, Homo sapiens
  source 1..16: mol_type = genomic DNA
ctcaaagcaatacact

SEQ ID NO: 13427 - DNA, 17 bp, Homo sapiens
  source 1..17: mol_type = genomic DNA
ctcaaagcaatacactg

SEQ ID NO: 13428 - DNA, 18 bp, Homo sapiens
  source 1..18: mol_type = genomic DNA
ctcaaagcaatacactga

SEQ ID NO: 13429 - DNA, 19 bp, Homo sapiens
  source 1..19: mol_type = genomic DNA
ctcaaagcaatacactgaa

SEQ ID NO: 13430 - DNA, 31 bp, Homo sapiens
  source 1..31: mol_type = genomic DNA
ctcaaagcaatacactgaaaatgtttagacg

SEQ ID NO: 13431 - DNA, 35 bp, Homo sapiens
  source 1..35: mol_type = genomic DNA
ctcaaagcaatacactgaaaatgtttagacgggct

SEQ ID NO: 13432 - DNA, 36 bp, Homo sapiens
  source 1..36: mol_type = genomic DNA
ctcaaagcaatacactgaaaatgtttagacgggctc

SEQ ID NO: 13433 - DNA, 37 bp, Homo sapiens
  source 1..37: mol_type = genomic DNA
ctcaaagcaatacactgaaaatgtttagacgggctca

SEQ ID NO: 13434 - DNA, 38 bp, Homo sapiens
  source 1..38: mol_type = genomic DNA
ctcaaagcaatacactgaaaatgtttagacgggctcac

SEQ ID NO: 13435 - DNA, 45 bp, Homo sapiens
  source 1..45: mol_type = genomic DNA
ctcaaagcaatacactgaaaatgtttagacgggctcacatcaccc

SEQ ID NO: 13436 - DNA, 16 bp, Homo sapiens
  source 1..16: mol_type = genomic DNA
ctcaagttctggtctc

SEQ ID NO: 13437 - DNA, 17 bp, Homo sapiens
  source 1..17: mol_type = genomic DNA
ctcaagttctggtctcc

SEQ ID NO: 13438 - DNA, 18 bp, Homo sapiens
  source 1..18: mol_type = genomic DNA
ctcaagttctggtctcca

SEQ ID NO: 13439 - DNA, 21 bp, Homo sapiens
  source 1..21: mol_type = genomic DNA
ctcaagttctggtctccaatg

SEQ ID NO: 13440 - DNA, 32 bp, Homo sapiens
  source 1..32: mol_type = genomic DNA
ctcaagttctggtctccaatggaggcgtgggt

SEQ ID NO: 13441 - DNA, 18 bp, Homo sapiens
  source 1..18: mol_type = genomic DNA
ctcaagttctggtctccg

SEQ ID NO: 13442 - DNA, 19 bp, Homo sapiens
  source 1..19: mol_type = genomic DNA
ctcaagttctggtctccgg

SEQ ID NO: 13443 - DNA, 20 bp, Homo sapiens
  source 1..20: mol_type = genomic DNA
ctcaagttctggtctccgga

SEQ ID NO: 13444 - DNA, 21 bp, Homo sapiens
  source 1..21: mol_type = genomic DNA
ctcaagttctggtctccggat

SEQ ID NO: 13445 - DNA, 22 bp, Homo sapiens
  source 1..22: mol_type = genomic DNA
ctcaagttctggtctccggatg

SEQ ID NO: 13446 - DNA, 28 bp, Homo sapiens
  source 1..28: mol_type = genomic DNA
ctcaagttctggtctccggatggaggcg

SEQ ID NO: 13447 - DNA, 33 bp, Homo sapiens
  source 1..33: mol_type = genomic DNA
ctcaagttctggtctccggatggaggcgtgggt

SEQ ID NO: 13448 - DNA, 16 bp, Homo sapiens
  source 1..16: mol_type = genomic DNA
ctcacaagaactgcta

SEQ ID NO: 13449 - DNA, 17 bp, Homo sapiens
  source 1..17: mol_type = genomic DNA
ctcacaagaactgctaa

SEQ ID NO: 13450 - DNA, 18 bp, Homo sapiens
  source 1..18: mol_type = genomic DNA
ctcacaagaactgctaac

SEQ ID NO: 13451 - DNA, 19 bp, Homo sapiens
  source 1..19: mol_type = genomic DNA
ctcacaagaactgctaact

SEQ ID NO: 13452 - DNA, 20 bp, Homo sapiens
  source 1..20: mol_type = genomic DNA
ctcacaagaactgctaactc

SEQ ID NO: 13453 - DNA, 21 bp, Homo sapiens
  source 1..21: mol_type = genomic DNA
ctcacaagaactgctaactca

SEQ ID NO: 13454 - DNA, 22 bp, Homo sapiens
  source 1..22: mol_type = genomic DNA
ctcacaagaactgctaactcat

SEQ ID NO: 13455 - DNA, 23 bp, Homo sapiens
  source 1..23: mol_type = genomic DNA
ctcacaagaactgctaactcatg

SEQ ID NO: 13456 - DNA, 24 bp, Homo sapiens
  source 1..24: mol_type = genomic DNA
ctcacaagaactgctaactcatgc

SEQ ID NO: 13457 - DNA, 25 bp, Homo sapiens
  source 1..25: mol_type = genomic DNA
ctcacaagaactgctaactcatgcc

SEQ ID NO: 13458 - DNA, 26 bp, Homo sapiens
  source 1..26: mol_type = genomic DNA
ctcacaagaactgctaactcatgccc

SEQ ID NO: 13459 - DNA, 27 bp, Homo sapiens
  source 1..27: mol_type = genomic DNA
ctcacaagaactgctaactcatgcccc

SEQ ID NO: 13460 - DNA, 28 bp, Homo sapiens
  source 1..28: mol_type = genomic DNA
ctcacaagaactgctaactcatgccccc

SEQ ID NO: 13461 - DNA, 29 bp, Homo sapiens
  source 1..29: mol_type = genomic DNA
ctcacaagaactgctaactcatgccccca

SEQ ID NO: 13462 - DNA, 30 bp, Homo sapiens
  source 1..30: mol_type = genomic DNA
ctcacaagaactgctaactcatgcccccat

SEQ ID NO: 13463 - DNA, 31 bp, Homo sapiens
  source 1..31: mol_type = genomic DNA
ctcacaagaactgctaactcatgcccccatg

SEQ ID NO: 13464 - DNA, 32 bp, Homo sapiens
  source 1..32: mol_type = genomic DNA
ctcacaagaactgctaactcatgcccccatgt

SEQ ID NO: 13465 - DNA, 33 bp, Homo sapiens
  source 1..33: mol_type = genomic DNA
ctcacaagaactgctaactcatgcccccatgtc

SEQ ID NO: 13466 - DNA, 34 bp, Homo sapiens
  source 1..34: mol_type = genomic DNA
ctcacaagaactgctaactcatgcccccatgtct

SEQ ID NO: 13467 - DNA, 35 bp, Homo sapiens
  source 1..35: mol_type = genomic DNA
ctcacaagaactgctaactcatgcccccatgtcta

SEQ ID NO: 13468 - DNA, 36 bp, Homo sapiens
  source 1..36: mol_type = genomic DNA
ctcacaagaactgctaactcatgcccccatgtctaa

SEQ ID NO: 13469 - DNA, 37 bp, Homo sapiens
  source 1..37: mol_type = genomic DNA
ctcacaagaactgctaactcatgcccccatgtctaac

SEQ ID NO: 13470 - DNA, 38 bp, Homo sapiens
  source 1..38: mol_type = genomic DNA
ctcacaagaactgctaactcatgcccccatgtctaaca

SEQ ID NO: 13471 - DNA, 39 bp, Homo sapiens
  source 1..39: mol_type = genomic DNA
ctcacaagaactgctaactcatgcccccatgtctaacaa

SEQ ID NO: 13472 - DNA, 40 bp, Homo sapiens
  source 1..40: mol_type = genomic DNA
ctcacaagaactgctaactcatgcccccatgtctaacaac

SEQ ID NO: 13473 - DNA, 41 bp, Homo sapiens
  source 1..41: mol_type = genomic DNA
ctcacaagaactgctaactcatgcccccatgtctaacaaca

SEQ ID NO: 13474 - DNA, 42 bp, Homo sapiens
  source 1..42: mol_type = genomic DNA
ctcacaagaactgctaactcatgcccccatgtctaacaacat

SEQ ID NO: 13475 - DNA, 43 bp, Homo sapiens
  source 1..43: mol_type = genomic DNA
ctcacaagaactgctaactcatgcccccatgtctaacaacatg

SEQ ID NO: 13476 - DNA, 44 bp, Homo sapiens
  source 1..44: mol_type = genomic DNA
ctcacaagaactgctaactcatgcccccatgtctaacaacatgg

SEQ ID NO: 13477 - DNA, 45 bp, Homo sapiens
  source 1..45: mol_type = genomic DNA
ctcacaagaactgctaactcatgcccccatgtctaacaacatggc

SEQ ID NO: 13478 - DNA, 46 bp, Homo sapiens
  source 1..46: mol_type = genomic DNA
ctcacaagaactgctaactcatgcccccatgtctaacaacatggct

SEQ ID NO: 13479 - DNA, 47 bp, Homo sapiens
  source 1..47: mol_type = genomic DNA
ctcacaagaactgctaactcatgcccccatgtctaacaacatggctt

SEQ ID NO: 13480 - DNA, 48 bp, Homo sapiens
  source 1..48: mol_type = genomic DNA
ctcacaagaactgctaactcatgcccccatgtctaacaacatggcttt

SEQ ID NO: 13481 - DNA, 23 bp, Homo sapiens
  source 1..23: mol_type = genomic DNA
ctcacacgcgaaaggtccccggt

SEQ ID NO: 13482 - DNA, 16 bp, Homo sapiens
  source 1..16: mol_type = genomic DNA
ctcacacggggcacca

SEQ ID NO: 13483 - DNA, 16 bp, Homo sapiens
  source 1..16: mol_type = genomic DNA
ctcacatcaccccata

SEQ ID NO: 13484 - DNA, 17 bp, Homo sapiens
  source 1..17: mol_type = genomic DNA
ctcacatcaccccataa

SEQ ID NO: 13485 - DNA, 18 bp, Homo sapiens
  source 1..18: mol_type = genomic DNA
ctcacatcaccccataaa

SEQ ID NO: 13486 - DNA, 19 bp, Homo sapiens
  source 1..19: mol_type = genomic DNA
ctcacatcaccccataaac

SEQ ID NO: 13487 - DNA, 20 bp, Homo sapiens
  source 1..20: mol_type = genomic DNA
ctcacatcaccccataaaca

SEQ ID NO: 13488 - DNA, 21 bp, Homo sapiens
  source 1..21: mol_type = genomic DNA
ctcacatcaccccataaacac

SEQ ID NO: 13489 - DNA, 22 bp, Homo sapiens
  source 1..22: mol_type = genomic DNA
ctcacatcaccccataaacacc

SEQ ID NO: 13490 - DNA, 23 bp, Homo sapiens
  source 1..23: mol_type = genomic DNA
ctcacatcaccccataaacacca

SEQ ID NO: 13491 - DNA, 16 bp, Homo sapiens
  source 1..16: mol_type = genomic DNA
ctcaccgccgcggccc

SEQ ID NO: 13492 - DNA, 17 bp, Homo sapiens
  source 1..17: mol_type = genomic DNA
ctcaccgccgcggcccg

SEQ ID NO: 13493 - DNA, 18 bp, Homo sapiens
  source 1..18: mol_type = genomic DNA
ctcaccgccgcggcccgg

SEQ ID NO: 13494 - DNA, 20 bp, Homo sapiens
  source 1..20: mol_type = genomic DNA
ctcaccgccgcggcccgggt

SEQ ID NO: 13495 - DNA, 21 bp, Homo sapiens
  source 1..21: mol_type = genomic DNA
ctcaccgccgcggcccgggtt

SEQ ID NO: 13496 - DNA, 22 bp, Homo sapiens
  source 1..22: mol_type = genomic DNA
ctcaccgccgcggcccgggttc

SEQ ID NO: 13497 - DNA, 23 bp, Homo sapiens
  source 1..23: mol_type = genomic DNA
ctcaccgccgcggcccgggttcg

SEQ ID NO: 13498 - DNA, 25 bp, Homo sapiens
  source 1..25: mol_type = genomic DNA
ctcaccgccgcggcccgggttcgat

SEQ ID NO: 13499 - DNA, 27 bp, Homo sapiens
  source 1..27: mol_type = genomic DNA
ctcaccgccgcggcccgggttcgattc

SEQ ID NO: 13500 - DNA, 30 bp, Homo sapiens
  source 1..30: mol_type = genomic DNA
ctcaccgccgcggcccgggttcgattcccg

SEQ ID NO: 13501 - DNA, 31 bp, Homo sapiens
  source 1..31: mol_type = genomic DNA
ctcaccgccgcggcccgggttcgattcccgg

SEQ ID NO: 13502 - DNA, 32 bp, Homo sapiens
  source 1..32: mol_type = genomic DNA
ctcaccgccgcggcccgggttcgattcccggt

SEQ ID NO: 13503 - DNA, 33 bp, Homo sapiens
  source 1..33: mol_type = genomic DNA
ctcaccgccgcggcccgggttcgattcccggtc

SEQ ID NO: 13504 - DNA, 34 bp, Homo sapiens
  source 1..34: mol_type = genomic DNA
ctcaccgccgcggcccgggttcgattcccggtca

SEQ ID NO: 13505 - DNA, 35 bp, Homo sapiens
  source 1..35: mol_type = genomic DNA
ctcaccgccgcggcccgggttcgattcccggtcag

SEQ ID NO: 13506 - DNA, 36 bp, Homo sapiens
  source 1..36: mol_type = genomic DNA
ctcaccgccgcggcccgggttcgattcccggtcagg

SEQ ID NO: 13507 - DNA, 38 bp, Homo sapiens
  source 1..38: mol_type = genomic DNA
ctcaccgccgcggcccgggttcgattcccggtcaggga

SEQ ID NO: 13508 - DNA, 39 bp, Homo sapiens
  source 1..39: mol_type = genomic DNA
ctcaccgccgcggcccgggttcgattcccggtcagggaa

SEQ ID NO: 13509 - DNA, 40 bp, Homo sapiens
  source 1..40: mol_type = genomic DNA
ctcaccgccgcggcccgggttcgattcccggtcagggaac

SEQ ID NO: 13510 - DNA, 41 bp, Homo sapiens
  source 1..41: mol_type = genomic DNA
ctcaccgccgcggcccgggttcgattcccggtcagggaacc

SEQ ID NO: 13511 - DNA, 42 bp, Homo sapiens
  source 1..42: mol_type = genomic DNA
ctcaccgccgcggcccgggttcgattcccggtcagggaacca

SEQ ID NO: 13512 - DNA, 16 bp, Homo sapiens
  source 1..16: mol_type = genomic DNA
ctcacctggagcacca

SEQ ID NO: 13513 - DNA, 16 bp, Homo sapiens
  source 1..16: mol_type = genomic DNA
ctcagagagggcacca

SEQ ID NO: 13514 - DNA, 16 bp, Homo sapiens
  source 1..16: mol_type = genomic DNA
ctcagagggggcacca

SEQ ID NO: 13515 - DNA, 16 bp, Homo sapiens
  source 1..16: mol_type = genomic DNA
ctcagggatgggttcg

SEQ ID NO: 13516 - DNA, 18 bp, Homo sapiens
  source 1..18: mol_type = genomic DNA
ctcagggatgggttcgat

SEQ ID NO: 13517 - DNA, 19 bp, Homo sapiens
  source 1..19: mol_type = genomic DNA
ctcagggatgggttcgatt

SEQ ID NO: 13518 - DNA, 20 bp, Homo sapiens
  source 1..20: mol_type = genomic DNA
ctcagggatgggttcgattc

SEQ ID NO: 13519 - DNA, 21 bp, Homo sapiens
  source 1..21: mol_type = genomic DNA
ctcagggatgggttcgattct

SEQ ID NO: 13520 - DNA, 22 bp, Homo sapiens
  source 1..22: mol_type = genomic DNA
ctcagggatgggttcgattctc

SEQ ID NO: 13521 - DNA, 28 bp, Homo sapiens
  source 1..28: mol_type = genomic DNA
ctcagggatgggttcgattctcatagtc

SEQ ID NO: 13522 - DNA, 29 bp, Homo sapiens
  source 1..29: mol_type = genomic DNA
ctcagggatgggttcgattctcatagtcc

SEQ ID NO: 13523 - DNA, 30 bp, Homo sapiens
  source 1..30: mol_type = genomic DNA
ctcagggatgggttcgattctcatagtcct

SEQ ID NO: 13524 - DNA, 32 bp, Homo sapiens
  source 1..32: mol_type = genomic DNA
ctcagggatgggttcgattctcatagtcctag

SEQ ID NO: 13525 - DNA, 33 bp, Homo sapiens
  source 1..33: mol_type = genomic DNA
ctcagggatgggttcgattctcatagtcctagc

SEQ ID NO: 13526 - DNA, 34 bp, Homo sapiens
  source 1..34: mol_type = genomic DNA
ctcagggatgggttcgattctcatagtcctagcc

SEQ ID NO: 13527 - DNA, 35 bp, Homo sapiens
  source 1..35: mol_type = genomic DNA
ctcagggatgggttcgattctcatagtcctagcca

SEQ ID NO: 13528 - DNA, 16 bp, Homo sapiens
  source 1..16: mol_type = genomic DNA
ctcaggggtagagcat

SEQ ID NO: 13529 - DNA, 20 bp, Homo sapiens
  source 1..20: mol_type = genomic DNA
ctcaggggtagagcatttga

SEQ ID NO: 13530 - DNA, 22 bp, Homo sapiens
  source 1..22: mol_type = genomic DNA
ctcaggggtagagcatttgact

SEQ ID NO: 13531 - DNA, 23 bp, Homo sapiens
  source 1..23: mol_type = genomic DNA
ctcaggggtagagcatttgactg

SEQ ID NO: 13532 - DNA, 18 bp, Homo sapiens
  source 1..18: mol_type = genomic DNA
ctcaggggttagagcact

SEQ ID NO: 13533 - DNA, 19 bp, Homo sapiens
  source 1..19: mol_type = genomic DNA
ctcaggggttagagcactg

SEQ ID NO: 13534 - DNA, 22 bp, Homo sapiens
  source 1..22: mol_type = genomic DNA
ctcaggggttagagcactggtc

SEQ ID NO: 13535 - DNA, 23 bp, Homo sapiens
  source 1..23: mol_type = genomic DNA
ctcaggggttagagcactggtct

SEQ ID NO: 13536 - DNA, 17 bp, Homo sapiens
  source 1..17: mol_type = genomic DNA
ctcagggtcgtgggttc

SEQ ID NO: 13537 - DNA, 18 bp, Homo sapiens
  source 1..18: mol_type = genomic DNA
ctcagggtcgtgggttcg

SEQ ID NO: 13538 - DNA, 33 bp, Homo sapiens
  source 1..33: mol_type = genomic DNA
ctcagggtcgtgggttcgagccccacgttgggc

SEQ ID NO: 13539 - DNA, 34 bp, Homo sapiens
  source 1..34: mol_type = genomic DNA
ctcagggtcgtgggttcgagccccacgttgggcg

SEQ ID NO: 13540 - DNA, 35 bp, Homo sapiens
  source 1..35: mol_type = genomic DNA
ctcagggtcgtgggttcgagccccacgttgggcgc

SEQ ID NO: 13541 - DNA, 36 bp, Homo sapiens
  source 1..36: mol_type = genomic DNA
ctcagggtcgtgggttcgagccccacgttgggcgcc

SEQ ID NO: 13542 - DNA, 37 bp, Homo sapiens
  source 1..37: mol_type = genomic DNA
ctcagggtcgtgggttcgagccccacgttgggcgcca

SEQ ID NO: 13543 - DNA, 16 bp, Homo sapiens
  source 1..16: mol_type = genomic DNA
ctcagtaagttgcaat

SEQ ID NO: 13544 - DNA, 17 bp, Homo sapiens
  source 1..17: mol_type = genomic DNA
ctcagtaagttgcaata

SEQ ID NO: 13545 - DNA, 18 bp, Homo sapiens
  source 1..18: mol_type = genomic DNA
ctcagtaagttgcaatac

SEQ ID NO: 13546 - DNA, 19 bp, Homo sapiens
  source 1..19: mol_type = genomic DNA
ctcagtaagttgcaatact

SEQ ID NO: 13547 - DNA, 20 bp, Homo sapiens
  source 1..20: mol_type = genomic DNA
ctcagtaagttgcaatactt

SEQ ID NO: 13548 - DNA, 21 bp, Homo sapiens
  source 1..21: mol_type = genomic DNA
ctcagtaagttgcaatactta

SEQ ID NO: 13549 - DNA, 22 bp, Homo sapiens
  source 1..22: mol_type = genomic DNA
ctcagtaagttgcaatacttaa

SEQ ID NO: 13550 - DNA, 23 bp, Homo sapiens
  source 1..23: mol_type = genomic DNA
ctcagtaagttgcaatacttaat

SEQ ID NO: 13551 - DNA, 24 bp, Homo sapiens
  source 1..24: mol_type = genomic DNA
ctcagtaagttgcaatacttaatt

SEQ ID NO: 13552 - DNA, 25 bp, Homo sapiens
  source 1..25: mol_type = genomic DNA
ctcagtaagttgcaatacttaattt

SEQ ID NO: 13553 - DNA, 26 bp, Homo sapiens
  source 1..26: mol_type = genomic DNA
ctcagtaagttgcaatacttaatttc

SEQ ID NO: 13554 - DNA, 27 bp, Homo sapiens
  source 1..27: mol_type = genomic DNA
ctcagtaagttgcaatacttaatttct

SEQ ID NO: 13555 - DNA, 28 bp, Homo sapiens
  source 1..28: mol_type = genomic DNA
ctcagtaagttgcaatacttaatttctg

SEQ ID NO: 13556 - DNA, 29 bp, Homo sapiens
  source 1..29: mol_type = genomic DNA
ctcagtaagttgcaatacttaatttctgc

SEQ ID NO: 13557 - DNA, 30 bp, Homo sapiens
  source 1..30: mol_type = genomic DNA
ctcagtaagttgcaatacttaatttctgcc

SEQ ID NO: 13558 - DNA, 31 bp, Homo sapiens
  source 1..31: mol_type = genomic DNA
ctcagtaagttgcaatacttaatttctgcca

SEQ ID NO: 13559 - DNA, 24 bp, Homo sapiens
  source 1..24: mol_type = genomic DNA
ctcagtcgatagagcatgagactc

SEQ ID NO: 13560 - DNA, 16 bp, Homo sapiens
  source 1..16: mol_type = genomic DNA
ctcagtcggtagagca

SEQ ID NO: 13561 - DNA, 17 bp, Homo sapiens
  source 1..17: mol_type = genomic DNA
ctcagtcggtagagcat

SEQ ID NO: 13562 - DNA, 18 bp, Homo sapiens
  source 1..18: mol_type = genomic DNA
ctcagtcggtagagcatc

SEQ ID NO: 13563 - DNA, 19 bp, Homo sapiens
  source 1..19: mol_type = genomic DNA
ctcagtcggtagagcatca

SEQ ID NO: 13564 - DNA, 20 bp, Homo sapiens
  source 1..20: mol_type = genomic DNA
ctcagtcggtagagcatcag

SEQ ID NO: 13565 - DNA, 21 bp, Homo sapiens
  source 1..21: mol_type = genomic DNA
ctcagtcggtagagcatcaga

SEQ ID NO: 13566 - DNA, 22 bp, Homo sapiens
  source 1..22: mol_type = genomic DNA
ctcagtcggtagagcatcagac

SEQ ID NO: 13567 - DNA, 23 bp, Homo sapiens
  source 1..23: mol_type = genomic DNA
ctcagtcggtagagcatcagact

SEQ ID NO: 13568 - DNA, 24 bp, Homo sapiens
  source 1..24: mol_type = genomic DNA
ctcagtcggtagagcatcagactt

SEQ ID NO: 13569 - DNA, 25 bp, Homo sapiens
  source 1..25: mol_type = genomic DNA
ctcagtcggtagagcatcagacttt

SEQ ID NO: 13570 - DNA, 26 bp, Homo sapiens
  source 1..26: mol_type = genomic DNA
ctcagtcggtagagcatcagactttt

SEQ ID NO: 13571 - DNA, 18 bp, Homo sapiens
  source 1..18: mol_type = genomic DNA
ctcagtcggtagagcatg

SEQ ID NO: 13572 - DNA, 19 bp, Homo sapiens
  source 1..19: mol_type = genomic DNA
ctcagtcggtagagcatga

SEQ ID NO: 13573 - DNA, 21 bp, Homo sapiens
  source 1..21: mol_type = genomic DNA
ctcagtcggtagagcatgaga

SEQ ID NO: 13574 - DNA, 22 bp, Homo sapiens
  source 1..22: mol_type = genomic DNA
ctcagtcggtagagcatgagac

SEQ ID NO: 13575 - DNA, 23 bp, Homo sapiens
  source 1..23: mol_type = genomic DNA
ctcagtcggtagagcatgagacc

SEQ ID NO: 13576 - DNA, 24 bp, Homo sapiens
  source 1..24: mol_type = genomic DNA
ctcagtcggtagagcatgagaccc

SEQ ID NO: 13577 - DNA, 25 bp, Homo sapiens
  source 1..25: mol_type = genomic DNA
ctcagtcggtagagcatgagaccct

SEQ ID NO: 13578 - DNA, 23 bp, Homo sapiens
  source 1..23: mol_type = genomic DNA
ctcagtcggtagagcatgagact

SEQ ID NO: 13579 - DNA, 24 bp, Homo sapiens
  source 1..24: mol_type = genomic DNA
ctcagtcggtagagcatgagactc

SEQ ID NO: 13580 - DNA, 25 bp, Homo sapiens
  source 1..25: mol_type = genomic DNA
ctcagtcggtagagcatgagactct

SEQ ID NO: 13581 - DNA, 26 bp, Homo sapiens
  source 1..26: mol_type = genomic DNA
ctcagtcggtagagcatgagactctt

SEQ ID NO: 13582 - DNA, 27 bp, Homo sapiens
  source 1..27: mol_type = genomic DNA
ctcagtcggtagagcatgagactctta

SEQ ID NO: 13583 - DNA, 28 bp, Homo sapiens
  source 1..28: mol_type = genomic DNA
ctcagtcggtagagcatgagactcttaa

SEQ ID NO: 13584 - DNA, 29 bp, Homo sapiens
  source 1..29: mol_type = genomic DNA
ctcagtcggtagagcatgagactcttaat

SEQ ID NO: 13585 - DNA, 30 bp, Homo sapiens
  source 1..30: mol_type = genomic DNA
ctcagtcggtagagcatgagactcttaatc

SEQ ID NO: 13586 - DNA, 31 bp, Homo sapiens
  source 1..31: mol_type = genomic DNA
ctcagtcggtagagcatgagactcttaatct

SEQ ID NO: 13587 - DNA, 32 bp, Homo sapiens
  source 1..32: mol_type = genomic DNA
ctcagtcggtagagcatgagactcttaatctc

SEQ ID NO: 13588 - DNA, 42 bp, Homo sapiens
  source 1..42: mol_type = genomic DNA
ctcagtcggtagagcatgagactcttaatctcagggtcgtgg

SEQ ID NO: 13589 - DNA, 45 bp, Homo sapiens
  source 1..45: mol_type = genomic DNA
ctcagtcggtagagcatgagactcttaatctcagggtcgtgggtt

SEQ ID NO: 13590 - DNA, 19 bp, Homo sapiens
  source 1..19: mol_type = genomic DNA
ctcagtcggtagagcatgg

SEQ ID NO: 13591 - DNA, 20 bp, Homo sapiens
  source 1..20: mol_type = genomic DNA
ctcagtcggtagagcatggg

SEQ ID NO: 13592 - DNA, 21 bp, Homo sapiens
  source 1..21: mol_type = genomic DNA
ctcagtcggtagagcatggga

SEQ ID NO: 13593 - DNA, 22 bp, Homo sapiens
  source 1..22: mol_type = genomic DNA
ctcagtcggtagagcatgggac

SEQ ID NO: 13594 - DNA, 23 bp, Homo sapiens
  source 1..23: mol_type = genomic DNA
ctcagtcggtagagcatgggact

SEQ ID NO: 13595 - DNA, 24 bp, Homo sapiens
  source 1..24: mol_type = genomic DNA
ctcagtcggtagagcatgggactc

SEQ ID NO: 13596 - DNA, 25 bp, Homo sapiens
  source 1..25: mol_type = genomic DNA
ctcagtcggtagagcatgggactct

SEQ ID NO: 13597 - DNA, 26 bp, Homo sapiens
  source 1..26: mol_type = genomic DNA
ctcagtcggtagagcatgggactctt

SEQ ID NO: 13598 - DNA, 27 bp, Homo sapiens
  source 1..27: mol_type = genomic DNA
ctcagtcggtagagcatgggactctta

SEQ ID NO: 13599 - DNA, 28 bp, Homo sapiens
  source 1..28: mol_type = genomic DNA
ctcagtcggtagagcatgggactcttaa

SEQ ID NO: 13600 - DNA, 29 bp, Homo sapiens
  source 1..29: mol_type = genomic DNA
ctcagtcggtagagcatgggactcttaat

SEQ ID NO: 13601 - DNA, 31 bp, Homo sapiens
  source 1..31: mol_type = genomic DNA
ctcagtcggtagagcatgggactcttaatcc

SEQ ID NO: 13602 - DNA, 32 bp, Homo sapiens
  source 1..32: mol_type = genomic DNA
ctcagtcggtagagcatgggactcttaatccc

SEQ ID NO: 13603 - DNA, 42 bp, Homo sapiens
  source 1..42: mol_type = genomic DNA
ctcagtcggtagagcatgggactcttaatcccagggtcgtgg

SEQ ID NO: 13604 - DNA, 45 bp, Homo sapiens
  source 1..45: mol_type = genomic DNA
ctcagtcggtagagcatgggactcttaatcccagggtcgtgggtt

SEQ ID NO: 13605 - DNA, 33 bp, Homo sapiens
  source 1..33: mol_type = genomic DNA
ctcagtcggtagagcatgggactcttaatctca

SEQ ID NO: 13606 - DNA, 16 bp, Homo sapiens
  source 1..16: mol_type = genomic DNA
ctcagtcggtagagct

SEQ ID NO: 13607 - DNA, 16 bp, Homo sapiens
  source 1..16: mol_type = genomic DNA
ctcagtggtagagcat

SEQ ID NO: 13608 - DNA, 18 bp, Homo sapiens
  source 1..18: mol_type = genomic DNA
ctcagtggtagagcattt

SEQ ID NO: 13609 - DNA, 20 bp, Homo sapiens
  source 1..20: mol_type = genomic DNA
ctcagtggtagagcatttga

SEQ ID NO: 13610 - DNA, 22 bp, Homo sapiens
  source 1..22: mol_type = genomic DNA
ctcagtggtagagcatttgact

SEQ ID NO: 13611 - DNA, 24 bp, Homo sapiens
  source 1..24: mol_type = genomic DNA
ctcagtggtagagcatttgactgc

SEQ ID NO: 13612 - DNA, 25 bp, Homo sapiens
  source 1..25: mol_type = genomic DNA
ctcagtggtagagcatttgactgca

SEQ ID NO: 13613 - DNA, 17 bp, Homo sapiens
  source 1..17: mol_type = genomic DNA
ctcagtggtagagcgca

SEQ ID NO: 13614 - DNA, 18 bp, Homo sapiens
  source 1..18: mol_type = genomic DNA
ctcagtggtagagcgcat

SEQ ID NO: 13615 - DNA, 18 bp, Homo sapiens
  source 1..18: mol_type = genomic DNA
ctcagtggttagagcact

SEQ ID NO: 13616 - DNA, 25 bp, Homo sapiens
  source 1..25: mol_type = genomic DNA
ctcagttggtagagcatgggactct

SEQ ID NO: 13617 - DNA, 26 bp, Homo sapiens
  source 1..26: mol_type = genomic DNA
ctcagttggtagagcatgggactctt

SEQ ID NO: 13618 - DNA, 17 bp, Homo sapiens
  source 1..17: mol_type = genomic DNA
ctcataatctgaaggtc

SEQ ID NO: 13619 - DNA, 19 bp, Homo sapiens
  source 1..19: mol_type = genomic DNA
ctcataatctgaaggtcct

SEQ ID NO: 13620 - DNA, 22 bp, Homo sapiens
  source 1..22: mol_type = genomic DNA
ctcataatctgaaggtcctgag

SEQ ID NO: 13621 - DNA, 23 bp, Homo sapiens
  source 1..23: mol_type = genomic DNA
ctcataatctgaaggtcctgagt

SEQ ID NO: 13622 - DNA, 25 bp, Homo sapiens
  source 1..25: mol_type = genomic DNA
ctcataatctgaaggtcctgagttc

SEQ ID NO: 13623 - DNA, 31 bp, Homo sapiens
  source 1..31: mol_type = genomic DNA
ctcataatctgaaggtcctgagttcgaacct

SEQ ID NO: 13624 - DNA, 44 bp, Homo sapiens
  source 1..44: mol_type = genomic DNA
ctcataatctgaaggtcctgagttcgaacctcagagggggcacc

SEQ ID NO: 13625 - DNA, 45 bp, Homo sapiens
  source 1..45: mol_type = genomic DNA
ctcataatctgaaggtcctgagttcgaacctcagagggggcacca

SEQ ID NO: 13626 - DNA, 18 bp, Homo sapiens
  source 1..18: mol_type = genomic DNA
ctcataatctgaaggtcg

SEQ ID NO: 13627 - DNA, 20 bp, Homo sapiens
  source 1..20: mol_type = genomic DNA
ctcataatctgaaggtcgtg

SEQ ID NO: 13628 - DNA, 23 bp, Homo sapiens
  source 1..23: mol_type = genomic DNA
ctcataatctgaaggtcgtgagt

SEQ ID NO: 13629 - DNA, 39 bp, Homo sapiens
  source 1..39: mol_type = genomic DNA
ctcataatctgaaggtcgtgagttcgagcctcacacggg

SEQ ID NO: 13630 - DNA, 44 bp, Homo sapiens
  source 1..44: mol_type = genomic DNA
ctcataatctgaaggtcgtgagttcgatcctcacacggggcacc

SEQ ID NO: 13631 - DNA, 16 bp, Homo sapiens
  source 1..16: mol_type = genomic DNA
ctcatagtcctagcca

SEQ ID NO: 13632 - DNA, 16 bp, Homo sapiens
  source 1..16: mol_type = genomic DNA
ctcatgcccccatgtc

SEQ ID NO: 13633 - DNA, 17 bp, Homo sapiens
  source 1..17: mol_type = genomic DNA
ctcatgcccccatgtct

SEQ ID NO: 13634 - DNA, 18 bp, Homo sapiens
  source 1..18: mol_type = genomic DNA
ctcatgcccccatgtcta

SEQ ID NO: 13635 - DNA, 19 bp, Homo sapiens
  source 1..19: mol_type = genomic DNA
ctcatgcccccatgtctaa

SEQ ID NO: 13636 - DNA, 20 bp, Homo sapiens
  source 1..20: mol_type = genomic DNA
ctcatgcccccatgtctaac

SEQ ID NO: 13637 - DNA, 21 bp, Homo sapiens
  source 1..21: mol_type = genomic DNA
ctcatgcccccatgtctaaca

SEQ ID NO: 13638 - DNA, 23 bp, Homo sapiens
  source 1..23: mol_type = genomic DNA
ctcatgcccccatgtctaacaac

SEQ ID NO: 13639 - DNA, 24 bp, Homo sapiens
  source 1..24: mol_type = genomic DNA
ctcatgcccccatgtctaacaaca

SEQ ID NO: 13640 - DNA, 25 bp, Homo sapiens
  source 1..25: mol_type = genomic DNA
ctcatgcccccatgtctaacaacat

SEQ ID NO: 13641 - DNA, 26 bp, Homo sapiens
  source 1..26: mol_type = genomic DNA
ctcatgcccccatgtctaacaacatg

SEQ ID NO: 13642 - DNA, 27 bp, Homo sapiens
  source 1..27: mol_type = genomic DNA
ctcatgcccccatgtctaacaacatgg

SEQ ID NO: 13643 - DNA, 28 bp, Homo sapiens
  source 1..28: mol_type = genomic DNA
ctcatgcccccatgtctaacaacatggc

SEQ ID NO: 13644 - DNA, 29 bp, Homo sapiens
  source 1..29: mol_type = genomic DNA
ctcatgcccccatgtctaacaacatggct

SEQ ID NO: 13645 - DNA, 30 bp, Homo sapiens
  source 1..30: mol_type = genomic DNA
ctcatgcccccatgtctaacaacatggctt

SEQ ID NO: 13646 - DNA, 31 bp, Homo sapiens
  source 1..31: mol_type = genomic DNA
ctcatgcccccatgtctaacaacatggcttt

SEQ ID NO: 13647 - DNA, 32 bp, Homo sapiens
  source 1..32: mol_type = genomic DNA
ctcatgcccccatgtctaacaacatggctttc

SEQ ID NO: 13648 - DNA, 33 bp, Homo sapiens
  source 1..33: mol_type = genomic DNA
ctcatgcccccatgtctaacaacatggctttct

SEQ ID NO: 13649 - DNA, 34 bp, Homo sapiens
  source 1..34: mol_type = genomic DNA
ctcatgcccccatgtctaacaacatggctttctc

SEQ ID NO: 13650 - DNA, 35 bp, Homo sapiens
  source 1..35: mol_type = genomic DNA
ctcatgcccccatgtctaacaacatggctttctca

SEQ ID NO: 13651 - DNA, 36 bp, Homo sapiens
  source 1..36: mol_type = genomic DNA
ctcatgcccccatgtctaacaacatggctttctcac

SEQ ID NO: 13652 - DNA, 37 bp, Homo sapiens
  source 1..37: mol_type = genomic DNA
ctcatgcccccatgtctaacaacatggctttctcacc

SEQ ID NO: 13653 - DNA, 38 bp, Homo sapiens
  source 1..38: mol_type = genomic DNA
ctcatgcccccatgtctaacaacatggctttctcacca

SEQ ID NO: 13654 - DNA, 33 bp, Homo sapiens
  source 1..33: mol_type = genomic DNA
ctcattaaattatgataatcatatttaccaacc

SEQ ID NO: 13655 - DNA, 16 bp, Homo sapiens
  source 1..16: mol_type = genomic DNA
ctccaaataaaagtac

SEQ ID NO: 13656 - DNA, 17 bp, Homo sapiens
  source 1..17: mol_type = genomic DNA
ctccaaataaaagtacc

SEQ ID NO: 13657 - DNA, 18 bp, Homo sapiens
  source 1..18: mol_type = genomic DNA
ctccaaataaaagtacca

SEQ ID NO: 13658 - DNA, 35 bp, Homo sapiens
  source 1..35: mol_type = genomic DNA
ctccaatggaggcgtgggttcgaatcccacttctg

SEQ ID NO: 13659 - DNA, 17 bp, Homo sapiens
  source 1..17: mol_type = genomic DNA
ctccagatcagaaggct

SEQ ID NO: 13660 - DNA, 18 bp, Homo sapiens
  source 1..18: mol_type = genomic DNA
ctccagatcagaaggctg

SEQ ID NO: 13661 - DNA, 19 bp, Homo sapiens
  source 1..19: mol_type = genomic DNA
ctccagatcagaaggctgc

SEQ ID NO: 13662 - DNA, 20 bp, Homo sapiens
  source 1..20: mol_type = genomic DNA
ctccagatcagaaggctgcg

SEQ ID NO: 13663 - DNA, 21 bp, Homo sapiens
  source 1..21: mol_type = genomic DNA
ctccagatcagaaggctgcgt

SEQ ID NO: 13664 - DNA, 22 bp, Homo sapiens
  source 1..22: mol_type = genomic DNA
ctccagatcagaaggctgcgtg

SEQ ID NO: 13665 - DNA, 24 bp, Homo sapiens
  source 1..24: mol_type = genomic DNA
ctccagatcagaaggctgcgtgtt

SEQ ID NO: 13666 - DNA, 25 bp, Homo sapiens
  source 1..25: mol_type = genomic DNA
ctccagatcagaaggctgcgtgttc

SEQ ID NO: 13667 - DNA, 26 bp, Homo sapiens
  source 1..26: mol_type = genomic DNA
ctccagatcagaaggctgcgtgttcg

SEQ ID NO: 13668 - DNA, 29 bp, Homo sapiens
  source 1..29: mol_type = genomic DNA
ctccagatcagaaggctgcgtgttcgaat

SEQ ID NO: 13669 - DNA, 30 bp, Homo sapiens
  source 1..30: mol_type = genomic DNA
ctccagatcagaaggctgcgtgttcgaatc

SEQ ID NO: 13670 - DNA, 39 bp, Homo sapiens
  source 1..39: mol_type = genomic DNA
ctccagatcagaaggctgcgtgttcgaatcacgtcgggg

SEQ ID NO: 13671 - DNA, 40 bp, Homo sapiens
  source 1..40: mol_type = genomic DNA
ctccagatcagaaggctgcgtgttcgaatcacgtcggggt

SEQ ID NO: 13672 - DNA, 44 bp, Homo sapiens
  source 1..44: mol_type = genomic DNA
ctccagatcagaaggctgcgtgttcgaatcacgtcggggtcacc

SEQ ID NO: 13673 - DNA, 19 bp, Homo sapiens
  source 1..19: mol_type = genomic DNA
ctccagatcagaaggttgc

SEQ ID NO: 13674 - DNA, 25 bp, Homo sapiens
  source 1..25: mol_type = genomic DNA
ctccagatcagaaggttgcgtgttc

SEQ ID NO: 13675 - DNA, 38 bp, Homo sapiens
  source 1..38: mol_type = genomic DNA
ctccagatcagaaggttgcgtgttcaagtcacgtcggg

SEQ ID NO: 13676 - DNA, 17 bp, Homo sapiens
  source 1..17: mol_type = genomic DNA
ctccagtcatttcgatg

SEQ ID NO: 13677 - DNA, 46 bp, Homo sapiens
  source 1..46: mol_type = genomic DNA
ctccagtcatttcgatggcgtgggttcgaatcccaccgctgccacc

SEQ ID NO: 13678 - DNA, 47 bp, Homo sapiens
  source 1..47: mol_type = genomic DNA
ctccagtcatttcgatggcgtgggttcgaatcccaccgctgccacca

SEQ ID NO: 13679 - DNA, 16 bp, Homo sapiens
  source 1..16: mol_type = genomic DNA
ctccagtctcttcgga

SEQ ID NO: 13680 - DNA, 45 bp, Homo sapiens
  source 1..45: mol_type = genomic DNA
ctccagtctcttcggaggcgtgggttcgaatcccaccgctgccac

SEQ ID NO: 13681 - DNA, 46 bp, Homo sapiens
  source 1..46: mol_type = genomic DNA
ctccagtctcttcggaggcgtgggttcgaatcccaccgctgccacc

SEQ ID NO: 13682 - DNA, 16 bp, Homo sapiens
  source 1..16: mol_type = genomic DNA
ctccagtctcttcggg

SEQ ID NO: 13683 - DNA, 17 bp, Homo sapiens
  source 1..17: mol_type = genomic DNA
ctccagtctcttcgggg

SEQ ID NO: 13684 - DNA, 18 bp, Homo sapiens
  source 1..18: mol_type = genomic DNA
ctccagtctcttcggggg

SEQ ID NO: 13685 - DNA, 20 bp, Homo sapiens
  source 1..20: mol_type = genomic DNA
ctccagtctcttcgggggcg

SEQ ID NO: 13686 - DNA, 25 bp, Homo sapiens
  source 1..25: mol_type = genomic DNA
ctccagtctcttcgggggcgtgggt

SEQ ID NO: 13687 - DNA, 44 bp, Homo sapiens
  source 1..44: mol_type = genomic DNA
ctccagtctcttcgggggcgtgggttcgaatcccaccgctgcca

SEQ ID NO: 13688 - DNA, 45 bp, Homo sapiens
  source 1..45: mol_type = genomic DNA
ctccagtctcttcgggggcgtgggttcgaatcccaccgctgccac

SEQ ID NO: 13689 - DNA, 46 bp, Homo sapiens
  source 1..46: mol_type = genomic DNA
ctccagtctcttcgggggcgtgggttcgaatcccaccgctgccacc

SEQ ID NO: 13690 - DNA, 47 bp, Homo sapiens
  source 1..47: mol_type = genomic DNA
ctccagtctcttcgggggcgtgggttcgaatcccaccgctgccacca

SEQ ID NO: 13691 - DNA, 16 bp, Homo sapiens
  source 1..16: mol_type = genomic DNA
ctccatagctcagggg

SEQ ID NO: 13692 - DNA, 17 bp, Homo sapiens
  source 1..17: mol_type = genomic DNA
ctccatagctcaggggt

SEQ ID NO: 13693 - DNA, 27 bp, Homo sapiens
  source 1..27: mol_type = genomic DNA
ctccatagctcaggggttagagcactg

SEQ ID NO: 13694 - DNA, 28 bp, Homo sapiens
  source 1..28: mol_type = genomic DNA
ctccatagctcaggggttagagcactgg

SEQ ID NO: 13695 - DNA, 30 bp, Homo sapiens
  source 1..30: mol_type = genomic DNA
ctccatagctcaggggttagagcactggtc

SEQ ID NO: 13696 - DNA, 31 bp, Homo sapiens
  source 1..31: mol_type = genomic DNA
ctccatagctcaggggttagagcactggtct

SEQ ID NO: 13697 - DNA, 32 bp, Homo sapiens
  source 1..32: mol_type = genomic DNA
ctccatagctcaggggttagagcactggtctt

SEQ ID NO: 13698 - DNA, 33 bp, Homo sapiens
  source 1..33: mol_type = genomic DNA
ctccatagctcaggggttagagcactggtcttg

SEQ ID NO: 13699 - DNA, 34 bp, Homo sapiens
  source 1..34: mol_type = genomic DNA
ctccatagctcaggggttagagcactggtcttgt

SEQ ID NO: 13700 - DNA, 39 bp, Homo sapiens
  source 1..39: mol_type = genomic DNA
ctccatagctcaggggttagagcactggtcttgtaaacc

SEQ ID NO: 13701 - DNA, 27 bp, Homo sapiens
  source 1..27: mol_type = genomic DNA
ctccatagctcagtggttagagcactg

SEQ ID NO: 13702 - DNA, 34 bp, Homo sapiens
  source 1..34: mol_type = genomic DNA
ctccatagctcagtggttagagcactggtcttgt

SEQ ID NO: 13703 - DNA, 27 bp, Homo sapiens
  source 1..27: mol_type = genomic DNA
ctcccacatggtctagcggttaggatt

SEQ ID NO: 13704 - DNA, 30 bp, Homo sapiens
  source 1..30: mol_type = genomic DNA
ctcccacatggtctagcggttaggattcct

SEQ ID NO: 13705 - DNA, 34 bp, Homo sapiens
  source 1..34: mol_type = genomic DNA
ctcccacatggtctagcggttaggattcctggtt

SEQ ID NO: 13706 - DNA, 36 bp, Homo sapiens
  source 1..36: mol_type = genomic DNA
ctcccacatggtctagcggttaggattcctggtttt

SEQ ID NO: 13707 - DNA, 16 bp, Homo sapiens
  source 1..16: mol_type = genomic DNA
ctcccagtggggcctc

SEQ ID NO: 13708 - DNA, 17 bp, Homo sapiens
  source 1..17: mol_type = genomic DNA
ctcccagtggggcctcc

SEQ ID NO: 13709 - DNA, 34 bp, Homo sapiens
  source 1..34: mol_type = genomic DNA
ctcccatatggtctagcggttaggattcctggtt

SEQ ID NO: 13710 - DNA, 36 bp, Homo sapiens
  source 1..36: mol_type = genomic DNA
ctcccatatggtctagcggttaggattcctggtttt

SEQ ID NO: 13711 - DNA, 23 bp, Homo sapiens
  source 1..23: mol_type = genomic DNA
ctccccgcgcaggttcgaaccct

SEQ ID NO: 13712 - DNA, 22 bp, Homo sapiens
  source 1..22: mol_type = genomic DNA
ctccccgcgcaggttcgaatcc

SEQ ID NO: 13713 - DNA, 23 bp, Homo sapiens
  source 1..23: mol_type = genomic DNA
ctccccgcgcaggttcgaatcct

SEQ ID NO: 13714 - DNA, 38 bp, Homo sapiens
  source 1..38: mol_type = genomic DNA
ctcccctggaggcgtgggttcgaatcccacttctgaca

SEQ ID NO: 13715 - DNA, 16 bp, Homo sapiens
  source 1..16: mol_type = genomic DNA
ctcccggtatgggaac

SEQ ID NO: 13716 - DNA, 17 bp, Homo sapiens
  source 1..17: mol_type = genomic DNA
ctcccggtatgggaacc

SEQ ID NO: 13717 - DNA, 16 bp, Homo sapiens
  source 1..16: mol_type = genomic DNA
ctcccggtgtgggaac

SEQ ID NO: 13718 - DNA, 17 bp, Homo sapiens
  source 1..17: mol_type = genomic DNA
ctcccggtgtgggaacc

SEQ ID NO: 13719 - DNA, 18 bp, Homo sapiens
  source 1..18: mol_type = genomic DNA
ctcccggtgtgggaacca

SEQ ID NO: 13720 - DNA, 34 bp, Homo sapiens
  source 1..34: mol_type = genomic DNA
ctccctggtggtctagtggctaggattcggcgct

SEQ ID NO: 13721 - DNA, 37 bp, Homo sapiens
  source 1..37: mol_type = genomic DNA
ctccctggtggtctagtggctaggattcggcgctttc

SEQ ID NO: 13722 - DNA, 27 bp, Homo sapiens
  source 1..27: mol_type = genomic DNA
ctccctggtggtctagtggttaggatt

SEQ ID NO: 13723 - DNA, 29 bp, Homo sapiens
  source 1..29: mol_type = genomic DNA
ctccctggtggtctagtggttaggattcg

SEQ ID NO: 13724 - DNA, 31 bp, Homo sapiens
  source 1..31: mol_type = genomic DNA
ctccctggtggtctagtggttaggattcggc

SEQ ID NO: 13725 - DNA, 32 bp, Homo sapiens
  source 1..32: mol_type = genomic DNA
ctccctggtggtctagtggttaggattcggcg

SEQ ID NO: 13726 - DNA, 33 bp, Homo sapiens
  source 1..33: mol_type = genomic DNA
ctccctggtggtctagtggttaggattcggcgc

SEQ ID NO: 13727 - DNA, 34 bp, Homo sapiens
  source 1..34: mol_type = genomic DNA
ctccctggtggtctagtggttaggattcggcgct

SEQ ID NO: 13728 - DNA, 35 bp, Homo sapiens
  source 1..35: mol_type = genomic DNA
ctccctggtggtctagtggttaggattcggcgctc

SEQ ID NO: 13729 - DNA, 36 bp, Homo sapiens
  source 1..36: mol_type = genomic DNA
ctccctggtggtctagtggttaggattcggcgctct

SEQ ID NO: 13730 - DNA, 37 bp, Homo sapiens
  source 1..37: mol_type = genomic DNA
ctccctggtggtctagtggttaggattcggcgctctc

SEQ ID NO: 13731 - DNA, 38 bp, Homo sapiens
  source 1..38: mol_type = genomic DNA
ctccctggtggtctagtggttaggattcggcgctctca

SEQ ID NO: 13732 - DNA, 40 bp, Homo sapiens
  source 1..40: mol_type = genomic DNA
ctccctggtggtctagtggttaggattcggcgctctcacc

SEQ ID NO: 13733 - DNA, 41 bp, Homo sapiens
  source 1..41: mol_type = genomic DNA
ctccctggtggtctagtggttaggattcggcgctctcaccg

SEQ ID NO: 13734 - DNA, 16 bp, Homo sapiens
  source 1..16: mol_type = genomic DNA
ctccgaggtgattttc

SEQ ID NO: 13735 - DNA, 17 bp, Homo sapiens
  source 1..17: mol_type = genomic DNA
ctccgaggtgattttca

SEQ ID NO: 13736 - DNA, 18 bp, Homo sapiens
  source 1..18: mol_type = genomic DNA
ctccgaggtgattttcat

SEQ ID NO: 13737 - DNA, 19 bp, Homo sapiens
  source 1..19: mol_type = genomic DNA
ctccgaggtgattttcata

SEQ ID NO: 13738 - DNA, 20 bp, Homo sapiens
  source 1..20: mol_type = genomic DNA
ctccgaggtgattttcatat

SEQ ID NO: 13739 - DNA, 21 bp, Homo sapiens
  source 1..21: mol_type = genomic DNA
ctccgaggtgattttcatatt

SEQ ID NO: 13740 - DNA, 22 bp, Homo sapiens
  source 1..22: mol_type = genomic DNA
ctccgaggtgattttcatattg

SEQ ID NO: 13741 - DNA, 23 bp, Homo sapiens
  source 1..23: mol_type = genomic DNA
ctccgaggtgattttcatattga

SEQ ID NO: 13742 - DNA, 24 bp, Homo sapiens
  source 1..24: mol_type = genomic DNA
ctccgaggtgattttcatattgaa

SEQ ID NO: 13743 - DNA, 25 bp, Homo sapiens
  source 1..25: mol_type = genomic DNA
ctccgaggtgattttcatattgaat

SEQ ID NO: 13744 - DNA, 26 bp, Homo sapiens
  source 1..26: mol_type = genomic DNA
ctccgaggtgattttcatattgaatt

SEQ ID NO: 13745 - DNA, 27 bp, Homo sapiens
  source 1..27: mol_type = genomic DNA
ctccgaggtgattttcatattgaattg

SEQ ID NO: 13746 - DNA, 28 bp, Homo sapiens
  source 1..28: mol_type = genomic DNA
ctccgaggtgattttcatattgaattgc

SEQ ID NO: 13747 - DNA, 29 bp, Homo sapiens
  source 1..29: mol_type = genomic DNA
ctccgaggtgattttcatattgaattgca

SEQ ID NO: 13748 - DNA, 30 bp, Homo sapiens
  source 1..30: mol_type = genomic DNA
ctccgaggtgattttcatattgaattgcaa

SEQ ID NO: 13749 - DNA, 31 bp, Homo sapiens
  source 1..31: mol_type = genomic DNA
ctccgaggtgattttcatattgaattgcaaa

SEQ ID NO: 13750 - DNA, 32 bp, Homo sapiens
  source 1..32: mol_type = genomic DNA
ctccgaggtgattttcatattgaattgcaaat

SEQ ID NO: 13751 - DNA, 33 bp, Homo sapiens
  source 1..33: mol_type = genomic DNA
ctccgaggtgattttcatattgaattgcaaatt

SEQ ID NO: 13752 - DNA, 34 bp, Homo sapiens
  source 1..34: mol_type = genomic DNA
ctccgaggtgattttcatattgaattgcaaattc

SEQ ID NO: 13753 - DNA, 35 bp, Homo sapiens
  source 1..35: mol_type = genomic DNA
ctccgaggtgattttcatattgaattgcaaattcg

SEQ ID NO: 13754 - DNA, 36 bp, Homo sapiens
  source 1..36: mol_type = genomic DNA
ctccgaggtgattttcatattgaattgcaaattcga

SEQ ID NO: 13755 - DNA, 37 bp, Homo sapiens
  source 1..37: mol_type = genomic DNA
ctccgaggtgattttcatattgaattgcaaattcgaa

SEQ ID NO: 13756 - DNA, 38 bp, Homo sapiens
  source 1..38: mol_type = genomic DNA
ctccgaggtgattttcatattgaattgcaaattcgaag

SEQ ID NO: 13757 - DNA, 40 bp, Homo sapiens
  source 1..40: mol_type = genomic DNA
ctccgaggtgattttcatattgaattgcaaattcgaagaa

SEQ ID NO: 13758 - DNA, 41 bp, Homo sapiens
  source 1..41: mol_type = genomic DNA
ctccgaggtgattttcatattgaattgcaaattcgaagaag

SEQ ID NO: 13759 - DNA, 42 bp, Homo sapiens
  source 1..42: mol_type = genomic DNA
ctccgaggtgattttcatattgaattgcaaattcgaagaagc

SEQ ID NO: 13760 - DNA, 44 bp, Homo sapiens
  source 1..44: mol_type = genomic DNA
ctccgaggtgattttcatattgaattgcaaattcgaagaagcag

SEQ ID NO: 13761 - DNA, 45 bp, Homo sapiens
  source 1..45: mol_type = genomic DNA
ctccgaggtgattttcatattgaattgcaaattcgaagaagcagc

SEQ ID NO: 13762 - DNA, 46 bp, Homo sapiens
  source 1..46: mol_type = genomic DNA
ctccgaggtgattttcatattgaattgcaaattcgaagaagcagct

SEQ ID NO: 13763 - DNA, 47 bp, Homo sapiens
  source 1..47: mol_type = genomic DNA
ctccgaggtgattttcatattgaattgcaaattcgaagaagcagctt

SEQ ID NO: 13764 - DNA, 48 bp, Homo sapiens
  source 1..48: mol_type = genomic DNA
ctccgaggtgattttcatattgaattgcaaattcgaagaagcagcttc

SEQ ID NO: 13765 - DNA, 26 bp, Homo sapiens
  source 1..26: mol_type = genomic DNA
ctccggagctggggattgtgggttcg

SEQ ID NO: 13766 - DNA, 16 bp, Homo sapiens
  source 1..16: mol_type = genomic DNA
ctccggatggaggcgt

SEQ ID NO: 13767 - DNA, 20 bp, Homo sapiens
  source 1..20: mol_type = genomic DNA
ctccggatggaggcgtgggt

SEQ ID NO: 13768 - DNA, 16 bp, Homo sapiens
  source 1..16: mol_type = genomic DNA
ctccgtggcgcaatgg

SEQ ID NO: 13769 - DNA, 17 bp, Homo sapiens
  source 1..17: mol_type = genomic DNA
ctccgtggcgcaatgga

SEQ ID NO: 13770 - DNA, 27 bp, Homo sapiens
  source 1..27: mol_type = genomic DNA
ctccgtggcgcaatggatagcgcattg

SEQ ID NO: 13771 - DNA, 28 bp, Homo sapiens
  source 1..28: mol_type = genomic DNA
ctccgtggcgcaatggatagcgcattgg

SEQ ID NO: 13772 - DNA, 29 bp, Homo sapiens
  source 1..29: mol_type = genomic DNA
ctccgtggcgcaatggatagcgcattgga

SEQ ID NO: 13773 - DNA, 30 bp, Homo sapiens
  source 1..30: mol_type = genomic DNA
ctccgtggcgcaatggatagcgcattggac

SEQ ID NO: 13774 - DNA, 31 bp, Homo sapiens
  source 1..31: mol_type = genomic DNA
ctccgtggcgcaatggatagcgcattggact

SEQ ID NO: 13775 - DNA, 19 bp, Homo sapiens
  source 1..19: mol_type = genomic DNA
ctcctcaaagcaatacact

SEQ ID NO: 13776 - DNA, 20 bp, Homo sapiens
  source 1..20: mol_type = genomic DNA
ctcctcaaagcaatacactg

SEQ ID NO: 13777 - DNA, 21 bp, Homo sapiens
  source 1..21: mol_type = genomic DNA
ctcctcaaagcaatacactga

SEQ ID NO: 13778 - DNA, 38 bp, Homo sapiens
  source 1..38: mol_type = genomic DNA
ctcctcaaagcaatacactgaaaatgtttagacgggct

SEQ ID NO: 13779 - DNA, 41 bp, Homo sapiens
  source 1..41: mol_type = genomic DNA
ctcctcaaagcaatacactgaaaatgtttagacgggctcac

SEQ ID NO: 13780 - DNA, 29 bp, Homo sapiens
  source 1..29: mol_type = genomic DNA
ctcctcgttagtatagtggtgagtatccc

SEQ ID NO: 13781 - DNA, 30 bp, Homo sapiens
  source 1..30: mol_type = genomic DNA
ctcctcgttagtatagtggtgagtatcccc

SEQ ID NO: 13782 - DNA, 33 bp, Homo sapiens
  source 1..33: mol_type = genomic DNA
ctcctcgttagtatagtggtgagtatccccgcc

SEQ ID NO: 13783 - DNA, 34 bp, Homo sapiens
  source 1..34: mol_type = genomic DNA
ctcctcgttagtatagtggtgagtatccccgcct

SEQ ID NO: 13784 - DNA, 35 bp, Homo sapiens
  source 1..35: mol_type = genomic DNA
ctcctcgttagtatagtggtgagtatccccgcctg

SEQ ID NO: 13785 - DNA, 36 bp, Homo sapiens
  source 1..36: mol_type = genomic DNA
ctcctcgttagtatagtggtgagtatccccgcctgt

SEQ ID NO: 13786 - DNA, 37 bp, Homo sapiens
  source 1..37: mol_type = genomic DNA
ctcctcgttagtatagtggtgagtatccccgcctgtc

SEQ ID NO: 13787 - DNA, 29 bp, Homo sapiens
  source 1..29: mol_type = genomic DNA
ctcctcgttagtatagtggttagtatccc

SEQ ID NO: 13788 - DNA, 30 bp, Homo sapiens
  source 1..30: mol_type = genomic DNA
ctcctcgttagtatagtggttagtatcccc

SEQ ID NO: 13789 - DNA, 33 bp, Homo sapiens
  source 1..33: mol_type = genomic DNA
ctcctcgttagtatagtggttagtatccccgcc

SEQ ID NO: 13790 - DNA, 34 bp, Homo sapiens
  source 1..34: mol_type = genomic DNA
ctcctcgttagtatagtggttagtatccccgcct

SEQ ID NO: 13791 - DNA, 36 bp, Homo sapiens
  source 1..36: mol_type = genomic DNA
ctcctcgttagtatagtggttagtatccccgcctgt

SEQ ID NO: 13792 - DNA, 37 bp, Homo sapiens
  source 1..37: mol_type = genomic DNA
ctcctcgttagtatagtggttagtatccccgcctgtc

SEQ ID NO: 13793 - DNA, 39 bp, Homo sapiens
  source 1..39: mol_type = genomic DNA
ctcctcgttagtatagtggttagtatccccgcctgtcac

SEQ ID NO: 13794 - DNA, 17 bp, Homo sapiens
  source 1..17: mol_type = genomic DNA
ctcctggctggctcacc

SEQ ID NO: 13795 - DNA, 16 bp, Homo sapiens
  source 1..16: mol_type = genomic DNA
ctcctggctggctcgc

SEQ ID NO: 13796 - DNA, 17 bp, Homo sapiens
  source 1..17: mol_type = genomic DNA
ctcctggctggctcgcc

SEQ ID NO: 13797 - DNA, 18 bp, Homo sapiens
  source 1..18: mol_type = genomic DNA
ctcctggctggctcgcca

SEQ ID NO: 13798 - DNA, 16 bp, Homo sapiens
  source 1..16: mol_type = genomic DNA
ctccttagcgcagtag

SEQ ID NO: 13799 - DNA, 17 bp, Homo sapiens
  source 1..17: mol_type = genomic DNA
ctccttagcgcagtagg

SEQ ID NO: 13800 - DNA, 16 bp, Homo sapiens
  source 1..16: mol_type = genomic DNA
ctcgcctgccacgcgg

SEQ ID NO: 13801 - DNA, 23 bp, Homo sapiens
  source 1..23: mol_type = genomic DNA
ctcgcctgccacgcgggaggccc

SEQ ID NO: 13802 - DNA, 25 bp, Homo sapiens
  source 1..25: mol_type = genomic DNA
ctcgcctgccacgcgggaggcccgg

SEQ ID NO: 13803 - DNA, 26 bp, Homo sapiens
  source 1..26: mol_type = genomic DNA
ctcgcctgccacgcgggaggcccggg

SEQ ID NO: 13804 - DNA, 27 bp, Homo sapiens
  source 1..27: mol_type = genomic DNA
ctcgcctgccacgcgggaggcccgggt

SEQ ID NO: 13805 - DNA, 28 bp, Homo sapiens
  source 1..28: mol_type = genomic DNA
ctcgcctgccacgcgggaggcccgggtt

SEQ ID NO: 13806 - DNA, 29 bp, Homo sapiens
  source 1..29: mol_type = genomic DNA
ctcgcctgccacgcgggaggcccgggttc

SEQ ID NO: 13807 - DNA, 16 bp, Homo sapiens
  source 1..16: mol_type = genomic DNA
ctcgctggggcctcca

SEQ ID NO: 13808 - DNA, 16 bp, Homo sapiens
  source 1..16: mol_type = genomic DNA
ctcggtggaacctcca

SEQ ID NO: 13809 - DNA, 16 bp, Homo sapiens
  source 1..16: mol_type = genomic DNA
ctcggtgggacctcca

SEQ ID NO: 13810 - DNA, 24 bp, Homo sapiens
  source 1..24: mol_type = genomic DNA
ctcggttcgaatccgagtcacggc

SEQ ID NO: 13811 - DNA, 31 bp, Homo sapiens
  source 1..31: mol_type = genomic DNA
ctcgtggcgcaacggtagcgcgtctgactcc

SEQ ID NO: 13812 - DNA, 32 bp, Homo sapiens
  source 1..32: mol_type = genomic DNA
ctcgtggcgcaacggtagcgcgtctgactcca

SEQ ID NO: 13813 - DNA, 31 bp, Homo sapiens
  source 1..31: mol_type = genomic DNA
ctcgtggcgcaatggtagcgcgtctgactcc

SEQ ID NO: 13814 - DNA, 16 bp, Homo sapiens
  source 1..16: mol_type = genomic DNA
ctcgttagcgcagtag

SEQ ID NO: 13815 - DNA, 17 bp, Homo sapiens
  source 1..17: mol_type = genomic DNA
ctcgttagcgcagtagg

SEQ ID NO: 13816 - DNA, 18 bp, Homo sapiens
  source 1..18: mol_type = genomic DNA
ctcgttagcgcagtaggt

SEQ ID NO: 13817 - DNA, 20 bp, Homo sapiens
  source 1..20: mol_type = genomic DNA
ctcgttagcgcagtaggtag

SEQ ID NO: 13818 - DNA, 21 bp, Homo sapiens
  source 1..21: mol_type = genomic DNA
ctcgttagcgcagtaggtagc

SEQ ID NO: 13819 - DNA, 23 bp, Homo sapiens
  source 1..23: mol_type = genomic DNA
ctcgttagcgcagtaggtagcgc

SEQ ID NO: 13820 - DNA, 16 bp, Homo sapiens
  source 1..16: mol_type = genomic DNA
ctcgttagtatagtgg

SEQ ID NO: 13821 - DNA, 24 bp, Homo sapiens
  source 1..24: mol_type = genomic DNA
ctcgttagtatagtggtgagtatc

SEQ ID NO: 13822 - DNA, 26 bp, Homo sapiens
  source 1..26: mol_type = genomic DNA
ctcgttagtatagtggtgagtatccc

SEQ ID NO: 13823 - DNA, 27 bp, Homo sapiens
  source 1..27: mol_type = genomic DNA
ctcgttagtatagtggtgagtatcccc

SEQ ID NO: 13824 - DNA, 28 bp, Homo sapiens
  source 1..28: mol_type = genomic DNA
ctcgttagtatagtggtgagtatccccg

SEQ ID NO: 13825 - DNA, 29 bp, Homo sapiens
  source 1..29: mol_type = genomic DNA
ctcgttagtatagtggtgagtatccccgc

SEQ ID NO: 13826 - DNA, 30 bp, Homo sapiens
  source 1..30: mol_type = genomic DNA
ctcgttagtatagtggtgagtatccccgcc

SEQ ID NO: 13827 - DNA, 31 bp, Homo sapiens
  source 1..31: mol_type = genomic DNA
ctcgttagtatagtggtgagtatccccgcct

SEQ ID NO: 13828 - DNA, 32 bp, Homo sapiens
  source 1..32: mol_type = genomic DNA
ctcgttagtatagtggtgagtatccccgcctg

SEQ ID NO: 13829 - DNA, 33 bp, Homo sapiens
  source 1..33: mol_type = genomic DNA
ctcgttagtatagtggtgagtatccccgcctgt

SEQ ID NO: 13830 - DNA, 34 bp, Homo sapiens
  source 1..34: mol_type = genomic DNA
ctcgttagtatagtggtgagtatccccgcctgtc

SEQ ID NO: 13831 - DNA, 35 bp, Homo sapiens
  source 1..35: mol_type = genomic DNA
ctcgttagtatagtggtgagtatccccgcctgtca

SEQ ID NO: 13832 - DNA, 36 bp, Homo sapiens
  source 1..36: mol_type = genomic DNA
ctcgttagtatagtggtgagtatccccgcctgtcac

SEQ ID NO: 13833 - DNA, 37 bp, Homo sapiens
  source 1..37: mol_type = genomic DNA
ctcgttagtatagtggtgagtatccccgcctgtcacg

SEQ ID NO: 13834 - DNA, 39 bp, Homo sapiens
  source 1..39: mol_type = genomic DNA
ctcgttagtatagtggtgagtatccccgcctgtcacgcg

SEQ ID NO: 13835 - DNA, 40 bp, Homo sapiens
  source 1..40: mol_type = genomic DNA
ctcgttagtatagtggtgagtatccccgcctgtcacgcgg

SEQ ID NO: 13836 - DNA, 48 bp, Homo sapiens
  source 1..48: mol_type = genomic DNA
ctcgttagtatagtggtgagtatccccgcctgtcacgcgggagaccgg

SEQ ID NO: 13837 - DNA, 26 bp, Homo sapiens
  source 1..26: mol_type = genomic DNA
ctcgttagtatagtggttagtatccc

SEQ ID NO: 13838 - DNA, 27 bp, Homo sapiens
  source 1..27: mol_type = genomic DNA
ctcgttagtatagtggttagtatcccc

SEQ ID NO: 13839 - DNA, 28 bp, Homo sapiens
  source 1..28: mol_type = genomic DNA
ctcgttagtatagtggttagtatccccg

SEQ ID NO: 13840 - DNA, 29 bp, Homo sapiens
  source 1..29: mol_type = genomic DNA
ctcgttagtatagtggttagtatccccgc

SEQ ID NO: 13841 - DNA, 30 bp, Homo sapiens
  source 1..30: mol_type = genomic DNA
ctcgttagtatagtggttagtatccccgcc

SEQ ID NO: 13842 - DNA, 31 bp, Homo sapiens
  source 1..31: mol_type = genomic DNA
ctcgttagtatagtggttagtatccccgcct

SEQ ID NO: 13843 - DNA, 32 bp, Homo sapiens
  source 1..32: mol_type = genomic DNA
ctcgttagtatagtggttagtatccccgcctg

SEQ ID NO: 13844 - DNA, 33 bp, Homo sapiens
  source 1..33: mol_type = genomic DNA
ctcgttagtatagtggttagtatccccgcctgt

SEQ ID NO: 13845 - DNA, 34 bp, Homo sapiens
  source 1..34: mol_type = genomic DNA
ctcgttagtatagtggttagtatccccgcctgtc

SEQ ID NO: 13846 - DNA, 35 bp, Homo sapiens
  source 1..35: mol_type = genomic DNA
ctcgttagtatagtggttagtatccccgcctgtca

SEQ ID NO: 13847 - DNA, 25 bp, Homo sapiens
  source 1..25: mol_type = genomic DNA
ctcgttggtctaggggtatgattct

SEQ ID NO: 13848 - DNA, 26 bp, Homo sapiens
  source 1..26: mol_type = genomic DNA
ctcgttggtctaggggtatgattctc

SEQ ID NO: 13849 - DNA, 27 bp, Homo sapiens
  source 1..27: mol_type = genomic DNA
ctcgttggtctaggggtatgattctcg

SEQ ID NO: 13850 - DNA, 28 bp, Homo sapiens
  source 1..28: mol_type = genomic DNA
ctcgttggtctaggggtatgattctcgc

SEQ ID NO: 13851 - DNA, 29 bp, Homo sapiens
  source 1..29: mol_type = genomic DNA
ctcgttggtctaggggtatgattctcgct

SEQ ID NO: 13852 - DNA, 30 bp, Homo sapiens
  source 1..30: mol_type = genomic DNA
ctcgttggtctaggggtatgattctcgctt

SEQ ID NO: 13853 - DNA, 32 bp, Homo sapiens
  source 1..32: mol_type = genomic DNA
ctcgttggtctaggggtatgattctcgcttcg

SEQ ID NO: 13854 - DNA, 33 bp, Homo sapiens
  source 1..33: mol_type = genomic DNA
ctcgttggtctaggggtatgattctcgcttcgg

SEQ ID NO: 13855 - DNA, 31 bp, Homo sapiens
  source 1..31: mol_type = genomic DNA
ctcgttggtctaggggtatgattctcgcttt

SEQ ID NO: 13856 - DNA, 33 bp, Homo sapiens
  source 1..33: mol_type = genomic DNA
ctcgttggtctaggggtatgattctcgctttgg

SEQ ID NO: 13857 - DNA, 32 bp, Homo sapiens
  source 1..32: mol_type = genomic DNA
ctcgttggtctaggggtatgattctcggtttg

SEQ ID NO: 13858 - DNA, 33 bp, Homo sapiens
  source 1..33: mol_type = genomic DNA
ctcgttggtctaggggtatgattctcggtttgg

SEQ ID NO: 13859 - DNA, 27 bp, Homo sapiens
  source 1..27: mol_type = genomic DNA
ctcgttggtctagtggtatgattctcg

SEQ ID NO: 13860 - DNA, 33 bp, Homo sapiens
  source 1..33: mol_type = genomic DNA
ctcgttggtctagtggtatgattctcgctttgg

SEQ ID NO: 13861 - DNA, 16 bp, Homo sapiens
  source 1..16: mol_type = genomic DNA
ctctcaccgccgcggc

SEQ ID NO: 13862 - DNA, 17 bp, Homo sapiens
  source 1..17: mol_type = genomic DNA
ctctcaccgccgcggcc

SEQ ID NO: 13863 - DNA, 18 bp, Homo sapiens
  source 1..18: mol_type = genomic DNA
ctctcaccgccgcggccc

SEQ ID NO: 13864 - DNA, 19 bp, Homo sapiens
  source 1..19: mol_type = genomic DNA
ctctcaccgccgcggcccg

SEQ ID NO: 13865 - DNA, 20 bp, Homo sapiens
  source 1..20: mol_type = genomic DNA
ctctcaccgccgcggcccgg

SEQ ID NO: 13866 - DNA, 21 bp, Homo sapiens
  source 1..21: mol_type = genomic DNA
ctctcaccgccgcggcccggg

SEQ ID NO: 13867 - DNA, 22 bp, Homo sapiens
  source 1..22: mol_type = genomic DNA
ctctcaccgccgcggcccgggt

SEQ ID NO: 13868 - DNA, 23 bp, Homo sapiens
  source 1..23: mol_type = genomic DNA
ctctcaccgccgcggcccgggtt

SEQ ID NO: 13869 - DNA, 24 bp, Homo sapiens
  source 1..24: mol_type = genomic DNA
ctctcaccgccgcggcccgggttc

SEQ ID NO: 13870 - DNA, 25 bp, Homo sapiens
  source 1..25: mol_type = genomic DNA
ctctcaccgccgcggcccgggttcg

SEQ ID NO: 13871 - DNA, 27 bp, Homo sapiens
  source 1..27: mol_type = genomic DNA
ctctcaccgccgcggcccgggttcgat

SEQ ID NO: 13872 - DNA, 29 bp, Homo sapiens
  source 1..29: mol_type = genomic DNA
ctctcaccgccgcggcccgggttcgattc

SEQ ID NO: 13873 - DNA, 33 bp, Homo sapiens
  source 1..33: mol_type = genomic DNA
ctctcaccgccgcggcccgggttcgattcccgg

SEQ ID NO: 13874 - DNA, 34 bp, Homo sapiens
  source 1..34: mol_type = genomic DNA
ctctcaccgccgcggcccgggttcgattcccggt

SEQ ID NO: 13875 - DNA, 35 bp, Homo sapiens
  source 1..35: mol_type = genomic DNA
ctctcaccgccgcggcccgggttcgattcccggtc

SEQ ID NO: 13876 - DNA, 36 bp, Homo sapiens
  source 1..36: mol_type = genomic DNA
ctctcaccgccgcggcccgggttcgattcccggtca

SEQ ID NO: 13877 - DNA, 37 bp, Homo sapiens
  source 1..37: mol_type = genomic DNA
ctctcaccgccgcggcccgggttcgattcccggtcag

SEQ ID NO: 13878 - DNA, 38 bp, Homo sapiens
  source 1..38: mol_type = genomic DNA
ctctcaccgccgcggcccgggttcgattcccggtcagg

SEQ ID NO: 13879 - DNA, 39 bp, Homo sapiens
  source 1..39: mol_type = genomic DNA
ctctcaccgccgcggcccgggttcgattcccggtcaggg

SEQ ID NO: 13880 - DNA, 41 bp, Homo sapiens
  source 1..41: mol_type = genomic DNA
ctctcaccgccgcggcccgggttcgattcccggtcagggaa

SEQ ID NO: 13881 - DNA, 42 bp, Homo sapiens
  source 1..42: mol_type = genomic DNA
ctctcaccgccgcggcccgggttcgattcccggtcagggaac

SEQ ID NO: 13882 - DNA, 43 bp, Homo sapiens
  source 1..43: mol_type = genomic DNA
ctctcaccgccgcggcccgggttcgattcccggtcagggaacc

SEQ ID NO: 13883 - DNA, 44 bp, Homo sapiens
  source 1..44: mol_type = genomic DNA
ctctcaccgccgcggcccgggttcgattcccggtcagggaacca

SEQ ID NO: 13884 - DNA, 18 bp, Homo sapiens
  source 1..18: mol_type = genomic DNA
ctctgaatccagcgatcc

SEQ ID NO: 13885 - DNA, 19 bp, Homo sapiens
  source 1..19: mol_type = genomic DNA
ctctgaatccagcgatccg

SEQ ID NO: 13886 - DNA, 20 bp, Homo sapiens
  source 1..20: mol_type = genomic DNA
ctctgaatccagcgatccga

SEQ ID NO: 13887 - DNA, 21 bp, Homo sapiens
  source 1..21: mol_type = genomic DNA
ctctgaatccagcgatccgag

SEQ ID NO: 13888 - DNA, 22 bp, Homo sapiens
  source 1..22: mol_type = genomic DNA
ctctgaatccagcgatccgagt

SEQ ID NO: 13889 - DNA, 23 bp, Homo sapiens
  source 1..23: mol_type = genomic DNA
ctctgaatccagcgatccgagtt

SEQ ID NO: 13890 - DNA, 24 bp, Homo sapiens
  source 1..24: mol_type = genomic DNA
ctctgaatccagcgatccgagttc

SEQ ID NO: 13891 - DNA, 32 bp, Homo sapiens
  source 1..32: mol_type = genomic DNA
ctctgaatccagcgatccgagttcaaatctcg

SEQ ID NO: 13892 - DNA, 35 bp, Homo sapiens
  source 1..35: mol_type = genomic DNA
ctctgaatccagcgatccgagttcaaatctcggtg

SEQ ID NO: 13893 - DNA, 36 bp, Homo sapiens
  source 1..36: mol_type = genomic DNA
ctctgaatccagcgatccgagttcaaatctcggtgg

SEQ ID NO: 13894 - DNA, 37 bp, Homo sapiens
  source 1..37: mol_type = genomic DNA
ctctgaatccagcgatccgagttcaaatctcggtgga

SEQ ID NO: 13895 - DNA, 38 bp, Homo sapiens
  source 1..38: mol_type = genomic DNA
ctctgaatccagcgatccgagttcaaatctcggtggaa

SEQ ID NO: 13896 - DNA, 39 bp, Homo sapiens
  source 1..39: mol_type = genomic DNA
ctctgaatccagcgatccgagttcaaatctcggtggaac

SEQ ID NO: 13897 - DNA, 41 bp, Homo sapiens
  source 1..41: mol_type = genomic DNA
ctctgaatccagcgatccgagttcaaatctcggtggaacct

SEQ ID NO: 13898 - DNA, 43 bp, Homo sapiens
  source 1..43: mol_type = genomic DNA
ctctgaatccagcgatccgagttcaaatctcggtggaacctcc

SEQ ID NO: 13899 - DNA, 35 bp, Homo sapiens
  source 1..35: mol_type = genomic DNA
ctctgaatccagcgatccgagttcgagtctcggtg

SEQ ID NO: 13900 - DNA, 36 bp, Homo sapiens
  source 1..36: mol_type = genomic DNA
ctctgaatccagcgatccgagttcgagtctcggtgg

SEQ ID NO: 13901 - DNA, 37 bp, Homo sapiens
  source 1..37: mol_type = genomic DNA
ctctgaatccagcgatccgagttcgagtctcggtgga

SEQ ID NO: 13902 - DNA, 38 bp, Homo sapiens
  source 1..38: mol_type = genomic DNA
ctctgaatccagcgatccgagttcgagtctcggtggaa

SEQ ID NO: 13903 - DNA, 42 bp, Homo sapiens
  source 1..42: mol_type = genomic DNA
ctctgaatccagcgatccgagttcgagtctcggtggaacctc

SEQ ID NO: 13904 - DNA, 16 bp, Homo sapiens
  source 1..16: mol_type = genomic DNA
ctctgcgttgtggccg

SEQ ID NO: 13905 - DNA, 16 bp, Homo sapiens
  source 1..16: mol_type = genomic DNA
ctctggactctgaatc

SEQ ID NO: 13906 - DNA, 17 bp, Homo sapiens
  source 1..17: mol_type = genomic DNA
ctctggactctgaatcc

SEQ ID NO: 13907 - DNA, 18 bp, Homo sapiens
  source 1..18: mol_type = genomic DNA
ctctggactctgaatcca

SEQ ID NO: 13908 - DNA, 19 bp, Homo sapiens
  source 1..19: mol_type = genomic DNA
ctctggactctgaatccag

SEQ ID NO: 13909 - DNA, 20 bp, Homo sapiens
  source 1..20: mol_type = genomic DNA
ctctggactctgaatccagc

SEQ ID NO: 13910 - DNA, 21 bp, Homo sapiens
  source 1..21: mol_type = genomic DNA
ctctggactctgaatccagcg

SEQ ID NO: 13911 - DNA, 23 bp, Homo sapiens
  source 1..23: mol_type = genomic DNA
ctctggactctgaatccagcgat

SEQ ID NO: 13912 - DNA, 26 bp, Homo sapiens
  source 1..26: mol_type = genomic DNA
ctctggactctgaatccagcgatccg

SEQ ID NO: 13913 - DNA, 27 bp, Homo sapiens
  source 1..27: mol_type = genomic DNA
ctctggactctgaatccagcgatccga

SEQ ID NO: 13914 - DNA, 28 bp, Homo sapiens
  source 1..28: mol_type = genomic DNA
ctctggactctgaatccagcgatccgag

SEQ ID NO: 13915 - DNA, 29 bp, Homo sapiens
  source 1..29: mol_type = genomic DNA
ctctggactctgaatccagcgatccgagt

SEQ ID NO: 13916 - DNA, 30 bp, Homo sapiens
  source 1..30: mol_type = genomic DNA
ctctggactctgaatccagcgatccgagtt

SEQ ID NO: 13917 - DNA, 31 bp, Homo sapiens
  source 1..31: mol_type = genomic DNA
ctctggactctgaatccagcgatccgagttc

SEQ ID NO: 13918 - DNA, 32 bp, Homo sapiens
  source 1..32: mol_type = genomic DNA
ctctggactctgaatccagcgatccgagttca

SEQ ID NO: 13919 - DNA, 33 bp, Homo sapiens
  source 1..33: mol_type = genomic DNA
ctctggactctgaatccagcgatccgagttcaa

SEQ ID NO: 13920 - DNA, 34 bp, Homo sapiens
  source 1..34: mol_type = genomic DNA
ctctggactctgaatccagcgatccgagttcaaa

SEQ ID NO: 13921 - DNA, 48 bp, Homo sapiens
  source 1..48: mol_type = genomic DNA
ctctggactctgaatccagcgatccgagttcaaatctcggtggaacct

SEQ ID NO: 13922 - DNA, 16 bp, Homo sapiens
  source 1..16: mol_type = genomic DNA
ctctggactttgaatc

SEQ ID NO: 13923 - DNA, 17 bp, Homo sapiens
  source 1..17: mol_type = genomic DNA
ctctggactttgaatcc

SEQ ID NO: 13924 - DNA, 28 bp, Homo sapiens
  source 1..28: mol_type = genomic DNA
ctctggactttgaatccagcgatccgag

SEQ ID NO: 13925 - DNA, 16 bp, Homo sapiens
  source 1..16: mol_type = genomic DNA
ctctgtggaacctcca

SEQ ID NO: 13926 - DNA, 17 bp, Homo sapiens
  source 1..17: mol_type = genomic DNA
ctctgtggcgcaatgga

SEQ ID NO: 13927 - DNA, 18 bp, Homo sapiens
  source 1..18: mol_type = genomic DNA
ctctgtggcgcaatggac

SEQ ID NO: 13928 - DNA, 19 bp, Homo sapiens
  source 1..19: mol_type = genomic DNA
ctctgtggcgcaatggacg

SEQ ID NO: 13929 - DNA, 34 bp, Homo sapiens
  source 1..34: mol_type = genomic DNA
ctctgtggcgcaatggatagcgcattggacttct

SEQ ID NO: 13930 - DNA, 17 bp, Homo sapiens
  source 1..17: mol_type = genomic DNA
ctcttaatcccagggtc

SEQ ID NO: 13931 - DNA, 18 bp, Homo sapiens
  source 1..18: mol_type = genomic DNA
ctcttaatcccagggtcg

SEQ ID NO: 13932 - DNA, 19 bp, Homo sapiens
  source 1..19: mol_type = genomic DNA
ctcttaatcccagggtcgt

SEQ ID NO: 13933 - DNA, 20 bp, Homo sapiens
  source 1..20: mol_type = genomic DNA
ctcttaatcccagggtcgtg

SEQ ID NO: 13934 - DNA, 21 bp, Homo sapiens
  source 1..21: mol_type = genomic DNA
ctcttaatcccagggtcgtgg

SEQ ID NO: 13935 - DNA, 24 bp, Homo sapiens
  source 1..24: mol_type = genomic DNA
ctcttaatcccagggtcgtgggtt

SEQ ID NO: 13936 - DNA, 26 bp, Homo sapiens
  source 1..26: mol_type = genomic DNA
ctcttaatcccagggtcgtgggttcg

SEQ ID NO: 13937 - DNA, 18 bp, Homo sapiens
  source 1..18: mol_type = genomic DNA
ctcttaatctcagggtcg

SEQ ID NO: 13938 - DNA, 19 bp, Homo sapiens
  source 1..19: mol_type = genomic DNA
ctcttaatctcagggtcgt

SEQ ID NO: 13939 - DNA, 20 bp, Homo sapiens
  source 1..20: mol_type = genomic DNA
ctcttaatctcagggtcgtg

SEQ ID NO: 13940 - DNA, 21 bp, Homo sapiens
  source 1..21: mol_type = genomic DNA
ctcttaatctcagggtcgtgg

SEQ ID NO: 13941 - DNA, 24 bp, Homo sapiens
  source 1..24: mol_type = genomic DNA
ctcttaatctcagggtcgtgggtt

SEQ ID NO: 13942 - DNA, 16 bp, Homo sapiens
  source 1..16: mol_type = genomic DNA
ctcttagcgcagtggg

SEQ ID NO: 13943 - DNA, 20 bp, Homo sapiens
  source 1..20: mol_type = genomic DNA
ctcttcggaggcgtgggttc

SEQ ID NO: 13944 - DNA, 16 bp, Homo sapiens
  source 1..16: mol_type = genomic DNA
ctcttcgggggcgtgg

SEQ ID NO: 13945 - DNA, 17 bp, Homo sapiens
  source 1..17: mol_type = genomic DNA
ctcttcgggggcgtggg

SEQ ID NO: 13946 - DNA, 18 bp, Homo sapiens
  source 1..18: mol_type = genomic DNA
ctcttcgggggcgtgggt

SEQ ID NO: 13947 - DNA, 19 bp, Homo sapiens
  source 1..19: mol_type = genomic DNA
ctcttcgggggcgtgggtt

SEQ ID NO: 13948 - DNA, 20 bp, Homo sapiens
  source 1..20: mol_type = genomic DNA
ctcttcgggggcgtgggttc

SEQ ID NO: 13949 - DNA, 20 bp, Homo sapiens
  source 1..20: mol_type = genomic DNA
ctcttcgggggcgtgggttt

SEQ ID NO: 13950 - DNA, 16 bp, Homo sapiens
  source 1..16: mol_type = genomic DNA
ctctttacagtgacca

SEQ ID NO: 13951 - DNA, 32 bp, Homo sapiens
  source 1..32: mol_type = genomic DNA
ctcttttagtataaatagtaccgttaacttcc

SEQ ID NO: 13952 - DNA, 16 bp, Homo sapiens
  source 1..16: mol_type = genomic DNA
ctgaaaatgtttagac

SEQ ID NO: 13953 - DNA, 20 bp, Homo sapiens
  source 1..20: mol_type = genomic DNA
ctgaaaatgtttagacgggc

SEQ ID NO: 13954 - DNA, 21 bp, Homo sapiens
  source 1..21: mol_type = genomic DNA
ctgaaaatgtttagacgggct

SEQ ID NO: 13955 - DNA, 22 bp, Homo sapiens
  source 1..22: mol_type = genomic DNA
ctgaaaatgtttagacgggctc

SEQ ID NO: 13956 - DNA, 23 bp, Homo sapiens
  source 1..23: mol_type = genomic DNA
ctgaaaatgtttagacgggctca

SEQ ID NO: 13957 - DNA, 24 bp, Homo sapiens
  source 1..24: mol_type = genomic DNA
ctgaaaatgtttagacgggctcac

SEQ ID NO: 13958 - DNA, 25 bp, Homo sapiens
  source 1..25: mol_type = genomic DNA
ctgaaaatgtttagacgggctcaca

SEQ ID NO: 13959 - DNA, 27 bp, Homo sapiens
  source 1..27: mol_type = genomic DNA
ctgaaaatgtttagacgggctcacatc

SEQ ID NO: 13960 - DNA, 30 bp, Homo sapiens
  source 1..30: mol_type = genomic DNA
ctgaaaatgtttagacgggctcacatcacc

SEQ ID NO: 13961 - DNA, 31 bp, Homo sapiens
  source 1..31: mol_type = genomic DNA
ctgaaaatgtttagacgggctcacatcaccc

SEQ ID NO: 13962 - DNA, 33 bp, Homo sapiens
  source 1..33: mol_type = genomic DNA
ctgaaaatgtttagacgggctcacatcacccca

SEQ ID NO: 13963 - DNA, 35 bp, Homo sapiens
  source 1..35: mol_type = genomic DNA
ctgaaaatgtttagacgggctcacatcaccccata

SEQ ID NO: 13964 - DNA, 36 bp, Homo sapiens
  source 1..36: mol_type = genomic DNA
ctgaaaatgtttagacgggctcacatcaccccataa

SEQ ID NO: 13965 - DNA, 39 bp, Homo sapiens
  source 1..39: mol_type = genomic DNA
ctgaaaatgtttagacgggctcacatcaccccataaaca

SEQ ID NO: 13966 - DNA, 41 bp, Homo sapiens
  source 1..41: mol_type = genomic DNA
ctgaaaatgtttagacgggctcacatcaccccataaacacc

SEQ ID NO: 13967 - DNA, 42 bp, Homo sapiens
  source 1..42: mol_type = genomic DNA
ctgaaaatgtttagacgggctcacatcaccccataaacacca

SEQ ID NO: 13968 - DNA, 37 bp, Homo sapiens
  source 1..37: mol_type = genomic DNA
ctgaaaggttggtggttcgagcccacccagggacgcc

SEQ ID NO: 13969 - DNA, 38 bp, Homo sapiens
  source 1..38: mol_type = genomic DNA
ctgaaaggttggtggttcgagcccacccagggacgcca

SEQ ID NO: 13970 - DNA, 16 bp, Homo sapiens
  source 1..16: mol_type = genomic DNA
ctgaaggtcctgagtt

SEQ ID NO: 13971 - DNA, 17 bp, Homo sapiens
  source 1..17: mol_type = genomic DNA
ctgaaggtcctgagttc

SEQ ID NO: 13972 - DNA, 18 bp, Homo sapiens
  source 1..18: mol_type = genomic DNA
ctgaaggtcctgagttcg

SEQ ID NO: 13973 - DNA, 21 bp, Homo sapiens
  source 1..21: mol_type = genomic DNA
ctgaaggtcctgagttcgaac

SEQ ID NO: 13974 - DNA, 22 bp, Homo sapiens
  source 1..22: mol_type = genomic DNA
ctgaaggtcctgagttcgaacc

SEQ ID NO: 13975 - DNA, 23 bp, Homo sapiens
  source 1..23: mol_type = genomic DNA
ctgaaggtcctgagttcgaacct

SEQ ID NO: 13976 - DNA, 24 bp, Homo sapiens
  source 1..24: mol_type = genomic DNA
ctgaaggtcctgagttcgaacctc

SEQ ID NO: 13977 - DNA, 25 bp, Homo sapiens
  source 1..25: mol_type = genomic DNA
ctgaaggtcctgagttcgaacctca

SEQ ID NO: 13978 - DNA, 28 bp, Homo sapiens
  source 1..28: mol_type = genomic DNA
ctgaaggtcctgagttcgaacctcagag

SEQ ID NO: 13979 - DNA, 29 bp, Homo sapiens
  source 1..29: mol_type = genomic DNA
ctgaaggtcctgagttcgaacctcagagg

SEQ ID NO: 13980 - DNA, 31 bp, Homo sapiens
  source 1..31: mol_type = genomic DNA
ctgaaggtcctgagttcgaacctcagagggg

SEQ ID NO: 13981 - DNA, 32 bp, Homo sapiens
  source 1..32: mol_type = genomic DNA
ctgaaggtcctgagttcgaacctcagaggggg

SEQ ID NO: 13982 - DNA, 33 bp, Homo sapiens
  source 1..33: mol_type = genomic DNA
ctgaaggtcctgagttcgaacctcagagggggc

SEQ ID NO: 13983 - DNA, 34 bp, Homo sapiens
  source 1..34: mol_type = genomic DNA
ctgaaggtcctgagttcgaacctcagagggggca

SEQ ID NO: 13984 - DNA, 35 bp, Homo sapiens
  source 1..35: mol_type = genomic DNA
ctgaaggtcctgagttcgaacctcagagggggcac

SEQ ID NO: 13985 - DNA, 36 bp, Homo sapiens
  source 1..36: mol_type = genomic DNA
ctgaaggtcctgagttcgaacctcagagggggcacc

SEQ ID NO: 13986 - DNA, 37 bp, Homo sapiens
  source 1..37: mol_type = genomic DNA
ctgaaggtcctgagttcgaacctcagagggggcacca

SEQ ID NO: 13987 - DNA, 22 bp, Homo sapiens
  source 1..22: mol_type = genomic DNA
ctgaaggtcctgagttcgagcc

SEQ ID NO: 13988 - DNA, 33 bp, Homo sapiens
  source 1..33: mol_type = genomic DNA
ctgaaggtcctgagttcgagcctcagagagggc

SEQ ID NO: 13989 - DNA, 34 bp, Homo sapiens
  source 1..34: mol_type = genomic DNA
ctgaaggtcctgagttcgagcctcagagagggca

SEQ ID NO: 13990 - DNA, 35 bp, Homo sapiens
  source 1..35: mol_type = genomic DNA
ctgaaggtcctgagttcgagcctcagagagggcac

SEQ ID NO: 13991 - DNA, 36 bp, Homo sapiens
  source 1..36: mol_type = genomic DNA
ctgaaggtcctgagttcgagcctcagagagggcacc

SEQ ID NO: 13992 - DNA, 37 bp, Homo sapiens
  source 1..37: mol_type = genomic DNA
ctgaaggtcctgagttcgagcctcagagagggcacca

SEQ ID NO: 13993 - DNA, 16 bp, Homo sapiens
  source 1..16: mol_type = genomic DNA
ctgaaggtcgtgagtt

SEQ ID NO: 13994 - DNA, 17 bp, Homo sapiens
  source 1..17: mol_type = genomic DNA
ctgaaggtcgtgagttc

SEQ ID NO: 13995 - DNA, 18 bp, Homo sapiens
  source 1..18: mol_type = genomic DNA
ctgaaggtcgtgagttcg

SEQ ID NO: 13996 - DNA, 22 bp, Homo sapiens
  source 1..22: mol_type = genomic DNA
ctgaaggtcgtgagttcgagcc

SEQ ID NO: 13997 - DNA, 23 bp, Homo sapiens
  source 1..23: mol_type = genomic DNA
ctgaaggtcgtgagttcgagcct

SEQ ID NO: 13998 - DNA, 24 bp, Homo sapiens
  source 1..24: mol_type = genomic DNA
ctgaaggtcgtgagttcgagcctc

SEQ ID NO: 13999 - DNA, 30 bp, Homo sapiens
  source 1..30: mol_type = genomic DNA
ctgaaggtcgtgagttcgagcctcacacgg

SEQ ID NO: 14000 - DNA, 31 bp, Homo sapiens
  source 1..31: mol_type = genomic DNA
ctgaaggtcgtgagttcgagcctcacacggg

SEQ ID NO: 14001 - DNA, 33 bp, Homo sapiens
  source 1..33: mol_type = genomic DNA
ctgaaggtcgtgagttcgagcctcacacggggc

SEQ ID NO: 14002 - DNA, 34 bp, Homo sapiens
  source 1..34: mol_type = genomic DNA
ctgaaggtcgtgagttcgagcctcacacggggca

SEQ ID NO: 14003 - DNA, 35 bp, Homo sapiens
  source 1..35: mol_type = genomic DNA
ctgaaggtcgtgagttcgagcctcacacggggcac

SEQ ID NO: 14004 - DNA, 36 bp, Homo sapiens
  source 1..36: mol_type = genomic DNA
ctgaaggtcgtgagttcgagcctcacacggggcacc

SEQ ID NO: 14005 - DNA, 37 bp, Homo sapiens
  source 1..37: mol_type = genomic DNA
ctgaaggtcgtgagttcgagcctcacacggggcacca

SEQ ID NO: 14006 - DNA, 32 bp, Homo sapiens
  source 1..32: mol_type = genomic DNA
ctgaaggtcgtgagttcgatcctcacacgggg

SEQ ID NO: 14007 - DNA, 33 bp, Homo sapiens
  source 1..33: mol_type = genomic DNA
ctgaaggtcgtgagttcgatcctcacacggggc

SEQ ID NO: 14008 - DNA, 34 bp, Homo sapiens
  source 1..34: mol_type = genomic DNA
ctgaaggtcgtgagttcgatcctcacacggggca

SEQ ID NO: 14009 - DNA, 35 bp, Homo sapiens
  source 1..35: mol_type = genomic DNA
ctgaaggtcgtgagttcgatcctcacacggggcac

SEQ ID NO: 14010 - DNA, 36 bp, Homo sapiens
  source 1..36: mol_type = genomic DNA
ctgaaggtcgtgagttcgatcctcacacggggcacc

SEQ ID NO: 14011 - DNA, 37 bp, Homo sapiens
  source 1..37: mol_type = genomic DNA
ctgaaggtcgtgagttcgatcctcacacggggcacca

SEQ ID NO: 14012 - DNA, 16 bp, Homo sapiens
  source 1..16: mol_type = genomic DNA
ctgaatccagcgatcc

SEQ ID NO: 14013 - DNA, 17 bp, Homo sapiens
  source 1..17: mol_type = genomic DNA
ctgaatccagcgatccg

SEQ ID NO: 14014 - DNA, 18 bp, Homo sapiens
  source 1..18: mol_type = genomic DNA
ctgaatccagcgatccga

SEQ ID NO: 14015 - DNA, 19 bp, Homo sapiens
  source 1..19: mol_type = genomic DNA
ctgaatccagcgatccgag

SEQ ID NO: 14016 - DNA, 20 bp, Homo sapiens
  source 1..20: mol_type = genomic DNA
ctgaatccagcgatccgagt

SEQ ID NO: 14017 - DNA, 21 bp, Homo sapiens
  source 1..21: mol_type = genomic DNA
ctgaatccagcgatccgagtt

SEQ ID NO: 14018 - DNA, 22 bp, Homo sapiens
  source 1..22: mol_type = genomic DNA
ctgaatccagcgatccgagttc

SEQ ID NO: 14019 - DNA, 23 bp, Homo sapiens
  source 1..23: mol_type = genomic DNA
ctgaatccagcgatccgagttca

SEQ ID NO: 14020 - DNA, 24 bp, Homo sapiens
  source 1..24: mol_type = genomic DNA
ctgaatccagcgatccgagttcaa

SEQ ID NO: 14021 - DNA, 25 bp, Homo sapiens
  source 1..25: mol_type = genomic DNA
ctgaatccagcgatccgagttcaaa

SEQ ID NO: 14022 - DNA, 26 bp, Homo sapiens
  source 1..26: mol_type = genomic DNA
ctgaatccagcgatccgagttcaaat

SEQ ID NO: 14023 - DNA, 27 bp, Homo sapiens
  source 1..27: mol_type = genomic DNA
ctgaatccagcgatccgagttcaaatc

SEQ ID NO: 14024 - DNA, 28 bp, Homo sapiens
  source 1..28: mol_type = genomic DNA
ctgaatccagcgatccgagttcaaatct

SEQ ID NO: 14025 - DNA, 32 bp, Homo sapiens
  source 1..32: mol_type = genomic DNA
ctgaatccagcgatccgagttcaaatctcggt

SEQ ID NO: 14026 - DNA, 33 bp, Homo sapiens
  source 1..33: mol_type = genomic DNA
ctgaatccagcgatccgagttcaaatctcggtg

SEQ ID NO: 14027 - DNA, 35 bp, Homo sapiens
  source 1..35: mol_type = genomic DNA
ctgaatccagcgatccgagttcaaatctcggtgga

SEQ ID NO: 14028 - DNA, 36 bp, Homo sapiens
  source 1..36: mol_type = genomic DNA
ctgaatccagcgatccgagttcaaatctcggtggaa

SEQ ID NO: 14029 - DNA, 37 bp, Homo sapiens
  source 1..37: mol_type = genomic DNA
ctgaatccagcgatccgagttcaaatctcggtggaac

SEQ ID NO: 14030 - DNA, 38 bp, Homo sapiens
  source 1..38: mol_type = genomic DNA
ctgaatccagcgatccgagttcaaatctcggtggaacc

SEQ ID NO: 14031 - DNA, 39 bp, Homo sapiens
  source 1..39: mol_type = genomic DNA
ctgaatccagcgatccgagttcaaatctcggtggaacct

SEQ ID NO: 14032 - DNA, 40 bp, Homo sapiens
  source 1..40: mol_type = genomic DNA
ctgaatccagcgatccgagttcaaatctcggtggaacctc

SEQ ID NO: 14033 - DNA, 41 bp, Homo sapiens
  source 1..41: mol_type = genomic DNA
ctgaatccagcgatccgagttcaaatctcggtggaacctcc

SEQ ID NO: 14034 - DNA, 42 bp, Homo sapiens
  source 1..42: mol_type = genomic DNA
ctgaatccagcgatccgagttcaaatctcggtggaacctcca

SEQ ID NO: 14035 - DNA, 39 bp, Homo sapiens
  source 1..39: mol_type = genomic DNA
ctgaatccagcgatccgagttcaagtctcggtggaacct

SEQ ID NO: 14036 - DNA, 23 bp, Homo sapiens
  source 1..23: mol_type = genomic DNA
ctgaatccagcgatccgagttcg

SEQ ID NO: 14037 - DNA, 24 bp, Homo sapiens
  source 1..24: mol_type = genomic DNA
ctgaatccagcgatccgagttcga

SEQ ID NO: 14038 - DNA, 25 bp, Homo sapiens
  source 1..25: mol_type = genomic DNA
ctgaatccagcgatccgagttcgag

SEQ ID NO: 14039 - DNA, 26 bp, Homo sapiens
  source 1..26: mol_type = genomic DNA
ctgaatccagcgatccgagttcgagt

SEQ ID NO: 14040 - DNA, 28 bp, Homo sapiens
  source 1..28: mol_type = genomic DNA
ctgaatccagcgatccgagttcgagtct

SEQ ID NO: 14041 - DNA, 33 bp, Homo sapiens
  source 1..33: mol_type = genomic DNA
ctgaatccagcgatccgagttcgagtctcggtg

SEQ ID NO: 14042 - DNA, 34 bp, Homo sapiens
  source 1..34: mol_type = genomic DNA
ctgaatccagcgatccgagttcgagtctcggtgg

SEQ ID NO: 14043 - DNA, 39 bp, Homo sapiens
  source 1..39: mol_type = genomic DNA
ctgaatccagcgatccgagttcgagtctcggtggaacct

SEQ ID NO: 14044 - DNA, 40 bp, Homo sapiens
  source 1..40: mol_type = genomic DNA
ctgaatccagcgatccgagttcgagtctcggtggaacctc

SEQ ID NO: 14045 - DNA, 41 bp, Homo sapiens
  source 1..41: mol_type = genomic DNA
ctgaatccagcgatccgagttcgagtctcggtggaacctcc

SEQ ID NO: 14046 - DNA, 16 bp, Homo sapiens
  source 1..16: mol_type = genomic DNA
ctgacaacagaggctt

SEQ ID NO: 14047 - DNA, 17 bp, Homo sapiens
  source 1..17: mol_type = genomic DNA
ctgacaacagaggctta

SEQ ID NO: 14048 - DNA, 18 bp, Homo sapiens
  source 1..18: mol_type = genomic DNA
ctgacaacagaggcttac

SEQ ID NO: 14049 - DNA, 19 bp, Homo sapiens
  source 1..19: mol_type = genomic DNA
ctgacaacagaggcttacg

SEQ ID NO: 14050 - DNA, 20 bp, Homo sapiens
  source 1..20: mol_type = genomic DNA
ctgacaacagaggcttacga

SEQ ID NO: 14051 - DNA, 21 bp, Homo sapiens
  source 1..21: mol_type = genomic DNA
ctgacaacagaggcttacgac

SEQ ID NO: 14052 - DNA, 22 bp, Homo sapiens
  source 1..22: mol_type = genomic DNA
ctgacaacagaggcttacgacc

SEQ ID NO: 14053 - DNA, 23 bp, Homo sapiens
  source 1..23: mol_type = genomic DNA
ctgacaacagaggcttacgaccc

SEQ ID NO: 14054 - DNA, 24 bp, Homo sapiens
  source 1..24: mol_type = genomic DNA
ctgacaacagaggcttacgacccc

SEQ ID NO: 14055 - DNA, 25 bp, Homo sapiens
  source 1..25: mol_type = genomic DNA
ctgacaacagaggcttacgacccct

SEQ ID NO: 14056 - DNA, 26 bp, Homo sapiens
  source 1..26: mol_type = genomic DNA
ctgacaacagaggcttacgacccctt

SEQ ID NO: 14057 - DNA, 27 bp, Homo sapiens
  source 1..27: mol_type = genomic DNA
ctgacaacagaggcttacgacccctta

SEQ ID NO: 14058 - DNA, 28 bp, Homo sapiens
  source 1..28: mol_type = genomic DNA
ctgacaacagaggcttacgaccccttat

SEQ ID NO: 14059 - DNA, 29 bp, Homo sapiens
  source 1..29: mol_type = genomic DNA
ctgacaacagaggcttacgaccccttatt

SEQ ID NO: 14060 - DNA, 30 bp, Homo sapiens
  source 1..30: mol_type = genomic DNA
ctgacaacagaggcttacgaccccttattt

SEQ ID NO: 14061 - DNA, 31 bp, Homo sapiens
  source 1..31: mol_type = genomic DNA
ctgacaacagaggcttacgaccccttattta

SEQ ID NO: 14062 - DNA, 32 bp, Homo sapiens
  source 1..32: mol_type = genomic DNA
ctgacaacagaggcttacgaccccttatttac

SEQ ID NO: 14063 - DNA, 33 bp, Homo sapiens
  source 1..33: mol_type = genomic DNA
ctgacaacagaggcttacgaccccttatttacc

SEQ ID NO: 14064 - DNA, 34 bp, Homo sapiens
  source 1..34: mol_type = genomic DNA
ctgacaacagaggcttacgaccccttatttaccc

SEQ ID NO: 14065 - DNA, 35 bp, Homo sapiens
  source 1..35: mol_type = genomic DNA
ctgacaacagaggcttacgaccccttatttacccc

SEQ ID NO: 14066 - DNA, 36 bp, Homo sapiens
  source 1..36: mol_type = genomic DNA
ctgacaacagaggcttacgaccccttatttacccca

SEQ ID NO: 14067 - DNA, 16 bp, Homo sapiens
  source 1..16: mol_type = genomic DNA
ctgacttcggatcaga

SEQ ID NO: 14068 - DNA, 17 bp, Homo sapiens
  source 1..17: mol_type = genomic DNA
ctgacttcggatcagaa

SEQ ID NO: 14069 - DNA, 27 bp, Homo sapiens
  source 1..27: mol_type = genomic DNA
ctgacttcggatcagaagattgcaggt

SEQ ID NO: 14070 - DNA, 36 bp, Homo sapiens
  source 1..36: mol_type = genomic DNA
ctgacttcggatcagaagattgcaggttcgagtcct

SEQ ID NO: 14071 - DNA, 16 bp, Homo sapiens
  source 1..16: mol_type = genomic DNA
ctgagggtccagggtt

SEQ ID NO: 14072 - DNA, 17 bp, Homo sapiens
  source 1..17: mol_type = genomic DNA
ctgagggtccagggttc

SEQ ID NO: 14073 - DNA, 18 bp, Homo sapiens
  source 1..18: mol_type = genomic DNA
ctgagggtccagggttca

SEQ ID NO: 14074 - DNA, 26 bp, Homo sapiens
  source 1..26: mol_type = genomic DNA
ctgagggtccagggttcaagtccctg

SEQ ID NO: 14075 - DNA, 36 bp, Homo sapiens
  source 1..36: mol_type = genomic DNA
ctgagggtccagggttcaagtccctgtccaggcgcc

SEQ ID NO: 14076 - DNA, 36 bp, Homo sapiens
  source 1..36: mol_type = genomic DNA
ctgagggtccagggttcaagtccctgttcaggcgcc

SEQ ID NO: 14077 - DNA, 31 bp, Homo sapiens
  source 1..31: mol_type = genomic DNA
ctgagggtccagggttcaagtccctgttcgg

SEQ ID NO: 14078 - DNA, 32 bp, Homo sapiens
  source 1..32: mol_type = genomic DNA
ctgagggtccagggttcaagtccctgttcggg

SEQ ID NO: 14079 - DNA, 33 bp, Homo sapiens
  source 1..33: mol_type = genomic DNA
ctgagggtccagggttcaagtccctgttcgggc

SEQ ID NO: 14080 - DNA, 34 bp, Homo sapiens
  source 1..34: mol_type = genomic DNA
ctgagggtccagggttcaagtccctgttcgggcg

SEQ ID NO: 14081 - DNA, 35 bp, Homo sapiens
  source 1..35: mol_type = genomic DNA
ctgagggtccagggttcaagtccctgttcgggcgc

SEQ ID NO: 14082 - DNA, 36 bp, Homo sapiens
  source 1..36: mol_type = genomic DNA
ctgagggtccagggttcaagtccctgttcgggcgcc

SEQ ID NO: 14083 - DNA, 37 bp, Homo sapiens
  source 1..37: mol_type = genomic DNA
ctgagggtccagggttcaagtccctgttcgggcgcca

SEQ ID NO: 14084 - DNA, 25 bp, Homo sapiens
  source 1..25: mol_type = genomic DNA
ctgagggtccagggttcatgtccct

SEQ ID NO: 14085 - DNA, 29 bp, Homo sapiens
  source 1..29: mol_type = genomic DNA
ctgagggtccagggttcatgtccctgttc

SEQ ID NO: 14086 - DNA, 18 bp, Homo sapiens
  source 1..18: mol_type = genomic DNA
ctgagggtccagggttta

SEQ ID NO: 14087 - DNA, 16 bp, Homo sapiens
  source 1..16: mol_type = genomic DNA
ctgagtgaagcattgg

SEQ ID NO: 14088 - DNA, 18 bp, Homo sapiens
  source 1..18: mol_type = genomic DNA
ctgagtgaagcattggac

SEQ ID NO: 14089 - DNA, 19 bp, Homo sapiens
  source 1..19: mol_type = genomic DNA
ctgagtgaagcattggact

SEQ ID NO: 14090 - DNA, 20 bp, Homo sapiens
  source 1..20: mol_type = genomic DNA
ctgagtgaagcattggactg

SEQ ID NO: 14091 - DNA, 21 bp, Homo sapiens
  source 1..21: mol_type = genomic DNA
ctgagtgaagcattggactgt

SEQ ID NO: 14092 - DNA, 22 bp, Homo sapiens
  source 1..22: mol_type = genomic DNA
ctgagtgaagcattggactgta

SEQ ID NO: 14093 - DNA, 23 bp, Homo sapiens
  source 1..23: mol_type = genomic DNA
ctgagtgaagcattggactgtaa

SEQ ID NO: 14094 - DNA, 24 bp, Homo sapiens
  source 1..24: mol_type = genomic DNA
ctgagtgaagcattggactgtaaa

SEQ ID NO: 14095 - DNA, 27 bp, Homo sapiens
  source 1..27: mol_type = genomic DNA
ctgagtgaagcattggactgtaaatct

SEQ ID NO: 14096 - DNA, 28 bp, Homo sapiens
  source 1..28: mol_type = genomic DNA
ctgagtgaagcattggactgtaaatcta

SEQ ID NO: 14097 - DNA, 29 bp, Homo sapiens
  source 1..29: mol_type = genomic DNA
ctgagtgaagcattggactgtaaatctaa

SEQ ID NO: 14098 - DNA, 30 bp, Homo sapiens
  source 1..30: mol_type = genomic DNA
ctgagtgaagcattggactgtaaatctaaa

SEQ ID NO: 14099 - DNA, 31 bp, Homo sapiens
  source 1..31: mol_type = genomic DNA
ctgagtgaagcattggactgtaaatctaaag

SEQ ID NO: 14100 - DNA, 37 bp, Homo sapiens
  source 1..37: mol_type = genomic DNA
ctgagtgaagcattggactgtaaatctaaagacaggg

SEQ ID NO: 14101 - DNA, 24 bp, Homo sapiens
  source 1..24: mol_type = genomic DNA
ctgagttcgaacctcagagggggc

SEQ ID NO: 14102 - DNA, 22 bp, Homo sapiens
  source 1..22: mol_type = genomic DNA
ctgataaaagagttactttgat

SEQ ID NO: 14103 - DNA, 26 bp, Homo sapiens
  source 1..26: mol_type = genomic DNA
ctgataaaagagttactttgatagag

SEQ ID NO: 14104 - DNA, 16 bp, Homo sapiens
  source 1..16: mol_type = genomic DNA
ctgattccggatcaga

SEQ ID NO: 14105 - DNA, 19 bp, Homo sapiens
  source 1..19: mol_type = genomic DNA
ctgcagatcaagaggtccc

SEQ ID NO: 14106 - DNA, 22 bp, Homo sapiens
  source 1..22: mol_type = genomic DNA
ctgcagatcaagaggtccccgg

SEQ ID NO: 14107 - DNA, 21 bp, Homo sapiens
  source 1..21: mol_type = genomic DNA
ctgcagatcaagaggtccctg

SEQ ID NO: 14108 - DNA, 23 bp, Homo sapiens
  source 1..23: mol_type = genomic DNA
ctgcagatcaagaggtccctggt

SEQ ID NO: 14109 - DNA, 17 bp, Homo sapiens
  source 1..17: mol_type = genomic DNA
ctgccacgcgggaggcc

SEQ ID NO: 14110 - DNA, 18 bp, Homo sapiens
  source 1..18: mol_type = genomic DNA
ctgccacgcgggaggccc

SEQ ID NO: 14111 - DNA, 20 bp, Homo sapiens
  source 1..20: mol_type = genomic DNA
ctgccacgcgggaggcccgg

SEQ ID NO: 14112 - DNA, 21 bp, Homo sapiens
  source 1..21: mol_type = genomic DNA
ctgccacgcgggaggcccggg

SEQ ID NO: 14113 - DNA, 22 bp, Homo sapiens
  source 1..22: mol_type = genomic DNA
ctgccacgcgggaggcccgggt

SEQ ID NO: 14114 - DNA, 23 bp, Homo sapiens
  source 1..23: mol_type = genomic DNA
ctgccacgcgggaggcccgggtt

SEQ ID NO: 14115 - DNA, 25 bp, Homo sapiens
  source 1..25: mol_type = genomic DNA
ctgccacgcgggaggcccgggttcg

SEQ ID NO: 14116 - DNA, 28 bp, Homo sapiens
  source 1..28: mol_type = genomic DNA
ctgccacgcgggaggcccgggttcgatt

SEQ ID NO: 14117 - DNA, 35 bp, Homo sapiens
  source 1..35: mol_type = genomic DNA
ctgccacgcgggaggcccgggttcgattcccggcc

SEQ ID NO: 14118 - DNA, 24 bp, Homo sapiens
  source 1..24: mol_type = genomic DNA
ctgccttccaagcagttgacccgg

SEQ ID NO: 14119 - DNA, 26 bp, Homo sapiens
  source 1..26: mol_type = genomic DNA
ctgccttccaagcagttgacccgggt

SEQ ID NO: 14120 - DNA, 47 bp, Homo sapiens
  source 1..47: mol_type = genomic DNA
ctgccttccaagcagttgacccgggttcgattcccggccaacgcacc

SEQ ID NO: 14121 - DNA, 18 bp, Homo sapiens
  source 1..18: mol_type = genomic DNA
ctgcgtgttcgaatcacg

SEQ ID NO: 14122 - DNA, 22 bp, Homo sapiens
  source 1..22: mol_type = genomic DNA
ctgcgtgttcgaatcacgtcgg

SEQ ID NO: 14123 - DNA, 23 bp, Homo sapiens
  source 1..23: mol_type = genomic DNA
ctgcgtgttcgaatcacgtcggg

SEQ ID NO: 14124 - DNA, 24 bp, Homo sapiens
  source 1..24: mol_type = genomic DNA
ctgcgtgttcgaatcacgtcgggg

SEQ ID NO: 14125 - DNA, 25 bp, Homo sapiens
  source 1..25: mol_type = genomic DNA
ctgcgtgttcgaatcacgtcggggt

SEQ ID NO: 14126 - DNA, 26 bp, Homo sapiens
  source 1..26: mol_type = genomic DNA
ctgcgtgttcgaatcacgtcggggtc

SEQ ID NO: 14127 - DNA, 27 bp, Homo sapiens
  source 1..27: mol_type = genomic DNA
ctgcgtgttcgaatcacgtcggggtca

SEQ ID NO: 14128 - DNA, 28 bp, Homo sapiens
  source 1..28: mol_type = genomic DNA
ctgcgtgttcgaatcacgtcggggtcac

SEQ ID NO: 14129 - DNA, 29 bp, Homo sapiens
  source 1..29: mol_type = genomic DNA
ctgcgtgttcgaatcacgtcggggtcacc

SEQ ID NO: 14130 - DNA, 30 bp, Homo sapiens
  source 1..30: mol_type = genomic DNA
ctgcgtgttcgaatcacgtcggggtcacca

SEQ ID NO: 14131 - DNA, 16 bp, Homo sapiens
  source 1..16: mol_type = genomic DNA
ctgcgttgtggccgca

SEQ ID NO: 14132 - DNA, 16 bp, Homo sapiens
  source 1..16: mol_type = genomic DNA
ctgctaactcatgccc

SEQ ID NO: 14133 - DNA, 17 bp, Homo sapiens
  source 1..17: mol_type = genomic DNA
ctgctaactcatgcccc

SEQ ID NO: 14134 - DNA, 18 bp, Homo sapiens
  source 1..18: mol_type = genomic DNA
ctgctaactcatgccccc

SEQ ID NO: 14135 - DNA, 19 bp, Homo sapiens
  source 1..19: mol_type = genomic DNA
ctgctaactcatgccccca

SEQ ID NO: 14136 - DNA, 20 bp, Homo sapiens
  source 1..20: mol_type = genomic DNA
ctgctaactcatgcccccat

SEQ ID NO: 14137 - DNA, 21 bp, Homo sapiens
  source 1..21: mol_type = genomic DNA
ctgctaactcatgcccccatg

SEQ ID NO: 14138 - DNA, 22 bp, Homo sapiens
  source 1..22: mol_type = genomic DNA
ctgctaactcatgcccccatgt

SEQ ID NO: 14139 - DNA, 23 bp, Homo sapiens
  source 1..23: mol_type = genomic DNA
ctgctaactcatgcccccatgtc

SEQ ID NO: 14140 - DNA, 24 bp, Homo sapiens
  source 1..24: mol_type = genomic DNA
ctgctaactcatgcccccatgtct

SEQ ID NO: 14141 - DNA, 25 bp, Homo sapiens
  source 1..25: mol_type = genomic DNA
ctgctaactcatgcccccatgtcta

SEQ ID NO: 14142 - DNA, 26 bp, Homo sapiens
  source 1..26: mol_type = genomic DNA
ctgctaactcatgcccccatgtctaa

SEQ ID NO: 14143 - DNA, 27 bp, Homo sapiens
  source 1..27: mol_type = genomic DNA
ctgctaactcatgcccccatgtctaac

SEQ ID NO: 14144 - DNA, 28 bp, Homo sapiens
  source 1..28: mol_type = genomic DNA
ctgctaactcatgcccccatgtctaaca

SEQ ID NO: 14145 - DNA, 30 bp, Homo sapiens
  source 1..30: mol_type = genomic DNA
ctgctaactcatgcccccatgtctaacaac

SEQ ID NO: 14146 - DNA, 31 bp, Homo sapiens
  source 1..31: mol_type = genomic DNA
ctgctaactcatgcccccatgtctaacaaca

SEQ ID NO: 14147 - DNA, 32 bp, Homo sapiens
  source 1..32: mol_type = genomic DNA
ctgctaactcatgcccccatgtctaacaacat

SEQ ID NO: 14148 - DNA, 33 bp, Homo sapiens
  source 1..33: mol_type = genomic DNA
ctgctaactcatgcccccatgtctaacaacatg

SEQ ID NO: 14149 - DNA, 34 bp, Homo sapiens
  source 1..34: mol_type = genomic DNA
ctgctaactcatgcccccatgtctaacaacatgg

SEQ ID NO: 14150 - DNA, 35 bp, Homo sapiens
  source 1..35: mol_type = genomic DNA
ctgctaactcatgcccccatgtctaacaacatggc

SEQ ID NO: 14151 - DNA, 36 bp, Homo sapiens
  source 1..36: mol_type = genomic DNA
ctgctaactcatgcccccatgtctaacaacatggct

SEQ ID NO: 14152 - DNA, 37 bp, Homo sapiens
  source 1..37: mol_type = genomic DNA
ctgctaactcatgcccccatgtctaacaacatggctt

SEQ ID NO: 14153 - DNA, 38 bp, Homo sapiens
  source 1..38: mol_type = genomic DNA
ctgctaactcatgcccccatgtctaacaacatggcttt

SEQ ID NO: 14154 - DNA, 39 bp, Homo sapiens
  source 1..39: mol_type = genomic DNA
ctgctaactcatgcccccatgtctaacaacatggctttc

SEQ ID NO: 14155 - DNA, 40 bp, Homo sapiens
  source 1..40: mol_type = genomic DNA
ctgctaactcatgcccccatgtctaacaacatggctttct

SEQ ID NO: 14156 - DNA, 41 bp, Homo sapiens
  source 1..41: mol_type = genomic DNA
ctgctaactcatgcccccatgtctaacaacatggctttctc

SEQ ID NO: 14157 - DNA, 42 bp, Homo sapiens
  source 1..42: mol_type = genomic DNA
ctgctaactcatgcccccatgtctaacaacatggctttctca

SEQ ID NO: 14158 - DNA, 43 bp, Homo sapiens
  source 1..43: mol_type = genomic DNA
ctgctaactcatgcccccatgtctaacaacatggctttctcac

SEQ ID NO: 14159 - DNA, 44 bp, Homo sapiens
  source 1..44: mol_type = genomic DNA
ctgctaactcatgcccccatgtctaacaacatggctttctcacc

SEQ ID NO: 14160 - DNA, 45 bp, Homo sapiens
  source 1..45: mol_type = genomic DNA
ctgctaactcatgcccccatgtctaacaacatggctttctcacca

SEQ ID NO: 14161 - DNA, 17 bp, Homo sapiens
  source 1..17: mol_type = genomic DNA
ctgctaatccattgtgc

SEQ ID NO: 14162 - DNA, 18 bp, Homo sapiens
  source 1..18: mol_type = genomic DNA
ctgctaatccattgtgct

SEQ ID NO: 14163 - DNA, 19 bp, Homo sapiens
  source 1..19: mol_type = genomic DNA
ctgctaatccattgtgctc

SEQ ID NO: 14164 - DNA, 22 bp, Homo sapiens
  source 1..22: mol_type = genomic DNA
ctgctaatccattgtgctttgc

SEQ ID NO: 14165 - DNA, 16 bp, Homo sapiens
  source 1..16: mol_type = genomic DNA
ctggactctgaatcca

SEQ ID NO: 14166 - DNA, 17 bp, Homo sapiens
  source 1..17: mol_type = genomic DNA
ctggactctgaatccag

SEQ ID NO: 14167 - DNA, 18 bp, Homo sapiens
  source 1..18: mol_type = genomic DNA
ctggactctgaatccagc

SEQ ID NO: 14168 - DNA, 19 bp, Homo sapiens
  source 1..19: mol_type = genomic DNA
ctggactctgaatccagcg

SEQ ID NO: 14169 - DNA, 20 bp, Homo sapiens
  source 1..20: mol_type = genomic DNA
ctggactctgaatccagcga

SEQ ID NO: 14170 - DNA, 21 bp, Homo sapiens
  source 1..21: mol_type = genomic DNA
ctggactctgaatccagcgat

SEQ ID NO: 14171 - DNA, 22 bp, Homo sapiens
  source 1..22: mol_type = genomic DNA
ctggactctgaatccagcgatc

SEQ ID NO: 14172 - DNA, 23 bp, Homo sapiens
  source 1..23: mol_type = genomic DNA
ctggactctgaatccagcgatcc

SEQ ID NO: 14173 - DNA, 24 bp, Homo sapiens
  source 1..24: mol_type = genomic DNA
ctggactctgaatccagcgatccg

SEQ ID NO: 14174 - DNA, 25 bp, Homo sapiens
  source 1..25: mol_type = genomic DNA
ctggactctgaatccagcgatccga

SEQ ID NO: 14175 - DNA, 26 bp, Homo sapiens
  source 1..26: mol_type = genomic DNA
ctggactctgaatccagcgatccgag

SEQ ID NO: 14176 - DNA, 27 bp, Homo sapiens
  source 1..27: mol_type = genomic DNA
ctggactctgaatccagcgatccgagt

SEQ ID NO: 14177 - DNA, 28 bp, Homo sapiens
  source 1..28: mol_type = genomic DNA
ctggactctgaatccagcgatccgagtt

SEQ ID NO: 14178 - DNA, 29 bp, Homo sapiens
  source 1..29: mol_type = genomic DNA
ctggactctgaatccagcgatccgagttc

SEQ ID NO: 14179 - DNA, 30 bp, Homo sapiens
  source 1..30: mol_type = genomic DNA
ctggactctgaatccagcgatccgagttca

SEQ ID NO: 14180 - DNA, 31 bp, Homo sapiens
  source 1..31: mol_type = genomic DNA
ctggactctgaatccagcgatccgagttcaa

SEQ ID NO: 14181 - DNA, 32 bp, Homo sapiens
  source 1..32: mol_type = genomic DNA
ctggactctgaatccagcgatccgagttcaaa

SEQ ID NO: 14182 - DNA, 39 bp, Homo sapiens
  source 1..39: mol_type = genomic DNA
ctggactctgaatccagcgatccgagttcaaatctcggt

SEQ ID NO: 14183 - DNA, 40 bp, Homo sapiens
  source 1..40: mol_type = genomic DNA
ctggactctgaatccagcgatccgagttcaaatctcggtg

SEQ ID NO: 14184 - DNA, 46 bp, Homo sapiens
  source 1..46: mol_type = genomic DNA
ctggactctgaatccagcgatccgagttcaaatctcggtggaacct

SEQ ID NO: 14185 - DNA, 48 bp, Homo sapiens
  source 1..48: mol_type = genomic DNA
ctggactctgaatccagcgatccgagttcaaatctcggtggaacctcc

SEQ ID NO: 14186 - DNA, 30 bp, Homo sapiens
  source 1..30: mol_type = genomic DNA
ctggactctgaatccagcgatccgagttcg

SEQ ID NO: 14187 - DNA, 47 bp, Homo sapiens
  source 1..47: mol_type = genomic DNA
ctggactctgaatccagcgatccgagttcgagtctcggtggaacctc

SEQ ID NO: 14188 - DNA, 16 bp, Homo sapiens
  source 1..16: mol_type = genomic DNA
ctggactttgaatcca

SEQ ID NO: 14189 - DNA, 26 bp, Homo sapiens
  source 1..26: mol_type = genomic DNA
ctggactttgaatccagcgatccgag

SEQ ID NO: 14190 - DNA, 27 bp, Homo sapiens
  source 1..27: mol_type = genomic DNA
ctggactttgaatccagcgatccgagt

SEQ ID NO: 14191 - DNA, 29 bp, Homo sapiens
  source 1..29: mol_type = genomic DNA
ctggactttgaatccagcgatccgagttc

SEQ ID NO: 14192 - DNA, 35 bp, Homo sapiens
  source 1..35: mol_type = genomic DNA
ctggaggcgtgggttcgaatcccacttctgacacc

SEQ ID NO: 14193 - DNA, 23 bp, Homo sapiens
  source 1..23: mol_type = genomic DNA
ctggatagctcagtcggtagagc

SEQ ID NO: 14194 - DNA, 26 bp, Homo sapiens
  source 1..26: mol_type = genomic DNA
ctggatagctcagtcggtagagcatc

SEQ ID NO: 14195 - DNA, 27 bp, Homo sapiens
  source 1..27: mol_type = genomic DNA
ctggatagctcagtcggtagagcatca

SEQ ID NO: 14196 - DNA, 28 bp, Homo sapiens
  source 1..28: mol_type = genomic DNA
ctggatagctcagtcggtagagcatcag

SEQ ID NO: 14197 - DNA, 30 bp, Homo sapiens
  source 1..30: mol_type = genomic DNA
ctggatagctcagtcggtagagcatcagac

SEQ ID NO: 14198 - DNA, 31 bp, Homo sapiens
  source 1..31: mol_type = genomic DNA
ctggatagctcagtcggtagagcatcagact

SEQ ID NO: 14199 - DNA, 20 bp, Homo sapiens
  source 1..20: mol_type = genomic DNA
ctggatagctcagttggtag

SEQ ID NO: 14200 - DNA, 23 bp, Homo sapiens
  source 1..23: mol_type = genomic DNA
ctggatagctcagttggtagagc

SEQ ID NO: 14201 - DNA, 26 bp, Homo sapiens
  source 1..26: mol_type = genomic DNA
ctggatagctcagttggtagagcatc

SEQ ID NO: 14202 - DNA, 30 bp, Homo sapiens
  source 1..30: mol_type = genomic DNA
ctggatagctcagttggtagagcatcagac

SEQ ID NO: 14203 - DNA, 36 bp, Homo sapiens
  source 1..36: mol_type = genomic DNA
ctggatttaggctccagtctcttcggaggcgtgggt

SEQ ID NO: 14204 - DNA, 29 bp, Homo sapiens
  source 1..29: mol_type = genomic DNA
ctggcggtctagtggttaggattcggcgc

SEQ ID NO: 14205 - DNA, 30 bp, Homo sapiens
  source 1..30: mol_type = genomic DNA
ctggcggtctagtggttaggattcggcgct

SEQ ID NO: 14206 - DNA, 31 bp, Homo sapiens
  source 1..31: mol_type = genomic DNA
ctggcggtctagtggttaggattcggcgctc

SEQ ID NO: 14207 - DNA, 17 bp, Homo sapiens
  source 1..17: mol_type = genomic DNA
ctggctagctcagtcgg

SEQ ID NO: 14208 - DNA, 24 bp, Homo sapiens
  source 1..24: mol_type = genomic DNA
ctgggcccataacccagaggtcga

SEQ ID NO: 14209 - DNA, 26 bp, Homo sapiens
  source 1..26: mol_type = genomic DNA
ctgggcccataacccagaggtcgatg

SEQ ID NO: 14210 - DNA, 28 bp, Homo sapiens
  source 1..28: mol_type = genomic DNA
ctgggcccataacccagaggtcgatgga

SEQ ID NO: 14211 - DNA, 29 bp, Homo sapiens
  source 1..29: mol_type = genomic DNA
ctgggcccataacccagaggtcgatggat

SEQ ID NO: 14212 - DNA, 30 bp, Homo sapiens
  source 1..30: mol_type = genomic DNA
ctgggcccataacccagaggtcgatggatc

SEQ ID NO: 14213 - DNA, 31 bp, Homo sapiens
  source 1..31: mol_type = genomic DNA
ctgggcccataacccagaggtcgatggatcg

SEQ ID NO: 14214 - DNA, 16 bp, Homo sapiens
  source 1..16: mol_type = genomic DNA
ctggggattgtgggtt

SEQ ID NO: 14215 - DNA, 17 bp, Homo sapiens
  source 1..17: mol_type = genomic DNA
ctggggattgtgggttc

SEQ ID NO: 14216 - DNA, 18 bp, Homo sapiens
  source 1..18: mol_type = genomic DNA
ctggggattgtgggttcg

SEQ ID NO: 14217 - DNA, 24 bp, Homo sapiens
  source 1..24: mol_type = genomic DNA
ctggggattgtgggttcgagtccc

SEQ ID NO: 14218 - DNA, 27 bp, Homo sapiens
  source 1..27: mol_type = genomic DNA
ctggggattgtgggttcgagtcccatc

SEQ ID NO: 14219 - DNA, 32 bp, Homo sapiens
  source 1..32: mol_type = genomic DNA
ctggggattgtgggttcgagtcccatctgggt

SEQ ID NO: 14220 - DNA, 33 bp, Homo sapiens
  source 1..33: mol_type = genomic DNA
ctggggattgtgggttcgagtcccatctgggtc

SEQ ID NO: 14221 - DNA, 34 bp, Homo sapiens
  source 1..34: mol_type = genomic DNA
ctggggattgtgggttcgagtcccatctgggtcg

SEQ ID NO: 14222 - DNA, 35 bp, Homo sapiens
  source 1..35: mol_type = genomic DNA
ctggggattgtgggttcgagtcccatctgggtcgc

SEQ ID NO: 14223 - DNA, 36 bp, Homo sapiens
  source 1..36: mol_type = genomic DNA
ctggggattgtgggttcgagtcccatctgggtcgcc

SEQ ID NO: 14224 - DNA, 37 bp, Homo sapiens
  source 1..37: mol_type = genomic DNA
ctggggattgtgggttcgagtcccatctgggtcgcca

SEQ ID NO: 14225 - DNA, 23 bp, Homo sapiens
  source 1..23: mol_type = genomic DNA
ctgggtagctcagtcggtagagc

SEQ ID NO: 14226 - DNA, 26 bp, Homo sapiens
  source 1..26: mol_type = genomic DNA
ctgggtagctcagtcggtagagcatc

SEQ ID NO: 14227 - DNA, 27 bp, Homo sapiens
  source 1..27: mol_type = genomic DNA
ctgggtagctcagtcggtagagcatca

SEQ ID NO: 14228 - DNA, 28 bp, Homo sapiens
  source 1..28: mol_type = genomic DNA
ctgggtagctcagtcggtagagcatcag

SEQ ID NO: 14229 - DNA, 30 bp, Homo sapiens
  source 1..30: mol_type = genomic DNA
ctgggtagctcagtcggtagagcatcagac

SEQ ID NO: 14230 - DNA, 23 bp, Homo sapiens
  source 1..23: mol_type = genomic DNA
ctgggttcgaatcccagcggggc

SEQ ID NO: 14231 - DNA, 24 bp, Homo sapiens
  source 1..24: mol_type = genomic DNA
ctgggttcgaatcccagcggggcc

SEQ ID NO: 14232 - DNA, 26 bp, Homo sapiens
  source 1..26: mol_type = genomic DNA
ctgggttcgaatcccagcggggcctc

SEQ ID NO: 14233 - DNA, 27 bp, Homo sapiens
  source 1..27: mol_type = genomic DNA
ctgggttcgaatcccagcggggcctcc

SEQ ID NO: 14234 - DNA, 25 bp, Homo sapiens
  source 1..25: mol_type = genomic DNA
ctgggttcgaatcccagcggtgcct

SEQ ID NO: 14235 - DNA, 26 bp, Homo sapiens
  source 1..26: mol_type = genomic DNA
ctgggttcgaatcccagcggtgcctc

SEQ ID NO: 14236 - DNA, 27 bp, Homo sapiens
  source 1..27: mol_type = genomic DNA
ctgggttcgaatcccagcggtgcctcc

SEQ ID NO: 14237 - DNA, 25 bp, Homo sapiens
  source 1..25: mol_type = genomic DNA
ctgggttcgagccccagtggaacca

SEQ ID NO: 14238 - DNA, 27 bp, Homo sapiens
  source 1..27: mol_type = genomic DNA
ctgggttcgagccccagtggaaccacc

SEQ ID NO: 14239 - DNA, 17 bp, Homo sapiens
  source 1..17: mol_type = genomic DNA
ctggtagagcggaggac

SEQ ID NO: 14240 - DNA, 18 bp, Homo sapiens
  source 1..18: mol_type = genomic DNA
ctggtagagcggaggact

SEQ ID NO: 14241 - DNA, 19 bp, Homo sapiens
  source 1..19: mol_type = genomic DNA
ctggtagagcggaggactg

SEQ ID NO: 14242 - DNA, 21 bp, Homo sapiens
  source 1..21: mol_type = genomic DNA
ctggtagagcggaggactgta

SEQ ID NO: 14243 - DNA, 26 bp, Homo sapiens
  source 1..26: mol_type = genomic DNA
ctggtagagcggaggactgtagatcc

SEQ ID NO: 14244 - DNA, 20 bp, Homo sapiens
  source 1..20: mol_type = genomic DNA
ctggtctagtggttaggatt

SEQ ID NO: 14245 - DNA, 45 bp, Homo sapiens
  source 1..45: mol_type = genomic DNA
ctggtctccaatggaggcgtgggttcgaatcccacttctgacacc

SEQ ID NO: 14246 - DNA, 25 bp, Homo sapiens
  source 1..25: mol_type = genomic DNA
ctggtctccggatggaggcgtgggt

SEQ ID NO: 14247 - DNA, 46 bp, Homo sapiens
  source 1..46: mol_type = genomic DNA
ctggtctccggatggaggcgtgggttcgaatcccacttctgacacc

SEQ ID NO: 14248 - DNA, 47 bp, Homo sapiens
  source 1..47: mol_type = genomic DNA
ctggtctccggatggaggcgtgggttcgaatcccacttctgacacca

SEQ ID NO: 14249 - DNA, 16 bp, Homo sapiens
  source 1..16: mol_type = genomic DNA
ctggtggtctagtggc

SEQ ID NO: 14250 - DNA, 21 bp, Homo sapiens
  source 1..21: mol_type = genomic DNA
ctggtggtctagtggctagga

SEQ ID NO: 14251 - DNA, 23 bp, Homo sapiens
  source 1..23: mol_type = genomic DNA
ctggtggtctagtggctaggatt

SEQ ID NO: 14252 - DNA, 24 bp, Homo sapiens
  source 1..24: mol_type = genomic DNA
ctggtggtctagtggctaggattc

SEQ ID NO: 14253 - DNA, 25 bp, Homo sapiens
  source 1..25: mol_type = genomic DNA
ctggtggtctagtggctaggattcg

SEQ ID NO: 14254 - DNA, 26 bp, Homo sapiens
  source 1..26: mol_type = genomic DNA
ctggtggtctagtggctaggattcgg

SEQ ID NO: 14255 - DNA, 27 bp, Homo sapiens
  source 1..27: mol_type = genomic DNA
ctggtggtctagtggctaggattcggc

SEQ ID NO: 14256 - DNA, 28 bp, Homo sapiens
  source 1..28: mol_type = genomic DNA
ctggtggtctagtggctaggattcggcg

SEQ ID NO: 14257 - DNA, 29 bp, Homo sapiens
  source 1..29: mol_type = genomic DNA
ctggtggtctagtggctaggattcggcgc

SEQ ID NO: 14258 - DNA, 30 bp, Homo sapiens
  source 1..30: mol_type = genomic DNA
ctggtggtctagtggctaggattcggcgct

SEQ ID NO: 14259 - DNA, 31 bp, Homo sapiens
  source 1..31: mol_type = genomic DNA
ctggtggtctagtggctaggattcggcgctt

SEQ ID NO: 14260 - DNA, 32 bp, Homo sapiens
  source 1..32: mol_type = genomic DNA
ctggtggtctagtggctaggattcggcgcttt

SEQ ID NO: 14261 - DNA, 33 bp, Homo sapiens
  source 1..33: mol_type = genomic DNA
ctggtggtctagtggctaggattcggcgctttc

SEQ ID NO: 14262 - DNA, 34 bp, Homo sapiens
  source 1..34: mol_type = genomic DNA
ctggtggtctagtggctaggattcggcgctttca

SEQ ID NO: 14263 - DNA, 35 bp, Homo sapiens
  source 1..35: mol_type = genomic DNA
ctggtggtctagtggctaggattcggcgctttcac

SEQ ID NO: 14264 - DNA, 36 bp, Homo sapiens
  source 1..36: mol_type = genomic DNA
ctggtggtctagtggctaggattcggcgctttcacc

SEQ ID NO: 14265 - DNA, 16 bp, Homo sapiens
  source 1..16: mol_type = genomic DNA
ctggtggtctagtggt

SEQ ID NO: 14266 - DNA, 19 bp, Homo sapiens
  source 1..19: mol_type = genomic DNA
ctggtggtctagtggttag

SEQ ID NO: 14267 - DNA, 20 bp, Homo sapiens
  source 1..20: mol_type = genomic DNA
ctggtggtctagtggttagg

SEQ ID NO: 14268 - DNA, 21 bp, Homo sapiens
  source 1..21: mol_type = genomic DNA
ctggtggtctagtggttagga

SEQ ID NO: 14269 - DNA, 22 bp, Homo sapiens
  source 1..22: mol_type = genomic DNA
ctggtggtctagtggttaggat

SEQ ID NO: 14270 - DNA, 23 bp, Homo sapiens
  source 1..23: mol_type = genomic DNA
ctggtggtctagtggttaggatt

SEQ ID NO: 14271 - DNA, 24 bp, Homo sapiens
  source 1..24: mol_type = genomic DNA
ctggtggtctagtggttaggattc

SEQ ID NO: 14272 - DNA, 25 bp, Homo sapiens
  source 1..25: mol_type = genomic DNA
ctggtggtctagtggttaggattcg

SEQ ID NO: 14273 - DNA, 26 bp, Homo sapiens
  source 1..26: mol_type = genomic DNA
ctggtggtctagtggttaggattcgg

SEQ ID NO: 14274 - DNA, 27 bp, Homo sapiens
  source 1..27: mol_type = genomic DNA
ctggtggtctagtggttaggattcggc

SEQ ID NO: 14275 - DNA, 28 bp, Homo sapiens
  source 1..28: mol_type = genomic DNA
ctggtggtctagtggttaggattcggcg

SEQ ID NO: 14276 - DNA, 29 bp, Homo sapiens
  source 1..29: mol_type = genomic DNA
ctggtggtctagtggttaggattcggcgc

SEQ ID NO: 14277 - DNA, 30 bp, Homo sapiens
  source 1..30: mol_type = genomic DNA
ctggtggtctagtggttaggattcggcgct

SEQ ID NO: 14278 - DNA, 31 bp, Homo sapiens
  source 1..31: mol_type = genomic DNA
ctggtggtctagtggttaggattcggcgctc

SEQ ID NO: 14279 - DNA, 32 bp, Homo sapiens
  source 1..32: mol_type = genomic DNA
ctggtggtctagtggttaggattcggcgctct

SEQ ID NO: 14280 - DNA, 33 bp, Homo sapiens
  source 1..33: mol_type = genomic DNA
ctggtggtctagtggttaggattcggcgctctc

SEQ ID NO: 14281 - DNA, 34 bp, Homo sapiens
  source 1..34: mol_type = genomic DNA
ctggtggtctagtggttaggattcggcgctctca

SEQ ID NO: 14282 - DNA, 35 bp, Homo sapiens
  source 1..35: mol_type = genomic DNA
ctggtggtctagtggttaggattcggcgctctcac

SEQ ID NO: 14283 - DNA, 36 bp, Homo sapiens
  source 1..36: mol_type = genomic DNA
ctggtggtctagtggttaggattcggcgctctcacc

SEQ ID NO: 14284 - DNA, 39 bp, Homo sapiens
  source 1..39: mol_type = genomic DNA
ctggtggtctagtggttaggattcggcgctctcaccgcc

SEQ ID NO: 14285 - DNA, 46 bp, Homo sapiens
  source 1..46: mol_type = genomic DNA
ctggtggtctagtggttaggattcggcgctctcaccgccgcggccc

SEQ ID NO: 14286 - DNA, 28 bp, Homo sapiens
  source 1..28: mol_type = genomic DNA
ctggtggttcagtggtagaattctcgcc

SEQ ID NO: 14287 - DNA, 29 bp, Homo sapiens
  source 1..29: mol_type = genomic DNA
ctggtggttcagtggtagaattctcgcct

SEQ ID NO: 14288 - DNA, 16 bp, Homo sapiens
  source 1..16: mol_type = genomic DNA
ctggtgtagtggtatc

SEQ ID NO: 14289 - DNA, 18 bp, Homo sapiens
  source 1..18: mol_type = genomic DNA
ctggtgtagtggtatcat

SEQ ID NO: 14290 - DNA, 21 bp, Homo sapiens
  source 1..21: mol_type = genomic DNA
ctggtgtagtggtatcatgca

SEQ ID NO: 14291 - DNA, 23 bp, Homo sapiens
  source 1..23: mol_type = genomic DNA
ctggtgtagtggtatcatgcaag

SEQ ID NO: 14292 - DNA, 24 bp, Homo sapiens
  source 1..24: mol_type = genomic DNA
ctggtgtagtggtatcatgcaaga

SEQ ID NO: 14293 - DNA, 26 bp, Homo sapiens
  source 1..26: mol_type = genomic DNA
ctggtgtagtggtatcatgcaagatt

SEQ ID NO: 14294 - DNA, 27 bp, Homo sapiens
  source 1..27: mol_type = genomic DNA
ctggtgtagtggtatcatgcaagattc

SEQ ID NO: 14295 - DNA, 28 bp, Homo sapiens
  source 1..28: mol_type = genomic DNA
ctggtgtagtggtatcatgcaagattcc

SEQ ID NO: 14296 - DNA, 29 bp, Homo sapiens
  source 1..29: mol_type = genomic DNA
ctggtgtagtggtatcatgcaagattccc

SEQ ID NO: 14297 - DNA, 33 bp, Homo sapiens
  source 1..33: mol_type = genomic DNA
ctggtgtagtggtatcatgcaagattcccattc

SEQ ID NO: 14298 - DNA, 34 bp, Homo sapiens
  source 1..34: mol_type = genomic DNA
ctggtgtagtggtatcatgcaagattcccattct

SEQ ID NO: 14299 - DNA, 38 bp, Homo sapiens
  source 1..38: mol_type = genomic DNA
ctggtgtagtggtatcatgcaagattcccattcttgcg

SEQ ID NO: 14300 - DNA, 42 bp, Homo sapiens
  source 1..42: mol_type = genomic DNA
ctggtgtagtggtatcatgcaagattcccattcttgcgaccc

SEQ ID NO: 14301 - DNA, 43 bp, Homo sapiens
  source 1..43: mol_type = genomic DNA
ctggtgtagtggtatcatgcaagattcccattcttgcgacccg

SEQ ID NO: 14302 - DNA, 44 bp, Homo sapiens
  source 1..44: mol_type = genomic DNA
ctggtgtagtggtatcatgcaagattcccattcttgcgacccgg

SEQ ID NO: 14303 - DNA, 45 bp, Homo sapiens
  source 1..45: mol_type = genomic DNA
ctggtgtagtggtatcatgcaagattcccattcttgcgacccggg

SEQ ID NO: 14304 - DNA, 46 bp, Homo sapiens
  source 1..46: mol_type = genomic DNA
ctggtgtagtggtatcatgcaagattcccattcttgcgacccgggt

SEQ ID NO: 14305 - DNA, 26 bp, Homo sapiens
  source 1..26: mol_type = genomic DNA
ctggttcaaatccgggtgccccctcc

SEQ ID NO: 14306 - DNA, 24 bp, Homo sapiens
  source 1..24: mol_type = genomic DNA
ctggttcaatcccgggtttcggca

SEQ ID NO: 14307 - DNA, 27 bp, Homo sapiens
  source 1..27: mol_type = genomic DNA
ctggttcaatcccgggtttcggcacca

SEQ ID NO: 14308 - DNA, 16 bp, Homo sapiens
  source 1..16: mol_type = genomic DNA
ctggttcgaatccggc

SEQ ID NO: 14309 - DNA, 17 bp, Homo sapiens
  source 1..17: mol_type = genomic DNA
ctggttcgaatccggct

SEQ ID NO: 14310 - DNA, 24 bp, Homo sapiens
  source 1..24: mol_type = genomic DNA
ctggttcgaatccggctcgaagga

SEQ ID NO: 14311 - DNA, 25 bp, Homo sapiens
  source 1..25: mol_type = genomic DNA
ctggttcgaatccggctcgaaggac

SEQ ID NO: 14312 - DNA, 26 bp, Homo sapiens
  source 1..26: mol_type = genomic DNA
ctggttcgaatccggctcgaaggacc

SEQ ID NO: 14313 - DNA, 27 bp, Homo sapiens
  source 1..27: mol_type = genomic DNA
ctggttcgaatccggctcgaaggacca

SEQ ID NO: 14314 - DNA, 25 bp, Homo sapiens
  source 1..25: mol_type = genomic DNA
ctggttcgaatccggctcggaggac

SEQ ID NO: 14315 - DNA, 26 bp, Homo sapiens
  source 1..26: mol_type = genomic DNA
ctggttcgaatccggctcggaggacc

SEQ ID NO: 14316 - DNA, 22 bp, Homo sapiens
  source 1..22: mol_type = genomic DNA
ctggttcgatcccgggtttcgg

SEQ ID NO: 14317 - DNA, 24 bp, Homo sapiens
  source 1..24: mol_type = genomic DNA
ctggttcgatcccgggtttcggca

SEQ ID NO: 14318 - DNA, 25 bp, Homo sapiens
  source 1..25: mol_type = genomic DNA
ctggttcgatcccgggtttcggcac

SEQ ID NO: 14319 - DNA, 26 bp, Homo sapiens
  source 1..26: mol_type = genomic DNA
ctggttcgatcccgggtttcggcacc

SEQ ID NO: 14320 - DNA, 27 bp, Homo sapiens
  source 1..27: mol_type = genomic DNA
ctggttcgatcccgggtttcggcacca

SEQ ID NO: 14321 - DNA, 16 bp, Homo sapiens
  source 1..16: mol_type = genomic DNA
ctggttcgattccggc

SEQ ID NO: 14322 - DNA, 17 bp, Homo sapiens
  source 1..17: mol_type = genomic DNA
ctggttcgattccggct

SEQ ID NO: 14323 - DNA, 18 bp, Homo sapiens
  source 1..18: mol_type = genomic DNA
ctggttcgattccggctc

SEQ ID NO: 14324 - DNA, 25 bp, Homo sapiens
  source 1..25: mol_type = genomic DNA
ctggttcgattccggctcgaaggac

SEQ ID NO: 14325 - DNA, 26 bp, Homo sapiens
  source 1..26: mol_type = genomic DNA
ctggttcgattccggctcgaaggacc

SEQ ID NO: 14326 - DNA, 27 bp, Homo sapiens
  source 1..27: mol_type = genomic DNA
ctggttcgattccggctcgaaggacca

SEQ ID NO: 14327 - DNA, 37 bp, Homo sapiens
  source 1..37: mol_type = genomic DNA
ctggttttcacccaggcggcccgggttcgactcccgg

SEQ ID NO: 14328 - DNA, 47 bp, Homo sapiens
  source 1..47: mol_type = genomic DNA
ctggttttcacccaggcggcccgggttcgactcccggtgtgggaacc

SEQ ID NO: 14329 - DNA, 48 bp, Homo sapiens
  source 1..48: mol_type = genomic DNA
ctggttttcacccaggcggcccgggttcgactcccggtgtgggaacca

SEQ ID NO: 14330 - DNA, 28 bp, Homo sapiens
  source 1..28: mol_type = genomic DNA
ctggttttcacccaggtggcccgggttc

SEQ ID NO: 14331 - DNA, 16 bp, Homo sapiens
  source 1..16: mol_type = genomic DNA
ctgtaaagctaactta

SEQ ID NO: 14332 - DNA, 18 bp, Homo sapiens
  source 1..18: mol_type = genomic DNA
ctgtaaagctaacttagc

SEQ ID NO: 14333 - DNA, 21 bp, Homo sapiens
  source 1..21: mol_type = genomic DNA
ctgtaaagctaacttagcatt

SEQ ID NO: 14334 - DNA, 22 bp, Homo sapiens
  source 1..22: mol_type = genomic DNA
ctgtaaagctaacttagcatta

SEQ ID NO: 14335 - DNA, 24 bp, Homo sapiens
  source 1..24: mol_type = genomic DNA
ctgtaaagctaacttagcattaac

SEQ ID NO: 14336 - DNA, 25 bp, Homo sapiens
  source 1..25: mol_type = genomic DNA
ctgtaaagctaacttagcattaacc

SEQ ID NO: 14337 - DNA, 26 bp, Homo sapiens
  source 1..26: mol_type = genomic DNA
ctgtaaagctaacttagcattaacct

SEQ ID NO: 14338 - DNA, 29 bp, Homo sapiens
  source 1..29: mol_type = genomic DNA
ctgtaaagctaacttagcattaacctttt

SEQ ID NO: 14339 - DNA, 30 bp, Homo sapiens
  source 1..30: mol_type = genomic DNA
ctgtaaagctaacttagcattaacctttta

SEQ ID NO: 14340 - DNA, 31 bp, Homo sapiens
  source 1..31: mol_type = genomic DNA
ctgtaaagctaacttagcattaaccttttaa

SEQ ID NO: 14341 - DNA, 32 bp, Homo sapiens
  source 1..32: mol_type = genomic DNA
ctgtaaagctaacttagcattaaccttttaag

SEQ ID NO: 14342 - DNA, 33 bp, Homo sapiens
  source 1..33: mol_type = genomic DNA
ctgtaaagctaacttagcattaaccttttaagt

SEQ ID NO: 14343 - DNA, 36 bp, Homo sapiens
  source 1..36: mol_type = genomic DNA
ctgtaaagctaacttagcattaaccttttaagttaa

SEQ ID NO: 14344 - DNA, 41 bp, Homo sapiens
  source 1..41: mol_type = genomic DNA
ctgtaaatctaaagacaggggttaggcctctttttaccacc

SEQ ID NO: 14345 - DNA, 42 bp, Homo sapiens
  source 1..42: mol_type = genomic DNA
ctgtaaatctaaagacaggggttaggcctctttttaccacca

SEQ ID NO: 14346 - DNA, 19 bp, Homo sapiens
  source 1..19: mol_type = genomic DNA
ctgtagatccttaggtcgc

SEQ ID NO: 14347 - DNA, 29 bp, Homo sapiens
  source 1..29: mol_type = genomic DNA
ctgtagcgcgatcggttagcgccttcggc

SEQ ID NO: 14348 - DNA, 28 bp, Homo sapiens
  source 1..28: mol_type = genomic DNA
ctgtagtgtagtggttatcacgttcgcc

SEQ ID NO: 14349 - DNA, 29 bp, Homo sapiens
  source 1..29: mol_type = genomic DNA
ctgtagtgtagtggttatcacgttcgcct

SEQ ID NO: 14350 - DNA, 30 bp, Homo sapiens
  source 1..30: mol_type = genomic DNA
ctgtagtgtagtggttatcacgttcgcctc

SEQ ID NO: 14351 - DNA, 31 bp, Homo sapiens
  source 1..31: mol_type = genomic DNA
ctgtagtgtagtggttatcacgttcgcctca

SEQ ID NO: 14352 - DNA, 32 bp, Homo sapiens
  source 1..32: mol_type = genomic DNA
ctgtagtgtagtggttatcacgttcgcctcac

SEQ ID NO: 14353 - DNA, 16 bp, Homo sapiens
  source 1..16: mol_type = genomic DNA
ctgtcacgcgggagac

SEQ ID NO: 14354 - DNA, 17 bp, Homo sapiens
  source 1..17: mol_type = genomic DNA
ctgtcacgcgggagacc

SEQ ID NO: 14355 - DNA, 18 bp, Homo sapiens
  source 1..18: mol_type = genomic DNA
ctgtcacgcgggagaccg

SEQ ID NO: 14356 - DNA, 20 bp, Homo sapiens
  source 1..20: mol_type = genomic DNA
ctgtcacgcgggagaccggg

SEQ ID NO: 14357 - DNA, 22 bp, Homo sapiens
  source 1..22: mol_type = genomic DNA
ctgtcacgcgggagaccggggt

SEQ ID NO: 14358 - DNA, 23 bp, Homo sapiens
  source 1..23: mol_type = genomic DNA
ctgtcacgcgggagaccggggtt

SEQ ID NO: 14359 - DNA, 35 bp, Homo sapiens
  source 1..35: mol_type = genomic DNA
ctgtcacgcgggagaccggggttcaattccccgac

SEQ ID NO: 14360 - DNA, 38 bp, Homo sapiens
  source 1..38: mol_type = genomic DNA
ctgtcacgcgggagaccggggttcaattccccgacggg

SEQ ID NO: 14361 - DNA, 40 bp, Homo sapiens
  source 1..40: mol_type = genomic DNA
ctgtcacgcgggagaccggggttcaattccccgacgggga

SEQ ID NO: 14362 - DNA, 42 bp, Homo sapiens
  source 1..42: mol_type = genomic DNA
ctgtcacgcgggagaccggggttcaattccccgacggggagc

SEQ ID NO: 14363 - DNA, 43 bp, Homo sapiens
  source 1..43: mol_type = genomic DNA
ctgtcacgcgggagaccggggttcaattccccgacggggagcc

SEQ ID NO: 14364 - DNA, 44 bp, Homo sapiens
  source 1..44: mol_type = genomic DNA
ctgtcacgcgggagaccggggttcaattccccgacggggagcca

SEQ ID NO: 14365 - DNA, 25 bp, Homo sapiens
  source 1..25: mol_type = genomic DNA
ctgtcacgcgggagaccggggttcg

SEQ ID NO: 14366 - DNA, 32 bp, Homo sapiens
  source 1..32: mol_type = genomic DNA
ctgtcacgcgggagaccggggttcgattcccc

SEQ ID NO: 14367 - DNA, 35 bp, Homo sapiens
  source 1..35: mol_type = genomic DNA
ctgtcacgcgggagaccggggttcgattccccaac

SEQ ID NO: 14368 - DNA, 34 bp, Homo sapiens
  source 1..34: mol_type = genomic DNA
ctgtcacgcgggagaccggggttcgattccccga

SEQ ID NO: 14369 - DNA, 35 bp, Homo sapiens
  source 1..35: mol_type = genomic DNA
ctgtcacgcgggagaccggggttcgattccccgac

SEQ ID NO: 14370 - DNA, 36 bp, Homo sapiens
  source 1..36: mol_type = genomic DNA
ctgtcacgcgggagaccggggttcgattccccgacg

SEQ ID NO: 14371 - DNA, 37 bp, Homo sapiens
  source 1..37: mol_type = genomic DNA
ctgtcacgcgggagaccggggttcgattccccgacgg

SEQ ID NO: 14372 - DNA, 38 bp, Homo sapiens
  source 1..38: mol_type = genomic DNA
ctgtcacgcgggagaccggggttcgattccccgacggg

SEQ ID NO: 14373 - DNA, 39 bp, Homo sapiens
  source 1..39: mol_type = genomic DNA
ctgtcacgcgggagaccggggttcgattccccgacgggg

SEQ ID NO: 14374 - DNA, 41 bp, Homo sapiens
  source 1..41: mol_type = genomic DNA
ctgtcacgcgggagaccggggttcgattccccgacggggag

SEQ ID NO: 14375 - DNA, 42 bp, Homo sapiens
  source 1..42: mol_type = genomic DNA
ctgtcacgcgggagaccggggttcgattccccgacggggagc

SEQ ID NO: 14376 - DNA, 43 bp, Homo sapiens
  source 1..43: mol_type = genomic DNA
ctgtcacgcgggagaccggggttcgattccccgacggggagcc

SEQ ID NO: 14377 - DNA, 44 bp, Homo sapiens
  source 1..44: mol_type = genomic DNA
ctgtcacgcgggagaccggggttcgattccccgacggggagcca

SEQ ID NO: 14378 - DNA, 16 bp, Homo sapiens
  source 1..16: mol_type = genomic DNA
ctgtggcgcaatcggt

SEQ ID NO: 14379 - DNA, 36 bp, Homo sapiens
  source 1..36: mol_type = genomic DNA
ctgtggcgcaatcggttagcgcgttcggctgttaac

SEQ ID NO: 14380 - DNA, 16 bp, Homo sapiens
  source 1..16: mol_type = genomic DNA
ctgtggcgcaatggac

SEQ ID NO: 14381 - DNA, 28 bp, Homo sapiens
  source 1..28: mol_type = genomic DNA
ctgtggcgcaatggatagcgcattggac

SEQ ID NO: 14382 - DNA, 18 bp, Homo sapiens
  source 1..18: mol_type = genomic DNA
ctgtggtctagtggttag

SEQ ID NO: 14383 - DNA, 19 bp, Homo sapiens
  source 1..19: mol_type = genomic DNA
ctgtggtctagtggttagg

SEQ ID NO: 14384 - DNA, 20 bp, Homo sapiens
  source 1..20: mol_type = genomic DNA
ctgtggtctagtggttagga

SEQ ID NO: 14385 - DNA, 45 bp, Homo sapiens
  source 1..45: mol_type = genomic DNA
ctgttaaccgaaaggttggtggttcgagcccacccagggacgcca

SEQ ID NO: 14386 - DNA, 18 bp, Homo sapiens
  source 1..18: mol_type = genomic DNA
ctgttaactaagtgtttg

SEQ ID NO: 14387 - DNA, 19 bp, Homo sapiens
  source 1..19: mol_type = genomic DNA
ctgttaactaagtgtttgt

SEQ ID NO: 14388 - DNA, 20 bp, Homo sapiens
  source 1..20: mol_type = genomic DNA
ctgttaactaagtgtttgtg

SEQ ID NO: 14389 - DNA, 25 bp, Homo sapiens
  source 1..25: mol_type = genomic DNA
ctgttaactaagtgtttgtgggttt

SEQ ID NO: 14390 - DNA, 26 bp, Homo sapiens
  source 1..26: mol_type = genomic DNA
ctgttaactaagtgtttgtgggttta

SEQ ID NO: 14391 - DNA, 27 bp, Homo sapiens
  source 1..27: mol_type = genomic DNA
ctgttaactaagtgtttgtgggtttaa

SEQ ID NO: 14392 - DNA, 32 bp, Homo sapiens
  source 1..32: mol_type = genomic DNA
ctgttaactaagtgtttgtgggtttaagtccc

SEQ ID NO: 14393 - DNA, 35 bp, Homo sapiens
  source 1..35: mol_type = genomic DNA
ctgttaactaagtgtttgtgggtttaagtcccatt

SEQ ID NO: 14394 - DNA, 36 bp, Homo sapiens
  source 1..36: mol_type = genomic DNA
ctgttaactaagtgtttgtgggtttaagtcccattg

SEQ ID NO: 14395 - DNA, 39 bp, Homo sapiens
  source 1..39: mol_type = genomic DNA
ctgttaactaagtgtttgtgggtttaagtcccattggtc

SEQ ID NO: 14396 - DNA, 40 bp, Homo sapiens
  source 1..40: mol_type = genomic DNA
ctgttaactaagtgtttgtgggtttaagtcccattggtct

SEQ ID NO: 14397 - DNA, 42 bp, Homo sapiens
  source 1..42: mol_type = genomic DNA
ctgttaactaagtgtttgtgggtttaagtcccattggtctag

SEQ ID NO: 14398 - DNA, 43 bp, Homo sapiens
  source 1..43: mol_type = genomic DNA
ctgttaactaagtgtttgtgggtttaagtcccattggtctagc

SEQ ID NO: 14399 - DNA, 44 bp, Homo sapiens
  source 1..44: mol_type = genomic DNA
ctgttaactaagtgtttgtgggtttaagtcccattggtctagcc

SEQ ID NO: 14400 - DNA, 45 bp, Homo sapiens
  source 1..45: mol_type = genomic DNA
ctgttaactaagtgtttgtgggtttaagtcccattggtctagcca

SEQ ID NO: 14401 - DNA, 19 bp, Homo sapiens
  source 1..19: mol_type = genomic DNA
cttaaaactttacagtcag

SEQ ID NO: 14402 - DNA, 20 bp, Homo sapiens
  source 1..20: mol_type = genomic DNA
cttaaaactttacagtcaga

SEQ ID NO: 14403 - DNA, 21 bp, Homo sapiens
  source 1..21: mol_type = genomic DNA
cttaaaactttacagtcagag

SEQ ID NO: 14404 - DNA, 22 bp, Homo sapiens
  source 1..22: mol_type = genomic DNA
cttaaaactttacagtcagagg

SEQ ID NO: 14405 - DNA, 23 bp, Homo sapiens
  source 1..23: mol_type = genomic DNA
cttaaaactttacagtcagaggt

SEQ ID NO: 14406 - DNA, 24 bp, Homo sapiens
  source 1..24: mol_type = genomic DNA
cttaaaactttacagtcagaggtt

SEQ ID NO: 14407 - DNA, 25 bp, Homo sapiens
  source 1..25: mol_type = genomic DNA
cttaaaactttacagtcagaggttc

SEQ ID NO: 14408 - DNA, 26 bp, Homo sapiens
  source 1..26: mol_type = genomic DNA
cttaaaactttacagtcagaggttca

SEQ ID NO: 14409 - DNA, 33 bp, Homo sapiens
  source 1..33: mol_type = genomic DNA
cttaaaactttacagtcagaggttcaattcctc

SEQ ID NO: 14410 - DNA, 34 bp, Homo sapiens
  source 1..34: mol_type = genomic DNA
cttaaaactttacagtcagaggttcaattcctct

SEQ ID NO: 14411 - DNA, 35 bp, Homo sapiens
  source 1..35: mol_type = genomic DNA
cttaaaactttacagtcagaggttcaattcctctt

SEQ ID NO: 14412 - DNA, 36 bp, Homo sapiens
  source 1..36: mol_type = genomic DNA
cttaaaactttacagtcagaggttcaattcctcttc

SEQ ID NO: 14413 - DNA, 37 bp, Homo sapiens
  source 1..37: mol_type = genomic DNA
cttaaaactttacagtcagaggttcaattcctcttct

SEQ ID NO: 14414 - DNA, 16 bp, Homo sapiens
  source 1..16: mol_type = genomic DNA
cttaaacccccttatt

SEQ ID NO: 14415 - DNA, 17 bp, Homo sapiens
  source 1..17: mol_type = genomic DNA
cttaaacccccttattt

SEQ ID NO: 14416 - DNA, 18 bp, Homo sapiens
  source 1..18: mol_type = genomic DNA
cttaaacccccttatttc

SEQ ID NO: 14417 - DNA, 19 bp, Homo sapiens
  source 1..19: mol_type = genomic DNA
cttaaacccccttatttct

SEQ ID NO: 14418 - DNA, 20 bp, Homo sapiens
  source 1..20: mol_type = genomic DNA
cttaaacccccttatttcta

SEQ ID NO: 14419 - DNA, 21 bp, Homo sapiens
  source 1..21: mol_type = genomic DNA
cttaaacccccttatttctac

SEQ ID NO: 14420 - DNA, 22 bp, Homo sapiens
  source 1..22: mol_type = genomic DNA
cttaaacccccttatttctacc

SEQ ID NO: 14421 - DNA, 23 bp, Homo sapiens
  source 1..23: mol_type = genomic DNA
cttaaacccccttatttctacca

SEQ ID NO: 14422 - DNA, 16 bp, Homo sapiens
  source 1..16: mol_type = genomic DNA
cttaacacaaagcacc

SEQ ID NO: 14423 - DNA, 17 bp, Homo sapiens
  source 1..17: mol_type = genomic DNA
cttaacacaaagcaccc

SEQ ID NO: 14424 - DNA, 18 bp, Homo sapiens
  source 1..18: mol_type = genomic DNA
cttaacacaaagcaccca

SEQ ID NO: 14425 - DNA, 19 bp, Homo sapiens
  source 1..19: mol_type = genomic DNA
cttaacacaaagcacccaa

SEQ ID NO: 14426 - DNA, 20 bp, Homo sapiens
  source 1..20: mol_type = genomic DNA
cttaacacaaagcacccaac

SEQ ID NO: 14427 - DNA, 21 bp, Homo sapiens
  source 1..21: mol_type = genomic DNA
cttaacacaaagcacccaact

SEQ ID NO: 14428 - DNA, 22 bp, Homo sapiens
  source 1..22: mol_type = genomic DNA
cttaacacaaagcacccaactt

SEQ ID NO: 14429 - DNA, 23 bp, Homo sapiens
  source 1..23: mol_type = genomic DNA
cttaacacaaagcacccaactta

SEQ ID NO: 14430 - DNA, 24 bp, Homo sapiens
  source 1..24: mol_type = genomic DNA
cttaacacaaagcacccaacttac

SEQ ID NO: 14431 - DNA, 25 bp, Homo sapiens
  source 1..25: mol_type = genomic DNA
cttaacacaaagcacccaacttaca

SEQ ID NO: 14432 - DNA, 26 bp, Homo sapiens
  source 1..26: mol_type = genomic DNA
cttaacacaaagcacccaacttacac

SEQ ID NO: 14433 - DNA, 27 bp, Homo sapiens
  source 1..27: mol_type = genomic DNA
cttaacacaaagcacccaacttacact

SEQ ID NO: 14434 - DNA, 28 bp, Homo sapiens
  source 1..28: mol_type = genomic DNA
cttaacacaaagcacccaacttacactt

SEQ ID NO: 14435 - DNA, 29 bp, Homo sapiens
  source 1..29: mol_type = genomic DNA
cttaacacaaagcacccaacttacactta

SEQ ID NO: 14436 - DNA, 30 bp, Homo sapiens
  source 1..30: mol_type = genomic DNA
cttaacacaaagcacccaacttacacttag

SEQ ID NO: 14437 - DNA, 31 bp, Homo sapiens
  source 1..31: mol_type = genomic DNA
cttaacacaaagcacccaacttacacttagg

SEQ ID NO: 14438 - DNA, 32 bp, Homo sapiens
  source 1..32: mol_type = genomic DNA
cttaacacaaagcacccaacttacacttagga

SEQ ID NO: 14439 - DNA, 33 bp, Homo sapiens
  source 1..33: mol_type = genomic DNA
cttaacacaaagcacccaacttacacttaggag

SEQ ID NO: 14440 - DNA, 34 bp, Homo sapiens
  source 1..34: mol_type = genomic DNA
cttaacacaaagcacccaacttacacttaggaga

SEQ ID NO: 14441 - DNA, 35 bp, Homo sapiens
  source 1..35: mol_type = genomic DNA
cttaacacaaagcacccaacttacacttaggagat

SEQ ID NO: 14442 - DNA, 37 bp, Homo sapiens
  source 1..37: mol_type = genomic DNA
cttaacacaaagcacccaacttacacttaggagattt

SEQ ID NO: 14443 - DNA, 38 bp, Homo sapiens
  source 1..38: mol_type = genomic DNA
cttaacacaaagcacccaacttacacttaggagatttc

SEQ ID NO: 14444 - DNA, 40 bp, Homo sapiens
  source 1..40: mol_type = genomic DNA
cttaacacaaagcacccaacttacacttaggagatttcaa

SEQ ID NO: 14445 - DNA, 41 bp, Homo sapiens
  source 1..41: mol_type = genomic DNA
cttaacacaaagcacccaacttacacttaggagatttcaac

SEQ ID NO: 14446 - DNA, 44 bp, Homo sapiens
  source 1..44: mol_type = genomic DNA
cttaacacaaagcacccaacttacacttaggagatttcaactta

SEQ ID NO: 14447 - DNA, 45 bp, Homo sapiens
  source 1..45: mol_type = genomic DNA
cttaacacaaagcacccaacttacacttaggagatttcaacttaa

SEQ ID NO: 14448 - DNA, 46 bp, Homo sapiens
  source 1..46: mol_type = genomic DNA
cttaacacaaagcacccaacttacacttaggagatttcaacttaac

SEQ ID NO: 14449 - DNA, 47 bp, Homo sapiens
  source 1..47: mol_type = genomic DNA
cttaacacaaagcacccaacttacacttaggagatttcaacttaact

SEQ ID NO: 14450 - DNA, 16 bp, Homo sapiens
  source 1..16: mol_type = genomic DNA
cttaacttgaccgctc

SEQ ID NO: 14451 - DNA, 17 bp, Homo sapiens
  source 1..17: mol_type = genomic DNA
cttaacttgaccgctct

SEQ ID NO: 14452 - DNA, 18 bp, Homo sapiens
  source 1..18: mol_type = genomic DNA
cttaacttgaccgctctg

SEQ ID NO: 14453 - DNA, 19 bp, Homo sapiens
  source 1..19: mol_type = genomic DNA
cttaacttgaccgctctga

SEQ ID NO: 14454 - DNA, 20 bp, Homo sapiens
  source 1..20: mol_type = genomic DNA
cttaacttgaccgctctgac

SEQ ID NO: 14455 - DNA, 21 bp, Homo sapiens
  source 1..21: mol_type = genomic DNA
cttaacttgaccgctctgacc

SEQ ID NO: 14456 - DNA, 22 bp, Homo sapiens
  source 1..22: mol_type = genomic DNA
cttaacttgaccgctctgacca

SEQ ID NO: 14457 - DNA, 16 bp, Homo sapiens
  source 1..16: mol_type = genomic DNA
cttaagatccaatgga

SEQ ID NO: 14458 - DNA, 17 bp, Homo sapiens
  source 1..17: mol_type = genomic DNA
cttaagatccaatggac

SEQ ID NO: 14459 - DNA, 18 bp, Homo sapiens
  source 1..18: mol_type = genomic DNA
cttaagatccaatggaca

SEQ ID NO: 14460 - DNA, 19 bp, Homo sapiens
  source 1..19: mol_type = genomic DNA
cttaagatccaatggacat

SEQ ID NO: 14461 - DNA, 20 bp, Homo sapiens
  source 1..20: mol_type = genomic DNA
cttaagatccaatggacata

SEQ ID NO: 14462 - DNA, 21 bp, Homo sapiens
  source 1..21: mol_type = genomic DNA
cttaagatccaatggacatat

SEQ ID NO: 14463 - DNA, 16 bp, Homo sapiens
  source 1..16: mol_type = genomic DNA
cttaatcccagggtcg

SEQ ID NO: 14464 - DNA, 17 bp, Homo sapiens
  source 1..17: mol_type = genomic DNA
cttaatcccagggtcgt

SEQ ID NO: 14465 - DNA, 18 bp, Homo sapiens
  source 1..18: mol_type = genomic DNA
cttaatcccagggtcgtg

SEQ ID NO: 14466 - DNA, 19 bp, Homo sapiens
  source 1..19: mol_type = genomic DNA
cttaatcccagggtcgtgg

SEQ ID NO: 14467 - DNA, 22 bp, Homo sapiens
  source 1..22: mol_type = genomic DNA
cttaatcccagggtcgtgggtt

SEQ ID NO: 14468 - DNA, 36 bp, Homo sapiens
  source 1..36: mol_type = genomic DNA
cttaatcccagggtcgtgggttcgagccccacgttg

SEQ ID NO: 14469 - DNA, 42 bp, Homo sapiens
  source 1..42: mol_type = genomic DNA
cttaatcccagggtcgtgggttcgagccccacgttgggcgcc

SEQ ID NO: 14470 - DNA, 16 bp, Homo sapiens
  source 1..16: mol_type = genomic DNA
cttaatctcagggtcg

SEQ ID NO: 14471 - DNA, 17 bp, Homo sapiens
  source 1..17: mol_type = genomic DNA
cttaatctcagggtcgt

SEQ ID NO: 14472 - DNA, 18 bp, Homo sapiens
  source 1..18: mol_type = genomic DNA
cttaatctcagggtcgtg

SEQ ID NO: 14473 - DNA, 19 bp, Homo sapiens
  source 1..19: mol_type = genomic DNA
cttaatctcagggtcgtgg

SEQ ID NO: 14474 - DNA, 22 bp, Homo sapiens
  source 1..22: mol_type = genomic DNA
cttaatctcagggtcgtgggtt

SEQ ID NO: 14475 - DNA, 30 bp, Homo sapiens
  source 1..30: mol_type = genomic DNA
cttaatctcagggtcgtgggttcgagcccc

SEQ ID NO: 14476 - DNA, 42 bp, Homo sapiens
  source 1..42: mol_type = genomic DNA
cttaatctcagggtcgtgggttcgagccccacgttgggcgcc

SEQ ID NO: 14477 - DNA, 43 bp, Homo sapiens
  source 1..43: mol_type = genomic DNA
cttaatctcagggtcgtgggttcgagccccacgttgggcgcca

SEQ ID NO: 14478 - DNA, 18 bp, Homo sapiens
  source 1..18: mol_type = genomic DNA
cttaattaaagtggctga

SEQ ID NO: 14479 - DNA, 19 bp, Homo sapiens
  source 1..19: mol_type = genomic DNA
cttaattaaagtggctgat

SEQ ID NO: 14480 - DNA, 20 bp, Homo sapiens
  source 1..20: mol_type = genomic DNA
cttaattaaagtggctgatt

SEQ ID NO: 14481 - DNA, 21 bp, Homo sapiens
  source 1..21: mol_type = genomic DNA
cttaattaaagtggctgattt

SEQ ID NO: 14482 - DNA, 22 bp, Homo sapiens
  source 1..22: mol_type = genomic DNA
cttaattaaagtggctgatttg

SEQ ID NO: 14483 - DNA, 23 bp, Homo sapiens
  source 1..23: mol_type = genomic DNA
cttaattaaagtggctgatttgc

SEQ ID NO: 14484 - DNA, 16 bp, Homo sapiens
  source 1..16: mol_type = genomic DNA
cttacacttaggagat

SEQ ID NO: 14485 - DNA, 17 bp, Homo sapiens
  source 1..17: mol_type = genomic DNA
cttacacttaggagatt

SEQ ID NO: 14486 - DNA, 19 bp, Homo sapiens
  source 1..19: mol_type = genomic DNA
cttacacttaggagatttc

SEQ ID NO: 14487 - DNA, 20 bp, Homo sapiens
  source 1..20: mol_type = genomic DNA
cttacacttaggagatttca

SEQ ID NO: 14488 - DNA, 21 bp, Homo sapiens
  source 1..21: mol_type = genomic DNA
cttacacttaggagatttcaa

SEQ ID NO: 14489 - DNA, 22 bp, Homo sapiens
  source 1..22: mol_type = genomic DNA
cttacacttaggagatttcaac

SEQ ID NO: 14490 - DNA, 23 bp, Homo sapiens
  source 1..23: mol_type = genomic DNA
cttacacttaggagatttcaact

SEQ ID NO: 14491 - DNA, 24 bp, Homo sapiens
  source 1..24: mol_type = genomic DNA
cttacacttaggagatttcaactt

SEQ ID NO: 14492 - DNA, 25 bp, Homo sapiens
  source 1..25: mol_type = genomic DNA
cttacacttaggagatttcaactta

SEQ ID NO: 14493 - DNA, 26 bp, Homo sapiens
  source 1..26: mol_type = genomic DNA
cttacacttaggagatttcaacttaa

SEQ ID NO: 14494 - DNA, 27 bp, Homo sapiens
  source 1..27: mol_type = genomic DNA
cttacacttaggagatttcaacttaac

SEQ ID NO: 14495 - DNA, 28 bp, Homo sapiens
  source 1..28: mol_type = genomic DNA
cttacacttaggagatttcaacttaact

SEQ ID NO: 14496 - DNA, 29 bp, Homo sapiens
  source 1..29: mol_type = genomic DNA
cttacacttaggagatttcaacttaactt

SEQ ID NO: 14497 - DNA, 30 bp, Homo sapiens
  source 1..30: mol_type = genomic DNA
cttacacttaggagatttcaacttaacttg

SEQ ID NO: 14498 - DNA, 31 bp, Homo sapiens
  source 1..31: mol_type = genomic DNA
cttacacttaggagatttcaacttaacttga

SEQ ID NO: 14499 - DNA, 32 bp, Homo sapiens
  source 1..32: mol_type = genomic DNA
cttacacttaggagatttcaacttaacttgac

SEQ ID NO: 14500 - DNA, 33 bp, Homo sapiens
  source 1..33: mol_type = genomic DNA
cttacacttaggagatttcaacttaacttgacc

SEQ ID NO: 14501 - DNA, 34 bp, Homo sapiens
  source 1..34: mol_type = genomic DNA
cttacacttaggagatttcaacttaacttgaccg

SEQ ID NO: 14502 - DNA, 35 bp, Homo sapiens
  source 1..35: mol_type = genomic DNA
cttacacttaggagatttcaacttaacttgaccgc

SEQ ID NO: 14503 - DNA, 36 bp, Homo sapiens
  source 1..36: mol_type = genomic DNA
cttacacttaggagatttcaacttaacttgaccgct

SEQ ID NO: 14504 - DNA, 37 bp, Homo sapiens
  source 1..37: mol_type = genomic DNA
cttacacttaggagatttcaacttaacttgaccgctc

SEQ ID NO: 14505 - DNA, 38 bp, Homo sapiens
  source 1..38: mol_type = genomic DNA
cttacacttaggagatttcaacttaacttgaccgctct

SEQ ID NO: 14506 - DNA, 39 bp, Homo sapiens
  source 1..39: mol_type = genomic DNA
cttacacttaggagatttcaacttaacttgaccgctctg

SEQ ID NO: 14507 - DNA, 40 bp, Homo sapiens
  source 1..40: mol_type = genomic DNA
cttacacttaggagatttcaacttaacttgaccgctctga

SEQ ID NO: 14508 - DNA, 41 bp, Homo sapiens
  source 1..41: mol_type = genomic DNA
cttacacttaggagatttcaacttaacttgaccgctctgac

SEQ ID NO: 14509 - DNA, 42 bp, Homo sapiens
  source 1..42: mol_type = genomic DNA
cttacacttaggagatttcaacttaacttgaccgctctgacc

SEQ ID NO: 14510 - DNA, 43 bp, Homo sapiens
  source 1..43: mol_type = genomic DNA
cttacacttaggagatttcaacttaacttgaccgctctgacca

SEQ ID NO: 14511 - DNA, 16 bp, Homo sapiens
  source 1..16: mol_type = genomic DNA
cttacctcctcaaagc

SEQ ID NO: 14512 - DNA, 17 bp, Homo sapiens
  source 1..17: mol_type = genomic DNA
cttacctcctcaaagca

SEQ ID NO: 14513 - DNA, 21 bp, Homo sapiens
  source 1..21: mol_type = genomic DNA
cttacctcctcaaagcaatac

SEQ ID NO: 14514 - DNA, 22 bp, Homo sapiens
  source 1..22: mol_type = genomic DNA
cttacctcctcaaagcaataca

SEQ ID NO: 14515 - DNA, 23 bp, Homo sapiens
  source 1..23: mol_type = genomic DNA
cttacctcctcaaagcaatacac

SEQ ID NO: 14516 - DNA, 24 bp, Homo sapiens
  source 1..24: mol_type = genomic DNA
cttacctcctcaaagcaatacact

SEQ ID NO: 14517 - DNA, 25 bp, Homo sapiens
  source 1..25: mol_type = genomic DNA
cttacctcctcaaagcaatacactg

SEQ ID NO: 14518 - DNA, 26 bp, Homo sapiens
  source 1..26: mol_type = genomic DNA
cttacctcctcaaagcaatacactga

SEQ ID NO: 14519 - DNA, 27 bp, Homo sapiens
  source 1..27: mol_type = genomic DNA
cttacctcctcaaagcaatacactgaa

SEQ ID NO: 14520 - DNA, 32 bp, Homo sapiens
  source 1..32: mol_type = genomic DNA
cttacctcctcaaagcaatacactgaaaatgt

SEQ ID NO: 14521 - DNA, 43 bp, Homo sapiens
  source 1..43: mol_type = genomic DNA
cttacctcctcaaagcaatacactgaaaatgtttagacgggct

SEQ ID NO: 14522 - DNA, 18 bp, Homo sapiens
  source 1..18: mol_type = genomic DNA
cttacgaccccttattta

SEQ ID NO: 14523 - DNA, 19 bp, Homo sapiens
  source 1..19: mol_type = genomic DNA
cttacgaccccttatttac

SEQ ID NO: 14524 - DNA, 20 bp, Homo sapiens
  source 1..20: mol_type = genomic DNA
cttacgaccccttatttacc

SEQ ID NO: 14525 - DNA, 21 bp, Homo sapiens
  source 1..21: mol_type = genomic DNA
cttacgaccccttatttaccc

SEQ ID NO: 14526 - DNA, 22 bp, Homo sapiens
  source 1..22: mol_type = genomic DNA
cttacgaccccttatttacccc

SEQ ID NO: 14527 - DNA, 23 bp, Homo sapiens
  source 1..23: mol_type = genomic DNA
cttacgaccccttatttacccca

SEQ ID NO: 14528 - DNA, 17 bp, Homo sapiens
  source 1..17: mol_type = genomic DNA
cttagcattaacctttt

SEQ ID NO: 14529 - DNA, 19 bp, Homo sapiens
  source 1..19: mol_type = genomic DNA
cttagcattaaccttttaa

SEQ ID NO: 14530 - DNA, 20 bp, Homo sapiens
  source 1..20: mol_type = genomic DNA
cttagcattaaccttttaag

SEQ ID NO: 14531 - DNA, 21 bp, Homo sapiens
  source 1..21: mol_type = genomic DNA
cttagcattaaccttttaagt

SEQ ID NO: 14532 - DNA, 23 bp, Homo sapiens
  source 1..23: mol_type = genomic DNA
cttagcattaaccttttaagtta

SEQ ID NO: 14533 - DNA, 24 bp, Homo sapiens
  source 1..24: mol_type = genomic DNA
cttagcattaaccttttaagttaa

SEQ ID NO: 14534 - DNA, 38 bp, Homo sapiens
  source 1..38: mol_type = genomic DNA
cttagcattaaccttttaagttaaagattaagagaacc

SEQ ID NO: 14535 - DNA, 44 bp, Homo sapiens
  source 1..44: mol_type = genomic DNA
cttagcattaaccttttaagttaaagattaagagaaccaacacc

SEQ ID NO: 14536 - DNA, 16 bp, Homo sapiens
  source 1..16: mol_type = genomic DNA
cttagcgcagcgggca

SEQ ID NO: 14537 - DNA, 24 bp, Homo sapiens
  source 1..24: mol_type = genomic DNA
cttagctgttaactaagtgtttgt

SEQ ID NO: 14538 - DNA, 28 bp, Homo sapiens
  source 1..28: mol_type = genomic DNA
cttagctgttaactaagtgtttgtgggt

SEQ ID NO: 14539 - DNA, 29 bp, Homo sapiens
  source 1..29: mol_type = genomic DNA
cttagctgttaactaagtgtttgtgggtt

SEQ ID NO: 14540 - DNA, 30 bp, Homo sapiens
  source 1..30: mol_type = genomic DNA
cttagctgttaactaagtgtttgtgggttt

SEQ ID NO: 14541 - DNA, 31 bp, Homo sapiens
  source 1..31: mol_type = genomic DNA
cttagctgttaactaagtgtttgtgggttta

SEQ ID NO: 14542 - DNA, 32 bp, Homo sapiens
  source 1..32: mol_type = genomic DNA
cttagctgttaactaagtgtttgtgggtttaa

SEQ ID NO: 14543 - DNA, 33 bp, Homo sapiens
  source 1..33: mol_type = genomic DNA
cttagctgttaactaagtgtttgtgggtttaag

SEQ ID NO: 14544 - DNA, 40 bp, Homo sapiens
  source 1..40: mol_type = genomic DNA
cttagctgttaactaagtgtttgtgggtttaagtcccatt

SEQ ID NO: 14545 - DNA, 44 bp, Homo sapiens
  source 1..44: mol_type = genomic DNA
cttagctgttaactaagtgtttgtgggtttaagtcccattggtc

SEQ ID NO: 14546 - DNA, 45 bp, Homo sapiens
  source 1..45: mol_type = genomic DNA
cttagctgttaactaagtgtttgtgggtttaagtcccattggtct

SEQ ID NO: 14547 - DNA, 48 bp, Homo sapiens
  source 1..48: mol_type = genomic DNA
cttagctgttaactaagtgtttgtgggtttaagtcccattggtctagc

SEQ ID NO: 14548 - DNA, 23 bp, Homo sapiens
  source 1..23: mol_type = genomic DNA
cttagcttaattaaagtggctga

SEQ ID NO: 14549 - DNA, 23 bp, Homo sapiens
  source 1..23: mol_type = genomic DNA
cttagctttgggtgctaatggtg

SEQ ID NO: 14550 - DNA, 24 bp, Homo sapiens
  source 1..24: mol_type = genomic DNA
cttagctttgggtgctaatggtgg

SEQ ID NO: 14551 - DNA, 25 bp, Homo sapiens
  source 1..25: mol_type = genomic DNA
cttagctttgggtgctaatggtgga

SEQ ID NO: 14552 - DNA, 26 bp, Homo sapiens
  source 1..26: mol_type = genomic DNA
cttagctttgggtgctaatggtggag

SEQ ID NO: 14553 - DNA, 27 bp, Homo sapiens
  source 1..27: mol_type = genomic DNA
cttagctttgggtgctaatggtggagt

SEQ ID NO: 14554 - DNA, 28 bp, Homo sapiens
  source 1..28: mol_type = genomic DNA
cttagctttgggtgctaatggtggagtt

SEQ ID NO: 14555 - DNA, 29 bp, Homo sapiens
  source 1..29: mol_type = genomic DNA
cttagctttgggtgctaatggtggagtta

SEQ ID NO: 14556 - DNA, 30 bp, Homo sapiens
  source 1..30: mol_type = genomic DNA
cttagctttgggtgctaatggtggagttaa

SEQ ID NO: 14557 - DNA, 31 bp, Homo sapiens
  source 1..31: mol_type = genomic DNA
cttagctttgggtgctaatggtggagttaaa

SEQ ID NO: 14558 - DNA, 32 bp, Homo sapiens
  source 1..32: mol_type = genomic DNA
cttagctttgggtgctaatggtggagttaaag

SEQ ID NO: 14559 - DNA, 33 bp, Homo sapiens
  source 1..33: mol_type = genomic DNA
cttagctttgggtgctaatggtggagttaaaga

SEQ ID NO: 14560 - DNA, 34 bp, Homo sapiens
  source 1..34: mol_type = genomic DNA
cttagctttgggtgctaatggtggagttaaagac

SEQ ID NO: 14561 - DNA, 35 bp, Homo sapiens
  source 1..35: mol_type = genomic DNA
cttagctttgggtgctaatggtggagttaaagact

SEQ ID NO: 14562 - DNA, 36 bp, Homo sapiens
  source 1..36: mol_type = genomic DNA
cttagctttgggtgctaatggtggagttaaagactt

SEQ ID NO: 14563 - DNA, 37 bp, Homo sapiens
  source 1..37: mol_type = genomic DNA
cttagctttgggtgctaatggtggagttaaagacttt

SEQ ID NO: 14564 - DNA, 42 bp, Homo sapiens
  source 1..42: mol_type = genomic DNA
cttagctttgggtgctaatggtggagttaaagactttttctc

SEQ ID NO: 14565 - DNA, 45 bp, Homo sapiens
  source 1..45: mol_type = genomic DNA
cttagctttgggtgctaatggtggagttaaagactttttctctga

SEQ ID NO: 14566 - DNA, 46 bp, Homo sapiens
  source 1..46: mol_type = genomic DNA
cttagctttgggtgctaatggtggagttaaagactttttctctgac

SEQ ID NO: 14567 - DNA, 47 bp, Homo sapiens
  source 1..47: mol_type = genomic DNA
cttagctttgggtgctaatggtggagttaaagactttttctctgacc

SEQ ID NO: 14568 - DNA, 48 bp, Homo sapiens
  source 1..48: mol_type = genomic DNA
cttagctttgggtgctaatggtggagttaaagactttttctctgacca

SEQ ID NO: 14569 - DNA, 16 bp, Homo sapiens
  source 1..16: mol_type = genomic DNA
cttaggagatttcaac

SEQ ID NO: 14570 - DNA, 17 bp, Homo sapiens
  source 1..17: mol_type = genomic DNA
cttaggagatttcaact

SEQ ID NO: 14571 - DNA, 18 bp, Homo sapiens
  source 1..18: mol_type = genomic DNA
cttaggagatttcaactt

SEQ ID NO: 14572 - DNA, 19 bp, Homo sapiens
  source 1..19: mol_type = genomic DNA
cttaggagatttcaactta

SEQ ID NO: 14573 - DNA, 20 bp, Homo sapiens
  source 1..20: mol_type = genomic DNA
cttaggagatttcaacttaa

SEQ ID NO: 14574 - DNA, 21 bp, Homo sapiens
  source 1..21: mol_type = genomic DNA
cttaggagatttcaacttaac

SEQ ID NO: 14575 - DNA, 22 bp, Homo sapiens
  source 1..22: mol_type = genomic DNA
cttaggagatttcaacttaact

SEQ ID NO: 14576 - DNA, 23 bp, Homo sapiens
  source 1..23: mol_type = genomic DNA
cttaggagatttcaacttaactt

SEQ ID NO: 14577 - DNA, 24 bp, Homo sapiens
  source 1..24: mol_type = genomic DNA
cttaggagatttcaacttaacttg

SEQ ID NO: 14578 - DNA, 25 bp, Homo sapiens
  source 1..25: mol_type = genomic DNA
cttaggagatttcaacttaacttga

SEQ ID NO: 14579 - DNA, 26 bp, Homo sapiens
  source 1..26: mol_type = genomic DNA
cttaggagatttcaacttaacttgac

SEQ ID NO: 14580 - DNA, 27 bp, Homo sapiens
  source 1..27: mol_type = genomic DNA
cttaggagatttcaacttaacttgacc

SEQ ID NO: 14581 - DNA, 28 bp, Homo sapiens
  source 1..28: mol_type = genomic DNA
cttaggagatttcaacttaacttgaccg

SEQ ID NO: 14582 - DNA, 29 bp, Homo sapiens
  source 1..29: mol_type = genomic DNA
cttaggagatttcaacttaacttgaccgc

SEQ ID NO: 14583 - DNA, 30 bp, Homo sapiens
  source 1..30: mol_type = genomic DNA
cttaggagatttcaacttaacttgaccgct

SEQ ID NO: 14584 - DNA, 31 bp, Homo sapiens
  source 1..31: mol_type = genomic DNA
cttaggagatttcaacttaacttgaccgctc

SEQ ID NO: 14585 - DNA, 32 bp, Homo sapiens
  source 1..32: mol_type = genomic DNA
cttaggagatttcaacttaacttgaccgctct

SEQ ID NO: 14586 - DNA, 33 bp, Homo sapiens
  source 1..33: mol_type = genomic DNA
cttaggagatttcaacttaacttgaccgctctg

SEQ ID NO: 14587 - DNA, 34 bp, Homo sapiens
  source 1..34: mol_type = genomic DNA
cttaggagatttcaacttaacttgaccgctctga

SEQ ID NO: 14588 - DNA, 35 bp, Homo sapiens
  source 1..35: mol_type = genomic DNA
cttaggagatttcaacttaacttgaccgctctgac

SEQ ID NO: 14589 - DNA, 36 bp, Homo sapiens
  source 1..36: mol_type = genomic DNA
cttaggagatttcaacttaacttgaccgctctgacc

SEQ ID NO: 14590 - DNA, 37 bp, Homo sapiens
  source 1..37: mol_type = genomic DNA
cttaggagatttcaacttaacttgaccgctctgacca

SEQ ID NO: 14591 - DNA, 35 bp, Homo sapiens
  source 1..35: mol_type = genomic DNA
cttaggccccaaaaattttggtgcaactccaaata

SEQ ID NO: 14592 - DNA, 16 bp, Homo sapiens
  source 1..16: mol_type = genomic DNA
cttaggtcgctggttc

SEQ ID NO: 14593 - DNA, 17 bp, Homo sapiens
  source 1..17: mol_type = genomic DNA
cttaggtcgctggttcg

SEQ ID NO: 14594 - DNA, 34 bp, Homo sapiens
  source 1..34: mol_type = genomic DNA
cttaggtcgctggttcgaatccggctcgaaggac

SEQ ID NO: 14595 - DNA, 35 bp, Homo sapiens
  source 1..35: mol_type = genomic DNA
cttaggtcgctggttcgaatccggctcgaaggacc

SEQ ID NO: 14596 - DNA, 34 bp, Homo sapiens
  source 1..34: mol_type = genomic DNA
cttaggtcgctggttcgaatccggctcggaggac

SEQ ID NO: 14597 - DNA, 35 bp, Homo sapiens
  source 1..35: mol_type = genomic DNA
cttaggtcgctggttcgaatccggctcggaggacc

SEQ ID NO: 14598 - DNA, 36 bp, Homo sapiens
  source 1..36: mol_type = genomic DNA
cttaggtcgctggttcgaatccggctcggaggacca

SEQ ID NO: 14599 - DNA, 34 bp, Homo sapiens
  source 1..34: mol_type = genomic DNA
cttaggtcgctggttcgattccggctcgaaggac

SEQ ID NO: 14600 - DNA, 35 bp, Homo sapiens
  source 1..35: mol_type = genomic DNA
cttaggtcgctggttcgattccggctcgaaggacc

SEQ ID NO: 14601 - DNA, 36 bp, Homo sapiens
  source 1..36: mol_type = genomic DNA
cttaggtcgctggttcgattccggctcgaaggacca

SEQ ID NO: 14602 - DNA, 18 bp, Homo sapiens
  source 1..18: mol_type = genomic DNA
cttataatgccgaggttg

SEQ ID NO: 14603 - DNA, 19 bp, Homo sapiens
  source 1..19: mol_type = genomic DNA
cttataatgccgaggttgt

SEQ ID NO: 14604 - DNA, 20 bp, Homo sapiens
  source 1..20: mol_type = genomic DNA
cttataatgccgaggttgtg

SEQ ID NO: 14605 - DNA, 22 bp, Homo sapiens
  source 1..22: mol_type = genomic DNA
cttataatgccgaggttgtgag

SEQ ID NO: 14606 - DNA, 23 bp, Homo sapiens
  source 1..23: mol_type = genomic DNA
cttataatgccgaggttgtgagt

SEQ ID NO: 14607 - DNA, 24 bp, Homo sapiens
  source 1..24: mol_type = genomic DNA
cttataatgccgaggttgtgagtt

SEQ ID NO: 14608 - DNA, 25 bp, Homo sapiens
  source 1..25: mol_type = genomic DNA
cttataatgccgaggttgtgagttc

SEQ ID NO: 14609 - DNA, 16 bp, Homo sapiens
  source 1..16: mol_type = genomic DNA
cttcaaacctgccggg

SEQ ID NO: 14610 - DNA, 17 bp, Homo sapiens
  source 1..17: mol_type = genomic DNA
cttcaaacctgccgggg

SEQ ID NO: 14611 - DNA, 18 bp, Homo sapiens
  source 1..18: mol_type = genomic DNA
cttcaaacctgccggggc

SEQ ID NO: 14612 - DNA, 19 bp, Homo sapiens
  source 1..19: mol_type = genomic DNA
cttcaaacctgccggggct

SEQ ID NO: 14613 - DNA, 20 bp, Homo sapiens
  source 1..20: mol_type = genomic DNA
cttcaaacctgccggggctt

SEQ ID NO: 14614 - DNA, 21 bp, Homo sapiens
  source 1..21: mol_type = genomic DNA
cttcaaacctgccggggcttc

SEQ ID NO: 14615 - DNA, 22 bp, Homo sapiens
  source 1..22: mol_type = genomic DNA
cttcaaacctgccggggcttcc

SEQ ID NO: 14616 - DNA, 23 bp, Homo sapiens
  source 1..23: mol_type = genomic DNA
cttcaaacctgccggggcttcca

SEQ ID NO: 14617 - DNA, 40 bp, Homo sapiens
  source 1..40: mol_type = genomic DNA
cttcaaagccctcagtaagttgcaatacttaatttctgcc

SEQ ID NO: 14618 - DNA, 41 bp, Homo sapiens
  source 1..41: mol_type = genomic DNA
cttcaaagccctcagtaagttgcaatacttaatttctgcca

SEQ ID NO: 14619 - DNA, 17 bp, Homo sapiens
  source 1..17: mol_type = genomic DNA
cttccaagcagttgacc

SEQ ID NO: 14620 - DNA, 18 bp, Homo sapiens
  source 1..18: mol_type = genomic DNA
cttccaagcagttgaccc

SEQ ID NO: 14621 - DNA, 19 bp, Homo sapiens
  source 1..19: mol_type = genomic DNA
cttccaagcagttgacccg

SEQ ID NO: 14622 - DNA, 20 bp, Homo sapiens
  source 1..20: mol_type = genomic DNA
cttccaagcagttgacccgg

SEQ ID NO: 14623 - DNA, 21 bp, Homo sapiens
  source 1..21: mol_type = genomic DNA
cttccaagcagttgacccggg

SEQ ID NO: 14624 - DNA, 22 bp, Homo sapiens
  source 1..22: mol_type = genomic DNA
cttccaagcagttgacccgggt

SEQ ID NO: 14625 - DNA, 23 bp, Homo sapiens
  source 1..23: mol_type = genomic DNA
cttccaagcagttgacccgggtt

SEQ ID NO: 14626 - DNA, 34 bp, Homo sapiens
  source 1..34: mol_type = genomic DNA
cttccaagcagttgacccgggttcgattcccggc

SEQ ID NO: 14627 - DNA, 35 bp, Homo sapiens
  source 1..35: mol_type = genomic DNA
cttccaagcagttgacccgggttcgattcccggcc

SEQ ID NO: 14628 - DNA, 16 bp, Homo sapiens
  source 1..16: mol_type = genomic DNA
cttccaattaactagt

SEQ ID NO: 14629 - DNA, 17 bp, Homo sapiens
  source 1..17: mol_type = genomic DNA
cttccaattaactagtt

SEQ ID NO: 14630 - DNA, 20 bp, Homo sapiens
  source 1..20: mol_type = genomic DNA
cttccaattaactagttttg

SEQ ID NO: 14631 - DNA, 21 bp, Homo sapiens
  source 1..21: mol_type = genomic DNA
cttccaattaactagttttga

SEQ ID NO: 14632 - DNA, 22 bp, Homo sapiens
  source 1..22: mol_type = genomic DNA
cttccaattaactagttttgac

SEQ ID NO: 14633 - DNA, 23 bp, Homo sapiens
  source 1..23: mol_type = genomic DNA
cttccaattaactagttttgaca

SEQ ID NO: 14634 - DNA, 24 bp, Homo sapiens
  source 1..24: mol_type = genomic DNA
cttccaattaactagttttgacaa

SEQ ID NO: 14635 - DNA, 25 bp, Homo sapiens
  source 1..25: mol_type = genomic DNA
cttccaattaactagttttgacaac

SEQ ID NO: 14636 - DNA, 26 bp, Homo sapiens
  source 1..26: mol_type = genomic DNA
cttccaattaactagttttgacaaca

SEQ ID NO: 14637 - DNA, 40 bp, Homo sapiens
  source 1..40: mol_type = genomic DNA
cttccaattaactagttttgacaacattcaaaaaagagta

SEQ ID NO: 14638 - DNA, 42 bp, Homo sapiens
  source 1..42: mol_type = genomic DNA
cttccaattaactagttttgacaacattcaaaaaagagtacc

SEQ ID NO: 14639 - DNA, 43 bp, Homo sapiens
  source 1..43: mol_type = genomic DNA
cttccaattaactagttttgacaacattcaaaaaagagtacca

SEQ ID NO: 14640 - DNA, 18 bp, Homo sapiens
  source 1..18: mol_type = genomic DNA
cttcgatagctcagctgg

SEQ ID NO: 14641 - DNA, 16 bp, Homo sapiens
  source 1..16: mol_type = genomic DNA
cttcggaggcgtgggt

SEQ ID NO: 14642 - DNA, 17 bp, Homo sapiens
  source 1..17: mol_type = genomic DNA
cttcggaggcgtgggtt

SEQ ID NO: 14643 - DNA, 18 bp, Homo sapiens
  source 1..18: mol_type = genomic DNA
cttcggaggcgtgggttc

SEQ ID NO: 14644 - DNA, 19 bp, Homo sapiens
  source 1..19: mol_type = genomic DNA
cttcggaggcgtgggttcg

SEQ ID NO: 14645 - DNA, 26 bp, Homo sapiens
  source 1..26: mol_type = genomic DNA
cttcggaggcgtgggttcgaatccca

SEQ ID NO: 14646 - DNA, 19 bp, Homo sapiens
  source 1..19: mol_type = genomic DNA
cttcggatcagaagattga

SEQ ID NO: 14647 - DNA, 20 bp, Homo sapiens
  source 1..20: mol_type = genomic DNA
cttcggatcagaagattgag

SEQ ID NO: 14648 - DNA, 21 bp, Homo sapiens
  source 1..21: mol_type = genomic DNA
cttcggatcagaagattgagg

SEQ ID NO: 14649 - DNA, 23 bp, Homo sapiens
  source 1..23: mol_type = genomic DNA
cttcggatcagaagattgagggt

SEQ ID NO: 14650 - DNA, 25 bp, Homo sapiens
  source 1..25: mol_type = genomic DNA
cttcggatcagaagattgagggttc

SEQ ID NO: 14651 - DNA, 26 bp, Homo sapiens
  source 1..26: mol_type = genomic DNA
cttcggatcagaagattgagggttcg

SEQ ID NO: 14652 - DNA, 44 bp, Homo sapiens
  source 1..44: mol_type = genomic DNA
cttcggatcagaagattgagggttcgagtcccttcgtggtcgcc

SEQ ID NO: 14653 - DNA, 45 bp, Homo sapiens
  source 1..45: mol_type = genomic DNA
cttcggatcagaagattgagggttcgagtcccttcgtggtcgcca

SEQ ID NO: 14654 - DNA, 20 bp, Homo sapiens
  source 1..20: mol_type = genomic DNA
cttcggatcagaagattgca

SEQ ID NO: 14655 - DNA, 25 bp, Homo sapiens
  source 1..25: mol_type = genomic DNA
cttcggatcagaagattgcaggttc

SEQ ID NO: 14656 - DNA, 26 bp, Homo sapiens
  source 1..26: mol_type = genomic DNA
cttcggatcagaagattgcaggttcg

SEQ ID NO: 14657 - DNA, 30 bp, Homo sapiens
  source 1..30: mol_type = genomic DNA
cttcggatcagaagattgcaggttcgagtc

SEQ ID NO: 14658 - DNA, 31 bp, Homo sapiens
  source 1..31: mol_type = genomic DNA
cttcggatcagaagattgcaggttcgagtcc

SEQ ID NO: 14659 - DNA, 32 bp, Homo sapiens
  source 1..32: mol_type = genomic DNA
cttcggatcagaagattgcaggttcgagtcct

SEQ ID NO: 14660 - DNA, 33 bp, Homo sapiens
  source 1..33: mol_type = genomic DNA
cttcggatcagaagattgcaggttcgagtcctg

SEQ ID NO: 14661 - DNA, 45 bp, Homo sapiens
  source 1..45: mol_type = genomic DNA
cttcggatcagaagattgcaggttcgagtcctgccgcggtcgcca

SEQ ID NO: 14662 - DNA, 16 bp, Homo sapiens
  source 1..16: mol_type = genomic DNA
cttcgggggcgtgggt

SEQ ID NO: 14663 - DNA, 17 bp, Homo sapiens
  source 1..17: mol_type = genomic DNA
cttcgggggcgtgggtt

SEQ ID NO: 14664 - DNA, 18 bp, Homo sapiens
  source 1..18: mol_type = genomic DNA
cttcgggggcgtgggttc

SEQ ID NO: 14665 - DNA, 19 bp, Homo sapiens
  source 1..19: mol_type = genomic DNA
cttcgggggcgtgggttcg

SEQ ID NO: 14666 - DNA, 37 bp, Homo sapiens
  source 1..37: mol_type = genomic DNA
cttcgggggcgtgggttcgaatcccaccgctgccacc

SEQ ID NO: 14667 - DNA, 18 bp, Homo sapiens
  source 1..18: mol_type = genomic DNA
cttcgggggcgtgggttt

SEQ ID NO: 14668 - DNA, 44 bp, Homo sapiens
  source 1..44: mol_type = genomic DNA
cttcgggtgcgagaggtcccgggttcaaatcccggacgagcccc

SEQ ID NO: 14669 - DNA, 45 bp, Homo sapiens
  source 1..45: mol_type = genomic DNA
cttcgggtgcgagaggtcccgggttcaaatcccggacgagccccc

SEQ ID NO: 14670 - DNA, 25 bp, Homo sapiens
  source 1..25: mol_type = genomic DNA
cttctgtagtgtagtggttatcacg

SEQ ID NO: 14671 - DNA, 30 bp, Homo sapiens
  source 1..30: mol_type = genomic DNA
cttctgtagtgtagtggttatcacgttcgc

SEQ ID NO: 14672 - DNA, 31 bp, Homo sapiens
  source 1..31: mol_type = genomic DNA
cttctgtagtgtagtggttatcacgttcgcc

SEQ ID NO: 14673 - DNA, 32 bp, Homo sapiens
  source 1..32: mol_type = genomic DNA
cttctgtagtgtagtggttatcacgttcgcct

SEQ ID NO: 14674 - DNA, 33 bp, Homo sapiens
  source 1..33: mol_type = genomic DNA
cttctgtagtgtagtggttatcacgttcgcctc

SEQ ID NO: 14675 - DNA, 34 bp, Homo sapiens
  source 1..34: mol_type = genomic DNA
cttctgtagtgtagtggttatcacgttcgcctca

SEQ ID NO: 14676 - DNA, 35 bp, Homo sapiens
  source 1..35: mol_type = genomic DNA
cttctgtagtgtagtggttatcacgttcgcctcac

SEQ ID NO: 14677 - DNA, 38 bp, Homo sapiens
  source 1..38: mol_type = genomic DNA
cttctgtagtgtagtggttatcacgttcgcctcacacg

SEQ ID NO: 14678 - DNA, 16 bp, Homo sapiens
  source 1..16: mol_type = genomic DNA
cttgaccgctctgacc

SEQ ID NO: 14679 - DNA, 17 bp, Homo sapiens
  source 1..17: mol_type = genomic DNA
cttgaccgctctgacca

SEQ ID NO: 14680 - DNA, 16 bp, Homo sapiens
  source 1..16: mol_type = genomic DNA
cttgcgacccgggttc

SEQ ID NO: 14681 - DNA, 17 bp, Homo sapiens
  source 1..17: mol_type = genomic DNA
cttgcgacccgggttcg

SEQ ID NO: 14682 - DNA, 22 bp, Homo sapiens
  source 1..22: mol_type = genomic DNA
cttgcgacccgggttcgattcc

SEQ ID NO: 14683 - DNA, 30 bp, Homo sapiens
  source 1..30: mol_type = genomic DNA
cttgcgacccgggttcgattcccgggcggc

SEQ ID NO: 14684 - DNA, 31 bp, Homo sapiens
  source 1..31: mol_type = genomic DNA
cttgcgacccgggttcgattcccgggcggcg

SEQ ID NO: 14685 - DNA, 35 bp, Homo sapiens
  source 1..35: mol_type = genomic DNA
cttgcgacccgggttcgattcccgggcggcgcacc

SEQ ID NO: 14686 - DNA, 27 bp, Homo sapiens
  source 1..27: mol_type = genomic DNA
cttgtaaaccaggggtcgcgagttcaa

SEQ ID NO: 14687 - DNA, 22 bp, Homo sapiens
  source 1..22: mol_type = genomic DNA
cttgtaaaccggagatgaaaac

SEQ ID NO: 14688 - DNA, 23 bp, Homo sapiens
  source 1..23: mol_type = genomic DNA
cttgtaaaccggagatgaaaacc

SEQ ID NO: 14689 - DNA, 24 bp, Homo sapiens
  source 1..24: mol_type = genomic DNA
cttgtaaaccggagatgaaaacct

SEQ ID NO: 14690 - DNA, 34 bp, Homo sapiens
  source 1..34: mol_type = genomic DNA
cttgtaaaccggagatgaaaacctttttccaagg

SEQ ID NO: 14691 - DNA, 37 bp, Homo sapiens
  source 1..37: mol_type = genomic DNA
cttgtaaaccggagatgaaaacctttttccaaggaca

SEQ ID NO: 14692 - DNA, 38 bp, Homo sapiens
  source 1..38: mol_type = genomic DNA
cttgtaaaccggagatgaaaacctttttccaaggacac

SEQ ID NO: 14693 - DNA, 39 bp, Homo sapiens
  source 1..39: mol_type = genomic DNA
cttgtaaaccggagatgaaaacctttttccaaggacacc

SEQ ID NO: 14694 - DNA, 40 bp, Homo sapiens
  source 1..40: mol_type = genomic DNA
cttgtaaaccggagatgaaaacctttttccaaggacacca

SEQ ID NO: 14695 - DNA, 26 bp, Homo sapiens
  source 1..26: mol_type = genomic DNA
cttgtagtataaactaatacaccagt

SEQ ID NO: 14696 - DNA, 23 bp, Homo sapiens
  source 1..23: mol_type = genomic DNA
cttgtagttgaaatacaacgatg

SEQ ID NO: 14697 - DNA, 17 bp, Homo sapiens
  source 1..17: mol_type = genomic DNA
ctttacaatcagaggtt

SEQ ID NO: 14698 - DNA, 45 bp, Homo sapiens
  source 1..45: mol_type = genomic DNA
ctttacacgcagaaggtcctgggttcgagccccagtggaaccacc

SEQ ID NO: 14699 - DNA, 16 bp, Homo sapiens
  source 1..16: mol_type = genomic DNA
ctttacagtcagaggt

SEQ ID NO: 14700 - DNA, 17 bp, Homo sapiens
  source 1..17: mol_type = genomic DNA
ctttacagtcagaggtt

SEQ ID NO: 14701 - DNA, 18 bp, Homo sapiens
  source 1..18: mol_type = genomic DNA
ctttacagtcagaggttc

SEQ ID NO: 14702 - DNA, 19 bp, Homo sapiens
  source 1..19: mol_type = genomic DNA
ctttacagtcagaggttca

SEQ ID NO: 14703 - DNA, 20 bp, Homo sapiens
  source 1..20: mol_type = genomic DNA
ctttacagtcagaggttcaa

SEQ ID NO: 14704 - DNA, 23 bp, Homo sapiens
  source 1..23: mol_type = genomic DNA
ctttacagtcagaggttcaattc

SEQ ID NO: 14705 - DNA, 24 bp, Homo sapiens
  source 1..24: mol_type = genomic DNA
ctttacagtcagaggttcaattcc

SEQ ID NO: 14706 - DNA, 25 bp, Homo sapiens
  source 1..25: mol_type = genomic DNA
ctttacagtcagaggttcaattcct

SEQ ID NO: 14707 - DNA, 26 bp, Homo sapiens
  source 1..26: mol_type = genomic DNA
ctttacagtcagaggttcaattcctc

SEQ ID NO: 14708 - DNA, 28 bp, Homo sapiens
  source 1..28: mol_type = genomic DNA
ctttacagtcagaggttcaattcctctt

SEQ ID NO: 14709 - DNA, 29 bp, Homo sapiens
  source 1..29: mol_type = genomic DNA
ctttacagtcagaggttcaattcctcttc

SEQ ID NO: 14710 - DNA, 30 bp, Homo sapiens
  source 1..30: mol_type = genomic DNA
ctttacagtcagaggttcaattcctcttct

SEQ ID NO: 14711 - DNA, 35 bp, Homo sapiens
  source 1..35: mol_type = genomic DNA
ctttacagtcagaggttcaattcctcttcttaaca

SEQ ID NO: 14712 - DNA, 36 bp, Homo sapiens
  source 1..36: mol_type = genomic DNA
ctttacagtcagaggttcaattcctcttcttaacac

SEQ ID NO: 14713 - DNA, 37 bp, Homo sapiens
  source 1..37: mol_type = genomic DNA
ctttacagtcagaggttcaattcctcttcttaacacc

SEQ ID NO: 14714 - DNA, 18 bp, Homo sapiens
  source 1..18: mol_type = genomic DNA
ctttcaccgccgcggccc

SEQ ID NO: 14715 - DNA, 20 bp, Homo sapiens
  source 1..20: mol_type = genomic DNA
ctttcaccgccgcggcccgg

SEQ ID NO: 14716 - DNA, 22 bp, Homo sapiens
  source 1..22: mol_type = genomic DNA
ctttcaccgccgcggcccgggt

SEQ ID NO: 14717 - DNA, 24 bp, Homo sapiens
  source 1..24: mol_type = genomic DNA
ctttcaccgccgcggcccgggttc

SEQ ID NO: 14718 - DNA, 36 bp, Homo sapiens
  source 1..36: mol_type = genomic DNA
ctttcaccgccgcggcccgggttcgattcccggtca

SEQ ID NO: 14719 - DNA, 19 bp, Homo sapiens
  source 1..19: mol_type = genomic DNA
ctttgaatccagcaatccg

SEQ ID NO: 14720 - DNA, 20 bp, Homo sapiens
  source 1..20: mol_type = genomic DNA
ctttgaatccagcaatccga

SEQ ID NO: 14721 - DNA, 21 bp, Homo sapiens
  source 1..21: mol_type = genomic DNA
ctttgaatccagcaatccgag

SEQ ID NO: 14722 - DNA, 22 bp, Homo sapiens
  source 1..22: mol_type = genomic DNA
ctttgaatccagcaatccgagt

SEQ ID NO: 14723 - DNA, 23 bp, Homo sapiens
  source 1..23: mol_type = genomic DNA
ctttgaatccagcaatccgagtt

SEQ ID NO: 14724 - DNA, 24 bp, Homo sapiens
  source 1..24: mol_type = genomic DNA
ctttgaatccagcaatccgagttc

SEQ ID NO: 14725 - DNA, 16 bp, Homo sapiens
  source 1..16: mol_type = genomic DNA
ctttgaatccagcgat

SEQ ID NO: 14726 - DNA, 17 bp, Homo sapiens
  source 1..17: mol_type = genomic DNA
ctttgaatccagcgatc

SEQ ID NO: 14727 - DNA, 18 bp, Homo sapiens
  source 1..18: mol_type = genomic DNA
ctttgaatccagcgatcc

SEQ ID NO: 14728 - DNA, 19 bp, Homo sapiens
  source 1..19: mol_type = genomic DNA
ctttgaatccagcgatccg

SEQ ID NO: 14729 - DNA, 20 bp, Homo sapiens
  source 1..20: mol_type = genomic DNA
ctttgaatccagcgatccga

SEQ ID NO: 14730 - DNA, 21 bp, Homo sapiens
  source 1..21: mol_type = genomic DNA
ctttgaatccagcgatccgag

SEQ ID NO: 14731 - DNA, 22 bp, Homo sapiens
  source 1..22: mol_type = genomic DNA
ctttgaatccagcgatccgagt

SEQ ID NO: 14732 - DNA, 23 bp, Homo sapiens
  source 1..23: mol_type = genomic DNA
ctttgaatccagcgatccgagtt

SEQ ID NO: 14733 - DNA, 24 bp, Homo sapiens
  source 1..24: mol_type = genomic DNA
ctttgaatccagcgatccgagttc

SEQ ID NO: 14734 - DNA, 25 bp, Homo sapiens
  source 1..25: mol_type = genomic DNA
ctttgaatccagcgatccgagttca

SEQ ID NO: 14735 - DNA, 35 bp, Homo sapiens
  source 1..35: mol_type = genomic DNA
ctttgaatccagcgatccgagttcaaatctcggtg

SEQ ID NO: 14736 - DNA, 36 bp, Homo sapiens
  source 1..36: mol_type = genomic DNA
ctttgaatccagcgatccgagttcaaatctcggtgg

SEQ ID NO: 14737 - DNA, 38 bp, Homo sapiens
  source 1..38: mol_type = genomic DNA
ctttgaatccagcgatccgagttcaaatctcggtggga

SEQ ID NO: 14738 - DNA, 16 bp, Homo sapiens
  source 1..16: mol_type = genomic DNA
ctttgatagagtaaat

SEQ ID NO: 14739 - DNA, 18 bp, Homo sapiens
  source 1..18: mol_type = genomic DNA
ctttgatagagtaaataa

SEQ ID NO: 14740 - DNA, 19 bp, Homo sapiens
  source 1..19: mol_type = genomic DNA
ctttgatagagtaaataat

SEQ ID NO: 14741 - DNA, 21 bp, Homo sapiens
  source 1..21: mol_type = genomic DNA
ctttgatagagtaaataatag

SEQ ID NO: 14742 - DNA, 23 bp, Homo sapiens
  source 1..23: mol_type = genomic DNA
ctttgatagagtaaataatagga

SEQ ID NO: 14743 - DNA, 24 bp, Homo sapiens
  source 1..24: mol_type = genomic DNA
ctttgatagagtaaataataggag

SEQ ID NO: 14744 - DNA, 25 bp, Homo sapiens
  source 1..25: mol_type = genomic DNA
ctttgatagagtaaataataggagc

SEQ ID NO: 14745 - DNA, 26 bp, Homo sapiens
  source 1..26: mol_type = genomic DNA
ctttgatagagtaaataataggagct

SEQ ID NO: 14746 - DNA, 27 bp, Homo sapiens
  source 1..27: mol_type = genomic DNA
ctttgatagagtaaataataggagctt

SEQ ID NO: 14747 - DNA, 28 bp, Homo sapiens
  source 1..28: mol_type = genomic DNA
ctttgatagagtaaataataggagctta

SEQ ID NO: 14748 - DNA, 29 bp, Homo sapiens
  source 1..29: mol_type = genomic DNA
ctttgatagagtaaataataggagcttaa

SEQ ID NO: 14749 - DNA, 30 bp, Homo sapiens
  source 1..30: mol_type = genomic DNA
ctttgatagagtaaataataggagcttaaa

SEQ ID NO: 14750 - DNA, 31 bp, Homo sapiens
  source 1..31: mol_type = genomic DNA
ctttgatagagtaaataataggagcttaaac

SEQ ID NO: 14751 - DNA, 32 bp, Homo sapiens
  source 1..32: mol_type = genomic DNA
ctttgatagagtaaataataggagcttaaacc

SEQ ID NO: 14752 - DNA, 33 bp, Homo sapiens
  source 1..33: mol_type = genomic DNA
ctttgatagagtaaataataggagcttaaaccc

SEQ ID NO: 14753 - DNA, 34 bp, Homo sapiens
  source 1..34: mol_type = genomic DNA
ctttgatagagtaaataataggagcttaaacccc

SEQ ID NO: 14754 - DNA, 35 bp, Homo sapiens
  source 1..35: mol_type = genomic DNA
ctttgatagagtaaataataggagcttaaaccccc

SEQ ID NO: 14755 - DNA, 36 bp, Homo sapiens
  source 1..36: mol_type = genomic DNA
ctttgatagagtaaataataggagcttaaaccccct

SEQ ID NO: 14756 - DNA, 37 bp, Homo sapiens
  source 1..37: mol_type = genomic DNA
ctttgatagagtaaataataggagcttaaaccccctt

SEQ ID NO: 14757 - DNA, 38 bp, Homo sapiens
  source 1..38: mol_type = genomic DNA
ctttgatagagtaaataataggagcttaaaccccctta

SEQ ID NO: 14758 - DNA, 39 bp, Homo sapiens
  source 1..39: mol_type = genomic DNA
ctttgatagagtaaataataggagcttaaacccccttat

SEQ ID NO: 14759 - DNA, 40 bp, Homo sapiens
  source 1..40: mol_type = genomic DNA
ctttgatagagtaaataataggagcttaaacccccttatt

SEQ ID NO: 14760 - DNA, 46 bp, Homo sapiens
  source 1..46: mol_type = genomic DNA
ctttgatagagtaaataataggagcttaaacccccttatttctacc

SEQ ID NO: 14761 - DNA, 47 bp, Homo sapiens
  source 1..47: mol_type = genomic DNA
ctttgatagagtaaataataggagcttaaacccccttatttctacca

SEQ ID NO: 14762 - DNA, 16 bp, Homo sapiens
  source 1..16: mol_type = genomic DNA
ctttgcacgcgtgggt

SEQ ID NO: 14763 - DNA, 37 bp, Homo sapiens
  source 1..37: mol_type = genomic DNA
ctttgcacgcgtgggttcgaatcccatcctcgtcgcc

SEQ ID NO: 14764 - DNA, 38 bp, Homo sapiens
  source 1..38: mol_type = genomic DNA
ctttgcacgcgtgggttcgaatcccatcctcgtcgcca

SEQ ID NO: 14765 - DNA, 17 bp, Homo sapiens
  source 1..17: mol_type = genomic DNA
ctttgcacgtatgaggc

SEQ ID NO: 14766 - DNA, 35 bp, Homo sapiens
  source 1..35: mol_type = genomic DNA
ctttgcacgtatgaggccccgggttcaatccccgg

SEQ ID NO: 14767 - DNA, 40 bp, Homo sapiens
  source 1..40: mol_type = genomic DNA
ctttgcacgtatgaggccccgggttcaatccccggcatct

SEQ ID NO: 14768 - DNA, 41 bp, Homo sapiens
  source 1..41: mol_type = genomic DNA
ctttgcacgtatgaggccccgggttcaatccccggcatctc

SEQ ID NO: 14769 - DNA, 19 bp, Homo sapiens
  source 1..19: mol_type = genomic DNA
ctttggggggttcgattcc

SEQ ID NO: 14770 - DNA, 23 bp, Homo sapiens
  source 1..23: mol_type = genomic DNA
ctttggggggttcgattccttcc

SEQ ID NO: 14771 - DNA, 24 bp, Homo sapiens
  source 1..24: mol_type = genomic DNA
ctttggggggttcgattccttcct

SEQ ID NO: 14772 - DNA, 30 bp, Homo sapiens
  source 1..30: mol_type = genomic DNA
ctttggggggttcgattccttccttttttg

SEQ ID NO: 14773 - DNA, 32 bp, Homo sapiens
  source 1..32: mol_type = genomic DNA
ctttggggggttcgattccttccttttttgcc

SEQ ID NO: 14774 - DNA, 33 bp, Homo sapiens
  source 1..33: mol_type = genomic DNA
ctttggggggttcgattccttccttttttgcca

SEQ ID NO: 14775 - DNA, 20 bp, Homo sapiens
  source 1..20: mol_type = genomic DNA
ctttgggtgcgagaggtccc

SEQ ID NO: 14776 - DNA, 44 bp, Homo sapiens
  source 1..44: mol_type = genomic DNA
ctttgggtgcgagaggtcccgggttcaaatcccggacgagcccc

SEQ ID NO: 14777 - DNA, 16 bp, Homo sapiens
  source 1..16: mol_type = genomic DNA
ctttgggtgctaatgg

SEQ ID NO: 14778 - DNA, 18 bp, Homo sapiens
  source 1..18: mol_type = genomic DNA
ctttgggtgctaatggtg

SEQ ID NO: 14779 - DNA, 19 bp, Homo sapiens
  source 1..19: mol_type = genomic DNA
ctttgggtgctaatggtgg

SEQ ID NO: 14780 - DNA, 21 bp, Homo sapiens
  source 1..21: mol_type = genomic DNA
ctttgggtgctaatggtggag

SEQ ID NO: 14781 - DNA, 22 bp, Homo sapiens
  source 1..22: mol_type = genomic DNA
ctttgggtgctaatggtggagt

SEQ ID NO: 14782 - DNA, 23 bp, Homo sapiens
  source 1..23: mol_type = genomic DNA
ctttgggtgctaatggtggagtt

SEQ ID NO: 14783 - DNA, 24 bp, Homo sapiens
  source 1..24: mol_type = genomic DNA
ctttgggtgctaatggtggagtta

SEQ ID NO: 14784 - DNA, 25 bp, Homo sapiens
  source 1..25: mol_type = genomic DNA
ctttgggtgctaatggtggagttaa

SEQ ID NO: 14785 - DNA, 26 bp, Homo sapiens
  source 1..26: mol_type = genomic DNA
ctttgggtgctaatggtggagttaaa

SEQ ID NO: 14786 - DNA, 27 bp, Homo sapiens
  source 1..27: mol_type = genomic DNA
ctttgggtgctaatggtggagttaaag

SEQ ID NO: 14787 - DNA, 28 bp, Homo sapiens
  source 1..28: mol_type = genomic DNA
ctttgggtgctaatggtggagttaaaga

SEQ ID NO: 14788 - DNA, 29 bp, Homo sapiens
  source 1..29: mol_type = genomic DNA
ctttgggtgctaatggtggagttaaagac

SEQ ID NO: 14789 - DNA, 30 bp, Homo sapiens
  source 1..30: mol_type = genomic DNA
ctttgggtgctaatggtggagttaaagact

SEQ ID NO: 14790 - DNA, 31 bp, Homo sapiens
  source 1..31: mol_type = genomic DNA
ctttgggtgctaatggtggagttaaagactt

SEQ ID NO: 14791 - DNA, 32 bp, Homo sapiens
  source 1..32: mol_type = genomic DNA
ctttgggtgctaatggtggagttaaagacttt

SEQ ID NO: 14792 - DNA, 33 bp, Homo sapiens
  source 1..33: mol_type = genomic DNA
ctttgggtgctaatggtggagttaaagactttt

SEQ ID NO: 14793 - DNA, 36 bp, Homo sapiens
  source 1..36: mol_type = genomic DNA
ctttgggtgctaatggtggagttaaagactttttct

SEQ ID NO: 14794 - DNA, 37 bp, Homo sapiens
  source 1..37: mol_type = genomic DNA
ctttgggtgctaatggtggagttaaagactttttctc

SEQ ID NO: 14795 - DNA, 40 bp, Homo sapiens
  source 1..40: mol_type = genomic DNA
ctttgggtgctaatggtggagttaaagactttttctctga

SEQ ID NO: 14796 - DNA, 41 bp, Homo sapiens
  source 1..41: mol_type = genomic DNA
ctttgggtgctaatggtggagttaaagactttttctctgac

SEQ ID NO: 14797 - DNA, 42 bp, Homo sapiens
  source 1..42: mol_type = genomic DNA
ctttgggtgctaatggtggagttaaagactttttctctgacc

SEQ ID NO: 14798 - DNA, 43 bp, Homo sapiens
  source 1..43: mol_type = genomic DNA
ctttgggtgctaatggtggagttaaagactttttctctgacca

SEQ ID NO: 14799 - DNA, 16 bp, Homo sapiens
  source 1..16: mol_type = genomic DNA
ctttgtcaaagttaaa

SEQ ID NO: 14800 - DNA, 18 bp, Homo sapiens
  source 1..18: mol_type = genomic DNA
ctttgtcaaagttaaatt

SEQ ID NO: 14801 - DNA, 20 bp, Homo sapiens
  source 1..20: mol_type = genomic DNA
ctttgtcaaagttaaattat

SEQ ID NO: 14802 - DNA, 21 bp, Homo sapiens
  source 1..21: mol_type = genomic DNA
ctttgtcaaagttaaattata

SEQ ID NO: 14803 - DNA, 22 bp, Homo sapiens
  source 1..22: mol_type = genomic DNA
ctttgtcaaagttaaattatag

SEQ ID NO: 14804 - DNA, 23 bp, Homo sapiens
  source 1..23: mol_type = genomic DNA
ctttgtcaaagttaaattatagg

SEQ ID NO: 14805 - DNA, 24 bp, Homo sapiens
  source 1..24: mol_type = genomic DNA
ctttgtcaaagttaaattataggc

SEQ ID NO: 14806 - DNA, 25 bp, Homo sapiens
  source 1..25: mol_type = genomic DNA
ctttgtcaaagttaaattataggct

SEQ ID NO: 14807 - DNA, 26 bp, Homo sapiens
  source 1..26: mol_type = genomic DNA
ctttgtcaaagttaaattataggcta

SEQ ID NO: 14808 - DNA, 27 bp, Homo sapiens
  source 1..27: mol_type = genomic DNA
ctttgtcaaagttaaattataggctaa

SEQ ID NO: 14809 - DNA, 28 bp, Homo sapiens
  source 1..28: mol_type = genomic DNA
ctttgtcaaagttaaattataggctaaa

SEQ ID NO: 14810 - DNA, 29 bp, Homo sapiens
  source 1..29: mol_type = genomic DNA
ctttgtcaaagttaaattataggctaaat

SEQ ID NO: 14811 - DNA, 31 bp, Homo sapiens
  source 1..31: mol_type = genomic DNA
ctttgtcaaagttaaattataggctaaatcc

SEQ ID NO: 14812 - DNA, 32 bp, Homo sapiens
  source 1..32: mol_type = genomic DNA
ctttgtcaaagttaaattataggctaaatcct

SEQ ID NO: 14813 - DNA, 33 bp, Homo sapiens
  source 1..33: mol_type = genomic DNA
ctttgtcaaagttaaattataggctaaatccta

SEQ ID NO: 14814 - DNA, 35 bp, Homo sapiens
  source 1..35: mol_type = genomic DNA
ctttgtcaaagttaaattataggctaaatcctata

SEQ ID NO: 14815 - DNA, 36 bp, Homo sapiens
  source 1..36: mol_type = genomic DNA
ctttgtcaaagttaaattataggctaaatcctatat

SEQ ID NO: 14816 - DNA, 37 bp, Homo sapiens
  source 1..37: mol_type = genomic DNA
ctttgtcaaagttaaattataggctaaatcctatata

SEQ ID NO: 14817 - DNA, 39 bp, Homo sapiens
  source 1..39: mol_type = genomic DNA
ctttgtcaaagttaaattataggctaaatcctatatatc

SEQ ID NO: 14818 - DNA, 41 bp, Homo sapiens
  source 1..41: mol_type = genomic DNA
ctttgtcaaagttaaattataggctaaatcctatatatctt

SEQ ID NO: 14819 - DNA, 43 bp, Homo sapiens
  source 1..43: mol_type = genomic DNA
ctttgtcaaagttaaattataggctaaatcctatatatcttac

SEQ ID NO: 14820 - DNA, 44 bp, Homo sapiens
  source 1..44: mol_type = genomic DNA
ctttgtcaaagttaaattataggctaaatcctatatatcttacc

SEQ ID NO: 14821 - DNA, 45 bp, Homo sapiens
  source 1..45: mol_type = genomic DNA
ctttgtcaaagttaaattataggctaaatcctatatatcttacca

SEQ ID NO: 14822 - DNA, 19 bp, Homo sapiens
  source 1..19: mol_type = genomic DNA
cttttaaaggataacagct

SEQ ID NO: 14823 - DNA, 30 bp, Homo sapiens
  source 1..30: mol_type = genomic DNA
cttttaaaggataacagctatccattggtc

SEQ ID NO: 14824 - DNA, 31 bp, Homo sapiens
  source 1..31: mol_type = genomic DNA
cttttaaaggataacagctatccattggtct

SEQ ID NO: 14825 - DNA, 32 bp, Homo sapiens
  source 1..32: mol_type = genomic DNA
cttttaaaggataacagctatccattggtctt

SEQ ID NO: 14826 - DNA, 34 bp, Homo sapiens
  source 1..34: mol_type = genomic DNA
cttttaaaggataacagctatccattggtcttag

SEQ ID NO: 14827 - DNA, 16 bp, Homo sapiens
  source 1..16: mol_type = genomic DNA
cttttaagttaaagat

SEQ ID NO: 14828 - DNA, 20 bp, Homo sapiens
  source 1..20: mol_type = genomic DNA
cttttaagttaaagattaag

SEQ ID NO: 14829 - DNA, 22 bp, Homo sapiens
  source 1..22: mol_type = genomic DNA
cttttaagttaaagattaagag

SEQ ID NO: 14830 - DNA, 24 bp, Homo sapiens
  source 1..24: mol_type = genomic DNA
cttttaagttaaagattaagagaa

SEQ ID NO: 14831 - DNA, 25 bp, Homo sapiens
  source 1..25: mol_type = genomic DNA
cttttaagttaaagattaagagaac

SEQ ID NO: 14832 - DNA, 26 bp, Homo sapiens
  source 1..26: mol_type = genomic DNA
cttttaagttaaagattaagagaacc

SEQ ID NO: 14833 - DNA, 27 bp, Homo sapiens
  source 1..27: mol_type = genomic DNA
cttttaagttaaagattaagagaacca

SEQ ID NO: 14834 - DNA, 28 bp, Homo sapiens
  source 1..28: mol_type = genomic DNA
cttttaagttaaagattaagagaaccaa

SEQ ID NO: 14835 - DNA, 29 bp, Homo sapiens
  source 1..29: mol_type = genomic DNA
cttttaagttaaagattaagagaaccaac

SEQ ID NO: 14836 - DNA, 30 bp, Homo sapiens
  source 1..30: mol_type = genomic DNA
cttttaagttaaagattaagagaaccaaca

SEQ ID NO: 14837 - DNA, 31 bp, Homo sapiens
  source 1..31: mol_type = genomic DNA
cttttaagttaaagattaagagaaccaacac

SEQ ID NO: 14838 - DNA, 32 bp, Homo sapiens
  source 1..32: mol_type = genomic DNA
cttttaagttaaagattaagagaaccaacacc

SEQ ID NO: 14839 - DNA, 33 bp, Homo sapiens
  source 1..33: mol_type = genomic DNA
cttttaagttaaagattaagagaaccaacacct

SEQ ID NO: 14840 - DNA, 34 bp, Homo sapiens
  source 1..34: mol_type = genomic DNA
cttttaagttaaagattaagagaaccaacacctc

SEQ ID NO: 14841 - DNA, 35 bp, Homo sapiens
  source 1..35: mol_type = genomic DNA
cttttaagttaaagattaagagaaccaacacctct

SEQ ID NO: 14842 - DNA, 36 bp, Homo sapiens
  source 1..36: mol_type = genomic DNA
cttttaagttaaagattaagagaaccaacacctctt

SEQ ID NO: 14843 - DNA, 38 bp, Homo sapiens
  source 1..38: mol_type = genomic DNA
cttttaagttaaagattaagagaaccaacacctcttta

SEQ ID NO: 14844 - DNA, 41 bp, Homo sapiens
  source 1..41: mol_type = genomic DNA
cttttaagttaaagattaagagaaccaacacctctttacag

SEQ ID NO: 14845 - DNA, 43 bp, Homo sapiens
  source 1..43: mol_type = genomic DNA
cttttaagttaaagattaagagaaccaacacctctttacagtg

SEQ ID NO: 14846 - DNA, 44 bp, Homo sapiens
  source 1..44: mol_type = genomic DNA
cttttaagttaaagattaagagaaccaacacctctttacagtga

SEQ ID NO: 14847 - DNA, 45 bp, Homo sapiens
  source 1..45: mol_type = genomic DNA
cttttaagttaaagattaagagaaccaacacctctttacagtgac

SEQ ID NO: 14848 - DNA, 46 bp, Homo sapiens
  source 1..46: mol_type = genomic DNA
cttttaagttaaagattaagagaaccaacacctctttacagtgacc

SEQ ID NO: 14849 - DNA, 47 bp, Homo sapiens
  source 1..47: mol_type = genomic DNA
cttttaagttaaagattaagagaaccaacacctctttacagtgacca

SEQ ID NO: 14850 - DNA, 18 bp, Homo sapiens
  source 1..18: mol_type = genomic DNA
cttttaatctgagggtcc

SEQ ID NO: 14851 - DNA, 19 bp, Homo sapiens
  source 1..19: mol_type = genomic DNA
cttttaatctgagggtcca

SEQ ID NO: 14852 - DNA, 37 bp, Homo sapiens
  source 1..37: mol_type = genomic DNA
cttttaatctgagggtccagggttcatgtccctgttc

SEQ ID NO: 14853 - DNA, 26 bp, Homo sapiens
  source 1..26: mol_type = genomic DNA
cttttagtataaatagtaccgttaac

SEQ ID NO: 14854 - DNA, 27 bp, Homo sapiens
  source 1..27: mol_type = genomic DNA
cttttagtataaatagtaccgttaact

SEQ ID NO: 14855 - DNA, 28 bp, Homo sapiens
  source 1..28: mol_type = genomic DNA
cttttagtataaatagtaccgttaactt

SEQ ID NO: 14856 - DNA, 29 bp, Homo sapiens
  source 1..29: mol_type = genomic DNA
cttttagtataaatagtaccgttaacttc

SEQ ID NO: 14857 - DNA, 30 bp, Homo sapiens
  source 1..30: mol_type = genomic DNA
cttttagtataaatagtaccgttaacttcc

SEQ ID NO: 14858 - DNA, 31 bp, Homo sapiens
  source 1..31: mol_type = genomic DNA
cttttagtataaatagtaccgttaacttcca

SEQ ID NO: 14859 - DNA, 35 bp, Homo sapiens
  source 1..35: mol_type = genomic DNA
cttttagtataaatagtaccgttaacttccaatta

SEQ ID NO: 14860 - DNA, 16 bp, Homo sapiens
  source 1..16: mol_type = genomic DNA
ctttttccaaggacac

SEQ ID NO: 14861 - DNA, 17 bp, Homo sapiens
  source 1..17: mol_type = genomic DNA
ctttttccaaggacacc

SEQ ID NO: 14862 - DNA, 18 bp, Homo sapiens
  source 1..18: mol_type = genomic DNA
ctttttccaaggacacca

SEQ ID NO: 14863 - DNA, 16 bp, Homo sapiens
  source 1..16: mol_type = genomic DNA
gaaaaagtcatggagg

SEQ ID NO: 14864 - DNA, 17 bp, Homo sapiens
  source 1..17: mol_type = genomic DNA
gaaaaagtcatggaggc

SEQ ID NO: 14865 - DNA, 18 bp, Homo sapiens
  source 1..18: mol_type = genomic DNA
gaaaaagtcatggaggcc

SEQ ID NO: 14866 - DNA, 19 bp, Homo sapiens
  source 1..19: mol_type = genomic DNA
gaaaaagtcatggaggcca

SEQ ID NO: 14867 - DNA, 20 bp, Homo sapiens
  source 1..20: mol_type = genomic DNA
gaaaaagtcatggaggccat

SEQ ID NO: 14868 - DNA, 21 bp, Homo sapiens
  source 1..21: mol_type = genomic DNA
gaaaaagtcatggaggccatg

SEQ ID NO: 14869 - DNA, 22 bp, Homo sapiens
  source 1..22: mol_type = genomic DNA
gaaaaagtcatggaggccatgg

SEQ ID NO: 14870 - DNA, 23 bp, Homo sapiens
  source 1..23: mol_type = genomic DNA
gaaaaagtcatggaggccatggg

SEQ ID NO: 14871 - DNA, 24 bp, Homo sapiens
  source 1..24: mol_type = genomic DNA
gaaaaagtcatggaggccatgggg

SEQ ID NO: 14872 - DNA, 25 bp, Homo sapiens
  source 1..25: mol_type = genomic DNA
gaaaaagtcatggaggccatggggt

SEQ ID NO: 14873 - DNA, 26 bp, Homo sapiens
  source 1..26: mol_type = genomic DNA
gaaaaagtcatggaggccatggggtt

SEQ ID NO: 14874 - DNA, 27 bp, Homo sapiens
  source 1..27: mol_type = genomic DNA
gaaaaagtcatggaggccatggggttg

SEQ ID NO: 14875 - DNA, 28 bp, Homo sapiens
  source 1..28: mol_type = genomic DNA
gaaaaagtcatggaggccatggggttgg

SEQ ID NO: 14876 - DNA, 29 bp, Homo sapiens
  source 1..29: mol_type = genomic DNA
gaaaaagtcatggaggccatggggttggc

SEQ ID NO: 14877 - DNA, 30 bp, Homo sapiens
  source 1..30: mol_type = genomic DNA
gaaaaagtcatggaggccatggggttggct

SEQ ID NO: 14878 - DNA, 31 bp, Homo sapiens
  source 1..31: mol_type = genomic DNA
gaaaaagtcatggaggccatggggttggctt

SEQ ID NO: 14879 - DNA, 32 bp, Homo sapiens
  source 1..32: mol_type = genomic DNA
gaaaaagtcatggaggccatggggttggcttg

SEQ ID NO: 14880 - DNA, 33 bp, Homo sapiens
  source 1..33: mol_type = genomic DNA
gaaaaagtcatggaggccatggggttggcttga

SEQ ID NO: 14881 - DNA, 34 bp, Homo sapiens
  source 1..34: mol_type = genomic DNA
gaaaaagtcatggaggccatggggttggcttgaa

SEQ ID NO: 14882 - DNA, 35 bp, Homo sapiens
  source 1..35: mol_type = genomic DNA
gaaaaagtcatggaggccatggggttggcttgaaa

SEQ ID NO: 14883 - DNA, 37 bp, Homo sapiens
  source 1..37: mol_type = genomic DNA
gaaaaagtcatggaggccatggggttggcttgaaacc

SEQ ID NO: 14884 - DNA, 38 bp, Homo sapiens
  source 1..38: mol_type = genomic DNA
gaaaaagtcatggaggccatggggttggcttgaaacca

SEQ ID NO: 14885 - DNA, 40 bp, Homo sapiens
  source 1..40: mol_type = genomic DNA
gaaaaagtcatggaggccatggggttggcttgaaaccagc

SEQ ID NO: 14886 - DNA, 41 bp, Homo sapiens
  source 1..41: mol_type = genomic DNA
gaaaaagtcatggaggccatggggttggcttgaaaccagct

SEQ ID NO: 14887 - DNA, 42 bp, Homo sapiens
  source 1..42: mol_type = genomic DNA
gaaaaagtcatggaggccatggggttggcttgaaaccagctt

SEQ ID NO: 14888 - DNA, 43 bp, Homo sapiens
  source 1..43: mol_type = genomic DNA
gaaaaagtcatggaggccatggggttggcttgaaaccagcttt

SEQ ID NO: 14889 - DNA, 45 bp, Homo sapiens
  source 1..45: mol_type = genomic DNA
gaaaaagtcatggaggccatggggttggcttgaaaccagctttgg

SEQ ID NO: 14890 - DNA, 46 bp, Homo sapiens
  source 1..46: mol_type = genomic DNA
gaaaaagtcatggaggccatggggttggcttgaaaccagctttggg

SEQ ID NO: 14891 - DNA, 17 bp, Homo sapiens
  source 1..17: mol_type = genomic DNA
gaaaacctttttccaag

SEQ ID NO: 14892 - DNA, 20 bp, Homo sapiens
  source 1..20: mol_type = genomic DNA
gaaaacctttttccaaggac

SEQ ID NO: 14893 - DNA, 21 bp, Homo sapiens
  source 1..21: mol_type = genomic DNA
gaaaacctttttccaaggaca

SEQ ID NO: 14894 - DNA, 23 bp, Homo sapiens
  source 1..23: mol_type = genomic DNA
gaaaacctttttccaaggacacc

SEQ ID NO: 14895 - DNA, 24 bp, Homo sapiens
  source 1..24: mol_type = genomic DNA
gaaaacctttttccaaggacacca

SEQ ID NO: 14896 - DNA, 16 bp, Homo sapiens
  source 1..16: mol_type = genomic DNA
gaaaatgttggttata

SEQ ID NO: 14897 - DNA, 17 bp, Homo sapiens
  source 1..17: mol_type = genomic DNA
gaaaatgttggttatac

SEQ ID NO: 14898 - DNA, 18 bp, Homo sapiens
  source 1..18: mol_type = genomic DNA
gaaaatgttggttatacc

SEQ ID NO: 14899 - DNA, 19 bp, Homo sapiens
  source 1..19: mol_type = genomic DNA
gaaaatgttggttataccc

SEQ ID NO: 14900 - DNA, 20 bp, Homo sapiens
  source 1..20: mol_type = genomic DNA
gaaaatgttggttataccct

SEQ ID NO: 14901 - DNA, 21 bp, Homo sapiens
  source 1..21: mol_type = genomic DNA
gaaaatgttggttataccctt

SEQ ID NO: 14902 - DNA, 22 bp, Homo sapiens
  source 1..22: mol_type = genomic DNA
gaaaatgttggttatacccttc

SEQ ID NO: 14903 - DNA, 24 bp, Homo sapiens
  source 1..24: mol_type = genomic DNA
gaaaatgttggttatacccttccc

SEQ ID NO: 14904 - DNA, 25 bp, Homo sapiens
  source 1..25: mol_type = genomic DNA
gaaaatgttggttatacccttcccg

SEQ ID NO: 14905 - DNA, 27 bp, Homo sapiens
  source 1..27: mol_type = genomic DNA
gaaaatgttggttatacccttcccgta

SEQ ID NO: 14906 - DNA, 28 bp, Homo sapiens
  source 1..28: mol_type = genomic DNA
gaaaatgttggttatacccttcccgtac

SEQ ID NO: 14907 - DNA, 29 bp, Homo sapiens
  source 1..29: mol_type = genomic DNA
gaaaatgttggttatacccttcccgtact

SEQ ID NO: 14908 - DNA, 30 bp, Homo sapiens
  source 1..30: mol_type = genomic DNA
gaaaatgttggttatacccttcccgtacta

SEQ ID NO: 14909 - DNA, 31 bp, Homo sapiens
  source 1..31: mol_type = genomic DNA
gaaaatgttggttatacccttcccgtactac

SEQ ID NO: 14910 - DNA, 32 bp, Homo sapiens
  source 1..32: mol_type = genomic DNA
gaaaatgttggttatacccttcccgtactacc

SEQ ID NO: 14911 - DNA, 33 bp, Homo sapiens
  source 1..33: mol_type = genomic DNA
gaaaatgttggttatacccttcccgtactacca

SEQ ID NO: 14912 - DNA, 16 bp, Homo sapiens
  source 1..16: mol_type = genomic DNA
gaaaatgtttagacgg

SEQ ID NO: 14913 - DNA, 17 bp, Homo sapiens
  source 1..17: mol_type = genomic DNA
gaaaatgtttagacggg

SEQ ID NO: 14914 - DNA, 18 bp, Homo sapiens
  source 1..18: mol_type = genomic DNA
gaaaatgtttagacgggc

SEQ ID NO: 14915 - DNA, 19 bp, Homo sapiens
  source 1..19: mol_type = genomic DNA
gaaaatgtttagacgggct

SEQ ID NO: 14916 - DNA, 20 bp, Homo sapiens
  source 1..20: mol_type = genomic DNA
gaaaatgtttagacgggctc

SEQ ID NO: 14917 - DNA, 21 bp, Homo sapiens
  source 1..21: mol_type = genomic DNA
gaaaatgtttagacgggctca

SEQ ID NO: 14918 - DNA, 22 bp, Homo sapiens
  source 1..22: mol_type = genomic DNA
gaaaatgtttagacgggctcac

SEQ ID NO: 14919 - DNA, 23 bp, Homo sapiens
  source 1..23: mol_type = genomic DNA
gaaaatgtttagacgggctcaca

SEQ ID NO: 14920 - DNA, 24 bp, Homo sapiens
  source 1..24: mol_type = genomic DNA
gaaaatgtttagacgggctcacat

SEQ ID NO: 14921 - DNA, 25 bp, Homo sapiens
  source 1..25: mol_type = genomic DNA
gaaaatgtttagacgggctcacatc

SEQ ID NO: 14922 - DNA, 26 bp, Homo sapiens
  source 1..26: mol_type = genomic DNA
gaaaatgtttagacgggctcacatca

SEQ ID NO: 14923 - DNA, 27 bp, Homo sapiens
  source 1..27: mol_type = genomic DNA
gaaaatgtttagacgggctcacatcac

SEQ ID NO: 14924 - DNA, 28 bp, Homo sapiens
  source 1..28: mol_type = genomic DNA
gaaaatgtttagacgggctcacatcacc

SEQ ID NO: 14925 - DNA, 29 bp, Homo sapiens
  source 1..29: mol_type = genomic DNA
gaaaatgtttagacgggctcacatcaccc

SEQ ID NO: 14926 - DNA, 30 bp, Homo sapiens
  source 1..30: mol_type = genomic DNA
gaaaatgtttagacgggctcacatcacccc

SEQ ID NO: 14927 - DNA, 31 bp, Homo sapiens
  source 1..31: mol_type = genomic DNA
gaaaatgtttagacgggctcacatcacccca

SEQ ID NO: 14928 - DNA, 32 bp, Homo sapiens
  source 1..32: mol_type = genomic DNA
gaaaatgtttagacgggctcacatcaccccat

SEQ ID NO: 14929 - DNA, 33 bp, Homo sapiens
  source 1..33: mol_type = genomic DNA
gaaaatgtttagacgggctcacatcaccccata

SEQ ID NO: 14930 - DNA, 34 bp, Homo sapiens
  source 1..34: mol_type = genomic DNA
gaaaatgtttagacgggctcacatcaccccataa

SEQ ID NO: 14931 - DNA, 35 bp, Homo sapiens
  source 1..35: mol_type = genomic DNA
gaaaatgtttagacgggctcacatcaccccataaa

SEQ ID NO: 14932 - DNA, 36 bp, Homo sapiens
  source 1..36: mol_type = genomic DNA
gaaaatgtttagacgggctcacatcaccccataaac

SEQ ID NO: 14933 - DNA, 37 bp, Homo sapiens
  source 1..37: mol_type = genomic DNA
gaaaatgtttagacgggctcacatcaccccataaaca

SEQ ID NO: 14934 - DNA, 39 bp, Homo sapiens
  source 1..39: mol_type = genomic DNA
gaaaatgtttagacgggctcacatcaccccataaacacc

SEQ ID NO: 14935 - DNA, 40 bp, Homo sapiens
  source 1..40: mol_type = genomic DNA
gaaaatgtttagacgggctcacatcaccccataaacacca

SEQ ID NO: 14936 - DNA, 21 bp, Homo sapiens
  source 1..21: mol_type = genomic DNA
gaaaccagctttggggggttc

SEQ ID NO: 14937 - DNA, 34 bp, Homo sapiens
  source 1..34: mol_type = genomic DNA
gaaaccagctttggggggttcgattccttccttt

SEQ ID NO: 14938 - DNA, 16 bp, Homo sapiens
  source 1..16: mol_type = genomic DNA
gaaaccatcctctgct

SEQ ID NO: 14939 - DNA, 19 bp, Homo sapiens
  source 1..19: mol_type = genomic DNA
gaaaccatcctctgctacc

SEQ ID NO: 14940 - DNA, 20 bp, Homo sapiens
  source 1..20: mol_type = genomic DNA
gaaaccatcctctgctacca

SEQ ID NO: 14941 - DNA, 16 bp, Homo sapiens
  source 1..16: mol_type = genomic DNA
gaaaccgggcggaaac

SEQ ID NO: 14942 - DNA, 17 bp, Homo sapiens
  source 1..17: mol_type = genomic DNA
gaaaccgggcggaaaca

SEQ ID NO: 14943 - DNA, 18 bp, Homo sapiens
  source 1..18: mol_type = genomic DNA
gaaaccgggcggaaacac

SEQ ID NO: 14944 - DNA, 19 bp, Homo sapiens
  source 1..19: mol_type = genomic DNA
gaaaccgggcggaaacacc

SEQ ID NO: 14945 - DNA, 20 bp, Homo sapiens
  source 1..20: mol_type = genomic DNA
gaaaccgggcggaaacacca

SEQ ID NO: 14946 - DNA, 16 bp, Homo sapiens
  source 1..16: mol_type = genomic DNA
gaaagattggtggttc

SEQ ID NO: 14947 - DNA, 17 bp, Homo sapiens
  source 1..17: mol_type = genomic DNA
gaaagattggtggttcg

SEQ ID NO: 14948 - DNA, 35 bp, Homo sapiens
  source 1..35: mol_type = genomic DNA
gaaagattggtggttcgagcccacccagggacgcc

SEQ ID NO: 14949 - DNA, 16 bp, Homo sapiens
  source 1..16: mol_type = genomic DNA
gaaagctcacaagaac

SEQ ID NO: 14950 - DNA, 17 bp, Homo sapiens
  source 1..17: mol_type = genomic DNA
gaaagctcacaagaact

SEQ ID NO: 14951 - DNA, 18 bp, Homo sapiens
  source 1..18: mol_type = genomic DNA
gaaagctcacaagaactg

SEQ ID NO: 14952 - DNA, 19 bp, Homo sapiens
  source 1..19: mol_type = genomic DNA
gaaagctcacaagaactgc

SEQ ID NO: 14953 - DNA, 20 bp, Homo sapiens
  source 1..20: mol_type = genomic DNA
gaaagctcacaagaactgct

SEQ ID NO: 14954 - DNA, 21 bp, Homo sapiens
  source 1..21: mol_type = genomic DNA
gaaagctcacaagaactgcta

SEQ ID NO: 14955 - DNA, 22 bp, Homo sapiens
  source 1..22: mol_type = genomic DNA
gaaagctcacaagaactgctaa

SEQ ID NO: 14956 - DNA, 23 bp, Homo sapiens
  source 1..23: mol_type = genomic DNA
gaaagctcacaagaactgctaac

SEQ ID NO: 14957 - DNA, 24 bp, Homo sapiens
  source 1..24: mol_type = genomic DNA
gaaagctcacaagaactgctaact

SEQ ID NO: 14958 - DNA, 25 bp, Homo sapiens
  source 1..25: mol_type = genomic DNA
gaaagctcacaagaactgctaactc

SEQ ID NO: 14959 - DNA, 26 bp, Homo sapiens
  source 1..26: mol_type = genomic DNA
gaaagctcacaagaactgctaactca

SEQ ID NO: 14960 - DNA, 27 bp, Homo sapiens
  source 1..27: mol_type = genomic DNA
gaaagctcacaagaactgctaactcat

SEQ ID NO: 14961 - DNA, 28 bp, Homo sapiens
  source 1..28: mol_type = genomic DNA
gaaagctcacaagaactgctaactcatg

SEQ ID NO: 14962 - DNA, 29 bp, Homo sapiens
  source 1..29: mol_type = genomic DNA
gaaagctcacaagaactgctaactcatgc

SEQ ID NO: 14963 - DNA, 30 bp, Homo sapiens
  source 1..30: mol_type = genomic DNA
gaaagctcacaagaactgctaactcatgcc

SEQ ID NO: 14964 - DNA, 31 bp, Homo sapiens
  source 1..31: mol_type = genomic DNA
gaaagctcacaagaactgctaactcatgccc

SEQ ID NO: 14965 - DNA, 32 bp, Homo sapiens
  source 1..32: mol_type = genomic DNA
gaaagctcacaagaactgctaactcatgcccc

SEQ ID NO: 14966 - DNA, 33 bp, Homo sapiens
  source 1..33: mol_type = genomic DNA
gaaagctcacaagaactgctaactcatgccccc

SEQ ID NO: 14967 - DNA, 34 bp, Homo sapiens
  source 1..34: mol_type = genomic DNA
gaaagctcacaagaactgctaactcatgccccca

SEQ ID NO: 14968 - DNA, 35 bp, Homo sapiens
  source 1..35: mol_type = genomic DNA
gaaagctcacaagaactgctaactcatgcccccat

SEQ ID NO: 14969 - DNA, 36 bp, Homo sapiens
  source 1..36: mol_type = genomic DNA
gaaagctcacaagaactgctaactcatgcccccatg

SEQ ID NO: 14970 - DNA, 37 bp, Homo sapiens
  source 1..37: mol_type = genomic DNA
gaaagctcacaagaactgctaactcatgcccccatgt

SEQ ID NO: 14971 - DNA, 38 bp, Homo sapiens
  source 1..38: mol_type = genomic DNA
gaaagctcacaagaactgctaactcatgcccccatgtc

SEQ ID NO: 14972 - DNA, 39 bp, Homo sapiens
  source 1..39: mol_type = genomic DNA
gaaagctcacaagaactgctaactcatgcccccatgtct

SEQ ID NO: 14973 - DNA, 40 bp, Homo sapiens
  source 1..40: mol_type = genomic DNA
gaaagctcacaagaactgctaactcatgcccccatgtcta

SEQ ID NO: 14974 - DNA, 41 bp, Homo sapiens
  source 1..41: mol_type = genomic DNA
gaaagctcacaagaactgctaactcatgcccccatgtctaa

SEQ ID NO: 14975 - DNA, 42 bp, Homo sapiens
  source 1..42: mol_type = genomic DNA
gaaagctcacaagaactgctaactcatgcccccatgtctaac

SEQ ID NO: 14976 - DNA, 43 bp, Homo sapiens
  source 1..43: mol_type = genomic DNA
gaaagctcacaagaactgctaactcatgcccccatgtctaaca

SEQ ID NO: 14977 - DNA, 44 bp, Homo sapiens
  source 1..44: mol_type = genomic DNA
gaaagctcacaagaactgctaactcatgcccccatgtctaacaa

SEQ ID NO: 14978 - DNA, 45 bp, Homo sapiens
  source 1..45: mol_type = genomic DNA
gaaagctcacaagaactgctaactcatgcccccatgtctaacaac

SEQ ID NO: 14979 - DNA, 46 bp, Homo sapiens
  source 1..46: mol_type = genomic DNA
gaaagctcacaagaactgctaactcatgcccccatgtctaacaaca

SEQ ID NO: 14980 - DNA, 47 bp, Homo sapiens
  source 1..47: mol_type = genomic DNA
gaaagctcacaagaactgctaactcatgcccccatgtctaacaacat

SEQ ID NO: 14981 - DNA, 48 bp, Homo sapiens
  source 1..48: mol_type = genomic DNA
gaaagctcacaagaactgctaactcatgcccccatgtctaacaacatg

SEQ ID NO: 14982 - DNA, 23 bp, Homo sapiens
  source 1..23: mol_type = genomic DNA
gaaaggtccccggttcgaaaccg

SEQ ID NO: 14983 - DNA, 32 bp, Homo sapiens
  source 1..32: mol_type = genomic DNA
gaaaggtccccggttcgaaaccgggcggaaac

SEQ ID NO: 14984 - DNA, 35 bp, Homo sapiens
  source 1..35: mol_type = genomic DNA
gaaaggtccccggttcgaaaccgggcggaaacacc

SEQ ID NO: 14985 - DNA, 32 bp, Homo sapiens
  source 1..32: mol_type = genomic DNA
gaaaggtccccggttcgatcccgggcggaaac

SEQ ID NO: 14986 - DNA, 16 bp, Homo sapiens
  source 1..16: mol_type = genomic DNA
gaaaggttggtggttc

SEQ ID NO: 14987 - DNA, 17 bp, Homo sapiens
  source 1..17: mol_type = genomic DNA
gaaaggttggtggttcg

SEQ ID NO: 14988 - DNA, 32 bp, Homo sapiens
  source 1..32: mol_type = genomic DNA
gaaaggttggtggttcgagcccacccagggac

SEQ ID NO: 14989 - DNA, 33 bp, Homo sapiens
  source 1..33: mol_type = genomic DNA
gaaaggttggtggttcgagcccacccagggacg

SEQ ID NO: 14990 - DNA, 34 bp, Homo sapiens
  source 1..34: mol_type = genomic DNA
gaaaggttggtggttcgagcccacccagggacgc

SEQ ID NO: 14991 - DNA, 35 bp, Homo sapiens
  source 1..35: mol_type = genomic DNA
gaaaggttggtggttcgagcccacccagggacgcc

SEQ ID NO: 14992 - DNA, 36 bp, Homo sapiens
  source 1..36: mol_type = genomic DNA
gaaaggttggtggttcgagcccacccagggacgcca

SEQ ID NO: 14993 - DNA, 32 bp, Homo sapiens
  source 1..32: mol_type = genomic DNA
gaaaggttggtggttcgatcccacccagggac

SEQ ID NO: 14994 - DNA, 19 bp, Homo sapiens
  source 1..19: mol_type = genomic DNA
gaaatacaacgatggtttt

SEQ ID NO: 14995 - DNA, 20 bp, Homo sapiens
  source 1..20: mol_type = genomic DNA
gaaatacaacgatggttttt

SEQ ID NO: 14996 - DNA, 21 bp, Homo sapiens
  source 1..21: mol_type = genomic DNA
gaaatacaacgatggtttttc

SEQ ID NO: 14997 - DNA, 26 bp, Homo sapiens
  source 1..26: mol_type = genomic DNA
gaaatacaacgatggtttttcatatc

SEQ ID NO: 14998 - DNA, 33 bp, Homo sapiens
  source 1..33: mol_type = genomic DNA
gaaatacaacgatggtttttcatatcattggtc

SEQ ID NO: 14999 - DNA, 34 bp, Homo sapiens
  source 1..34: mol_type = genomic DNA
gaaatacaacgatggtttttcatatcattggtcg

SEQ ID NO: 15000 - DNA, 35 bp, Homo sapiens
  source 1..35: mol_type = genomic DNA
gaaatacaacgatggtttttcatatcattggtcgt

SEQ ID NO: 15001 - DNA, 40 bp, Homo sapiens
  source 1..40: mol_type = genomic DNA
gaaatacaacgatggtttttcatatcattggtcgtggttg

SEQ ID NO: 15002 - DNA, 41 bp, Homo sapiens
  source 1..41: mol_type = genomic DNA
gaaatacaacgatggtttttcatatcattggtcgtggttgt

SEQ ID NO: 15003 - DNA, 42 bp, Homo sapiens
  source 1..42: mol_type = genomic DNA
gaaatacaacgatggtttttcatatcattggtcgtggttgta

SEQ ID NO: 15004 - DNA, 44 bp, Homo sapiens
  source 1..44: mol_type = genomic DNA
gaaatacaacgatggtttttcatatcattggtcgtggttgtagt

SEQ ID NO: 15005 - DNA, 45 bp, Homo sapiens
  source 1..45: mol_type = genomic DNA
gaaatacaacgatggtttttcatatcattggtcgtggttgtagtc

SEQ ID NO: 15006 - DNA, 46 bp, Homo sapiens
  source 1..46: mol_type = genomic DNA
gaaatacaacgatggtttttcatatcattggtcgtggttgtagtcc

SEQ ID NO: 15007 - DNA, 47 bp, Homo sapiens
  source 1..47: mol_type = genomic DNA
gaaatacaacgatggtttttcatatcattggtcgtggttgtagtccg

SEQ ID NO: 15008 - DNA, 48 bp, Homo sapiens
  source 1..48: mol_type = genomic DNA
gaaatacaacgatggtttttcatatcattggtcgtggttgtagtccgt

SEQ ID NO: 15009 - DNA, 19 bp, Homo sapiens
  source 1..19: mol_type = genomic DNA
gaaatatgtctgataaaag

SEQ ID NO: 15010 - DNA, 31 bp, Homo sapiens
  source 1..31: mol_type = genomic DNA
gaaatatgtctgataaaagagttactttgat

SEQ ID NO: 15011 - DNA, 34 bp, Homo sapiens
  source 1..34: mol_type = genomic DNA
gaaatatgtctgataaaagagttactttgataga

SEQ ID NO: 15012 - DNA, 39 bp, Homo sapiens
  source 1..39: mol_type = genomic DNA
gaaatccaatggggtctccccgcgcaggttcgaaccctg

SEQ ID NO: 15013 - DNA, 39 bp, Homo sapiens
  source 1..39: mol_type = genomic DNA
gaaatccattggggtctccccgcgcaggttcgaatcctg

SEQ ID NO: 15014 - DNA, 22 bp, Homo sapiens
  source 1..22: mol_type = genomic DNA
gaaatttaggttaaatacagac

SEQ ID NO: 15015 - DNA, 16 bp, Homo sapiens
  source 1..16: mol_type = genomic DNA
gaaccaacacctcttt

SEQ ID NO: 15016 - DNA, 17 bp, Homo sapiens
  source 1..17: mol_type = genomic DNA
gaaccaacacctcttta

SEQ ID NO: 15017 - DNA, 18 bp, Homo sapiens
  source 1..18: mol_type = genomic DNA
gaaccaacacctctttac

SEQ ID NO: 15018 - DNA, 19 bp, Homo sapiens
  source 1..19: mol_type = genomic DNA
gaaccaacacctctttaca

SEQ ID NO: 15019 - DNA, 20 bp, Homo sapiens
  source 1..20: mol_type = genomic DNA
gaaccaacacctctttacag

SEQ ID NO: 15020 - DNA, 22 bp, Homo sapiens
  source 1..22: mol_type = genomic DNA
gaaccaacacctctttacagtg

SEQ ID NO: 15021 - DNA, 23 bp, Homo sapiens
  source 1..23: mol_type = genomic DNA
gaaccaacacctctttacagtga

SEQ ID NO: 15022 - DNA, 24 bp, Homo sapiens
  source 1..24: mol_type = genomic DNA
gaaccaacacctctttacagtgac

SEQ ID NO: 15023 - DNA, 25 bp, Homo sapiens
  source 1..25: mol_type = genomic DNA
gaaccaacacctctttacagtgacc

SEQ ID NO: 15024 - DNA, 26 bp, Homo sapiens
  source 1..26: mol_type = genomic DNA
gaaccaacacctctttacagtgacca

SEQ ID NO: 15025 - DNA, 20 bp, Homo sapiens
  source 1..20: mol_type = genomic DNA
gaaccctgctcgctgcgcca

SEQ ID NO: 15026 - DNA, 16 bp, Homo sapiens
  source 1..16: mol_type = genomic DNA
gaactgctaactcatg

SEQ ID NO: 15027 - DNA, 17 bp, Homo sapiens
  source 1..17: mol_type = genomic DNA
gaactgctaactcatgc

SEQ ID NO: 15028 - DNA, 18 bp, Homo sapiens
  source 1..18: mol_type = genomic DNA
gaactgctaactcatgcc

SEQ ID NO: 15029 - DNA, 19 bp, Homo sapiens
  source 1..19: mol_type = genomic DNA
gaactgctaactcatgccc

SEQ ID NO: 15030 - DNA, 20 bp, Homo sapiens
  source 1..20: mol_type = genomic DNA
gaactgctaactcatgcccc

SEQ ID NO: 15031 - DNA, 21 bp, Homo sapiens
  source 1..21: mol_type = genomic DNA
gaactgctaactcatgccccc

SEQ ID NO: 15032 - DNA, 22 bp, Homo sapiens
  source 1..22: mol_type = genomic DNA
gaactgctaactcatgccccca

SEQ ID NO: 15033 - DNA, 23 bp, Homo sapiens
  source 1..23: mol_type = genomic DNA
gaactgctaactcatgcccccat

SEQ ID NO: 15034 - DNA, 24 bp, Homo sapiens
  source 1..24: mol_type = genomic DNA
gaactgctaactcatgcccccatg

SEQ ID NO: 15035 - DNA, 25 bp, Homo sapiens
  source 1..25: mol_type = genomic DNA
gaactgctaactcatgcccccatgt

SEQ ID NO: 15036 - DNA, 26 bp, Homo sapiens
  source 1..26: mol_type = genomic DNA
gaactgctaactcatgcccccatgtc

SEQ ID NO: 15037 - DNA, 27 bp, Homo sapiens
  source 1..27: mol_type = genomic DNA
gaactgctaactcatgcccccatgtct

SEQ ID NO: 15038 - DNA, 28 bp, Homo sapiens
  source 1..28: mol_type = genomic DNA
gaactgctaactcatgcccccatgtcta

SEQ ID NO: 15039 - DNA, 29 bp, Homo sapiens
  source 1..29: mol_type = genomic DNA
gaactgctaactcatgcccccatgtctaa

SEQ ID NO: 15040 - DNA, 30 bp, Homo sapiens
  source 1..30: mol_type = genomic DNA
gaactgctaactcatgcccccatgtctaac

SEQ ID NO: 15041 - DNA, 31 bp, Homo sapiens
  source 1..31: mol_type = genomic DNA
gaactgctaactcatgcccccatgtctaaca

SEQ ID NO: 15042 - DNA, 32 bp, Homo sapiens
  source 1..32: mol_type = genomic DNA
gaactgctaactcatgcccccatgtctaacaa

SEQ ID NO: 15043 - DNA, 33 bp, Homo sapiens
  source 1..33: mol_type = genomic DNA
gaactgctaactcatgcccccatgtctaacaac

SEQ ID NO: 15044 - DNA, 34 bp, Homo sapiens
  source 1..34: mol_type = genomic DNA
gaactgctaactcatgcccccatgtctaacaaca

SEQ ID NO: 15045 - DNA, 35 bp, Homo sapiens
  source 1..35: mol_type = genomic DNA
gaactgctaactcatgcccccatgtctaacaacat

SEQ ID NO: 15046 - DNA, 36 bp, Homo sapiens
  source 1..36: mol_type = genomic DNA
gaactgctaactcatgcccccatgtctaacaacatg

SEQ ID NO: 15047 - DNA, 37 bp, Homo sapiens
  source 1..37: mol_type = genomic DNA
gaactgctaactcatgcccccatgtctaacaacatgg

SEQ ID NO: 15048 - DNA, 38 bp, Homo sapiens
  source 1..38: mol_type = genomic DNA
gaactgctaactcatgcccccatgtctaacaacatggc

SEQ ID NO: 15049 - DNA, 39 bp, Homo sapiens
  source 1..39: mol_type = genomic DNA
gaactgctaactcatgcccccatgtctaacaacatggct

SEQ ID NO: 15050 - DNA, 40 bp, Homo sapiens
  source 1..40: mol_type = genomic DNA
gaactgctaactcatgcccccatgtctaacaacatggctt

SEQ ID NO: 15051 - DNA, 41 bp, Homo sapiens
  source 1..41: mol_type = genomic DNA
gaactgctaactcatgcccccatgtctaacaacatggcttt

SEQ ID NO: 15052 - DNA, 42 bp, Homo sapiens
  source 1..42: mol_type = genomic DNA
gaactgctaactcatgcccccatgtctaacaacatggctttc

SEQ ID NO: 15053 - DNA, 43 bp, Homo sapiens
  source 1..43: mol_type = genomic DNA
gaactgctaactcatgcccccatgtctaacaacatggctttct

SEQ ID NO: 15054 - DNA, 44 bp, Homo sapiens
  source 1..44: mol_type = genomic DNA
gaactgctaactcatgcccccatgtctaacaacatggctttctc

SEQ ID NO: 15055 - DNA, 45 bp, Homo sapiens
  source 1..45: mol_type = genomic DNA
gaactgctaactcatgcccccatgtctaacaacatggctttctca

SEQ ID NO: 15056 - DNA, 46 bp, Homo sapiens
  source 1..46: mol_type = genomic DNA
gaactgctaactcatgcccccatgtctaacaacatggctttctcac

SEQ ID NO: 15057 - DNA, 47 bp, Homo sapiens
  source 1..47: mol_type = genomic DNA
gaactgctaactcatgcccccatgtctaacaacatggctttctcacc

SEQ ID NO: 15058 - DNA, 48 bp, Homo sapiens
  source 1..48: mol_type = genomic DNA
gaactgctaactcatgcccccatgtctaacaacatggctttctcacca

SEQ ID NO: 15059 - DNA, 27 bp, Homo sapiens
  source 1..27: mol_type = genomic DNA
gaagaagcagcttcaaacctgccgggg

SEQ ID NO: 15060 - DNA, 28 bp, Homo sapiens
  source 1..28: mol_type = genomic DNA
gaagaagcagcttcaaacctgccggggc

SEQ ID NO: 15061 - DNA, 29 bp, Homo sapiens
  source 1..29: mol_type = genomic DNA
gaagaagcagcttcaaacctgccggggct

SEQ ID NO: 15062 - DNA, 30 bp, Homo sapiens
  source 1..30: mol_type = genomic DNA
gaagaagcagcttcaaacctgccggggctt

SEQ ID NO: 15063 - DNA, 31 bp, Homo sapiens
  source 1..31: mol_type = genomic DNA
gaagaagcagcttcaaacctgccggggcttc

SEQ ID NO: 15064 - DNA, 32 bp, Homo sapiens
  source 1..32: mol_type = genomic DNA
gaagaagcagcttcaaacctgccggggcttcc

SEQ ID NO: 15065 - DNA, 33 bp, Homo sapiens
  source 1..33: mol_type = genomic DNA
gaagaagcagcttcaaacctgccggggcttcca

SEQ ID NO: 15066 - DNA, 16 bp, Homo sapiens
  source 1..16: mol_type = genomic DNA
gaagatcacgggttcg

SEQ ID NO: 15067 - DNA, 34 bp, Homo sapiens
  source 1..34: mol_type = genomic DNA
gaagatcacgggttcgaaccccgtccgtgcctcc

SEQ ID NO: 15068 - DNA, 16 bp, Homo sapiens
  source 1..16: mol_type = genomic DNA
gaagatcgcgggttcg

SEQ ID NO: 15069 - DNA, 23 bp, Homo sapiens
  source 1..23: mol_type = genomic DNA
gaagatcgcgggttcgaaccccg

SEQ ID NO: 15070 - DNA, 32 bp, Homo sapiens
  source 1..32: mol_type = genomic DNA
gaagatcgcgggttcgaaccccgtccgtgcct

SEQ ID NO: 15071 - DNA, 33 bp, Homo sapiens
  source 1..33: mol_type = genomic DNA
gaagatcgcgggttcgaaccccgtccgtgcctc

SEQ ID NO: 15072 - DNA, 34 bp, Homo sapiens
  source 1..34: mol_type = genomic DNA
gaagatcgcgggttcgaaccccgtccgtgcctcc

SEQ ID NO: 15073 - DNA, 35 bp, Homo sapiens
  source 1..35: mol_type = genomic DNA
gaagatcgcgggttcgaaccccgtccgtgcctcca

SEQ ID NO: 15074 - DNA, 29 bp, Homo sapiens
  source 1..29: mol_type = genomic DNA
gaagattccaggttcgactcctggctggc

SEQ ID NO: 15075 - DNA, 30 bp, Homo sapiens
  source 1..30: mol_type = genomic DNA
gaagattccaggttcgactcctggctggct

SEQ ID NO: 15076 - DNA, 31 bp, Homo sapiens
  source 1..31: mol_type = genomic DNA
gaagattccaggttcgactcctggctggctc

SEQ ID NO: 15077 - DNA, 32 bp, Homo sapiens
  source 1..32: mol_type = genomic DNA
gaagattccaggttcgactcctggctggctcg

SEQ ID NO: 15078 - DNA, 33 bp, Homo sapiens
  source 1..33: mol_type = genomic DNA
gaagattccaggttcgactcctggctggctcgc

SEQ ID NO: 15079 - DNA, 34 bp, Homo sapiens
  source 1..34: mol_type = genomic DNA
gaagattccaggttcgactcctggctggctcgcc

SEQ ID NO: 15080 - DNA, 35 bp, Homo sapiens
  source 1..35: mol_type = genomic DNA
gaagattccaggttcgactcctggctggctcgcca

SEQ ID NO: 15081 - DNA, 16 bp, Homo sapiens
  source 1..16: mol_type = genomic DNA
gaagattctaggttcg

SEQ ID NO: 15082 - DNA, 21 bp, Homo sapiens
  source 1..21: mol_type = genomic DNA
gaagattctaggttcgactcc

SEQ ID NO: 15083 - DNA, 25 bp, Homo sapiens
  source 1..25: mol_type = genomic DNA
gaagattctaggttcgactcctggc

SEQ ID NO: 15084 - DNA, 29 bp, Homo sapiens
  source 1..29: mol_type = genomic DNA
gaagattctaggttcgactcctggctggc

SEQ ID NO: 15085 - DNA, 30 bp, Homo sapiens
  source 1..30: mol_type = genomic DNA
gaagattctaggttcgactcctggctggct

SEQ ID NO: 15086 - DNA, 31 bp, Homo sapiens
  source 1..31: mol_type = genomic DNA
gaagattctaggttcgactcctggctggctc

SEQ ID NO: 15087 - DNA, 32 bp, Homo sapiens
  source 1..32: mol_type = genomic DNA
gaagattctaggttcgactcctggctggctcg

SEQ ID NO: 15088 - DNA, 33 bp, Homo sapiens
  source 1..33: mol_type = genomic DNA
gaagattctaggttcgactcctggctggctcgc

SEQ ID NO: 15089 - DNA, 34 bp, Homo sapiens
  source 1..34: mol_type = genomic DNA
gaagattctaggttcgactcctggctggctcgcc

SEQ ID NO: 15090 - DNA, 35 bp, Homo sapiens
  source 1..35: mol_type = genomic DNA
gaagattctaggttcgactcctggctggctcgcca

SEQ ID NO: 15091 - DNA, 16 bp, Homo sapiens
  source 1..16: mol_type = genomic DNA
gaagattgagggttcg

SEQ ID NO: 15092 - DNA, 32 bp, Homo sapiens
  source 1..32: mol_type = genomic DNA
gaagattgagggttcgaatcccttcgtggttg

SEQ ID NO: 15093 - DNA, 33 bp, Homo sapiens
  source 1..33: mol_type = genomic DNA
gaagattgagggttcgaatcccttcgtggttgc

SEQ ID NO: 15094 - DNA, 34 bp, Homo sapiens
  source 1..34: mol_type = genomic DNA
gaagattgagggttcgaatcccttcgtggttgcc

SEQ ID NO: 15095 - DNA, 35 bp, Homo sapiens
  source 1..35: mol_type = genomic DNA
gaagattgagggttcgaatcccttcgtggttgcca

SEQ ID NO: 15096 - DNA, 23 bp, Homo sapiens
  source 1..23: mol_type = genomic DNA
gaagattgagggttcgagtccct

SEQ ID NO: 15097 - DNA, 32 bp, Homo sapiens
  source 1..32: mol_type = genomic DNA
gaagattgagggttcgagtcccttcgtggtcg

SEQ ID NO: 15098 - DNA, 33 bp, Homo sapiens
  source 1..33: mol_type = genomic DNA
gaagattgagggttcgagtcccttcgtggtcgc

SEQ ID NO: 15099 - DNA, 34 bp, Homo sapiens
  source 1..34: mol_type = genomic DNA
gaagattgagggttcgagtcccttcgtggtcgcc

SEQ ID NO: 15100 - DNA, 35 bp, Homo sapiens
  source 1..35: mol_type = genomic DNA
gaagattgagggttcgagtcccttcgtggtcgcca

SEQ ID NO: 15101 - DNA, 23 bp, Homo sapiens
  source 1..23: mol_type = genomic DNA
gaagattgcaggttcgagtcctg

SEQ ID NO: 15102 - DNA, 31 bp, Homo sapiens
  source 1..31: mol_type = genomic DNA
gaagattgcaggttcgagtcctgccgcggtc

SEQ ID NO: 15103 - DNA, 32 bp, Homo sapiens
  source 1..32: mol_type = genomic DNA
gaagattgcaggttcgagtcctgccgcggtcg

SEQ ID NO: 15104 - DNA, 33 bp, Homo sapiens
  source 1..33: mol_type = genomic DNA
gaagattgcaggttcgagtcctgccgcggtcgc

SEQ ID NO: 15105 - DNA, 34 bp, Homo sapiens
  source 1..34: mol_type = genomic DNA
gaagattgcaggttcgagtcctgccgcggtcgcc

SEQ ID NO: 15106 - DNA, 35 bp, Homo sapiens
  source 1..35: mol_type = genomic DNA
gaagattgcaggttcgagtcctgccgcggtcgcca

SEQ ID NO: 15107 - DNA, 16 bp, Homo sapiens
  source 1..16: mol_type = genomic DNA
gaagcagcttcaaacc

SEQ ID NO: 15108 - DNA, 17 bp, Homo sapiens
  source 1..17: mol_type = genomic DNA
gaagcagcttcaaacct

SEQ ID NO: 15109 - DNA, 18 bp, Homo sapiens
  source 1..18: mol_type = genomic DNA
gaagcagcttcaaacctg

SEQ ID NO: 15110 - DNA, 24 bp, Homo sapiens
  source 1..24: mol_type = genomic DNA
gaagcagcttcaaacctgccgggg

SEQ ID NO: 15111 - DNA, 25 bp, Homo sapiens
  source 1..25: mol_type = genomic DNA
gaagcagcttcaaacctgccggggc

SEQ ID NO: 15112 - DNA, 26 bp, Homo sapiens
  source 1..26: mol_type = genomic DNA
gaagcagcttcaaacctgccggggct

SEQ ID NO: 15113 - DNA, 27 bp, Homo sapiens
  source 1..27: mol_type = genomic DNA
gaagcagcttcaaacctgccggggctt

SEQ ID NO: 15114 - DNA, 28 bp, Homo sapiens
  source 1..28: mol_type = genomic DNA
gaagcagcttcaaacctgccggggcttc

SEQ ID NO: 15115 - DNA, 29 bp, Homo sapiens
  source 1..29: mol_type = genomic DNA
gaagcagcttcaaacctgccggggcttcc

SEQ ID NO: 15116 - DNA, 30 bp, Homo sapiens
  source 1..30: mol_type = genomic DNA
gaagcagcttcaaacctgccggggcttcca

SEQ ID NO: 15117 - DNA, 16 bp, Homo sapiens
  source 1..16: mol_type = genomic DNA
gaagcattggactgta

SEQ ID NO: 15118 - DNA, 17 bp, Homo sapiens
  source 1..17: mol_type = genomic DNA
gaagcattggactgtaa

SEQ ID NO: 15119 - DNA, 18 bp, Homo sapiens
  source 1..18: mol_type = genomic DNA
gaagcattggactgtaaa

SEQ ID NO: 15120 - DNA, 19 bp, Homo sapiens
  source 1..19: mol_type = genomic DNA
gaagcattggactgtaaat

SEQ ID NO: 15121 - DNA, 20 bp, Homo sapiens
  source 1..20: mol_type = genomic DNA
gaagcattggactgtaaatc

SEQ ID NO: 15122 - DNA, 21 bp, Homo sapiens
  source 1..21: mol_type = genomic DNA
gaagcattggactgtaaatct

SEQ ID NO: 15123 - DNA, 22 bp, Homo sapiens
  source 1..22: mol_type = genomic DNA
gaagcattggactgtaaatcta

SEQ ID NO: 15124 - DNA, 23 bp, Homo sapiens
  source 1..23: mol_type = genomic DNA
gaagcattggactgtaaatctaa

SEQ ID NO: 15125 - DNA, 24 bp, Homo sapiens
  source 1..24: mol_type = genomic DNA
gaagcattggactgtaaatctaaa

SEQ ID NO: 15126 - DNA, 31 bp, Homo sapiens
  source 1..31: mol_type = genomic DNA
gaagcattggactgtaaatctaaagacaggg

SEQ ID NO: 15127 - DNA, 34 bp, Homo sapiens
  source 1..34: mol_type = genomic DNA
gaagcattggactgtaaatctaaagacaggggtt

SEQ ID NO: 15128 - DNA, 37 bp, Homo sapiens
  source 1..37: mol_type = genomic DNA
gaagcattggactgtaaatctaaagacaggggttagg

SEQ ID NO: 15129 - DNA, 43 bp, Homo sapiens
  source 1..43: mol_type = genomic DNA
gaagcattggactgtaaatctaaagacaggggttaggcctctt

SEQ ID NO: 15130 - DNA, 45 bp, Homo sapiens
  source 1..45: mol_type = genomic DNA
gaagcattggactgtaaatctaaagacaggggttaggcctctttt

SEQ ID NO: 15131 - DNA, 16 bp, Homo sapiens
  source 1..16: mol_type = genomic DNA
gaagcgtgctgggccc

SEQ ID NO: 15132 - DNA, 17 bp, Homo sapiens
  source 1..17: mol_type = genomic DNA
gaagcgtgctgggccca

SEQ ID NO: 15133 - DNA, 18 bp, Homo sapiens
  source 1..18: mol_type = genomic DNA
gaagcgtgctgggcccat

SEQ ID NO: 15134 - DNA, 23 bp, Homo sapiens
  source 1..23: mol_type = genomic DNA
gaagcgtgctgggcccataaccc

SEQ ID NO: 15135 - DNA, 26 bp, Homo sapiens
  source 1..26: mol_type = genomic DNA
gaagcgtgctgggcccataacccaga

SEQ ID NO: 15136 - DNA, 32 bp, Homo sapiens
  source 1..32: mol_type = genomic DNA
gaagcgtgctgggcccataacccagaggtcga

SEQ ID NO: 15137 - DNA, 36 bp, Homo sapiens
  source 1..36: mol_type = genomic DNA
gaagcgtgctgggcccataacccagaggtcgatgga

SEQ ID NO: 15138 - DNA, 37 bp, Homo sapiens
  source 1..37: mol_type = genomic DNA
gaagcgtgctgggcccataacccagaggtcgatggat

SEQ ID NO: 15139 - DNA, 39 bp, Homo sapiens
  source 1..39: mol_type = genomic DNA
gaagcgtgctgggcccataacccagaggtcgatggatcg

SEQ ID NO: 15140 - DNA, 16 bp, Homo sapiens
  source 1..16: mol_type = genomic DNA
gaaggctgcgtgttcg

SEQ ID NO: 15141 - DNA, 27 bp, Homo sapiens
  source 1..27: mol_type = genomic DNA
gaaggctgcgtgttcgaatcacgtcgg

SEQ ID NO: 15142 - DNA, 29 bp, Homo sapiens
  source 1..29: mol_type = genomic DNA
gaaggctgcgtgttcgaatcacgtcgggg

SEQ ID NO: 15143 - DNA, 31 bp, Homo sapiens
  source 1..31: mol_type = genomic DNA
gaaggctgcgtgttcgaatcacgtcggggtc

SEQ ID NO: 15144 - DNA, 32 bp, Homo sapiens
  source 1..32: mol_type = genomic DNA
gaaggctgcgtgttcgaatcacgtcggggtca

SEQ ID NO: 15145 - DNA, 33 bp, Homo sapiens
  source 1..33: mol_type = genomic DNA
gaaggctgcgtgttcgaatcacgtcggggtcac

SEQ ID NO: 15146 - DNA, 34 bp, Homo sapiens
  source 1..34: mol_type = genomic DNA
gaaggctgcgtgttcgaatcacgtcggggtcacc

SEQ ID NO: 15147 - DNA, 35 bp, Homo sapiens
  source 1..35: mol_type = genomic DNA
gaaggctgcgtgttcgaatcacgtcggggtcacca

SEQ ID NO: 15148 - DNA, 16 bp, Homo sapiens
  source 1..16: mol_type = genomic DNA
gaaggtcctgagttcg

SEQ ID NO: 15149 - DNA, 20 bp, Homo sapiens
  source 1..20: mol_type = genomic DNA
gaaggtcctgagttcgaacc

SEQ ID NO: 15150 - DNA, 21 bp, Homo sapiens
  source 1..21: mol_type = genomic DNA
gaaggtcctgagttcgaacct

SEQ ID NO: 15151 - DNA, 22 bp, Homo sapiens
  source 1..22: mol_type = genomic DNA
gaaggtcctgagttcgaacctc

SEQ ID NO: 15152 - DNA, 31 bp, Homo sapiens
  source 1..31: mol_type = genomic DNA
gaaggtcctgagttcgaacctcagagggggc

SEQ ID NO: 15153 - DNA, 32 bp, Homo sapiens
  source 1..32: mol_type = genomic DNA
gaaggtcctgagttcgaacctcagagggggca

SEQ ID NO: 15154 - DNA, 33 bp, Homo sapiens
  source 1..33: mol_type = genomic DNA
gaaggtcctgagttcgaacctcagagggggcac

SEQ ID NO: 15155 - DNA, 34 bp, Homo sapiens
  source 1..34: mol_type = genomic DNA
gaaggtcctgagttcgaacctcagagggggcacc

SEQ ID NO: 15156 - DNA, 35 bp, Homo sapiens
  source 1..35: mol_type = genomic DNA
gaaggtcctgagttcgaacctcagagggggcacca

SEQ ID NO: 15157 - DNA, 34 bp, Homo sapiens
  source 1..34: mol_type = genomic DNA
gaaggtcctgagttcgagcctcagagagggcacc

SEQ ID NO: 15158 - DNA, 22 bp, Homo sapiens
  source 1..22: mol_type = genomic DNA
gaaggtcctgggttcgagcccc

SEQ ID NO: 15159 - DNA, 30 bp, Homo sapiens
  source 1..30: mol_type = genomic DNA
gaaggtcctgggttcgagccccagtggaac

SEQ ID NO: 15160 - DNA, 31 bp, Homo sapiens
  source 1..31: mol_type = genomic DNA
gaaggtcctgggttcgagccccagtggaacc

SEQ ID NO: 15161 - DNA, 32 bp, Homo sapiens
  source 1..32: mol_type = genomic DNA
gaaggtcctgggttcgagccccagtggaacca

SEQ ID NO: 15162 - DNA, 33 bp, Homo sapiens
  source 1..33: mol_type = genomic DNA
gaaggtcctgggttcgagccccagtggaaccac

SEQ ID NO: 15163 - DNA, 34 bp, Homo sapiens
  source 1..34: mol_type = genomic DNA
gaaggtcctgggttcgagccccagtggaaccacc

SEQ ID NO: 15164 - DNA, 35 bp, Homo sapiens
  source 1..35: mol_type = genomic DNA
gaaggtcctgggttcgagccccagtggaaccacca

SEQ ID NO: 15165 - DNA, 16 bp, Homo sapiens
  source 1..16: mol_type = genomic DNA
gaaggtcgtgagttcg

SEQ ID NO: 15166 - DNA, 19 bp, Homo sapiens
  source 1..19: mol_type = genomic DNA
gaaggtcgtgagttcgagc

SEQ ID NO: 15167 - DNA, 33 bp, Homo sapiens
  source 1..33: mol_type = genomic DNA
gaaggtcgtgagttcgagcctcacacggggcac

SEQ ID NO: 15168 - DNA, 34 bp, Homo sapiens
  source 1..34: mol_type = genomic DNA
gaaggtcgtgagttcgagcctcacacggggcacc

SEQ ID NO: 15169 - DNA, 35 bp, Homo sapiens
  source 1..35: mol_type = genomic DNA
gaaggtcgtgagttcgagcctcacacggggcacca

SEQ ID NO: 15170 - DNA, 31 bp, Homo sapiens
  source 1..31: mol_type = genomic DNA
gaaggtcgtgagttcgatcctcacacggggc

SEQ ID NO: 15171 - DNA, 32 bp, Homo sapiens
  source 1..32: mol_type = genomic DNA
gaaggtcgtgagttcgatcctcacacggggca

SEQ ID NO: 15172 - DNA, 33 bp, Homo sapiens
  source 1..33: mol_type = genomic DNA
gaaggtcgtgagttcgatcctcacacggggcac

SEQ ID NO: 15173 - DNA, 34 bp, Homo sapiens
  source 1..34: mol_type = genomic DNA
gaaggtcgtgagttcgatcctcacacggggcacc

SEQ ID NO: 15174 - DNA, 35 bp, Homo sapiens
  source 1..35: mol_type = genomic DNA
gaaggtcgtgagttcgatcctcacacggggcacca

SEQ ID NO: 15175 - DNA, 16 bp, Homo sapiens
  source 1..16: mol_type = genomic DNA
gaaggttgcgtgttca

SEQ ID NO: 15176 - DNA, 31 bp, Homo sapiens
  source 1..31: mol_type = genomic DNA
gaaggttgcgtgttcaaatcacgtcggggtc

SEQ ID NO: 15177 - DNA, 34 bp, Homo sapiens
  source 1..34: mol_type = genomic DNA
gaaggttgcgtgttcaaatcacgtcggggtcacc

SEQ ID NO: 15178 - DNA, 32 bp, Homo sapiens
  source 1..32: mol_type = genomic DNA
gaaggttgcgtgttcaagtcacgtcggggtca

SEQ ID NO: 15179 - DNA, 33 bp, Homo sapiens
  source 1..33: mol_type = genomic DNA
gaaggttgcgtgttcaagtcacgtcggggtcac

SEQ ID NO: 15180 - DNA, 34 bp, Homo sapiens
  source 1..34: mol_type = genomic DNA
gaaggttgcgtgttcaagtcacgtcggggtcacc

SEQ ID NO: 15181 - DNA, 35 bp, Homo sapiens
  source 1..35: mol_type = genomic DNA
gaaggttgcgtgttcaagtcacgtcggggtcacca

SEQ ID NO: 15182 - DNA, 20 bp, Homo sapiens
  source 1..20: mol_type = genomic DNA
gaatagtttaaattagaatc

SEQ ID NO: 15183 - DNA, 25 bp, Homo sapiens
  source 1..25: mol_type = genomic DNA
gaatagtttaaattagaatcttagc

SEQ ID NO: 15184 - DNA, 26 bp, Homo sapiens
  source 1..26: mol_type = genomic DNA
gaatagtttaaattagaatcttagct

SEQ ID NO: 15185 - DNA, 27 bp, Homo sapiens
  source 1..27: mol_type = genomic DNA
gaatagtttaaattagaatcttagctt

SEQ ID NO: 15186 - DNA, 28 bp, Homo sapiens
  source 1..28: mol_type = genomic DNA
gaatagtttaaattagaatcttagcttt

SEQ ID NO: 15187 - DNA, 29 bp, Homo sapiens
  source 1..29: mol_type = genomic DNA
gaatagtttaaattagaatcttagctttg

SEQ ID NO: 15188 - DNA, 30 bp, Homo sapiens
  source 1..30: mol_type = genomic DNA
gaatagtttaaattagaatcttagctttgg

SEQ ID NO: 15189 - DNA, 19 bp, Homo sapiens
  source 1..19: mol_type = genomic DNA
gaatcacgtcggggtcacc

SEQ ID NO: 15190 - DNA, 16 bp, Homo sapiens
  source 1..16: mol_type = genomic DNA
gaatccagcgatccga

SEQ ID NO: 15191 - DNA, 17 bp, Homo sapiens
  source 1..17: mol_type = genomic DNA
gaatccagcgatccgag

SEQ ID NO: 15192 - DNA, 19 bp, Homo sapiens
  source 1..19: mol_type = genomic DNA
gaatccagcgatccgagtt

SEQ ID NO: 15193 - DNA, 20 bp, Homo sapiens
  source 1..20: mol_type = genomic DNA
gaatccagcgatccgagttc

SEQ ID NO: 15194 - DNA, 21 bp, Homo sapiens
  source 1..21: mol_type = genomic DNA
gaatccagcgatccgagttca

SEQ ID NO: 15195 - DNA, 23 bp, Homo sapiens
  source 1..23: mol_type = genomic DNA
gaatccagcgatccgagttcaaa

SEQ ID NO: 15196 - DNA, 31 bp, Homo sapiens
  source 1..31: mol_type = genomic DNA
gaatccagcgatccgagttcaaatctcggtg

SEQ ID NO: 15197 - DNA, 37 bp, Homo sapiens
  source 1..37: mol_type = genomic DNA
gaatccagcgatccgagttcaaatctcggtggaacct

SEQ ID NO: 15198 - DNA, 38 bp, Homo sapiens
  source 1..38: mol_type = genomic DNA
gaatccagcgatccgagttcaaatctcggtggaacctc

SEQ ID NO: 15199 - DNA, 39 bp, Homo sapiens
  source 1..39: mol_type = genomic DNA
gaatccagcgatccgagttcaaatctcggtggaacctcc

SEQ ID NO: 15200 - DNA, 40 bp, Homo sapiens
  source 1..40: mol_type = genomic DNA
gaatccagcgatccgagttcaaatctcggtggaacctcca

SEQ ID NO: 15201 - DNA, 23 bp, Homo sapiens
  source 1..23: mol_type = genomic DNA
gaatccagcgatccgagttcgag

SEQ ID NO: 15202 - DNA, 24 bp, Homo sapiens
  source 1..24: mol_type = genomic DNA
gaatccagcgatccgagttcgagt

SEQ ID NO: 15203 - DNA, 31 bp, Homo sapiens
  source 1..31: mol_type = genomic DNA
gaatccagcgatccgagttcgagtctcggtg

SEQ ID NO: 15204 - DNA, 37 bp, Homo sapiens
  source 1..37: mol_type = genomic DNA
gaatccagcgatccgagttcgagtctcggtggaacct

SEQ ID NO: 15205 - DNA, 38 bp, Homo sapiens
  source 1..38: mol_type = genomic DNA
gaatccagcgatccgagttcgagtctcggtggaacctc

SEQ ID NO: 15206 - DNA, 39 bp, Homo sapiens
  source 1..39: mol_type = genomic DNA
gaatccagcgatccgagttcgagtctcggtggaacctcc

SEQ ID NO: 15207 - DNA, 20 bp, Homo sapiens
  source 1..20: mol_type = genomic DNA
gaatcccaccagagtcgcca

SEQ ID NO: 15208 - DNA, 17 bp, Homo sapiens
  source 1..17: mol_type = genomic DNA
gaatcccaccgctgcca

SEQ ID NO: 15209 - DNA, 19 bp, Homo sapiens
  source 1..19: mol_type = genomic DNA
gaatcccaccgctgccacc

SEQ ID NO: 15210 - DNA, 20 bp, Homo sapiens
  source 1..20: mol_type = genomic DNA
gaatcccagcggtgcctcca

SEQ ID NO: 15211 - DNA, 18 bp, Homo sapiens
  source 1..18: mol_type = genomic DNA
gaatcccatcctcgtcgc

SEQ ID NO: 15212 - DNA, 19 bp, Homo sapiens
  source 1..19: mol_type = genomic DNA
gaatcccatcctcgtcgcc

SEQ ID NO: 15213 - DNA, 20 bp, Homo sapiens
  source 1..20: mol_type = genomic DNA
gaatcccatcctcgtcgcca

SEQ ID NO: 15214 - DNA, 16 bp, Homo sapiens
  source 1..16: mol_type = genomic DNA
gaatccgagtcacggc

SEQ ID NO: 15215 - DNA, 17 bp, Homo sapiens
  source 1..17: mol_type = genomic DNA
gaatccgagtcacggca

SEQ ID NO: 15216 - DNA, 18 bp, Homo sapiens
  source 1..18: mol_type = genomic DNA
gaatccgagtcacggcac

SEQ ID NO: 15217 - DNA, 19 bp, Homo sapiens
  source 1..19: mol_type = genomic DNA
gaatccgagtcacggcacc

SEQ ID NO: 15218 - DNA, 20 bp, Homo sapiens
  source 1..20: mol_type = genomic DNA
gaatccgagtcacggcacca

SEQ ID NO: 15219 - DNA, 19 bp, Homo sapiens
  source 1..19: mol_type = genomic DNA
gaatccggctcgaaggacc

SEQ ID NO: 15220 - DNA, 19 bp, Homo sapiens
  source 1..19: mol_type = genomic DNA
gaatccggctcggaggacc

SEQ ID NO: 15221 - DNA, 20 bp, Homo sapiens
  source 1..20: mol_type = genomic DNA
gaatcctgttcgtgacgcca

SEQ ID NO: 15222 - DNA, 19 bp, Homo sapiens
  source 1..19: mol_type = genomic DNA
gaatctgacaacagaggct

SEQ ID NO: 15223 - DNA, 20 bp, Homo sapiens
  source 1..20: mol_type = genomic DNA
gaatctgacaacagaggctt

SEQ ID NO: 15224 - DNA, 25 bp, Homo sapiens
  source 1..25: mol_type = genomic DNA
gaatctgacaacagaggcttacgac

SEQ ID NO: 15225 - DNA, 26 bp, Homo sapiens
  source 1..26: mol_type = genomic DNA
gaatctgacaacagaggcttacgacc

SEQ ID NO: 15226 - DNA, 27 bp, Homo sapiens
  source 1..27: mol_type = genomic DNA
gaatctgacaacagaggcttacgaccc

SEQ ID NO: 15227 - DNA, 28 bp, Homo sapiens
  source 1..28: mol_type = genomic DNA
gaatctgacaacagaggcttacgacccc

SEQ ID NO: 15228 - DNA, 29 bp, Homo sapiens
  source 1..29: mol_type = genomic DNA
gaatctgacaacagaggcttacgacccct

SEQ ID NO: 15229 - DNA, 30 bp, Homo sapiens
  source 1..30: mol_type = genomic DNA
gaatctgacaacagaggcttacgacccctt

SEQ ID NO: 15230 - DNA, 31 bp, Homo sapiens
  source 1..31: mol_type = genomic DNA
gaatctgacaacagaggcttacgacccctta

SEQ ID NO: 15231 - DNA, 36 bp, Homo sapiens
  source 1..36: mol_type = genomic DNA
gaatctgacaacagaggcttacgaccccttatttac

SEQ ID NO: 15232 - DNA, 37 bp, Homo sapiens
  source 1..37: mol_type = genomic DNA
gaatctgacaacagaggcttacgaccccttatttacc

SEQ ID NO: 15233 - DNA, 38 bp, Homo sapiens
  source 1..38: mol_type = genomic DNA
gaatctgacaacagaggcttacgaccccttatttaccc

SEQ ID NO: 15234 - DNA, 39 bp, Homo sapiens
  source 1..39: mol_type = genomic DNA
gaatctgacaacagaggcttacgaccccttatttacccc

SEQ ID NO: 15235 - DNA, 40 bp, Homo sapiens
  source 1..40: mol_type = genomic DNA
gaatctgacaacagaggcttacgaccccttatttacccca

SEQ ID NO: 15236 - DNA, 33 bp, Homo sapiens
  source 1..33: mol_type = genomic DNA
gaatcttagctttgggtgctaatggtggagtta

SEQ ID NO: 15237 - DNA, 38 bp, Homo sapiens
  source 1..38: mol_type = genomic DNA
gaatcttagctttgggtgctaatggtggagttaaagac

SEQ ID NO: 15238 - DNA, 39 bp, Homo sapiens
  source 1..39: mol_type = genomic DNA
gaatcttagctttgggtgctaatggtggagttaaagact

SEQ ID NO: 15239 - DNA, 40 bp, Homo sapiens
  source 1..40: mol_type = genomic DNA
gaatcttagctttgggtgctaatggtggagttaaagactt

SEQ ID NO: 15240 - DNA, 16 bp, Homo sapiens
  source 1..16: mol_type = genomic DNA
gaatgatttcgactca

SEQ ID NO: 15241 - DNA, 17 bp, Homo sapiens
  source 1..17: mol_type = genomic DNA
gaatgatttcgactcat

SEQ ID NO: 15242 - DNA, 18 bp, Homo sapiens
  source 1..18: mol_type = genomic DNA
gaatgatttcgactcatt

SEQ ID NO: 15243 - DNA, 19 bp, Homo sapiens
  source 1..19: mol_type = genomic DNA
gaatgatttcgactcatta

SEQ ID NO: 15244 - DNA, 27 bp, Homo sapiens
  source 1..27: mol_type = genomic DNA
gaatgatttcgactcattaaattatga

SEQ ID NO: 15245 - DNA, 28 bp, Homo sapiens
  source 1..28: mol_type = genomic DNA
gaatgatttcgactcattaaattatgat

SEQ ID NO: 15246 - DNA, 29 bp, Homo sapiens
  source 1..29: mol_type = genomic DNA
gaatgatttcgactcattaaattatgata

SEQ ID NO: 15247 - DNA, 30 bp, Homo sapiens
  source 1..30: mol_type = genomic DNA
gaatgatttcgactcattaaattatgataa

SEQ ID NO: 15248 - DNA, 31 bp, Homo sapiens
  source 1..31: mol_type = genomic DNA
gaatgatttcgactcattaaattatgataat

SEQ ID NO: 15249 - DNA, 32 bp, Homo sapiens
  source 1..32: mol_type = genomic DNA
gaatgatttcgactcattaaattatgataatc

SEQ ID NO: 15250 - DNA, 33 bp, Homo sapiens
  source 1..33: mol_type = genomic DNA
gaatgatttcgactcattaaattatgataatca

SEQ ID NO: 15251 - DNA, 45 bp, Homo sapiens
  source 1..45: mol_type = genomic DNA
gaatgatttcgactcattaaattatgataatcatatttaccaacc

SEQ ID NO: 15252 - DNA, 16 bp, Homo sapiens
  source 1..16: mol_type = genomic DNA
gaattctcgcctgcca

SEQ ID NO: 15253 - DNA, 17 bp, Homo sapiens
  source 1..17: mol_type = genomic DNA
gaattctcgcctgccac

SEQ ID NO: 15254 - DNA, 18 bp, Homo sapiens
  source 1..18: mol_type = genomic DNA
gaattctcgcctgccacg

SEQ ID NO: 15255 - DNA, 31 bp, Homo sapiens
  source 1..31: mol_type = genomic DNA
gaattctcgcctgccacgcgggaggcccggg

SEQ ID NO: 15256 - DNA, 45 bp, Homo sapiens
  source 1..45: mol_type = genomic DNA
gaattctcgcctgccacgcgggaggcccgggttcgattcccggcc

SEQ ID NO: 15257 - DNA, 19 bp, Homo sapiens
  source 1..19: mol_type = genomic DNA
gaattgcaaattcgaagaa

SEQ ID NO: 15258 - DNA, 21 bp, Homo sapiens
  source 1..21: mol_type = genomic DNA
gaattgcaaattcgaagaagc

SEQ ID NO: 15259 - DNA, 23 bp, Homo sapiens
  source 1..23: mol_type = genomic DNA
gaattgcaaattcgaagaagcag

SEQ ID NO: 15260 - DNA, 24 bp, Homo sapiens
  source 1..24: mol_type = genomic DNA
gaattgcaaattcgaagaagcagc

SEQ ID NO: 15261 - DNA, 25 bp, Homo sapiens
  source 1..25: mol_type = genomic DNA
gaattgcaaattcgaagaagcagct

SEQ ID NO: 15262 - DNA, 26 bp, Homo sapiens
  source 1..26: mol_type = genomic DNA
gaattgcaaattcgaagaagcagctt

SEQ ID NO: 15263 - DNA, 32 bp, Homo sapiens
  source 1..32: mol_type = genomic DNA
gaattgcaaattcgaagaagcagcttcaaacc

SEQ ID NO: 15264 - DNA, 34 bp, Homo sapiens
  source 1..34: mol_type = genomic DNA
gaattgcaaattcgaagaagcagcttcaaacctg

SEQ ID NO: 15265 - DNA, 40 bp, Homo sapiens
  source 1..40: mol_type = genomic DNA
gaattgcaaattcgaagaagcagcttcaaacctgccgggg

SEQ ID NO: 15266 - DNA, 41 bp, Homo sapiens
  source 1..41: mol_type = genomic DNA
gaattgcaaattcgaagaagcagcttcaaacctgccggggc

SEQ ID NO: 15267 - DNA, 42 bp, Homo sapiens
  source 1..42: mol_type = genomic DNA
gaattgcaaattcgaagaagcagcttcaaacctgccggggct

SEQ ID NO: 15268 - DNA, 43 bp, Homo sapiens
  source 1..43: mol_type = genomic DNA
gaattgcaaattcgaagaagcagcttcaaacctgccggggctt

SEQ ID NO: 15269 - DNA, 44 bp, Homo sapiens
  source 1..44: mol_type = genomic DNA
gaattgcaaattcgaagaagcagcttcaaacctgccggggcttc

SEQ ID NO: 15270 - DNA, 45 bp, Homo sapiens
  source 1..45: mol_type = genomic DNA
gaattgcaaattcgaagaagcagcttcaaacctgccggggcttcc

SEQ ID NO: 15271 - DNA, 46 bp, Homo sapiens
  source 1..46: mol_type = genomic DNA
gaattgcaaattcgaagaagcagcttcaaacctgccggggcttcca

SEQ ID NO: 15272 - DNA, 16 bp, Homo sapiens
  source 1..16: mol_type = genomic DNA
gacaacagaggcttac

SEQ ID NO: 15273 - DNA, 17 bp, Homo sapiens
  source 1..17: mol_type = genomic DNA
gacaacagaggcttacg

SEQ ID NO: 15274 - DNA, 18 bp, Homo sapiens
  source 1..18: mol_type = genomic DNA
gacaacagaggcttacga

SEQ ID NO: 15275 - DNA, 19 bp, Homo sapiens
  source 1..19: mol_type = genomic DNA
gacaacagaggcttacgac

SEQ ID NO: 15276 - DNA, 20 bp, Homo sapiens
  source 1..20: mol_type = genomic DNA
gacaacagaggcttacgacc

SEQ ID NO: 15277 - DNA, 21 bp, Homo sapiens
  source 1..21: mol_type = genomic DNA
gacaacagaggcttacgaccc

SEQ ID NO: 15278 - DNA, 22 bp, Homo sapiens
  source 1..22: mol_type = genomic DNA
gacaacagaggcttacgacccc

SEQ ID NO: 15279 - DNA, 23 bp, Homo sapiens
  source 1..23: mol_type = genomic DNA
gacaacagaggcttacgacccct

SEQ ID NO: 15280 - DNA, 25 bp, Homo sapiens
  source 1..25: mol_type = genomic DNA
gacaacagaggcttacgacccctta

SEQ ID NO: 15281 - DNA, 26 bp, Homo sapiens
  source 1..26: mol_type = genomic DNA
gacaacagaggcttacgaccccttat

SEQ ID NO: 15282 - DNA, 27 bp, Homo sapiens
  source 1..27: mol_type = genomic DNA
gacaacagaggcttacgaccccttatt

SEQ ID NO: 15283 - DNA, 29 bp, Homo sapiens
  source 1..29: mol_type = genomic DNA
gacaacagaggcttacgaccccttattta

SEQ ID NO: 15284 - DNA, 30 bp, Homo sapiens
  source 1..30: mol_type = genomic DNA
gacaacagaggcttacgaccccttatttac

SEQ ID NO: 15285 - DNA, 31 bp, Homo sapiens
  source 1..31: mol_type = genomic DNA
gacaacagaggcttacgaccccttatttacc

SEQ ID NO: 15286 - DNA, 32 bp, Homo sapiens
  source 1..32: mol_type = genomic DNA
gacaacagaggcttacgaccccttatttaccc

SEQ ID NO: 15287 - DNA, 33 bp, Homo sapiens
  source 1..33: mol_type = genomic DNA
gacaacagaggcttacgaccccttatttacccc

SEQ ID NO: 15288 - DNA, 34 bp, Homo sapiens
  source 1..34: mol_type = genomic DNA
gacaacagaggcttacgaccccttatttacccca

SEQ ID NO: 15289 - DNA, 17 bp, Homo sapiens
  source 1..17: mol_type = genomic DNA
gacaacattcaaaaaag

SEQ ID NO: 15290 - DNA, 22 bp, Homo sapiens
  source 1..22: mol_type = genomic DNA
gacaacattcaaaaaagagtac

SEQ ID NO: 15291 - DNA, 23 bp, Homo sapiens
  source 1..23: mol_type = genomic DNA
gacaacattcaaaaaagagtacc

SEQ ID NO: 15292 - DNA, 24 bp, Homo sapiens
  source 1..24: mol_type = genomic DNA
gacaacattcaaaaaagagtacca

SEQ ID NO: 15293 - DNA, 16 bp, Homo sapiens
  source 1..16: mol_type = genomic DNA
gacaggggttaggcct

SEQ ID NO: 15294 - DNA, 17 bp, Homo sapiens
  source 1..17: mol_type = genomic DNA
gacaggggttaggcctc

SEQ ID NO: 15295 - DNA, 18 bp, Homo sapiens
  source 1..18: mol_type = genomic DNA
gacaggggttaggcctct

SEQ ID NO: 15296 - DNA, 25 bp, Homo sapiens
  source 1..25: mol_type = genomic DNA
gacaggggttaggcctctttttacc

SEQ ID NO: 15297 - DNA, 28 bp, Homo sapiens
  source 1..28: mol_type = genomic DNA
gacaggggttaggcctctttttaccacc

SEQ ID NO: 15298 - DNA, 29 bp, Homo sapiens
  source 1..29: mol_type = genomic DNA
gacaggggttaggcctctttttaccacca

SEQ ID NO: 15299 - DNA, 20 bp, Homo sapiens
  source 1..20: mol_type = genomic DNA
gaccaagagccttcaaagcc

SEQ ID NO: 15300 - DNA, 24 bp, Homo sapiens
  source 1..24: mol_type = genomic DNA
gaccaagagccttcaaagccctca

SEQ ID NO: 15301 - DNA, 25 bp, Homo sapiens
  source 1..25: mol_type = genomic DNA
gaccaagagccttcaaagccctcag

SEQ ID NO: 15302 - DNA, 30 bp, Homo sapiens
  source 1..30: mol_type = genomic DNA
gaccaagagccttcaaagccctcagtaagt

SEQ ID NO: 15303 - DNA, 33 bp, Homo sapiens
  source 1..33: mol_type = genomic DNA
gaccaagagccttcaaagccctcagtaagttgc

SEQ ID NO: 15304 - DNA, 17 bp, Homo sapiens
  source 1..17: mol_type = genomic DNA
gaccacgtggcctaatg

SEQ ID NO: 15305 - DNA, 18 bp, Homo sapiens
  source 1..18: mol_type = genomic DNA
gaccacgtggcctaatgg

SEQ ID NO: 15306 - DNA, 19 bp, Homo sapiens
  source 1..19: mol_type = genomic DNA
gaccacgtggcctaatgga

SEQ ID NO: 15307 - DNA, 20 bp, Homo sapiens
  source 1..20: mol_type = genomic DNA
gaccacgtggcctaatggat

SEQ ID NO: 15308 - DNA, 32 bp, Homo sapiens
  source 1..32: mol_type = genomic DNA
gaccacgtggcctaatggataaggcgtctgac

SEQ ID NO: 15309 - DNA, 33 bp, Homo sapiens
  source 1..33: mol_type = genomic DNA
gaccacgtggcctaatggataaggcgtctgact

SEQ ID NO: 15310 - DNA, 36 bp, Homo sapiens
  source 1..36: mol_type = genomic DNA
gaccacgtggcctaatggataaggcgtctgacttcg

SEQ ID NO: 15311 - DNA, 18 bp, Homo sapiens
  source 1..18: mol_type = genomic DNA
gacccagtggcctaatgg

SEQ ID NO: 15312 - DNA, 19 bp, Homo sapiens
  source 1..19: mol_type = genomic DNA
gacccagtggcctaatgga

SEQ ID NO: 15313 - DNA, 20 bp, Homo sapiens
  source 1..20: mol_type = genomic DNA
gacccagtggcctaatggat

SEQ ID NO: 15314 - DNA, 23 bp, Homo sapiens
  source 1..23: mol_type = genomic DNA
gacccagtggcctaatggataag

SEQ ID NO: 15315 - DNA, 26 bp, Homo sapiens
  source 1..26: mol_type = genomic DNA
gacccagtggcctaatggataaggca

SEQ ID NO: 15316 - DNA, 28 bp, Homo sapiens
  source 1..28: mol_type = genomic DNA
gacccagtggcctaatggataaggcatc

SEQ ID NO: 15317 - DNA, 29 bp, Homo sapiens
  source 1..29: mol_type = genomic DNA
gacccagtggcctaatggataaggcatca

SEQ ID NO: 15318 - DNA, 30 bp, Homo sapiens
  source 1..30: mol_type = genomic DNA
gacccagtggcctaatggataaggcatcag

SEQ ID NO: 15319 - DNA, 31 bp, Homo sapiens
  source 1..31: mol_type = genomic DNA
gacccagtggcctaatggataaggcatcagc

SEQ ID NO: 15320 - DNA, 32 bp, Homo sapiens
  source 1..32: mol_type = genomic DNA
gacccagtggcctaatggataaggcatcagcc

SEQ ID NO: 15321 - DNA, 33 bp, Homo sapiens
  source 1..33: mol_type = genomic DNA
gacccagtggcctaatggataaggcatcagcct

SEQ ID NO: 15322 - DNA, 34 bp, Homo sapiens
  source 1..34: mol_type = genomic DNA
gacccagtggcctaatggataaggcatcagcctc

SEQ ID NO: 15323 - DNA, 35 bp, Homo sapiens
  source 1..35: mol_type = genomic DNA
gacccagtggcctaatggataaggcatcagcctcc

SEQ ID NO: 15324 - DNA, 36 bp, Homo sapiens
  source 1..36: mol_type = genomic DNA
gacccagtggcctaatggataaggcatcagcctccg

SEQ ID NO: 15325 - DNA, 42 bp, Homo sapiens
  source 1..42: mol_type = genomic DNA
gacccagtggcctaatggataaggcatcagcctccggagctg

SEQ ID NO: 15326 - DNA, 16 bp, Homo sapiens
  source 1..16: mol_type = genomic DNA
gaccccttatttaccc

SEQ ID NO: 15327 - DNA, 17 bp, Homo sapiens
  source 1..17: mol_type = genomic DNA
gaccccttatttacccc

SEQ ID NO: 15328 - DNA, 18 bp, Homo sapiens
  source 1..18: mol_type = genomic DNA
gaccccttatttacccca

SEQ ID NO: 15329 - DNA, 22 bp, Homo sapiens
  source 1..22: mol_type = genomic DNA
gacccgggttcgattcccggcc

SEQ ID NO: 15330 - DNA, 25 bp, Homo sapiens
  source 1..25: mol_type = genomic DNA
gacccgggttcgattcccggccaac

SEQ ID NO: 15331 - DNA, 30 bp, Homo sapiens
  source 1..30: mol_type = genomic DNA
gacccgggttcgattcccggccaacgcacc

SEQ ID NO: 15332 - DNA, 31 bp, Homo sapiens
  source 1..31: mol_type = genomic DNA
gacccgggttcgattcccggccaacgcacca

SEQ ID NO: 15333 - DNA, 18 bp, Homo sapiens
  source 1..18: mol_type = genomic DNA
gaccgcgtggcctaatgg

SEQ ID NO: 15334 - DNA, 19 bp, Homo sapiens
  source 1..19: mol_type = genomic DNA
gaccgcgtggcctaatgga

SEQ ID NO: 15335 - DNA, 20 bp, Homo sapiens
  source 1..20: mol_type = genomic DNA
gaccgcgtggcctaatggat

SEQ ID NO: 15336 - DNA, 23 bp, Homo sapiens
  source 1..23: mol_type = genomic DNA
gaccgcgtggcctaatggataag

SEQ ID NO: 15337 - DNA, 30 bp, Homo sapiens
  source 1..30: mol_type = genomic DNA
gaccgcgtggcctaatggataaggcgtctg

SEQ ID NO: 15338 - DNA, 32 bp, Homo sapiens
  source 1..32: mol_type = genomic DNA
gaccgcgtggcctaatggataaggcgtctgac

SEQ ID NO: 15339 - DNA, 33 bp, Homo sapiens
  source 1..33: mol_type = genomic DNA
gaccgcgtggcctaatggataaggcgtctgact

SEQ ID NO: 15340 - DNA, 34 bp, Homo sapiens
  source 1..34: mol_type = genomic DNA
gaccgcgtggcctaatggataaggcgtctgactt

SEQ ID NO: 15341 - DNA, 35 bp, Homo sapiens
  source 1..35: mol_type = genomic DNA
gaccgcgtggcctaatggataaggcgtctgacttc

SEQ ID NO: 15342 - DNA, 36 bp, Homo sapiens
  source 1..36: mol_type = genomic DNA
gaccgcgtggcctaatggataaggcgtctgacttcg

SEQ ID NO: 15343 - DNA, 29 bp, Homo sapiens
  source 1..29: mol_type = genomic DNA
gaccggggttcaattccccgacggggagc

SEQ ID NO: 15344 - DNA, 30 bp, Homo sapiens
  source 1..30: mol_type = genomic DNA
gaccggggttcaattccccgacggggagcc

SEQ ID NO: 15345 - DNA, 31 bp, Homo sapiens
  source 1..31: mol_type = genomic DNA
gaccggggttcaattccccgacggggagcca

SEQ ID NO: 15346 - DNA, 24 bp, Homo sapiens
  source 1..24: mol_type = genomic DNA
gaccggggttcgattccccgacgg

SEQ ID NO: 15347 - DNA, 25 bp, Homo sapiens
  source 1..25: mol_type = genomic DNA
gaccggggttcgattccccgacggg

SEQ ID NO: 15348 - DNA, 26 bp, Homo sapiens
  source 1..26: mol_type = genomic DNA
gaccggggttcgattccccgacgggg

SEQ ID NO: 15349 - DNA, 28 bp, Homo sapiens
  source 1..28: mol_type = genomic DNA
gaccggggttcgattccccgacggggag

SEQ ID NO: 15350 - DNA, 29 bp, Homo sapiens
  source 1..29: mol_type = genomic DNA
gaccggggttcgattccccgacggggagc

SEQ ID NO: 15351 - DNA, 30 bp, Homo sapiens
  source 1..30: mol_type = genomic DNA
gaccggggttcgattccccgacggggagcc

SEQ ID NO: 15352 - DNA, 31 bp, Homo sapiens
  source 1..31: mol_type = genomic DNA
gaccggggttcgattccccgacggggagcca

SEQ ID NO: 15353 - DNA, 16 bp, Homo sapiens
  source 1..16: mol_type = genomic DNA
gacctcgtggcgcaac

SEQ ID NO: 15354 - DNA, 17 bp, Homo sapiens
  source 1..17: mol_type = genomic DNA
gacctcgtggcgcaacg

SEQ ID NO: 15355 - DNA, 18 bp, Homo sapiens
  source 1..18: mol_type = genomic DNA
gacctcgtggcgcaacgg

SEQ ID NO: 15356 - DNA, 21 bp, Homo sapiens
  source 1..21: mol_type = genomic DNA
gacctcgtggcgcaacggtag

SEQ ID NO: 15357 - DNA, 31 bp, Homo sapiens
  source 1..31: mol_type = genomic DNA
gacctcgtggcgcaacggtagcgcgtctgac

SEQ ID NO: 15358 - DNA, 32 bp, Homo sapiens
  source 1..32: mol_type = genomic DNA
gacctcgtggcgcaacggtagcgcgtctgact

SEQ ID NO: 15359 - DNA, 33 bp, Homo sapiens
  source 1..33: mol_type = genomic DNA
gacctcgtggcgcaacggtagcgcgtctgactc

SEQ ID NO: 15360 - DNA, 34 bp, Homo sapiens
  source 1..34: mol_type = genomic DNA
gacctcgtggcgcaacggtagcgcgtctgactcc

SEQ ID NO: 15361 - DNA, 18 bp, Homo sapiens
  source 1..18: mol_type = genomic DNA
gacctcgtggcgcaatgg

SEQ ID NO: 15362 - DNA, 21 bp, Homo sapiens
  source 1..21: mol_type = genomic DNA
gacctcgtggcgcaatggtag

SEQ ID NO: 15363 - DNA, 22 bp, Homo sapiens
  source 1..22: mol_type = genomic DNA
gacctcgtggcgcaatggtagc

SEQ ID NO: 15364 - DNA, 23 bp, Homo sapiens
  source 1..23: mol_type = genomic DNA
gacctcgtggcgcaatggtagcg

SEQ ID NO: 15365 - DNA, 32 bp, Homo sapiens
  source 1..32: mol_type = genomic DNA
gacctcgtggcgcaatggtagcgcgtctgact

SEQ ID NO: 15366 - DNA, 33 bp, Homo sapiens
  source 1..33: mol_type = genomic DNA
gacctcgtggcgcaatggtagcgcgtctgactc

SEQ ID NO: 15367 - DNA, 34 bp, Homo sapiens
  source 1..34: mol_type = genomic DNA
gacctcgtggcgcaatggtagcgcgtctgactcc

SEQ ID NO: 15368 - DNA, 16 bp, Homo sapiens
  source 1..16: mol_type = genomic DNA
gacgaggtggccgagt

SEQ ID NO: 15369 - DNA, 17 bp, Homo sapiens
  source 1..17: mol_type = genomic DNA
gacgaggtggccgagtg

SEQ ID NO: 15370 - DNA, 18 bp, Homo sapiens
  source 1..18: mol_type = genomic DNA
gacgaggtggccgagtgg

SEQ ID NO: 15371 - DNA, 19 bp, Homo sapiens
  source 1..19: mol_type = genomic DNA
gacgaggtggccgagtggt

SEQ ID NO: 15372 - DNA, 20 bp, Homo sapiens
  source 1..20: mol_type = genomic DNA
gacgaggtggccgagtggtt

SEQ ID NO: 15373 - DNA, 21 bp, Homo sapiens
  source 1..21: mol_type = genomic DNA
gacgaggtggccgagtggtta

SEQ ID NO: 15374 - DNA, 22 bp, Homo sapiens
  source 1..22: mol_type = genomic DNA
gacgaggtggccgagtggttaa

SEQ ID NO: 15375 - DNA, 23 bp, Homo sapiens
  source 1..23: mol_type = genomic DNA
gacgaggtggccgagtggttaag

SEQ ID NO: 15376 - DNA, 24 bp, Homo sapiens
  source 1..24: mol_type = genomic DNA
gacgaggtggccgagtggttaagg

SEQ ID NO: 15377 - DNA, 25 bp, Homo sapiens
  source 1..25: mol_type = genomic DNA
gacgaggtggccgagtggttaaggc

SEQ ID NO: 15378 - DNA, 32 bp, Homo sapiens
  source 1..32: mol_type = genomic DNA
gacgaggtggccgagtggttaaggcgatggac

SEQ ID NO: 15379 - DNA, 33 bp, Homo sapiens
  source 1..33: mol_type = genomic DNA
gacgaggtggccgagtggttaaggcgatggact

SEQ ID NO: 15380 - DNA, 35 bp, Homo sapiens
  source 1..35: mol_type = genomic DNA
gacgaggtggccgagtggttaaggcgatggactgc

SEQ ID NO: 15381 - DNA, 36 bp, Homo sapiens
  source 1..36: mol_type = genomic DNA
gacgaggtggccgagtggttaaggcgatggactgct

SEQ ID NO: 15382 - DNA, 16 bp, Homo sapiens
  source 1..16: mol_type = genomic DNA
gacgggctcacatcac

SEQ ID NO: 15383 - DNA, 17 bp, Homo sapiens
  source 1..17: mol_type = genomic DNA
gacgggctcacatcacc

SEQ ID NO: 15384 - DNA, 18 bp, Homo sapiens
  source 1..18: mol_type = genomic DNA
gacgggctcacatcaccc

SEQ ID NO: 15385 - DNA, 19 bp, Homo sapiens
  source 1..19: mol_type = genomic DNA
gacgggctcacatcacccc

SEQ ID NO: 15386 - DNA, 20 bp, Homo sapiens
  source 1..20: mol_type = genomic DNA
gacgggctcacatcacccca

SEQ ID NO: 15387 - DNA, 21 bp, Homo sapiens
  source 1..21: mol_type = genomic DNA
gacgggctcacatcaccccat

SEQ ID NO: 15388 - DNA, 22 bp, Homo sapiens
  source 1..22: mol_type = genomic DNA
gacgggctcacatcaccccata

SEQ ID NO: 15389 - DNA, 23 bp, Homo sapiens
  source 1..23: mol_type = genomic DNA
gacgggctcacatcaccccataa

SEQ ID NO: 15390 - DNA, 24 bp, Homo sapiens
  source 1..24: mol_type = genomic DNA
gacgggctcacatcaccccataaa

SEQ ID NO: 15391 - DNA, 25 bp, Homo sapiens
  source 1..25: mol_type = genomic DNA
gacgggctcacatcaccccataaac

SEQ ID NO: 15392 - DNA, 26 bp, Homo sapiens
  source 1..26: mol_type = genomic DNA
gacgggctcacatcaccccataaaca

SEQ ID NO: 15393 - DNA, 27 bp, Homo sapiens
  source 1..27: mol_type = genomic DNA
gacgggctcacatcaccccataaacac

SEQ ID NO: 15394 - DNA, 28 bp, Homo sapiens
  source 1..28: mol_type = genomic DNA
gacgggctcacatcaccccataaacacc

SEQ ID NO: 15395 - DNA, 29 bp, Homo sapiens
  source 1..29: mol_type = genomic DNA
gacgggctcacatcaccccataaacacca

SEQ ID NO: 15396 - DNA, 17 bp, Homo sapiens
  source 1..17: mol_type = genomic DNA
gactacggatcagaaga

SEQ ID NO: 15397 - DNA, 23 bp, Homo sapiens
  source 1..23: mol_type = genomic DNA
gactcaagttctggtctccaatg

SEQ ID NO: 15398 - DNA, 22 bp, Homo sapiens
  source 1..22: mol_type = genomic DNA
gactcaagttctggtctccgga

SEQ ID NO: 15399 - DNA, 23 bp, Homo sapiens
  source 1..23: mol_type = genomic DNA
gactcaagttctggtctccggat

SEQ ID NO: 15400 - DNA, 31 bp, Homo sapiens
  source 1..31: mol_type = genomic DNA
gactcattaaattatgataatcatatttacc

SEQ ID NO: 15401 - DNA, 35 bp, Homo sapiens
  source 1..35: mol_type = genomic DNA
gactcattaaattatgataatcatatttaccaacc

SEQ ID NO: 15402 - DNA, 36 bp, Homo sapiens
  source 1..36: mol_type = genomic DNA
gactcattaaattatgataatcatatttaccaacca

SEQ ID NO: 15403 - DNA, 21 bp, Homo sapiens
  source 1..21: mol_type = genomic DNA
gactccagatcagaaggctgc

SEQ ID NO: 15404 - DNA, 27 bp, Homo sapiens
  source 1..27: mol_type = genomic DNA
gactccagatcagaaggctgcgtgttc

SEQ ID NO: 15405 - DNA, 20 bp, Homo sapiens
  source 1..20: mol_type = genomic DNA
gactccagatcagaaggttg

SEQ ID NO: 15406 - DNA, 18 bp, Homo sapiens
  source 1..18: mol_type = genomic DNA
gactcccggtatgggaac

SEQ ID NO: 15407 - DNA, 19 bp, Homo sapiens
  source 1..19: mol_type = genomic DNA
gactcccggtatgggaacc

SEQ ID NO: 15408 - DNA, 18 bp, Homo sapiens
  source 1..18: mol_type = genomic DNA
gactcccggtgtgggaac

SEQ ID NO: 15409 - DNA, 19 bp, Homo sapiens
  source 1..19: mol_type = genomic DNA
gactcccggtgtgggaacc

SEQ ID NO: 15410 - DNA, 20 bp, Homo sapiens
  source 1..20: mol_type = genomic DNA
gactcccggtgtgggaacca

SEQ ID NO: 15411 - DNA, 16 bp, Homo sapiens
  source 1..16: mol_type = genomic DNA
gactcctggctggctc

SEQ ID NO: 15412 - DNA, 17 bp, Homo sapiens
  source 1..17: mol_type = genomic DNA
gactcctggctggctcg

SEQ ID NO: 15413 - DNA, 18 bp, Homo sapiens
  source 1..18: mol_type = genomic DNA
gactcctggctggctcgc

SEQ ID NO: 15414 - DNA, 19 bp, Homo sapiens
  source 1..19: mol_type = genomic DNA
gactcctggctggctcgcc

SEQ ID NO: 15415 - DNA, 20 bp, Homo sapiens
  source 1..20: mol_type = genomic DNA
gactcctggctggctcgcca

SEQ ID NO: 15416 - DNA, 16 bp, Homo sapiens
  source 1..16: mol_type = genomic DNA
gactctgaatccagcg

SEQ ID NO: 15417 - DNA, 17 bp, Homo sapiens
  source 1..17: mol_type = genomic DNA
gactctgaatccagcga

SEQ ID NO: 15418 - DNA, 20 bp, Homo sapiens
  source 1..20: mol_type = genomic DNA
gactctgaatccagcgatcc

SEQ ID NO: 15419 - DNA, 22 bp, Homo sapiens
  source 1..22: mol_type = genomic DNA
gactctgaatccagcgatccga

SEQ ID NO: 15420 - DNA, 23 bp, Homo sapiens
  source 1..23: mol_type = genomic DNA
gactctgaatccagcgatccgag

SEQ ID NO: 15421 - DNA, 24 bp, Homo sapiens
  source 1..24: mol_type = genomic DNA
gactctgaatccagcgatccgagt

SEQ ID NO: 15422 - DNA, 26 bp, Homo sapiens
  source 1..26: mol_type = genomic DNA
gactctgaatccagcgatccgagttc

SEQ ID NO: 15423 - DNA, 40 bp, Homo sapiens
  source 1..40: mol_type = genomic DNA
gactctgaatccagcgatccgagttcaaatctcggtggaa

SEQ ID NO: 15424 - DNA, 41 bp, Homo sapiens
  source 1..41: mol_type = genomic DNA
gactctgaatccagcgatccgagttcaaatctcggtggaac

SEQ ID NO: 15425 - DNA, 43 bp, Homo sapiens
  source 1..43: mol_type = genomic DNA
gactctgaatccagcgatccgagttcaaatctcggtggaacct

SEQ ID NO: 15426 - DNA, 44 bp, Homo sapiens
  source 1..44: mol_type = genomic DNA
gactctgaatccagcgatccgagttcaaatctcggtggaacctc

SEQ ID NO: 15427 - DNA, 45 bp, Homo sapiens
  source 1..45: mol_type = genomic DNA
gactctgaatccagcgatccgagttcaaatctcggtggaacctcc

SEQ ID NO: 15428 - DNA, 46 bp, Homo sapiens
  source 1..46: mol_type = genomic DNA
gactctgaatccagcgatccgagttcaaatctcggtggaacctcca

SEQ ID NO: 15429 - DNA, 43 bp, Homo sapiens
  source 1..43: mol_type = genomic DNA
gactctgaatccagcgatccgagttcgagtctcggtggaacct

SEQ ID NO: 15430 - DNA, 44 bp, Homo sapiens
  source 1..44: mol_type = genomic DNA
gactctgaatccagcgatccgagttcgagtctcggtggaacctc

SEQ ID NO: 15431 - DNA, 45 bp, Homo sapiens
  source 1..45: mol_type = genomic DNA
gactctgaatccagcgatccgagttcgagtctcggtggaacctcc

SEQ ID NO: 15432 - DNA, 45 bp, Homo sapiens
  source 1..45: mol_type = genomic DNA
gactcttaatcccagggtcgtgggttcgagccccacgttgggcgc

SEQ ID NO: 15433 - DNA, 21 bp, Homo sapiens
  source 1..21: mol_type = genomic DNA
gactgcagatcaagaggtccc

SEQ ID NO: 15434 - DNA, 19 bp, Homo sapiens
  source 1..19: mol_type = genomic DNA
gactgctaatccattgtgc

SEQ ID NO: 15435 - DNA, 43 bp, Homo sapiens
  source 1..43: mol_type = genomic DNA
gactgtaaatctaaagacaggggttaggcctctttttaccacc

SEQ ID NO: 15436 - DNA, 44 bp, Homo sapiens
  source 1..44: mol_type = genomic DNA
gactgtaaatctaaagacaggggttaggcctctttttaccacca

SEQ ID NO: 15437 - DNA, 18 bp, Homo sapiens
  source 1..18: mol_type = genomic DNA
gacttaagatccaatgga

SEQ ID NO: 15438 - DNA, 19 bp, Homo sapiens
  source 1..19: mol_type = genomic DNA
gacttaagatccaatggac

SEQ ID NO: 15439 - DNA, 20 bp, Homo sapiens
  source 1..20: mol_type = genomic DNA
gacttaagatccaatggaca

SEQ ID NO: 15440 - DNA, 21 bp, Homo sapiens
  source 1..21: mol_type = genomic DNA
gacttaagatccaatggacat

SEQ ID NO: 15441 - DNA, 22 bp, Homo sapiens
  source 1..22: mol_type = genomic DNA
gacttaagatccaatggacata

SEQ ID NO: 15442 - DNA, 23 bp, Homo sapiens
  source 1..23: mol_type = genomic DNA
gacttaagatccaatggacatat

SEQ ID NO: 15443 - DNA, 25 bp, Homo sapiens
  source 1..25: mol_type = genomic DNA
gacttaagatccaatggacatatgt

SEQ ID NO: 15444 - DNA, 16 bp, Homo sapiens
  source 1..16: mol_type = genomic DNA
gacttcggatcagaag

SEQ ID NO: 15445 - DNA, 17 bp, Homo sapiens
  source 1..17: mol_type = genomic DNA
gacttcggatcagaaga

SEQ ID NO: 15446 - DNA, 20 bp, Homo sapiens
  source 1..20: mol_type = genomic DNA
gacttcggatcagaagattg

SEQ ID NO: 15447 - DNA, 24 bp, Homo sapiens
  source 1..24: mol_type = genomic DNA
gacttcggatcagaagattgaggg

SEQ ID NO: 15448 - DNA, 26 bp, Homo sapiens
  source 1..26: mol_type = genomic DNA
gacttcggatcagaagattgagggtt

SEQ ID NO: 15449 - DNA, 27 bp, Homo sapiens
  source 1..27: mol_type = genomic DNA
gacttcggatcagaagattgagggttc

SEQ ID NO: 15450 - DNA, 46 bp, Homo sapiens
  source 1..46: mol_type = genomic DNA
gacttcggatcagaagattgagggttcgaatcccttcgtggttgcc

SEQ ID NO: 15451 - DNA, 46 bp, Homo sapiens
  source 1..46: mol_type = genomic DNA
gacttcggatcagaagattgagggttcgagtcccttcgtggtcgcc

SEQ ID NO: 15452 - DNA, 21 bp, Homo sapiens
  source 1..21: mol_type = genomic DNA
gacttcggatcagaagattgc

SEQ ID NO: 15453 - DNA, 23 bp, Homo sapiens
  source 1..23: mol_type = genomic DNA
gacttcggatcagaagattgcag

SEQ ID NO: 15454 - DNA, 27 bp, Homo sapiens
  source 1..27: mol_type = genomic DNA
gacttcggatcagaagattgcaggttc

SEQ ID NO: 15455 - DNA, 43 bp, Homo sapiens
  source 1..43: mol_type = genomic DNA
gacttcggatcagaagattgcaggttcgagtcctgccgcggtc

SEQ ID NO: 15456 - DNA, 44 bp, Homo sapiens
  source 1..44: mol_type = genomic DNA
gacttcggatcagaagattgcaggttcgagtcctgccgcggtcg

SEQ ID NO: 15457 - DNA, 45 bp, Homo sapiens
  source 1..45: mol_type = genomic DNA
gacttcggatcagaagattgcaggttcgagtcctgccgcggtcgc

SEQ ID NO: 15458 - DNA, 46 bp, Homo sapiens
  source 1..46: mol_type = genomic DNA
gacttcggatcagaagattgcaggttcgagtcctgccgcggtcgcc

SEQ ID NO: 15459 - DNA, 18 bp, Homo sapiens
  source 1..18: mol_type = genomic DNA
gactttgaatccagcgat

SEQ ID NO: 15460 - DNA, 19 bp, Homo sapiens
  source 1..19: mol_type = genomic DNA
gactttgaatccagcgatc

SEQ ID NO: 15461 - DNA, 21 bp, Homo sapiens
  source 1..21: mol_type = genomic DNA
gactttgaatccagcgatccg

SEQ ID NO: 15462 - DNA, 22 bp, Homo sapiens
  source 1..22: mol_type = genomic DNA
gactttgaatccagcgatccga

SEQ ID NO: 15463 - DNA, 23 bp, Homo sapiens
  source 1..23: mol_type = genomic DNA
gactttgaatccagcgatccgag

SEQ ID NO: 15464 - DNA, 43 bp, Homo sapiens
  source 1..43: mol_type = genomic DNA
gactttgaatccagcgatccgagttcaaatctcggtgggacct

SEQ ID NO: 15465 - DNA, 44 bp, Homo sapiens
  source 1..44: mol_type = genomic DNA
gactttgaatccagcgatccgagttcaaatctcggtgggacctc

SEQ ID NO: 15466 - DNA, 45 bp, Homo sapiens
  source 1..45: mol_type = genomic DNA
gactttgaatccagcgatccgagttcaaatctcggtgggacctcc

SEQ ID NO: 15467 - DNA, 19 bp, Homo sapiens
  source 1..19: mol_type = genomic DNA
gacttttaaaggataacag

SEQ ID NO: 15468 - DNA, 22 bp, Homo sapiens
  source 1..22: mol_type = genomic DNA
gacttttaatctgagggtccag

SEQ ID NO: 15469 - DNA, 16 bp, Homo sapiens
  source 1..16: mol_type = genomic DNA
gactttttctctgacc

SEQ ID NO: 15470 - DNA, 17 bp, Homo sapiens
  source 1..17: mol_type = genomic DNA
gactttttctctgacca

SEQ ID NO: 15471 - DNA, 16 bp, Homo sapiens
  source 1..16: mol_type = genomic DNA
gagaaagctcacaaga

SEQ ID NO: 15472 - DNA, 17 bp, Homo sapiens
  source 1..17: mol_type = genomic DNA
gagaaagctcacaagaa

SEQ ID NO: 15473 - DNA, 18 bp, Homo sapiens
  source 1..18: mol_type = genomic DNA
gagaaagctcacaagaac

SEQ ID NO: 15474 - DNA, 19 bp, Homo sapiens
  source 1..19: mol_type = genomic DNA
gagaaagctcacaagaact

SEQ ID NO: 15475 - DNA, 20 bp, Homo sapiens
  source 1..20: mol_type = genomic DNA
gagaaagctcacaagaactg

SEQ ID NO: 15476 - DNA, 21 bp, Homo sapiens
  source 1..21: mol_type = genomic DNA
gagaaagctcacaagaactgc

SEQ ID NO: 15477 - DNA, 22 bp, Homo sapiens
  source 1..22: mol_type = genomic DNA
gagaaagctcacaagaactgct

SEQ ID NO: 15478 - DNA, 23 bp, Homo sapiens
  source 1..23: mol_type = genomic DNA
gagaaagctcacaagaactgcta

SEQ ID NO: 15479 - DNA, 24 bp, Homo sapiens
  source 1..24: mol_type = genomic DNA
gagaaagctcacaagaactgctaa

SEQ ID NO: 15480 - DNA, 25 bp, Homo sapiens
  source 1..25: mol_type = genomic DNA
gagaaagctcacaagaactgctaac

SEQ ID NO: 15481 - DNA, 26 bp, Homo sapiens
  source 1..26: mol_type = genomic DNA
gagaaagctcacaagaactgctaact

SEQ ID NO: 15482 - DNA, 27 bp, Homo sapiens
  source 1..27: mol_type = genomic DNA
gagaaagctcacaagaactgctaactc

SEQ ID NO: 15483 - DNA, 28 bp, Homo sapiens
  source 1..28: mol_type = genomic DNA
gagaaagctcacaagaactgctaactca

SEQ ID NO: 15484 - DNA, 29 bp, Homo sapiens
  source 1..29: mol_type = genomic DNA
gagaaagctcacaagaactgctaactcat

SEQ ID NO: 15485 - DNA, 30 bp, Homo sapiens
  source 1..30: mol_type = genomic DNA
gagaaagctcacaagaactgctaactcatg

SEQ ID NO: 15486 - DNA, 31 bp, Homo sapiens
  source 1..31: mol_type = genomic DNA
gagaaagctcacaagaactgctaactcatgc

SEQ ID NO: 15487 - DNA, 32 bp, Homo sapiens
  source 1..32: mol_type = genomic DNA
gagaaagctcacaagaactgctaactcatgcc

SEQ ID NO: 15488 - DNA, 33 bp, Homo sapiens
  source 1..33: mol_type = genomic DNA
gagaaagctcacaagaactgctaactcatgccc

SEQ ID NO: 15489 - DNA, 34 bp, Homo sapiens
  source 1..34: mol_type = genomic DNA
gagaaagctcacaagaactgctaactcatgcccc

SEQ ID NO: 15490 - DNA, 35 bp, Homo sapiens
  source 1..35: mol_type = genomic DNA
gagaaagctcacaagaactgctaactcatgccccc

SEQ ID NO: 15491 - DNA, 36 bp, Homo sapiens
  source 1..36: mol_type = genomic DNA
gagaaagctcacaagaactgctaactcatgccccca

SEQ ID NO: 15492 - DNA, 37 bp, Homo sapiens
  source 1..37: mol_type = genomic DNA
gagaaagctcacaagaactgctaactcatgcccccat

SEQ ID NO: 15493 - DNA, 38 bp, Homo sapiens
  source 1..38: mol_type = genomic DNA
gagaaagctcacaagaactgctaactcatgcccccatg

SEQ ID NO: 15494 - DNA, 39 bp, Homo sapiens
  source 1..39: mol_type = genomic DNA
gagaaagctcacaagaactgctaactcatgcccccatgt

SEQ ID NO: 15495 - DNA, 40 bp, Homo sapiens
  source 1..40: mol_type = genomic DNA
gagaaagctcacaagaactgctaactcatgcccccatgtc

SEQ ID NO: 15496 - DNA, 41 bp, Homo sapiens
  source 1..41: mol_type = genomic DNA
gagaaagctcacaagaactgctaactcatgcccccatgtct

SEQ ID NO: 15497 - DNA, 42 bp, Homo sapiens
  source 1..42: mol_type = genomic DNA
gagaaagctcacaagaactgctaactcatgcccccatgtcta

SEQ ID NO: 15498 - DNA, 43 bp, Homo sapiens
  source 1..43: mol_type = genomic DNA
gagaaagctcacaagaactgctaactcatgcccccatgtctaa

SEQ ID NO: 15499 - DNA, 44 bp, Homo sapiens
  source 1..44: mol_type = genomic DNA
gagaaagctcacaagaactgctaactcatgcccccatgtctaac

SEQ ID NO: 15500 - DNA, 45 bp, Homo sapiens
  source 1..45: mol_type = genomic DNA
gagaaagctcacaagaactgctaactcatgcccccatgtctaaca

SEQ ID NO: 15501 - DNA, 46 bp, Homo sapiens
  source 1..46: mol_type = genomic DNA
gagaaagctcacaagaactgctaactcatgcccccatgtctaacaa

SEQ ID NO: 15502 - DNA, 47 bp, Homo sapiens
  source 1..47: mol_type = genomic DNA
gagaaagctcacaagaactgctaactcatgcccccatgtctaacaac

SEQ ID NO: 15503 - DNA, 48 bp, Homo sapiens
  source 1..48: mol_type = genomic DNA
gagaaagctcacaagaactgctaactcatgcccccatgtctaacaaca

SEQ ID NO: 15504 - DNA, 17 bp, Homo sapiens
  source 1..17: mol_type = genomic DNA
gagaaccaacacctctt

SEQ ID NO: 15505 - DNA, 18 bp, Homo sapiens
  source 1..18: mol_type = genomic DNA
gagaaccaacacctcttt

SEQ ID NO: 15506 - DNA, 19 bp, Homo sapiens
  source 1..19: mol_type = genomic DNA
gagaaccaacacctcttta

SEQ ID NO: 15507 - DNA, 20 bp, Homo sapiens
  source 1..20: mol_type = genomic DNA
gagaaccaacacctctttac

SEQ ID NO: 15508 - DNA, 21 bp, Homo sapiens
  source 1..21: mol_type = genomic DNA
gagaaccaacacctctttaca

SEQ ID NO: 15509 - DNA, 22 bp, Homo sapiens
  source 1..22: mol_type = genomic DNA
gagaaccaacacctctttacag

SEQ ID NO: 15510 - DNA, 24 bp, Homo sapiens
  source 1..24: mol_type = genomic DNA
gagaaccaacacctctttacagtg

SEQ ID NO: 15511 - DNA, 25 bp, Homo sapiens
  source 1..25: mol_type = genomic DNA
gagaaccaacacctctttacagtga

SEQ ID NO: 15512 - DNA, 26 bp, Homo sapiens
  source 1..26: mol_type = genomic DNA
gagaaccaacacctctttacagtgac

SEQ ID NO: 15513 - DNA, 27 bp, Homo sapiens
  source 1..27: mol_type = genomic DNA
gagaaccaacacctctttacagtgacc

SEQ ID NO: 15514 - DNA, 28 bp, Homo sapiens
  source 1..28: mol_type = genomic DNA
gagaaccaacacctctttacagtgacca

SEQ ID NO: 15515 - DNA, 18 bp, Homo sapiens
  source 1..18: mol_type = genomic DNA
gagaatagtttaaattag

SEQ ID NO: 15516 - DNA, 20 bp, Homo sapiens
  source 1..20: mol_type = genomic DNA
gagaatagtttaaattagaa

SEQ ID NO: 15517 - DNA, 21 bp, Homo sapiens
  source 1..21: mol_type = genomic DNA
gagaatagtttaaattagaat

SEQ ID NO: 15518 - DNA, 22 bp, Homo sapiens
  source 1..22: mol_type = genomic DNA
gagaatagtttaaattagaatc

SEQ ID NO: 15519 - DNA, 23 bp, Homo sapiens
  source 1..23: mol_type = genomic DNA
gagaatagtttaaattagaatct

SEQ ID NO: 15520 - DNA, 24 bp, Homo sapiens
  source 1..24: mol_type = genomic DNA
gagaatagtttaaattagaatctt

SEQ ID NO: 15521 - DNA, 25 bp, Homo sapiens
  source 1..25: mol_type = genomic DNA
gagaatagtttaaattagaatctta

SEQ ID NO: 15522 - DNA, 26 bp, Homo sapiens
  source 1..26: mol_type = genomic DNA
gagaatagtttaaattagaatcttag

SEQ ID NO: 15523 - DNA, 27 bp, Homo sapiens
  source 1..27: mol_type = genomic DNA
gagaatagtttaaattagaatcttagc

SEQ ID NO: 15524 - DNA, 28 bp, Homo sapiens
  source 1..28: mol_type = genomic DNA
gagaatagtttaaattagaatcttagct

SEQ ID NO: 15525 - DNA, 29 bp, Homo sapiens
  source 1..29: mol_type = genomic DNA
gagaatagtttaaattagaatcttagctt

SEQ ID NO: 15526 - DNA, 30 bp, Homo sapiens
  source 1..30: mol_type = genomic DNA
gagaatagtttaaattagaatcttagcttt

SEQ ID NO: 15527 - DNA, 31 bp, Homo sapiens
  source 1..31: mol_type = genomic DNA
gagaatagtttaaattagaatcttagctttg

SEQ ID NO: 15528 - DNA, 32 bp, Homo sapiens
  source 1..32: mol_type = genomic DNA
gagaatagtttaaattagaatcttagctttgg

SEQ ID NO: 15529 - DNA, 35 bp, Homo sapiens
  source 1..35: mol_type = genomic DNA
gagaatagtttaaattagaatcttagctttgggtg

SEQ ID NO: 15530 - DNA, 24 bp, Homo sapiens
  source 1..24: mol_type = genomic DNA
gagaccggggttcaattccccgac

SEQ ID NO: 15531 - DNA, 30 bp, Homo sapiens
  source 1..30: mol_type = genomic DNA
gagaccggggttcaattccccgacggggag

SEQ ID NO: 15532 - DNA, 31 bp, Homo sapiens
  source 1..31: mol_type = genomic DNA
gagaccggggttcaattccccgacggggagc

SEQ ID NO: 15533 - DNA, 32 bp, Homo sapiens
  source 1..32: mol_type = genomic DNA
gagaccggggttcaattccccgacggggagcc

SEQ ID NO: 15534 - DNA, 33 bp, Homo sapiens
  source 1..33: mol_type = genomic DNA
gagaccggggttcaattccccgacggggagcca

SEQ ID NO: 15535 - DNA, 23 bp, Homo sapiens
  source 1..23: mol_type = genomic DNA
gagaccggggttcgattccccga

SEQ ID NO: 15536 - DNA, 24 bp, Homo sapiens
  source 1..24: mol_type = genomic DNA
gagaccggggttcgattccccgac

SEQ ID NO: 15537 - DNA, 25 bp, Homo sapiens
  source 1..25: mol_type = genomic DNA
gagaccggggttcgattccccgacg

SEQ ID NO: 15538 - DNA, 26 bp, Homo sapiens
  source 1..26: mol_type = genomic DNA
gagaccggggttcgattccccgacgg

SEQ ID NO: 15539 - DNA, 27 bp, Homo sapiens
  source 1..27: mol_type = genomic DNA
gagaccggggttcgattccccgacggg

SEQ ID NO: 15540 - DNA, 28 bp, Homo sapiens
  source 1..28: mol_type = genomic DNA
gagaccggggttcgattccccgacgggg

SEQ ID NO: 15541 - DNA, 29 bp, Homo sapiens
  source 1..29: mol_type = genomic DNA
gagaccggggttcgattccccgacgggga

SEQ ID NO: 15542 - DNA, 30 bp, Homo sapiens
  source 1..30: mol_type = genomic DNA
gagaccggggttcgattccccgacggggag

SEQ ID NO: 15543 - DNA, 31 bp, Homo sapiens
  source 1..31: mol_type = genomic DNA
gagaccggggttcgattccccgacggggagc

SEQ ID NO: 15544 - DNA, 32 bp, Homo sapiens
  source 1..32: mol_type = genomic DNA
gagaccggggttcgattccccgacggggagcc

SEQ ID NO: 15545 - DNA, 33 bp, Homo sapiens
  source 1..33: mol_type = genomic DNA
gagaccggggttcgattccccgacggggagcca

SEQ ID NO: 15546 - DNA, 30 bp, Homo sapiens
  source 1..30: mol_type = genomic DNA
gagactcttaatctcagggtcgtgggttcg

SEQ ID NO: 15547 - DNA, 22 bp, Homo sapiens
  source 1..22: mol_type = genomic DNA
gagagcgttagactgaagatct

SEQ ID NO: 15548 - DNA, 16 bp, Homo sapiens
  source 1..16: mol_type = genomic DNA
gagaggtagcgggatc

SEQ ID NO: 15549 - DNA, 17 bp, Homo sapiens
  source 1..17: mol_type = genomic DNA
gagaggtagcgggatcg

SEQ ID NO: 15550 - DNA, 26 bp, Homo sapiens
  source 1..26: mol_type = genomic DNA
gagaggtagcgggatcgatgcccgca

SEQ ID NO: 15551 - DNA, 16 bp, Homo sapiens
  source 1..16: mol_type = genomic DNA
gagaggtcccgggttc

SEQ ID NO: 15552 - DNA, 17 bp, Homo sapiens
  source 1..17: mol_type = genomic DNA
gagaggtcccgggttca

SEQ ID NO: 15553 - DNA, 27 bp, Homo sapiens
  source 1..27: mol_type = genomic DNA
gagaggtcccgggttcaaatcccggac

SEQ ID NO: 15554 - DNA, 31 bp, Homo sapiens
  source 1..31: mol_type = genomic DNA
gagaggtcccgggttcaaatcccggacgagc

SEQ ID NO: 15555 - DNA, 32 bp, Homo sapiens
  source 1..32: mol_type = genomic DNA
gagaggtcccgggttcaaatcccggacgagcc

SEQ ID NO: 15556 - DNA, 33 bp, Homo sapiens
  source 1..33: mol_type = genomic DNA
gagaggtcccgggttcaaatcccggacgagccc

SEQ ID NO: 15557 - DNA, 34 bp, Homo sapiens
  source 1..34: mol_type = genomic DNA
gagaggtcccgggttcaaatcccggacgagcccc

SEQ ID NO: 15558 - DNA, 35 bp, Homo sapiens
  source 1..35: mol_type = genomic DNA
gagaggtcccgggttcaaatcccggacgagccccc

SEQ ID NO: 15559 - DNA, 30 bp, Homo sapiens
  source 1..30: mol_type = genomic DNA
gagatcctgggttcgaatcccagcggggcc

SEQ ID NO: 15560 - DNA, 31 bp, Homo sapiens
  source 1..31: mol_type = genomic DNA
gagatcctgggttcgaatcccagcggggcct

SEQ ID NO: 15561 - DNA, 30 bp, Homo sapiens
  source 1..30: mol_type = genomic DNA
gagatcctgggttcgaatcccagcggtgcc

SEQ ID NO: 15562 - DNA, 33 bp, Homo sapiens
  source 1..33: mol_type = genomic DNA
gagatcctgggttcgaatcccagcggtgcctcc

SEQ ID NO: 15563 - DNA, 19 bp, Homo sapiens
  source 1..19: mol_type = genomic DNA
gagatgaaaacctttttcc

SEQ ID NO: 15564 - DNA, 20 bp, Homo sapiens
  source 1..20: mol_type = genomic DNA
gagatgaaaacctttttcca

SEQ ID NO: 15565 - DNA, 22 bp, Homo sapiens
  source 1..22: mol_type = genomic DNA
gagatgaaaacctttttccaag

SEQ ID NO: 15566 - DNA, 23 bp, Homo sapiens
  source 1..23: mol_type = genomic DNA
gagatgaaaacctttttccaagg

SEQ ID NO: 15567 - DNA, 25 bp, Homo sapiens
  source 1..25: mol_type = genomic DNA
gagatgaaaacctttttccaaggac

SEQ ID NO: 15568 - DNA, 26 bp, Homo sapiens
  source 1..26: mol_type = genomic DNA
gagatgaaaacctttttccaaggaca

SEQ ID NO: 15569 - DNA, 27 bp, Homo sapiens
  source 1..27: mol_type = genomic DNA
gagatgaaaacctttttccaaggacac

SEQ ID NO: 15570 - DNA, 28 bp, Homo sapiens
  source 1..28: mol_type = genomic DNA
gagatgaaaacctttttccaaggacacc

SEQ ID NO: 15571 - DNA, 29 bp, Homo sapiens
  source 1..29: mol_type = genomic DNA
gagatgaaaacctttttccaaggacacca

SEQ ID NO: 15572 - DNA, 16 bp, Homo sapiens
  source 1..16: mol_type = genomic DNA
gagatttcaacttaac

SEQ ID NO: 15573 - DNA, 17 bp, Homo sapiens
  source 1..17: mol_type = genomic DNA
gagatttcaacttaact

SEQ ID NO: 15574 - DNA, 21 bp, Homo sapiens
  source 1..21: mol_type = genomic DNA
gagatttcaacttaacttgac

SEQ ID NO: 15575 - DNA, 22 bp, Homo sapiens
  source 1..22: mol_type = genomic DNA
gagatttcaacttaacttgacc

SEQ ID NO: 15576 - DNA, 23 bp, Homo sapiens
  source 1..23: mol_type = genomic DNA
gagatttcaacttaacttgaccg

SEQ ID NO: 15577 - DNA, 24 bp, Homo sapiens
  source 1..24: mol_type = genomic DNA
gagatttcaacttaacttgaccgc

SEQ ID NO: 15578 - DNA, 25 bp, Homo sapiens
  source 1..25: mol_type = genomic DNA
gagatttcaacttaacttgaccgct

SEQ ID NO: 15579 - DNA, 26 bp, Homo sapiens
  source 1..26: mol_type = genomic DNA
gagatttcaacttaacttgaccgctc

SEQ ID NO: 15580 - DNA, 27 bp, Homo sapiens
  source 1..27: mol_type = genomic DNA
gagatttcaacttaacttgaccgctct

SEQ ID NO: 15581 - DNA, 28 bp, Homo sapiens
  source 1..28: mol_type = genomic DNA
gagatttcaacttaacttgaccgctctg

SEQ ID NO: 15582 - DNA, 29 bp, Homo sapiens
  source 1..29: mol_type = genomic DNA
gagatttcaacttaacttgaccgctctga

SEQ ID NO: 15583 - DNA, 30 bp, Homo sapiens
  source 1..30: mol_type = genomic DNA
gagatttcaacttaacttgaccgctctgac

SEQ ID NO: 15584 - DNA, 31 bp, Homo sapiens
  source 1..31: mol_type = genomic DNA
gagatttcaacttaacttgaccgctctgacc

SEQ ID NO: 15585 - DNA, 32 bp, Homo sapiens
  source 1..32: mol_type = genomic DNA
gagatttcaacttaacttgaccgctctgacca

SEQ ID NO: 15586 - DNA, 22 bp, Homo sapiens
  source 1..22: mol_type = genomic DNA
gagcactctggactctgaatcc

SEQ ID NO: 15587 - DNA, 24 bp, Homo sapiens
  source 1..24: mol_type = genomic DNA
gagcactctggactctgaatccag

SEQ ID NO: 15588 - DNA, 25 bp, Homo sapiens
  source 1..25: mol_type = genomic DNA
gagcactctggactctgaatccagc

SEQ ID NO: 15589 - DNA, 26 bp, Homo sapiens
  source 1..26: mol_type = genomic DNA
gagcactctggactctgaatccagcg

SEQ ID NO: 15590 - DNA, 33 bp, Homo sapiens
  source 1..33: mol_type = genomic DNA
gagcactctggactctgaatccagcgatccgag

SEQ ID NO: 15591 - DNA, 34 bp, Homo sapiens
  source 1..34: mol_type = genomic DNA
gagcactctggactctgaatccagcgatccgagt

SEQ ID NO: 15592 - DNA, 35 bp, Homo sapiens
  source 1..35: mol_type = genomic DNA
gagcactctggactctgaatccagcgatccgagtt

SEQ ID NO: 15593 - DNA, 38 bp, Homo sapiens
  source 1..38: mol_type = genomic DNA
gagcactctggactctgaatccagcgatccgagttcga

SEQ ID NO: 15594 - DNA, 39 bp, Homo sapiens
  source 1..39: mol_type = genomic DNA
gagcactctggactctgaatccagcgatccgagttcgag

SEQ ID NO: 15595 - DNA, 32 bp, Homo sapiens
  source 1..32: mol_type = genomic DNA
gagcatagctgccttccaagcagttgacccgg

SEQ ID NO: 15596 - DNA, 34 bp, Homo sapiens
  source 1..34: mol_type = genomic DNA
gagcatagctgccttccaagcagttgacccgggt

SEQ ID NO: 15597 - DNA, 19 bp, Homo sapiens
  source 1..19: mol_type = genomic DNA
gagcatgagactcttaatc

SEQ ID NO: 15598 - DNA, 20 bp, Homo sapiens
  source 1..20: mol_type = genomic DNA
gagcatgagactcttaatct

SEQ ID NO: 15599 - DNA, 21 bp, Homo sapiens
  source 1..21: mol_type = genomic DNA
gagcatgagactcttaatctc

SEQ ID NO: 15600 - DNA, 31 bp, Homo sapiens
  source 1..31: mol_type = genomic DNA
gagcatgagactcttaatctcagggtcgtgg

SEQ ID NO: 15601 - DNA, 34 bp, Homo sapiens
  source 1..34: mol_type = genomic DNA
gagcatgagactcttaatctcagggtcgtgggtt

SEQ ID NO: 15602 - DNA, 16 bp, Homo sapiens
  source 1..16: mol_type = genomic DNA
gagcatgggactctta

SEQ ID NO: 15603 - DNA, 20 bp, Homo sapiens
  source 1..20: mol_type = genomic DNA
gagcatgggactcttaatcc

SEQ ID NO: 15604 - DNA, 21 bp, Homo sapiens
  source 1..21: mol_type = genomic DNA
gagcatgggactcttaatccc

SEQ ID NO: 15605 - DNA, 29 bp, Homo sapiens
  source 1..29: mol_type = genomic DNA
gagcatgggactcttaatcccagggtcgt

SEQ ID NO: 15606 - DNA, 30 bp, Homo sapiens
  source 1..30: mol_type = genomic DNA
gagcatgggactcttaatcccagggtcgtg

SEQ ID NO: 15607 - DNA, 31 bp, Homo sapiens
  source 1..31: mol_type = genomic DNA
gagcatgggactcttaatcccagggtcgtgg

SEQ ID NO: 15608 - DNA, 34 bp, Homo sapiens
  source 1..34: mol_type = genomic DNA
gagcatgggactcttaatcccagggtcgtgggtt

SEQ ID NO: 15609 - DNA, 35 bp, Homo sapiens
  source 1..35: mol_type = genomic DNA
gagcatgggactcttaatcccagggtcgtgggttc

SEQ ID NO: 15610 - DNA, 36 bp, Homo sapiens
  source 1..36: mol_type = genomic DNA
gagcatgggactcttaatcccagggtcgtgggttcg

SEQ ID NO: 15611 - DNA, 21 bp, Homo sapiens
  source 1..21: mol_type = genomic DNA
gagcatgggactcttaatctc

SEQ ID NO: 15612 - DNA, 19 bp, Homo sapiens
  source 1..19: mol_type = genomic DNA
gagccccacgttgggcgcc

SEQ ID NO: 15613 - DNA, 19 bp, Homo sapiens
  source 1..19: mol_type = genomic DNA
gagccccagtggaaccacc

SEQ ID NO: 15614 - DNA, 17 bp, Homo sapiens
  source 1..17: mol_type = genomic DNA
gagcccggtaatcgcat

SEQ ID NO: 15615 - DNA, 18 bp, Homo sapiens
  source 1..18: mol_type = genomic DNA
gagcccggtaatcgcata

SEQ ID NO: 15616 - DNA, 19 bp, Homo sapiens
  source 1..19: mol_type = genomic DNA
gagcccggtaatcgcataa

SEQ ID NO: 15617 - DNA, 20 bp, Homo sapiens
  source 1..20: mol_type = genomic DNA
gagcccggtaatcgcataaa

SEQ ID NO: 15618 - DNA, 22 bp, Homo sapiens
  source 1..22: mol_type = genomic DNA
gagcccggtaatcgcataaaac

SEQ ID NO: 15619 - DNA, 24 bp, Homo sapiens
  source 1..24: mol_type = genomic DNA
gagcccggtaatcgcataaaactt

SEQ ID NO: 15620 - DNA, 25 bp, Homo sapiens
  source 1..25: mol_type = genomic DNA
gagcccggtaatcgcataaaactta

SEQ ID NO: 15621 - DNA, 26 bp, Homo sapiens
  source 1..26: mol_type = genomic DNA
gagcccggtaatcgcataaaacttaa

SEQ ID NO: 15622 - DNA, 27 bp, Homo sapiens
  source 1..27: mol_type = genomic DNA
gagcccggtaatcgcataaaacttaaa

SEQ ID NO: 15623 - DNA, 28 bp, Homo sapiens
  source 1..28: mol_type = genomic DNA
gagcccggtaatcgcataaaacttaaaa

SEQ ID NO: 15624 - DNA, 29 bp, Homo sapiens
  source 1..29: mol_type = genomic DNA
gagcccggtaatcgcataaaacttaaaac

SEQ ID NO: 15625 - DNA, 30 bp, Homo sapiens
  source 1..30: mol_type = genomic DNA
gagcccggtaatcgcataaaacttaaaact

SEQ ID NO: 15626 - DNA, 31 bp, Homo sapiens
  source 1..31: mol_type = genomic DNA
gagcccggtaatcgcataaaacttaaaactt

SEQ ID NO: 15627 - DNA, 32 bp, Homo sapiens
  source 1..32: mol_type = genomic DNA
gagcccggtaatcgcataaaacttaaaacttt

SEQ ID NO: 15628 - DNA, 33 bp, Homo sapiens
  source 1..33: mol_type = genomic DNA
gagcccggtaatcgcataaaacttaaaacttta

SEQ ID NO: 15629 - DNA, 34 bp, Homo sapiens
  source 1..34: mol_type = genomic DNA
gagcccggtaatcgcataaaacttaaaactttac

SEQ ID NO: 15630 - DNA, 35 bp, Homo sapiens
  source 1..35: mol_type = genomic DNA
gagcccggtaatcgcataaaacttaaaactttaca

SEQ ID NO: 15631 - DNA, 36 bp, Homo sapiens
  source 1..36: mol_type = genomic DNA
gagcccggtaatcgcataaaacttaaaactttacag

SEQ ID NO: 15632 - DNA, 41 bp, Homo sapiens
  source 1..41: mol_type = genomic DNA
gagcccggtaatcgcataaaacttaaaactttacagtcaga

SEQ ID NO: 15633 - DNA, 42 bp, Homo sapiens
  source 1..42: mol_type = genomic DNA
gagcccggtaatcgcataaaacttaaaactttacagtcagag

SEQ ID NO: 15634 - DNA, 19 bp, Homo sapiens
  source 1..19: mol_type = genomic DNA
gagcctcacctggagcacc

SEQ ID NO: 15635 - DNA, 44 bp, Homo sapiens
  source 1..44: mol_type = genomic DNA
gagccttcaaagccctcagtaagttgcaatacttaatttctgcc

SEQ ID NO: 15636 - DNA, 45 bp, Homo sapiens
  source 1..45: mol_type = genomic DNA
gagccttcaaagccctcagtaagttgcaatacttaatttctgcca

SEQ ID NO: 15637 - DNA, 16 bp, Homo sapiens
  source 1..16: mol_type = genomic DNA
gagcgcgctggacttc

SEQ ID NO: 15638 - DNA, 18 bp, Homo sapiens
  source 1..18: mol_type = genomic DNA
gagcggtctaaggcgctg

SEQ ID NO: 15639 - DNA, 22 bp, Homo sapiens
  source 1..22: mol_type = genomic DNA
gagcggtctaaggcgctgcgtt

SEQ ID NO: 15640 - DNA, 23 bp, Homo sapiens
  source 1..23: mol_type = genomic DNA
gagcggtctaaggcgctgcgttc

SEQ ID NO: 15641 - DNA, 25 bp, Homo sapiens
  source 1..25: mol_type = genomic DNA
gagcggtctaaggcgctgcgttcag

SEQ ID NO: 15642 - DNA, 20 bp, Homo sapiens
  source 1..20: mol_type = genomic DNA
gagcggtctaaggcgctgga

SEQ ID NO: 15643 - DNA, 38 bp, Homo sapiens
  source 1..38: mol_type = genomic DNA
gagctggggattgtgggttcgagtcccatctgggtcgc

SEQ ID NO: 15644 - DNA, 39 bp, Homo sapiens
  source 1..39: mol_type = genomic DNA
gagctggggattgtgggttcgagtcccatctgggtcgcc

SEQ ID NO: 15645 - DNA, 40 bp, Homo sapiens
  source 1..40: mol_type = genomic DNA
gagctggggattgtgggttcgagtcccatctgggtcgcca

SEQ ID NO: 15646 - DNA, 16 bp, Homo sapiens
  source 1..16: mol_type = genomic DNA
gagcttaaaccccctt

SEQ ID NO: 15647 - DNA, 17 bp, Homo sapiens
  source 1..17: mol_type = genomic DNA
gagcttaaaccccctta

SEQ ID NO: 15648 - DNA, 18 bp, Homo sapiens
  source 1..18: mol_type = genomic DNA
gagcttaaacccccttat

SEQ ID NO: 15649 - DNA, 19 bp, Homo sapiens
  source 1..19: mol_type = genomic DNA
gagcttaaacccccttatt

SEQ ID NO: 15650 - DNA, 20 bp, Homo sapiens
  source 1..20: mol_type = genomic DNA
gagcttaaacccccttattt

SEQ ID NO: 15651 - DNA, 21 bp, Homo sapiens
  source 1..21: mol_type = genomic DNA
gagcttaaacccccttatttc

SEQ ID NO: 15652 - DNA, 22 bp, Homo sapiens
  source 1..22: mol_type = genomic DNA
gagcttaaacccccttatttct

SEQ ID NO: 15653 - DNA, 23 bp, Homo sapiens
  source 1..23: mol_type = genomic DNA
gagcttaaacccccttatttcta

SEQ ID NO: 15654 - DNA, 24 bp, Homo sapiens
  source 1..24: mol_type = genomic DNA
gagcttaaacccccttatttctac

SEQ ID NO: 15655 - DNA, 25 bp, Homo sapiens
  source 1..25: mol_type = genomic DNA
gagcttaaacccccttatttctacc

SEQ ID NO: 15656 - DNA, 26 bp, Homo sapiens
  source 1..26: mol_type = genomic DNA
gagcttaaacccccttatttctacca

SEQ ID NO: 15657 - DNA, 20 bp, Homo sapiens
  source 1..20: mol_type = genomic DNA
gaggccccgggttcaatccc

SEQ ID NO: 15658 - DNA, 34 bp, Homo sapiens
  source 1..34: mol_type = genomic DNA
gaggccccgggttcaatccccggcacctccacca

SEQ ID NO: 15659 - DNA, 24 bp, Homo sapiens
  source 1..24: mol_type = genomic DNA
gaggccccgggttcgatccccggc

SEQ ID NO: 15660 - DNA, 25 bp, Homo sapiens
  source 1..25: mol_type = genomic DNA
gaggccccgggttcgatccccggca

SEQ ID NO: 15661 - DNA, 28 bp, Homo sapiens
  source 1..28: mol_type = genomic DNA
gaggccccgggttcgatccccggcatct

SEQ ID NO: 15662 - DNA, 34 bp, Homo sapiens
  source 1..34: mol_type = genomic DNA
gaggccccgggttcgatccccggcatctccacca

SEQ ID NO: 15663 - DNA, 32 bp, Homo sapiens
  source 1..32: mol_type = genomic DNA
gaggcccgggttcgattcccggccaatgcacc

SEQ ID NO: 15664 - DNA, 20 bp, Homo sapiens
  source 1..20: mol_type = genomic DNA
gaggcgtgggttcgaatccc

SEQ ID NO: 15665 - DNA, 32 bp, Homo sapiens
  source 1..32: mol_type = genomic DNA
gaggcgtgggttcgaatcccactcctgacacc

SEQ ID NO: 15666 - DNA, 27 bp, Homo sapiens
  source 1..27: mol_type = genomic DNA
gaggcgtgggttcgaatcccacttctg

SEQ ID NO: 15667 - DNA, 31 bp, Homo sapiens
  source 1..31: mol_type = genomic DNA
gaggcgtgggttcgaatcccacttctgacac

SEQ ID NO: 15668 - DNA, 32 bp, Homo sapiens
  source 1..32: mol_type = genomic DNA
gaggcgtgggttcgaatcccacttctgacacc

SEQ ID NO: 15669 - DNA, 33 bp, Homo sapiens
  source 1..33: mol_type = genomic DNA
gaggcgtgggttcgaatcccacttctgacacca

SEQ ID NO: 15670 - DNA, 16 bp, Homo sapiens
  source 1..16: mol_type = genomic DNA
gaggcttacgacccct

SEQ ID NO: 15671 - DNA, 17 bp, Homo sapiens
  source 1..17: mol_type = genomic DNA
gaggcttacgacccctt

SEQ ID NO: 15672 - DNA, 18 bp, Homo sapiens
  source 1..18: mol_type = genomic DNA
gaggcttacgacccctta

SEQ ID NO: 15673 - DNA, 20 bp, Homo sapiens
  source 1..20: mol_type = genomic DNA
gaggcttacgaccccttatt

SEQ ID NO: 15674 - DNA, 22 bp, Homo sapiens
  source 1..22: mol_type = genomic DNA
gaggcttacgaccccttattta

SEQ ID NO: 15675 - DNA, 23 bp, Homo sapiens
  source 1..23: mol_type = genomic DNA
gaggcttacgaccccttatttac

SEQ ID NO: 15676 - DNA, 24 bp, Homo sapiens
  source 1..24: mol_type = genomic DNA
gaggcttacgaccccttatttacc

SEQ ID NO: 15677 - DNA, 25 bp, Homo sapiens
  source 1..25: mol_type = genomic DNA
gaggcttacgaccccttatttaccc

SEQ ID NO: 15678 - DNA, 26 bp, Homo sapiens
  source 1..26: mol_type = genomic DNA
gaggcttacgaccccttatttacccc

SEQ ID NO: 15679 - DNA, 27 bp, Homo sapiens
  source 1..27: mol_type = genomic DNA
gaggcttacgaccccttatttacccca

SEQ ID NO: 15680 - DNA, 16 bp, Homo sapiens
  source 1..16: mol_type = genomic DNA
gagggtccagggttca

SEQ ID NO: 15681 - DNA, 30 bp, Homo sapiens
  source 1..30: mol_type = genomic DNA
gagggtccagggttcaagtccctgttcggg

SEQ ID NO: 15682 - DNA, 31 bp, Homo sapiens
  source 1..31: mol_type = genomic DNA
gagggtccagggttcaagtccctgttcgggc

SEQ ID NO: 15683 - DNA, 32 bp, Homo sapiens
  source 1..32: mol_type = genomic DNA
gagggtccagggttcaagtccctgttcgggcg

SEQ ID NO: 15684 - DNA, 33 bp, Homo sapiens
  source 1..33: mol_type = genomic DNA
gagggtccagggttcaagtccctgttcgggcgc

SEQ ID NO: 15685 - DNA, 34 bp, Homo sapiens
  source 1..34: mol_type = genomic DNA
gagggtccagggttcaagtccctgttcgggcgcc

SEQ ID NO: 15686 - DNA, 35 bp, Homo sapiens
  source 1..35: mol_type = genomic DNA
gagggtccagggttcaagtccctgttcgggcgcca

SEQ ID NO: 15687 - DNA, 26 bp, Homo sapiens
  source 1..26: mol_type = genomic DNA
gagggttcgagtcccttcgtggtcgc

SEQ ID NO: 15688 - DNA, 27 bp, Homo sapiens
  source 1..27: mol_type = genomic DNA
gagggttcgagtcccttcgtggtcgcc

SEQ ID NO: 15689 - DNA, 28 bp, Homo sapiens
  source 1..28: mol_type = genomic DNA
gagggttcgagtcccttcgtggtcgcca

SEQ ID NO: 15690 - DNA, 19 bp, Homo sapiens
  source 1..19: mol_type = genomic DNA
gaggtcccgggttcgatcc

SEQ ID NO: 15691 - DNA, 28 bp, Homo sapiens
  source 1..28: mol_type = genomic DNA
gaggtcccgggttcgatccccagcatct

SEQ ID NO: 15692 - DNA, 20 bp, Homo sapiens
  source 1..20: mol_type = genomic DNA
gaggtcgatggatcgaaacc

SEQ ID NO: 15693 - DNA, 21 bp, Homo sapiens
  source 1..21: mol_type = genomic DNA
gaggtcgatggatcgaaacca

SEQ ID NO: 15694 - DNA, 22 bp, Homo sapiens
  source 1..22: mol_type = genomic DNA
gaggtcgatggatcgaaaccat

SEQ ID NO: 15695 - DNA, 29 bp, Homo sapiens
  source 1..29: mol_type = genomic DNA
gaggtcgatggatcgaaaccatcctctgc

SEQ ID NO: 15696 - DNA, 18 bp, Homo sapiens
  source 1..18: mol_type = genomic DNA
gaggtgattttcatattg

SEQ ID NO: 15697 - DNA, 19 bp, Homo sapiens
  source 1..19: mol_type = genomic DNA
gaggtgattttcatattga

SEQ ID NO: 15698 - DNA, 22 bp, Homo sapiens
  source 1..22: mol_type = genomic DNA
gaggtgattttcatattgaatt

SEQ ID NO: 15699 - DNA, 23 bp, Homo sapiens
  source 1..23: mol_type = genomic DNA
gaggtgattttcatattgaattg

SEQ ID NO: 15700 - DNA, 24 bp, Homo sapiens
  source 1..24: mol_type = genomic DNA
gaggtgattttcatattgaattgc

SEQ ID NO: 15701 - DNA, 25 bp, Homo sapiens
  source 1..25: mol_type = genomic DNA
gaggtgattttcatattgaattgca

SEQ ID NO: 15702 - DNA, 31 bp, Homo sapiens
  source 1..31: mol_type = genomic DNA
gaggtgattttcatattgaattgcaaattcg

SEQ ID NO: 15703 - DNA, 20 bp, Homo sapiens
  source 1..20: mol_type = genomic DNA
gaggtggccgagtggttaag

SEQ ID NO: 15704 - DNA, 21 bp, Homo sapiens
  source 1..21: mol_type = genomic DNA
gaggtggccgagtggttaagg

SEQ ID NO: 15705 - DNA, 24 bp, Homo sapiens
  source 1..24: mol_type = genomic DNA
gaggttccgggttcgagtcccggc

SEQ ID NO: 15706 - DNA, 30 bp, Homo sapiens
  source 1..30: mol_type = genomic DNA
gaggttgtgagttcaagcctcacctggagc

SEQ ID NO: 15707 - DNA, 30 bp, Homo sapiens
  source 1..30: mol_type = genomic DNA
gaggttgtgagttcgagcctcacctggagc

SEQ ID NO: 15708 - DNA, 33 bp, Homo sapiens
  source 1..33: mol_type = genomic DNA
gaggttgtgagttcgagcctcacctggagcacc

SEQ ID NO: 15709 - DNA, 16 bp, Homo sapiens
  source 1..16: mol_type = genomic DNA
gagtaaataataggag

SEQ ID NO: 15710 - DNA, 17 bp, Homo sapiens
  source 1..17: mol_type = genomic DNA
gagtaaataataggagc

SEQ ID NO: 15711 - DNA, 18 bp, Homo sapiens
  source 1..18: mol_type = genomic DNA
gagtaaataataggagct

SEQ ID NO: 15712 - DNA, 19 bp, Homo sapiens
  source 1..19: mol_type = genomic DNA
gagtaaataataggagctt

SEQ ID NO: 15713 - DNA, 20 bp, Homo sapiens
  source 1..20: mol_type = genomic DNA
gagtaaataataggagctta

SEQ ID NO: 15714 - DNA, 21 bp, Homo sapiens
  source 1..21: mol_type = genomic DNA
gagtaaataataggagcttaa

SEQ ID NO: 15715 - DNA, 23 bp, Homo sapiens
  source 1..23: mol_type = genomic DNA
gagtaaataataggagcttaaac

SEQ ID NO: 15716 - DNA, 24 bp, Homo sapiens
  source 1..24: mol_type = genomic DNA
gagtaaataataggagcttaaacc

SEQ ID NO: 15717 - DNA, 25 bp, Homo sapiens
  source 1..25: mol_type = genomic DNA
gagtaaataataggagcttaaaccc

SEQ ID NO: 15718 - DNA, 26 bp, Homo sapiens
  source 1..26: mol_type = genomic DNA
gagtaaataataggagcttaaacccc

SEQ ID NO: 15719 - DNA, 27 bp, Homo sapiens
  source 1..27: mol_type = genomic DNA
gagtaaataataggagcttaaaccccc

SEQ ID NO: 15720 - DNA, 28 bp, Homo sapiens
  source 1..28: mol_type = genomic DNA
gagtaaataataggagcttaaaccccct

SEQ ID NO: 15721 - DNA, 29 bp, Homo sapiens
  source 1..29: mol_type = genomic DNA
gagtaaataataggagcttaaaccccctt

SEQ ID NO: 15722 - DNA, 30 bp, Homo sapiens
  source 1..30: mol_type = genomic DNA
gagtaaataataggagcttaaaccccctta

SEQ ID NO: 15723 - DNA, 31 bp, Homo sapiens
  source 1..31: mol_type = genomic DNA
gagtaaataataggagcttaaacccccttat

SEQ ID NO: 15724 - DNA, 32 bp, Homo sapiens
  source 1..32: mol_type = genomic DNA
gagtaaataataggagcttaaacccccttatt

SEQ ID NO: 15725 - DNA, 35 bp, Homo sapiens
  source 1..35: mol_type = genomic DNA
gagtaaataataggagcttaaacccccttatttct

SEQ ID NO: 15726 - DNA, 31 bp, Homo sapiens
  source 1..31: mol_type = genomic DNA
gagtaaggtcagctaaataagctatcgggcc

SEQ ID NO: 15727 - DNA, 32 bp, Homo sapiens
  source 1..32: mol_type = genomic DNA
gagtaaggtcagctaaataagctatcgggccc

SEQ ID NO: 15728 - DNA, 16 bp, Homo sapiens
  source 1..16: mol_type = genomic DNA
gagtatccccgcctgt

SEQ ID NO: 15729 - DNA, 17 bp, Homo sapiens
  source 1..17: mol_type = genomic DNA
gagtatccccgcctgtc

SEQ ID NO: 15730 - DNA, 20 bp, Homo sapiens
  source 1..20: mol_type = genomic DNA
gagtatccccgcctgtcacg

SEQ ID NO: 15731 - DNA, 27 bp, Homo sapiens
  source 1..27: mol_type = genomic DNA
gagtatccccgcctgtcacgcgggaga

SEQ ID NO: 15732 - DNA, 18 bp, Homo sapiens
  source 1..18: mol_type = genomic DNA
gagtcccatctgggtcgc

SEQ ID NO: 15733 - DNA, 16 bp, Homo sapiens
  source 1..16: mol_type = genomic DNA
gagtcccggcggagtc

SEQ ID NO: 15734 - DNA, 17 bp, Homo sapiens
  source 1..17: mol_type = genomic DNA
gagtcccggcggagtcg

SEQ ID NO: 15735 - DNA, 17 bp, Homo sapiens
  source 1..17: mol_type = genomic DNA
gagtcccttcgtggtcg

SEQ ID NO: 15736 - DNA, 18 bp, Homo sapiens
  source 1..18: mol_type = genomic DNA
gagtcctgccgcggtcgc

SEQ ID NO: 15737 - DNA, 19 bp, Homo sapiens
  source 1..19: mol_type = genomic DNA
gagtcctgccgcggtcgcc

SEQ ID NO: 15738 - DNA, 16 bp, Homo sapiens
  source 1..16: mol_type = genomic DNA
gagtctcggtggaacc

SEQ ID NO: 15739 - DNA, 17 bp, Homo sapiens
  source 1..17: mol_type = genomic DNA
gagtctcggtggaacct

SEQ ID NO: 15740 - DNA, 19 bp, Homo sapiens
  source 1..19: mol_type = genomic DNA
gagtctcggtggaacctcc

SEQ ID NO: 15741 - DNA, 16 bp, Homo sapiens
  source 1..16: mol_type = genomic DNA
gagtgaagcattggac

SEQ ID NO: 15742 - DNA, 17 bp, Homo sapiens
  source 1..17: mol_type = genomic DNA
gagtgaagcattggact

SEQ ID NO: 15743 - DNA, 18 bp, Homo sapiens
  source 1..18: mol_type = genomic DNA
gagtgaagcattggactg

SEQ ID NO: 15744 - DNA, 19 bp, Homo sapiens
  source 1..19: mol_type = genomic DNA
gagtgaagcattggactgt

SEQ ID NO: 15745 - DNA, 20 bp, Homo sapiens
  source 1..20: mol_type = genomic DNA
gagtgaagcattggactgta

SEQ ID NO: 15746 - DNA, 21 bp, Homo sapiens
  source 1..21: mol_type = genomic DNA
gagtgaagcattggactgtaa

SEQ ID NO: 15747 - DNA, 22 bp, Homo sapiens
  source 1..22: mol_type = genomic DNA
gagtgaagcattggactgtaaa

SEQ ID NO: 15748 - DNA, 23 bp, Homo sapiens
  source 1..23: mol_type = genomic DNA
gagtgaagcattggactgtaaat

SEQ ID NO: 15749 - DNA, 24 bp, Homo sapiens
  source 1..24: mol_type = genomic DNA
gagtgaagcattggactgtaaatc

SEQ ID NO: 15750 - DNA, 25 bp, Homo sapiens
  source 1..25: mol_type = genomic DNA
gagtgaagcattggactgtaaatct

SEQ ID NO: 15751 - DNA, 26 bp, Homo sapiens
  source 1..26: mol_type = genomic DNA
gagtgaagcattggactgtaaatcta

SEQ ID NO: 15752 - DNA, 27 bp, Homo sapiens
  source 1..27: mol_type = genomic DNA
gagtgaagcattggactgtaaatctaa

SEQ ID NO: 15753 - DNA, 28 bp, Homo sapiens
  source 1..28: mol_type = genomic DNA
gagtgaagcattggactgtaaatctaaa

SEQ ID NO: 15754 - DNA, 29 bp, Homo sapiens
  source 1..29: mol_type = genomic DNA
gagtgaagcattggactgtaaatctaaag

SEQ ID NO: 15755 - DNA, 30 bp, Homo sapiens
  source 1..30: mol_type = genomic DNA
gagtgaagcattggactgtaaatctaaaga

SEQ ID NO: 15756 - DNA, 32 bp, Homo sapiens
  source 1..32: mol_type = genomic DNA
gagtgaagcattggactgtaaatctaaagaca

SEQ ID NO: 15757 - DNA, 33 bp, Homo sapiens
  source 1..33: mol_type = genomic DNA
gagtgaagcattggactgtaaatctaaagacag

SEQ ID NO: 15758 - DNA, 36 bp, Homo sapiens
  source 1..36: mol_type = genomic DNA
gagtgaagcattggactgtaaatctaaagacagggg

SEQ ID NO: 15759 - DNA, 37 bp, Homo sapiens
  source 1..37: mol_type = genomic DNA
gagtgaagcattggactgtaaatctaaagacaggggt

SEQ ID NO: 15760 - DNA, 38 bp, Homo sapiens
  source 1..38: mol_type = genomic DNA
gagtgaagcattggactgtaaatctaaagacaggggtt

SEQ ID NO: 15761 - DNA, 39 bp, Homo sapiens
  source 1..39: mol_type = genomic DNA
gagtgaagcattggactgtaaatctaaagacaggggtta

SEQ ID NO: 15762 - DNA, 40 bp, Homo sapiens
  source 1..40: mol_type = genomic DNA
gagtgaagcattggactgtaaatctaaagacaggggttag

SEQ ID NO: 15763 - DNA, 42 bp, Homo sapiens
  source 1..42: mol_type = genomic DNA
gagtgaagcattggactgtaaatctaaagacaggggttaggc

SEQ ID NO: 15764 - DNA, 43 bp, Homo sapiens
  source 1..43: mol_type = genomic DNA
gagtgaagcattggactgtaaatctaaagacaggggttaggcc

SEQ ID NO: 15765 - DNA, 44 bp, Homo sapiens
  source 1..44: mol_type = genomic DNA
gagtgaagcattggactgtaaatctaaagacaggggttaggcct

SEQ ID NO: 15766 - DNA, 45 bp, Homo sapiens
  source 1..45: mol_type = genomic DNA
gagtgaagcattggactgtaaatctaaagacaggggttaggcctc

SEQ ID NO: 15767 - DNA, 17 bp, Homo sapiens
  source 1..17: mol_type = genomic DNA
gagtggcgcagcggaag

SEQ ID NO: 15768 - DNA, 19 bp, Homo sapiens
  source 1..19: mol_type = genomic DNA
gagtggcgcagcggaagcg

SEQ ID NO: 15769 - DNA, 26 bp, Homo sapiens
  source 1..26: mol_type = genomic DNA
gagtggcgcagcggaagcgtgctggg

SEQ ID NO: 15770 - DNA, 27 bp, Homo sapiens
  source 1..27: mol_type = genomic DNA
gagtggcgcagcggaagcgtgctgggc

SEQ ID NO: 15771 - DNA, 28 bp, Homo sapiens
  source 1..28: mol_type = genomic DNA
gagtggcgcagcggaagcgtgctgggcc

SEQ ID NO: 15772 - DNA, 29 bp, Homo sapiens
  source 1..29: mol_type = genomic DNA
gagtggcgcagcggaagcgtgctgggccc

SEQ ID NO: 15773 - DNA, 30 bp, Homo sapiens
  source 1..30: mol_type = genomic DNA
gagtggcgcagcggaagcgtgctgggccca

SEQ ID NO: 15774 - DNA, 31 bp, Homo sapiens
  source 1..31: mol_type = genomic DNA
gagtggcgcagcggaagcgtgctgggcccat

SEQ ID NO: 15775 - DNA, 34 bp, Homo sapiens
  source 1..34: mol_type = genomic DNA
gagtggcgcagcggaagcgtgctgggcccataac

SEQ ID NO: 15776 - DNA, 35 bp, Homo sapiens
  source 1..35: mol_type = genomic DNA
gagtggcgcagcggaagcgtgctgggcccataacc

SEQ ID NO: 15777 - DNA, 17 bp, Homo sapiens
  source 1..17: mol_type = genomic DNA
gagtggggttttgcagt

SEQ ID NO: 15778 - DNA, 18 bp, Homo sapiens
  source 1..18: mol_type = genomic DNA
gagtggggttttgcagtc

SEQ ID NO: 15779 - DNA, 19 bp, Homo sapiens
  source 1..19: mol_type = genomic DNA
gagtggggttttgcagtcc

SEQ ID NO: 15780 - DNA, 20 bp, Homo sapiens
  source 1..20: mol_type = genomic DNA
gagtggggttttgcagtcct

SEQ ID NO: 15781 - DNA, 21 bp, Homo sapiens
  source 1..21: mol_type = genomic DNA
gagtggggttttgcagtcctt

SEQ ID NO: 15782 - DNA, 23 bp, Homo sapiens
  source 1..23: mol_type = genomic DNA
gagtggggttttgcagtccttac

SEQ ID NO: 15783 - DNA, 24 bp, Homo sapiens
  source 1..24: mol_type = genomic DNA
gagtggggttttgcagtccttacc

SEQ ID NO: 15784 - DNA, 25 bp, Homo sapiens
  source 1..25: mol_type = genomic DNA
gagtggggttttgcagtccttacca

SEQ ID NO: 15785 - DNA, 23 bp, Homo sapiens
  source 1..23: mol_type = genomic DNA
gagtggtctaaggcgccagactc

SEQ ID NO: 15786 - DNA, 16 bp, Homo sapiens
  source 1..16: mol_type = genomic DNA
gagtgtagcttaacac

SEQ ID NO: 15787 - DNA, 25 bp, Homo sapiens
  source 1..25: mol_type = genomic DNA
gagtgtagcttaacacaaagcaccc

SEQ ID NO: 15788 - DNA, 26 bp, Homo sapiens
  source 1..26: mol_type = genomic DNA
gagtgtagcttaacacaaagcaccca

SEQ ID NO: 15789 - DNA, 27 bp, Homo sapiens
  source 1..27: mol_type = genomic DNA
gagtgtagcttaacacaaagcacccaa

SEQ ID NO: 15790 - DNA, 31 bp, Homo sapiens
  source 1..31: mol_type = genomic DNA
gagtgtagcttaacacaaagcacccaactta

SEQ ID NO: 15791 - DNA, 32 bp, Homo sapiens
  source 1..32: mol_type = genomic DNA
gagtgtagcttaacacaaagcacccaacttac

SEQ ID NO: 15792 - DNA, 35 bp, Homo sapiens
  source 1..35: mol_type = genomic DNA
gagtgtagcttaacacaaagcacccaacttacact

SEQ ID NO: 15793 - DNA, 37 bp, Homo sapiens
  source 1..37: mol_type = genomic DNA
gagtgtagcttaacacaaagcacccaacttacactta

SEQ ID NO: 15794 - DNA, 17 bp, Homo sapiens
  source 1..17: mol_type = genomic DNA
gagttaaagactttttc

SEQ ID NO: 15795 - DNA, 19 bp, Homo sapiens
  source 1..19: mol_type = genomic DNA
gagttaaagactttttctc

SEQ ID NO: 15796 - DNA, 22 bp, Homo sapiens
  source 1..22: mol_type = genomic DNA
gagttaaagactttttctctga

SEQ ID NO: 15797 - DNA, 23 bp, Homo sapiens
  source 1..23: mol_type = genomic DNA
gagttaaagactttttctctgac

SEQ ID NO: 15798 - DNA, 24 bp, Homo sapiens
  source 1..24: mol_type = genomic DNA
gagttaaagactttttctctgacc

SEQ ID NO: 15799 - DNA, 25 bp, Homo sapiens
  source 1..25: mol_type = genomic DNA
gagttaaagactttttctctgacca

SEQ ID NO: 15800 - DNA, 31 bp, Homo sapiens
  source 1..31: mol_type = genomic DNA
gagttactttgatagagtaaataataggagc

SEQ ID NO: 15801 - DNA, 32 bp, Homo sapiens
  source 1..32: mol_type = genomic DNA
gagttactttgatagagtaaataataggagct

SEQ ID NO: 15802 - DNA, 34 bp, Homo sapiens
  source 1..34: mol_type = genomic DNA
gagttactttgatagagtaaataataggagctta

SEQ ID NO: 15803 - DNA, 23 bp, Homo sapiens
  source 1..23: mol_type = genomic DNA
gagttcaaatctcgctggggcct

SEQ ID NO: 15804 - DNA, 24 bp, Homo sapiens
  source 1..24: mol_type = genomic DNA
gagttcaaatctcgctggggcctc

SEQ ID NO: 15805 - DNA, 25 bp, Homo sapiens
  source 1..25: mol_type = genomic DNA
gagttcaaatctcgctggggcctcc

SEQ ID NO: 15806 - DNA, 21 bp, Homo sapiens
  source 1..21: mol_type = genomic DNA
gagttcaaatctcggtggaac

SEQ ID NO: 15807 - DNA, 23 bp, Homo sapiens
  source 1..23: mol_type = genomic DNA
gagttcaaatctcggtggaacct

SEQ ID NO: 15808 - DNA, 24 bp, Homo sapiens
  source 1..24: mol_type = genomic DNA
gagttcaaatctcggtggaacctc

SEQ ID NO: 15809 - DNA, 25 bp, Homo sapiens
  source 1..25: mol_type = genomic DNA
gagttcaaatctcggtggaacctcc

SEQ ID NO: 15810 - DNA, 26 bp, Homo sapiens
  source 1..26: mol_type = genomic DNA
gagttcaaatctcggtggaacctcca

SEQ ID NO: 15811 - DNA, 21 bp, Homo sapiens
  source 1..21: mol_type = genomic DNA
gagttcaaatctcggtgggac

SEQ ID NO: 15812 - DNA, 22 bp, Homo sapiens
  source 1..22: mol_type = genomic DNA
gagttcaaatctcggtgggacc

SEQ ID NO: 15813 - DNA, 23 bp, Homo sapiens
  source 1..23: mol_type = genomic DNA
gagttcaaatctcggtgggacct

SEQ ID NO: 15814 - DNA, 24 bp, Homo sapiens
  source 1..24: mol_type = genomic DNA
gagttcaaatctcggtgggacctc

SEQ ID NO: 15815 - DNA, 24 bp, Homo sapiens
  source 1..24: mol_type = genomic DNA
gagttcaagtctcggtggaacctc

SEQ ID NO: 15816 - DNA, 25 bp, Homo sapiens
  source 1..25: mol_type = genomic DNA
gagttcgaacctcagagggggcacc

SEQ ID NO: 15817 - DNA, 21 bp, Homo sapiens
  source 1..21: mol_type = genomic DNA
gagttcgaatctcggtgggac

SEQ ID NO: 15818 - DNA, 22 bp, Homo sapiens
  source 1..22: mol_type = genomic DNA
gagttcgaatctcggtgggacc

SEQ ID NO: 15819 - DNA, 23 bp, Homo sapiens
  source 1..23: mol_type = genomic DNA
gagttcgaatctcggtgggacct

SEQ ID NO: 15820 - DNA, 24 bp, Homo sapiens
  source 1..24: mol_type = genomic DNA
gagttcgaatctcggtgggacctc

SEQ ID NO: 15821 - DNA, 21 bp, Homo sapiens
  source 1..21: mol_type = genomic DNA
gagttcgagtctcggtggaac

SEQ ID NO: 15822 - DNA, 22 bp, Homo sapiens
  source 1..22: mol_type = genomic DNA
gagttcgagtctcggtggaacc

SEQ ID NO: 15823 - DNA, 23 bp, Homo sapiens
  source 1..23: mol_type = genomic DNA
gagttcgagtctcggtggaacct

SEQ ID NO: 15824 - DNA, 24 bp, Homo sapiens
  source 1..24: mol_type = genomic DNA
gagttcgagtctcggtggaacctc

SEQ ID NO: 15825 - DNA, 25 bp, Homo sapiens
  source 1..25: mol_type = genomic DNA
gagttcgagtctcggtggaacctcc

SEQ ID NO: 15826 - DNA, 26 bp, Homo sapiens
  source 1..26: mol_type = genomic DNA
gagttcgagtctcggtggaacctcca

SEQ ID NO: 15827 - DNA, 22 bp, Homo sapiens
  source 1..22: mol_type = genomic DNA
gagttcgatcctcgctggggcc

SEQ ID NO: 15828 - DNA, 24 bp, Homo sapiens
  source 1..24: mol_type = genomic DNA
gagttcgatcctcgctggggcctc

SEQ ID NO: 15829 - DNA, 25 bp, Homo sapiens
  source 1..25: mol_type = genomic DNA
gagttcgatcctcgctggggcctcc

SEQ ID NO: 15830 - DNA, 19 bp, Homo sapiens
  source 1..19: mol_type = genomic DNA
gataaaagagttactttga

SEQ ID NO: 15831 - DNA, 20 bp, Homo sapiens
  source 1..20: mol_type = genomic DNA
gataaaagagttactttgat

SEQ ID NO: 15832 - DNA, 21 bp, Homo sapiens
  source 1..21: mol_type = genomic DNA
gataaaagagttactttgata

SEQ ID NO: 15833 - DNA, 23 bp, Homo sapiens
  source 1..23: mol_type = genomic DNA
gataaaagagttactttgataga

SEQ ID NO: 15834 - DNA, 38 bp, Homo sapiens
  source 1..38: mol_type = genomic DNA
gataaaagagttactttgatagagtaaataataggagc

SEQ ID NO: 15835 - DNA, 39 bp, Homo sapiens
  source 1..39: mol_type = genomic DNA
gataaaagagttactttgatagagtaaataataggagct

SEQ ID NO: 15836 - DNA, 40 bp, Homo sapiens
  source 1..40: mol_type = genomic DNA
gataaaagagttactttgatagagtaaataataggagctt

SEQ ID NO: 15837 - DNA, 17 bp, Homo sapiens
  source 1..17: mol_type = genomic DNA
gataacagctatccatt

SEQ ID NO: 15838 - DNA, 18 bp, Homo sapiens
  source 1..18: mol_type = genomic DNA
gataacagctatccattg

SEQ ID NO: 15839 - DNA, 19 bp, Homo sapiens
  source 1..19: mol_type = genomic DNA
gataacagctatccattgg

SEQ ID NO: 15840 - DNA, 20 bp, Homo sapiens
  source 1..20: mol_type = genomic DNA
gataacagctatccattggt

SEQ ID NO: 15841 - DNA, 21 bp, Homo sapiens
  source 1..21: mol_type = genomic DNA
gataacagctatccattggtc

SEQ ID NO: 15842 - DNA, 22 bp, Homo sapiens
  source 1..22: mol_type = genomic DNA
gataacagctatccattggtct

SEQ ID NO: 15843 - DNA, 23 bp, Homo sapiens
  source 1..23: mol_type = genomic DNA
gataacagctatccattggtctt

SEQ ID NO: 15844 - DNA, 24 bp, Homo sapiens
  source 1..24: mol_type = genomic DNA
gataacagctatccattggtctta

SEQ ID NO: 15845 - DNA, 25 bp, Homo sapiens
  source 1..25: mol_type = genomic DNA
gataacagctatccattggtcttag

SEQ ID NO: 15846 - DNA, 28 bp, Homo sapiens
  source 1..28: mol_type = genomic DNA
gataacagctatccattggtcttaggcc

SEQ ID NO: 15847 - DNA, 29 bp, Homo sapiens
  source 1..29: mol_type = genomic DNA
gataacagctatccattggtcttaggccc

SEQ ID NO: 15848 - DNA, 30 bp, Homo sapiens
  source 1..30: mol_type = genomic DNA
gataacagctatccattggtcttaggcccc

SEQ ID NO: 15849 - DNA, 31 bp, Homo sapiens
  source 1..31: mol_type = genomic DNA
gataacagctatccattggtcttaggcccca

SEQ ID NO: 15850 - DNA, 35 bp, Homo sapiens
  source 1..35: mol_type = genomic DNA
gataacagctatccattggtcttaggccccaaaaa

SEQ ID NO: 15851 - DNA, 43 bp, Homo sapiens
  source 1..43: mol_type = genomic DNA
gataacagctatccattggtcttaggccccaaaaattttggtg

SEQ ID NO: 15852 - DNA, 25 bp, Homo sapiens
  source 1..25: mol_type = genomic DNA
gataaggcatcagcctccggagctg

SEQ ID NO: 15853 - DNA, 18 bp, Homo sapiens
  source 1..18: mol_type = genomic DNA
gataaggcgtctgattcc

SEQ ID NO: 15854 - DNA, 16 bp, Homo sapiens
  source 1..16: mol_type = genomic DNA
gataatcatatttacc

SEQ ID NO: 15855 - DNA, 17 bp, Homo sapiens
  source 1..17: mol_type = genomic DNA
gataatcatatttacca

SEQ ID NO: 15856 - DNA, 18 bp, Homo sapiens
  source 1..18: mol_type = genomic DNA
gataatcatatttaccaa

SEQ ID NO: 15857 - DNA, 19 bp, Homo sapiens
  source 1..19: mol_type = genomic DNA
gataatcatatttaccaac

SEQ ID NO: 15858 - DNA, 20 bp, Homo sapiens
  source 1..20: mol_type = genomic DNA
gataatcatatttaccaacc

SEQ ID NO: 15859 - DNA, 21 bp, Homo sapiens
  source 1..21: mol_type = genomic DNA
gataatcatatttaccaacca

SEQ ID NO: 15860 - DNA, 19 bp, Homo sapiens
  source 1..19: mol_type = genomic DNA
gatagagtaaataatagga

SEQ ID NO: 15861 - DNA, 20 bp, Homo sapiens
  source 1..20: mol_type = genomic DNA
gatagagtaaataataggag

SEQ ID NO: 15862 - DNA, 21 bp, Homo sapiens
  source 1..21: mol_type = genomic DNA
gatagagtaaataataggagc

SEQ ID NO: 15863 - DNA, 22 bp, Homo sapiens
  source 1..22: mol_type = genomic DNA
gatagagtaaataataggagct

SEQ ID NO: 15864 - DNA, 23 bp, Homo sapiens
  source 1..23: mol_type = genomic DNA
gatagagtaaataataggagctt

SEQ ID NO: 15865 - DNA, 24 bp, Homo sapiens
  source 1..24: mol_type = genomic DNA
gatagagtaaataataggagctta

SEQ ID NO: 15866 - DNA, 25 bp, Homo sapiens
  source 1..25: mol_type = genomic DNA
gatagagtaaataataggagcttaa

SEQ ID NO: 15867 - DNA, 27 bp, Homo sapiens
  source 1..27: mol_type = genomic DNA
gatagagtaaataataggagcttaaac

SEQ ID NO: 15868 - DNA, 28 bp, Homo sapiens
  source 1..28: mol_type = genomic DNA
gatagagtaaataataggagcttaaacc

SEQ ID NO: 15869 - DNA, 29 bp, Homo sapiens
  source 1..29: mol_type = genomic DNA
gatagagtaaataataggagcttaaaccc

SEQ ID NO: 15870 - DNA, 30 bp, Homo sapiens
  source 1..30: mol_type = genomic DNA
gatagagtaaataataggagcttaaacccc

SEQ ID NO: 15871 - DNA, 31 bp, Homo sapiens
  source 1..31: mol_type = genomic DNA
gatagagtaaataataggagcttaaaccccc

SEQ ID NO: 15872 - DNA, 32 bp, Homo sapiens
  source 1..32: mol_type = genomic DNA
gatagagtaaataataggagcttaaaccccct

SEQ ID NO: 15873 - DNA, 33 bp, Homo sapiens
  source 1..33: mol_type = genomic DNA
gatagagtaaataataggagcttaaaccccctt

SEQ ID NO: 15874 - DNA, 34 bp, Homo sapiens
  source 1..34: mol_type = genomic DNA
gatagagtaaataataggagcttaaaccccctta

SEQ ID NO: 15875 - DNA, 35 bp, Homo sapiens
  source 1..35: mol_type = genomic DNA
gatagagtaaataataggagcttaaacccccttat

SEQ ID NO: 15876 - DNA, 36 bp, Homo sapiens
  source 1..36: mol_type = genomic DNA
gatagagtaaataataggagcttaaacccccttatt

SEQ ID NO: 15877 - DNA, 39 bp, Homo sapiens
  source 1..39: mol_type = genomic DNA
gatagagtaaataataggagcttaaacccccttatttct

SEQ ID NO: 15878 - DNA, 20 bp, Homo sapiens
  source 1..20: mol_type = genomic DNA
gatagcgcattggacttcta

SEQ ID NO: 15879 - DNA, 26 bp, Homo sapiens
  source 1..26: mol_type = genomic DNA
gatagctcagctggtagagcggagga

SEQ ID NO: 15880 - DNA, 28 bp, Homo sapiens
  source 1..28: mol_type = genomic DNA
gatagctcagctggtagagcggaggact

SEQ ID NO: 15881 - DNA, 31 bp, Homo sapiens
  source 1..31: mol_type = genomic DNA
gatagctcagctggtagagcggaggactgta

SEQ ID NO: 15882 - DNA, 17 bp, Homo sapiens
  source 1..17: mol_type = genomic DNA
gatagctcagtcggtag

SEQ ID NO: 15883 - DNA, 18 bp, Homo sapiens
  source 1..18: mol_type = genomic DNA
gatagctcagtcggtaga

SEQ ID NO: 15884 - DNA, 19 bp, Homo sapiens
  source 1..19: mol_type = genomic DNA
gatagctcagtcggtagag

SEQ ID NO: 15885 - DNA, 23 bp, Homo sapiens
  source 1..23: mol_type = genomic DNA
gatagctcagtcggtagagcatc

SEQ ID NO: 15886 - DNA, 27 bp, Homo sapiens
  source 1..27: mol_type = genomic DNA
gatagctcagtcggtagagcatcagac

SEQ ID NO: 15887 - DNA, 28 bp, Homo sapiens
  source 1..28: mol_type = genomic DNA
gatagctcagtcggtagagcatcagact

SEQ ID NO: 15888 - DNA, 29 bp, Homo sapiens
  source 1..29: mol_type = genomic DNA
gatagctcagtcggtagagcatcagactt

SEQ ID NO: 15889 - DNA, 30 bp, Homo sapiens
  source 1..30: mol_type = genomic DNA
gatagctcagtcggtagagcatcagacttt

SEQ ID NO: 15890 - DNA, 31 bp, Homo sapiens
  source 1..31: mol_type = genomic DNA
gatagctcagtcggtagagcatcagactttt

SEQ ID NO: 15891 - DNA, 18 bp, Homo sapiens
  source 1..18: mol_type = genomic DNA
gatagctcagttggtaga

SEQ ID NO: 15892 - DNA, 19 bp, Homo sapiens
  source 1..19: mol_type = genomic DNA
gatagctcagttggtagag

SEQ ID NO: 15893 - DNA, 29 bp, Homo sapiens
  source 1..29: mol_type = genomic DNA
gatagctcagttggtagagcggaggactg

SEQ ID NO: 15894 - DNA, 31 bp, Homo sapiens
  source 1..31: mol_type = genomic DNA
gatagctcagttggtagagcggaggactgta

SEQ ID NO: 15895 - DNA, 18 bp, Homo sapiens
  source 1..18: mol_type = genomic DNA
gataggtggcacggagaa

SEQ ID NO: 15896 - DNA, 19 bp, Homo sapiens
  source 1..19: mol_type = genomic DNA
gataggtggcacggagaat

SEQ ID NO: 15897 - DNA, 20 bp, Homo sapiens
  source 1..20: mol_type = genomic DNA
gataggtggcacggagaatt

SEQ ID NO: 15898 - DNA, 21 bp, Homo sapiens
  source 1..21: mol_type = genomic DNA
gataggtggcacggagaattt

SEQ ID NO: 15899 - DNA, 22 bp, Homo sapiens
  source 1..22: mol_type = genomic DNA
gataggtggcacggagaatttt

SEQ ID NO: 15900 - DNA, 23 bp, Homo sapiens
  source 1..23: mol_type = genomic DNA
gataggtggcacggagaattttg

SEQ ID NO: 15901 - DNA, 39 bp, Homo sapiens
  source 1..39: mol_type = genomic DNA
gatcaagaggtccccggttcaaatccgggtgccccctcc

SEQ ID NO: 15902 - DNA, 24 bp, Homo sapiens
  source 1..24: mol_type = genomic DNA
gatcagaagattccaggttcgact

SEQ ID NO: 15903 - DNA, 37 bp, Homo sapiens
  source 1..37: mol_type = genomic DNA
gatcagaagattccaggttcgactcctggctggctcg

SEQ ID NO: 15904 - DNA, 38 bp, Homo sapiens
  source 1..38: mol_type = genomic DNA
gatcagaagattccaggttcgactcctggctggctcgc

SEQ ID NO: 15905 - DNA, 39 bp, Homo sapiens
  source 1..39: mol_type = genomic DNA
gatcagaagattccaggttcgactcctggctggctcgcc

SEQ ID NO: 15906 - DNA, 40 bp, Homo sapiens
  source 1..40: mol_type = genomic DNA
gatcagaagattccaggttcgactcctggctggctcgcca

SEQ ID NO: 15907 - DNA, 23 bp, Homo sapiens
  source 1..23: mol_type = genomic DNA
gatcagaagattctaggttcgac

SEQ ID NO: 15908 - DNA, 24 bp, Homo sapiens
  source 1..24: mol_type = genomic DNA
gatcagaagattctaggttcgact

SEQ ID NO: 15909 - DNA, 34 bp, Homo sapiens
  source 1..34: mol_type = genomic DNA
gatcagaagattctaggttcgactcctggctggc

SEQ ID NO: 15910 - DNA, 35 bp, Homo sapiens
  source 1..35: mol_type = genomic DNA
gatcagaagattctaggttcgactcctggctggct

SEQ ID NO: 15911 - DNA, 36 bp, Homo sapiens
  source 1..36: mol_type = genomic DNA
gatcagaagattctaggttcgactcctggctggctc

SEQ ID NO: 15912 - DNA, 37 bp, Homo sapiens
  source 1..37: mol_type = genomic DNA
gatcagaagattctaggttcgactcctggctggctcg

SEQ ID NO: 15913 - DNA, 38 bp, Homo sapiens
  source 1..38: mol_type = genomic DNA
gatcagaagattctaggttcgactcctggctggctcgc

SEQ ID NO: 15914 - DNA, 39 bp, Homo sapiens
  source 1..39: mol_type = genomic DNA
gatcagaagattctaggttcgactcctggctggctcgcc

SEQ ID NO: 15915 - DNA, 40 bp, Homo sapiens
  source 1..40: mol_type = genomic DNA
gatcagaagattctaggttcgactcctggctggctcgcca

SEQ ID NO: 15916 - DNA, 18 bp, Homo sapiens
  source 1..18: mol_type = genomic DNA
gatcagaagattgagggt

SEQ ID NO: 15917 - DNA, 21 bp, Homo sapiens
  source 1..21: mol_type = genomic DNA
gatcagaagattgagggttcg

SEQ ID NO: 15918 - DNA, 31 bp, Homo sapiens
  source 1..31: mol_type = genomic DNA
gatcagaagattgagggttcgaatccctccg

SEQ ID NO: 15919 - DNA, 39 bp, Homo sapiens
  source 1..39: mol_type = genomic DNA
gatcagaagattgagggttcgaatccctccgtggttacc

SEQ ID NO: 15920 - DNA, 37 bp, Homo sapiens
  source 1..37: mol_type = genomic DNA
gatcagaagattgagggttcgaatcccttcgtggttg

SEQ ID NO: 15921 - DNA, 39 bp, Homo sapiens
  source 1..39: mol_type = genomic DNA
gatcagaagattgagggttcgaatcccttcgtggttgcc

SEQ ID NO: 15922 - DNA, 37 bp, Homo sapiens
  source 1..37: mol_type = genomic DNA
gatcagaagattgagggttcgagtcccttcgtggtcg

SEQ ID NO: 15923 - DNA, 38 bp, Homo sapiens
  source 1..38: mol_type = genomic DNA
gatcagaagattgagggttcgagtcccttcgtggtcgc

SEQ ID NO: 15924 - DNA, 39 bp, Homo sapiens
  source 1..39: mol_type = genomic DNA
gatcagaagattgagggttcgagtcccttcgtggtcgcc

SEQ ID NO: 15925 - DNA, 40 bp, Homo sapiens
  source 1..40: mol_type = genomic DNA
gatcagaagattgagggttcgagtcccttcgtggtcgcca

SEQ ID NO: 15926 - DNA, 36 bp, Homo sapiens
  source 1..36: mol_type = genomic DNA
gatcagaagattgcaggttcgagtcctgccgcggtc

SEQ ID NO: 15927 - DNA, 37 bp, Homo sapiens
  source 1..37: mol_type = genomic DNA
gatcagaagattgcaggttcgagtcctgccgcggtcg

SEQ ID NO: 15928 - DNA, 38 bp, Homo sapiens
  source 1..38: mol_type = genomic DNA
gatcagaagattgcaggttcgagtcctgccgcggtcgc

SEQ ID NO: 15929 - DNA, 39 bp, Homo sapiens
  source 1..39: mol_type = genomic DNA
gatcagaagattgcaggttcgagtcctgccgcggtcgcc

SEQ ID NO: 15930 - DNA, 40 bp, Homo sapiens
  source 1..40: mol_type = genomic DNA
gatcagaagattgcaggttcgagtcctgccgcggtcgcca

SEQ ID NO: 15931 - DNA, 20 bp, Homo sapiens
  source 1..20: mol_type = genomic DNA
gatcagaaggctgcgtgttc

SEQ ID NO: 15932 - DNA, 21 bp, Homo sapiens
  source 1..21: mol_type = genomic DNA
gatcagaaggctgcgtgttcg

SEQ ID NO: 15933 - DNA, 34 bp, Homo sapiens
  source 1..34: mol_type = genomic DNA
gatcagaaggctgcgtgttcgaatcacgtcgggg

SEQ ID NO: 15934 - DNA, 35 bp, Homo sapiens
  source 1..35: mol_type = genomic DNA
gatcagaaggctgcgtgttcgaatcacgtcggggt

SEQ ID NO: 15935 - DNA, 36 bp, Homo sapiens
  source 1..36: mol_type = genomic DNA
gatcagaaggctgcgtgttcgaatcacgtcggggtc

SEQ ID NO: 15936 - DNA, 38 bp, Homo sapiens
  source 1..38: mol_type = genomic DNA
gatcagaaggctgcgtgttcgaatcacgtcggggtcac

SEQ ID NO: 15937 - DNA, 39 bp, Homo sapiens
  source 1..39: mol_type = genomic DNA
gatcagaaggctgcgtgttcgaatcacgtcggggtcacc

SEQ ID NO: 15938 - DNA, 40 bp, Homo sapiens
  source 1..40: mol_type = genomic DNA
gatcagaaggctgcgtgttcgaatcacgtcggggtcacca

SEQ ID NO: 15939 - DNA, 16 bp, Homo sapiens
  source 1..16: mol_type = genomic DNA
gatcagaaggttgcgt

SEQ ID NO: 15940 - DNA, 20 bp, Homo sapiens
  source 1..20: mol_type = genomic DNA
gatcagaaggttgcgtgttc

SEQ ID NO: 15941 - DNA, 34 bp, Homo sapiens
  source 1..34: mol_type = genomic DNA
gatcagaaggttgcgtgttcaaatcacgtcgggg

SEQ ID NO: 15942 - DNA, 36 bp, Homo sapiens
  source 1..36: mol_type = genomic DNA
gatcagaaggttgcgtgttcaaatcacgtcggggtc

SEQ ID NO: 15943 - DNA, 37 bp, Homo sapiens
  source 1..37: mol_type = genomic DNA
gatcagaaggttgcgtgttcaaatcacgtcggggtca

SEQ ID NO: 15944 - DNA, 38 bp, Homo sapiens
  source 1..38: mol_type = genomic DNA
gatcagaaggttgcgtgttcaaatcacgtcggggtcac

SEQ ID NO: 15945 - DNA, 39 bp, Homo sapiens
  source 1..39: mol_type = genomic DNA
gatcagaaggttgcgtgttcaaatcacgtcggggtcacc

SEQ ID NO: 15946 - DNA, 40 bp, Homo sapiens
  source 1..40: mol_type = genomic DNA
gatcagaaggttgcgtgttcaaatcacgtcggggtcacca

SEQ ID NO: 15947 - DNA, 34 bp, Homo sapiens
  source 1..34: mol_type = genomic DNA
gatcagaaggttgcgtgttcaagtcacgtcgggg

SEQ ID NO: 15948 - DNA, 35 bp, Homo sapiens
  source 1..35: mol_type = genomic DNA
gatcagaaggttgcgtgttcaagtcacgtcggggt

SEQ ID NO: 15949 - DNA, 36 bp, Homo sapiens
  source 1..36: mol_type = genomic DNA
gatcagaaggttgcgtgttcaagtcacgtcggggtc

SEQ ID NO: 15950 - DNA, 37 bp, Homo sapiens
  source 1..37: mol_type = genomic DNA
gatcagaaggttgcgtgttcaagtcacgtcggggtca

SEQ ID NO: 15951 - DNA, 38 bp, Homo sapiens
  source 1..38: mol_type = genomic DNA
gatcagaaggttgcgtgttcaagtcacgtcggggtcac

SEQ ID NO: 15952 - DNA, 39 bp, Homo sapiens
  source 1..39: mol_type = genomic DNA
gatcagaaggttgcgtgttcaagtcacgtcggggtcacc

SEQ ID NO: 15953 - DNA, 40 bp, Homo sapiens
  source 1..40: mol_type = genomic DNA
gatcagaaggttgcgtgttcaagtcacgtcggggtcacca

SEQ ID NO: 15954 - DNA, 16 bp, Homo sapiens
  source 1..16: mol_type = genomic DNA
gatccaatggacatat

SEQ ID NO: 15955 - DNA, 18 bp, Homo sapiens
  source 1..18: mol_type = genomic DNA
gatccaatggacatatgt

SEQ ID NO: 15956 - DNA, 20 bp, Homo sapiens
  source 1..20: mol_type = genomic DNA
gatccccagcatctccacca

SEQ ID NO: 15957 - DNA, 19 bp, Homo sapiens
  source 1..19: mol_type = genomic DNA
gatccccggcatctccacc

SEQ ID NO: 15958 - DNA, 20 bp, Homo sapiens
  source 1..20: mol_type = genomic DNA
gatccccggcatctccacca

SEQ ID NO: 15959 - DNA, 16 bp, Homo sapiens
  source 1..16: mol_type = genomic DNA
gatccccgtacgggcc

SEQ ID NO: 15960 - DNA, 18 bp, Homo sapiens
  source 1..18: mol_type = genomic DNA
gatccccgtacgggccac

SEQ ID NO: 15961 - DNA, 19 bp, Homo sapiens
  source 1..19: mol_type = genomic DNA
gatccccgtacgggccacc

SEQ ID NO: 15962 - DNA, 20 bp, Homo sapiens
  source 1..20: mol_type = genomic DNA
gatcccgggcggaaacacca

SEQ ID NO: 15963 - DNA, 18 bp, Homo sapiens
  source 1..18: mol_type = genomic DNA
gatcccgggtttcggcac

SEQ ID NO: 15964 - DNA, 20 bp, Homo sapiens
  source 1..20: mol_type = genomic DNA
gatcccgggtttcggcacca

SEQ ID NO: 15965 - DNA, 19 bp, Homo sapiens
  source 1..19: mol_type = genomic DNA
gatccgagttcgagtctcg

SEQ ID NO: 15966 - DNA, 29 bp, Homo sapiens
  source 1..29: mol_type = genomic DNA
gatccgagttcgagtctcggtggaacctc

SEQ ID NO: 15967 - DNA, 27 bp, Homo sapiens
  source 1..27: mol_type = genomic DNA
gatcctgggttcgaatcccagcggggc

SEQ ID NO: 15968 - DNA, 28 bp, Homo sapiens
  source 1..28: mol_type = genomic DNA
gatcctgggttcgaatcccagcggggcc

SEQ ID NO: 15969 - DNA, 31 bp, Homo sapiens
  source 1..31: mol_type = genomic DNA
gatcctgggttcgaatcccagcggggcctcc

SEQ ID NO: 15970 - DNA, 26 bp, Homo sapiens
  source 1..26: mol_type = genomic DNA
gatcctgggttcgaatcccagcggtg

SEQ ID NO: 15971 - DNA, 31 bp, Homo sapiens
  source 1..31: mol_type = genomic DNA
gatcctgggttcgaatcccagcggtgcctcc

SEQ ID NO: 15972 - DNA, 30 bp, Homo sapiens
  source 1..30: mol_type = genomic DNA
gatcctgggttcgaatcccagtagagcctc

SEQ ID NO: 15973 - DNA, 31 bp, Homo sapiens
  source 1..31: mol_type = genomic DNA
gatcctgggttcgaatcccagtagagcctcc

SEQ ID NO: 15974 - DNA, 16 bp, Homo sapiens
  source 1..16: mol_type = genomic DNA
gatccttaggtcgctg

SEQ ID NO: 15975 - DNA, 35 bp, Homo sapiens
  source 1..35: mol_type = genomic DNA
gatccttaggtcgctggttcgaatccggctcgaag

SEQ ID NO: 15976 - DNA, 20 bp, Homo sapiens
  source 1..20: mol_type = genomic DNA
gatcgaaaccatcctctgct

SEQ ID NO: 15977 - DNA, 23 bp, Homo sapiens
  source 1..23: mol_type = genomic DNA
gatcgaaaccatcctctgctacc

SEQ ID NO: 15978 - DNA, 24 bp, Homo sapiens
  source 1..24: mol_type = genomic DNA
gatcgaaaccatcctctgctacca

SEQ ID NO: 15979 - DNA, 23 bp, Homo sapiens
  source 1..23: mol_type = genomic DNA
gatcgtatagtggttagtactct

SEQ ID NO: 15980 - DNA, 24 bp, Homo sapiens
  source 1..24: mol_type = genomic DNA
gatcgtatagtggttagtactctg

SEQ ID NO: 15981 - DNA, 25 bp, Homo sapiens
  source 1..25: mol_type = genomic DNA
gatcgtatagtggttagtactctgc

SEQ ID NO: 15982 - DNA, 26 bp, Homo sapiens
  source 1..26: mol_type = genomic DNA
gatcgtatagtggttagtactctgcg

SEQ ID NO: 15983 - DNA, 27 bp, Homo sapiens
  source 1..27: mol_type = genomic DNA
gatcgtatagtggttagtactctgcgt

SEQ ID NO: 15984 - DNA, 28 bp, Homo sapiens
  source 1..28: mol_type = genomic DNA
gatcgtatagtggttagtactctgcgtt

SEQ ID NO: 15985 - DNA, 29 bp, Homo sapiens
  source 1..29: mol_type = genomic DNA
gatcgtatagtggttagtactctgcgttg

SEQ ID NO: 15986 - DNA, 22 bp, Homo sapiens
  source 1..22: mol_type = genomic DNA
gatgaaaacctttttccaagga

SEQ ID NO: 15987 - DNA, 23 bp, Homo sapiens
  source 1..23: mol_type = genomic DNA
gatgaaaacctttttccaaggac

SEQ ID NO: 15988 - DNA, 24 bp, Homo sapiens
  source 1..24: mol_type = genomic DNA
gatgaaaacctttttccaaggaca

SEQ ID NO: 15989 - DNA, 25 bp, Homo sapiens
  source 1..25: mol_type = genomic DNA
gatgaaaacctttttccaaggacac

SEQ ID NO: 15990 - DNA, 26 bp, Homo sapiens
  source 1..26: mol_type = genomic DNA
gatgaaaacctttttccaaggacacc

SEQ ID NO: 15991 - DNA, 27 bp, Homo sapiens
  source 1..27: mol_type = genomic DNA
gatgaaaacctttttccaaggacacca

SEQ ID NO: 15992 - DNA, 16 bp, Homo sapiens
  source 1..16: mol_type = genomic DNA
gatgcagagtggggtt

SEQ ID NO: 15993 - DNA, 17 bp, Homo sapiens
  source 1..17: mol_type = genomic DNA
gatgcagagtggggttt

SEQ ID NO: 15994 - DNA, 19 bp, Homo sapiens
  source 1..19: mol_type = genomic DNA
gatgcagagtggggttttg

SEQ ID NO: 15995 - DNA, 24 bp, Homo sapiens
  source 1..24: mol_type = genomic DNA
gatgcagagtggggttttgcagtc

SEQ ID NO: 15996 - DNA, 25 bp, Homo sapiens
  source 1..25: mol_type = genomic DNA
gatgcagagtggggttttgcagtcc

SEQ ID NO: 15997 - DNA, 26 bp, Homo sapiens
  source 1..26: mol_type = genomic DNA
gatgcagagtggggttttgcagtcct

SEQ ID NO: 15998 - DNA, 28 bp, Homo sapiens
  source 1..28: mol_type = genomic DNA
gatgcagagtggggttttgcagtcctta

SEQ ID NO: 15999 - DNA, 29 bp, Homo sapiens
  source 1..29: mol_type = genomic DNA
gatgcagagtggggttttgcagtccttac

SEQ ID NO: 16000 - DNA, 30 bp, Homo sapiens
  source 1..30: mol_type = genomic DNA
gatgcagagtggggttttgcagtccttacc

SEQ ID NO: 16001 - DNA, 31 bp, Homo sapiens
  source 1..31: mol_type = genomic DNA
gatgcagagtggggttttgcagtccttacca

SEQ ID NO: 16002 - DNA, 19 bp, Homo sapiens
  source 1..19: mol_type = genomic DNA
gatgcccgcatcctccacc

SEQ ID NO: 16003 - DNA, 24 bp, Homo sapiens
  source 1..24: mol_type = genomic DNA
gatggaggcgtgggttcgaatccc

SEQ ID NO: 16004 - DNA, 25 bp, Homo sapiens
  source 1..25: mol_type = genomic DNA
gatggaggcgtgggttcgaatccca

SEQ ID NO: 16005 - DNA, 31 bp, Homo sapiens
  source 1..31: mol_type = genomic DNA
gatggaggcgtgggttcgaatcccacttctg

SEQ ID NO: 16006 - DNA, 34 bp, Homo sapiens
  source 1..34: mol_type = genomic DNA
gatggaggcgtgggttcgaatcccacttctgaca

SEQ ID NO: 16007 - DNA, 36 bp, Homo sapiens
  source 1..36: mol_type = genomic DNA
gatggaggcgtgggttcgaatcccacttctgacacc

SEQ ID NO: 16008 - DNA, 37 bp, Homo sapiens
  source 1..37: mol_type = genomic DNA
gatggaggcgtgggttcgaatcccacttctgacacca

SEQ ID NO: 16009 - DNA, 24 bp, Homo sapiens
  source 1..24: mol_type = genomic DNA
gatggatcgaaaccatcctctgct

SEQ ID NO: 16010 - DNA, 19 bp, Homo sapiens
  source 1..19: mol_type = genomic DNA
gatggcagagcccggtaat

SEQ ID NO: 16011 - DNA, 21 bp, Homo sapiens
  source 1..21: mol_type = genomic DNA
gatggcagagcccggtaatcg

SEQ ID NO: 16012 - DNA, 25 bp, Homo sapiens
  source 1..25: mol_type = genomic DNA
gatggcagagcccggtaatcgcata

SEQ ID NO: 16013 - DNA, 26 bp, Homo sapiens
  source 1..26: mol_type = genomic DNA
gatggcagagcccggtaatcgcataa

SEQ ID NO: 16014 - DNA, 28 bp, Homo sapiens
  source 1..28: mol_type = genomic DNA
gatggcagagcccggtaatcgcataaaa

SEQ ID NO: 16015 - DNA, 29 bp, Homo sapiens
  source 1..29: mol_type = genomic DNA
gatggcagagcccggtaatcgcataaaac

SEQ ID NO: 16016 - DNA, 32 bp, Homo sapiens
  source 1..32: mol_type = genomic DNA
gatggcagagcccggtaatcgcataaaactta

SEQ ID NO: 16017 - DNA, 33 bp, Homo sapiens
  source 1..33: mol_type = genomic DNA
gatggcagagcccggtaatcgcataaaacttaa

SEQ ID NO: 16018 - DNA, 34 bp, Homo sapiens
  source 1..34: mol_type = genomic DNA
gatggcagagcccggtaatcgcataaaacttaaa

SEQ ID NO: 16019 - DNA, 36 bp, Homo sapiens
  source 1..36: mol_type = genomic DNA
gatggcagagcccggtaatcgcataaaacttaaaac

SEQ ID NO: 16020 - DNA, 37 bp, Homo sapiens
  source 1..37: mol_type = genomic DNA
gatggcagagcccggtaatcgcataaaacttaaaact

SEQ ID NO: 16021 - DNA, 16 bp, Homo sapiens
  source 1..16: mol_type = genomic DNA
gatggccgagcggtct

SEQ ID NO: 16022 - DNA, 17 bp, Homo sapiens
  source 1..17: mol_type = genomic DNA
gatggccgagcggtcta

SEQ ID NO: 16023 - DNA, 19 bp, Homo sapiens
  source 1..19: mol_type = genomic DNA
gatggccgagcggtctaag

SEQ ID NO: 16024 - DNA, 21 bp, Homo sapiens
  source 1..21: mol_type = genomic DNA
gatggccgagcggtctaaggc

SEQ ID NO: 16025 - DNA, 29 bp, Homo sapiens
  source 1..29: mol_type = genomic DNA
gatggccgagcggtctaaggcgctgcgtt

SEQ ID NO: 16026 - DNA, 21 bp, Homo sapiens
  source 1..21: mol_type = genomic DNA
gatggccgagtggtctaaggc

SEQ ID NO: 16027 - DNA, 18 bp, Homo sapiens
  source 1..18: mol_type = genomic DNA
gatggccgagtggttaag

SEQ ID NO: 16028 - DNA, 19 bp, Homo sapiens
  source 1..19: mol_type = genomic DNA
gatggccgagtggttaagg

SEQ ID NO: 16029 - DNA, 28 bp, Homo sapiens
  source 1..28: mol_type = genomic DNA
gatggcgtgggttcgaatcccaccgctg

SEQ ID NO: 16030 - DNA, 20 bp, Homo sapiens
  source 1..20: mol_type = genomic DNA
gatggggtgtgataggtggc

SEQ ID NO: 16031 - DNA, 23 bp, Homo sapiens
  source 1..23: mol_type = genomic DNA
gatggggtgtgataggtggcacg

SEQ ID NO: 16032 - DNA, 25 bp, Homo sapiens
  source 1..25: mol_type = genomic DNA
gatggggtgtgataggtggcacgga

SEQ ID NO: 16033 - DNA, 26 bp, Homo sapiens
  source 1..26: mol_type = genomic DNA
gatggggtgtgataggtggcacggag

SEQ ID NO: 16034 - DNA, 27 bp, Homo sapiens
  source 1..27: mol_type = genomic DNA
gatggggtgtgataggtggcacggaga

SEQ ID NO: 16035 - DNA, 28 bp, Homo sapiens
  source 1..28: mol_type = genomic DNA
gatggggtgtgataggtggcacggagaa

SEQ ID NO: 16036 - DNA, 29 bp, Homo sapiens
  source 1..29: mol_type = genomic DNA
gatggggtgtgataggtggcacggagaat

SEQ ID NO: 16037 - DNA, 30 bp, Homo sapiens
  source 1..30: mol_type = genomic DNA
gatggggtgtgataggtggcacggagaatt

SEQ ID NO: 16038 - DNA, 31 bp, Homo sapiens
  source 1..31: mol_type = genomic DNA
gatggggtgtgataggtggcacggagaattt

SEQ ID NO: 16039 - DNA, 32 bp, Homo sapiens
  source 1..32: mol_type = genomic DNA
gatggggtgtgataggtggcacggagaatttt

SEQ ID NO: 16040 - DNA, 33 bp, Homo sapiens
  source 1..33: mol_type = genomic DNA
gatggggtgtgataggtggcacggagaattttg

SEQ ID NO: 16041 - DNA, 16 bp, Homo sapiens
  source 1..16: mol_type = genomic DNA
gatgggttcgattctc

SEQ ID NO: 16042 - DNA, 26 bp, Homo sapiens
  source 1..26: mol_type = genomic DNA
gatgggttcgattctcatagtcctag

SEQ ID NO: 16043 - DNA, 27 bp, Homo sapiens
  source 1..27: mol_type = genomic DNA
gatgggttcgattctcatagtcctagc

SEQ ID NO: 16044 - DNA, 28 bp, Homo sapiens
  source 1..28: mol_type = genomic DNA
gatgggttcgattctcatagtcctagcc

SEQ ID NO: 16045 - DNA, 29 bp, Homo sapiens
  source 1..29: mol_type = genomic DNA
gatgggttcgattctcatagtcctagcca

SEQ ID NO: 16046 - DNA, 23 bp, Homo sapiens
  source 1..23: mol_type = genomic DNA
gatggtttttcatatcattggtc

SEQ ID NO: 16047 - DNA, 24 bp, Homo sapiens
  source 1..24: mol_type = genomic DNA
gatggtttttcatatcattggtcg

SEQ ID NO: 16048 - DNA, 25 bp, Homo sapiens
  source 1..25: mol_type = genomic DNA
gatggtttttcatatcattggtcgt

SEQ ID NO: 16049 - DNA, 26 bp, Homo sapiens
  source 1..26: mol_type = genomic DNA
gatggtttttcatatcattggtcgtg

SEQ ID NO: 16050 - DNA, 27 bp, Homo sapiens
  source 1..27: mol_type = genomic DNA
gatggtttttcatatcattggtcgtgg

SEQ ID NO: 16051 - DNA, 28 bp, Homo sapiens
  source 1..28: mol_type = genomic DNA
gatggtttttcatatcattggtcgtggt

SEQ ID NO: 16052 - DNA, 29 bp, Homo sapiens
  source 1..29: mol_type = genomic DNA
gatggtttttcatatcattggtcgtggtt

SEQ ID NO: 16053 - DNA, 30 bp, Homo sapiens
  source 1..30: mol_type = genomic DNA
gatggtttttcatatcattggtcgtggttg

SEQ ID NO: 16054 - DNA, 31 bp, Homo sapiens
  source 1..31: mol_type = genomic DNA
gatggtttttcatatcattggtcgtggttgt

SEQ ID NO: 16055 - DNA, 32 bp, Homo sapiens
  source 1..32: mol_type = genomic DNA
gatggtttttcatatcattggtcgtggttgta

SEQ ID NO: 16056 - DNA, 33 bp, Homo sapiens
  source 1..33: mol_type = genomic DNA
gatggtttttcatatcattggtcgtggttgtag

SEQ ID NO: 16057 - DNA, 34 bp, Homo sapiens
  source 1..34: mol_type = genomic DNA
gatggtttttcatatcattggtcgtggttgtagt

SEQ ID NO: 16058 - DNA, 35 bp, Homo sapiens
  source 1..35: mol_type = genomic DNA
gatggtttttcatatcattggtcgtggttgtagtc

SEQ ID NO: 16059 - DNA, 36 bp, Homo sapiens
  source 1..36: mol_type = genomic DNA
gatggtttttcatatcattggtcgtggttgtagtcc

SEQ ID NO: 16060 - DNA, 37 bp, Homo sapiens
  source 1..37: mol_type = genomic DNA
gatggtttttcatatcattggtcgtggttgtagtccg

SEQ ID NO: 16061 - DNA, 38 bp, Homo sapiens
  source 1..38: mol_type = genomic DNA
gatggtttttcatatcattggtcgtggttgtagtccgt

SEQ ID NO: 16062 - DNA, 39 bp, Homo sapiens
  source 1..39: mol_type = genomic DNA
gatggtttttcatatcattggtcgtggttgtagtccgtg

SEQ ID NO: 16063 - DNA, 40 bp, Homo sapiens
  source 1..40: mol_type = genomic DNA
gatggtttttcatatcattggtcgtggttgtagtccgtgc

SEQ ID NO: 16064 - DNA, 41 bp, Homo sapiens
  source 1..41: mol_type = genomic DNA
gatggtttttcatatcattggtcgtggttgtagtccgtgcg

SEQ ID NO: 16065 - DNA, 42 bp, Homo sapiens
  source 1..42: mol_type = genomic DNA
gatggtttttcatatcattggtcgtggttgtagtccgtgcga

SEQ ID NO: 16066 - DNA, 43 bp, Homo sapiens
  source 1..43: mol_type = genomic DNA
gatggtttttcatatcattggtcgtggttgtagtccgtgcgag

SEQ ID NO: 16067 - DNA, 44 bp, Homo sapiens
  source 1..44: mol_type = genomic DNA
gatggtttttcatatcattggtcgtggttgtagtccgtgcgaga

SEQ ID NO: 16068 - DNA, 45 bp, Homo sapiens
  source 1..45: mol_type = genomic DNA
gatggtttttcatatcattggtcgtggttgtagtccgtgcgagaa

SEQ ID NO: 16069 - DNA, 46 bp, Homo sapiens
  source 1..46: mol_type = genomic DNA
gatggtttttcatatcattggtcgtggttgtagtccgtgcgagaat

SEQ ID NO: 16070 - DNA, 47 bp, Homo sapiens
  source 1..47: mol_type = genomic DNA
gatggtttttcatatcattggtcgtggttgtagtccgtgcgagaata

SEQ ID NO: 16071 - DNA, 48 bp, Homo sapiens
  source 1..48: mol_type = genomic DNA
gatggtttttcatatcattggtcgtggttgtagtccgtgcgagaatac

SEQ ID NO: 16072 - DNA, 17 bp, Homo sapiens
  source 1..17: mol_type = genomic DNA
gatgtagctcagtggta

SEQ ID NO: 16073 - DNA, 18 bp, Homo sapiens
  source 1..18: mol_type = genomic DNA
gatgtagctcagtggtag

SEQ ID NO: 16074 - DNA, 19 bp, Homo sapiens
  source 1..19: mol_type = genomic DNA
gatgtagctcagtggtaga

SEQ ID NO: 16075 - DNA, 20 bp, Homo sapiens
  source 1..20: mol_type = genomic DNA
gatgtagctcagtggtagag

SEQ ID NO: 16076 - DNA, 32 bp, Homo sapiens
  source 1..32: mol_type = genomic DNA
gatgtagctcagtggtagagcgcatgcttcgc

SEQ ID NO: 16077 - DNA, 32 bp, Homo sapiens
  source 1..32: mol_type = genomic DNA
gatgtagctcagtggtagagcgcatgctttgc

SEQ ID NO: 16078 - DNA, 32 bp, Homo sapiens
  source 1..32: mol_type = genomic DNA
gatgtagctcagtggtagagcgcgcgcttcgc

SEQ ID NO: 16079 - DNA, 16 bp, Homo sapiens
  source 1..16: mol_type = genomic DNA
gattaagagaaccaac

SEQ ID NO: 16080 - DNA, 18 bp, Homo sapiens
  source 1..18: mol_type = genomic DNA
gattaagagaaccaacac

SEQ ID NO: 16081 - DNA, 19 bp, Homo sapiens
  source 1..19: mol_type = genomic DNA
gattaagagaaccaacacc

SEQ ID NO: 16082 - DNA, 20 bp, Homo sapiens
  source 1..20: mol_type = genomic DNA
gattaagagaaccaacacct

SEQ ID NO: 16083 - DNA, 21 bp, Homo sapiens
  source 1..21: mol_type = genomic DNA
gattaagagaaccaacacctc

SEQ ID NO: 16084 - DNA, 22 bp, Homo sapiens
  source 1..22: mol_type = genomic DNA
gattaagagaaccaacacctct

SEQ ID NO: 16085 - DNA, 24 bp, Homo sapiens
  source 1..24: mol_type = genomic DNA
gattaagagaaccaacacctcttt

SEQ ID NO: 16086 - DNA, 25 bp, Homo sapiens
  source 1..25: mol_type = genomic DNA
gattaagagaaccaacacctcttta

SEQ ID NO: 16087 - DNA, 27 bp, Homo sapiens
  source 1..27: mol_type = genomic DNA
gattaagagaaccaacacctctttaca

SEQ ID NO: 16088 - DNA, 30 bp, Homo sapiens
  source 1..30: mol_type = genomic DNA
gattaagagaaccaacacctctttacagtg

SEQ ID NO: 16089 - DNA, 31 bp, Homo sapiens
  source 1..31: mol_type = genomic DNA
gattaagagaaccaacacctctttacagtga

SEQ ID NO: 16090 - DNA, 32 bp, Homo sapiens
  source 1..32: mol_type = genomic DNA
gattaagagaaccaacacctctttacagtgac

SEQ ID NO: 16091 - DNA, 33 bp, Homo sapiens
  source 1..33: mol_type = genomic DNA
gattaagagaaccaacacctctttacagtgacc

SEQ ID NO: 16092 - DNA, 34 bp, Homo sapiens
  source 1..34: mol_type = genomic DNA
gattaagagaaccaacacctctttacagtgacca

SEQ ID NO: 16093 - DNA, 19 bp, Homo sapiens
  source 1..19: mol_type = genomic DNA
gattagctcaaatggtaga

SEQ ID NO: 16094 - DNA, 20 bp, Homo sapiens
  source 1..20: mol_type = genomic DNA
gattagctcaaatggtagag

SEQ ID NO: 16095 - DNA, 16 bp, Homo sapiens
  source 1..16: mol_type = genomic DNA
gattagggtgcttagc

SEQ ID NO: 16096 - DNA, 17 bp, Homo sapiens
  source 1..17: mol_type = genomic DNA
gattagggtgcttagct

SEQ ID NO: 16097 - DNA, 19 bp, Homo sapiens
  source 1..19: mol_type = genomic DNA
gattagggtgcttagctgt

SEQ ID NO: 16098 - DNA, 20 bp, Homo sapiens
  source 1..20: mol_type = genomic DNA
gattagggtgcttagctgtt

SEQ ID NO: 16099 - DNA, 22 bp, Homo sapiens
  source 1..22: mol_type = genomic DNA
gattagggtgcttagctgttaa

SEQ ID NO: 16100 - DNA, 24 bp, Homo sapiens
  source 1..24: mol_type = genomic DNA
gattagggtgcttagctgttaact

SEQ ID NO: 16101 - DNA, 25 bp, Homo sapiens
  source 1..25: mol_type = genomic DNA
gattagggtgcttagctgttaacta

SEQ ID NO: 16102 - DNA, 31 bp, Homo sapiens
  source 1..31: mol_type = genomic DNA
gattagggtgcttagctgttaactaagtgtt

SEQ ID NO: 16103 - DNA, 33 bp, Homo sapiens
  source 1..33: mol_type = genomic DNA
gattagggtgcttagctgttaactaagtgtttg

SEQ ID NO: 16104 - DNA, 34 bp, Homo sapiens
  source 1..34: mol_type = genomic DNA
gattagggtgcttagctgttaactaagtgtttgt

SEQ ID NO: 16105 - DNA, 39 bp, Homo sapiens
  source 1..39: mol_type = genomic DNA
gattagggtgcttagctgttaactaagtgtttgtgggtt

SEQ ID NO: 16106 - DNA, 40 bp, Homo sapiens
  source 1..40: mol_type = genomic DNA
gattagggtgcttagctgttaactaagtgtttgtgggttt

SEQ ID NO: 16107 - DNA, 17 bp, Homo sapiens
  source 1..17: mol_type = genomic DNA
gattccaggttcgactc

SEQ ID NO: 16108 - DNA, 27 bp, Homo sapiens
  source 1..27: mol_type = genomic DNA
gattccaggttcgactcctggctggct

SEQ ID NO: 16109 - DNA, 28 bp, Homo sapiens
  source 1..28: mol_type = genomic DNA
gattccaggttcgactcctggctggctc

SEQ ID NO: 16110 - DNA, 29 bp, Homo sapiens
  source 1..29: mol_type = genomic DNA
gattccaggttcgactcctggctggctcg

SEQ ID NO: 16111 - DNA, 30 bp, Homo sapiens
  source 1..30: mol_type = genomic DNA
gattccaggttcgactcctggctggctcgc

SEQ ID NO: 16112 - DNA, 31 bp, Homo sapiens
  source 1..31: mol_type = genomic DNA
gattccaggttcgactcctggctggctcgcc

SEQ ID NO: 16113 - DNA, 18 bp, Homo sapiens
  source 1..18: mol_type = genomic DNA
gattcccattcttgcgac

SEQ ID NO: 16114 - DNA, 19 bp, Homo sapiens
  source 1..19: mol_type = genomic DNA
gattcccattcttgcgacc

SEQ ID NO: 16115 - DNA, 22 bp, Homo sapiens
  source 1..22: mol_type = genomic DNA
gattcccattcttgcgacccgg

SEQ ID NO: 16116 - DNA, 45 bp, Homo sapiens
  source 1..45: mol_type = genomic DNA
gattcccattcttgcgacccgggttcgattcccgggcggcgcacc

SEQ ID NO: 16117 - DNA, 46 bp, Homo sapiens
  source 1..46: mol_type = genomic DNA
gattcccattcttgcgacccgggttcgattcccgggcggcgcacca

SEQ ID NO: 16118 - DNA, 17 bp, Homo sapiens
  source 1..17: mol_type = genomic DNA
gattccccgacggggag

SEQ ID NO: 16119 - DNA, 18 bp, Homo sapiens
  source 1..18: mol_type = genomic DNA
gattccccgacggggagc

SEQ ID NO: 16120 - DNA, 19 bp, Homo sapiens
  source 1..19: mol_type = genomic DNA
gattccccgacggggagcc

SEQ ID NO: 16121 - DNA, 20 bp, Homo sapiens
  source 1..20: mol_type = genomic DNA
gattccccgacggggagcca

SEQ ID NO: 16122 - DNA, 19 bp, Homo sapiens
  source 1..19: mol_type = genomic DNA
gattcccggccaacgcacc

SEQ ID NO: 16123 - DNA, 20 bp, Homo sapiens
  source 1..20: mol_type = genomic DNA
gattcccggccaacgcacca

SEQ ID NO: 16124 - DNA, 17 bp, Homo sapiens
  source 1..17: mol_type = genomic DNA
gattcccggccaatgca

SEQ ID NO: 16125 - DNA, 18 bp, Homo sapiens
  source 1..18: mol_type = genomic DNA
gattcccggccaatgcac

SEQ ID NO: 16126 - DNA, 19 bp, Homo sapiens
  source 1..19: mol_type = genomic DNA
gattcccggccaatgcacc

SEQ ID NO: 16127 - DNA, 20 bp, Homo sapiens
  source 1..20: mol_type = genomic DNA
gattcccggccaatgcacca

SEQ ID NO: 16128 - DNA, 19 bp, Homo sapiens
  source 1..19: mol_type = genomic DNA
gattcccgggcggcgcacc

SEQ ID NO: 16129 - DNA, 20 bp, Homo sapiens
  source 1..20: mol_type = genomic DNA
gattcccgggcggcgcacca

SEQ ID NO: 16130 - DNA, 18 bp, Homo sapiens
  source 1..18: mol_type = genomic DNA
gattcccggtcagggaac

SEQ ID NO: 16131 - DNA, 19 bp, Homo sapiens
  source 1..19: mol_type = genomic DNA
gattcccggtcagggaacc

SEQ ID NO: 16132 - DNA, 16 bp, Homo sapiens
  source 1..16: mol_type = genomic DNA
gattccggatcagaag

SEQ ID NO: 16133 - DNA, 17 bp, Homo sapiens
  source 1..17: mol_type = genomic DNA
gattccggatcagaaga

SEQ ID NO: 16134 - DNA, 20 bp, Homo sapiens
  source 1..20: mol_type = genomic DNA
gattccggatcagaagattg

SEQ ID NO: 16135 - DNA, 21 bp, Homo sapiens
  source 1..21: mol_type = genomic DNA
gattccggatcagaagattga

SEQ ID NO: 16136 - DNA, 22 bp, Homo sapiens
  source 1..22: mol_type = genomic DNA
gattccggatcagaagattgag

SEQ ID NO: 16137 - DNA, 27 bp, Homo sapiens
  source 1..27: mol_type = genomic DNA
gattccggatcagaagattgagggttc

SEQ ID NO: 16138 - DNA, 46 bp, Homo sapiens
  source 1..46: mol_type = genomic DNA
gattccggatcagaagattgagggttcgagtcccttcgtggtcgcc

SEQ ID NO: 16139 - DNA, 47 bp, Homo sapiens
  source 1..47: mol_type = genomic DNA
gattccggatcagaagattgagggttcgagtcccttcgtggtcgcca

SEQ ID NO: 16140 - DNA, 17 bp, Homo sapiens
  source 1..17: mol_type = genomic DNA
gattccggctcgaagga

SEQ ID NO: 16141 - DNA, 18 bp, Homo sapiens
  source 1..18: mol_type = genomic DNA
gattccggctcgaaggac

SEQ ID NO: 16142 - DNA, 19 bp, Homo sapiens
  source 1..19: mol_type = genomic DNA
gattccggctcgaaggacc

SEQ ID NO: 16143 - DNA, 20 bp, Homo sapiens
  source 1..20: mol_type = genomic DNA
gattccggctcgaaggacca

SEQ ID NO: 16144 - DNA, 33 bp, Homo sapiens
  source 1..33: mol_type = genomic DNA
gattcctggttttcacccaggcggcccgggttc

SEQ ID NO: 16145 - DNA, 19 bp, Homo sapiens
  source 1..19: mol_type = genomic DNA
gattccttccttttttgcc

SEQ ID NO: 16146 - DNA, 20 bp, Homo sapiens
  source 1..20: mol_type = genomic DNA
gattccttccttttttgcca

SEQ ID NO: 16147 - DNA, 16 bp, Homo sapiens
  source 1..16: mol_type = genomic DNA
gattcggcgctctcac

SEQ ID NO: 16148 - DNA, 17 bp, Homo sapiens
  source 1..17: mol_type = genomic DNA
gattcggcgctctcacc

SEQ ID NO: 16149 - DNA, 18 bp, Homo sapiens
  source 1..18: mol_type = genomic DNA
gattcggcgctctcaccg

SEQ ID NO: 16150 - DNA, 19 bp, Homo sapiens
  source 1..19: mol_type = genomic DNA
gattcggcgctctcaccgc

SEQ ID NO: 16151 - DNA, 20 bp, Homo sapiens
  source 1..20: mol_type = genomic DNA
gattcggcgctctcaccgcc

SEQ ID NO: 16152 - DNA, 26 bp, Homo sapiens
  source 1..26: mol_type = genomic DNA
gattcggcgctctcaccgccgcggcc

SEQ ID NO: 16153 - DNA, 27 bp, Homo sapiens
  source 1..27: mol_type = genomic DNA
gattcggcgctctcaccgccgcggccc

SEQ ID NO: 16154 - DNA, 28 bp, Homo sapiens
  source 1..28: mol_type = genomic DNA
gattcggcgctctcaccgccgcggcccg

SEQ ID NO: 16155 - DNA, 29 bp, Homo sapiens
  source 1..29: mol_type = genomic DNA
gattcggcgctctcaccgccgcggcccgg

SEQ ID NO: 16156 - DNA, 30 bp, Homo sapiens
  source 1..30: mol_type = genomic DNA
gattcggcgctctcaccgccgcggcccggg

SEQ ID NO: 16157 - DNA, 31 bp, Homo sapiens
  source 1..31: mol_type = genomic DNA
gattcggcgctctcaccgccgcggcccgggt

SEQ ID NO: 16158 - DNA, 32 bp, Homo sapiens
  source 1..32: mol_type = genomic DNA
gattcggcgctctcaccgccgcggcccgggtt

SEQ ID NO: 16159 - DNA, 33 bp, Homo sapiens
  source 1..33: mol_type = genomic DNA
gattcggcgctctcaccgccgcggcccgggttc

SEQ ID NO: 16160 - DNA, 36 bp, Homo sapiens
  source 1..36: mol_type = genomic DNA
gattcggcgctctcaccgccgcggcccgggttcgat

SEQ ID NO: 16161 - DNA, 37 bp, Homo sapiens
  source 1..37: mol_type = genomic DNA
gattcggcgctctcaccgccgcggcccgggttcgatt

SEQ ID NO: 16162 - DNA, 38 bp, Homo sapiens
  source 1..38: mol_type = genomic DNA
gattcggcgctctcaccgccgcggcccgggttcgattc

SEQ ID NO: 16163 - DNA, 27 bp, Homo sapiens
  source 1..27: mol_type = genomic DNA
gattcggcgctttcaccgccgcggccc

SEQ ID NO: 16164 - DNA, 28 bp, Homo sapiens
  source 1..28: mol_type = genomic DNA
gattcggcgctttcaccgccgcggcccg

SEQ ID NO: 16165 - DNA, 16 bp, Homo sapiens
  source 1..16: mol_type = genomic DNA
gattctaggttcgact

SEQ ID NO: 16166 - DNA, 22 bp, Homo sapiens
  source 1..22: mol_type = genomic DNA
gattctaggttcgactcctggc

SEQ ID NO: 16167 - DNA, 27 bp, Homo sapiens
  source 1..27: mol_type = genomic DNA
gattctaggttcgactcctggctggct

SEQ ID NO: 16168 - DNA, 28 bp, Homo sapiens
  source 1..28: mol_type = genomic DNA
gattctaggttcgactcctggctggctc

SEQ ID NO: 16169 - DNA, 29 bp, Homo sapiens
  source 1..29: mol_type = genomic DNA
gattctaggttcgactcctggctggctcg

SEQ ID NO: 16170 - DNA, 30 bp, Homo sapiens
  source 1..30: mol_type = genomic DNA
gattctaggttcgactcctggctggctcgc

SEQ ID NO: 16171 - DNA, 31 bp, Homo sapiens
  source 1..31: mol_type = genomic DNA
gattctaggttcgactcctggctggctcgcc

SEQ ID NO: 16172 - DNA, 32 bp, Homo sapiens
  source 1..32: mol_type = genomic DNA
gattctaggttcgactcctggctggctcgcca

SEQ ID NO: 16173 - DNA, 33 bp, Homo sapiens
  source 1..33: mol_type = genomic DNA
gattctcagggatgggttcgattctcatagtcc

SEQ ID NO: 16174 - DNA, 36 bp, Homo sapiens
  source 1..36: mol_type = genomic DNA
gattctcagggatgggttcgattctcatagtcctag

SEQ ID NO: 16175 - DNA, 37 bp, Homo sapiens
  source 1..37: mol_type = genomic DNA
gattctcagggatgggttcgattctcatagtcctagc

SEQ ID NO: 16176 - DNA, 38 bp, Homo sapiens
  source 1..38: mol_type = genomic DNA
gattctcagggatgggttcgattctcatagtcctagcc

SEQ ID NO: 16177 - DNA, 39 bp, Homo sapiens
  source 1..39: mol_type = genomic DNA
gattctcagggatgggttcgattctcatagtcctagcca

SEQ ID NO: 16178 - DNA, 17 bp, Homo sapiens
  source 1..17: mol_type = genomic DNA
gattctcatagtcctag

SEQ ID NO: 16179 - DNA, 18 bp, Homo sapiens
  source 1..18: mol_type = genomic DNA
gattctcatagtcctagc

SEQ ID NO: 16180 - DNA, 19 bp, Homo sapiens
  source 1..19: mol_type = genomic DNA
gattctcatagtcctagcc

SEQ ID NO: 16181 - DNA, 20 bp, Homo sapiens
  source 1..20: mol_type = genomic DNA
gattctcatagtcctagcca

SEQ ID NO: 16182 - DNA, 20 bp, Homo sapiens
  source 1..20: mol_type = genomic DNA
gattctcggtttgggtccga

SEQ ID NO: 16183 - DNA, 33 bp, Homo sapiens
  source 1..33: mol_type = genomic DNA
gattgaagccagttgattagggtgcttagctgt

SEQ ID NO: 16184 - DNA, 34 bp, Homo sapiens
  source 1..34: mol_type = genomic DNA
gattgaagccagttgattagggtgcttagctgtt

SEQ ID NO: 16185 - DNA, 31 bp, Homo sapiens
  source 1..31: mol_type = genomic DNA
gattgagggttcgaatcccttcgtggttacc

SEQ ID NO: 16186 - DNA, 29 bp, Homo sapiens
  source 1..29: mol_type = genomic DNA
gattgagggttcgaatcccttcgtggttg

SEQ ID NO: 16187 - DNA, 31 bp, Homo sapiens
  source 1..31: mol_type = genomic DNA
gattgagggttcgaatcccttcgtggttgcc

SEQ ID NO: 16188 - DNA, 17 bp, Homo sapiens
  source 1..17: mol_type = genomic DNA
gattgagggttcgagtc

SEQ ID NO: 16189 - DNA, 20 bp, Homo sapiens
  source 1..20: mol_type = genomic DNA
gattgagggttcgagtccct

SEQ ID NO: 16190 - DNA, 29 bp, Homo sapiens
  source 1..29: mol_type = genomic DNA
gattgagggttcgagtcccttcgtggtcg

SEQ ID NO: 16191 - DNA, 30 bp, Homo sapiens
  source 1..30: mol_type = genomic DNA
gattgagggttcgagtcccttcgtggtcgc

SEQ ID NO: 16192 - DNA, 31 bp, Homo sapiens
  source 1..31: mol_type = genomic DNA
gattgagggttcgagtcccttcgtggtcgcc

SEQ ID NO: 16193 - DNA, 32 bp, Homo sapiens
  source 1..32: mol_type = genomic DNA
gattgagggttcgagtcccttcgtggtcgcca

SEQ ID NO: 16194 - DNA, 20 bp, Homo sapiens
  source 1..20: mol_type = genomic DNA
gattgcaggttcgagtcctg

SEQ ID NO: 16195 - DNA, 30 bp, Homo sapiens
  source 1..30: mol_type = genomic DNA
gattgcaggttcgagtcctgccgcggtcgc

SEQ ID NO: 16196 - DNA, 31 bp, Homo sapiens
  source 1..31: mol_type = genomic DNA
gattgcaggttcgagtcctgccgcggtcgcc

SEQ ID NO: 16197 - DNA, 32 bp, Homo sapiens
  source 1..32: mol_type = genomic DNA
gattgcaggttcgagtcctgccgcggtcgcca

SEQ ID NO: 16198 - DNA, 16 bp, Homo sapiens
  source 1..16: mol_type = genomic DNA
gattgtgaatctgaca

SEQ ID NO: 16199 - DNA, 17 bp, Homo sapiens
  source 1..17: mol_type = genomic DNA
gattgtgaatctgacaa

SEQ ID NO: 16200 - DNA, 18 bp, Homo sapiens
  source 1..18: mol_type = genomic DNA
gattgtgaatctgacaac

SEQ ID NO: 16201 - DNA, 19 bp, Homo sapiens
  source 1..19: mol_type = genomic DNA
gattgtgaatctgacaaca

SEQ ID NO: 16202 - DNA, 20 bp, Homo sapiens
  source 1..20: mol_type = genomic DNA
gattgtgaatctgacaacag

SEQ ID NO: 16203 - DNA, 21 bp, Homo sapiens
  source 1..21: mol_type = genomic DNA
gattgtgaatctgacaacaga

SEQ ID NO: 16204 - DNA, 22 bp, Homo sapiens
  source 1..22: mol_type = genomic DNA
gattgtgaatctgacaacagag

SEQ ID NO: 16205 - DNA, 23 bp, Homo sapiens
  source 1..23: mol_type = genomic DNA
gattgtgaatctgacaacagagg

SEQ ID NO: 16206 - DNA, 24 bp, Homo sapiens
  source 1..24: mol_type = genomic DNA
gattgtgaatctgacaacagaggc

SEQ ID NO: 16207 - DNA, 25 bp, Homo sapiens
  source 1..25: mol_type = genomic DNA
gattgtgaatctgacaacagaggct

SEQ ID NO: 16208 - DNA, 26 bp, Homo sapiens
  source 1..26: mol_type = genomic DNA
gattgtgaatctgacaacagaggctt

SEQ ID NO: 16209 - DNA, 27 bp, Homo sapiens
  source 1..27: mol_type = genomic DNA
gattgtgaatctgacaacagaggctta

SEQ ID NO: 16210 - DNA, 28 bp, Homo sapiens
  source 1..28: mol_type = genomic DNA
gattgtgaatctgacaacagaggcttac

SEQ ID NO: 16211 - DNA, 29 bp, Homo sapiens
  source 1..29: mol_type = genomic DNA
gattgtgaatctgacaacagaggcttacg

SEQ ID NO: 16212 - DNA, 30 bp, Homo sapiens
  source 1..30: mol_type = genomic DNA
gattgtgaatctgacaacagaggcttacga

SEQ ID NO: 16213 - DNA, 31 bp, Homo sapiens
  source 1..31: mol_type = genomic DNA
gattgtgaatctgacaacagaggcttacgac

SEQ ID NO: 16214 - DNA, 32 bp, Homo sapiens
  source 1..32: mol_type = genomic DNA
gattgtgaatctgacaacagaggcttacgacc

SEQ ID NO: 16215 - DNA, 33 bp, Homo sapiens
  source 1..33: mol_type = genomic DNA
gattgtgaatctgacaacagaggcttacgaccc

SEQ ID NO: 16216 - DNA, 34 bp, Homo sapiens
  source 1..34: mol_type = genomic DNA
gattgtgaatctgacaacagaggcttacgacccc

SEQ ID NO: 16217 - DNA, 35 bp, Homo sapiens
  source 1..35: mol_type = genomic DNA
gattgtgaatctgacaacagaggcttacgacccct

SEQ ID NO: 16218 - DNA, 36 bp, Homo sapiens
  source 1..36: mol_type = genomic DNA
gattgtgaatctgacaacagaggcttacgacccctt

SEQ ID NO: 16219 - DNA, 37 bp, Homo sapiens
  source 1..37: mol_type = genomic DNA
gattgtgaatctgacaacagaggcttacgacccctta

SEQ ID NO: 16220 - DNA, 38 bp, Homo sapiens
  source 1..38: mol_type = genomic DNA
gattgtgaatctgacaacagaggcttacgaccccttat

SEQ ID NO: 16221 - DNA, 39 bp, Homo sapiens
  source 1..39: mol_type = genomic DNA
gattgtgaatctgacaacagaggcttacgaccccttatt

SEQ ID NO: 16222 - DNA, 40 bp, Homo sapiens
  source 1..40: mol_type = genomic DNA
gattgtgaatctgacaacagaggcttacgaccccttattt

SEQ ID NO: 16223 - DNA, 41 bp, Homo sapiens
  source 1..41: mol_type = genomic DNA
gattgtgaatctgacaacagaggcttacgaccccttattta

SEQ ID NO: 16224 - DNA, 42 bp, Homo sapiens
  source 1..42: mol_type = genomic DNA
gattgtgaatctgacaacagaggcttacgaccccttatttac

SEQ ID NO: 16225 - DNA, 43 bp, Homo sapiens
  source 1..43: mol_type = genomic DNA
gattgtgaatctgacaacagaggcttacgaccccttatttacc

SEQ ID NO: 16226 - DNA, 44 bp, Homo sapiens
  source 1..44: mol_type = genomic DNA
gattgtgaatctgacaacagaggcttacgaccccttatttaccc

SEQ ID NO: 16227 - DNA, 45 bp, Homo sapiens
  source 1..45: mol_type = genomic DNA
gattgtgaatctgacaacagaggcttacgaccccttatttacccc

SEQ ID NO: 16228 - DNA, 46 bp, Homo sapiens
  source 1..46: mol_type = genomic DNA
gattgtgaatctgacaacagaggcttacgaccccttatttacccca

SEQ ID NO: 16229 - DNA, 29 bp, Homo sapiens
  source 1..29: mol_type = genomic DNA
gattgtgggttcgagtcccacctggggtg

SEQ ID NO: 16230 - DNA, 24 bp, Homo sapiens
  source 1..24: mol_type = genomic DNA
gattgtgggttcgagtcccatctg

SEQ ID NO: 16231 - DNA, 29 bp, Homo sapiens
  source 1..29: mol_type = genomic DNA
gattgtgggttcgagtcccatctggggtg

SEQ ID NO: 16232 - DNA, 30 bp, Homo sapiens
  source 1..30: mol_type = genomic DNA
gattgtgggttcgagtcccatctggggtgc

SEQ ID NO: 16233 - DNA, 31 bp, Homo sapiens
  source 1..31: mol_type = genomic DNA
gattgtgggttcgagtcccatctggggtgcc

SEQ ID NO: 16234 - DNA, 32 bp, Homo sapiens
  source 1..32: mol_type = genomic DNA
gattgtgggttcgagtcccatctggggtgcca

SEQ ID NO: 16235 - DNA, 28 bp, Homo sapiens
  source 1..28: mol_type = genomic DNA
gattgtgggttcgagtcccatctgggtc

SEQ ID NO: 16236 - DNA, 29 bp, Homo sapiens
  source 1..29: mol_type = genomic DNA
gattgtgggttcgagtcccatctgggtcg

SEQ ID NO: 16237 - DNA, 30 bp, Homo sapiens
  source 1..30: mol_type = genomic DNA
gattgtgggttcgagtcccatctgggtcgc

SEQ ID NO: 16238 - DNA, 31 bp, Homo sapiens
  source 1..31: mol_type = genomic DNA
gattgtgggttcgagtcccatctgggtcgcc

SEQ ID NO: 16239 - DNA, 32 bp, Homo sapiens
  source 1..32: mol_type = genomic DNA
gattgtgggttcgagtcccatctgggtcgcca

SEQ ID NO: 16240 - DNA, 19 bp, Homo sapiens
  source 1..19: mol_type = genomic DNA
gatttaggctccagtcatt

SEQ ID NO: 16241 - DNA, 17 bp, Homo sapiens
  source 1..17: mol_type = genomic DNA
gatttcaacttaacttg

SEQ ID NO: 16242 - DNA, 19 bp, Homo sapiens
  source 1..19: mol_type = genomic DNA
gatttcaacttaacttgac

SEQ ID NO: 16243 - DNA, 20 bp, Homo sapiens
  source 1..20: mol_type = genomic DNA
gatttcaacttaacttgacc

SEQ ID NO: 16244 - DNA, 21 bp, Homo sapiens
  source 1..21: mol_type = genomic DNA
gatttcaacttaacttgaccg

SEQ ID NO: 16245 - DNA, 22 bp, Homo sapiens
  source 1..22: mol_type = genomic DNA
gatttcaacttaacttgaccgc

SEQ ID NO: 16246 - DNA, 23 bp, Homo sapiens
  source 1..23: mol_type = genomic DNA
gatttcaacttaacttgaccgct

SEQ ID NO: 16247 - DNA, 24 bp, Homo sapiens
  source 1..24: mol_type = genomic DNA
gatttcaacttaacttgaccgctc

SEQ ID NO: 16248 - DNA, 25 bp, Homo sapiens
  source 1..25: mol_type = genomic DNA
gatttcaacttaacttgaccgctct

SEQ ID NO: 16249 - DNA, 26 bp, Homo sapiens
  source 1..26: mol_type = genomic DNA
gatttcaacttaacttgaccgctctg

SEQ ID NO: 16250 - DNA, 27 bp, Homo sapiens
  source 1..27: mol_type = genomic DNA
gatttcaacttaacttgaccgctctga

SEQ ID NO: 16251 - DNA, 28 bp, Homo sapiens
  source 1..28: mol_type = genomic DNA
gatttcaacttaacttgaccgctctgac

SEQ ID NO: 16252 - DNA, 29 bp, Homo sapiens
  source 1..29: mol_type = genomic DNA
gatttcaacttaacttgaccgctctgacc

SEQ ID NO: 16253 - DNA, 30 bp, Homo sapiens
  source 1..30: mol_type = genomic DNA
gatttcaacttaacttgaccgctctgacca

SEQ ID NO: 16254 - DNA, 16 bp, Homo sapiens
  source 1..16: mol_type = genomic DNA
gatttcgactcattaa

SEQ ID NO: 16255 - DNA, 17 bp, Homo sapiens
  source 1..17: mol_type = genomic DNA
gatttcgactcattaaa

SEQ ID NO: 16256 - DNA, 18 bp, Homo sapiens
  source 1..18: mol_type = genomic DNA
gatttcgactcattaaat

SEQ ID NO: 16257 - DNA, 19 bp, Homo sapiens
  source 1..19: mol_type = genomic DNA
gatttcgactcattaaatt

SEQ ID NO: 16258 - DNA, 20 bp, Homo sapiens
  source 1..20: mol_type = genomic DNA
gatttcgactcattaaatta

SEQ ID NO: 16259 - DNA, 21 bp, Homo sapiens
  source 1..21: mol_type = genomic DNA
gatttcgactcattaaattat

SEQ ID NO: 16260 - DNA, 22 bp, Homo sapiens
  source 1..22: mol_type = genomic DNA
gatttcgactcattaaattatg

SEQ ID NO: 16261 - DNA, 23 bp, Homo sapiens
  source 1..23: mol_type = genomic DNA
gatttcgactcattaaattatga

SEQ ID NO: 16262 - DNA, 24 bp, Homo sapiens
  source 1..24: mol_type = genomic DNA
gatttcgactcattaaattatgat

SEQ ID NO: 16263 - DNA, 25 bp, Homo sapiens
  source 1..25: mol_type = genomic DNA
gatttcgactcattaaattatgata

SEQ ID NO: 16264 - DNA, 26 bp, Homo sapiens
  source 1..26: mol_type = genomic DNA
gatttcgactcattaaattatgataa

SEQ ID NO: 16265 - DNA, 27 bp, Homo sapiens
  source 1..27: mol_type = genomic DNA
gatttcgactcattaaattatgataat

SEQ ID NO: 16266 - DNA, 28 bp, Homo sapiens
  source 1..28: mol_type = genomic DNA
gatttcgactcattaaattatgataatc

SEQ ID NO: 16267 - DNA, 29 bp, Homo sapiens
  source 1..29: mol_type = genomic DNA
gatttcgactcattaaattatgataatca

SEQ ID NO: 16268 - DNA, 35 bp, Homo sapiens
  source 1..35: mol_type = genomic DNA
gatttcgactcattaaattatgataatcatattta

SEQ ID NO: 16269 - DNA, 36 bp, Homo sapiens
  source 1..36: mol_type = genomic DNA
gatttcgactcattaaattatgataatcatatttac

SEQ ID NO: 16270 - DNA, 37 bp, Homo sapiens
  source 1..37: mol_type = genomic DNA
gatttcgactcattaaattatgataatcatatttacc

SEQ ID NO: 16271 - DNA, 38 bp, Homo sapiens
  source 1..38: mol_type = genomic DNA
gatttcgactcattaaattatgataatcatatttacca

SEQ ID NO: 16272 - DNA, 39 bp, Homo sapiens
  source 1..39: mol_type = genomic DNA
gatttcgactcattaaattatgataatcatatttaccaa

SEQ ID NO: 16273 - DNA, 40 bp, Homo sapiens
  source 1..40: mol_type = genomic DNA
gatttcgactcattaaattatgataatcatatttaccaac

SEQ ID NO: 16274 - DNA, 41 bp, Homo sapiens
  source 1..41: mol_type = genomic DNA
gatttcgactcattaaattatgataatcatatttaccaacc

SEQ ID NO: 16275 - DNA, 42 bp, Homo sapiens
  source 1..42: mol_type = genomic DNA
gatttcgactcattaaattatgataatcatatttaccaacca

SEQ ID NO: 16276 - DNA, 16 bp, Homo sapiens
  source 1..16: mol_type = genomic DNA
gatttgcgttcagttg

SEQ ID NO: 16277 - DNA, 18 bp, Homo sapiens
  source 1..18: mol_type = genomic DNA
gatttgcgttcagttgat

SEQ ID NO: 16278 - DNA, 19 bp, Homo sapiens
  source 1..19: mol_type = genomic DNA
gatttgcgttcagttgatg

SEQ ID NO: 16279 - DNA, 20 bp, Homo sapiens
  source 1..20: mol_type = genomic DNA
gatttgcgttcagttgatgc

SEQ ID NO: 16280 - DNA, 28 bp, Homo sapiens
  source 1..28: mol_type = genomic DNA
gatttgcgttcagttgatgcagagtggg

SEQ ID NO: 16281 - DNA, 18 bp, Homo sapiens
  source 1..18: mol_type = genomic DNA
gattttcatattgaattg

SEQ ID NO: 16282 - DNA, 19 bp, Homo sapiens
  source 1..19: mol_type = genomic DNA
gattttcatattgaattgc

SEQ ID NO: 16283 - DNA, 20 bp, Homo sapiens
  source 1..20: mol_type = genomic DNA
gattttcatattgaattgca

SEQ ID NO: 16284 - DNA, 23 bp, Homo sapiens
  source 1..23: mol_type = genomic DNA
gattttcatattgaattgcaaat

SEQ ID NO: 16285 - DNA, 25 bp, Homo sapiens
  source 1..25: mol_type = genomic DNA
gattttcatattgaattgcaaattc

SEQ ID NO: 16286 - DNA, 29 bp, Homo sapiens
  source 1..29: mol_type = genomic DNA
gattttcatattgaattgcaaattcgaag

SEQ ID NO: 16287 - DNA, 18 bp, Homo sapiens
  source 1..18: mol_type = genomic DNA
gcaaattcgaagaagcag

SEQ ID NO: 16288 - DNA, 29 bp, Homo sapiens
  source 1..29: mol_type = genomic DNA
gcaaattcgaagaagcagcttcaaacctg

SEQ ID NO: 16289 - DNA, 36 bp, Homo sapiens
  source 1..36: mol_type = genomic DNA
gcaaattcgaagaagcagcttcaaacctgccggggc

SEQ ID NO: 16290 - DNA, 37 bp, Homo sapiens
  source 1..37: mol_type = genomic DNA
gcaaattcgaagaagcagcttcaaacctgccggggct

SEQ ID NO: 16291 - DNA, 38 bp, Homo sapiens
  source 1..38: mol_type = genomic DNA
gcaaattcgaagaagcagcttcaaacctgccggggctt

SEQ ID NO: 16292 - DNA, 39 bp, Homo sapiens
  source 1..39: mol_type = genomic DNA
gcaaattcgaagaagcagcttcaaacctgccggggcttc

SEQ ID NO: 16293 - DNA, 40 bp, Homo sapiens
  source 1..40: mol_type = genomic DNA
gcaaattcgaagaagcagcttcaaacctgccggggcttcc

SEQ ID NO: 16294 - DNA, 41 bp, Homo sapiens
  source 1..41: mol_type = genomic DNA
gcaaattcgaagaagcagcttcaaacctgccggggcttcca

SEQ ID NO: 16295 - DNA, 20 bp, Homo sapiens
  source 1..20: mol_type = genomic DNA
gcaacctcggttcgaatccg

SEQ ID NO: 16296 - DNA, 29 bp, Homo sapiens
  source 1..29: mol_type = genomic DNA
gcaacctcggttcgaatccgagtcacggc

SEQ ID NO: 16297 - DNA, 31 bp, Homo sapiens
  source 1..31: mol_type = genomic DNA
gcaacctcggttcgaatccgagtcacggcac

SEQ ID NO: 16298 - DNA, 32 bp, Homo sapiens
  source 1..32: mol_type = genomic DNA
gcaacctcggttcgaatccgagtcacggcacc

SEQ ID NO: 16299 - DNA, 23 bp, Homo sapiens
  source 1..23: mol_type = genomic DNA
gcaacggtagcgcgtctgactcc

SEQ ID NO: 16300 - DNA, 19 bp, Homo sapiens
  source 1..19: mol_type = genomic DNA
gcaactccaaataaaagta

SEQ ID NO: 16301 - DNA, 20 bp, Homo sapiens
  source 1..20: mol_type = genomic DNA
gcaactccaaataaaagtac

SEQ ID NO: 16302 - DNA, 21 bp, Homo sapiens
  source 1..21: mol_type = genomic DNA
gcaactccaaataaaagtacc

SEQ ID NO: 16303 - DNA, 22 bp, Homo sapiens
  source 1..22: mol_type = genomic DNA
gcaactccaaataaaagtacca

SEQ ID NO: 16304 - DNA, 27 bp, Homo sapiens
  source 1..27: mol_type = genomic DNA
gcaagattcccattcttgcgacccggg

SEQ ID NO: 16305 - DNA, 28 bp, Homo sapiens
  source 1..28: mol_type = genomic DNA
gcaagattcccattcttgcgacccgggt

SEQ ID NO: 16306 - DNA, 29 bp, Homo sapiens
  source 1..29: mol_type = genomic DNA
gcaagattcccattcttgcgacccgggtt

SEQ ID NO: 16307 - DNA, 30 bp, Homo sapiens
  source 1..30: mol_type = genomic DNA
gcaagattcccattcttgcgacccgggttc

SEQ ID NO: 16308 - DNA, 24 bp, Homo sapiens
  source 1..24: mol_type = genomic DNA
gcaatacactgaaaatgtttagac

SEQ ID NO: 16309 - DNA, 28 bp, Homo sapiens
  source 1..28: mol_type = genomic DNA
gcaatacactgaaaatgtttagacgggc

SEQ ID NO: 16310 - DNA, 29 bp, Homo sapiens
  source 1..29: mol_type = genomic DNA
gcaatacactgaaaatgtttagacgggct

SEQ ID NO: 16311 - DNA, 30 bp, Homo sapiens
  source 1..30: mol_type = genomic DNA
gcaatacactgaaaatgtttagacgggctc

SEQ ID NO: 16312 - DNA, 31 bp, Homo sapiens
  source 1..31: mol_type = genomic DNA
gcaatacactgaaaatgtttagacgggctca

SEQ ID NO: 16313 - DNA, 32 bp, Homo sapiens
  source 1..32: mol_type = genomic DNA
gcaatacactgaaaatgtttagacgggctcac

SEQ ID NO: 16314 - DNA, 33 bp, Homo sapiens
  source 1..33: mol_type = genomic DNA
gcaatacactgaaaatgtttagacgggctcaca

SEQ ID NO: 16315 - DNA, 34 bp, Homo sapiens
  source 1..34: mol_type = genomic DNA
gcaatacactgaaaatgtttagacgggctcacat

SEQ ID NO: 16316 - DNA, 35 bp, Homo sapiens
  source 1..35: mol_type = genomic DNA
gcaatacactgaaaatgtttagacgggctcacatc

SEQ ID NO: 16317 - DNA, 41 bp, Homo sapiens
  source 1..41: mol_type = genomic DNA
gcaatacactgaaaatgtttagacgggctcacatcacccca

SEQ ID NO: 16318 - DNA, 47 bp, Homo sapiens
  source 1..47: mol_type = genomic DNA
gcaatacactgaaaatgtttagacgggctcacatcaccccataaaca

SEQ ID NO: 16319 - DNA, 17 bp, Homo sapiens
  source 1..17: mol_type = genomic DNA
gcaatacttaatttctg

SEQ ID NO: 16320 - DNA, 18 bp, Homo sapiens
  source 1..18: mol_type = genomic DNA
gcaatacttaatttctgc

SEQ ID NO: 16321 - DNA, 19 bp, Homo sapiens
  source 1..19: mol_type = genomic DNA
gcaatacttaatttctgcc

SEQ ID NO: 16322 - DNA, 20 bp, Homo sapiens
  source 1..20: mol_type = genomic DNA
gcaatacttaatttctgcca

SEQ ID NO: 16323 - DNA, 31 bp, Homo sapiens
  source 1..31: mol_type = genomic DNA
gcaatccgagttcgaatctcggtgggacctc

SEQ ID NO: 16324 - DNA, 22 bp, Homo sapiens
  source 1..22: mol_type = genomic DNA
gcaatcggttagcgcgcggtac

SEQ ID NO: 16325 - DNA, 25 bp, Homo sapiens
  source 1..25: mol_type = genomic DNA
gcaatcggttagcgcgcggtactta

SEQ ID NO: 16326 - DNA, 29 bp, Homo sapiens
  source 1..29: mol_type = genomic DNA
gcaatcggttagcgcgttcggctgttaac

SEQ ID NO: 16327 - DNA, 19 bp, Homo sapiens
  source 1..19: mol_type = genomic DNA
gcaatggacgagcgcgctg

SEQ ID NO: 16328 - DNA, 21 bp, Homo sapiens
  source 1..21: mol_type = genomic DNA
gcaatggacgagcgcgctgga

SEQ ID NO: 16329 - DNA, 22 bp, Homo sapiens
  source 1..22: mol_type = genomic DNA
gcaatggacgagcgcgctggac

SEQ ID NO: 16330 - DNA, 20 bp, Homo sapiens
  source 1..20: mol_type = genomic DNA
gcaatggataacgcgtctga

SEQ ID NO: 16331 - DNA, 22 bp, Homo sapiens
  source 1..22: mol_type = genomic DNA
gcaatggataacgcgtctgact

SEQ ID NO: 16332 - DNA, 18 bp, Homo sapiens
  source 1..18: mol_type = genomic DNA
gcaatggatagcgcattg

SEQ ID NO: 16333 - DNA, 19 bp, Homo sapiens
  source 1..19: mol_type = genomic DNA
gcaatggatagcgcattgg

SEQ ID NO: 16334 - DNA, 20 bp, Homo sapiens
  source 1..20: mol_type = genomic DNA
gcaatggatagcgcattgga

SEQ ID NO: 16335 - DNA, 30 bp, Homo sapiens
  source 1..30: mol_type = genomic DNA
gcaatggatagcgcattggacttctaattc

SEQ ID NO: 16336 - DNA, 18 bp, Homo sapiens
  source 1..18: mol_type = genomic DNA
gcaatggtggttcagtgg

SEQ ID NO: 16337 - DNA, 27 bp, Homo sapiens
  source 1..27: mol_type = genomic DNA
gcaatggtggttcagtggtagaattct

SEQ ID NO: 16338 - DNA, 28 bp, Homo sapiens
  source 1..28: mol_type = genomic DNA
gcaatggtggttcagtggtagaattctc

SEQ ID NO: 16339 - DNA, 30 bp, Homo sapiens
  source 1..30: mol_type = genomic DNA
gcaatggtggttcagtggtagaattctcgc

SEQ ID NO: 16340 - DNA, 31 bp, Homo sapiens
  source 1..31: mol_type = genomic DNA
gcaatggtggttcagtggtagaattctcgcc

SEQ ID NO: 16341 - DNA, 32 bp, Homo sapiens
  source 1..32: mol_type = genomic DNA
gcaatggtggttcagtggtagaattctcgcct

SEQ ID NO: 16342 - DNA, 16 bp, Homo sapiens
  source 1..16: mol_type = genomic DNA
gcacccaacttacact

SEQ ID NO: 16343 - DNA, 27 bp, Homo sapiens
  source 1..27: mol_type = genomic DNA
gcacccaacttacacttaggagatttc

SEQ ID NO: 16344 - DNA, 35 bp, Homo sapiens
  source 1..35: mol_type = genomic DNA
gcacccaacttacacttaggagatttcaacttaac

SEQ ID NO: 16345 - DNA, 36 bp, Homo sapiens
  source 1..36: mol_type = genomic DNA
gcacccaacttacacttaggagatttcaacttaact

SEQ ID NO: 16346 - DNA, 37 bp, Homo sapiens
  source 1..37: mol_type = genomic DNA
gcacccaacttacacttaggagatttcaacttaactt

SEQ ID NO: 16347 - DNA, 40 bp, Homo sapiens
  source 1..40: mol_type = genomic DNA
gcacccaacttacacttaggagatttcaacttaacttgac

SEQ ID NO: 16348 - DNA, 41 bp, Homo sapiens
  source 1..41: mol_type = genomic DNA
gcacccaacttacacttaggagatttcaacttaacttgacc

SEQ ID NO: 16349 - DNA, 45 bp, Homo sapiens
  source 1..45: mol_type = genomic DNA
gcacccaacttacacttaggagatttcaacttaacttgaccgctc

SEQ ID NO: 16350 - DNA, 46 bp, Homo sapiens
  source 1..46: mol_type = genomic DNA
gcacccaacttacacttaggagatttcaacttaacttgaccgctct

SEQ ID NO: 16351 - DNA, 47 bp, Homo sapiens
  source 1..47: mol_type = genomic DNA
gcacccaacttacacttaggagatttcaacttaacttgaccgctctg

SEQ ID NO: 16352 - DNA, 48 bp, Homo sapiens
  source 1..48: mol_type = genomic DNA
gcacccaacttacacttaggagatttcaacttaacttgaccgctctga

SEQ ID NO: 16353 - DNA, 31 bp, Homo sapiens
  source 1..31: mol_type = genomic DNA
gcacgaggccccgggttcaatccccggcacc

SEQ ID NO: 16354 - DNA, 32 bp, Homo sapiens
  source 1..32: mol_type = genomic DNA
gcacgaggccccgggttcaatccccggcacct

SEQ ID NO: 16355 - DNA, 33 bp, Homo sapiens
  source 1..33: mol_type = genomic DNA
gcacgaggccccgggttcaatccccggcacctc

SEQ ID NO: 16356 - DNA, 36 bp, Homo sapiens
  source 1..36: mol_type = genomic DNA
gcacgaggccccgggttcaatccccggcacctccac

SEQ ID NO: 16357 - DNA, 37 bp, Homo sapiens
  source 1..37: mol_type = genomic DNA
gcacgaggccccgggttcaatccccggcacctccacc

SEQ ID NO: 16358 - DNA, 38 bp, Homo sapiens
  source 1..38: mol_type = genomic DNA
gcacgaggccccgggttcaatccccggcacctccacca

SEQ ID NO: 16359 - DNA, 16 bp, Homo sapiens
  source 1..16: mol_type = genomic DNA
gcacgaggtcctgggt

SEQ ID NO: 16360 - DNA, 32 bp, Homo sapiens
  source 1..32: mol_type = genomic DNA
gcacgcgtgggttcgaatcccatcctcgtcgc

SEQ ID NO: 16361 - DNA, 33 bp, Homo sapiens
  source 1..33: mol_type = genomic DNA
gcacgcgtgggttcgaatcccatcctcgtcgcc

SEQ ID NO: 16362 - DNA, 34 bp, Homo sapiens
  source 1..34: mol_type = genomic DNA
gcacgcgtgggttcgaatcccatcctcgtcgcca

SEQ ID NO: 16363 - DNA, 16 bp, Homo sapiens
  source 1..16: mol_type = genomic DNA
gcactctggactctga

SEQ ID NO: 16364 - DNA, 17 bp, Homo sapiens
  source 1..17: mol_type = genomic DNA
gcactctggactctgaa

SEQ ID NO: 16365 - DNA, 18 bp, Homo sapiens
  source 1..18: mol_type = genomic DNA
gcactctggactctgaat

SEQ ID NO: 16366 - DNA, 19 bp, Homo sapiens
  source 1..19: mol_type = genomic DNA
gcactctggactctgaatc

SEQ ID NO: 16367 - DNA, 20 bp, Homo sapiens
  source 1..20: mol_type = genomic DNA
gcactctggactctgaatcc

SEQ ID NO: 16368 - DNA, 21 bp, Homo sapiens
  source 1..21: mol_type = genomic DNA
gcactctggactctgaatcca

SEQ ID NO: 16369 - DNA, 22 bp, Homo sapiens
  source 1..22: mol_type = genomic DNA
gcactctggactctgaatccag

SEQ ID NO: 16370 - DNA, 23 bp, Homo sapiens
  source 1..23: mol_type = genomic DNA
gcactctggactctgaatccagc

SEQ ID NO: 16371 - DNA, 24 bp, Homo sapiens
  source 1..24: mol_type = genomic DNA
gcactctggactctgaatccagcg

SEQ ID NO: 16372 - DNA, 25 bp, Homo sapiens
  source 1..25: mol_type = genomic DNA
gcactctggactctgaatccagcga

SEQ ID NO: 16373 - DNA, 28 bp, Homo sapiens
  source 1..28: mol_type = genomic DNA
gcactctggactctgaatccagcgatcc

SEQ ID NO: 16374 - DNA, 29 bp, Homo sapiens
  source 1..29: mol_type = genomic DNA
gcactctggactctgaatccagcgatccg

SEQ ID NO: 16375 - DNA, 30 bp, Homo sapiens
  source 1..30: mol_type = genomic DNA
gcactctggactctgaatccagcgatccga

SEQ ID NO: 16376 - DNA, 31 bp, Homo sapiens
  source 1..31: mol_type = genomic DNA
gcactctggactctgaatccagcgatccgag

SEQ ID NO: 16377 - DNA, 32 bp, Homo sapiens
  source 1..32: mol_type = genomic DNA
gcactctggactctgaatccagcgatccgagt

SEQ ID NO: 16378 - DNA, 33 bp, Homo sapiens
  source 1..33: mol_type = genomic DNA
gcactctggactctgaatccagcgatccgagtt

SEQ ID NO: 16379 - DNA, 34 bp, Homo sapiens
  source 1..34: mol_type = genomic DNA
gcactctggactctgaatccagcgatccgagttc

SEQ ID NO: 16380 - DNA, 35 bp, Homo sapiens
  source 1..35: mol_type = genomic DNA
gcactctggactctgaatccagcgatccgagttca

SEQ ID NO: 16381 - DNA, 36 bp, Homo sapiens
  source 1..36: mol_type = genomic DNA
gcactctggactctgaatccagcgatccgagttcaa

SEQ ID NO: 16382 - DNA, 37 bp, Homo sapiens
  source 1..37: mol_type = genomic DNA
gcactctggactctgaatccagcgatccgagttcaaa

SEQ ID NO: 16383 - DNA, 44 bp, Homo sapiens
  source 1..44: mol_type = genomic DNA
gcactctggactctgaatccagcgatccgagttcaaatctcggt

SEQ ID NO: 16384 - DNA, 45 bp, Homo sapiens
  source 1..45: mol_type = genomic DNA
gcactctggactctgaatccagcgatccgagttcaaatctcggtg

SEQ ID NO: 16385 - DNA, 35 bp, Homo sapiens
  source 1..35: mol_type = genomic DNA
gcactctggactctgaatccagcgatccgagttcg

SEQ ID NO: 16386 - DNA, 16 bp, Homo sapiens
  source 1..16: mol_type = genomic DNA
gcactctggactttga

SEQ ID NO: 16387 - DNA, 17 bp, Homo sapiens
  source 1..17: mol_type = genomic DNA
gcactctggactttgaa

SEQ ID NO: 16388 - DNA, 18 bp, Homo sapiens
  source 1..18: mol_type = genomic DNA
gcactctggactttgaat

SEQ ID NO: 16389 - DNA, 19 bp, Homo sapiens
  source 1..19: mol_type = genomic DNA
gcactctggactttgaatc

SEQ ID NO: 16390 - DNA, 20 bp, Homo sapiens
  source 1..20: mol_type = genomic DNA
gcactctggactttgaatcc

SEQ ID NO: 16391 - DNA, 21 bp, Homo sapiens
  source 1..21: mol_type = genomic DNA
gcactctggactttgaatcca

SEQ ID NO: 16392 - DNA, 23 bp, Homo sapiens
  source 1..23: mol_type = genomic DNA
gcactctggactttgaatccagc

SEQ ID NO: 16393 - DNA, 29 bp, Homo sapiens
  source 1..29: mol_type = genomic DNA
gcactctggactttgaatccagcgatccg

SEQ ID NO: 16394 - DNA, 30 bp, Homo sapiens
  source 1..30: mol_type = genomic DNA
gcactctggactttgaatccagcgatccga

SEQ ID NO: 16395 - DNA, 31 bp, Homo sapiens
  source 1..31: mol_type = genomic DNA
gcactctggactttgaatccagcgatccgag

SEQ ID NO: 16396 - DNA, 35 bp, Homo sapiens
  source 1..35: mol_type = genomic DNA
gcactctggactttgaatccagcgatccgagttca

SEQ ID NO: 16397 - DNA, 18 bp, Homo sapiens
  source 1..18: mol_type = genomic DNA
gcactggtcttgtaaacc

SEQ ID NO: 16398 - DNA, 18 bp, Homo sapiens
  source 1..18: mol_type = genomic DNA
gcactggtggttcagtgg

SEQ ID NO: 16399 - DNA, 27 bp, Homo sapiens
  source 1..27: mol_type = genomic DNA
gcactggtggttcagtggtagaattct

SEQ ID NO: 16400 - DNA, 28 bp, Homo sapiens
  source 1..28: mol_type = genomic DNA
gcactggtggttcagtggtagaattctc

SEQ ID NO: 16401 - DNA, 30 bp, Homo sapiens
  source 1..30: mol_type = genomic DNA
gcactggtggttcagtggtagaattctcgc

SEQ ID NO: 16402 - DNA, 31 bp, Homo sapiens
  source 1..31: mol_type = genomic DNA
gcactggtggttcagtggtagaattctcgcc

SEQ ID NO: 16403 - DNA, 32 bp, Homo sapiens
  source 1..32: mol_type = genomic DNA
gcactggtggttcagtggtagaattctcgcct

SEQ ID NO: 16404 - DNA, 33 bp, Homo sapiens
  source 1..33: mol_type = genomic DNA
gcactggtggttcagtggtagaattctcgcctc

SEQ ID NO: 16405 - DNA, 35 bp, Homo sapiens
  source 1..35: mol_type = genomic DNA
gcactggtggttcagtggtagaattctcgcctccc

SEQ ID NO: 16406 - DNA, 36 bp, Homo sapiens
  source 1..36: mol_type = genomic DNA
gcactggtggttcagtggtagaattctcgcctccca

SEQ ID NO: 16407 - DNA, 29 bp, Homo sapiens
  source 1..29: mol_type = genomic DNA
gcactgtaaagctaacttagcattaacct

SEQ ID NO: 16408 - DNA, 17 bp, Homo sapiens
  source 1..17: mol_type = genomic DNA
gcagaaggtcctgggtt

SEQ ID NO: 16409 - DNA, 18 bp, Homo sapiens
  source 1..18: mol_type = genomic DNA
gcagaaggtcctgggttc

SEQ ID NO: 16410 - DNA, 37 bp, Homo sapiens
  source 1..37: mol_type = genomic DNA
gcagaaggtcctgggttcaagccccagtggaaccacc

SEQ ID NO: 16411 - DNA, 27 bp, Homo sapiens
  source 1..27: mol_type = genomic DNA
gcagaaggtcctgggttcgagccccag

SEQ ID NO: 16412 - DNA, 28 bp, Homo sapiens
  source 1..28: mol_type = genomic DNA
gcagaaggtcctgggttcgagccccagt

SEQ ID NO: 16413 - DNA, 32 bp, Homo sapiens
  source 1..32: mol_type = genomic DNA
gcagaaggtcctgggttcgagccccagtggaa

SEQ ID NO: 16414 - DNA, 33 bp, Homo sapiens
  source 1..33: mol_type = genomic DNA
gcagaaggtcctgggttcgagccccagtggaac

SEQ ID NO: 16415 - DNA, 34 bp, Homo sapiens
  source 1..34: mol_type = genomic DNA
gcagaaggtcctgggttcgagccccagtggaacc

SEQ ID NO: 16416 - DNA, 35 bp, Homo sapiens
  source 1..35: mol_type = genomic DNA
gcagaaggtcctgggttcgagccccagtggaacca

SEQ ID NO: 16417 - DNA, 36 bp, Homo sapiens
  source 1..36: mol_type = genomic DNA
gcagaaggtcctgggttcgagccccagtggaaccac

SEQ ID NO: 16418 - DNA, 37 bp, Homo sapiens
  source 1..37: mol_type = genomic DNA
gcagaaggtcctgggttcgagccccagtggaaccacc

SEQ ID NO: 16419 - DNA, 38 bp, Homo sapiens
  source 1..38: mol_type = genomic DNA
gcagaaggtcctgggttcgagccccagtggaaccacca

SEQ ID NO: 16420 - DNA, 16 bp, Homo sapiens
  source 1..16: mol_type = genomic DNA
gcagagcccggtaatc

SEQ ID NO: 16421 - DNA, 17 bp, Homo sapiens
  source 1..17: mol_type = genomic DNA
gcagagcccggtaatcg

SEQ ID NO: 16422 - DNA, 18 bp, Homo sapiens
  source 1..18: mol_type = genomic DNA
gcagagcccggtaatcgc

SEQ ID NO: 16423 - DNA, 20 bp, Homo sapiens
  source 1..20: mol_type = genomic DNA
gcagagcccggtaatcgcat

SEQ ID NO: 16424 - DNA, 21 bp, Homo sapiens
  source 1..21: mol_type = genomic DNA
gcagagcccggtaatcgcata

SEQ ID NO: 16425 - DNA, 22 bp, Homo sapiens
  source 1..22: mol_type = genomic DNA
gcagagcccggtaatcgcataa

SEQ ID NO: 16426 - DNA, 23 bp, Homo sapiens
  source 1..23: mol_type = genomic DNA
gcagagcccggtaatcgcataaa

SEQ ID NO: 16427 - DNA, 24 bp, Homo sapiens
  source 1..24: mol_type = genomic DNA
gcagagcccggtaatcgcataaaa

SEQ ID NO: 16428 - DNA, 25 bp, Homo sapiens
  source 1..25: mol_type = genomic DNA
gcagagcccggtaatcgcataaaac

SEQ ID NO: 16429 - DNA, 26 bp, Homo sapiens
  source 1..26: mol_type = genomic DNA
gcagagcccggtaatcgcataaaact

SEQ ID NO: 16430 - DNA, 28 bp, Homo sapiens
  source 1..28: mol_type = genomic DNA
gcagagcccggtaatcgcataaaactta

SEQ ID NO: 16431 - DNA, 29 bp, Homo sapiens
  source 1..29: mol_type = genomic DNA
gcagagcccggtaatcgcataaaacttaa

SEQ ID NO: 16432 - DNA, 30 bp, Homo sapiens
  source 1..30: mol_type = genomic DNA
gcagagcccggtaatcgcataaaacttaaa

SEQ ID NO: 16433 - DNA, 31 bp, Homo sapiens
  source 1..31: mol_type = genomic DNA
gcagagcccggtaatcgcataaaacttaaaa

SEQ ID NO: 16434 - DNA, 32 bp, Homo sapiens
  source 1..32: mol_type = genomic DNA
gcagagcccggtaatcgcataaaacttaaaac

SEQ ID NO: 16435 - DNA, 33 bp, Homo sapiens
  source 1..33: mol_type = genomic DNA
gcagagcccggtaatcgcataaaacttaaaact

SEQ ID NO: 16436 - DNA, 34 bp, Homo sapiens
  source 1..34: mol_type = genomic DNA
gcagagcccggtaatcgcataaaacttaaaactt

SEQ ID NO: 16437 - DNA, 35 bp, Homo sapiens
  source 1..35: mol_type = genomic DNA
gcagagcccggtaatcgcataaaacttaaaacttt

SEQ ID NO: 16438 - DNA, 27 bp, Homo sapiens
  source 1..27: mol_type = genomic DNA
gcagagtggcgcagcggaagcgtgctg

SEQ ID NO: 16439 - DNA, 29 bp, Homo sapiens
  source 1..29: mol_type = genomic DNA
gcagagtggcgcagcggaagcgtgctggg

SEQ ID NO: 16440 - DNA, 30 bp, Homo sapiens
  source 1..30: mol_type = genomic DNA
gcagagtggcgcagcggaagcgtgctgggc

SEQ ID NO: 16441 - DNA, 31 bp, Homo sapiens
  source 1..31: mol_type = genomic DNA
gcagagtggcgcagcggaagcgtgctgggcc

SEQ ID NO: 16442 - DNA, 32 bp, Homo sapiens
  source 1..32: mol_type = genomic DNA
gcagagtggcgcagcggaagcgtgctgggccc

SEQ ID NO: 16443 - DNA, 34 bp, Homo sapiens
  source 1..34: mol_type = genomic DNA
gcagagtggcgcagcggaagcgtgctgggcccat

SEQ ID NO: 16444 - DNA, 48 bp, Homo sapiens
  source 1..48: mol_type = genomic DNA
gcagagtggcgcagcggaagcgtgctgggcccataacccagaggtcga

SEQ ID NO: 16445 - DNA, 16 bp, Homo sapiens
  source 1..16: mol_type = genomic DNA
gcagagtggggttttg

SEQ ID NO: 16446 - DNA, 17 bp, Homo sapiens
  source 1..17: mol_type = genomic DNA
gcagagtggggttttgc

SEQ ID NO: 16447 - DNA, 18 bp, Homo sapiens
  source 1..18: mol_type = genomic DNA
gcagagtggggttttgca

SEQ ID NO: 16448 - DNA, 21 bp, Homo sapiens
  source 1..21: mol_type = genomic DNA
gcagagtggggttttgcagtc

SEQ ID NO: 16449 - DNA, 22 bp, Homo sapiens
  source 1..22: mol_type = genomic DNA
gcagagtggggttttgcagtcc

SEQ ID NO: 16450 - DNA, 23 bp, Homo sapiens
  source 1..23: mol_type = genomic DNA
gcagagtggggttttgcagtcct

SEQ ID NO: 16451 - DNA, 24 bp, Homo sapiens
  source 1..24: mol_type = genomic DNA
gcagagtggggttttgcagtcctt

SEQ ID NO: 16452 - DNA, 25 bp, Homo sapiens
  source 1..25: mol_type = genomic DNA
gcagagtggggttttgcagtcctta

SEQ ID NO: 16453 - DNA, 26 bp, Homo sapiens
  source 1..26: mol_type = genomic DNA
gcagagtggggttttgcagtccttac

SEQ ID NO: 16454 - DNA, 27 bp, Homo sapiens
  source 1..27: mol_type = genomic DNA
gcagagtggggttttgcagtccttacc

SEQ ID NO: 16455 - DNA, 28 bp, Homo sapiens
  source 1..28: mol_type = genomic DNA
gcagagtggggttttgcagtccttacca

SEQ ID NO: 16456 - DNA, 16 bp, Homo sapiens
  source 1..16: mol_type = genomic DNA
gcagcaacctcggttc

SEQ ID NO: 16457 - DNA, 17 bp, Homo sapiens
  source 1..17: mol_type = genomic DNA
gcagcaacctcggttcg

SEQ ID NO: 16458 - DNA, 26 bp, Homo sapiens
  source 1..26: mol_type = genomic DNA
gcagcaacctcggttcgaatccgagt

SEQ ID NO: 16459 - DNA, 30 bp, Homo sapiens
  source 1..30: mol_type = genomic DNA
gcagcaacctcggttcgaatccgagtcacg

SEQ ID NO: 16460 - DNA, 31 bp, Homo sapiens
  source 1..31: mol_type = genomic DNA
gcagcaacctcggttcgaatccgagtcacgg

SEQ ID NO: 16461 - DNA, 32 bp, Homo sapiens
  source 1..32: mol_type = genomic DNA
gcagcaacctcggttcgaatccgagtcacggc

SEQ ID NO: 16462 - DNA, 33 bp, Homo sapiens
  source 1..33: mol_type = genomic DNA
gcagcaacctcggttcgaatccgagtcacggca

SEQ ID NO: 16463 - DNA, 34 bp, Homo sapiens
  source 1..34: mol_type = genomic DNA
gcagcaacctcggttcgaatccgagtcacggcac

SEQ ID NO: 16464 - DNA, 35 bp, Homo sapiens
  source 1..35: mol_type = genomic DNA
gcagcaacctcggttcgaatccgagtcacggcacc

SEQ ID NO: 16465 - DNA, 36 bp, Homo sapiens
  source 1..36: mol_type = genomic DNA
gcagcaacctcggttcgaatccgagtcacggcacca

SEQ ID NO: 16466 - DNA, 16 bp, Homo sapiens
  source 1..16: mol_type = genomic DNA
gcagcgatggccgagt

SEQ ID NO: 16467 - DNA, 17 bp, Homo sapiens
  source 1..17: mol_type = genomic DNA
gcagcgatggccgagtg

SEQ ID NO: 16468 - DNA, 18 bp, Homo sapiens
  source 1..18: mol_type = genomic DNA
gcagcgatggccgagtgg

SEQ ID NO: 16469 - DNA, 19 bp, Homo sapiens
  source 1..19: mol_type = genomic DNA
gcagcgatggccgagtggt

SEQ ID NO: 16470 - DNA, 20 bp, Homo sapiens
  source 1..20: mol_type = genomic DNA
gcagcgatggccgagtggtt

SEQ ID NO: 16471 - DNA, 21 bp, Homo sapiens
  source 1..21: mol_type = genomic DNA
gcagcgatggccgagtggtta

SEQ ID NO: 16472 - DNA, 22 bp, Homo sapiens
  source 1..22: mol_type = genomic DNA
gcagcgatggccgagtggttaa

SEQ ID NO: 16473 - DNA, 23 bp, Homo sapiens
  source 1..23: mol_type = genomic DNA
gcagcgatggccgagtggttaag

SEQ ID NO: 16474 - DNA, 24 bp, Homo sapiens
  source 1..24: mol_type = genomic DNA
gcagcgatggccgagtggttaagg

SEQ ID NO: 16475 - DNA, 25 bp, Homo sapiens
  source 1..25: mol_type = genomic DNA
gcagcgatggccgagtggttaaggc

SEQ ID NO: 16476 - DNA, 32 bp, Homo sapiens
  source 1..32: mol_type = genomic DNA
gcagcgatggccgagtggttaaggcgttggac

SEQ ID NO: 16477 - DNA, 33 bp, Homo sapiens
  source 1..33: mol_type = genomic DNA
gcagcgatggccgagtggttaaggcgttggact

SEQ ID NO: 16478 - DNA, 22 bp, Homo sapiens
  source 1..22: mol_type = genomic DNA
gcagcgcgtcagtctcataatc

SEQ ID NO: 16479 - DNA, 20 bp, Homo sapiens
  source 1..20: mol_type = genomic DNA
gcagcggaagcgtgctgggc

SEQ ID NO: 16480 - DNA, 21 bp, Homo sapiens
  source 1..21: mol_type = genomic DNA
gcagcggaagcgtgctgggcc

SEQ ID NO: 16481 - DNA, 22 bp, Homo sapiens
  source 1..22: mol_type = genomic DNA
gcagcggaagcgtgctgggccc

SEQ ID NO: 16482 - DNA, 23 bp, Homo sapiens
  source 1..23: mol_type = genomic DNA
gcagcggaagcgtgctgggccca

SEQ ID NO: 16483 - DNA, 24 bp, Homo sapiens
  source 1..24: mol_type = genomic DNA
gcagcggaagcgtgctgggcccat

SEQ ID NO: 16484 - DNA, 41 bp, Homo sapiens
  source 1..41: mol_type = genomic DNA
gcagcggaagcgtgctgggcccataacccagaggtcgatgg

SEQ ID NO: 16485 - DNA, 42 bp, Homo sapiens
  source 1..42: mol_type = genomic DNA
gcagcggaagcgtgctgggcccataacccagaggtcgatgga

SEQ ID NO: 16486 - DNA, 43 bp, Homo sapiens
  source 1..43: mol_type = genomic DNA
gcagcggaagcgtgctgggcccataacccagaggtcgatggat

SEQ ID NO: 16487 - DNA, 22 bp, Homo sapiens
  source 1..22: mol_type = genomic DNA
gcagcttcaaacctgccggggc

SEQ ID NO: 16488 - DNA, 24 bp, Homo sapiens
  source 1..24: mol_type = genomic DNA
gcagcttcaaacctgccggggctt

SEQ ID NO: 16489 - DNA, 25 bp, Homo sapiens
  source 1..25: mol_type = genomic DNA
gcagcttcaaacctgccggggcttc

SEQ ID NO: 16490 - DNA, 26 bp, Homo sapiens
  source 1..26: mol_type = genomic DNA
gcagcttcaaacctgccggggcttcc

SEQ ID NO: 16491 - DNA, 27 bp, Homo sapiens
  source 1..27: mol_type = genomic DNA
gcagcttcaaacctgccggggcttcca

SEQ ID NO: 16492 - DNA, 16 bp, Homo sapiens
  source 1..16: mol_type = genomic DNA
gcaggttcgaaccctg

SEQ ID NO: 16493 - DNA, 16 bp, Homo sapiens
  source 1..16: mol_type = genomic DNA
gcaggttcgaatcctg

SEQ ID NO: 16494 - DNA, 27 bp, Homo sapiens
  source 1..27: mol_type = genomic DNA
gcaggttcgaatcctgccgactacgcc

SEQ ID NO: 16495 - DNA, 16 bp, Homo sapiens
  source 1..16: mol_type = genomic DNA
gcaggttcgagtcctg

SEQ ID NO: 16496 - DNA, 26 bp, Homo sapiens
  source 1..26: mol_type = genomic DNA
gcaggttcgagtcctgccgcggtcgc

SEQ ID NO: 16497 - DNA, 21 bp, Homo sapiens
  source 1..21: mol_type = genomic DNA
gcagtggtagaattctcgcct

SEQ ID NO: 16498 - DNA, 16 bp, Homo sapiens
  source 1..16: mol_type = genomic DNA
gcagttgacccgggtt

SEQ ID NO: 16499 - DNA, 18 bp, Homo sapiens
  source 1..18: mol_type = genomic DNA
gcagttgacccgggttcg

SEQ ID NO: 16500 - DNA, 28 bp, Homo sapiens
  source 1..28: mol_type = genomic DNA
gcagttgacccgggttcgattcccggcc

SEQ ID NO: 16501 - DNA, 30 bp, Homo sapiens
  source 1..30: mol_type = genomic DNA
gcagttgacccgggttcgattcccggccaa

SEQ ID NO: 16502 - DNA, 31 bp, Homo sapiens
  source 1..31: mol_type = genomic DNA
gcagttgacccgggttcgattcccggccaac

SEQ ID NO: 16503 - DNA, 32 bp, Homo sapiens
  source 1..32: mol_type = genomic DNA
gcagttgacccgggttcgattcccggccaacg

SEQ ID NO: 16504 - DNA, 36 bp, Homo sapiens
  source 1..36: mol_type = genomic DNA
gcagttgacccgggttcgattcccggccaacgcacc

SEQ ID NO: 16505 - DNA, 17 bp, Homo sapiens
  source 1..17: mol_type = genomic DNA
gcataaaacttaaaact

SEQ ID NO: 16506 - DNA, 18 bp, Homo sapiens
  source 1..18: mol_type = genomic DNA
gcataaaacttaaaactt

SEQ ID NO: 16507 - DNA, 25 bp, Homo sapiens
  source 1..25: mol_type = genomic DNA
gcataaaacttaaaactttacagtc

SEQ ID NO: 16508 - DNA, 27 bp, Homo sapiens
  source 1..27: mol_type = genomic DNA
gcataaaacttaaaactttacagtcag

SEQ ID NO: 16509 - DNA, 28 bp, Homo sapiens
  source 1..28: mol_type = genomic DNA
gcataaaacttaaaactttacagtcaga

SEQ ID NO: 16510 - DNA, 29 bp, Homo sapiens
  source 1..29: mol_type = genomic DNA
gcataaaacttaaaactttacagtcagag

SEQ ID NO: 16511 - DNA, 30 bp, Homo sapiens
  source 1..30: mol_type = genomic DNA
gcataaaacttaaaactttacagtcagagg

SEQ ID NO: 16512 - DNA, 31 bp, Homo sapiens
  source 1..31: mol_type = genomic DNA
gcataaaacttaaaactttacagtcagaggt

SEQ ID NO: 16513 - DNA, 32 bp, Homo sapiens
  source 1..32: mol_type = genomic DNA
gcataaaacttaaaactttacagtcagaggtt

SEQ ID NO: 16514 - DNA, 33 bp, Homo sapiens
  source 1..33: mol_type = genomic DNA
gcataaaacttaaaactttacagtcagaggttc

SEQ ID NO: 16515 - DNA, 34 bp, Homo sapiens
  source 1..34: mol_type = genomic DNA
gcataaaacttaaaactttacagtcagaggttca

SEQ ID NO: 16516 - DNA, 32 bp, Homo sapiens
  source 1..32: mol_type = genomic DNA
gcatagctgccttccaagcagttgacccgggt

SEQ ID NO: 16517 - DNA, 18 bp, Homo sapiens
  source 1..18: mol_type = genomic DNA
gcataggtggttcagtgg

SEQ ID NO: 16518 - DNA, 26 bp, Homo sapiens
  source 1..26: mol_type = genomic DNA
gcataggtggttcagtggtagaattc

SEQ ID NO: 16519 - DNA, 27 bp, Homo sapiens
  source 1..27: mol_type = genomic DNA
gcataggtggttcagtggtagaattct

SEQ ID NO: 16520 - DNA, 19 bp, Homo sapiens
  source 1..19: mol_type = genomic DNA
gcatcagcctccggagctg

SEQ ID NO: 16521 - DNA, 23 bp, Homo sapiens
  source 1..23: mol_type = genomic DNA
gcatcagcctccggagctgggga

SEQ ID NO: 16522 - DNA, 27 bp, Homo sapiens
  source 1..27: mol_type = genomic DNA
gcatcagcctccggagctggggattgt

SEQ ID NO: 16523 - DNA, 16 bp, Homo sapiens
  source 1..16: mol_type = genomic DNA
gcatgagactcttaat

SEQ ID NO: 16524 - DNA, 17 bp, Homo sapiens
  source 1..17: mol_type = genomic DNA
gcatgagactcttaatc

SEQ ID NO: 16525 - DNA, 18 bp, Homo sapiens
  source 1..18: mol_type = genomic DNA
gcatgagactcttaatct

SEQ ID NO: 16526 - DNA, 19 bp, Homo sapiens
  source 1..19: mol_type = genomic DNA
gcatgagactcttaatctc

SEQ ID NO: 16527 - DNA, 27 bp, Homo sapiens
  source 1..27: mol_type = genomic DNA
gcatgagactcttaatctcagggtcgt

SEQ ID NO: 16528 - DNA, 32 bp, Homo sapiens
  source 1..32: mol_type = genomic DNA
gcatgagactcttaatctcagggtcgtgggtt

SEQ ID NO: 16529 - DNA, 32 bp, Homo sapiens
  source 1..32: mol_type = genomic DNA
gcatgaggtcccgggttcgatccccagcatct

SEQ ID NO: 16530 - DNA, 33 bp, Homo sapiens
  source 1..33: mol_type = genomic DNA
gcatgaggtcccgggttcgatccccagcatctc

SEQ ID NO: 16531 - DNA, 34 bp, Homo sapiens
  source 1..34: mol_type = genomic DNA
gcatgaggtcccgggttcgatccccagcatctcc

SEQ ID NO: 16532 - DNA, 35 bp, Homo sapiens
  source 1..35: mol_type = genomic DNA
gcatgaggtcccgggttcgatccccagcatctcca

SEQ ID NO: 16533 - DNA, 36 bp, Homo sapiens
  source 1..36: mol_type = genomic DNA
gcatgaggtcccgggttcgatccccagcatctccac

SEQ ID NO: 16534 - DNA, 37 bp, Homo sapiens
  source 1..37: mol_type = genomic DNA
gcatgaggtcccgggttcgatccccagcatctccacc

SEQ ID NO: 16535 - DNA, 38 bp, Homo sapiens
  source 1..38: mol_type = genomic DNA
gcatgaggtcccgggttcgatccccagcatctccacca

SEQ ID NO: 16536 - DNA, 16 bp, Homo sapiens
  source 1..16: mol_type = genomic DNA
gcatgggactcttaat

SEQ ID NO: 16537 - DNA, 17 bp, Homo sapiens
  source 1..17: mol_type = genomic DNA
gcatgggactcttaatc

SEQ ID NO: 16538 - DNA, 18 bp, Homo sapiens
  source 1..18: mol_type = genomic DNA
gcatgggactcttaatcc

SEQ ID NO: 16539 - DNA, 19 bp, Homo sapiens
  source 1..19: mol_type = genomic DNA
gcatgggactcttaatccc

SEQ ID NO: 16540 - DNA, 27 bp, Homo sapiens
  source 1..27: mol_type = genomic DNA
gcatgggactcttaatcccagggtcgt

SEQ ID NO: 16541 - DNA, 32 bp, Homo sapiens
  source 1..32: mol_type = genomic DNA
gcatgggactcttaatcccagggtcgtgggtt

SEQ ID NO: 16542 - DNA, 33 bp, Homo sapiens
  source 1..33: mol_type = genomic DNA
gcatgggactcttaatcccagggtcgtgggttc

SEQ ID NO: 16543 - DNA, 18 bp, Homo sapiens
  source 1..18: mol_type = genomic DNA
gcatgggactcttaatct

SEQ ID NO: 16544 - DNA, 19 bp, Homo sapiens
  source 1..19: mol_type = genomic DNA
gcatgggactcttaatctc

SEQ ID NO: 16545 - DNA, 18 bp, Homo sapiens
  source 1..18: mol_type = genomic DNA
gcatgggtgattcagtgg

SEQ ID NO: 16546 - DNA, 16 bp, Homo sapiens
  source 1..16: mol_type = genomic DNA
gcatgggtggttcagt

SEQ ID NO: 16547 - DNA, 17 bp, Homo sapiens
  source 1..17: mol_type = genomic DNA
gcatgggtggttcagtg

SEQ ID NO: 16548 - DNA, 18 bp, Homo sapiens
  source 1..18: mol_type = genomic DNA
gcatgggtggttcagtgg

SEQ ID NO: 16549 - DNA, 20 bp, Homo sapiens
  source 1..20: mol_type = genomic DNA
gcatgggtggttcagtggta

SEQ ID NO: 16550 - DNA, 21 bp, Homo sapiens
  source 1..21: mol_type = genomic DNA
gcatgggtggttcagtggtag

SEQ ID NO: 16551 - DNA, 22 bp, Homo sapiens
  source 1..22: mol_type = genomic DNA
gcatgggtggttcagtggtaga

SEQ ID NO: 16552 - DNA, 23 bp, Homo sapiens
  source 1..23: mol_type = genomic DNA
gcatgggtggttcagtggtagaa

SEQ ID NO: 16553 - DNA, 24 bp, Homo sapiens
  source 1..24: mol_type = genomic DNA
gcatgggtggttcagtggtagaat

SEQ ID NO: 16554 - DNA, 25 bp, Homo sapiens
  source 1..25: mol_type = genomic DNA
gcatgggtggttcagtggtagaatt

SEQ ID NO: 16555 - DNA, 26 bp, Homo sapiens
  source 1..26: mol_type = genomic DNA
gcatgggtggttcagtggtagaattc

SEQ ID NO: 16556 - DNA, 27 bp, Homo sapiens
  source 1..27: mol_type = genomic DNA
gcatgggtggttcagtggtagaattct

SEQ ID NO: 16557 - DNA, 28 bp, Homo sapiens
  source 1..28: mol_type = genomic DNA
gcatgggtggttcagtggtagaattctc

SEQ ID NO: 16558 - DNA, 29 bp, Homo sapiens
  source 1..29: mol_type = genomic DNA
gcatgggtggttcagtggtagaattctcg

SEQ ID NO: 16559 - DNA, 30 bp, Homo sapiens
  source 1..30: mol_type = genomic DNA
gcatgggtggttcagtggtagaattctcgc

SEQ ID NO: 16560 - DNA, 31 bp, Homo sapiens
  source 1..31: mol_type = genomic DNA
gcatgggtggttcagtggtagaattctcgcc

SEQ ID NO: 16561 - DNA, 32 bp, Homo sapiens
  source 1..32: mol_type = genomic DNA
gcatgggtggttcagtggtagaattctcgcct

SEQ ID NO: 16562 - DNA, 33 bp, Homo sapiens
  source 1..33: mol_type = genomic DNA
gcatgggtggttcagtggtagaattctcgcctg

SEQ ID NO: 16563 - DNA, 34 bp, Homo sapiens
  source 1..34: mol_type = genomic DNA
gcatgggtggttcagtggtagaattctcgcctgc

SEQ ID NO: 16564 - DNA, 35 bp, Homo sapiens
  source 1..35: mol_type = genomic DNA
gcatgggtggttcagtggtagaattctcgcctgcc

SEQ ID NO: 16565 - DNA, 36 bp, Homo sapiens
  source 1..36: mol_type = genomic DNA
gcatgggtggttcagtggtagaattctcgcctgcca

SEQ ID NO: 16566 - DNA, 37 bp, Homo sapiens
  source 1..37: mol_type = genomic DNA
gcatgggtggttcagtggtagaattctcgcctgccac

SEQ ID NO: 16567 - DNA, 38 bp, Homo sapiens
  source 1..38: mol_type = genomic DNA
gcatgggtggttcagtggtagaattctcgcctgccacg

SEQ ID NO: 16568 - DNA, 39 bp, Homo sapiens
  source 1..39: mol_type = genomic DNA
gcatgggtggttcagtggtagaattctcgcctgccacgc

SEQ ID NO: 16569 - DNA, 40 bp, Homo sapiens
  source 1..40: mol_type = genomic DNA
gcatgggtggttcagtggtagaattctcgcctgccacgcg

SEQ ID NO: 16570 - DNA, 41 bp, Homo sapiens
  source 1..41: mol_type = genomic DNA
gcatgggtggttcagtggtagaattctcgcctgccacgcgg

SEQ ID NO: 16571 - DNA, 42 bp, Homo sapiens
  source 1..42: mol_type = genomic DNA
gcatgggtggttcagtggtagaattctcgcctgccacgcggg

SEQ ID NO: 16572 - DNA, 43 bp, Homo sapiens
  source 1..43: mol_type = genomic DNA
gcatgggtggttcagtggtagaattctcgcctgccacgcggga

SEQ ID NO: 16573 - DNA, 44 bp, Homo sapiens
  source 1..44: mol_type = genomic DNA
gcatgggtggttcagtggtagaattctcgcctgccacgcgggag

SEQ ID NO: 16574 - DNA, 46 bp, Homo sapiens
  source 1..46: mol_type = genomic DNA
gcatgggtggttcagtggtagaattctcgcctgccacgcgggaggc

SEQ ID NO: 16575 - DNA, 47 bp, Homo sapiens
  source 1..47: mol_type = genomic DNA
gcatgggtggttcagtggtagaattctcgcctgccacgcgggaggcc

SEQ ID NO: 16576 - DNA, 48 bp, Homo sapiens
  source 1..48: mol_type = genomic DNA
gcatgggtggttcagtggtagaattctcgcctgccacgcgggaggccc

SEQ ID NO: 16577 - DNA, 33 bp, Homo sapiens
  source 1..33: mol_type = genomic DNA
gcattaaccttttaagttaaagattaagagaac

SEQ ID NO: 16578 - DNA, 34 bp, Homo sapiens
  source 1..34: mol_type = genomic DNA
gcattaaccttttaagttaaagattaagagaacc

SEQ ID NO: 16579 - DNA, 35 bp, Homo sapiens
  source 1..35: mol_type = genomic DNA
gcattaaccttttaagttaaagattaagagaacca

SEQ ID NO: 16580 - DNA, 37 bp, Homo sapiens
  source 1..37: mol_type = genomic DNA
gcattaaccttttaagttaaagattaagagaaccaac

SEQ ID NO: 16581 - DNA, 39 bp, Homo sapiens
  source 1..39: mol_type = genomic DNA
gcattaaccttttaagttaaagattaagagaaccaacac

SEQ ID NO: 16582 - DNA, 40 bp, Homo sapiens
  source 1..40: mol_type = genomic DNA
gcattaaccttttaagttaaagattaagagaaccaacacc

SEQ ID NO: 16583 - DNA, 41 bp, Homo sapiens
  source 1..41: mol_type = genomic DNA
gcattaaccttttaagttaaagattaagagaaccaacacct

SEQ ID NO: 16584 - DNA, 16 bp, Homo sapiens
  source 1..16: mol_type = genomic DNA
gcattcggctgttaac

SEQ ID NO: 16585 - DNA, 17 bp, Homo sapiens
  source 1..17: mol_type = genomic DNA
gcattcggctgttaacc

SEQ ID NO: 16586 - DNA, 16 bp, Homo sapiens
  source 1..16: mol_type = genomic DNA
gcattggactgtaaat

SEQ ID NO: 16587 - DNA, 17 bp, Homo sapiens
  source 1..17: mol_type = genomic DNA
gcattggactgtaaatc

SEQ ID NO: 16588 - DNA, 18 bp, Homo sapiens
  source 1..18: mol_type = genomic DNA
gcattggactgtaaatct

SEQ ID NO: 16589 - DNA, 19 bp, Homo sapiens
  source 1..19: mol_type = genomic DNA
gcattggactgtaaatcta

SEQ ID NO: 16590 - DNA, 20 bp, Homo sapiens
  source 1..20: mol_type = genomic DNA
gcattggactgtaaatctaa

SEQ ID NO: 16591 - DNA, 21 bp, Homo sapiens
  source 1..21: mol_type = genomic DNA
gcattggactgtaaatctaaa

SEQ ID NO: 16592 - DNA, 22 bp, Homo sapiens
  source 1..22: mol_type = genomic DNA
gcattggactgtaaatctaaag

SEQ ID NO: 16593 - DNA, 25 bp, Homo sapiens
  source 1..25: mol_type = genomic DNA
gcattggactgtaaatctaaagaca

SEQ ID NO: 16594 - DNA, 27 bp, Homo sapiens
  source 1..27: mol_type = genomic DNA
gcattggactgtaaatctaaagacagg

SEQ ID NO: 16595 - DNA, 28 bp, Homo sapiens
  source 1..28: mol_type = genomic DNA
gcattggactgtaaatctaaagacaggg

SEQ ID NO: 16596 - DNA, 31 bp, Homo sapiens
  source 1..31: mol_type = genomic DNA
gcattggactgtaaatctaaagacaggggtt

SEQ ID NO: 16597 - DNA, 34 bp, Homo sapiens
  source 1..34: mol_type = genomic DNA
gcattggactgtaaatctaaagacaggggttagg

SEQ ID NO: 16598 - DNA, 35 bp, Homo sapiens
  source 1..35: mol_type = genomic DNA
gcattggactgtaaatctaaagacaggggttaggc

SEQ ID NO: 16599 - DNA, 36 bp, Homo sapiens
  source 1..36: mol_type = genomic DNA
gcattggactgtaaatctaaagacaggggttaggcc

SEQ ID NO: 16600 - DNA, 37 bp, Homo sapiens
  source 1..37: mol_type = genomic DNA
gcattggactgtaaatctaaagacaggggttaggcct

SEQ ID NO: 16601 - DNA, 38 bp, Homo sapiens
  source 1..38: mol_type = genomic DNA
gcattggactgtaaatctaaagacaggggttaggcctc

SEQ ID NO: 16602 - DNA, 41 bp, Homo sapiens
  source 1..41: mol_type = genomic DNA
gcattggactgtaaatctaaagacaggggttaggcctcttt

SEQ ID NO: 16603 - DNA, 42 bp, Homo sapiens
  source 1..42: mol_type = genomic DNA
gcattggactgtaaatctaaagacaggggttaggcctctttt

SEQ ID NO: 16604 - DNA, 44 bp, Homo sapiens
  source 1..44: mol_type = genomic DNA
gcattggactgtaaatctaaagacaggggttaggcctcttttta

SEQ ID NO: 16605 - DNA, 46 bp, Homo sapiens
  source 1..46: mol_type = genomic DNA
gcattggactgtaaatctaaagacaggggttaggcctctttttacc

SEQ ID NO: 16606 - DNA, 16 bp, Homo sapiens
  source 1..16: mol_type = genomic DNA
gcattggacttctaat

SEQ ID NO: 16607 - DNA, 19 bp, Homo sapiens
  source 1..19: mol_type = genomic DNA
gcattggacttctaattca

SEQ ID NO: 16608 - DNA, 20 bp, Homo sapiens
  source 1..20: mol_type = genomic DNA
gcattggacttctaattcaa

SEQ ID NO: 16609 - DNA, 18 bp, Homo sapiens
  source 1..18: mol_type = genomic DNA
gcattggtggttcaatgg

SEQ ID NO: 16610 - DNA, 27 bp, Homo sapiens
  source 1..27: mol_type = genomic DNA
gcattggtggttcaatggtagaattct

SEQ ID NO: 16611 - DNA, 28 bp, Homo sapiens
  source 1..28: mol_type = genomic DNA
gcattggtggttcaatggtagaattctc

SEQ ID NO: 16612 - DNA, 30 bp, Homo sapiens
  source 1..30: mol_type = genomic DNA
gcattggtggttcaatggtagaattctcgc

SEQ ID NO: 16613 - DNA, 31 bp, Homo sapiens
  source 1..31: mol_type = genomic DNA
gcattggtggttcaatggtagaattctcgcc

SEQ ID NO: 16614 - DNA, 32 bp, Homo sapiens
  source 1..32: mol_type = genomic DNA
gcattggtggttcaatggtagaattctcgcct

SEQ ID NO: 16615 - DNA, 33 bp, Homo sapiens
  source 1..33: mol_type = genomic DNA
gcattggtggttcaatggtagaattctcgcctc

SEQ ID NO: 16616 - DNA, 16 bp, Homo sapiens
  source 1..16: mol_type = genomic DNA
gcattggtggttcagt

SEQ ID NO: 16617 - DNA, 17 bp, Homo sapiens
  source 1..17: mol_type = genomic DNA
gcattggtggttcagtg

SEQ ID NO: 16618 - DNA, 18 bp, Homo sapiens
  source 1..18: mol_type = genomic DNA
gcattggtggttcagtgg

SEQ ID NO: 16619 - DNA, 19 bp, Homo sapiens
  source 1..19: mol_type = genomic DNA
gcattggtggttcagtggt

SEQ ID NO: 16620 - DNA, 20 bp, Homo sapiens
  source 1..20: mol_type = genomic DNA
gcattggtggttcagtggta

SEQ ID NO: 16621 - DNA, 21 bp, Homo sapiens
  source 1..21: mol_type = genomic DNA
gcattggtggttcagtggtag

SEQ ID NO: 16622 - DNA, 22 bp, Homo sapiens
  source 1..22: mol_type = genomic DNA
gcattggtggttcagtggtaga

SEQ ID NO: 16623 - DNA, 23 bp, Homo sapiens
  source 1..23: mol_type = genomic DNA
gcattggtggttcagtggtagaa

SEQ ID NO: 16624 - DNA, 24 bp, Homo sapiens
  source 1..24: mol_type = genomic DNA
gcattggtggttcagtggtagaat

SEQ ID NO: 16625 - DNA, 25 bp, Homo sapiens
  source 1..25: mol_type = genomic DNA
gcattggtggttcagtggtagaatt

SEQ ID NO: 16626 - DNA, 26 bp, Homo sapiens
  source 1..26: mol_type = genomic DNA
gcattggtggttcagtggtagaattc

SEQ ID NO: 16627 - DNA, 27 bp, Homo sapiens
  source 1..27: mol_type = genomic DNA
gcattggtggttcagtggtagaattct

SEQ ID NO: 16628 - DNA, 28 bp, Homo sapiens
  source 1..28: mol_type = genomic DNA
gcattggtggttcagtggtagaattctc

SEQ ID NO: 16629 - DNA, 29 bp, Homo sapiens
  source 1..29: mol_type = genomic DNA
gcattggtggttcagtggtagaattctcg

SEQ ID NO: 16630 - DNA, 30 bp, Homo sapiens
  source 1..30: mol_type = genomic DNA
gcattggtggttcagtggtagaattctcgc

SEQ ID NO: 16631 - DNA, 31 bp, Homo sapiens
  source 1..31: mol_type = genomic DNA
gcattggtggttcagtggtagaattctcgcc

SEQ ID NO: 16632 - DNA, 32 bp, Homo sapiens
  source 1..32: mol_type = genomic DNA
gcattggtggttcagtggtagaattctcgcct

SEQ ID NO: 16633 - DNA, 33 bp, Homo sapiens
  source 1..33: mol_type = genomic DNA
gcattggtggttcagtggtagaattctcgcctc

SEQ ID NO: 16634 - DNA, 34 bp, Homo sapiens
  source 1..34: mol_type = genomic DNA
gcattggtggttcagtggtagaattctcgcctcc

SEQ ID NO: 16635 - DNA, 35 bp, Homo sapiens
  source 1..35: mol_type = genomic DNA
gcattggtggttcagtggtagaattctcgcctccc

SEQ ID NO: 16636 - DNA, 36 bp, Homo sapiens
  source 1..36: mol_type = genomic DNA
gcattggtggttcagtggtagaattctcgcctccca

SEQ ID NO: 16637 - DNA, 37 bp, Homo sapiens
  source 1..37: mol_type = genomic DNA
gcattggtggttcagtggtagaattctcgcctcccac

SEQ ID NO: 16638 - DNA, 38 bp, Homo sapiens
  source 1..38: mol_type = genomic DNA
gcattggtggttcagtggtagaattctcgcctcccacg

SEQ ID NO: 16639 - DNA, 39 bp, Homo sapiens
  source 1..39: mol_type = genomic DNA
gcattggtggttcagtggtagaattctcgcctcccacgc

SEQ ID NO: 16640 - DNA, 33 bp, Homo sapiens
  source 1..33: mol_type = genomic DNA
gcattggtggttcagtggtagaattctcgcctg

SEQ ID NO: 16641 - DNA, 34 bp, Homo sapiens
  source 1..34: mol_type = genomic DNA
gcattggtggttcagtggtagaattctcgcctgc

SEQ ID NO: 16642 - DNA, 35 bp, Homo sapiens
  source 1..35: mol_type = genomic DNA
gcattggtggttcagtggtagaattctcgcctgcc

SEQ ID NO: 16643 - DNA, 36 bp, Homo sapiens
  source 1..36: mol_type = genomic DNA
gcattggtggttcagtggtagaattctcgcctgcca

SEQ ID NO: 16644 - DNA, 37 bp, Homo sapiens
  source 1..37: mol_type = genomic DNA
gcattggtggttcagtggtagaattctcgcctgccac

SEQ ID NO: 16645 - DNA, 38 bp, Homo sapiens
  source 1..38: mol_type = genomic DNA
gcattggtggttcagtggtagaattctcgcctgccacg

SEQ ID NO: 16646 - DNA, 39 bp, Homo sapiens
  source 1..39: mol_type = genomic DNA
gcattggtggttcagtggtagaattctcgcctgccacgc

SEQ ID NO: 16647 - DNA, 40 bp, Homo sapiens
  source 1..40: mol_type = genomic DNA
gcattggtggttcagtggtagaattctcgcctgccacgcg

SEQ ID NO: 16648 - DNA, 41 bp, Homo sapiens
  source 1..41: mol_type = genomic DNA
gcattggtggttcagtggtagaattctcgcctgccacgcgg

SEQ ID NO: 16649 - DNA, 42 bp, Homo sapiens
  source 1..42: mol_type = genomic DNA
gcattggtggttcagtggtagaattctcgcctgccacgcggg

SEQ ID NO: 16650 - DNA, 43 bp, Homo sapiens
  source 1..43: mol_type = genomic DNA
gcattggtggttcagtggtagaattctcgcctgccacgcggga

SEQ ID NO: 16651 - DNA, 44 bp, Homo sapiens
  source 1..44: mol_type = genomic DNA
gcattggtggttcagtggtagaattctcgcctgccacgcgggag

SEQ ID NO: 16652 - DNA, 45 bp, Homo sapiens
  source 1..45: mol_type = genomic DNA
gcattggtggttcagtggtagaattctcgcctgccacgcgggagg

SEQ ID NO: 16653 - DNA, 46 bp, Homo sapiens
  source 1..46: mol_type = genomic DNA
gcattggtggttcagtggtagaattctcgcctgccacgcgggaggc

SEQ ID NO: 16654 - DNA, 47 bp, Homo sapiens
  source 1..47: mol_type = genomic DNA
gcattggtggttcagtggtagaattctcgcctgccacgcgggaggcc

SEQ ID NO: 16655 - DNA, 48 bp, Homo sapiens
  source 1..48: mol_type = genomic DNA
gcattggtggttcagtggtagaattctcgcctgccacgcgggaggccc

SEQ ID NO: 16656 - DNA, 37 bp, Homo sapiens
  source 1..37: mol_type = genomic DNA
gcattggtggttcagtggtagaattctcgcctgccat

SEQ ID NO: 16657 - DNA, 38 bp, Homo sapiens
  source 1..38: mol_type = genomic DNA
gcattggtggttcagtggtagaattctcgcctgccatg

SEQ ID NO: 16658 - DNA, 39 bp, Homo sapiens
  source 1..39: mol_type = genomic DNA
gcattggtggttcagtggtagaattctcgcctgccatgc

SEQ ID NO: 16659 - DNA, 16 bp, Homo sapiens
  source 1..16: mol_type = genomic DNA
gccaaggtcgcgggtt

SEQ ID NO: 16660 - DNA, 17 bp, Homo sapiens
  source 1..17: mol_type = genomic DNA
gccaaggtcgcgggttc

SEQ ID NO: 16661 - DNA, 18 bp, Homo sapiens
  source 1..18: mol_type = genomic DNA
gccaaggtcgcgggttcg

SEQ ID NO: 16662 - DNA, 32 bp, Homo sapiens
  source 1..32: mol_type = genomic DNA
gccaaggtcgcgggttcgaaccccgtacgggc

SEQ ID NO: 16663 - DNA, 36 bp, Homo sapiens
  source 1..36: mol_type = genomic DNA
gccaaggtcgcgggttcgaaccccgtacgggccacc

SEQ ID NO: 16664 - DNA, 32 bp, Homo sapiens
  source 1..32: mol_type = genomic DNA
gccaaggtcgcgggttcgatccccgtacgggc

SEQ ID NO: 16665 - DNA, 35 bp, Homo sapiens
  source 1..35: mol_type = genomic DNA
gccaaggtcgcgggttcgatccccgtacgggccac

SEQ ID NO: 16666 - DNA, 36 bp, Homo sapiens
  source 1..36: mol_type = genomic DNA
gccaaggtcgcgggttcgatccccgtacgggccacc

SEQ ID NO: 16667 - DNA, 37 bp, Homo sapiens
  source 1..37: mol_type = genomic DNA
gccaaggtcgcgggttcgatccccgtacgggccacca

SEQ ID NO: 16668 - DNA, 36 bp, Homo sapiens
  source 1..36: mol_type = genomic DNA
gccaaggtcgcgggttcgatccccgtactggccacc

SEQ ID NO: 16669 - DNA, 16 bp, Homo sapiens
  source 1..16: mol_type = genomic DNA
gccacgcgggaggccc

SEQ ID NO: 16670 - DNA, 17 bp, Homo sapiens
  source 1..17: mol_type = genomic DNA
gccacgcgggaggcccg

SEQ ID NO: 16671 - DNA, 18 bp, Homo sapiens
  source 1..18: mol_type = genomic DNA
gccacgcgggaggcccgg

SEQ ID NO: 16672 - DNA, 20 bp, Homo sapiens
  source 1..20: mol_type = genomic DNA
gccacgcgggaggcccgggt

SEQ ID NO: 16673 - DNA, 22 bp, Homo sapiens
  source 1..22: mol_type = genomic DNA
gccacgcgggaggcccgggttc

SEQ ID NO: 16674 - DNA, 23 bp, Homo sapiens
  source 1..23: mol_type = genomic DNA
gccacgcgggaggcccgggttcg

SEQ ID NO: 16675 - DNA, 24 bp, Homo sapiens
  source 1..24: mol_type = genomic DNA
gccacgcgggaggcccgggttcga

SEQ ID NO: 16676 - DNA, 25 bp, Homo sapiens
  source 1..25: mol_type = genomic DNA
gccacgcgggaggcccgggttcgat

SEQ ID NO: 16677 - DNA, 33 bp, Homo sapiens
  source 1..33: mol_type = genomic DNA
gccacgcgggaggcccgggttcgattcccggcc

SEQ ID NO: 16678 - DNA, 37 bp, Homo sapiens
  source 1..37: mol_type = genomic DNA
gccacgcgggaggcccgggttcgattcccggccaatg

SEQ ID NO: 16679 - DNA, 40 bp, Homo sapiens
  source 1..40: mol_type = genomic DNA
gccacgcgggaggcccgggttcgattcccggccaatgcac

SEQ ID NO: 16680 - DNA, 41 bp, Homo sapiens
  source 1..41: mol_type = genomic DNA
gccacgcgggaggcccgggttcgattcccggccaatgcacc

SEQ ID NO: 16681 - DNA, 42 bp, Homo sapiens
  source 1..42: mol_type = genomic DNA
gccacgcgggaggcccgggttcgattcccggccaatgcacca

SEQ ID NO: 16682 - DNA, 41 bp, Homo sapiens
  source 1..41: mol_type = genomic DNA
gccacgcgggaggcccgggttcgattcccggcccatgcacc

SEQ ID NO: 16683 - DNA, 42 bp, Homo sapiens
  source 1..42: mol_type = genomic DNA
gccacgcgggaggcccgggttcgattcccggcccatgcacca

SEQ ID NO: 16684 - DNA, 18 bp, Homo sapiens
  source 1..18: mol_type = genomic DNA
gccagggattgtgggttc

SEQ ID NO: 16685 - DNA, 19 bp, Homo sapiens
  source 1..19: mol_type = genomic DNA
gccagggattgtgggttcg

SEQ ID NO: 16686 - DNA, 33 bp, Homo sapiens
  source 1..33: mol_type = genomic DNA
gccagggattgtgggttcgagtcccacccgggg

SEQ ID NO: 16687 - DNA, 35 bp, Homo sapiens
  source 1..35: mol_type = genomic DNA
gccagggattgtgggttcgagtcccacccggggta

SEQ ID NO: 16688 - DNA, 36 bp, Homo sapiens
  source 1..36: mol_type = genomic DNA
gccagggattgtgggttcgagtcccacccggggtac

SEQ ID NO: 16689 - DNA, 37 bp, Homo sapiens
  source 1..37: mol_type = genomic DNA
gccagggattgtgggttcgagtcccacccggggtacc

SEQ ID NO: 16690 - DNA, 35 bp, Homo sapiens
  source 1..35: mol_type = genomic DNA
gccagggattgtgggttcgagtcccacctggggta

SEQ ID NO: 16691 - DNA, 37 bp, Homo sapiens
  source 1..37: mol_type = genomic DNA
gccagggattgtgggttcgagtcccacctggggtacc

SEQ ID NO: 16692 - DNA, 35 bp, Homo sapiens
  source 1..35: mol_type = genomic DNA
gccagggattgtgggttcgagtcccacctggggtg

SEQ ID NO: 16693 - DNA, 37 bp, Homo sapiens
  source 1..37: mol_type = genomic DNA
gccagggattgtgggttcgagtcccacctggggtgcc

SEQ ID NO: 16694 - DNA, 38 bp, Homo sapiens
  source 1..38: mol_type = genomic DNA
gccagggattgtgggttcgagtcccacctggggtgcca

SEQ ID NO: 16695 - DNA, 28 bp, Homo sapiens
  source 1..28: mol_type = genomic DNA
gccagggattgtgggttcgagtcccatc

SEQ ID NO: 16696 - DNA, 30 bp, Homo sapiens
  source 1..30: mol_type = genomic DNA
gccagggattgtgggttcgagtcccatctg

SEQ ID NO: 16697 - DNA, 31 bp, Homo sapiens
  source 1..31: mol_type = genomic DNA
gccagggattgtgggttcgagtcccatctgg

SEQ ID NO: 16698 - DNA, 33 bp, Homo sapiens
  source 1..33: mol_type = genomic DNA
gccagggattgtgggttcgagtcccatctgggg

SEQ ID NO: 16699 - DNA, 35 bp, Homo sapiens
  source 1..35: mol_type = genomic DNA
gccagggattgtgggttcgagtcccatctggggtg

SEQ ID NO: 16700 - DNA, 36 bp, Homo sapiens
  source 1..36: mol_type = genomic DNA
gccagggattgtgggttcgagtcccatctggggtgc

SEQ ID NO: 16701 - DNA, 37 bp, Homo sapiens
  source 1..37: mol_type = genomic DNA
gccagggattgtgggttcgagtcccatctggggtgcc

SEQ ID NO: 16702 - DNA, 38 bp, Homo sapiens
  source 1..38: mol_type = genomic DNA
gccagggattgtgggttcgagtcccatctggggtgcca

SEQ ID NO: 16703 - DNA, 17 bp, Homo sapiens
  source 1..17: mol_type = genomic DNA
gccagtggcgcaatgga

SEQ ID NO: 16704 - DNA, 26 bp, Homo sapiens
  source 1..26: mol_type = genomic DNA
gccagttgattagggtgcttagctgt

SEQ ID NO: 16705 - DNA, 27 bp, Homo sapiens
  source 1..27: mol_type = genomic DNA
gccagttgattagggtgcttagctgtt

SEQ ID NO: 16706 - DNA, 27 bp, Homo sapiens
  source 1..27: mol_type = genomic DNA
gccatgatcgtatagtggttagtactc

SEQ ID NO: 16707 - DNA, 28 bp, Homo sapiens
  source 1..28: mol_type = genomic DNA
gccatgatcgtatagtggttagtactct

SEQ ID NO: 16708 - DNA, 29 bp, Homo sapiens
  source 1..29: mol_type = genomic DNA
gccatgatcgtatagtggttagtactctg

SEQ ID NO: 16709 - DNA, 30 bp, Homo sapiens
  source 1..30: mol_type = genomic DNA
gccatgatcgtatagtggttagtactctgc

SEQ ID NO: 16710 - DNA, 31 bp, Homo sapiens
  source 1..31: mol_type = genomic DNA
gccatgatcgtatagtggttagtactctgcg

SEQ ID NO: 16711 - DNA, 32 bp, Homo sapiens
  source 1..32: mol_type = genomic DNA
gccatgatcgtatagtggttagtactctgcgc

SEQ ID NO: 16712 - DNA, 16 bp, Homo sapiens
  source 1..16: mol_type = genomic DNA
gcccacccagggacgc

SEQ ID NO: 16713 - DNA, 17 bp, Homo sapiens
  source 1..17: mol_type = genomic DNA
gcccacccagggacgcc

SEQ ID NO: 16714 - DNA, 18 bp, Homo sapiens
  source 1..18: mol_type = genomic DNA
gcccacccagggacgcca

SEQ ID NO: 16715 - DNA, 32 bp, Homo sapiens
  source 1..32: mol_type = genomic DNA
gcccagctagctcagtcggtagagcatgagac

SEQ ID NO: 16716 - DNA, 33 bp, Homo sapiens
  source 1..33: mol_type = genomic DNA
gcccagctagctcagtcggtagagcatgagact

SEQ ID NO: 16717 - DNA, 34 bp, Homo sapiens
  source 1..34: mol_type = genomic DNA
gcccagctagctcagtcggtagagcatgagactc

SEQ ID NO: 16718 - DNA, 35 bp, Homo sapiens
  source 1..35: mol_type = genomic DNA
gcccagctagctcagtcggtagagcatgagactct

SEQ ID NO: 16719 - DNA, 22 bp, Homo sapiens
  source 1..22: mol_type = genomic DNA
gcccataacccagaggtcgatg

SEQ ID NO: 16720 - DNA, 25 bp, Homo sapiens
  source 1..25: mol_type = genomic DNA
gcccataacccagaggtcgatggat

SEQ ID NO: 16721 - DNA, 27 bp, Homo sapiens
  source 1..27: mol_type = genomic DNA
gcccataacccagaggtcgatggatcg

SEQ ID NO: 16722 - DNA, 16 bp, Homo sapiens
  source 1..16: mol_type = genomic DNA
gcccataccccgaaaa

SEQ ID NO: 16723 - DNA, 20 bp, Homo sapiens
  source 1..20: mol_type = genomic DNA
gcccataccccgaaaatgtt

SEQ ID NO: 16724 - DNA, 21 bp, Homo sapiens
  source 1..21: mol_type = genomic DNA
gcccataccccgaaaatgttg

SEQ ID NO: 16725 - DNA, 22 bp, Homo sapiens
  source 1..22: mol_type = genomic DNA
gcccataccccgaaaatgttgg

SEQ ID NO: 16726 - DNA, 23 bp, Homo sapiens
  source 1..23: mol_type = genomic DNA
gcccataccccgaaaatgttggt

SEQ ID NO: 16727 - DNA, 24 bp, Homo sapiens
  source 1..24: mol_type = genomic DNA
gcccataccccgaaaatgttggtt

SEQ ID NO: 16728 - DNA, 25 bp, Homo sapiens
  source 1..25: mol_type = genomic DNA
gcccataccccgaaaatgttggtta

SEQ ID NO: 16729 - DNA, 29 bp, Homo sapiens
  source 1..29: mol_type = genomic DNA
gcccataccccgaaaatgttggttatacc

SEQ ID NO: 16730 - DNA, 34 bp, Homo sapiens
  source 1..34: mol_type = genomic DNA
gcccataccccgaaaatgttggttatacccttcc

SEQ ID NO: 16731 - DNA, 43 bp, Homo sapiens
  source 1..43: mol_type = genomic DNA
gcccataccccgaaaatgttggttatacccttcccgtactacc

SEQ ID NO: 16732 - DNA, 44 bp, Homo sapiens
  source 1..44: mol_type = genomic DNA
gcccataccccgaaaatgttggttatacccttcccgtactacca

SEQ ID NO: 16733 - DNA, 38 bp, Homo sapiens
  source 1..38: mol_type = genomic DNA
gccccaaaaattttggtgcaactccaaataaaagtacc

SEQ ID NO: 16734 - DNA, 16 bp, Homo sapiens
  source 1..16: mol_type = genomic DNA
gccccacgttgggcgc

SEQ ID NO: 16735 - DNA, 17 bp, Homo sapiens
  source 1..17: mol_type = genomic DNA
gccccacgttgggcgcc

SEQ ID NO: 16736 - DNA, 18 bp, Homo sapiens
  source 1..18: mol_type = genomic DNA
gccccacgttgggcgcca

SEQ ID NO: 16737 - DNA, 16 bp, Homo sapiens
  source 1..16: mol_type = genomic DNA
gccccagtggaaccac

SEQ ID NO: 16738 - DNA, 17 bp, Homo sapiens
  source 1..17: mol_type = genomic DNA
gccccagtggaaccacc

SEQ ID NO: 16739 - DNA, 18 bp, Homo sapiens
  source 1..18: mol_type = genomic DNA
gccccagtggaaccacca

SEQ ID NO: 16740 - DNA, 18 bp, Homo sapiens
  source 1..18: mol_type = genomic DNA
gccccagtggcctaatgg

SEQ ID NO: 16741 - DNA, 19 bp, Homo sapiens
  source 1..19: mol_type = genomic DNA
gccccagtggcctaatgga

SEQ ID NO: 16742 - DNA, 20 bp, Homo sapiens
  source 1..20: mol_type = genomic DNA
gccccagtggcctaatggat

SEQ ID NO: 16743 - DNA, 29 bp, Homo sapiens
  source 1..29: mol_type = genomic DNA
gccccagtggcctaatggataaggcactg

SEQ ID NO: 16744 - DNA, 29 bp, Homo sapiens
  source 1..29: mol_type = genomic DNA
gccccagtggcctaatggataaggcattg

SEQ ID NO: 16745 - DNA, 30 bp, Homo sapiens
  source 1..30: mol_type = genomic DNA
gccccagtggcctaatggataaggcattgg

SEQ ID NO: 16746 - DNA, 33 bp, Homo sapiens
  source 1..33: mol_type = genomic DNA
gccccagtggcctaatggataaggcattggcct

SEQ ID NO: 16747 - DNA, 36 bp, Homo sapiens
  source 1..36: mol_type = genomic DNA
gccccagtggcctaatggataaggcattggcctcct

SEQ ID NO: 16748 - DNA, 19 bp, Homo sapiens
  source 1..19: mol_type = genomic DNA
gccccagtggcctgatgga

SEQ ID NO: 16749 - DNA, 34 bp, Homo sapiens
  source 1..34: mol_type = genomic DNA
gccccatggtgtaatggtcagcactctggactct

SEQ ID NO: 16750 - DNA, 35 bp, Homo sapiens
  source 1..35: mol_type = genomic DNA
gccccatggtgtaatggtcagcactctggactctg

SEQ ID NO: 16751 - DNA, 28 bp, Homo sapiens
  source 1..28: mol_type = genomic DNA
gccccatggtgtaatggttagcactctg

SEQ ID NO: 16752 - DNA, 32 bp, Homo sapiens
  source 1..32: mol_type = genomic DNA
gccccatggtgtaatggttagcactctggact

SEQ ID NO: 16753 - DNA, 35 bp, Homo sapiens
  source 1..35: mol_type = genomic DNA
gccccatggtgtaatggttagcactctggactttg

SEQ ID NO: 16754 - DNA, 40 bp, Homo sapiens
  source 1..40: mol_type = genomic DNA
gccccatggtgtaatggttagcactctggactttgaatcc

SEQ ID NO: 16755 - DNA, 17 bp, Homo sapiens
  source 1..17: mol_type = genomic DNA
gcccccatgtctaacaa

SEQ ID NO: 16756 - DNA, 18 bp, Homo sapiens
  source 1..18: mol_type = genomic DNA
gcccccatgtctaacaac

SEQ ID NO: 16757 - DNA, 19 bp, Homo sapiens
  source 1..19: mol_type = genomic DNA
gcccccatgtctaacaaca

SEQ ID NO: 16758 - DNA, 21 bp, Homo sapiens
  source 1..21: mol_type = genomic DNA
gcccccatgtctaacaacatg

SEQ ID NO: 16759 - DNA, 22 bp, Homo sapiens
  source 1..22: mol_type = genomic DNA
gcccccatgtctaacaacatgg

SEQ ID NO: 16760 - DNA, 23 bp, Homo sapiens
  source 1..23: mol_type = genomic DNA
gcccccatgtctaacaacatggc

SEQ ID NO: 16761 - DNA, 24 bp, Homo sapiens
  source 1..24: mol_type = genomic DNA
gcccccatgtctaacaacatggct

SEQ ID NO: 16762 - DNA, 25 bp, Homo sapiens
  source 1..25: mol_type = genomic DNA
gcccccatgtctaacaacatggctt

SEQ ID NO: 16763 - DNA, 26 bp, Homo sapiens
  source 1..26: mol_type = genomic DNA
gcccccatgtctaacaacatggcttt

SEQ ID NO: 16764 - DNA, 27 bp, Homo sapiens
  source 1..27: mol_type = genomic DNA
gcccccatgtctaacaacatggctttc

SEQ ID NO: 16765 - DNA, 28 bp, Homo sapiens
  source 1..28: mol_type = genomic DNA
gcccccatgtctaacaacatggctttct

SEQ ID NO: 16766 - DNA, 29 bp, Homo sapiens
  source 1..29: mol_type = genomic DNA
gcccccatgtctaacaacatggctttctc

SEQ ID NO: 16767 - DNA, 30 bp, Homo sapiens
  source 1..30: mol_type = genomic DNA
gcccccatgtctaacaacatggctttctca

SEQ ID NO: 16768 - DNA, 31 bp, Homo sapiens
  source 1..31: mol_type = genomic DNA
gcccccatgtctaacaacatggctttctcac

SEQ ID NO: 16769 - DNA, 32 bp, Homo sapiens
  source 1..32: mol_type = genomic DNA
gcccccatgtctaacaacatggctttctcacc

SEQ ID NO: 16770 - DNA, 33 bp, Homo sapiens
  source 1..33: mol_type = genomic DNA
gcccccatgtctaacaacatggctttctcacca

SEQ ID NO: 16771 - DNA, 20 bp, Homo sapiens
  source 1..20: mol_type = genomic DNA
gccccgggttcaatccccgg

SEQ ID NO: 16772 - DNA, 30 bp, Homo sapiens
  source 1..30: mol_type = genomic DNA
gccccgggttcaatccccggcacctccacc

SEQ ID NO: 16773 - DNA, 31 bp, Homo sapiens
  source 1..31: mol_type = genomic DNA
gccccgggttcaatccccggcacctccacca

SEQ ID NO: 16774 - DNA, 17 bp, Homo sapiens
  source 1..17: mol_type = genomic DNA
gccccgggttcgatccc

SEQ ID NO: 16775 - DNA, 18 bp, Homo sapiens
  source 1..18: mol_type = genomic DNA
gccccgggttcgatcccc

SEQ ID NO: 16776 - DNA, 20 bp, Homo sapiens
  source 1..20: mol_type = genomic DNA
gccccgggttcgatccccgg

SEQ ID NO: 16777 - DNA, 22 bp, Homo sapiens
  source 1..22: mol_type = genomic DNA
gccccgggttcgatccccggca

SEQ ID NO: 16778 - DNA, 25 bp, Homo sapiens
  source 1..25: mol_type = genomic DNA
gccccgggttcgatccccggcatct

SEQ ID NO: 16779 - DNA, 18 bp, Homo sapiens
  source 1..18: mol_type = genomic DNA
gccccggtggcctaatgg

SEQ ID NO: 16780 - DNA, 19 bp, Homo sapiens
  source 1..19: mol_type = genomic DNA
gccccggtggcctaatgga

SEQ ID NO: 16781 - DNA, 20 bp, Homo sapiens
  source 1..20: mol_type = genomic DNA
gccccggtggcctaatggat

SEQ ID NO: 16782 - DNA, 29 bp, Homo sapiens
  source 1..29: mol_type = genomic DNA
gccccggtggcctaatggataaggcattg

SEQ ID NO: 16783 - DNA, 33 bp, Homo sapiens
  source 1..33: mol_type = genomic DNA
gccccggtggcctaatggataaggcattggcct

SEQ ID NO: 16784 - DNA, 36 bp, Homo sapiens
  source 1..36: mol_type = genomic DNA
gccccggtggcctaatggataaggcattggcctcct

SEQ ID NO: 16785 - DNA, 16 bp, Homo sapiens
  source 1..16: mol_type = genomic DNA
gcccgcatcctccacc

SEQ ID NO: 16786 - DNA, 17 bp, Homo sapiens
  source 1..17: mol_type = genomic DNA
gcccgcatcctccacca

SEQ ID NO: 16787 - DNA, 17 bp, Homo sapiens
  source 1..17: mol_type = genomic DNA
gcccgcattctccacca

SEQ ID NO: 16788 - DNA, 16 bp, Homo sapiens
  source 1..16: mol_type = genomic DNA
gcccggatagctcagt

SEQ ID NO: 16789 - DNA, 17 bp, Homo sapiens
  source 1..17: mol_type = genomic DNA
gcccggatagctcagtc

SEQ ID NO: 16790 - DNA, 18 bp, Homo sapiens
  source 1..18: mol_type = genomic DNA
gcccggatagctcagtcg

SEQ ID NO: 16791 - DNA, 19 bp, Homo sapiens
  source 1..19: mol_type = genomic DNA
gcccggatagctcagtcgg

SEQ ID NO: 16792 - DNA, 20 bp, Homo sapiens
  source 1..20: mol_type = genomic DNA
gcccggatagctcagtcggt

SEQ ID NO: 16793 - DNA, 21 bp, Homo sapiens
  source 1..21: mol_type = genomic DNA
gcccggatagctcagtcggta

SEQ ID NO: 16794 - DNA, 22 bp, Homo sapiens
  source 1..22: mol_type = genomic DNA
gcccggatagctcagtcggtag

SEQ ID NO: 16795 - DNA, 23 bp, Homo sapiens
  source 1..23: mol_type = genomic DNA
gcccggatagctcagtcggtaga

SEQ ID NO: 16796 - DNA, 24 bp, Homo sapiens
  source 1..24: mol_type = genomic DNA
gcccggatagctcagtcggtagag

SEQ ID NO: 16797 - DNA, 25 bp, Homo sapiens
  source 1..25: mol_type = genomic DNA
gcccggatagctcagtcggtagagc

SEQ ID NO: 16798 - DNA, 26 bp, Homo sapiens
  source 1..26: mol_type = genomic DNA
gcccggatagctcagtcggtagagca

SEQ ID NO: 16799 - DNA, 27 bp, Homo sapiens
  source 1..27: mol_type = genomic DNA
gcccggatagctcagtcggtagagcat

SEQ ID NO: 16800 - DNA, 28 bp, Homo sapiens
  source 1..28: mol_type = genomic DNA
gcccggatagctcagtcggtagagcatc

SEQ ID NO: 16801 - DNA, 29 bp, Homo sapiens
  source 1..29: mol_type = genomic DNA
gcccggatagctcagtcggtagagcatca

SEQ ID NO: 16802 - DNA, 30 bp, Homo sapiens
  source 1..30: mol_type = genomic DNA
gcccggatagctcagtcggtagagcatcag

SEQ ID NO: 16803 - DNA, 31 bp, Homo sapiens
  source 1..31: mol_type = genomic DNA
gcccggatagctcagtcggtagagcatcaga

SEQ ID NO: 16804 - DNA, 32 bp, Homo sapiens
  source 1..32: mol_type = genomic DNA
gcccggatagctcagtcggtagagcatcagac

SEQ ID NO: 16805 - DNA, 33 bp, Homo sapiens
  source 1..33: mol_type = genomic DNA
gcccggatagctcagtcggtagagcatcagact

SEQ ID NO: 16806 - DNA, 34 bp, Homo sapiens
  source 1..34: mol_type = genomic DNA
gcccggatagctcagtcggtagagcatcagactt

SEQ ID NO: 16807 - DNA, 35 bp, Homo sapiens
  source 1..35: mol_type = genomic DNA
gcccggatagctcagtcggtagagcatcagacttt

SEQ ID NO: 16808 - DNA, 36 bp, Homo sapiens
  source 1..36: mol_type = genomic DNA
gcccggatagctcagtcggtagagcatcagactttt

SEQ ID NO: 16809 - DNA, 37 bp, Homo sapiens
  source 1..37: mol_type = genomic DNA
gcccggatagctcagtcggtagagcatcagactttta

SEQ ID NO: 16810 - DNA, 39 bp, Homo sapiens
  source 1..39: mol_type = genomic DNA
gcccggatagctcagtcggtagagcatcagacttttaat

SEQ ID NO: 16811 - DNA, 16 bp, Homo sapiens
  source 1..16: mol_type = genomic DNA
gcccggctagctcagt

SEQ ID NO: 16812 - DNA, 17 bp, Homo sapiens
  source 1..17: mol_type = genomic DNA
gcccggctagctcagtc

SEQ ID NO: 16813 - DNA, 18 bp, Homo sapiens
  source 1..18: mol_type = genomic DNA
gcccggctagctcagtcg

SEQ ID NO: 16814 - DNA, 32 bp, Homo sapiens
  source 1..32: mol_type = genomic DNA
gcccggctagctcagtcgatagagcatgagac

SEQ ID NO: 16815 - DNA, 33 bp, Homo sapiens
  source 1..33: mol_type = genomic DNA
gcccggctagctcagtcgatagagcatgagact

SEQ ID NO: 16816 - DNA, 34 bp, Homo sapiens
  source 1..34: mol_type = genomic DNA
gcccggctagctcagtcgatagagcatgagactc

SEQ ID NO: 16817 - DNA, 36 bp, Homo sapiens
  source 1..36: mol_type = genomic DNA
gcccggctagctcagtcgatagagcatgagactctt

SEQ ID NO: 16818 - DNA, 19 bp, Homo sapiens
  source 1..19: mol_type = genomic DNA
gcccggctagctcagtcgg

SEQ ID NO: 16819 - DNA, 22 bp, Homo sapiens
  source 1..22: mol_type = genomic DNA
gcccggctagctcagtcggtag

SEQ ID NO: 16820 - DNA, 23 bp, Homo sapiens
  source 1..23: mol_type = genomic DNA
gcccggctagctcagtcggtaga

SEQ ID NO: 16821 - DNA, 24 bp, Homo sapiens
  source 1..24: mol_type = genomic DNA
gcccggctagctcagtcggtagag

SEQ ID NO: 16822 - DNA, 25 bp, Homo sapiens
  source 1..25: mol_type = genomic DNA
gcccggctagctcagtcggtagagc

SEQ ID NO: 16823 - DNA, 26 bp, Homo sapiens
  source 1..26: mol_type = genomic DNA
gcccggctagctcagtcggtagagca

SEQ ID NO: 16824 - DNA, 27 bp, Homo sapiens
  source 1..27: mol_type = genomic DNA
gcccggctagctcagtcggtagagcat

SEQ ID NO: 16825 - DNA, 28 bp, Homo sapiens
  source 1..28: mol_type = genomic DNA
gcccggctagctcagtcggtagagcatg

SEQ ID NO: 16826 - DNA, 29 bp, Homo sapiens
  source 1..29: mol_type = genomic DNA
gcccggctagctcagtcggtagagcatga

SEQ ID NO: 16827 - DNA, 30 bp, Homo sapiens
  source 1..30: mol_type = genomic DNA
gcccggctagctcagtcggtagagcatgag

SEQ ID NO: 16828 - DNA, 31 bp, Homo sapiens
  source 1..31: mol_type = genomic DNA
gcccggctagctcagtcggtagagcatgaga

SEQ ID NO: 16829 - DNA, 32 bp, Homo sapiens
  source 1..32: mol_type = genomic DNA
gcccggctagctcagtcggtagagcatgagac

SEQ ID NO: 16830 - DNA, 33 bp, Homo sapiens
  source 1..33: mol_type = genomic DNA
gcccggctagctcagtcggtagagcatgagacc

SEQ ID NO: 16831 - DNA, 34 bp, Homo sapiens
  source 1..34: mol_type = genomic DNA
gcccggctagctcagtcggtagagcatgagaccc

SEQ ID NO: 16832 - DNA, 35 bp, Homo sapiens
  source 1..35: mol_type = genomic DNA
gcccggctagctcagtcggtagagcatgagaccct

SEQ ID NO: 16833 - DNA, 36 bp, Homo sapiens
  source 1..36: mol_type = genomic DNA
gcccggctagctcagtcggtagagcatgagaccctt

SEQ ID NO: 16834 - DNA, 38 bp, Homo sapiens
  source 1..38: mol_type = genomic DNA
gcccggctagctcagtcggtagagcatgagacccttaa

SEQ ID NO: 16835 - DNA, 33 bp, Homo sapiens
  source 1..33: mol_type = genomic DNA
gcccggctagctcagtcggtagagcatgagact

SEQ ID NO: 16836 - DNA, 34 bp, Homo sapiens
  source 1..34: mol_type = genomic DNA
gcccggctagctcagtcggtagagcatgagactc

SEQ ID NO: 16837 - DNA, 35 bp, Homo sapiens
  source 1..35: mol_type = genomic DNA
gcccggctagctcagtcggtagagcatgagactct

SEQ ID NO: 16838 - DNA, 36 bp, Homo sapiens
  source 1..36: mol_type = genomic DNA
gcccggctagctcagtcggtagagcatgagactctt

SEQ ID NO: 16839 - DNA, 37 bp, Homo sapiens
  source 1..37: mol_type = genomic DNA
gcccggctagctcagtcggtagagcatgagactctta

SEQ ID NO: 16840 - DNA, 38 bp, Homo sapiens
  source 1..38: mol_type = genomic DNA
gcccggctagctcagtcggtagagcatgagactcttaa

SEQ ID NO: 16841 - DNA, 39 bp, Homo sapiens
  source 1..39: mol_type = genomic DNA
gcccggctagctcagtcggtagagcatgagactcttaat

SEQ ID NO: 16842 - DNA, 40 bp, Homo sapiens
  source 1..40: mol_type = genomic DNA
gcccggctagctcagtcggtagagcatgagactcttaatc

SEQ ID NO: 16843 - DNA, 41 bp, Homo sapiens
  source 1..41: mol_type = genomic DNA
gcccggctagctcagtcggtagagcatgagactcttaatct

SEQ ID NO: 16844 - DNA, 42 bp, Homo sapiens
  source 1..42: mol_type = genomic DNA
gcccggctagctcagtcggtagagcatgagactcttaatctc

SEQ ID NO: 16845 - DNA, 43 bp, Homo sapiens
  source 1..43: mol_type = genomic DNA
gcccggctagctcagtcggtagagcatgagactcttaatctca

SEQ ID NO: 16846 - DNA, 29 bp, Homo sapiens
  source 1..29: mol_type = genomic DNA
gcccggctagctcagtcggtagagcatgg

SEQ ID NO: 16847 - DNA, 30 bp, Homo sapiens
  source 1..30: mol_type = genomic DNA
gcccggctagctcagtcggtagagcatggg

SEQ ID NO: 16848 - DNA, 31 bp, Homo sapiens
  source 1..31: mol_type = genomic DNA
gcccggctagctcagtcggtagagcatggga

SEQ ID NO: 16849 - DNA, 32 bp, Homo sapiens
  source 1..32: mol_type = genomic DNA
gcccggctagctcagtcggtagagcatgggac

SEQ ID NO: 16850 - DNA, 33 bp, Homo sapiens
  source 1..33: mol_type = genomic DNA
gcccggctagctcagtcggtagagcatgggact

SEQ ID NO: 16851 - DNA, 34 bp, Homo sapiens
  source 1..34: mol_type = genomic DNA
gcccggctagctcagtcggtagagcatgggactc

SEQ ID NO: 16852 - DNA, 35 bp, Homo sapiens
  source 1..35: mol_type = genomic DNA
gcccggctagctcagtcggtagagcatgggactct

SEQ ID NO: 16853 - DNA, 36 bp, Homo sapiens
  source 1..36: mol_type = genomic DNA
gcccggctagctcagtcggtagagcatgggactctt

SEQ ID NO: 16854 - DNA, 37 bp, Homo sapiens
  source 1..37: mol_type = genomic DNA
gcccggctagctcagtcggtagagcatgggactctta

SEQ ID NO: 16855 - DNA, 38 bp, Homo sapiens
  source 1..38: mol_type = genomic DNA
gcccggctagctcagtcggtagagcatgggactcttaa

SEQ ID NO: 16856 - DNA, 39 bp, Homo sapiens
  source 1..39: mol_type = genomic DNA
gcccggctagctcagtcggtagagcatgggactcttaat

SEQ ID NO: 16857 - DNA, 40 bp, Homo sapiens
  source 1..40: mol_type = genomic DNA
gcccggctagctcagtcggtagagcatgggactcttaatc

SEQ ID NO: 16858 - DNA, 41 bp, Homo sapiens
  source 1..41: mol_type = genomic DNA
gcccggctagctcagtcggtagagcatgggactcttaatcc

SEQ ID NO: 16859 - DNA, 42 bp, Homo sapiens
  source 1..42: mol_type = genomic DNA
gcccggctagctcagtcggtagagcatgggactcttaatccc

SEQ ID NO: 16860 - DNA, 43 bp, Homo sapiens
  source 1..43: mol_type = genomic DNA
gcccggctagctcagtcggtagagcatgggactcttaatccca

SEQ ID NO: 16861 - DNA, 41 bp, Homo sapiens
  source 1..41: mol_type = genomic DNA
gcccggctagctcagtcggtagagcatgggactcttaatct

SEQ ID NO: 16862 - DNA, 42 bp, Homo sapiens
  source 1..42: mol_type = genomic DNA
gcccggctagctcagtcggtagagcatgggactcttaatctc

SEQ ID NO: 16863 - DNA, 28 bp, Homo sapiens
  source 1..28: mol_type = genomic DNA
gcccgggttcgactcccggtgtgggaac

SEQ ID NO: 16864 - DNA, 29 bp, Homo sapiens
  source 1..29: mol_type = genomic DNA
gcccgggttcgactcccggtgtgggaacc

SEQ ID NO: 16865 - DNA, 30 bp, Homo sapiens
  source 1..30: mol_type = genomic DNA
gcccgggttcgactcccggtgtgggaacca

SEQ ID NO: 16866 - DNA, 29 bp, Homo sapiens
  source 1..29: mol_type = genomic DNA
gcccgggttcgattcccggtcagggaacc

SEQ ID NO: 16867 - DNA, 30 bp, Homo sapiens
  source 1..30: mol_type = genomic DNA
gcccgggttcgattcccggtcagggaacca

SEQ ID NO: 16868 - DNA, 20 bp, Homo sapiens
  source 1..20: mol_type = genomic DNA
gcccggtaatcgcataaaac

SEQ ID NO: 16869 - DNA, 27 bp, Homo sapiens
  source 1..27: mol_type = genomic DNA
gcccggtaatcgcataaaacttaaaac

SEQ ID NO: 16870 - DNA, 28 bp, Homo sapiens
  source 1..28: mol_type = genomic DNA
gcccggtaatcgcataaaacttaaaact

SEQ ID NO: 16871 - DNA, 16 bp, Homo sapiens
  source 1..16: mol_type = genomic DNA
gccctcagtaagttgc

SEQ ID NO: 16872 - DNA, 18 bp, Homo sapiens
  source 1..18: mol_type = genomic DNA
gccctcagtaagttgcaa

SEQ ID NO: 16873 - DNA, 19 bp, Homo sapiens
  source 1..19: mol_type = genomic DNA
gccctcagtaagttgcaat

SEQ ID NO: 16874 - DNA, 20 bp, Homo sapiens
  source 1..20: mol_type = genomic DNA
gccctcagtaagttgcaata

SEQ ID NO: 16875 - DNA, 22 bp, Homo sapiens
  source 1..22: mol_type = genomic DNA
gccctcagtaagttgcaatact

SEQ ID NO: 16876 - DNA, 29 bp, Homo sapiens
  source 1..29: mol_type = genomic DNA
gccctcagtaagttgcaatacttaatttc

SEQ ID NO: 16877 - DNA, 31 bp, Homo sapiens
  source 1..31: mol_type = genomic DNA
gccctcagtaagttgcaatacttaatttctg

SEQ ID NO: 16878 - DNA, 32 bp, Homo sapiens
  source 1..32: mol_type = genomic DNA
gccctcagtaagttgcaatacttaatttctgc

SEQ ID NO: 16879 - DNA, 33 bp, Homo sapiens
  source 1..33: mol_type = genomic DNA
gccctcagtaagttgcaatacttaatttctgcc

SEQ ID NO: 16880 - DNA, 34 bp, Homo sapiens
  source 1..34: mol_type = genomic DNA
gccctcagtaagttgcaatacttaatttctgcca

SEQ ID NO: 16881 - DNA, 19 bp, Homo sapiens
  source 1..19: mol_type = genomic DNA
gccctcttagcgcagcggg

SEQ ID NO: 16882 - DNA, 19 bp, Homo sapiens
  source 1..19: mol_type = genomic DNA
gccctcttagcgcagtggg

SEQ ID NO: 16883 - DNA, 32 bp, Homo sapiens
  source 1..32: mol_type = genomic DNA
gccctcttagcgcagtgggcagcgcgtcagtc

SEQ ID NO: 16884 - DNA, 18 bp, Homo sapiens
  source 1..18: mol_type = genomic DNA
gccgaaatagctcagttg

SEQ ID NO: 16885 - DNA, 19 bp, Homo sapiens
  source 1..19: mol_type = genomic DNA
gccgaaatagctcagttgg

SEQ ID NO: 16886 - DNA, 20 bp, Homo sapiens
  source 1..20: mol_type = genomic DNA
gccgaaatagctcagttggg

SEQ ID NO: 16887 - DNA, 21 bp, Homo sapiens
  source 1..21: mol_type = genomic DNA
gccgaaatagctcagttggga

SEQ ID NO: 16888 - DNA, 22 bp, Homo sapiens
  source 1..22: mol_type = genomic DNA
gccgaaatagctcagttgggag

SEQ ID NO: 16889 - DNA, 23 bp, Homo sapiens
  source 1..23: mol_type = genomic DNA
gccgaaatagctcagttgggaga

SEQ ID NO: 16890 - DNA, 33 bp, Homo sapiens
  source 1..33: mol_type = genomic DNA
gccgaaatagctcagttgggagagcgttagact

SEQ ID NO: 16891 - DNA, 33 bp, Homo sapiens
  source 1..33: mol_type = genomic DNA
gccgagatagctcagttgggagagcgttagact

SEQ ID NO: 16892 - DNA, 16 bp, Homo sapiens
  source 1..16: mol_type = genomic DNA
gccgagcggtctaagg

SEQ ID NO: 16893 - DNA, 17 bp, Homo sapiens
  source 1..17: mol_type = genomic DNA
gccgagcggtctaaggc

SEQ ID NO: 16894 - DNA, 22 bp, Homo sapiens
  source 1..22: mol_type = genomic DNA
gccgagcggtctaaggcgctgc

SEQ ID NO: 16895 - DNA, 16 bp, Homo sapiens
  source 1..16: mol_type = genomic DNA
gccgaggttgtgagtt

SEQ ID NO: 16896 - DNA, 17 bp, Homo sapiens
  source 1..17: mol_type = genomic DNA
gccgaggttgtgagttc

SEQ ID NO: 16897 - DNA, 33 bp, Homo sapiens
  source 1..33: mol_type = genomic DNA
gccgaggttgtgagttcgagcctcacctggagc

SEQ ID NO: 16898 - DNA, 27 bp, Homo sapiens
  source 1..27: mol_type = genomic DNA
gccgagtggttaaggcgatggactgct

SEQ ID NO: 16899 - DNA, 20 bp, Homo sapiens
  source 1..20: mol_type = genomic DNA
gccgcagcaacctcggttcg

SEQ ID NO: 16900 - DNA, 33 bp, Homo sapiens
  source 1..33: mol_type = genomic DNA
gccgcagcaacctcggttcgaatccgagtcacg

SEQ ID NO: 16901 - DNA, 36 bp, Homo sapiens
  source 1..36: mol_type = genomic DNA
gccgcagcaacctcggttcgaatccgagtcacggca

SEQ ID NO: 16902 - DNA, 37 bp, Homo sapiens
  source 1..37: mol_type = genomic DNA
gccgcagcaacctcggttcgaatccgagtcacggcac

SEQ ID NO: 16903 - DNA, 38 bp, Homo sapiens
  source 1..38: mol_type = genomic DNA
gccgcagcaacctcggttcgaatccgagtcacggcacc

SEQ ID NO: 16904 - DNA, 39 bp, Homo sapiens
  source 1..39: mol_type = genomic DNA
gccgcagcaacctcggttcgaatccgagtcacggcacca

SEQ ID NO: 16905 - DNA, 16 bp, Homo sapiens
  source 1..16: mol_type = genomic DNA
gccgcggcccgggttc

SEQ ID NO: 16906 - DNA, 26 bp, Homo sapiens
  source 1..26: mol_type = genomic DNA
gccgcggcccgggttcgattcccggt

SEQ ID NO: 16907 - DNA, 27 bp, Homo sapiens
  source 1..27: mol_type = genomic DNA
gccgcggcccgggttcgattcccggtc

SEQ ID NO: 16908 - DNA, 29 bp, Homo sapiens
  source 1..29: mol_type = genomic DNA
gccgcggcccgggttcgattcccggtcag

SEQ ID NO: 16909 - DNA, 30 bp, Homo sapiens
  source 1..30: mol_type = genomic DNA
gccgcggcccgggttcgattcccggtcagg

SEQ ID NO: 16910 - DNA, 31 bp, Homo sapiens
  source 1..31: mol_type = genomic DNA
gccgcggcccgggttcgattcccggtcaggg

SEQ ID NO: 16911 - DNA, 32 bp, Homo sapiens
  source 1..32: mol_type = genomic DNA
gccgcggcccgggttcgattcccggtcaggga

SEQ ID NO: 16912 - DNA, 33 bp, Homo sapiens
  source 1..33: mol_type = genomic DNA
gccgcggcccgggttcgattcccggtcagggaa

SEQ ID NO: 16913 - DNA, 34 bp, Homo sapiens
  source 1..34: mol_type = genomic DNA
gccgcggcccgggttcgattcccggtcagggaac

SEQ ID NO: 16914 - DNA, 35 bp, Homo sapiens
  source 1..35: mol_type = genomic DNA
gccgcggcccgggttcgattcccggtcagggaacc

SEQ ID NO: 16915 - DNA, 36 bp, Homo sapiens
  source 1..36: mol_type = genomic DNA
gccgcggcccgggttcgattcccggtcagggaacca

SEQ ID NO: 16916 - DNA, 18 bp, Homo sapiens
  source 1..18: mol_type = genomic DNA
gccgcgtggcctaatgga

SEQ ID NO: 16917 - DNA, 35 bp, Homo sapiens
  source 1..35: mol_type = genomic DNA
gccgcgtggcctaatggataaggcgtctgattccg

SEQ ID NO: 16918 - DNA, 16 bp, Homo sapiens
  source 1..16: mol_type = genomic DNA
gccgctggtgtagtgg

SEQ ID NO: 16919 - DNA, 18 bp, Homo sapiens
  source 1..18: mol_type = genomic DNA
gccgctggtgtagtggta

SEQ ID NO: 16920 - DNA, 24 bp, Homo sapiens
  source 1..24: mol_type = genomic DNA
gccgctggtgtagtggtatcatgc

SEQ ID NO: 16921 - DNA, 25 bp, Homo sapiens
  source 1..25: mol_type = genomic DNA
gccgctggtgtagtggtatcatgca

SEQ ID NO: 16922 - DNA, 26 bp, Homo sapiens
  source 1..26: mol_type = genomic DNA
gccgctggtgtagtggtatcatgcaa

SEQ ID NO: 16923 - DNA, 27 bp, Homo sapiens
  source 1..27: mol_type = genomic DNA
gccgctggtgtagtggtatcatgcaag

SEQ ID NO: 16924 - DNA, 28 bp, Homo sapiens
  source 1..28: mol_type = genomic DNA
gccgctggtgtagtggtatcatgcaaga

SEQ ID NO: 16925 - DNA, 29 bp, Homo sapiens
  source 1..29: mol_type = genomic DNA
gccgctggtgtagtggtatcatgcaagat

SEQ ID NO: 16926 - DNA, 30 bp, Homo sapiens
  source 1..30: mol_type = genomic DNA
gccgctggtgtagtggtatcatgcaagatt

SEQ ID NO: 16927 - DNA, 31 bp, Homo sapiens
  source 1..31: mol_type = genomic DNA
gccgctggtgtagtggtatcatgcaagattc

SEQ ID NO: 16928 - DNA, 32 bp, Homo sapiens
  source 1..32: mol_type = genomic DNA
gccgctggtgtagtggtatcatgcaagattcc

SEQ ID NO: 16929 - DNA, 33 bp, Homo sapiens
  source 1..33: mol_type = genomic DNA
gccgctggtgtagtggtatcatgcaagattccc

SEQ ID NO: 16930 - DNA, 34 bp, Homo sapiens
  source 1..34: mol_type = genomic DNA
gccgctggtgtagtggtatcatgcaagattccca

SEQ ID NO: 16931 - DNA, 35 bp, Homo sapiens
  source 1..35: mol_type = genomic DNA
gccgctggtgtagtggtatcatgcaagattcccat

SEQ ID NO: 16932 - DNA, 37 bp, Homo sapiens
  source 1..37: mol_type = genomic DNA
gccgctggtgtagtggtatcatgcaagattcccattc

SEQ ID NO: 16933 - DNA, 38 bp, Homo sapiens
  source 1..38: mol_type = genomic DNA
gccgctggtgtagtggtatcatgcaagattcccattct

SEQ ID NO: 16934 - DNA, 47 bp, Homo sapiens
  source 1..47: mol_type = genomic DNA
gccgctggtgtagtggtatcatgcaagattcccattcttgcgacccg

SEQ ID NO: 16935 - DNA, 48 bp, Homo sapiens
  source 1..48: mol_type = genomic DNA
gccgctggtgtagtggtatcatgcaagattcccattcttgcgacccgg

SEQ ID NO: 16936 - DNA, 19 bp, Homo sapiens
  source 1..19: mol_type = genomic DNA
gccggttagctcagttggt

SEQ ID NO: 16937 - DNA, 16 bp, Homo sapiens
  source 1..16: mol_type = genomic DNA
gccgtgatcgtatagt

SEQ ID NO: 16938 - DNA, 17 bp, Homo sapiens
  source 1..17: mol_type = genomic DNA
gccgtgatcgtatagtg

SEQ ID NO: 16939 - DNA, 18 bp, Homo sapiens
  source 1..18: mol_type = genomic DNA
gccgtgatcgtatagtgg

SEQ ID NO: 16940 - DNA, 19 bp, Homo sapiens
  source 1..19: mol_type = genomic DNA
gccgtgatcgtatagtggt

SEQ ID NO: 16941 - DNA, 20 bp, Homo sapiens
  source 1..20: mol_type = genomic DNA
gccgtgatcgtatagtggtt

SEQ ID NO: 16942 - DNA, 21 bp, Homo sapiens
  source 1..21: mol_type = genomic DNA
gccgtgatcgtatagtggtta

SEQ ID NO: 16943 - DNA, 22 bp, Homo sapiens
  source 1..22: mol_type = genomic DNA
gccgtgatcgtatagtggttag

SEQ ID NO: 16944 - DNA, 23 bp, Homo sapiens
  source 1..23: mol_type = genomic DNA
gccgtgatcgtatagtggttagt

SEQ ID NO: 16945 - DNA, 24 bp, Homo sapiens
  source 1..24: mol_type = genomic DNA
gccgtgatcgtatagtggttagta

SEQ ID NO: 16946 - DNA, 25 bp, Homo sapiens
  source 1..25: mol_type = genomic DNA
gccgtgatcgtatagtggttagtac

SEQ ID NO: 16947 - DNA, 26 bp, Homo sapiens
  source 1..26: mol_type = genomic DNA
gccgtgatcgtatagtggttagtact

SEQ ID NO: 16948 - DNA, 27 bp, Homo sapiens
  source 1..27: mol_type = genomic DNA
gccgtgatcgtatagtggttagtactc

SEQ ID NO: 16949 - DNA, 28 bp, Homo sapiens
  source 1..28: mol_type = genomic DNA
gccgtgatcgtatagtggttagtactct

SEQ ID NO: 16950 - DNA, 29 bp, Homo sapiens
  source 1..29: mol_type = genomic DNA
gccgtgatcgtatagtggttagtactctg

SEQ ID NO: 16951 - DNA, 30 bp, Homo sapiens
  source 1..30: mol_type = genomic DNA
gccgtgatcgtatagtggttagtactctgc

SEQ ID NO: 16952 - DNA, 31 bp, Homo sapiens
  source 1..31: mol_type = genomic DNA
gccgtgatcgtatagtggttagtactctgcg

SEQ ID NO: 16953 - DNA, 32 bp, Homo sapiens
  source 1..32: mol_type = genomic DNA
gccgtgatcgtatagtggttagtactctgcgt

SEQ ID NO: 16954 - DNA, 33 bp, Homo sapiens
  source 1..33: mol_type = genomic DNA
gccgtgatcgtatagtggttagtactctgcgtt

SEQ ID NO: 16955 - DNA, 34 bp, Homo sapiens
  source 1..34: mol_type = genomic DNA
gccgtgatcgtatagtggttagtactctgcgttg

SEQ ID NO: 16956 - DNA, 35 bp, Homo sapiens
  source 1..35: mol_type = genomic DNA
gccgtgatcgtatagtggttagtactctgcgttgt

SEQ ID NO: 16957 - DNA, 36 bp, Homo sapiens
  source 1..36: mol_type = genomic DNA
gccgtgatcgtatagtggttagtactctgcgttgtg

SEQ ID NO: 16958 - DNA, 37 bp, Homo sapiens
  source 1..37: mol_type = genomic DNA
gccgtgatcgtatagtggttagtactctgcgttgtgg

SEQ ID NO: 16959 - DNA, 38 bp, Homo sapiens
  source 1..38: mol_type = genomic DNA
gccgtgatcgtatagtggttagtactctgcgttgtggc

SEQ ID NO: 16960 - DNA, 39 bp, Homo sapiens
  source 1..39: mol_type = genomic DNA
gccgtgatcgtatagtggttagtactctgcgttgtggcc

SEQ ID NO: 16961 - DNA, 40 bp, Homo sapiens
  source 1..40: mol_type = genomic DNA
gccgtgatcgtatagtggttagtactctgcgttgtggccg

SEQ ID NO: 16962 - DNA, 41 bp, Homo sapiens
  source 1..41: mol_type = genomic DNA
gccgtgatcgtatagtggttagtactctgcgttgtggccgc

SEQ ID NO: 16963 - DNA, 42 bp, Homo sapiens
  source 1..42: mol_type = genomic DNA
gccgtgatcgtatagtggttagtactctgcgttgtggccgca

SEQ ID NO: 16964 - DNA, 43 bp, Homo sapiens
  source 1..43: mol_type = genomic DNA
gccgtgatcgtatagtggttagtactctgcgttgtggccgcag

SEQ ID NO: 16965 - DNA, 44 bp, Homo sapiens
  source 1..44: mol_type = genomic DNA
gccgtgatcgtatagtggttagtactctgcgttgtggccgcagc

SEQ ID NO: 16966 - DNA, 45 bp, Homo sapiens
  source 1..45: mol_type = genomic DNA
gccgtgatcgtatagtggttagtactctgcgttgtggccgcagca

SEQ ID NO: 16967 - DNA, 48 bp, Homo sapiens
  source 1..48: mol_type = genomic DNA
gccgtgatcgtatagtggttagtactctgcgttgtggccgcagcaacc

SEQ ID NO: 16968 - DNA, 23 bp, Homo sapiens
  source 1..23: mol_type = genomic DNA
gcctcacacgcgaaaggtccccg

SEQ ID NO: 16969 - DNA, 44 bp, Homo sapiens
  source 1..44: mol_type = genomic DNA
gcctcacacgcgaaaggtccccggttcgaaaccgggcggaaaca

SEQ ID NO: 16970 - DNA, 46 bp, Homo sapiens
  source 1..46: mol_type = genomic DNA
gcctcacacgcgaaaggtccccggttcgaaaccgggcggaaacacc

SEQ ID NO: 16971 - DNA, 40 bp, Homo sapiens
  source 1..40: mol_type = genomic DNA
gcctcacacgcgaaaggtccccggttcgatcccgggcgga

SEQ ID NO: 16972 - DNA, 41 bp, Homo sapiens
  source 1..41: mol_type = genomic DNA
gcctcacacgcgaaaggtccccggttcgatcccgggcggaa

SEQ ID NO: 16973 - DNA, 46 bp, Homo sapiens
  source 1..46: mol_type = genomic DNA
gcctcacacgcgaaaggtccccggttcgatcccgggcggaaacacc

SEQ ID NO: 16974 - DNA, 17 bp, Homo sapiens
  source 1..17: mol_type = genomic DNA
gcctcacctggagcacc

SEQ ID NO: 16975 - DNA, 18 bp, Homo sapiens
  source 1..18: mol_type = genomic DNA
gcctcacctggagcacca

SEQ ID NO: 16976 - DNA, 46 bp, Homo sapiens
  source 1..46: mol_type = genomic DNA
gcctccggagctggggattgtgggttcgagtcccatctgggtcgcc

SEQ ID NO: 16977 - DNA, 16 bp, Homo sapiens
  source 1..16: mol_type = genomic DNA
gcctccttagcgcagt

SEQ ID NO: 16978 - DNA, 18 bp, Homo sapiens
  source 1..18: mol_type = genomic DNA
gcctccttagcgcagtag

SEQ ID NO: 16979 - DNA, 19 bp, Homo sapiens
  source 1..19: mol_type = genomic DNA
gcctccttagcgcagtagg

SEQ ID NO: 16980 - DNA, 32 bp, Homo sapiens
  source 1..32: mol_type = genomic DNA
gcctccttagcgcagtaggcagcgcgtcagtc

SEQ ID NO: 16981 - DNA, 35 bp, Homo sapiens
  source 1..35: mol_type = genomic DNA
gcctccttagcgcagtaggcagcgcgtcagtctca

SEQ ID NO: 16982 - DNA, 16 bp, Homo sapiens
  source 1..16: mol_type = genomic DNA
gcctcgttagcgcagt

SEQ ID NO: 16983 - DNA, 18 bp, Homo sapiens
  source 1..18: mol_type = genomic DNA
gcctcgttagcgcagtag

SEQ ID NO: 16984 - DNA, 19 bp, Homo sapiens
  source 1..19: mol_type = genomic DNA
gcctcgttagcgcagtagg

SEQ ID NO: 16985 - DNA, 32 bp, Homo sapiens
  source 1..32: mol_type = genomic DNA
gcctcgttagcgcagtaggcagcgcgtcagtc

SEQ ID NO: 16986 - DNA, 34 bp, Homo sapiens
  source 1..34: mol_type = genomic DNA
gcctcgttagcgcagtaggcagcgcgtcagtctc

SEQ ID NO: 16987 - DNA, 35 bp, Homo sapiens
  source 1..35: mol_type = genomic DNA
gcctcgttagcgcagtaggcagcgcgtcagtctca

SEQ ID NO: 16988 - DNA, 32 bp, Homo sapiens
  source 1..32: mol_type = genomic DNA
gcctcgttagcgcagtaggtagcgcgtcagtc

SEQ ID NO: 16989 - DNA, 33 bp, Homo sapiens
  source 1..33: mol_type = genomic DNA
gcctcgttagcgcagtaggtagcgcgtcagtct

SEQ ID NO: 16990 - DNA, 35 bp, Homo sapiens
  source 1..35: mol_type = genomic DNA
gcctcgttagcgcagtaggtagcgcgtcagtctca

SEQ ID NO: 16991 - DNA, 16 bp, Homo sapiens
  source 1..16: mol_type = genomic DNA
gcctctttttaccacc

SEQ ID NO: 16992 - DNA, 17 bp, Homo sapiens
  source 1..17: mol_type = genomic DNA
gcctctttttaccacca

SEQ ID NO: 16993 - DNA, 18 bp, Homo sapiens
  source 1..18: mol_type = genomic DNA
gcctgccacgcgggaggc

SEQ ID NO: 16994 - DNA, 24 bp, Homo sapiens
  source 1..24: mol_type = genomic DNA
gcctgccacgcgggaggcccgggt

SEQ ID NO: 16995 - DNA, 45 bp, Homo sapiens
  source 1..45: mol_type = genomic DNA
gcctgccacgcgggaggcccgggttcgattcccggccaatgcacc

SEQ ID NO: 16996 - DNA, 19 bp, Homo sapiens
  source 1..19: mol_type = genomic DNA
gcctggatagctcagtcgg

SEQ ID NO: 16997 - DNA, 22 bp, Homo sapiens
  source 1..22: mol_type = genomic DNA
gcctggatagctcagtcggtag

SEQ ID NO: 16998 - DNA, 28 bp, Homo sapiens
  source 1..28: mol_type = genomic DNA
gcctggatagctcagtcggtagagcatc

SEQ ID NO: 16999 - DNA, 29 bp, Homo sapiens
  source 1..29: mol_type = genomic DNA
gcctggatagctcagtcggtagagcatca

SEQ ID NO: 17000 - DNA, 31 bp, Homo sapiens
  source 1..31: mol_type = genomic DNA
gcctggatagctcagtcggtagagcatcaga

SEQ ID NO: 17001 - DNA, 32 bp, Homo sapiens
  source 1..32: mol_type = genomic DNA
gcctggatagctcagtcggtagagcatcagac

SEQ ID NO: 17002 - DNA, 33 bp, Homo sapiens
  source 1..33: mol_type = genomic DNA
gcctggatagctcagtcggtagagcatcagact

SEQ ID NO: 17003 - DNA, 19 bp, Homo sapiens
  source 1..19: mol_type = genomic DNA
gcctggatagctcagttgg

SEQ ID NO: 17004 - DNA, 20 bp, Homo sapiens
  source 1..20: mol_type = genomic DNA
gcctggatagctcagttggt

SEQ ID NO: 17005 - DNA, 28 bp, Homo sapiens
  source 1..28: mol_type = genomic DNA
gcctggatagctcagttggtagagcatc

SEQ ID NO: 17006 - DNA, 32 bp, Homo sapiens
  source 1..32: mol_type = genomic DNA
gcctggatagctcagttggtagagcatcagac

SEQ ID NO: 17007 - DNA, 33 bp, Homo sapiens
  source 1..33: mol_type = genomic DNA
gcctggatagctcagttggtagagcatcagact

SEQ ID NO: 17008 - DNA, 19 bp, Homo sapiens
  source 1..19: mol_type = genomic DNA
gcctgggtagctcagtcgg

SEQ ID NO: 17009 - DNA, 22 bp, Homo sapiens
  source 1..22: mol_type = genomic DNA
gcctgggtagctcagtcggtag

SEQ ID NO: 17010 - DNA, 28 bp, Homo sapiens
  source 1..28: mol_type = genomic DNA
gcctgggtagctcagtcggtagagcatc

SEQ ID NO: 17011 - DNA, 29 bp, Homo sapiens
  source 1..29: mol_type = genomic DNA
gcctgggtagctcagtcggtagagcatca

SEQ ID NO: 17012 - DNA, 31 bp, Homo sapiens
  source 1..31: mol_type = genomic DNA
gcctgggtagctcagtcggtagagcatcaga

SEQ ID NO: 17013 - DNA, 32 bp, Homo sapiens
  source 1..32: mol_type = genomic DNA
gcctgggtagctcagtcggtagagcatcagac

SEQ ID NO: 17014 - DNA, 33 bp, Homo sapiens
  source 1..33: mol_type = genomic DNA
gcctgggtagctcagtcggtagagcatcagact

SEQ ID NO: 17015 - DNA, 19 bp, Homo sapiens
  source 1..19: mol_type = genomic DNA
gcctgtcacgcgggagacc

SEQ ID NO: 17016 - DNA, 20 bp, Homo sapiens
  source 1..20: mol_type = genomic DNA
gcctgtcacgcgggagaccg

SEQ ID NO: 17017 - DNA, 21 bp, Homo sapiens
  source 1..21: mol_type = genomic DNA
gcctgtcacgcgggagaccgg

SEQ ID NO: 17018 - DNA, 40 bp, Homo sapiens
  source 1..40: mol_type = genomic DNA
gcctgtcacgcgggagaccggggttcaattccccgacggg

SEQ ID NO: 17019 - DNA, 44 bp, Homo sapiens
  source 1..44: mol_type = genomic DNA
gcctgtcacgcgggagaccggggttcaattccccgacggggagc

SEQ ID NO: 17020 - DNA, 45 bp, Homo sapiens
  source 1..45: mol_type = genomic DNA
gcctgtcacgcgggagaccggggttcaattccccgacggggagcc

SEQ ID NO: 17021 - DNA, 46 bp, Homo sapiens
  source 1..46: mol_type = genomic DNA
gcctgtcacgcgggagaccggggttcaattccccgacggggagcca

SEQ ID NO: 17022 - DNA, 39 bp, Homo sapiens
  source 1..39: mol_type = genomic DNA
gcctgtcacgcgggagaccggggttcgattccccgacgg

SEQ ID NO: 17023 - DNA, 40 bp, Homo sapiens
  source 1..40: mol_type = genomic DNA
gcctgtcacgcgggagaccggggttcgattccccgacggg

SEQ ID NO: 17024 - DNA, 41 bp, Homo sapiens
  source 1..41: mol_type = genomic DNA
gcctgtcacgcgggagaccggggttcgattccccgacgggg

SEQ ID NO: 17025 - DNA, 42 bp, Homo sapiens
  source 1..42: mol_type = genomic DNA
gcctgtcacgcgggagaccggggttcgattccccgacgggga

SEQ ID NO: 17026 - DNA, 43 bp, Homo sapiens
  source 1..43: mol_type = genomic DNA
gcctgtcacgcgggagaccggggttcgattccccgacggggag

SEQ ID NO: 17027 - DNA, 44 bp, Homo sapiens
  source 1..44: mol_type = genomic DNA
gcctgtcacgcgggagaccggggttcgattccccgacggggagc

SEQ ID NO: 17028 - DNA, 45 bp, Homo sapiens
  source 1..45: mol_type = genomic DNA
gcctgtcacgcgggagaccggggttcgattccccgacggggagcc

SEQ ID NO: 17029 - DNA, 46 bp, Homo sapiens
  source 1..46: mol_type = genomic DNA
gcctgtcacgcgggagaccggggttcgattccccgacggggagcca

SEQ ID NO: 17030 - DNA, 42 bp, Homo sapiens
  source 1..42: mol_type = genomic DNA
gccttcaaagccctcagtaagttgcaatacttaatttctgcc

SEQ ID NO: 17031 - DNA, 43 bp, Homo sapiens
  source 1..43: mol_type = genomic DNA
gccttcaaagccctcagtaagttgcaatacttaatttctgcca

SEQ ID NO: 17032 - DNA, 22 bp, Homo sapiens
  source 1..22: mol_type = genomic DNA
gccttccaagcagttgacccgg

SEQ ID NO: 17033 - DNA, 36 bp, Homo sapiens
  source 1..36: mol_type = genomic DNA
gccttccaagcagttgacccgggttcgattcccggc

SEQ ID NO: 17034 - DNA, 45 bp, Homo sapiens
  source 1..45: mol_type = genomic DNA
gccttccaagcagttgacccgggttcgattcccggccaacgcacc

SEQ ID NO: 17035 - DNA, 16 bp, Homo sapiens
  source 1..16: mol_type = genomic DNA
gcgaaaggtccccggt

SEQ ID NO: 17036 - DNA, 17 bp, Homo sapiens
  source 1..17: mol_type = genomic DNA
gcgaaaggtccccggtt

SEQ ID NO: 17037 - DNA, 19 bp, Homo sapiens
  source 1..19: mol_type = genomic DNA
gcgaaaggtccccggttcg

SEQ ID NO: 17038 - DNA, 33 bp, Homo sapiens
  source 1..33: mol_type = genomic DNA
gcgaaaggtccccggttcgaaaccgggcagaag

SEQ ID NO: 17039 - DNA, 37 bp, Homo sapiens
  source 1..37: mol_type = genomic DNA
gcgaaaggtccccggttcgaaaccgggcagaagcacc

SEQ ID NO: 17040 - DNA, 38 bp, Homo sapiens
  source 1..38: mol_type = genomic DNA
gcgaaaggtccccggttcgaaaccgggcagaagcacca

SEQ ID NO: 17041 - DNA, 29 bp, Homo sapiens
  source 1..29: mol_type = genomic DNA
gcgaaaggtccccggttcgaaaccgggcg

SEQ ID NO: 17042 - DNA, 33 bp, Homo sapiens
  source 1..33: mol_type = genomic DNA
gcgaaaggtccccggttcgaaaccgggcggaaa

SEQ ID NO: 17043 - DNA, 34 bp, Homo sapiens
  source 1..34: mol_type = genomic DNA
gcgaaaggtccccggttcgaaaccgggcggaaac

SEQ ID NO: 17044 - DNA, 35 bp, Homo sapiens
  source 1..35: mol_type = genomic DNA
gcgaaaggtccccggttcgaaaccgggcggaaaca

SEQ ID NO: 17045 - DNA, 36 bp, Homo sapiens
  source 1..36: mol_type = genomic DNA
gcgaaaggtccccggttcgaaaccgggcggaaacac

SEQ ID NO: 17046 - DNA, 37 bp, Homo sapiens
  source 1..37: mol_type = genomic DNA
gcgaaaggtccccggttcgaaaccgggcggaaacacc

SEQ ID NO: 17047 - DNA, 38 bp, Homo sapiens
  source 1..38: mol_type = genomic DNA
gcgaaaggtccccggttcgaaaccgggcggaaacacca

SEQ ID NO: 17048 - DNA, 37 bp, Homo sapiens
  source 1..37: mol_type = genomic DNA
gcgaaaggtccccggttcgaaactgggcggaaacacc

SEQ ID NO: 17049 - DNA, 33 bp, Homo sapiens
  source 1..33: mol_type = genomic DNA
gcgaaaggtccccggttcgatcccgggcggaaa

SEQ ID NO: 17050 - DNA, 34 bp, Homo sapiens
  source 1..34: mol_type = genomic DNA
gcgaaaggtccccggttcgatcccgggcggaaac

SEQ ID NO: 17051 - DNA, 35 bp, Homo sapiens
  source 1..35: mol_type = genomic DNA
gcgaaaggtccccggttcgatcccgggcggaaaca

SEQ ID NO: 17052 - DNA, 37 bp, Homo sapiens
  source 1..37: mol_type = genomic DNA
gcgaaaggtccccggttcgatcccgggcggaaacacc

SEQ ID NO: 17053 - DNA, 38 bp, Homo sapiens
  source 1..38: mol_type = genomic DNA
gcgaaaggtccccggttcgatcccgggcggaaacacca

SEQ ID NO: 17054 - DNA, 37 bp, Homo sapiens
  source 1..37: mol_type = genomic DNA
gcgaaaggtccctggatcaaaaccaggcggaaacacc

SEQ ID NO: 17055 - DNA, 20 bp, Homo sapiens
  source 1..20: mol_type = genomic DNA
gcgacccgggttcgattccc

SEQ ID NO: 17056 - DNA, 28 bp, Homo sapiens
  source 1..28: mol_type = genomic DNA
gcgacccgggttcgattcccgggcggcg

SEQ ID NO: 17057 - DNA, 16 bp, Homo sapiens
  source 1..16: mol_type = genomic DNA
gcgagaggtagcggga

SEQ ID NO: 17058 - DNA, 17 bp, Homo sapiens
  source 1..17: mol_type = genomic DNA
gcgagaggtagcgggat

SEQ ID NO: 17059 - DNA, 18 bp, Homo sapiens
  source 1..18: mol_type = genomic DNA
gcgagaggtagcgggatc

SEQ ID NO: 17060 - DNA, 16 bp, Homo sapiens
  source 1..16: mol_type = genomic DNA
gcgagaggtcccgggt

SEQ ID NO: 17061 - DNA, 31 bp, Homo sapiens
  source 1..31: mol_type = genomic DNA
gcgagaggtcccgggttcaaatcccggacga

SEQ ID NO: 17062 - DNA, 32 bp, Homo sapiens
  source 1..32: mol_type = genomic DNA
gcgagaggtcccgggttcaaatcccggacgag

SEQ ID NO: 17063 - DNA, 34 bp, Homo sapiens
  source 1..34: mol_type = genomic DNA
gcgagaggtcccgggttcaaatcccggacgagcc

SEQ ID NO: 17064 - DNA, 35 bp, Homo sapiens
  source 1..35: mol_type = genomic DNA
gcgagaggtcccgggttcaaatcccggacgagccc

SEQ ID NO: 17065 - DNA, 36 bp, Homo sapiens
  source 1..36: mol_type = genomic DNA
gcgagaggtcccgggttcaaatcccggacgagcccc

SEQ ID NO: 17066 - DNA, 37 bp, Homo sapiens
  source 1..37: mol_type = genomic DNA
gcgagaggtcccgggttcaaatcccggacgagccccc

SEQ ID NO: 17067 - DNA, 38 bp, Homo sapiens
  source 1..38: mol_type = genomic DNA
gcgagaggtcccgggttcaaatcccggacgagccccca

SEQ ID NO: 17068 - DNA, 26 bp, Homo sapiens
  source 1..26: mol_type = genomic DNA
gcgagttcaaatctcgctggggcctc

SEQ ID NO: 17069 - DNA, 26 bp, Homo sapiens
  source 1..26: mol_type = genomic DNA
gcgagttcaattctcgctggggcctc

SEQ ID NO: 17070 - DNA, 26 bp, Homo sapiens
  source 1..26: mol_type = genomic DNA
gcgagttcgatcctcgctggggcctc

SEQ ID NO: 17071 - DNA, 24 bp, Homo sapiens
  source 1..24: mol_type = genomic DNA
gcgatccgagttcaaatctcggtg

SEQ ID NO: 17072 - DNA, 28 bp, Homo sapiens
  source 1..28: mol_type = genomic DNA
gcgatccgagttcaaatctcggtggaac

SEQ ID NO: 17073 - DNA, 29 bp, Homo sapiens
  source 1..29: mol_type = genomic DNA
gcgatccgagttcaaatctcggtggaacc

SEQ ID NO: 17074 - DNA, 31 bp, Homo sapiens
  source 1..31: mol_type = genomic DNA
gcgatccgagttcaaatctcggtggaacctc

SEQ ID NO: 17075 - DNA, 32 bp, Homo sapiens
  source 1..32: mol_type = genomic DNA
gcgatccgagttcaaatctcggtggaacctcc

SEQ ID NO: 17076 - DNA, 28 bp, Homo sapiens
  source 1..28: mol_type = genomic DNA
gcgatccgagttcaaatctcggtgggac

SEQ ID NO: 17077 - DNA, 29 bp, Homo sapiens
  source 1..29: mol_type = genomic DNA
gcgatccgagttcaaatctcggtgggacc

SEQ ID NO: 17078 - DNA, 31 bp, Homo sapiens
  source 1..31: mol_type = genomic DNA
gcgatccgagttcaaatctcggtgggacctc

SEQ ID NO: 17079 - DNA, 24 bp, Homo sapiens
  source 1..24: mol_type = genomic DNA
gcgatccgagttcgagtctcggtg

SEQ ID NO: 17080 - DNA, 28 bp, Homo sapiens
  source 1..28: mol_type = genomic DNA
gcgatccgagttcgagtctcggtggaac

SEQ ID NO: 17081 - DNA, 31 bp, Homo sapiens
  source 1..31: mol_type = genomic DNA
gcgatccgagttcgagtctcggtggaacctc

SEQ ID NO: 17082 - DNA, 32 bp, Homo sapiens
  source 1..32: mol_type = genomic DNA
gcgatccgagttcgagtctcggtggaacctcc

SEQ ID NO: 17083 - DNA, 20 bp, Homo sapiens
  source 1..20: mol_type = genomic DNA
gcgatggccgagtggttaag

SEQ ID NO: 17084 - DNA, 24 bp, Homo sapiens
  source 1..24: mol_type = genomic DNA
gcgcaatggataacgcgtctgact

SEQ ID NO: 17085 - DNA, 22 bp, Homo sapiens
  source 1..22: mol_type = genomic DNA
gcgcagcggaagcgtgctgggc

SEQ ID NO: 17086 - DNA, 23 bp, Homo sapiens
  source 1..23: mol_type = genomic DNA
gcgcagcggaagcgtgctgggcc

SEQ ID NO: 17087 - DNA, 30 bp, Homo sapiens
  source 1..30: mol_type = genomic DNA
gcgcagcggaagcgtgctgggcccataacc

SEQ ID NO: 17088 - DNA, 31 bp, Homo sapiens
  source 1..31: mol_type = genomic DNA
gcgcagcggaagcgtgctgggcccataaccc

SEQ ID NO: 17089 - DNA, 18 bp, Homo sapiens
  source 1..18: mol_type = genomic DNA
gcgcaggttcgaaccctg

SEQ ID NO: 17090 - DNA, 16 bp, Homo sapiens
  source 1..16: mol_type = genomic DNA
gcgcaggttcgaatcc

SEQ ID NO: 17091 - DNA, 17 bp, Homo sapiens
  source 1..17: mol_type = genomic DNA
gcgcaggttcgaatcct

SEQ ID NO: 17092 - DNA, 18 bp, Homo sapiens
  source 1..18: mol_type = genomic DNA
gcgcaggttcgaatcctg

SEQ ID NO: 17093 - DNA, 21 bp, Homo sapiens
  source 1..21: mol_type = genomic DNA
gcgcattcggctgttaaccga

SEQ ID NO: 17094 - DNA, 31 bp, Homo sapiens
  source 1..31: mol_type = genomic DNA
gcgcattcggctgttaaccgaaaggttggtg

SEQ ID NO: 17095 - DNA, 16 bp, Homo sapiens
  source 1..16: mol_type = genomic DNA
gcgcattggacttcta

SEQ ID NO: 17096 - DNA, 18 bp, Homo sapiens
  source 1..18: mol_type = genomic DNA
gcgcattggacttctaat

SEQ ID NO: 17097 - DNA, 32 bp, Homo sapiens
  source 1..32: mol_type = genomic DNA
gcgcattggacttctaattcaaaggttccggg

SEQ ID NO: 17098 - DNA, 16 bp, Homo sapiens
  source 1..16: mol_type = genomic DNA
gcgccgctggtgtagt

SEQ ID NO: 17099 - DNA, 17 bp, Homo sapiens
  source 1..17: mol_type = genomic DNA
gcgccgctggtgtagtg

SEQ ID NO: 17100 - DNA, 18 bp, Homo sapiens
  source 1..18: mol_type = genomic DNA
gcgccgctggtgtagtgg

SEQ ID NO: 17101 - DNA, 20 bp, Homo sapiens
  source 1..20: mol_type = genomic DNA
gcgccgctggtgtagtggta

SEQ ID NO: 17102 - DNA, 21 bp, Homo sapiens
  source 1..21: mol_type = genomic DNA
gcgccgctggtgtagtggtat

SEQ ID NO: 17103 - DNA, 22 bp, Homo sapiens
  source 1..22: mol_type = genomic DNA
gcgccgctggtgtagtggtatc

SEQ ID NO: 17104 - DNA, 23 bp, Homo sapiens
  source 1..23: mol_type = genomic DNA
gcgccgctggtgtagtggtatca

SEQ ID NO: 17105 - DNA, 25 bp, Homo sapiens
  source 1..25: mol_type = genomic DNA
gcgccgctggtgtagtggtatcatg

SEQ ID NO: 17106 - DNA, 26 bp, Homo sapiens
  source 1..26: mol_type = genomic DNA
gcgccgctggtgtagtggtatcatgc

SEQ ID NO: 17107 - DNA, 27 bp, Homo sapiens
  source 1..27: mol_type = genomic DNA
gcgccgctggtgtagtggtatcatgca

SEQ ID NO: 17108 - DNA, 28 bp, Homo sapiens
  source 1..28: mol_type = genomic DNA
gcgccgctggtgtagtggtatcatgcaa

SEQ ID NO: 17109 - DNA, 29 bp, Homo sapiens
  source 1..29: mol_type = genomic DNA
gcgccgctggtgtagtggtatcatgcaag

SEQ ID NO: 17110 - DNA, 30 bp, Homo sapiens
  source 1..30: mol_type = genomic DNA
gcgccgctggtgtagtggtatcatgcaaga

SEQ ID NO: 17111 - DNA, 31 bp, Homo sapiens
  source 1..31: mol_type = genomic DNA
gcgccgctggtgtagtggtatcatgcaagat

SEQ ID NO: 17112 - DNA, 32 bp, Homo sapiens
  source 1..32: mol_type = genomic DNA
gcgccgctggtgtagtggtatcatgcaagatt

SEQ ID NO: 17113 - DNA, 33 bp, Homo sapiens
  source 1..33: mol_type = genomic DNA
gcgccgctggtgtagtggtatcatgcaagattc

SEQ ID NO: 17114 - DNA, 34 bp, Homo sapiens
  source 1..34: mol_type = genomic DNA
gcgccgctggtgtagtggtatcatgcaagattcc

SEQ ID NO: 17115 - DNA, 35 bp, Homo sapiens
  source 1..35: mol_type = genomic DNA
gcgccgctggtgtagtggtatcatgcaagattccc

SEQ ID NO: 17116 - DNA, 36 bp, Homo sapiens
  source 1..36: mol_type = genomic DNA
gcgccgctggtgtagtggtatcatgcaagattccca

SEQ ID NO: 17117 - DNA, 37 bp, Homo sapiens
  source 1..37: mol_type = genomic DNA
gcgccgctggtgtagtggtatcatgcaagattcccat

SEQ ID NO: 17118 - DNA, 39 bp, Homo sapiens
  source 1..39: mol_type = genomic DNA
gcgccgctggtgtagtggtatcatgcaagattcccattc

SEQ ID NO: 17119 - DNA, 40 bp, Homo sapiens
  source 1..40: mol_type = genomic DNA
gcgccgctggtgtagtggtatcatgcaagattcccattct

SEQ ID NO: 17120 - DNA, 42 bp, Homo sapiens
  source 1..42: mol_type = genomic DNA
gcgccgctggtgtagtggtatcatgcaagattcccattcttg

SEQ ID NO: 17121 - DNA, 44 bp, Homo sapiens
  source 1..44: mol_type = genomic DNA
gcgccgctggtgtagtggtatcatgcaagattcccattcttgcg

SEQ ID NO: 17122 - DNA, 28 bp, Homo sapiens
  source 1..28: mol_type = genomic DNA
gcgcgcggtacttataatgccgaggttg

SEQ ID NO: 17123 - DNA, 30 bp, Homo sapiens
  source 1..30: mol_type = genomic DNA
gcgcgcggtacttataatgccgaggttgtg

SEQ ID NO: 17124 - DNA, 35 bp, Homo sapiens
  source 1..35: mol_type = genomic DNA
gcgcgtcagtctcataatctgaaggtcctgagttc

SEQ ID NO: 17125 - DNA, 18 bp, Homo sapiens
  source 1..18: mol_type = genomic DNA
gcgcgttcggctgttaac

SEQ ID NO: 17126 - DNA, 25 bp, Homo sapiens
  source 1..25: mol_type = genomic DNA
gcgcgttcggctgttaaccgaaagg

SEQ ID NO: 17127 - DNA, 16 bp, Homo sapiens
  source 1..16: mol_type = genomic DNA
gcgctctcaccgccgc

SEQ ID NO: 17128 - DNA, 17 bp, Homo sapiens
  source 1..17: mol_type = genomic DNA
gcgctctcaccgccgcg

SEQ ID NO: 17129 - DNA, 18 bp, Homo sapiens
  source 1..18: mol_type = genomic DNA
gcgctctcaccgccgcgg

SEQ ID NO: 17130 - DNA, 19 bp, Homo sapiens
  source 1..19: mol_type = genomic DNA
gcgctctcaccgccgcggc

SEQ ID NO: 17131 - DNA, 20 bp, Homo sapiens
  source 1..20: mol_type = genomic DNA
gcgctctcaccgccgcggcc

SEQ ID NO: 17132 - DNA, 21 bp, Homo sapiens
  source 1..21: mol_type = genomic DNA
gcgctctcaccgccgcggccc

SEQ ID NO: 17133 - DNA, 22 bp, Homo sapiens
  source 1..22: mol_type = genomic DNA
gcgctctcaccgccgcggcccg

SEQ ID NO: 17134 - DNA, 23 bp, Homo sapiens
  source 1..23: mol_type = genomic DNA
gcgctctcaccgccgcggcccgg

SEQ ID NO: 17135 - DNA, 24 bp, Homo sapiens
  source 1..24: mol_type = genomic DNA
gcgctctcaccgccgcggcccggg

SEQ ID NO: 17136 - DNA, 25 bp, Homo sapiens
  source 1..25: mol_type = genomic DNA
gcgctctcaccgccgcggcccgggt

SEQ ID NO: 17137 - DNA, 26 bp, Homo sapiens
  source 1..26: mol_type = genomic DNA
gcgctctcaccgccgcggcccgggtt

SEQ ID NO: 17138 - DNA, 27 bp, Homo sapiens
  source 1..27: mol_type = genomic DNA
gcgctctcaccgccgcggcccgggttc

SEQ ID NO: 17139 - DNA, 28 bp, Homo sapiens
  source 1..28: mol_type = genomic DNA
gcgctctcaccgccgcggcccgggttcg

SEQ ID NO: 17140 - DNA, 29 bp, Homo sapiens
  source 1..29: mol_type = genomic DNA
gcgctctcaccgccgcggcccgggttcga

SEQ ID NO: 17141 - DNA, 30 bp, Homo sapiens
  source 1..30: mol_type = genomic DNA
gcgctctcaccgccgcggcccgggttcgat

SEQ ID NO: 17142 - DNA, 31 bp, Homo sapiens
  source 1..31: mol_type = genomic DNA
gcgctctcaccgccgcggcccgggttcgatt

SEQ ID NO: 17143 - DNA, 32 bp, Homo sapiens
  source 1..32: mol_type = genomic DNA
gcgctctcaccgccgcggcccgggttcgattc

SEQ ID NO: 17144 - DNA, 33 bp, Homo sapiens
  source 1..33: mol_type = genomic DNA
gcgctctcaccgccgcggcccgggttcgattcc

SEQ ID NO: 17145 - DNA, 34 bp, Homo sapiens
  source 1..34: mol_type = genomic DNA
gcgctctcaccgccgcggcccgggttcgattccc

SEQ ID NO: 17146 - DNA, 41 bp, Homo sapiens
  source 1..41: mol_type = genomic DNA
gcgctctcaccgccgcggcccgggttcgattcccggtcagg

SEQ ID NO: 17147 - DNA, 43 bp, Homo sapiens
  source 1..43: mol_type = genomic DNA
gcgctctcaccgccgcggcccgggttcgattcccggtcaggga

SEQ ID NO: 17148 - DNA, 44 bp, Homo sapiens
  source 1..44: mol_type = genomic DNA
gcgctctcaccgccgcggcccgggttcgattcccggtcagggaa

SEQ ID NO: 17149 - DNA, 45 bp, Homo sapiens
  source 1..45: mol_type = genomic DNA
gcgctctcaccgccgcggcccgggttcgattcccggtcagggaac

SEQ ID NO: 17150 - DNA, 46 bp, Homo sapiens
  source 1..46: mol_type = genomic DNA
gcgctctcaccgccgcggcccgggttcgattcccggtcagggaacc

SEQ ID NO: 17151 - DNA, 47 bp, Homo sapiens
  source 1..47: mol_type = genomic DNA
gcgctctcaccgccgcggcccgggttcgattcccggtcagggaacca

SEQ ID NO: 17152 - DNA, 18 bp, Homo sapiens
  source 1..18: mol_type = genomic DNA
gcgctggatttaggctcc

SEQ ID NO: 17153 - DNA, 27 bp, Homo sapiens
  source 1..27: mol_type = genomic DNA
gcgctttcaccgccgcggcccgggttc

SEQ ID NO: 17154 - DNA, 45 bp, Homo sapiens
  source 1..45: mol_type = genomic DNA
gcgctttcaccgccgcggcccgggttcgattcccggtcagggaac

SEQ ID NO: 17155 - DNA, 47 bp, Homo sapiens
  source 1..47: mol_type = genomic DNA
gcgctttcaccgccgcggcccgggttcgattcccggtcagggaacca

SEQ ID NO: 17156 - DNA, 16 bp, Homo sapiens
  source 1..16: mol_type = genomic DNA
gcggaagcgtgctggg

SEQ ID NO: 17157 - DNA, 17 bp, Homo sapiens
  source 1..17: mol_type = genomic DNA
gcggaagcgtgctgggc

SEQ ID NO: 17158 - DNA, 18 bp, Homo sapiens
  source 1..18: mol_type = genomic DNA
gcggaagcgtgctgggcc

SEQ ID NO: 17159 - DNA, 19 bp, Homo sapiens
  source 1..19: mol_type = genomic DNA
gcggaagcgtgctgggccc

SEQ ID NO: 17160 - DNA, 20 bp, Homo sapiens
  source 1..20: mol_type = genomic DNA
gcggaagcgtgctgggccca

SEQ ID NO: 17161 - DNA, 21 bp, Homo sapiens
  source 1..21: mol_type = genomic DNA
gcggaagcgtgctgggcccat

SEQ ID NO: 17162 - DNA, 25 bp, Homo sapiens
  source 1..25: mol_type = genomic DNA
gcggaagcgtgctgggcccataacc

SEQ ID NO: 17163 - DNA, 26 bp, Homo sapiens
  source 1..26: mol_type = genomic DNA
gcggaagcgtgctgggcccataaccc

SEQ ID NO: 17164 - DNA, 28 bp, Homo sapiens
  source 1..28: mol_type = genomic DNA
gcggaagcgtgctgggcccataacccag

SEQ ID NO: 17165 - DNA, 29 bp, Homo sapiens
  source 1..29: mol_type = genomic DNA
gcggaagcgtgctgggcccataacccaga

SEQ ID NO: 17166 - DNA, 35 bp, Homo sapiens
  source 1..35: mol_type = genomic DNA
gcggaagcgtgctgggcccataacccagaggtcga

SEQ ID NO: 17167 - DNA, 37 bp, Homo sapiens
  source 1..37: mol_type = genomic DNA
gcggaagcgtgctgggcccataacccagaggtcgatg

SEQ ID NO: 17168 - DNA, 39 bp, Homo sapiens
  source 1..39: mol_type = genomic DNA
gcggaagcgtgctgggcccataacccagaggtcgatgga

SEQ ID NO: 17169 - DNA, 41 bp, Homo sapiens
  source 1..41: mol_type = genomic DNA
gcggaagcgtgctgggcccataacccagaggtcgatggatc

SEQ ID NO: 17170 - DNA, 16 bp, Homo sapiens
  source 1..16: mol_type = genomic DNA
gcggcccgggttcgac

SEQ ID NO: 17171 - DNA, 17 bp, Homo sapiens
  source 1..17: mol_type = genomic DNA
gcggcccgggttcgact

SEQ ID NO: 17172 - DNA, 18 bp, Homo sapiens
  source 1..18: mol_type = genomic DNA
gcggcccgggttcgactc

SEQ ID NO: 17173 - DNA, 19 bp, Homo sapiens
  source 1..19: mol_type = genomic DNA
gcggcccgggttcgactcc

SEQ ID NO: 17174 - DNA, 20 bp, Homo sapiens
  source 1..20: mol_type = genomic DNA
gcggcccgggttcgactccc

SEQ ID NO: 17175 - DNA, 22 bp, Homo sapiens
  source 1..22: mol_type = genomic DNA
gcggcccgggttcgactcccgg

SEQ ID NO: 17176 - DNA, 23 bp, Homo sapiens
  source 1..23: mol_type = genomic DNA
gcggcccgggttcgactcccggt

SEQ ID NO: 17177 - DNA, 24 bp, Homo sapiens
  source 1..24: mol_type = genomic DNA
gcggcccgggttcgactcccggtg

SEQ ID NO: 17178 - DNA, 25 bp, Homo sapiens
  source 1..25: mol_type = genomic DNA
gcggcccgggttcgactcccggtgt

SEQ ID NO: 17179 - DNA, 26 bp, Homo sapiens
  source 1..26: mol_type = genomic DNA
gcggcccgggttcgactcccggtgtg

SEQ ID NO: 17180 - DNA, 27 bp, Homo sapiens
  source 1..27: mol_type = genomic DNA
gcggcccgggttcgactcccggtgtgg

SEQ ID NO: 17181 - DNA, 28 bp, Homo sapiens
  source 1..28: mol_type = genomic DNA
gcggcccgggttcgactcccggtgtggg

SEQ ID NO: 17182 - DNA, 29 bp, Homo sapiens
  source 1..29: mol_type = genomic DNA
gcggcccgggttcgactcccggtgtggga

SEQ ID NO: 17183 - DNA, 30 bp, Homo sapiens
  source 1..30: mol_type = genomic DNA
gcggcccgggttcgactcccggtgtgggaa

SEQ ID NO: 17184 - DNA, 31 bp, Homo sapiens
  source 1..31: mol_type = genomic DNA
gcggcccgggttcgactcccggtgtgggaac

SEQ ID NO: 17185 - DNA, 32 bp, Homo sapiens
  source 1..32: mol_type = genomic DNA
gcggcccgggttcgactcccggtgtgggaacc

SEQ ID NO: 17186 - DNA, 33 bp, Homo sapiens
  source 1..33: mol_type = genomic DNA
gcggcccgggttcgactcccggtgtgggaacca

SEQ ID NO: 17187 - DNA, 16 bp, Homo sapiens
  source 1..16: mol_type = genomic DNA
gcggcccgggttcgat

SEQ ID NO: 17188 - DNA, 17 bp, Homo sapiens
  source 1..17: mol_type = genomic DNA
gcggcccgggttcgatt

SEQ ID NO: 17189 - DNA, 18 bp, Homo sapiens
  source 1..18: mol_type = genomic DNA
gcggcccgggttcgattc

SEQ ID NO: 17190 - DNA, 19 bp, Homo sapiens
  source 1..19: mol_type = genomic DNA
gcggcccgggttcgattcc

SEQ ID NO: 17191 - DNA, 20 bp, Homo sapiens
  source 1..20: mol_type = genomic DNA
gcggcccgggttcgattccc

SEQ ID NO: 17192 - DNA, 21 bp, Homo sapiens
  source 1..21: mol_type = genomic DNA
gcggcccgggttcgattcccg

SEQ ID NO: 17193 - DNA, 22 bp, Homo sapiens
  source 1..22: mol_type = genomic DNA
gcggcccgggttcgattcccgg

SEQ ID NO: 17194 - DNA, 23 bp, Homo sapiens
  source 1..23: mol_type = genomic DNA
gcggcccgggttcgattcccggt

SEQ ID NO: 17195 - DNA, 24 bp, Homo sapiens
  source 1..24: mol_type = genomic DNA
gcggcccgggttcgattcccggtc

SEQ ID NO: 17196 - DNA, 25 bp, Homo sapiens
  source 1..25: mol_type = genomic DNA
gcggcccgggttcgattcccggtca

SEQ ID NO: 17197 - DNA, 26 bp, Homo sapiens
  source 1..26: mol_type = genomic DNA
gcggcccgggttcgattcccggtcag

SEQ ID NO: 17198 - DNA, 27 bp, Homo sapiens
  source 1..27: mol_type = genomic DNA
gcggcccgggttcgattcccggtcagg

SEQ ID NO: 17199 - DNA, 28 bp, Homo sapiens
  source 1..28: mol_type = genomic DNA
gcggcccgggttcgattcccggtcaggg

SEQ ID NO: 17200 - DNA, 29 bp, Homo sapiens
  source 1..29: mol_type = genomic DNA
gcggcccgggttcgattcccggtcaggga

SEQ ID NO: 17201 - DNA, 30 bp, Homo sapiens
  source 1..30: mol_type = genomic DNA
gcggcccgggttcgattcccggtcagggaa

SEQ ID NO: 17202 - DNA, 31 bp, Homo sapiens
  source 1..31: mol_type = genomic DNA
gcggcccgggttcgattcccggtcagggaac

SEQ ID NO: 17203 - DNA, 32 bp, Homo sapiens
  source 1..32: mol_type = genomic DNA
gcggcccgggttcgattcccggtcagggaacc

SEQ ID NO: 17204 - DNA, 33 bp, Homo sapiens
  source 1..33: mol_type = genomic DNA
gcggcccgggttcgattcccggtcagggaacca

SEQ ID NO: 17205 - DNA, 36 bp, Homo sapiens
  source 1..36: mol_type = genomic DNA
gcgggagacccgggttcaattcccggccaatgcacc

SEQ ID NO: 17206 - DNA, 37 bp, Homo sapiens
  source 1..37: mol_type = genomic DNA
gcgggagacccgggttcaattcccggccaatgcacca

SEQ ID NO: 17207 - DNA, 16 bp, Homo sapiens
  source 1..16: mol_type = genomic DNA
gcgggagaccggggtt

SEQ ID NO: 17208 - DNA, 17 bp, Homo sapiens
  source 1..17: mol_type = genomic DNA
gcgggagaccggggttc

SEQ ID NO: 17209 - DNA, 27 bp, Homo sapiens
  source 1..27: mol_type = genomic DNA
gcgggagaccggggttcaattccccga

SEQ ID NO: 17210 - DNA, 28 bp, Homo sapiens
  source 1..28: mol_type = genomic DNA
gcgggagaccggggttcaattccccgac

SEQ ID NO: 17211 - DNA, 29 bp, Homo sapiens
  source 1..29: mol_type = genomic DNA
gcgggagaccggggttcaattccccgacg

SEQ ID NO: 17212 - DNA, 30 bp, Homo sapiens
  source 1..30: mol_type = genomic DNA
gcgggagaccggggttcaattccccgacgg

SEQ ID NO: 17213 - DNA, 31 bp, Homo sapiens
  source 1..31: mol_type = genomic DNA
gcgggagaccggggttcaattccccgacggg

SEQ ID NO: 17214 - DNA, 32 bp, Homo sapiens
  source 1..32: mol_type = genomic DNA
gcgggagaccggggttcaattccccgacgggg

SEQ ID NO: 17215 - DNA, 33 bp, Homo sapiens
  source 1..33: mol_type = genomic DNA
gcgggagaccggggttcaattccccgacgggga

SEQ ID NO: 17216 - DNA, 34 bp, Homo sapiens
  source 1..34: mol_type = genomic DNA
gcgggagaccggggttcaattccccgacggggag

SEQ ID NO: 17217 - DNA, 35 bp, Homo sapiens
  source 1..35: mol_type = genomic DNA
gcgggagaccggggttcaattccccgacggggagc

SEQ ID NO: 17218 - DNA, 36 bp, Homo sapiens
  source 1..36: mol_type = genomic DNA
gcgggagaccggggttcaattccccgacggggagcc

SEQ ID NO: 17219 - DNA, 37 bp, Homo sapiens
  source 1..37: mol_type = genomic DNA
gcgggagaccggggttcaattccccgacggggagcca

SEQ ID NO: 17220 - DNA, 20 bp, Homo sapiens
  source 1..20: mol_type = genomic DNA
gcgggagaccggggttcgat

SEQ ID NO: 17221 - DNA, 35 bp, Homo sapiens
  source 1..35: mol_type = genomic DNA
gcgggagaccggggttcgattccccaacggggagc

SEQ ID NO: 17222 - DNA, 36 bp, Homo sapiens
  source 1..36: mol_type = genomic DNA
gcgggagaccggggttcgattccccaacggggagcc

SEQ ID NO: 17223 - DNA, 37 bp, Homo sapiens
  source 1..37: mol_type = genomic DNA
gcgggagaccggggttcgattccccaacggggagcca

SEQ ID NO: 17224 - DNA, 26 bp, Homo sapiens
  source 1..26: mol_type = genomic DNA
gcgggagaccggggttcgattccccg

SEQ ID NO: 17225 - DNA, 27 bp, Homo sapiens
  source 1..27: mol_type = genomic DNA
gcgggagaccggggttcgattccccga

SEQ ID NO: 17226 - DNA, 28 bp, Homo sapiens
  source 1..28: mol_type = genomic DNA
gcgggagaccggggttcgattccccgac

SEQ ID NO: 17227 - DNA, 29 bp, Homo sapiens
  source 1..29: mol_type = genomic DNA
gcgggagaccggggttcgattccccgacg

SEQ ID NO: 17228 - DNA, 30 bp, Homo sapiens
  source 1..30: mol_type = genomic DNA
gcgggagaccggggttcgattccccgacgg

SEQ ID NO: 17229 - DNA, 31 bp, Homo sapiens
  source 1..31: mol_type = genomic DNA
gcgggagaccggggttcgattccccgacggg

SEQ ID NO: 17230 - DNA, 32 bp, Homo sapiens
  source 1..32: mol_type = genomic DNA
gcgggagaccggggttcgattccccgacgggg

SEQ ID NO: 17231 - DNA, 33 bp, Homo sapiens
  source 1..33: mol_type = genomic DNA
gcgggagaccggggttcgattccccgacgggga

SEQ ID NO: 17232 - DNA, 34 bp, Homo sapiens
  source 1..34: mol_type = genomic DNA
gcgggagaccggggttcgattccccgacggggag

SEQ ID NO: 17233 - DNA, 35 bp, Homo sapiens
  source 1..35: mol_type = genomic DNA
gcgggagaccggggttcgattccccgacggggagc

SEQ ID NO: 17234 - DNA, 36 bp, Homo sapiens
  source 1..36: mol_type = genomic DNA
gcgggagaccggggttcgattccccgacggggagcc

SEQ ID NO: 17235 - DNA, 37 bp, Homo sapiens
  source 1..37: mol_type = genomic DNA
gcgggagaccggggttcgattccccgacggggagcca

SEQ ID NO: 17236 - DNA, 16 bp, Homo sapiens
  source 1..16: mol_type = genomic DNA
gcgggaggcccgggtt

SEQ ID NO: 17237 - DNA, 18 bp, Homo sapiens
  source 1..18: mol_type = genomic DNA
gcgggaggcccgggttcg

SEQ ID NO: 17238 - DNA, 23 bp, Homo sapiens
  source 1..23: mol_type = genomic DNA
gcgggaggcccgggttcgattcc

SEQ ID NO: 17239 - DNA, 27 bp, Homo sapiens
  source 1..27: mol_type = genomic DNA
gcgggaggcccgggttcgattcccggc

SEQ ID NO: 17240 - DNA, 28 bp, Homo sapiens
  source 1..28: mol_type = genomic DNA
gcgggaggcccgggttcgattcccggcc

SEQ ID NO: 17241 - DNA, 30 bp, Homo sapiens
  source 1..30: mol_type = genomic DNA
gcgggaggcccgggttcgattcccggccaa

SEQ ID NO: 17242 - DNA, 31 bp, Homo sapiens
  source 1..31: mol_type = genomic DNA
gcgggaggcccgggttcgattcccggccaat

SEQ ID NO: 17243 - DNA, 32 bp, Homo sapiens
  source 1..32: mol_type = genomic DNA
gcgggaggcccgggttcgattcccggccaatg

SEQ ID NO: 17244 - DNA, 33 bp, Homo sapiens
  source 1..33: mol_type = genomic DNA
gcgggaggcccgggttcgattcccggccaatgc

SEQ ID NO: 17245 - DNA, 34 bp, Homo sapiens
  source 1..34: mol_type = genomic DNA
gcgggaggcccgggttcgattcccggccaatgca

SEQ ID NO: 17246 - DNA, 35 bp, Homo sapiens
  source 1..35: mol_type = genomic DNA
gcgggaggcccgggttcgattcccggccaatgcac

SEQ ID NO: 17247 - DNA, 36 bp, Homo sapiens
  source 1..36: mol_type = genomic DNA
gcgggaggcccgggttcgattcccggccaatgcacc

SEQ ID NO: 17248 - DNA, 37 bp, Homo sapiens
  source 1..37: mol_type = genomic DNA
gcgggaggcccgggttcgattcccggccaatgcacca

SEQ ID NO: 17249 - DNA, 32 bp, Homo sapiens
  source 1..32: mol_type = genomic DNA
gcgggaggcccgggttcgattcccggcccatg

SEQ ID NO: 17250 - DNA, 36 bp, Homo sapiens
  source 1..36: mol_type = genomic DNA
gcgggaggcccgggttcgattcccggcccatgcacc

SEQ ID NO: 17251 - DNA, 27 bp, Homo sapiens
  source 1..27: mol_type = genomic DNA
gcgggttcgaaccccgtccgtgcctcc

SEQ ID NO: 17252 - DNA, 25 bp, Homo sapiens
  source 1..25: mol_type = genomic DNA
gcgggttcgatccccgtacgggcca

SEQ ID NO: 17253 - DNA, 27 bp, Homo sapiens
  source 1..27: mol_type = genomic DNA
gcgggttcgatccccgtacgggccacc

SEQ ID NO: 17254 - DNA, 16 bp, Homo sapiens
  source 1..16: mol_type = genomic DNA
gcggtctaaggcgctg

SEQ ID NO: 17255 - DNA, 16 bp, Homo sapiens
  source 1..16: mol_type = genomic DNA
gcggttaggattcctg

SEQ ID NO: 17256 - DNA, 18 bp, Homo sapiens
  source 1..18: mol_type = genomic DNA
gcggttaggattcctggt

SEQ ID NO: 17257 - DNA, 19 bp, Homo sapiens
  source 1..19: mol_type = genomic DNA
gcggttaggattcctggtt

SEQ ID NO: 17258 - DNA, 20 bp, Homo sapiens
  source 1..20: mol_type = genomic DNA
gcggttaggattcctggttt

SEQ ID NO: 17259 - DNA, 21 bp, Homo sapiens
  source 1..21: mol_type = genomic DNA
gcggttaggattcctggtttt

SEQ ID NO: 17260 - DNA, 22 bp, Homo sapiens
  source 1..22: mol_type = genomic DNA
gcggttaggattcctggttttc

SEQ ID NO: 17261 - DNA, 23 bp, Homo sapiens
  source 1..23: mol_type = genomic DNA
gcggttaggattcctggttttca

SEQ ID NO: 17262 - DNA, 36 bp, Homo sapiens
  source 1..36: mol_type = genomic DNA
gcggttaggattcctggttttcacccaggcggcccg

SEQ ID NO: 17263 - DNA, 19 bp, Homo sapiens
  source 1..19: mol_type = genomic DNA
gcggttatcacattcgcct

SEQ ID NO: 17264 - DNA, 22 bp, Homo sapiens
  source 1..22: mol_type = genomic DNA
gcggttatcacattcgcctcac

SEQ ID NO: 17265 - DNA, 17 bp, Homo sapiens
  source 1..17: mol_type = genomic DNA
gcggttatcacgtctgc

SEQ ID NO: 17266 - DNA, 18 bp, Homo sapiens
  source 1..18: mol_type = genomic DNA
gcggttatcacgtctgct

SEQ ID NO: 17267 - DNA, 19 bp, Homo sapiens
  source 1..19: mol_type = genomic DNA
gcggttatcacgtctgctt

SEQ ID NO: 17268 - DNA, 20 bp, Homo sapiens
  source 1..20: mol_type = genomic DNA
gcggttatcacgtctgcttt

SEQ ID NO: 17269 - DNA, 21 bp, Homo sapiens
  source 1..21: mol_type = genomic DNA
gcggttatcacgtctgcttta

SEQ ID NO: 17270 - DNA, 22 bp, Homo sapiens
  source 1..22: mol_type = genomic DNA
gcggttatcacgtctgctttac

SEQ ID NO: 17271 - DNA, 18 bp, Homo sapiens
  source 1..18: mol_type = genomic DNA
gcgtgctgggcccataac

SEQ ID NO: 17272 - DNA, 19 bp, Homo sapiens
  source 1..19: mol_type = genomic DNA
gcgtgctgggcccataacc

SEQ ID NO: 17273 - DNA, 20 bp, Homo sapiens
  source 1..20: mol_type = genomic DNA
gcgtgctgggcccataaccc

SEQ ID NO: 17274 - DNA, 22 bp, Homo sapiens
  source 1..22: mol_type = genomic DNA
gcgtgctgggcccataacccag

SEQ ID NO: 17275 - DNA, 23 bp, Homo sapiens
  source 1..23: mol_type = genomic DNA
gcgtgctgggcccataacccaga

SEQ ID NO: 17276 - DNA, 28 bp, Homo sapiens
  source 1..28: mol_type = genomic DNA
gcgtgctgggcccataacccagaggtcg

SEQ ID NO: 17277 - DNA, 29 bp, Homo sapiens
  source 1..29: mol_type = genomic DNA
gcgtgctgggcccataacccagaggtcga

SEQ ID NO: 17278 - DNA, 30 bp, Homo sapiens
  source 1..30: mol_type = genomic DNA
gcgtgctgggcccataacccagaggtcgat

SEQ ID NO: 17279 - DNA, 31 bp, Homo sapiens
  source 1..31: mol_type = genomic DNA
gcgtgctgggcccataacccagaggtcgatg

SEQ ID NO: 17280 - DNA, 33 bp, Homo sapiens
  source 1..33: mol_type = genomic DNA
gcgtgctgggcccataacccagaggtcgatgga

SEQ ID NO: 17281 - DNA, 34 bp, Homo sapiens
  source 1..34: mol_type = genomic DNA
gcgtgctgggcccataacccagaggtcgatggat

SEQ ID NO: 17282 - DNA, 35 bp, Homo sapiens
  source 1..35: mol_type = genomic DNA
gcgtgctgggcccataacccagaggtcgatggatc

SEQ ID NO: 17283 - DNA, 36 bp, Homo sapiens
  source 1..36: mol_type = genomic DNA
gcgtgctgggcccataacccagaggtcgatggatcg

SEQ ID NO: 17284 - DNA, 16 bp, Homo sapiens
  source 1..16: mol_type = genomic DNA
gcgtggccgagcggtc

SEQ ID NO: 17285 - DNA, 17 bp, Homo sapiens
  source 1..17: mol_type = genomic DNA
gcgtggccgagcggtct

SEQ ID NO: 17286 - DNA, 18 bp, Homo sapiens
  source 1..18: mol_type = genomic DNA
gcgtggccgagcggtcta

SEQ ID NO: 17287 - DNA, 20 bp, Homo sapiens
  source 1..20: mol_type = genomic DNA
gcgtggccgagcggtctaag

SEQ ID NO: 17288 - DNA, 21 bp, Homo sapiens
  source 1..21: mol_type = genomic DNA
gcgtggccgagcggtctaagg

SEQ ID NO: 17289 - DNA, 22 bp, Homo sapiens
  source 1..22: mol_type = genomic DNA
gcgtggccgagcggtctaaggc

SEQ ID NO: 17290 - DNA, 20 bp, Homo sapiens
  source 1..20: mol_type = genomic DNA
gcgtggccgagtggtctaag

SEQ ID NO: 17291 - DNA, 27 bp, Homo sapiens
  source 1..27: mol_type = genomic DNA
gcgtggcctaatggataaggcgtctga

SEQ ID NO: 17292 - DNA, 29 bp, Homo sapiens
  source 1..29: mol_type = genomic DNA
gcgtggcctaatggataaggcgtctgact

SEQ ID NO: 17293 - DNA, 31 bp, Homo sapiens
  source 1..31: mol_type = genomic DNA
gcgtggcctaatggataaggcgtctgattcc

SEQ ID NO: 17294 - DNA, 32 bp, Homo sapiens
  source 1..32: mol_type = genomic DNA
gcgtggcctaatggataaggcgtctgattccg

SEQ ID NO: 17295 - DNA, 28 bp, Homo sapiens
  source 1..28: mol_type = genomic DNA
gcgtgggttcgaaccccacttctggtac

SEQ ID NO: 17296 - DNA, 27 bp, Homo sapiens
  source 1..27: mol_type = genomic DNA
gcgtgggttcgaatcccatcctcgtcg

SEQ ID NO: 17297 - DNA, 29 bp, Homo sapiens
  source 1..29: mol_type = genomic DNA
gcgtgggttcgaatcccatcctcgtcgcc

SEQ ID NO: 17298 - DNA, 30 bp, Homo sapiens
  source 1..30: mol_type = genomic DNA
gcgtgggttcgaatcccatcctcgtcgcca

SEQ ID NO: 17299 - DNA, 32 bp, Homo sapiens
  source 1..32: mol_type = genomic DNA
gcgtggtgctaataacgccaaggtcgcgggtt

SEQ ID NO: 17300 - DNA, 24 bp, Homo sapiens
  source 1..24: mol_type = genomic DNA
gcgtgttcaaatcacgtcggggtc

SEQ ID NO: 17301 - DNA, 24 bp, Homo sapiens
  source 1..24: mol_type = genomic DNA
gcgtgttcgaatcacgtcggggtc

SEQ ID NO: 17302 - DNA, 26 bp, Homo sapiens
  source 1..26: mol_type = genomic DNA
gcgtgttcgaatcacgtcggggtcac

SEQ ID NO: 17303 - DNA, 20 bp, Homo sapiens
  source 1..20: mol_type = genomic DNA
gcgttcaggtcgcagtctcc

SEQ ID NO: 17304 - DNA, 21 bp, Homo sapiens
  source 1..21: mol_type = genomic DNA
gcgttcaggtcgcagtctccc

SEQ ID NO: 17305 - DNA, 16 bp, Homo sapiens
  source 1..16: mol_type = genomic DNA
gcgttggtggtatagt

SEQ ID NO: 17306 - DNA, 17 bp, Homo sapiens
  source 1..17: mol_type = genomic DNA
gcgttggtggtatagtg

SEQ ID NO: 17307 - DNA, 18 bp, Homo sapiens
  source 1..18: mol_type = genomic DNA
gcgttggtggtatagtgg

SEQ ID NO: 17308 - DNA, 19 bp, Homo sapiens
  source 1..19: mol_type = genomic DNA
gcgttggtggtatagtggt

SEQ ID NO: 17309 - DNA, 20 bp, Homo sapiens
  source 1..20: mol_type = genomic DNA
gcgttggtggtatagtggta

SEQ ID NO: 17310 - DNA, 22 bp, Homo sapiens
  source 1..22: mol_type = genomic DNA
gcgttggtggtatagtggtaag

SEQ ID NO: 17311 - DNA, 23 bp, Homo sapiens
  source 1..23: mol_type = genomic DNA
gcgttggtggtatagtggtaagc

SEQ ID NO: 17312 - DNA, 24 bp, Homo sapiens
  source 1..24: mol_type = genomic DNA
gcgttggtggtatagtggtaagca

SEQ ID NO: 17313 - DNA, 26 bp, Homo sapiens
  source 1..26: mol_type = genomic DNA
gcgttggtggtatagtggtaagcata

SEQ ID NO: 17314 - DNA, 27 bp, Homo sapiens
  source 1..27: mol_type = genomic DNA
gcgttggtggtatagtggtaagcatag

SEQ ID NO: 17315 - DNA, 28 bp, Homo sapiens
  source 1..28: mol_type = genomic DNA
gcgttggtggtatagtggtaagcatagc

SEQ ID NO: 17316 - DNA, 29 bp, Homo sapiens
  source 1..29: mol_type = genomic DNA
gcgttggtggtatagtggtaagcatagct

SEQ ID NO: 17317 - DNA, 30 bp, Homo sapiens
  source 1..30: mol_type = genomic DNA
gcgttggtggtatagtggtaagcatagctg

SEQ ID NO: 17318 - DNA, 31 bp, Homo sapiens
  source 1..31: mol_type = genomic DNA
gcgttggtggtatagtggtaagcatagctgc

SEQ ID NO: 17319 - DNA, 32 bp, Homo sapiens
  source 1..32: mol_type = genomic DNA
gcgttggtggtatagtggtaagcatagctgcc

SEQ ID NO: 17320 - DNA, 33 bp, Homo sapiens
  source 1..33: mol_type = genomic DNA
gcgttggtggtatagtggtaagcatagctgcct

SEQ ID NO: 17321 - DNA, 34 bp, Homo sapiens
  source 1..34: mol_type = genomic DNA
gcgttggtggtatagtggtaagcatagctgcctt

SEQ ID NO: 17322 - DNA, 35 bp, Homo sapiens
  source 1..35: mol_type = genomic DNA
gcgttggtggtatagtggtaagcatagctgccttc

SEQ ID NO: 17323 - DNA, 36 bp, Homo sapiens
  source 1..36: mol_type = genomic DNA
gcgttggtggtatagtggtaagcatagctgccttcc

SEQ ID NO: 17324 - DNA, 37 bp, Homo sapiens
  source 1..37: mol_type = genomic DNA
gcgttggtggtatagtggtaagcatagctgccttcca

SEQ ID NO: 17325 - DNA, 40 bp, Homo sapiens
  source 1..40: mol_type = genomic DNA
gcgttggtggtatagtggtaagcatagctgccttccaagc

SEQ ID NO: 17326 - DNA, 20 bp, Homo sapiens
  source 1..20: mol_type = genomic DNA
gcgttggtggtatagtggtg

SEQ ID NO: 17327 - DNA, 22 bp, Homo sapiens
  source 1..22: mol_type = genomic DNA
gcgttggtggtatagtggtgag

SEQ ID NO: 17328 - DNA, 23 bp, Homo sapiens
  source 1..23: mol_type = genomic DNA
gcgttggtggtatagtggtgagc

SEQ ID NO: 17329 - DNA, 24 bp, Homo sapiens
  source 1..24: mol_type = genomic DNA
gcgttggtggtatagtggtgagca

SEQ ID NO: 17330 - DNA, 25 bp, Homo sapiens
  source 1..25: mol_type = genomic DNA
gcgttggtggtatagtggtgagcat

SEQ ID NO: 17331 - DNA, 26 bp, Homo sapiens
  source 1..26: mol_type = genomic DNA
gcgttggtggtatagtggtgagcata

SEQ ID NO: 17332 - DNA, 27 bp, Homo sapiens
  source 1..27: mol_type = genomic DNA
gcgttggtggtatagtggtgagcatag

SEQ ID NO: 17333 - DNA, 28 bp, Homo sapiens
  source 1..28: mol_type = genomic DNA
gcgttggtggtatagtggtgagcatagc

SEQ ID NO: 17334 - DNA, 29 bp, Homo sapiens
  source 1..29: mol_type = genomic DNA
gcgttggtggtatagtggtgagcatagct

SEQ ID NO: 17335 - DNA, 30 bp, Homo sapiens
  source 1..30: mol_type = genomic DNA
gcgttggtggtatagtggtgagcatagctg

SEQ ID NO: 17336 - DNA, 31 bp, Homo sapiens
  source 1..31: mol_type = genomic DNA
gcgttggtggtatagtggtgagcatagctgc

SEQ ID NO: 17337 - DNA, 32 bp, Homo sapiens
  source 1..32: mol_type = genomic DNA
gcgttggtggtatagtggtgagcatagctgcc

SEQ ID NO: 17338 - DNA, 33 bp, Homo sapiens
  source 1..33: mol_type = genomic DNA
gcgttggtggtatagtggtgagcatagctgcct

SEQ ID NO: 17339 - DNA, 34 bp, Homo sapiens
  source 1..34: mol_type = genomic DNA
gcgttggtggtatagtggtgagcatagctgcctt

SEQ ID NO: 17340 - DNA, 35 bp, Homo sapiens
  source 1..35: mol_type = genomic DNA
gcgttggtggtatagtggtgagcatagctgccttc

SEQ ID NO: 17341 - DNA, 36 bp, Homo sapiens
  source 1..36: mol_type = genomic DNA
gcgttggtggtatagtggtgagcatagctgccttcc

SEQ ID NO: 17342 - DNA, 37 bp, Homo sapiens
  source 1..37: mol_type = genomic DNA
gcgttggtggtatagtggtgagcatagctgccttcca

SEQ ID NO: 17343 - DNA, 38 bp, Homo sapiens
  source 1..38: mol_type = genomic DNA
gcgttggtggtatagtggtgagcatagctgccttccaa

SEQ ID NO: 17344 - DNA, 39 bp, Homo sapiens
  source 1..39: mol_type = genomic DNA
gcgttggtggtatagtggtgagcatagctgccttccaag

SEQ ID NO: 17345 - DNA, 40 bp, Homo sapiens
  source 1..40: mol_type = genomic DNA
gcgttggtggtatagtggtgagcatagctgccttccaagc

SEQ ID NO: 17346 - DNA, 45 bp, Homo sapiens
  source 1..45: mol_type = genomic DNA
gcgttggtggtatagtggtgagcatagctgccttccaagcagttg

SEQ ID NO: 17347 - DNA, 47 bp, Homo sapiens
  source 1..47: mol_type = genomic DNA
gcgttggtggtatagtggtgagcatagctgccttccaagcagttgac

SEQ ID NO: 17348 - DNA, 48 bp, Homo sapiens
  source 1..48: mol_type = genomic DNA
gcgttggtggtatagtggtgagcatagctgccttccaagcagttgacc

SEQ ID NO: 17349 - DNA, 20 bp, Homo sapiens
  source 1..20: mol_type = genomic DNA
gcgttggtggtatagtggtt

SEQ ID NO: 17350 - DNA, 21 bp, Homo sapiens
  source 1..21: mol_type = genomic DNA
gcgttggtggtatagtggtta

SEQ ID NO: 17351 - DNA, 22 bp, Homo sapiens
  source 1..22: mol_type = genomic DNA
gcgttggtggtatagtggttag

SEQ ID NO: 17352 - DNA, 23 bp, Homo sapiens
  source 1..23: mol_type = genomic DNA
gcgttggtggtatagtggttagc

SEQ ID NO: 17353 - DNA, 24 bp, Homo sapiens
  source 1..24: mol_type = genomic DNA
gcgttggtggtatagtggttagca

SEQ ID NO: 17354 - DNA, 26 bp, Homo sapiens
  source 1..26: mol_type = genomic DNA
gcgttggtggtatagtggttagcata

SEQ ID NO: 17355 - DNA, 27 bp, Homo sapiens
  source 1..27: mol_type = genomic DNA
gcgttggtggtatagtggttagcatag

SEQ ID NO: 17356 - DNA, 28 bp, Homo sapiens
  source 1..28: mol_type = genomic DNA
gcgttggtggtatagtggttagcatagc

SEQ ID NO: 17357 - DNA, 29 bp, Homo sapiens
  source 1..29: mol_type = genomic DNA
gcgttggtggtatagtggttagcatagct

SEQ ID NO: 17358 - DNA, 30 bp, Homo sapiens
  source 1..30: mol_type = genomic DNA
gcgttggtggtatagtggttagcatagctg

SEQ ID NO: 17359 - DNA, 31 bp, Homo sapiens
  source 1..31: mol_type = genomic DNA
gcgttggtggtatagtggttagcatagctgc

SEQ ID NO: 17360 - DNA, 32 bp, Homo sapiens
  source 1..32: mol_type = genomic DNA
gcgttggtggtatagtggttagcatagctgcc

SEQ ID NO: 17361 - DNA, 33 bp, Homo sapiens
  source 1..33: mol_type = genomic DNA
gcgttggtggtatagtggttagcatagctgcct

SEQ ID NO: 17362 - DNA, 34 bp, Homo sapiens
  source 1..34: mol_type = genomic DNA
gcgttggtggtatagtggttagcatagctgcctt

SEQ ID NO: 17363 - DNA, 35 bp, Homo sapiens
  source 1..35: mol_type = genomic DNA
gcgttggtggtatagtggttagcatagctgccttc

SEQ ID NO: 17364 - DNA, 36 bp, Homo sapiens
  source 1..36: mol_type = genomic DNA
gcgttggtggtatagtggttagcatagctgccttcc

SEQ ID NO: 17365 - DNA, 37 bp, Homo sapiens
  source 1..37: mol_type = genomic DNA
gcgttggtggtatagtggttagcatagctgccttcca

SEQ ID NO: 17366 - DNA, 38 bp, Homo sapiens
  source 1..38: mol_type = genomic DNA
gcgttggtggtatagtggttagcatagctgccttccaa

SEQ ID NO: 17367 - DNA, 40 bp, Homo sapiens
  source 1..40: mol_type = genomic DNA
gcgttggtggtatagtggttagcatagctgccttccaagc

SEQ ID NO: 17368 - DNA, 31 bp, Homo sapiens
  source 1..31: mol_type = genomic DNA
gcgttggtggtttagtggtagaattctcgcc

SEQ ID NO: 17369 - DNA, 32 bp, Homo sapiens
  source 1..32: mol_type = genomic DNA
gcgttggtggtttagtggtagaattctcgcct

SEQ ID NO: 17370 - DNA, 33 bp, Homo sapiens
  source 1..33: mol_type = genomic DNA
gcgttggtggtttagtggtagaattctcgcctc

SEQ ID NO: 17371 - DNA, 34 bp, Homo sapiens
  source 1..34: mol_type = genomic DNA
gcgttggtggtttagtggtagaattctcgcctcc

SEQ ID NO: 17372 - DNA, 23 bp, Homo sapiens
  source 1..23: mol_type = genomic DNA
gcgttgtggccgcagcaacctcg

SEQ ID NO: 17373 - DNA, 17 bp, Homo sapiens
  source 1..17: mol_type = genomic DNA
gctaaataagctatcgg

SEQ ID NO: 17374 - DNA, 18 bp, Homo sapiens
  source 1..18: mol_type = genomic DNA
gctaaataagctatcggg

SEQ ID NO: 17375 - DNA, 19 bp, Homo sapiens
  source 1..19: mol_type = genomic DNA
gctaaataagctatcgggc

SEQ ID NO: 17376 - DNA, 20 bp, Homo sapiens
  source 1..20: mol_type = genomic DNA
gctaaataagctatcgggcc

SEQ ID NO: 17377 - DNA, 21 bp, Homo sapiens
  source 1..21: mol_type = genomic DNA
gctaaataagctatcgggccc

SEQ ID NO: 17378 - DNA, 22 bp, Homo sapiens
  source 1..22: mol_type = genomic DNA
gctaaataagctatcgggccca

SEQ ID NO: 17379 - DNA, 23 bp, Homo sapiens
  source 1..23: mol_type = genomic DNA
gctaaataagctatcgggcccat

SEQ ID NO: 17380 - DNA, 24 bp, Homo sapiens
  source 1..24: mol_type = genomic DNA
gctaaataagctatcgggcccata

SEQ ID NO: 17381 - DNA, 25 bp, Homo sapiens
  source 1..25: mol_type = genomic DNA
gctaaataagctatcgggcccatac

SEQ ID NO: 17382 - DNA, 26 bp, Homo sapiens
  source 1..26: mol_type = genomic DNA
gctaaataagctatcgggcccatacc

SEQ ID NO: 17383 - DNA, 27 bp, Homo sapiens
  source 1..27: mol_type = genomic DNA
gctaaataagctatcgggcccataccc

SEQ ID NO: 17384 - DNA, 28 bp, Homo sapiens
  source 1..28: mol_type = genomic DNA
gctaaataagctatcgggcccatacccc

SEQ ID NO: 17385 - DNA, 30 bp, Homo sapiens
  source 1..30: mol_type = genomic DNA
gctaaataagctatcgggcccataccccga

SEQ ID NO: 17386 - DNA, 32 bp, Homo sapiens
  source 1..32: mol_type = genomic DNA
gctaaataagctatcgggcccataccccgaaa

SEQ ID NO: 17387 - DNA, 41 bp, Homo sapiens
  source 1..41: mol_type = genomic DNA
gctaaataagctatcgggcccataccccgaaaatgttggtt

SEQ ID NO: 17388 - DNA, 43 bp, Homo sapiens
  source 1..43: mol_type = genomic DNA
gctaaataagctatcgggcccataccccgaaaatgttggttat

SEQ ID NO: 17389 - DNA, 17 bp, Homo sapiens
  source 1..17: mol_type = genomic DNA
gctaaatcctatatatc

SEQ ID NO: 17390 - DNA, 18 bp, Homo sapiens
  source 1..18: mol_type = genomic DNA
gctaaatcctatatatct

SEQ ID NO: 17391 - DNA, 20 bp, Homo sapiens
  source 1..20: mol_type = genomic DNA
gctaaatcctatatatctta

SEQ ID NO: 17392 - DNA, 21 bp, Homo sapiens
  source 1..21: mol_type = genomic DNA
gctaaatcctatatatcttac

SEQ ID NO: 17393 - DNA, 22 bp, Homo sapiens
  source 1..22: mol_type = genomic DNA
gctaaatcctatatatcttacc

SEQ ID NO: 17394 - DNA, 23 bp, Homo sapiens
  source 1..23: mol_type = genomic DNA
gctaaatcctatatatcttacca

SEQ ID NO: 17395 - DNA, 16 bp, Homo sapiens
  source 1..16: mol_type = genomic DNA
gctaactcatgccccc

SEQ ID NO: 17396 - DNA, 21 bp, Homo sapiens
  source 1..21: mol_type = genomic DNA
gctaactcatgcccccatgtc

SEQ ID NO: 17397 - DNA, 22 bp, Homo sapiens
  source 1..22: mol_type = genomic DNA
gctaactcatgcccccatgtct

SEQ ID NO: 17398 - DNA, 23 bp, Homo sapiens
  source 1..23: mol_type = genomic DNA
gctaactcatgcccccatgtcta

SEQ ID NO: 17399 - DNA, 24 bp, Homo sapiens
  source 1..24: mol_type = genomic DNA
gctaactcatgcccccatgtctaa

SEQ ID NO: 17400 - DNA, 25 bp, Homo sapiens
  source 1..25: mol_type = genomic DNA
gctaactcatgcccccatgtctaac

SEQ ID NO: 17401 - DNA, 26 bp, Homo sapiens
  source 1..26: mol_type = genomic DNA
gctaactcatgcccccatgtctaaca

SEQ ID NO: 17402 - DNA, 28 bp, Homo sapiens
  source 1..28: mol_type = genomic DNA
gctaactcatgcccccatgtctaacaac

SEQ ID NO: 17403 - DNA, 29 bp, Homo sapiens
  source 1..29: mol_type = genomic DNA
gctaactcatgcccccatgtctaacaaca

SEQ ID NO: 17404 - DNA, 30 bp, Homo sapiens
  source 1..30: mol_type = genomic DNA
gctaactcatgcccccatgtctaacaacat

SEQ ID NO: 17405 - DNA, 34 bp, Homo sapiens
  source 1..34: mol_type = genomic DNA
gctaactcatgcccccatgtctaacaacatggct

SEQ ID NO: 17406 - DNA, 35 bp, Homo sapiens
  source 1..35: mol_type = genomic DNA
gctaactcatgcccccatgtctaacaacatggctt

SEQ ID NO: 17407 - DNA, 37 bp, Homo sapiens
  source 1..37: mol_type = genomic DNA
gctaactcatgcccccatgtctaacaacatggctttc

SEQ ID NO: 17408 - DNA, 38 bp, Homo sapiens
  source 1..38: mol_type = genomic DNA
gctaactcatgcccccatgtctaacaacatggctttct

SEQ ID NO: 17409 - DNA, 39 bp, Homo sapiens
  source 1..39: mol_type = genomic DNA
gctaactcatgcccccatgtctaacaacatggctttctc

SEQ ID NO: 17410 - DNA, 40 bp, Homo sapiens
  source 1..40: mol_type = genomic DNA
gctaactcatgcccccatgtctaacaacatggctttctca

SEQ ID NO: 17411 - DNA, 41 bp, Homo sapiens
  source 1..41: mol_type = genomic DNA
gctaactcatgcccccatgtctaacaacatggctttctcac

SEQ ID NO: 17412 - DNA, 42 bp, Homo sapiens
  source 1..42: mol_type = genomic DNA
gctaactcatgcccccatgtctaacaacatggctttctcacc

SEQ ID NO: 17413 - DNA, 43 bp, Homo sapiens
  source 1..43: mol_type = genomic DNA
gctaactcatgcccccatgtctaacaacatggctttctcacca

SEQ ID NO: 17414 - DNA, 16 bp, Homo sapiens
  source 1..16: mol_type = genomic DNA
gctaatccattgtgct

SEQ ID NO: 17415 - DNA, 16 bp, Homo sapiens
  source 1..16: mol_type = genomic DNA
gctaatggtggagtta

SEQ ID NO: 17416 - DNA, 17 bp, Homo sapiens
  source 1..17: mol_type = genomic DNA
gctaatggtggagttaa

SEQ ID NO: 17417 - DNA, 18 bp, Homo sapiens
  source 1..18: mol_type = genomic DNA
gctaatggtggagttaaa

SEQ ID NO: 17418 - DNA, 19 bp, Homo sapiens
  source 1..19: mol_type = genomic DNA
gctaatggtggagttaaag

SEQ ID NO: 17419 - DNA, 20 bp, Homo sapiens
  source 1..20: mol_type = genomic DNA
gctaatggtggagttaaaga

SEQ ID NO: 17420 - DNA, 21 bp, Homo sapiens
  source 1..21: mol_type = genomic DNA
gctaatggtggagttaaagac

SEQ ID NO: 17421 - DNA, 22 bp, Homo sapiens
  source 1..22: mol_type = genomic DNA
gctaatggtggagttaaagact

SEQ ID NO: 17422 - DNA, 23 bp, Homo sapiens
  source 1..23: mol_type = genomic DNA
gctaatggtggagttaaagactt

SEQ ID NO: 17423 - DNA, 24 bp, Homo sapiens
  source 1..24: mol_type = genomic DNA
gctaatggtggagttaaagacttt

SEQ ID NO: 17424 - DNA, 25 bp, Homo sapiens
  source 1..25: mol_type = genomic DNA
gctaatggtggagttaaagactttt

SEQ ID NO: 17425 - DNA, 26 bp, Homo sapiens
  source 1..26: mol_type = genomic DNA
gctaatggtggagttaaagacttttt

SEQ ID NO: 17426 - DNA, 28 bp, Homo sapiens
  source 1..28: mol_type = genomic DNA
gctaatggtggagttaaagactttttct

SEQ ID NO: 17427 - DNA, 29 bp, Homo sapiens
  source 1..29: mol_type = genomic DNA
gctaatggtggagttaaagactttttctc

SEQ ID NO: 17428 - DNA, 31 bp, Homo sapiens
  source 1..31: mol_type = genomic DNA
gctaatggtggagttaaagactttttctctg

SEQ ID NO: 17429 - DNA, 32 bp, Homo sapiens
  source 1..32: mol_type = genomic DNA
gctaatggtggagttaaagactttttctctga

SEQ ID NO: 17430 - DNA, 33 bp, Homo sapiens
  source 1..33: mol_type = genomic DNA
gctaatggtggagttaaagactttttctctgac

SEQ ID NO: 17431 - DNA, 34 bp, Homo sapiens
  source 1..34: mol_type = genomic DNA
gctaatggtggagttaaagactttttctctgacc

SEQ ID NO: 17432 - DNA, 35 bp, Homo sapiens
  source 1..35: mol_type = genomic DNA
gctaatggtggagttaaagactttttctctgacca

SEQ ID NO: 17433 - DNA, 16 bp, Homo sapiens
  source 1..16: mol_type = genomic DNA
gctagctcagtcggta

SEQ ID NO: 17434 - DNA, 17 bp, Homo sapiens
  source 1..17: mol_type = genomic DNA
gctagctcagtcggtag

SEQ ID NO: 17435 - DNA, 18 bp, Homo sapiens
  source 1..18: mol_type = genomic DNA
gctagctcagtcggtaga

SEQ ID NO: 17436 - DNA, 19 bp, Homo sapiens
  source 1..19: mol_type = genomic DNA
gctagctcagtcggtagag

SEQ ID NO: 17437 - DNA, 20 bp, Homo sapiens
  source 1..20: mol_type = genomic DNA
gctagctcagtcggtagagc

SEQ ID NO: 17438 - DNA, 23 bp, Homo sapiens
  source 1..23: mol_type = genomic DNA
gctagctcagtcggtagagcatg

SEQ ID NO: 17439 - DNA, 25 bp, Homo sapiens
  source 1..25: mol_type = genomic DNA
gctagctcagtcggtagagcatgag

SEQ ID NO: 17440 - DNA, 26 bp, Homo sapiens
  source 1..26: mol_type = genomic DNA
gctagctcagtcggtagagcatgaga

SEQ ID NO: 17441 - DNA, 27 bp, Homo sapiens
  source 1..27: mol_type = genomic DNA
gctagctcagtcggtagagcatgagac

SEQ ID NO: 17442 - DNA, 29 bp, Homo sapiens
  source 1..29: mol_type = genomic DNA
gctagctcagtcggtagagcatgagaccc

SEQ ID NO: 17443 - DNA, 30 bp, Homo sapiens
  source 1..30: mol_type = genomic DNA
gctagctcagtcggtagagcatgagaccct

SEQ ID NO: 17444 - DNA, 28 bp, Homo sapiens
  source 1..28: mol_type = genomic DNA
gctagctcagtcggtagagcatgagact

SEQ ID NO: 17445 - DNA, 29 bp, Homo sapiens
  source 1..29: mol_type = genomic DNA
gctagctcagtcggtagagcatgagactc

SEQ ID NO: 17446 - DNA, 30 bp, Homo sapiens
  source 1..30: mol_type = genomic DNA
gctagctcagtcggtagagcatgagactct

SEQ ID NO: 17447 - DNA, 31 bp, Homo sapiens
  source 1..31: mol_type = genomic DNA
gctagctcagtcggtagagcatgagactctt

SEQ ID NO: 17448 - DNA, 32 bp, Homo sapiens
  source 1..32: mol_type = genomic DNA
gctagctcagtcggtagagcatgagactctta

SEQ ID NO: 17449 - DNA, 33 bp, Homo sapiens
  source 1..33: mol_type = genomic DNA
gctagctcagtcggtagagcatgagactcttaa

SEQ ID NO: 17450 - DNA, 34 bp, Homo sapiens
  source 1..34: mol_type = genomic DNA
gctagctcagtcggtagagcatgagactcttaat

SEQ ID NO: 17451 - DNA, 35 bp, Homo sapiens
  source 1..35: mol_type = genomic DNA
gctagctcagtcggtagagcatgagactcttaatc

SEQ ID NO: 17452 - DNA, 36 bp, Homo sapiens
  source 1..36: mol_type = genomic DNA
gctagctcagtcggtagagcatgagactcttaatct

SEQ ID NO: 17453 - DNA, 44 bp, Homo sapiens
  source 1..44: mol_type = genomic DNA
gctagctcagtcggtagagcatgagactcttaatctcagggtcg

SEQ ID NO: 17454 - DNA, 46 bp, Homo sapiens
  source 1..46: mol_type = genomic DNA
gctagctcagtcggtagagcatgagactcttaatctcagggtcgtg

SEQ ID NO: 17455 - DNA, 47 bp, Homo sapiens
  source 1..47: mol_type = genomic DNA
gctagctcagtcggtagagcatgagactcttaatctcagggtcgtgg

SEQ ID NO: 17456 - DNA, 48 bp, Homo sapiens
  source 1..48: mol_type = genomic DNA
gctagctcagtcggtagagcatgagactcttaatctcagggtcgtggg

SEQ ID NO: 17457 - DNA, 25 bp, Homo sapiens
  source 1..25: mol_type = genomic DNA
gctagctcagtcggtagagcatggg

SEQ ID NO: 17458 - DNA, 26 bp, Homo sapiens
  source 1..26: mol_type = genomic DNA
gctagctcagtcggtagagcatggga

SEQ ID NO: 17459 - DNA, 27 bp, Homo sapiens
  source 1..27: mol_type = genomic DNA
gctagctcagtcggtagagcatgggac

SEQ ID NO: 17460 - DNA, 28 bp, Homo sapiens
  source 1..28: mol_type = genomic DNA
gctagctcagtcggtagagcatgggact

SEQ ID NO: 17461 - DNA, 29 bp, Homo sapiens
  source 1..29: mol_type = genomic DNA
gctagctcagtcggtagagcatgggactc

SEQ ID NO: 17462 - DNA, 30 bp, Homo sapiens
  source 1..30: mol_type = genomic DNA
gctagctcagtcggtagagcatgggactct

SEQ ID NO: 17463 - DNA, 31 bp, Homo sapiens
  source 1..31: mol_type = genomic DNA
gctagctcagtcggtagagcatgggactctt

SEQ ID NO: 17464 - DNA, 32 bp, Homo sapiens
  source 1..32: mol_type = genomic DNA
gctagctcagtcggtagagcatgggactctta

SEQ ID NO: 17465 - DNA, 33 bp, Homo sapiens
  source 1..33: mol_type = genomic DNA
gctagctcagtcggtagagcatgggactcttaa

SEQ ID NO: 17466 - DNA, 34 bp, Homo sapiens
  source 1..34: mol_type = genomic DNA
gctagctcagtcggtagagcatgggactcttaat

SEQ ID NO: 17467 - DNA, 35 bp, Homo sapiens
  source 1..35: mol_type = genomic DNA
gctagctcagtcggtagagcatgggactcttaatc

SEQ ID NO: 17468 - DNA, 36 bp, Homo sapiens
  source 1..36: mol_type = genomic DNA
gctagctcagtcggtagagcatgggactcttaatcc

SEQ ID NO: 17469 - DNA, 37 bp, Homo sapiens
  source 1..37: mol_type = genomic DNA
gctagctcagtcggtagagcatgggactcttaatccc

SEQ ID NO: 17470 - DNA, 44 bp, Homo sapiens
  source 1..44: mol_type = genomic DNA
gctagctcagtcggtagagcatgggactcttaatcccagggtcg

SEQ ID NO: 17471 - DNA, 45 bp, Homo sapiens
  source 1..45: mol_type = genomic DNA
gctagctcagtcggtagagcatgggactcttaatcccagggtcgt

SEQ ID NO: 17472 - DNA, 46 bp, Homo sapiens
  source 1..46: mol_type = genomic DNA
gctagctcagtcggtagagcatgggactcttaatcccagggtcgtg

SEQ ID NO: 17473 - DNA, 47 bp, Homo sapiens
  source 1..47: mol_type = genomic DNA
gctagctcagtcggtagagcatgggactcttaatcccagggtcgtgg

SEQ ID NO: 17474 - DNA, 48 bp, Homo sapiens
  source 1..48: mol_type = genomic DNA
gctagctcagtcggtagagcatgggactcttaatcccagggtcgtggg

SEQ ID NO: 17475 - DNA, 16 bp, Homo sapiens
  source 1..16: mol_type = genomic DNA
gctaggattcggcgct

SEQ ID NO: 17476 - DNA, 17 bp, Homo sapiens
  source 1..17: mol_type = genomic DNA
gctaggattcggcgctt

SEQ ID NO: 17477 - DNA, 18 bp, Homo sapiens
  source 1..18: mol_type = genomic DNA
gctaggattcggcgcttt

SEQ ID NO: 17478 - DNA, 19 bp, Homo sapiens
  source 1..19: mol_type = genomic DNA
gctaggattcggcgctttc

SEQ ID NO: 17479 - DNA, 22 bp, Homo sapiens
  source 1..22: mol_type = genomic DNA
gctaggattcggcgctttcacc

SEQ ID NO: 17480 - DNA, 16 bp, Homo sapiens
  source 1..16: mol_type = genomic DNA
gctatccattggtctt

SEQ ID NO: 17481 - DNA, 17 bp, Homo sapiens
  source 1..17: mol_type = genomic DNA
gctatccattggtctta

SEQ ID NO: 17482 - DNA, 18 bp, Homo sapiens
  source 1..18: mol_type = genomic DNA
gctatccattggtcttag

SEQ ID NO: 17483 - DNA, 21 bp, Homo sapiens
  source 1..21: mol_type = genomic DNA
gctatccattggtcttaggcc

SEQ ID NO: 17484 - DNA, 22 bp, Homo sapiens
  source 1..22: mol_type = genomic DNA
gctatccattggtcttaggccc

SEQ ID NO: 17485 - DNA, 28 bp, Homo sapiens
  source 1..28: mol_type = genomic DNA
gctatccattggtcttaggccccaaaaa

SEQ ID NO: 17486 - DNA, 16 bp, Homo sapiens
  source 1..16: mol_type = genomic DNA
gctatcgggcccatac

SEQ ID NO: 17487 - DNA, 17 bp, Homo sapiens
  source 1..17: mol_type = genomic DNA
gctatcgggcccatacc

SEQ ID NO: 17488 - DNA, 18 bp, Homo sapiens
  source 1..18: mol_type = genomic DNA
gctatcgggcccataccc

SEQ ID NO: 17489 - DNA, 19 bp, Homo sapiens
  source 1..19: mol_type = genomic DNA
gctatcgggcccatacccc

SEQ ID NO: 17490 - DNA, 20 bp, Homo sapiens
  source 1..20: mol_type = genomic DNA
gctatcgggcccataccccg

SEQ ID NO: 17491 - DNA, 21 bp, Homo sapiens
  source 1..21: mol_type = genomic DNA
gctatcgggcccataccccga

SEQ ID NO: 17492 - DNA, 22 bp, Homo sapiens
  source 1..22: mol_type = genomic DNA
gctatcgggcccataccccgaa

SEQ ID NO: 17493 - DNA, 23 bp, Homo sapiens
  source 1..23: mol_type = genomic DNA
gctatcgggcccataccccgaaa

SEQ ID NO: 17494 - DNA, 24 bp, Homo sapiens
  source 1..24: mol_type = genomic DNA
gctatcgggcccataccccgaaaa

SEQ ID NO: 17495 - DNA, 25 bp, Homo sapiens
  source 1..25: mol_type = genomic DNA
gctatcgggcccataccccgaaaat

SEQ ID NO: 17496 - DNA, 26 bp, Homo sapiens
  source 1..26: mol_type = genomic DNA
gctatcgggcccataccccgaaaatg

SEQ ID NO: 17497 - DNA, 28 bp, Homo sapiens
  source 1..28: mol_type = genomic DNA
gctatcgggcccataccccgaaaatgtt

SEQ ID NO: 17498 - DNA, 29 bp, Homo sapiens
  source 1..29: mol_type = genomic DNA
gctatcgggcccataccccgaaaatgttg

SEQ ID NO: 17499 - DNA, 30 bp, Homo sapiens
  source 1..30: mol_type = genomic DNA
gctatcgggcccataccccgaaaatgttgg

SEQ ID NO: 17500 - DNA, 31 bp, Homo sapiens
  source 1..31: mol_type = genomic DNA
gctatcgggcccataccccgaaaatgttggt

SEQ ID NO: 17501 - DNA, 32 bp, Homo sapiens
  source 1..32: mol_type = genomic DNA
gctatcgggcccataccccgaaaatgttggtt

SEQ ID NO: 17502 - DNA, 33 bp, Homo sapiens
  source 1..33: mol_type = genomic DNA
gctatcgggcccataccccgaaaatgttggtta

SEQ ID NO: 17503 - DNA, 34 bp, Homo sapiens
  source 1..34: mol_type = genomic DNA
gctatcgggcccataccccgaaaatgttggttat

SEQ ID NO: 17504 - DNA, 35 bp, Homo sapiens
  source 1..35: mol_type = genomic DNA
gctatcgggcccataccccgaaaatgttggttata

SEQ ID NO: 17505 - DNA, 36 bp, Homo sapiens
  source 1..36: mol_type = genomic DNA
gctatcgggcccataccccgaaaatgttggttatac

SEQ ID NO: 17506 - DNA, 37 bp, Homo sapiens
  source 1..37: mol_type = genomic DNA
gctatcgggcccataccccgaaaatgttggttatacc

SEQ ID NO: 17507 - DNA, 16 bp, Homo sapiens
  source 1..16: mol_type = genomic DNA
gctcacaagaactgct

SEQ ID NO: 17508 - DNA, 17 bp, Homo sapiens
  source 1..17: mol_type = genomic DNA
gctcacaagaactgcta

SEQ ID NO: 17509 - DNA, 18 bp, Homo sapiens
  source 1..18: mol_type = genomic DNA
gctcacaagaactgctaa

SEQ ID NO: 17510 - DNA, 19 bp, Homo sapiens
  source 1..19: mol_type = genomic DNA
gctcacaagaactgctaac

SEQ ID NO: 17511 - DNA, 20 bp, Homo sapiens
  source 1..20: mol_type = genomic DNA
gctcacaagaactgctaact

SEQ ID NO: 17512 - DNA, 21 bp, Homo sapiens
  source 1..21: mol_type = genomic DNA
gctcacaagaactgctaactc

SEQ ID NO: 17513 - DNA, 22 bp, Homo sapiens
  source 1..22: mol_type = genomic DNA
gctcacaagaactgctaactca

SEQ ID NO: 17514 - DNA, 23 bp, Homo sapiens
  source 1..23: mol_type = genomic DNA
gctcacaagaactgctaactcat

SEQ ID NO: 17515 - DNA, 24 bp, Homo sapiens
  source 1..24: mol_type = genomic DNA
gctcacaagaactgctaactcatg

SEQ ID NO: 17516 - DNA, 25 bp, Homo sapiens
  source 1..25: mol_type = genomic DNA
gctcacaagaactgctaactcatgc

SEQ ID NO: 17517 - DNA, 26 bp, Homo sapiens
  source 1..26: mol_type = genomic DNA
gctcacaagaactgctaactcatgcc

SEQ ID NO: 17518 - DNA, 27 bp, Homo sapiens
  source 1..27: mol_type = genomic DNA
gctcacaagaactgctaactcatgccc

SEQ ID NO: 17519 - DNA, 28 bp, Homo sapiens
  source 1..28: mol_type = genomic DNA
gctcacaagaactgctaactcatgcccc

SEQ ID NO: 17520 - DNA, 29 bp, Homo sapiens
  source 1..29: mol_type = genomic DNA
gctcacaagaactgctaactcatgccccc

SEQ ID NO: 17521 - DNA, 30 bp, Homo sapiens
  source 1..30: mol_type = genomic DNA
gctcacaagaactgctaactcatgccccca

SEQ ID NO: 17522 - DNA, 31 bp, Homo sapiens
  source 1..31: mol_type = genomic DNA
gctcacaagaactgctaactcatgcccccat

SEQ ID NO: 17523 - DNA, 32 bp, Homo sapiens
  source 1..32: mol_type = genomic DNA
gctcacaagaactgctaactcatgcccccatg

SEQ ID NO: 17524 - DNA, 33 bp, Homo sapiens
  source 1..33: mol_type = genomic DNA
gctcacaagaactgctaactcatgcccccatgt

SEQ ID NO: 17525 - DNA, 34 bp, Homo sapiens
  source 1..34: mol_type = genomic DNA
gctcacaagaactgctaactcatgcccccatgtc

SEQ ID NO: 17526 - DNA, 35 bp, Homo sapiens
  source 1..35: mol_type = genomic DNA
gctcacaagaactgctaactcatgcccccatgtct

SEQ ID NO: 17527 - DNA, 36 bp, Homo sapiens
  source 1..36: mol_type = genomic DNA
gctcacaagaactgctaactcatgcccccatgtcta

SEQ ID NO: 17528 - DNA, 37 bp, Homo sapiens
  source 1..37: mol_type = genomic DNA
gctcacaagaactgctaactcatgcccccatgtctaa

SEQ ID NO: 17529 - DNA, 38 bp, Homo sapiens
  source 1..38: mol_type = genomic DNA
gctcacaagaactgctaactcatgcccccatgtctaac

SEQ ID NO: 17530 - DNA, 39 bp, Homo sapiens
  source 1..39: mol_type = genomic DNA
gctcacaagaactgctaactcatgcccccatgtctaaca

SEQ ID NO: 17531 - DNA, 41 bp, Homo sapiens
  source 1..41: mol_type = genomic DNA
gctcacaagaactgctaactcatgcccccatgtctaacaac

SEQ ID NO: 17532 - DNA, 42 bp, Homo sapiens
  source 1..42: mol_type = genomic DNA
gctcacaagaactgctaactcatgcccccatgtctaacaaca

SEQ ID NO: 17533 - DNA, 43 bp, Homo sapiens
  source 1..43: mol_type = genomic DNA
gctcacaagaactgctaactcatgcccccatgtctaacaacat

SEQ ID NO: 17534 - DNA, 44 bp, Homo sapiens
  source 1..44: mol_type = genomic DNA
gctcacaagaactgctaactcatgcccccatgtctaacaacatg

SEQ ID NO: 17535 - DNA, 45 bp, Homo sapiens
  source 1..45: mol_type = genomic DNA
gctcacaagaactgctaactcatgcccccatgtctaacaacatgg

SEQ ID NO: 17536 - DNA, 46 bp, Homo sapiens
  source 1..46: mol_type = genomic DNA
gctcacaagaactgctaactcatgcccccatgtctaacaacatggc

SEQ ID NO: 17537 - DNA, 47 bp, Homo sapiens
  source 1..47: mol_type = genomic DNA
gctcacaagaactgctaactcatgcccccatgtctaacaacatggct

SEQ ID NO: 17538 - DNA, 48 bp, Homo sapiens
  source 1..48: mol_type = genomic DNA
gctcacaagaactgctaactcatgcccccatgtctaacaacatggctt

SEQ ID NO: 17539 - DNA, 17 bp, Homo sapiens
  source 1..17: mol_type = genomic DNA
gctcacatcaccccata

SEQ ID NO: 17540 - DNA, 18 bp, Homo sapiens
  source 1..18: mol_type = genomic DNA
gctcacatcaccccataa

SEQ ID NO: 17541 - DNA, 19 bp, Homo sapiens
  source 1..19: mol_type = genomic DNA
gctcacatcaccccataaa

SEQ ID NO: 17542 - DNA, 20 bp, Homo sapiens
  source 1..20: mol_type = genomic DNA
gctcacatcaccccataaac

SEQ ID NO: 17543 - DNA, 21 bp, Homo sapiens
  source 1..21: mol_type = genomic DNA
gctcacatcaccccataaaca

SEQ ID NO: 17544 - DNA, 22 bp, Homo sapiens
  source 1..22: mol_type = genomic DNA
gctcacatcaccccataaacac

SEQ ID NO: 17545 - DNA, 23 bp, Homo sapiens
  source 1..23: mol_type = genomic DNA
gctcacatcaccccataaacacc

SEQ ID NO: 17546 - DNA, 24 bp, Homo sapiens
  source 1..24: mol_type = genomic DNA
gctcacatcaccccataaacacca

SEQ ID NO: 17547 - DNA, 23 bp, Homo sapiens
  source 1..23: mol_type = genomic DNA
gctcaggggtagagcatttgact

SEQ ID NO: 17548 - DNA, 20 bp, Homo sapiens
  source 1..20: mol_type = genomic DNA
gctcaggggttagagcactg

SEQ ID NO: 17549 - DNA, 23 bp, Homo sapiens
  source 1..23: mol_type = genomic DNA
gctcaggggttagagcactggtc

SEQ ID NO: 17550 - DNA, 24 bp, Homo sapiens
  source 1..24: mol_type = genomic DNA
gctcaggggttagagcactggtct

SEQ ID NO: 17551 - DNA, 32 bp, Homo sapiens
  source 1..32: mol_type = genomic DNA
gctcaggggttagagcactggtcttgtaaacc

SEQ ID NO: 17552 - DNA, 17 bp, Homo sapiens
  source 1..17: mol_type = genomic DNA
gctcagtcggtagagca

SEQ ID NO: 17553 - DNA, 19 bp, Homo sapiens
  source 1..19: mol_type = genomic DNA
gctcagtcggtagagcatc

SEQ ID NO: 17554 - DNA, 23 bp, Homo sapiens
  source 1..23: mol_type = genomic DNA
gctcagtcggtagagcatcagac

SEQ ID NO: 17555 - DNA, 24 bp, Homo sapiens
  source 1..24: mol_type = genomic DNA
gctcagtcggtagagcatcagact

SEQ ID NO: 17556 - DNA, 26 bp, Homo sapiens
  source 1..26: mol_type = genomic DNA
gctcagtcggtagagcatcagacttt

SEQ ID NO: 17557 - DNA, 27 bp, Homo sapiens
  source 1..27: mol_type = genomic DNA
gctcagtcggtagagcatcagactttt

SEQ ID NO: 17558 - DNA, 19 bp, Homo sapiens
  source 1..19: mol_type = genomic DNA
gctcagtcggtagagcatg

SEQ ID NO: 17559 - DNA, 23 bp, Homo sapiens
  source 1..23: mol_type = genomic DNA
gctcagtcggtagagcatgagac

SEQ ID NO: 17560 - DNA, 25 bp, Homo sapiens
  source 1..25: mol_type = genomic DNA
gctcagtcggtagagcatgagaccc

SEQ ID NO: 17561 - DNA, 26 bp, Homo sapiens
  source 1..26: mol_type = genomic DNA
gctcagtcggtagagcatgagaccct

SEQ ID NO: 17562 - DNA, 24 bp, Homo sapiens
  source 1..24: mol_type = genomic DNA
gctcagtcggtagagcatgagact

SEQ ID NO: 17563 - DNA, 25 bp, Homo sapiens
  source 1..25: mol_type = genomic DNA
gctcagtcggtagagcatgagactc

SEQ ID NO: 17564 - DNA, 26 bp, Homo sapiens
  source 1..26: mol_type = genomic DNA
gctcagtcggtagagcatgagactct

SEQ ID NO: 17565 - DNA, 27 bp, Homo sapiens
  source 1..27: mol_type = genomic DNA
gctcagtcggtagagcatgagactctt

SEQ ID NO: 17566 - DNA, 29 bp, Homo sapiens
  source 1..29: mol_type = genomic DNA
gctcagtcggtagagcatgagactcttaa

SEQ ID NO: 17567 - DNA, 30 bp, Homo sapiens
  source 1..30: mol_type = genomic DNA
gctcagtcggtagagcatgagactcttaat

SEQ ID NO: 17568 - DNA, 31 bp, Homo sapiens
  source 1..31: mol_type = genomic DNA
gctcagtcggtagagcatgagactcttaatc

SEQ ID NO: 17569 - DNA, 32 bp, Homo sapiens
  source 1..32: mol_type = genomic DNA
gctcagtcggtagagcatgagactcttaatct

SEQ ID NO: 17570 - DNA, 33 bp, Homo sapiens
  source 1..33: mol_type = genomic DNA
gctcagtcggtagagcatgagactcttaatctc

SEQ ID NO: 17571 - DNA, 43 bp, Homo sapiens
  source 1..43: mol_type = genomic DNA
gctcagtcggtagagcatgagactcttaatctcagggtcgtgg

SEQ ID NO: 17572 - DNA, 46 bp, Homo sapiens
  source 1..46: mol_type = genomic DNA
gctcagtcggtagagcatgagactcttaatctcagggtcgtgggtt

SEQ ID NO: 17573 - DNA, 21 bp, Homo sapiens
  source 1..21: mol_type = genomic DNA
gctcagtcggtagagcatggg

SEQ ID NO: 17574 - DNA, 22 bp, Homo sapiens
  source 1..22: mol_type = genomic DNA
gctcagtcggtagagcatggga

SEQ ID NO: 17575 - DNA, 23 bp, Homo sapiens
  source 1..23: mol_type = genomic DNA
gctcagtcggtagagcatgggac

SEQ ID NO: 17576 - DNA, 24 bp, Homo sapiens
  source 1..24: mol_type = genomic DNA
gctcagtcggtagagcatgggact

SEQ ID NO: 17577 - DNA, 25 bp, Homo sapiens
  source 1..25: mol_type = genomic DNA
gctcagtcggtagagcatgggactc

SEQ ID NO: 17578 - DNA, 26 bp, Homo sapiens
  source 1..26: mol_type = genomic DNA
gctcagtcggtagagcatgggactct

SEQ ID NO: 17579 - DNA, 27 bp, Homo sapiens
  source 1..27: mol_type = genomic DNA
gctcagtcggtagagcatgggactctt

SEQ ID NO: 17580 - DNA, 28 bp, Homo sapiens
  source 1..28: mol_type = genomic DNA
gctcagtcggtagagcatgggactctta

SEQ ID NO: 17581 - DNA, 30 bp, Homo sapiens
  source 1..30: mol_type = genomic DNA
gctcagtcggtagagcatgggactcttaat

SEQ ID NO: 17582 - DNA, 31 bp, Homo sapiens
  source 1..31: mol_type = genomic DNA
gctcagtcggtagagcatgggactcttaatc

SEQ ID NO: 17583 - DNA, 32 bp, Homo sapiens
  source 1..32: mol_type = genomic DNA
gctcagtcggtagagcatgggactcttaatcc

SEQ ID NO: 17584 - DNA, 33 bp, Homo sapiens
  source 1..33: mol_type = genomic DNA
gctcagtcggtagagcatgggactcttaatccc

SEQ ID NO: 17585 - DNA, 42 bp, Homo sapiens
  source 1..42: mol_type = genomic DNA
gctcagtcggtagagcatgggactcttaatcccagggtcgtg

SEQ ID NO: 17586 - DNA, 43 bp, Homo sapiens
  source 1..43: mol_type = genomic DNA
gctcagtcggtagagcatgggactcttaatcccagggtcgtgg

SEQ ID NO: 17587 - DNA, 46 bp, Homo sapiens
  source 1..46: mol_type = genomic DNA
gctcagtcggtagagcatgggactcttaatcccagggtcgtgggtt

SEQ ID NO: 17588 - DNA, 32 bp, Homo sapiens
  source 1..32: mol_type = genomic DNA
gctcagtcggtagagcatgggactcttaatct

SEQ ID NO: 17589 - DNA, 46 bp, Homo sapiens
  source 1..46: mol_type = genomic DNA
gctcagtcggtagagcatgggactcttaatctcagggtcgtgggtt

SEQ ID NO: 17590 - DNA, 23 bp, Homo sapiens
  source 1..23: mol_type = genomic DNA
gctcagtggtagagcatttgact

SEQ ID NO: 17591 - DNA, 24 bp, Homo sapiens
  source 1..24: mol_type = genomic DNA
gctcagtggtagagcatttgactg

SEQ ID NO: 17592 - DNA, 25 bp, Homo sapiens
  source 1..25: mol_type = genomic DNA
gctcagtggtagagcatttgactgc

SEQ ID NO: 17593 - DNA, 26 bp, Homo sapiens
  source 1..26: mol_type = genomic DNA
gctcagtggtagagcatttgactgca

SEQ ID NO: 17594 - DNA, 47 bp, Homo sapiens
  source 1..47: mol_type = genomic DNA
gctccagtcatttcgatggcgtgggttcgaatcccaccgctgccacc

SEQ ID NO: 17595 - DNA, 23 bp, Homo sapiens
  source 1..23: mol_type = genomic DNA
gctccagtctcttcggaggcgtg

SEQ ID NO: 17596 - DNA, 24 bp, Homo sapiens
  source 1..24: mol_type = genomic DNA
gctccagtctcttcggaggcgtgg

SEQ ID NO: 17597 - DNA, 46 bp, Homo sapiens
  source 1..46: mol_type = genomic DNA
gctccagtctcttcggaggcgtgggttcgaatcccaccgctgccac

SEQ ID NO: 17598 - DNA, 23 bp, Homo sapiens
  source 1..23: mol_type = genomic DNA
gctccagtctcttcgggggcgtg

SEQ ID NO: 17599 - DNA, 26 bp, Homo sapiens
  source 1..26: mol_type = genomic DNA
gctccagtctcttcgggggcgtgggt

SEQ ID NO: 17600 - DNA, 45 bp, Homo sapiens
  source 1..45: mol_type = genomic DNA
gctccagtctcttcgggggcgtgggttcgaatcccaccgctgcca

SEQ ID NO: 17601 - DNA, 47 bp, Homo sapiens
  source 1..47: mol_type = genomic DNA
gctccagtctcttcgggggcgtgggttcgaatcccaccgctgccacc

SEQ ID NO: 17602 - DNA, 48 bp, Homo sapiens
  source 1..48: mol_type = genomic DNA
gctccagtctcttcgggggcgtgggttcgaatcccaccgctgccacca

SEQ ID NO: 17603 - DNA, 19 bp, Homo sapiens
  source 1..19: mol_type = genomic DNA
gctccagtggcgcaatcgg

SEQ ID NO: 17604 - DNA, 20 bp, Homo sapiens
  source 1..20: mol_type = genomic DNA
gctccagtggcgcaatcggt

SEQ ID NO: 17605 - DNA, 23 bp, Homo sapiens
  source 1..23: mol_type = genomic DNA
gctccagtggcgcaatcggttag

SEQ ID NO: 17606 - DNA, 25 bp, Homo sapiens
  source 1..25: mol_type = genomic DNA
gctccagtggcgcaatcggttagcg

SEQ ID NO: 17607 - DNA, 27 bp, Homo sapiens
  source 1..27: mol_type = genomic DNA
gctccagtggcgcaatcggttagcgcg

SEQ ID NO: 17608 - DNA, 33 bp, Homo sapiens
  source 1..33: mol_type = genomic DNA
gctccagtggcgcaatcggttagcgcgcggtac

SEQ ID NO: 17609 - DNA, 34 bp, Homo sapiens
  source 1..34: mol_type = genomic DNA
gctccagtggcgcaatcggttagcgcgcggtact

SEQ ID NO: 17610 - DNA, 35 bp, Homo sapiens
  source 1..35: mol_type = genomic DNA
gctccagtggcgcaatcggttagcgcgcggtactt

SEQ ID NO: 17611 - DNA, 36 bp, Homo sapiens
  source 1..36: mol_type = genomic DNA
gctccagtggcgcaatcggttagcgcgcggtactta

SEQ ID NO: 17612 - DNA, 37 bp, Homo sapiens
  source 1..37: mol_type = genomic DNA
gctccagtggcgcaatcggttagcgcgcggtacttat

SEQ ID NO: 17613 - DNA, 16 bp, Homo sapiens
  source 1..16: mol_type = genomic DNA
gctccatagctcaggg

SEQ ID NO: 17614 - DNA, 18 bp, Homo sapiens
  source 1..18: mol_type = genomic DNA
gctccatagctcaggggt

SEQ ID NO: 17615 - DNA, 28 bp, Homo sapiens
  source 1..28: mol_type = genomic DNA
gctccatagctcaggggttagagcactg

SEQ ID NO: 17616 - DNA, 32 bp, Homo sapiens
  source 1..32: mol_type = genomic DNA
gctccatagctcaggggttagagcactggtct

SEQ ID NO: 17617 - DNA, 16 bp, Homo sapiens
  source 1..16: mol_type = genomic DNA
gctccgaggtgatttt

SEQ ID NO: 17618 - DNA, 17 bp, Homo sapiens
  source 1..17: mol_type = genomic DNA
gctccgaggtgattttc

SEQ ID NO: 17619 - DNA, 18 bp, Homo sapiens
  source 1..18: mol_type = genomic DNA
gctccgaggtgattttca

SEQ ID NO: 17620 - DNA, 19 bp, Homo sapiens
  source 1..19: mol_type = genomic DNA
gctccgaggtgattttcat

SEQ ID NO: 17621 - DNA, 20 bp, Homo sapiens
  source 1..20: mol_type = genomic DNA
gctccgaggtgattttcata

SEQ ID NO: 17622 - DNA, 21 bp, Homo sapiens
  source 1..21: mol_type = genomic DNA
gctccgaggtgattttcatat

SEQ ID NO: 17623 - DNA, 22 bp, Homo sapiens
  source 1..22: mol_type = genomic DNA
gctccgaggtgattttcatatt

SEQ ID NO: 17624 - DNA, 23 bp, Homo sapiens
  source 1..23: mol_type = genomic DNA
gctccgaggtgattttcatattg

SEQ ID NO: 17625 - DNA, 24 bp, Homo sapiens
  source 1..24: mol_type = genomic DNA
gctccgaggtgattttcatattga

SEQ ID NO: 17626 - DNA, 26 bp, Homo sapiens
  source 1..26: mol_type = genomic DNA
gctccgaggtgattttcatattgaat

SEQ ID NO: 17627 - DNA, 27 bp, Homo sapiens
  source 1..27: mol_type = genomic DNA
gctccgaggtgattttcatattgaatt

SEQ ID NO: 17628 - DNA, 28 bp, Homo sapiens
  source 1..28: mol_type = genomic DNA
gctccgaggtgattttcatattgaattg

SEQ ID NO: 17629 - DNA, 29 bp, Homo sapiens
  source 1..29: mol_type = genomic DNA
gctccgaggtgattttcatattgaattgc

SEQ ID NO: 17630 - DNA, 30 bp, Homo sapiens
  source 1..30: mol_type = genomic DNA
gctccgaggtgattttcatattgaattgca

SEQ ID NO: 17631 - DNA, 33 bp, Homo sapiens
  source 1..33: mol_type = genomic DNA
gctccgaggtgattttcatattgaattgcaaat

SEQ ID NO: 17632 - DNA, 35 bp, Homo sapiens
  source 1..35: mol_type = genomic DNA
gctccgaggtgattttcatattgaattgcaaattc

SEQ ID NO: 17633 - DNA, 36 bp, Homo sapiens
  source 1..36: mol_type = genomic DNA
gctccgaggtgattttcatattgaattgcaaattcg

SEQ ID NO: 17634 - DNA, 38 bp, Homo sapiens
  source 1..38: mol_type = genomic DNA
gctccgaggtgattttcatattgaattgcaaattcgaa

SEQ ID NO: 17635 - DNA, 40 bp, Homo sapiens
  source 1..40: mol_type = genomic DNA
gctccgaggtgattttcatattgaattgcaaattcgaaga

SEQ ID NO: 17636 - DNA, 44 bp, Homo sapiens
  source 1..44: mol_type = genomic DNA
gctccgaggtgattttcatattgaattgcaaattcgaagaagca

SEQ ID NO: 17637 - DNA, 45 bp, Homo sapiens
  source 1..45: mol_type = genomic DNA
gctccgaggtgattttcatattgaattgcaaattcgaagaagcag

SEQ ID NO: 17638 - DNA, 18 bp, Homo sapiens
  source 1..18: mol_type = genomic DNA
gctccgtggcgcaatgga

SEQ ID NO: 17639 - DNA, 28 bp, Homo sapiens
  source 1..28: mol_type = genomic DNA
gctccgtggcgcaatggatagcgcattg

SEQ ID NO: 17640 - DNA, 29 bp, Homo sapiens
  source 1..29: mol_type = genomic DNA
gctccgtggcgcaatggatagcgcattgg

SEQ ID NO: 17641 - DNA, 32 bp, Homo sapiens
  source 1..32: mol_type = genomic DNA
gctccgtggcgcaatggatagcgcattggact

SEQ ID NO: 17642 - DNA, 26 bp, Homo sapiens
  source 1..26: mol_type = genomic DNA
gctcgttggtctaggggtatgattct

SEQ ID NO: 17643 - DNA, 27 bp, Homo sapiens
  source 1..27: mol_type = genomic DNA
gctcgttggtctaggggtatgattctc

SEQ ID NO: 17644 - DNA, 29 bp, Homo sapiens
  source 1..29: mol_type = genomic DNA
gctcgttggtctaggggtatgattctcgc

SEQ ID NO: 17645 - DNA, 30 bp, Homo sapiens
  source 1..30: mol_type = genomic DNA
gctcgttggtctaggggtatgattctcgct

SEQ ID NO: 17646 - DNA, 31 bp, Homo sapiens
  source 1..31: mol_type = genomic DNA
gctcgttggtctaggggtatgattctcgctt

SEQ ID NO: 17647 - DNA, 34 bp, Homo sapiens
  source 1..34: mol_type = genomic DNA
gctcgttggtctaggggtatgattctcgcttcgg

SEQ ID NO: 17648 - DNA, 34 bp, Homo sapiens
  source 1..34: mol_type = genomic DNA
gctcgttggtctaggggtatgattctcgctttgg

SEQ ID NO: 17649 - DNA, 30 bp, Homo sapiens
  source 1..30: mol_type = genomic DNA
gctcgttggtctaggggtatgattctcggt

SEQ ID NO: 17650 - DNA, 31 bp, Homo sapiens
  source 1..31: mol_type = genomic DNA
gctcgttggtctaggggtatgattctcggtt

SEQ ID NO: 17651 - DNA, 34 bp, Homo sapiens
  source 1..34: mol_type = genomic DNA
gctcgttggtctaggggtatgattctcggtttgg

SEQ ID NO: 17652 - DNA, 16 bp, Homo sapiens
  source 1..16: mol_type = genomic DNA
gctctcaccgccgcgg

SEQ ID NO: 17653 - DNA, 17 bp, Homo sapiens
  source 1..17: mol_type = genomic DNA
gctctcaccgccgcggc

SEQ ID NO: 17654 - DNA, 18 bp, Homo sapiens
  source 1..18: mol_type = genomic DNA
gctctcaccgccgcggcc

SEQ ID NO: 17655 - DNA, 19 bp, Homo sapiens
  source 1..19: mol_type = genomic DNA
gctctcaccgccgcggccc

SEQ ID NO: 17656 - DNA, 20 bp, Homo sapiens
  source 1..20: mol_type = genomic DNA
gctctcaccgccgcggcccg

SEQ ID NO: 17657 - DNA, 21 bp, Homo sapiens
  source 1..21: mol_type = genomic DNA
gctctcaccgccgcggcccgg

SEQ ID NO: 17658 - DNA, 22 bp, Homo sapiens
  source 1..22: mol_type = genomic DNA
gctctcaccgccgcggcccggg

SEQ ID NO: 17659 - DNA, 23 bp, Homo sapiens
  source 1..23: mol_type = genomic DNA
gctctcaccgccgcggcccgggt

SEQ ID NO: 17660 - DNA, 24 bp, Homo sapiens
  source 1..24: mol_type = genomic DNA
gctctcaccgccgcggcccgggtt

SEQ ID NO: 17661 - DNA, 25 bp, Homo sapiens
  source 1..25: mol_type = genomic DNA
gctctcaccgccgcggcccgggttc

SEQ ID NO: 17662 - DNA, 26 bp, Homo sapiens
  source 1..26: mol_type = genomic DNA
gctctcaccgccgcggcccgggttcg

SEQ ID NO: 17663 - DNA, 29 bp, Homo sapiens
  source 1..29: mol_type = genomic DNA
gctctcaccgccgcggcccgggttcgatt

SEQ ID NO: 17664 - DNA, 30 bp, Homo sapiens
  source 1..30: mol_type = genomic DNA
gctctcaccgccgcggcccgggttcgattc

SEQ ID NO: 17665 - DNA, 36 bp, Homo sapiens
  source 1..36: mol_type = genomic DNA
gctctcaccgccgcggcccgggttcgattcccggtc

SEQ ID NO: 17666 - DNA, 37 bp, Homo sapiens
  source 1..37: mol_type = genomic DNA
gctctcaccgccgcggcccgggttcgattcccggtca

SEQ ID NO: 17667 - DNA, 39 bp, Homo sapiens
  source 1..39: mol_type = genomic DNA
gctctcaccgccgcggcccgggttcgattcccggtcagg

SEQ ID NO: 17668 - DNA, 40 bp, Homo sapiens
  source 1..40: mol_type = genomic DNA
gctctcaccgccgcggcccgggttcgattcccggtcaggg

SEQ ID NO: 17669 - DNA, 41 bp, Homo sapiens
  source 1..41: mol_type = genomic DNA
gctctcaccgccgcggcccgggttcgattcccggtcaggga

SEQ ID NO: 17670 - DNA, 42 bp, Homo sapiens
  source 1..42: mol_type = genomic DNA
gctctcaccgccgcggcccgggttcgattcccggtcagggaa

SEQ ID NO: 17671 - DNA, 43 bp, Homo sapiens
  source 1..43: mol_type = genomic DNA
gctctcaccgccgcggcccgggttcgattcccggtcagggaac

SEQ ID NO: 17672 - DNA, 44 bp, Homo sapiens
  source 1..44: mol_type = genomic DNA
gctctcaccgccgcggcccgggttcgattcccggtcagggaacc

SEQ ID NO: 17673 - DNA, 45 bp, Homo sapiens
  source 1..45: mol_type = genomic DNA
gctctcaccgccgcggcccgggttcgattcccggtcagggaacca

SEQ ID NO: 17674 - DNA, 18 bp, Homo sapiens
  source 1..18: mol_type = genomic DNA
gctctgtggcgcaatgga

SEQ ID NO: 17675 - DNA, 19 bp, Homo sapiens
  source 1..19: mol_type = genomic DNA
gctgagtgaagcattggac

SEQ ID NO: 17676 - DNA, 20 bp, Homo sapiens
  source 1..20: mol_type = genomic DNA
gctgagtgaagcattggact

SEQ ID NO: 17677 - DNA, 21 bp, Homo sapiens
  source 1..21: mol_type = genomic DNA
gctgagtgaagcattggactg

SEQ ID NO: 17678 - DNA, 22 bp, Homo sapiens
  source 1..22: mol_type = genomic DNA
gctgagtgaagcattggactgt

SEQ ID NO: 17679 - DNA, 23 bp, Homo sapiens
  source 1..23: mol_type = genomic DNA
gctgagtgaagcattggactgta

SEQ ID NO: 17680 - DNA, 24 bp, Homo sapiens
  source 1..24: mol_type = genomic DNA
gctgagtgaagcattggactgtaa

SEQ ID NO: 17681 - DNA, 25 bp, Homo sapiens
  source 1..25: mol_type = genomic DNA
gctgagtgaagcattggactgtaaa

SEQ ID NO: 17682 - DNA, 27 bp, Homo sapiens
  source 1..27: mol_type = genomic DNA
gctgagtgaagcattggactgtaaatc

SEQ ID NO: 17683 - DNA, 28 bp, Homo sapiens
  source 1..28: mol_type = genomic DNA
gctgagtgaagcattggactgtaaatct

SEQ ID NO: 17684 - DNA, 30 bp, Homo sapiens
  source 1..30: mol_type = genomic DNA
gctgagtgaagcattggactgtaaatctaa

SEQ ID NO: 17685 - DNA, 31 bp, Homo sapiens
  source 1..31: mol_type = genomic DNA
gctgagtgaagcattggactgtaaatctaaa

SEQ ID NO: 17686 - DNA, 32 bp, Homo sapiens
  source 1..32: mol_type = genomic DNA
gctgagtgaagcattggactgtaaatctaaag

SEQ ID NO: 17687 - DNA, 41 bp, Homo sapiens
  source 1..41: mol_type = genomic DNA
gctgagtgaagcattggactgtaaatctaaagacaggggtt

SEQ ID NO: 17688 - DNA, 46 bp, Homo sapiens
  source 1..46: mol_type = genomic DNA
gctgagtgaagcattggactgtaaatctaaagacaggggttaggcc

SEQ ID NO: 17689 - DNA, 48 bp, Homo sapiens
  source 1..48: mol_type = genomic DNA
gctgagtgaagcattggactgtaaatctaaagacaggggttaggcctc

SEQ ID NO: 17690 - DNA, 27 bp, Homo sapiens
  source 1..27: mol_type = genomic DNA
gctgccttccaagcagttgacccgggt

SEQ ID NO: 17691 - DNA, 27 bp, Homo sapiens
  source 1..27: mol_type = genomic DNA
gctgcgtgttcgaatcacgtcggggtc

SEQ ID NO: 17692 - DNA, 30 bp, Homo sapiens
  source 1..30: mol_type = genomic DNA
gctgcgtgttcgaatcacgtcggggtcacc

SEQ ID NO: 17693 - DNA, 29 bp, Homo sapiens
  source 1..29: mol_type = genomic DNA
gctgggcccataacccagaggtcgatgga

SEQ ID NO: 17694 - DNA, 30 bp, Homo sapiens
  source 1..30: mol_type = genomic DNA
gctgggcccataacccagaggtcgatggat

SEQ ID NO: 17695 - DNA, 31 bp, Homo sapiens
  source 1..31: mol_type = genomic DNA
gctgggcccataacccagaggtcgatggatc

SEQ ID NO: 17696 - DNA, 32 bp, Homo sapiens
  source 1..32: mol_type = genomic DNA
gctgggcccataacccagaggtcgatggatcg

SEQ ID NO: 17697 - DNA, 18 bp, Homo sapiens
  source 1..18: mol_type = genomic DNA
gctggggattgtgggttc

SEQ ID NO: 17698 - DNA, 19 bp, Homo sapiens
  source 1..19: mol_type = genomic DNA
gctggggattgtgggttcg

SEQ ID NO: 17699 - DNA, 25 bp, Homo sapiens
  source 1..25: mol_type = genomic DNA
gctggggattgtgggttcgagtccc

SEQ ID NO: 17700 - DNA, 26 bp, Homo sapiens
  source 1..26: mol_type = genomic DNA
gctggggattgtgggttcgagtccca

SEQ ID NO: 17701 - DNA, 28 bp, Homo sapiens
  source 1..28: mol_type = genomic DNA
gctggggattgtgggttcgagtcccatc

SEQ ID NO: 17702 - DNA, 32 bp, Homo sapiens
  source 1..32: mol_type = genomic DNA
gctggggattgtgggttcgagtcccatctggg

SEQ ID NO: 17703 - DNA, 33 bp, Homo sapiens
  source 1..33: mol_type = genomic DNA
gctggggattgtgggttcgagtcccatctgggt

SEQ ID NO: 17704 - DNA, 34 bp, Homo sapiens
  source 1..34: mol_type = genomic DNA
gctggggattgtgggttcgagtcccatctgggtc

SEQ ID NO: 17705 - DNA, 35 bp, Homo sapiens
  source 1..35: mol_type = genomic DNA
gctggggattgtgggttcgagtcccatctgggtcg

SEQ ID NO: 17706 - DNA, 36 bp, Homo sapiens
  source 1..36: mol_type = genomic DNA
gctggggattgtgggttcgagtcccatctgggtcgc

SEQ ID NO: 17707 - DNA, 37 bp, Homo sapiens
  source 1..37: mol_type = genomic DNA
gctggggattgtgggttcgagtcccatctgggtcgcc

SEQ ID NO: 17708 - DNA, 38 bp, Homo sapiens
  source 1..38: mol_type = genomic DNA
gctggggattgtgggttcgagtcccatctgggtcgcca

SEQ ID NO: 17709 - DNA, 18 bp, Homo sapiens
  source 1..18: mol_type = genomic DNA
gctggtagagcggaggac

SEQ ID NO: 17710 - DNA, 26 bp, Homo sapiens
  source 1..26: mol_type = genomic DNA
gctggtagagcggaggactgtagatc

SEQ ID NO: 17711 - DNA, 16 bp, Homo sapiens
  source 1..16: mol_type = genomic DNA
gctggtgtagtggtat

SEQ ID NO: 17712 - DNA, 17 bp, Homo sapiens
  source 1..17: mol_type = genomic DNA
gctggtgtagtggtatc

SEQ ID NO: 17713 - DNA, 18 bp, Homo sapiens
  source 1..18: mol_type = genomic DNA
gctggtgtagtggtatca

SEQ ID NO: 17714 - DNA, 19 bp, Homo sapiens
  source 1..19: mol_type = genomic DNA
gctggtgtagtggtatcat

SEQ ID NO: 17715 - DNA, 20 bp, Homo sapiens
  source 1..20: mol_type = genomic DNA
gctggtgtagtggtatcatg

SEQ ID NO: 17716 - DNA, 21 bp, Homo sapiens
  source 1..21: mol_type = genomic DNA
gctggtgtagtggtatcatgc

SEQ ID NO: 17717 - DNA, 22 bp, Homo sapiens
  source 1..22: mol_type = genomic DNA
gctggtgtagtggtatcatgca

SEQ ID NO: 17718 - DNA, 24 bp, Homo sapiens
  source 1..24: mol_type = genomic DNA
gctggtgtagtggtatcatgcaag

SEQ ID NO: 17719 - DNA, 25 bp, Homo sapiens
  source 1..25: mol_type = genomic DNA
gctggtgtagtggtatcatgcaaga

SEQ ID NO: 17720 - DNA, 26 bp, Homo sapiens
  source 1..26: mol_type = genomic DNA
gctggtgtagtggtatcatgcaagat

SEQ ID NO: 17721 - DNA, 27 bp, Homo sapiens
  source 1..27: mol_type = genomic DNA
gctggtgtagtggtatcatgcaagatt

SEQ ID NO: 17722 - DNA, 28 bp, Homo sapiens
  source 1..28: mol_type = genomic DNA
gctggtgtagtggtatcatgcaagattc

SEQ ID NO: 17723 - DNA, 29 bp, Homo sapiens
  source 1..29: mol_type = genomic DNA
gctggtgtagtggtatcatgcaagattcc

SEQ ID NO: 17724 - DNA, 30 bp, Homo sapiens
  source 1..30: mol_type = genomic DNA
gctggtgtagtggtatcatgcaagattccc

SEQ ID NO: 17725 - DNA, 31 bp, Homo sapiens
  source 1..31: mol_type = genomic DNA
gctggtgtagtggtatcatgcaagattccca

SEQ ID NO: 17726 - DNA, 34 bp, Homo sapiens
  source 1..34: mol_type = genomic DNA
gctggtgtagtggtatcatgcaagattcccattc

SEQ ID NO: 17727 - DNA, 35 bp, Homo sapiens
  source 1..35: mol_type = genomic DNA
gctggtgtagtggtatcatgcaagattcccattct

SEQ ID NO: 17728 - DNA, 45 bp, Homo sapiens
  source 1..45: mol_type = genomic DNA
gctggtgtagtggtatcatgcaagattcccattcttgcgacccgg

SEQ ID NO: 17729 - DNA, 46 bp, Homo sapiens
  source 1..46: mol_type = genomic DNA
gctggtgtagtggtatcatgcaagattcccattcttgcgacccggg

SEQ ID NO: 17730 - DNA, 47 bp, Homo sapiens
  source 1..47: mol_type = genomic DNA
gctggtgtagtggtatcatgcaagattcccattcttgcgacccgggt

SEQ ID NO: 17731 - DNA, 27 bp, Homo sapiens
  source 1..27: mol_type = genomic DNA
gctggttcgaatccggctcgaaggacc

SEQ ID NO: 17732 - DNA, 26 bp, Homo sapiens
  source 1..26: mol_type = genomic DNA
gctggttcgattccggctcgaaggac

SEQ ID NO: 17733 - DNA, 27 bp, Homo sapiens
  source 1..27: mol_type = genomic DNA
gctggttcgattccggctcgaaggacc

SEQ ID NO: 17734 - DNA, 28 bp, Homo sapiens
  source 1..28: mol_type = genomic DNA
gctggttcgattccggctcgaaggacca

SEQ ID NO: 17735 - DNA, 16 bp, Homo sapiens
  source 1..16: mol_type = genomic DNA
gctgtgatggccgagt

SEQ ID NO: 17736 - DNA, 18 bp, Homo sapiens
  source 1..18: mol_type = genomic DNA
gctgtgatggccgagtgg

SEQ ID NO: 17737 - DNA, 24 bp, Homo sapiens
  source 1..24: mol_type = genomic DNA
gctgtgatggccgagtggttaagg

SEQ ID NO: 17738 - DNA, 25 bp, Homo sapiens
  source 1..25: mol_type = genomic DNA
gctgtgatggccgagtggttaaggc

SEQ ID NO: 17739 - DNA, 33 bp, Homo sapiens
  source 1..33: mol_type = genomic DNA
gctgtgatggccgagtggttaaggtgttggact

SEQ ID NO: 17740 - DNA, 34 bp, Homo sapiens
  source 1..34: mol_type = genomic DNA
gctgtgatggccgagtggttaaggtgttggactc

SEQ ID NO: 17741 - DNA, 25 bp, Homo sapiens
  source 1..25: mol_type = genomic DNA
gctgttaactaagtgtttgtgggtt

SEQ ID NO: 17742 - DNA, 26 bp, Homo sapiens
  source 1..26: mol_type = genomic DNA
gctgttaactaagtgtttgtgggttt

SEQ ID NO: 17743 - DNA, 34 bp, Homo sapiens
  source 1..34: mol_type = genomic DNA
gctgttaactaagtgtttgtgggtttaagtccca

SEQ ID NO: 17744 - DNA, 44 bp, Homo sapiens
  source 1..44: mol_type = genomic DNA
gctgttaactaagtgtttgtgggtttaagtcccattggtctagc

SEQ ID NO: 17745 - DNA, 45 bp, Homo sapiens
  source 1..45: mol_type = genomic DNA
gctgttaactaagtgtttgtgggtttaagtcccattggtctagcc

SEQ ID NO: 17746 - DNA, 46 bp, Homo sapiens
  source 1..46: mol_type = genomic DNA
gctgttaactaagtgtttgtgggtttaagtcccattggtctagcca

SEQ ID NO: 17747 - DNA, 16 bp, Homo sapiens
  source 1..16: mol_type = genomic DNA
gcttaaacccccttat

SEQ ID NO: 17748 - DNA, 17 bp, Homo sapiens
  source 1..17: mol_type = genomic DNA
gcttaaacccccttatt

SEQ ID NO: 17749 - DNA, 19 bp, Homo sapiens
  source 1..19: mol_type = genomic DNA
gcttaaacccccttatttc

SEQ ID NO: 17750 - DNA, 20 bp, Homo sapiens
  source 1..20: mol_type = genomic DNA
gcttaaacccccttatttct

SEQ ID NO: 17751 - DNA, 21 bp, Homo sapiens
  source 1..21: mol_type = genomic DNA
gcttaaacccccttatttcta

SEQ ID NO: 17752 - DNA, 22 bp, Homo sapiens
  source 1..22: mol_type = genomic DNA
gcttaaacccccttatttctac

SEQ ID NO: 17753 - DNA, 23 bp, Homo sapiens
  source 1..23: mol_type = genomic DNA
gcttaaacccccttatttctacc

SEQ ID NO: 17754 - DNA, 24 bp, Homo sapiens
  source 1..24: mol_type = genomic DNA
gcttaaacccccttatttctacca

SEQ ID NO: 17755 - DNA, 18 bp, Homo sapiens
  source 1..18: mol_type = genomic DNA
gcttaacacaaagcaccc

SEQ ID NO: 17756 - DNA, 21 bp, Homo sapiens
  source 1..21: mol_type = genomic DNA
gcttaacacaaagcacccaac

SEQ ID NO: 17757 - DNA, 30 bp, Homo sapiens
  source 1..30: mol_type = genomic DNA
gcttaacacaaagcacccaacttacactta

SEQ ID NO: 17758 - DNA, 20 bp, Homo sapiens
  source 1..20: mol_type = genomic DNA
gcttaattaaagtggctgat

SEQ ID NO: 17759 - DNA, 23 bp, Homo sapiens
  source 1..23: mol_type = genomic DNA
gcttaattaaagtggctgatttg

SEQ ID NO: 17760 - DNA, 24 bp, Homo sapiens
  source 1..24: mol_type = genomic DNA
gcttaattaaagtggctgatttgc

SEQ ID NO: 17761 - DNA, 25 bp, Homo sapiens
  source 1..25: mol_type = genomic DNA
gcttacctcctcaaagcaatacact

SEQ ID NO: 17762 - DNA, 28 bp, Homo sapiens
  source 1..28: mol_type = genomic DNA
gcttacctcctcaaagcaatacactgaa

SEQ ID NO: 17763 - DNA, 19 bp, Homo sapiens
  source 1..19: mol_type = genomic DNA
gcttacgaccccttattta

SEQ ID NO: 17764 - DNA, 20 bp, Homo sapiens
  source 1..20: mol_type = genomic DNA
gcttacgaccccttatttac

SEQ ID NO: 17765 - DNA, 21 bp, Homo sapiens
  source 1..21: mol_type = genomic DNA
gcttacgaccccttatttacc

SEQ ID NO: 17766 - DNA, 22 bp, Homo sapiens
  source 1..22: mol_type = genomic DNA
gcttacgaccccttatttaccc

SEQ ID NO: 17767 - DNA, 23 bp, Homo sapiens
  source 1..23: mol_type = genomic DNA
gcttacgaccccttatttacccc

SEQ ID NO: 17768 - DNA, 24 bp, Homo sapiens
  source 1..24: mol_type = genomic DNA
gcttacgaccccttatttacccca

SEQ ID NO: 17769 - DNA, 23 bp, Homo sapiens
  source 1..23: mol_type = genomic DNA
gcttagcggtagagcatttgact

SEQ ID NO: 17770 - DNA, 30 bp, Homo sapiens
  source 1..30: mol_type = genomic DNA
gcttagctgttaactaagtgtttgtgggtt

SEQ ID NO: 17771 - DNA, 31 bp, Homo sapiens
  source 1..31: mol_type = genomic DNA
gcttagctgttaactaagtgtttgtgggttt

SEQ ID NO: 17772 - DNA, 32 bp, Homo sapiens
  source 1..32: mol_type = genomic DNA
gcttagctgttaactaagtgtttgtgggttta

SEQ ID NO: 17773 - DNA, 33 bp, Homo sapiens
  source 1..33: mol_type = genomic DNA
gcttagctgttaactaagtgtttgtgggtttaa

SEQ ID NO: 17774 - DNA, 37 bp, Homo sapiens
  source 1..37: mol_type = genomic DNA
gcttagctgttaactaagtgtttgtgggtttaagtcc

SEQ ID NO: 17775 - DNA, 41 bp, Homo sapiens
  source 1..41: mol_type = genomic DNA
gcttagctgttaactaagtgtttgtgggtttaagtcccatt

SEQ ID NO: 17776 - DNA, 29 bp, Homo sapiens
  source 1..29: mol_type = genomic DNA
gcttagcttaattaaagtggctgatttgc

SEQ ID NO: 17777 - DNA, 16 bp, Homo sapiens
  source 1..16: mol_type = genomic DNA
gcttcaaacctgccgg

SEQ ID NO: 17778 - DNA, 17 bp, Homo sapiens
  source 1..17: mol_type = genomic DNA
gcttcaaacctgccggg

SEQ ID NO: 17779 - DNA, 18 bp, Homo sapiens
  source 1..18: mol_type = genomic DNA
gcttcaaacctgccgggg

SEQ ID NO: 17780 - DNA, 19 bp, Homo sapiens
  source 1..19: mol_type = genomic DNA
gcttcaaacctgccggggc

SEQ ID NO: 17781 - DNA, 20 bp, Homo sapiens
  source 1..20: mol_type = genomic DNA
gcttcaaacctgccggggct

SEQ ID NO: 17782 - DNA, 21 bp, Homo sapiens
  source 1..21: mol_type = genomic DNA
gcttcaaacctgccggggctt

SEQ ID NO: 17783 - DNA, 22 bp, Homo sapiens
  source 1..22: mol_type = genomic DNA
gcttcaaacctgccggggcttc

SEQ ID NO: 17784 - DNA, 23 bp, Homo sapiens
  source 1..23: mol_type = genomic DNA
gcttcaaacctgccggggcttcc

SEQ ID NO: 17785 - DNA, 24 bp, Homo sapiens
  source 1..24: mol_type = genomic DNA
gcttcaaacctgccggggcttcca

SEQ ID NO: 17786 - DNA, 20 bp, Homo sapiens
  source 1..20: mol_type = genomic DNA
gcttcgggtgcgagaggtcc

SEQ ID NO: 17787 - DNA, 45 bp, Homo sapiens
  source 1..45: mol_type = genomic DNA
gcttcgggtgcgagaggtcccgggttcaaatcccggacgagcccc

SEQ ID NO: 17788 - DNA, 33 bp, Homo sapiens
  source 1..33: mol_type = genomic DNA
gcttctgtaatgtagtggttatcacattcgcct

SEQ ID NO: 17789 - DNA, 16 bp, Homo sapiens
  source 1..16: mol_type = genomic DNA
gcttctgtagtgtagt

SEQ ID NO: 17790 - DNA, 17 bp, Homo sapiens
  source 1..17: mol_type = genomic DNA
gcttctgtagtgtagtg

SEQ ID NO: 17791 - DNA, 18 bp, Homo sapiens
  source 1..18: mol_type = genomic DNA
gcttctgtagtgtagtgg

SEQ ID NO: 17792 - DNA, 19 bp, Homo sapiens
  source 1..19: mol_type = genomic DNA
gcttctgtagtgtagtggt

SEQ ID NO: 17793 - DNA, 23 bp, Homo sapiens
  source 1..23: mol_type = genomic DNA
gcttctgtagtgtagtggttatc

SEQ ID NO: 17794 - DNA, 24 bp, Homo sapiens
  source 1..24: mol_type = genomic DNA
gcttctgtagtgtagtggttatca

SEQ ID NO: 17795 - DNA, 25 bp, Homo sapiens
  source 1..25: mol_type = genomic DNA
gcttctgtagtgtagtggttatcac

SEQ ID NO: 17796 - DNA, 26 bp, Homo sapiens
  source 1..26: mol_type = genomic DNA
gcttctgtagtgtagtggttatcacg

SEQ ID NO: 17797 - DNA, 28 bp, Homo sapiens
  source 1..28: mol_type = genomic DNA
gcttctgtagtgtagtggttatcacgtt

SEQ ID NO: 17798 - DNA, 29 bp, Homo sapiens
  source 1..29: mol_type = genomic DNA
gcttctgtagtgtagtggttatcacgttc

SEQ ID NO: 17799 - DNA, 30 bp, Homo sapiens
  source 1..30: mol_type = genomic DNA
gcttctgtagtgtagtggttatcacgttcg

SEQ ID NO: 17800 - DNA, 31 bp, Homo sapiens
  source 1..31: mol_type = genomic DNA
gcttctgtagtgtagtggttatcacgttcgc

SEQ ID NO: 17801 - DNA, 32 bp, Homo sapiens
  source 1..32: mol_type = genomic DNA
gcttctgtagtgtagtggttatcacgttcgcc

SEQ ID NO: 17802 - DNA, 33 bp, Homo sapiens
  source 1..33: mol_type = genomic DNA
gcttctgtagtgtagtggttatcacgttcgcct

SEQ ID NO: 17803 - DNA, 34 bp, Homo sapiens
  source 1..34: mol_type = genomic DNA
gcttctgtagtgtagtggttatcacgttcgcctc

SEQ ID NO: 17804 - DNA, 35 bp, Homo sapiens
  source 1..35: mol_type = genomic DNA
gcttctgtagtgtagtggttatcacgttcgcctca

SEQ ID NO: 17805 - DNA, 36 bp, Homo sapiens
  source 1..36: mol_type = genomic DNA
gcttctgtagtgtagtggttatcacgttcgcctcac

SEQ ID NO: 17806 - DNA, 37 bp, Homo sapiens
  source 1..37: mol_type = genomic DNA
gcttctgtagtgtagtggttatcacgttcgcctcaca

SEQ ID NO: 17807 - DNA, 38 bp, Homo sapiens
  source 1..38: mol_type = genomic DNA
gcttctgtagtgtagtggttatcacgttcgcctcacac

SEQ ID NO: 17808 - DNA, 39 bp, Homo sapiens
  source 1..39: mol_type = genomic DNA
gcttctgtagtgtagtggttatcacgttcgcctcacacg

SEQ ID NO: 17809 - DNA, 40 bp, Homo sapiens
  source 1..40: mol_type = genomic DNA
gcttctgtagtgtagtggttatcacgttcgcctcacacgc

SEQ ID NO: 17810 - DNA, 41 bp, Homo sapiens
  source 1..41: mol_type = genomic DNA
gcttctgtagtgtagtggttatcacgttcgcctcacacgcg

SEQ ID NO: 17811 - DNA, 43 bp, Homo sapiens
  source 1..43: mol_type = genomic DNA
gcttctgtagtgtagtggttatcacgttcgcctcacacgcgaa

SEQ ID NO: 17812 - DNA, 22 bp, Homo sapiens
  source 1..22: mol_type = genomic DNA
gctttacacgcagaaggtcctg

SEQ ID NO: 17813 - DNA, 46 bp, Homo sapiens
  source 1..46: mol_type = genomic DNA
gctttacacgcagaaggtcctgggttcgagccccagtggaaccacc

SEQ ID NO: 17814 - DNA, 19 bp, Homo sapiens
  source 1..19: mol_type = genomic DNA
gctttcaccgccgcggccc

SEQ ID NO: 17815 - DNA, 20 bp, Homo sapiens
  source 1..20: mol_type = genomic DNA
gctttcaccgccgcggcccg

SEQ ID NO: 17816 - DNA, 24 bp, Homo sapiens
  source 1..24: mol_type = genomic DNA
gctttcaccgccgcggcccgggtt

SEQ ID NO: 17817 - DNA, 26 bp, Homo sapiens
  source 1..26: mol_type = genomic DNA
gctttcaccgccgcggcccgggttcg

SEQ ID NO: 17818 - DNA, 17 bp, Homo sapiens
  source 1..17: mol_type = genomic DNA
gctttgcacgcgtgggt

SEQ ID NO: 17819 - DNA, 31 bp, Homo sapiens
  source 1..31: mol_type = genomic DNA
gctttgcacgcgtgggttcgaatcccatcct

SEQ ID NO: 17820 - DNA, 19 bp, Homo sapiens
  source 1..19: mol_type = genomic DNA
gctttgcacgtatgaggcc

SEQ ID NO: 17821 - DNA, 20 bp, Homo sapiens
  source 1..20: mol_type = genomic DNA
gctttgcacgtatgaggccc

SEQ ID NO: 17822 - DNA, 21 bp, Homo sapiens
  source 1..21: mol_type = genomic DNA
gctttgcacgtatgaggcccc

SEQ ID NO: 17823 - DNA, 22 bp, Homo sapiens
  source 1..22: mol_type = genomic DNA
gctttgcacgtatgaggccccg

SEQ ID NO: 17824 - DNA, 23 bp, Homo sapiens
  source 1..23: mol_type = genomic DNA
gctttgcacgtatgaggccccgg

SEQ ID NO: 17825 - DNA, 24 bp, Homo sapiens
  source 1..24: mol_type = genomic DNA
gctttgcacgtatgaggccccggg

SEQ ID NO: 17826 - DNA, 25 bp, Homo sapiens
  source 1..25: mol_type = genomic DNA
gctttgcacgtatgaggccccgggt

SEQ ID NO: 17827 - DNA, 40 bp, Homo sapiens
  source 1..40: mol_type = genomic DNA
gctttgcacgtatgaggccccgggttcaatccccggcatc

SEQ ID NO: 17828 - DNA, 41 bp, Homo sapiens
  source 1..41: mol_type = genomic DNA
gctttgcacgtatgaggccccgggttcaatccccggcatct

SEQ ID NO: 17829 - DNA, 16 bp, Homo sapiens
  source 1..16: mol_type = genomic DNA
gctttggggggttcga

SEQ ID NO: 17830 - DNA, 17 bp, Homo sapiens
  source 1..17: mol_type = genomic DNA
gctttggggggttcgat

SEQ ID NO: 17831 - DNA, 18 bp, Homo sapiens
  source 1..18: mol_type = genomic DNA
gctttggggggttcgatt

SEQ ID NO: 17832 - DNA, 19 bp, Homo sapiens
  source 1..19: mol_type = genomic DNA
gctttggggggttcgattc

SEQ ID NO: 17833 - DNA, 20 bp, Homo sapiens
  source 1..20: mol_type = genomic DNA
gctttggggggttcgattcc

SEQ ID NO: 17834 - DNA, 21 bp, Homo sapiens
  source 1..21: mol_type = genomic DNA
gctttggggggttcgattcct

SEQ ID NO: 17835 - DNA, 23 bp, Homo sapiens
  source 1..23: mol_type = genomic DNA
gctttggggggttcgattccttc

SEQ ID NO: 17836 - DNA, 24 bp, Homo sapiens
  source 1..24: mol_type = genomic DNA
gctttggggggttcgattccttcc

SEQ ID NO: 17837 - DNA, 25 bp, Homo sapiens
  source 1..25: mol_type = genomic DNA
gctttggggggttcgattccttcct

SEQ ID NO: 17838 - DNA, 26 bp, Homo sapiens
  source 1..26: mol_type = genomic DNA
gctttggggggttcgattccttcctt

SEQ ID NO: 17839 - DNA, 27 bp, Homo sapiens
  source 1..27: mol_type = genomic DNA
gctttggggggttcgattccttccttt

SEQ ID NO: 17840 - DNA, 31 bp, Homo sapiens
  source 1..31: mol_type = genomic DNA
gctttggggggttcgattccttccttttttg

SEQ ID NO: 17841 - DNA, 32 bp, Homo sapiens
  source 1..32: mol_type = genomic DNA
gctttggggggttcgattccttccttttttgc

SEQ ID NO: 17842 - DNA, 33 bp, Homo sapiens
  source 1..33: mol_type = genomic DNA
gctttggggggttcgattccttccttttttgcc

SEQ ID NO: 17843 - DNA, 34 bp, Homo sapiens
  source 1..34: mol_type = genomic DNA
gctttggggggttcgattccttccttttttgcca

SEQ ID NO: 17844 - DNA, 16 bp, Homo sapiens
  source 1..16: mol_type = genomic DNA
gctttgggtgctaatg

SEQ ID NO: 17845 - DNA, 18 bp, Homo sapiens
  source 1..18: mol_type = genomic DNA
gctttgggtgctaatggt

SEQ ID NO: 17846 - DNA, 21 bp, Homo sapiens
  source 1..21: mol_type = genomic DNA
gctttgggtgctaatggtgga

SEQ ID NO: 17847 - DNA, 22 bp, Homo sapiens
  source 1..22: mol_type = genomic DNA
gctttgggtgctaatggtggag

SEQ ID NO: 17848 - DNA, 23 bp, Homo sapiens
  source 1..23: mol_type = genomic DNA
gctttgggtgctaatggtggagt

SEQ ID NO: 17849 - DNA, 24 bp, Homo sapiens
  source 1..24: mol_type = genomic DNA
gctttgggtgctaatggtggagtt

SEQ ID NO: 17850 - DNA, 25 bp, Homo sapiens
  source 1..25: mol_type = genomic DNA
gctttgggtgctaatggtggagtta

SEQ ID NO: 17851 - DNA, 26 bp, Homo sapiens
  source 1..26: mol_type = genomic DNA
gctttgggtgctaatggtggagttaa

SEQ ID NO: 17852 - DNA, 27 bp, Homo sapiens
  source 1..27: mol_type = genomic DNA
gctttgggtgctaatggtggagttaaa

SEQ ID NO: 17853 - DNA, 28 bp, Homo sapiens
  source 1..28: mol_type = genomic DNA
gctttgggtgctaatggtggagttaaag

SEQ ID NO: 17854 - DNA, 29 bp, Homo sapiens
  source 1..29: mol_type = genomic DNA
gctttgggtgctaatggtggagttaaaga

SEQ ID NO: 17855 - DNA, 30 bp, Homo sapiens
  source 1..30: mol_type = genomic DNA
gctttgggtgctaatggtggagttaaagac

SEQ ID NO: 17856 - DNA, 31 bp, Homo sapiens
  source 1..31: mol_type = genomic DNA
gctttgggtgctaatggtggagttaaagact

SEQ ID NO: 17857 - DNA, 32 bp, Homo sapiens
  source 1..32: mol_type = genomic DNA
gctttgggtgctaatggtggagttaaagactt

SEQ ID NO: 17858 - DNA, 33 bp, Homo sapiens
  source 1..33: mol_type = genomic DNA
gctttgggtgctaatggtggagttaaagacttt

SEQ ID NO: 17859 - DNA, 35 bp, Homo sapiens
  source 1..35: mol_type = genomic DNA
gctttgggtgctaatggtggagttaaagacttttt

SEQ ID NO: 17860 - DNA, 38 bp, Homo sapiens
  source 1..38: mol_type = genomic DNA
gctttgggtgctaatggtggagttaaagactttttctc

SEQ ID NO: 17861 - DNA, 40 bp, Homo sapiens
  source 1..40: mol_type = genomic DNA
gctttgggtgctaatggtggagttaaagactttttctctg

SEQ ID NO: 17862 - DNA, 41 bp, Homo sapiens
  source 1..41: mol_type = genomic DNA
gctttgggtgctaatggtggagttaaagactttttctctga

SEQ ID NO: 17863 - DNA, 42 bp, Homo sapiens
  source 1..42: mol_type = genomic DNA
gctttgggtgctaatggtggagttaaagactttttctctgac

SEQ ID NO: 17864 - DNA, 43 bp, Homo sapiens
  source 1..43: mol_type = genomic DNA
gctttgggtgctaatggtggagttaaagactttttctctgacc

SEQ ID NO: 17865 - DNA, 44 bp, Homo sapiens
  source 1..44: mol_type = genomic DNA
gctttgggtgctaatggtggagttaaagactttttctctgacca

SEQ ID NO: 17866 - DNA, 26 bp, Homo sapiens
  source 1..26: mol_type = genomic DNA
ggaaaaagtcatggaggccatggggt

SEQ ID NO: 17867 - DNA, 27 bp, Homo sapiens
  source 1..27: mol_type = genomic DNA
ggaaaaagtcatggaggccatggggtt

SEQ ID NO: 17868 - DNA, 16 bp, Homo sapiens
  source 1..16: mol_type = genomic DNA
ggaagcgtgctgggcc

SEQ ID NO: 17869 - DNA, 17 bp, Homo sapiens
  source 1..17: mol_type = genomic DNA
ggaagcgtgctgggccc

SEQ ID NO: 17870 - DNA, 18 bp, Homo sapiens
  source 1..18: mol_type = genomic DNA
ggaagcgtgctgggccca

SEQ ID NO: 17871 - DNA, 19 bp, Homo sapiens
  source 1..19: mol_type = genomic DNA
ggaagcgtgctgggcccat

SEQ ID NO: 17872 - DNA, 23 bp, Homo sapiens
  source 1..23: mol_type = genomic DNA
ggaagcgtgctgggcccataacc

SEQ ID NO: 17873 - DNA, 24 bp, Homo sapiens
  source 1..24: mol_type = genomic DNA
ggaagcgtgctgggcccataaccc

SEQ ID NO: 17874 - DNA, 25 bp, Homo sapiens
  source 1..25: mol_type = genomic DNA
ggaagcgtgctgggcccataaccca

SEQ ID NO: 17875 - DNA, 27 bp, Homo sapiens
  source 1..27: mol_type = genomic DNA
ggaagcgtgctgggcccataacccaga

SEQ ID NO: 17876 - DNA, 32 bp, Homo sapiens
  source 1..32: mol_type = genomic DNA
ggaagcgtgctgggcccataacccagaggtcg

SEQ ID NO: 17877 - DNA, 33 bp, Homo sapiens
  source 1..33: mol_type = genomic DNA
ggaagcgtgctgggcccataacccagaggtcga

SEQ ID NO: 17878 - DNA, 34 bp, Homo sapiens
  source 1..34: mol_type = genomic DNA
ggaagcgtgctgggcccataacccagaggtcgat

SEQ ID NO: 17879 - DNA, 35 bp, Homo sapiens
  source 1..35: mol_type = genomic DNA
ggaagcgtgctgggcccataacccagaggtcgatg

SEQ ID NO: 17880 - DNA, 36 bp, Homo sapiens
  source 1..36: mol_type = genomic DNA
ggaagcgtgctgggcccataacccagaggtcgatgg

SEQ ID NO: 17881 - DNA, 37 bp, Homo sapiens
  source 1..37: mol_type = genomic DNA
ggaagcgtgctgggcccataacccagaggtcgatgga

SEQ ID NO: 17882 - DNA, 38 bp, Homo sapiens
  source 1..38: mol_type = genomic DNA
ggaagcgtgctgggcccataacccagaggtcgatggat

SEQ ID NO: 17883 - DNA, 39 bp, Homo sapiens
  source 1..39: mol_type = genomic DNA
ggaagcgtgctgggcccataacccagaggtcgatggatc

SEQ ID NO: 17884 - DNA, 40 bp, Homo sapiens
  source 1..40: mol_type = genomic DNA
ggaagcgtgctgggcccataacccagaggtcgatggatcg

SEQ ID NO: 17885 - DNA, 21 bp, Homo sapiens
  source 1..21: mol_type = genomic DNA
ggaattagctcaagtggtaga

SEQ ID NO: 17886 - DNA, 16 bp, Homo sapiens
  source 1..16: mol_type = genomic DNA
ggacgagcgcgctgga

SEQ ID NO: 17887 - DNA, 16 bp, Homo sapiens
  source 1..16: mol_type = genomic DNA
ggactctgaatccagc

SEQ ID NO: 17888 - DNA, 18 bp, Homo sapiens
  source 1..18: mol_type = genomic DNA
ggactctgaatccagcga

SEQ ID NO: 17889 - DNA, 21 bp, Homo sapiens
  source 1..21: mol_type = genomic DNA
ggactctgaatccagcgatcc

SEQ ID NO: 17890 - DNA, 24 bp, Homo sapiens
  source 1..24: mol_type = genomic DNA
ggactctgaatccagcgatccgag

SEQ ID NO: 17891 - DNA, 25 bp, Homo sapiens
  source 1..25: mol_type = genomic DNA
ggactctgaatccagcgatccgagt

SEQ ID NO: 17892 - DNA, 27 bp, Homo sapiens
  source 1..27: mol_type = genomic DNA
ggactctgaatccagcgatccgagttc

SEQ ID NO: 17893 - DNA, 44 bp, Homo sapiens
  source 1..44: mol_type = genomic DNA
ggactctgaatccagcgatccgagttcaaatctcggtggaacct

SEQ ID NO: 17894 - DNA, 45 bp, Homo sapiens
  source 1..45: mol_type = genomic DNA
ggactctgaatccagcgatccgagttcaaatctcggtggaacctc

SEQ ID NO: 17895 - DNA, 46 bp, Homo sapiens
  source 1..46: mol_type = genomic DNA
ggactctgaatccagcgatccgagttcaaatctcggtggaacctcc

SEQ ID NO: 17896 - DNA, 47 bp, Homo sapiens
  source 1..47: mol_type = genomic DNA
ggactctgaatccagcgatccgagttcaaatctcggtggaacctcca

SEQ ID NO: 17897 - DNA, 38 bp, Homo sapiens
  source 1..38: mol_type = genomic DNA
ggactctgaatccagcgatccgagttcgagtctcggtg

SEQ ID NO: 17898 - DNA, 44 bp, Homo sapiens
  source 1..44: mol_type = genomic DNA
ggactctgaatccagcgatccgagttcgagtctcggtggaacct

SEQ ID NO: 17899 - DNA, 46 bp, Homo sapiens
  source 1..46: mol_type = genomic DNA
ggactctgaatccagcgatccgagttcgagtctcggtggaacctcc

SEQ ID NO: 17900 - DNA, 41 bp, Homo sapiens
  source 1..41: mol_type = genomic DNA
ggactgtaaatctaaagacaggggttaggcctctttttacc

SEQ ID NO: 17901 - DNA, 44 bp, Homo sapiens
  source 1..44: mol_type = genomic DNA
ggactgtaaatctaaagacaggggttaggcctctttttaccacc

SEQ ID NO: 17902 - DNA, 27 bp, Homo sapiens
  source 1..27: mol_type = genomic DNA
ggagaaagctcacaagaactgctaact

SEQ ID NO: 17903 - DNA, 24 bp, Homo sapiens
  source 1..24: mol_type = genomic DNA
ggagaccggggttcaattccccga

SEQ ID NO: 17904 - DNA, 25 bp, Homo sapiens
  source 1..25: mol_type = genomic DNA
ggagaccggggttcaattccccgac

SEQ ID NO: 17905 - DNA, 26 bp, Homo sapiens
  source 1..26: mol_type = genomic DNA
ggagaccggggttcaattccccgacg

SEQ ID NO: 17906 - DNA, 28 bp, Homo sapiens
  source 1..28: mol_type = genomic DNA
ggagaccggggttcaattccccgacggg

SEQ ID NO: 17907 - DNA, 29 bp, Homo sapiens
  source 1..29: mol_type = genomic DNA
ggagaccggggttcaattccccgacgggg

SEQ ID NO: 17908 - DNA, 30 bp, Homo sapiens
  source 1..30: mol_type = genomic DNA
ggagaccggggttcaattccccgacgggga

SEQ ID NO: 17909 - DNA, 31 bp, Homo sapiens
  source 1..31: mol_type = genomic DNA
ggagaccggggttcaattccccgacggggag

SEQ ID NO: 17910 - DNA, 32 bp, Homo sapiens
  source 1..32: mol_type = genomic DNA
ggagaccggggttcaattccccgacggggagc

SEQ ID NO: 17911 - DNA, 33 bp, Homo sapiens
  source 1..33: mol_type = genomic DNA
ggagaccggggttcaattccccgacggggagcc

SEQ ID NO: 17912 - DNA, 34 bp, Homo sapiens
  source 1..34: mol_type = genomic DNA
ggagaccggggttcaattccccgacggggagcca

SEQ ID NO: 17913 - DNA, 19 bp, Homo sapiens
  source 1..19: mol_type = genomic DNA
ggagaccggggttcgattc

SEQ ID NO: 17914 - DNA, 25 bp, Homo sapiens
  source 1..25: mol_type = genomic DNA
ggagaccggggttcgattccccgac

SEQ ID NO: 17915 - DNA, 26 bp, Homo sapiens
  source 1..26: mol_type = genomic DNA
ggagaccggggttcgattccccgacg

SEQ ID NO: 17916 - DNA, 27 bp, Homo sapiens
  source 1..27: mol_type = genomic DNA
ggagaccggggttcgattccccgacgg

SEQ ID NO: 17917 - DNA, 28 bp, Homo sapiens
  source 1..28: mol_type = genomic DNA
ggagaccggggttcgattccccgacggg

SEQ ID NO: 17918 - DNA, 29 bp, Homo sapiens
  source 1..29: mol_type = genomic DNA
ggagaccggggttcgattccccgacgggg

SEQ ID NO: 17919 - DNA, 30 bp, Homo sapiens
  source 1..30: mol_type = genomic DNA
ggagaccggggttcgattccccgacgggga

SEQ ID NO: 17920 - DNA, 31 bp, Homo sapiens
  source 1..31: mol_type = genomic DNA
ggagaccggggttcgattccccgacggggag

SEQ ID NO: 17921 - DNA, 32 bp, Homo sapiens
  source 1..32: mol_type = genomic DNA
ggagaccggggttcgattccccgacggggagc

SEQ ID NO: 17922 - DNA, 33 bp, Homo sapiens
  source 1..33: mol_type = genomic DNA
ggagaccggggttcgattccccgacggggagcc

SEQ ID NO: 17923 - DNA, 34 bp, Homo sapiens
  source 1..34: mol_type = genomic DNA
ggagaccggggttcgattccccgacggggagcca

SEQ ID NO: 17924 - DNA, 29 bp, Homo sapiens
  source 1..29: mol_type = genomic DNA
ggagagcgttagactgaagatctaaaggt

SEQ ID NO: 17925 - DNA, 16 bp, Homo sapiens
  source 1..16: mol_type = genomic DNA
ggagatcctgggttcg

SEQ ID NO: 17926 - DNA, 30 bp, Homo sapiens
  source 1..30: mol_type = genomic DNA
ggagatcctgggttcgaatcccagcggggc

SEQ ID NO: 17927 - DNA, 31 bp, Homo sapiens
  source 1..31: mol_type = genomic DNA
ggagatcctgggttcgaatcccagcggggcc

SEQ ID NO: 17928 - DNA, 32 bp, Homo sapiens
  source 1..32: mol_type = genomic DNA
ggagatcctgggttcgaatcccagcggggcct

SEQ ID NO: 17929 - DNA, 33 bp, Homo sapiens
  source 1..33: mol_type = genomic DNA
ggagatcctgggttcgaatcccagcggggcctc

SEQ ID NO: 17930 - DNA, 30 bp, Homo sapiens
  source 1..30: mol_type = genomic DNA
ggagatcctgggttcgaatcccagcggtgc

SEQ ID NO: 17931 - DNA, 31 bp, Homo sapiens
  source 1..31: mol_type = genomic DNA
ggagatcctgggttcgaatcccagcggtgcc

SEQ ID NO: 17932 - DNA, 32 bp, Homo sapiens
  source 1..32: mol_type = genomic DNA
ggagatcctgggttcgaatcccagcggtgcct

SEQ ID NO: 17933 - DNA, 33 bp, Homo sapiens
  source 1..33: mol_type = genomic DNA
ggagatcctgggttcgaatcccagcggtgcctc

SEQ ID NO: 17934 - DNA, 34 bp, Homo sapiens
  source 1..34: mol_type = genomic DNA
ggagatcctgggttcgaatcccagcggtgcctcc

SEQ ID NO: 17935 - DNA, 21 bp, Homo sapiens
  source 1..21: mol_type = genomic DNA
ggagatgaaaacctttttcca

SEQ ID NO: 17936 - DNA, 23 bp, Homo sapiens
  source 1..23: mol_type = genomic DNA
ggagatgaaaacctttttccaag

SEQ ID NO: 17937 - DNA, 24 bp, Homo sapiens
  source 1..24: mol_type = genomic DNA
ggagatgaaaacctttttccaagg

SEQ ID NO: 17938 - DNA, 26 bp, Homo sapiens
  source 1..26: mol_type = genomic DNA
ggagatgaaaacctttttccaaggac

SEQ ID NO: 17939 - DNA, 27 bp, Homo sapiens
  source 1..27: mol_type = genomic DNA
ggagatgaaaacctttttccaaggaca

SEQ ID NO: 17940 - DNA, 28 bp, Homo sapiens
  source 1..28: mol_type = genomic DNA
ggagatgaaaacctttttccaaggacac

SEQ ID NO: 17941 - DNA, 29 bp, Homo sapiens
  source 1..29: mol_type = genomic DNA
ggagatgaaaacctttttccaaggacacc

SEQ ID NO: 17942 - DNA, 30 bp, Homo sapiens
  source 1..30: mol_type = genomic DNA
ggagatgaaaacctttttccaaggacacca

SEQ ID NO: 17943 - DNA, 16 bp, Homo sapiens
  source 1..16: mol_type = genomic DNA
ggagatttcaacttaa

SEQ ID NO: 17944 - DNA, 17 bp, Homo sapiens
  source 1..17: mol_type = genomic DNA
ggagatttcaacttaac

SEQ ID NO: 17945 - DNA, 18 bp, Homo sapiens
  source 1..18: mol_type = genomic DNA
ggagatttcaacttaact

SEQ ID NO: 17946 - DNA, 20 bp, Homo sapiens
  source 1..20: mol_type = genomic DNA
ggagatttcaacttaacttg

SEQ ID NO: 17947 - DNA, 21 bp, Homo sapiens
  source 1..21: mol_type = genomic DNA
ggagatttcaacttaacttga

SEQ ID NO: 17948 - DNA, 22 bp, Homo sapiens
  source 1..22: mol_type = genomic DNA
ggagatttcaacttaacttgac

SEQ ID NO: 17949 - DNA, 23 bp, Homo sapiens
  source 1..23: mol_type = genomic DNA
ggagatttcaacttaacttgacc

SEQ ID NO: 17950 - DNA, 24 bp, Homo sapiens
  source 1..24: mol_type = genomic DNA
ggagatttcaacttaacttgaccg

SEQ ID NO: 17951 - DNA, 25 bp, Homo sapiens
  source 1..25: mol_type = genomic DNA
ggagatttcaacttaacttgaccgc

SEQ ID NO: 17952 - DNA, 26 bp, Homo sapiens
  source 1..26: mol_type = genomic DNA
ggagatttcaacttaacttgaccgct

SEQ ID NO: 17953 - DNA, 27 bp, Homo sapiens
  source 1..27: mol_type = genomic DNA
ggagatttcaacttaacttgaccgctc

SEQ ID NO: 17954 - DNA, 28 bp, Homo sapiens
  source 1..28: mol_type = genomic DNA
ggagatttcaacttaacttgaccgctct

SEQ ID NO: 17955 - DNA, 29 bp, Homo sapiens
  source 1..29: mol_type = genomic DNA
ggagatttcaacttaacttgaccgctctg

SEQ ID NO: 17956 - DNA, 30 bp, Homo sapiens
  source 1..30: mol_type = genomic DNA
ggagatttcaacttaacttgaccgctctga

SEQ ID NO: 17957 - DNA, 31 bp, Homo sapiens
  source 1..31: mol_type = genomic DNA
ggagatttcaacttaacttgaccgctctgac

SEQ ID NO: 17958 - DNA, 32 bp, Homo sapiens
  source 1..32: mol_type = genomic DNA
ggagatttcaacttaacttgaccgctctgacc

SEQ ID NO: 17959 - DNA, 33 bp, Homo sapiens
  source 1..33: mol_type = genomic DNA
ggagatttcaacttaacttgaccgctctgacca

SEQ ID NO: 17960 - DNA, 17 bp, Homo sapiens
  source 1..17: mol_type = genomic DNA
ggagctggggattgtgg

SEQ ID NO: 17961 - DNA, 19 bp, Homo sapiens
  source 1..19: mol_type = genomic DNA
ggagctggggattgtgggt

SEQ ID NO: 17962 - DNA, 28 bp, Homo sapiens
  source 1..28: mol_type = genomic DNA
ggagctggggattgtgggttcgagtccc

SEQ ID NO: 17963 - DNA, 40 bp, Homo sapiens
  source 1..40: mol_type = genomic DNA
ggagctggggattgtgggttcgagtcccatctgggtcgcc

SEQ ID NO: 17964 - DNA, 41 bp, Homo sapiens
  source 1..41: mol_type = genomic DNA
ggagctggggattgtgggttcgagtcccatctgggtcgcca

SEQ ID NO: 17965 - DNA, 16 bp, Homo sapiens
  source 1..16: mol_type = genomic DNA
ggagcttaaaccccct

SEQ ID NO: 17966 - DNA, 22 bp, Homo sapiens
  source 1..22: mol_type = genomic DNA
ggagcttaaacccccttatttc

SEQ ID NO: 17967 - DNA, 23 bp, Homo sapiens
  source 1..23: mol_type = genomic DNA
ggagcttaaacccccttatttct

SEQ ID NO: 17968 - DNA, 24 bp, Homo sapiens
  source 1..24: mol_type = genomic DNA
ggagcttaaacccccttatttcta

SEQ ID NO: 17969 - DNA, 25 bp, Homo sapiens
  source 1..25: mol_type = genomic DNA
ggagcttaaacccccttatttctac

SEQ ID NO: 17970 - DNA, 26 bp, Homo sapiens
  source 1..26: mol_type = genomic DNA
ggagcttaaacccccttatttctacc

SEQ ID NO: 17971 - DNA, 27 bp, Homo sapiens
  source 1..27: mol_type = genomic DNA
ggagcttaaacccccttatttctacca

SEQ ID NO: 17972 - DNA, 29 bp, Homo sapiens
  source 1..29: mol_type = genomic DNA
ggaggcccgggttcgattcccggccaatg

SEQ ID NO: 17973 - DNA, 33 bp, Homo sapiens
  source 1..33: mol_type = genomic DNA
ggaggcccgggttcgattcccggccaatgcacc

SEQ ID NO: 17974 - DNA, 34 bp, Homo sapiens
  source 1..34: mol_type = genomic DNA
ggaggcccgggttcgattcccggccaatgcacca

SEQ ID NO: 17975 - DNA, 21 bp, Homo sapiens
  source 1..21: mol_type = genomic DNA
ggaggcgtgggttcgaatccc

SEQ ID NO: 17976 - DNA, 24 bp, Homo sapiens
  source 1..24: mol_type = genomic DNA
ggaggcgtgggttcgaatcccact

SEQ ID NO: 17977 - DNA, 31 bp, Homo sapiens
  source 1..31: mol_type = genomic DNA
ggaggcgtgggttcgaatcccacttctgaca

SEQ ID NO: 17978 - DNA, 32 bp, Homo sapiens
  source 1..32: mol_type = genomic DNA
ggaggcgtgggttcgaatcccacttctgacac

SEQ ID NO: 17979 - DNA, 33 bp, Homo sapiens
  source 1..33: mol_type = genomic DNA
ggaggcgtgggttcgaatcccacttctgacacc

SEQ ID NO: 17980 - DNA, 34 bp, Homo sapiens
  source 1..34: mol_type = genomic DNA
ggaggcgtgggttcgaatcccacttctgacacca

SEQ ID NO: 17981 - DNA, 20 bp, Homo sapiens
  source 1..20: mol_type = genomic DNA
ggagttaaagactttttctc

SEQ ID NO: 17982 - DNA, 23 bp, Homo sapiens
  source 1..23: mol_type = genomic DNA
ggagttaaagactttttctctga

SEQ ID NO: 17983 - DNA, 24 bp, Homo sapiens
  source 1..24: mol_type = genomic DNA
ggagttaaagactttttctctgac

SEQ ID NO: 17984 - DNA, 25 bp, Homo sapiens
  source 1..25: mol_type = genomic DNA
ggagttaaagactttttctctgacc

SEQ ID NO: 17985 - DNA, 26 bp, Homo sapiens
  source 1..26: mol_type = genomic DNA
ggagttaaagactttttctctgacca

SEQ ID NO: 17986 - DNA, 22 bp, Homo sapiens
  source 1..22: mol_type = genomic DNA
ggataacagctatccattggtc

SEQ ID NO: 17987 - DNA, 23 bp, Homo sapiens
  source 1..23: mol_type = genomic DNA
ggataacagctatccattggtct

SEQ ID NO: 17988 - DNA, 24 bp, Homo sapiens
  source 1..24: mol_type = genomic DNA
ggataacagctatccattggtctt

SEQ ID NO: 17989 - DNA, 25 bp, Homo sapiens
  source 1..25: mol_type = genomic DNA
ggataacagctatccattggtctta

SEQ ID NO: 17990 - DNA, 26 bp, Homo sapiens
  source 1..26: mol_type = genomic DNA
ggataacagctatccattggtcttag

SEQ ID NO: 17991 - DNA, 29 bp, Homo sapiens
  source 1..29: mol_type = genomic DNA
ggataacagctatccattggtcttaggcc

SEQ ID NO: 17992 - DNA, 31 bp, Homo sapiens
  source 1..31: mol_type = genomic DNA
ggataacagctatccattggtcttaggcccc

SEQ ID NO: 17993 - DNA, 17 bp, Homo sapiens
  source 1..17: mol_type = genomic DNA
ggataacgcgtctgact

SEQ ID NO: 17994 - DNA, 20 bp, Homo sapiens
  source 1..20: mol_type = genomic DNA
ggataacgcgtctgactacg

SEQ ID NO: 17995 - DNA, 32 bp, Homo sapiens
  source 1..32: mol_type = genomic DNA
ggataacgcgtctgactacggatcagaagatt

SEQ ID NO: 17996 - DNA, 18 bp, Homo sapiens
  source 1..18: mol_type = genomic DNA
ggataaggcactggcctc

SEQ ID NO: 17997 - DNA, 17 bp, Homo sapiens
  source 1..17: mol_type = genomic DNA
ggataaggcatcagcct

SEQ ID NO: 17998 - DNA, 19 bp, Homo sapiens
  source 1..19: mol_type = genomic DNA
ggataaggcatcagcctcc

SEQ ID NO: 17999 - DNA, 26 bp, Homo sapiens
  source 1..26: mol_type = genomic DNA
ggataaggcatcagcctccggagctg

SEQ ID NO: 18000 - DNA, 31 bp, Homo sapiens
  source 1..31: mol_type = genomic DNA
ggataaggcatcagcctccggagctggggat

SEQ ID NO: 18001 - DNA, 33 bp, Homo sapiens
  source 1..33: mol_type = genomic DNA
ggataaggcatcagcctccggagctggggattg

SEQ ID NO: 18002 - DNA, 34 bp, Homo sapiens
  source 1..34: mol_type = genomic DNA
ggataaggcatcagcctccggagctggggattgt

SEQ ID NO: 18003 - DNA, 20 bp, Homo sapiens
  source 1..20: mol_type = genomic DNA
ggataaggcgtctgattccg

SEQ ID NO: 18004 - DNA, 16 bp, Homo sapiens
  source 1..16: mol_type = genomic DNA
ggatagcgcattggac

SEQ ID NO: 18005 - DNA, 17 bp, Homo sapiens
  source 1..17: mol_type = genomic DNA
ggatagcgcattggact

SEQ ID NO: 18006 - DNA, 19 bp, Homo sapiens
  source 1..19: mol_type = genomic DNA
ggatagcgcattggacttc

SEQ ID NO: 18007 - DNA, 23 bp, Homo sapiens
  source 1..23: mol_type = genomic DNA
ggatagcgcattggacttctaat

SEQ ID NO: 18008 - DNA, 16 bp, Homo sapiens
  source 1..16: mol_type = genomic DNA
ggatagctcagtcggt

SEQ ID NO: 18009 - DNA, 17 bp, Homo sapiens
  source 1..17: mol_type = genomic DNA
ggatagctcagtcggta

SEQ ID NO: 18010 - DNA, 18 bp, Homo sapiens
  source 1..18: mol_type = genomic DNA
ggatagctcagtcggtag

SEQ ID NO: 18011 - DNA, 19 bp, Homo sapiens
  source 1..19: mol_type = genomic DNA
ggatagctcagtcggtaga

SEQ ID NO: 18012 - DNA, 20 bp, Homo sapiens
  source 1..20: mol_type = genomic DNA
ggatagctcagtcggtagag

SEQ ID NO: 18013 - DNA, 21 bp, Homo sapiens
  source 1..21: mol_type = genomic DNA
ggatagctcagtcggtagagc

SEQ ID NO: 18014 - DNA, 24 bp, Homo sapiens
  source 1..24: mol_type = genomic DNA
ggatagctcagtcggtagagcatc

SEQ ID NO: 18015 - DNA, 25 bp, Homo sapiens
  source 1..25: mol_type = genomic DNA
ggatagctcagtcggtagagcatca

SEQ ID NO: 18016 - DNA, 27 bp, Homo sapiens
  source 1..27: mol_type = genomic DNA
ggatagctcagtcggtagagcatcaga

SEQ ID NO: 18017 - DNA, 28 bp, Homo sapiens
  source 1..28: mol_type = genomic DNA
ggatagctcagtcggtagagcatcagac

SEQ ID NO: 18018 - DNA, 29 bp, Homo sapiens
  source 1..29: mol_type = genomic DNA
ggatagctcagtcggtagagcatcagact

SEQ ID NO: 18019 - DNA, 30 bp, Homo sapiens
  source 1..30: mol_type = genomic DNA
ggatagctcagtcggtagagcatcagactt

SEQ ID NO: 18020 - DNA, 31 bp, Homo sapiens
  source 1..31: mol_type = genomic DNA
ggatagctcagtcggtagagcatcagacttt

SEQ ID NO: 18021 - DNA, 32 bp, Homo sapiens
  source 1..32: mol_type = genomic DNA
ggatagctcagtcggtagagcatcagactttt

SEQ ID NO: 18022 - DNA, 24 bp, Homo sapiens
  source 1..24: mol_type = genomic DNA
ggatagctcagttggtagagcatc

SEQ ID NO: 18023 - DNA, 21 bp, Homo sapiens
  source 1..21: mol_type = genomic DNA
ggatcagaagattccaggttc

SEQ ID NO: 18024 - DNA, 22 bp, Homo sapiens
  source 1..22: mol_type = genomic DNA
ggatcagaagattccaggttcg

SEQ ID NO: 18025 - DNA, 24 bp, Homo sapiens
  source 1..24: mol_type = genomic DNA
ggatcagaagattccaggttcgac

SEQ ID NO: 18026 - DNA, 38 bp, Homo sapiens
  source 1..38: mol_type = genomic DNA
ggatcagaagattccaggttcgactcctggctggctcg

SEQ ID NO: 18027 - DNA, 40 bp, Homo sapiens
  source 1..40: mol_type = genomic DNA
ggatcagaagattccaggttcgactcctggctggctcgcc

SEQ ID NO: 18028 - DNA, 41 bp, Homo sapiens
  source 1..41: mol_type = genomic DNA
ggatcagaagattccaggttcgactcctggctggctcgcca

SEQ ID NO: 18029 - DNA, 21 bp, Homo sapiens
  source 1..21: mol_type = genomic DNA
ggatcagaagattctaggttc

SEQ ID NO: 18030 - DNA, 22 bp, Homo sapiens
  source 1..22: mol_type = genomic DNA
ggatcagaagattctaggttcg

SEQ ID NO: 18031 - DNA, 31 bp, Homo sapiens
  source 1..31: mol_type = genomic DNA
ggatcagaagattctaggttcgactcctggc

SEQ ID NO: 18032 - DNA, 37 bp, Homo sapiens
  source 1..37: mol_type = genomic DNA
ggatcagaagattctaggttcgactcctggctggctc

SEQ ID NO: 18033 - DNA, 38 bp, Homo sapiens
  source 1..38: mol_type = genomic DNA
ggatcagaagattctaggttcgactcctggctggctcg

SEQ ID NO: 18034 - DNA, 39 bp, Homo sapiens
  source 1..39: mol_type = genomic DNA
ggatcagaagattctaggttcgactcctggctggctcgc

SEQ ID NO: 18035 - DNA, 40 bp, Homo sapiens
  source 1..40: mol_type = genomic DNA
ggatcagaagattctaggttcgactcctggctggctcgcc

SEQ ID NO: 18036 - DNA, 41 bp, Homo sapiens
  source 1..41: mol_type = genomic DNA
ggatcagaagattctaggttcgactcctggctggctcgcca

SEQ ID NO: 18037 - DNA, 19 bp, Homo sapiens
  source 1..19: mol_type = genomic DNA
ggatcagaagattgagggt

SEQ ID NO: 18038 - DNA, 20 bp, Homo sapiens
  source 1..20: mol_type = genomic DNA
ggatcagaagattgagggtt

SEQ ID NO: 18039 - DNA, 21 bp, Homo sapiens
  source 1..21: mol_type = genomic DNA
ggatcagaagattgagggttc

SEQ ID NO: 18040 - DNA, 22 bp, Homo sapiens
  source 1..22: mol_type = genomic DNA
ggatcagaagattgagggttcg

SEQ ID NO: 18041 - DNA, 29 bp, Homo sapiens
  source 1..29: mol_type = genomic DNA
ggatcagaagattgagggttcgagtccct

SEQ ID NO: 18042 - DNA, 39 bp, Homo sapiens
  source 1..39: mol_type = genomic DNA
ggatcagaagattgagggttcgagtcccttcgtggtcgc

SEQ ID NO: 18043 - DNA, 40 bp, Homo sapiens
  source 1..40: mol_type = genomic DNA
ggatcagaagattgagggttcgagtcccttcgtggtcgcc

SEQ ID NO: 18044 - DNA, 41 bp, Homo sapiens
  source 1..41: mol_type = genomic DNA
ggatcagaagattgagggttcgagtcccttcgtggtcgcca

SEQ ID NO: 18045 - DNA, 20 bp, Homo sapiens
  source 1..20: mol_type = genomic DNA
ggatcagaagattgcaggtt

SEQ ID NO: 18046 - DNA, 21 bp, Homo sapiens
  source 1..21: mol_type = genomic DNA
ggatcagaagattgcaggttc

SEQ ID NO: 18047 - DNA, 29 bp, Homo sapiens
  source 1..29: mol_type = genomic DNA
ggatcagaagattgcaggttcgagtcctg

SEQ ID NO: 18048 - DNA, 40 bp, Homo sapiens
  source 1..40: mol_type = genomic DNA
ggatcagaagattgcaggttcgagtcctgccgcggtcgcc

SEQ ID NO: 18049 - DNA, 16 bp, Homo sapiens
  source 1..16: mol_type = genomic DNA
ggatggaggcgtgggt

SEQ ID NO: 18050 - DNA, 17 bp, Homo sapiens
  source 1..17: mol_type = genomic DNA
ggatggaggcgtgggtt

SEQ ID NO: 18051 - DNA, 18 bp, Homo sapiens
  source 1..18: mol_type = genomic DNA
ggatggaggcgtgggttc

SEQ ID NO: 18052 - DNA, 35 bp, Homo sapiens
  source 1..35: mol_type = genomic DNA
ggatggaggcgtgggttcgaatcccacttctgaca

SEQ ID NO: 18053 - DNA, 37 bp, Homo sapiens
  source 1..37: mol_type = genomic DNA
ggatggaggcgtgggttcgaatcccacttctgacacc

SEQ ID NO: 18054 - DNA, 16 bp, Homo sapiens
  source 1..16: mol_type = genomic DNA
ggatggccgagcggtc

SEQ ID NO: 18055 - DNA, 17 bp, Homo sapiens
  source 1..17: mol_type = genomic DNA
ggatggccgagcggtct

SEQ ID NO: 18056 - DNA, 18 bp, Homo sapiens
  source 1..18: mol_type = genomic DNA
ggatggccgagcggtcta

SEQ ID NO: 18057 - DNA, 20 bp, Homo sapiens
  source 1..20: mol_type = genomic DNA
ggatggccgagcggtctaag

SEQ ID NO: 18058 - DNA, 22 bp, Homo sapiens
  source 1..22: mol_type = genomic DNA
ggatggccgagcggtctaaggc

SEQ ID NO: 18059 - DNA, 26 bp, Homo sapiens
  source 1..26: mol_type = genomic DNA
ggatggccgagcggtctaaggcgctg

SEQ ID NO: 18060 - DNA, 31 bp, Homo sapiens
  source 1..31: mol_type = genomic DNA
ggatggccgagcggtctaaggcgctgcgttc

SEQ ID NO: 18061 - DNA, 33 bp, Homo sapiens
  source 1..33: mol_type = genomic DNA
ggatggccgagcggtctaaggcgctgcgttcag

SEQ ID NO: 18062 - DNA, 18 bp, Homo sapiens
  source 1..18: mol_type = genomic DNA
ggatggccgagtggtcta

SEQ ID NO: 18063 - DNA, 20 bp, Homo sapiens
  source 1..20: mol_type = genomic DNA
ggatggccgagtggtctaag

SEQ ID NO: 18064 - DNA, 21 bp, Homo sapiens
  source 1..21: mol_type = genomic DNA
ggatggccgagtggtctaagg

SEQ ID NO: 18065 - DNA, 31 bp, Homo sapiens
  source 1..31: mol_type = genomic DNA
ggatggccgagtggtctaaggcgccagactc

SEQ ID NO: 18066 - DNA, 19 bp, Homo sapiens
  source 1..19: mol_type = genomic DNA
ggatggccgagtggttaag

SEQ ID NO: 18067 - DNA, 19 bp, Homo sapiens
  source 1..19: mol_type = genomic DNA
ggatggggtgtgataggtg

SEQ ID NO: 18068 - DNA, 21 bp, Homo sapiens
  source 1..21: mol_type = genomic DNA
ggatggggtgtgataggtggc

SEQ ID NO: 18069 - DNA, 25 bp, Homo sapiens
  source 1..25: mol_type = genomic DNA
ggatggggtgtgataggtggcacgg

SEQ ID NO: 18070 - DNA, 26 bp, Homo sapiens
  source 1..26: mol_type = genomic DNA
ggatggggtgtgataggtggcacgga

SEQ ID NO: 18071 - DNA, 27 bp, Homo sapiens
  source 1..27: mol_type = genomic DNA
ggatggggtgtgataggtggcacggag

SEQ ID NO: 18072 - DNA, 28 bp, Homo sapiens
  source 1..28: mol_type = genomic DNA
ggatggggtgtgataggtggcacggaga

SEQ ID NO: 18073 - DNA, 29 bp, Homo sapiens
  source 1..29: mol_type = genomic DNA
ggatggggtgtgataggtggcacggagaa

SEQ ID NO: 18074 - DNA, 30 bp, Homo sapiens
  source 1..30: mol_type = genomic DNA
ggatggggtgtgataggtggcacggagaat

SEQ ID NO: 18075 - DNA, 31 bp, Homo sapiens
  source 1..31: mol_type = genomic DNA
ggatggggtgtgataggtggcacggagaatt

SEQ ID NO: 18076 - DNA, 32 bp, Homo sapiens
  source 1..32: mol_type = genomic DNA
ggatggggtgtgataggtggcacggagaattt

SEQ ID NO: 18077 - DNA, 33 bp, Homo sapiens
  source 1..33: mol_type = genomic DNA
ggatggggtgtgataggtggcacggagaatttt

SEQ ID NO: 18078 - DNA, 34 bp, Homo sapiens
  source 1..34: mol_type = genomic DNA
ggatggggtgtgataggtggcacggagaattttg

SEQ ID NO: 18079 - DNA, 27 bp, Homo sapiens
  source 1..27: mol_type = genomic DNA
ggatgggttcgattctcatagtcctag

SEQ ID NO: 18080 - DNA, 28 bp, Homo sapiens
  source 1..28: mol_type = genomic DNA
ggatgggttcgattctcatagtcctagc

SEQ ID NO: 18081 - DNA, 29 bp, Homo sapiens
  source 1..29: mol_type = genomic DNA
ggatgggttcgattctcatagtcctagcc

SEQ ID NO: 18082 - DNA, 30 bp, Homo sapiens
  source 1..30: mol_type = genomic DNA
ggatgggttcgattctcatagtcctagcca

SEQ ID NO: 18083 - DNA, 16 bp, Homo sapiens
  source 1..16: mol_type = genomic DNA
ggatgtagctcagtgg

SEQ ID NO: 18084 - DNA, 33 bp, Homo sapiens
  source 1..33: mol_type = genomic DNA
ggatgtagctcagtggtagagcgcatgcttcgc

SEQ ID NO: 18085 - DNA, 33 bp, Homo sapiens
  source 1..33: mol_type = genomic DNA
ggatgtagctcagtggtagagcgcgcgcttcgc

SEQ ID NO: 18086 - DNA, 19 bp, Homo sapiens
  source 1..19: mol_type = genomic DNA
ggattagctcaaatggtag

SEQ ID NO: 18087 - DNA, 20 bp, Homo sapiens
  source 1..20: mol_type = genomic DNA
ggattagctcaaatggtaga

SEQ ID NO: 18088 - DNA, 29 bp, Homo sapiens
  source 1..29: mol_type = genomic DNA
ggattcctggttttcacccaggcggcccg

SEQ ID NO: 18089 - DNA, 37 bp, Homo sapiens
  source 1..37: mol_type = genomic DNA
ggattcctggttttcacccaggcggcccgggttcgac

SEQ ID NO: 18090 - DNA, 16 bp, Homo sapiens
  source 1..16: mol_type = genomic DNA
ggattcggcgctctca

SEQ ID NO: 18091 - DNA, 17 bp, Homo sapiens
  source 1..17: mol_type = genomic DNA
ggattcggcgctctcac

SEQ ID NO: 18092 - DNA, 18 bp, Homo sapiens
  source 1..18: mol_type = genomic DNA
ggattcggcgctctcacc

SEQ ID NO: 18093 - DNA, 19 bp, Homo sapiens
  source 1..19: mol_type = genomic DNA
ggattcggcgctctcaccg

SEQ ID NO: 18094 - DNA, 21 bp, Homo sapiens
  source 1..21: mol_type = genomic DNA
ggattcggcgctctcaccgcc

SEQ ID NO: 18095 - DNA, 23 bp, Homo sapiens
  source 1..23: mol_type = genomic DNA
ggattcggcgctctcaccgccgc

SEQ ID NO: 18096 - DNA, 26 bp, Homo sapiens
  source 1..26: mol_type = genomic DNA
ggattcggcgctctcaccgccgcggc

SEQ ID NO: 18097 - DNA, 27 bp, Homo sapiens
  source 1..27: mol_type = genomic DNA
ggattcggcgctctcaccgccgcggcc

SEQ ID NO: 18098 - DNA, 28 bp, Homo sapiens
  source 1..28: mol_type = genomic DNA
ggattcggcgctctcaccgccgcggccc

SEQ ID NO: 18099 - DNA, 29 bp, Homo sapiens
  source 1..29: mol_type = genomic DNA
ggattcggcgctctcaccgccgcggcccg

SEQ ID NO: 18100 - DNA, 30 bp, Homo sapiens
  source 1..30: mol_type = genomic DNA
ggattcggcgctctcaccgccgcggcccgg

SEQ ID NO: 18101 - DNA, 31 bp, Homo sapiens
  source 1..31: mol_type = genomic DNA
ggattcggcgctctcaccgccgcggcccggg

SEQ ID NO: 18102 - DNA, 32 bp, Homo sapiens
  source 1..32: mol_type = genomic DNA
ggattcggcgctctcaccgccgcggcccgggt

SEQ ID NO: 18103 - DNA, 33 bp, Homo sapiens
  source 1..33: mol_type = genomic DNA
ggattcggcgctctcaccgccgcggcccgggtt

SEQ ID NO: 18104 - DNA, 34 bp, Homo sapiens
  source 1..34: mol_type = genomic DNA
ggattcggcgctctcaccgccgcggcccgggttc

SEQ ID NO: 18105 - DNA, 17 bp, Homo sapiens
  source 1..17: mol_type = genomic DNA
ggattcggcgctttcac

SEQ ID NO: 18106 - DNA, 21 bp, Homo sapiens
  source 1..21: mol_type = genomic DNA
ggattcggcgctttcaccgcc

SEQ ID NO: 18107 - DNA, 35 bp, Homo sapiens
  source 1..35: mol_type = genomic DNA
ggattctcagggatgggttcgattctcatagtcct

SEQ ID NO: 18108 - DNA, 37 bp, Homo sapiens
  source 1..37: mol_type = genomic DNA
ggattctcagggatgggttcgattctcatagtcctag

SEQ ID NO: 18109 - DNA, 39 bp, Homo sapiens
  source 1..39: mol_type = genomic DNA
ggattctcagggatgggttcgattctcatagtcctagcc

SEQ ID NO: 18110 - DNA, 40 bp, Homo sapiens
  source 1..40: mol_type = genomic DNA
ggattctcagggatgggttcgattctcatagtcctagcca

SEQ ID NO: 18111 - DNA, 20 bp, Homo sapiens
  source 1..20: mol_type = genomic DNA
ggattgtgggttcgagtccc

SEQ ID NO: 18112 - DNA, 30 bp, Homo sapiens
  source 1..30: mol_type = genomic DNA
ggattgtgggttcgagtcccacctggggta

SEQ ID NO: 18113 - DNA, 28 bp, Homo sapiens
  source 1..28: mol_type = genomic DNA
ggattgtgggttcgagtcccatctgggg

SEQ ID NO: 18114 - DNA, 32 bp, Homo sapiens
  source 1..32: mol_type = genomic DNA
ggattgtgggttcgagtcccatctggggtgcc

SEQ ID NO: 18115 - DNA, 31 bp, Homo sapiens
  source 1..31: mol_type = genomic DNA
ggattgtgggttcgagtcccatctgggtcgc

SEQ ID NO: 18116 - DNA, 32 bp, Homo sapiens
  source 1..32: mol_type = genomic DNA
ggattgtgggttcgagtcccatctgggtcgcc

SEQ ID NO: 18117 - DNA, 33 bp, Homo sapiens
  source 1..33: mol_type = genomic DNA
ggattgtgggttcgagtcccatctgggtcgcca

SEQ ID NO: 18118 - DNA, 21 bp, Homo sapiens
  source 1..21: mol_type = genomic DNA
ggatttaggctccagtcattt

SEQ ID NO: 18119 - DNA, 34 bp, Homo sapiens
  source 1..34: mol_type = genomic DNA
ggcacggagaattttggattctcagggatgggtt

SEQ ID NO: 18120 - DNA, 16 bp, Homo sapiens
  source 1..16: mol_type = genomic DNA
ggcagagcatttgact

SEQ ID NO: 18121 - DNA, 16 bp, Homo sapiens
  source 1..16: mol_type = genomic DNA
ggcagagcccggtaat

SEQ ID NO: 18122 - DNA, 26 bp, Homo sapiens
  source 1..26: mol_type = genomic DNA
ggcagagcccggtaatcgcataaaac

SEQ ID NO: 18123 - DNA, 28 bp, Homo sapiens
  source 1..28: mol_type = genomic DNA
ggcagagcccggtaatcgcataaaactt

SEQ ID NO: 18124 - DNA, 29 bp, Homo sapiens
  source 1..29: mol_type = genomic DNA
ggcagagcccggtaatcgcataaaactta

SEQ ID NO: 18125 - DNA, 33 bp, Homo sapiens
  source 1..33: mol_type = genomic DNA
ggcagagcccggtaatcgcataaaacttaaaac

SEQ ID NO: 18126 - DNA, 34 bp, Homo sapiens
  source 1..34: mol_type = genomic DNA
ggcagagcccggtaatcgcataaaacttaaaact

SEQ ID NO: 18127 - DNA, 35 bp, Homo sapiens
  source 1..35: mol_type = genomic DNA
ggcagagcccggtaatcgcataaaacttaaaactt

SEQ ID NO: 18128 - DNA, 19 bp, Homo sapiens
  source 1..19: mol_type = genomic DNA
ggcagcgatggccgagtgg

SEQ ID NO: 18129 - DNA, 30 bp, Homo sapiens
  source 1..30: mol_type = genomic DNA
ggcatagctcagtggtagagcatttgactg

SEQ ID NO: 18130 - DNA, 31 bp, Homo sapiens
  source 1..31: mol_type = genomic DNA
ggcatagctcagtggtagagcatttgactgc

SEQ ID NO: 18131 - DNA, 20 bp, Homo sapiens
  source 1..20: mol_type = genomic DNA
ggcatcagcctccggagctg

SEQ ID NO: 18132 - DNA, 27 bp, Homo sapiens
  source 1..27: mol_type = genomic DNA
ggcatcagcctccggagctggggattg

SEQ ID NO: 18133 - DNA, 28 bp, Homo sapiens
  source 1..28: mol_type = genomic DNA
ggcatcagcctccggagctggggattgt

SEQ ID NO: 18134 - DNA, 35 bp, Homo sapiens
  source 1..35: mol_type = genomic DNA
ggcatcagcctccggagctggggattgtgggttcg

SEQ ID NO: 18135 - DNA, 31 bp, Homo sapiens
  source 1..31: mol_type = genomic DNA
ggcatgggtggttcagtggtagaattctcgc

SEQ ID NO: 18136 - DNA, 32 bp, Homo sapiens
  source 1..32: mol_type = genomic DNA
ggcatgggtggttcagtggtagaattctcgcc

SEQ ID NO: 18137 - DNA, 33 bp, Homo sapiens
  source 1..33: mol_type = genomic DNA
ggcatgggtggttcagtggtagaattctcgcct

SEQ ID NO: 18138 - DNA, 34 bp, Homo sapiens
  source 1..34: mol_type = genomic DNA
ggcatgggtggttcagtggtagaattctcgcctg

SEQ ID NO: 18139 - DNA, 35 bp, Homo sapiens
  source 1..35: mol_type = genomic DNA
ggcatgggtggttcagtggtagaattctcgcctgc

SEQ ID NO: 18140 - DNA, 19 bp, Homo sapiens
  source 1..19: mol_type = genomic DNA
ggcattggcctcctaagcc

SEQ ID NO: 18141 - DNA, 28 bp, Homo sapiens
  source 1..28: mol_type = genomic DNA
ggcattggcctcctaagccagggattgt

SEQ ID NO: 18142 - DNA, 32 bp, Homo sapiens
  source 1..32: mol_type = genomic DNA
ggcattggtggttcagtggtagaattctcgcc

SEQ ID NO: 18143 - DNA, 33 bp, Homo sapiens
  source 1..33: mol_type = genomic DNA
ggcattggtggttcagtggtagaattctcgcct

SEQ ID NO: 18144 - DNA, 34 bp, Homo sapiens
  source 1..34: mol_type = genomic DNA
ggcattggtggttcagtggtagaattctcgcctg

SEQ ID NO: 18145 - DNA, 35 bp, Homo sapiens
  source 1..35: mol_type = genomic DNA
ggcattggtggttcagtggtagaattctcgcctgc

SEQ ID NO: 18146 - DNA, 36 bp, Homo sapiens
  source 1..36: mol_type = genomic DNA
ggcattggtggttcagtggtagaattctcgcctgcc

SEQ ID NO: 18147 - DNA, 37 bp, Homo sapiens
  source 1..37: mol_type = genomic DNA
ggcattggtggttcagtggtagaattctcgcctgcca

SEQ ID NO: 18148 - DNA, 18 bp, Homo sapiens
  source 1..18: mol_type = genomic DNA
ggccagtggcgcaatgga

SEQ ID NO: 18149 - DNA, 22 bp, Homo sapiens
  source 1..22: mol_type = genomic DNA
ggccatgatcgtatagtggtta

SEQ ID NO: 18150 - DNA, 26 bp, Homo sapiens
  source 1..26: mol_type = genomic DNA
ggcccataacccagaggtcgatggat

SEQ ID NO: 18151 - DNA, 27 bp, Homo sapiens
  source 1..27: mol_type = genomic DNA
ggcccataacccagaggtcgatggatc

SEQ ID NO: 18152 - DNA, 16 bp, Homo sapiens
  source 1..16: mol_type = genomic DNA
ggcccataccccgaaa

SEQ ID NO: 18153 - DNA, 17 bp, Homo sapiens
  source 1..17: mol_type = genomic DNA
ggcccataccccgaaaa

SEQ ID NO: 18154 - DNA, 18 bp, Homo sapiens
  source 1..18: mol_type = genomic DNA
ggcccataccccgaaaat

SEQ ID NO: 18155 - DNA, 19 bp, Homo sapiens
  source 1..19: mol_type = genomic DNA
ggcccataccccgaaaatg

SEQ ID NO: 18156 - DNA, 20 bp, Homo sapiens
  source 1..20: mol_type = genomic DNA
ggcccataccccgaaaatgt

SEQ ID NO: 18157 - DNA, 21 bp, Homo sapiens
  source 1..21: mol_type = genomic DNA
ggcccataccccgaaaatgtt

SEQ ID NO: 18158 - DNA, 22 bp, Homo sapiens
  source 1..22: mol_type = genomic DNA
ggcccataccccgaaaatgttg

SEQ ID NO: 18159 - DNA, 24 bp, Homo sapiens
  source 1..24: mol_type = genomic DNA
ggcccataccccgaaaatgttggt

SEQ ID NO: 18160 - DNA, 25 bp, Homo sapiens
  source 1..25: mol_type = genomic DNA
ggcccataccccgaaaatgttggtt

SEQ ID NO: 18161 - DNA, 26 bp, Homo sapiens
  source 1..26: mol_type = genomic DNA
ggcccataccccgaaaatgttggtta

SEQ ID NO: 18162 - DNA, 27 bp, Homo sapiens
  source 1..27: mol_type = genomic DNA
ggcccataccccgaaaatgttggttat

SEQ ID NO: 18163 - DNA, 28 bp, Homo sapiens
  source 1..28: mol_type = genomic DNA
ggcccataccccgaaaatgttggttata

SEQ ID NO: 18164 - DNA, 29 bp, Homo sapiens
  source 1..29: mol_type = genomic DNA
ggcccataccccgaaaatgttggttatac

SEQ ID NO: 18165 - DNA, 30 bp, Homo sapiens
  source 1..30: mol_type = genomic DNA
ggcccataccccgaaaatgttggttatacc

SEQ ID NO: 18166 - DNA, 31 bp, Homo sapiens
  source 1..31: mol_type = genomic DNA
ggcccataccccgaaaatgttggttataccc

SEQ ID NO: 18167 - DNA, 32 bp, Homo sapiens
  source 1..32: mol_type = genomic DNA
ggcccataccccgaaaatgttggttataccct

SEQ ID NO: 18168 - DNA, 33 bp, Homo sapiens
  source 1..33: mol_type = genomic DNA
ggcccataccccgaaaatgttggttataccctt

SEQ ID NO: 18169 - DNA, 34 bp, Homo sapiens
  source 1..34: mol_type = genomic DNA
ggcccataccccgaaaatgttggttatacccttc

SEQ ID NO: 18170 - DNA, 35 bp, Homo sapiens
  source 1..35: mol_type = genomic DNA
ggcccataccccgaaaatgttggttatacccttcc

SEQ ID NO: 18171 - DNA, 36 bp, Homo sapiens
  source 1..36: mol_type = genomic DNA
ggcccataccccgaaaatgttggttatacccttccc

SEQ ID NO: 18172 - DNA, 40 bp, Homo sapiens
  source 1..40: mol_type = genomic DNA
ggcccataccccgaaaatgttggttatacccttcccgtac

SEQ ID NO: 18173 - DNA, 41 bp, Homo sapiens
  source 1..41: mol_type = genomic DNA
ggcccataccccgaaaatgttggttatacccttcccgtact

SEQ ID NO: 18174 - DNA, 42 bp, Homo sapiens
  source 1..42: mol_type = genomic DNA
ggcccataccccgaaaatgttggttatacccttcccgtacta

SEQ ID NO: 18175 - DNA, 43 bp, Homo sapiens
  source 1..43: mol_type = genomic DNA
ggcccataccccgaaaatgttggttatacccttcccgtactac

SEQ ID NO: 18176 - DNA, 44 bp, Homo sapiens
  source 1..44: mol_type = genomic DNA
ggcccataccccgaaaatgttggttatacccttcccgtactacc

SEQ ID NO: 18177 - DNA, 45 bp, Homo sapiens
  source 1..45: mol_type = genomic DNA
ggcccataccccgaaaatgttggttatacccttcccgtactacca

SEQ ID NO: 18178 - DNA, 17 bp, Homo sapiens
  source 1..17: mol_type = genomic DNA
ggccccatggtgtaatg

SEQ ID NO: 18179 - DNA, 18 bp, Homo sapiens
  source 1..18: mol_type = genomic DNA
ggccccatggtgtaatgg

SEQ ID NO: 18180 - DNA, 19 bp, Homo sapiens
  source 1..19: mol_type = genomic DNA
ggccccatggtgtaatggt

SEQ ID NO: 18181 - DNA, 29 bp, Homo sapiens
  source 1..29: mol_type = genomic DNA
ggccccatggtgtaatggtcagcactctg

SEQ ID NO: 18182 - DNA, 32 bp, Homo sapiens
  source 1..32: mol_type = genomic DNA
ggccccatggtgtaatggtcagcactctggac

SEQ ID NO: 18183 - DNA, 33 bp, Homo sapiens
  source 1..33: mol_type = genomic DNA
ggccccatggtgtaatggtcagcactctggact

SEQ ID NO: 18184 - DNA, 34 bp, Homo sapiens
  source 1..34: mol_type = genomic DNA
ggccccatggtgtaatggtcagcactctggactc

SEQ ID NO: 18185 - DNA, 35 bp, Homo sapiens
  source 1..35: mol_type = genomic DNA
ggccccatggtgtaatggtcagcactctggactct

SEQ ID NO: 18186 - DNA, 36 bp, Homo sapiens
  source 1..36: mol_type = genomic DNA
ggccccatggtgtaatggtcagcactctggactctg

SEQ ID NO: 18187 - DNA, 37 bp, Homo sapiens
  source 1..37: mol_type = genomic DNA
ggccccatggtgtaatggtcagcactctggactctga

SEQ ID NO: 18188 - DNA, 40 bp, Homo sapiens
  source 1..40: mol_type = genomic DNA
ggccccatggtgtaatggtcagcactctggactctgaatc

SEQ ID NO: 18189 - DNA, 41 bp, Homo sapiens
  source 1..41: mol_type = genomic DNA
ggccccatggtgtaatggtcagcactctggactctgaatcc

SEQ ID NO: 18190 - DNA, 22 bp, Homo sapiens
  source 1..22: mol_type = genomic DNA
ggccccatggtgtaatggttag

SEQ ID NO: 18191 - DNA, 23 bp, Homo sapiens
  source 1..23: mol_type = genomic DNA
ggccccatggtgtaatggttagc

SEQ ID NO: 18192 - DNA, 28 bp, Homo sapiens
  source 1..28: mol_type = genomic DNA
ggccccatggtgtaatggttagcactct

SEQ ID NO: 18193 - DNA, 29 bp, Homo sapiens
  source 1..29: mol_type = genomic DNA
ggccccatggtgtaatggttagcactctg

SEQ ID NO: 18194 - DNA, 30 bp, Homo sapiens
  source 1..30: mol_type = genomic DNA
ggccccatggtgtaatggttagcactctgg

SEQ ID NO: 18195 - DNA, 32 bp, Homo sapiens
  source 1..32: mol_type = genomic DNA
ggccccatggtgtaatggttagcactctggac

SEQ ID NO: 18196 - DNA, 33 bp, Homo sapiens
  source 1..33: mol_type = genomic DNA
ggccccatggtgtaatggttagcactctggact

SEQ ID NO: 18197 - DNA, 34 bp, Homo sapiens
  source 1..34: mol_type = genomic DNA
ggccccatggtgtaatggttagcactctggactt

SEQ ID NO: 18198 - DNA, 35 bp, Homo sapiens
  source 1..35: mol_type = genomic DNA
ggccccatggtgtaatggttagcactctggacttt

SEQ ID NO: 18199 - DNA, 36 bp, Homo sapiens
  source 1..36: mol_type = genomic DNA
ggccccatggtgtaatggttagcactctggactttg

SEQ ID NO: 18200 - DNA, 37 bp, Homo sapiens
  source 1..37: mol_type = genomic DNA
ggccccatggtgtaatggttagcactctggactttga

SEQ ID NO: 18201 - DNA, 40 bp, Homo sapiens
  source 1..40: mol_type = genomic DNA
ggccccatggtgtaatggttagcactctggactttgaatc

SEQ ID NO: 18202 - DNA, 41 bp, Homo sapiens
  source 1..41: mol_type = genomic DNA
ggccccatggtgtaatggttagcactctggactttgaatcc

SEQ ID NO: 18203 - DNA, 22 bp, Homo sapiens
  source 1..22: mol_type = genomic DNA
ggccccgggttcaatccccggc

SEQ ID NO: 18204 - DNA, 32 bp, Homo sapiens
  source 1..32: mol_type = genomic DNA
ggccccgggttcaatccccggcacctccacca

SEQ ID NO: 18205 - DNA, 22 bp, Homo sapiens
  source 1..22: mol_type = genomic DNA
ggccccgggttcgatccccggc

SEQ ID NO: 18206 - DNA, 16 bp, Homo sapiens
  source 1..16: mol_type = genomic DNA
ggcccgggttcgactc

SEQ ID NO: 18207 - DNA, 29 bp, Homo sapiens
  source 1..29: mol_type = genomic DNA
ggcccgggttcgactcccggtgtgggaac

SEQ ID NO: 18208 - DNA, 30 bp, Homo sapiens
  source 1..30: mol_type = genomic DNA
ggcccgggttcgactcccggtgtgggaacc

SEQ ID NO: 18209 - DNA, 31 bp, Homo sapiens
  source 1..31: mol_type = genomic DNA
ggcccgggttcgactcccggtgtgggaacca

SEQ ID NO: 18210 - DNA, 17 bp, Homo sapiens
  source 1..17: mol_type = genomic DNA
ggcccgggttcgattcc

SEQ ID NO: 18211 - DNA, 18 bp, Homo sapiens
  source 1..18: mol_type = genomic DNA
ggcccgggttcgattccc

SEQ ID NO: 18212 - DNA, 21 bp, Homo sapiens
  source 1..21: mol_type = genomic DNA
ggcccgggttcgattcccggt

SEQ ID NO: 18213 - DNA, 16 bp, Homo sapiens
  source 1..16: mol_type = genomic DNA
ggccctatagctcagg

SEQ ID NO: 18214 - DNA, 17 bp, Homo sapiens
  source 1..17: mol_type = genomic DNA
ggccctatagctcaggg

SEQ ID NO: 18215 - DNA, 18 bp, Homo sapiens
  source 1..18: mol_type = genomic DNA
ggccctatagctcagggg

SEQ ID NO: 18216 - DNA, 19 bp, Homo sapiens
  source 1..19: mol_type = genomic DNA
ggccctatagctcaggggt

SEQ ID NO: 18217 - DNA, 29 bp, Homo sapiens
  source 1..29: mol_type = genomic DNA
ggccctatagctcaggggttagagcactg

SEQ ID NO: 18218 - DNA, 30 bp, Homo sapiens
  source 1..30: mol_type = genomic DNA
ggccctatagctcaggggttagagcactgg

SEQ ID NO: 18219 - DNA, 31 bp, Homo sapiens
  source 1..31: mol_type = genomic DNA
ggccctatagctcaggggttagagcactggt

SEQ ID NO: 18220 - DNA, 32 bp, Homo sapiens
  source 1..32: mol_type = genomic DNA
ggccctatagctcaggggttagagcactggtc

SEQ ID NO: 18221 - DNA, 33 bp, Homo sapiens
  source 1..33: mol_type = genomic DNA
ggccctatagctcaggggttagagcactggtct

SEQ ID NO: 18222 - DNA, 34 bp, Homo sapiens
  source 1..34: mol_type = genomic DNA
ggccctatagctcaggggttagagcactggtctt

SEQ ID NO: 18223 - DNA, 35 bp, Homo sapiens
  source 1..35: mol_type = genomic DNA
ggccctatagctcaggggttagagcactggtcttg

SEQ ID NO: 18224 - DNA, 37 bp, Homo sapiens
  source 1..37: mol_type = genomic DNA
ggccctatagctcaggggttagagcactggtcttgta

SEQ ID NO: 18225 - DNA, 21 bp, Homo sapiens
  source 1..21: mol_type = genomic DNA
ggccctgtggcttagctggtc

SEQ ID NO: 18226 - DNA, 16 bp, Homo sapiens
  source 1..16: mol_type = genomic DNA
ggccgagcggtctaag

SEQ ID NO: 18227 - DNA, 18 bp, Homo sapiens
  source 1..18: mol_type = genomic DNA
ggccgagcggtctaaggc

SEQ ID NO: 18228 - DNA, 22 bp, Homo sapiens
  source 1..22: mol_type = genomic DNA
ggccgagcggtctaaggcgctg

SEQ ID NO: 18229 - DNA, 23 bp, Homo sapiens
  source 1..23: mol_type = genomic DNA
ggccgagcggtctaaggcgctgc

SEQ ID NO: 18230 - DNA, 26 bp, Homo sapiens
  source 1..26: mol_type = genomic DNA
ggccgagtggtctaaggcgccagact

SEQ ID NO: 18231 - DNA, 24 bp, Homo sapiens
  source 1..24: mol_type = genomic DNA
ggccgagtggttaaggcgatggac

SEQ ID NO: 18232 - DNA, 27 bp, Homo sapiens
  source 1..27: mol_type = genomic DNA
ggccgagtggttaaggcgatggactgc

SEQ ID NO: 18233 - DNA, 28 bp, Homo sapiens
  source 1..28: mol_type = genomic DNA
ggccgagtggttaaggcgatggactgct

SEQ ID NO: 18234 - DNA, 21 bp, Homo sapiens
  source 1..21: mol_type = genomic DNA
ggccgcagcaacctcggttcg

SEQ ID NO: 18235 - DNA, 34 bp, Homo sapiens
  source 1..34: mol_type = genomic DNA
ggccgcagcaacctcggttcgaatccgagtcacg

SEQ ID NO: 18236 - DNA, 39 bp, Homo sapiens
  source 1..39: mol_type = genomic DNA
ggccgcagcaacctcggttcgaatccgagtcacggcacc

SEQ ID NO: 18237 - DNA, 18 bp, Homo sapiens
  source 1..18: mol_type = genomic DNA
ggccgcgtggcctaatgg

SEQ ID NO: 18238 - DNA, 19 bp, Homo sapiens
  source 1..19: mol_type = genomic DNA
ggccgcgtggcctaatgga

SEQ ID NO: 18239 - DNA, 29 bp, Homo sapiens
  source 1..29: mol_type = genomic DNA
ggccgcgtggcctaatggataaggcgtct

SEQ ID NO: 18240 - DNA, 30 bp, Homo sapiens
  source 1..30: mol_type = genomic DNA
ggccgcgtggcctaatggataaggcgtctg

SEQ ID NO: 18241 - DNA, 33 bp, Homo sapiens
  source 1..33: mol_type = genomic DNA
ggccgcgtggcctaatggataaggcgtctgact

SEQ ID NO: 18242 - DNA, 36 bp, Homo sapiens
  source 1..36: mol_type = genomic DNA
ggccgcgtggcctaatggataaggcgtctgacttcg

SEQ ID NO: 18243 - DNA, 32 bp, Homo sapiens
  source 1..32: mol_type = genomic DNA
ggccgcgtggcctaatggataaggcgtctgat

SEQ ID NO: 18244 - DNA, 33 bp, Homo sapiens
  source 1..33: mol_type = genomic DNA
ggccgcgtggcctaatggataaggcgtctgatt

SEQ ID NO: 18245 - DNA, 34 bp, Homo sapiens
  source 1..34: mol_type = genomic DNA
ggccgcgtggcctaatggataaggcgtctgattc

SEQ ID NO: 18246 - DNA, 35 bp, Homo sapiens
  source 1..35: mol_type = genomic DNA
ggccgcgtggcctaatggataaggcgtctgattcc

SEQ ID NO: 18247 - DNA, 36 bp, Homo sapiens
  source 1..36: mol_type = genomic DNA
ggccgcgtggcctaatggataaggcgtctgattccg

SEQ ID NO: 18248 - DNA, 16 bp, Homo sapiens
  source 1..16: mol_type = genomic DNA
ggccggttagctcagt

SEQ ID NO: 18249 - DNA, 19 bp, Homo sapiens
  source 1..19: mol_type = genomic DNA
ggccggttagctcagtcgg

SEQ ID NO: 18250 - DNA, 20 bp, Homo sapiens
  source 1..20: mol_type = genomic DNA
ggccggttagctcagtcggc

SEQ ID NO: 18251 - DNA, 33 bp, Homo sapiens
  source 1..33: mol_type = genomic DNA
ggccggttagctcagtcggctagagcgtggtgc

SEQ ID NO: 18252 - DNA, 18 bp, Homo sapiens
  source 1..18: mol_type = genomic DNA
ggccggttagctcagttg

SEQ ID NO: 18253 - DNA, 19 bp, Homo sapiens
  source 1..19: mol_type = genomic DNA
ggccggttagctcagttgg

SEQ ID NO: 18254 - DNA, 20 bp, Homo sapiens
  source 1..20: mol_type = genomic DNA
ggccggttagctcagttggt

SEQ ID NO: 18255 - DNA, 21 bp, Homo sapiens
  source 1..21: mol_type = genomic DNA
ggccggttagctcagttggta

SEQ ID NO: 18256 - DNA, 35 bp, Homo sapiens
  source 1..35: mol_type = genomic DNA
ggccggttagctcagttggtaagagcgtggtgctg

SEQ ID NO: 18257 - DNA, 21 bp, Homo sapiens
  source 1..21: mol_type = genomic DNA
ggccggttagctcagttggtc

SEQ ID NO: 18258 - DNA, 21 bp, Homo sapiens
  source 1..21: mol_type = genomic DNA
ggccggttagctcagttggtt

SEQ ID NO: 18259 - DNA, 23 bp, Homo sapiens
  source 1..23: mol_type = genomic DNA
ggccggttagctcagttggttag

SEQ ID NO: 18260 - DNA, 24 bp, Homo sapiens
  source 1..24: mol_type = genomic DNA
ggccggttagctcagttggttaga

SEQ ID NO: 18261 - DNA, 25 bp, Homo sapiens
  source 1..25: mol_type = genomic DNA
ggccggttagctcagttggttagag

SEQ ID NO: 18262 - DNA, 26 bp, Homo sapiens
  source 1..26: mol_type = genomic DNA
ggccggttagctcagttggttagagc

SEQ ID NO: 18263 - DNA, 33 bp, Homo sapiens
  source 1..33: mol_type = genomic DNA
ggccggttagctcagttggttagagcgtggtgc

SEQ ID NO: 18264 - DNA, 34 bp, Homo sapiens
  source 1..34: mol_type = genomic DNA
ggccggttagctcagttggttagagcgtggtgct

SEQ ID NO: 18265 - DNA, 16 bp, Homo sapiens
  source 1..16: mol_type = genomic DNA
ggccgtgatcgtatag

SEQ ID NO: 18266 - DNA, 17 bp, Homo sapiens
  source 1..17: mol_type = genomic DNA
ggccgtgatcgtatagt

SEQ ID NO: 18267 - DNA, 18 bp, Homo sapiens
  source 1..18: mol_type = genomic DNA
ggccgtgatcgtatagtg

SEQ ID NO: 18268 - DNA, 19 bp, Homo sapiens
  source 1..19: mol_type = genomic DNA
ggccgtgatcgtatagtgg

SEQ ID NO: 18269 - DNA, 20 bp, Homo sapiens
  source 1..20: mol_type = genomic DNA
ggccgtgatcgtatagtggt

SEQ ID NO: 18270 - DNA, 21 bp, Homo sapiens
  source 1..21: mol_type = genomic DNA
ggccgtgatcgtatagtggtt

SEQ ID NO: 18271 - DNA, 22 bp, Homo sapiens
  source 1..22: mol_type = genomic DNA
ggccgtgatcgtatagtggtta

SEQ ID NO: 18272 - DNA, 23 bp, Homo sapiens
  source 1..23: mol_type = genomic DNA
ggccgtgatcgtatagtggttag

SEQ ID NO: 18273 - DNA, 24 bp, Homo sapiens
  source 1..24: mol_type = genomic DNA
ggccgtgatcgtatagtggttagt

SEQ ID NO: 18274 - DNA, 25 bp, Homo sapiens
  source 1..25: mol_type = genomic DNA
ggccgtgatcgtatagtggttagta

SEQ ID NO: 18275 - DNA, 26 bp, Homo sapiens
  source 1..26: mol_type = genomic DNA
ggccgtgatcgtatagtggttagtac

SEQ ID NO: 18276 - DNA, 27 bp, Homo sapiens
  source 1..27: mol_type = genomic DNA
ggccgtgatcgtatagtggttagtact

SEQ ID NO: 18277 - DNA, 28 bp, Homo sapiens
  source 1..28: mol_type = genomic DNA
ggccgtgatcgtatagtggttagtactc

SEQ ID NO: 18278 - DNA, 29 bp, Homo sapiens
  source 1..29: mol_type = genomic DNA
ggccgtgatcgtatagtggttagtactct

SEQ ID NO: 18279 - DNA, 30 bp, Homo sapiens
  source 1..30: mol_type = genomic DNA
ggccgtgatcgtatagtggttagtactctg

SEQ ID NO: 18280 - DNA, 31 bp, Homo sapiens
  source 1..31: mol_type = genomic DNA
ggccgtgatcgtatagtggttagtactctgc

SEQ ID NO: 18281 - DNA, 32 bp, Homo sapiens
  source 1..32: mol_type = genomic DNA
ggccgtgatcgtatagtggttagtactctgcg

SEQ ID NO: 18282 - DNA, 33 bp, Homo sapiens
  source 1..33: mol_type = genomic DNA
ggccgtgatcgtatagtggttagtactctgcgt

SEQ ID NO: 18283 - DNA, 34 bp, Homo sapiens
  source 1..34: mol_type = genomic DNA
ggccgtgatcgtatagtggttagtactctgcgtt

SEQ ID NO: 18284 - DNA, 35 bp, Homo sapiens
  source 1..35: mol_type = genomic DNA
ggccgtgatcgtatagtggttagtactctgcgttg

SEQ ID NO: 18285 - DNA, 36 bp, Homo sapiens
  source 1..36: mol_type = genomic DNA
ggccgtgatcgtatagtggttagtactctgcgttgt

SEQ ID NO: 18286 - DNA, 37 bp, Homo sapiens
  source 1..37: mol_type = genomic DNA
ggccgtgatcgtatagtggttagtactctgcgttgtg

SEQ ID NO: 18287 - DNA, 38 bp, Homo sapiens
  source 1..38: mol_type = genomic DNA
ggccgtgatcgtatagtggttagtactctgcgttgtgg

SEQ ID NO: 18288 - DNA, 39 bp, Homo sapiens
  source 1..39: mol_type = genomic DNA
ggccgtgatcgtatagtggttagtactctgcgttgtggc

SEQ ID NO: 18289 - DNA, 40 bp, Homo sapiens
  source 1..40: mol_type = genomic DNA
ggccgtgatcgtatagtggttagtactctgcgttgtggcc

SEQ ID NO: 18290 - DNA, 27 bp, Homo sapiens
  source 1..27: mol_type = genomic DNA
ggcctaatggataaggcatcagcctcc

SEQ ID NO: 18291 - DNA, 28 bp, Homo sapiens
  source 1..28: mol_type = genomic DNA
ggcctaatggataaggcgtctgattccg

SEQ ID NO: 18292 - DNA, 18 bp, Homo sapiens
  source 1..18: mol_type = genomic DNA
ggcctcgtggcgcaacgg

SEQ ID NO: 18293 - DNA, 31 bp, Homo sapiens
  source 1..31: mol_type = genomic DNA
ggcctcgtggcgcaacggtagcgcgtctgac

SEQ ID NO: 18294 - DNA, 32 bp, Homo sapiens
  source 1..32: mol_type = genomic DNA
ggcctcgtggcgcaacggtagcgcgtctgact

SEQ ID NO: 18295 - DNA, 33 bp, Homo sapiens
  source 1..33: mol_type = genomic DNA
ggcctcgtggcgcaacggtagcgcgtctgactc

SEQ ID NO: 18296 - DNA, 34 bp, Homo sapiens
  source 1..34: mol_type = genomic DNA
ggcctcgtggcgcaacggtagcgcgtctgactcc

SEQ ID NO: 18297 - DNA, 35 bp, Homo sapiens
  source 1..35: mol_type = genomic DNA
ggcctcgtggcgcaacggtagcgcgtctgactcca

SEQ ID NO: 18298 - DNA, 17 bp, Homo sapiens
  source 1..17: mol_type = genomic DNA
ggcctctttttaccacc

SEQ ID NO: 18299 - DNA, 18 bp, Homo sapiens
  source 1..18: mol_type = genomic DNA
ggcctctttttaccacca

SEQ ID NO: 18300 - DNA, 16 bp, Homo sapiens
  source 1..16: mol_type = genomic DNA
ggcgcaatcggttagc

SEQ ID NO: 18301 - DNA, 26 bp, Homo sapiens
  source 1..26: mol_type = genomic DNA
ggcgcaatcggttagcgcgcggtact

SEQ ID NO: 18302 - DNA, 24 bp, Homo sapiens
  source 1..24: mol_type = genomic DNA
ggcgcaatggatagcgcattggac

SEQ ID NO: 18303 - DNA, 20 bp, Homo sapiens
  source 1..20: mol_type = genomic DNA
ggcgccgtggcttagttggt

SEQ ID NO: 18304 - DNA, 22 bp, Homo sapiens
  source 1..22: mol_type = genomic DNA
ggcgcggtggccaagtggtaag

SEQ ID NO: 18305 - DNA, 24 bp, Homo sapiens
  source 1..24: mol_type = genomic DNA
ggcgcggtggccaagtggtaaggc

SEQ ID NO: 18306 - DNA, 32 bp, Homo sapiens
  source 1..32: mol_type = genomic DNA
ggcgcggtggccaagtggtaaggcgtcggtct

SEQ ID NO: 18307 - DNA, 21 bp, Homo sapiens
  source 1..21: mol_type = genomic DNA
ggcgctctcaccgccgcggcc

SEQ ID NO: 18308 - DNA, 22 bp, Homo sapiens
  source 1..22: mol_type = genomic DNA
ggcgctctcaccgccgcggccc

SEQ ID NO: 18309 - DNA, 23 bp, Homo sapiens
  source 1..23: mol_type = genomic DNA
ggcgctctcaccgccgcggcccg

SEQ ID NO: 18310 - DNA, 24 bp, Homo sapiens
  source 1..24: mol_type = genomic DNA
ggcgctctcaccgccgcggcccgg

SEQ ID NO: 18311 - DNA, 25 bp, Homo sapiens
  source 1..25: mol_type = genomic DNA
ggcgctctcaccgccgcggcccggg

SEQ ID NO: 18312 - DNA, 26 bp, Homo sapiens
  source 1..26: mol_type = genomic DNA
ggcgctctcaccgccgcggcccgggt

SEQ ID NO: 18313 - DNA, 27 bp, Homo sapiens
  source 1..27: mol_type = genomic DNA
ggcgctctcaccgccgcggcccgggtt

SEQ ID NO: 18314 - DNA, 28 bp, Homo sapiens
  source 1..28: mol_type = genomic DNA
ggcgctctcaccgccgcggcccgggttc

SEQ ID NO: 18315 - DNA, 29 bp, Homo sapiens
  source 1..29: mol_type = genomic DNA
ggcgctctcaccgccgcggcccgggttcg

SEQ ID NO: 18316 - DNA, 46 bp, Homo sapiens
  source 1..46: mol_type = genomic DNA
ggcgctctcaccgccgcggcccgggttcgattcccggtcagggaac

SEQ ID NO: 18317 - DNA, 47 bp, Homo sapiens
  source 1..47: mol_type = genomic DNA
ggcgctctcaccgccgcggcccgggttcgattcccggtcagggaacc

SEQ ID NO: 18318 - DNA, 48 bp, Homo sapiens
  source 1..48: mol_type = genomic DNA
ggcgctctcaccgccgcggcccgggttcgattcccggtcagggaacca

SEQ ID NO: 18319 - DNA, 21 bp, Homo sapiens
  source 1..21: mol_type = genomic DNA
ggcggcccgggttcgactccc

SEQ ID NO: 18320 - DNA, 24 bp, Homo sapiens
  source 1..24: mol_type = genomic DNA
ggcggcccgggttcgactcccggt

SEQ ID NO: 18321 - DNA, 25 bp, Homo sapiens
  source 1..25: mol_type = genomic DNA
ggcggcccgggttcgactcccggtg

SEQ ID NO: 18322 - DNA, 26 bp, Homo sapiens
  source 1..26: mol_type = genomic DNA
ggcggcccgggttcgactcccggtgt

SEQ ID NO: 18323 - DNA, 27 bp, Homo sapiens
  source 1..27: mol_type = genomic DNA
ggcggcccgggttcgactcccggtgtg

SEQ ID NO: 18324 - DNA, 28 bp, Homo sapiens
  source 1..28: mol_type = genomic DNA
ggcggcccgggttcgactcccggtgtgg

SEQ ID NO: 18325 - DNA, 29 bp, Homo sapiens
  source 1..29: mol_type = genomic DNA
ggcggcccgggttcgactcccggtgtggg

SEQ ID NO: 18326 - DNA, 30 bp, Homo sapiens
  source 1..30: mol_type = genomic DNA
ggcggcccgggttcgactcccggtgtggga

SEQ ID NO: 18327 - DNA, 31 bp, Homo sapiens
  source 1..31: mol_type = genomic DNA
ggcggcccgggttcgactcccggtgtgggaa

SEQ ID NO: 18328 - DNA, 32 bp, Homo sapiens
  source 1..32: mol_type = genomic DNA
ggcggcccgggttcgactcccggtgtgggaac

SEQ ID NO: 18329 - DNA, 33 bp, Homo sapiens
  source 1..33: mol_type = genomic DNA
ggcggcccgggttcgactcccggtgtgggaacc

SEQ ID NO: 18330 - DNA, 34 bp, Homo sapiens
  source 1..34: mol_type = genomic DNA
ggcggcccgggttcgactcccggtgtgggaacca

SEQ ID NO: 18331 - DNA, 18 bp, Homo sapiens
  source 1..18: mol_type = genomic DNA
ggcgtctgacttcggatc

SEQ ID NO: 18332 - DNA, 18 bp, Homo sapiens
  source 1..18: mol_type = genomic DNA
ggcgtctgattccggatc

SEQ ID NO: 18333 - DNA, 22 bp, Homo sapiens
  source 1..22: mol_type = genomic DNA
ggctaaatcctatatatcttac

SEQ ID NO: 18334 - DNA, 23 bp, Homo sapiens
  source 1..23: mol_type = genomic DNA
ggctaaatcctatatatcttacc

SEQ ID NO: 18335 - DNA, 24 bp, Homo sapiens
  source 1..24: mol_type = genomic DNA
ggctaaatcctatatatcttacca

SEQ ID NO: 18336 - DNA, 29 bp, Homo sapiens
  source 1..29: mol_type = genomic DNA
ggctagctcagtcgatagagcatgagact

SEQ ID NO: 18337 - DNA, 16 bp, Homo sapiens
  source 1..16: mol_type = genomic DNA
ggctagctcagtcggc

SEQ ID NO: 18338 - DNA, 16 bp, Homo sapiens
  source 1..16: mol_type = genomic DNA
ggctagctcagtcggt

SEQ ID NO: 18339 - DNA, 17 bp, Homo sapiens
  source 1..17: mol_type = genomic DNA
ggctagctcagtcggta

SEQ ID NO: 18340 - DNA, 18 bp, Homo sapiens
  source 1..18: mol_type = genomic DNA
ggctagctcagtcggtag

SEQ ID NO: 18341 - DNA, 19 bp, Homo sapiens
  source 1..19: mol_type = genomic DNA
ggctagctcagtcggtaga

SEQ ID NO: 18342 - DNA, 20 bp, Homo sapiens
  source 1..20: mol_type = genomic DNA
ggctagctcagtcggtagag

SEQ ID NO: 18343 - DNA, 21 bp, Homo sapiens
  source 1..21: mol_type = genomic DNA
ggctagctcagtcggtagagc

SEQ ID NO: 18344 - DNA, 22 bp, Homo sapiens
  source 1..22: mol_type = genomic DNA
ggctagctcagtcggtagagca

SEQ ID NO: 18345 - DNA, 23 bp, Homo sapiens
  source 1..23: mol_type = genomic DNA
ggctagctcagtcggtagagcat

SEQ ID NO: 18346 - DNA, 24 bp, Homo sapiens
  source 1..24: mol_type = genomic DNA
ggctagctcagtcggtagagcatg

SEQ ID NO: 18347 - DNA, 25 bp, Homo sapiens
  source 1..25: mol_type = genomic DNA
ggctagctcagtcggtagagcatga

SEQ ID NO: 18348 - DNA, 26 bp, Homo sapiens
  source 1..26: mol_type = genomic DNA
ggctagctcagtcggtagagcatgag

SEQ ID NO: 18349 - DNA, 27 bp, Homo sapiens
  source 1..27: mol_type = genomic DNA
ggctagctcagtcggtagagcatgaga

SEQ ID NO: 18350 - DNA, 28 bp, Homo sapiens
  source 1..28: mol_type = genomic DNA
ggctagctcagtcggtagagcatgagac

SEQ ID NO: 18351 - DNA, 29 bp, Homo sapiens
  source 1..29: mol_type = genomic DNA
ggctagctcagtcggtagagcatgagacc

SEQ ID NO: 18352 - DNA, 30 bp, Homo sapiens
  source 1..30: mol_type = genomic DNA
ggctagctcagtcggtagagcatgagaccc

SEQ ID NO: 18353 - DNA, 31 bp, Homo sapiens
  source 1..31: mol_type = genomic DNA
ggctagctcagtcggtagagcatgagaccct

SEQ ID NO: 18354 - DNA, 29 bp, Homo sapiens
  source 1..29: mol_type = genomic DNA
ggctagctcagtcggtagagcatgagact

SEQ ID NO: 18355 - DNA, 30 bp, Homo sapiens
  source 1..30: mol_type = genomic DNA
ggctagctcagtcggtagagcatgagactc

SEQ ID NO: 18356 - DNA, 31 bp, Homo sapiens
  source 1..31: mol_type = genomic DNA
ggctagctcagtcggtagagcatgagactct

SEQ ID NO: 18357 - DNA, 32 bp, Homo sapiens
  source 1..32: mol_type = genomic DNA
ggctagctcagtcggtagagcatgagactctt

SEQ ID NO: 18358 - DNA, 33 bp, Homo sapiens
  source 1..33: mol_type = genomic DNA
ggctagctcagtcggtagagcatgagactctta

SEQ ID NO: 18359 - DNA, 34 bp, Homo sapiens
  source 1..34: mol_type = genomic DNA
ggctagctcagtcggtagagcatgagactcttaa

SEQ ID NO: 18360 - DNA, 35 bp, Homo sapiens
  source 1..35: mol_type = genomic DNA
ggctagctcagtcggtagagcatgagactcttaat

SEQ ID NO: 18361 - DNA, 36 bp, Homo sapiens
  source 1..36: mol_type = genomic DNA
ggctagctcagtcggtagagcatgagactcttaatc

SEQ ID NO: 18362 - DNA, 37 bp, Homo sapiens
  source 1..37: mol_type = genomic DNA
ggctagctcagtcggtagagcatgagactcttaatct

SEQ ID NO: 18363 - DNA, 38 bp, Homo sapiens
  source 1..38: mol_type = genomic DNA
ggctagctcagtcggtagagcatgagactcttaatctc

SEQ ID NO: 18364 - DNA, 48 bp, Homo sapiens
  source 1..48: mol_type = genomic DNA
ggctagctcagtcggtagagcatgagactcttaatctcagggtcgtgg

SEQ ID NO: 18365 - DNA, 25 bp, Homo sapiens
  source 1..25: mol_type = genomic DNA
ggctagctcagtcggtagagcatgg

SEQ ID NO: 18366 - DNA, 26 bp, Homo sapiens
  source 1..26: mol_type = genomic DNA
ggctagctcagtcggtagagcatggg

SEQ ID NO: 18367 - DNA, 27 bp, Homo sapiens
  source 1..27: mol_type = genomic DNA
ggctagctcagtcggtagagcatggga

SEQ ID NO: 18368 - DNA, 28 bp, Homo sapiens
  source 1..28: mol_type = genomic DNA
ggctagctcagtcggtagagcatgggac

SEQ ID NO: 18369 - DNA, 29 bp, Homo sapiens
  source 1..29: mol_type = genomic DNA
ggctagctcagtcggtagagcatgggact

SEQ ID NO: 18370 - DNA, 30 bp, Homo sapiens
  source 1..30: mol_type = genomic DNA
ggctagctcagtcggtagagcatgggactc

SEQ ID NO: 18371 - DNA, 31 bp, Homo sapiens
  source 1..31: mol_type = genomic DNA
ggctagctcagtcggtagagcatgggactct

SEQ ID NO: 18372 - DNA, 32 bp, Homo sapiens
  source 1..32: mol_type = genomic DNA
ggctagctcagtcggtagagcatgggactctt

SEQ ID NO: 18373 - DNA, 33 bp, Homo sapiens
  source 1..33: mol_type = genomic DNA
ggctagctcagtcggtagagcatgggactctta

SEQ ID NO: 18374 - DNA, 34 bp, Homo sapiens
  source 1..34: mol_type = genomic DNA
ggctagctcagtcggtagagcatgggactcttaa

SEQ ID NO: 18375 - DNA, 35 bp, Homo sapiens
  source 1..35: mol_type = genomic DNA
ggctagctcagtcggtagagcatgggactcttaat

SEQ ID NO: 18376 - DNA, 36 bp, Homo sapiens
  source 1..36: mol_type = genomic DNA
ggctagctcagtcggtagagcatgggactcttaatc

SEQ ID NO: 18377 - DNA, 37 bp, Homo sapiens
  source 1..37: mol_type = genomic DNA
ggctagctcagtcggtagagcatgggactcttaatcc

SEQ ID NO: 18378 - DNA, 38 bp, Homo sapiens
  source 1..38: mol_type = genomic DNA
ggctagctcagtcggtagagcatgggactcttaatccc

SEQ ID NO: 18379 - DNA, 48 bp, Homo sapiens
  source 1..48: mol_type = genomic DNA
ggctagctcagtcggtagagcatgggactcttaatcccagggtcgtgg

SEQ ID NO: 18380 - DNA, 16 bp, Homo sapiens
  source 1..16: mol_type = genomic DNA
ggctaggattcggcgc

SEQ ID NO: 18381 - DNA, 17 bp, Homo sapiens
  source 1..17: mol_type = genomic DNA
ggctaggattcggcgct

SEQ ID NO: 18382 - DNA, 18 bp, Homo sapiens
  source 1..18: mol_type = genomic DNA
ggctaggattcggcgctt

SEQ ID NO: 18383 - DNA, 19 bp, Homo sapiens
  source 1..19: mol_type = genomic DNA
ggctaggattcggcgcttt

SEQ ID NO: 18384 - DNA, 20 bp, Homo sapiens
  source 1..20: mol_type = genomic DNA
ggctaggattcggcgctttc

SEQ ID NO: 18385 - DNA, 23 bp, Homo sapiens
  source 1..23: mol_type = genomic DNA
ggctaggattcggcgctttcacc

SEQ ID NO: 18386 - DNA, 16 bp, Homo sapiens
  source 1..16: mol_type = genomic DNA
ggctcacatcacccca

SEQ ID NO: 18387 - DNA, 18 bp, Homo sapiens
  source 1..18: mol_type = genomic DNA
ggctcacatcaccccata

SEQ ID NO: 18388 - DNA, 19 bp, Homo sapiens
  source 1..19: mol_type = genomic DNA
ggctcacatcaccccataa

SEQ ID NO: 18389 - DNA, 20 bp, Homo sapiens
  source 1..20: mol_type = genomic DNA
ggctcacatcaccccataaa

SEQ ID NO: 18390 - DNA, 21 bp, Homo sapiens
  source 1..21: mol_type = genomic DNA
ggctcacatcaccccataaac

SEQ ID NO: 18391 - DNA, 22 bp, Homo sapiens
  source 1..22: mol_type = genomic DNA
ggctcacatcaccccataaaca

SEQ ID NO: 18392 - DNA, 23 bp, Homo sapiens
  source 1..23: mol_type = genomic DNA
ggctcacatcaccccataaacac

SEQ ID NO: 18393 - DNA, 24 bp, Homo sapiens
  source 1..24: mol_type = genomic DNA
ggctcacatcaccccataaacacc

SEQ ID NO: 18394 - DNA, 25 bp, Homo sapiens
  source 1..25: mol_type = genomic DNA
ggctcacatcaccccataaacacca

SEQ ID NO: 18395 - DNA, 25 bp, Homo sapiens
  source 1..25: mol_type = genomic DNA
ggctccagtctcttcggaggcgtgg

SEQ ID NO: 18396 - DNA, 22 bp, Homo sapiens
  source 1..22: mol_type = genomic DNA
ggctccagtctcttcgggggcg

SEQ ID NO: 18397 - DNA, 24 bp, Homo sapiens
  source 1..24: mol_type = genomic DNA
ggctccagtctcttcgggggcgtg

SEQ ID NO: 18398 - DNA, 25 bp, Homo sapiens
  source 1..25: mol_type = genomic DNA
ggctccagtctcttcgggggcgtgg

SEQ ID NO: 18399 - DNA, 26 bp, Homo sapiens
  source 1..26: mol_type = genomic DNA
ggctccagtctcttcgggggcgtggg

SEQ ID NO: 18400 - DNA, 27 bp, Homo sapiens
  source 1..27: mol_type = genomic DNA
ggctccagtctcttcgggggcgtgggt

SEQ ID NO: 18401 - DNA, 28 bp, Homo sapiens
  source 1..28: mol_type = genomic DNA
ggctccagtctcttcgggggcgtgggtt

SEQ ID NO: 18402 - DNA, 17 bp, Homo sapiens
  source 1..17: mol_type = genomic DNA
ggctccatagctcaggg

SEQ ID NO: 18403 - DNA, 18 bp, Homo sapiens
  source 1..18: mol_type = genomic DNA
ggctccatagctcagggg

SEQ ID NO: 18404 - DNA, 19 bp, Homo sapiens
  source 1..19: mol_type = genomic DNA
ggctccatagctcaggggt

SEQ ID NO: 18405 - DNA, 27 bp, Homo sapiens
  source 1..27: mol_type = genomic DNA
ggctccatagctcaggggttagagcac

SEQ ID NO: 18406 - DNA, 28 bp, Homo sapiens
  source 1..28: mol_type = genomic DNA
ggctccatagctcaggggttagagcact

SEQ ID NO: 18407 - DNA, 29 bp, Homo sapiens
  source 1..29: mol_type = genomic DNA
ggctccatagctcaggggttagagcactg

SEQ ID NO: 18408 - DNA, 30 bp, Homo sapiens
  source 1..30: mol_type = genomic DNA
ggctccatagctcaggggttagagcactgg

SEQ ID NO: 18409 - DNA, 31 bp, Homo sapiens
  source 1..31: mol_type = genomic DNA
ggctccatagctcaggggttagagcactggt

SEQ ID NO: 18410 - DNA, 32 bp, Homo sapiens
  source 1..32: mol_type = genomic DNA
ggctccatagctcaggggttagagcactggtc

SEQ ID NO: 18411 - DNA, 33 bp, Homo sapiens
  source 1..33: mol_type = genomic DNA
ggctccatagctcaggggttagagcactggtct

SEQ ID NO: 18412 - DNA, 34 bp, Homo sapiens
  source 1..34: mol_type = genomic DNA
ggctccatagctcaggggttagagcactggtctt

SEQ ID NO: 18413 - DNA, 35 bp, Homo sapiens
  source 1..35: mol_type = genomic DNA
ggctccatagctcaggggttagagcactggtcttg

SEQ ID NO: 18414 - DNA, 36 bp, Homo sapiens
  source 1..36: mol_type = genomic DNA
ggctccatagctcaggggttagagcactggtcttgt

SEQ ID NO: 18415 - DNA, 37 bp, Homo sapiens
  source 1..37: mol_type = genomic DNA
ggctccatagctcaggggttagagcactggtcttgta

SEQ ID NO: 18416 - DNA, 32 bp, Homo sapiens
  source 1..32: mol_type = genomic DNA
ggctccatagctcagtggttagagcactggtc

SEQ ID NO: 18417 - DNA, 33 bp, Homo sapiens
  source 1..33: mol_type = genomic DNA
ggctccatagctcagtggttagagcactggtct

SEQ ID NO: 18418 - DNA, 35 bp, Homo sapiens
  source 1..35: mol_type = genomic DNA
ggctccatagctcagtggttagagcactggtcttg

SEQ ID NO: 18419 - DNA, 18 bp, Homo sapiens
  source 1..18: mol_type = genomic DNA
ggctccgtggcgcaatgg

SEQ ID NO: 18420 - DNA, 19 bp, Homo sapiens
  source 1..19: mol_type = genomic DNA
ggctccgtggcgcaatgga

SEQ ID NO: 18421 - DNA, 20 bp, Homo sapiens
  source 1..20: mol_type = genomic DNA
ggctccgtggcgcaatggat

SEQ ID NO: 18422 - DNA, 22 bp, Homo sapiens
  source 1..22: mol_type = genomic DNA
ggctccgtggcgcaatggatag

SEQ ID NO: 18423 - DNA, 23 bp, Homo sapiens
  source 1..23: mol_type = genomic DNA
ggctccgtggcgcaatggatagc

SEQ ID NO: 18424 - DNA, 29 bp, Homo sapiens
  source 1..29: mol_type = genomic DNA
ggctccgtggcgcaatggatagcgcattg

SEQ ID NO: 18425 - DNA, 30 bp, Homo sapiens
  source 1..30: mol_type = genomic DNA
ggctccgtggcgcaatggatagcgcattgg

SEQ ID NO: 18426 - DNA, 31 bp, Homo sapiens
  source 1..31: mol_type = genomic DNA
ggctccgtggcgcaatggatagcgcattgga

SEQ ID NO: 18427 - DNA, 32 bp, Homo sapiens
  source 1..32: mol_type = genomic DNA
ggctccgtggcgcaatggatagcgcattggac

SEQ ID NO: 18428 - DNA, 33 bp, Homo sapiens
  source 1..33: mol_type = genomic DNA
ggctccgtggcgcaatggatagcgcattggact

SEQ ID NO: 18429 - DNA, 34 bp, Homo sapiens
  source 1..34: mol_type = genomic DNA
ggctccgtggcgcaatggatagcgcattggactt

SEQ ID NO: 18430 - DNA, 35 bp, Homo sapiens
  source 1..35: mol_type = genomic DNA
ggctccgtggcgcaatggatagcgcattggacttc

SEQ ID NO: 18431 - DNA, 36 bp, Homo sapiens
  source 1..36: mol_type = genomic DNA
ggctccgtggcgcaatggatagcgcattggacttct

SEQ ID NO: 18432 - DNA, 37 bp, Homo sapiens
  source 1..37: mol_type = genomic DNA
ggctccgtggcgcaatggatagcgcattggacttcta

SEQ ID NO: 18433 - DNA, 16 bp, Homo sapiens
  source 1..16: mol_type = genomic DNA
ggctccgtggcttagc

SEQ ID NO: 18434 - DNA, 18 bp, Homo sapiens
  source 1..18: mol_type = genomic DNA
ggctccgtggcttagctg

SEQ ID NO: 18435 - DNA, 16 bp, Homo sapiens
  source 1..16: mol_type = genomic DNA
ggctcgttggtctagg

SEQ ID NO: 18436 - DNA, 17 bp, Homo sapiens
  source 1..17: mol_type = genomic DNA
ggctcgttggtctaggg

SEQ ID NO: 18437 - DNA, 18 bp, Homo sapiens
  source 1..18: mol_type = genomic DNA
ggctcgttggtctagggg

SEQ ID NO: 18438 - DNA, 19 bp, Homo sapiens
  source 1..19: mol_type = genomic DNA
ggctcgttggtctaggggt

SEQ ID NO: 18439 - DNA, 20 bp, Homo sapiens
  source 1..20: mol_type = genomic DNA
ggctcgttggtctaggggta

SEQ ID NO: 18440 - DNA, 22 bp, Homo sapiens
  source 1..22: mol_type = genomic DNA
ggctcgttggtctaggggtatg

SEQ ID NO: 18441 - DNA, 23 bp, Homo sapiens
  source 1..23: mol_type = genomic DNA
ggctcgttggtctaggggtatga

SEQ ID NO: 18442 - DNA, 25 bp, Homo sapiens
  source 1..25: mol_type = genomic DNA
ggctcgttggtctaggggtatgatt

SEQ ID NO: 18443 - DNA, 26 bp, Homo sapiens
  source 1..26: mol_type = genomic DNA
ggctcgttggtctaggggtatgattc

SEQ ID NO: 18444 - DNA, 27 bp, Homo sapiens
  source 1..27: mol_type = genomic DNA
ggctcgttggtctaggggtatgattct

SEQ ID NO: 18445 - DNA, 28 bp, Homo sapiens
  source 1..28: mol_type = genomic DNA
ggctcgttggtctaggggtatgattctc

SEQ ID NO: 18446 - DNA, 29 bp, Homo sapiens
  source 1..29: mol_type = genomic DNA
ggctcgttggtctaggggtatgattctcg

SEQ ID NO: 18447 - DNA, 30 bp, Homo sapiens
  source 1..30: mol_type = genomic DNA
ggctcgttggtctaggggtatgattctcgc

SEQ ID NO: 18448 - DNA, 31 bp, Homo sapiens
  source 1..31: mol_type = genomic DNA
ggctcgttggtctaggggtatgattctcgct

SEQ ID NO: 18449 - DNA, 32 bp, Homo sapiens
  source 1..32: mol_type = genomic DNA
ggctcgttggtctaggggtatgattctcgctt

SEQ ID NO: 18450 - DNA, 33 bp, Homo sapiens
  source 1..33: mol_type = genomic DNA
ggctcgttggtctaggggtatgattctcgcttc

SEQ ID NO: 18451 - DNA, 34 bp, Homo sapiens
  source 1..34: mol_type = genomic DNA
ggctcgttggtctaggggtatgattctcgcttcg

SEQ ID NO: 18452 - DNA, 35 bp, Homo sapiens
  source 1..35: mol_type = genomic DNA
ggctcgttggtctaggggtatgattctcgcttcgg

SEQ ID NO: 18453 - DNA, 36 bp, Homo sapiens
  source 1..36: mol_type = genomic DNA
ggctcgttggtctaggggtatgattctcgcttcggg

SEQ ID NO: 18454 - DNA, 33 bp, Homo sapiens
  source 1..33: mol_type = genomic DNA
ggctcgttggtctaggggtatgattctcgcttt

SEQ ID NO: 18455 - DNA, 34 bp, Homo sapiens
  source 1..34: mol_type = genomic DNA
ggctcgttggtctaggggtatgattctcgctttg

SEQ ID NO: 18456 - DNA, 35 bp, Homo sapiens
  source 1..35: mol_type = genomic DNA
ggctcgttggtctaggggtatgattctcgctttgg

SEQ ID NO: 18457 - DNA, 36 bp, Homo sapiens
  source 1..36: mol_type = genomic DNA
ggctcgttggtctaggggtatgattctcgctttggg

SEQ ID NO: 18458 - DNA, 31 bp, Homo sapiens
  source 1..31: mol_type = genomic DNA
ggctcgttggtctaggggtatgattctcggt

SEQ ID NO: 18459 - DNA, 32 bp, Homo sapiens
  source 1..32: mol_type = genomic DNA
ggctcgttggtctaggggtatgattctcggtt

SEQ ID NO: 18460 - DNA, 33 bp, Homo sapiens
  source 1..33: mol_type = genomic DNA
ggctcgttggtctaggggtatgattctcggttt

SEQ ID NO: 18461 - DNA, 34 bp, Homo sapiens
  source 1..34: mol_type = genomic DNA
ggctcgttggtctaggggtatgattctcggtttg

SEQ ID NO: 18462 - DNA, 35 bp, Homo sapiens
  source 1..35: mol_type = genomic DNA
ggctcgttggtctaggggtatgattctcggtttgg

SEQ ID NO: 18463 - DNA, 37 bp, Homo sapiens
  source 1..37: mol_type = genomic DNA
ggctcgttggtctaggggtatgattctcggtttgggt

SEQ ID NO: 18464 - DNA, 38 bp, Homo sapiens
  source 1..38: mol_type = genomic DNA
ggctcgttggtctaggggtatgattctcggtttgggtc

SEQ ID NO: 18465 - DNA, 22 bp, Homo sapiens
  source 1..22: mol_type = genomic DNA
ggctcgttggtctagtggtatg

SEQ ID NO: 18466 - DNA, 28 bp, Homo sapiens
  source 1..28: mol_type = genomic DNA
ggctcgttggtctagtggtatgattctc

SEQ ID NO: 18467 - DNA, 31 bp, Homo sapiens
  source 1..31: mol_type = genomic DNA
ggctcgttggtctagtggtatgattctcgct

SEQ ID NO: 18468 - DNA, 32 bp, Homo sapiens
  source 1..32: mol_type = genomic DNA
ggctcgttggtctagtggtatgattctcgctt

SEQ ID NO: 18469 - DNA, 35 bp, Homo sapiens
  source 1..35: mol_type = genomic DNA
ggctcgttggtctagtggtatgattctcgctttgg

SEQ ID NO: 18470 - DNA, 18 bp, Homo sapiens
  source 1..18: mol_type = genomic DNA
ggctctgtggcgcaatgg

SEQ ID NO: 18471 - DNA, 19 bp, Homo sapiens
  source 1..19: mol_type = genomic DNA
ggctctgtggcgcaatgga

SEQ ID NO: 18472 - DNA, 20 bp, Homo sapiens
  source 1..20: mol_type = genomic DNA
ggctctgtggcgcaatggat

SEQ ID NO: 18473 - DNA, 29 bp, Homo sapiens
  source 1..29: mol_type = genomic DNA
ggctctgtggcgcaatggatagcgcattg

SEQ ID NO: 18474 - DNA, 32 bp, Homo sapiens
  source 1..32: mol_type = genomic DNA
ggctctgtggcgcaatggatagcgcattggac

SEQ ID NO: 18475 - DNA, 33 bp, Homo sapiens
  source 1..33: mol_type = genomic DNA
ggctctgtggcgcaatggatagcgcattggact

SEQ ID NO: 18476 - DNA, 34 bp, Homo sapiens
  source 1..34: mol_type = genomic DNA
ggctctgtggcgcaatggatagcgcattggactt

SEQ ID NO: 18477 - DNA, 20 bp, Homo sapiens
  source 1..20: mol_type = genomic DNA
ggctctgtggcttagttggc

SEQ ID NO: 18478 - DNA, 20 bp, Homo sapiens
  source 1..20: mol_type = genomic DNA
ggctgagtgaagcattggac

SEQ ID NO: 18479 - DNA, 21 bp, Homo sapiens
  source 1..21: mol_type = genomic DNA
ggctgagtgaagcattggact

SEQ ID NO: 18480 - DNA, 22 bp, Homo sapiens
  source 1..22: mol_type = genomic DNA
ggctgagtgaagcattggactg

SEQ ID NO: 18481 - DNA, 23 bp, Homo sapiens
  source 1..23: mol_type = genomic DNA
ggctgagtgaagcattggactgt

SEQ ID NO: 18482 - DNA, 24 bp, Homo sapiens
  source 1..24: mol_type = genomic DNA
ggctgagtgaagcattggactgta

SEQ ID NO: 18483 - DNA, 25 bp, Homo sapiens
  source 1..25: mol_type = genomic DNA
ggctgagtgaagcattggactgtaa

SEQ ID NO: 18484 - DNA, 26 bp, Homo sapiens
  source 1..26: mol_type = genomic DNA
ggctgagtgaagcattggactgtaaa

SEQ ID NO: 18485 - DNA, 28 bp, Homo sapiens
  source 1..28: mol_type = genomic DNA
ggctgagtgaagcattggactgtaaatc

SEQ ID NO: 18486 - DNA, 29 bp, Homo sapiens
  source 1..29: mol_type = genomic DNA
ggctgagtgaagcattggactgtaaatct

SEQ ID NO: 18487 - DNA, 31 bp, Homo sapiens
  source 1..31: mol_type = genomic DNA
ggctgagtgaagcattggactgtaaatctaa

SEQ ID NO: 18488 - DNA, 16 bp, Homo sapiens
  source 1..16: mol_type = genomic DNA
ggctgcgtgttcgaat

SEQ ID NO: 18489 - DNA, 30 bp, Homo sapiens
  source 1..30: mol_type = genomic DNA
ggctgcgtgttcgaatcacgtcggggtcac

SEQ ID NO: 18490 - DNA, 26 bp, Homo sapiens
  source 1..26: mol_type = genomic DNA
ggctgtgatggccgagtggttaaggc

SEQ ID NO: 18491 - DNA, 22 bp, Homo sapiens
  source 1..22: mol_type = genomic DNA
ggctgttaaccgaaaggttggt

SEQ ID NO: 18492 - DNA, 23 bp, Homo sapiens
  source 1..23: mol_type = genomic DNA
ggctgttaaccgaaaggttggtg

SEQ ID NO: 18493 - DNA, 26 bp, Homo sapiens
  source 1..26: mol_type = genomic DNA
ggctgttaaccgaaaggttggtggtt

SEQ ID NO: 18494 - DNA, 45 bp, Homo sapiens
  source 1..45: mol_type = genomic DNA
ggctgttaaccgaaaggttggtggttcgagcccacccagggacgc

SEQ ID NO: 18495 - DNA, 16 bp, Homo sapiens
  source 1..16: mol_type = genomic DNA
ggcttacgacccctta

SEQ ID NO: 18496 - DNA, 21 bp, Homo sapiens
  source 1..21: mol_type = genomic DNA
ggcttacgaccccttatttac

SEQ ID NO: 18497 - DNA, 23 bp, Homo sapiens
  source 1..23: mol_type = genomic DNA
ggcttacgaccccttatttaccc

SEQ ID NO: 18498 - DNA, 24 bp, Homo sapiens
  source 1..24: mol_type = genomic DNA
ggcttacgaccccttatttacccc

SEQ ID NO: 18499 - DNA, 25 bp, Homo sapiens
  source 1..25: mol_type = genomic DNA
ggcttacgaccccttatttacccca

SEQ ID NO: 18500 - DNA, 24 bp, Homo sapiens
  source 1..24: mol_type = genomic DNA
ggcttagcttaattaaagtggctg

SEQ ID NO: 18501 - DNA, 26 bp, Homo sapiens
  source 1..26: mol_type = genomic DNA
ggcttagcttaattaaagtggctgat

SEQ ID NO: 18502 - DNA, 30 bp, Homo sapiens
  source 1..30: mol_type = genomic DNA
ggcttagcttaattaaagtggctgatttgc

SEQ ID NO: 18503 - DNA, 34 bp, Homo sapiens
  source 1..34: mol_type = genomic DNA
ggcttctgtagtgtagtggttatcacgttcgcct

SEQ ID NO: 18504 - DNA, 26 bp, Homo sapiens
  source 1..26: mol_type = genomic DNA
gggagaccggggttcaattccccgac

SEQ ID NO: 18505 - DNA, 28 bp, Homo sapiens
  source 1..28: mol_type = genomic DNA
gggagaccggggttcaattccccgacgg

SEQ ID NO: 18506 - DNA, 29 bp, Homo sapiens
  source 1..29: mol_type = genomic DNA
gggagaccggggttcaattccccgacggg

SEQ ID NO: 18507 - DNA, 30 bp, Homo sapiens
  source 1..30: mol_type = genomic DNA
gggagaccggggttcaattccccgacgggg

SEQ ID NO: 18508 - DNA, 31 bp, Homo sapiens
  source 1..31: mol_type = genomic DNA
gggagaccggggttcaattccccgacgggga

SEQ ID NO: 18509 - DNA, 32 bp, Homo sapiens
  source 1..32: mol_type = genomic DNA
gggagaccggggttcaattccccgacggggag

SEQ ID NO: 18510 - DNA, 33 bp, Homo sapiens
  source 1..33: mol_type = genomic DNA
gggagaccggggttcaattccccgacggggagc

SEQ ID NO: 18511 - DNA, 34 bp, Homo sapiens
  source 1..34: mol_type = genomic DNA
gggagaccggggttcaattccccgacggggagcc

SEQ ID NO: 18512 - DNA, 35 bp, Homo sapiens
  source 1..35: mol_type = genomic DNA
gggagaccggggttcaattccccgacggggagcca

SEQ ID NO: 18513 - DNA, 16 bp, Homo sapiens
  source 1..16: mol_type = genomic DNA
gggagaccggggttcg

SEQ ID NO: 18514 - DNA, 25 bp, Homo sapiens
  source 1..25: mol_type = genomic DNA
gggagaccggggttcgattccccga

SEQ ID NO: 18515 - DNA, 26 bp, Homo sapiens
  source 1..26: mol_type = genomic DNA
gggagaccggggttcgattccccgac

SEQ ID NO: 18516 - DNA, 27 bp, Homo sapiens
  source 1..27: mol_type = genomic DNA
gggagaccggggttcgattccccgacg

SEQ ID NO: 18517 - DNA, 28 bp, Homo sapiens
  source 1..28: mol_type = genomic DNA
gggagaccggggttcgattccccgacgg

SEQ ID NO: 18518 - DNA, 29 bp, Homo sapiens
  source 1..29: mol_type = genomic DNA
gggagaccggggttcgattccccgacggg

SEQ ID NO: 18519 - DNA, 30 bp, Homo sapiens
  source 1..30: mol_type = genomic DNA
gggagaccggggttcgattccccgacgggg

SEQ ID NO: 18520 - DNA, 31 bp, Homo sapiens
  source 1..31: mol_type = genomic DNA
gggagaccggggttcgattccccgacgggga

SEQ ID NO: 18521 - DNA, 32 bp, Homo sapiens
  source 1..32: mol_type = genomic DNA
gggagaccggggttcgattccccgacggggag

SEQ ID NO: 18522 - DNA, 33 bp, Homo sapiens
  source 1..33: mol_type = genomic DNA
gggagaccggggttcgattccccgacggggagc

SEQ ID NO: 18523 - DNA, 34 bp, Homo sapiens
  source 1..34: mol_type = genomic DNA
gggagaccggggttcgattccccgacggggagcc

SEQ ID NO: 18524 - DNA, 35 bp, Homo sapiens
  source 1..35: mol_type = genomic DNA
gggagaccggggttcgattccccgacggggagcca

SEQ ID NO: 18525 - DNA, 32 bp, Homo sapiens
  source 1..32: mol_type = genomic DNA
gggagagcgttagactgaagatctaaaggtcc

SEQ ID NO: 18526 - DNA, 25 bp, Homo sapiens
  source 1..25: mol_type = genomic DNA
gggaggcccgggttcgattcccggc

SEQ ID NO: 18527 - DNA, 26 bp, Homo sapiens
  source 1..26: mol_type = genomic DNA
gggaggcccgggttcgattcccggcc

SEQ ID NO: 18528 - DNA, 30 bp, Homo sapiens
  source 1..30: mol_type = genomic DNA
gggaggcccgggttcgattcccggccaatg

SEQ ID NO: 18529 - DNA, 33 bp, Homo sapiens
  source 1..33: mol_type = genomic DNA
gggaggcccgggttcgattcccggccaatgcac

SEQ ID NO: 18530 - DNA, 34 bp, Homo sapiens
  source 1..34: mol_type = genomic DNA
gggaggcccgggttcgattcccggccaatgcacc

SEQ ID NO: 18531 - DNA, 35 bp, Homo sapiens
  source 1..35: mol_type = genomic DNA
gggaggcccgggttcgattcccggccaatgcacca

SEQ ID NO: 18532 - DNA, 34 bp, Homo sapiens
  source 1..34: mol_type = genomic DNA
gggaggcccgggttcgattcccggcccatgcacc

SEQ ID NO: 18533 - DNA, 16 bp, Homo sapiens
  source 1..16: mol_type = genomic DNA
gggatgggttcgattc

SEQ ID NO: 18534 - DNA, 18 bp, Homo sapiens
  source 1..18: mol_type = genomic DNA
gggatgggttcgattctc

SEQ ID NO: 18535 - DNA, 25 bp, Homo sapiens
  source 1..25: mol_type = genomic DNA
gggatgggttcgattctcatagtcc

SEQ ID NO: 18536 - DNA, 26 bp, Homo sapiens
  source 1..26: mol_type = genomic DNA
gggatgggttcgattctcatagtcct

SEQ ID NO: 18537 - DNA, 29 bp, Homo sapiens
  source 1..29: mol_type = genomic DNA
gggatgggttcgattctcatagtcctagc

SEQ ID NO: 18538 - DNA, 30 bp, Homo sapiens
  source 1..30: mol_type = genomic DNA
gggatgggttcgattctcatagtcctagcc

SEQ ID NO: 18539 - DNA, 31 bp, Homo sapiens
  source 1..31: mol_type = genomic DNA
gggatgggttcgattctcatagtcctagcca

SEQ ID NO: 18540 - DNA, 16 bp, Homo sapiens
  source 1..16: mol_type = genomic DNA
gggatgtagctcagtg

SEQ ID NO: 18541 - DNA, 17 bp, Homo sapiens
  source 1..17: mol_type = genomic DNA
gggatgtagctcagtgg

SEQ ID NO: 18542 - DNA, 18 bp, Homo sapiens
  source 1..18: mol_type = genomic DNA
gggatgtagctcagtggt

SEQ ID NO: 18543 - DNA, 19 bp, Homo sapiens
  source 1..19: mol_type = genomic DNA
gggatgtagctcagtggta

SEQ ID NO: 18544 - DNA, 20 bp, Homo sapiens
  source 1..20: mol_type = genomic DNA
gggatgtagctcagtggtag

SEQ ID NO: 18545 - DNA, 21 bp, Homo sapiens
  source 1..21: mol_type = genomic DNA
gggatgtagctcagtggtaga

SEQ ID NO: 18546 - DNA, 22 bp, Homo sapiens
  source 1..22: mol_type = genomic DNA
gggatgtagctcagtggtagag

SEQ ID NO: 18547 - DNA, 23 bp, Homo sapiens
  source 1..23: mol_type = genomic DNA
gggatgtagctcagtggtagagc

SEQ ID NO: 18548 - DNA, 27 bp, Homo sapiens
  source 1..27: mol_type = genomic DNA
gggatgtagctcagtggtagagcgcat

SEQ ID NO: 18549 - DNA, 34 bp, Homo sapiens
  source 1..34: mol_type = genomic DNA
gggatgtagctcagtggtagagcgcgcgcttcgc

SEQ ID NO: 18550 - DNA, 20 bp, Homo sapiens
  source 1..20: mol_type = genomic DNA
gggattagctcaaatggtag

SEQ ID NO: 18551 - DNA, 21 bp, Homo sapiens
  source 1..21: mol_type = genomic DNA
gggattagctcaaatggtaga

SEQ ID NO: 18552 - DNA, 22 bp, Homo sapiens
  source 1..22: mol_type = genomic DNA
gggattagctcaaatggtagag

SEQ ID NO: 18553 - DNA, 30 bp, Homo sapiens
  source 1..30: mol_type = genomic DNA
gggattagctcaaatggtagagcgctcgct

SEQ ID NO: 18554 - DNA, 20 bp, Homo sapiens
  source 1..20: mol_type = genomic DNA
gggattgtgggttcgagtcc

SEQ ID NO: 18555 - DNA, 21 bp, Homo sapiens
  source 1..21: mol_type = genomic DNA
gggattgtgggttcgagtccc

SEQ ID NO: 18556 - DNA, 22 bp, Homo sapiens
  source 1..22: mol_type = genomic DNA
gggattgtgggttcgagtccca

SEQ ID NO: 18557 - DNA, 24 bp, Homo sapiens
  source 1..24: mol_type = genomic DNA
gggattgtgggttcgagtcccacc

SEQ ID NO: 18558 - DNA, 29 bp, Homo sapiens
  source 1..29: mol_type = genomic DNA
gggattgtgggttcgagtcccacccgggg

SEQ ID NO: 18559 - DNA, 30 bp, Homo sapiens
  source 1..30: mol_type = genomic DNA
gggattgtgggttcgagtcccacccggggt

SEQ ID NO: 18560 - DNA, 31 bp, Homo sapiens
  source 1..31: mol_type = genomic DNA
gggattgtgggttcgagtcccacccggggta

SEQ ID NO: 18561 - DNA, 31 bp, Homo sapiens
  source 1..31: mol_type = genomic DNA
gggattgtgggttcgagtcccacctggggta

SEQ ID NO: 18562 - DNA, 24 bp, Homo sapiens
  source 1..24: mol_type = genomic DNA
gggattgtgggttcgagtcccatc

SEQ ID NO: 18563 - DNA, 27 bp, Homo sapiens
  source 1..27: mol_type = genomic DNA
gggattgtgggttcgagtcccatctgg

SEQ ID NO: 18564 - DNA, 29 bp, Homo sapiens
  source 1..29: mol_type = genomic DNA
gggattgtgggttcgagtcccatctgggg

SEQ ID NO: 18565 - DNA, 31 bp, Homo sapiens
  source 1..31: mol_type = genomic DNA
gggattgtgggttcgagtcccatctggggtg

SEQ ID NO: 18566 - DNA, 32 bp, Homo sapiens
  source 1..32: mol_type = genomic DNA
gggattgtgggttcgagtcccatctggggtgc

SEQ ID NO: 18567 - DNA, 33 bp, Homo sapiens
  source 1..33: mol_type = genomic DNA
gggattgtgggttcgagtcccatctggggtgcc

SEQ ID NO: 18568 - DNA, 34 bp, Homo sapiens
  source 1..34: mol_type = genomic DNA
gggattgtgggttcgagtcccatctggggtgcca

SEQ ID NO: 18569 - DNA, 32 bp, Homo sapiens
  source 1..32: mol_type = genomic DNA
gggattgtgggttcgagtcccatctgggtcgc

SEQ ID NO: 18570 - DNA, 33 bp, Homo sapiens
  source 1..33: mol_type = genomic DNA
gggattgtgggttcgagtcccatctgggtcgcc

SEQ ID NO: 18571 - DNA, 34 bp, Homo sapiens
  source 1..34: mol_type = genomic DNA
gggattgtgggttcgagtcccatctgggtcgcca

SEQ ID NO: 18572 - DNA, 31 bp, Homo sapiens
  source 1..31: mol_type = genomic DNA
gggcatagctcagtggtagagcatttgactg

SEQ ID NO: 18573 - DNA, 32 bp, Homo sapiens
  source 1..32: mol_type = genomic DNA
gggcatagctcagtggtagagcatttgactgc

SEQ ID NO: 18574 - DNA, 18 bp, Homo sapiens
  source 1..18: mol_type = genomic DNA
gggccagtggcgcaatgg

SEQ ID NO: 18575 - DNA, 19 bp, Homo sapiens
  source 1..19: mol_type = genomic DNA
gggccagtggcgcaatgga

SEQ ID NO: 18576 - DNA, 20 bp, Homo sapiens
  source 1..20: mol_type = genomic DNA
gggccagtggcgcaatggat

SEQ ID NO: 18577 - DNA, 24 bp, Homo sapiens
  source 1..24: mol_type = genomic DNA
gggccagtggcgcaatggataacg

SEQ ID NO: 18578 - DNA, 32 bp, Homo sapiens
  source 1..32: mol_type = genomic DNA
gggccagtggcgcaatggataacgcgtctgac

SEQ ID NO: 18579 - DNA, 33 bp, Homo sapiens
  source 1..33: mol_type = genomic DNA
gggccagtggcgcaatggataacgcgtctgact

SEQ ID NO: 18580 - DNA, 26 bp, Homo sapiens
  source 1..26: mol_type = genomic DNA
gggcccataacccagaggtcgatgga

SEQ ID NO: 18581 - DNA, 27 bp, Homo sapiens
  source 1..27: mol_type = genomic DNA
gggcccataacccagaggtcgatggat

SEQ ID NO: 18582 - DNA, 28 bp, Homo sapiens
  source 1..28: mol_type = genomic DNA
gggcccataacccagaggtcgatggatc

SEQ ID NO: 18583 - DNA, 29 bp, Homo sapiens
  source 1..29: mol_type = genomic DNA
gggcccataacccagaggtcgatggatcg

SEQ ID NO: 18584 - DNA, 16 bp, Homo sapiens
  source 1..16: mol_type = genomic DNA
gggcccataccccgaa

SEQ ID NO: 18585 - DNA, 17 bp, Homo sapiens
  source 1..17: mol_type = genomic DNA
gggcccataccccgaaa

SEQ ID NO: 18586 - DNA, 18 bp, Homo sapiens
  source 1..18: mol_type = genomic DNA
gggcccataccccgaaaa

SEQ ID NO: 18587 - DNA, 19 bp, Homo sapiens
  source 1..19: mol_type = genomic DNA
gggcccataccccgaaaat

SEQ ID NO: 18588 - DNA, 20 bp, Homo sapiens
  source 1..20: mol_type = genomic DNA
gggcccataccccgaaaatg

SEQ ID NO: 18589 - DNA, 21 bp, Homo sapiens
  source 1..21: mol_type = genomic DNA
gggcccataccccgaaaatgt

SEQ ID NO: 18590 - DNA, 22 bp, Homo sapiens
  source 1..22: mol_type = genomic DNA
gggcccataccccgaaaatgtt

SEQ ID NO: 18591 - DNA, 23 bp, Homo sapiens
  source 1..23: mol_type = genomic DNA
gggcccataccccgaaaatgttg

SEQ ID NO: 18592 - DNA, 24 bp, Homo sapiens
  source 1..24: mol_type = genomic DNA
gggcccataccccgaaaatgttgg

SEQ ID NO: 18593 - DNA, 25 bp, Homo sapiens
  source 1..25: mol_type = genomic DNA
gggcccataccccgaaaatgttggt

SEQ ID NO: 18594 - DNA, 26 bp, Homo sapiens
  source 1..26: mol_type = genomic DNA
gggcccataccccgaaaatgttggtt

SEQ ID NO: 18595 - DNA, 27 bp, Homo sapiens
  source 1..27: mol_type = genomic DNA
gggcccataccccgaaaatgttggtta

SEQ ID NO: 18596 - DNA, 28 bp, Homo sapiens
  source 1..28: mol_type = genomic DNA
gggcccataccccgaaaatgttggttat

SEQ ID NO: 18597 - DNA, 29 bp, Homo sapiens
  source 1..29: mol_type = genomic DNA
gggcccataccccgaaaatgttggttata

SEQ ID NO: 18598 - DNA, 30 bp, Homo sapiens
  source 1..30: mol_type = genomic DNA
gggcccataccccgaaaatgttggttatac

SEQ ID NO: 18599 - DNA, 31 bp, Homo sapiens
  source 1..31: mol_type = genomic DNA
gggcccataccccgaaaatgttggttatacc

SEQ ID NO: 18600 - DNA, 32 bp, Homo sapiens
  source 1..32: mol_type = genomic DNA
gggcccataccccgaaaatgttggttataccc

SEQ ID NO: 18601 - DNA, 33 bp, Homo sapiens
  source 1..33: mol_type = genomic DNA
gggcccataccccgaaaatgttggttataccct

SEQ ID NO: 18602 - DNA, 34 bp, Homo sapiens
  source 1..34: mol_type = genomic DNA
gggcccataccccgaaaatgttggttataccctt

SEQ ID NO: 18603 - DNA, 35 bp, Homo sapiens
  source 1..35: mol_type = genomic DNA
gggcccataccccgaaaatgttggttatacccttc

SEQ ID NO: 18604 - DNA, 36 bp, Homo sapiens
  source 1..36: mol_type = genomic DNA
gggcccataccccgaaaatgttggttatacccttcc

SEQ ID NO: 18605 - DNA, 37 bp, Homo sapiens
  source 1..37: mol_type = genomic DNA
gggcccataccccgaaaatgttggttatacccttccc

SEQ ID NO: 18606 - DNA, 39 bp, Homo sapiens
  source 1..39: mol_type = genomic DNA
gggcccataccccgaaaatgttggttatacccttcccgt

SEQ ID NO: 18607 - DNA, 40 bp, Homo sapiens
  source 1..40: mol_type = genomic DNA
gggcccataccccgaaaatgttggttatacccttcccgta

SEQ ID NO: 18608 - DNA, 41 bp, Homo sapiens
  source 1..41: mol_type = genomic DNA
gggcccataccccgaaaatgttggttatacccttcccgtac

SEQ ID NO: 18609 - DNA, 42 bp, Homo sapiens
  source 1..42: mol_type = genomic DNA
gggcccataccccgaaaatgttggttatacccttcccgtact

SEQ ID NO: 18610 - DNA, 43 bp, Homo sapiens
  source 1..43: mol_type = genomic DNA
gggcccataccccgaaaatgttggttatacccttcccgtacta

SEQ ID NO: 18611 - DNA, 44 bp, Homo sapiens
  source 1..44: mol_type = genomic DNA
gggcccataccccgaaaatgttggttatacccttcccgtactac

SEQ ID NO: 18612 - DNA, 45 bp, Homo sapiens
  source 1..45: mol_type = genomic DNA
gggcccataccccgaaaatgttggttatacccttcccgtactacc

SEQ ID NO: 18613 - DNA, 46 bp, Homo sapiens
  source 1..46: mol_type = genomic DNA
gggcccataccccgaaaatgttggttatacccttcccgtactacca

SEQ ID NO: 18614 - DNA, 19 bp, Homo sapiens
  source 1..19: mol_type = genomic DNA
gggccccatggtgtaatgg

SEQ ID NO: 18615 - DNA, 20 bp, Homo sapiens
  source 1..20: mol_type = genomic DNA
gggccgcgtggcctaatgga

SEQ ID NO: 18616 - DNA, 35 bp, Homo sapiens
  source 1..35: mol_type = genomic DNA
gggcctcgtggcgcaacggtagcgcgtctgactcc

SEQ ID NO: 18617 - DNA, 20 bp, Homo sapiens
  source 1..20: mol_type = genomic DNA
gggcgtgggttcgaatccca

SEQ ID NO: 18618 - DNA, 16 bp, Homo sapiens
  source 1..16: mol_type = genomic DNA
gggctcacatcacccc

SEQ ID NO: 18619 - DNA, 17 bp, Homo sapiens
  source 1..17: mol_type = genomic DNA
gggctcacatcacccca

SEQ ID NO: 18620 - DNA, 19 bp, Homo sapiens
  source 1..19: mol_type = genomic DNA
gggctcacatcaccccata

SEQ ID NO: 18621 - DNA, 20 bp, Homo sapiens
  source 1..20: mol_type = genomic DNA
gggctcacatcaccccataa

SEQ ID NO: 18622 - DNA, 21 bp, Homo sapiens
  source 1..21: mol_type = genomic DNA
gggctcacatcaccccataaa

SEQ ID NO: 18623 - DNA, 22 bp, Homo sapiens
  source 1..22: mol_type = genomic DNA
gggctcacatcaccccataaac

SEQ ID NO: 18624 - DNA, 23 bp, Homo sapiens
  source 1..23: mol_type = genomic DNA
gggctcacatcaccccataaaca

SEQ ID NO: 18625 - DNA, 24 bp, Homo sapiens
  source 1..24: mol_type = genomic DNA
gggctcacatcaccccataaacac

SEQ ID NO: 18626 - DNA, 25 bp, Homo sapiens
  source 1..25: mol_type = genomic DNA
gggctcacatcaccccataaacacc

SEQ ID NO: 18627 - DNA, 26 bp, Homo sapiens
  source 1..26: mol_type = genomic DNA
gggctcacatcaccccataaacacca

SEQ ID NO: 18628 - DNA, 31 bp, Homo sapiens
  source 1..31: mol_type = genomic DNA
gggcttagcttaattaaagtggctgatttgc

SEQ ID NO: 18629 - DNA, 16 bp, Homo sapiens
  source 1..16: mol_type = genomic DNA
ggggaattagctcaaa

SEQ ID NO: 18630 - DNA, 19 bp, Homo sapiens
  source 1..19: mol_type = genomic DNA
ggggaattagctcaaatgg

SEQ ID NO: 18631 - DNA, 20 bp, Homo sapiens
  source 1..20: mol_type = genomic DNA
ggggaattagctcaaatggt

SEQ ID NO: 18632 - DNA, 23 bp, Homo sapiens
  source 1..23: mol_type = genomic DNA
ggggaattagctcaaatggtaga

SEQ ID NO: 18633 - DNA, 32 bp, Homo sapiens
  source 1..32: mol_type = genomic DNA
ggggaattagctcaaatggtagagcgctcgct

SEQ ID NO: 18634 - DNA, 33 bp, Homo sapiens
  source 1..33: mol_type = genomic DNA
ggggaattagctcaaatggtagagcgctcgctt

SEQ ID NO: 18635 - DNA, 33 bp, Homo sapiens
  source 1..33: mol_type = genomic DNA
ggggaattagctcaagtggtagagcgctcgctt

SEQ ID NO: 18636 - DNA, 16 bp, Homo sapiens
  source 1..16: mol_type = genomic DNA
ggggatgtagctcagt

SEQ ID NO: 18637 - DNA, 17 bp, Homo sapiens
  source 1..17: mol_type = genomic DNA
ggggatgtagctcagtg

SEQ ID NO: 18638 - DNA, 18 bp, Homo sapiens
  source 1..18: mol_type = genomic DNA
ggggatgtagctcagtgg

SEQ ID NO: 18639 - DNA, 19 bp, Homo sapiens
  source 1..19: mol_type = genomic DNA
ggggatgtagctcagtggt

SEQ ID NO: 18640 - DNA, 20 bp, Homo sapiens
  source 1..20: mol_type = genomic DNA
ggggatgtagctcagtggta

SEQ ID NO: 18641 - DNA, 21 bp, Homo sapiens
  source 1..21: mol_type = genomic DNA
ggggatgtagctcagtggtag

SEQ ID NO: 18642 - DNA, 22 bp, Homo sapiens
  source 1..22: mol_type = genomic DNA
ggggatgtagctcagtggtaga

SEQ ID NO: 18643 - DNA, 23 bp, Homo sapiens
  source 1..23: mol_type = genomic DNA
ggggatgtagctcagtggtagag

SEQ ID NO: 18644 - DNA, 24 bp, Homo sapiens
  source 1..24: mol_type = genomic DNA
ggggatgtagctcagtggtagagc

SEQ ID NO: 18645 - DNA, 26 bp, Homo sapiens
  source 1..26: mol_type = genomic DNA
ggggatgtagctcagtggtagagcgc

SEQ ID NO: 18646 - DNA, 27 bp, Homo sapiens
  source 1..27: mol_type = genomic DNA
ggggatgtagctcagtggtagagcgca

SEQ ID NO: 18647 - DNA, 28 bp, Homo sapiens
  source 1..28: mol_type = genomic DNA
ggggatgtagctcagtggtagagcgcat

SEQ ID NO: 18648 - DNA, 29 bp, Homo sapiens
  source 1..29: mol_type = genomic DNA
ggggatgtagctcagtggtagagcgcatg

SEQ ID NO: 18649 - DNA, 30 bp, Homo sapiens
  source 1..30: mol_type = genomic DNA
ggggatgtagctcagtggtagagcgcatgc

SEQ ID NO: 18650 - DNA, 31 bp, Homo sapiens
  source 1..31: mol_type = genomic DNA
ggggatgtagctcagtggtagagcgcatgct

SEQ ID NO: 18651 - DNA, 32 bp, Homo sapiens
  source 1..32: mol_type = genomic DNA
ggggatgtagctcagtggtagagcgcatgctt

SEQ ID NO: 18652 - DNA, 35 bp, Homo sapiens
  source 1..35: mol_type = genomic DNA
ggggatgtagctcagtggtagagcgcatgcttcgc

SEQ ID NO: 18653 - DNA, 34 bp, Homo sapiens
  source 1..34: mol_type = genomic DNA
ggggatgtagctcagtggtagagcgcatgctttg

SEQ ID NO: 18654 - DNA, 35 bp, Homo sapiens
  source 1..35: mol_type = genomic DNA
ggggatgtagctcagtggtagagcgcatgctttgc

SEQ ID NO: 18655 - DNA, 40 bp, Homo sapiens
  source 1..40: mol_type = genomic DNA
ggggatgtagctcagtggtagagcgcatgctttgcacgta

SEQ ID NO: 18656 - DNA, 28 bp, Homo sapiens
  source 1..28: mol_type = genomic DNA
ggggatgtagctcagtggtagagcgcgc

SEQ ID NO: 18657 - DNA, 29 bp, Homo sapiens
  source 1..29: mol_type = genomic DNA
ggggatgtagctcagtggtagagcgcgcg

SEQ ID NO: 18658 - DNA, 30 bp, Homo sapiens
  source 1..30: mol_type = genomic DNA
ggggatgtagctcagtggtagagcgcgcgc

SEQ ID NO: 18659 - DNA, 31 bp, Homo sapiens
  source 1..31: mol_type = genomic DNA
ggggatgtagctcagtggtagagcgcgcgct

SEQ ID NO: 18660 - DNA, 32 bp, Homo sapiens
  source 1..32: mol_type = genomic DNA
ggggatgtagctcagtggtagagcgcgcgctt

SEQ ID NO: 18661 - DNA, 33 bp, Homo sapiens
  source 1..33: mol_type = genomic DNA
ggggatgtagctcagtggtagagcgcgcgcttc

SEQ ID NO: 18662 - DNA, 34 bp, Homo sapiens
  source 1..34: mol_type = genomic DNA
ggggatgtagctcagtggtagagcgcgcgcttcg

SEQ ID NO: 18663 - DNA, 35 bp, Homo sapiens
  source 1..35: mol_type = genomic DNA
ggggatgtagctcagtggtagagcgcgcgcttcgc

SEQ ID NO: 18664 - DNA, 22 bp, Homo sapiens
  source 1..22: mol_type = genomic DNA
ggggattagctcaaatggtaga

SEQ ID NO: 18665 - DNA, 32 bp, Homo sapiens
  source 1..32: mol_type = genomic DNA
ggggattagctcaaatggtagagcgctcgctt

SEQ ID NO: 18666 - DNA, 16 bp, Homo sapiens
  source 1..16: mol_type = genomic DNA
ggggattgtgggttcg

SEQ ID NO: 18667 - DNA, 22 bp, Homo sapiens
  source 1..22: mol_type = genomic DNA
ggggattgtgggttcgagtccc

SEQ ID NO: 18668 - DNA, 23 bp, Homo sapiens
  source 1..23: mol_type = genomic DNA
ggggattgtgggttcgagtccca

SEQ ID NO: 18669 - DNA, 25 bp, Homo sapiens
  source 1..25: mol_type = genomic DNA
ggggattgtgggttcgagtcccatc

SEQ ID NO: 18670 - DNA, 29 bp, Homo sapiens
  source 1..29: mol_type = genomic DNA
ggggattgtgggttcgagtcccatctggg

SEQ ID NO: 18671 - DNA, 31 bp, Homo sapiens
  source 1..31: mol_type = genomic DNA
ggggattgtgggttcgagtcccatctgggtc

SEQ ID NO: 18672 - DNA, 32 bp, Homo sapiens
  source 1..32: mol_type = genomic DNA
ggggattgtgggttcgagtcccatctgggtcg

SEQ ID NO: 18673 - DNA, 33 bp, Homo sapiens
  source 1..33: mol_type = genomic DNA
ggggattgtgggttcgagtcccatctgggtcgc

SEQ ID NO: 18674 - DNA, 34 bp, Homo sapiens
  source 1..34: mol_type = genomic DNA
ggggattgtgggttcgagtcccatctgggtcgcc

SEQ ID NO: 18675 - DNA, 35 bp, Homo sapiens
  source 1..35: mol_type = genomic DNA
ggggattgtgggttcgagtcccatctgggtcgcca

SEQ ID NO: 18676 - DNA, 19 bp, Homo sapiens
  source 1..19: mol_type = genomic DNA
ggggcagagcatttgactg

SEQ ID NO: 18677 - DNA, 32 bp, Homo sapiens
  source 1..32: mol_type = genomic DNA
ggggcatagctcagtggtagagcatttgactg

SEQ ID NO: 18678 - DNA, 33 bp, Homo sapiens
  source 1..33: mol_type = genomic DNA
ggggcatagctcagtggtagagcatttgactgc

SEQ ID NO: 18679 - DNA, 21 bp, Homo sapiens
  source 1..21: mol_type = genomic DNA
ggggcgtgggttcgaatccca

SEQ ID NO: 18680 - DNA, 23 bp, Homo sapiens
  source 1..23: mol_type = genomic DNA
ggggcgtgggttcgaatcccacc

SEQ ID NO: 18681 - DNA, 27 bp, Homo sapiens
  source 1..27: mol_type = genomic DNA
ggggcgtgggttcgaatcccaccgctg

SEQ ID NO: 18682 - DNA, 16 bp, Homo sapiens
  source 1..16: mol_type = genomic DNA
gggggattagctcaaa

SEQ ID NO: 18683 - DNA, 18 bp, Homo sapiens
  source 1..18: mol_type = genomic DNA
gggggattagctcaaatg

SEQ ID NO: 18684 - DNA, 19 bp, Homo sapiens
  source 1..19: mol_type = genomic DNA
gggggattagctcaaatgg

SEQ ID NO: 18685 - DNA, 20 bp, Homo sapiens
  source 1..20: mol_type = genomic DNA
gggggattagctcaaatggt

SEQ ID NO: 18686 - DNA, 21 bp, Homo sapiens
  source 1..21: mol_type = genomic DNA
gggggattagctcaaatggta

SEQ ID NO: 18687 - DNA, 22 bp, Homo sapiens
  source 1..22: mol_type = genomic DNA
gggggattagctcaaatggtag

SEQ ID NO: 18688 - DNA, 23 bp, Homo sapiens
  source 1..23: mol_type = genomic DNA
gggggattagctcaaatggtaga

SEQ ID NO: 18689 - DNA, 24 bp, Homo sapiens
  source 1..24: mol_type = genomic DNA
gggggattagctcaaatggtagag

SEQ ID NO: 18690 - DNA, 25 bp, Homo sapiens
  source 1..25: mol_type = genomic DNA
gggggattagctcaaatggtagagc

SEQ ID NO: 18691 - DNA, 31 bp, Homo sapiens
  source 1..31: mol_type = genomic DNA
gggggattagctcaaatggtagagcgctcgc

SEQ ID NO: 18692 - DNA, 32 bp, Homo sapiens
  source 1..32: mol_type = genomic DNA
gggggattagctcaaatggtagagcgctcgct

SEQ ID NO: 18693 - DNA, 33 bp, Homo sapiens
  source 1..33: mol_type = genomic DNA
gggggattagctcaaatggtagagcgctcgctt

SEQ ID NO: 18694 - DNA, 18 bp, Homo sapiens
  source 1..18: mol_type = genomic DNA
gggggcatagctcagtgg

SEQ ID NO: 18695 - DNA, 22 bp, Homo sapiens
  source 1..22: mol_type = genomic DNA
gggggcatagctcagtggtaga

SEQ ID NO: 18696 - DNA, 27 bp, Homo sapiens
  source 1..27: mol_type = genomic DNA
gggggcatagctcagtggtagagcatt

SEQ ID NO: 18697 - DNA, 28 bp, Homo sapiens
  source 1..28: mol_type = genomic DNA
gggggcatagctcagtggtagagcattt

SEQ ID NO: 18698 - DNA, 29 bp, Homo sapiens
  source 1..29: mol_type = genomic DNA
gggggcatagctcagtggtagagcatttg

SEQ ID NO: 18699 - DNA, 31 bp, Homo sapiens
  source 1..31: mol_type = genomic DNA
gggggcatagctcagtggtagagcatttgac

SEQ ID NO: 18700 - DNA, 32 bp, Homo sapiens
  source 1..32: mol_type = genomic DNA
gggggcatagctcagtggtagagcatttgact

SEQ ID NO: 18701 - DNA, 33 bp, Homo sapiens
  source 1..33: mol_type = genomic DNA
gggggcatagctcagtggtagagcatttgactg

SEQ ID NO: 18702 - DNA, 34 bp, Homo sapiens
  source 1..34: mol_type = genomic DNA
gggggcatagctcagtggtagagcatttgactgc

SEQ ID NO: 18703 - DNA, 35 bp, Homo sapiens
  source 1..35: mol_type = genomic DNA
gggggcatagctcagtggtagagcatttgactgca

SEQ ID NO: 18704 - DNA, 24 bp, Homo sapiens
  source 1..24: mol_type = genomic DNA
gggggcgtgggttcgaatcccacc

SEQ ID NO: 18705 - DNA, 16 bp, Homo sapiens
  source 1..16: mol_type = genomic DNA
gggggtatagctcagc

SEQ ID NO: 18706 - DNA, 29 bp, Homo sapiens
  source 1..29: mol_type = genomic DNA
gggggtatagctcagcggtagagcgcgtg

SEQ ID NO: 18707 - DNA, 31 bp, Homo sapiens
  source 1..31: mol_type = genomic DNA
gggggtatagctcagcggtagagcgcgtgct

SEQ ID NO: 18708 - DNA, 32 bp, Homo sapiens
  source 1..32: mol_type = genomic DNA
gggggtatagctcagcggtagagcgcgtgctt

SEQ ID NO: 18709 - DNA, 16 bp, Homo sapiens
  source 1..16: mol_type = genomic DNA
gggggtatagctcagg

SEQ ID NO: 18710 - DNA, 18 bp, Homo sapiens
  source 1..18: mol_type = genomic DNA
gggggtatagctcagggg

SEQ ID NO: 18711 - DNA, 22 bp, Homo sapiens
  source 1..22: mol_type = genomic DNA
gggggtatagctcaggggtaga

SEQ ID NO: 18712 - DNA, 24 bp, Homo sapiens
  source 1..24: mol_type = genomic DNA
gggggtatagctcaggggtagagc

SEQ ID NO: 18713 - DNA, 25 bp, Homo sapiens
  source 1..25: mol_type = genomic DNA
gggggtatagctcaggggtagagca

SEQ ID NO: 18714 - DNA, 31 bp, Homo sapiens
  source 1..31: mol_type = genomic DNA
gggggtatagctcaggggtagagcacttgac

SEQ ID NO: 18715 - DNA, 32 bp, Homo sapiens
  source 1..32: mol_type = genomic DNA
gggggtatagctcaggggtagagcacttgact

SEQ ID NO: 18716 - DNA, 33 bp, Homo sapiens
  source 1..33: mol_type = genomic DNA
gggggtatagctcaggggtagagcacttgactg

SEQ ID NO: 18717 - DNA, 35 bp, Homo sapiens
  source 1..35: mol_type = genomic DNA
gggggtatagctcaggggtagagcacttgactgca

SEQ ID NO: 18718 - DNA, 26 bp, Homo sapiens
  source 1..26: mol_type = genomic DNA
gggggtatagctcaggggtagagcat

SEQ ID NO: 18719 - DNA, 27 bp, Homo sapiens
  source 1..27: mol_type = genomic DNA
gggggtatagctcaggggtagagcatt

SEQ ID NO: 18720 - DNA, 28 bp, Homo sapiens
  source 1..28: mol_type = genomic DNA
gggggtatagctcaggggtagagcattt

SEQ ID NO: 18721 - DNA, 29 bp, Homo sapiens
  source 1..29: mol_type = genomic DNA
gggggtatagctcaggggtagagcatttg

SEQ ID NO: 18722 - DNA, 30 bp, Homo sapiens
  source 1..30: mol_type = genomic DNA
gggggtatagctcaggggtagagcatttga

SEQ ID NO: 18723 - DNA, 31 bp, Homo sapiens
  source 1..31: mol_type = genomic DNA
gggggtatagctcaggggtagagcatttgac

SEQ ID NO: 18724 - DNA, 32 bp, Homo sapiens
  source 1..32: mol_type = genomic DNA
gggggtatagctcaggggtagagcatttgact

SEQ ID NO: 18725 - DNA, 33 bp, Homo sapiens
  source 1..33: mol_type = genomic DNA
gggggtatagctcaggggtagagcatttgactg

SEQ ID NO: 18726 - DNA, 34 bp, Homo sapiens
  source 1..34: mol_type = genomic DNA
gggggtatagctcaggggtagagcatttgactgc

SEQ ID NO: 18727 - DNA, 35 bp, Homo sapiens
  source 1..35: mol_type = genomic DNA
gggggtatagctcaggggtagagcatttgactgca

SEQ ID NO: 18728 - DNA, 37 bp, Homo sapiens
  source 1..37: mol_type = genomic DNA
gggggtatagctcaggggtagagcatttgactgcaga

SEQ ID NO: 18729 - DNA, 33 bp, Homo sapiens
  source 1..33: mol_type = genomic DNA
gggggtatagctcaggtggtagagcatttgact

SEQ ID NO: 18730 - DNA, 34 bp, Homo sapiens
  source 1..34: mol_type = genomic DNA
gggggtatagctcaggtggtagagcatttgactg

SEQ ID NO: 18731 - DNA, 35 bp, Homo sapiens
  source 1..35: mol_type = genomic DNA
gggggtatagctcaggtggtagagcatttgactgc

SEQ ID NO: 18732 - DNA, 36 bp, Homo sapiens
  source 1..36: mol_type = genomic DNA
gggggtatagctcaggtggtagagcatttgactgca

SEQ ID NO: 18733 - DNA, 16 bp, Homo sapiens
  source 1..16: mol_type = genomic DNA
gggggtatagctcagt

SEQ ID NO: 18734 - DNA, 17 bp, Homo sapiens
  source 1..17: mol_type = genomic DNA
gggggtatagctcagtg

SEQ ID NO: 18735 - DNA, 18 bp, Homo sapiens
  source 1..18: mol_type = genomic DNA
gggggtatagctcagtgg

SEQ ID NO: 18736 - DNA, 19 bp, Homo sapiens
  source 1..19: mol_type = genomic DNA
gggggtatagctcagtggg

SEQ ID NO: 18737 - DNA, 33 bp, Homo sapiens
  source 1..33: mol_type = genomic DNA
gggggtatagctcagtgggtagagcatttgact

SEQ ID NO: 18738 - DNA, 34 bp, Homo sapiens
  source 1..34: mol_type = genomic DNA
gggggtatagctcagtgggtagagcatttgactg

SEQ ID NO: 18739 - DNA, 35 bp, Homo sapiens
  source 1..35: mol_type = genomic DNA
gggggtatagctcagtgggtagagcatttgactgc

SEQ ID NO: 18740 - DNA, 36 bp, Homo sapiens
  source 1..36: mol_type = genomic DNA
gggggtatagctcagtgggtagagcatttgactgca

SEQ ID NO: 18741 - DNA, 19 bp, Homo sapiens
  source 1..19: mol_type = genomic DNA
gggggtatagctcagtggt

SEQ ID NO: 18742 - DNA, 20 bp, Homo sapiens
  source 1..20: mol_type = genomic DNA
gggggtatagctcagtggta

SEQ ID NO: 18743 - DNA, 21 bp, Homo sapiens
  source 1..21: mol_type = genomic DNA
gggggtatagctcagtggtag

SEQ ID NO: 18744 - DNA, 22 bp, Homo sapiens
  source 1..22: mol_type = genomic DNA
gggggtatagctcagtggtaga

SEQ ID NO: 18745 - DNA, 23 bp, Homo sapiens
  source 1..23: mol_type = genomic DNA
gggggtatagctcagtggtagag

SEQ ID NO: 18746 - DNA, 24 bp, Homo sapiens
  source 1..24: mol_type = genomic DNA
gggggtatagctcagtggtagagc

SEQ ID NO: 18747 - DNA, 25 bp, Homo sapiens
  source 1..25: mol_type = genomic DNA
gggggtatagctcagtggtagagca

SEQ ID NO: 18748 - DNA, 26 bp, Homo sapiens
  source 1..26: mol_type = genomic DNA
gggggtatagctcagtggtagagcat

SEQ ID NO: 18749 - DNA, 27 bp, Homo sapiens
  source 1..27: mol_type = genomic DNA
gggggtatagctcagtggtagagcatt

SEQ ID NO: 18750 - DNA, 28 bp, Homo sapiens
  source 1..28: mol_type = genomic DNA
gggggtatagctcagtggtagagcattt

SEQ ID NO: 18751 - DNA, 29 bp, Homo sapiens
  source 1..29: mol_type = genomic DNA
gggggtatagctcagtggtagagcatttg

SEQ ID NO: 18752 - DNA, 30 bp, Homo sapiens
  source 1..30: mol_type = genomic DNA
gggggtatagctcagtggtagagcatttga

SEQ ID NO: 18753 - DNA, 31 bp, Homo sapiens
  source 1..31: mol_type = genomic DNA
gggggtatagctcagtggtagagcatttgac

SEQ ID NO: 18754 - DNA, 32 bp, Homo sapiens
  source 1..32: mol_type = genomic DNA
gggggtatagctcagtggtagagcatttgact

SEQ ID NO: 18755 - DNA, 33 bp, Homo sapiens
  source 1..33: mol_type = genomic DNA
gggggtatagctcagtggtagagcatttgactg

SEQ ID NO: 18756 - DNA, 34 bp, Homo sapiens
  source 1..34: mol_type = genomic DNA
gggggtatagctcagtggtagagcatttgactgc

SEQ ID NO: 18757 - DNA, 35 bp, Homo sapiens
  source 1..35: mol_type = genomic DNA
gggggtatagctcagtggtagagcatttgactgca

SEQ ID NO: 18758 - DNA, 39 bp, Homo sapiens
  source 1..39: mol_type = genomic DNA
gggggtatagctcagtggtagagcatttgactgcagatc

SEQ ID NO: 18759 - DNA, 42 bp, Homo sapiens
  source 1..42: mol_type = genomic DNA
gggggtatagctcagtggtagagcatttgactgcagatcaag

SEQ ID NO: 18760 - DNA, 48 bp, Homo sapiens
  source 1..48: mol_type = genomic DNA
gggggtatagctcagtggtagagcatttgactgcagatcaagaggtcc

SEQ ID NO: 18761 - DNA, 32 bp, Homo sapiens
  source 1..32: mol_type = genomic DNA
gggggtatagctcagtggtagagcgcgtgctt

SEQ ID NO: 18762 - DNA, 28 bp, Homo sapiens
  source 1..28: mol_type = genomic DNA
gggggtatagcttagcggtagagcattt

SEQ ID NO: 18763 - DNA, 29 bp, Homo sapiens
  source 1..29: mol_type = genomic DNA
gggggtatagcttagcggtagagcatttg

SEQ ID NO: 18764 - DNA, 31 bp, Homo sapiens
  source 1..31: mol_type = genomic DNA
gggggtatagcttagcggtagagcatttgac

SEQ ID NO: 18765 - DNA, 32 bp, Homo sapiens
  source 1..32: mol_type = genomic DNA
gggggtatagcttagcggtagagcatttgact

SEQ ID NO: 18766 - DNA, 33 bp, Homo sapiens
  source 1..33: mol_type = genomic DNA
gggggtatagcttagcggtagagcatttgactg

SEQ ID NO: 18767 - DNA, 34 bp, Homo sapiens
  source 1..34: mol_type = genomic DNA
gggggtatagcttagcggtagagcatttgactgc

SEQ ID NO: 18768 - DNA, 35 bp, Homo sapiens
  source 1..35: mol_type = genomic DNA
gggggtatagcttagcggtagagcatttgactgca

SEQ ID NO: 18769 - DNA, 32 bp, Homo sapiens
  source 1..32: mol_type = genomic DNA
gggggtatagcttaggggtagagcatttgact

SEQ ID NO: 18770 - DNA, 25 bp, Homo sapiens
  source 1..25: mol_type = genomic DNA
gggggtcgattccccgacggggagc

SEQ ID NO: 18771 - DNA, 26 bp, Homo sapiens
  source 1..26: mol_type = genomic DNA
gggggtcgattccccgacggggagcc

SEQ ID NO: 18772 - DNA, 27 bp, Homo sapiens
  source 1..27: mol_type = genomic DNA
gggggtcgattccccgacggggagcca

SEQ ID NO: 18773 - DNA, 16 bp, Homo sapiens
  source 1..16: mol_type = genomic DNA
gggggtgtagctcagt

SEQ ID NO: 18774 - DNA, 17 bp, Homo sapiens
  source 1..17: mol_type = genomic DNA
gggggtgtagctcagtg

SEQ ID NO: 18775 - DNA, 18 bp, Homo sapiens
  source 1..18: mol_type = genomic DNA
gggggtgtagctcagtgg

SEQ ID NO: 18776 - DNA, 19 bp, Homo sapiens
  source 1..19: mol_type = genomic DNA
gggggtgtagctcagtggt

SEQ ID NO: 18777 - DNA, 20 bp, Homo sapiens
  source 1..20: mol_type = genomic DNA
gggggtgtagctcagtggta

SEQ ID NO: 18778 - DNA, 21 bp, Homo sapiens
  source 1..21: mol_type = genomic DNA
gggggtgtagctcagtggtag

SEQ ID NO: 18779 - DNA, 22 bp, Homo sapiens
  source 1..22: mol_type = genomic DNA
gggggtgtagctcagtggtaga

SEQ ID NO: 18780 - DNA, 23 bp, Homo sapiens
  source 1..23: mol_type = genomic DNA
gggggtgtagctcagtggtagag

SEQ ID NO: 18781 - DNA, 24 bp, Homo sapiens
  source 1..24: mol_type = genomic DNA
gggggtgtagctcagtggtagagc

SEQ ID NO: 18782 - DNA, 26 bp, Homo sapiens
  source 1..26: mol_type = genomic DNA
gggggtgtagctcagtggtagagcac

SEQ ID NO: 18783 - DNA, 31 bp, Homo sapiens
  source 1..31: mol_type = genomic DNA
gggggtgtagctcagtggtagagcacatgct

SEQ ID NO: 18784 - DNA, 32 bp, Homo sapiens
  source 1..32: mol_type = genomic DNA
gggggtgtagctcagtggtagagcacatgctt

SEQ ID NO: 18785 - DNA, 27 bp, Homo sapiens
  source 1..27: mol_type = genomic DNA
gggggtgtagctcagtggtagagcatt

SEQ ID NO: 18786 - DNA, 28 bp, Homo sapiens
  source 1..28: mol_type = genomic DNA
gggggtgtagctcagtggtagagcattt

SEQ ID NO: 18787 - DNA, 30 bp, Homo sapiens
  source 1..30: mol_type = genomic DNA
gggggtgtagctcagtggtagagcatttga

SEQ ID NO: 18788 - DNA, 31 bp, Homo sapiens
  source 1..31: mol_type = genomic DNA
gggggtgtagctcagtggtagagcatttgac

SEQ ID NO: 18789 - DNA, 32 bp, Homo sapiens
  source 1..32: mol_type = genomic DNA
gggggtgtagctcagtggtagagcatttgact

SEQ ID NO: 18790 - DNA, 33 bp, Homo sapiens
  source 1..33: mol_type = genomic DNA
gggggtgtagctcagtggtagagcatttgactg

SEQ ID NO: 18791 - DNA, 34 bp, Homo sapiens
  source 1..34: mol_type = genomic DNA
gggggtgtagctcagtggtagagcatttgactgc

SEQ ID NO: 18792 - DNA, 35 bp, Homo sapiens
  source 1..35: mol_type = genomic DNA
gggggtgtagctcagtggtagagcatttgactgca

SEQ ID NO: 18793 - DNA, 28 bp, Homo sapiens
  source 1..28: mol_type = genomic DNA
gggggtgtagctcagtggtagagcgcat

SEQ ID NO: 18794 - DNA, 31 bp, Homo sapiens
  source 1..31: mol_type = genomic DNA
gggggtgtagctcagtggtagagcgcatgct

SEQ ID NO: 18795 - DNA, 32 bp, Homo sapiens
  source 1..32: mol_type = genomic DNA
gggggtgtagctcagtggtagagcgcatgctt

SEQ ID NO: 18796 - DNA, 33 bp, Homo sapiens
  source 1..33: mol_type = genomic DNA
gggggtgtagctcagtggtagagcgcatgcttt

SEQ ID NO: 18797 - DNA, 35 bp, Homo sapiens
  source 1..35: mol_type = genomic DNA
gggggtgtagctcagtggtagagcgcatgctttgc

SEQ ID NO: 18798 - DNA, 27 bp, Homo sapiens
  source 1..27: mol_type = genomic DNA
gggggtgtagctcagtggtagagcgcg

SEQ ID NO: 18799 - DNA, 28 bp, Homo sapiens
  source 1..28: mol_type = genomic DNA
gggggtgtagctcagtggtagagcgcgt

SEQ ID NO: 18800 - DNA, 29 bp, Homo sapiens
  source 1..29: mol_type = genomic DNA
gggggtgtagctcagtggtagagcgcgtg

SEQ ID NO: 18801 - DNA, 30 bp, Homo sapiens
  source 1..30: mol_type = genomic DNA
gggggtgtagctcagtggtagagcgcgtgc

SEQ ID NO: 18802 - DNA, 31 bp, Homo sapiens
  source 1..31: mol_type = genomic DNA
gggggtgtagctcagtggtagagcgcgtgct

SEQ ID NO: 18803 - DNA, 32 bp, Homo sapiens
  source 1..32: mol_type = genomic DNA
gggggtgtagctcagtggtagagcgcgtgctt

SEQ ID NO: 18804 - DNA, 33 bp, Homo sapiens
  source 1..33: mol_type = genomic DNA
gggggtgtagctcagtggtagagcgcgtgctta

SEQ ID NO: 18805 - DNA, 33 bp, Homo sapiens
  source 1..33: mol_type = genomic DNA
gggggtgtagctcagtggtagagcgcgtgcttc

SEQ ID NO: 18806 - DNA, 35 bp, Homo sapiens
  source 1..35: mol_type = genomic DNA
gggggtgtagctcagtggtagagcgcgtgcttcgc

SEQ ID NO: 18807 - DNA, 27 bp, Homo sapiens
  source 1..27: mol_type = genomic DNA
gggggttcgattccttccttttttgcc

SEQ ID NO: 18808 - DNA, 28 bp, Homo sapiens
  source 1..28: mol_type = genomic DNA
gggggttcgattccttccttttttgcca

SEQ ID NO: 18809 - DNA, 17 bp, Homo sapiens
  source 1..17: mol_type = genomic DNA
ggggtagagcatttgac

SEQ ID NO: 18810 - DNA, 19 bp, Homo sapiens
  source 1..19: mol_type = genomic DNA
ggggtagagcatttgactg

SEQ ID NO: 18811 - DNA, 20 bp, Homo sapiens
  source 1..20: mol_type = genomic DNA
ggggtagagcatttgactgc

SEQ ID NO: 18812 - DNA, 32 bp, Homo sapiens
  source 1..32: mol_type = genomic DNA
ggggtatagctcaggggtagagcatttgactg

SEQ ID NO: 18813 - DNA, 33 bp, Homo sapiens
  source 1..33: mol_type = genomic DNA
ggggtatagctcaggggtagagcatttgactgc

SEQ ID NO: 18814 - DNA, 34 bp, Homo sapiens
  source 1..34: mol_type = genomic DNA
ggggtatagctcaggggtagagcatttgactgca

SEQ ID NO: 18815 - DNA, 27 bp, Homo sapiens
  source 1..27: mol_type = genomic DNA
ggggtatagctcagtggtagagcattt

SEQ ID NO: 18816 - DNA, 28 bp, Homo sapiens
  source 1..28: mol_type = genomic DNA
ggggtatagctcagtggtagagcatttg

SEQ ID NO: 18817 - DNA, 29 bp, Homo sapiens
  source 1..29: mol_type = genomic DNA
ggggtatagctcagtggtagagcatttga

SEQ ID NO: 18818 - DNA, 31 bp, Homo sapiens
  source 1..31: mol_type = genomic DNA
ggggtatagctcagtggtagagcatttgact

SEQ ID NO: 18819 - DNA, 32 bp, Homo sapiens
  source 1..32: mol_type = genomic DNA
ggggtatagctcagtggtagagcatttgactg

SEQ ID NO: 18820 - DNA, 33 bp, Homo sapiens
  source 1..33: mol_type = genomic DNA
ggggtatagctcagtggtagagcatttgactgc

SEQ ID NO: 18821 - DNA, 34 bp, Homo sapiens
  source 1..34: mol_type = genomic DNA
ggggtatagctcagtggtagagcatttgactgca

SEQ ID NO: 18822 - DNA, 32 bp, Homo sapiens
  source 1..32: mol_type = genomic DNA
ggggtatagcttagcggtagagcatttgactg

SEQ ID NO: 18823 - DNA, 16 bp, Homo sapiens
  source 1..16: mol_type = genomic DNA
ggggtatgattctcgc

SEQ ID NO: 18824 - DNA, 17 bp, Homo sapiens
  source 1..17: mol_type = genomic DNA
ggggtatgattctcgct

SEQ ID NO: 18825 - DNA, 18 bp, Homo sapiens
  source 1..18: mol_type = genomic DNA
ggggtatgattctcgctt

SEQ ID NO: 18826 - DNA, 19 bp, Homo sapiens
  source 1..19: mol_type = genomic DNA
ggggtatgattctcgcttc

SEQ ID NO: 18827 - DNA, 20 bp, Homo sapiens
  source 1..20: mol_type = genomic DNA
ggggtatgattctcgcttcg

SEQ ID NO: 18828 - DNA, 21 bp, Homo sapiens
  source 1..21: mol_type = genomic DNA
ggggtatgattctcgcttcgg

SEQ ID NO: 18829 - DNA, 20 bp, Homo sapiens
  source 1..20: mol_type = genomic DNA
ggggtatgattctcgctttg

SEQ ID NO: 18830 - DNA, 21 bp, Homo sapiens
  source 1..21: mol_type = genomic DNA
ggggtatgattctcgctttgg

SEQ ID NO: 18831 - DNA, 16 bp, Homo sapiens
  source 1..16: mol_type = genomic DNA
ggggtatgattctcgg

SEQ ID NO: 18832 - DNA, 17 bp, Homo sapiens
  source 1..17: mol_type = genomic DNA
ggggtatgattctcggt

SEQ ID NO: 18833 - DNA, 18 bp, Homo sapiens
  source 1..18: mol_type = genomic DNA
ggggtatgattctcggtt

SEQ ID NO: 18834 - DNA, 19 bp, Homo sapiens
  source 1..19: mol_type = genomic DNA
ggggtatgattctcggttt

SEQ ID NO: 18835 - DNA, 20 bp, Homo sapiens
  source 1..20: mol_type = genomic DNA
ggggtatgattctcggtttg

SEQ ID NO: 18836 - DNA, 21 bp, Homo sapiens
  source 1..21: mol_type = genomic DNA
ggggtatgattctcggtttgg

SEQ ID NO: 18837 - DNA, 23 bp, Homo sapiens
  source 1..23: mol_type = genomic DNA
ggggtcgcgagttcaaatctcgc

SEQ ID NO: 18838 - DNA, 32 bp, Homo sapiens
  source 1..32: mol_type = genomic DNA
ggggtcgcgagttcaaatctcgctggggcctc

SEQ ID NO: 18839 - DNA, 32 bp, Homo sapiens
  source 1..32: mol_type = genomic DNA
ggggtgtagctcagtggtagagcatttgactg

SEQ ID NO: 18840 - DNA, 33 bp, Homo sapiens
  source 1..33: mol_type = genomic DNA
ggggtgtagctcagtggtagagcatttgactgc

SEQ ID NO: 18841 - DNA, 31 bp, Homo sapiens
  source 1..31: mol_type = genomic DNA
ggggtgtagctcagtggtagagcgcgtgctt

SEQ ID NO: 18842 - DNA, 18 bp, Homo sapiens
  source 1..18: mol_type = genomic DNA
ggggtgtgataggtggca

SEQ ID NO: 18843 - DNA, 20 bp, Homo sapiens
  source 1..20: mol_type = genomic DNA
ggggtgtgataggtggcacg

SEQ ID NO: 18844 - DNA, 24 bp, Homo sapiens
  source 1..24: mol_type = genomic DNA
ggggtgtgataggtggcacggaga

SEQ ID NO: 18845 - DNA, 30 bp, Homo sapiens
  source 1..30: mol_type = genomic DNA
ggggtgtgataggtggcacggagaattttg

SEQ ID NO: 18846 - DNA, 18 bp, Homo sapiens
  source 1..18: mol_type = genomic DNA
ggggttagagcactggtc

SEQ ID NO: 18847 - DNA, 19 bp, Homo sapiens
  source 1..19: mol_type = genomic DNA
ggggttagagcactggtct

SEQ ID NO: 18848 - DNA, 16 bp, Homo sapiens
  source 1..16: mol_type = genomic DNA
ggggttaggcctcttt

SEQ ID NO: 18849 - DNA, 21 bp, Homo sapiens
  source 1..21: mol_type = genomic DNA
ggggttaggcctctttttacc

SEQ ID NO: 18850 - DNA, 23 bp, Homo sapiens
  source 1..23: mol_type = genomic DNA
ggggttaggcctctttttaccac

SEQ ID NO: 18851 - DNA, 24 bp, Homo sapiens
  source 1..24: mol_type = genomic DNA
ggggttaggcctctttttaccacc

SEQ ID NO: 18852 - DNA, 25 bp, Homo sapiens
  source 1..25: mol_type = genomic DNA
ggggttaggcctctttttaccacca

SEQ ID NO: 18853 - DNA, 20 bp, Homo sapiens
  source 1..20: mol_type = genomic DNA
ggggttcaattccccgacgg

SEQ ID NO: 18854 - DNA, 21 bp, Homo sapiens
  source 1..21: mol_type = genomic DNA
ggggttcaattccccgacggg

SEQ ID NO: 18855 - DNA, 22 bp, Homo sapiens
  source 1..22: mol_type = genomic DNA
ggggttcaattccccgacgggg

SEQ ID NO: 18856 - DNA, 24 bp, Homo sapiens
  source 1..24: mol_type = genomic DNA
ggggttcaattccccgacggggag

SEQ ID NO: 18857 - DNA, 25 bp, Homo sapiens
  source 1..25: mol_type = genomic DNA
ggggttcaattccccgacggggagc

SEQ ID NO: 18858 - DNA, 26 bp, Homo sapiens
  source 1..26: mol_type = genomic DNA
ggggttcaattccccgacggggagcc

SEQ ID NO: 18859 - DNA, 27 bp, Homo sapiens
  source 1..27: mol_type = genomic DNA
ggggttcaattccccgacggggagcca

SEQ ID NO: 18860 - DNA, 25 bp, Homo sapiens
  source 1..25: mol_type = genomic DNA
ggggttcgattccccaacggggagc

SEQ ID NO: 18861 - DNA, 26 bp, Homo sapiens
  source 1..26: mol_type = genomic DNA
ggggttcgattccccaacggggagcc

SEQ ID NO: 18862 - DNA, 19 bp, Homo sapiens
  source 1..19: mol_type = genomic DNA
ggggttcgattccccgacg

SEQ ID NO: 18863 - DNA, 20 bp, Homo sapiens
  source 1..20: mol_type = genomic DNA
ggggttcgattccccgacgg

SEQ ID NO: 18864 - DNA, 21 bp, Homo sapiens
  source 1..21: mol_type = genomic DNA
ggggttcgattccccgacggg

SEQ ID NO: 18865 - DNA, 23 bp, Homo sapiens
  source 1..23: mol_type = genomic DNA
ggggttcgattccccgacgggga

SEQ ID NO: 18866 - DNA, 24 bp, Homo sapiens
  source 1..24: mol_type = genomic DNA
ggggttcgattccccgacggggag

SEQ ID NO: 18867 - DNA, 25 bp, Homo sapiens
  source 1..25: mol_type = genomic DNA
ggggttcgattccccgacggggagc

SEQ ID NO: 18868 - DNA, 26 bp, Homo sapiens
  source 1..26: mol_type = genomic DNA
ggggttcgattccccgacggggagcc

SEQ ID NO: 18869 - DNA, 27 bp, Homo sapiens
  source 1..27: mol_type = genomic DNA
ggggttcgattccccgacggggagcca

SEQ ID NO: 18870 - DNA, 17 bp, Homo sapiens
  source 1..17: mol_type = genomic DNA
ggggttcgattccttcc

SEQ ID NO: 18871 - DNA, 18 bp, Homo sapiens
  source 1..18: mol_type = genomic DNA
ggggttcgattccttcct

SEQ ID NO: 18872 - DNA, 19 bp, Homo sapiens
  source 1..19: mol_type = genomic DNA
ggggttcgattccttcctt

SEQ ID NO: 18873 - DNA, 25 bp, Homo sapiens
  source 1..25: mol_type = genomic DNA
ggggttcgattccttccttttttgc

SEQ ID NO: 18874 - DNA, 26 bp, Homo sapiens
  source 1..26: mol_type = genomic DNA
ggggttcgattccttccttttttgcc

SEQ ID NO: 18875 - DNA, 27 bp, Homo sapiens
  source 1..27: mol_type = genomic DNA
ggggttcgattccttccttttttgcca

SEQ ID NO: 18876 - DNA, 20 bp, Homo sapiens
  source 1..20: mol_type = genomic DNA
ggggttttgcagtccttacc

SEQ ID NO: 18877 - DNA, 21 bp, Homo sapiens
  source 1..21: mol_type = genomic DNA
ggggttttgcagtccttacca

SEQ ID NO: 18878 - DNA, 17 bp, Homo sapiens
  source 1..17: mol_type = genomic DNA
gggtagagcatttgact

SEQ ID NO: 18879 - DNA, 19 bp, Homo sapiens
  source 1..19: mol_type = genomic DNA
gggtagagcatttgactgc

SEQ ID NO: 18880 - DNA, 20 bp, Homo sapiens
  source 1..20: mol_type = genomic DNA
gggtagctcagtcggtagag

SEQ ID NO: 18881 - DNA, 28 bp, Homo sapiens
  source 1..28: mol_type = genomic DNA
gggtagctcagtcggtagagcatcagac

SEQ ID NO: 18882 - DNA, 19 bp, Homo sapiens
  source 1..19: mol_type = genomic DNA
gggtatagctcaggggtag

SEQ ID NO: 18883 - DNA, 26 bp, Homo sapiens
  source 1..26: mol_type = genomic DNA
gggtatagctcaggggtagagcattt

SEQ ID NO: 18884 - DNA, 30 bp, Homo sapiens
  source 1..30: mol_type = genomic DNA
gggtatagctcaggggtagagcatttgact

SEQ ID NO: 18885 - DNA, 31 bp, Homo sapiens
  source 1..31: mol_type = genomic DNA
gggtatagctcaggggtagagcatttgactg

SEQ ID NO: 18886 - DNA, 32 bp, Homo sapiens
  source 1..32: mol_type = genomic DNA
gggtatagctcaggggtagagcatttgactgc

SEQ ID NO: 18887 - DNA, 33 bp, Homo sapiens
  source 1..33: mol_type = genomic DNA
gggtatagctcaggggtagagcatttgactgca

SEQ ID NO: 18888 - DNA, 33 bp, Homo sapiens
  source 1..33: mol_type = genomic DNA
gggtatagctcaggtggtagagcatttgactgc

SEQ ID NO: 18889 - DNA, 16 bp, Homo sapiens
  source 1..16: mol_type = genomic DNA
gggtatagctcagtgg

SEQ ID NO: 18890 - DNA, 32 bp, Homo sapiens
  source 1..32: mol_type = genomic DNA
gggtatagctcagtgggtagagcatttgactg

SEQ ID NO: 18891 - DNA, 33 bp, Homo sapiens
  source 1..33: mol_type = genomic DNA
gggtatagctcagtgggtagagcatttgactgc

SEQ ID NO: 18892 - DNA, 34 bp, Homo sapiens
  source 1..34: mol_type = genomic DNA
gggtatagctcagtgggtagagcatttgactgca

SEQ ID NO: 18893 - DNA, 18 bp, Homo sapiens
  source 1..18: mol_type = genomic DNA
gggtatagctcagtggta

SEQ ID NO: 18894 - DNA, 19 bp, Homo sapiens
  source 1..19: mol_type = genomic DNA
gggtatagctcagtggtag

SEQ ID NO: 18895 - DNA, 20 bp, Homo sapiens
  source 1..20: mol_type = genomic DNA
gggtatagctcagtggtaga

SEQ ID NO: 18896 - DNA, 25 bp, Homo sapiens
  source 1..25: mol_type = genomic DNA
gggtatagctcagtggtagagcatt

SEQ ID NO: 18897 - DNA, 26 bp, Homo sapiens
  source 1..26: mol_type = genomic DNA
gggtatagctcagtggtagagcattt

SEQ ID NO: 18898 - DNA, 27 bp, Homo sapiens
  source 1..27: mol_type = genomic DNA
gggtatagctcagtggtagagcatttg

SEQ ID NO: 18899 - DNA, 28 bp, Homo sapiens
  source 1..28: mol_type = genomic DNA
gggtatagctcagtggtagagcatttga

SEQ ID NO: 18900 - DNA, 29 bp, Homo sapiens
  source 1..29: mol_type = genomic DNA
gggtatagctcagtggtagagcatttgac

SEQ ID NO: 18901 - DNA, 30 bp, Homo sapiens
  source 1..30: mol_type = genomic DNA
gggtatagctcagtggtagagcatttgact

SEQ ID NO: 18902 - DNA, 31 bp, Homo sapiens
  source 1..31: mol_type = genomic DNA
gggtatagctcagtggtagagcatttgactg

SEQ ID NO: 18903 - DNA, 32 bp, Homo sapiens
  source 1..32: mol_type = genomic DNA
gggtatagctcagtggtagagcatttgactgc

SEQ ID NO: 18904 - DNA, 33 bp, Homo sapiens
  source 1..33: mol_type = genomic DNA
gggtatagctcagtggtagagcatttgactgca

SEQ ID NO: 18905 - DNA, 37 bp, Homo sapiens
  source 1..37: mol_type = genomic DNA
gggtatagctcagtggtagagcatttgactgcagatc

SEQ ID NO: 18906 - DNA, 30 bp, Homo sapiens
  source 1..30: mol_type = genomic DNA
gggtatagcttagcggtagagcatttgact

SEQ ID NO: 18907 - DNA, 31 bp, Homo sapiens
  source 1..31: mol_type = genomic DNA
gggtatagcttagcggtagagcatttgactg

SEQ ID NO: 18908 - DNA, 32 bp, Homo sapiens
  source 1..32: mol_type = genomic DNA
gggtatagcttagcggtagagcatttgactgc

SEQ ID NO: 18909 - DNA, 33 bp, Homo sapiens
  source 1..33: mol_type = genomic DNA
gggtatagcttagcggtagagcatttgactgca

SEQ ID NO: 18910 - DNA, 16 bp, Homo sapiens
  source 1..16: mol_type = genomic DNA
gggtatgattctcgct

SEQ ID NO: 18911 - DNA, 17 bp, Homo sapiens
  source 1..17: mol_type = genomic DNA
gggtatgattctcgctt

SEQ ID NO: 18912 - DNA, 18 bp, Homo sapiens
  source 1..18: mol_type = genomic DNA
gggtatgattctcgcttc

SEQ ID NO: 18913 - DNA, 19 bp, Homo sapiens
  source 1..19: mol_type = genomic DNA
gggtatgattctcgcttcg

SEQ ID NO: 18914 - DNA, 20 bp, Homo sapiens
  source 1..20: mol_type = genomic DNA
gggtatgattctcgcttcgg

SEQ ID NO: 18915 - DNA, 18 bp, Homo sapiens
  source 1..18: mol_type = genomic DNA
gggtatgattctcgcttt

SEQ ID NO: 18916 - DNA, 19 bp, Homo sapiens
  source 1..19: mol_type = genomic DNA
gggtatgattctcgctttg

SEQ ID NO: 18917 - DNA, 20 bp, Homo sapiens
  source 1..20: mol_type = genomic DNA
gggtatgattctcgctttgg

SEQ ID NO: 18918 - DNA, 16 bp, Homo sapiens
  source 1..16: mol_type = genomic DNA
gggtatgattctcggt

SEQ ID NO: 18919 - DNA, 17 bp, Homo sapiens
  source 1..17: mol_type = genomic DNA
gggtatgattctcggtt

SEQ ID NO: 18920 - DNA, 18 bp, Homo sapiens
  source 1..18: mol_type = genomic DNA
gggtatgattctcggttt

SEQ ID NO: 18921 - DNA, 19 bp, Homo sapiens
  source 1..19: mol_type = genomic DNA
gggtatgattctcggtttg

SEQ ID NO: 18922 - DNA, 20 bp, Homo sapiens
  source 1..20: mol_type = genomic DNA
gggtatgattctcggtttgg

SEQ ID NO: 18923 - DNA, 28 bp, Homo sapiens
  source 1..28: mol_type = genomic DNA
gggtatgattctcggtttgggtccgaga

SEQ ID NO: 18924 - DNA, 29 bp, Homo sapiens
  source 1..29: mol_type = genomic DNA
gggtccagggttcaagtccctgttcgggc

SEQ ID NO: 18925 - DNA, 30 bp, Homo sapiens
  source 1..30: mol_type = genomic DNA
gggtccagggttcaagtccctgttcgggcg

SEQ ID NO: 18926 - DNA, 31 bp, Homo sapiens
  source 1..31: mol_type = genomic DNA
gggtccagggttcaagtccctgttcgggcgc

SEQ ID NO: 18927 - DNA, 32 bp, Homo sapiens
  source 1..32: mol_type = genomic DNA
gggtccagggttcaagtccctgttcgggcgcc

SEQ ID NO: 18928 - DNA, 33 bp, Homo sapiens
  source 1..33: mol_type = genomic DNA
gggtccagggttcaagtccctgttcgggcgcca

SEQ ID NO: 18929 - DNA, 23 bp, Homo sapiens
  source 1..23: mol_type = genomic DNA
gggtccagggttcatgtccctgt

SEQ ID NO: 18930 - DNA, 17 bp, Homo sapiens
  source 1..17: mol_type = genomic DNA
gggtcgtgggttcgagc

SEQ ID NO: 18931 - DNA, 20 bp, Homo sapiens
  source 1..20: mol_type = genomic DNA
gggtcgtgggttcgagcccc

SEQ ID NO: 18932 - DNA, 21 bp, Homo sapiens
  source 1..21: mol_type = genomic DNA
gggtcgtgggttcgagcccca

SEQ ID NO: 18933 - DNA, 23 bp, Homo sapiens
  source 1..23: mol_type = genomic DNA
gggtcgtgggttcgagccccacg

SEQ ID NO: 18934 - DNA, 24 bp, Homo sapiens
  source 1..24: mol_type = genomic DNA
gggtcgtgggttcgagccccacgt

SEQ ID NO: 18935 - DNA, 27 bp, Homo sapiens
  source 1..27: mol_type = genomic DNA
gggtcgtgggttcgagccccacgttgg

SEQ ID NO: 18936 - DNA, 29 bp, Homo sapiens
  source 1..29: mol_type = genomic DNA
gggtcgtgggttcgagccccacgttgggc

SEQ ID NO: 18937 - DNA, 30 bp, Homo sapiens
  source 1..30: mol_type = genomic DNA
gggtcgtgggttcgagccccacgttgggcg

SEQ ID NO: 18938 - DNA, 31 bp, Homo sapiens
  source 1..31: mol_type = genomic DNA
gggtcgtgggttcgagccccacgttgggcgc

SEQ ID NO: 18939 - DNA, 32 bp, Homo sapiens
  source 1..32: mol_type = genomic DNA
gggtcgtgggttcgagccccacgttgggcgcc

SEQ ID NO: 18940 - DNA, 33 bp, Homo sapiens
  source 1..33: mol_type = genomic DNA
gggtcgtgggttcgagccccacgttgggcgcca

SEQ ID NO: 18941 - DNA, 16 bp, Homo sapiens
  source 1..16: mol_type = genomic DNA
gggtgcgagaggtccc

SEQ ID NO: 18942 - DNA, 18 bp, Homo sapiens
  source 1..18: mol_type = genomic DNA
gggtgcgagaggtcccgg

SEQ ID NO: 18943 - DNA, 21 bp, Homo sapiens
  source 1..21: mol_type = genomic DNA
gggtgcgagaggtcccgggtt

SEQ ID NO: 18944 - DNA, 23 bp, Homo sapiens
  source 1..23: mol_type = genomic DNA
gggtgcgagaggtcccgggttca

SEQ ID NO: 18945 - DNA, 35 bp, Homo sapiens
  source 1..35: mol_type = genomic DNA
gggtgcgagaggtcccgggttcaaatcccggacga

SEQ ID NO: 18946 - DNA, 37 bp, Homo sapiens
  source 1..37: mol_type = genomic DNA
gggtgcgagaggtcccgggttcaaatcccggacgagc

SEQ ID NO: 18947 - DNA, 40 bp, Homo sapiens
  source 1..40: mol_type = genomic DNA
gggtgcgagaggtcccgggttcaaatcccggacgagcccc

SEQ ID NO: 18948 - DNA, 41 bp, Homo sapiens
  source 1..41: mol_type = genomic DNA
gggtgcgagaggtcccgggttcaaatcccggacgagccccc

SEQ ID NO: 18949 - DNA, 16 bp, Homo sapiens
  source 1..16: mol_type = genomic DNA
gggtgctaatggtgga

SEQ ID NO: 18950 - DNA, 20 bp, Homo sapiens
  source 1..20: mol_type = genomic DNA
gggtgctaatggtggagtta

SEQ ID NO: 18951 - DNA, 21 bp, Homo sapiens
  source 1..21: mol_type = genomic DNA
gggtgctaatggtggagttaa

SEQ ID NO: 18952 - DNA, 22 bp, Homo sapiens
  source 1..22: mol_type = genomic DNA
gggtgctaatggtggagttaaa

SEQ ID NO: 18953 - DNA, 23 bp, Homo sapiens
  source 1..23: mol_type = genomic DNA
gggtgctaatggtggagttaaag

SEQ ID NO: 18954 - DNA, 25 bp, Homo sapiens
  source 1..25: mol_type = genomic DNA
gggtgctaatggtggagttaaagac

SEQ ID NO: 18955 - DNA, 26 bp, Homo sapiens
  source 1..26: mol_type = genomic DNA
gggtgctaatggtggagttaaagact

SEQ ID NO: 18956 - DNA, 28 bp, Homo sapiens
  source 1..28: mol_type = genomic DNA
gggtgctaatggtggagttaaagacttt

SEQ ID NO: 18957 - DNA, 36 bp, Homo sapiens
  source 1..36: mol_type = genomic DNA
gggtgctaatggtggagttaaagactttttctctga

SEQ ID NO: 18958 - DNA, 37 bp, Homo sapiens
  source 1..37: mol_type = genomic DNA
gggtgctaatggtggagttaaagactttttctctgac

SEQ ID NO: 18959 - DNA, 38 bp, Homo sapiens
  source 1..38: mol_type = genomic DNA
gggtgctaatggtggagttaaagactttttctctgacc

SEQ ID NO: 18960 - DNA, 39 bp, Homo sapiens
  source 1..39: mol_type = genomic DNA
gggtgctaatggtggagttaaagactttttctctgacca

SEQ ID NO: 18961 - DNA, 28 bp, Homo sapiens
  source 1..28: mol_type = genomic DNA
gggtgcttagctgttaactaagtgtttg

SEQ ID NO: 18962 - DNA, 34 bp, Homo sapiens
  source 1..34: mol_type = genomic DNA
gggtgcttagctgttaactaagtgtttgtgggtt

SEQ ID NO: 18963 - DNA, 36 bp, Homo sapiens
  source 1..36: mol_type = genomic DNA
gggtgcttagctgttaactaagtgtttgtgggttta

SEQ ID NO: 18964 - DNA, 19 bp, Homo sapiens
  source 1..19: mol_type = genomic DNA
gggtggttcagtggtagaa

SEQ ID NO: 18965 - DNA, 21 bp, Homo sapiens
  source 1..21: mol_type = genomic DNA
gggtggttcagtggtagaatt

SEQ ID NO: 18966 - DNA, 22 bp, Homo sapiens
  source 1..22: mol_type = genomic DNA
gggtggttcagtggtagaattc

SEQ ID NO: 18967 - DNA, 23 bp, Homo sapiens
  source 1..23: mol_type = genomic DNA
gggtggttcagtggtagaattct

SEQ ID NO: 18968 - DNA, 24 bp, Homo sapiens
  source 1..24: mol_type = genomic DNA
gggtggttcagtggtagaattctc

SEQ ID NO: 18969 - DNA, 25 bp, Homo sapiens
  source 1..25: mol_type = genomic DNA
gggtggttcagtggtagaattctcg

SEQ ID NO: 18970 - DNA, 26 bp, Homo sapiens
  source 1..26: mol_type = genomic DNA
gggtggttcagtggtagaattctcgc

SEQ ID NO: 18971 - DNA, 27 bp, Homo sapiens
  source 1..27: mol_type = genomic DNA
gggtggttcagtggtagaattctcgcc

SEQ ID NO: 18972 - DNA, 28 bp, Homo sapiens
  source 1..28: mol_type = genomic DNA
gggtggttcagtggtagaattctcgcct

SEQ ID NO: 18973 - DNA, 29 bp, Homo sapiens
  source 1..29: mol_type = genomic DNA
gggtggttcagtggtagaattctcgcctg

SEQ ID NO: 18974 - DNA, 30 bp, Homo sapiens
  source 1..30: mol_type = genomic DNA
gggtggttcagtggtagaattctcgcctgc

SEQ ID NO: 18975 - DNA, 31 bp, Homo sapiens
  source 1..31: mol_type = genomic DNA
gggtggttcagtggtagaattctcgcctgcc

SEQ ID NO: 18976 - DNA, 32 bp, Homo sapiens
  source 1..32: mol_type = genomic DNA
gggtggttcagtggtagaattctcgcctgcca

SEQ ID NO: 18977 - DNA, 16 bp, Homo sapiens
  source 1..16: mol_type = genomic DNA
gggtgtagctcagtgg

SEQ ID NO: 18978 - DNA, 20 bp, Homo sapiens
  source 1..20: mol_type = genomic DNA
gggtgtagctcagtggtaga

SEQ ID NO: 18979 - DNA, 25 bp, Homo sapiens
  source 1..25: mol_type = genomic DNA
gggtgtagctcagtggtagagcatt

SEQ ID NO: 18980 - DNA, 27 bp, Homo sapiens
  source 1..27: mol_type = genomic DNA
gggtgtagctcagtggtagagcatttg

SEQ ID NO: 18981 - DNA, 30 bp, Homo sapiens
  source 1..30: mol_type = genomic DNA
gggtgtagctcagtggtagagcatttgact

SEQ ID NO: 18982 - DNA, 31 bp, Homo sapiens
  source 1..31: mol_type = genomic DNA
gggtgtagctcagtggtagagcatttgactg

SEQ ID NO: 18983 - DNA, 32 bp, Homo sapiens
  source 1..32: mol_type = genomic DNA
gggtgtagctcagtggtagagcatttgactgc

SEQ ID NO: 18984 - DNA, 33 bp, Homo sapiens
  source 1..33: mol_type = genomic DNA
gggtgtagctcagtggtagagcatttgactgca

SEQ ID NO: 18985 - DNA, 16 bp, Homo sapiens
  source 1..16: mol_type = genomic DNA
gggtgtgataggtggc

SEQ ID NO: 18986 - DNA, 17 bp, Homo sapiens
  source 1..17: mol_type = genomic DNA
gggtgtgataggtggca

SEQ ID NO: 18987 - DNA, 19 bp, Homo sapiens
  source 1..19: mol_type = genomic DNA
gggtgtgataggtggcacg

SEQ ID NO: 18988 - DNA, 21 bp, Homo sapiens
  source 1..21: mol_type = genomic DNA
gggtgtgataggtggcacgga

SEQ ID NO: 18989 - DNA, 22 bp, Homo sapiens
  source 1..22: mol_type = genomic DNA
gggtgtgataggtggcacggag

SEQ ID NO: 18990 - DNA, 23 bp, Homo sapiens
  source 1..23: mol_type = genomic DNA
gggtgtgataggtggcacggaga

SEQ ID NO: 18991 - DNA, 24 bp, Homo sapiens
  source 1..24: mol_type = genomic DNA
gggtgtgataggtggcacggagaa

SEQ ID NO: 18992 - DNA, 25 bp, Homo sapiens
  source 1..25: mol_type = genomic DNA
gggtgtgataggtggcacggagaat

SEQ ID NO: 18993 - DNA, 26 bp, Homo sapiens
  source 1..26: mol_type = genomic DNA
gggtgtgataggtggcacggagaatt

SEQ ID NO: 18994 - DNA, 27 bp, Homo sapiens
  source 1..27: mol_type = genomic DNA
gggtgtgataggtggcacggagaattt

SEQ ID NO: 18995 - DNA, 28 bp, Homo sapiens
  source 1..28: mol_type = genomic DNA
gggtgtgataggtggcacggagaatttt

SEQ ID NO: 18996 - DNA, 29 bp, Homo sapiens
  source 1..29: mol_type = genomic DNA
gggtgtgataggtggcacggagaattttg

SEQ ID NO: 18997 - DNA, 17 bp, Homo sapiens
  source 1..17: mol_type = genomic DNA
gggttagagcactggtc

SEQ ID NO: 18998 - DNA, 18 bp, Homo sapiens
  source 1..18: mol_type = genomic DNA
gggttagagcactggtct

SEQ ID NO: 18999 - DNA, 26 bp, Homo sapiens
  source 1..26: mol_type = genomic DNA
gggttagagcactggtcttgtaaacc

SEQ ID NO: 19000 - DNA, 17 bp, Homo sapiens
  source 1..17: mol_type = genomic DNA
gggttaggcctcttttt

SEQ ID NO: 19001 - DNA, 18 bp, Homo sapiens
  source 1..18: mol_type = genomic DNA
gggttaggcctcttttta

SEQ ID NO: 19002 - DNA, 19 bp, Homo sapiens
  source 1..19: mol_type = genomic DNA
gggttaggcctctttttac

SEQ ID NO: 19003 - DNA, 20 bp, Homo sapiens
  source 1..20: mol_type = genomic DNA
gggttaggcctctttttacc

SEQ ID NO: 19004 - DNA, 21 bp, Homo sapiens
  source 1..21: mol_type = genomic DNA
gggttaggcctctttttacca

SEQ ID NO: 19005 - DNA, 22 bp, Homo sapiens
  source 1..22: mol_type = genomic DNA
gggttaggcctctttttaccac

SEQ ID NO: 19006 - DNA, 23 bp, Homo sapiens
  source 1..23: mol_type = genomic DNA
gggttaggcctctttttaccacc

SEQ ID NO: 19007 - DNA, 24 bp, Homo sapiens
  source 1..24: mol_type = genomic DNA
gggttaggcctctttttaccacca

SEQ ID NO: 19008 - DNA, 22 bp, Homo sapiens
  source 1..22: mol_type = genomic DNA
gggttcaagtccctgttcgggc

SEQ ID NO: 19009 - DNA, 23 bp, Homo sapiens
  source 1..23: mol_type = genomic DNA
gggttcaagtccctgttcgggcg

SEQ ID NO: 19010 - DNA, 24 bp, Homo sapiens
  source 1..24: mol_type = genomic DNA
gggttcaagtccctgttcgggcgc

SEQ ID NO: 19011 - DNA, 25 bp, Homo sapiens
  source 1..25: mol_type = genomic DNA
gggttcaagtccctgttcgggcgcc

SEQ ID NO: 19012 - DNA, 26 bp, Homo sapiens
  source 1..26: mol_type = genomic DNA
gggttcaagtccctgttcgggcgcca

SEQ ID NO: 19013 - DNA, 24 bp, Homo sapiens
  source 1..24: mol_type = genomic DNA
gggttcaatccccggcacctccac

SEQ ID NO: 19014 - DNA, 24 bp, Homo sapiens
  source 1..24: mol_type = genomic DNA
gggttcaattccccgacggggagc

SEQ ID NO: 19015 - DNA, 25 bp, Homo sapiens
  source 1..25: mol_type = genomic DNA
gggttcaattccccgacggggagcc

SEQ ID NO: 19016 - DNA, 26 bp, Homo sapiens
  source 1..26: mol_type = genomic DNA
gggttcaattccccgacggggagcca

SEQ ID NO: 19017 - DNA, 23 bp, Homo sapiens
  source 1..23: mol_type = genomic DNA
gggttcaattcccggtcagggaa

SEQ ID NO: 19018 - DNA, 34 bp, Homo sapiens
  source 1..34: mol_type = genomic DNA
gggttccatagtgtagtggttatcacgtctgctt

SEQ ID NO: 19019 - DNA, 34 bp, Homo sapiens
  source 1..34: mol_type = genomic DNA
gggttccatggtgtaatggttagcactctggact

SEQ ID NO: 19020 - DNA, 25 bp, Homo sapiens
  source 1..25: mol_type = genomic DNA
gggttcgaaccccgtccgtgcctcc

SEQ ID NO: 19021 - DNA, 26 bp, Homo sapiens
  source 1..26: mol_type = genomic DNA
gggttcgaatcccagcggggcctcca

SEQ ID NO: 19022 - DNA, 25 bp, Homo sapiens
  source 1..25: mol_type = genomic DNA
gggttcgaatcccagcggtgcctcc

SEQ ID NO: 19023 - DNA, 24 bp, Homo sapiens
  source 1..24: mol_type = genomic DNA
gggttcgaatcccatcctcgtcgc

SEQ ID NO: 19024 - DNA, 25 bp, Homo sapiens
  source 1..25: mol_type = genomic DNA
gggttcgaatcccatcctcgtcgcc

SEQ ID NO: 19025 - DNA, 26 bp, Homo sapiens
  source 1..26: mol_type = genomic DNA
gggttcgaatcccatcctcgtcgcca

SEQ ID NO: 19026 - DNA, 23 bp, Homo sapiens
  source 1..23: mol_type = genomic DNA
gggttcgaatcccttcgtggttg

SEQ ID NO: 19027 - DNA, 24 bp, Homo sapiens
  source 1..24: mol_type = genomic DNA
gggttcgaatcccttcgtggttgc

SEQ ID NO: 19028 - DNA, 22 bp, Homo sapiens
  source 1..22: mol_type = genomic DNA
gggttcgactcccggtatggga

SEQ ID NO: 19029 - DNA, 23 bp, Homo sapiens
  source 1..23: mol_type = genomic DNA
gggttcgactcccggtatgggaa

SEQ ID NO: 19030 - DNA, 24 bp, Homo sapiens
  source 1..24: mol_type = genomic DNA
gggttcgactcccggtatgggaac

SEQ ID NO: 19031 - DNA, 25 bp, Homo sapiens
  source 1..25: mol_type = genomic DNA
gggttcgactcccggtatgggaacc

SEQ ID NO: 19032 - DNA, 18 bp, Homo sapiens
  source 1..18: mol_type = genomic DNA
gggttcgactcccggtgt

SEQ ID NO: 19033 - DNA, 20 bp, Homo sapiens
  source 1..20: mol_type = genomic DNA
gggttcgactcccggtgtgg

SEQ ID NO: 19034 - DNA, 21 bp, Homo sapiens
  source 1..21: mol_type = genomic DNA
gggttcgactcccggtgtggg

SEQ ID NO: 19035 - DNA, 22 bp, Homo sapiens
  source 1..22: mol_type = genomic DNA
gggttcgactcccggtgtggga

SEQ ID NO: 19036 - DNA, 23 bp, Homo sapiens
  source 1..23: mol_type = genomic DNA
gggttcgactcccggtgtgggaa

SEQ ID NO: 19037 - DNA, 24 bp, Homo sapiens
  source 1..24: mol_type = genomic DNA
gggttcgactcccggtgtgggaac

SEQ ID NO: 19038 - DNA, 25 bp, Homo sapiens
  source 1..25: mol_type = genomic DNA
gggttcgactcccggtgtgggaacc

SEQ ID NO: 19039 - DNA, 26 bp, Homo sapiens
  source 1..26: mol_type = genomic DNA
gggttcgactcccggtgtgggaacca

SEQ ID NO: 19040 - DNA, 23 bp, Homo sapiens
  source 1..23: mol_type = genomic DNA
gggttcgagccccacgttgggcg

SEQ ID NO: 19041 - DNA, 24 bp, Homo sapiens
  source 1..24: mol_type = genomic DNA
gggttcgagccccacgttgggcgc

SEQ ID NO: 19042 - DNA, 25 bp, Homo sapiens
  source 1..25: mol_type = genomic DNA
gggttcgagccccacgttgggcgcc

SEQ ID NO: 19043 - DNA, 26 bp, Homo sapiens
  source 1..26: mol_type = genomic DNA
gggttcgagccccacgttgggcgcca

SEQ ID NO: 19044 - DNA, 24 bp, Homo sapiens
  source 1..24: mol_type = genomic DNA
gggttcgagtcccatctgggtcgc

SEQ ID NO: 19045 - DNA, 23 bp, Homo sapiens
  source 1..23: mol_type = genomic DNA
gggttcgagtcccggcagagatg

SEQ ID NO: 19046 - DNA, 25 bp, Homo sapiens
  source 1..25: mol_type = genomic DNA
gggttcgagtcccttcgtggtcgcc

SEQ ID NO: 19047 - DNA, 16 bp, Homo sapiens
  source 1..16: mol_type = genomic DNA
gggttcgatccccggc

SEQ ID NO: 19048 - DNA, 17 bp, Homo sapiens
  source 1..17: mol_type = genomic DNA
gggttcgatccccggca

SEQ ID NO: 19049 - DNA, 20 bp, Homo sapiens
  source 1..20: mol_type = genomic DNA
gggttcgatccccggcatct

SEQ ID NO: 19050 - DNA, 21 bp, Homo sapiens
  source 1..21: mol_type = genomic DNA
gggttcgatccccggcatctc

SEQ ID NO: 19051 - DNA, 22 bp, Homo sapiens
  source 1..22: mol_type = genomic DNA
gggttcgatccccggcatctcc

SEQ ID NO: 19052 - DNA, 24 bp, Homo sapiens
  source 1..24: mol_type = genomic DNA
gggttcgatccccggcatctccac

SEQ ID NO: 19053 - DNA, 25 bp, Homo sapiens
  source 1..25: mol_type = genomic DNA
gggttcgatccccggcatctccacc

SEQ ID NO: 19054 - DNA, 26 bp, Homo sapiens
  source 1..26: mol_type = genomic DNA
gggttcgatccccggcatctccacca

SEQ ID NO: 19055 - DNA, 19 bp, Homo sapiens
  source 1..19: mol_type = genomic DNA
gggttcgattccccgacgg

SEQ ID NO: 19056 - DNA, 22 bp, Homo sapiens
  source 1..22: mol_type = genomic DNA
gggttcgattccccgacgggga

SEQ ID NO: 19057 - DNA, 23 bp, Homo sapiens
  source 1..23: mol_type = genomic DNA
gggttcgattccccgacggggag

SEQ ID NO: 19058 - DNA, 24 bp, Homo sapiens
  source 1..24: mol_type = genomic DNA
gggttcgattccccgacggggagc

SEQ ID NO: 19059 - DNA, 25 bp, Homo sapiens
  source 1..25: mol_type = genomic DNA
gggttcgattccccgacggggagcc

SEQ ID NO: 19060 - DNA, 26 bp, Homo sapiens
  source 1..26: mol_type = genomic DNA
gggttcgattccccgacggggagcca

SEQ ID NO: 19061 - DNA, 16 bp, Homo sapiens
  source 1..16: mol_type = genomic DNA
gggttcgattcccggc

SEQ ID NO: 19062 - DNA, 18 bp, Homo sapiens
  source 1..18: mol_type = genomic DNA
gggttcgattcccggcca

SEQ ID NO: 19063 - DNA, 21 bp, Homo sapiens
  source 1..21: mol_type = genomic DNA
gggttcgattcccggccaacg

SEQ ID NO: 19064 - DNA, 24 bp, Homo sapiens
  source 1..24: mol_type = genomic DNA
gggttcgattcccggccaacgcac

SEQ ID NO: 19065 - DNA, 21 bp, Homo sapiens
  source 1..21: mol_type = genomic DNA
gggttcgattcccggccaatg

SEQ ID NO: 19066 - DNA, 24 bp, Homo sapiens
  source 1..24: mol_type = genomic DNA
gggttcgattcccggccagggaac

SEQ ID NO: 19067 - DNA, 17 bp, Homo sapiens
  source 1..17: mol_type = genomic DNA
gggttcgattcccgggc

SEQ ID NO: 19068 - DNA, 18 bp, Homo sapiens
  source 1..18: mol_type = genomic DNA
gggttcgattcccgggcg

SEQ ID NO: 19069 - DNA, 20 bp, Homo sapiens
  source 1..20: mol_type = genomic DNA
gggttcgattcccgggcggc

SEQ ID NO: 19070 - DNA, 21 bp, Homo sapiens
  source 1..21: mol_type = genomic DNA
gggttcgattcccgggcggcg

SEQ ID NO: 19071 - DNA, 22 bp, Homo sapiens
  source 1..22: mol_type = genomic DNA
gggttcgattcccgggcggcgc

SEQ ID NO: 19072 - DNA, 23 bp, Homo sapiens
  source 1..23: mol_type = genomic DNA
gggttcgattcccgggcggcgca

SEQ ID NO: 19073 - DNA, 24 bp, Homo sapiens
  source 1..24: mol_type = genomic DNA
gggttcgattcccgggcggcgcac

SEQ ID NO: 19074 - DNA, 25 bp, Homo sapiens
  source 1..25: mol_type = genomic DNA
gggttcgattcccgggcggcgcacc

SEQ ID NO: 19075 - DNA, 26 bp, Homo sapiens
  source 1..26: mol_type = genomic DNA
gggttcgattcccgggcggcgcacca

SEQ ID NO: 19076 - DNA, 17 bp, Homo sapiens
  source 1..17: mol_type = genomic DNA
gggttcgattcccggtc

SEQ ID NO: 19077 - DNA, 18 bp, Homo sapiens
  source 1..18: mol_type = genomic DNA
gggttcgattcccggtca

SEQ ID NO: 19078 - DNA, 19 bp, Homo sapiens
  source 1..19: mol_type = genomic DNA
gggttcgattcccggtcag

SEQ ID NO: 19079 - DNA, 20 bp, Homo sapiens
  source 1..20: mol_type = genomic DNA
gggttcgattcccggtcagg

SEQ ID NO: 19080 - DNA, 24 bp, Homo sapiens
  source 1..24: mol_type = genomic DNA
gggttcgattcccggtcaggaaac

SEQ ID NO: 19081 - DNA, 25 bp, Homo sapiens
  source 1..25: mol_type = genomic DNA
gggttcgattcccggtcaggaaacc

SEQ ID NO: 19082 - DNA, 21 bp, Homo sapiens
  source 1..21: mol_type = genomic DNA
gggttcgattcccggtcaggg

SEQ ID NO: 19083 - DNA, 22 bp, Homo sapiens
  source 1..22: mol_type = genomic DNA
gggttcgattcccggtcaggga

SEQ ID NO: 19084 - DNA, 23 bp, Homo sapiens
  source 1..23: mol_type = genomic DNA
gggttcgattcccggtcagggaa

SEQ ID NO: 19085 - DNA, 24 bp, Homo sapiens
  source 1..24: mol_type = genomic DNA
gggttcgattcccggtcagggaac

SEQ ID NO: 19086 - DNA, 25 bp, Homo sapiens
  source 1..25: mol_type = genomic DNA
gggttcgattcccggtcagggaacc

SEQ ID NO: 19087 - DNA, 26 bp, Homo sapiens
  source 1..26: mol_type = genomic DNA
gggttcgattcccggtcagggaacca

SEQ ID NO: 19088 - DNA, 24 bp, Homo sapiens
  source 1..24: mol_type = genomic DNA
gggttcgattccttccttttttgc

SEQ ID NO: 19089 - DNA, 25 bp, Homo sapiens
  source 1..25: mol_type = genomic DNA
gggttcgattccttccttttttgcc

SEQ ID NO: 19090 - DNA, 26 bp, Homo sapiens
  source 1..26: mol_type = genomic DNA
gggttcgattccttccttttttgcca

SEQ ID NO: 19091 - DNA, 20 bp, Homo sapiens
  source 1..20: mol_type = genomic DNA
gggttcgattctcatagtcc

SEQ ID NO: 19092 - DNA, 23 bp, Homo sapiens
  source 1..23: mol_type = genomic DNA
gggttcgattctcatagtcctag

SEQ ID NO: 19093 - DNA, 24 bp, Homo sapiens
  source 1..24: mol_type = genomic DNA
gggttcgattctcatagtcctagc

SEQ ID NO: 19094 - DNA, 25 bp, Homo sapiens
  source 1..25: mol_type = genomic DNA
gggttcgattctcatagtcctagcc

SEQ ID NO: 19095 - DNA, 26 bp, Homo sapiens
  source 1..26: mol_type = genomic DNA
gggttcgattctcatagtcctagcca

SEQ ID NO: 19096 - DNA, 20 bp, Homo sapiens
  source 1..20: mol_type = genomic DNA
gggtttaagtcccattggtc

SEQ ID NO: 19097 - DNA, 23 bp, Homo sapiens
  source 1..23: mol_type = genomic DNA
gggtttaagtcccattggtctag

SEQ ID NO: 19098 - DNA, 24 bp, Homo sapiens
  source 1..24: mol_type = genomic DNA
gggtttaagtcccattggtctagc

SEQ ID NO: 19099 - DNA, 25 bp, Homo sapiens
  source 1..25: mol_type = genomic DNA
gggtttaagtcccattggtctagcc

SEQ ID NO: 19100 - DNA, 18 bp, Homo sapiens
  source 1..18: mol_type = genomic DNA
gggtttccccgcgcaggt

SEQ ID NO: 19101 - DNA, 19 bp, Homo sapiens
  source 1..19: mol_type = genomic DNA
gggtttccccgcgcaggtt

SEQ ID NO: 19102 - DNA, 19 bp, Homo sapiens
  source 1..19: mol_type = genomic DNA
gggttttgcagtccttacc

SEQ ID NO: 19103 - DNA, 20 bp, Homo sapiens
  source 1..20: mol_type = genomic DNA
gggttttgcagtccttacca

SEQ ID NO: 19104 - DNA, 16 bp, Homo sapiens
  source 1..16: mol_type = genomic DNA
ggtaaaatggctgagt

SEQ ID NO: 19105 - DNA, 17 bp, Homo sapiens
  source 1..17: mol_type = genomic DNA
ggtaaaatggctgagtg

SEQ ID NO: 19106 - DNA, 18 bp, Homo sapiens
  source 1..18: mol_type = genomic DNA
ggtaaaatggctgagtga

SEQ ID NO: 19107 - DNA, 19 bp, Homo sapiens
  source 1..19: mol_type = genomic DNA
ggtaaaatggctgagtgaa

SEQ ID NO: 19108 - DNA, 20 bp, Homo sapiens
  source 1..20: mol_type = genomic DNA
ggtaaaatggctgagtgaag

SEQ ID NO: 19109 - DNA, 21 bp, Homo sapiens
  source 1..21: mol_type = genomic DNA
ggtaaaatggctgagtgaagc

SEQ ID NO: 19110 - DNA, 22 bp, Homo sapiens
  source 1..22: mol_type = genomic DNA
ggtaaaatggctgagtgaagca

SEQ ID NO: 19111 - DNA, 23 bp, Homo sapiens
  source 1..23: mol_type = genomic DNA
ggtaaaatggctgagtgaagcat

SEQ ID NO: 19112 - DNA, 24 bp, Homo sapiens
  source 1..24: mol_type = genomic DNA
ggtaaaatggctgagtgaagcatt

SEQ ID NO: 19113 - DNA, 25 bp, Homo sapiens
  source 1..25: mol_type = genomic DNA
ggtaaaatggctgagtgaagcattg

SEQ ID NO: 19114 - DNA, 26 bp, Homo sapiens
  source 1..26: mol_type = genomic DNA
ggtaaaatggctgagtgaagcattgg

SEQ ID NO: 19115 - DNA, 27 bp, Homo sapiens
  source 1..27: mol_type = genomic DNA
ggtaaaatggctgagtgaagcattgga

SEQ ID NO: 19116 - DNA, 28 bp, Homo sapiens
  source 1..28: mol_type = genomic DNA
ggtaaaatggctgagtgaagcattggac

SEQ ID NO: 19117 - DNA, 29 bp, Homo sapiens
  source 1..29: mol_type = genomic DNA
ggtaaaatggctgagtgaagcattggact

SEQ ID NO: 19118 - DNA, 30 bp, Homo sapiens
  source 1..30: mol_type = genomic DNA
ggtaaaatggctgagtgaagcattggactg

SEQ ID NO: 19119 - DNA, 31 bp, Homo sapiens
  source 1..31: mol_type = genomic DNA
ggtaaaatggctgagtgaagcattggactgt

SEQ ID NO: 19120 - DNA, 32 bp, Homo sapiens
  source 1..32: mol_type = genomic DNA
ggtaaaatggctgagtgaagcattggactgta

SEQ ID NO: 19121 - DNA, 33 bp, Homo sapiens
  source 1..33: mol_type = genomic DNA
ggtaaaatggctgagtgaagcattggactgtaa

SEQ ID NO: 19122 - DNA, 34 bp, Homo sapiens
  source 1..34: mol_type = genomic DNA
ggtaaaatggctgagtgaagcattggactgtaaa

SEQ ID NO: 19123 - DNA, 35 bp, Homo sapiens
  source 1..35: mol_type = genomic DNA
ggtaaaatggctgagtgaagcattggactgtaaat

SEQ ID NO: 19124 - DNA, 36 bp, Homo sapiens
  source 1..36: mol_type = genomic DNA
ggtaaaatggctgagtgaagcattggactgtaaatc

SEQ ID NO: 19125 - DNA, 37 bp, Homo sapiens
  source 1..37: mol_type = genomic DNA
ggtaaaatggctgagtgaagcattggactgtaaatct

SEQ ID NO: 19126 - DNA, 38 bp, Homo sapiens
  source 1..38: mol_type = genomic DNA
ggtaaaatggctgagtgaagcattggactgtaaatcta

SEQ ID NO: 19127 - DNA, 39 bp, Homo sapiens
  source 1..39: mol_type = genomic DNA
ggtaaaatggctgagtgaagcattggactgtaaatctaa

SEQ ID NO: 19128 - DNA, 40 bp, Homo sapiens
  source 1..40: mol_type = genomic DNA
ggtaaaatggctgagtgaagcattggactgtaaatctaaa

SEQ ID NO: 19129 - DNA, 41 bp, Homo sapiens
  source 1..41: mol_type = genomic DNA
ggtaaaatggctgagtgaagcattggactgtaaatctaaag

SEQ ID NO: 19130 - DNA, 43 bp, Homo sapiens
  source 1..43: mol_type = genomic DNA
ggtaaaatggctgagtgaagcattggactgtaaatctaaagac

SEQ ID NO: 19131 - DNA, 47 bp, Homo sapiens
  source 1..47: mol_type = genomic DNA
ggtaaaatggctgagtgaagcattggactgtaaatctaaagacaggg

SEQ ID NO: 19132 - DNA, 48 bp, Homo sapiens
  source 1..48: mol_type = genomic DNA
ggtaaaatggctgagtgaagcattggactgtaaatctaaagacagggg

SEQ ID NO: 19133 - DNA, 17 bp, Homo sapiens
  source 1..17: mol_type = genomic DNA
ggtaaatatagtttaac

SEQ ID NO: 19134 - DNA, 18 bp, Homo sapiens
  source 1..18: mol_type = genomic DNA
ggtaaatatagtttaacc

SEQ ID NO: 19135 - DNA, 29 bp, Homo sapiens
  source 1..29: mol_type = genomic DNA
ggtaaatatagtttaaccaaaacatcaga

SEQ ID NO: 19136 - DNA, 30 bp, Homo sapiens
  source 1..30: mol_type = genomic DNA
ggtaaatatagtttaaccaaaacatcagat

SEQ ID NO: 19137 - DNA, 32 bp, Homo sapiens
  source 1..32: mol_type = genomic DNA
ggtaaatatagtttaaccaaaacatcagattg

SEQ ID NO: 19138 - DNA, 33 bp, Homo sapiens
  source 1..33: mol_type = genomic DNA
ggtaaatatagtttaaccaaaacatcagattgt

SEQ ID NO: 19139 - DNA, 34 bp, Homo sapiens
  source 1..34: mol_type = genomic DNA
ggtaaatatagtttaaccaaaacatcagattgtg

SEQ ID NO: 19140 - DNA, 35 bp, Homo sapiens
  source 1..35: mol_type = genomic DNA
ggtaaatatagtttaaccaaaacatcagattgtga

SEQ ID NO: 19141 - DNA, 36 bp, Homo sapiens
  source 1..36: mol_type = genomic DNA
ggtaaatatagtttaaccaaaacatcagattgtgaa

SEQ ID NO: 19142 - DNA, 37 bp, Homo sapiens
  source 1..37: mol_type = genomic DNA
ggtaaatatagtttaaccaaaacatcagattgtgaat

SEQ ID NO: 19143 - DNA, 38 bp, Homo sapiens
  source 1..38: mol_type = genomic DNA
ggtaaatatagtttaaccaaaacatcagattgtgaatc

SEQ ID NO: 19144 - DNA, 39 bp, Homo sapiens
  source 1..39: mol_type = genomic DNA
ggtaaatatagtttaaccaaaacatcagattgtgaatct

SEQ ID NO: 19145 - DNA, 40 bp, Homo sapiens
  source 1..40: mol_type = genomic DNA
ggtaaatatagtttaaccaaaacatcagattgtgaatctg

SEQ ID NO: 19146 - DNA, 41 bp, Homo sapiens
  source 1..41: mol_type = genomic DNA
ggtaaatatagtttaaccaaaacatcagattgtgaatctga

SEQ ID NO: 19147 - DNA, 42 bp, Homo sapiens
  source 1..42: mol_type = genomic DNA
ggtaaatatagtttaaccaaaacatcagattgtgaatctgac

SEQ ID NO: 19148 - DNA, 43 bp, Homo sapiens
  source 1..43: mol_type = genomic DNA
ggtaaatatagtttaaccaaaacatcagattgtgaatctgaca

SEQ ID NO: 19149 - DNA, 44 bp, Homo sapiens
  source 1..44: mol_type = genomic DNA
ggtaaatatagtttaaccaaaacatcagattgtgaatctgacaa

SEQ ID NO: 19150 - DNA, 21 bp, Homo sapiens
  source 1..21: mol_type = genomic DNA
ggtaagcactctggactctga

SEQ ID NO: 19151 - DNA, 22 bp, Homo sapiens
  source 1..22: mol_type = genomic DNA
ggtaagcactctggactctgaa

SEQ ID NO: 19152 - DNA, 36 bp, Homo sapiens
  source 1..36: mol_type = genomic DNA
ggtaagcactctggactctgaatccagcgatccgag

SEQ ID NO: 19153 - DNA, 20 bp, Homo sapiens
  source 1..20: mol_type = genomic DNA
ggtaagcatagctgccttcc

SEQ ID NO: 19154 - DNA, 16 bp, Homo sapiens
  source 1..16: mol_type = genomic DNA
ggtaatcgcataaaac

SEQ ID NO: 19155 - DNA, 17 bp, Homo sapiens
  source 1..17: mol_type = genomic DNA
ggtaatcgcataaaact

SEQ ID NO: 19156 - DNA, 18 bp, Homo sapiens
  source 1..18: mol_type = genomic DNA
ggtaatcgcataaaactt

SEQ ID NO: 19157 - DNA, 19 bp, Homo sapiens
  source 1..19: mol_type = genomic DNA
ggtaatcgcataaaactta

SEQ ID NO: 19158 - DNA, 20 bp, Homo sapiens
  source 1..20: mol_type = genomic DNA
ggtaatcgcataaaacttaa

SEQ ID NO: 19159 - DNA, 21 bp, Homo sapiens
  source 1..21: mol_type = genomic DNA
ggtaatcgcataaaacttaaa

SEQ ID NO: 19160 - DNA, 22 bp, Homo sapiens
  source 1..22: mol_type = genomic DNA
ggtaatcgcataaaacttaaaa

SEQ ID NO: 19161 - DNA, 23 bp, Homo sapiens
  source 1..23: mol_type = genomic DNA
ggtaatcgcataaaacttaaaac

SEQ ID NO: 19162 - DNA, 24 bp, Homo sapiens
  source 1..24: mol_type = genomic DNA
ggtaatcgcataaaacttaaaact

SEQ ID NO: 19163 - DNA, 25 bp, Homo sapiens
  source 1..25: mol_type = genomic DNA
ggtaatcgcataaaacttaaaactt

SEQ ID NO: 19164 - DNA, 26 bp, Homo sapiens
  source 1..26: mol_type = genomic DNA
ggtaatcgcataaaacttaaaacttt

SEQ ID NO: 19165 - DNA, 27 bp, Homo sapiens
  source 1..27: mol_type = genomic DNA
ggtaatcgcataaaacttaaaacttta

SEQ ID NO: 19166 - DNA, 28 bp, Homo sapiens
  source 1..28: mol_type = genomic DNA
ggtaatcgcataaaacttaaaactttac

SEQ ID NO: 19167 - DNA, 29 bp, Homo sapiens
  source 1..29: mol_type = genomic DNA
ggtaatcgcataaaacttaaaactttaca

SEQ ID NO: 19168 - DNA, 30 bp, Homo sapiens
  source 1..30: mol_type = genomic DNA
ggtaatcgcataaaacttaaaactttacag

SEQ ID NO: 19169 - DNA, 31 bp, Homo sapiens
  source 1..31: mol_type = genomic DNA
ggtaatcgcataaaacttaaaactttacagt

SEQ ID NO: 19170 - DNA, 32 bp, Homo sapiens
  source 1..32: mol_type = genomic DNA
ggtaatcgcataaaacttaaaactttacagtc

SEQ ID NO: 19171 - DNA, 34 bp, Homo sapiens
  source 1..34: mol_type = genomic DNA
ggtaatcgcataaaacttaaaactttacagtcag

SEQ ID NO: 19172 - DNA, 35 bp, Homo sapiens
  source 1..35: mol_type = genomic DNA
ggtaatcgcataaaacttaaaactttacagtcaga

SEQ ID NO: 19173 - DNA, 36 bp, Homo sapiens
  source 1..36: mol_type = genomic DNA
ggtaatcgcataaaacttaaaactttacagtcagag

SEQ ID NO: 19174 - DNA, 37 bp, Homo sapiens
  source 1..37: mol_type = genomic DNA
ggtaatcgcataaaacttaaaactttacagtcagagg

SEQ ID NO: 19175 - DNA, 39 bp, Homo sapiens
  source 1..39: mol_type = genomic DNA
ggtaatcgcataaaacttaaaactttacagtcagaggtt

SEQ ID NO: 19176 - DNA, 40 bp, Homo sapiens
  source 1..40: mol_type = genomic DNA
ggtaatcgcataaaacttaaaactttacagtcagaggttc

SEQ ID NO: 19177 - DNA, 41 bp, Homo sapiens
  source 1..41: mol_type = genomic DNA
ggtaatcgcataaaacttaaaactttacagtcagaggttca

SEQ ID NO: 19178 - DNA, 28 bp, Homo sapiens
  source 1..28: mol_type = genomic DNA
ggtacttataatgccgaggttgtgagtt

SEQ ID NO: 19179 - DNA, 16 bp, Homo sapiens
  source 1..16: mol_type = genomic DNA
ggtagaattctcgcct

SEQ ID NO: 19180 - DNA, 19 bp, Homo sapiens
  source 1..19: mol_type = genomic DNA
ggtagaattctcgcctccc

SEQ ID NO: 19181 - DNA, 36 bp, Homo sapiens
  source 1..36: mol_type = genomic DNA
ggtagaattctcgcctcccacgcgggagacccgggt

SEQ ID NO: 19182 - DNA, 37 bp, Homo sapiens
  source 1..37: mol_type = genomic DNA
ggtagaattctcgcctcccacgcgggagacccgggtt

SEQ ID NO: 19183 - DNA, 17 bp, Homo sapiens
  source 1..17: mol_type = genomic DNA
ggtagaattctcgcctg

SEQ ID NO: 19184 - DNA, 18 bp, Homo sapiens
  source 1..18: mol_type = genomic DNA
ggtagaattctcgcctgc

SEQ ID NO: 19185 - DNA, 19 bp, Homo sapiens
  source 1..19: mol_type = genomic DNA
ggtagaattctcgcctgcc

SEQ ID NO: 19186 - DNA, 20 bp, Homo sapiens
  source 1..20: mol_type = genomic DNA
ggtagaattctcgcctgcca

SEQ ID NO: 19187 - DNA, 21 bp, Homo sapiens
  source 1..21: mol_type = genomic DNA
ggtagaattctcgcctgccac

SEQ ID NO: 19188 - DNA, 22 bp, Homo sapiens
  source 1..22: mol_type = genomic DNA
ggtagaattctcgcctgccacg

SEQ ID NO: 19189 - DNA, 23 bp, Homo sapiens
  source 1..23: mol_type = genomic DNA
ggtagaattctcgcctgccacgc

SEQ ID NO: 19190 - DNA, 25 bp, Homo sapiens
  source 1..25: mol_type = genomic DNA
ggtagaattctcgcctgccacgcgg

SEQ ID NO: 19191 - DNA, 27 bp, Homo sapiens
  source 1..27: mol_type = genomic DNA
ggtagaattctcgcctgccacgcggga

SEQ ID NO: 19192 - DNA, 28 bp, Homo sapiens
  source 1..28: mol_type = genomic DNA
ggtagaattctcgcctgccacgcgggag

SEQ ID NO: 19193 - DNA, 31 bp, Homo sapiens
  source 1..31: mol_type = genomic DNA
ggtagaattctcgcctgccacgcgggaggcc

SEQ ID NO: 19194 - DNA, 32 bp, Homo sapiens
  source 1..32: mol_type = genomic DNA
ggtagaattctcgcctgccacgcgggaggccc

SEQ ID NO: 19195 - DNA, 33 bp, Homo sapiens
  source 1..33: mol_type = genomic DNA
ggtagaattctcgcctgccacgcgggaggcccg

SEQ ID NO: 19196 - DNA, 34 bp, Homo sapiens
  source 1..34: mol_type = genomic DNA
ggtagaattctcgcctgccacgcgggaggcccgg

SEQ ID NO: 19197 - DNA, 35 bp, Homo sapiens
  source 1..35: mol_type = genomic DNA
ggtagaattctcgcctgccacgcgggaggcccggg

SEQ ID NO: 19198 - DNA, 36 bp, Homo sapiens
  source 1..36: mol_type = genomic DNA
ggtagaattctcgcctgccacgcgggaggcccgggt

SEQ ID NO: 19199 - DNA, 37 bp, Homo sapiens
  source 1..37: mol_type = genomic DNA
ggtagaattctcgcctgccacgcgggaggcccgggtt

SEQ ID NO: 19200 - DNA, 39 bp, Homo sapiens
  source 1..39: mol_type = genomic DNA
ggtagaattctcgcctgccacgcgggaggcccgggttcg

SEQ ID NO: 19201 - DNA, 16 bp, Homo sapiens
  source 1..16: mol_type = genomic DNA
ggtagagcatcagact

SEQ ID NO: 19202 - DNA, 17 bp, Homo sapiens
  source 1..17: mol_type = genomic DNA
ggtagagcatcagactt

SEQ ID NO: 19203 - DNA, 18 bp, Homo sapiens
  source 1..18: mol_type = genomic DNA
ggtagagcatcagacttt

SEQ ID NO: 19204 - DNA, 19 bp, Homo sapiens
  source 1..19: mol_type = genomic DNA
ggtagagcatcagactttt

SEQ ID NO: 19205 - DNA, 22 bp, Homo sapiens
  source 1..22: mol_type = genomic DNA
ggtagagcatcagacttttaat

SEQ ID NO: 19206 - DNA, 16 bp, Homo sapiens
  source 1..16: mol_type = genomic DNA
ggtagagcatgagacc

SEQ ID NO: 19207 - DNA, 17 bp, Homo sapiens
  source 1..17: mol_type = genomic DNA
ggtagagcatgagaccc

SEQ ID NO: 19208 - DNA, 18 bp, Homo sapiens
  source 1..18: mol_type = genomic DNA
ggtagagcatgagaccct

SEQ ID NO: 19209 - DNA, 25 bp, Homo sapiens
  source 1..25: mol_type = genomic DNA
ggtagagcatgagacccttaatctc

SEQ ID NO: 19210 - DNA, 16 bp, Homo sapiens
  source 1..16: mol_type = genomic DNA
ggtagagcatgagact

SEQ ID NO: 19211 - DNA, 17 bp, Homo sapiens
  source 1..17: mol_type = genomic DNA
ggtagagcatgagactc

SEQ ID NO: 19212 - DNA, 18 bp, Homo sapiens
  source 1..18: mol_type = genomic DNA
ggtagagcatgagactct

SEQ ID NO: 19213 - DNA, 19 bp, Homo sapiens
  source 1..19: mol_type = genomic DNA
ggtagagcatgagactctt

SEQ ID NO: 19214 - DNA, 21 bp, Homo sapiens
  source 1..21: mol_type = genomic DNA
ggtagagcatgagactcttaa

SEQ ID NO: 19215 - DNA, 23 bp, Homo sapiens
  source 1..23: mol_type = genomic DNA
ggtagagcatgagactcttaatc

SEQ ID NO: 19216 - DNA, 24 bp, Homo sapiens
  source 1..24: mol_type = genomic DNA
ggtagagcatgagactcttaatct

SEQ ID NO: 19217 - DNA, 25 bp, Homo sapiens
  source 1..25: mol_type = genomic DNA
ggtagagcatgagactcttaatctc

SEQ ID NO: 19218 - DNA, 32 bp, Homo sapiens
  source 1..32: mol_type = genomic DNA
ggtagagcatgagactcttaatctcagggtcg

SEQ ID NO: 19219 - DNA, 33 bp, Homo sapiens
  source 1..33: mol_type = genomic DNA
ggtagagcatgagactcttaatctcagggtcgt

SEQ ID NO: 19220 - DNA, 34 bp, Homo sapiens
  source 1..34: mol_type = genomic DNA
ggtagagcatgagactcttaatctcagggtcgtg

SEQ ID NO: 19221 - DNA, 35 bp, Homo sapiens
  source 1..35: mol_type = genomic DNA
ggtagagcatgagactcttaatctcagggtcgtgg

SEQ ID NO: 19222 - DNA, 36 bp, Homo sapiens
  source 1..36: mol_type = genomic DNA
ggtagagcatgagactcttaatctcagggtcgtggg

SEQ ID NO: 19223 - DNA, 38 bp, Homo sapiens
  source 1..38: mol_type = genomic DNA
ggtagagcatgagactcttaatctcagggtcgtgggtt

SEQ ID NO: 19224 - DNA, 39 bp, Homo sapiens
  source 1..39: mol_type = genomic DNA
ggtagagcatgagactcttaatctcagggtcgtgggttc

SEQ ID NO: 19225 - DNA, 40 bp, Homo sapiens
  source 1..40: mol_type = genomic DNA
ggtagagcatgagactcttaatctcagggtcgtgggttcg

SEQ ID NO: 19226 - DNA, 16 bp, Homo sapiens
  source 1..16: mol_type = genomic DNA
ggtagagcatgggact

SEQ ID NO: 19227 - DNA, 17 bp, Homo sapiens
  source 1..17: mol_type = genomic DNA
ggtagagcatgggactc

SEQ ID NO: 19228 - DNA, 18 bp, Homo sapiens
  source 1..18: mol_type = genomic DNA
ggtagagcatgggactct

SEQ ID NO: 19229 - DNA, 19 bp, Homo sapiens
  source 1..19: mol_type = genomic DNA
ggtagagcatgggactctt

SEQ ID NO: 19230 - DNA, 20 bp, Homo sapiens
  source 1..20: mol_type = genomic DNA
ggtagagcatgggactctta

SEQ ID NO: 19231 - DNA, 21 bp, Homo sapiens
  source 1..21: mol_type = genomic DNA
ggtagagcatgggactcttaa

SEQ ID NO: 19232 - DNA, 22 bp, Homo sapiens
  source 1..22: mol_type = genomic DNA
ggtagagcatgggactcttaat

SEQ ID NO: 19233 - DNA, 23 bp, Homo sapiens
  source 1..23: mol_type = genomic DNA
ggtagagcatgggactcttaatc

SEQ ID NO: 19234 - DNA, 24 bp, Homo sapiens
  source 1..24: mol_type = genomic DNA
ggtagagcatgggactcttaatcc

SEQ ID NO: 19235 - DNA, 25 bp, Homo sapiens
  source 1..25: mol_type = genomic DNA
ggtagagcatgggactcttaatccc

SEQ ID NO: 19236 - DNA, 26 bp, Homo sapiens
  source 1..26: mol_type = genomic DNA
ggtagagcatgggactcttaatccca

SEQ ID NO: 19237 - DNA, 32 bp, Homo sapiens
  source 1..32: mol_type = genomic DNA
ggtagagcatgggactcttaatcccagggtcg

SEQ ID NO: 19238 - DNA, 33 bp, Homo sapiens
  source 1..33: mol_type = genomic DNA
ggtagagcatgggactcttaatcccagggtcgt

SEQ ID NO: 19239 - DNA, 34 bp, Homo sapiens
  source 1..34: mol_type = genomic DNA
ggtagagcatgggactcttaatcccagggtcgtg

SEQ ID NO: 19240 - DNA, 35 bp, Homo sapiens
  source 1..35: mol_type = genomic DNA
ggtagagcatgggactcttaatcccagggtcgtgg

SEQ ID NO: 19241 - DNA, 36 bp, Homo sapiens
  source 1..36: mol_type = genomic DNA
ggtagagcatgggactcttaatcccagggtcgtggg

SEQ ID NO: 19242 - DNA, 38 bp, Homo sapiens
  source 1..38: mol_type = genomic DNA
ggtagagcatgggactcttaatcccagggtcgtgggtt

SEQ ID NO: 19243 - DNA, 40 bp, Homo sapiens
  source 1..40: mol_type = genomic DNA
ggtagagcatgggactcttaatcccagggtcgtgggttcg

SEQ ID NO: 19244 - DNA, 46 bp, Homo sapiens
  source 1..46: mol_type = genomic DNA
ggtagagcatgggactcttaatcccagggtcgtgggttcgagcccc

SEQ ID NO: 19245 - DNA, 25 bp, Homo sapiens
  source 1..25: mol_type = genomic DNA
ggtagagcatgggactcttaatctc

SEQ ID NO: 19246 - DNA, 16 bp, Homo sapiens
  source 1..16: mol_type = genomic DNA
ggtagagcatttgact

SEQ ID NO: 19247 - DNA, 17 bp, Homo sapiens
  source 1..17: mol_type = genomic DNA
ggtagagcatttgactg

SEQ ID NO: 19248 - DNA, 18 bp, Homo sapiens
  source 1..18: mol_type = genomic DNA
ggtagagcatttgactgc

SEQ ID NO: 19249 - DNA, 17 bp, Homo sapiens
  source 1..17: mol_type = genomic DNA
ggtagagcggaggactg

SEQ ID NO: 19250 - DNA, 20 bp, Homo sapiens
  source 1..20: mol_type = genomic DNA
ggtagagcggaggactgtag

SEQ ID NO: 19251 - DNA, 16 bp, Homo sapiens
  source 1..16: mol_type = genomic DNA
ggtagcgcgtctgact

SEQ ID NO: 19252 - DNA, 18 bp, Homo sapiens
  source 1..18: mol_type = genomic DNA
ggtagcgcgtctgactcc

SEQ ID NO: 19253 - DNA, 16 bp, Homo sapiens
  source 1..16: mol_type = genomic DNA
ggtagcgtggccgagc

SEQ ID NO: 19254 - DNA, 17 bp, Homo sapiens
  source 1..17: mol_type = genomic DNA
ggtagcgtggccgagcg

SEQ ID NO: 19255 - DNA, 18 bp, Homo sapiens
  source 1..18: mol_type = genomic DNA
ggtagcgtggccgagcgg

SEQ ID NO: 19256 - DNA, 19 bp, Homo sapiens
  source 1..19: mol_type = genomic DNA
ggtagcgtggccgagcggt

SEQ ID NO: 19257 - DNA, 20 bp, Homo sapiens
  source 1..20: mol_type = genomic DNA
ggtagcgtggccgagcggtc

SEQ ID NO: 19258 - DNA, 21 bp, Homo sapiens
  source 1..21: mol_type = genomic DNA
ggtagcgtggccgagcggtct

SEQ ID NO: 19259 - DNA, 22 bp, Homo sapiens
  source 1..22: mol_type = genomic DNA
ggtagcgtggccgagcggtcta

SEQ ID NO: 19260 - DNA, 23 bp, Homo sapiens
  source 1..23: mol_type = genomic DNA
ggtagcgtggccgagcggtctaa

SEQ ID NO: 19261 - DNA, 24 bp, Homo sapiens
  source 1..24: mol_type = genomic DNA
ggtagcgtggccgagcggtctaag

SEQ ID NO: 19262 - DNA, 25 bp, Homo sapiens
  source 1..25: mol_type = genomic DNA
ggtagcgtggccgagcggtctaagg

SEQ ID NO: 19263 - DNA, 26 bp, Homo sapiens
  source 1..26: mol_type = genomic DNA
ggtagcgtggccgagcggtctaaggc

SEQ ID NO: 19264 - DNA, 28 bp, Homo sapiens
  source 1..28: mol_type = genomic DNA
ggtagcgtggccgagcggtctaaggcgc

SEQ ID NO: 19265 - DNA, 30 bp, Homo sapiens
  source 1..30: mol_type = genomic DNA
ggtagcgtggccgagcggtctaaggcgctg

SEQ ID NO: 19266 - DNA, 32 bp, Homo sapiens
  source 1..32: mol_type = genomic DNA
ggtagcgtggccgagcggtctaaggcgctgga

SEQ ID NO: 19267 - DNA, 33 bp, Homo sapiens
  source 1..33: mol_type = genomic DNA
ggtagcgtggccgagcggtctaaggcgctggat

SEQ ID NO: 19268 - DNA, 34 bp, Homo sapiens
  source 1..34: mol_type = genomic DNA
ggtagcgtggccgagcggtctaaggcgctggatt

SEQ ID NO: 19269 - DNA, 35 bp, Homo sapiens
  source 1..35: mol_type = genomic DNA
ggtagcgtggccgagcggtctaaggcgctggattt

SEQ ID NO: 19270 - DNA, 37 bp, Homo sapiens
  source 1..37: mol_type = genomic DNA
ggtagcgtggccgagcggtctaaggcgctggatttag

SEQ ID NO: 19271 - DNA, 16 bp, Homo sapiens
  source 1..16: mol_type = genomic DNA
ggtagcgtggccgagt

SEQ ID NO: 19272 - DNA, 18 bp, Homo sapiens
  source 1..18: mol_type = genomic DNA
ggtagcgtggccgagtgg

SEQ ID NO: 19273 - DNA, 19 bp, Homo sapiens
  source 1..19: mol_type = genomic DNA
ggtagcgtggccgagtggt

SEQ ID NO: 19274 - DNA, 20 bp, Homo sapiens
  source 1..20: mol_type = genomic DNA
ggtagcgtggccgagtggtc

SEQ ID NO: 19275 - DNA, 21 bp, Homo sapiens
  source 1..21: mol_type = genomic DNA
ggtagcgtggccgagtggtct

SEQ ID NO: 19276 - DNA, 22 bp, Homo sapiens
  source 1..22: mol_type = genomic DNA
ggtagcgtggccgagtggtcta

SEQ ID NO: 19277 - DNA, 24 bp, Homo sapiens
  source 1..24: mol_type = genomic DNA
ggtagcgtggccgagtggtctaag

SEQ ID NO: 19278 - DNA, 25 bp, Homo sapiens
  source 1..25: mol_type = genomic DNA
ggtagcgtggccgagtggtctaagg

SEQ ID NO: 19279 - DNA, 26 bp, Homo sapiens
  source 1..26: mol_type = genomic DNA
ggtagcgtggccgagtggtctaaggc

SEQ ID NO: 19280 - DNA, 31 bp, Homo sapiens
  source 1..31: mol_type = genomic DNA
ggtagcgtggccgagtggtctaaggcgctgg

SEQ ID NO: 19281 - DNA, 33 bp, Homo sapiens
  source 1..33: mol_type = genomic DNA
ggtagcgtggccgagtggtctaaggcgctggat

SEQ ID NO: 19282 - DNA, 34 bp, Homo sapiens
  source 1..34: mol_type = genomic DNA
ggtagcgtggccgagtggtctaaggcgctggatt

SEQ ID NO: 19283 - DNA, 35 bp, Homo sapiens
  source 1..35: mol_type = genomic DNA
ggtagcgtggccgagtggtctaaggcgctggattt

SEQ ID NO: 19284 - DNA, 37 bp, Homo sapiens
  source 1..37: mol_type = genomic DNA
ggtagcgtggccgagtggtctaaggcgctggatttag

SEQ ID NO: 19285 - DNA, 23 bp, Homo sapiens
  source 1..23: mol_type = genomic DNA
ggtagctcagtcggtagagcatc

SEQ ID NO: 19286 - DNA, 27 bp, Homo sapiens
  source 1..27: mol_type = genomic DNA
ggtagctcagtcggtagagcatcagac

SEQ ID NO: 19287 - DNA, 19 bp, Homo sapiens
  source 1..19: mol_type = genomic DNA
ggtagtcgtggccgagtgg

SEQ ID NO: 19288 - DNA, 16 bp, Homo sapiens
  source 1..16: mol_type = genomic DNA
ggtagtgtggccgagc

SEQ ID NO: 19289 - DNA, 18 bp, Homo sapiens
  source 1..18: mol_type = genomic DNA
ggtagtgtggccgagcgg

SEQ ID NO: 19290 - DNA, 19 bp, Homo sapiens
  source 1..19: mol_type = genomic DNA
ggtagtgtggccgagcggt

SEQ ID NO: 19291 - DNA, 21 bp, Homo sapiens
  source 1..21: mol_type = genomic DNA
ggtagtgtggccgagcggtct

SEQ ID NO: 19292 - DNA, 22 bp, Homo sapiens
  source 1..22: mol_type = genomic DNA
ggtagtgtggccgagcggtcta

SEQ ID NO: 19293 - DNA, 24 bp, Homo sapiens
  source 1..24: mol_type = genomic DNA
ggtagtgtggccgagcggtctaag

SEQ ID NO: 19294 - DNA, 25 bp, Homo sapiens
  source 1..25: mol_type = genomic DNA
ggtagtgtggccgagcggtctaagg

SEQ ID NO: 19295 - DNA, 26 bp, Homo sapiens
  source 1..26: mol_type = genomic DNA
ggtagtgtggccgagcggtctaaggc

SEQ ID NO: 19296 - DNA, 34 bp, Homo sapiens
  source 1..34: mol_type = genomic DNA
ggtagtgtggccgagcggtctaaggcgctggatt

SEQ ID NO: 19297 - DNA, 35 bp, Homo sapiens
  source 1..35: mol_type = genomic DNA
ggtagtgtggccgagcggtctaaggcgctggattt

SEQ ID NO: 19298 - DNA, 31 bp, Homo sapiens
  source 1..31: mol_type = genomic DNA
ggtatagctcaggggtagagcatttgactgc

SEQ ID NO: 19299 - DNA, 32 bp, Homo sapiens
  source 1..32: mol_type = genomic DNA
ggtatagctcaggggtagagcatttgactgca

SEQ ID NO: 19300 - DNA, 33 bp, Homo sapiens
  source 1..33: mol_type = genomic DNA
ggtatagctcaggtggtagagcatttgactgca

SEQ ID NO: 19301 - DNA, 31 bp, Homo sapiens
  source 1..31: mol_type = genomic DNA
ggtatagctcagtgggtagagcatttgactg

SEQ ID NO: 19302 - DNA, 32 bp, Homo sapiens
  source 1..32: mol_type = genomic DNA
ggtatagctcagtgggtagagcatttgactgc

SEQ ID NO: 19303 - DNA, 19 bp, Homo sapiens
  source 1..19: mol_type = genomic DNA
ggtatagctcagtggtaga

SEQ ID NO: 19304 - DNA, 20 bp, Homo sapiens
  source 1..20: mol_type = genomic DNA
ggtatagctcagtggtagag

SEQ ID NO: 19305 - DNA, 26 bp, Homo sapiens
  source 1..26: mol_type = genomic DNA
ggtatagctcagtggtagagcatttg

SEQ ID NO: 19306 - DNA, 28 bp, Homo sapiens
  source 1..28: mol_type = genomic DNA
ggtatagctcagtggtagagcatttgac

SEQ ID NO: 19307 - DNA, 29 bp, Homo sapiens
  source 1..29: mol_type = genomic DNA
ggtatagctcagtggtagagcatttgact

SEQ ID NO: 19308 - DNA, 30 bp, Homo sapiens
  source 1..30: mol_type = genomic DNA
ggtatagctcagtggtagagcatttgactg

SEQ ID NO: 19309 - DNA, 31 bp, Homo sapiens
  source 1..31: mol_type = genomic DNA
ggtatagctcagtggtagagcatttgactgc

SEQ ID NO: 19310 - DNA, 32 bp, Homo sapiens
  source 1..32: mol_type = genomic DNA
ggtatagctcagtggtagagcatttgactgca

SEQ ID NO: 19311 - DNA, 30 bp, Homo sapiens
  source 1..30: mol_type = genomic DNA
ggtatagcttagcggtagagcatttgactg

SEQ ID NO: 19312 - DNA, 31 bp, Homo sapiens
  source 1..31: mol_type = genomic DNA
ggtatagcttagcggtagagcatttgactgc

SEQ ID NO: 19313 - DNA, 32 bp, Homo sapiens
  source 1..32: mol_type = genomic DNA
ggtatagcttagcggtagagcatttgactgca

SEQ ID NO: 19314 - DNA, 45 bp, Homo sapiens
  source 1..45: mol_type = genomic DNA
ggtatagtggtgagcatagctgccttccaagcagttgacccgggt

SEQ ID NO: 19315 - DNA, 22 bp, Homo sapiens
  source 1..22: mol_type = genomic DNA
ggtatagtggttagcatagctg

SEQ ID NO: 19316 - DNA, 24 bp, Homo sapiens
  source 1..24: mol_type = genomic DNA
ggtatagtggttagcatagctgcc

SEQ ID NO: 19317 - DNA, 27 bp, Homo sapiens
  source 1..27: mol_type = genomic DNA
ggtatagtggttagcatagctgccttc

SEQ ID NO: 19318 - DNA, 16 bp, Homo sapiens
  source 1..16: mol_type = genomic DNA
ggtatatagtttaaac

SEQ ID NO: 19319 - DNA, 35 bp, Homo sapiens
  source 1..35: mol_type = genomic DNA
ggtatatagtttaaacaaaacgaatgatttcgact

SEQ ID NO: 19320 - DNA, 16 bp, Homo sapiens
  source 1..16: mol_type = genomic DNA
ggtatcatgcaagatt

SEQ ID NO: 19321 - DNA, 17 bp, Homo sapiens
  source 1..17: mol_type = genomic DNA
ggtatcatgcaagattc

SEQ ID NO: 19322 - DNA, 34 bp, Homo sapiens
  source 1..34: mol_type = genomic DNA
ggtatcatgcaagattcccattcttgcgacccgg

SEQ ID NO: 19323 - DNA, 36 bp, Homo sapiens
  source 1..36: mol_type = genomic DNA
ggtatcatgcaagattcccattcttgcgacccgggt

SEQ ID NO: 19324 - DNA, 40 bp, Homo sapiens
  source 1..40: mol_type = genomic DNA
ggtatcatgcaagattcccattcttgcgacccgggttcga

SEQ ID NO: 19325 - DNA, 16 bp, Homo sapiens
  source 1..16: mol_type = genomic DNA
ggtatgattctcgctt

SEQ ID NO: 19326 - DNA, 17 bp, Homo sapiens
  source 1..17: mol_type = genomic DNA
ggtatgattctcgctta

SEQ ID NO: 19327 - DNA, 17 bp, Homo sapiens
  source 1..17: mol_type = genomic DNA
ggtatgattctcgcttc

SEQ ID NO: 19328 - DNA, 18 bp, Homo sapiens
  source 1..18: mol_type = genomic DNA
ggtatgattctcgcttcg

SEQ ID NO: 19329 - DNA, 19 bp, Homo sapiens
  source 1..19: mol_type = genomic DNA
ggtatgattctcgcttcgg

SEQ ID NO: 19330 - DNA, 17 bp, Homo sapiens
  source 1..17: mol_type = genomic DNA
ggtatgattctcgcttt

SEQ ID NO: 19331 - DNA, 18 bp, Homo sapiens
  source 1..18: mol_type = genomic DNA
ggtatgattctcgctttg

SEQ ID NO: 19332 - DNA, 19 bp, Homo sapiens
  source 1..19: mol_type = genomic DNA
ggtatgattctcgctttgg

SEQ ID NO: 19333 - DNA, 16 bp, Homo sapiens
  source 1..16: mol_type = genomic DNA
ggtatgattctcggtt

SEQ ID NO: 19334 - DNA, 17 bp, Homo sapiens
  source 1..17: mol_type = genomic DNA
ggtatgattctcggttt

SEQ ID NO: 19335 - DNA, 18 bp, Homo sapiens
  source 1..18: mol_type = genomic DNA
ggtatgattctcggtttg

SEQ ID NO: 19336 - DNA, 19 bp, Homo sapiens
  source 1..19: mol_type = genomic DNA
ggtatgattctcggtttgg

SEQ ID NO: 19337 - DNA, 28 bp, Homo sapiens
  source 1..28: mol_type = genomic DNA
ggtcagcactctggactctgaatccagc

SEQ ID NO: 19338 - DNA, 24 bp, Homo sapiens
  source 1..24: mol_type = genomic DNA
ggtcagctaaataagctatcgggc

SEQ ID NO: 19339 - DNA, 25 bp, Homo sapiens
  source 1..25: mol_type = genomic DNA
ggtcagctaaataagctatcgggcc

SEQ ID NO: 19340 - DNA, 26 bp, Homo sapiens
  source 1..26: mol_type = genomic DNA
ggtcagctaaataagctatcgggccc

SEQ ID NO: 19341 - DNA, 27 bp, Homo sapiens
  source 1..27: mol_type = genomic DNA
ggtcagctaaataagctatcgggccca

SEQ ID NO: 19342 - DNA, 28 bp, Homo sapiens
  source 1..28: mol_type = genomic DNA
ggtcagctaaataagctatcgggcccat

SEQ ID NO: 19343 - DNA, 29 bp, Homo sapiens
  source 1..29: mol_type = genomic DNA
ggtcagctaaataagctatcgggcccata

SEQ ID NO: 19344 - DNA, 35 bp, Homo sapiens
  source 1..35: mol_type = genomic DNA
ggtcagctaaataagctatcgggcccataccccga

SEQ ID NO: 19345 - DNA, 46 bp, Homo sapiens
  source 1..46: mol_type = genomic DNA
ggtcagctaaataagctatcgggcccataccccgaaaatgttggtt

SEQ ID NO: 19346 - DNA, 47 bp, Homo sapiens
  source 1..47: mol_type = genomic DNA
ggtcagctaaataagctatcgggcccataccccgaaaatgttggtta

SEQ ID NO: 19347 - DNA, 28 bp, Homo sapiens
  source 1..28: mol_type = genomic DNA
ggtccagggttcaagtccctgttcgggc

SEQ ID NO: 19348 - DNA, 29 bp, Homo sapiens
  source 1..29: mol_type = genomic DNA
ggtccagggttcaagtccctgttcgggcg

SEQ ID NO: 19349 - DNA, 30 bp, Homo sapiens
  source 1..30: mol_type = genomic DNA
ggtccagggttcaagtccctgttcgggcgc

SEQ ID NO: 19350 - DNA, 31 bp, Homo sapiens
  source 1..31: mol_type = genomic DNA
ggtccagggttcaagtccctgttcgggcgcc

SEQ ID NO: 19351 - DNA, 32 bp, Homo sapiens
  source 1..32: mol_type = genomic DNA
ggtccagggttcaagtccctgttcgggcgcca

SEQ ID NO: 19352 - DNA, 16 bp, Homo sapiens
  source 1..16: mol_type = genomic DNA
ggtcccatggtgtaat

SEQ ID NO: 19353 - DNA, 17 bp, Homo sapiens
  source 1..17: mol_type = genomic DNA
ggtcccatggtgtaatg

SEQ ID NO: 19354 - DNA, 18 bp, Homo sapiens
  source 1..18: mol_type = genomic DNA
ggtcccatggtgtaatgg

SEQ ID NO: 19355 - DNA, 19 bp, Homo sapiens
  source 1..19: mol_type = genomic DNA
ggtcccatggtgtaatggt

SEQ ID NO: 19356 - DNA, 22 bp, Homo sapiens
  source 1..22: mol_type = genomic DNA
ggtcccatggtgtaatggttag

SEQ ID NO: 19357 - DNA, 23 bp, Homo sapiens
  source 1..23: mol_type = genomic DNA
ggtcccatggtgtaatggttagc

SEQ ID NO: 19358 - DNA, 27 bp, Homo sapiens
  source 1..27: mol_type = genomic DNA
ggtcccatggtgtaatggttagcactc

SEQ ID NO: 19359 - DNA, 28 bp, Homo sapiens
  source 1..28: mol_type = genomic DNA
ggtcccatggtgtaatggttagcactct

SEQ ID NO: 19360 - DNA, 29 bp, Homo sapiens
  source 1..29: mol_type = genomic DNA
ggtcccatggtgtaatggttagcactctg

SEQ ID NO: 19361 - DNA, 30 bp, Homo sapiens
  source 1..30: mol_type = genomic DNA
ggtcccatggtgtaatggttagcactctgg

SEQ ID NO: 19362 - DNA, 31 bp, Homo sapiens
  source 1..31: mol_type = genomic DNA
ggtcccatggtgtaatggttagcactctgga

SEQ ID NO: 19363 - DNA, 32 bp, Homo sapiens
  source 1..32: mol_type = genomic DNA
ggtcccatggtgtaatggttagcactctggac

SEQ ID NO: 19364 - DNA, 33 bp, Homo sapiens
  source 1..33: mol_type = genomic DNA
ggtcccatggtgtaatggttagcactctggact

SEQ ID NO: 19365 - DNA, 34 bp, Homo sapiens
  source 1..34: mol_type = genomic DNA
ggtcccatggtgtaatggttagcactctggactt

SEQ ID NO: 19366 - DNA, 36 bp, Homo sapiens
  source 1..36: mol_type = genomic DNA
ggtcccatggtgtaatggttagcactctggactttg

SEQ ID NO: 19367 - DNA, 40 bp, Homo sapiens
  source 1..40: mol_type = genomic DNA
ggtcccatggtgtaatggttagcactctggactttgaatc

SEQ ID NO: 19368 - DNA, 41 bp, Homo sapiens
  source 1..41: mol_type = genomic DNA
ggtcccatggtgtaatggttagcactctggactttgaatcc

SEQ ID NO: 19369 - DNA, 33 bp, Homo sapiens
  source 1..33: mol_type = genomic DNA
ggtcccatggtgtaatggttagcactctgggct

SEQ ID NO: 19370 - DNA, 32 bp, Homo sapiens
  source 1..32: mol_type = genomic DNA
ggtcccgggttcgatccccagcatctccacca

SEQ ID NO: 19371 - DNA, 31 bp, Homo sapiens
  source 1..31: mol_type = genomic DNA
ggtcccgggttcgatccccggcatctccacc

SEQ ID NO: 19372 - DNA, 19 bp, Homo sapiens
  source 1..19: mol_type = genomic DNA
ggtccctggttcaaatccg

SEQ ID NO: 19373 - DNA, 29 bp, Homo sapiens
  source 1..29: mol_type = genomic DNA
ggtccctggttcgatcccgggtttcggca

SEQ ID NO: 19374 - DNA, 16 bp, Homo sapiens
  source 1..16: mol_type = genomic DNA
ggtcctgagttcgaac

SEQ ID NO: 19375 - DNA, 17 bp, Homo sapiens
  source 1..17: mol_type = genomic DNA
ggtcctgagttcgaacc

SEQ ID NO: 19376 - DNA, 18 bp, Homo sapiens
  source 1..18: mol_type = genomic DNA
ggtcctgagttcgaacct

SEQ ID NO: 19377 - DNA, 28 bp, Homo sapiens
  source 1..28: mol_type = genomic DNA
ggtcctgagttcgaacctcagagggggc

SEQ ID NO: 19378 - DNA, 29 bp, Homo sapiens
  source 1..29: mol_type = genomic DNA
ggtcctgagttcgaacctcagagggggca

SEQ ID NO: 19379 - DNA, 31 bp, Homo sapiens
  source 1..31: mol_type = genomic DNA
ggtcctgagttcgaacctcagagggggcacc

SEQ ID NO: 19380 - DNA, 19 bp, Homo sapiens
  source 1..19: mol_type = genomic DNA
ggtcctgggttcgagcccc

SEQ ID NO: 19381 - DNA, 31 bp, Homo sapiens
  source 1..31: mol_type = genomic DNA
ggtcctgggttcgagccccagtggaaccacc

SEQ ID NO: 19382 - DNA, 19 bp, Homo sapiens
  source 1..19: mol_type = genomic DNA
ggtccttgtagtataaact

SEQ ID NO: 19383 - DNA, 17 bp, Homo sapiens
  source 1..17: mol_type = genomic DNA
ggtcgatggatcgaaac

SEQ ID NO: 19384 - DNA, 18 bp, Homo sapiens
  source 1..18: mol_type = genomic DNA
ggtcgatggatcgaaacc

SEQ ID NO: 19385 - DNA, 19 bp, Homo sapiens
  source 1..19: mol_type = genomic DNA
ggtcgatggatcgaaacca

SEQ ID NO: 19386 - DNA, 20 bp, Homo sapiens
  source 1..20: mol_type = genomic DNA
ggtcgatggatcgaaaccat

SEQ ID NO: 19387 - DNA, 28 bp, Homo sapiens
  source 1..28: mol_type = genomic DNA
ggtcgatggatcgaaaccatcctctgct

SEQ ID NO: 19388 - DNA, 31 bp, Homo sapiens
  source 1..31: mol_type = genomic DNA
ggtcgatggatcgaaaccatcctctgctacc

SEQ ID NO: 19389 - DNA, 23 bp, Homo sapiens
  source 1..23: mol_type = genomic DNA
ggtcgattccccgacggggagcc

SEQ ID NO: 19390 - DNA, 24 bp, Homo sapiens
  source 1..24: mol_type = genomic DNA
ggtcgattccccgacggggagcca

SEQ ID NO: 19391 - DNA, 17 bp, Homo sapiens
  source 1..17: mol_type = genomic DNA
ggtcgcagtctcccctg

SEQ ID NO: 19392 - DNA, 27 bp, Homo sapiens
  source 1..27: mol_type = genomic DNA
ggtcgcgagttcaaatctcgctggggc

SEQ ID NO: 19393 - DNA, 28 bp, Homo sapiens
  source 1..28: mol_type = genomic DNA
ggtcgcgagttcaaatctcgctggggcc

SEQ ID NO: 19394 - DNA, 29 bp, Homo sapiens
  source 1..29: mol_type = genomic DNA
ggtcgcgagttcaaatctcgctggggcct

SEQ ID NO: 19395 - DNA, 30 bp, Homo sapiens
  source 1..30: mol_type = genomic DNA
ggtcgcgagttcaaatctcgctggggcctc

SEQ ID NO: 19396 - DNA, 31 bp, Homo sapiens
  source 1..31: mol_type = genomic DNA
ggtcgcgagttcaaatctcgctggggcctcc

SEQ ID NO: 19397 - DNA, 31 bp, Homo sapiens
  source 1..31: mol_type = genomic DNA
ggtcgcgagttcaattctcgctggggcctcc

SEQ ID NO: 19398 - DNA, 30 bp, Homo sapiens
  source 1..30: mol_type = genomic DNA
ggtcgcgagttcgatcctcgctggggcctc

SEQ ID NO: 19399 - DNA, 28 bp, Homo sapiens
  source 1..28: mol_type = genomic DNA
ggtcgcgggttcgaaccccgtacgggcc

SEQ ID NO: 19400 - DNA, 27 bp, Homo sapiens
  source 1..27: mol_type = genomic DNA
ggtcgcgggttcgatccccgtacgggc

SEQ ID NO: 19401 - DNA, 28 bp, Homo sapiens
  source 1..28: mol_type = genomic DNA
ggtcgcgggttcgatccccgtacgggcc

SEQ ID NO: 19402 - DNA, 29 bp, Homo sapiens
  source 1..29: mol_type = genomic DNA
ggtcgcgggttcgatccccgtacgggcca

SEQ ID NO: 19403 - DNA, 30 bp, Homo sapiens
  source 1..30: mol_type = genomic DNA
ggtcgcgggttcgatccccgtacgggccac

SEQ ID NO: 19404 - DNA, 31 bp, Homo sapiens
  source 1..31: mol_type = genomic DNA
ggtcgcgggttcgatccccgtacgggccacc

SEQ ID NO: 19405 - DNA, 31 bp, Homo sapiens
  source 1..31: mol_type = genomic DNA
ggtcgctggttcaattccggctcgaaggacc

SEQ ID NO: 19406 - DNA, 30 bp, Homo sapiens
  source 1..30: mol_type = genomic DNA
ggtcgctggttcgaatccggctcgaaggac

SEQ ID NO: 19407 - DNA, 31 bp, Homo sapiens
  source 1..31: mol_type = genomic DNA
ggtcgctggttcgaatccggctcgaaggacc

SEQ ID NO: 19408 - DNA, 32 bp, Homo sapiens
  source 1..32: mol_type = genomic DNA
ggtcgctggttcgaatccggctcgaaggacca

SEQ ID NO: 19409 - DNA, 31 bp, Homo sapiens
  source 1..31: mol_type = genomic DNA
ggtcgctggttcgaatccggctcggaggacc

SEQ ID NO: 19410 - DNA, 31 bp, Homo sapiens
  source 1..31: mol_type = genomic DNA
ggtcgctggttcgattccagctcgaaggacc

SEQ ID NO: 19411 - DNA, 30 bp, Homo sapiens
  source 1..30: mol_type = genomic DNA
ggtcgctggttcgattccggctcgaaggac

SEQ ID NO: 19412 - DNA, 31 bp, Homo sapiens
  source 1..31: mol_type = genomic DNA
ggtcgctggttcgattccggctcgaaggacc

SEQ ID NO: 19413 - DNA, 32 bp, Homo sapiens
  source 1..32: mol_type = genomic DNA
ggtcgctggttcgattccggctcgaaggacca

SEQ ID NO: 19414 - DNA, 16 bp, Homo sapiens
  source 1..16: mol_type = genomic DNA
ggtcgtgagttcgagc

SEQ ID NO: 19415 - DNA, 20 bp, Homo sapiens
  source 1..20: mol_type = genomic DNA
ggtcgtgagttcgagcctca

SEQ ID NO: 19416 - DNA, 28 bp, Homo sapiens
  source 1..28: mol_type = genomic DNA
ggtcgtgagttcgatcctcacacggggc

SEQ ID NO: 19417 - DNA, 29 bp, Homo sapiens
  source 1..29: mol_type = genomic DNA
ggtcgtgagttcgatcctcacacggggca

SEQ ID NO: 19418 - DNA, 17 bp, Homo sapiens
  source 1..17: mol_type = genomic DNA
ggtcgtgggttcgagcc

SEQ ID NO: 19419 - DNA, 20 bp, Homo sapiens
  source 1..20: mol_type = genomic DNA
ggtcgtgggttcgagcccca

SEQ ID NO: 19420 - DNA, 27 bp, Homo sapiens
  source 1..27: mol_type = genomic DNA
ggtcgtgggttcgagccccacgttggg

SEQ ID NO: 19421 - DNA, 28 bp, Homo sapiens
  source 1..28: mol_type = genomic DNA
ggtcgtgggttcgagccccacgttgggc

SEQ ID NO: 19422 - DNA, 29 bp, Homo sapiens
  source 1..29: mol_type = genomic DNA
ggtcgtgggttcgagccccacgttgggcg

SEQ ID NO: 19423 - DNA, 30 bp, Homo sapiens
  source 1..30: mol_type = genomic DNA
ggtcgtgggttcgagccccacgttgggcgc

SEQ ID NO: 19424 - DNA, 31 bp, Homo sapiens
  source 1..31: mol_type = genomic DNA
ggtcgtgggttcgagccccacgttgggcgcc

SEQ ID NO: 19425 - DNA, 32 bp, Homo sapiens
  source 1..32: mol_type = genomic DNA
ggtcgtgggttcgagccccacgttgggcgcca

SEQ ID NO: 19426 - DNA, 16 bp, Homo sapiens
  source 1..16: mol_type = genomic DNA
ggtcgtggttgtagtc

SEQ ID NO: 19427 - DNA, 17 bp, Homo sapiens
  source 1..17: mol_type = genomic DNA
ggtcgtggttgtagtcc

SEQ ID NO: 19428 - DNA, 18 bp, Homo sapiens
  source 1..18: mol_type = genomic DNA
ggtcgtggttgtagtccg

SEQ ID NO: 19429 - DNA, 20 bp, Homo sapiens
  source 1..20: mol_type = genomic DNA
ggtcgtggttgtagtccgtg

SEQ ID NO: 19430 - DNA, 21 bp, Homo sapiens
  source 1..21: mol_type = genomic DNA
ggtcgtggttgtagtccgtgc

SEQ ID NO: 19431 - DNA, 22 bp, Homo sapiens
  source 1..22: mol_type = genomic DNA
ggtcgtggttgtagtccgtgcg

SEQ ID NO: 19432 - DNA, 23 bp, Homo sapiens
  source 1..23: mol_type = genomic DNA
ggtcgtggttgtagtccgtgcga

SEQ ID NO: 19433 - DNA, 24 bp, Homo sapiens
  source 1..24: mol_type = genomic DNA
ggtcgtggttgtagtccgtgcgag

SEQ ID NO: 19434 - DNA, 25 bp, Homo sapiens
  source 1..25: mol_type = genomic DNA
ggtcgtggttgtagtccgtgcgaga

SEQ ID NO: 19435 - DNA, 26 bp, Homo sapiens
  source 1..26: mol_type = genomic DNA
ggtcgtggttgtagtccgtgcgagaa

SEQ ID NO: 19436 - DNA, 27 bp, Homo sapiens
  source 1..27: mol_type = genomic DNA
ggtcgtggttgtagtccgtgcgagaat

SEQ ID NO: 19437 - DNA, 28 bp, Homo sapiens
  source 1..28: mol_type = genomic DNA
ggtcgtggttgtagtccgtgcgagaata

SEQ ID NO: 19438 - DNA, 29 bp, Homo sapiens
  source 1..29: mol_type = genomic DNA
ggtcgtggttgtagtccgtgcgagaatac

SEQ ID NO: 19439 - DNA, 30 bp, Homo sapiens
  source 1..30: mol_type = genomic DNA
ggtcgtggttgtagtccgtgcgagaatacc

SEQ ID NO: 19440 - DNA, 31 bp, Homo sapiens
  source 1..31: mol_type = genomic DNA
ggtcgtggttgtagtccgtgcgagaatacca

SEQ ID NO: 19441 - DNA, 16 bp, Homo sapiens
  source 1..16: mol_type = genomic DNA
ggtctaaggcgctgcg

SEQ ID NO: 19442 - DNA, 19 bp, Homo sapiens
  source 1..19: mol_type = genomic DNA
ggtctaaggcgctgcgttc

SEQ ID NO: 19443 - DNA, 16 bp, Homo sapiens
  source 1..16: mol_type = genomic DNA
ggtctaaggcgctgga

SEQ ID NO: 19444 - DNA, 18 bp, Homo sapiens
  source 1..18: mol_type = genomic DNA
ggtctagcggttaggatt

SEQ ID NO: 19445 - DNA, 20 bp, Homo sapiens
  source 1..20: mol_type = genomic DNA
ggtctagcggttaggattcc

SEQ ID NO: 19446 - DNA, 22 bp, Homo sapiens
  source 1..22: mol_type = genomic DNA
ggtctagcggttaggattcctg

SEQ ID NO: 19447 - DNA, 25 bp, Homo sapiens
  source 1..25: mol_type = genomic DNA
ggtctagcggttaggattcctggtt

SEQ ID NO: 19448 - DNA, 28 bp, Homo sapiens
  source 1..28: mol_type = genomic DNA
ggtctagcggttaggattcctggttttc

SEQ ID NO: 19449 - DNA, 20 bp, Homo sapiens
  source 1..20: mol_type = genomic DNA
ggtctaggggtatgattctc

SEQ ID NO: 19450 - DNA, 21 bp, Homo sapiens
  source 1..21: mol_type = genomic DNA
ggtctaggggtatgattctcg

SEQ ID NO: 19451 - DNA, 22 bp, Homo sapiens
  source 1..22: mol_type = genomic DNA
ggtctaggggtatgattctcgc

SEQ ID NO: 19452 - DNA, 23 bp, Homo sapiens
  source 1..23: mol_type = genomic DNA
ggtctaggggtatgattctcgct

SEQ ID NO: 19453 - DNA, 24 bp, Homo sapiens
  source 1..24: mol_type = genomic DNA
ggtctaggggtatgattctcgctt

SEQ ID NO: 19454 - DNA, 27 bp, Homo sapiens
  source 1..27: mol_type = genomic DNA
ggtctaggggtatgattctcgctttgg

SEQ ID NO: 19455 - DNA, 23 bp, Homo sapiens
  source 1..23: mol_type = genomic DNA
ggtctaggggtatgattctcggt

SEQ ID NO: 19456 - DNA, 24 bp, Homo sapiens
  source 1..24: mol_type = genomic DNA
ggtctaggggtatgattctcggtt

SEQ ID NO: 19457 - DNA, 27 bp, Homo sapiens
  source 1..27: mol_type = genomic DNA
ggtctaggggtatgattctcggtttgg

SEQ ID NO: 19458 - DNA, 17 bp, Homo sapiens
  source 1..17: mol_type = genomic DNA
ggtctagtggctaggat

SEQ ID NO: 19459 - DNA, 20 bp, Homo sapiens
  source 1..20: mol_type = genomic DNA
ggtctagtggctaggattcg

SEQ ID NO: 19460 - DNA, 22 bp, Homo sapiens
  source 1..22: mol_type = genomic DNA
ggtctagtggctaggattcggc

SEQ ID NO: 19461 - DNA, 28 bp, Homo sapiens
  source 1..28: mol_type = genomic DNA
ggtctagtggctaggattcggcgctttc

SEQ ID NO: 19462 - DNA, 17 bp, Homo sapiens
  source 1..17: mol_type = genomic DNA
ggtctagtggttaggat

SEQ ID NO: 19463 - DNA, 18 bp, Homo sapiens
  source 1..18: mol_type = genomic DNA
ggtctagtggttaggatt

SEQ ID NO: 19464 - DNA, 26 bp, Homo sapiens
  source 1..26: mol_type = genomic DNA
ggtctagtggttaggattcagcgctc

SEQ ID NO: 19465 - DNA, 20 bp, Homo sapiens
  source 1..20: mol_type = genomic DNA
ggtctagtggttaggattcg

SEQ ID NO: 19466 - DNA, 21 bp, Homo sapiens
  source 1..21: mol_type = genomic DNA
ggtctagtggttaggattcgg

SEQ ID NO: 19467 - DNA, 22 bp, Homo sapiens
  source 1..22: mol_type = genomic DNA
ggtctagtggttaggattcggc

SEQ ID NO: 19468 - DNA, 23 bp, Homo sapiens
  source 1..23: mol_type = genomic DNA
ggtctagtggttaggattcggcg

SEQ ID NO: 19469 - DNA, 24 bp, Homo sapiens
  source 1..24: mol_type = genomic DNA
ggtctagtggttaggattcggcgc

SEQ ID NO: 19470 - DNA, 25 bp, Homo sapiens
  source 1..25: mol_type = genomic DNA
ggtctagtggttaggattcggcgct

SEQ ID NO: 19471 - DNA, 26 bp, Homo sapiens
  source 1..26: mol_type = genomic DNA
ggtctagtggttaggattcggcgctc

SEQ ID NO: 19472 - DNA, 27 bp, Homo sapiens
  source 1..27: mol_type = genomic DNA
ggtctagtggttaggattcggcgctct

SEQ ID NO: 19473 - DNA, 28 bp, Homo sapiens
  source 1..28: mol_type = genomic DNA
ggtctagtggttaggattcggcgctctc

SEQ ID NO: 19474 - DNA, 29 bp, Homo sapiens
  source 1..29: mol_type = genomic DNA
ggtctagtggttaggattcggcgctctca

SEQ ID NO: 19475 - DNA, 30 bp, Homo sapiens
  source 1..30: mol_type = genomic DNA
ggtctagtggttaggattcggcgctctcac

SEQ ID NO: 19476 - DNA, 31 bp, Homo sapiens
  source 1..31: mol_type = genomic DNA
ggtctagtggttaggattcggcgctctcacc

SEQ ID NO: 19477 - DNA, 34 bp, Homo sapiens
  source 1..34: mol_type = genomic DNA
ggtctagtggttaggattcggcgctctcaccgcc

SEQ ID NO: 19478 - DNA, 41 bp, Homo sapiens
  source 1..41: mol_type = genomic DNA
ggtctagtggttaggattcggcgctctcaccgccgcggccc

SEQ ID NO: 19479 - DNA, 43 bp, Homo sapiens
  source 1..43: mol_type = genomic DNA
ggtctagtggttaggattcggcgctctcaccgccgcggcccgg

SEQ ID NO: 19480 - DNA, 46 bp, Homo sapiens
  source 1..46: mol_type = genomic DNA
ggtctagtggttaggattcggcgctctcaccgccgcggcccgggtt

SEQ ID NO: 19481 - DNA, 47 bp, Homo sapiens
  source 1..47: mol_type = genomic DNA
ggtctagtggttaggattcggcgctctcaccgccgcggcccgggttc

SEQ ID NO: 19482 - DNA, 24 bp, Homo sapiens
  source 1..24: mol_type = genomic DNA
ggtctccaatggaggcgtgggttc

SEQ ID NO: 19483 - DNA, 21 bp, Homo sapiens
  source 1..21: mol_type = genomic DNA
ggtctccggatggaggcgtgg

SEQ ID NO: 19484 - DNA, 16 bp, Homo sapiens
  source 1..16: mol_type = genomic DNA
ggtgagcactctggac

SEQ ID NO: 19485 - DNA, 17 bp, Homo sapiens
  source 1..17: mol_type = genomic DNA
ggtgagcactctggact

SEQ ID NO: 19486 - DNA, 18 bp, Homo sapiens
  source 1..18: mol_type = genomic DNA
ggtgagcactctggactc

SEQ ID NO: 19487 - DNA, 22 bp, Homo sapiens
  source 1..22: mol_type = genomic DNA
ggtgagcactctggactctgaa

SEQ ID NO: 19488 - DNA, 23 bp, Homo sapiens
  source 1..23: mol_type = genomic DNA
ggtgagcactctggactctgaat

SEQ ID NO: 19489 - DNA, 24 bp, Homo sapiens
  source 1..24: mol_type = genomic DNA
ggtgagcactctggactctgaatc

SEQ ID NO: 19490 - DNA, 25 bp, Homo sapiens
  source 1..25: mol_type = genomic DNA
ggtgagcactctggactctgaatcc

SEQ ID NO: 19491 - DNA, 26 bp, Homo sapiens
  source 1..26: mol_type = genomic DNA
ggtgagcactctggactctgaatcca

SEQ ID NO: 19492 - DNA, 27 bp, Homo sapiens
  source 1..27: mol_type = genomic DNA
ggtgagcactctggactctgaatccag

SEQ ID NO: 19493 - DNA, 28 bp, Homo sapiens
  source 1..28: mol_type = genomic DNA
ggtgagcactctggactctgaatccagc

SEQ ID NO: 19494 - DNA, 29 bp, Homo sapiens
  source 1..29: mol_type = genomic DNA
ggtgagcactctggactctgaatccagcg

SEQ ID NO: 19495 - DNA, 33 bp, Homo sapiens
  source 1..33: mol_type = genomic DNA
ggtgagcactctggactctgaatccagcgatcc

SEQ ID NO: 19496 - DNA, 34 bp, Homo sapiens
  source 1..34: mol_type = genomic DNA
ggtgagcactctggactctgaatccagcgatccg

SEQ ID NO: 19497 - DNA, 36 bp, Homo sapiens
  source 1..36: mol_type = genomic DNA
ggtgagcactctggactctgaatccagcgatccgag

SEQ ID NO: 19498 - DNA, 37 bp, Homo sapiens
  source 1..37: mol_type = genomic DNA
ggtgagcactctggactctgaatccagcgatccgagt

SEQ ID NO: 19499 - DNA, 39 bp, Homo sapiens
  source 1..39: mol_type = genomic DNA
ggtgagcactctggactctgaatccagcgatccgagttc

SEQ ID NO: 19500 - DNA, 40 bp, Homo sapiens
  source 1..40: mol_type = genomic DNA
ggtgagcactctggactctgaatccagcgatccgagttcg

SEQ ID NO: 19501 - DNA, 42 bp, Homo sapiens
  source 1..42: mol_type = genomic DNA
ggtgagcactctggactctgaatccagcgatccgagttcgag

SEQ ID NO: 19502 - DNA, 18 bp, Homo sapiens
  source 1..18: mol_type = genomic DNA
ggtgagcatagctgcctt

SEQ ID NO: 19503 - DNA, 16 bp, Homo sapiens
  source 1..16: mol_type = genomic DNA
ggtgagtatccccgcc

SEQ ID NO: 19504 - DNA, 18 bp, Homo sapiens
  source 1..18: mol_type = genomic DNA
ggtgagtatccccgcctg

SEQ ID NO: 19505 - DNA, 19 bp, Homo sapiens
  source 1..19: mol_type = genomic DNA
ggtgagtatccccgcctgt

SEQ ID NO: 19506 - DNA, 20 bp, Homo sapiens
  source 1..20: mol_type = genomic DNA
ggtgagtatccccgcctgtc

SEQ ID NO: 19507 - DNA, 23 bp, Homo sapiens
  source 1..23: mol_type = genomic DNA
ggtgagtatccccgcctgtcacg

SEQ ID NO: 19508 - DNA, 25 bp, Homo sapiens
  source 1..25: mol_type = genomic DNA
ggtgagtatccccgcctgtcacgcg

SEQ ID NO: 19509 - DNA, 16 bp, Homo sapiens
  source 1..16: mol_type = genomic DNA
ggtgattttcatattg

SEQ ID NO: 19510 - DNA, 17 bp, Homo sapiens
  source 1..17: mol_type = genomic DNA
ggtgattttcatattga

SEQ ID NO: 19511 - DNA, 21 bp, Homo sapiens
  source 1..21: mol_type = genomic DNA
ggtgattttcatattgaattg

SEQ ID NO: 19512 - DNA, 22 bp, Homo sapiens
  source 1..22: mol_type = genomic DNA
ggtgattttcatattgaattgc

SEQ ID NO: 19513 - DNA, 23 bp, Homo sapiens
  source 1..23: mol_type = genomic DNA
ggtgattttcatattgaattgca

SEQ ID NO: 19514 - DNA, 35 bp, Homo sapiens
  source 1..35: mol_type = genomic DNA
ggtgattttcatattgaattgcaaattcgaagaag

SEQ ID NO: 19515 - DNA, 22 bp, Homo sapiens
  source 1..22: mol_type = genomic DNA
ggtgcaactccaaataaaagta

SEQ ID NO: 19516 - DNA, 23 bp, Homo sapiens
  source 1..23: mol_type = genomic DNA
ggtgcaactccaaataaaagtac

SEQ ID NO: 19517 - DNA, 24 bp, Homo sapiens
  source 1..24: mol_type = genomic DNA
ggtgcaactccaaataaaagtacc

SEQ ID NO: 19518 - DNA, 25 bp, Homo sapiens
  source 1..25: mol_type = genomic DNA
ggtgcaactccaaataaaagtacca

SEQ ID NO: 19519 - DNA, 23 bp, Homo sapiens
  source 1..23: mol_type = genomic DNA
ggtgcagtggtagaattctcgcc

SEQ ID NO: 19520 - DNA, 24 bp, Homo sapiens
  source 1..24: mol_type = genomic DNA
ggtgcagtggtagaattctcgcct

SEQ ID NO: 19521 - DNA, 16 bp, Homo sapiens
  source 1..16: mol_type = genomic DNA
ggtgcgagaggtcccg

SEQ ID NO: 19522 - DNA, 22 bp, Homo sapiens
  source 1..22: mol_type = genomic DNA
ggtgcgagaggtcccgggttca

SEQ ID NO: 19523 - DNA, 23 bp, Homo sapiens
  source 1..23: mol_type = genomic DNA
ggtgcgagaggtcccgggttcaa

SEQ ID NO: 19524 - DNA, 24 bp, Homo sapiens
  source 1..24: mol_type = genomic DNA
ggtgcgagaggtcccgggttcaaa

SEQ ID NO: 19525 - DNA, 25 bp, Homo sapiens
  source 1..25: mol_type = genomic DNA
ggtgcgagaggtcccgggttcaaat

SEQ ID NO: 19526 - DNA, 36 bp, Homo sapiens
  source 1..36: mol_type = genomic DNA
ggtgcgagaggtcccgggttcaaatcccggacgagc

SEQ ID NO: 19527 - DNA, 37 bp, Homo sapiens
  source 1..37: mol_type = genomic DNA
ggtgcgagaggtcccgggttcaaatcccggacgagcc

SEQ ID NO: 19528 - DNA, 38 bp, Homo sapiens
  source 1..38: mol_type = genomic DNA
ggtgcgagaggtcccgggttcaaatcccggacgagccc

SEQ ID NO: 19529 - DNA, 39 bp, Homo sapiens
  source 1..39: mol_type = genomic DNA
ggtgcgagaggtcccgggttcaaatcccggacgagcccc

SEQ ID NO: 19530 - DNA, 40 bp, Homo sapiens
  source 1..40: mol_type = genomic DNA
ggtgcgagaggtcccgggttcaaatcccggacgagccccc

SEQ ID NO: 19531 - DNA, 41 bp, Homo sapiens
  source 1..41: mol_type = genomic DNA
ggtgcgagaggtcccgggttcaaatcccggacgagccccca

SEQ ID NO: 19532 - DNA, 28 bp, Homo sapiens
  source 1..28: mol_type = genomic DNA
ggtgctaataacgccaaggtcgcgggtt

SEQ ID NO: 19533 - DNA, 18 bp, Homo sapiens
  source 1..18: mol_type = genomic DNA
ggtgctaatggtggagtt

SEQ ID NO: 19534 - DNA, 19 bp, Homo sapiens
  source 1..19: mol_type = genomic DNA
ggtgctaatggtggagtta

SEQ ID NO: 19535 - DNA, 20 bp, Homo sapiens
  source 1..20: mol_type = genomic DNA
ggtgctaatggtggagttaa

SEQ ID NO: 19536 - DNA, 21 bp, Homo sapiens
  source 1..21: mol_type = genomic DNA
ggtgctaatggtggagttaaa

SEQ ID NO: 19537 - DNA, 22 bp, Homo sapiens
  source 1..22: mol_type = genomic DNA
ggtgctaatggtggagttaaag

SEQ ID NO: 19538 - DNA, 23 bp, Homo sapiens
  source 1..23: mol_type = genomic DNA
ggtgctaatggtggagttaaaga

SEQ ID NO: 19539 - DNA, 24 bp, Homo sapiens
  source 1..24: mol_type = genomic DNA
ggtgctaatggtggagttaaagac

SEQ ID NO: 19540 - DNA, 25 bp, Homo sapiens
  source 1..25: mol_type = genomic DNA
ggtgctaatggtggagttaaagact

SEQ ID NO: 19541 - DNA, 26 bp, Homo sapiens
  source 1..26: mol_type = genomic DNA
ggtgctaatggtggagttaaagactt

SEQ ID NO: 19542 - DNA, 27 bp, Homo sapiens
  source 1..27: mol_type = genomic DNA
ggtgctaatggtggagttaaagacttt

SEQ ID NO: 19543 - DNA, 28 bp, Homo sapiens
  source 1..28: mol_type = genomic DNA
ggtgctaatggtggagttaaagactttt

SEQ ID NO: 19544 - DNA, 29 bp, Homo sapiens
  source 1..29: mol_type = genomic DNA
ggtgctaatggtggagttaaagacttttt

SEQ ID NO: 19545 - DNA, 31 bp, Homo sapiens
  source 1..31: mol_type = genomic DNA
ggtgctaatggtggagttaaagactttttct

SEQ ID NO: 19546 - DNA, 32 bp, Homo sapiens
  source 1..32: mol_type = genomic DNA
ggtgctaatggtggagttaaagactttttctc

SEQ ID NO: 19547 - DNA, 35 bp, Homo sapiens
  source 1..35: mol_type = genomic DNA
ggtgctaatggtggagttaaagactttttctctga

SEQ ID NO: 19548 - DNA, 36 bp, Homo sapiens
  source 1..36: mol_type = genomic DNA
ggtgctaatggtggagttaaagactttttctctgac

SEQ ID NO: 19549 - DNA, 37 bp, Homo sapiens
  source 1..37: mol_type = genomic DNA
ggtgctaatggtggagttaaagactttttctctgacc

SEQ ID NO: 19550 - DNA, 38 bp, Homo sapiens
  source 1..38: mol_type = genomic DNA
ggtgctaatggtggagttaaagactttttctctgacca

SEQ ID NO: 19551 - DNA, 18 bp, Homo sapiens
  source 1..18: mol_type = genomic DNA
ggtgcttagctgttaact

SEQ ID NO: 19552 - DNA, 32 bp, Homo sapiens
  source 1..32: mol_type = genomic DNA
ggtgcttagctgttaactaagtgtttgtgggt

SEQ ID NO: 19553 - DNA, 33 bp, Homo sapiens
  source 1..33: mol_type = genomic DNA
ggtgcttagctgttaactaagtgtttgtgggtt

SEQ ID NO: 19554 - DNA, 34 bp, Homo sapiens
  source 1..34: mol_type = genomic DNA
ggtgcttagctgttaactaagtgtttgtgggttt

SEQ ID NO: 19555 - DNA, 35 bp, Homo sapiens
  source 1..35: mol_type = genomic DNA
ggtgcttagctgttaactaagtgtttgtgggttta

SEQ ID NO: 19556 - DNA, 37 bp, Homo sapiens
  source 1..37: mol_type = genomic DNA
ggtgcttagctgttaactaagtgtttgtgggtttaag

SEQ ID NO: 19557 - DNA, 17 bp, Homo sapiens
  source 1..17: mol_type = genomic DNA
ggtggagcatgggactc

SEQ ID NO: 19558 - DNA, 16 bp, Homo sapiens
  source 1..16: mol_type = genomic DNA
ggtggagttaaagact

SEQ ID NO: 19559 - DNA, 17 bp, Homo sapiens
  source 1..17: mol_type = genomic DNA
ggtggagttaaagactt

SEQ ID NO: 19560 - DNA, 18 bp, Homo sapiens
  source 1..18: mol_type = genomic DNA
ggtggagttaaagacttt

SEQ ID NO: 19561 - DNA, 19 bp, Homo sapiens
  source 1..19: mol_type = genomic DNA
ggtggagttaaagactttt

SEQ ID NO: 19562 - DNA, 20 bp, Homo sapiens
  source 1..20: mol_type = genomic DNA
ggtggagttaaagacttttt

SEQ ID NO: 19563 - DNA, 22 bp, Homo sapiens
  source 1..22: mol_type = genomic DNA
ggtggagttaaagactttttct

SEQ ID NO: 19564 - DNA, 23 bp, Homo sapiens
  source 1..23: mol_type = genomic DNA
ggtggagttaaagactttttctc

SEQ ID NO: 19565 - DNA, 24 bp, Homo sapiens
  source 1..24: mol_type = genomic DNA
ggtggagttaaagactttttctct

SEQ ID NO: 19566 - DNA, 25 bp, Homo sapiens
  source 1..25: mol_type = genomic DNA
ggtggagttaaagactttttctctg

SEQ ID NO: 19567 - DNA, 26 bp, Homo sapiens
  source 1..26: mol_type = genomic DNA
ggtggagttaaagactttttctctga

SEQ ID NO: 19568 - DNA, 27 bp, Homo sapiens
  source 1..27: mol_type = genomic DNA
ggtggagttaaagactttttctctgac

SEQ ID NO: 19569 - DNA, 28 bp, Homo sapiens
  source 1..28: mol_type = genomic DNA
ggtggagttaaagactttttctctgacc

SEQ ID NO: 19570 - DNA, 29 bp, Homo sapiens
  source 1..29: mol_type = genomic DNA
ggtggagttaaagactttttctctgacca

SEQ ID NO: 19571 - DNA, 16 bp, Homo sapiens
  source 1..16: mol_type = genomic DNA
ggtggcacggagaatt

SEQ ID NO: 19572 - DNA, 17 bp, Homo sapiens
  source 1..17: mol_type = genomic DNA
ggtggcacggagaattt

SEQ ID NO: 19573 - DNA, 18 bp, Homo sapiens
  source 1..18: mol_type = genomic DNA
ggtggcacggagaatttt

SEQ ID NO: 19574 - DNA, 19 bp, Homo sapiens
  source 1..19: mol_type = genomic DNA
ggtggcacggagaattttg

SEQ ID NO: 19575 - DNA, 35 bp, Homo sapiens
  source 1..35: mol_type = genomic DNA
ggtggcacggagaattttggattctcagggatggg

SEQ ID NO: 19576 - DNA, 33 bp, Homo sapiens
  source 1..33: mol_type = genomic DNA
ggtggcccgggttcgactcccggtatgggaacc

SEQ ID NO: 19577 - DNA, 18 bp, Homo sapiens
  source 1..18: mol_type = genomic DNA
ggtggccgagtggttaag

SEQ ID NO: 19578 - DNA, 46 bp, Homo sapiens
  source 1..46: mol_type = genomic DNA
ggtggtatagtggtaagcatagctgccttccaagcagttgacccgg

SEQ ID NO: 19579 - DNA, 28 bp, Homo sapiens
  source 1..28: mol_type = genomic DNA
ggtggtatagtggttagcatagctgcct

SEQ ID NO: 19580 - DNA, 23 bp, Homo sapiens
  source 1..23: mol_type = genomic DNA
ggtggtctagtggctaggattcg

SEQ ID NO: 19581 - DNA, 25 bp, Homo sapiens
  source 1..25: mol_type = genomic DNA
ggtggtctagtggctaggattcggc

SEQ ID NO: 19582 - DNA, 27 bp, Homo sapiens
  source 1..27: mol_type = genomic DNA
ggtggtctagtggctaggattcggcgc

SEQ ID NO: 19583 - DNA, 28 bp, Homo sapiens
  source 1..28: mol_type = genomic DNA
ggtggtctagtggctaggattcggcgct

SEQ ID NO: 19584 - DNA, 29 bp, Homo sapiens
  source 1..29: mol_type = genomic DNA
ggtggtctagtggctaggattcggcgctt

SEQ ID NO: 19585 - DNA, 31 bp, Homo sapiens
  source 1..31: mol_type = genomic DNA
ggtggtctagtggctaggattcggcgctttc

SEQ ID NO: 19586 - DNA, 34 bp, Homo sapiens
  source 1..34: mol_type = genomic DNA
ggtggtctagtggctaggattcggcgctttcacc

SEQ ID NO: 19587 - DNA, 17 bp, Homo sapiens
  source 1..17: mol_type = genomic DNA
ggtggtctagtggttag

SEQ ID NO: 19588 - DNA, 18 bp, Homo sapiens
  source 1..18: mol_type = genomic DNA
ggtggtctagtggttagg

SEQ ID NO: 19589 - DNA, 20 bp, Homo sapiens
  source 1..20: mol_type = genomic DNA
ggtggtctagtggttaggat

SEQ ID NO: 19590 - DNA, 21 bp, Homo sapiens
  source 1..21: mol_type = genomic DNA
ggtggtctagtggttaggatt

SEQ ID NO: 19591 - DNA, 22 bp, Homo sapiens
  source 1..22: mol_type = genomic DNA
ggtggtctagtggttaggattc

SEQ ID NO: 19592 - DNA, 23 bp, Homo sapiens
  source 1..23: mol_type = genomic DNA
ggtggtctagtggttaggattcg

SEQ ID NO: 19593 - DNA, 24 bp, Homo sapiens
  source 1..24: mol_type = genomic DNA
ggtggtctagtggttaggattcgg

SEQ ID NO: 19594 - DNA, 25 bp, Homo sapiens
  source 1..25: mol_type = genomic DNA
ggtggtctagtggttaggattcggc

SEQ ID NO: 19595 - DNA, 26 bp, Homo sapiens
  source 1..26: mol_type = genomic DNA
ggtggtctagtggttaggattcggcg

SEQ ID NO: 19596 - DNA, 27 bp, Homo sapiens
  source 1..27: mol_type = genomic DNA
ggtggtctagtggttaggattcggcgc

SEQ ID NO: 19597 - DNA, 28 bp, Homo sapiens
  source 1..28: mol_type = genomic DNA
ggtggtctagtggttaggattcggcgct

SEQ ID NO: 19598 - DNA, 29 bp, Homo sapiens
  source 1..29: mol_type = genomic DNA
ggtggtctagtggttaggattcggcgctc

SEQ ID NO: 19599 - DNA, 30 bp, Homo sapiens
  source 1..30: mol_type = genomic DNA
ggtggtctagtggttaggattcggcgctct

SEQ ID NO: 19600 - DNA, 31 bp, Homo sapiens
  source 1..31: mol_type = genomic DNA
ggtggtctagtggttaggattcggcgctctc

SEQ ID NO: 19601 - DNA, 32 bp, Homo sapiens
  source 1..32: mol_type = genomic DNA
ggtggtctagtggttaggattcggcgctctca

SEQ ID NO: 19602 - DNA, 34 bp, Homo sapiens
  source 1..34: mol_type = genomic DNA
ggtggtctagtggttaggattcggcgctctcacc

SEQ ID NO: 19603 - DNA, 44 bp, Homo sapiens
  source 1..44: mol_type = genomic DNA
ggtggtctagtggttaggattcggcgctctcaccgccgcggccc

SEQ ID NO: 19604 - DNA, 16 bp, Homo sapiens
  source 1..16: mol_type = genomic DNA
ggtggttcagtggtag

SEQ ID NO: 19605 - DNA, 18 bp, Homo sapiens
  source 1..18: mol_type = genomic DNA
ggtggttcagtggtagaa

SEQ ID NO: 19606 - DNA, 21 bp, Homo sapiens
  source 1..21: mol_type = genomic DNA
ggtggttcagtggtagaattc

SEQ ID NO: 19607 - DNA, 22 bp, Homo sapiens
  source 1..22: mol_type = genomic DNA
ggtggttcagtggtagaattct

SEQ ID NO: 19608 - DNA, 23 bp, Homo sapiens
  source 1..23: mol_type = genomic DNA
ggtggttcagtggtagaattctc

SEQ ID NO: 19609 - DNA, 24 bp, Homo sapiens
  source 1..24: mol_type = genomic DNA
ggtggttcagtggtagaattctcg

SEQ ID NO: 19610 - DNA, 25 bp, Homo sapiens
  source 1..25: mol_type = genomic DNA
ggtggttcagtggtagaattctcgc

SEQ ID NO: 19611 - DNA, 26 bp, Homo sapiens
  source 1..26: mol_type = genomic DNA
ggtggttcagtggtagaattctcgcc

SEQ ID NO: 19612 - DNA, 27 bp, Homo sapiens
  source 1..27: mol_type = genomic DNA
ggtggttcagtggtagaattctcgcct

SEQ ID NO: 19613 - DNA, 28 bp, Homo sapiens
  source 1..28: mol_type = genomic DNA
ggtggttcagtggtagaattctcgcctc

SEQ ID NO: 19614 - DNA, 30 bp, Homo sapiens
  source 1..30: mol_type = genomic DNA
ggtggttcagtggtagaattctcgcctccc

SEQ ID NO: 19615 - DNA, 31 bp, Homo sapiens
  source 1..31: mol_type = genomic DNA
ggtggttcagtggtagaattctcgcctccca

SEQ ID NO: 19616 - DNA, 46 bp, Homo sapiens
  source 1..46: mol_type = genomic DNA
ggtggttcagtggtagaattctcgcctcccacgcgggagacccggg

SEQ ID NO: 19617 - DNA, 28 bp, Homo sapiens
  source 1..28: mol_type = genomic DNA
ggtggttcagtggtagaattctcgcctg

SEQ ID NO: 19618 - DNA, 29 bp, Homo sapiens
  source 1..29: mol_type = genomic DNA
ggtggttcagtggtagaattctcgcctgc

SEQ ID NO: 19619 - DNA, 30 bp, Homo sapiens
  source 1..30: mol_type = genomic DNA
ggtggttcagtggtagaattctcgcctgcc

SEQ ID NO: 19620 - DNA, 31 bp, Homo sapiens
  source 1..31: mol_type = genomic DNA
ggtggttcagtggtagaattctcgcctgcca

SEQ ID NO: 19621 - DNA, 32 bp, Homo sapiens
  source 1..32: mol_type = genomic DNA
ggtggttcagtggtagaattctcgcctgccac

SEQ ID NO: 19622 - DNA, 33 bp, Homo sapiens
  source 1..33: mol_type = genomic DNA
ggtggttcagtggtagaattctcgcctgccacg

SEQ ID NO: 19623 - DNA, 34 bp, Homo sapiens
  source 1..34: mol_type = genomic DNA
ggtggttcagtggtagaattctcgcctgccacgc

SEQ ID NO: 19624 - DNA, 37 bp, Homo sapiens
  source 1..37: mol_type = genomic DNA
ggtggttcagtggtagaattctcgcctgccacgcggg

SEQ ID NO: 19625 - DNA, 43 bp, Homo sapiens
  source 1..43: mol_type = genomic DNA
ggtggttcagtggtagaattctcgcctgccacgcgggaggccc

SEQ ID NO: 19626 - DNA, 45 bp, Homo sapiens
  source 1..45: mol_type = genomic DNA
ggtggttcagtggtagaattctcgcctgccacgcgggaggcccgg

SEQ ID NO: 19627 - DNA, 47 bp, Homo sapiens
  source 1..47: mol_type = genomic DNA
ggtggttcagtggtagaattctcgcctgccacgcgggaggcccgggt

SEQ ID NO: 19628 - DNA, 25 bp, Homo sapiens
  source 1..25: mol_type = genomic DNA
ggtgtaatggtgagcactctggact

SEQ ID NO: 19629 - DNA, 26 bp, Homo sapiens
  source 1..26: mol_type = genomic DNA
ggtgtaatggtgagcactctggactc

SEQ ID NO: 19630 - DNA, 28 bp, Homo sapiens
  source 1..28: mol_type = genomic DNA
ggtgtaatggtgagcactctggactctg

SEQ ID NO: 19631 - DNA, 30 bp, Homo sapiens
  source 1..30: mol_type = genomic DNA
ggtgtaatggtgagcactctggactctgaa

SEQ ID NO: 19632 - DNA, 32 bp, Homo sapiens
  source 1..32: mol_type = genomic DNA
ggtgtaatggtgagcactctggactctgaatc

SEQ ID NO: 19633 - DNA, 19 bp, Homo sapiens
  source 1..19: mol_type = genomic DNA
ggtgtaatggttagcactc

SEQ ID NO: 19634 - DNA, 21 bp, Homo sapiens
  source 1..21: mol_type = genomic DNA
ggtgtaatggttagcactctg

SEQ ID NO: 19635 - DNA, 22 bp, Homo sapiens
  source 1..22: mol_type = genomic DNA
ggtgtaatggttagcactctgg

SEQ ID NO: 19636 - DNA, 23 bp, Homo sapiens
  source 1..23: mol_type = genomic DNA
ggtgtaatggttagcactctgga

SEQ ID NO: 19637 - DNA, 24 bp, Homo sapiens
  source 1..24: mol_type = genomic DNA
ggtgtaatggttagcactctggac

SEQ ID NO: 19638 - DNA, 25 bp, Homo sapiens
  source 1..25: mol_type = genomic DNA
ggtgtaatggttagcactctggact

SEQ ID NO: 19639 - DNA, 26 bp, Homo sapiens
  source 1..26: mol_type = genomic DNA
ggtgtaatggttagcactctggactc

SEQ ID NO: 19640 - DNA, 27 bp, Homo sapiens
  source 1..27: mol_type = genomic DNA
ggtgtaatggttagcactctggactct

SEQ ID NO: 19641 - DNA, 28 bp, Homo sapiens
  source 1..28: mol_type = genomic DNA
ggtgtaatggttagcactctggactctg

SEQ ID NO: 19642 - DNA, 32 bp, Homo sapiens
  source 1..32: mol_type = genomic DNA
ggtgtaatggttagcactctggactctgaatc

SEQ ID NO: 19643 - DNA, 33 bp, Homo sapiens
  source 1..33: mol_type = genomic DNA
ggtgtaatggttagcactctggactctgaatcc

SEQ ID NO: 19644 - DNA, 43 bp, Homo sapiens
  source 1..43: mol_type = genomic DNA
ggtgtaatggttagcactctggactctgaatccagcgatccga

SEQ ID NO: 19645 - DNA, 44 bp, Homo sapiens
  source 1..44: mol_type = genomic DNA
ggtgtaatggttagcactctggactctgaatccagcgatccgag

SEQ ID NO: 19646 - DNA, 45 bp, Homo sapiens
  source 1..45: mol_type = genomic DNA
ggtgtaatggttagcactctggactctgaatccagcgatccgagt

SEQ ID NO: 19647 - DNA, 46 bp, Homo sapiens
  source 1..46: mol_type = genomic DNA
ggtgtaatggttagcactctggactctgaatccagcgatccgagtt

SEQ ID NO: 19648 - DNA, 47 bp, Homo sapiens
  source 1..47: mol_type = genomic DNA
ggtgtaatggttagcactctggactctgaatccagcgatccgagttc

SEQ ID NO: 19649 - DNA, 17 bp, Homo sapiens
  source 1..17: mol_type = genomic DNA
ggtgtagctcagtggta

SEQ ID NO: 19650 - DNA, 30 bp, Homo sapiens
  source 1..30: mol_type = genomic DNA
ggtgtagctcagtggtagagcatttgactg

SEQ ID NO: 19651 - DNA, 31 bp, Homo sapiens
  source 1..31: mol_type = genomic DNA
ggtgtagctcagtggtagagcatttgactgc

SEQ ID NO: 19652 - DNA, 32 bp, Homo sapiens
  source 1..32: mol_type = genomic DNA
ggtgtagctcagtggtagagcatttgactgca

SEQ ID NO: 19653 - DNA, 32 bp, Homo sapiens
  source 1..32: mol_type = genomic DNA
ggtgtagctcagtggtagagcgcgtgcttcgc

SEQ ID NO: 19654 - DNA, 16 bp, Homo sapiens
  source 1..16: mol_type = genomic DNA
ggtgtagtggtatcat

SEQ ID NO: 19655 - DNA, 17 bp, Homo sapiens
  source 1..17: mol_type = genomic DNA
ggtgtagtggtatcatg

SEQ ID NO: 19656 - DNA, 19 bp, Homo sapiens
  source 1..19: mol_type = genomic DNA
ggtgtagtggtatcatgca

SEQ ID NO: 19657 - DNA, 22 bp, Homo sapiens
  source 1..22: mol_type = genomic DNA
ggtgtagtggtatcatgcaaga

SEQ ID NO: 19658 - DNA, 24 bp, Homo sapiens
  source 1..24: mol_type = genomic DNA
ggtgtagtggtatcatgcaagatt

SEQ ID NO: 19659 - DNA, 25 bp, Homo sapiens
  source 1..25: mol_type = genomic DNA
ggtgtagtggtatcatgcaagattc

SEQ ID NO: 19660 - DNA, 26 bp, Homo sapiens
  source 1..26: mol_type = genomic DNA
ggtgtagtggtatcatgcaagattcc

SEQ ID NO: 19661 - DNA, 27 bp, Homo sapiens
  source 1..27: mol_type = genomic DNA
ggtgtagtggtatcatgcaagattccc

SEQ ID NO: 19662 - DNA, 28 bp, Homo sapiens
  source 1..28: mol_type = genomic DNA
ggtgtagtggtatcatgcaagattccca

SEQ ID NO: 19663 - DNA, 31 bp, Homo sapiens
  source 1..31: mol_type = genomic DNA
ggtgtagtggtatcatgcaagattcccattc

SEQ ID NO: 19664 - DNA, 42 bp, Homo sapiens
  source 1..42: mol_type = genomic DNA
ggtgtagtggtatcatgcaagattcccattcttgcgacccgg

SEQ ID NO: 19665 - DNA, 43 bp, Homo sapiens
  source 1..43: mol_type = genomic DNA
ggtgtagtggtatcatgcaagattcccattcttgcgacccggg

SEQ ID NO: 19666 - DNA, 44 bp, Homo sapiens
  source 1..44: mol_type = genomic DNA
ggtgtagtggtatcatgcaagattcccattcttgcgacccgggt

SEQ ID NO: 19667 - DNA, 16 bp, Homo sapiens
  source 1..16: mol_type = genomic DNA
ggtgtgagaggtcccg

SEQ ID NO: 19668 - DNA, 16 bp, Homo sapiens
  source 1..16: mol_type = genomic DNA
ggtgtgataggtggca

SEQ ID NO: 19669 - DNA, 23 bp, Homo sapiens
  source 1..23: mol_type = genomic DNA
ggtgtgataggtggcacggagaa

SEQ ID NO: 19670 - DNA, 28 bp, Homo sapiens
  source 1..28: mol_type = genomic DNA
ggtgtgataggtggcacggagaattttg

SEQ ID NO: 19671 - DNA, 21 bp, Homo sapiens
  source 1..21: mol_type = genomic DNA
ggttaaatacagaccaagagc

SEQ ID NO: 19672 - DNA, 22 bp, Homo sapiens
  source 1..22: mol_type = genomic DNA
ggttaaatacagaccaagagcc

SEQ ID NO: 19673 - DNA, 16 bp, Homo sapiens
  source 1..16: mol_type = genomic DNA
ggttaaggcattggac

SEQ ID NO: 19674 - DNA, 17 bp, Homo sapiens
  source 1..17: mol_type = genomic DNA
ggttaaggcattggact

SEQ ID NO: 19675 - DNA, 23 bp, Homo sapiens
  source 1..23: mol_type = genomic DNA
ggttaaggcgatggactgctaat

SEQ ID NO: 19676 - DNA, 16 bp, Homo sapiens
  source 1..16: mol_type = genomic DNA
ggttaaggcgttggac

SEQ ID NO: 19677 - DNA, 16 bp, Homo sapiens
  source 1..16: mol_type = genomic DNA
ggttagagcactggtc

SEQ ID NO: 19678 - DNA, 17 bp, Homo sapiens
  source 1..17: mol_type = genomic DNA
ggttagagcactggtct

SEQ ID NO: 19679 - DNA, 16 bp, Homo sapiens
  source 1..16: mol_type = genomic DNA
ggttagcactctggac

SEQ ID NO: 19680 - DNA, 17 bp, Homo sapiens
  source 1..17: mol_type = genomic DNA
ggttagcactctggact

SEQ ID NO: 19681 - DNA, 18 bp, Homo sapiens
  source 1..18: mol_type = genomic DNA
ggttagcactctggactc

SEQ ID NO: 19682 - DNA, 19 bp, Homo sapiens
  source 1..19: mol_type = genomic DNA
ggttagcactctggactct

SEQ ID NO: 19683 - DNA, 20 bp, Homo sapiens
  source 1..20: mol_type = genomic DNA
ggttagcactctggactctg

SEQ ID NO: 19684 - DNA, 21 bp, Homo sapiens
  source 1..21: mol_type = genomic DNA
ggttagcactctggactctga

SEQ ID NO: 19685 - DNA, 22 bp, Homo sapiens
  source 1..22: mol_type = genomic DNA
ggttagcactctggactctgaa

SEQ ID NO: 19686 - DNA, 23 bp, Homo sapiens
  source 1..23: mol_type = genomic DNA
ggttagcactctggactctgaat

SEQ ID NO: 19687 - DNA, 24 bp, Homo sapiens
  source 1..24: mol_type = genomic DNA
ggttagcactctggactctgaatc

SEQ ID NO: 19688 - DNA, 25 bp, Homo sapiens
  source 1..25: mol_type = genomic DNA
ggttagcactctggactctgaatcc

SEQ ID NO: 19689 - DNA, 26 bp, Homo sapiens
  source 1..26: mol_type = genomic DNA
ggttagcactctggactctgaatcca

SEQ ID NO: 19690 - DNA, 28 bp, Homo sapiens
  source 1..28: mol_type = genomic DNA
ggttagcactctggactctgaatccagc

SEQ ID NO: 19691 - DNA, 29 bp, Homo sapiens
  source 1..29: mol_type = genomic DNA
ggttagcactctggactctgaatccagcg

SEQ ID NO: 19692 - DNA, 30 bp, Homo sapiens
  source 1..30: mol_type = genomic DNA
ggttagcactctggactctgaatccagcga

SEQ ID NO: 19693 - DNA, 31 bp, Homo sapiens
  source 1..31: mol_type = genomic DNA
ggttagcactctggactctgaatccagcgat

SEQ ID NO: 19694 - DNA, 32 bp, Homo sapiens
  source 1..32: mol_type = genomic DNA
ggttagcactctggactctgaatccagcgatc

SEQ ID NO: 19695 - DNA, 33 bp, Homo sapiens
  source 1..33: mol_type = genomic DNA
ggttagcactctggactctgaatccagcgatcc

SEQ ID NO: 19696 - DNA, 34 bp, Homo sapiens
  source 1..34: mol_type = genomic DNA
ggttagcactctggactctgaatccagcgatccg

SEQ ID NO: 19697 - DNA, 35 bp, Homo sapiens
  source 1..35: mol_type = genomic DNA
ggttagcactctggactctgaatccagcgatccga

SEQ ID NO: 19698 - DNA, 36 bp, Homo sapiens
  source 1..36: mol_type = genomic DNA
ggttagcactctggactctgaatccagcgatccgag

SEQ ID NO: 19699 - DNA, 37 bp, Homo sapiens
  source 1..37: mol_type = genomic DNA
ggttagcactctggactctgaatccagcgatccgagt

SEQ ID NO: 19700 - DNA, 38 bp, Homo sapiens
  source 1..38: mol_type = genomic DNA
ggttagcactctggactctgaatccagcgatccgagtt

SEQ ID NO: 19701 - DNA, 39 bp, Homo sapiens
  source 1..39: mol_type = genomic DNA
ggttagcactctggactctgaatccagcgatccgagttc

SEQ ID NO: 19702 - DNA, 40 bp, Homo sapiens
  source 1..40: mol_type = genomic DNA
ggttagcactctggactctgaatccagcgatccgagttca

SEQ ID NO: 19703 - DNA, 48 bp, Homo sapiens
  source 1..48: mol_type = genomic DNA
ggttagcactctggactctgaatccagcgatccgagttcaaatctcgg

SEQ ID NO: 19704 - DNA, 42 bp, Homo sapiens
  source 1..42: mol_type = genomic DNA
ggttagcactctggactctgaatccagcgatccgagttcaag

SEQ ID NO: 19705 - DNA, 20 bp, Homo sapiens
  source 1..20: mol_type = genomic DNA
ggttagcactctggactttg

SEQ ID NO: 19706 - DNA, 21 bp, Homo sapiens
  source 1..21: mol_type = genomic DNA
ggttagcactctggactttga

SEQ ID NO: 19707 - DNA, 22 bp, Homo sapiens
  source 1..22: mol_type = genomic DNA
ggttagcactctggactttgaa

SEQ ID NO: 19708 - DNA, 23 bp, Homo sapiens
  source 1..23: mol_type = genomic DNA
ggttagcactctggactttgaat

SEQ ID NO: 19709 - DNA, 24 bp, Homo sapiens
  source 1..24: mol_type = genomic DNA
ggttagcactctggactttgaatc

SEQ ID NO: 19710 - DNA, 25 bp, Homo sapiens
  source 1..25: mol_type = genomic DNA
ggttagcactctggactttgaatcc

SEQ ID NO: 19711 - DNA, 26 bp, Homo sapiens
  source 1..26: mol_type = genomic DNA
ggttagcactctggactttgaatcca

SEQ ID NO: 19712 - DNA, 28 bp, Homo sapiens
  source 1..28: mol_type = genomic DNA
ggttagcactctggactttgaatccagc

SEQ ID NO: 19713 - DNA, 33 bp, Homo sapiens
  source 1..33: mol_type = genomic DNA
ggttagcactctggactttgaatccagcaatcc

SEQ ID NO: 19714 - DNA, 36 bp, Homo sapiens
  source 1..36: mol_type = genomic DNA
ggttagcactctggactttgaatccagcaatccgag

SEQ ID NO: 19715 - DNA, 33 bp, Homo sapiens
  source 1..33: mol_type = genomic DNA
ggttagcactctggactttgaatccagcgatcc

SEQ ID NO: 19716 - DNA, 35 bp, Homo sapiens
  source 1..35: mol_type = genomic DNA
ggttagcactctggactttgaatccagcgatccga

SEQ ID NO: 19717 - DNA, 36 bp, Homo sapiens
  source 1..36: mol_type = genomic DNA
ggttagcactctggactttgaatccagcgatccgag

SEQ ID NO: 19718 - DNA, 37 bp, Homo sapiens
  source 1..37: mol_type = genomic DNA
ggttagcactctggactttgaatccagcgatccgagt

SEQ ID NO: 19719 - DNA, 38 bp, Homo sapiens
  source 1..38: mol_type = genomic DNA
ggttagcactctggactttgaatccagcgatccgagtt

SEQ ID NO: 19720 - DNA, 40 bp, Homo sapiens
  source 1..40: mol_type = genomic DNA
ggttagcactctggactttgaatccagcgatccgagttca

SEQ ID NO: 19721 - DNA, 48 bp, Homo sapiens
  source 1..48: mol_type = genomic DNA
ggttagcactctggactttgaatccagcgatccgagttcaaatctcgg

SEQ ID NO: 19722 - DNA, 16 bp, Homo sapiens
  source 1..16: mol_type = genomic DNA
ggttagcgccttcggc

SEQ ID NO: 19723 - DNA, 16 bp, Homo sapiens
  source 1..16: mol_type = genomic DNA
ggttagcgcgcggtac

SEQ ID NO: 19724 - DNA, 19 bp, Homo sapiens
  source 1..19: mol_type = genomic DNA
ggttagcgcgcggtactta

SEQ ID NO: 19725 - DNA, 17 bp, Homo sapiens
  source 1..17: mol_type = genomic DNA
ggttagcgcgttcggct

SEQ ID NO: 19726 - DNA, 23 bp, Homo sapiens
  source 1..23: mol_type = genomic DNA
ggttagcgcgttcggctgttaac

SEQ ID NO: 19727 - DNA, 24 bp, Homo sapiens
  source 1..24: mol_type = genomic DNA
ggttagcgcgttcggctgttaacc

SEQ ID NO: 19728 - DNA, 16 bp, Homo sapiens
  source 1..16: mol_type = genomic DNA
ggttagctcagtcggc

SEQ ID NO: 19729 - DNA, 18 bp, Homo sapiens
  source 1..18: mol_type = genomic DNA
ggttagctcagtcggcta

SEQ ID NO: 19730 - DNA, 19 bp, Homo sapiens
  source 1..19: mol_type = genomic DNA
ggttagctcagtcggctag

SEQ ID NO: 19731 - DNA, 20 bp, Homo sapiens
  source 1..20: mol_type = genomic DNA
ggttagctcagtcggctaga

SEQ ID NO: 19732 - DNA, 22 bp, Homo sapiens
  source 1..22: mol_type = genomic DNA
ggttagctcagtcggctagagc

SEQ ID NO: 19733 - DNA, 19 bp, Homo sapiens
  source 1..19: mol_type = genomic DNA
ggttagctcagttggttag

SEQ ID NO: 19734 - DNA, 16 bp, Homo sapiens
  source 1..16: mol_type = genomic DNA
ggttaggattcagcgc

SEQ ID NO: 19735 - DNA, 17 bp, Homo sapiens
  source 1..17: mol_type = genomic DNA
ggttaggattcagcgct

SEQ ID NO: 19736 - DNA, 16 bp, Homo sapiens
  source 1..16: mol_type = genomic DNA
ggttaggattcctggt

SEQ ID NO: 19737 - DNA, 17 bp, Homo sapiens
  source 1..17: mol_type = genomic DNA
ggttaggattcctggtt

SEQ ID NO: 19738 - DNA, 18 bp, Homo sapiens
  source 1..18: mol_type = genomic DNA
ggttaggattcctggttt

SEQ ID NO: 19739 - DNA, 19 bp, Homo sapiens
  source 1..19: mol_type = genomic DNA
ggttaggattcctggtttt

SEQ ID NO: 19740 - DNA, 20 bp, Homo sapiens
  source 1..20: mol_type = genomic DNA
ggttaggattcctggttttc

SEQ ID NO: 19741 - DNA, 21 bp, Homo sapiens
  source 1..21: mol_type = genomic DNA
ggttaggattcctggttttca

SEQ ID NO: 19742 - DNA, 33 bp, Homo sapiens
  source 1..33: mol_type = genomic DNA
ggttaggattcctggttttcacccaggcggccc

SEQ ID NO: 19743 - DNA, 16 bp, Homo sapiens
  source 1..16: mol_type = genomic DNA
ggttaggattcggcgc

SEQ ID NO: 19744 - DNA, 17 bp, Homo sapiens
  source 1..17: mol_type = genomic DNA
ggttaggattcggcgct

SEQ ID NO: 19745 - DNA, 18 bp, Homo sapiens
  source 1..18: mol_type = genomic DNA
ggttaggattcggcgctc

SEQ ID NO: 19746 - DNA, 19 bp, Homo sapiens
  source 1..19: mol_type = genomic DNA
ggttaggattcggcgctct

SEQ ID NO: 19747 - DNA, 20 bp, Homo sapiens
  source 1..20: mol_type = genomic DNA
ggttaggattcggcgctctc

SEQ ID NO: 19748 - DNA, 21 bp, Homo sapiens
  source 1..21: mol_type = genomic DNA
ggttaggattcggcgctctca

SEQ ID NO: 19749 - DNA, 22 bp, Homo sapiens
  source 1..22: mol_type = genomic DNA
ggttaggattcggcgctctcac

SEQ ID NO: 19750 - DNA, 23 bp, Homo sapiens
  source 1..23: mol_type = genomic DNA
ggttaggattcggcgctctcacc

SEQ ID NO: 19751 - DNA, 24 bp, Homo sapiens
  source 1..24: mol_type = genomic DNA
ggttaggattcggcgctctcaccg

SEQ ID NO: 19752 - DNA, 25 bp, Homo sapiens
  source 1..25: mol_type = genomic DNA
ggttaggattcggcgctctcaccgc

SEQ ID NO: 19753 - DNA, 26 bp, Homo sapiens
  source 1..26: mol_type = genomic DNA
ggttaggattcggcgctctcaccgcc

SEQ ID NO: 19754 - DNA, 27 bp, Homo sapiens
  source 1..27: mol_type = genomic DNA
ggttaggattcggcgctctcaccgccg

SEQ ID NO: 19755 - DNA, 28 bp, Homo sapiens
  source 1..28: mol_type = genomic DNA
ggttaggattcggcgctctcaccgccgc

SEQ ID NO: 19756 - DNA, 32 bp, Homo sapiens
  source 1..32: mol_type = genomic DNA
ggttaggattcggcgctctcaccgccgcggcc

SEQ ID NO: 19757 - DNA, 33 bp, Homo sapiens
  source 1..33: mol_type = genomic DNA
ggttaggattcggcgctctcaccgccgcggccc

SEQ ID NO: 19758 - DNA, 34 bp, Homo sapiens
  source 1..34: mol_type = genomic DNA
ggttaggattcggcgctctcaccgccgcggcccg

SEQ ID NO: 19759 - DNA, 35 bp, Homo sapiens
  source 1..35: mol_type = genomic DNA
ggttaggattcggcgctctcaccgccgcggcccgg

SEQ ID NO: 19760 - DNA, 36 bp, Homo sapiens
  source 1..36: mol_type = genomic DNA
ggttaggattcggcgctctcaccgccgcggcccggg

SEQ ID NO: 19761 - DNA, 37 bp, Homo sapiens
  source 1..37: mol_type = genomic DNA
ggttaggattcggcgctctcaccgccgcggcccgggt

SEQ ID NO: 19762 - DNA, 38 bp, Homo sapiens
  source 1..38: mol_type = genomic DNA
ggttaggattcggcgctctcaccgccgcggcccgggtt

SEQ ID NO: 19763 - DNA, 39 bp, Homo sapiens
  source 1..39: mol_type = genomic DNA
ggttaggattcggcgctctcaccgccgcggcccgggttc

SEQ ID NO: 19764 - DNA, 42 bp, Homo sapiens
  source 1..42: mol_type = genomic DNA
ggttaggattcggcgctctcaccgccgcggcccgggttcgat

SEQ ID NO: 19765 - DNA, 18 bp, Homo sapiens
  source 1..18: mol_type = genomic DNA
ggttaggcctctttttac

SEQ ID NO: 19766 - DNA, 19 bp, Homo sapiens
  source 1..19: mol_type = genomic DNA
ggttaggcctctttttacc

SEQ ID NO: 19767 - DNA, 21 bp, Homo sapiens
  source 1..21: mol_type = genomic DNA
ggttaggcctctttttaccac

SEQ ID NO: 19768 - DNA, 22 bp, Homo sapiens
  source 1..22: mol_type = genomic DNA
ggttaggcctctttttaccacc

SEQ ID NO: 19769 - DNA, 23 bp, Homo sapiens
  source 1..23: mol_type = genomic DNA
ggttaggcctctttttaccacca

SEQ ID NO: 19770 - DNA, 16 bp, Homo sapiens
  source 1..16: mol_type = genomic DNA
ggttagtactctgcgt

SEQ ID NO: 19771 - DNA, 17 bp, Homo sapiens
  source 1..17: mol_type = genomic DNA
ggttagtactctgcgtt

SEQ ID NO: 19772 - DNA, 18 bp, Homo sapiens
  source 1..18: mol_type = genomic DNA
ggttagtactctgcgttg

SEQ ID NO: 19773 - DNA, 19 bp, Homo sapiens
  source 1..19: mol_type = genomic DNA
ggttagtactctgcgttgt

SEQ ID NO: 19774 - DNA, 20 bp, Homo sapiens
  source 1..20: mol_type = genomic DNA
ggttagtactctgcgttgtg

SEQ ID NO: 19775 - DNA, 23 bp, Homo sapiens
  source 1..23: mol_type = genomic DNA
ggttagtactctgcgttgtggcc

SEQ ID NO: 19776 - DNA, 24 bp, Homo sapiens
  source 1..24: mol_type = genomic DNA
ggttagtactctgcgttgtggccg

SEQ ID NO: 19777 - DNA, 32 bp, Homo sapiens
  source 1..32: mol_type = genomic DNA
ggttagtactctgcgttgtggccgcagcaacc

SEQ ID NO: 19778 - DNA, 33 bp, Homo sapiens
  source 1..33: mol_type = genomic DNA
ggttagtactctgcgttgtggccgcagcaacct

SEQ ID NO: 19779 - DNA, 36 bp, Homo sapiens
  source 1..36: mol_type = genomic DNA
ggttagtactctgcgttgtggccgcagcaacctcgg

SEQ ID NO: 19780 - DNA, 37 bp, Homo sapiens
  source 1..37: mol_type = genomic DNA
ggttagtactctgcgttgtggccgcagcaacctcggt

SEQ ID NO: 19781 - DNA, 16 bp, Homo sapiens
  source 1..16: mol_type = genomic DNA
ggttagtatccccgcc

SEQ ID NO: 19782 - DNA, 19 bp, Homo sapiens
  source 1..19: mol_type = genomic DNA
ggttagtatccccgcctgt

SEQ ID NO: 19783 - DNA, 20 bp, Homo sapiens
  source 1..20: mol_type = genomic DNA
ggttagtatccccgcctgtc

SEQ ID NO: 19784 - DNA, 16 bp, Homo sapiens
  source 1..16: mol_type = genomic DNA
ggttatacccttcccg

SEQ ID NO: 19785 - DNA, 19 bp, Homo sapiens
  source 1..19: mol_type = genomic DNA
ggttatacccttcccgtac

SEQ ID NO: 19786 - DNA, 20 bp, Homo sapiens
  source 1..20: mol_type = genomic DNA
ggttatacccttcccgtact

SEQ ID NO: 19787 - DNA, 21 bp, Homo sapiens
  source 1..21: mol_type = genomic DNA
ggttatacccttcccgtacta

SEQ ID NO: 19788 - DNA, 22 bp, Homo sapiens
  source 1..22: mol_type = genomic DNA
ggttatacccttcccgtactac

SEQ ID NO: 19789 - DNA, 23 bp, Homo sapiens
  source 1..23: mol_type = genomic DNA
ggttatacccttcccgtactacc

SEQ ID NO: 19790 - DNA, 24 bp, Homo sapiens
  source 1..24: mol_type = genomic DNA
ggttatacccttcccgtactacca

SEQ ID NO: 19791 - DNA, 17 bp, Homo sapiens
  source 1..17: mol_type = genomic DNA
ggttatcacatctgctt

SEQ ID NO: 19792 - DNA, 18 bp, Homo sapiens
  source 1..18: mol_type = genomic DNA
ggttatcacatctgcttt

SEQ ID NO: 19793 - DNA, 20 bp, Homo sapiens
  source 1..20: mol_type = genomic DNA
ggttatcacattcgcctcac

SEQ ID NO: 19794 - DNA, 16 bp, Homo sapiens
  source 1..16: mol_type = genomic DNA
ggttatcacgtctgct

SEQ ID NO: 19795 - DNA, 17 bp, Homo sapiens
  source 1..17: mol_type = genomic DNA
ggttatcacgtctgctt

SEQ ID NO: 19796 - DNA, 18 bp, Homo sapiens
  source 1..18: mol_type = genomic DNA
ggttatcacgtctgcttt

SEQ ID NO: 19797 - DNA, 19 bp, Homo sapiens
  source 1..19: mol_type = genomic DNA
ggttatcacgtctgcttta

SEQ ID NO: 19798 - DNA, 20 bp, Homo sapiens
  source 1..20: mol_type = genomic DNA
ggttatcacgtctgctttac

SEQ ID NO: 19799 - DNA, 21 bp, Homo sapiens
  source 1..21: mol_type = genomic DNA
ggttatcacgtctgctttaca

SEQ ID NO: 19800 - DNA, 22 bp, Homo sapiens
  source 1..22: mol_type = genomic DNA
ggttatcacgtctgctttacac

SEQ ID NO: 19801 - DNA, 16 bp, Homo sapiens
  source 1..16: mol_type = genomic DNA
ggttatcacgttcgcc

SEQ ID NO: 19802 - DNA, 17 bp, Homo sapiens
  source 1..17: mol_type = genomic DNA
ggttatcacgttcgcct

SEQ ID NO: 19803 - DNA, 18 bp, Homo sapiens
  source 1..18: mol_type = genomic DNA
ggttatcacgttcgcctc

SEQ ID NO: 19804 - DNA, 19 bp, Homo sapiens
  source 1..19: mol_type = genomic DNA
ggttatcacgttcgcctca

SEQ ID NO: 19805 - DNA, 20 bp, Homo sapiens
  source 1..20: mol_type = genomic DNA
ggttatcacgttcgcctcac

SEQ ID NO: 19806 - DNA, 22 bp, Homo sapiens
  source 1..22: mol_type = genomic DNA
ggttatcacgttcgcctcacac

SEQ ID NO: 19807 - DNA, 23 bp, Homo sapiens
  source 1..23: mol_type = genomic DNA
ggttatcacgttcgcctcacacg

SEQ ID NO: 19808 - DNA, 24 bp, Homo sapiens
  source 1..24: mol_type = genomic DNA
ggttatcacgttcgcctcacacgc

SEQ ID NO: 19809 - DNA, 27 bp, Homo sapiens
  source 1..27: mol_type = genomic DNA
ggttatcacgttcgcctcacacgcgaa

SEQ ID NO: 19810 - DNA, 16 bp, Homo sapiens
  source 1..16: mol_type = genomic DNA
ggttcaaatcccggac

SEQ ID NO: 19811 - DNA, 17 bp, Homo sapiens
  source 1..17: mol_type = genomic DNA
ggttcaaatcccggacg

SEQ ID NO: 19812 - DNA, 18 bp, Homo sapiens
  source 1..18: mol_type = genomic DNA
ggttcaaatcccggacga

SEQ ID NO: 19813 - DNA, 19 bp, Homo sapiens
  source 1..19: mol_type = genomic DNA
ggttcaaatcccggacgag

SEQ ID NO: 19814 - DNA, 20 bp, Homo sapiens
  source 1..20: mol_type = genomic DNA
ggttcaaatcccggacgagc

SEQ ID NO: 19815 - DNA, 21 bp, Homo sapiens
  source 1..21: mol_type = genomic DNA
ggttcaaatcccggacgagcc

SEQ ID NO: 19816 - DNA, 22 bp, Homo sapiens
  source 1..22: mol_type = genomic DNA
ggttcaaatcccggacgagccc

SEQ ID NO: 19817 - DNA, 23 bp, Homo sapiens
  source 1..23: mol_type = genomic DNA
ggttcaaatcccggacgagcccc

SEQ ID NO: 19818 - DNA, 24 bp, Homo sapiens
  source 1..24: mol_type = genomic DNA
ggttcaaatcccggacgagccccc

SEQ ID NO: 19819 - DNA, 16 bp, Homo sapiens
  source 1..16: mol_type = genomic DNA
ggttcaaatccgggtg

SEQ ID NO: 19820 - DNA, 18 bp, Homo sapiens
  source 1..18: mol_type = genomic DNA
ggttcaaatccgggtgcc

SEQ ID NO: 19821 - DNA, 24 bp, Homo sapiens
  source 1..24: mol_type = genomic DNA
ggttcaaatccgggtgccccctcc

SEQ ID NO: 19822 - DNA, 25 bp, Homo sapiens
  source 1..25: mol_type = genomic DNA
ggttcaaatccgggtgccccctcca

SEQ ID NO: 19823 - DNA, 22 bp, Homo sapiens
  source 1..22: mol_type = genomic DNA
ggttcaagtccctgttcgggcg

SEQ ID NO: 19824 - DNA, 23 bp, Homo sapiens
  source 1..23: mol_type = genomic DNA
ggttcaagtccctgttcgggcgc

SEQ ID NO: 19825 - DNA, 24 bp, Homo sapiens
  source 1..24: mol_type = genomic DNA
ggttcaagtccctgttcgggcgcc

SEQ ID NO: 19826 - DNA, 19 bp, Homo sapiens
  source 1..19: mol_type = genomic DNA
ggttcaatccccggcacct

SEQ ID NO: 19827 - DNA, 23 bp, Homo sapiens
  source 1..23: mol_type = genomic DNA
ggttcaatccccggcacctccac

SEQ ID NO: 19828 - DNA, 24 bp, Homo sapiens
  source 1..24: mol_type = genomic DNA
ggttcaatccccggcacctccacc

SEQ ID NO: 19829 - DNA, 25 bp, Homo sapiens
  source 1..25: mol_type = genomic DNA
ggttcaatccccggcacctccacca

SEQ ID NO: 19830 - DNA, 20 bp, Homo sapiens
  source 1..20: mol_type = genomic DNA
ggttcaatccccggcatctc

SEQ ID NO: 19831 - DNA, 16 bp, Homo sapiens
  source 1..16: mol_type = genomic DNA
ggttcaattccccgac

SEQ ID NO: 19832 - DNA, 22 bp, Homo sapiens
  source 1..22: mol_type = genomic DNA
ggttcaattccccgacggggag

SEQ ID NO: 19833 - DNA, 23 bp, Homo sapiens
  source 1..23: mol_type = genomic DNA
ggttcaattccccgacggggagc

SEQ ID NO: 19834 - DNA, 24 bp, Homo sapiens
  source 1..24: mol_type = genomic DNA
ggttcaattccccgacggggagcc

SEQ ID NO: 19835 - DNA, 25 bp, Homo sapiens
  source 1..25: mol_type = genomic DNA
ggttcaattccccgacggggagcca

SEQ ID NO: 19836 - DNA, 22 bp, Homo sapiens
  source 1..22: mol_type = genomic DNA
ggttcaattcctcttcttaaca

SEQ ID NO: 19837 - DNA, 24 bp, Homo sapiens
  source 1..24: mol_type = genomic DNA
ggttcaattcctcttcttaacacc

SEQ ID NO: 19838 - DNA, 17 bp, Homo sapiens
  source 1..17: mol_type = genomic DNA
ggttcagtggtagaatt

SEQ ID NO: 19839 - DNA, 18 bp, Homo sapiens
  source 1..18: mol_type = genomic DNA
ggttcagtggtagaattc

SEQ ID NO: 19840 - DNA, 19 bp, Homo sapiens
  source 1..19: mol_type = genomic DNA
ggttcagtggtagaattct

SEQ ID NO: 19841 - DNA, 20 bp, Homo sapiens
  source 1..20: mol_type = genomic DNA
ggttcagtggtagaattctc

SEQ ID NO: 19842 - DNA, 22 bp, Homo sapiens
  source 1..22: mol_type = genomic DNA
ggttcagtggtagaattctcgc

SEQ ID NO: 19843 - DNA, 23 bp, Homo sapiens
  source 1..23: mol_type = genomic DNA
ggttcagtggtagaattctcgcc

SEQ ID NO: 19844 - DNA, 24 bp, Homo sapiens
  source 1..24: mol_type = genomic DNA
ggttcagtggtagaattctcgcct

SEQ ID NO: 19845 - DNA, 27 bp, Homo sapiens
  source 1..27: mol_type = genomic DNA
ggttcagtggtagaattctcgcctccc

SEQ ID NO: 19846 - DNA, 25 bp, Homo sapiens
  source 1..25: mol_type = genomic DNA
ggttcagtggtagaattctcgcctg

SEQ ID NO: 19847 - DNA, 26 bp, Homo sapiens
  source 1..26: mol_type = genomic DNA
ggttcagtggtagaattctcgcctgc

SEQ ID NO: 19848 - DNA, 27 bp, Homo sapiens
  source 1..27: mol_type = genomic DNA
ggttcagtggtagaattctcgcctgcc

SEQ ID NO: 19849 - DNA, 28 bp, Homo sapiens
  source 1..28: mol_type = genomic DNA
ggttcagtggtagaattctcgcctgcca

SEQ ID NO: 19850 - DNA, 29 bp, Homo sapiens
  source 1..29: mol_type = genomic DNA
ggttcagtggtagaattctcgcctgccac

SEQ ID NO: 19851 - DNA, 30 bp, Homo sapiens
  source 1..30: mol_type = genomic DNA
ggttcagtggtagaattctcgcctgccacg

SEQ ID NO: 19852 - DNA, 31 bp, Homo sapiens
  source 1..31: mol_type = genomic DNA
ggttcagtggtagaattctcgcctgccacgc

SEQ ID NO: 19853 - DNA, 40 bp, Homo sapiens
  source 1..40: mol_type = genomic DNA
ggttcagtggtagaattctcgcctgccacgcgggaggccc

SEQ ID NO: 19854 - DNA, 42 bp, Homo sapiens
  source 1..42: mol_type = genomic DNA
ggttcagtggtagaattctcgcctgccacgcgggaggcccgg

SEQ ID NO: 19855 - DNA, 24 bp, Homo sapiens
  source 1..24: mol_type = genomic DNA
ggttcagtggtagaattcttgcct

SEQ ID NO: 19856 - DNA, 16 bp, Homo sapiens
  source 1..16: mol_type = genomic DNA
ggttccatagtgtagc

SEQ ID NO: 19857 - DNA, 18 bp, Homo sapiens
  source 1..18: mol_type = genomic DNA
ggttccatagtgtagcgg

SEQ ID NO: 19858 - DNA, 19 bp, Homo sapiens
  source 1..19: mol_type = genomic DNA
ggttccatagtgtagcggt

SEQ ID NO: 19859 - DNA, 22 bp, Homo sapiens
  source 1..22: mol_type = genomic DNA
ggttccatagtgtagcggttat

SEQ ID NO: 19860 - DNA, 23 bp, Homo sapiens
  source 1..23: mol_type = genomic DNA
ggttccatagtgtagcggttatc

SEQ ID NO: 19861 - DNA, 28 bp, Homo sapiens
  source 1..28: mol_type = genomic DNA
ggttccatagtgtagcggttatcacgtc

SEQ ID NO: 19862 - DNA, 29 bp, Homo sapiens
  source 1..29: mol_type = genomic DNA
ggttccatagtgtagcggttatcacgtct

SEQ ID NO: 19863 - DNA, 30 bp, Homo sapiens
  source 1..30: mol_type = genomic DNA
ggttccatagtgtagcggttatcacgtctg

SEQ ID NO: 19864 - DNA, 31 bp, Homo sapiens
  source 1..31: mol_type = genomic DNA
ggttccatagtgtagcggttatcacgtctgc

SEQ ID NO: 19865 - DNA, 32 bp, Homo sapiens
  source 1..32: mol_type = genomic DNA
ggttccatagtgtagcggttatcacgtctgct

SEQ ID NO: 19866 - DNA, 33 bp, Homo sapiens
  source 1..33: mol_type = genomic DNA
ggttccatagtgtagcggttatcacgtctgctt

SEQ ID NO: 19867 - DNA, 34 bp, Homo sapiens
  source 1..34: mol_type = genomic DNA
ggttccatagtgtagcggttatcacgtctgcttt

SEQ ID NO: 19868 - DNA, 35 bp, Homo sapiens
  source 1..35: mol_type = genomic DNA
ggttccatagtgtagcggttatcacgtctgcttta

SEQ ID NO: 19869 - DNA, 36 bp, Homo sapiens
  source 1..36: mol_type = genomic DNA
ggttccatagtgtagcggttatcacgtctgctttac

SEQ ID NO: 19870 - DNA, 37 bp, Homo sapiens
  source 1..37: mol_type = genomic DNA
ggttccatagtgtagcggttatcacgtctgctttaca

SEQ ID NO: 19871 - DNA, 38 bp, Homo sapiens
  source 1..38: mol_type = genomic DNA
ggttccatagtgtagcggttatcacgtctgctttacac

SEQ ID NO: 19872 - DNA, 39 bp, Homo sapiens
  source 1..39: mol_type = genomic DNA
ggttccatagtgtagcggttatcacgtctgctttacacg

SEQ ID NO: 19873 - DNA, 16 bp, Homo sapiens
  source 1..16: mol_type = genomic DNA
ggttccatagtgtagt

SEQ ID NO: 19874 - DNA, 17 bp, Homo sapiens
  source 1..17: mol_type = genomic DNA
ggttccatagtgtagtg

SEQ ID NO: 19875 - DNA, 18 bp, Homo sapiens
  source 1..18: mol_type = genomic DNA
ggttccatagtgtagtgg

SEQ ID NO: 19876 - DNA, 19 bp, Homo sapiens
  source 1..19: mol_type = genomic DNA
ggttccatagtgtagtggt

SEQ ID NO: 19877 - DNA, 21 bp, Homo sapiens
  source 1..21: mol_type = genomic DNA
ggttccatagtgtagtggtta

SEQ ID NO: 19878 - DNA, 22 bp, Homo sapiens
  source 1..22: mol_type = genomic DNA
ggttccatagtgtagtggttat

SEQ ID NO: 19879 - DNA, 23 bp, Homo sapiens
  source 1..23: mol_type = genomic DNA
ggttccatagtgtagtggttatc

SEQ ID NO: 19880 - DNA, 24 bp, Homo sapiens
  source 1..24: mol_type = genomic DNA
ggttccatagtgtagtggttatca

SEQ ID NO: 19881 - DNA, 25 bp, Homo sapiens
  source 1..25: mol_type = genomic DNA
ggttccatagtgtagtggttatcac

SEQ ID NO: 19882 - DNA, 31 bp, Homo sapiens
  source 1..31: mol_type = genomic DNA
ggttccatagtgtagtggttatcacatctgc

SEQ ID NO: 19883 - DNA, 32 bp, Homo sapiens
  source 1..32: mol_type = genomic DNA
ggttccatagtgtagtggttatcacatctgct

SEQ ID NO: 19884 - DNA, 33 bp, Homo sapiens
  source 1..33: mol_type = genomic DNA
ggttccatagtgtagtggttatcacatctgctt

SEQ ID NO: 19885 - DNA, 34 bp, Homo sapiens
  source 1..34: mol_type = genomic DNA
ggttccatagtgtagtggttatcacatctgcttt

SEQ ID NO: 19886 - DNA, 35 bp, Homo sapiens
  source 1..35: mol_type = genomic DNA
ggttccatagtgtagtggttatcacatctgcttta

SEQ ID NO: 19887 - DNA, 36 bp, Homo sapiens
  source 1..36: mol_type = genomic DNA
ggttccatagtgtagtggttatcacatctgctttac

SEQ ID NO: 19888 - DNA, 37 bp, Homo sapiens
  source 1..37: mol_type = genomic DNA
ggttccatagtgtagtggttatcacatctgctttaca

SEQ ID NO: 19889 - DNA, 26 bp, Homo sapiens
  source 1..26: mol_type = genomic DNA
ggttccatagtgtagtggttatcacg

SEQ ID NO: 19890 - DNA, 28 bp, Homo sapiens
  source 1..28: mol_type = genomic DNA
ggttccatagtgtagtggttatcacgtc

SEQ ID NO: 19891 - DNA, 29 bp, Homo sapiens
  source 1..29: mol_type = genomic DNA
ggttccatagtgtagtggttatcacgtct

SEQ ID NO: 19892 - DNA, 30 bp, Homo sapiens
  source 1..30: mol_type = genomic DNA
ggttccatagtgtagtggttatcacgtctg

SEQ ID NO: 19893 - DNA, 31 bp, Homo sapiens
  source 1..31: mol_type = genomic DNA
ggttccatagtgtagtggttatcacgtctgc

SEQ ID NO: 19894 - DNA, 32 bp, Homo sapiens
  source 1..32: mol_type = genomic DNA
ggttccatagtgtagtggttatcacgtctgct

SEQ ID NO: 19895 - DNA, 33 bp, Homo sapiens
  source 1..33: mol_type = genomic DNA
ggttccatagtgtagtggttatcacgtctgctt

SEQ ID NO: 19896 - DNA, 34 bp, Homo sapiens
  source 1..34: mol_type = genomic DNA
ggttccatagtgtagtggttatcacgtctgcttt

SEQ ID NO: 19897 - DNA, 35 bp, Homo sapiens
  source 1..35: mol_type = genomic DNA
ggttccatagtgtagtggttatcacgtctgcttta

SEQ ID NO: 19898 - DNA, 36 bp, Homo sapiens
  source 1..36: mol_type = genomic DNA
ggttccatagtgtagtggttatcacgtctgctttac

SEQ ID NO: 19899 - DNA, 37 bp, Homo sapiens
  source 1..37: mol_type = genomic DNA
ggttccatagtgtagtggttatcacgtctgctttaca

SEQ ID NO: 19900 - DNA, 38 bp, Homo sapiens
  source 1..38: mol_type = genomic DNA
ggttccatagtgtagtggttatcacgtctgctttacac

SEQ ID NO: 19901 - DNA, 39 bp, Homo sapiens
  source 1..39: mol_type = genomic DNA
ggttccatagtgtagtggttatcacgtctgctttacacg

SEQ ID NO: 19902 - DNA, 40 bp, Homo sapiens
  source 1..40: mol_type = genomic DNA
ggttccatagtgtagtggttatcacgtctgctttacacgc

SEQ ID NO: 19903 - DNA, 43 bp, Homo sapiens
  source 1..43: mol_type = genomic DNA
ggttccatagtgtagtggttatcacgtctgctttacacgcaga

SEQ ID NO: 19904 - DNA, 16 bp, Homo sapiens
  source 1..16: mol_type = genomic DNA
ggttccatggtgtaat

SEQ ID NO: 19905 - DNA, 17 bp, Homo sapiens
  source 1..17: mol_type = genomic DNA
ggttccatggtgtaatg

SEQ ID NO: 19906 - DNA, 18 bp, Homo sapiens
  source 1..18: mol_type = genomic DNA
ggttccatggtgtaatgg

SEQ ID NO: 19907 - DNA, 19 bp, Homo sapiens
  source 1..19: mol_type = genomic DNA
ggttccatggtgtaatggt

SEQ ID NO: 19908 - DNA, 29 bp, Homo sapiens
  source 1..29: mol_type = genomic DNA
ggttccatggtgtaatggtaagcactctg

SEQ ID NO: 19909 - DNA, 32 bp, Homo sapiens
  source 1..32: mol_type = genomic DNA
ggttccatggtgtaatggtaagcactctggac

SEQ ID NO: 19910 - DNA, 33 bp, Homo sapiens
  source 1..33: mol_type = genomic DNA
ggttccatggtgtaatggtaagcactctggact

SEQ ID NO: 19911 - DNA, 34 bp, Homo sapiens
  source 1..34: mol_type = genomic DNA
ggttccatggtgtaatggtaagcactctggactc

SEQ ID NO: 19912 - DNA, 35 bp, Homo sapiens
  source 1..35: mol_type = genomic DNA
ggttccatggtgtaatggtaagcactctggactct

SEQ ID NO: 19913 - DNA, 36 bp, Homo sapiens
  source 1..36: mol_type = genomic DNA
ggttccatggtgtaatggtaagcactctggactctg

SEQ ID NO: 19914 - DNA, 27 bp, Homo sapiens
  source 1..27: mol_type = genomic DNA
ggttccatggtgtaatggtgagcactc

SEQ ID NO: 19915 - DNA, 28 bp, Homo sapiens
  source 1..28: mol_type = genomic DNA
ggttccatggtgtaatggtgagcactct

SEQ ID NO: 19916 - DNA, 29 bp, Homo sapiens
  source 1..29: mol_type = genomic DNA
ggttccatggtgtaatggtgagcactctg

SEQ ID NO: 19917 - DNA, 30 bp, Homo sapiens
  source 1..30: mol_type = genomic DNA
ggttccatggtgtaatggtgagcactctgg

SEQ ID NO: 19918 - DNA, 31 bp, Homo sapiens
  source 1..31: mol_type = genomic DNA
ggttccatggtgtaatggtgagcactctgga

SEQ ID NO: 19919 - DNA, 32 bp, Homo sapiens
  source 1..32: mol_type = genomic DNA
ggttccatggtgtaatggtgagcactctggac

SEQ ID NO: 19920 - DNA, 33 bp, Homo sapiens
  source 1..33: mol_type = genomic DNA
ggttccatggtgtaatggtgagcactctggact

SEQ ID NO: 19921 - DNA, 34 bp, Homo sapiens
  source 1..34: mol_type = genomic DNA
ggttccatggtgtaatggtgagcactctggactc

SEQ ID NO: 19922 - DNA, 35 bp, Homo sapiens
  source 1..35: mol_type = genomic DNA
ggttccatggtgtaatggtgagcactctggactct

SEQ ID NO: 19923 - DNA, 36 bp, Homo sapiens
  source 1..36: mol_type = genomic DNA
ggttccatggtgtaatggtgagcactctggactctg

SEQ ID NO: 19924 - DNA, 37 bp, Homo sapiens
  source 1..37: mol_type = genomic DNA
ggttccatggtgtaatggtgagcactctggactctga

SEQ ID NO: 19925 - DNA, 40 bp, Homo sapiens
  source 1..40: mol_type = genomic DNA
ggttccatggtgtaatggtgagcactctggactctgaatc

SEQ ID NO: 19926 - DNA, 41 bp, Homo sapiens
  source 1..41: mol_type = genomic DNA
ggttccatggtgtaatggtgagcactctggactctgaatcc

SEQ ID NO: 19927 - DNA, 23 bp, Homo sapiens
  source 1..23: mol_type = genomic DNA
ggttccatggtgtaatggttagc

SEQ ID NO: 19928 - DNA, 27 bp, Homo sapiens
  source 1..27: mol_type = genomic DNA
ggttccatggtgtaatggttagcactc

SEQ ID NO: 19929 - DNA, 28 bp, Homo sapiens
  source 1..28: mol_type = genomic DNA
ggttccatggtgtaatggttagcactct

SEQ ID NO: 19930 - DNA, 29 bp, Homo sapiens
  source 1..29: mol_type = genomic DNA
ggttccatggtgtaatggttagcactctg

SEQ ID NO: 19931 - DNA, 30 bp, Homo sapiens
  source 1..30: mol_type = genomic DNA
ggttccatggtgtaatggttagcactctgg

SEQ ID NO: 19932 - DNA, 31 bp, Homo sapiens
  source 1..31: mol_type = genomic DNA
ggttccatggtgtaatggttagcactctgga

SEQ ID NO: 19933 - DNA, 32 bp, Homo sapiens
  source 1..32: mol_type = genomic DNA
ggttccatggtgtaatggttagcactctggac

SEQ ID NO: 19934 - DNA, 33 bp, Homo sapiens
  source 1..33: mol_type = genomic DNA
ggttccatggtgtaatggttagcactctggact

SEQ ID NO: 19935 - DNA, 34 bp, Homo sapiens
  source 1..34: mol_type = genomic DNA
ggttccatggtgtaatggttagcactctggactc

SEQ ID NO: 19936 - DNA, 35 bp, Homo sapiens
  source 1..35: mol_type = genomic DNA
ggttccatggtgtaatggttagcactctggactct

SEQ ID NO: 19937 - DNA, 36 bp, Homo sapiens
  source 1..36: mol_type = genomic DNA
ggttccatggtgtaatggttagcactctggactctg

SEQ ID NO: 19938 - DNA, 37 bp, Homo sapiens
  source 1..37: mol_type = genomic DNA
ggttccatggtgtaatggttagcactctggactctga

SEQ ID NO: 19939 - DNA, 38 bp, Homo sapiens
  source 1..38: mol_type = genomic DNA
ggttccatggtgtaatggttagcactctggactctgaa

SEQ ID NO: 19940 - DNA, 39 bp, Homo sapiens
  source 1..39: mol_type = genomic DNA
ggttccatggtgtaatggttagcactctggactctgaat

SEQ ID NO: 19941 - DNA, 40 bp, Homo sapiens
  source 1..40: mol_type = genomic DNA
ggttccatggtgtaatggttagcactctggactctgaatc

SEQ ID NO: 19942 - DNA, 41 bp, Homo sapiens
  source 1..41: mol_type = genomic DNA
ggttccatggtgtaatggttagcactctggactctgaatcc

SEQ ID NO: 19943 - DNA, 42 bp, Homo sapiens
  source 1..42: mol_type = genomic DNA
ggttccatggtgtaatggttagcactctggactctgaatcca

SEQ ID NO: 19944 - DNA, 44 bp, Homo sapiens
  source 1..44: mol_type = genomic DNA
ggttccatggtgtaatggttagcactctggactctgaatccagc

SEQ ID NO: 19945 - DNA, 45 bp, Homo sapiens
  source 1..45: mol_type = genomic DNA
ggttccatggtgtaatggttagcactctggactctgaatccagcg

SEQ ID NO: 19946 - DNA, 46 bp, Homo sapiens
  source 1..46: mol_type = genomic DNA
ggttccatggtgtaatggttagcactctggactctgaatccagcga

SEQ ID NO: 19947 - DNA, 47 bp, Homo sapiens
  source 1..47: mol_type = genomic DNA
ggttccatggtgtaatggttagcactctggactctgaatccagcgat

SEQ ID NO: 19948 - DNA, 48 bp, Homo sapiens
  source 1..48: mol_type = genomic DNA
ggttccatggtgtaatggttagcactctggactctgaatccagcgatc

SEQ ID NO: 19949 - DNA, 28 bp, Homo sapiens
  source 1..28: mol_type = genomic DNA
ggttccgggttcgagtcccggcggagtc

SEQ ID NO: 19950 - DNA, 30 bp, Homo sapiens
  source 1..30: mol_type = genomic DNA
ggttccgggttcgagtcccggcggagtcgc

SEQ ID NO: 19951 - DNA, 31 bp, Homo sapiens
  source 1..31: mol_type = genomic DNA
ggttccgggttcgagtcccggcggagtcgcc

SEQ ID NO: 19952 - DNA, 32 bp, Homo sapiens
  source 1..32: mol_type = genomic DNA
ggttccgggttcgagtcccggcggagtcgcca

SEQ ID NO: 19953 - DNA, 16 bp, Homo sapiens
  source 1..16: mol_type = genomic DNA
ggttcgaaaccgggcg

SEQ ID NO: 19954 - DNA, 18 bp, Homo sapiens
  source 1..18: mol_type = genomic DNA
ggttcgaaaccgggcgga

SEQ ID NO: 19955 - DNA, 19 bp, Homo sapiens
  source 1..19: mol_type = genomic DNA
ggttcgaaaccgggcggaa

SEQ ID NO: 19956 - DNA, 20 bp, Homo sapiens
  source 1..20: mol_type = genomic DNA
ggttcgaaaccgggcggaaa

SEQ ID NO: 19957 - DNA, 21 bp, Homo sapiens
  source 1..21: mol_type = genomic DNA
ggttcgaaaccgggcggaaac

SEQ ID NO: 19958 - DNA, 22 bp, Homo sapiens
  source 1..22: mol_type = genomic DNA
ggttcgaaaccgggcggaaaca

SEQ ID NO: 19959 - DNA, 23 bp, Homo sapiens
  source 1..23: mol_type = genomic DNA
ggttcgaaaccgggcggaaacac

SEQ ID NO: 19960 - DNA, 24 bp, Homo sapiens
  source 1..24: mol_type = genomic DNA
ggttcgaaaccgggcggaaacacc

SEQ ID NO: 19961 - DNA, 20 bp, Homo sapiens
  source 1..20: mol_type = genomic DNA
ggttcgaaccccgtacgggc

SEQ ID NO: 19962 - DNA, 23 bp, Homo sapiens
  source 1..23: mol_type = genomic DNA
ggttcgaaccccgtccgtgcctc

SEQ ID NO: 19963 - DNA, 19 bp, Homo sapiens
  source 1..19: mol_type = genomic DNA
ggttcgaaccctgctcgct

SEQ ID NO: 19964 - DNA, 24 bp, Homo sapiens
  source 1..24: mol_type = genomic DNA
ggttcgaaccctgctcgctgcgcc

SEQ ID NO: 19965 - DNA, 25 bp, Homo sapiens
  source 1..25: mol_type = genomic DNA
ggttcgaaccctgctcgctgcgcca

SEQ ID NO: 19966 - DNA, 23 bp, Homo sapiens
  source 1..23: mol_type = genomic DNA
ggttcgaatcccaccagagtcgc

SEQ ID NO: 19967 - DNA, 25 bp, Homo sapiens
  source 1..25: mol_type = genomic DNA
ggttcgaatcccaccagagtcgcca

SEQ ID NO: 19968 - DNA, 23 bp, Homo sapiens
  source 1..23: mol_type = genomic DNA
ggttcgaatcccaccgctgccac

SEQ ID NO: 19969 - DNA, 24 bp, Homo sapiens
  source 1..24: mol_type = genomic DNA
ggttcgaatcccaccgctgccacc

SEQ ID NO: 19970 - DNA, 22 bp, Homo sapiens
  source 1..22: mol_type = genomic DNA
ggttcgaatcccactcctgaca

SEQ ID NO: 19971 - DNA, 24 bp, Homo sapiens
  source 1..24: mol_type = genomic DNA
ggttcgaatcccactcctgacacc

SEQ ID NO: 19972 - DNA, 25 bp, Homo sapiens
  source 1..25: mol_type = genomic DNA
ggttcgaatcccactcctgacacca

SEQ ID NO: 19973 - DNA, 23 bp, Homo sapiens
  source 1..23: mol_type = genomic DNA
ggttcgaatcccacttctgacac

SEQ ID NO: 19974 - DNA, 24 bp, Homo sapiens
  source 1..24: mol_type = genomic DNA
ggttcgaatcccacttctgacacc

SEQ ID NO: 19975 - DNA, 22 bp, Homo sapiens
  source 1..22: mol_type = genomic DNA
ggttcgaatcccagcggtgcct

SEQ ID NO: 19976 - DNA, 24 bp, Homo sapiens
  source 1..24: mol_type = genomic DNA
ggttcgaatcccagcggtgcctcc

SEQ ID NO: 19977 - DNA, 23 bp, Homo sapiens
  source 1..23: mol_type = genomic DNA
ggttcgaatcccatcctcgtcgc

SEQ ID NO: 19978 - DNA, 24 bp, Homo sapiens
  source 1..24: mol_type = genomic DNA
ggttcgaatcccatcctcgtcgcc

SEQ ID NO: 19979 - DNA, 25 bp, Homo sapiens
  source 1..25: mol_type = genomic DNA
ggttcgaatcccatcctcgtcgcca

SEQ ID NO: 19980 - DNA, 23 bp, Homo sapiens
  source 1..23: mol_type = genomic DNA
ggttcgaatcccttcgtggttgc

SEQ ID NO: 19981 - DNA, 24 bp, Homo sapiens
  source 1..24: mol_type = genomic DNA
ggttcgaatcccttcgtggttgcc

SEQ ID NO: 19982 - DNA, 19 bp, Homo sapiens
  source 1..19: mol_type = genomic DNA
ggttcgaatccgagtcacg

SEQ ID NO: 19983 - DNA, 21 bp, Homo sapiens
  source 1..21: mol_type = genomic DNA
ggttcgaatccgagtcacggc

SEQ ID NO: 19984 - DNA, 22 bp, Homo sapiens
  source 1..22: mol_type = genomic DNA
ggttcgaatccgagtcacggca

SEQ ID NO: 19985 - DNA, 23 bp, Homo sapiens
  source 1..23: mol_type = genomic DNA
ggttcgaatccgagtcacggcac

SEQ ID NO: 19986 - DNA, 24 bp, Homo sapiens
  source 1..24: mol_type = genomic DNA
ggttcgaatccgagtcacggcacc

SEQ ID NO: 19987 - DNA, 25 bp, Homo sapiens
  source 1..25: mol_type = genomic DNA
ggttcgaatccgagtcacggcacca

SEQ ID NO: 19988 - DNA, 23 bp, Homo sapiens
  source 1..23: mol_type = genomic DNA
ggttcgaatccggctcgaaggac

SEQ ID NO: 19989 - DNA, 23 bp, Homo sapiens
  source 1..23: mol_type = genomic DNA
ggttcgaatccggctcggaggac

SEQ ID NO: 19990 - DNA, 18 bp, Homo sapiens
  source 1..18: mol_type = genomic DNA
ggttcgaatcctgccgac

SEQ ID NO: 19991 - DNA, 19 bp, Homo sapiens
  source 1..19: mol_type = genomic DNA
ggttcgaatcctgccgact

SEQ ID NO: 19992 - DNA, 22 bp, Homo sapiens
  source 1..22: mol_type = genomic DNA
ggttcgaatcctgccgactacg

SEQ ID NO: 19993 - DNA, 17 bp, Homo sapiens
  source 1..17: mol_type = genomic DNA
ggttcgaatcctgtcgg

SEQ ID NO: 19994 - DNA, 18 bp, Homo sapiens
  source 1..18: mol_type = genomic DNA
ggttcgaatcctgttcgt

SEQ ID NO: 19995 - DNA, 24 bp, Homo sapiens
  source 1..24: mol_type = genomic DNA
ggttcgaatcctgttcgtgacgcc

SEQ ID NO: 19996 - DNA, 25 bp, Homo sapiens
  source 1..25: mol_type = genomic DNA
ggttcgaatcctgttcgtgacgcca

SEQ ID NO: 19997 - DNA, 18 bp, Homo sapiens
  source 1..18: mol_type = genomic DNA
ggttcgactcccggtatg

SEQ ID NO: 19998 - DNA, 23 bp, Homo sapiens
  source 1..23: mol_type = genomic DNA
ggttcgactcccggtatgggaac

SEQ ID NO: 19999 - DNA, 24 bp, Homo sapiens
  source 1..24: mol_type = genomic DNA
ggttcgactcccggtatgggaacc

SEQ ID NO: 20000 - DNA, 16 bp, Homo sapiens
  source 1..16: mol_type = genomic DNA
ggttcgactcccggtg

SEQ ID NO: 20001 - DNA, 17 bp, Homo sapiens
  source 1..17: mol_type = genomic DNA
ggttcgactcccggtgt

SEQ ID NO: 20002 - DNA, 18 bp, Homo sapiens
  source 1..18: mol_type = genomic DNA
ggttcgactcccggtgtg

SEQ ID NO: 20003 - DNA, 19 bp, Homo sapiens
  source 1..19: mol_type = genomic DNA
ggttcgactcccggtgtgg

SEQ ID NO: 20004 - DNA, 20 bp, Homo sapiens
  source 1..20: mol_type = genomic DNA
ggttcgactcccggtgtggg

SEQ ID NO: 20005 - DNA, 21 bp, Homo sapiens
  source 1..21: mol_type = genomic DNA
ggttcgactcccggtgtggga

SEQ ID NO: 20006 - DNA, 22 bp, Homo sapiens
  source 1..22: mol_type = genomic DNA
ggttcgactcccggtgtgggaa

SEQ ID NO: 20007 - DNA, 23 bp, Homo sapiens
  source 1..23: mol_type = genomic DNA
ggttcgactcccggtgtgggaac

SEQ ID NO: 20008 - DNA, 24 bp, Homo sapiens
  source 1..24: mol_type = genomic DNA
ggttcgactcccggtgtgggaacc

SEQ ID NO: 20009 - DNA, 25 bp, Homo sapiens
  source 1..25: mol_type = genomic DNA
ggttcgactcccggtgtgggaacca

SEQ ID NO: 20010 - DNA, 19 bp, Homo sapiens
  source 1..19: mol_type = genomic DNA
ggttcgactcctggctggc

SEQ ID NO: 20011 - DNA, 20 bp, Homo sapiens
  source 1..20: mol_type = genomic DNA
ggttcgactcctggctggct

SEQ ID NO: 20012 - DNA, 21 bp, Homo sapiens
  source 1..21: mol_type = genomic DNA
ggttcgactcctggctggctc

SEQ ID NO: 20013 - DNA, 22 bp, Homo sapiens
  source 1..22: mol_type = genomic DNA
ggttcgactcctggctggctcg

SEQ ID NO: 20014 - DNA, 23 bp, Homo sapiens
  source 1..23: mol_type = genomic DNA
ggttcgactcctggctggctcgc

SEQ ID NO: 20015 - DNA, 24 bp, Homo sapiens
  source 1..24: mol_type = genomic DNA
ggttcgactcctggctggctcgcc

SEQ ID NO: 20016 - DNA, 25 bp, Homo sapiens
  source 1..25: mol_type = genomic DNA
ggttcgactcctggctggctcgcca

SEQ ID NO: 20017 - DNA, 24 bp, Homo sapiens
  source 1..24: mol_type = genomic DNA
ggttcgagtcccacctggggtacc

SEQ ID NO: 20018 - DNA, 24 bp, Homo sapiens
  source 1..24: mol_type = genomic DNA
ggttcgagtcccatctggggtgcc

SEQ ID NO: 20019 - DNA, 24 bp, Homo sapiens
  source 1..24: mol_type = genomic DNA
ggttcgagtcccatctgggtcgcc

SEQ ID NO: 20020 - DNA, 22 bp, Homo sapiens
  source 1..22: mol_type = genomic DNA
ggttcgagtcccggcagagatg

SEQ ID NO: 20021 - DNA, 24 bp, Homo sapiens
  source 1..24: mol_type = genomic DNA
ggttcgagtcccggcagagatgcc

SEQ ID NO: 20022 - DNA, 16 bp, Homo sapiens
  source 1..16: mol_type = genomic DNA
ggttcgagtcccggcg

SEQ ID NO: 20023 - DNA, 17 bp, Homo sapiens
  source 1..17: mol_type = genomic DNA
ggttcgagtcccggcgg

SEQ ID NO: 20024 - DNA, 18 bp, Homo sapiens
  source 1..18: mol_type = genomic DNA
ggttcgagtcccggcgga

SEQ ID NO: 20025 - DNA, 19 bp, Homo sapiens
  source 1..19: mol_type = genomic DNA
ggttcgagtcccggcggag

SEQ ID NO: 20026 - DNA, 20 bp, Homo sapiens
  source 1..20: mol_type = genomic DNA
ggttcgagtcccggcggagt

SEQ ID NO: 20027 - DNA, 21 bp, Homo sapiens
  source 1..21: mol_type = genomic DNA
ggttcgagtcccggcggagtc

SEQ ID NO: 20028 - DNA, 22 bp, Homo sapiens
  source 1..22: mol_type = genomic DNA
ggttcgagtcccggcggagtcg

SEQ ID NO: 20029 - DNA, 23 bp, Homo sapiens
  source 1..23: mol_type = genomic DNA
ggttcgagtcccggcggagtcgc

SEQ ID NO: 20030 - DNA, 25 bp, Homo sapiens
  source 1..25: mol_type = genomic DNA
ggttcgagtcccggcggagtcgcca

SEQ ID NO: 20031 - DNA, 17 bp, Homo sapiens
  source 1..17: mol_type = genomic DNA
ggttcgagtcccttcgt

SEQ ID NO: 20032 - DNA, 21 bp, Homo sapiens
  source 1..21: mol_type = genomic DNA
ggttcgagtcccttcgtggtc

SEQ ID NO: 20033 - DNA, 24 bp, Homo sapiens
  source 1..24: mol_type = genomic DNA
ggttcgagtcccttcgtggtcgcc

SEQ ID NO: 20034 - DNA, 17 bp, Homo sapiens
  source 1..17: mol_type = genomic DNA
ggttcgagtcctgccgc

SEQ ID NO: 20035 - DNA, 23 bp, Homo sapiens
  source 1..23: mol_type = genomic DNA
ggttcgagtcctgccgcggtcgc

SEQ ID NO: 20036 - DNA, 24 bp, Homo sapiens
  source 1..24: mol_type = genomic DNA
ggttcgagtcctgccgcggtcgcc

SEQ ID NO: 20037 - DNA, 25 bp, Homo sapiens
  source 1..25: mol_type = genomic DNA
ggttcgagtcctgccgcggtcgcca

SEQ ID NO: 20038 - DNA, 23 bp, Homo sapiens
  source 1..23: mol_type = genomic DNA
ggttcgatccccagcatctccac

SEQ ID NO: 20039 - DNA, 16 bp, Homo sapiens
  source 1..16: mol_type = genomic DNA
ggttcgatccccggca

SEQ ID NO: 20040 - DNA, 17 bp, Homo sapiens
  source 1..17: mol_type = genomic DNA
ggttcgatccccggcat

SEQ ID NO: 20041 - DNA, 18 bp, Homo sapiens
  source 1..18: mol_type = genomic DNA
ggttcgatccccggcatc

SEQ ID NO: 20042 - DNA, 19 bp, Homo sapiens
  source 1..19: mol_type = genomic DNA
ggttcgatccccggcatct

SEQ ID NO: 20043 - DNA, 20 bp, Homo sapiens
  source 1..20: mol_type = genomic DNA
ggttcgatccccggcatctc

SEQ ID NO: 20044 - DNA, 21 bp, Homo sapiens
  source 1..21: mol_type = genomic DNA
ggttcgatccccggcatctcc

SEQ ID NO: 20045 - DNA, 22 bp, Homo sapiens
  source 1..22: mol_type = genomic DNA
ggttcgatccccggcatctcca

SEQ ID NO: 20046 - DNA, 24 bp, Homo sapiens
  source 1..24: mol_type = genomic DNA
ggttcgatccccggcatctccacc

SEQ ID NO: 20047 - DNA, 25 bp, Homo sapiens
  source 1..25: mol_type = genomic DNA
ggttcgatccccggcatctccacca

SEQ ID NO: 20048 - DNA, 16 bp, Homo sapiens
  source 1..16: mol_type = genomic DNA
ggttcgatccccgtac

SEQ ID NO: 20049 - DNA, 20 bp, Homo sapiens
  source 1..20: mol_type = genomic DNA
ggttcgatccccgtacgggc

SEQ ID NO: 20050 - DNA, 21 bp, Homo sapiens
  source 1..21: mol_type = genomic DNA
ggttcgatccccgtacgggcc

SEQ ID NO: 20051 - DNA, 17 bp, Homo sapiens
  source 1..17: mol_type = genomic DNA
ggttcgatccccgtact

SEQ ID NO: 20052 - DNA, 20 bp, Homo sapiens
  source 1..20: mol_type = genomic DNA
ggttcgatccccgtactggc

SEQ ID NO: 20053 - DNA, 21 bp, Homo sapiens
  source 1..21: mol_type = genomic DNA
ggttcgatccccgtactggcc

SEQ ID NO: 20054 - DNA, 22 bp, Homo sapiens
  source 1..22: mol_type = genomic DNA
ggttcgatccccgtactggcca

SEQ ID NO: 20055 - DNA, 23 bp, Homo sapiens
  source 1..23: mol_type = genomic DNA
ggttcgatccccgtactggccac

SEQ ID NO: 20056 - DNA, 24 bp, Homo sapiens
  source 1..24: mol_type = genomic DNA
ggttcgatccccgtactggccacc

SEQ ID NO: 20057 - DNA, 22 bp, Homo sapiens
  source 1..22: mol_type = genomic DNA
ggttcgatcccgggcggaaaca

SEQ ID NO: 20058 - DNA, 24 bp, Homo sapiens
  source 1..24: mol_type = genomic DNA
ggttcgatcccgggcggaaacacc

SEQ ID NO: 20059 - DNA, 16 bp, Homo sapiens
  source 1..16: mol_type = genomic DNA
ggttcgatcccgggtt

SEQ ID NO: 20060 - DNA, 17 bp, Homo sapiens
  source 1..17: mol_type = genomic DNA
ggttcgatcccgggttt

SEQ ID NO: 20061 - DNA, 22 bp, Homo sapiens
  source 1..22: mol_type = genomic DNA
ggttcgatcccgggtttcggca

SEQ ID NO: 20062 - DNA, 23 bp, Homo sapiens
  source 1..23: mol_type = genomic DNA
ggttcgatcccgggtttcggcac

SEQ ID NO: 20063 - DNA, 16 bp, Homo sapiens
  source 1..16: mol_type = genomic DNA
ggttcgattccccaac

SEQ ID NO: 20064 - DNA, 16 bp, Homo sapiens
  source 1..16: mol_type = genomic DNA
ggttcgattccccgac

SEQ ID NO: 20065 - DNA, 17 bp, Homo sapiens
  source 1..17: mol_type = genomic DNA
ggttcgattccccgacg

SEQ ID NO: 20066 - DNA, 18 bp, Homo sapiens
  source 1..18: mol_type = genomic DNA
ggttcgattccccgacgg

SEQ ID NO: 20067 - DNA, 19 bp, Homo sapiens
  source 1..19: mol_type = genomic DNA
ggttcgattccccgacggg

SEQ ID NO: 20068 - DNA, 20 bp, Homo sapiens
  source 1..20: mol_type = genomic DNA
ggttcgattccccgacgggg

SEQ ID NO: 20069 - DNA, 21 bp, Homo sapiens
  source 1..21: mol_type = genomic DNA
ggttcgattccccgacgggga

SEQ ID NO: 20070 - DNA, 22 bp, Homo sapiens
  source 1..22: mol_type = genomic DNA
ggttcgattccccgacggggag

SEQ ID NO: 20071 - DNA, 23 bp, Homo sapiens
  source 1..23: mol_type = genomic DNA
ggttcgattccccgacggggagc

SEQ ID NO: 20072 - DNA, 24 bp, Homo sapiens
  source 1..24: mol_type = genomic DNA
ggttcgattccccgacggggagcc

SEQ ID NO: 20073 - DNA, 25 bp, Homo sapiens
  source 1..25: mol_type = genomic DNA
ggttcgattccccgacggggagcca

SEQ ID NO: 20074 - DNA, 16 bp, Homo sapiens
  source 1..16: mol_type = genomic DNA
ggttcgattcccggcc

SEQ ID NO: 20075 - DNA, 19 bp, Homo sapiens
  source 1..19: mol_type = genomic DNA
ggttcgattcccggccaac

SEQ ID NO: 20076 - DNA, 20 bp, Homo sapiens
  source 1..20: mol_type = genomic DNA
ggttcgattcccggccaacg

SEQ ID NO: 20077 - DNA, 24 bp, Homo sapiens
  source 1..24: mol_type = genomic DNA
ggttcgattcccggccaacgcacc

SEQ ID NO: 20078 - DNA, 20 bp, Homo sapiens
  source 1..20: mol_type = genomic DNA
ggttcgattcccggccaatg

SEQ ID NO: 20079 - DNA, 21 bp, Homo sapiens
  source 1..21: mol_type = genomic DNA
ggttcgattcccggccaatgc

SEQ ID NO: 20080 - DNA, 24 bp, Homo sapiens
  source 1..24: mol_type = genomic DNA
ggttcgattcccggccaatgcacc

SEQ ID NO: 20081 - DNA, 16 bp, Homo sapiens
  source 1..16: mol_type = genomic DNA
ggttcgattcccgggc

SEQ ID NO: 20082 - DNA, 17 bp, Homo sapiens
  source 1..17: mol_type = genomic DNA
ggttcgattcccgggcg

SEQ ID NO: 20083 - DNA, 19 bp, Homo sapiens
  source 1..19: mol_type = genomic DNA
ggttcgattcccgggcggc

SEQ ID NO: 20084 - DNA, 22 bp, Homo sapiens
  source 1..22: mol_type = genomic DNA
ggttcgattcccgggcggcgca

SEQ ID NO: 20085 - DNA, 24 bp, Homo sapiens
  source 1..24: mol_type = genomic DNA
ggttcgattcccgggcggcgcacc

SEQ ID NO: 20086 - DNA, 16 bp, Homo sapiens
  source 1..16: mol_type = genomic DNA
ggttcgattcccgggt

SEQ ID NO: 20087 - DNA, 16 bp, Homo sapiens
  source 1..16: mol_type = genomic DNA
ggttcgattcccggtc

SEQ ID NO: 20088 - DNA, 17 bp, Homo sapiens
  source 1..17: mol_type = genomic DNA
ggttcgattcccggtca

SEQ ID NO: 20089 - DNA, 18 bp, Homo sapiens
  source 1..18: mol_type = genomic DNA
ggttcgattcccggtcag

SEQ ID NO: 20090 - DNA, 19 bp, Homo sapiens
  source 1..19: mol_type = genomic DNA
ggttcgattcccggtcagg

SEQ ID NO: 20091 - DNA, 24 bp, Homo sapiens
  source 1..24: mol_type = genomic DNA
ggttcgattcccggtcaggaaacc

SEQ ID NO: 20092 - DNA, 20 bp, Homo sapiens
  source 1..20: mol_type = genomic DNA
ggttcgattcccggtcaggg

SEQ ID NO: 20093 - DNA, 21 bp, Homo sapiens
  source 1..21: mol_type = genomic DNA
ggttcgattcccggtcaggga

SEQ ID NO: 20094 - DNA, 22 bp, Homo sapiens
  source 1..22: mol_type = genomic DNA
ggttcgattcccggtcagggaa

SEQ ID NO: 20095 - DNA, 23 bp, Homo sapiens
  source 1..23: mol_type = genomic DNA
ggttcgattcccggtcagggaac

SEQ ID NO: 20096 - DNA, 24 bp, Homo sapiens
  source 1..24: mol_type = genomic DNA
ggttcgattcccggtcagggaacc

SEQ ID NO: 20097 - DNA, 25 bp, Homo sapiens
  source 1..25: mol_type = genomic DNA
ggttcgattcccggtcagggaacca

SEQ ID NO: 20098 - DNA, 16 bp, Homo sapiens
  source 1..16: mol_type = genomic DNA
ggttcgattccggctc

SEQ ID NO: 20099 - DNA, 22 bp, Homo sapiens
  source 1..22: mol_type = genomic DNA
ggttcgattccggctcgaagga

SEQ ID NO: 20100 - DNA, 23 bp, Homo sapiens
  source 1..23: mol_type = genomic DNA
ggttcgattccggctcgaaggac

SEQ ID NO: 20101 - DNA, 24 bp, Homo sapiens
  source 1..24: mol_type = genomic DNA
ggttcgattccggctcgaaggacc

SEQ ID NO: 20102 - DNA, 22 bp, Homo sapiens
  source 1..22: mol_type = genomic DNA
ggttcgattccttccttttttg

SEQ ID NO: 20103 - DNA, 23 bp, Homo sapiens
  source 1..23: mol_type = genomic DNA
ggttcgattccttccttttttgc

SEQ ID NO: 20104 - DNA, 24 bp, Homo sapiens
  source 1..24: mol_type = genomic DNA
ggttcgattccttccttttttgcc

SEQ ID NO: 20105 - DNA, 25 bp, Homo sapiens
  source 1..25: mol_type = genomic DNA
ggttcgattccttccttttttgcca

SEQ ID NO: 20106 - DNA, 18 bp, Homo sapiens
  source 1..18: mol_type = genomic DNA
ggttcgattctcatagtc

SEQ ID NO: 20107 - DNA, 19 bp, Homo sapiens
  source 1..19: mol_type = genomic DNA
ggttcgattctcatagtcc

SEQ ID NO: 20108 - DNA, 20 bp, Homo sapiens
  source 1..20: mol_type = genomic DNA
ggttcgattctcatagtcct

SEQ ID NO: 20109 - DNA, 21 bp, Homo sapiens
  source 1..21: mol_type = genomic DNA
ggttcgattctcatagtccta

SEQ ID NO: 20110 - DNA, 22 bp, Homo sapiens
  source 1..22: mol_type = genomic DNA
ggttcgattctcatagtcctag

SEQ ID NO: 20111 - DNA, 23 bp, Homo sapiens
  source 1..23: mol_type = genomic DNA
ggttcgattctcatagtcctagc

SEQ ID NO: 20112 - DNA, 24 bp, Homo sapiens
  source 1..24: mol_type = genomic DNA
ggttcgattctcatagtcctagcc

SEQ ID NO: 20113 - DNA, 25 bp, Homo sapiens
  source 1..25: mol_type = genomic DNA
ggttcgattctcatagtcctagcca

SEQ ID NO: 20114 - DNA, 18 bp, Homo sapiens
  source 1..18: mol_type = genomic DNA
ggttcttgtagttgaaat

SEQ ID NO: 20115 - DNA, 26 bp, Homo sapiens
  source 1..26: mol_type = genomic DNA
ggttgcgtgttcaagtcacgtcgggg

SEQ ID NO: 20116 - DNA, 28 bp, Homo sapiens
  source 1..28: mol_type = genomic DNA
ggttgcgtgttcaagtcacgtcggggtc

SEQ ID NO: 20117 - DNA, 18 bp, Homo sapiens
  source 1..18: mol_type = genomic DNA
ggttggtggttcgagccc

SEQ ID NO: 20118 - DNA, 31 bp, Homo sapiens
  source 1..31: mol_type = genomic DNA
ggttggtggttcgagcccacccagggacgcc

SEQ ID NO: 20119 - DNA, 32 bp, Homo sapiens
  source 1..32: mol_type = genomic DNA
ggttggtggttcgagcccacccagggacgcca

SEQ ID NO: 20120 - DNA, 16 bp, Homo sapiens
  source 1..16: mol_type = genomic DNA
ggttgtagtccgtgcg

SEQ ID NO: 20121 - DNA, 17 bp, Homo sapiens
  source 1..17: mol_type = genomic DNA
ggttgtagtccgtgcga

SEQ ID NO: 20122 - DNA, 18 bp, Homo sapiens
  source 1..18: mol_type = genomic DNA
ggttgtagtccgtgcgag

SEQ ID NO: 20123 - DNA, 19 bp, Homo sapiens
  source 1..19: mol_type = genomic DNA
ggttgtagtccgtgcgaga

SEQ ID NO: 20124 - DNA, 20 bp, Homo sapiens
  source 1..20: mol_type = genomic DNA
ggttgtagtccgtgcgagaa

SEQ ID NO: 20125 - DNA, 21 bp, Homo sapiens
  source 1..21: mol_type = genomic DNA
ggttgtagtccgtgcgagaat

SEQ ID NO: 20126 - DNA, 22 bp, Homo sapiens
  source 1..22: mol_type = genomic DNA
ggttgtagtccgtgcgagaata

SEQ ID NO: 20127 - DNA, 23 bp, Homo sapiens
  source 1..23: mol_type = genomic DNA
ggttgtagtccgtgcgagaatac

SEQ ID NO: 20128 - DNA, 24 bp, Homo sapiens
  source 1..24: mol_type = genomic DNA
ggttgtagtccgtgcgagaatacc

SEQ ID NO: 20129 - DNA, 25 bp, Homo sapiens
  source 1..25: mol_type = genomic DNA
ggttgtagtccgtgcgagaatacca

SEQ ID NO: 20130 - DNA, 16 bp, Homo sapiens
  source 1..16: mol_type = genomic DNA
ggttgtgagttcgagc

SEQ ID NO: 20131 - DNA, 20 bp, Homo sapiens
  source 1..20: mol_type = genomic DNA
ggttgtgagttcgagcctca

SEQ ID NO: 20132 - DNA, 31 bp, Homo sapiens
  source 1..31: mol_type = genomic DNA
ggttgtgagttcgagcctcacctggagcacc

SEQ ID NO: 20133 - DNA, 17 bp, Homo sapiens
  source 1..17: mol_type = genomic DNA
ggttgtgagttcgatcc

SEQ ID NO: 20134 - DNA, 31 bp, Homo sapiens
  source 1..31: mol_type = genomic DNA
ggttgtgggttcgaatcccaccagagtcgcc

SEQ ID NO: 20135 - DNA, 32 bp, Homo sapiens
  source 1..32: mol_type = genomic DNA
ggttgtgggttcgaatcccaccagagtcgcca

SEQ ID NO: 20136 - DNA, 18 bp, Homo sapiens
  source 1..18: mol_type = genomic DNA
ggtttaagtcccattggt

SEQ ID NO: 20137 - DNA, 19 bp, Homo sapiens
  source 1..19: mol_type = genomic DNA
ggtttaagtcccattggtc

SEQ ID NO: 20138 - DNA, 20 bp, Homo sapiens
  source 1..20: mol_type = genomic DNA
ggtttaagtcccattggtct

SEQ ID NO: 20139 - DNA, 21 bp, Homo sapiens
  source 1..21: mol_type = genomic DNA
ggtttaagtcccattggtcta

SEQ ID NO: 20140 - DNA, 23 bp, Homo sapiens
  source 1..23: mol_type = genomic DNA
ggtttaagtcccattggtctagc

SEQ ID NO: 20141 - DNA, 24 bp, Homo sapiens
  source 1..24: mol_type = genomic DNA
ggtttaagtcccattggtctagcc

SEQ ID NO: 20142 - DNA, 25 bp, Homo sapiens
  source 1..25: mol_type = genomic DNA
ggtttaagtcccattggtctagcca

SEQ ID NO: 20143 - DNA, 17 bp, Homo sapiens
  source 1..17: mol_type = genomic DNA
ggtttccccgcgcaggt

SEQ ID NO: 20144 - DNA, 18 bp, Homo sapiens
  source 1..18: mol_type = genomic DNA
ggtttccccgcgcaggtt

SEQ ID NO: 20145 - DNA, 33 bp, Homo sapiens
  source 1..33: mol_type = genomic DNA
ggtttccgtagtgtagcggttatcacattcgcc

SEQ ID NO: 20146 - DNA, 34 bp, Homo sapiens
  source 1..34: mol_type = genomic DNA
ggtttccgtagtgtagcggttatcacattcgcct

SEQ ID NO: 20147 - DNA, 19 bp, Homo sapiens
  source 1..19: mol_type = genomic DNA
ggtttccgtagtgtagtgg

SEQ ID NO: 20148 - DNA, 33 bp, Homo sapiens
  source 1..33: mol_type = genomic DNA
ggtttccgtagtgtagtggtcatcacgttcgcc

SEQ ID NO: 20149 - DNA, 34 bp, Homo sapiens
  source 1..34: mol_type = genomic DNA
ggtttccgtagtgtagtggtcatcacgttcgcct

SEQ ID NO: 20150 - DNA, 24 bp, Homo sapiens
  source 1..24: mol_type = genomic DNA
ggtttccgtagtgtagtggttatc

SEQ ID NO: 20151 - DNA, 30 bp, Homo sapiens
  source 1..30: mol_type = genomic DNA
ggtttccgtagtgtagtggttatcacgttc

SEQ ID NO: 20152 - DNA, 32 bp, Homo sapiens
  source 1..32: mol_type = genomic DNA
ggtttccgtagtgtagtggttatcacgttcgc

SEQ ID NO: 20153 - DNA, 33 bp, Homo sapiens
  source 1..33: mol_type = genomic DNA
ggtttccgtagtgtagtggttatcacgttcgcc

SEQ ID NO: 20154 - DNA, 34 bp, Homo sapiens
  source 1..34: mol_type = genomic DNA
ggtttccgtagtgtagtggttatcacgttcgcct

SEQ ID NO: 20155 - DNA, 35 bp, Homo sapiens
  source 1..35: mol_type = genomic DNA
ggtttccgtagtgtagtggttatcacgttcgcctc

SEQ ID NO: 20156 - DNA, 44 bp, Homo sapiens
  source 1..44: mol_type = genomic DNA
ggtttccgtagtgtagtggttatcacgttcgcctcacacgcgaa

SEQ ID NO: 20157 - DNA, 19 bp, Homo sapiens
  source 1..19: mol_type = genomic DNA
ggttttcacccaggcggcc

SEQ ID NO: 20158 - DNA, 38 bp, Homo sapiens
  source 1..38: mol_type = genomic DNA
ggttttcacccaggcggcccgggttcgactcccggtgt

SEQ ID NO: 20159 - DNA, 39 bp, Homo sapiens
  source 1..39: mol_type = genomic DNA
ggttttcacccaggcggcccgggttcgactcccggtgtg

SEQ ID NO: 20160 - DNA, 40 bp, Homo sapiens
  source 1..40: mol_type = genomic DNA
ggttttcacccaggcggcccgggttcgactcccggtgtgg

SEQ ID NO: 20161 - DNA, 41 bp, Homo sapiens
  source 1..41: mol_type = genomic DNA
ggttttcacccaggcggcccgggttcgactcccggtgtggg

SEQ ID NO: 20162 - DNA, 42 bp, Homo sapiens
  source 1..42: mol_type = genomic DNA
ggttttcacccaggcggcccgggttcgactcccggtgtggga

SEQ ID NO: 20163 - DNA, 43 bp, Homo sapiens
  source 1..43: mol_type = genomic DNA
ggttttcacccaggcggcccgggttcgactcccggtgtgggaa

SEQ ID NO: 20164 - DNA, 44 bp, Homo sapiens
  source 1..44: mol_type = genomic DNA
ggttttcacccaggcggcccgggttcgactcccggtgtgggaac

SEQ ID NO: 20165 - DNA, 45 bp, Homo sapiens
  source 1..45: mol_type = genomic DNA
ggttttcacccaggcggcccgggttcgactcccggtgtgggaacc

SEQ ID NO: 20166 - DNA, 46 bp, Homo sapiens
  source 1..46: mol_type = genomic DNA
ggttttcacccaggcggcccgggttcgactcccggtgtgggaacca

SEQ ID NO: 20167 - DNA, 40 bp, Homo sapiens
  source 1..40: mol_type = genomic DNA
ggttttcacccaggtggcccgggttcgactcccggtatgg

SEQ ID NO: 20168 - DNA, 17 bp, Homo sapiens
  source 1..17: mol_type = genomic DNA
ggttttgcagtccttac

SEQ ID NO: 20169 - DNA, 18 bp, Homo sapiens
  source 1..18: mol_type = genomic DNA
ggttttgcagtccttacc

SEQ ID NO: 20170 - DNA, 19 bp, Homo sapiens
  source 1..19: mol_type = genomic DNA
ggttttgcagtccttacca

SEQ ID NO: 20171 - DNA, 18 bp, Homo sapiens
  source 1..18: mol_type = genomic DNA
ggtttttcatatcattgg

SEQ ID NO: 20172 - DNA, 19 bp, Homo sapiens
  source 1..19: mol_type = genomic DNA
ggtttttcatatcattggt

SEQ ID NO: 20173 - DNA, 20 bp, Homo sapiens
  source 1..20: mol_type = genomic DNA
ggtttttcatatcattggtc

SEQ ID NO: 20174 - DNA, 21 bp, Homo sapiens
  source 1..21: mol_type = genomic DNA
ggtttttcatatcattggtcg

SEQ ID NO: 20175 - DNA, 22 bp, Homo sapiens
  source 1..22: mol_type = genomic DNA
ggtttttcatatcattggtcgt

SEQ ID NO: 20176 - DNA, 23 bp, Homo sapiens
  source 1..23: mol_type = genomic DNA
ggtttttcatatcattggtcgtg

SEQ ID NO: 20177 - DNA, 24 bp, Homo sapiens
  source 1..24: mol_type = genomic DNA
ggtttttcatatcattggtcgtgg

SEQ ID NO: 20178 - DNA, 25 bp, Homo sapiens
  source 1..25: mol_type = genomic DNA
ggtttttcatatcattggtcgtggt

SEQ ID NO: 20179 - DNA, 26 bp, Homo sapiens
  source 1..26: mol_type = genomic DNA
ggtttttcatatcattggtcgtggtt

SEQ ID NO: 20180 - DNA, 27 bp, Homo sapiens
  source 1..27: mol_type = genomic DNA
ggtttttcatatcattggtcgtggttg

SEQ ID NO: 20181 - DNA, 28 bp, Homo sapiens
  source 1..28: mol_type = genomic DNA
ggtttttcatatcattggtcgtggttgt

SEQ ID NO: 20182 - DNA, 29 bp, Homo sapiens
  source 1..29: mol_type = genomic DNA
ggtttttcatatcattggtcgtggttgta

SEQ ID NO: 20183 - DNA, 30 bp, Homo sapiens
  source 1..30: mol_type = genomic DNA
ggtttttcatatcattggtcgtggttgtag

SEQ ID NO: 20184 - DNA, 31 bp, Homo sapiens
  source 1..31: mol_type = genomic DNA
ggtttttcatatcattggtcgtggttgtagt

SEQ ID NO: 20185 - DNA, 32 bp, Homo sapiens
  source 1..32: mol_type = genomic DNA
ggtttttcatatcattggtcgtggttgtagtc

SEQ ID NO: 20186 - DNA, 33 bp, Homo sapiens
  source 1..33: mol_type = genomic DNA
ggtttttcatatcattggtcgtggttgtagtcc

SEQ ID NO: 20187 - DNA, 34 bp, Homo sapiens
  source 1..34: mol_type = genomic DNA
ggtttttcatatcattggtcgtggttgtagtccg

SEQ ID NO: 20188 - DNA, 35 bp, Homo sapiens
  source 1..35: mol_type = genomic DNA
ggtttttcatatcattggtcgtggttgtagtccgt

SEQ ID NO: 20189 - DNA, 36 bp, Homo sapiens
  source 1..36: mol_type = genomic DNA
ggtttttcatatcattggtcgtggttgtagtccgtg

SEQ ID NO: 20190 - DNA, 37 bp, Homo sapiens
  source 1..37: mol_type = genomic DNA
ggtttttcatatcattggtcgtggttgtagtccgtgc

SEQ ID NO: 20191 - DNA, 38 bp, Homo sapiens
  source 1..38: mol_type = genomic DNA
ggtttttcatatcattggtcgtggttgtagtccgtgcg

SEQ ID NO: 20192 - DNA, 39 bp, Homo sapiens
  source 1..39: mol_type = genomic DNA
ggtttttcatatcattggtcgtggttgtagtccgtgcga

SEQ ID NO: 20193 - DNA, 40 bp, Homo sapiens
  source 1..40: mol_type = genomic DNA
ggtttttcatatcattggtcgtggttgtagtccgtgcgag

SEQ ID NO: 20194 - DNA, 41 bp, Homo sapiens
  source 1..41: mol_type = genomic DNA
ggtttttcatatcattggtcgtggttgtagtccgtgcgaga

SEQ ID NO: 20195 - DNA, 42 bp, Homo sapiens
  source 1..42: mol_type = genomic DNA
ggtttttcatatcattggtcgtggttgtagtccgtgcgagaa

SEQ ID NO: 20196 - DNA, 43 bp, Homo sapiens
  source 1..43: mol_type = genomic DNA
ggtttttcatatcattggtcgtggttgtagtccgtgcgagaat

SEQ ID NO: 20197 - DNA, 44 bp, Homo sapiens
  source 1..44: mol_type = genomic DNA
ggtttttcatatcattggtcgtggttgtagtccgtgcgagaata

SEQ ID NO: 20198 - DNA, 45 bp, Homo sapiens
  source 1..45: mol_type = genomic DNA
ggtttttcatatcattggtcgtggttgtagtccgtgcgagaatac

SEQ ID NO: 20199 - DNA, 46 bp, Homo sapiens
  source 1..46: mol_type = genomic DNA
ggtttttcatatcattggtcgtggttgtagtccgtgcgagaatacc

SEQ ID NO: 20200 - DNA, 47 bp, Homo sapiens
  source 1..47: mol_type = genomic DNA
ggtttttcatatcattggtcgtggttgtagtccgtgcgagaatacca

SEQ ID NO: 20201 - DNA, 18 bp, Homo sapiens
  source 1..18: mol_type = genomic DNA
gtaaaatggctgagtgaa

SEQ ID NO: 20202 - DNA, 27 bp, Homo sapiens
  source 1..27: mol_type = genomic DNA
gtaaaatggctgagtgaagcattggac

SEQ ID NO: 20203 - DNA, 28 bp, Homo sapiens
  source 1..28: mol_type = genomic DNA
gtaaaatggctgagtgaagcattggact

SEQ ID NO: 20204 - DNA, 30 bp, Homo sapiens
  source 1..30: mol_type = genomic DNA
gtaaaatggctgagtgaagcattggactgt

SEQ ID NO: 20205 - DNA, 31 bp, Homo sapiens
  source 1..31: mol_type = genomic DNA
gtaaaatggctgagtgaagcattggactgta

SEQ ID NO: 20206 - DNA, 33 bp, Homo sapiens
  source 1..33: mol_type = genomic DNA
gtaaacaggagatcctgggttcgaatcccagcg

SEQ ID NO: 20207 - DNA, 37 bp, Homo sapiens
  source 1..37: mol_type = genomic DNA
gtaaacaggagatcctgggttcgaatcccagcggggc

SEQ ID NO: 20208 - DNA, 38 bp, Homo sapiens
  source 1..38: mol_type = genomic DNA
gtaaacaggagatcctgggttcgaatcccagcggggcc

SEQ ID NO: 20209 - DNA, 39 bp, Homo sapiens
  source 1..39: mol_type = genomic DNA
gtaaacaggagatcctgggttcgaatcccagcggggcct

SEQ ID NO: 20210 - DNA, 40 bp, Homo sapiens
  source 1..40: mol_type = genomic DNA
gtaaacaggagatcctgggttcgaatcccagcggggcctc

SEQ ID NO: 20211 - DNA, 41 bp, Homo sapiens
  source 1..41: mol_type = genomic DNA
gtaaacaggagatcctgggttcgaatcccagcggggcctcc

SEQ ID NO: 20212 - DNA, 36 bp, Homo sapiens
  source 1..36: mol_type = genomic DNA
gtaaacaggagatcctgggttcgaatcccagcggtg

SEQ ID NO: 20213 - DNA, 37 bp, Homo sapiens
  source 1..37: mol_type = genomic DNA
gtaaacaggagatcctgggttcgaatcccagcggtgc

SEQ ID NO: 20214 - DNA, 39 bp, Homo sapiens
  source 1..39: mol_type = genomic DNA
gtaaacaggagatcctgggttcgaatcccagcggtgcct

SEQ ID NO: 20215 - DNA, 40 bp, Homo sapiens
  source 1..40: mol_type = genomic DNA
gtaaacaggagatcctgggttcgaatcccagcggtgcctc

SEQ ID NO: 20216 - DNA, 41 bp, Homo sapiens
  source 1..41: mol_type = genomic DNA
gtaaacaggagatcctgggttcgaatcccagcggtgcctcc

SEQ ID NO: 20217 - DNA, 16 bp, Homo sapiens
  source 1..16: mol_type = genomic DNA
gtaaaccaggggtcgc

SEQ ID NO: 20218 - DNA, 18 bp, Homo sapiens
  source 1..18: mol_type = genomic DNA
gtaaaccaggggtcgcga

SEQ ID NO: 20219 - DNA, 20 bp, Homo sapiens
  source 1..20: mol_type = genomic DNA
gtaaaccaggggtcgcgagt

SEQ ID NO: 20220 - DNA, 21 bp, Homo sapiens
  source 1..21: mol_type = genomic DNA
gtaaaccaggggtcgcgagtt

SEQ ID NO: 20221 - DNA, 22 bp, Homo sapiens
  source 1..22: mol_type = genomic DNA
gtaaaccaggggtcgcgagttc

SEQ ID NO: 20222 - DNA, 23 bp, Homo sapiens
  source 1..23: mol_type = genomic DNA
gtaaaccaggggtcgcgagttca

SEQ ID NO: 20223 - DNA, 32 bp, Homo sapiens
  source 1..32: mol_type = genomic DNA
gtaaaccaggggtcgcgagttcaaatctcgct

SEQ ID NO: 20224 - DNA, 34 bp, Homo sapiens
  source 1..34: mol_type = genomic DNA
gtaaaccaggggtcgcgagttcaaatctcgctgg

SEQ ID NO: 20225 - DNA, 20 bp, Homo sapiens
  source 1..20: mol_type = genomic DNA
gtaaaccgaagatcacgggt

SEQ ID NO: 20226 - DNA, 40 bp, Homo sapiens
  source 1..40: mol_type = genomic DNA
gtaaaccgaagatcacgggttcgaaccccgtccgtgcctc

SEQ ID NO: 20227 - DNA, 20 bp, Homo sapiens
  source 1..20: mol_type = genomic DNA
gtaaaccgaagatcgcgggt

SEQ ID NO: 20228 - DNA, 21 bp, Homo sapiens
  source 1..21: mol_type = genomic DNA
gtaaaccgaagatcgcgggtt

SEQ ID NO: 20229 - DNA, 40 bp, Homo sapiens
  source 1..40: mol_type = genomic DNA
gtaaaccgaagatcgcgggttcgaaccccgtccgtgcctc

SEQ ID NO: 20230 - DNA, 41 bp, Homo sapiens
  source 1..41: mol_type = genomic DNA
gtaaaccgaagatcgcgggttcgaaccccgtccgtgcctcc

SEQ ID NO: 20231 - DNA, 16 bp, Homo sapiens
  source 1..16: mol_type = genomic DNA
gtaaaccggagatgaa

SEQ ID NO: 20232 - DNA, 17 bp, Homo sapiens
  source 1..17: mol_type = genomic DNA
gtaaaccggagatgaaa

SEQ ID NO: 20233 - DNA, 18 bp, Homo sapiens
  source 1..18: mol_type = genomic DNA
gtaaaccggagatgaaaa

SEQ ID NO: 20234 - DNA, 19 bp, Homo sapiens
  source 1..19: mol_type = genomic DNA
gtaaaccggagatgaaaac

SEQ ID NO: 20235 - DNA, 20 bp, Homo sapiens
  source 1..20: mol_type = genomic DNA
gtaaaccggagatgaaaacc

SEQ ID NO: 20236 - DNA, 21 bp, Homo sapiens
  source 1..21: mol_type = genomic DNA
gtaaaccggagatgaaaacct

SEQ ID NO: 20237 - DNA, 22 bp, Homo sapiens
  source 1..22: mol_type = genomic DNA
gtaaaccggagatgaaaacctt

SEQ ID NO: 20238 - DNA, 30 bp, Homo sapiens
  source 1..30: mol_type = genomic DNA
gtaaaccggagatgaaaacctttttccaag

SEQ ID NO: 20239 - DNA, 31 bp, Homo sapiens
  source 1..31: mol_type = genomic DNA
gtaaaccggagatgaaaacctttttccaagg

SEQ ID NO: 20240 - DNA, 33 bp, Homo sapiens
  source 1..33: mol_type = genomic DNA
gtaaaccggagatgaaaacctttttccaaggac

SEQ ID NO: 20241 - DNA, 34 bp, Homo sapiens
  source 1..34: mol_type = genomic DNA
gtaaaccggagatgaaaacctttttccaaggaca

SEQ ID NO: 20242 - DNA, 35 bp, Homo sapiens
  source 1..35: mol_type = genomic DNA
gtaaaccggagatgaaaacctttttccaaggacac

SEQ ID NO: 20243 - DNA, 36 bp, Homo sapiens
  source 1..36: mol_type = genomic DNA
gtaaaccggagatgaaaacctttttccaaggacacc

SEQ ID NO: 20244 - DNA, 37 bp, Homo sapiens
  source 1..37: mol_type = genomic DNA
gtaaaccggagatgaaaacctttttccaaggacacca

SEQ ID NO: 20245 - DNA, 16 bp, Homo sapiens
  source 1..16: mol_type = genomic DNA
gtaaataataggagct

SEQ ID NO: 20246 - DNA, 17 bp, Homo sapiens
  source 1..17: mol_type = genomic DNA
gtaaataataggagctt

SEQ ID NO: 20247 - DNA, 18 bp, Homo sapiens
  source 1..18: mol_type = genomic DNA
gtaaataataggagctta

SEQ ID NO: 20248 - DNA, 19 bp, Homo sapiens
  source 1..19: mol_type = genomic DNA
gtaaataataggagcttaa

SEQ ID NO: 20249 - DNA, 20 bp, Homo sapiens
  source 1..20: mol_type = genomic DNA
gtaaataataggagcttaaa

SEQ ID NO: 20250 - DNA, 21 bp, Homo sapiens
  source 1..21: mol_type = genomic DNA
gtaaataataggagcttaaac

SEQ ID NO: 20251 - DNA, 22 bp, Homo sapiens
  source 1..22: mol_type = genomic DNA
gtaaataataggagcttaaacc

SEQ ID NO: 20252 - DNA, 23 bp, Homo sapiens
  source 1..23: mol_type = genomic DNA
gtaaataataggagcttaaaccc

SEQ ID NO: 20253 - DNA, 24 bp, Homo sapiens
  source 1..24: mol_type = genomic DNA
gtaaataataggagcttaaacccc

SEQ ID NO: 20254 - DNA, 25 bp, Homo sapiens
  source 1..25: mol_type = genomic DNA
gtaaataataggagcttaaaccccc

SEQ ID NO: 20255 - DNA, 26 bp, Homo sapiens
  source 1..26: mol_type = genomic DNA
gtaaataataggagcttaaaccccct

SEQ ID NO: 20256 - DNA, 28 bp, Homo sapiens
  source 1..28: mol_type = genomic DNA
gtaaataataggagcttaaaccccctta

SEQ ID NO: 20257 - DNA, 29 bp, Homo sapiens
  source 1..29: mol_type = genomic DNA
gtaaataataggagcttaaacccccttat

SEQ ID NO: 20258 - DNA, 34 bp, Homo sapiens
  source 1..34: mol_type = genomic DNA
gtaaataataggagcttaaacccccttatttcta

SEQ ID NO: 20259 - DNA, 36 bp, Homo sapiens
  source 1..36: mol_type = genomic DNA
gtaaataataggagcttaaacccccttatttctacc

SEQ ID NO: 20260 - DNA, 37 bp, Homo sapiens
  source 1..37: mol_type = genomic DNA
gtaaataataggagcttaaacccccttatttctacca

SEQ ID NO: 20261 - DNA, 32 bp, Homo sapiens
  source 1..32: mol_type = genomic DNA
gtaaatatagtttaaccaaaacatcagattgt

SEQ ID NO: 20262 - DNA, 33 bp, Homo sapiens
  source 1..33: mol_type = genomic DNA
gtaaatatagtttaaccaaaacatcagattgtg

SEQ ID NO: 20263 - DNA, 34 bp, Homo sapiens
  source 1..34: mol_type = genomic DNA
gtaaatatagtttaaccaaaacatcagattgtga

SEQ ID NO: 20264 - DNA, 36 bp, Homo sapiens
  source 1..36: mol_type = genomic DNA
gtaaatatagtttaaccaaaacatcagattgtgaat

SEQ ID NO: 20265 - DNA, 37 bp, Homo sapiens
  source 1..37: mol_type = genomic DNA
gtaaatatagtttaaccaaaacatcagattgtgaatc

SEQ ID NO: 20266 - DNA, 42 bp, Homo sapiens
  source 1..42: mol_type = genomic DNA
gtaaatatagtttaaccaaaacatcagattgtgaatctgaca

SEQ ID NO: 20267 - DNA, 39 bp, Homo sapiens
  source 1..39: mol_type = genomic DNA
gtaaatctaaagacaggggttaggcctctttttaccacc

SEQ ID NO: 20268 - DNA, 40 bp, Homo sapiens
  source 1..40: mol_type = genomic DNA
gtaaatctaaagacaggggttaggcctctttttaccacca

SEQ ID NO: 20269 - DNA, 16 bp, Homo sapiens
  source 1..16: mol_type = genomic DNA
gtaaggtcagctaaat

SEQ ID NO: 20270 - DNA, 17 bp, Homo sapiens
  source 1..17: mol_type = genomic DNA
gtaaggtcagctaaata

SEQ ID NO: 20271 - DNA, 18 bp, Homo sapiens
  source 1..18: mol_type = genomic DNA
gtaaggtcagctaaataa

SEQ ID NO: 20272 - DNA, 19 bp, Homo sapiens
  source 1..19: mol_type = genomic DNA
gtaaggtcagctaaataag

SEQ ID NO: 20273 - DNA, 20 bp, Homo sapiens
  source 1..20: mol_type = genomic DNA
gtaaggtcagctaaataagc

SEQ ID NO: 20274 - DNA, 21 bp, Homo sapiens
  source 1..21: mol_type = genomic DNA
gtaaggtcagctaaataagct

SEQ ID NO: 20275 - DNA, 23 bp, Homo sapiens
  source 1..23: mol_type = genomic DNA
gtaaggtcagctaaataagctat

SEQ ID NO: 20276 - DNA, 27 bp, Homo sapiens
  source 1..27: mol_type = genomic DNA
gtaaggtcagctaaataagctatcggg

SEQ ID NO: 20277 - DNA, 28 bp, Homo sapiens
  source 1..28: mol_type = genomic DNA
gtaaggtcagctaaataagctatcgggc

SEQ ID NO: 20278 - DNA, 29 bp, Homo sapiens
  source 1..29: mol_type = genomic DNA
gtaaggtcagctaaataagctatcgggcc

SEQ ID NO: 20279 - DNA, 30 bp, Homo sapiens
  source 1..30: mol_type = genomic DNA
gtaaggtcagctaaataagctatcgggccc

SEQ ID NO: 20280 - DNA, 31 bp, Homo sapiens
  source 1..31: mol_type = genomic DNA
gtaaggtcagctaaataagctatcgggccca

SEQ ID NO: 20281 - DNA, 32 bp, Homo sapiens
  source 1..32: mol_type = genomic DNA
gtaaggtcagctaaataagctatcgggcccat

SEQ ID NO: 20282 - DNA, 33 bp, Homo sapiens
  source 1..33: mol_type = genomic DNA
gtaaggtcagctaaataagctatcgggcccata

SEQ ID NO: 20283 - DNA, 35 bp, Homo sapiens
  source 1..35: mol_type = genomic DNA
gtaaggtcagctaaataagctatcgggcccatacc

SEQ ID NO: 20284 - DNA, 39 bp, Homo sapiens
  source 1..39: mol_type = genomic DNA
gtaaggtcagctaaataagctatcgggcccataccccga

SEQ ID NO: 20285 - DNA, 41 bp, Homo sapiens
  source 1..41: mol_type = genomic DNA
gtaaggtcagctaaataagctatcgggcccataccccgaaa

SEQ ID NO: 20286 - DNA, 24 bp, Homo sapiens
  source 1..24: mol_type = genomic DNA
gtaagttgcaatacttaatttctg

SEQ ID NO: 20287 - DNA, 25 bp, Homo sapiens
  source 1..25: mol_type = genomic DNA
gtaagttgcaatacttaatttctgc

SEQ ID NO: 20288 - DNA, 26 bp, Homo sapiens
  source 1..26: mol_type = genomic DNA
gtaagttgcaatacttaatttctgcc

SEQ ID NO: 20289 - DNA, 27 bp, Homo sapiens
  source 1..27: mol_type = genomic DNA
gtaagttgcaatacttaatttctgcca

SEQ ID NO: 20290 - DNA, 19 bp, Homo sapiens
  source 1..19: mol_type = genomic DNA
gtaatcgcataaaacttaa

SEQ ID NO: 20291 - DNA, 22 bp, Homo sapiens
  source 1..22: mol_type = genomic DNA
gtaatcgcataaaacttaaaac

SEQ ID NO: 20292 - DNA, 23 bp, Homo sapiens
  source 1..23: mol_type = genomic DNA
gtaatcgcataaaacttaaaact

SEQ ID NO: 20293 - DNA, 24 bp, Homo sapiens
  source 1..24: mol_type = genomic DNA
gtaatcgcataaaacttaaaactt

SEQ ID NO: 20294 - DNA, 25 bp, Homo sapiens
  source 1..25: mol_type = genomic DNA
gtaatcgcataaaacttaaaacttt

SEQ ID NO: 20295 - DNA, 35 bp, Homo sapiens
  source 1..35: mol_type = genomic DNA
gtaatcgcataaaacttaaaactttacagtcagag

SEQ ID NO: 20296 - DNA, 39 bp, Homo sapiens
  source 1..39: mol_type = genomic DNA
gtaatcgcataaaacttaaaactttacagtcagaggttc

SEQ ID NO: 20297 - DNA, 18 bp, Homo sapiens
  source 1..18: mol_type = genomic DNA
gtaatggtaagcactctg

SEQ ID NO: 20298 - DNA, 19 bp, Homo sapiens
  source 1..19: mol_type = genomic DNA
gtaatggtaagcactctgg

SEQ ID NO: 20299 - DNA, 20 bp, Homo sapiens
  source 1..20: mol_type = genomic DNA
gtaatggtaagcactctgga

SEQ ID NO: 20300 - DNA, 25 bp, Homo sapiens
  source 1..25: mol_type = genomic DNA
gtaatggtaagcactctggactctg

SEQ ID NO: 20301 - DNA, 34 bp, Homo sapiens
  source 1..34: mol_type = genomic DNA
gtaatggtaagcactctggactctgaatccagcg

SEQ ID NO: 20302 - DNA, 16 bp, Homo sapiens
  source 1..16: mol_type = genomic DNA
gtaatggtgagcactc

SEQ ID NO: 20303 - DNA, 17 bp, Homo sapiens
  source 1..17: mol_type = genomic DNA
gtaatggtgagcactct

SEQ ID NO: 20304 - DNA, 18 bp, Homo sapiens
  source 1..18: mol_type = genomic DNA
gtaatggtgagcactctg

SEQ ID NO: 20305 - DNA, 19 bp, Homo sapiens
  source 1..19: mol_type = genomic DNA
gtaatggtgagcactctgg

SEQ ID NO: 20306 - DNA, 20 bp, Homo sapiens
  source 1..20: mol_type = genomic DNA
gtaatggtgagcactctgga

SEQ ID NO: 20307 - DNA, 21 bp, Homo sapiens
  source 1..21: mol_type = genomic DNA
gtaatggtgagcactctggac

SEQ ID NO: 20308 - DNA, 22 bp, Homo sapiens
  source 1..22: mol_type = genomic DNA
gtaatggtgagcactctggact

SEQ ID NO: 20309 - DNA, 23 bp, Homo sapiens
  source 1..23: mol_type = genomic DNA
gtaatggtgagcactctggactc

SEQ ID NO: 20310 - DNA, 24 bp, Homo sapiens
  source 1..24: mol_type = genomic DNA
gtaatggtgagcactctggactct

SEQ ID NO: 20311 - DNA, 25 bp, Homo sapiens
  source 1..25: mol_type = genomic DNA
gtaatggtgagcactctggactctg

SEQ ID NO: 20312 - DNA, 29 bp, Homo sapiens
  source 1..29: mol_type = genomic DNA
gtaatggtgagcactctggactctgaatc

SEQ ID NO: 20313 - DNA, 30 bp, Homo sapiens
  source 1..30: mol_type = genomic DNA
gtaatggtgagcactctggactctgaatcc

SEQ ID NO: 20314 - DNA, 34 bp, Homo sapiens
  source 1..34: mol_type = genomic DNA
gtaatggtgagcactctggactctgaatccagcg

SEQ ID NO: 20315 - DNA, 16 bp, Homo sapiens
  source 1..16: mol_type = genomic DNA
gtaatggttagcactc

SEQ ID NO: 20316 - DNA, 17 bp, Homo sapiens
  source 1..17: mol_type = genomic DNA
gtaatggttagcactct

SEQ ID NO: 20317 - DNA, 18 bp, Homo sapiens
  source 1..18: mol_type = genomic DNA
gtaatggttagcactctg

SEQ ID NO: 20318 - DNA, 19 bp, Homo sapiens
  source 1..19: mol_type = genomic DNA
gtaatggttagcactctgg

SEQ ID NO: 20319 - DNA, 20 bp, Homo sapiens
  source 1..20: mol_type = genomic DNA
gtaatggttagcactctgga

SEQ ID NO: 20320 - DNA, 21 bp, Homo sapiens
  source 1..21: mol_type = genomic DNA
gtaatggttagcactctggac

SEQ ID NO: 20321 - DNA, 22 bp, Homo sapiens
  source 1..22: mol_type = genomic DNA
gtaatggttagcactctggact

SEQ ID NO: 20322 - DNA, 23 bp, Homo sapiens
  source 1..23: mol_type = genomic DNA
gtaatggttagcactctggactc

SEQ ID NO: 20323 - DNA, 24 bp, Homo sapiens
  source 1..24: mol_type = genomic DNA
gtaatggttagcactctggactct

SEQ ID NO: 20324 - DNA, 25 bp, Homo sapiens
  source 1..25: mol_type = genomic DNA
gtaatggttagcactctggactctg

SEQ ID NO: 20325 - DNA, 26 bp, Homo sapiens
  source 1..26: mol_type = genomic DNA
gtaatggttagcactctggactctga

SEQ ID NO: 20326 - DNA, 27 bp, Homo sapiens
  source 1..27: mol_type = genomic DNA
gtaatggttagcactctggactctgaa

SEQ ID NO: 20327 - DNA, 29 bp, Homo sapiens
  source 1..29: mol_type = genomic DNA
gtaatggttagcactctggactctgaatc

SEQ ID NO: 20328 - DNA, 30 bp, Homo sapiens
  source 1..30: mol_type = genomic DNA
gtaatggttagcactctggactctgaatcc

SEQ ID NO: 20329 - DNA, 34 bp, Homo sapiens
  source 1..34: mol_type = genomic DNA
gtaatggttagcactctggactctgaatccagcg

SEQ ID NO: 20330 - DNA, 41 bp, Homo sapiens
  source 1..41: mol_type = genomic DNA
gtaatggttagcactctggactctgaatccagcgatccgag

SEQ ID NO: 20331 - DNA, 42 bp, Homo sapiens
  source 1..42: mol_type = genomic DNA
gtaatggttagcactctggactctgaatccagcgatccgagt

SEQ ID NO: 20332 - DNA, 43 bp, Homo sapiens
  source 1..43: mol_type = genomic DNA
gtaatggttagcactctggactctgaatccagcgatccgagtt

SEQ ID NO: 20333 - DNA, 23 bp, Homo sapiens
  source 1..23: mol_type = genomic DNA
gtaatggttagcactctggactt

SEQ ID NO: 20334 - DNA, 25 bp, Homo sapiens
  source 1..25: mol_type = genomic DNA
gtaatggttagcactctggactttg

SEQ ID NO: 20335 - DNA, 20 bp, Homo sapiens
  source 1..20: mol_type = genomic DNA
gtaatggttagcactctggg

SEQ ID NO: 20336 - DNA, 22 bp, Homo sapiens
  source 1..22: mol_type = genomic DNA
gtaatggttagcactctgggct

SEQ ID NO: 20337 - DNA, 32 bp, Homo sapiens
  source 1..32: mol_type = genomic DNA
gtaccgttaacttccaattaactagttttgac

SEQ ID NO: 20338 - DNA, 33 bp, Homo sapiens
  source 1..33: mol_type = genomic DNA
gtaccgttaacttccaattaactagttttgaca

SEQ ID NO: 20339 - DNA, 35 bp, Homo sapiens
  source 1..35: mol_type = genomic DNA
gtaccgttaacttccaattaactagttttgacaac

SEQ ID NO: 20340 - DNA, 19 bp, Homo sapiens
  source 1..19: mol_type = genomic DNA
gtactctgcgttgtggccg

SEQ ID NO: 20341 - DNA, 17 bp, Homo sapiens
  source 1..17: mol_type = genomic DNA
gtagaattctcgcctcc

SEQ ID NO: 20342 - DNA, 18 bp, Homo sapiens
  source 1..18: mol_type = genomic DNA
gtagaattctcgcctccc

SEQ ID NO: 20343 - DNA, 20 bp, Homo sapiens
  source 1..20: mol_type = genomic DNA
gtagaattctcgcctcccac

SEQ ID NO: 20344 - DNA, 31 bp, Homo sapiens
  source 1..31: mol_type = genomic DNA
gtagaattctcgcctcccacgcgggagaccc

SEQ ID NO: 20345 - DNA, 33 bp, Homo sapiens
  source 1..33: mol_type = genomic DNA
gtagaattctcgcctcccacgcgggagacccgg

SEQ ID NO: 20346 - DNA, 34 bp, Homo sapiens
  source 1..34: mol_type = genomic DNA
gtagaattctcgcctcccacgcgggagacccggg

SEQ ID NO: 20347 - DNA, 35 bp, Homo sapiens
  source 1..35: mol_type = genomic DNA
gtagaattctcgcctcccacgcgggagacccgggt

SEQ ID NO: 20348 - DNA, 36 bp, Homo sapiens
  source 1..36: mol_type = genomic DNA
gtagaattctcgcctcccacgcgggagacccgggtt

SEQ ID NO: 20349 - DNA, 16 bp, Homo sapiens
  source 1..16: mol_type = genomic DNA
gtagaattctcgcctg

SEQ ID NO: 20350 - DNA, 17 bp, Homo sapiens
  source 1..17: mol_type = genomic DNA
gtagaattctcgcctgc

SEQ ID NO: 20351 - DNA, 18 bp, Homo sapiens
  source 1..18: mol_type = genomic DNA
gtagaattctcgcctgcc

SEQ ID NO: 20352 - DNA, 19 bp, Homo sapiens
  source 1..19: mol_type = genomic DNA
gtagaattctcgcctgcca

SEQ ID NO: 20353 - DNA, 20 bp, Homo sapiens
  source 1..20: mol_type = genomic DNA
gtagaattctcgcctgccac

SEQ ID NO: 20354 - DNA, 21 bp, Homo sapiens
  source 1..21: mol_type = genomic DNA
gtagaattctcgcctgccacg

SEQ ID NO: 20355 - DNA, 22 bp, Homo sapiens
  source 1..22: mol_type = genomic DNA
gtagaattctcgcctgccacgc

SEQ ID NO: 20356 - DNA, 23 bp, Homo sapiens
  source 1..23: mol_type = genomic DNA
gtagaattctcgcctgccacgcg

SEQ ID NO: 20357 - DNA, 24 bp, Homo sapiens
  source 1..24: mol_type = genomic DNA
gtagaattctcgcctgccacgcgg

SEQ ID NO: 20358 - DNA, 25 bp, Homo sapiens
  source 1..25: mol_type = genomic DNA
gtagaattctcgcctgccacgcggg

SEQ ID NO: 20359 - DNA, 26 bp, Homo sapiens
  source 1..26: mol_type = genomic DNA
gtagaattctcgcctgccacgcggga

SEQ ID NO: 20360 - DNA, 27 bp, Homo sapiens
  source 1..27: mol_type = genomic DNA
gtagaattctcgcctgccacgcgggag

SEQ ID NO: 20361 - DNA, 28 bp, Homo sapiens
  source 1..28: mol_type = genomic DNA
gtagaattctcgcctgccacgcgggagg

SEQ ID NO: 20362 - DNA, 29 bp, Homo sapiens
  source 1..29: mol_type = genomic DNA
gtagaattctcgcctgccacgcgggaggc

SEQ ID NO: 20363 - DNA, 30 bp, Homo sapiens
  source 1..30: mol_type = genomic DNA
gtagaattctcgcctgccacgcgggaggcc

SEQ ID NO: 20364 - DNA, 31 bp, Homo sapiens
  source 1..31: mol_type = genomic DNA
gtagaattctcgcctgccacgcgggaggccc

SEQ ID NO: 20365 - DNA, 32 bp, Homo sapiens
  source 1..32: mol_type = genomic DNA
gtagaattctcgcctgccacgcgggaggcccg

SEQ ID NO: 20366 - DNA, 33 bp, Homo sapiens
  source 1..33: mol_type = genomic DNA
gtagaattctcgcctgccacgcgggaggcccgg

SEQ ID NO: 20367 - DNA, 34 bp, Homo sapiens
  source 1..34: mol_type = genomic DNA
gtagaattctcgcctgccacgcgggaggcccggg

SEQ ID NO: 20368 - DNA, 35 bp, Homo sapiens
  source 1..35: mol_type = genomic DNA
gtagaattctcgcctgccacgcgggaggcccgggt

SEQ ID NO: 20369 - DNA, 36 bp, Homo sapiens
  source 1..36: mol_type = genomic DNA
gtagaattctcgcctgccacgcgggaggcccgggtt

SEQ ID NO: 20370 - DNA, 37 bp, Homo sapiens
  source 1..37: mol_type = genomic DNA
gtagaattctcgcctgccacgcgggaggcccgggttc

SEQ ID NO: 20371 - DNA, 41 bp, Homo sapiens
  source 1..41: mol_type = genomic DNA
gtagaattctcgcctgccacgcgggaggcccgggttcgatt

SEQ ID NO: 20372 - DNA, 43 bp, Homo sapiens
  source 1..43: mol_type = genomic DNA
gtagaattctcgcctgccacgcgggaggcccgggttcgattcc

SEQ ID NO: 20373 - DNA, 46 bp, Homo sapiens
  source 1..46: mol_type = genomic DNA
gtagaattctcgcctgccacgcgggaggcccgggttcgattcccgg

SEQ ID NO: 20374 - DNA, 47 bp, Homo sapiens
  source 1..47: mol_type = genomic DNA
gtagaattctcgcctgccacgcgggaggcccgggttcgattcccggc

SEQ ID NO: 20375 - DNA, 48 bp, Homo sapiens
  source 1..48: mol_type = genomic DNA
gtagaattctcgcctgccacgcgggaggcccgggttcgattcccggcc

SEQ ID NO: 20376 - DNA, 37 bp, Homo sapiens
  source 1..37: mol_type = genomic DNA
gtagaattctcgcctgccacgcgggaggcccgggttt

SEQ ID NO: 20377 - DNA, 16 bp, Homo sapiens
  source 1..16: mol_type = genomic DNA
gtagaattcttgcctg

SEQ ID NO: 20378 - DNA, 18 bp, Homo sapiens
  source 1..18: mol_type = genomic DNA
gtagagcatcagactttt

SEQ ID NO: 20379 - DNA, 16 bp, Homo sapiens
  source 1..16: mol_type = genomic DNA
gtagagcatgagaccc

SEQ ID NO: 20380 - DNA, 17 bp, Homo sapiens
  source 1..17: mol_type = genomic DNA
gtagagcatgagaccct

SEQ ID NO: 20381 - DNA, 23 bp, Homo sapiens
  source 1..23: mol_type = genomic DNA
gtagagcatgagacccttaatct

SEQ ID NO: 20382 - DNA, 24 bp, Homo sapiens
  source 1..24: mol_type = genomic DNA
gtagagcatgagacccttaatctc

SEQ ID NO: 20383 - DNA, 16 bp, Homo sapiens
  source 1..16: mol_type = genomic DNA
gtagagcatgagactc

SEQ ID NO: 20384 - DNA, 17 bp, Homo sapiens
  source 1..17: mol_type = genomic DNA
gtagagcatgagactct

SEQ ID NO: 20385 - DNA, 20 bp, Homo sapiens
  source 1..20: mol_type = genomic DNA
gtagagcatgagactcttaa

SEQ ID NO: 20386 - DNA, 22 bp, Homo sapiens
  source 1..22: mol_type = genomic DNA
gtagagcatgagactcttaatc

SEQ ID NO: 20387 - DNA, 23 bp, Homo sapiens
  source 1..23: mol_type = genomic DNA
gtagagcatgagactcttaatct

SEQ ID NO: 20388 - DNA, 24 bp, Homo sapiens
  source 1..24: mol_type = genomic DNA
gtagagcatgagactcttaatctc

SEQ ID NO: 20389 - DNA, 25 bp, Homo sapiens
  source 1..25: mol_type = genomic DNA
gtagagcatgagactcttaatctca

SEQ ID NO: 20390 - DNA, 31 bp, Homo sapiens
  source 1..31: mol_type = genomic DNA
gtagagcatgagactcttaatctcagggtcg

SEQ ID NO: 20391 - DNA, 32 bp, Homo sapiens
  source 1..32: mol_type = genomic DNA
gtagagcatgagactcttaatctcagggtcgt

SEQ ID NO: 20392 - DNA, 33 bp, Homo sapiens
  source 1..33: mol_type = genomic DNA
gtagagcatgagactcttaatctcagggtcgtg

SEQ ID NO: 20393 - DNA, 34 bp, Homo sapiens
  source 1..34: mol_type = genomic DNA
gtagagcatgagactcttaatctcagggtcgtgg

SEQ ID NO: 20394 - DNA, 35 bp, Homo sapiens
  source 1..35: mol_type = genomic DNA
gtagagcatgagactcttaatctcagggtcgtggg

SEQ ID NO: 20395 - DNA, 36 bp, Homo sapiens
  source 1..36: mol_type = genomic DNA
gtagagcatgagactcttaatctcagggtcgtgggt

SEQ ID NO: 20396 - DNA, 37 bp, Homo sapiens
  source 1..37: mol_type = genomic DNA
gtagagcatgagactcttaatctcagggtcgtgggtt

SEQ ID NO: 20397 - DNA, 39 bp, Homo sapiens
  source 1..39: mol_type = genomic DNA
gtagagcatgagactcttaatctcagggtcgtgggttcg

SEQ ID NO: 20398 - DNA, 16 bp, Homo sapiens
  source 1..16: mol_type = genomic DNA
gtagagcatgggactc

SEQ ID NO: 20399 - DNA, 17 bp, Homo sapiens
  source 1..17: mol_type = genomic DNA
gtagagcatgggactct

SEQ ID NO: 20400 - DNA, 18 bp, Homo sapiens
  source 1..18: mol_type = genomic DNA
gtagagcatgggactctt

SEQ ID NO: 20401 - DNA, 21 bp, Homo sapiens
  source 1..21: mol_type = genomic DNA
gtagagcatgggactcttaat

SEQ ID NO: 20402 - DNA, 22 bp, Homo sapiens
  source 1..22: mol_type = genomic DNA
gtagagcatgggactcttaatc

SEQ ID NO: 20403 - DNA, 23 bp, Homo sapiens
  source 1..23: mol_type = genomic DNA
gtagagcatgggactcttaatcc

SEQ ID NO: 20404 - DNA, 24 bp, Homo sapiens
  source 1..24: mol_type = genomic DNA
gtagagcatgggactcttaatccc

SEQ ID NO: 20405 - DNA, 25 bp, Homo sapiens
  source 1..25: mol_type = genomic DNA
gtagagcatgggactcttaatccca

SEQ ID NO: 20406 - DNA, 31 bp, Homo sapiens
  source 1..31: mol_type = genomic DNA
gtagagcatgggactcttaatcccagggtcg

SEQ ID NO: 20407 - DNA, 32 bp, Homo sapiens
  source 1..32: mol_type = genomic DNA
gtagagcatgggactcttaatcccagggtcgt

SEQ ID NO: 20408 - DNA, 33 bp, Homo sapiens
  source 1..33: mol_type = genomic DNA
gtagagcatgggactcttaatcccagggtcgtg

SEQ ID NO: 20409 - DNA, 34 bp, Homo sapiens
  source 1..34: mol_type = genomic DNA
gtagagcatgggactcttaatcccagggtcgtgg

SEQ ID NO: 20410 - DNA, 35 bp, Homo sapiens
  source 1..35: mol_type = genomic DNA
gtagagcatgggactcttaatcccagggtcgtggg

SEQ ID NO: 20411 - DNA, 37 bp, Homo sapiens
  source 1..37: mol_type = genomic DNA
gtagagcatgggactcttaatcccagggtcgtgggtt

SEQ ID NO: 20412 - DNA, 39 bp, Homo sapiens
  source 1..39: mol_type = genomic DNA
gtagagcatgggactcttaatcccagggtcgtgggttcg

SEQ ID NO: 20413 - DNA, 43 bp, Homo sapiens
  source 1..43: mol_type = genomic DNA
gtagagcatgggactcttaatcccagggtcgtgggttcgagcc

SEQ ID NO: 20414 - DNA, 45 bp, Homo sapiens
  source 1..45: mol_type = genomic DNA
gtagagcatgggactcttaatcccagggtcgtgggttcgagcccc

SEQ ID NO: 20415 - DNA, 24 bp, Homo sapiens
  source 1..24: mol_type = genomic DNA
gtagagcatgggactcttaatctc

SEQ ID NO: 20416 - DNA, 33 bp, Homo sapiens
  source 1..33: mol_type = genomic DNA
gtagagcatgggactcttaatctcagggtcgtg

SEQ ID NO: 20417 - DNA, 34 bp, Homo sapiens
  source 1..34: mol_type = genomic DNA
gtagagcatgggactcttaatctcagggtcgtgg

SEQ ID NO: 20418 - DNA, 37 bp, Homo sapiens
  source 1..37: mol_type = genomic DNA
gtagagcatgggactcttaatctcagggtcgtgggtt

SEQ ID NO: 20419 - DNA, 16 bp, Homo sapiens
  source 1..16: mol_type = genomic DNA
gtagagcatttgactg

SEQ ID NO: 20420 - DNA, 17 bp, Homo sapiens
  source 1..17: mol_type = genomic DNA
gtagagcatttgactgc

SEQ ID NO: 20421 - DNA, 24 bp, Homo sapiens
  source 1..24: mol_type = genomic DNA
gtagattgaagccagttgattagg

SEQ ID NO: 20422 - DNA, 18 bp, Homo sapiens
  source 1..18: mol_type = genomic DNA
gtagcggttatcacattc

SEQ ID NO: 20423 - DNA, 21 bp, Homo sapiens
  source 1..21: mol_type = genomic DNA
gtagcggttatcacattcgcc

SEQ ID NO: 20424 - DNA, 22 bp, Homo sapiens
  source 1..22: mol_type = genomic DNA
gtagcggttatcacattcgcct

SEQ ID NO: 20425 - DNA, 18 bp, Homo sapiens
  source 1..18: mol_type = genomic DNA
gtagcggttatcacgtct

SEQ ID NO: 20426 - DNA, 19 bp, Homo sapiens
  source 1..19: mol_type = genomic DNA
gtagcgtggccgagcggtc

SEQ ID NO: 20427 - DNA, 20 bp, Homo sapiens
  source 1..20: mol_type = genomic DNA
gtagcgtggccgagcggtct

SEQ ID NO: 20428 - DNA, 21 bp, Homo sapiens
  source 1..21: mol_type = genomic DNA
gtagcgtggccgagcggtcta

SEQ ID NO: 20429 - DNA, 23 bp, Homo sapiens
  source 1..23: mol_type = genomic DNA
gtagcgtggccgagcggtctaag

SEQ ID NO: 20430 - DNA, 25 bp, Homo sapiens
  source 1..25: mol_type = genomic DNA
gtagcgtggccgagcggtctaaggc

SEQ ID NO: 20431 - DNA, 25 bp, Homo sapiens
  source 1..25: mol_type = genomic DNA
gtagcgtggccgagtggtctaaggc

SEQ ID NO: 20432 - DNA, 17 bp, Homo sapiens
  source 1..17: mol_type = genomic DNA
gtagctcagtggtagag

SEQ ID NO: 20433 - DNA, 26 bp, Homo sapiens
  source 1..26: mol_type = genomic DNA
gtagctcagtggtagagcatttgact

SEQ ID NO: 20434 - DNA, 27 bp, Homo sapiens
  source 1..27: mol_type = genomic DNA
gtagctcagtggtagagcatttgactg

SEQ ID NO: 20435 - DNA, 28 bp, Homo sapiens
  source 1..28: mol_type = genomic DNA
gtagctcagtggtagagcatttgactgc

SEQ ID NO: 20436 - DNA, 26 bp, Homo sapiens
  source 1..26: mol_type = genomic DNA
gtagctcagtggtagagcgcatgctt

SEQ ID NO: 20437 - DNA, 21 bp, Homo sapiens
  source 1..21: mol_type = genomic DNA
gtagcttaacacaaagcaccc

SEQ ID NO: 20438 - DNA, 22 bp, Homo sapiens
  source 1..22: mol_type = genomic DNA
gtagcttaacacaaagcaccca

SEQ ID NO: 20439 - DNA, 24 bp, Homo sapiens
  source 1..24: mol_type = genomic DNA
gtagcttacctcctcaaagcaata

SEQ ID NO: 20440 - DNA, 28 bp, Homo sapiens
  source 1..28: mol_type = genomic DNA
gtagcttacctcctcaaagcaatacact

SEQ ID NO: 20441 - DNA, 31 bp, Homo sapiens
  source 1..31: mol_type = genomic DNA
gtaggatggggtgtgataggtggcacggaga

SEQ ID NO: 20442 - DNA, 18 bp, Homo sapiens
  source 1..18: mol_type = genomic DNA
gtaggtagcgcatcagtc

SEQ ID NO: 20443 - DNA, 19 bp, Homo sapiens
  source 1..19: mol_type = genomic DNA
gtaggtagcgcatcagtct

SEQ ID NO: 20444 - DNA, 16 bp, Homo sapiens
  source 1..16: mol_type = genomic DNA
gtagtccgtgcgagaa

SEQ ID NO: 20445 - DNA, 17 bp, Homo sapiens
  source 1..17: mol_type = genomic DNA
gtagtccgtgcgagaat

SEQ ID NO: 20446 - DNA, 18 bp, Homo sapiens
  source 1..18: mol_type = genomic DNA
gtagtccgtgcgagaata

SEQ ID NO: 20447 - DNA, 19 bp, Homo sapiens
  source 1..19: mol_type = genomic DNA
gtagtccgtgcgagaatac

SEQ ID NO: 20448 - DNA, 20 bp, Homo sapiens
  source 1..20: mol_type = genomic DNA
gtagtccgtgcgagaatacc

SEQ ID NO: 20449 - DNA, 21 bp, Homo sapiens
  source 1..21: mol_type = genomic DNA
gtagtccgtgcgagaatacca

SEQ ID NO: 20450 - DNA, 16 bp, Homo sapiens
  source 1..16: mol_type = genomic DNA
gtagtcgtggccgagt

SEQ ID NO: 20451 - DNA, 17 bp, Homo sapiens
  source 1..17: mol_type = genomic DNA
gtagtcgtggccgagtg

SEQ ID NO: 20452 - DNA, 18 bp, Homo sapiens
  source 1..18: mol_type = genomic DNA
gtagtcgtggccgagtgg

SEQ ID NO: 20453 - DNA, 19 bp, Homo sapiens
  source 1..19: mol_type = genomic DNA
gtagtcgtggccgagtggt

SEQ ID NO: 20454 - DNA, 20 bp, Homo sapiens
  source 1..20: mol_type = genomic DNA
gtagtcgtggccgagtggtt

SEQ ID NO: 20455 - DNA, 21 bp, Homo sapiens
  source 1..21: mol_type = genomic DNA
gtagtcgtggccgagtggtta

SEQ ID NO: 20456 - DNA, 22 bp, Homo sapiens
  source 1..22: mol_type = genomic DNA
gtagtcgtggccgagtggttaa

SEQ ID NO: 20457 - DNA, 23 bp, Homo sapiens
  source 1..23: mol_type = genomic DNA
gtagtcgtggccgagtggttaag

SEQ ID NO: 20458 - DNA, 24 bp, Homo sapiens
  source 1..24: mol_type = genomic DNA
gtagtcgtggccgagtggttaagg

SEQ ID NO: 20459 - DNA, 25 bp, Homo sapiens
  source 1..25: mol_type = genomic DNA
gtagtcgtggccgagtggttaaggc

SEQ ID NO: 20460 - DNA, 32 bp, Homo sapiens
  source 1..32: mol_type = genomic DNA
gtagtcgtggccgagtggttaaggcgatggac

SEQ ID NO: 20461 - DNA, 33 bp, Homo sapiens
  source 1..33: mol_type = genomic DNA
gtagtcgtggccgagtggttaaggcgatggact

SEQ ID NO: 20462 - DNA, 33 bp, Homo sapiens
  source 1..33: mol_type = genomic DNA
gtagtcgtggccgagtggttaaggtgatggact

SEQ ID NO: 20463 - DNA, 21 bp, Homo sapiens
  source 1..21: mol_type = genomic DNA
gtagtggtatcatgcaagatt

SEQ ID NO: 20464 - DNA, 22 bp, Homo sapiens
  source 1..22: mol_type = genomic DNA
gtagtggtatcatgcaagattc

SEQ ID NO: 20465 - DNA, 23 bp, Homo sapiens
  source 1..23: mol_type = genomic DNA
gtagtggtatcatgcaagattcc

SEQ ID NO: 20466 - DNA, 24 bp, Homo sapiens
  source 1..24: mol_type = genomic DNA
gtagtggtatcatgcaagattccc

SEQ ID NO: 20467 - DNA, 41 bp, Homo sapiens
  source 1..41: mol_type = genomic DNA
gtagtggtatcatgcaagattcccattcttgcgacccgggt

SEQ ID NO: 20468 - DNA, 21 bp, Homo sapiens
  source 1..21: mol_type = genomic DNA
gtagtggtcatcacgttcgcc

SEQ ID NO: 20469 - DNA, 22 bp, Homo sapiens
  source 1..22: mol_type = genomic DNA
gtagtggtcatcacgttcgcct

SEQ ID NO: 20470 - DNA, 21 bp, Homo sapiens
  source 1..21: mol_type = genomic DNA
gtagtggttatcacatctgct

SEQ ID NO: 20471 - DNA, 21 bp, Homo sapiens
  source 1..21: mol_type = genomic DNA
gtagtggttatcacattcgcc

SEQ ID NO: 20472 - DNA, 22 bp, Homo sapiens
  source 1..22: mol_type = genomic DNA
gtagtggttatcacattcgcct

SEQ ID NO: 20473 - DNA, 20 bp, Homo sapiens
  source 1..20: mol_type = genomic DNA
gtagtggttatcacgtctgc

SEQ ID NO: 20474 - DNA, 21 bp, Homo sapiens
  source 1..21: mol_type = genomic DNA
gtagtggttatcacgtctgct

SEQ ID NO: 20475 - DNA, 22 bp, Homo sapiens
  source 1..22: mol_type = genomic DNA
gtagtggttatcacgtctgctt

SEQ ID NO: 20476 - DNA, 23 bp, Homo sapiens
  source 1..23: mol_type = genomic DNA
gtagtggttatcacgtctgcttt

SEQ ID NO: 20477 - DNA, 25 bp, Homo sapiens
  source 1..25: mol_type = genomic DNA
gtagtggttatcacgtctgctttac

SEQ ID NO: 20478 - DNA, 26 bp, Homo sapiens
  source 1..26: mol_type = genomic DNA
gtagtggttatcacgtctgctttaca

SEQ ID NO: 20479 - DNA, 18 bp, Homo sapiens
  source 1..18: mol_type = genomic DNA
gtagtggttatcacgttc

SEQ ID NO: 20480 - DNA, 19 bp, Homo sapiens
  source 1..19: mol_type = genomic DNA
gtagtggttatcacgttcg

SEQ ID NO: 20481 - DNA, 20 bp, Homo sapiens
  source 1..20: mol_type = genomic DNA
gtagtggttatcacgttcgc

SEQ ID NO: 20482 - DNA, 21 bp, Homo sapiens
  source 1..21: mol_type = genomic DNA
gtagtggttatcacgttcgcc

SEQ ID NO: 20483 - DNA, 22 bp, Homo sapiens
  source 1..22: mol_type = genomic DNA
gtagtggttatcacgttcgcct

SEQ ID NO: 20484 - DNA, 23 bp, Homo sapiens
  source 1..23: mol_type = genomic DNA
gtagtggttatcacgttcgcctc

SEQ ID NO: 20485 - DNA, 24 bp, Homo sapiens
  source 1..24: mol_type = genomic DNA
gtagtggttatcacgttcgcctca

SEQ ID NO: 20486 - DNA, 25 bp, Homo sapiens
  source 1..25: mol_type = genomic DNA
gtagtggttatcacgttcgcctcac

SEQ ID NO: 20487 - DNA, 26 bp, Homo sapiens
  source 1..26: mol_type = genomic DNA
gtagtggttatcacgttcgcctcaca

SEQ ID NO: 20488 - DNA, 27 bp, Homo sapiens
  source 1..27: mol_type = genomic DNA
gtagtggttatcacgttcgcctcacac

SEQ ID NO: 20489 - DNA, 28 bp, Homo sapiens
  source 1..28: mol_type = genomic DNA
gtagtggttatcacgttcgcctcacacg

SEQ ID NO: 20490 - DNA, 16 bp, Homo sapiens
  source 1..16: mol_type = genomic DNA
gtagtgtagcggttat

SEQ ID NO: 20491 - DNA, 17 bp, Homo sapiens
  source 1..17: mol_type = genomic DNA
gtagtgtagcggttatc

SEQ ID NO: 20492 - DNA, 18 bp, Homo sapiens
  source 1..18: mol_type = genomic DNA
gtagtgtagcggttatca

SEQ ID NO: 20493 - DNA, 19 bp, Homo sapiens
  source 1..19: mol_type = genomic DNA
gtagtgtagcggttatcac

SEQ ID NO: 20494 - DNA, 22 bp, Homo sapiens
  source 1..22: mol_type = genomic DNA
gtagtgtagcggttatcacatt

SEQ ID NO: 20495 - DNA, 28 bp, Homo sapiens
  source 1..28: mol_type = genomic DNA
gtagtgtagcggttatcacattcgcctc

SEQ ID NO: 20496 - DNA, 17 bp, Homo sapiens
  source 1..17: mol_type = genomic DNA
gtagtgtagtggtcatc

SEQ ID NO: 20497 - DNA, 24 bp, Homo sapiens
  source 1..24: mol_type = genomic DNA
gtagtgtagtggtcatcacgttcg

SEQ ID NO: 20498 - DNA, 25 bp, Homo sapiens
  source 1..25: mol_type = genomic DNA
gtagtgtagtggtcatcacgttcgc

SEQ ID NO: 20499 - DNA, 26 bp, Homo sapiens
  source 1..26: mol_type = genomic DNA
gtagtgtagtggtcatcacgttcgcc

SEQ ID NO: 20500 - DNA, 27 bp, Homo sapiens
  source 1..27: mol_type = genomic DNA
gtagtgtagtggtcatcacgttcgcct

SEQ ID NO: 20501 - DNA, 16 bp, Homo sapiens
  source 1..16: mol_type = genomic DNA
gtagtgtagtggttat

SEQ ID NO: 20502 - DNA, 17 bp, Homo sapiens
  source 1..17: mol_type = genomic DNA
gtagtgtagtggttatc

SEQ ID NO: 20503 - DNA, 18 bp, Homo sapiens
  source 1..18: mol_type = genomic DNA
gtagtgtagtggttatca

SEQ ID NO: 20504 - DNA, 19 bp, Homo sapiens
  source 1..19: mol_type = genomic DNA
gtagtgtagtggttatcac

SEQ ID NO: 20505 - DNA, 24 bp, Homo sapiens
  source 1..24: mol_type = genomic DNA
gtagtgtagtggttatcacgttcg

SEQ ID NO: 20506 - DNA, 25 bp, Homo sapiens
  source 1..25: mol_type = genomic DNA
gtagtgtagtggttatcacgttcgc

SEQ ID NO: 20507 - DNA, 26 bp, Homo sapiens
  source 1..26: mol_type = genomic DNA
gtagtgtagtggttatcacgttcgcc

SEQ ID NO: 20508 - DNA, 27 bp, Homo sapiens
  source 1..27: mol_type = genomic DNA
gtagtgtagtggttatcacgttcgcct

SEQ ID NO: 20509 - DNA, 28 bp, Homo sapiens
  source 1..28: mol_type = genomic DNA
gtagtgtagtggttatcacgttcgcctc

SEQ ID NO: 20510 - DNA, 29 bp, Homo sapiens
  source 1..29: mol_type = genomic DNA
gtagtgtagtggttatcacgttcgcctca

SEQ ID NO: 20511 - DNA, 30 bp, Homo sapiens
  source 1..30: mol_type = genomic DNA
gtagtgtagtggttatcacgttcgcctcac

SEQ ID NO: 20512 - DNA, 31 bp, Homo sapiens
  source 1..31: mol_type = genomic DNA
gtagtgtagtggttatcacgttcgcctcaca

SEQ ID NO: 20513 - DNA, 33 bp, Homo sapiens
  source 1..33: mol_type = genomic DNA
gtagtgtagtggttatcacgttcgcctcacacg

SEQ ID NO: 20514 - DNA, 20 bp, Homo sapiens
  source 1..20: mol_type = genomic DNA
gtagttgaaatacaacgatg

SEQ ID NO: 20515 - DNA, 20 bp, Homo sapiens
  source 1..20: mol_type = genomic DNA
gtataaatagtaccgttaac

SEQ ID NO: 20516 - DNA, 21 bp, Homo sapiens
  source 1..21: mol_type = genomic DNA
gtataaatagtaccgttaact

SEQ ID NO: 20517 - DNA, 22 bp, Homo sapiens
  source 1..22: mol_type = genomic DNA
gtataaatagtaccgttaactt

SEQ ID NO: 20518 - DNA, 23 bp, Homo sapiens
  source 1..23: mol_type = genomic DNA
gtataaatagtaccgttaacttc

SEQ ID NO: 20519 - DNA, 24 bp, Homo sapiens
  source 1..24: mol_type = genomic DNA
gtataaatagtaccgttaacttcc

SEQ ID NO: 20520 - DNA, 28 bp, Homo sapiens
  source 1..28: mol_type = genomic DNA
gtatagctcaggggtagagcatttgact

SEQ ID NO: 20521 - DNA, 29 bp, Homo sapiens
  source 1..29: mol_type = genomic DNA
gtatagctcaggggtagagcatttgactg

SEQ ID NO: 20522 - DNA, 30 bp, Homo sapiens
  source 1..30: mol_type = genomic DNA
gtatagctcaggggtagagcatttgactgc

SEQ ID NO: 20523 - DNA, 31 bp, Homo sapiens
  source 1..31: mol_type = genomic DNA
gtatagctcaggggtagagcatttgactgca

SEQ ID NO: 20524 - DNA, 31 bp, Homo sapiens
  source 1..31: mol_type = genomic DNA
gtatagctcagtgggtagagcatttgactgc

SEQ ID NO: 20525 - DNA, 18 bp, Homo sapiens
  source 1..18: mol_type = genomic DNA
gtatagctcagtggtaga

SEQ ID NO: 20526 - DNA, 19 bp, Homo sapiens
  source 1..19: mol_type = genomic DNA
gtatagctcagtggtagag

SEQ ID NO: 20527 - DNA, 28 bp, Homo sapiens
  source 1..28: mol_type = genomic DNA
gtatagctcagtggtagagcatttgact

SEQ ID NO: 20528 - DNA, 29 bp, Homo sapiens
  source 1..29: mol_type = genomic DNA
gtatagctcagtggtagagcatttgactg

SEQ ID NO: 20529 - DNA, 30 bp, Homo sapiens
  source 1..30: mol_type = genomic DNA
gtatagctcagtggtagagcatttgactgc

SEQ ID NO: 20530 - DNA, 31 bp, Homo sapiens
  source 1..31: mol_type = genomic DNA
gtatagctcagtggtagagcatttgactgca

SEQ ID NO: 20531 - DNA, 30 bp, Homo sapiens
  source 1..30: mol_type = genomic DNA
gtatagcttagcggtagagcatttgactgc

SEQ ID NO: 20532 - DNA, 19 bp, Homo sapiens
  source 1..19: mol_type = genomic DNA
gtatagtggtaagcatagc

SEQ ID NO: 20533 - DNA, 23 bp, Homo sapiens
  source 1..23: mol_type = genomic DNA
gtatagtggtgagcatagctgcc

SEQ ID NO: 20534 - DNA, 24 bp, Homo sapiens
  source 1..24: mol_type = genomic DNA
gtatagtggtgagcatagctgcct

SEQ ID NO: 20535 - DNA, 27 bp, Homo sapiens
  source 1..27: mol_type = genomic DNA
gtatagtggtgagcatagctgccttcc

SEQ ID NO: 20536 - DNA, 44 bp, Homo sapiens
  source 1..44: mol_type = genomic DNA
gtatagtggtgagcatagctgccttccaagcagttgacccgggt

SEQ ID NO: 20537 - DNA, 19 bp, Homo sapiens
  source 1..19: mol_type = genomic DNA
gtatagtggtgagtatccc

SEQ ID NO: 20538 - DNA, 22 bp, Homo sapiens
  source 1..22: mol_type = genomic DNA
gtatagtggtgagtatccccgc

SEQ ID NO: 20539 - DNA, 19 bp, Homo sapiens
  source 1..19: mol_type = genomic DNA
gtatagtggttagcatagc

SEQ ID NO: 20540 - DNA, 21 bp, Homo sapiens
  source 1..21: mol_type = genomic DNA
gtatagtggttagcatagctg

SEQ ID NO: 20541 - DNA, 23 bp, Homo sapiens
  source 1..23: mol_type = genomic DNA
gtatagtggttagcatagctgcc

SEQ ID NO: 20542 - DNA, 24 bp, Homo sapiens
  source 1..24: mol_type = genomic DNA
gtatagtggttagcatagctgcct

SEQ ID NO: 20543 - DNA, 27 bp, Homo sapiens
  source 1..27: mol_type = genomic DNA
gtatagtggttagcatagctgccttcc

SEQ ID NO: 20544 - DNA, 16 bp, Homo sapiens
  source 1..16: mol_type = genomic DNA
gtatagtggttagtac

SEQ ID NO: 20545 - DNA, 17 bp, Homo sapiens
  source 1..17: mol_type = genomic DNA
gtatagtggttagtact

SEQ ID NO: 20546 - DNA, 18 bp, Homo sapiens
  source 1..18: mol_type = genomic DNA
gtatagtggttagtactc

SEQ ID NO: 20547 - DNA, 19 bp, Homo sapiens
  source 1..19: mol_type = genomic DNA
gtatagtggttagtactct

SEQ ID NO: 20548 - DNA, 20 bp, Homo sapiens
  source 1..20: mol_type = genomic DNA
gtatagtggttagtactctg

SEQ ID NO: 20549 - DNA, 21 bp, Homo sapiens
  source 1..21: mol_type = genomic DNA
gtatagtggttagtactctgc

SEQ ID NO: 20550 - DNA, 22 bp, Homo sapiens
  source 1..22: mol_type = genomic DNA
gtatagtggttagtactctgcg

SEQ ID NO: 20551 - DNA, 23 bp, Homo sapiens
  source 1..23: mol_type = genomic DNA
gtatagtggttagtactctgcgt

SEQ ID NO: 20552 - DNA, 24 bp, Homo sapiens
  source 1..24: mol_type = genomic DNA
gtatagtggttagtactctgcgtt

SEQ ID NO: 20553 - DNA, 25 bp, Homo sapiens
  source 1..25: mol_type = genomic DNA
gtatagtggttagtactctgcgttg

SEQ ID NO: 20554 - DNA, 26 bp, Homo sapiens
  source 1..26: mol_type = genomic DNA
gtatagtggttagtactctgcgttgt

SEQ ID NO: 20555 - DNA, 27 bp, Homo sapiens
  source 1..27: mol_type = genomic DNA
gtatagtggttagtactctgcgttgtg

SEQ ID NO: 20556 - DNA, 30 bp, Homo sapiens
  source 1..30: mol_type = genomic DNA
gtatagtggttagtactctgcgttgtggcc

SEQ ID NO: 20557 - DNA, 31 bp, Homo sapiens
  source 1..31: mol_type = genomic DNA
gtatagtggttagtactctgcgttgtggccg

SEQ ID NO: 20558 - DNA, 40 bp, Homo sapiens
  source 1..40: mol_type = genomic DNA
gtatagtggttagtactctgcgttgtggccgcagcaacct

SEQ ID NO: 20559 - DNA, 19 bp, Homo sapiens
  source 1..19: mol_type = genomic DNA
gtatagtggttagtatccc

SEQ ID NO: 20560 - DNA, 26 bp, Homo sapiens
  source 1..26: mol_type = genomic DNA
gtatagtggttagtatccccgcctgt

SEQ ID NO: 20561 - DNA, 16 bp, Homo sapiens
  source 1..16: mol_type = genomic DNA
gtatatagtttaaaca

SEQ ID NO: 20562 - DNA, 31 bp, Homo sapiens
  source 1..31: mol_type = genomic DNA
gtatatagtttaaacaaaacgaatgatttcg

SEQ ID NO: 20563 - DNA, 33 bp, Homo sapiens
  source 1..33: mol_type = genomic DNA
gtatatagtttaaacaaaacgaatgatttcgac

SEQ ID NO: 20564 - DNA, 34 bp, Homo sapiens
  source 1..34: mol_type = genomic DNA
gtatatagtttaaacaaaacgaatgatttcgact

SEQ ID NO: 20565 - DNA, 35 bp, Homo sapiens
  source 1..35: mol_type = genomic DNA
gtatatagtttaaacaaaacgaatgatttcgactc

SEQ ID NO: 20566 - DNA, 36 bp, Homo sapiens
  source 1..36: mol_type = genomic DNA
gtatatagtttaaacaaaacgaatgatttcgactca

SEQ ID NO: 20567 - DNA, 37 bp, Homo sapiens
  source 1..37: mol_type = genomic DNA
gtatatagtttaaacaaaacgaatgatttcgactcat

SEQ ID NO: 20568 - DNA, 38 bp, Homo sapiens
  source 1..38: mol_type = genomic DNA
gtatatagtttaaacaaaacgaatgatttcgactcatt

SEQ ID NO: 20569 - DNA, 39 bp, Homo sapiens
  source 1..39: mol_type = genomic DNA
gtatatagtttaaacaaaacgaatgatttcgactcatta

SEQ ID NO: 20570 - DNA, 18 bp, Homo sapiens
  source 1..18: mol_type = genomic DNA
gtatcatgcaagattccc

SEQ ID NO: 20571 - DNA, 19 bp, Homo sapiens
  source 1..19: mol_type = genomic DNA
gtatcatgcaagattccca

SEQ ID NO: 20572 - DNA, 32 bp, Homo sapiens
  source 1..32: mol_type = genomic DNA
gtatcatgcaagattcccattcttgcgacccg

SEQ ID NO: 20573 - DNA, 33 bp, Homo sapiens
  source 1..33: mol_type = genomic DNA
gtatcatgcaagattcccattcttgcgacccgg

SEQ ID NO: 20574 - DNA, 35 bp, Homo sapiens
  source 1..35: mol_type = genomic DNA
gtatcatgcaagattcccattcttgcgacccgggt

SEQ ID NO: 20575 - DNA, 16 bp, Homo sapiens
  source 1..16: mol_type = genomic DNA
gtatgaggccccgggt

SEQ ID NO: 20576 - DNA, 28 bp, Homo sapiens
  source 1..28: mol_type = genomic DNA
gtatgaggccccgggttcaatccccggc

SEQ ID NO: 20577 - DNA, 37 bp, Homo sapiens
  source 1..37: mol_type = genomic DNA
gtatgaggccccgggttcaatccccggcatctccacc

SEQ ID NO: 20578 - DNA, 38 bp, Homo sapiens
  source 1..38: mol_type = genomic DNA
gtatgaggccccgggttcaatccccggcatctccacca

SEQ ID NO: 20579 - DNA, 21 bp, Homo sapiens
  source 1..21: mol_type = genomic DNA
gtatgaggccccgggttcgat

SEQ ID NO: 20580 - DNA, 25 bp, Homo sapiens
  source 1..25: mol_type = genomic DNA
gtatgaggccccgggttcgatcccc

SEQ ID NO: 20581 - DNA, 27 bp, Homo sapiens
  source 1..27: mol_type = genomic DNA
gtatgaggccccgggttcgatccccgg

SEQ ID NO: 20582 - DNA, 28 bp, Homo sapiens
  source 1..28: mol_type = genomic DNA
gtatgaggccccgggttcgatccccggc

SEQ ID NO: 20583 - DNA, 31 bp, Homo sapiens
  source 1..31: mol_type = genomic DNA
gtatgaggccccgggttcgatccccggcatc

SEQ ID NO: 20584 - DNA, 32 bp, Homo sapiens
  source 1..32: mol_type = genomic DNA
gtatgaggccccgggttcgatccccggcatct

SEQ ID NO: 20585 - DNA, 33 bp, Homo sapiens
  source 1..33: mol_type = genomic DNA
gtatgaggccccgggttcgatccccggcatctc

SEQ ID NO: 20586 - DNA, 34 bp, Homo sapiens
  source 1..34: mol_type = genomic DNA
gtatgaggccccgggttcgatccccggcatctcc

SEQ ID NO: 20587 - DNA, 35 bp, Homo sapiens
  source 1..35: mol_type = genomic DNA
gtatgaggccccgggttcgatccccggcatctcca

SEQ ID NO: 20588 - DNA, 36 bp, Homo sapiens
  source 1..36: mol_type = genomic DNA
gtatgaggccccgggttcgatccccggcatctccac

SEQ ID NO: 20589 - DNA, 37 bp, Homo sapiens
  source 1..37: mol_type = genomic DNA
gtatgaggccccgggttcgatccccggcatctccacc

SEQ ID NO: 20590 - DNA, 38 bp, Homo sapiens
  source 1..38: mol_type = genomic DNA
gtatgaggccccgggttcgatccccggcatctccacca

SEQ ID NO: 20591 - DNA, 16 bp, Homo sapiens
  source 1..16: mol_type = genomic DNA
gtatgaggtcccgggt

SEQ ID NO: 20592 - DNA, 29 bp, Homo sapiens
  source 1..29: mol_type = genomic DNA
gtatgaggtcccgggttcgatccccggca

SEQ ID NO: 20593 - DNA, 32 bp, Homo sapiens
  source 1..32: mol_type = genomic DNA
gtatgaggtcccgggttcgatccccggcatct

SEQ ID NO: 20594 - DNA, 33 bp, Homo sapiens
  source 1..33: mol_type = genomic DNA
gtatgaggtcccgggttcgatccccggcatctc

SEQ ID NO: 20595 - DNA, 34 bp, Homo sapiens
  source 1..34: mol_type = genomic DNA
gtatgaggtcccgggttcgatccccggcatctcc

SEQ ID NO: 20596 - DNA, 35 bp, Homo sapiens
  source 1..35: mol_type = genomic DNA
gtatgaggtcccgggttcgatccccggcatctcca

SEQ ID NO: 20597 - DNA, 36 bp, Homo sapiens
  source 1..36: mol_type = genomic DNA
gtatgaggtcccgggttcgatccccggcatctccac

SEQ ID NO: 20598 - DNA, 37 bp, Homo sapiens
  source 1..37: mol_type = genomic DNA
gtatgaggtcccgggttcgatccccggcatctccacc

SEQ ID NO: 20599 - DNA, 16 bp, Homo sapiens
  source 1..16: mol_type = genomic DNA
gtatgattctcgcttc

SEQ ID NO: 20600 - DNA, 17 bp, Homo sapiens
  source 1..17: mol_type = genomic DNA
gtatgattctcgcttcg

SEQ ID NO: 20601 - DNA, 18 bp, Homo sapiens
  source 1..18: mol_type = genomic DNA
gtatgattctcgcttcgg

SEQ ID NO: 20602 - DNA, 16 bp, Homo sapiens
  source 1..16: mol_type = genomic DNA
gtatgattctcgcttt

SEQ ID NO: 20603 - DNA, 17 bp, Homo sapiens
  source 1..17: mol_type = genomic DNA
gtatgattctcgctttg

SEQ ID NO: 20604 - DNA, 18 bp, Homo sapiens
  source 1..18: mol_type = genomic DNA
gtatgattctcgctttgg

SEQ ID NO: 20605 - DNA, 34 bp, Homo sapiens
  source 1..34: mol_type = genomic DNA
gtatgattctcgctttgggtgcgagaggtcccgg

SEQ ID NO: 20606 - DNA, 16 bp, Homo sapiens
  source 1..16: mol_type = genomic DNA
gtatgattctcggttt

SEQ ID NO: 20607 - DNA, 17 bp, Homo sapiens
  source 1..17: mol_type = genomic DNA
gtatgattctcggtttg

SEQ ID NO: 20608 - DNA, 18 bp, Homo sapiens
  source 1..18: mol_type = genomic DNA
gtatgattctcggtttgg

SEQ ID NO: 20609 - DNA, 23 bp, Homo sapiens
  source 1..23: mol_type = genomic DNA
gtatgattctcggtttgggtccg

SEQ ID NO: 20610 - DNA, 26 bp, Homo sapiens
  source 1..26: mol_type = genomic DNA
gtatgattctcggtttgggtccgaga

SEQ ID NO: 20611 - DNA, 37 bp, Homo sapiens
  source 1..37: mol_type = genomic DNA
gtatggaggcgtgggttcgaatcccacttctgacacc

SEQ ID NO: 20612 - DNA, 30 bp, Homo sapiens
  source 1..30: mol_type = genomic DNA
gtattagaaaaaccatttcataactttgtc

SEQ ID NO: 20613 - DNA, 19 bp, Homo sapiens
  source 1..19: mol_type = genomic DNA
gtcaaagttaaattatagg

SEQ ID NO: 20614 - DNA, 20 bp, Homo sapiens
  source 1..20: mol_type = genomic DNA
gtcaaagttaaattataggc

SEQ ID NO: 20615 - DNA, 21 bp, Homo sapiens
  source 1..21: mol_type = genomic DNA
gtcaaagttaaattataggct

SEQ ID NO: 20616 - DNA, 22 bp, Homo sapiens
  source 1..22: mol_type = genomic DNA
gtcaaagttaaattataggcta

SEQ ID NO: 20617 - DNA, 23 bp, Homo sapiens
  source 1..23: mol_type = genomic DNA
gtcaaagttaaattataggctaa

SEQ ID NO: 20618 - DNA, 33 bp, Homo sapiens
  source 1..33: mol_type = genomic DNA
gtcaaagttaaattataggctaaatcctatata

SEQ ID NO: 20619 - DNA, 37 bp, Homo sapiens
  source 1..37: mol_type = genomic DNA
gtcaaagttaaattataggctaaatcctatatatctt

SEQ ID NO: 20620 - DNA, 38 bp, Homo sapiens
  source 1..38: mol_type = genomic DNA
gtcaaagttaaattataggctaaatcctatatatctta

SEQ ID NO: 20621 - DNA, 40 bp, Homo sapiens
  source 1..40: mol_type = genomic DNA
gtcaaagttaaattataggctaaatcctatatatcttacc

SEQ ID NO: 20622 - DNA, 35 bp, Homo sapiens
  source 1..35: mol_type = genomic DNA
gtcacgcgggagaccggggttcaattccccgacgg

SEQ ID NO: 20623 - DNA, 36 bp, Homo sapiens
  source 1..36: mol_type = genomic DNA
gtcacgcgggagaccggggttcaattccccgacggg

SEQ ID NO: 20624 - DNA, 37 bp, Homo sapiens
  source 1..37: mol_type = genomic DNA
gtcacgcgggagaccggggttcaattccccgacgggg

SEQ ID NO: 20625 - DNA, 40 bp, Homo sapiens
  source 1..40: mol_type = genomic DNA
gtcacgcgggagaccggggttcaattccccgacggggagc

SEQ ID NO: 20626 - DNA, 41 bp, Homo sapiens
  source 1..41: mol_type = genomic DNA
gtcacgcgggagaccggggttcaattccccgacggggagcc

SEQ ID NO: 20627 - DNA, 42 bp, Homo sapiens
  source 1..42: mol_type = genomic DNA
gtcacgcgggagaccggggttcaattccccgacggggagcca

SEQ ID NO: 20628 - DNA, 26 bp, Homo sapiens
  source 1..26: mol_type = genomic DNA
gtcacgcgggagaccggggttcgatt

SEQ ID NO: 20629 - DNA, 35 bp, Homo sapiens
  source 1..35: mol_type = genomic DNA
gtcacgcgggagaccggggttcgattccccgacgg

SEQ ID NO: 20630 - DNA, 36 bp, Homo sapiens
  source 1..36: mol_type = genomic DNA
gtcacgcgggagaccggggttcgattccccgacggg

SEQ ID NO: 20631 - DNA, 37 bp, Homo sapiens
  source 1..37: mol_type = genomic DNA
gtcacgcgggagaccggggttcgattccccgacgggg

SEQ ID NO: 20632 - DNA, 39 bp, Homo sapiens
  source 1..39: mol_type = genomic DNA
gtcacgcgggagaccggggttcgattccccgacggggag

SEQ ID NO: 20633 - DNA, 40 bp, Homo sapiens
  source 1..40: mol_type = genomic DNA
gtcacgcgggagaccggggttcgattccccgacggggagc

SEQ ID NO: 20634 - DNA, 41 bp, Homo sapiens
  source 1..41: mol_type = genomic DNA
gtcacgcgggagaccggggttcgattccccgacggggagcc

SEQ ID NO: 20635 - DNA, 42 bp, Homo sapiens
  source 1..42: mol_type = genomic DNA
gtcacgcgggagaccggggttcgattccccgacggggagcca

SEQ ID NO: 20636 - DNA, 16 bp, Homo sapiens
  source 1..16: mol_type = genomic DNA
gtcacggtggccgagt

SEQ ID NO: 20637 - DNA, 18 bp, Homo sapiens
  source 1..18: mol_type = genomic DNA
gtcacggtggccgagtgg

SEQ ID NO: 20638 - DNA, 19 bp, Homo sapiens
  source 1..19: mol_type = genomic DNA
gtcacggtggccgagtggt

SEQ ID NO: 20639 - DNA, 23 bp, Homo sapiens
  source 1..23: mol_type = genomic DNA
gtcacggtggccgagtggttaag

SEQ ID NO: 20640 - DNA, 24 bp, Homo sapiens
  source 1..24: mol_type = genomic DNA
gtcacggtggccgagtggttaagg

SEQ ID NO: 20641 - DNA, 25 bp, Homo sapiens
  source 1..25: mol_type = genomic DNA
gtcacggtggccgagtggttaaggc

SEQ ID NO: 20642 - DNA, 16 bp, Homo sapiens
  source 1..16: mol_type = genomic DNA
gtcacgtcggggtcac

SEQ ID NO: 20643 - DNA, 17 bp, Homo sapiens
  source 1..17: mol_type = genomic DNA
gtcacgtcggggtcacc

SEQ ID NO: 20644 - DNA, 18 bp, Homo sapiens
  source 1..18: mol_type = genomic DNA
gtcacgtcggggtcacca

SEQ ID NO: 20645 - DNA, 17 bp, Homo sapiens
  source 1..17: mol_type = genomic DNA
gtcagaggttcaattcc

SEQ ID NO: 20646 - DNA, 19 bp, Homo sapiens
  source 1..19: mol_type = genomic DNA
gtcagaggttcaattcctc

SEQ ID NO: 20647 - DNA, 20 bp, Homo sapiens
  source 1..20: mol_type = genomic DNA
gtcagaggttcaattcctct

SEQ ID NO: 20648 - DNA, 30 bp, Homo sapiens
  source 1..30: mol_type = genomic DNA
gtcagaggttcaattcctcttcttaacacc

SEQ ID NO: 20649 - DNA, 22 bp, Homo sapiens
  source 1..22: mol_type = genomic DNA
gtcagctaaataagctatcggg

SEQ ID NO: 20650 - DNA, 23 bp, Homo sapiens
  source 1..23: mol_type = genomic DNA
gtcagctaaataagctatcgggc

SEQ ID NO: 20651 - DNA, 24 bp, Homo sapiens
  source 1..24: mol_type = genomic DNA
gtcagctaaataagctatcgggcc

SEQ ID NO: 20652 - DNA, 25 bp, Homo sapiens
  source 1..25: mol_type = genomic DNA
gtcagctaaataagctatcgggccc

SEQ ID NO: 20653 - DNA, 26 bp, Homo sapiens
  source 1..26: mol_type = genomic DNA
gtcagctaaataagctatcgggccca

SEQ ID NO: 20654 - DNA, 27 bp, Homo sapiens
  source 1..27: mol_type = genomic DNA
gtcagctaaataagctatcgggcccat

SEQ ID NO: 20655 - DNA, 28 bp, Homo sapiens
  source 1..28: mol_type = genomic DNA
gtcagctaaataagctatcgggcccata

SEQ ID NO: 20656 - DNA, 29 bp, Homo sapiens
  source 1..29: mol_type = genomic DNA
gtcagctaaataagctatcgggcccatac

SEQ ID NO: 20657 - DNA, 30 bp, Homo sapiens
  source 1..30: mol_type = genomic DNA
gtcagctaaataagctatcgggcccatacc

SEQ ID NO: 20658 - DNA, 34 bp, Homo sapiens
  source 1..34: mol_type = genomic DNA
gtcagctaaataagctatcgggcccataccccga

SEQ ID NO: 20659 - DNA, 43 bp, Homo sapiens
  source 1..43: mol_type = genomic DNA
gtcagctaaataagctatcgggcccataccccgaaaatgttgg

SEQ ID NO: 20660 - DNA, 45 bp, Homo sapiens
  source 1..45: mol_type = genomic DNA
gtcagctaaataagctatcgggcccataccccgaaaatgttggtt

SEQ ID NO: 20661 - DNA, 16 bp, Homo sapiens
  source 1..16: mol_type = genomic DNA
gtcaggatggccgagc

SEQ ID NO: 20662 - DNA, 17 bp, Homo sapiens
  source 1..17: mol_type = genomic DNA
gtcaggatggccgagca

SEQ ID NO: 20663 - DNA, 17 bp, Homo sapiens
  source 1..17: mol_type = genomic DNA
gtcaggatggccgagcg

SEQ ID NO: 20664 - DNA, 18 bp, Homo sapiens
  source 1..18: mol_type = genomic DNA
gtcaggatggccgagcgg

SEQ ID NO: 20665 - DNA, 19 bp, Homo sapiens
  source 1..19: mol_type = genomic DNA
gtcaggatggccgagcggt

SEQ ID NO: 20666 - DNA, 20 bp, Homo sapiens
  source 1..20: mol_type = genomic DNA
gtcaggatggccgagcggtc

SEQ ID NO: 20667 - DNA, 21 bp, Homo sapiens
  source 1..21: mol_type = genomic DNA
gtcaggatggccgagcggtct

SEQ ID NO: 20668 - DNA, 22 bp, Homo sapiens
  source 1..22: mol_type = genomic DNA
gtcaggatggccgagcggtcta

SEQ ID NO: 20669 - DNA, 23 bp, Homo sapiens
  source 1..23: mol_type = genomic DNA
gtcaggatggccgagcggtctaa

SEQ ID NO: 20670 - DNA, 24 bp, Homo sapiens
  source 1..24: mol_type = genomic DNA
gtcaggatggccgagcggtctaag

SEQ ID NO: 20671 - DNA, 25 bp, Homo sapiens
  source 1..25: mol_type = genomic DNA
gtcaggatggccgagcggtctaagg

SEQ ID NO: 20672 - DNA, 26 bp, Homo sapiens
  source 1..26: mol_type = genomic DNA
gtcaggatggccgagcggtctaaggc

SEQ ID NO: 20673 - DNA, 29 bp, Homo sapiens
  source 1..29: mol_type = genomic DNA
gtcaggatggccgagcggtctaaggcgct

SEQ ID NO: 20674 - DNA, 30 bp, Homo sapiens
  source 1..30: mol_type = genomic DNA
gtcaggatggccgagcggtctaaggcgctg

SEQ ID NO: 20675 - DNA, 31 bp, Homo sapiens
  source 1..31: mol_type = genomic DNA
gtcaggatggccgagcggtctaaggcgctgc

SEQ ID NO: 20676 - DNA, 32 bp, Homo sapiens
  source 1..32: mol_type = genomic DNA
gtcaggatggccgagcggtctaaggcgctgcg

SEQ ID NO: 20677 - DNA, 33 bp, Homo sapiens
  source 1..33: mol_type = genomic DNA
gtcaggatggccgagcggtctaaggcgctgcgt

SEQ ID NO: 20678 - DNA, 34 bp, Homo sapiens
  source 1..34: mol_type = genomic DNA
gtcaggatggccgagcggtctaaggcgctgcgtt

SEQ ID NO: 20679 - DNA, 35 bp, Homo sapiens
  source 1..35: mol_type = genomic DNA
gtcaggatggccgagcggtctaaggcgctgcgttc

SEQ ID NO: 20680 - DNA, 36 bp, Homo sapiens
  source 1..36: mol_type = genomic DNA
gtcaggatggccgagcggtctaaggcgctgcgttca

SEQ ID NO: 20681 - DNA, 37 bp, Homo sapiens
  source 1..37: mol_type = genomic DNA
gtcaggatggccgagcggtctaaggcgctgcgttcag

SEQ ID NO: 20682 - DNA, 16 bp, Homo sapiens
  source 1..16: mol_type = genomic DNA
gtcaggatggccgagt

SEQ ID NO: 20683 - DNA, 17 bp, Homo sapiens
  source 1..17: mol_type = genomic DNA
gtcaggatggccgagtg

SEQ ID NO: 20684 - DNA, 18 bp, Homo sapiens
  source 1..18: mol_type = genomic DNA
gtcaggatggccgagtgg

SEQ ID NO: 20685 - DNA, 19 bp, Homo sapiens
  source 1..19: mol_type = genomic DNA
gtcaggatggccgagtggt

SEQ ID NO: 20686 - DNA, 20 bp, Homo sapiens
  source 1..20: mol_type = genomic DNA
gtcaggatggccgagtggtc

SEQ ID NO: 20687 - DNA, 21 bp, Homo sapiens
  source 1..21: mol_type = genomic DNA
gtcaggatggccgagtggtct

SEQ ID NO: 20688 - DNA, 22 bp, Homo sapiens
  source 1..22: mol_type = genomic DNA
gtcaggatggccgagtggtcta

SEQ ID NO: 20689 - DNA, 23 bp, Homo sapiens
  source 1..23: mol_type = genomic DNA
gtcaggatggccgagtggtctaa

SEQ ID NO: 20690 - DNA, 24 bp, Homo sapiens
  source 1..24: mol_type = genomic DNA
gtcaggatggccgagtggtctaag

SEQ ID NO: 20691 - DNA, 25 bp, Homo sapiens
  source 1..25: mol_type = genomic DNA
gtcaggatggccgagtggtctaagg

SEQ ID NO: 20692 - DNA, 26 bp, Homo sapiens
  source 1..26: mol_type = genomic DNA
gtcaggatggccgagtggtctaaggc

SEQ ID NO: 20693 - DNA, 29 bp, Homo sapiens
  source 1..29: mol_type = genomic DNA
gtcaggatggccgagtggtctaaggcgcc

SEQ ID NO: 20694 - DNA, 30 bp, Homo sapiens
  source 1..30: mol_type = genomic DNA
gtcaggatggccgagtggtctaaggcgcca

SEQ ID NO: 20695 - DNA, 32 bp, Homo sapiens
  source 1..32: mol_type = genomic DNA
gtcaggatggccgagtggtctaaggcgccaga

SEQ ID NO: 20696 - DNA, 33 bp, Homo sapiens
  source 1..33: mol_type = genomic DNA
gtcaggatggccgagtggtctaaggcgccagac

SEQ ID NO: 20697 - DNA, 34 bp, Homo sapiens
  source 1..34: mol_type = genomic DNA
gtcaggatggccgagtggtctaaggcgccagact

SEQ ID NO: 20698 - DNA, 35 bp, Homo sapiens
  source 1..35: mol_type = genomic DNA
gtcaggatggccgagtggtctaaggcgccagactc

SEQ ID NO: 20699 - DNA, 48 bp, Homo sapiens
  source 1..48: mol_type = genomic DNA
gtcaggatggccgagtggtctaaggcgccagactcaagttctggtctc

SEQ ID NO: 20700 - DNA, 18 bp, Homo sapiens
  source 1..18: mol_type = genomic DNA
gtcagtagagcatcagac

SEQ ID NO: 20701 - DNA, 27 bp, Homo sapiens
  source 1..27: mol_type = genomic DNA
gtcagtctcataatctgaaggtcctga

SEQ ID NO: 20702 - DNA, 26 bp, Homo sapiens
  source 1..26: mol_type = genomic DNA
gtcagtctcataatctgaaggtcgtg

SEQ ID NO: 20703 - DNA, 31 bp, Homo sapiens
  source 1..31: mol_type = genomic DNA
gtcagtctcataatctgaaggtcgtgagttc

SEQ ID NO: 20704 - DNA, 19 bp, Homo sapiens
  source 1..19: mol_type = genomic DNA
gtcatggaggccatggggt

SEQ ID NO: 20705 - DNA, 20 bp, Homo sapiens
  source 1..20: mol_type = genomic DNA
gtcatggaggccatggggtt

SEQ ID NO: 20706 - DNA, 21 bp, Homo sapiens
  source 1..21: mol_type = genomic DNA
gtcatggaggccatggggttg

SEQ ID NO: 20707 - DNA, 27 bp, Homo sapiens
  source 1..27: mol_type = genomic DNA
gtcatggaggccatggggttggcttga

SEQ ID NO: 20708 - DNA, 21 bp, Homo sapiens
  source 1..21: mol_type = genomic DNA
gtcatttcgatggcgtgggtt

SEQ ID NO: 20709 - DNA, 27 bp, Homo sapiens
  source 1..27: mol_type = genomic DNA
gtccagggttcaagtccctgttcgggc

SEQ ID NO: 20710 - DNA, 28 bp, Homo sapiens
  source 1..28: mol_type = genomic DNA
gtccagggttcaagtccctgttcgggcg

SEQ ID NO: 20711 - DNA, 29 bp, Homo sapiens
  source 1..29: mol_type = genomic DNA
gtccagggttcaagtccctgttcgggcgc

SEQ ID NO: 20712 - DNA, 30 bp, Homo sapiens
  source 1..30: mol_type = genomic DNA
gtccagggttcaagtccctgttcgggcgcc

SEQ ID NO: 20713 - DNA, 31 bp, Homo sapiens
  source 1..31: mol_type = genomic DNA
gtccagggttcaagtccctgttcgggcgcca

SEQ ID NO: 20714 - DNA, 34 bp, Homo sapiens
  source 1..34: mol_type = genomic DNA
gtcccacatggtctagcggttaggattcctggtt

SEQ ID NO: 20715 - DNA, 35 bp, Homo sapiens
  source 1..35: mol_type = genomic DNA
gtcccacatggtctagcggttaggattcctggttt

SEQ ID NO: 20716 - DNA, 17 bp, Homo sapiens
  source 1..17: mol_type = genomic DNA
gtcccaccagagtcgcc

SEQ ID NO: 20717 - DNA, 18 bp, Homo sapiens
  source 1..18: mol_type = genomic DNA
gtcccaccagagtcgcca

SEQ ID NO: 20718 - DNA, 17 bp, Homo sapiens
  source 1..17: mol_type = genomic DNA
gtcccacccggggtacc

SEQ ID NO: 20719 - DNA, 18 bp, Homo sapiens
  source 1..18: mol_type = genomic DNA
gtcccacccggggtacca

SEQ ID NO: 20720 - DNA, 17 bp, Homo sapiens
  source 1..17: mol_type = genomic DNA
gtcccacctggggtacc

SEQ ID NO: 20721 - DNA, 18 bp, Homo sapiens
  source 1..18: mol_type = genomic DNA
gtcccacctggggtgcca

SEQ ID NO: 20722 - DNA, 34 bp, Homo sapiens
  source 1..34: mol_type = genomic DNA
gtcccatatggtctagcggttaggattcctggtt

SEQ ID NO: 20723 - DNA, 16 bp, Homo sapiens
  source 1..16: mol_type = genomic DNA
gtcccatctggggtgc

SEQ ID NO: 20724 - DNA, 17 bp, Homo sapiens
  source 1..17: mol_type = genomic DNA
gtcccatctggggtgcc

SEQ ID NO: 20725 - DNA, 18 bp, Homo sapiens
  source 1..18: mol_type = genomic DNA
gtcccatctggggtgcca

SEQ ID NO: 20726 - DNA, 17 bp, Homo sapiens
  source 1..17: mol_type = genomic DNA
gtcccatctgggtcgcc

SEQ ID NO: 20727 - DNA, 18 bp, Homo sapiens
  source 1..18: mol_type = genomic DNA
gtcccatctgggtcgcca

SEQ ID NO: 20728 - DNA, 28 bp, Homo sapiens
  source 1..28: mol_type = genomic DNA
gtcccatggtgtaatggttagcactctg

SEQ ID NO: 20729 - DNA, 29 bp, Homo sapiens
  source 1..29: mol_type = genomic DNA
gtcccatggtgtaatggttagcactctgg

SEQ ID NO: 20730 - DNA, 31 bp, Homo sapiens
  source 1..31: mol_type = genomic DNA
gtcccatggtgtaatggttagcactctggac

SEQ ID NO: 20731 - DNA, 32 bp, Homo sapiens
  source 1..32: mol_type = genomic DNA
gtcccatggtgtaatggttagcactctggact

SEQ ID NO: 20732 - DNA, 35 bp, Homo sapiens
  source 1..35: mol_type = genomic DNA
gtcccatggtgtaatggttagcactctggactttg

SEQ ID NO: 20733 - DNA, 40 bp, Homo sapiens
  source 1..40: mol_type = genomic DNA
gtcccatggtgtaatggttagcactctggactttgaatcc

SEQ ID NO: 20734 - DNA, 16 bp, Homo sapiens
  source 1..16: mol_type = genomic DNA
gtcccattggtctagc

SEQ ID NO: 20735 - DNA, 17 bp, Homo sapiens
  source 1..17: mol_type = genomic DNA
gtcccattggtctagcc

SEQ ID NO: 20736 - DNA, 18 bp, Homo sapiens
  source 1..18: mol_type = genomic DNA
gtcccattggtctagcca

SEQ ID NO: 20737 - DNA, 18 bp, Homo sapiens
  source 1..18: mol_type = genomic DNA
gtccccggttcaaatccg

SEQ ID NO: 20738 - DNA, 19 bp, Homo sapiens
  source 1..19: mol_type = genomic DNA
gtccccggttcaaatccgg

SEQ ID NO: 20739 - DNA, 30 bp, Homo sapiens
  source 1..30: mol_type = genomic DNA
gtccccggttcaaatccgggtgccccctcc

SEQ ID NO: 20740 - DNA, 17 bp, Homo sapiens
  source 1..17: mol_type = genomic DNA
gtccccggttcgaaacc

SEQ ID NO: 20741 - DNA, 21 bp, Homo sapiens
  source 1..21: mol_type = genomic DNA
gtccccggttcgatcccgggc

SEQ ID NO: 20742 - DNA, 16 bp, Homo sapiens
  source 1..16: mol_type = genomic DNA
gtcccggcagagatgc

SEQ ID NO: 20743 - DNA, 17 bp, Homo sapiens
  source 1..17: mol_type = genomic DNA
gtcccggcagagatgcc

SEQ ID NO: 20744 - DNA, 18 bp, Homo sapiens
  source 1..18: mol_type = genomic DNA
gtcccggcagagatgcca

SEQ ID NO: 20745 - DNA, 16 bp, Homo sapiens
  source 1..16: mol_type = genomic DNA
gtcccggcggagtcgc

SEQ ID NO: 20746 - DNA, 17 bp, Homo sapiens
  source 1..17: mol_type = genomic DNA
gtcccggcggagtcgcc

SEQ ID NO: 20747 - DNA, 18 bp, Homo sapiens
  source 1..18: mol_type = genomic DNA
gtcccggcggagtcgcca

SEQ ID NO: 20748 - DNA, 18 bp, Homo sapiens
  source 1..18: mol_type = genomic DNA
gtcccgggttcaaatccc

SEQ ID NO: 20749 - DNA, 19 bp, Homo sapiens
  source 1..19: mol_type = genomic DNA
gtcccgggttcaaatcccg

SEQ ID NO: 20750 - DNA, 22 bp, Homo sapiens
  source 1..22: mol_type = genomic DNA
gtcccgggttcaaatcccggac

SEQ ID NO: 20751 - DNA, 17 bp, Homo sapiens
  source 1..17: mol_type = genomic DNA
gtcccgggttcgatccc

SEQ ID NO: 20752 - DNA, 18 bp, Homo sapiens
  source 1..18: mol_type = genomic DNA
gtcccgggttcgatcccc

SEQ ID NO: 20753 - DNA, 30 bp, Homo sapiens
  source 1..30: mol_type = genomic DNA
gtcccgggttcgatccccagcatctccacc

SEQ ID NO: 20754 - DNA, 32 bp, Homo sapiens
  source 1..32: mol_type = genomic DNA
gtccctggtggtctagtggttaggattcggcg

SEQ ID NO: 20755 - DNA, 33 bp, Homo sapiens
  source 1..33: mol_type = genomic DNA
gtccctggtggtctagtggttaggattcggcgc

SEQ ID NO: 20756 - DNA, 34 bp, Homo sapiens
  source 1..34: mol_type = genomic DNA
gtccctggtggtctagtggttaggattcggcgct

SEQ ID NO: 20757 - DNA, 35 bp, Homo sapiens
  source 1..35: mol_type = genomic DNA
gtccctggtggtctagtggttaggattcggcgctc

SEQ ID NO: 20758 - DNA, 36 bp, Homo sapiens
  source 1..36: mol_type = genomic DNA
gtccctggtggtctagtggttaggattcggcgctct

SEQ ID NO: 20759 - DNA, 28 bp, Homo sapiens
  source 1..28: mol_type = genomic DNA
gtccctggttcaatcccgggtttcggca

SEQ ID NO: 20760 - DNA, 17 bp, Homo sapiens
  source 1..17: mol_type = genomic DNA
gtccctgtccaggcgcc

SEQ ID NO: 20761 - DNA, 18 bp, Homo sapiens
  source 1..18: mol_type = genomic DNA
gtccctgtccaggcgcca

SEQ ID NO: 20762 - DNA, 17 bp, Homo sapiens
  source 1..17: mol_type = genomic DNA
gtccctgttcaggcacc

SEQ ID NO: 20763 - DNA, 16 bp, Homo sapiens
  source 1..16: mol_type = genomic DNA
gtccctgttcgggcgc

SEQ ID NO: 20764 - DNA, 17 bp, Homo sapiens
  source 1..17: mol_type = genomic DNA
gtccctgttcgggcgcc

SEQ ID NO: 20765 - DNA, 18 bp, Homo sapiens
  source 1..18: mol_type = genomic DNA
gtccctgttcgggcgcca

SEQ ID NO: 20766 - DNA, 16 bp, Homo sapiens
  source 1..16: mol_type = genomic DNA
gtcccttcgtggtcgc

SEQ ID NO: 20767 - DNA, 17 bp, Homo sapiens
  source 1..17: mol_type = genomic DNA
gtcccttcgtggtcgcc

SEQ ID NO: 20768 - DNA, 18 bp, Homo sapiens
  source 1..18: mol_type = genomic DNA
gtcccttcgtggtcgcca

SEQ ID NO: 20769 - DNA, 19 bp, Homo sapiens
  source 1..19: mol_type = genomic DNA
gtccgcgtgggttcgaacc

SEQ ID NO: 20770 - DNA, 22 bp, Homo sapiens
  source 1..22: mol_type = genomic DNA
gtccgcgtgggttcgaacccca

SEQ ID NO: 20771 - DNA, 24 bp, Homo sapiens
  source 1..24: mol_type = genomic DNA
gtccgcgtgggttcgaaccccact

SEQ ID NO: 20772 - DNA, 26 bp, Homo sapiens
  source 1..26: mol_type = genomic DNA
gtccgcgtgggttcgaaccccactcc

SEQ ID NO: 20773 - DNA, 27 bp, Homo sapiens
  source 1..27: mol_type = genomic DNA
gtccgcgtgggttcgaaccccactcct

SEQ ID NO: 20774 - DNA, 28 bp, Homo sapiens
  source 1..28: mol_type = genomic DNA
gtccgcgtgggttcgaaccccactcctg

SEQ ID NO: 20775 - DNA, 29 bp, Homo sapiens
  source 1..29: mol_type = genomic DNA
gtccgcgtgggttcgaaccccactcctgg

SEQ ID NO: 20776 - DNA, 30 bp, Homo sapiens
  source 1..30: mol_type = genomic DNA
gtccgcgtgggttcgaaccccactcctggt

SEQ ID NO: 20777 - DNA, 31 bp, Homo sapiens
  source 1..31: mol_type = genomic DNA
gtccgcgtgggttcgaaccccactcctggta

SEQ ID NO: 20778 - DNA, 32 bp, Homo sapiens
  source 1..32: mol_type = genomic DNA
gtccgcgtgggttcgaaccccactcctggtac

SEQ ID NO: 20779 - DNA, 33 bp, Homo sapiens
  source 1..33: mol_type = genomic DNA
gtccgcgtgggttcgaaccccactcctggtacc

SEQ ID NO: 20780 - DNA, 34 bp, Homo sapiens
  source 1..34: mol_type = genomic DNA
gtccgcgtgggttcgaaccccactcctggtacca

SEQ ID NO: 20781 - DNA, 16 bp, Homo sapiens
  source 1..16: mol_type = genomic DNA
gtccgtgcgagaatac

SEQ ID NO: 20782 - DNA, 17 bp, Homo sapiens
  source 1..17: mol_type = genomic DNA
gtccgtgcgagaatacc

SEQ ID NO: 20783 - DNA, 18 bp, Homo sapiens
  source 1..18: mol_type = genomic DNA
gtccgtgcgagaatacca

SEQ ID NO: 20784 - DNA, 32 bp, Homo sapiens
  source 1..32: mol_type = genomic DNA
gtcctcgttagtatagtggtgagtatccccgc

SEQ ID NO: 20785 - DNA, 17 bp, Homo sapiens
  source 1..17: mol_type = genomic DNA
gtcctgagttcgaacct

SEQ ID NO: 20786 - DNA, 27 bp, Homo sapiens
  source 1..27: mol_type = genomic DNA
gtcctgagttcgaacctcagagggggc

SEQ ID NO: 20787 - DNA, 28 bp, Homo sapiens
  source 1..28: mol_type = genomic DNA
gtcctgagttcgaacctcagagggggca

SEQ ID NO: 20788 - DNA, 31 bp, Homo sapiens
  source 1..31: mol_type = genomic DNA
gtcctgagttcgaacctcagagggggcacca

SEQ ID NO: 20789 - DNA, 16 bp, Homo sapiens
  source 1..16: mol_type = genomic DNA
gtcctgccgcggtcgc

SEQ ID NO: 20790 - DNA, 17 bp, Homo sapiens
  source 1..17: mol_type = genomic DNA
gtcctgccgcggtcgcc

SEQ ID NO: 20791 - DNA, 18 bp, Homo sapiens
  source 1..18: mol_type = genomic DNA
gtcctgccgcggtcgcca

SEQ ID NO: 20792 - DNA, 16 bp, Homo sapiens
  source 1..16: mol_type = genomic DNA
gtcctgggttcgagcc

SEQ ID NO: 20793 - DNA, 17 bp, Homo sapiens
  source 1..17: mol_type = genomic DNA
gtcctgggttcgagccc

SEQ ID NO: 20794 - DNA, 18 bp, Homo sapiens
  source 1..18: mol_type = genomic DNA
gtcctgggttcgagcccc

SEQ ID NO: 20795 - DNA, 27 bp, Homo sapiens
  source 1..27: mol_type = genomic DNA
gtcctgggttcgagccccagtggaacc

SEQ ID NO: 20796 - DNA, 30 bp, Homo sapiens
  source 1..30: mol_type = genomic DNA
gtcctgggttcgagccccagtggaaccacc

SEQ ID NO: 20797 - DNA, 31 bp, Homo sapiens
  source 1..31: mol_type = genomic DNA
gtcctgggttcgagccccagtggaaccacca

SEQ ID NO: 20798 - DNA, 16 bp, Homo sapiens
  source 1..16: mol_type = genomic DNA
gtccttgtagtataaa

SEQ ID NO: 20799 - DNA, 17 bp, Homo sapiens
  source 1..17: mol_type = genomic DNA
gtccttgtagtataaac

SEQ ID NO: 20800 - DNA, 18 bp, Homo sapiens
  source 1..18: mol_type = genomic DNA
gtccttgtagtataaact

SEQ ID NO: 20801 - DNA, 19 bp, Homo sapiens
  source 1..19: mol_type = genomic DNA
gtccttgtagtataaacta

SEQ ID NO: 20802 - DNA, 20 bp, Homo sapiens
  source 1..20: mol_type = genomic DNA
gtccttgtagtataaactaa

SEQ ID NO: 20803 - DNA, 21 bp, Homo sapiens
  source 1..21: mol_type = genomic DNA
gtccttgtagtataaactaat

SEQ ID NO: 20804 - DNA, 22 bp, Homo sapiens
  source 1..22: mol_type = genomic DNA
gtccttgtagtataaactaata

SEQ ID NO: 20805 - DNA, 23 bp, Homo sapiens
  source 1..23: mol_type = genomic DNA
gtccttgtagtataaactaatac

SEQ ID NO: 20806 - DNA, 24 bp, Homo sapiens
  source 1..24: mol_type = genomic DNA
gtccttgtagtataaactaataca

SEQ ID NO: 20807 - DNA, 25 bp, Homo sapiens
  source 1..25: mol_type = genomic DNA
gtccttgtagtataaactaatacac

SEQ ID NO: 20808 - DNA, 26 bp, Homo sapiens
  source 1..26: mol_type = genomic DNA
gtccttgtagtataaactaatacacc

SEQ ID NO: 20809 - DNA, 27 bp, Homo sapiens
  source 1..27: mol_type = genomic DNA
gtccttgtagtataaactaatacacca

SEQ ID NO: 20810 - DNA, 28 bp, Homo sapiens
  source 1..28: mol_type = genomic DNA
gtccttgtagtataaactaatacaccag

SEQ ID NO: 20811 - DNA, 29 bp, Homo sapiens
  source 1..29: mol_type = genomic DNA
gtccttgtagtataaactaatacaccagt

SEQ ID NO: 20812 - DNA, 30 bp, Homo sapiens
  source 1..30: mol_type = genomic DNA
gtccttgtagtataaactaatacaccagtc

SEQ ID NO: 20813 - DNA, 31 bp, Homo sapiens
  source 1..31: mol_type = genomic DNA
gtccttgtagtataaactaatacaccagtct

SEQ ID NO: 20814 - DNA, 33 bp, Homo sapiens
  source 1..33: mol_type = genomic DNA
gtccttgtagtataaactaatacaccagtcttg

SEQ ID NO: 20815 - DNA, 34 bp, Homo sapiens
  source 1..34: mol_type = genomic DNA
gtccttgtagtataaactaatacaccagtcttgt

SEQ ID NO: 20816 - DNA, 38 bp, Homo sapiens
  source 1..38: mol_type = genomic DNA
gtccttgtagtataaactaatacaccagtcttgtaaac

SEQ ID NO: 20817 - DNA, 39 bp, Homo sapiens
  source 1..39: mol_type = genomic DNA
gtccttgtagtataaactaatacaccagtcttgtaaacc

SEQ ID NO: 20818 - DNA, 40 bp, Homo sapiens
  source 1..40: mol_type = genomic DNA
gtccttgtagtataaactaatacaccagtcttgtaaaccg

SEQ ID NO: 20819 - DNA, 41 bp, Homo sapiens
  source 1..41: mol_type = genomic DNA
gtccttgtagtataaactaatacaccagtcttgtaaaccgg

SEQ ID NO: 20820 - DNA, 44 bp, Homo sapiens
  source 1..44: mol_type = genomic DNA
gtccttgtagtataaactaatacaccagtcttgtaaaccggaga

SEQ ID NO: 20821 - DNA, 16 bp, Homo sapiens
  source 1..16: mol_type = genomic DNA
gtcgatagagcatgag

SEQ ID NO: 20822 - DNA, 16 bp, Homo sapiens
  source 1..16: mol_type = genomic DNA
gtcgatggatcgaaac

SEQ ID NO: 20823 - DNA, 17 bp, Homo sapiens
  source 1..17: mol_type = genomic DNA
gtcgatggatcgaaacc

SEQ ID NO: 20824 - DNA, 18 bp, Homo sapiens
  source 1..18: mol_type = genomic DNA
gtcgatggatcgaaacca

SEQ ID NO: 20825 - DNA, 30 bp, Homo sapiens
  source 1..30: mol_type = genomic DNA
gtcgatggatcgaaaccatcctctgctacc

SEQ ID NO: 20826 - DNA, 23 bp, Homo sapiens
  source 1..23: mol_type = genomic DNA
gtcgattccccgacggggagcca

SEQ ID NO: 20827 - DNA, 16 bp, Homo sapiens
  source 1..16: mol_type = genomic DNA
gtcgcagtctcccctg

SEQ ID NO: 20828 - DNA, 24 bp, Homo sapiens
  source 1..24: mol_type = genomic DNA
gtcgcagtctcccctggaggcgtg

SEQ ID NO: 20829 - DNA, 16 bp, Homo sapiens
  source 1..16: mol_type = genomic DNA
gtcgcgagttcaaatc

SEQ ID NO: 20830 - DNA, 18 bp, Homo sapiens
  source 1..18: mol_type = genomic DNA
gtcgcgagttcaaatctc

SEQ ID NO: 20831 - DNA, 26 bp, Homo sapiens
  source 1..26: mol_type = genomic DNA
gtcgcgagttcaaatctcgctggggc

SEQ ID NO: 20832 - DNA, 27 bp, Homo sapiens
  source 1..27: mol_type = genomic DNA
gtcgcgagttcaaatctcgctggggcc

SEQ ID NO: 20833 - DNA, 29 bp, Homo sapiens
  source 1..29: mol_type = genomic DNA
gtcgcgagttcaaatctcgctggggcctc

SEQ ID NO: 20834 - DNA, 30 bp, Homo sapiens
  source 1..30: mol_type = genomic DNA
gtcgcgagttcaaatctcgctggggcctcc

SEQ ID NO: 20835 - DNA, 29 bp, Homo sapiens
  source 1..29: mol_type = genomic DNA
gtcgcgagttcaattctcgctggggcctc

SEQ ID NO: 20836 - DNA, 29 bp, Homo sapiens
  source 1..29: mol_type = genomic DNA
gtcgcgagttcgatcctcgctggggcctc

SEQ ID NO: 20837 - DNA, 30 bp, Homo sapiens
  source 1..30: mol_type = genomic DNA
gtcgcgagttcgatcctcgctggggcctcc

SEQ ID NO: 20838 - DNA, 27 bp, Homo sapiens
  source 1..27: mol_type = genomic DNA
gtcgcgggttcgaaccccgtacgggcc

SEQ ID NO: 20839 - DNA, 28 bp, Homo sapiens
  source 1..28: mol_type = genomic DNA
gtcgcgggttcgaaccccgtacgggcca

SEQ ID NO: 20840 - DNA, 30 bp, Homo sapiens
  source 1..30: mol_type = genomic DNA
gtcgcgggttcgaaccccgtacgggccacc

SEQ ID NO: 20841 - DNA, 26 bp, Homo sapiens
  source 1..26: mol_type = genomic DNA
gtcgcgggttcgatccccgtacgggc

SEQ ID NO: 20842 - DNA, 27 bp, Homo sapiens
  source 1..27: mol_type = genomic DNA
gtcgcgggttcgatccccgtacgggcc

SEQ ID NO: 20843 - DNA, 28 bp, Homo sapiens
  source 1..28: mol_type = genomic DNA
gtcgcgggttcgatccccgtacgggcca

SEQ ID NO: 20844 - DNA, 29 bp, Homo sapiens
  source 1..29: mol_type = genomic DNA
gtcgcgggttcgatccccgtacgggccac

SEQ ID NO: 20845 - DNA, 30 bp, Homo sapiens
  source 1..30: mol_type = genomic DNA
gtcgcgggttcgatccccgtacgggccacc

SEQ ID NO: 20846 - DNA, 31 bp, Homo sapiens
  source 1..31: mol_type = genomic DNA
gtcgcgggttcgatccccgtacgggccacca

SEQ ID NO: 20847 - DNA, 30 bp, Homo sapiens
  source 1..30: mol_type = genomic DNA
gtcgctggttcgaatccggctcgaaggacc

SEQ ID NO: 20848 - DNA, 31 bp, Homo sapiens
  source 1..31: mol_type = genomic DNA
gtcgctggttcgaatccggctcgaaggacca

SEQ ID NO: 20849 - DNA, 29 bp, Homo sapiens
  source 1..29: mol_type = genomic DNA
gtcgctggttcgaatccggctcggaggac

SEQ ID NO: 20850 - DNA, 30 bp, Homo sapiens
  source 1..30: mol_type = genomic DNA
gtcgctggttcgaatccggctcggaggacc

SEQ ID NO: 20851 - DNA, 30 bp, Homo sapiens
  source 1..30: mol_type = genomic DNA
gtcgctggttcgattccagctcgaaggacc

SEQ ID NO: 20852 - DNA, 20 bp, Homo sapiens
  source 1..20: mol_type = genomic DNA
gtcgctggttcgattccggc

SEQ ID NO: 20853 - DNA, 29 bp, Homo sapiens
  source 1..29: mol_type = genomic DNA
gtcgctggttcgattccggctcgaaggac

SEQ ID NO: 20854 - DNA, 30 bp, Homo sapiens
  source 1..30: mol_type = genomic DNA
gtcgctggttcgattccggctcgaaggacc

SEQ ID NO: 20855 - DNA, 31 bp, Homo sapiens
  source 1..31: mol_type = genomic DNA
gtcgctggttcgattccggctcgaaggacca

SEQ ID NO: 20856 - DNA, 17 bp, Homo sapiens
  source 1..17: mol_type = genomic DNA
gtcggatcccagctctc

SEQ ID NO: 20857 - DNA, 18 bp, Homo sapiens
  source 1..18: mol_type = genomic DNA
gtcggtagagcataagac

SEQ ID NO: 20858 - DNA, 19 bp, Homo sapiens
  source 1..19: mol_type = genomic DNA
gtcggtagagcataagact

SEQ ID NO: 20859 - DNA, 16 bp, Homo sapiens
  source 1..16: mol_type = genomic DNA
gtcggtagagcatcag

SEQ ID NO: 20860 - DNA, 17 bp, Homo sapiens
  source 1..17: mol_type = genomic DNA
gtcggtagagcatcaga

SEQ ID NO: 20861 - DNA, 18 bp, Homo sapiens
  source 1..18: mol_type = genomic DNA
gtcggtagagcatcagac

SEQ ID NO: 20862 - DNA, 19 bp, Homo sapiens
  source 1..19: mol_type = genomic DNA
gtcggtagagcatcagact

SEQ ID NO: 20863 - DNA, 20 bp, Homo sapiens
  source 1..20: mol_type = genomic DNA
gtcggtagagcatcagactt

SEQ ID NO: 20864 - DNA, 21 bp, Homo sapiens
  source 1..21: mol_type = genomic DNA
gtcggtagagcatcagacttt

SEQ ID NO: 20865 - DNA, 22 bp, Homo sapiens
  source 1..22: mol_type = genomic DNA
gtcggtagagcatcagactttt

SEQ ID NO: 20866 - DNA, 29 bp, Homo sapiens
  source 1..29: mol_type = genomic DNA
gtcggtagagcatcagacttttaatctga

SEQ ID NO: 20867 - DNA, 16 bp, Homo sapiens
  source 1..16: mol_type = genomic DNA
gtcggtagagcatgag

SEQ ID NO: 20868 - DNA, 17 bp, Homo sapiens
  source 1..17: mol_type = genomic DNA
gtcggtagagcatgaga

SEQ ID NO: 20869 - DNA, 18 bp, Homo sapiens
  source 1..18: mol_type = genomic DNA
gtcggtagagcatgagac

SEQ ID NO: 20870 - DNA, 19 bp, Homo sapiens
  source 1..19: mol_type = genomic DNA
gtcggtagagcatgagacc

SEQ ID NO: 20871 - DNA, 20 bp, Homo sapiens
  source 1..20: mol_type = genomic DNA
gtcggtagagcatgagaccc

SEQ ID NO: 20872 - DNA, 21 bp, Homo sapiens
  source 1..21: mol_type = genomic DNA
gtcggtagagcatgagaccct

SEQ ID NO: 20873 - DNA, 24 bp, Homo sapiens
  source 1..24: mol_type = genomic DNA
gtcggtagagcatgagacccttaa

SEQ ID NO: 20874 - DNA, 25 bp, Homo sapiens
  source 1..25: mol_type = genomic DNA
gtcggtagagcatgagacccttaat

SEQ ID NO: 20875 - DNA, 26 bp, Homo sapiens
  source 1..26: mol_type = genomic DNA
gtcggtagagcatgagacccttaatc

SEQ ID NO: 20876 - DNA, 27 bp, Homo sapiens
  source 1..27: mol_type = genomic DNA
gtcggtagagcatgagacccttaatct

SEQ ID NO: 20877 - DNA, 28 bp, Homo sapiens
  source 1..28: mol_type = genomic DNA
gtcggtagagcatgagacccttaatctc

SEQ ID NO: 20878 - DNA, 19 bp, Homo sapiens
  source 1..19: mol_type = genomic DNA
gtcggtagagcatgagact

SEQ ID NO: 20879 - DNA, 20 bp, Homo sapiens
  source 1..20: mol_type = genomic DNA
gtcggtagagcatgagactc

SEQ ID NO: 20880 - DNA, 21 bp, Homo sapiens
  source 1..21: mol_type = genomic DNA
gtcggtagagcatgagactct

SEQ ID NO: 20881 - DNA, 22 bp, Homo sapiens
  source 1..22: mol_type = genomic DNA
gtcggtagagcatgagactctt

SEQ ID NO: 20882 - DNA, 23 bp, Homo sapiens
  source 1..23: mol_type = genomic DNA
gtcggtagagcatgagactctta

SEQ ID NO: 20883 - DNA, 24 bp, Homo sapiens
  source 1..24: mol_type = genomic DNA
gtcggtagagcatgagactcttaa

SEQ ID NO: 20884 - DNA, 25 bp, Homo sapiens
  source 1..25: mol_type = genomic DNA
gtcggtagagcatgagactcttaat

SEQ ID NO: 20885 - DNA, 26 bp, Homo sapiens
  source 1..26: mol_type = genomic DNA
gtcggtagagcatgagactcttaatc

SEQ ID NO: 20886 - DNA, 27 bp, Homo sapiens
  source 1..27: mol_type = genomic DNA
gtcggtagagcatgagactcttaatct

SEQ ID NO: 20887 - DNA, 28 bp, Homo sapiens
  source 1..28: mol_type = genomic DNA
gtcggtagagcatgagactcttaatctc

SEQ ID NO: 20888 - DNA, 29 bp, Homo sapiens
  source 1..29: mol_type = genomic DNA
gtcggtagagcatgagactcttaatctca

SEQ ID NO: 20889 - DNA, 36 bp, Homo sapiens
  source 1..36: mol_type = genomic DNA
gtcggtagagcatgagactcttaatctcagggtcgt

SEQ ID NO: 20890 - DNA, 37 bp, Homo sapiens
  source 1..37: mol_type = genomic DNA
gtcggtagagcatgagactcttaatctcagggtcgtg

SEQ ID NO: 20891 - DNA, 38 bp, Homo sapiens
  source 1..38: mol_type = genomic DNA
gtcggtagagcatgagactcttaatctcagggtcgtgg

SEQ ID NO: 20892 - DNA, 39 bp, Homo sapiens
  source 1..39: mol_type = genomic DNA
gtcggtagagcatgagactcttaatctcagggtcgtggg

SEQ ID NO: 20893 - DNA, 40 bp, Homo sapiens
  source 1..40: mol_type = genomic DNA
gtcggtagagcatgagactcttaatctcagggtcgtgggt

SEQ ID NO: 20894 - DNA, 41 bp, Homo sapiens
  source 1..41: mol_type = genomic DNA
gtcggtagagcatgagactcttaatctcagggtcgtgggtt

SEQ ID NO: 20895 - DNA, 42 bp, Homo sapiens
  source 1..42: mol_type = genomic DNA
gtcggtagagcatgagactcttaatctcagggtcgtgggttc

SEQ ID NO: 20896 - DNA, 43 bp, Homo sapiens
  source 1..43: mol_type = genomic DNA
gtcggtagagcatgagactcttaatctcagggtcgtgggttcg

SEQ ID NO: 20897 - DNA, 16 bp, Homo sapiens
  source 1..16: mol_type = genomic DNA
gtcggtagagcatggg

SEQ ID NO: 20898 - DNA, 17 bp, Homo sapiens
  source 1..17: mol_type = genomic DNA
gtcggtagagcatggga

SEQ ID NO: 20899 - DNA, 18 bp, Homo sapiens
  source 1..18: mol_type = genomic DNA
gtcggtagagcatgggac

SEQ ID NO: 20900 - DNA, 19 bp, Homo sapiens
  source 1..19: mol_type = genomic DNA
gtcggtagagcatgggact

SEQ ID NO: 20901 - DNA, 20 bp, Homo sapiens
  source 1..20: mol_type = genomic DNA
gtcggtagagcatgggactc

SEQ ID NO: 20902 - DNA, 21 bp, Homo sapiens
  source 1..21: mol_type = genomic DNA
gtcggtagagcatgggactct

SEQ ID NO: 20903 - DNA, 22 bp, Homo sapiens
  source 1..22: mol_type = genomic DNA
gtcggtagagcatgggactctt

SEQ ID NO: 20904 - DNA, 23 bp, Homo sapiens
  source 1..23: mol_type = genomic DNA
gtcggtagagcatgggactctta

SEQ ID NO: 20905 - DNA, 24 bp, Homo sapiens
  source 1..24: mol_type = genomic DNA
gtcggtagagcatgggactcttaa

SEQ ID NO: 20906 - DNA, 25 bp, Homo sapiens
  source 1..25: mol_type = genomic DNA
gtcggtagagcatgggactcttaat

SEQ ID NO: 20907 - DNA, 26 bp, Homo sapiens
  source 1..26: mol_type = genomic DNA
gtcggtagagcatgggactcttaatc

SEQ ID NO: 20908 - DNA, 27 bp, Homo sapiens
  source 1..27: mol_type = genomic DNA
gtcggtagagcatgggactcttaatcc

SEQ ID NO: 20909 - DNA, 28 bp, Homo sapiens
  source 1..28: mol_type = genomic DNA
gtcggtagagcatgggactcttaatccc

SEQ ID NO: 20910 - DNA, 29 bp, Homo sapiens
  source 1..29: mol_type = genomic DNA
gtcggtagagcatgggactcttaatccca

SEQ ID NO: 20911 - DNA, 32 bp, Homo sapiens
  source 1..32: mol_type = genomic DNA
gtcggtagagcatgggactcttaatcccaggg

SEQ ID NO: 20912 - DNA, 36 bp, Homo sapiens
  source 1..36: mol_type = genomic DNA
gtcggtagagcatgggactcttaatcccagggtcgt

SEQ ID NO: 20913 - DNA, 37 bp, Homo sapiens
  source 1..37: mol_type = genomic DNA
gtcggtagagcatgggactcttaatcccagggtcgtg

SEQ ID NO: 20914 - DNA, 38 bp, Homo sapiens
  source 1..38: mol_type = genomic DNA
gtcggtagagcatgggactcttaatcccagggtcgtgg

SEQ ID NO: 20915 - DNA, 39 bp, Homo sapiens
  source 1..39: mol_type = genomic DNA
gtcggtagagcatgggactcttaatcccagggtcgtggg

SEQ ID NO: 20916 - DNA, 40 bp, Homo sapiens
  source 1..40: mol_type = genomic DNA
gtcggtagagcatgggactcttaatcccagggtcgtgggt

SEQ ID NO: 20917 - DNA, 41 bp, Homo sapiens
  source 1..41: mol_type = genomic DNA
gtcggtagagcatgggactcttaatcccagggtcgtgggtt

SEQ ID NO: 20918 - DNA, 43 bp, Homo sapiens
  source 1..43: mol_type = genomic DNA
gtcggtagagcatgggactcttaatcccagggtcgtgggttcg

SEQ ID NO: 20919 - DNA, 27 bp, Homo sapiens
  source 1..27: mol_type = genomic DNA
gtcggtagagcatgggactcttaatct

SEQ ID NO: 20920 - DNA, 28 bp, Homo sapiens
  source 1..28: mol_type = genomic DNA
gtcggtagagcatgggactcttaatctc

SEQ ID NO: 20921 - DNA, 29 bp, Homo sapiens
  source 1..29: mol_type = genomic DNA
gtcggtagagcatgggactcttaatctca

SEQ ID NO: 20922 - DNA, 16 bp, Homo sapiens
  source 1..16: mol_type = genomic DNA
gtcgtgagttcgagcc

SEQ ID NO: 20923 - DNA, 18 bp, Homo sapiens
  source 1..18: mol_type = genomic DNA
gtcgtgagttcgagcctc

SEQ ID NO: 20924 - DNA, 29 bp, Homo sapiens
  source 1..29: mol_type = genomic DNA
gtcgtgagttcgagcctcacacggggcac

SEQ ID NO: 20925 - DNA, 18 bp, Homo sapiens
  source 1..18: mol_type = genomic DNA
gtcgtgagttcgatcctc

SEQ ID NO: 20926 - DNA, 27 bp, Homo sapiens
  source 1..27: mol_type = genomic DNA
gtcgtgagttcgatcctcacacggggc

SEQ ID NO: 20927 - DNA, 28 bp, Homo sapiens
  source 1..28: mol_type = genomic DNA
gtcgtgagttcgatcctcacacggggca

SEQ ID NO: 20928 - DNA, 19 bp, Homo sapiens
  source 1..19: mol_type = genomic DNA
gtcgtggccgagtggttaa

SEQ ID NO: 20929 - DNA, 20 bp, Homo sapiens
  source 1..20: mol_type = genomic DNA
gtcgtggccgagtggttaag

SEQ ID NO: 20930 - DNA, 21 bp, Homo sapiens
  source 1..21: mol_type = genomic DNA
gtcgtggccgagtggttaagg

SEQ ID NO: 20931 - DNA, 22 bp, Homo sapiens
  source 1..22: mol_type = genomic DNA
gtcgtggccgagtggttaaggc

SEQ ID NO: 20932 - DNA, 16 bp, Homo sapiens
  source 1..16: mol_type = genomic DNA
gtcgtgggttcgagcc

SEQ ID NO: 20933 - DNA, 17 bp, Homo sapiens
  source 1..17: mol_type = genomic DNA
gtcgtgggttcgagccc

SEQ ID NO: 20934 - DNA, 18 bp, Homo sapiens
  source 1..18: mol_type = genomic DNA
gtcgtgggttcgagcccc

SEQ ID NO: 20935 - DNA, 27 bp, Homo sapiens
  source 1..27: mol_type = genomic DNA
gtcgtgggttcgagccccacgttgggc

SEQ ID NO: 20936 - DNA, 28 bp, Homo sapiens
  source 1..28: mol_type = genomic DNA
gtcgtgggttcgagccccacgttgggcg

SEQ ID NO: 20937 - DNA, 29 bp, Homo sapiens
  source 1..29: mol_type = genomic DNA
gtcgtgggttcgagccccacgttgggcgc

SEQ ID NO: 20938 - DNA, 30 bp, Homo sapiens
  source 1..30: mol_type = genomic DNA
gtcgtgggttcgagccccacgttgggcgcc

SEQ ID NO: 20939 - DNA, 31 bp, Homo sapiens
  source 1..31: mol_type = genomic DNA
gtcgtgggttcgagccccacgttgggcgcca

SEQ ID NO: 20940 - DNA, 16 bp, Homo sapiens
  source 1..16: mol_type = genomic DNA
gtcgtggttgtagtcc

SEQ ID NO: 20941 - DNA, 17 bp, Homo sapiens
  source 1..17: mol_type = genomic DNA
gtcgtggttgtagtccg

SEQ ID NO: 20942 - DNA, 18 bp, Homo sapiens
  source 1..18: mol_type = genomic DNA
gtcgtggttgtagtccgt

SEQ ID NO: 20943 - DNA, 19 bp, Homo sapiens
  source 1..19: mol_type = genomic DNA
gtcgtggttgtagtccgtg

SEQ ID NO: 20944 - DNA, 20 bp, Homo sapiens
  source 1..20: mol_type = genomic DNA
gtcgtggttgtagtccgtgc

SEQ ID NO: 20945 - DNA, 21 bp, Homo sapiens
  source 1..21: mol_type = genomic DNA
gtcgtggttgtagtccgtgcg

SEQ ID NO: 20946 - DNA, 22 bp, Homo sapiens
  source 1..22: mol_type = genomic DNA
gtcgtggttgtagtccgtgcga

SEQ ID NO: 20947 - DNA, 23 bp, Homo sapiens
  source 1..23: mol_type = genomic DNA
gtcgtggttgtagtccgtgcgag

SEQ ID NO: 20948 - DNA, 24 bp, Homo sapiens
  source 1..24: mol_type = genomic DNA
gtcgtggttgtagtccgtgcgaga

SEQ ID NO: 20949 - DNA, 25 bp, Homo sapiens
  source 1..25: mol_type = genomic DNA
gtcgtggttgtagtccgtgcgagaa

SEQ ID NO: 20950 - DNA, 26 bp, Homo sapiens
  source 1..26: mol_type = genomic DNA
gtcgtggttgtagtccgtgcgagaat

SEQ ID NO: 20951 - DNA, 27 bp, Homo sapiens
  source 1..27: mol_type = genomic DNA
gtcgtggttgtagtccgtgcgagaata

SEQ ID NO: 20952 - DNA, 28 bp, Homo sapiens
  source 1..28: mol_type = genomic DNA
gtcgtggttgtagtccgtgcgagaatac

SEQ ID NO: 20953 - DNA, 29 bp, Homo sapiens
  source 1..29: mol_type = genomic DNA
gtcgtggttgtagtccgtgcgagaatacc

SEQ ID NO: 20954 - DNA, 30 bp, Homo sapiens
  source 1..30: mol_type = genomic DNA
gtcgtggttgtagtccgtgcgagaatacca

SEQ ID NO: 20955 - DNA, 16 bp, Homo sapiens
  source 1..16: mol_type = genomic DNA
gtctaacaacatggct

SEQ ID NO: 20956 - DNA, 17 bp, Homo sapiens
  source 1..17: mol_type = genomic DNA
gtctaacaacatggctt

SEQ ID NO: 20957 - DNA, 18 bp, Homo sapiens
  source 1..18: mol_type = genomic DNA
gtctaacaacatggcttt

SEQ ID NO: 20958 - DNA, 19 bp, Homo sapiens
  source 1..19: mol_type = genomic DNA
gtctaacaacatggctttc

SEQ ID NO: 20959 - DNA, 20 bp, Homo sapiens
  source 1..20: mol_type = genomic DNA
gtctaacaacatggctttct

SEQ ID NO: 20960 - DNA, 21 bp, Homo sapiens
  source 1..21: mol_type = genomic DNA
gtctaacaacatggctttctc

SEQ ID NO: 20961 - DNA, 22 bp, Homo sapiens
  source 1..22: mol_type = genomic DNA
gtctaacaacatggctttctca

SEQ ID NO: 20962 - DNA, 23 bp, Homo sapiens
  source 1..23: mol_type = genomic DNA
gtctaacaacatggctttctcac

SEQ ID NO: 20963 - DNA, 24 bp, Homo sapiens
  source 1..24: mol_type = genomic DNA
gtctaacaacatggctttctcacc

SEQ ID NO: 20964 - DNA, 25 bp, Homo sapiens
  source 1..25: mol_type = genomic DNA
gtctaacaacatggctttctcacca

SEQ ID NO: 20965 - DNA, 16 bp, Homo sapiens
  source 1..16: mol_type = genomic DNA
gtctagcggttaggat

SEQ ID NO: 20966 - DNA, 17 bp, Homo sapiens
  source 1..17: mol_type = genomic DNA
gtctagcggttaggatt

SEQ ID NO: 20967 - DNA, 18 bp, Homo sapiens
  source 1..18: mol_type = genomic DNA
gtctagcggttaggattc

SEQ ID NO: 20968 - DNA, 19 bp, Homo sapiens
  source 1..19: mol_type = genomic DNA
gtctagcggttaggattcc

SEQ ID NO: 20969 - DNA, 20 bp, Homo sapiens
  source 1..20: mol_type = genomic DNA
gtctagcggttaggattcct

SEQ ID NO: 20970 - DNA, 21 bp, Homo sapiens
  source 1..21: mol_type = genomic DNA
gtctagcggttaggattcctg

SEQ ID NO: 20971 - DNA, 22 bp, Homo sapiens
  source 1..22: mol_type = genomic DNA
gtctagcggttaggattcctgg

SEQ ID NO: 20972 - DNA, 23 bp, Homo sapiens
  source 1..23: mol_type = genomic DNA
gtctagcggttaggattcctggt

SEQ ID NO: 20973 - DNA, 24 bp, Homo sapiens
  source 1..24: mol_type = genomic DNA
gtctagcggttaggattcctggtt

SEQ ID NO: 20974 - DNA, 25 bp, Homo sapiens
  source 1..25: mol_type = genomic DNA
gtctagcggttaggattcctggttt

SEQ ID NO: 20975 - DNA, 26 bp, Homo sapiens
  source 1..26: mol_type = genomic DNA
gtctagcggttaggattcctggtttt

SEQ ID NO: 20976 - DNA, 27 bp, Homo sapiens
  source 1..27: mol_type = genomic DNA
gtctagcggttaggattcctggttttc

SEQ ID NO: 20977 - DNA, 28 bp, Homo sapiens
  source 1..28: mol_type = genomic DNA
gtctagcggttaggattcctggttttca

SEQ ID NO: 20978 - DNA, 18 bp, Homo sapiens
  source 1..18: mol_type = genomic DNA
gtctaggggtatgattct

SEQ ID NO: 20979 - DNA, 19 bp, Homo sapiens
  source 1..19: mol_type = genomic DNA
gtctaggggtatgattctc

SEQ ID NO: 20980 - DNA, 20 bp, Homo sapiens
  source 1..20: mol_type = genomic DNA
gtctaggggtatgattctcg

SEQ ID NO: 20981 - DNA, 21 bp, Homo sapiens
  source 1..21: mol_type = genomic DNA
gtctaggggtatgattctcgc

SEQ ID NO: 20982 - DNA, 22 bp, Homo sapiens
  source 1..22: mol_type = genomic DNA
gtctaggggtatgattctcgct

SEQ ID NO: 20983 - DNA, 23 bp, Homo sapiens
  source 1..23: mol_type = genomic DNA
gtctaggggtatgattctcgctt

SEQ ID NO: 20984 - DNA, 26 bp, Homo sapiens
  source 1..26: mol_type = genomic DNA
gtctaggggtatgattctcgcttcgg

SEQ ID NO: 20985 - DNA, 26 bp, Homo sapiens
  source 1..26: mol_type = genomic DNA
gtctaggggtatgattctcgctttgg

SEQ ID NO: 20986 - DNA, 22 bp, Homo sapiens
  source 1..22: mol_type = genomic DNA
gtctaggggtatgattctcggt

SEQ ID NO: 20987 - DNA, 23 bp, Homo sapiens
  source 1..23: mol_type = genomic DNA
gtctaggggtatgattctcggtt

SEQ ID NO: 20988 - DNA, 16 bp, Homo sapiens
  source 1..16: mol_type = genomic DNA
gtctagtggctaggat

SEQ ID NO: 20989 - DNA, 17 bp, Homo sapiens
  source 1..17: mol_type = genomic DNA
gtctagtggctaggatt

SEQ ID NO: 20990 - DNA, 19 bp, Homo sapiens
  source 1..19: mol_type = genomic DNA
gtctagtggctaggattcg

SEQ ID NO: 20991 - DNA, 21 bp, Homo sapiens
  source 1..21: mol_type = genomic DNA
gtctagtggctaggattcggc

SEQ ID NO: 20992 - DNA, 22 bp, Homo sapiens
  source 1..22: mol_type = genomic DNA
gtctagtggctaggattcggcg

SEQ ID NO: 20993 - DNA, 23 bp, Homo sapiens
  source 1..23: mol_type = genomic DNA
gtctagtggctaggattcggcgc

SEQ ID NO: 20994 - DNA, 24 bp, Homo sapiens
  source 1..24: mol_type = genomic DNA
gtctagtggctaggattcggcgct

SEQ ID NO: 20995 - DNA, 27 bp, Homo sapiens
  source 1..27: mol_type = genomic DNA
gtctagtggctaggattcggcgctttc

SEQ ID NO: 20996 - DNA, 30 bp, Homo sapiens
  source 1..30: mol_type = genomic DNA
gtctagtggctaggattcggcgctttcacc

SEQ ID NO: 20997 - DNA, 16 bp, Homo sapiens
  source 1..16: mol_type = genomic DNA
gtctagtggtatgatt

SEQ ID NO: 20998 - DNA, 16 bp, Homo sapiens
  source 1..16: mol_type = genomic DNA
gtctagtggttaggat

SEQ ID NO: 20999 - DNA, 17 bp, Homo sapiens
  source 1..17: mol_type = genomic DNA
gtctagtggttaggatt

SEQ ID NO: 21000 - DNA, 18 bp, Homo sapiens
  source 1..18: mol_type = genomic DNA
gtctagtggttaggattc

SEQ ID NO: 21001 - DNA, 19 bp, Homo sapiens
  source 1..19: mol_type = genomic DNA
gtctagtggttaggattcg

SEQ ID NO: 21002 - DNA, 20 bp, Homo sapiens
  source 1..20: mol_type = genomic DNA
gtctagtggttaggattcgg

SEQ ID NO: 21003 - DNA, 21 bp, Homo sapiens
  source 1..21: mol_type = genomic DNA
gtctagtggttaggattcggc

SEQ ID NO: 21004 - DNA, 22 bp, Homo sapiens
  source 1..22: mol_type = genomic DNA
gtctagtggttaggattcggcg

SEQ ID NO: 21005 - DNA, 23 bp, Homo sapiens
  source 1..23: mol_type = genomic DNA
gtctagtggttaggattcggcgc

SEQ ID NO: 21006 - DNA, 24 bp, Homo sapiens
  source 1..24: mol_type = genomic DNA
gtctagtggttaggattcggcgct

SEQ ID NO: 21007 - DNA, 25 bp, Homo sapiens
  source 1..25: mol_type = genomic DNA
gtctagtggttaggattcggcgctc

SEQ ID NO: 21008 - DNA, 26 bp, Homo sapiens
  source 1..26: mol_type = genomic DNA
gtctagtggttaggattcggcgctct

SEQ ID NO: 21009 - DNA, 27 bp, Homo sapiens
  source 1..27: mol_type = genomic DNA
gtctagtggttaggattcggcgctctc

SEQ ID NO: 21010 - DNA, 28 bp, Homo sapiens
  source 1..28: mol_type = genomic DNA
gtctagtggttaggattcggcgctctca

SEQ ID NO: 21011 - DNA, 30 bp, Homo sapiens
  source 1..30: mol_type = genomic DNA
gtctagtggttaggattcggcgctctcacc

SEQ ID NO: 21012 - DNA, 33 bp, Homo sapiens
  source 1..33: mol_type = genomic DNA
gtctagtggttaggattcggcgctctcaccgcc

SEQ ID NO: 21013 - DNA, 40 bp, Homo sapiens
  source 1..40: mol_type = genomic DNA
gtctagtggttaggattcggcgctctcaccgccgcggccc

SEQ ID NO: 21014 - DNA, 43 bp, Homo sapiens
  source 1..43: mol_type = genomic DNA
gtctagtggttaggattcggcgctctcaccgccgcggcccggg

SEQ ID NO: 21015 - DNA, 44 bp, Homo sapiens
  source 1..44: mol_type = genomic DNA
gtctagtggttaggattcggcgctctcaccgccgcggcccgggt

SEQ ID NO: 21016 - DNA, 45 bp, Homo sapiens
  source 1..45: mol_type = genomic DNA
gtctagtggttaggattcggcgctctcaccgccgcggcccgggtt

SEQ ID NO: 21017 - DNA, 46 bp, Homo sapiens
  source 1..46: mol_type = genomic DNA
gtctagtggttaggattcggcgctctcaccgccgcggcccgggttc

SEQ ID NO: 21018 - DNA, 20 bp, Homo sapiens
  source 1..20: mol_type = genomic DNA
gtctcataatctgaaggtcc

SEQ ID NO: 21019 - DNA, 21 bp, Homo sapiens
  source 1..21: mol_type = genomic DNA
gtctcataatctgaaggtcct

SEQ ID NO: 21020 - DNA, 22 bp, Homo sapiens
  source 1..22: mol_type = genomic DNA
gtctcataatctgaaggtcctg

SEQ ID NO: 21021 - DNA, 25 bp, Homo sapiens
  source 1..25: mol_type = genomic DNA
gtctcataatctgaaggtcctgagt

SEQ ID NO: 21022 - DNA, 41 bp, Homo sapiens
  source 1..41: mol_type = genomic DNA
gtctcataatctgaaggtcctgagttcgaacctcagagggg

SEQ ID NO: 21023 - DNA, 46 bp, Homo sapiens
  source 1..46: mol_type = genomic DNA
gtctcataatctgaaggtcctgagttcgaacctcagagggggcacc

SEQ ID NO: 21024 - DNA, 22 bp, Homo sapiens
  source 1..22: mol_type = genomic DNA
gtctcataatctgaaggtcgtg

SEQ ID NO: 21025 - DNA, 41 bp, Homo sapiens
  source 1..41: mol_type = genomic DNA
gtctcataatctgaaggtcgtgagttcgagcctcacacggg

SEQ ID NO: 21026 - DNA, 46 bp, Homo sapiens
  source 1..46: mol_type = genomic DNA
gtctcataatctgaaggtcgtgagttcgatcctcacacggggcacc

SEQ ID NO: 21027 - DNA, 19 bp, Homo sapiens
  source 1..19: mol_type = genomic DNA
gtctccccgcgcaggttcg

SEQ ID NO: 21028 - DNA, 37 bp, Homo sapiens
  source 1..37: mol_type = genomic DNA
gtctccccgcgcaggttcgaaccctgctcgctgcgcc

SEQ ID NO: 21029 - DNA, 38 bp, Homo sapiens
  source 1..38: mol_type = genomic DNA
gtctccccgcgcaggttcgaaccctgctcgctgcgcca

SEQ ID NO: 21030 - DNA, 22 bp, Homo sapiens
  source 1..22: mol_type = genomic DNA
gtctccggatggaggcgtgggt

SEQ ID NO: 21031 - DNA, 16 bp, Homo sapiens
  source 1..16: mol_type = genomic DNA
gtctcggtggaacctc

SEQ ID NO: 21032 - DNA, 17 bp, Homo sapiens
  source 1..17: mol_type = genomic DNA
gtctcggtggaacctcc

SEQ ID NO: 21033 - DNA, 18 bp, Homo sapiens
  source 1..18: mol_type = genomic DNA
gtctcggtggaacctcca

SEQ ID NO: 21034 - DNA, 17 bp, Homo sapiens
  source 1..17: mol_type = genomic DNA
gtctctgtggcgcaatc

SEQ ID NO: 21035 - DNA, 18 bp, Homo sapiens
  source 1..18: mol_type = genomic DNA
gtctctgtggcgcaatcg

SEQ ID NO: 21036 - DNA, 19 bp, Homo sapiens
  source 1..19: mol_type = genomic DNA
gtctctgtggcgcaatcgg

SEQ ID NO: 21037 - DNA, 20 bp, Homo sapiens
  source 1..20: mol_type = genomic DNA
gtctctgtggcgcaatcggc

SEQ ID NO: 21038 - DNA, 20 bp, Homo sapiens
  source 1..20: mol_type = genomic DNA
gtctctgtggcgcaatcggt

SEQ ID NO: 21039 - DNA, 34 bp, Homo sapiens
  source 1..34: mol_type = genomic DNA
gtctctgtggcgcaatcggttagcgcattcggct

SEQ ID NO: 21040 - DNA, 35 bp, Homo sapiens
  source 1..35: mol_type = genomic DNA
gtctctgtggcgcaatcggttagcgcattcggctg

SEQ ID NO: 21041 - DNA, 37 bp, Homo sapiens
  source 1..37: mol_type = genomic DNA
gtctctgtggcgcaatcggttagcgcattcggctgtt

SEQ ID NO: 21042 - DNA, 35 bp, Homo sapiens
  source 1..35: mol_type = genomic DNA
gtctctgtggcgcaatcggttagcgcgttcggctg

SEQ ID NO: 21043 - DNA, 37 bp, Homo sapiens
  source 1..37: mol_type = genomic DNA
gtctctgtggcgcaatcggttagcgcgttcggctgtt

SEQ ID NO: 21044 - DNA, 18 bp, Homo sapiens
  source 1..18: mol_type = genomic DNA
gtctctgtggcgcaatgg

SEQ ID NO: 21045 - DNA, 19 bp, Homo sapiens
  source 1..19: mol_type = genomic DNA
gtctctgtggcgcaatgga

SEQ ID NO: 21046 - DNA, 20 bp, Homo sapiens
  source 1..20: mol_type = genomic DNA
gtctctgtggcgcaatggac

SEQ ID NO: 21047 - DNA, 21 bp, Homo sapiens
  source 1..21: mol_type = genomic DNA
gtctctgtggcgcaatggacg

SEQ ID NO: 21048 - DNA, 22 bp, Homo sapiens
  source 1..22: mol_type = genomic DNA
gtctctgtggcgcaatggacga

SEQ ID NO: 21049 - DNA, 33 bp, Homo sapiens
  source 1..33: mol_type = genomic DNA
gtctctgtggcgcaatggacgagcgcgctggac

SEQ ID NO: 21050 - DNA, 19 bp, Homo sapiens
  source 1..19: mol_type = genomic DNA
gtctctgtggcgcaatggg

SEQ ID NO: 21051 - DNA, 18 bp, Homo sapiens
  source 1..18: mol_type = genomic DNA
gtctcttcgggggcgtgg

SEQ ID NO: 21052 - DNA, 20 bp, Homo sapiens
  source 1..20: mol_type = genomic DNA
gtctcttcgggggcgtgggt

SEQ ID NO: 21053 - DNA, 21 bp, Homo sapiens
  source 1..21: mol_type = genomic DNA
gtctcttcgggggcgtgggtt

SEQ ID NO: 21054 - DNA, 22 bp, Homo sapiens
  source 1..22: mol_type = genomic DNA
gtctcttcgggggcgtgggttc

SEQ ID NO: 21055 - DNA, 23 bp, Homo sapiens
  source 1..23: mol_type = genomic DNA
gtctgataaaagagttactttga

SEQ ID NO: 21056 - DNA, 24 bp, Homo sapiens
  source 1..24: mol_type = genomic DNA
gtctgataaaagagttactttgat

SEQ ID NO: 21057 - DNA, 29 bp, Homo sapiens
  source 1..29: mol_type = genomic DNA
gtctgattccggatcagaagattgagggt

SEQ ID NO: 21058 - DNA, 29 bp, Homo sapiens
  source 1..29: mol_type = genomic DNA
gtctgctttacacgcagaaggtcctgggt

SEQ ID NO: 21059 - DNA, 45 bp, Homo sapiens
  source 1..45: mol_type = genomic DNA
gtcttaggccccaaaaattttggtgcaactccaaataaaagtacc

SEQ ID NO: 21060 - DNA, 24 bp, Homo sapiens
  source 1..24: mol_type = genomic DNA
gtcttgtaaaccggagatgaaaac

SEQ ID NO: 21061 - DNA, 41 bp, Homo sapiens
  source 1..41: mol_type = genomic DNA
gtcttgtaaaccggagatgaaaacctttttccaaggacacc

SEQ ID NO: 21062 - DNA, 42 bp, Homo sapiens
  source 1..42: mol_type = genomic DNA
gtcttgtaaaccggagatgaaaacctttttccaaggacacca

SEQ ID NO: 21063 - DNA, 16 bp, Homo sapiens
  source 1..16: mol_type = genomic DNA
gtgaagcattggactg

SEQ ID NO: 21064 - DNA, 17 bp, Homo sapiens
  source 1..17: mol_type = genomic DNA
gtgaagcattggactgt

SEQ ID NO: 21065 - DNA, 18 bp, Homo sapiens
  source 1..18: mol_type = genomic DNA
gtgaagcattggactgta

SEQ ID NO: 21066 - DNA, 19 bp, Homo sapiens
  source 1..19: mol_type = genomic DNA
gtgaagcattggactgtaa

SEQ ID NO: 21067 - DNA, 20 bp, Homo sapiens
  source 1..20: mol_type = genomic DNA
gtgaagcattggactgtaaa

SEQ ID NO: 21068 - DNA, 22 bp, Homo sapiens
  source 1..22: mol_type = genomic DNA
gtgaagcattggactgtaaatc

SEQ ID NO: 21069 - DNA, 23 bp, Homo sapiens
  source 1..23: mol_type = genomic DNA
gtgaagcattggactgtaaatct

SEQ ID NO: 21070 - DNA, 24 bp, Homo sapiens
  source 1..24: mol_type = genomic DNA
gtgaagcattggactgtaaatcta

SEQ ID NO: 21071 - DNA, 25 bp, Homo sapiens
  source 1..25: mol_type = genomic DNA
gtgaagcattggactgtaaatctaa

SEQ ID NO: 21072 - DNA, 26 bp, Homo sapiens
  source 1..26: mol_type = genomic DNA
gtgaagcattggactgtaaatctaaa

SEQ ID NO: 21073 - DNA, 29 bp, Homo sapiens
  source 1..29: mol_type = genomic DNA
gtgaagcattggactgtaaatctaaagac

SEQ ID NO: 21074 - DNA, 35 bp, Homo sapiens
  source 1..35: mol_type = genomic DNA
gtgaagcattggactgtaaatctaaagacaggggt

SEQ ID NO: 21075 - DNA, 48 bp, Homo sapiens
  source 1..48: mol_type = genomic DNA
gtgaagcattggactgtaaatctaaagacaggggttaggcctcttttt

SEQ ID NO: 21076 - DNA, 16 bp, Homo sapiens
  source 1..16: mol_type = genomic DNA
gtgaatctgacaacag

SEQ ID NO: 21077 - DNA, 17 bp, Homo sapiens
  source 1..17: mol_type = genomic DNA
gtgaatctgacaacaga

SEQ ID NO: 21078 - DNA, 18 bp, Homo sapiens
  source 1..18: mol_type = genomic DNA
gtgaatctgacaacagag

SEQ ID NO: 21079 - DNA, 20 bp, Homo sapiens
  source 1..20: mol_type = genomic DNA
gtgaatctgacaacagaggc

SEQ ID NO: 21080 - DNA, 21 bp, Homo sapiens
  source 1..21: mol_type = genomic DNA
gtgaatctgacaacagaggct

SEQ ID NO: 21081 - DNA, 22 bp, Homo sapiens
  source 1..22: mol_type = genomic DNA
gtgaatctgacaacagaggctt

SEQ ID NO: 21082 - DNA, 24 bp, Homo sapiens
  source 1..24: mol_type = genomic DNA
gtgaatctgacaacagaggcttac

SEQ ID NO: 21083 - DNA, 25 bp, Homo sapiens
  source 1..25: mol_type = genomic DNA
gtgaatctgacaacagaggcttacg

SEQ ID NO: 21084 - DNA, 26 bp, Homo sapiens
  source 1..26: mol_type = genomic DNA
gtgaatctgacaacagaggcttacga

SEQ ID NO: 21085 - DNA, 27 bp, Homo sapiens
  source 1..27: mol_type = genomic DNA
gtgaatctgacaacagaggcttacgac

SEQ ID NO: 21086 - DNA, 28 bp, Homo sapiens
  source 1..28: mol_type = genomic DNA
gtgaatctgacaacagaggcttacgacc

SEQ ID NO: 21087 - DNA, 29 bp, Homo sapiens
  source 1..29: mol_type = genomic DNA
gtgaatctgacaacagaggcttacgaccc

SEQ ID NO: 21088 - DNA, 30 bp, Homo sapiens
  source 1..30: mol_type = genomic DNA
gtgaatctgacaacagaggcttacgacccc

SEQ ID NO: 21089 - DNA, 31 bp, Homo sapiens
  source 1..31: mol_type = genomic DNA
gtgaatctgacaacagaggcttacgacccct

SEQ ID NO: 21090 - DNA, 32 bp, Homo sapiens
  source 1..32: mol_type = genomic DNA
gtgaatctgacaacagaggcttacgacccctt

SEQ ID NO: 21091 - DNA, 33 bp, Homo sapiens
  source 1..33: mol_type = genomic DNA
gtgaatctgacaacagaggcttacgacccctta

SEQ ID NO: 21092 - DNA, 34 bp, Homo sapiens
  source 1..34: mol_type = genomic DNA
gtgaatctgacaacagaggcttacgaccccttat

SEQ ID NO: 21093 - DNA, 35 bp, Homo sapiens
  source 1..35: mol_type = genomic DNA
gtgaatctgacaacagaggcttacgaccccttatt

SEQ ID NO: 21094 - DNA, 36 bp, Homo sapiens
  source 1..36: mol_type = genomic DNA
gtgaatctgacaacagaggcttacgaccccttattt

SEQ ID NO: 21095 - DNA, 37 bp, Homo sapiens
  source 1..37: mol_type = genomic DNA
gtgaatctgacaacagaggcttacgaccccttattta

SEQ ID NO: 21096 - DNA, 39 bp, Homo sapiens
  source 1..39: mol_type = genomic DNA
gtgaatctgacaacagaggcttacgaccccttatttacc

SEQ ID NO: 21097 - DNA, 40 bp, Homo sapiens
  source 1..40: mol_type = genomic DNA
gtgaatctgacaacagaggcttacgaccccttatttaccc

SEQ ID NO: 21098 - DNA, 41 bp, Homo sapiens
  source 1..41: mol_type = genomic DNA
gtgaatctgacaacagaggcttacgaccccttatttacccc

SEQ ID NO: 21099 - DNA, 42 bp, Homo sapiens
  source 1..42: mol_type = genomic DNA
gtgaatctgacaacagaggcttacgaccccttatttacccca

SEQ ID NO: 21100 - DNA, 35 bp, Homo sapiens
  source 1..35: mol_type = genomic DNA
gtgagaggtcccgggttcaaatcccggacgagccc

SEQ ID NO: 21101 - DNA, 36 bp, Homo sapiens
  source 1..36: mol_type = genomic DNA
gtgagaggtcccgggttcaaatcccggacgagcccc

SEQ ID NO: 21102 - DNA, 17 bp, Homo sapiens
  source 1..17: mol_type = genomic DNA
gtgagcactctggactc

SEQ ID NO: 21103 - DNA, 22 bp, Homo sapiens
  source 1..22: mol_type = genomic DNA
gtgagcactctggactctgaat

SEQ ID NO: 21104 - DNA, 24 bp, Homo sapiens
  source 1..24: mol_type = genomic DNA
gtgagcactctggactctgaatcc

SEQ ID NO: 21105 - DNA, 25 bp, Homo sapiens
  source 1..25: mol_type = genomic DNA
gtgagcactctggactctgaatcca

SEQ ID NO: 21106 - DNA, 26 bp, Homo sapiens
  source 1..26: mol_type = genomic DNA
gtgagcactctggactctgaatccag

SEQ ID NO: 21107 - DNA, 27 bp, Homo sapiens
  source 1..27: mol_type = genomic DNA
gtgagcactctggactctgaatccagc

SEQ ID NO: 21108 - DNA, 28 bp, Homo sapiens
  source 1..28: mol_type = genomic DNA
gtgagcactctggactctgaatccagcg

SEQ ID NO: 21109 - DNA, 32 bp, Homo sapiens
  source 1..32: mol_type = genomic DNA
gtgagcactctggactctgaatccagcgatcc

SEQ ID NO: 21110 - DNA, 35 bp, Homo sapiens
  source 1..35: mol_type = genomic DNA
gtgagcactctggactctgaatccagcgatccgag

SEQ ID NO: 21111 - DNA, 18 bp, Homo sapiens
  source 1..18: mol_type = genomic DNA
gtgagcatagctgccttc

SEQ ID NO: 21112 - DNA, 36 bp, Homo sapiens
  source 1..36: mol_type = genomic DNA
gtgagcatagctgccttccaagcagttgacccgggt

SEQ ID NO: 21113 - DNA, 16 bp, Homo sapiens
  source 1..16: mol_type = genomic DNA
gtgaggtcccgggttc

SEQ ID NO: 21114 - DNA, 17 bp, Homo sapiens
  source 1..17: mol_type = genomic DNA
gtgagtatccccgcctg

SEQ ID NO: 21115 - DNA, 18 bp, Homo sapiens
  source 1..18: mol_type = genomic DNA
gtgagtatccccgcctgt

SEQ ID NO: 21116 - DNA, 19 bp, Homo sapiens
  source 1..19: mol_type = genomic DNA
gtgagtatccccgcctgtc

SEQ ID NO: 21117 - DNA, 20 bp, Homo sapiens
  source 1..20: mol_type = genomic DNA
gtgagtatccccgcctgtca

SEQ ID NO: 21118 - DNA, 21 bp, Homo sapiens
  source 1..21: mol_type = genomic DNA
gtgagtatccccgcctgtcac

SEQ ID NO: 21119 - DNA, 23 bp, Homo sapiens
  source 1..23: mol_type = genomic DNA
gtgagtatccccgcctgtcacgc

SEQ ID NO: 21120 - DNA, 16 bp, Homo sapiens
  source 1..16: mol_type = genomic DNA
gtgagttcgagcctca

SEQ ID NO: 21121 - DNA, 16 bp, Homo sapiens
  source 1..16: mol_type = genomic DNA
gtgagttcgatcctca

SEQ ID NO: 21122 - DNA, 18 bp, Homo sapiens
  source 1..18: mol_type = genomic DNA
gtgataggtggcacggag

SEQ ID NO: 21123 - DNA, 19 bp, Homo sapiens
  source 1..19: mol_type = genomic DNA
gtgataggtggcacggaga

SEQ ID NO: 21124 - DNA, 20 bp, Homo sapiens
  source 1..20: mol_type = genomic DNA
gtgataggtggcacggagaa

SEQ ID NO: 21125 - DNA, 21 bp, Homo sapiens
  source 1..21: mol_type = genomic DNA
gtgataggtggcacggagaat

SEQ ID NO: 21126 - DNA, 25 bp, Homo sapiens
  source 1..25: mol_type = genomic DNA
gtgataggtggcacggagaattttg

SEQ ID NO: 21127 - DNA, 19 bp, Homo sapiens
  source 1..19: mol_type = genomic DNA
gtgatcgtatagtggttag

SEQ ID NO: 21128 - DNA, 20 bp, Homo sapiens
  source 1..20: mol_type = genomic DNA
gtgatcgtatagtggttagt

SEQ ID NO: 21129 - DNA, 21 bp, Homo sapiens
  source 1..21: mol_type = genomic DNA
gtgatcgtatagtggttagta

SEQ ID NO: 21130 - DNA, 22 bp, Homo sapiens
  source 1..22: mol_type = genomic DNA
gtgatcgtatagtggttagtac

SEQ ID NO: 21131 - DNA, 23 bp, Homo sapiens
  source 1..23: mol_type = genomic DNA
gtgatcgtatagtggttagtact

SEQ ID NO: 21132 - DNA, 24 bp, Homo sapiens
  source 1..24: mol_type = genomic DNA
gtgatcgtatagtggttagtactc

SEQ ID NO: 21133 - DNA, 25 bp, Homo sapiens
  source 1..25: mol_type = genomic DNA
gtgatcgtatagtggttagtactct

SEQ ID NO: 21134 - DNA, 26 bp, Homo sapiens
  source 1..26: mol_type = genomic DNA
gtgatcgtatagtggttagtactctg

SEQ ID NO: 21135 - DNA, 27 bp, Homo sapiens
  source 1..27: mol_type = genomic DNA
gtgatcgtatagtggttagtactctgc

SEQ ID NO: 21136 - DNA, 28 bp, Homo sapiens
  source 1..28: mol_type = genomic DNA
gtgatcgtatagtggttagtactctgcg

SEQ ID NO: 21137 - DNA, 29 bp, Homo sapiens
  source 1..29: mol_type = genomic DNA
gtgatcgtatagtggttagtactctgcgt

SEQ ID NO: 21138 - DNA, 30 bp, Homo sapiens
  source 1..30: mol_type = genomic DNA
gtgatcgtatagtggttagtactctgcgtt

SEQ ID NO: 21139 - DNA, 31 bp, Homo sapiens
  source 1..31: mol_type = genomic DNA
gtgatcgtatagtggttagtactctgcgttg

SEQ ID NO: 21140 - DNA, 32 bp, Homo sapiens
  source 1..32: mol_type = genomic DNA
gtgatcgtatagtggttagtactctgcgttgt

SEQ ID NO: 21141 - DNA, 33 bp, Homo sapiens
  source 1..33: mol_type = genomic DNA
gtgatcgtatagtggttagtactctgcgttgtg

SEQ ID NO: 21142 - DNA, 35 bp, Homo sapiens
  source 1..35: mol_type = genomic DNA
gtgatcgtatagtggttagtactctgcgttgtggc

SEQ ID NO: 21143 - DNA, 36 bp, Homo sapiens
  source 1..36: mol_type = genomic DNA
gtgatcgtatagtggttagtactctgcgttgtggcc

SEQ ID NO: 21144 - DNA, 18 bp, Homo sapiens
  source 1..18: mol_type = genomic DNA
gtgattttcatattgaat

SEQ ID NO: 21145 - DNA, 20 bp, Homo sapiens
  source 1..20: mol_type = genomic DNA
gtgattttcatattgaattg

SEQ ID NO: 21146 - DNA, 21 bp, Homo sapiens
  source 1..21: mol_type = genomic DNA
gtgattttcatattgaattgc

SEQ ID NO: 21147 - DNA, 22 bp, Homo sapiens
  source 1..22: mol_type = genomic DNA
gtgattttcatattgaattgca

SEQ ID NO: 21148 - DNA, 36 bp, Homo sapiens
  source 1..36: mol_type = genomic DNA
gtgattttcatattgaattgcaaattcgaagaagca

SEQ ID NO: 21149 - DNA, 37 bp, Homo sapiens
  source 1..37: mol_type = genomic DNA
gtgattttcatattgaattgcaaattcgaagaagcag

SEQ ID NO: 21150 - DNA, 16 bp, Homo sapiens
  source 1..16: mol_type = genomic DNA
gtgcaactccaaataa

SEQ ID NO: 21151 - DNA, 17 bp, Homo sapiens
  source 1..17: mol_type = genomic DNA
gtgcaactccaaataaa

SEQ ID NO: 21152 - DNA, 18 bp, Homo sapiens
  source 1..18: mol_type = genomic DNA
gtgcaactccaaataaaa

SEQ ID NO: 21153 - DNA, 19 bp, Homo sapiens
  source 1..19: mol_type = genomic DNA
gtgcaactccaaataaaag

SEQ ID NO: 21154 - DNA, 20 bp, Homo sapiens
  source 1..20: mol_type = genomic DNA
gtgcaactccaaataaaagt

SEQ ID NO: 21155 - DNA, 21 bp, Homo sapiens
  source 1..21: mol_type = genomic DNA
gtgcaactccaaataaaagta

SEQ ID NO: 21156 - DNA, 22 bp, Homo sapiens
  source 1..22: mol_type = genomic DNA
gtgcaactccaaataaaagtac

SEQ ID NO: 21157 - DNA, 23 bp, Homo sapiens
  source 1..23: mol_type = genomic DNA
gtgcaactccaaataaaagtacc

SEQ ID NO: 21158 - DNA, 24 bp, Homo sapiens
  source 1..24: mol_type = genomic DNA
gtgcaactccaaataaaagtacca

SEQ ID NO: 21159 - DNA, 35 bp, Homo sapiens
  source 1..35: mol_type = genomic DNA
gtgcgagaggtcccgggttcaaatcccggacgagc

SEQ ID NO: 21160 - DNA, 38 bp, Homo sapiens
  source 1..38: mol_type = genomic DNA
gtgcgagaggtcccgggttcaaatcccggacgagcccc

SEQ ID NO: 21161 - DNA, 39 bp, Homo sapiens
  source 1..39: mol_type = genomic DNA
gtgcgagaggtcccgggttcaaatcccggacgagccccc

SEQ ID NO: 21162 - DNA, 17 bp, Homo sapiens
  source 1..17: mol_type = genomic DNA
gtgctaatggtggagtt

SEQ ID NO: 21163 - DNA, 19 bp, Homo sapiens
  source 1..19: mol_type = genomic DNA
gtgctaatggtggagttaa

SEQ ID NO: 21164 - DNA, 20 bp, Homo sapiens
  source 1..20: mol_type = genomic DNA
gtgctaatggtggagttaaa

SEQ ID NO: 21165 - DNA, 21 bp, Homo sapiens
  source 1..21: mol_type = genomic DNA
gtgctaatggtggagttaaag

SEQ ID NO: 21166 - DNA, 22 bp, Homo sapiens
  source 1..22: mol_type = genomic DNA
gtgctaatggtggagttaaaga

SEQ ID NO: 21167 - DNA, 23 bp, Homo sapiens
  source 1..23: mol_type = genomic DNA
gtgctaatggtggagttaaagac

SEQ ID NO: 21168 - DNA, 24 bp, Homo sapiens
  source 1..24: mol_type = genomic DNA
gtgctaatggtggagttaaagact

SEQ ID NO: 21169 - DNA, 25 bp, Homo sapiens
  source 1..25: mol_type = genomic DNA
gtgctaatggtggagttaaagactt

SEQ ID NO: 21170 - DNA, 26 bp, Homo sapiens
  source 1..26: mol_type = genomic DNA
gtgctaatggtggagttaaagacttt

SEQ ID NO: 21171 - DNA, 27 bp, Homo sapiens
  source 1..27: mol_type = genomic DNA
gtgctaatggtggagttaaagactttt

SEQ ID NO: 21172 - DNA, 30 bp, Homo sapiens
  source 1..30: mol_type = genomic DNA
gtgctaatggtggagttaaagactttttct

SEQ ID NO: 21173 - DNA, 31 bp, Homo sapiens
  source 1..31: mol_type = genomic DNA
gtgctaatggtggagttaaagactttttctc

SEQ ID NO: 21174 - DNA, 34 bp, Homo sapiens
  source 1..34: mol_type = genomic DNA
gtgctaatggtggagttaaagactttttctctga

SEQ ID NO: 21175 - DNA, 35 bp, Homo sapiens
  source 1..35: mol_type = genomic DNA
gtgctaatggtggagttaaagactttttctctgac

SEQ ID NO: 21176 - DNA, 36 bp, Homo sapiens
  source 1..36: mol_type = genomic DNA
gtgctaatggtggagttaaagactttttctctgacc

SEQ ID NO: 21177 - DNA, 37 bp, Homo sapiens
  source 1..37: mol_type = genomic DNA
gtgctaatggtggagttaaagactttttctctgacca

SEQ ID NO: 21178 - DNA, 40 bp, Homo sapiens
  source 1..40: mol_type = genomic DNA
gtgctctgcacgcgtgggttcgaatcccatcctcgtcgcc

SEQ ID NO: 21179 - DNA, 41 bp, Homo sapiens
  source 1..41: mol_type = genomic DNA
gtgctctgcacgcgtgggttcgaatcccatcctcgtcgcca

SEQ ID NO: 21180 - DNA, 18 bp, Homo sapiens
  source 1..18: mol_type = genomic DNA
gtgctgggcccataaccc

SEQ ID NO: 21181 - DNA, 21 bp, Homo sapiens
  source 1..21: mol_type = genomic DNA
gtgctgggcccataacccaga

SEQ ID NO: 21182 - DNA, 28 bp, Homo sapiens
  source 1..28: mol_type = genomic DNA
gtgctgggcccataacccagaggtcgat

SEQ ID NO: 21183 - DNA, 29 bp, Homo sapiens
  source 1..29: mol_type = genomic DNA
gtgctgggcccataacccagaggtcgatg

SEQ ID NO: 21184 - DNA, 31 bp, Homo sapiens
  source 1..31: mol_type = genomic DNA
gtgctgggcccataacccagaggtcgatgga

SEQ ID NO: 21185 - DNA, 32 bp, Homo sapiens
  source 1..32: mol_type = genomic DNA
gtgctgggcccataacccagaggtcgatggat

SEQ ID NO: 21186 - DNA, 33 bp, Homo sapiens
  source 1..33: mol_type = genomic DNA
gtgctgggcccataacccagaggtcgatggatc

SEQ ID NO: 21187 - DNA, 34 bp, Homo sapiens
  source 1..34: mol_type = genomic DNA
gtgctgggcccataacccagaggtcgatggatcg

SEQ ID NO: 21188 - DNA, 36 bp, Homo sapiens
  source 1..36: mol_type = genomic DNA
gtgctgggcccataacccagaggtcgatggatcgaa

SEQ ID NO: 21189 - DNA, 38 bp, Homo sapiens
  source 1..38: mol_type = genomic DNA
gtgctgggcccataacccagaggtcgatggatcgaaac

SEQ ID NO: 21190 - DNA, 39 bp, Homo sapiens
  source 1..39: mol_type = genomic DNA
gtgctgggcccataacccagaggtcgatggatcgaaacc

SEQ ID NO: 21191 - DNA, 40 bp, Homo sapiens
  source 1..40: mol_type = genomic DNA
gtgctgggcccataacccagaggtcgatggatcgaaacca

SEQ ID NO: 21192 - DNA, 34 bp, Homo sapiens
  source 1..34: mol_type = genomic DNA
gtgctgggcccataacccagaggtcgatggatct

SEQ ID NO: 21193 - DNA, 31 bp, Homo sapiens
  source 1..31: mol_type = genomic DNA
gtgcttagctgttaactaagtgtttgtgggt

SEQ ID NO: 21194 - DNA, 33 bp, Homo sapiens
  source 1..33: mol_type = genomic DNA
gtgcttagctgttaactaagtgtttgtgggttt

SEQ ID NO: 21195 - DNA, 34 bp, Homo sapiens
  source 1..34: mol_type = genomic DNA
gtgcttagctgttaactaagtgtttgtgggttta

SEQ ID NO: 21196 - DNA, 40 bp, Homo sapiens
  source 1..40: mol_type = genomic DNA
gtgctttgcacgcgtgggttcgaatcccatcctcgtcgcc

SEQ ID NO: 21197 - DNA, 41 bp, Homo sapiens
  source 1..41: mol_type = genomic DNA
gtgctttgcacgcgtgggttcgaatcccatcctcgtcgcca

SEQ ID NO: 21198 - DNA, 25 bp, Homo sapiens
  source 1..25: mol_type = genomic DNA
gtggagtggttatcacgttcgcctc

SEQ ID NO: 21199 - DNA, 16 bp, Homo sapiens
  source 1..16: mol_type = genomic DNA
gtggagttaaagactt

SEQ ID NO: 21200 - DNA, 17 bp, Homo sapiens
  source 1..17: mol_type = genomic DNA
gtggagttaaagacttt

SEQ ID NO: 21201 - DNA, 18 bp, Homo sapiens
  source 1..18: mol_type = genomic DNA
gtggagttaaagactttt

SEQ ID NO: 21202 - DNA, 19 bp, Homo sapiens
  source 1..19: mol_type = genomic DNA
gtggagttaaagacttttt

SEQ ID NO: 21203 - DNA, 20 bp, Homo sapiens
  source 1..20: mol_type = genomic DNA
gtggagttaaagactttttc

SEQ ID NO: 21204 - DNA, 21 bp, Homo sapiens
  source 1..21: mol_type = genomic DNA
gtggagttaaagactttttct

SEQ ID NO: 21205 - DNA, 22 bp, Homo sapiens
  source 1..22: mol_type = genomic DNA
gtggagttaaagactttttctc

SEQ ID NO: 21206 - DNA, 23 bp, Homo sapiens
  source 1..23: mol_type = genomic DNA
gtggagttaaagactttttctct

SEQ ID NO: 21207 - DNA, 24 bp, Homo sapiens
  source 1..24: mol_type = genomic DNA
gtggagttaaagactttttctctg

SEQ ID NO: 21208 - DNA, 25 bp, Homo sapiens
  source 1..25: mol_type = genomic DNA
gtggagttaaagactttttctctga

SEQ ID NO: 21209 - DNA, 26 bp, Homo sapiens
  source 1..26: mol_type = genomic DNA
gtggagttaaagactttttctctgac

SEQ ID NO: 21210 - DNA, 27 bp, Homo sapiens
  source 1..27: mol_type = genomic DNA
gtggagttaaagactttttctctgacc

SEQ ID NO: 21211 - DNA, 28 bp, Homo sapiens
  source 1..28: mol_type = genomic DNA
gtggagttaaagactttttctctgacca

SEQ ID NO: 21212 - DNA, 16 bp, Homo sapiens
  source 1..16: mol_type = genomic DNA
gtggcacggagaattt

SEQ ID NO: 21213 - DNA, 17 bp, Homo sapiens
  source 1..17: mol_type = genomic DNA
gtggcacggagaatttt

SEQ ID NO: 21214 - DNA, 18 bp, Homo sapiens
  source 1..18: mol_type = genomic DNA
gtggcacggagaattttg

SEQ ID NO: 21215 - DNA, 24 bp, Homo sapiens
  source 1..24: mol_type = genomic DNA
gtggcccgggttcgactcccggta

SEQ ID NO: 21216 - DNA, 26 bp, Homo sapiens
  source 1..26: mol_type = genomic DNA
gtggcccgggttcgactcccggtatg

SEQ ID NO: 21217 - DNA, 30 bp, Homo sapiens
  source 1..30: mol_type = genomic DNA
gtggcccgggttcgactcccggtatgggaa

SEQ ID NO: 21218 - DNA, 32 bp, Homo sapiens
  source 1..32: mol_type = genomic DNA
gtggcccgggttcgactcccggtatgggaacc

SEQ ID NO: 21219 - DNA, 18 bp, Homo sapiens
  source 1..18: mol_type = genomic DNA
gtggccgagcggtctaag

SEQ ID NO: 21220 - DNA, 20 bp, Homo sapiens
  source 1..20: mol_type = genomic DNA
gtggccgagcggtctaaggc

SEQ ID NO: 21221 - DNA, 17 bp, Homo sapiens
  source 1..17: mol_type = genomic DNA
gtggccgagtggttaag

SEQ ID NO: 21222 - DNA, 18 bp, Homo sapiens
  source 1..18: mol_type = genomic DNA
gtggccgagtggttaagg

SEQ ID NO: 21223 - DNA, 23 bp, Homo sapiens
  source 1..23: mol_type = genomic DNA
gtggcctaatggataaggcactg

SEQ ID NO: 21224 - DNA, 30 bp, Homo sapiens
  source 1..30: mol_type = genomic DNA
gtggcctaatggataaggcatcagcctccg

SEQ ID NO: 21225 - DNA, 23 bp, Homo sapiens
  source 1..23: mol_type = genomic DNA
gtggcctaatggataaggcattg

SEQ ID NO: 21226 - DNA, 25 bp, Homo sapiens
  source 1..25: mol_type = genomic DNA
gtggcctaatggataaggcattggc

SEQ ID NO: 21227 - DNA, 34 bp, Homo sapiens
  source 1..34: mol_type = genomic DNA
gtggcgcaatcggttagcgcgttcggctgttaac

SEQ ID NO: 21228 - DNA, 18 bp, Homo sapiens
  source 1..18: mol_type = genomic DNA
gtggcgcaatggatagcg

SEQ ID NO: 21229 - DNA, 26 bp, Homo sapiens
  source 1..26: mol_type = genomic DNA
gtggcgcaatggatagcgcattggac

SEQ ID NO: 21230 - DNA, 27 bp, Homo sapiens
  source 1..27: mol_type = genomic DNA
gtggcgcaatggatagcgcattggact

SEQ ID NO: 21231 - DNA, 24 bp, Homo sapiens
  source 1..24: mol_type = genomic DNA
gtggcgcagcggaagcgtgctggg

SEQ ID NO: 21232 - DNA, 25 bp, Homo sapiens
  source 1..25: mol_type = genomic DNA
gtggcgcagcggaagcgtgctgggc

SEQ ID NO: 21233 - DNA, 26 bp, Homo sapiens
  source 1..26: mol_type = genomic DNA
gtggcgcagcggaagcgtgctgggcc

SEQ ID NO: 21234 - DNA, 27 bp, Homo sapiens
  source 1..27: mol_type = genomic DNA
gtggcgcagcggaagcgtgctgggccc

SEQ ID NO: 21235 - DNA, 28 bp, Homo sapiens
  source 1..28: mol_type = genomic DNA
gtggcgcagcggaagcgtgctgggccca

SEQ ID NO: 21236 - DNA, 34 bp, Homo sapiens
  source 1..34: mol_type = genomic DNA
gtggcgcagcggaagcgtgctgggcccataaccc

SEQ ID NO: 21237 - DNA, 16 bp, Homo sapiens
  source 1..16: mol_type = genomic DNA
gtggctaggattcggc

SEQ ID NO: 21238 - DNA, 17 bp, Homo sapiens
  source 1..17: mol_type = genomic DNA
gtggctaggattcggcg

SEQ ID NO: 21239 - DNA, 18 bp, Homo sapiens
  source 1..18: mol_type = genomic DNA
gtggctaggattcggcgc

SEQ ID NO: 21240 - DNA, 19 bp, Homo sapiens
  source 1..19: mol_type = genomic DNA
gtggctaggattcggcgct

SEQ ID NO: 21241 - DNA, 24 bp, Homo sapiens
  source 1..24: mol_type = genomic DNA
gtggctaggattcggcgctttcac

SEQ ID NO: 21242 - DNA, 25 bp, Homo sapiens
  source 1..25: mol_type = genomic DNA
gtggctaggattcggcgctttcacc

SEQ ID NO: 21243 - DNA, 26 bp, Homo sapiens
  source 1..26: mol_type = genomic DNA
gtggctaggattcggcgctttcaccg

SEQ ID NO: 21244 - DNA, 17 bp, Homo sapiens
  source 1..17: mol_type = genomic DNA
gtggctgatttgcgttc

SEQ ID NO: 21245 - DNA, 25 bp, Homo sapiens
  source 1..25: mol_type = genomic DNA
gtggctgatttgcgttcagttgatg

SEQ ID NO: 21246 - DNA, 32 bp, Homo sapiens
  source 1..32: mol_type = genomic DNA
gtggctgatttgcgttcagttgatgcagagtg

SEQ ID NO: 21247 - DNA, 16 bp, Homo sapiens
  source 1..16: mol_type = genomic DNA
gtggggttttgcagtc

SEQ ID NO: 21248 - DNA, 17 bp, Homo sapiens
  source 1..17: mol_type = genomic DNA
gtggggttttgcagtcc

SEQ ID NO: 21249 - DNA, 18 bp, Homo sapiens
  source 1..18: mol_type = genomic DNA
gtggggttttgcagtcct

SEQ ID NO: 21250 - DNA, 22 bp, Homo sapiens
  source 1..22: mol_type = genomic DNA
gtggggttttgcagtccttacc

SEQ ID NO: 21251 - DNA, 23 bp, Homo sapiens
  source 1..23: mol_type = genomic DNA
gtggggttttgcagtccttacca

SEQ ID NO: 21252 - DNA, 18 bp, Homo sapiens
  source 1..18: mol_type = genomic DNA
gtgggtagagcatcagac

SEQ ID NO: 21253 - DNA, 16 bp, Homo sapiens
  source 1..16: mol_type = genomic DNA
gtgggttcgaatccca

SEQ ID NO: 21254 - DNA, 27 bp, Homo sapiens
  source 1..27: mol_type = genomic DNA
gtgggttcgaatcccaccagagtcgcc

SEQ ID NO: 21255 - DNA, 28 bp, Homo sapiens
  source 1..28: mol_type = genomic DNA
gtgggttcgaatcccaccagagtcgcca

SEQ ID NO: 21256 - DNA, 27 bp, Homo sapiens
  source 1..27: mol_type = genomic DNA
gtgggttcgaatcccaccctcgtcgcc

SEQ ID NO: 21257 - DNA, 27 bp, Homo sapiens
  source 1..27: mol_type = genomic DNA
gtgggttcgaatcccaccttcgtcgcc

SEQ ID NO: 21258 - DNA, 28 bp, Homo sapiens
  source 1..28: mol_type = genomic DNA
gtgggttcgaatcccaccttcgtcgcca

SEQ ID NO: 21259 - DNA, 26 bp, Homo sapiens
  source 1..26: mol_type = genomic DNA
gtgggttcgaatcccatcctcgtcgc

SEQ ID NO: 21260 - DNA, 27 bp, Homo sapiens
  source 1..27: mol_type = genomic DNA
gtgggttcgaatcccatcctcgtcgcc

SEQ ID NO: 21261 - DNA, 28 bp, Homo sapiens
  source 1..28: mol_type = genomic DNA
gtgggttcgaatcccatcctcgtcgcca

SEQ ID NO: 21262 - DNA, 24 bp, Homo sapiens
  source 1..24: mol_type = genomic DNA
gtgggttcgagccccacgttgggc

SEQ ID NO: 21263 - DNA, 25 bp, Homo sapiens
  source 1..25: mol_type = genomic DNA
gtgggttcgagccccacgttgggcg

SEQ ID NO: 21264 - DNA, 26 bp, Homo sapiens
  source 1..26: mol_type = genomic DNA
gtgggttcgagccccacgttgggcgc

SEQ ID NO: 21265 - DNA, 27 bp, Homo sapiens
  source 1..27: mol_type = genomic DNA
gtgggttcgagccccacgttgggcgcc

SEQ ID NO: 21266 - DNA, 28 bp, Homo sapiens
  source 1..28: mol_type = genomic DNA
gtgggttcgagccccacgttgggcgcca

SEQ ID NO: 21267 - DNA, 27 bp, Homo sapiens
  source 1..27: mol_type = genomic DNA
gtgggttcgagtcccaccagagtcgcc

SEQ ID NO: 21268 - DNA, 25 bp, Homo sapiens
  source 1..25: mol_type = genomic DNA
gtgggttcgagtcccacccggggta

SEQ ID NO: 21269 - DNA, 26 bp, Homo sapiens
  source 1..26: mol_type = genomic DNA
gtgggttcgagtcccatctgggtcgc

SEQ ID NO: 21270 - DNA, 27 bp, Homo sapiens
  source 1..27: mol_type = genomic DNA
gtgggttcgagtcccatctgggtcgcc

SEQ ID NO: 21271 - DNA, 22 bp, Homo sapiens
  source 1..22: mol_type = genomic DNA
gtgggtttaagtcccattggtc

SEQ ID NO: 21272 - DNA, 23 bp, Homo sapiens
  source 1..23: mol_type = genomic DNA
gtgggtttaagtcccattggtct

SEQ ID NO: 21273 - DNA, 25 bp, Homo sapiens
  source 1..25: mol_type = genomic DNA
gtgggtttaagtcccattggtctag

SEQ ID NO: 21274 - DNA, 26 bp, Homo sapiens
  source 1..26: mol_type = genomic DNA
gtgggtttaagtcccattggtctagc

SEQ ID NO: 21275 - DNA, 27 bp, Homo sapiens
  source 1..27: mol_type = genomic DNA
gtgggtttaagtcccattggtctagcc

SEQ ID NO: 21276 - DNA, 28 bp, Homo sapiens
  source 1..28: mol_type = genomic DNA
gtgggtttaagtcccattggtctagcca

SEQ ID NO: 21277 - DNA, 17 bp, Homo sapiens
  source 1..17: mol_type = genomic DNA
gtggtaagcatagctgc

SEQ ID NO: 21278 - DNA, 18 bp, Homo sapiens
  source 1..18: mol_type = genomic DNA
gtggtaagcatagctgcc

SEQ ID NO: 21279 - DNA, 16 bp, Homo sapiens
  source 1..16: mol_type = genomic DNA
gtggtagaattctcgc

SEQ ID NO: 21280 - DNA, 17 bp, Homo sapiens
  source 1..17: mol_type = genomic DNA
gtggtagaattctcgcc

SEQ ID NO: 21281 - DNA, 18 bp, Homo sapiens
  source 1..18: mol_type = genomic DNA
gtggtagaattctcgcct

SEQ ID NO: 21282 - DNA, 19 bp, Homo sapiens
  source 1..19: mol_type = genomic DNA
gtggtagaattctcgcctc

SEQ ID NO: 21283 - DNA, 21 bp, Homo sapiens
  source 1..21: mol_type = genomic DNA
gtggtagaattctcgcctccc

SEQ ID NO: 21284 - DNA, 22 bp, Homo sapiens
  source 1..22: mol_type = genomic DNA
gtggtagaattctcgcctccca

SEQ ID NO: 21285 - DNA, 19 bp, Homo sapiens
  source 1..19: mol_type = genomic DNA
gtggtagaattctcgcctg

SEQ ID NO: 21286 - DNA, 20 bp, Homo sapiens
  source 1..20: mol_type = genomic DNA
gtggtagaattctcgcctgc

SEQ ID NO: 21287 - DNA, 21 bp, Homo sapiens
  source 1..21: mol_type = genomic DNA
gtggtagaattctcgcctgcc

SEQ ID NO: 21288 - DNA, 22 bp, Homo sapiens
  source 1..22: mol_type = genomic DNA
gtggtagaattctcgcctgcca

SEQ ID NO: 21289 - DNA, 23 bp, Homo sapiens
  source 1..23: mol_type = genomic DNA
gtggtagaattctcgcctgccac

SEQ ID NO: 21290 - DNA, 24 bp, Homo sapiens
  source 1..24: mol_type = genomic DNA
gtggtagaattctcgcctgccacg

SEQ ID NO: 21291 - DNA, 25 bp, Homo sapiens
  source 1..25: mol_type = genomic DNA
gtggtagaattctcgcctgccacgc

SEQ ID NO: 21292 - DNA, 29 bp, Homo sapiens
  source 1..29: mol_type = genomic DNA
gtggtagaattctcgcctgccacgcggga

SEQ ID NO: 21293 - DNA, 33 bp, Homo sapiens
  source 1..33: mol_type = genomic DNA
gtggtagaattctcgcctgccacgcgggaggcc

SEQ ID NO: 21294 - DNA, 34 bp, Homo sapiens
  source 1..34: mol_type = genomic DNA
gtggtagaattctcgcctgccacgcgggaggccc

SEQ ID NO: 21295 - DNA, 36 bp, Homo sapiens
  source 1..36: mol_type = genomic DNA
gtggtagaattctcgcctgccacgcgggaggcccgg

SEQ ID NO: 21296 - DNA, 37 bp, Homo sapiens
  source 1..37: mol_type = genomic DNA
gtggtagaattctcgcctgccacgcgggaggcccggg

SEQ ID NO: 21297 - DNA, 38 bp, Homo sapiens
  source 1..38: mol_type = genomic DNA
gtggtagaattctcgcctgccacgcgggaggcccgggt

SEQ ID NO: 21298 - DNA, 39 bp, Homo sapiens
  source 1..39: mol_type = genomic DNA
gtggtagaattctcgcctgccacgcgggaggcccgggtt

SEQ ID NO: 21299 - DNA, 40 bp, Homo sapiens
  source 1..40: mol_type = genomic DNA
gtggtagaattctcgcctgccacgcgggaggcccgggttc

SEQ ID NO: 21300 - DNA, 16 bp, Homo sapiens
  source 1..16: mol_type = genomic DNA
gtggtagagcatttga

SEQ ID NO: 21301 - DNA, 17 bp, Homo sapiens
  source 1..17: mol_type = genomic DNA
gtggtagagcatttgac

SEQ ID NO: 21302 - DNA, 18 bp, Homo sapiens
  source 1..18: mol_type = genomic DNA
gtggtagagcatttgact

SEQ ID NO: 21303 - DNA, 19 bp, Homo sapiens
  source 1..19: mol_type = genomic DNA
gtggtagagcatttgactg

SEQ ID NO: 21304 - DNA, 20 bp, Homo sapiens
  source 1..20: mol_type = genomic DNA
gtggtagagcatttgactgc

SEQ ID NO: 21305 - DNA, 21 bp, Homo sapiens
  source 1..21: mol_type = genomic DNA
gtggtagagcatttgactgca

SEQ ID NO: 21306 - DNA, 17 bp, Homo sapiens
  source 1..17: mol_type = genomic DNA
gtggtagagcgcatgct

SEQ ID NO: 21307 - DNA, 21 bp, Homo sapiens
  source 1..21: mol_type = genomic DNA
gtggtagagcgcatgctttgc

SEQ ID NO: 21308 - DNA, 19 bp, Homo sapiens
  source 1..19: mol_type = genomic DNA
gtggtagagcgcgtgcttc

SEQ ID NO: 21309 - DNA, 30 bp, Homo sapiens
  source 1..30: mol_type = genomic DNA
gtggtatagtggtaagcatagctgccttcc

SEQ ID NO: 21310 - DNA, 45 bp, Homo sapiens
  source 1..45: mol_type = genomic DNA
gtggtatagtggtaagcatagctgccttccaagcagttgacccgg

SEQ ID NO: 21311 - DNA, 47 bp, Homo sapiens
  source 1..47: mol_type = genomic DNA
gtggtatagtggtaagcatagctgccttccaagcagttgacccgggt

SEQ ID NO: 21312 - DNA, 16 bp, Homo sapiens
  source 1..16: mol_type = genomic DNA
gtggtatagtggtgag

SEQ ID NO: 21313 - DNA, 22 bp, Homo sapiens
  source 1..22: mol_type = genomic DNA
gtggtatagtggtgagcatagc

SEQ ID NO: 21314 - DNA, 23 bp, Homo sapiens
  source 1..23: mol_type = genomic DNA
gtggtatagtggtgagcatagct

SEQ ID NO: 21315 - DNA, 24 bp, Homo sapiens
  source 1..24: mol_type = genomic DNA
gtggtatagtggtgagcatagctg

SEQ ID NO: 21316 - DNA, 25 bp, Homo sapiens
  source 1..25: mol_type = genomic DNA
gtggtatagtggtgagcatagctgc

SEQ ID NO: 21317 - DNA, 26 bp, Homo sapiens
  source 1..26: mol_type = genomic DNA
gtggtatagtggtgagcatagctgcc

SEQ ID NO: 21318 - DNA, 30 bp, Homo sapiens
  source 1..30: mol_type = genomic DNA
gtggtatagtggtgagcatagctgccttcc

SEQ ID NO: 21319 - DNA, 47 bp, Homo sapiens
  source 1..47: mol_type = genomic DNA
gtggtatagtggtgagcatagctgccttccaagcagttgacccgggt

SEQ ID NO: 21320 - DNA, 22 bp, Homo sapiens
  source 1..22: mol_type = genomic DNA
gtggtatagtggttagcatagc

SEQ ID NO: 21321 - DNA, 23 bp, Homo sapiens
  source 1..23: mol_type = genomic DNA
gtggtatagtggttagcatagct

SEQ ID NO: 21322 - DNA, 16 bp, Homo sapiens
  source 1..16: mol_type = genomic DNA
gtggtatcatgcaaga

SEQ ID NO: 21323 - DNA, 17 bp, Homo sapiens
  source 1..17: mol_type = genomic DNA
gtggtatcatgcaagat

SEQ ID NO: 21324 - DNA, 18 bp, Homo sapiens
  source 1..18: mol_type = genomic DNA
gtggtatcatgcaagatt

SEQ ID NO: 21325 - DNA, 19 bp, Homo sapiens
  source 1..19: mol_type = genomic DNA
gtggtatcatgcaagattc

SEQ ID NO: 21326 - DNA, 20 bp, Homo sapiens
  source 1..20: mol_type = genomic DNA
gtggtatcatgcaagattcc

SEQ ID NO: 21327 - DNA, 21 bp, Homo sapiens
  source 1..21: mol_type = genomic DNA
gtggtatcatgcaagattccc

SEQ ID NO: 21328 - DNA, 16 bp, Homo sapiens
  source 1..16: mol_type = genomic DNA
gtggtatgattctcgc

SEQ ID NO: 21329 - DNA, 17 bp, Homo sapiens
  source 1..17: mol_type = genomic DNA
gtggtatgattctcgct

SEQ ID NO: 21330 - DNA, 21 bp, Homo sapiens
  source 1..21: mol_type = genomic DNA
gtggtatgattctcgctttgg

SEQ ID NO: 21331 - DNA, 17 bp, Homo sapiens
  source 1..17: mol_type = genomic DNA
gtggtcatcacgttcgc

SEQ ID NO: 21332 - DNA, 18 bp, Homo sapiens
  source 1..18: mol_type = genomic DNA
gtggtcatcacgttcgcc

SEQ ID NO: 21333 - DNA, 19 bp, Homo sapiens
  source 1..19: mol_type = genomic DNA
gtggtcatcacgttcgcct

SEQ ID NO: 21334 - DNA, 16 bp, Homo sapiens
  source 1..16: mol_type = genomic DNA
gtggtctaaggcgcca

SEQ ID NO: 21335 - DNA, 16 bp, Homo sapiens
  source 1..16: mol_type = genomic DNA
gtggtctaaggcgctg

SEQ ID NO: 21336 - DNA, 20 bp, Homo sapiens
  source 1..20: mol_type = genomic DNA
gtggtctagtggctaggatt

SEQ ID NO: 21337 - DNA, 22 bp, Homo sapiens
  source 1..22: mol_type = genomic DNA
gtggtctagtggctaggattcg

SEQ ID NO: 21338 - DNA, 24 bp, Homo sapiens
  source 1..24: mol_type = genomic DNA
gtggtctagtggctaggattcggc

SEQ ID NO: 21339 - DNA, 25 bp, Homo sapiens
  source 1..25: mol_type = genomic DNA
gtggtctagtggctaggattcggcg

SEQ ID NO: 21340 - DNA, 26 bp, Homo sapiens
  source 1..26: mol_type = genomic DNA
gtggtctagtggctaggattcggcgc

SEQ ID NO: 21341 - DNA, 27 bp, Homo sapiens
  source 1..27: mol_type = genomic DNA
gtggtctagtggctaggattcggcgct

SEQ ID NO: 21342 - DNA, 28 bp, Homo sapiens
  source 1..28: mol_type = genomic DNA
gtggtctagtggctaggattcggcgctt

SEQ ID NO: 21343 - DNA, 29 bp, Homo sapiens
  source 1..29: mol_type = genomic DNA
gtggtctagtggctaggattcggcgcttt

SEQ ID NO: 21344 - DNA, 30 bp, Homo sapiens
  source 1..30: mol_type = genomic DNA
gtggtctagtggctaggattcggcgctttc

SEQ ID NO: 21345 - DNA, 33 bp, Homo sapiens
  source 1..33: mol_type = genomic DNA
gtggtctagtggctaggattcggcgctttcacc

SEQ ID NO: 21346 - DNA, 16 bp, Homo sapiens
  source 1..16: mol_type = genomic DNA
gtggtctagtggttag

SEQ ID NO: 21347 - DNA, 19 bp, Homo sapiens
  source 1..19: mol_type = genomic DNA
gtggtctagtggttaggat

SEQ ID NO: 21348 - DNA, 20 bp, Homo sapiens
  source 1..20: mol_type = genomic DNA
gtggtctagtggttaggatt

SEQ ID NO: 21349 - DNA, 21 bp, Homo sapiens
  source 1..21: mol_type = genomic DNA
gtggtctagtggttaggattc

SEQ ID NO: 21350 - DNA, 22 bp, Homo sapiens
  source 1..22: mol_type = genomic DNA
gtggtctagtggttaggattcg

SEQ ID NO: 21351 - DNA, 23 bp, Homo sapiens
  source 1..23: mol_type = genomic DNA
gtggtctagtggttaggattcgg

SEQ ID NO: 21352 - DNA, 24 bp, Homo sapiens
  source 1..24: mol_type = genomic DNA
gtggtctagtggttaggattcggc

SEQ ID NO: 21353 - DNA, 25 bp, Homo sapiens
  source 1..25: mol_type = genomic DNA
gtggtctagtggttaggattcggcg

SEQ ID NO: 21354 - DNA, 26 bp, Homo sapiens
  source 1..26: mol_type = genomic DNA
gtggtctagtggttaggattcggcgc

SEQ ID NO: 21355 - DNA, 27 bp, Homo sapiens
  source 1..27: mol_type = genomic DNA
gtggtctagtggttaggattcggcgct

SEQ ID NO: 21356 - DNA, 28 bp, Homo sapiens
  source 1..28: mol_type = genomic DNA
gtggtctagtggttaggattcggcgctc

SEQ ID NO: 21357 - DNA, 29 bp, Homo sapiens
  source 1..29: mol_type = genomic DNA
gtggtctagtggttaggattcggcgctct

SEQ ID NO: 21358 - DNA, 30 bp, Homo sapiens
  source 1..30: mol_type = genomic DNA
gtggtctagtggttaggattcggcgctctc

SEQ ID NO: 21359 - DNA, 31 bp, Homo sapiens
  source 1..31: mol_type = genomic DNA
gtggtctagtggttaggattcggcgctctca

SEQ ID NO: 21360 - DNA, 33 bp, Homo sapiens
  source 1..33: mol_type = genomic DNA
gtggtctagtggttaggattcggcgctctcacc

SEQ ID NO: 21361 - DNA, 34 bp, Homo sapiens
  source 1..34: mol_type = genomic DNA
gtggtctagtggttaggattcggcgctctcaccg

SEQ ID NO: 21362 - DNA, 43 bp, Homo sapiens
  source 1..43: mol_type = genomic DNA
gtggtctagtggttaggattcggcgctctcaccgccgcggccc

SEQ ID NO: 21363 - DNA, 48 bp, Homo sapiens
  source 1..48: mol_type = genomic DNA
gtggtctagtggttaggattcggcgctctcaccgccgcggcccgggtt

SEQ ID NO: 21364 - DNA, 16 bp, Homo sapiens
  source 1..16: mol_type = genomic DNA
gtggtgagcatagctg

SEQ ID NO: 21365 - DNA, 17 bp, Homo sapiens
  source 1..17: mol_type = genomic DNA
gtggtgagcatagctgc

SEQ ID NO: 21366 - DNA, 18 bp, Homo sapiens
  source 1..18: mol_type = genomic DNA
gtggtgagcatagctgcc

SEQ ID NO: 21367 - DNA, 19 bp, Homo sapiens
  source 1..19: mol_type = genomic DNA
gtggtgagcatagctgcct

SEQ ID NO: 21368 - DNA, 22 bp, Homo sapiens
  source 1..22: mol_type = genomic DNA
gtggtgagcatagctgccttcc

SEQ ID NO: 21369 - DNA, 23 bp, Homo sapiens
  source 1..23: mol_type = genomic DNA
gtggtgagcatagctgccttcca

SEQ ID NO: 21370 - DNA, 39 bp, Homo sapiens
  source 1..39: mol_type = genomic DNA
gtggtgagcatagctgccttccaagcagttgacccgggt

SEQ ID NO: 21371 - DNA, 17 bp, Homo sapiens
  source 1..17: mol_type = genomic DNA
gtggtgagtatccccgc

SEQ ID NO: 21372 - DNA, 18 bp, Homo sapiens
  source 1..18: mol_type = genomic DNA
gtggtgagtatccccgcc

SEQ ID NO: 21373 - DNA, 19 bp, Homo sapiens
  source 1..19: mol_type = genomic DNA
gtggtgagtatccccgcct

SEQ ID NO: 21374 - DNA, 20 bp, Homo sapiens
  source 1..20: mol_type = genomic DNA
gtggtgagtatccccgcctg

SEQ ID NO: 21375 - DNA, 21 bp, Homo sapiens
  source 1..21: mol_type = genomic DNA
gtggtgagtatccccgcctgt

SEQ ID NO: 21376 - DNA, 22 bp, Homo sapiens
  source 1..22: mol_type = genomic DNA
gtggtgagtatccccgcctgtc

SEQ ID NO: 21377 - DNA, 23 bp, Homo sapiens
  source 1..23: mol_type = genomic DNA
gtggtgagtatccccgcctgtca

SEQ ID NO: 21378 - DNA, 24 bp, Homo sapiens
  source 1..24: mol_type = genomic DNA
gtggtgagtatccccgcctgtcac

SEQ ID NO: 21379 - DNA, 25 bp, Homo sapiens
  source 1..25: mol_type = genomic DNA
gtggtgagtatccccgcctgtcacg

SEQ ID NO: 21380 - DNA, 26 bp, Homo sapiens
  source 1..26: mol_type = genomic DNA
gtggtgagtatccccgcctgtcacgc

SEQ ID NO: 21381 - DNA, 27 bp, Homo sapiens
  source 1..27: mol_type = genomic DNA
gtggtgagtatccccgcctgtcacgcg

SEQ ID NO: 21382 - DNA, 30 bp, Homo sapiens
  source 1..30: mol_type = genomic DNA
gtggtgctaataacgccaaggtcgcgggtt

SEQ ID NO: 21383 - DNA, 19 bp, Homo sapiens
  source 1..19: mol_type = genomic DNA
gtggtgtagtggtgagcac

SEQ ID NO: 21384 - DNA, 17 bp, Homo sapiens
  source 1..17: mol_type = genomic DNA
gtggttaaggcattgga

SEQ ID NO: 21385 - DNA, 18 bp, Homo sapiens
  source 1..18: mol_type = genomic DNA
gtggttaaggcattggac

SEQ ID NO: 21386 - DNA, 17 bp, Homo sapiens
  source 1..17: mol_type = genomic DNA
gtggttaaggcgttgga

SEQ ID NO: 21387 - DNA, 16 bp, Homo sapiens
  source 1..16: mol_type = genomic DNA
gtggttagcatagctg

SEQ ID NO: 21388 - DNA, 17 bp, Homo sapiens
  source 1..17: mol_type = genomic DNA
gtggttagcatagctgc

SEQ ID NO: 21389 - DNA, 18 bp, Homo sapiens
  source 1..18: mol_type = genomic DNA
gtggttagcatagctgcc

SEQ ID NO: 21390 - DNA, 19 bp, Homo sapiens
  source 1..19: mol_type = genomic DNA
gtggttagcatagctgcct

SEQ ID NO: 21391 - DNA, 20 bp, Homo sapiens
  source 1..20: mol_type = genomic DNA
gtggttaggattcagcgctc

SEQ ID NO: 21392 - DNA, 16 bp, Homo sapiens
  source 1..16: mol_type = genomic DNA
gtggttaggattcggc

SEQ ID NO: 21393 - DNA, 17 bp, Homo sapiens
  source 1..17: mol_type = genomic DNA
gtggttaggattcggcg

SEQ ID NO: 21394 - DNA, 18 bp, Homo sapiens
  source 1..18: mol_type = genomic DNA
gtggttaggattcggcgc

SEQ ID NO: 21395 - DNA, 19 bp, Homo sapiens
  source 1..19: mol_type = genomic DNA
gtggttaggattcggcgct

SEQ ID NO: 21396 - DNA, 20 bp, Homo sapiens
  source 1..20: mol_type = genomic DNA
gtggttaggattcggcgctc

SEQ ID NO: 21397 - DNA, 21 bp, Homo sapiens
  source 1..21: mol_type = genomic DNA
gtggttaggattcggcgctct

SEQ ID NO: 21398 - DNA, 22 bp, Homo sapiens
  source 1..22: mol_type = genomic DNA
gtggttaggattcggcgctctc

SEQ ID NO: 21399 - DNA, 23 bp, Homo sapiens
  source 1..23: mol_type = genomic DNA
gtggttaggattcggcgctctca

SEQ ID NO: 21400 - DNA, 24 bp, Homo sapiens
  source 1..24: mol_type = genomic DNA
gtggttaggattcggcgctctcac

SEQ ID NO: 21401 - DNA, 25 bp, Homo sapiens
  source 1..25: mol_type = genomic DNA
gtggttaggattcggcgctctcacc

SEQ ID NO: 21402 - DNA, 26 bp, Homo sapiens
  source 1..26: mol_type = genomic DNA
gtggttaggattcggcgctctcaccg

SEQ ID NO: 21403 - DNA, 27 bp, Homo sapiens
  source 1..27: mol_type = genomic DNA
gtggttaggattcggcgctctcaccgc

SEQ ID NO: 21404 - DNA, 28 bp, Homo sapiens
  source 1..28: mol_type = genomic DNA
gtggttaggattcggcgctctcaccgcc

SEQ ID NO: 21405 - DNA, 30 bp, Homo sapiens
  source 1..30: mol_type = genomic DNA
gtggttaggattcggcgctctcaccgccgc

SEQ ID NO: 21406 - DNA, 34 bp, Homo sapiens
  source 1..34: mol_type = genomic DNA
gtggttaggattcggcgctctcaccgccgcggcc

SEQ ID NO: 21407 - DNA, 35 bp, Homo sapiens
  source 1..35: mol_type = genomic DNA
gtggttaggattcggcgctctcaccgccgcggccc

SEQ ID NO: 21408 - DNA, 36 bp, Homo sapiens
  source 1..36: mol_type = genomic DNA
gtggttaggattcggcgctctcaccgccgcggcccg

SEQ ID NO: 21409 - DNA, 37 bp, Homo sapiens
  source 1..37: mol_type = genomic DNA
gtggttaggattcggcgctctcaccgccgcggcccgg

SEQ ID NO: 21410 - DNA, 38 bp, Homo sapiens
  source 1..38: mol_type = genomic DNA
gtggttaggattcggcgctctcaccgccgcggcccggg

SEQ ID NO: 21411 - DNA, 39 bp, Homo sapiens
  source 1..39: mol_type = genomic DNA
gtggttaggattcggcgctctcaccgccgcggcccgggt

SEQ ID NO: 21412 - DNA, 40 bp, Homo sapiens
  source 1..40: mol_type = genomic DNA
gtggttaggattcggcgctctcaccgccgcggcccgggtt

SEQ ID NO: 21413 - DNA, 41 bp, Homo sapiens
  source 1..41: mol_type = genomic DNA
gtggttaggattcggcgctctcaccgccgcggcccgggttc

SEQ ID NO: 21414 - DNA, 45 bp, Homo sapiens
  source 1..45: mol_type = genomic DNA
gtggttaggattcggcgctctcaccgccgcggcccgggttcgatt

SEQ ID NO: 21415 - DNA, 46 bp, Homo sapiens
  source 1..46: mol_type = genomic DNA
gtggttaggattcggcgctctcaccgccgcggcccgggttcgattc

SEQ ID NO: 21416 - DNA, 16 bp, Homo sapiens
  source 1..16: mol_type = genomic DNA
gtggttagtactctgc

SEQ ID NO: 21417 - DNA, 17 bp, Homo sapiens
  source 1..17: mol_type = genomic DNA
gtggttagtactctgcg

SEQ ID NO: 21418 - DNA, 18 bp, Homo sapiens
  source 1..18: mol_type = genomic DNA
gtggttagtactctgcgt

SEQ ID NO: 21419 - DNA, 19 bp, Homo sapiens
  source 1..19: mol_type = genomic DNA
gtggttagtactctgcgtt

SEQ ID NO: 21420 - DNA, 20 bp, Homo sapiens
  source 1..20: mol_type = genomic DNA
gtggttagtactctgcgttg

SEQ ID NO: 21421 - DNA, 21 bp, Homo sapiens
  source 1..21: mol_type = genomic DNA
gtggttagtactctgcgttgt

SEQ ID NO: 21422 - DNA, 22 bp, Homo sapiens
  source 1..22: mol_type = genomic DNA
gtggttagtactctgcgttgtg

SEQ ID NO: 21423 - DNA, 24 bp, Homo sapiens
  source 1..24: mol_type = genomic DNA
gtggttagtactctgcgttgtggc

SEQ ID NO: 21424 - DNA, 25 bp, Homo sapiens
  source 1..25: mol_type = genomic DNA
gtggttagtactctgcgttgtggcc

SEQ ID NO: 21425 - DNA, 26 bp, Homo sapiens
  source 1..26: mol_type = genomic DNA
gtggttagtactctgcgttgtggccg

SEQ ID NO: 21426 - DNA, 27 bp, Homo sapiens
  source 1..27: mol_type = genomic DNA
gtggttagtactctgcgttgtggccgc

SEQ ID NO: 21427 - DNA, 31 bp, Homo sapiens
  source 1..31: mol_type = genomic DNA
gtggttagtactctgcgttgtggccgcagca

SEQ ID NO: 21428 - DNA, 34 bp, Homo sapiens
  source 1..34: mol_type = genomic DNA
gtggttagtactctgcgttgtggccgcagcaacc

SEQ ID NO: 21429 - DNA, 35 bp, Homo sapiens
  source 1..35: mol_type = genomic DNA
gtggttagtactctgcgttgtggccgcagcaacct

SEQ ID NO: 21430 - DNA, 37 bp, Homo sapiens
  source 1..37: mol_type = genomic DNA
gtggttagtactctgcgttgtggccgcagcaacctcg

SEQ ID NO: 21431 - DNA, 38 bp, Homo sapiens
  source 1..38: mol_type = genomic DNA
gtggttagtactctgcgttgtggccgcagcaacctcgg

SEQ ID NO: 21432 - DNA, 20 bp, Homo sapiens
  source 1..20: mol_type = genomic DNA
gtggttagtatccccgcctg

SEQ ID NO: 21433 - DNA, 21 bp, Homo sapiens
  source 1..21: mol_type = genomic DNA
gtggttagtatccccgcctgt

SEQ ID NO: 21434 - DNA, 22 bp, Homo sapiens
  source 1..22: mol_type = genomic DNA
gtggttagtatccccgcctgtc

SEQ ID NO: 21435 - DNA, 23 bp, Homo sapiens
  source 1..23: mol_type = genomic DNA
gtggttagtatccccgcctgtca

SEQ ID NO: 21436 - DNA, 24 bp, Homo sapiens
  source 1..24: mol_type = genomic DNA
gtggttagtatccccgcctgtcac

SEQ ID NO: 21437 - DNA, 25 bp, Homo sapiens
  source 1..25: mol_type = genomic DNA
gtggttagtatccccgcctgtcacg

SEQ ID NO: 21438 - DNA, 27 bp, Homo sapiens
  source 1..27: mol_type = genomic DNA
gtggttagtatccccgcctgtcacgcg

SEQ ID NO: 21439 - DNA, 19 bp, Homo sapiens
  source 1..19: mol_type = genomic DNA
gtggttatcacatctgctt

SEQ ID NO: 21440 - DNA, 20 bp, Homo sapiens
  source 1..20: mol_type = genomic DNA
gtggttatcacatctgcttt

SEQ ID NO: 21441 - DNA, 21 bp, Homo sapiens
  source 1..21: mol_type = genomic DNA
gtggttatcacatctgcttta

SEQ ID NO: 21442 - DNA, 22 bp, Homo sapiens
  source 1..22: mol_type = genomic DNA
gtggttatcacatctgctttac

SEQ ID NO: 21443 - DNA, 19 bp, Homo sapiens
  source 1..19: mol_type = genomic DNA
gtggttatcacattcgcct

SEQ ID NO: 21444 - DNA, 20 bp, Homo sapiens
  source 1..20: mol_type = genomic DNA
gtggttatcacattcgcctc

SEQ ID NO: 21445 - DNA, 21 bp, Homo sapiens
  source 1..21: mol_type = genomic DNA
gtggttatcacattcgcctca

SEQ ID NO: 21446 - DNA, 22 bp, Homo sapiens
  source 1..22: mol_type = genomic DNA
gtggttatcacattcgcctcac

SEQ ID NO: 21447 - DNA, 23 bp, Homo sapiens
  source 1..23: mol_type = genomic DNA
gtggttatcacattcgcctcaca

SEQ ID NO: 21448 - DNA, 17 bp, Homo sapiens
  source 1..17: mol_type = genomic DNA
gtggttatcacgtctgc

SEQ ID NO: 21449 - DNA, 18 bp, Homo sapiens
  source 1..18: mol_type = genomic DNA
gtggttatcacgtctgct

SEQ ID NO: 21450 - DNA, 19 bp, Homo sapiens
  source 1..19: mol_type = genomic DNA
gtggttatcacgtctgctt

SEQ ID NO: 21451 - DNA, 20 bp, Homo sapiens
  source 1..20: mol_type = genomic DNA
gtggttatcacgtctgcttt

SEQ ID NO: 21452 - DNA, 21 bp, Homo sapiens
  source 1..21: mol_type = genomic DNA
gtggttatcacgtctgcttta

SEQ ID NO: 21453 - DNA, 22 bp, Homo sapiens
  source 1..22: mol_type = genomic DNA
gtggttatcacgtctgctttac

SEQ ID NO: 21454 - DNA, 23 bp, Homo sapiens
  source 1..23: mol_type = genomic DNA
gtggttatcacgtctgctttaca

SEQ ID NO: 21455 - DNA, 24 bp, Homo sapiens
  source 1..24: mol_type = genomic DNA
gtggttatcacgtctgctttacac

SEQ ID NO: 21456 - DNA, 25 bp, Homo sapiens
  source 1..25: mol_type = genomic DNA
gtggttatcacgtctgctttacacg

SEQ ID NO: 21457 - DNA, 26 bp, Homo sapiens
  source 1..26: mol_type = genomic DNA
gtggttatcacgtctgctttacacgc

SEQ ID NO: 21458 - DNA, 37 bp, Homo sapiens
  source 1..37: mol_type = genomic DNA
gtggttatcacgtctgctttacacgcagaaggtcctg

SEQ ID NO: 21459 - DNA, 16 bp, Homo sapiens
  source 1..16: mol_type = genomic DNA
gtggttatcacgttcg

SEQ ID NO: 21460 - DNA, 17 bp, Homo sapiens
  source 1..17: mol_type = genomic DNA
gtggttatcacgttcgc

SEQ ID NO: 21461 - DNA, 18 bp, Homo sapiens
  source 1..18: mol_type = genomic DNA
gtggttatcacgttcgcc

SEQ ID NO: 21462 - DNA, 19 bp, Homo sapiens
  source 1..19: mol_type = genomic DNA
gtggttatcacgttcgcct

SEQ ID NO: 21463 - DNA, 20 bp, Homo sapiens
  source 1..20: mol_type = genomic DNA
gtggttatcacgttcgccta

SEQ ID NO: 21464 - DNA, 25 bp, Homo sapiens
  source 1..25: mol_type = genomic DNA
gtggttatcacgttcgcctaacacg

SEQ ID NO: 21465 - DNA, 20 bp, Homo sapiens
  source 1..20: mol_type = genomic DNA
gtggttatcacgttcgcctc

SEQ ID NO: 21466 - DNA, 21 bp, Homo sapiens
  source 1..21: mol_type = genomic DNA
gtggttatcacgttcgcctca

SEQ ID NO: 21467 - DNA, 22 bp, Homo sapiens
  source 1..22: mol_type = genomic DNA
gtggttatcacgttcgcctcac

SEQ ID NO: 21468 - DNA, 23 bp, Homo sapiens
  source 1..23: mol_type = genomic DNA
gtggttatcacgttcgcctcaca

SEQ ID NO: 21469 - DNA, 24 bp, Homo sapiens
  source 1..24: mol_type = genomic DNA
gtggttatcacgttcgcctcacac

SEQ ID NO: 21470 - DNA, 25 bp, Homo sapiens
  source 1..25: mol_type = genomic DNA
gtggttatcacgttcgcctcacacg

SEQ ID NO: 21471 - DNA, 26 bp, Homo sapiens
  source 1..26: mol_type = genomic DNA
gtggttatcacgttcgcctcacacgc

SEQ ID NO: 21472 - DNA, 27 bp, Homo sapiens
  source 1..27: mol_type = genomic DNA
gtggttatcacgttcgcctcacacgcg

SEQ ID NO: 21473 - DNA, 17 bp, Homo sapiens
  source 1..17: mol_type = genomic DNA
gtggttcagtggtagaa

SEQ ID NO: 21474 - DNA, 18 bp, Homo sapiens
  source 1..18: mol_type = genomic DNA
gtggttcagtggtagaat

SEQ ID NO: 21475 - DNA, 19 bp, Homo sapiens
  source 1..19: mol_type = genomic DNA
gtggttcagtggtagaatt

SEQ ID NO: 21476 - DNA, 20 bp, Homo sapiens
  source 1..20: mol_type = genomic DNA
gtggttcagtggtagaattc

SEQ ID NO: 21477 - DNA, 21 bp, Homo sapiens
  source 1..21: mol_type = genomic DNA
gtggttcagtggtagaattct

SEQ ID NO: 21478 - DNA, 22 bp, Homo sapiens
  source 1..22: mol_type = genomic DNA
gtggttcagtggtagaattctc

SEQ ID NO: 21479 - DNA, 23 bp, Homo sapiens
  source 1..23: mol_type = genomic DNA
gtggttcagtggtagaattctcg

SEQ ID NO: 21480 - DNA, 24 bp, Homo sapiens
  source 1..24: mol_type = genomic DNA
gtggttcagtggtagaattctcgc

SEQ ID NO: 21481 - DNA, 25 bp, Homo sapiens
  source 1..25: mol_type = genomic DNA
gtggttcagtggtagaattctcgcc

SEQ ID NO: 21482 - DNA, 26 bp, Homo sapiens
  source 1..26: mol_type = genomic DNA
gtggttcagtggtagaattctcgcct

SEQ ID NO: 21483 - DNA, 27 bp, Homo sapiens
  source 1..27: mol_type = genomic DNA
gtggttcagtggtagaattctcgcctc

SEQ ID NO: 21484 - DNA, 29 bp, Homo sapiens
  source 1..29: mol_type = genomic DNA
gtggttcagtggtagaattctcgcctccc

SEQ ID NO: 21485 - DNA, 30 bp, Homo sapiens
  source 1..30: mol_type = genomic DNA
gtggttcagtggtagaattctcgcctccca

SEQ ID NO: 21486 - DNA, 27 bp, Homo sapiens
  source 1..27: mol_type = genomic DNA
gtggttcagtggtagaattctcgcctg

SEQ ID NO: 21487 - DNA, 28 bp, Homo sapiens
  source 1..28: mol_type = genomic DNA
gtggttcagtggtagaattctcgcctgc

SEQ ID NO: 21488 - DNA, 29 bp, Homo sapiens
  source 1..29: mol_type = genomic DNA
gtggttcagtggtagaattctcgcctgcc

SEQ ID NO: 21489 - DNA, 30 bp, Homo sapiens
  source 1..30: mol_type = genomic DNA
gtggttcagtggtagaattctcgcctgcca

SEQ ID NO: 21490 - DNA, 31 bp, Homo sapiens
  source 1..31: mol_type = genomic DNA
gtggttcagtggtagaattctcgcctgccac

SEQ ID NO: 21491 - DNA, 32 bp, Homo sapiens
  source 1..32: mol_type = genomic DNA
gtggttcagtggtagaattctcgcctgccacg

SEQ ID NO: 21492 - DNA, 36 bp, Homo sapiens
  source 1..36: mol_type = genomic DNA
gtggttcagtggtagaattctcgcctgccacgcggg

SEQ ID NO: 21493 - DNA, 42 bp, Homo sapiens
  source 1..42: mol_type = genomic DNA
gtggttcagtggtagaattctcgcctgccacgcgggaggccc

SEQ ID NO: 21494 - DNA, 44 bp, Homo sapiens
  source 1..44: mol_type = genomic DNA
gtggttcagtggtagaattctcgcctgccacgcgggaggcccgg

SEQ ID NO: 21495 - DNA, 45 bp, Homo sapiens
  source 1..45: mol_type = genomic DNA
gtggttcagtggtagaattctcgcctgccacgcgggaggcccggg

SEQ ID NO: 21496 - DNA, 46 bp, Homo sapiens
  source 1..46: mol_type = genomic DNA
gtggttcagtggtagaattctcgcctgccacgcgggaggcccgggt

SEQ ID NO: 21497 - DNA, 16 bp, Homo sapiens
  source 1..16: mol_type = genomic DNA
gtggttgtagtccgtg

SEQ ID NO: 21498 - DNA, 17 bp, Homo sapiens
  source 1..17: mol_type = genomic DNA
gtggttgtagtccgtgc

SEQ ID NO: 21499 - DNA, 18 bp, Homo sapiens
  source 1..18: mol_type = genomic DNA
gtggttgtagtccgtgcg

SEQ ID NO: 21500 - DNA, 19 bp, Homo sapiens
  source 1..19: mol_type = genomic DNA
gtggttgtagtccgtgcga

SEQ ID NO: 21501 - DNA, 20 bp, Homo sapiens
  source 1..20: mol_type = genomic DNA
gtggttgtagtccgtgcgag

SEQ ID NO: 21502 - DNA, 21 bp, Homo sapiens
  source 1..21: mol_type = genomic DNA
gtggttgtagtccgtgcgaga

SEQ ID NO: 21503 - DNA, 22 bp, Homo sapiens
  source 1..22: mol_type = genomic DNA
gtggttgtagtccgtgcgagaa

SEQ ID NO: 21504 - DNA, 23 bp, Homo sapiens
  source 1..23: mol_type = genomic DNA
gtggttgtagtccgtgcgagaat

SEQ ID NO: 21505 - DNA, 24 bp, Homo sapiens
  source 1..24: mol_type = genomic DNA
gtggttgtagtccgtgcgagaata

SEQ ID NO: 21506 - DNA, 25 bp, Homo sapiens
  source 1..25: mol_type = genomic DNA
gtggttgtagtccgtgcgagaatac

SEQ ID NO: 21507 - DNA, 26 bp, Homo sapiens
  source 1..26: mol_type = genomic DNA
gtggttgtagtccgtgcgagaatacc

SEQ ID NO: 21508 - DNA, 27 bp, Homo sapiens
  source 1..27: mol_type = genomic DNA
gtggttgtagtccgtgcgagaatacca

SEQ ID NO: 21509 - DNA, 20 bp, Homo sapiens
  source 1..20: mol_type = genomic DNA
gtgtaatggtaagcactctg

SEQ ID NO: 21510 - DNA, 32 bp, Homo sapiens
  source 1..32: mol_type = genomic DNA
gtgtaatggtaagcactctggactctgaatcc

SEQ ID NO: 21511 - DNA, 20 bp, Homo sapiens
  source 1..20: mol_type = genomic DNA
gtgtaatggtcagcactctg

SEQ ID NO: 21512 - DNA, 43 bp, Homo sapiens
  source 1..43: mol_type = genomic DNA
gtgtaatggtcagcactctggactctgaatccagcgatccgag

SEQ ID NO: 21513 - DNA, 18 bp, Homo sapiens
  source 1..18: mol_type = genomic DNA
gtgtaatggtgagcactc

SEQ ID NO: 21514 - DNA, 19 bp, Homo sapiens
  source 1..19: mol_type = genomic DNA
gtgtaatggtgagcactct

SEQ ID NO: 21515 - DNA, 20 bp, Homo sapiens
  source 1..20: mol_type = genomic DNA
gtgtaatggtgagcactctg

SEQ ID NO: 21516 - DNA, 22 bp, Homo sapiens
  source 1..22: mol_type = genomic DNA
gtgtaatggtgagcactctgga

SEQ ID NO: 21517 - DNA, 24 bp, Homo sapiens
  source 1..24: mol_type = genomic DNA
gtgtaatggtgagcactctggact

SEQ ID NO: 21518 - DNA, 25 bp, Homo sapiens
  source 1..25: mol_type = genomic DNA
gtgtaatggtgagcactctggactc

SEQ ID NO: 21519 - DNA, 26 bp, Homo sapiens
  source 1..26: mol_type = genomic DNA
gtgtaatggtgagcactctggactct

SEQ ID NO: 21520 - DNA, 27 bp, Homo sapiens
  source 1..27: mol_type = genomic DNA
gtgtaatggtgagcactctggactctg

SEQ ID NO: 21521 - DNA, 30 bp, Homo sapiens
  source 1..30: mol_type = genomic DNA
gtgtaatggtgagcactctggactctgaat

SEQ ID NO: 21522 - DNA, 31 bp, Homo sapiens
  source 1..31: mol_type = genomic DNA
gtgtaatggtgagcactctggactctgaatc

SEQ ID NO: 21523 - DNA, 32 bp, Homo sapiens
  source 1..32: mol_type = genomic DNA
gtgtaatggtgagcactctggactctgaatcc

SEQ ID NO: 21524 - DNA, 43 bp, Homo sapiens
  source 1..43: mol_type = genomic DNA
gtgtaatggtgagcactctggactctgaatccagcgatccgag

SEQ ID NO: 21525 - DNA, 18 bp, Homo sapiens
  source 1..18: mol_type = genomic DNA
gtgtaatggttagcactc

SEQ ID NO: 21526 - DNA, 19 bp, Homo sapiens
  source 1..19: mol_type = genomic DNA
gtgtaatggttagcactct

SEQ ID NO: 21527 - DNA, 20 bp, Homo sapiens
  source 1..20: mol_type = genomic DNA
gtgtaatggttagcactctg

SEQ ID NO: 21528 - DNA, 21 bp, Homo sapiens
  source 1..21: mol_type = genomic DNA
gtgtaatggttagcactctgg

SEQ ID NO: 21529 - DNA, 22 bp, Homo sapiens
  source 1..22: mol_type = genomic DNA
gtgtaatggttagcactctgga

SEQ ID NO: 21530 - DNA, 23 bp, Homo sapiens
  source 1..23: mol_type = genomic DNA
gtgtaatggttagcactctggac

SEQ ID NO: 21531 - DNA, 24 bp, Homo sapiens
  source 1..24: mol_type = genomic DNA
gtgtaatggttagcactctggact

SEQ ID NO: 21532 - DNA, 25 bp, Homo sapiens
  source 1..25: mol_type = genomic DNA
gtgtaatggttagcactctggactc

SEQ ID NO: 21533 - DNA, 26 bp, Homo sapiens
  source 1..26: mol_type = genomic DNA
gtgtaatggttagcactctggactct

SEQ ID NO: 21534 - DNA, 27 bp, Homo sapiens
  source 1..27: mol_type = genomic DNA
gtgtaatggttagcactctggactctg

SEQ ID NO: 21535 - DNA, 28 bp, Homo sapiens
  source 1..28: mol_type = genomic DNA
gtgtaatggttagcactctggactctga

SEQ ID NO: 21536 - DNA, 29 bp, Homo sapiens
  source 1..29: mol_type = genomic DNA
gtgtaatggttagcactctggactctgaa

SEQ ID NO: 21537 - DNA, 31 bp, Homo sapiens
  source 1..31: mol_type = genomic DNA
gtgtaatggttagcactctggactctgaatc

SEQ ID NO: 21538 - DNA, 32 bp, Homo sapiens
  source 1..32: mol_type = genomic DNA
gtgtaatggttagcactctggactctgaatcc

SEQ ID NO: 21539 - DNA, 36 bp, Homo sapiens
  source 1..36: mol_type = genomic DNA
gtgtaatggttagcactctggactctgaatccagcg

SEQ ID NO: 21540 - DNA, 39 bp, Homo sapiens
  source 1..39: mol_type = genomic DNA
gtgtaatggttagcactctggactctgaatccagcgatc

SEQ ID NO: 21541 - DNA, 40 bp, Homo sapiens
  source 1..40: mol_type = genomic DNA
gtgtaatggttagcactctggactctgaatccagcgatcc

SEQ ID NO: 21542 - DNA, 41 bp, Homo sapiens
  source 1..41: mol_type = genomic DNA
gtgtaatggttagcactctggactctgaatccagcgatccg

SEQ ID NO: 21543 - DNA, 43 bp, Homo sapiens
  source 1..43: mol_type = genomic DNA
gtgtaatggttagcactctggactctgaatccagcgatccgag

SEQ ID NO: 21544 - DNA, 44 bp, Homo sapiens
  source 1..44: mol_type = genomic DNA
gtgtaatggttagcactctggactctgaatccagcgatccgagt

SEQ ID NO: 21545 - DNA, 45 bp, Homo sapiens
  source 1..45: mol_type = genomic DNA
gtgtaatggttagcactctggactctgaatccagcgatccgagtt

SEQ ID NO: 21546 - DNA, 46 bp, Homo sapiens
  source 1..46: mol_type = genomic DNA
gtgtaatggttagcactctggactctgaatccagcgatccgagttc

SEQ ID NO: 21547 - DNA, 47 bp, Homo sapiens
  source 1..47: mol_type = genomic DNA
gtgtaatggttagcactctggactctgaatccagcgatccgagttca

SEQ ID NO: 21548 - DNA, 25 bp, Homo sapiens
  source 1..25: mol_type = genomic DNA
gtgtaatggttagcactctggactt

SEQ ID NO: 21549 - DNA, 26 bp, Homo sapiens
  source 1..26: mol_type = genomic DNA
gtgtaatggttagcactctggacttt

SEQ ID NO: 21550 - DNA, 32 bp, Homo sapiens
  source 1..32: mol_type = genomic DNA
gtgtaatggttagcactctggactttgaatcc

SEQ ID NO: 21551 - DNA, 36 bp, Homo sapiens
  source 1..36: mol_type = genomic DNA
gtgtaatggttagcactctggactttgaatccagcg

SEQ ID NO: 21552 - DNA, 24 bp, Homo sapiens
  source 1..24: mol_type = genomic DNA
gtgtagcggttatcacattcgcct

SEQ ID NO: 21553 - DNA, 25 bp, Homo sapiens
  source 1..25: mol_type = genomic DNA
gtgtagcggttatcacattcgcctc

SEQ ID NO: 21554 - DNA, 21 bp, Homo sapiens
  source 1..21: mol_type = genomic DNA
gtgtagcggttatcacgtctg

SEQ ID NO: 21555 - DNA, 18 bp, Homo sapiens
  source 1..18: mol_type = genomic DNA
gtgtagctcagtggtaga

SEQ ID NO: 21556 - DNA, 28 bp, Homo sapiens
  source 1..28: mol_type = genomic DNA
gtgtagctcagtggtagagcatttgact

SEQ ID NO: 21557 - DNA, 29 bp, Homo sapiens
  source 1..29: mol_type = genomic DNA
gtgtagctcagtggtagagcatttgactg

SEQ ID NO: 21558 - DNA, 30 bp, Homo sapiens
  source 1..30: mol_type = genomic DNA
gtgtagctcagtggtagagcatttgactgc

SEQ ID NO: 21559 - DNA, 31 bp, Homo sapiens
  source 1..31: mol_type = genomic DNA
gtgtagctcagtggtagagcatttgactgca

SEQ ID NO: 21560 - DNA, 27 bp, Homo sapiens
  source 1..27: mol_type = genomic DNA
gtgtagctcagtggtagagcgcgtgct

SEQ ID NO: 21561 - DNA, 31 bp, Homo sapiens
  source 1..31: mol_type = genomic DNA
gtgtagctcagtggtagagcgcgtgcttcgc

SEQ ID NO: 21562 - DNA, 18 bp, Homo sapiens
  source 1..18: mol_type = genomic DNA
gtgtagtggtatcatgca

SEQ ID NO: 21563 - DNA, 23 bp, Homo sapiens
  source 1..23: mol_type = genomic DNA
gtgtagtggtatcatgcaagatt

SEQ ID NO: 21564 - DNA, 24 bp, Homo sapiens
  source 1..24: mol_type = genomic DNA
gtgtagtggtatcatgcaagattc

SEQ ID NO: 21565 - DNA, 25 bp, Homo sapiens
  source 1..25: mol_type = genomic DNA
gtgtagtggtatcatgcaagattcc

SEQ ID NO: 21566 - DNA, 26 bp, Homo sapiens
  source 1..26: mol_type = genomic DNA
gtgtagtggtatcatgcaagattccc

SEQ ID NO: 21567 - DNA, 31 bp, Homo sapiens
  source 1..31: mol_type = genomic DNA
gtgtagtggtatcatgcaagattcccattct

SEQ ID NO: 21568 - DNA, 32 bp, Homo sapiens
  source 1..32: mol_type = genomic DNA
gtgtagtggtatcatgcaagattcccattctt

SEQ ID NO: 21569 - DNA, 41 bp, Homo sapiens
  source 1..41: mol_type = genomic DNA
gtgtagtggtatcatgcaagattcccattcttgcgacccgg

SEQ ID NO: 21570 - DNA, 42 bp, Homo sapiens
  source 1..42: mol_type = genomic DNA
gtgtagtggtatcatgcaagattcccattcttgcgacccggg

SEQ ID NO: 21571 - DNA, 43 bp, Homo sapiens
  source 1..43: mol_type = genomic DNA
gtgtagtggtatcatgcaagattcccattcttgcgacccgggt

SEQ ID NO: 21572 - DNA, 23 bp, Homo sapiens
  source 1..23: mol_type = genomic DNA
gtgtagtggtcatcacgttcgcc

SEQ ID NO: 21573 - DNA, 24 bp, Homo sapiens
  source 1..24: mol_type = genomic DNA
gtgtagtggtcatcacgttcgcct

SEQ ID NO: 21574 - DNA, 23 bp, Homo sapiens
  source 1..23: mol_type = genomic DNA
gtgtagtggttatcacattcgcc

SEQ ID NO: 21575 - DNA, 24 bp, Homo sapiens
  source 1..24: mol_type = genomic DNA
gtgtagtggttatcacattcgcct

SEQ ID NO: 21576 - DNA, 21 bp, Homo sapiens
  source 1..21: mol_type = genomic DNA
gtgtagtggttatcacgtctg

SEQ ID NO: 21577 - DNA, 23 bp, Homo sapiens
  source 1..23: mol_type = genomic DNA
gtgtagtggttatcacgtctgct

SEQ ID NO: 21578 - DNA, 24 bp, Homo sapiens
  source 1..24: mol_type = genomic DNA
gtgtagtggttatcacgtctgctt

SEQ ID NO: 21579 - DNA, 25 bp, Homo sapiens
  source 1..25: mol_type = genomic DNA
gtgtagtggttatcacgtctgcttt

SEQ ID NO: 21580 - DNA, 27 bp, Homo sapiens
  source 1..27: mol_type = genomic DNA
gtgtagtggttatcacgtctgctttac

SEQ ID NO: 21581 - DNA, 21 bp, Homo sapiens
  source 1..21: mol_type = genomic DNA
gtgtagtggttatcacgttcg

SEQ ID NO: 21582 - DNA, 22 bp, Homo sapiens
  source 1..22: mol_type = genomic DNA
gtgtagtggttatcacgttcgc

SEQ ID NO: 21583 - DNA, 23 bp, Homo sapiens
  source 1..23: mol_type = genomic DNA
gtgtagtggttatcacgttcgcc

SEQ ID NO: 21584 - DNA, 24 bp, Homo sapiens
  source 1..24: mol_type = genomic DNA
gtgtagtggttatcacgttcgcct

SEQ ID NO: 21585 - DNA, 25 bp, Homo sapiens
  source 1..25: mol_type = genomic DNA
gtgtagtggttatcacgttcgcctc

SEQ ID NO: 21586 - DNA, 26 bp, Homo sapiens
  source 1..26: mol_type = genomic DNA
gtgtagtggttatcacgttcgcctca

SEQ ID NO: 21587 - DNA, 27 bp, Homo sapiens
  source 1..27: mol_type = genomic DNA
gtgtagtggttatcacgttcgcctcac

SEQ ID NO: 21588 - DNA, 28 bp, Homo sapiens
  source 1..28: mol_type = genomic DNA
gtgtagtggttatcacgttcgcctcaca

SEQ ID NO: 21589 - DNA, 29 bp, Homo sapiens
  source 1..29: mol_type = genomic DNA
gtgtagtggttatcacgttcgcctcacac

SEQ ID NO: 21590 - DNA, 30 bp, Homo sapiens
  source 1..30: mol_type = genomic DNA
gtgtagtggttatcacgttcgcctcacacg

SEQ ID NO: 21591 - DNA, 45 bp, Homo sapiens
  source 1..45: mol_type = genomic DNA
gtgtagtggttatcacgttcgcctcacacgcgaaaggtccccggt

SEQ ID NO: 21592 - DNA, 24 bp, Homo sapiens
  source 1..24: mol_type = genomic DNA
gtgtagtggttatcacgtttgcct

SEQ ID NO: 21593 - DNA, 24 bp, Homo sapiens
  source 1..24: mol_type = genomic DNA
gtgtagtggttatcatgttcgcct

SEQ ID NO: 21594 - DNA, 16 bp, Homo sapiens
  source 1..16: mol_type = genomic DNA
gtgtgaggtcccgggt

SEQ ID NO: 21595 - DNA, 35 bp, Homo sapiens
  source 1..35: mol_type = genomic DNA
gtgtgaggtcccgggttcaatccccggcatctcca

SEQ ID NO: 21596 - DNA, 17 bp, Homo sapiens
  source 1..17: mol_type = genomic DNA
gtgtgataggtggcacg

SEQ ID NO: 21597 - DNA, 20 bp, Homo sapiens
  source 1..20: mol_type = genomic DNA
gtgtgataggtggcacggag

SEQ ID NO: 21598 - DNA, 22 bp, Homo sapiens
  source 1..22: mol_type = genomic DNA
gtgtgataggtggcacggagaa

SEQ ID NO: 21599 - DNA, 23 bp, Homo sapiens
  source 1..23: mol_type = genomic DNA
gtgtgataggtggcacggagaat

SEQ ID NO: 21600 - DNA, 27 bp, Homo sapiens
  source 1..27: mol_type = genomic DNA
gtgtgataggtggcacggagaattttg

SEQ ID NO: 21601 - DNA, 18 bp, Homo sapiens
  source 1..18: mol_type = genomic DNA
gtgtggccgagcggtcta

SEQ ID NO: 21602 - DNA, 20 bp, Homo sapiens
  source 1..20: mol_type = genomic DNA
gtgttcaaatcacgtcgggg

SEQ ID NO: 21603 - DNA, 25 bp, Homo sapiens
  source 1..25: mol_type = genomic DNA
gtgttcaaatcacgtcggggtcacc

SEQ ID NO: 21604 - DNA, 19 bp, Homo sapiens
  source 1..19: mol_type = genomic DNA
gtgttcaagtcacgtcggg

SEQ ID NO: 21605 - DNA, 25 bp, Homo sapiens
  source 1..25: mol_type = genomic DNA
gtgttcaagtcacgtcggggtcacc

SEQ ID NO: 21606 - DNA, 26 bp, Homo sapiens
  source 1..26: mol_type = genomic DNA
gtgttcaagtcacgtcggggtcacca

SEQ ID NO: 21607 - DNA, 22 bp, Homo sapiens
  source 1..22: mol_type = genomic DNA
gtgttcgaatcacgtcggggtc

SEQ ID NO: 21608 - DNA, 23 bp, Homo sapiens
  source 1..23: mol_type = genomic DNA
gtgttcgaatcacgtcggggtca

SEQ ID NO: 21609 - DNA, 24 bp, Homo sapiens
  source 1..24: mol_type = genomic DNA
gtgttcgaatcacgtcggggtcac

SEQ ID NO: 21610 - DNA, 25 bp, Homo sapiens
  source 1..25: mol_type = genomic DNA
gtgttcgaatcacgtcggggtcacc

SEQ ID NO: 21611 - DNA, 26 bp, Homo sapiens
  source 1..26: mol_type = genomic DNA
gtgttcgaatcacgtcggggtcacca

SEQ ID NO: 21612 - DNA, 20 bp, Homo sapiens
  source 1..20: mol_type = genomic DNA
gtgtttgtgggtttaagtcc

SEQ ID NO: 21613 - DNA, 22 bp, Homo sapiens
  source 1..22: mol_type = genomic DNA
gtgtttgtgggtttaagtccca

SEQ ID NO: 21614 - DNA, 23 bp, Homo sapiens
  source 1..23: mol_type = genomic DNA
gtgtttgtgggtttaagtcccat

SEQ ID NO: 21615 - DNA, 24 bp, Homo sapiens
  source 1..24: mol_type = genomic DNA
gtgtttgtgggtttaagtcccatt

SEQ ID NO: 21616 - DNA, 27 bp, Homo sapiens
  source 1..27: mol_type = genomic DNA
gtgtttgtgggtttaagtcccattggt

SEQ ID NO: 21617 - DNA, 28 bp, Homo sapiens
  source 1..28: mol_type = genomic DNA
gtgtttgtgggtttaagtcccattggtc

SEQ ID NO: 21618 - DNA, 29 bp, Homo sapiens
  source 1..29: mol_type = genomic DNA
gtgtttgtgggtttaagtcccattggtct

SEQ ID NO: 21619 - DNA, 30 bp, Homo sapiens
  source 1..30: mol_type = genomic DNA
gtgtttgtgggtttaagtcccattggtcta

SEQ ID NO: 21620 - DNA, 31 bp, Homo sapiens
  source 1..31: mol_type = genomic DNA
gtgtttgtgggtttaagtcccattggtctag

SEQ ID NO: 21621 - DNA, 32 bp, Homo sapiens
  source 1..32: mol_type = genomic DNA
gtgtttgtgggtttaagtcccattggtctagc

SEQ ID NO: 21622 - DNA, 33 bp, Homo sapiens
  source 1..33: mol_type = genomic DNA
gtgtttgtgggtttaagtcccattggtctagcc

SEQ ID NO: 21623 - DNA, 34 bp, Homo sapiens
  source 1..34: mol_type = genomic DNA
gtgtttgtgggtttaagtcccattggtctagcca

SEQ ID NO: 21624 - DNA, 16 bp, Homo sapiens
  source 1..16: mol_type = genomic DNA
gttaaagactttttct

SEQ ID NO: 21625 - DNA, 17 bp, Homo sapiens
  source 1..17: mol_type = genomic DNA
gttaaagactttttctc

SEQ ID NO: 21626 - DNA, 18 bp, Homo sapiens
  source 1..18: mol_type = genomic DNA
gttaaagactttttctct

SEQ ID NO: 21627 - DNA, 19 bp, Homo sapiens
  source 1..19: mol_type = genomic DNA
gttaaagactttttctctg

SEQ ID NO: 21628 - DNA, 20 bp, Homo sapiens
  source 1..20: mol_type = genomic DNA
gttaaagactttttctctga

SEQ ID NO: 21629 - DNA, 21 bp, Homo sapiens
  source 1..21: mol_type = genomic DNA
gttaaagactttttctctgac

SEQ ID NO: 21630 - DNA, 22 bp, Homo sapiens
  source 1..22: mol_type = genomic DNA
gttaaagactttttctctgacc

SEQ ID NO: 21631 - DNA, 23 bp, Homo sapiens
  source 1..23: mol_type = genomic DNA
gttaaagactttttctctgacca

SEQ ID NO: 21632 - DNA, 16 bp, Homo sapiens
  source 1..16: mol_type = genomic DNA
gttaaagattaagaga

SEQ ID NO: 21633 - DNA, 17 bp, Homo sapiens
  source 1..17: mol_type = genomic DNA
gttaaagattaagagaa

SEQ ID NO: 21634 - DNA, 18 bp, Homo sapiens
  source 1..18: mol_type = genomic DNA
gttaaagattaagagaac

SEQ ID NO: 21635 - DNA, 19 bp, Homo sapiens
  source 1..19: mol_type = genomic DNA
gttaaagattaagagaacc

SEQ ID NO: 21636 - DNA, 20 bp, Homo sapiens
  source 1..20: mol_type = genomic DNA
gttaaagattaagagaacca

SEQ ID NO: 21637 - DNA, 21 bp, Homo sapiens
  source 1..21: mol_type = genomic DNA
gttaaagattaagagaaccaa

SEQ ID NO: 21638 - DNA, 22 bp, Homo sapiens
  source 1..22: mol_type = genomic DNA
gttaaagattaagagaaccaac

SEQ ID NO: 21639 - DNA, 23 bp, Homo sapiens
  source 1..23: mol_type = genomic DNA
gttaaagattaagagaaccaaca

SEQ ID NO: 21640 - DNA, 24 bp, Homo sapiens
  source 1..24: mol_type = genomic DNA
gttaaagattaagagaaccaacac

SEQ ID NO: 21641 - DNA, 25 bp, Homo sapiens
  source 1..25: mol_type = genomic DNA
gttaaagattaagagaaccaacacc

SEQ ID NO: 21642 - DNA, 26 bp, Homo sapiens
  source 1..26: mol_type = genomic DNA
gttaaagattaagagaaccaacacct

SEQ ID NO: 21643 - DNA, 27 bp, Homo sapiens
  source 1..27: mol_type = genomic DNA
gttaaagattaagagaaccaacacctc

SEQ ID NO: 21644 - DNA, 28 bp, Homo sapiens
  source 1..28: mol_type = genomic DNA
gttaaagattaagagaaccaacacctct

SEQ ID NO: 21645 - DNA, 29 bp, Homo sapiens
  source 1..29: mol_type = genomic DNA
gttaaagattaagagaaccaacacctctt

SEQ ID NO: 21646 - DNA, 30 bp, Homo sapiens
  source 1..30: mol_type = genomic DNA
gttaaagattaagagaaccaacacctcttt

SEQ ID NO: 21647 - DNA, 31 bp, Homo sapiens
  source 1..31: mol_type = genomic DNA
gttaaagattaagagaaccaacacctcttta

SEQ ID NO: 21648 - DNA, 32 bp, Homo sapiens
  source 1..32: mol_type = genomic DNA
gttaaagattaagagaaccaacacctctttac

SEQ ID NO: 21649 - DNA, 33 bp, Homo sapiens
  source 1..33: mol_type = genomic DNA
gttaaagattaagagaaccaacacctctttaca

SEQ ID NO: 21650 - DNA, 34 bp, Homo sapiens
  source 1..34: mol_type = genomic DNA
gttaaagattaagagaaccaacacctctttacag

SEQ ID NO: 21651 - DNA, 35 bp, Homo sapiens
  source 1..35: mol_type = genomic DNA
gttaaagattaagagaaccaacacctctttacagt

SEQ ID NO: 21652 - DNA, 36 bp, Homo sapiens
  source 1..36: mol_type = genomic DNA
gttaaagattaagagaaccaacacctctttacagtg

SEQ ID NO: 21653 - DNA, 37 bp, Homo sapiens
  source 1..37: mol_type = genomic DNA
gttaaagattaagagaaccaacacctctttacagtga

SEQ ID NO: 21654 - DNA, 38 bp, Homo sapiens
  source 1..38: mol_type = genomic DNA
gttaaagattaagagaaccaacacctctttacagtgac

SEQ ID NO: 21655 - DNA, 39 bp, Homo sapiens
  source 1..39: mol_type = genomic DNA
gttaaagattaagagaaccaacacctctttacagtgacc

SEQ ID NO: 21656 - DNA, 40 bp, Homo sapiens
  source 1..40: mol_type = genomic DNA
gttaaagattaagagaaccaacacctctttacagtgacca

SEQ ID NO: 21657 - DNA, 17 bp, Homo sapiens
  source 1..17: mol_type = genomic DNA
gttaaatacagaccaag

SEQ ID NO: 21658 - DNA, 18 bp, Homo sapiens
  source 1..18: mol_type = genomic DNA
gttaaatacagaccaaga

SEQ ID NO: 21659 - DNA, 20 bp, Homo sapiens
  source 1..20: mol_type = genomic DNA
gttaaatacagaccaagagc

SEQ ID NO: 21660 - DNA, 21 bp, Homo sapiens
  source 1..21: mol_type = genomic DNA
gttaaatacagaccaagagcc

SEQ ID NO: 21661 - DNA, 22 bp, Homo sapiens
  source 1..22: mol_type = genomic DNA
gttaaatacagaccaagagcct

SEQ ID NO: 21662 - DNA, 23 bp, Homo sapiens
  source 1..23: mol_type = genomic DNA
gttaaatacagaccaagagcctt

SEQ ID NO: 21663 - DNA, 24 bp, Homo sapiens
  source 1..24: mol_type = genomic DNA
gttaaatacagaccaagagccttc

SEQ ID NO: 21664 - DNA, 25 bp, Homo sapiens
  source 1..25: mol_type = genomic DNA
gttaaatacagaccaagagccttca

SEQ ID NO: 21665 - DNA, 26 bp, Homo sapiens
  source 1..26: mol_type = genomic DNA
gttaaatacagaccaagagccttcaa

SEQ ID NO: 21666 - DNA, 30 bp, Homo sapiens
  source 1..30: mol_type = genomic DNA
gttaaatacagaccaagagccttcaaagcc

SEQ ID NO: 21667 - DNA, 31 bp, Homo sapiens
  source 1..31: mol_type = genomic DNA
gttaaatacagaccaagagccttcaaagccc

SEQ ID NO: 21668 - DNA, 16 bp, Homo sapiens
  source 1..16: mol_type = genomic DNA
gttaaattataggcta

SEQ ID NO: 21669 - DNA, 17 bp, Homo sapiens
  source 1..17: mol_type = genomic DNA
gttaaattataggctaa

SEQ ID NO: 21670 - DNA, 18 bp, Homo sapiens
  source 1..18: mol_type = genomic DNA
gttaaattataggctaaa

SEQ ID NO: 21671 - DNA, 19 bp, Homo sapiens
  source 1..19: mol_type = genomic DNA
gttaaattataggctaaat

SEQ ID NO: 21672 - DNA, 20 bp, Homo sapiens
  source 1..20: mol_type = genomic DNA
gttaaattataggctaaatc

SEQ ID NO: 21673 - DNA, 21 bp, Homo sapiens
  source 1..21: mol_type = genomic DNA
gttaaattataggctaaatcc

SEQ ID NO: 21674 - DNA, 22 bp, Homo sapiens
  source 1..22: mol_type = genomic DNA
gttaaattataggctaaatcct

SEQ ID NO: 21675 - DNA, 25 bp, Homo sapiens
  source 1..25: mol_type = genomic DNA
gttaaattataggctaaatcctata

SEQ ID NO: 21676 - DNA, 26 bp, Homo sapiens
  source 1..26: mol_type = genomic DNA
gttaaattataggctaaatcctatat

SEQ ID NO: 21677 - DNA, 27 bp, Homo sapiens
  source 1..27: mol_type = genomic DNA
gttaaattataggctaaatcctatata

SEQ ID NO: 21678 - DNA, 29 bp, Homo sapiens
  source 1..29: mol_type = genomic DNA
gttaaattataggctaaatcctatatatc

SEQ ID NO: 21679 - DNA, 30 bp, Homo sapiens
  source 1..30: mol_type = genomic DNA
gttaaattataggctaaatcctatatatct

SEQ ID NO: 21680 - DNA, 34 bp, Homo sapiens
  source 1..34: mol_type = genomic DNA
gttaaattataggctaaatcctatatatcttacc

SEQ ID NO: 21681 - DNA, 42 bp, Homo sapiens
  source 1..42: mol_type = genomic DNA
gttaaccgaaaggttggtggttcgagcccacccagggacgcc

SEQ ID NO: 21682 - DNA, 43 bp, Homo sapiens
  source 1..43: mol_type = genomic DNA
gttaaccgaaaggttggtggttcgagcccacccagggacgcca

SEQ ID NO: 21683 - DNA, 17 bp, Homo sapiens
  source 1..17: mol_type = genomic DNA
gttaactaagtgtttgt

SEQ ID NO: 21684 - DNA, 18 bp, Homo sapiens
  source 1..18: mol_type = genomic DNA
gttaactaagtgtttgtg

SEQ ID NO: 21685 - DNA, 19 bp, Homo sapiens
  source 1..19: mol_type = genomic DNA
gttaactaagtgtttgtgg

SEQ ID NO: 21686 - DNA, 20 bp, Homo sapiens
  source 1..20: mol_type = genomic DNA
gttaactaagtgtttgtggg

SEQ ID NO: 21687 - DNA, 21 bp, Homo sapiens
  source 1..21: mol_type = genomic DNA
gttaactaagtgtttgtgggt

SEQ ID NO: 21688 - DNA, 22 bp, Homo sapiens
  source 1..22: mol_type = genomic DNA
gttaactaagtgtttgtgggtt

SEQ ID NO: 21689 - DNA, 23 bp, Homo sapiens
  source 1..23: mol_type = genomic DNA
gttaactaagtgtttgtgggttt

SEQ ID NO: 21690 - DNA, 28 bp, Homo sapiens
  source 1..28: mol_type = genomic DNA
gttaactaagtgtttgtgggtttaagtc

SEQ ID NO: 21691 - DNA, 29 bp, Homo sapiens
  source 1..29: mol_type = genomic DNA
gttaactaagtgtttgtgggtttaagtcc

SEQ ID NO: 21692 - DNA, 33 bp, Homo sapiens
  source 1..33: mol_type = genomic DNA
gttaactaagtgtttgtgggtttaagtcccatt

SEQ ID NO: 21693 - DNA, 37 bp, Homo sapiens
  source 1..37: mol_type = genomic DNA
gttaactaagtgtttgtgggtttaagtcccattggtc

SEQ ID NO: 21694 - DNA, 38 bp, Homo sapiens
  source 1..38: mol_type = genomic DNA
gttaactaagtgtttgtgggtttaagtcccattggtct

SEQ ID NO: 21695 - DNA, 39 bp, Homo sapiens
  source 1..39: mol_type = genomic DNA
gttaactaagtgtttgtgggtttaagtcccattggtcta

SEQ ID NO: 21696 - DNA, 40 bp, Homo sapiens
  source 1..40: mol_type = genomic DNA
gttaactaagtgtttgtgggtttaagtcccattggtctag

SEQ ID NO: 21697 - DNA, 41 bp, Homo sapiens
  source 1..41: mol_type = genomic DNA
gttaactaagtgtttgtgggtttaagtcccattggtctagc

SEQ ID NO: 21698 - DNA, 42 bp, Homo sapiens
  source 1..42: mol_type = genomic DNA
gttaactaagtgtttgtgggtttaagtcccattggtctagcc

SEQ ID NO: 21699 - DNA, 43 bp, Homo sapiens
  source 1..43: mol_type = genomic DNA
gttaactaagtgtttgtgggtttaagtcccattggtctagcca

SEQ ID NO: 21700 - DNA, 27 bp, Homo sapiens
  source 1..27: mol_type = genomic DNA
gttaacttccaattaactagttttgac

SEQ ID NO: 21701 - DNA, 16 bp, Homo sapiens
  source 1..16: mol_type = genomic DNA
gttaagatggcagagc

SEQ ID NO: 21702 - DNA, 17 bp, Homo sapiens
  source 1..17: mol_type = genomic DNA
gttaagatggcagagcc

SEQ ID NO: 21703 - DNA, 18 bp, Homo sapiens
  source 1..18: mol_type = genomic DNA
gttaagatggcagagccc

SEQ ID NO: 21704 - DNA, 19 bp, Homo sapiens
  source 1..19: mol_type = genomic DNA
gttaagatggcagagccca

SEQ ID NO: 21705 - DNA, 19 bp, Homo sapiens
  source 1..19: mol_type = genomic DNA
gttaagatggcagagcccg

SEQ ID NO: 21706 - DNA, 20 bp, Homo sapiens
  source 1..20: mol_type = genomic DNA
gttaagatggcagagcccgg

SEQ ID NO: 21707 - DNA, 21 bp, Homo sapiens
  source 1..21: mol_type = genomic DNA
gttaagatggcagagcccggc

SEQ ID NO: 21708 - DNA, 22 bp, Homo sapiens
  source 1..22: mol_type = genomic DNA
gttaagatggcagagcccggca

SEQ ID NO: 21709 - DNA, 21 bp, Homo sapiens
  source 1..21: mol_type = genomic DNA
gttaagatggcagagcccggt

SEQ ID NO: 21710 - DNA, 22 bp, Homo sapiens
  source 1..22: mol_type = genomic DNA
gttaagatggcagagcccggta

SEQ ID NO: 21711 - DNA, 23 bp, Homo sapiens
  source 1..23: mol_type = genomic DNA
gttaagatggcagagcccggtaa

SEQ ID NO: 21712 - DNA, 24 bp, Homo sapiens
  source 1..24: mol_type = genomic DNA
gttaagatggcagagcccggtaat

SEQ ID NO: 21713 - DNA, 25 bp, Homo sapiens
  source 1..25: mol_type = genomic DNA
gttaagatggcagagcccggtaatc

SEQ ID NO: 21714 - DNA, 26 bp, Homo sapiens
  source 1..26: mol_type = genomic DNA
gttaagatggcagagcccggtaatcg

SEQ ID NO: 21715 - DNA, 27 bp, Homo sapiens
  source 1..27: mol_type = genomic DNA
gttaagatggcagagcccggtaatcgc

SEQ ID NO: 21716 - DNA, 28 bp, Homo sapiens
  source 1..28: mol_type = genomic DNA
gttaagatggcagagcccggtaatcgca

SEQ ID NO: 21717 - DNA, 29 bp, Homo sapiens
  source 1..29: mol_type = genomic DNA
gttaagatggcagagcccggtaatcgcat

SEQ ID NO: 21718 - DNA, 30 bp, Homo sapiens
  source 1..30: mol_type = genomic DNA
gttaagatggcagagcccggtaatcgcata

SEQ ID NO: 21719 - DNA, 31 bp, Homo sapiens
  source 1..31: mol_type = genomic DNA
gttaagatggcagagcccggtaatcgcataa

SEQ ID NO: 21720 - DNA, 32 bp, Homo sapiens
  source 1..32: mol_type = genomic DNA
gttaagatggcagagcccggtaatcgcataaa

SEQ ID NO: 21721 - DNA, 33 bp, Homo sapiens
  source 1..33: mol_type = genomic DNA
gttaagatggcagagcccggtaatcgcataaaa

SEQ ID NO: 21722 - DNA, 34 bp, Homo sapiens
  source 1..34: mol_type = genomic DNA
gttaagatggcagagcccggtaatcgcataaaac

SEQ ID NO: 21723 - DNA, 35 bp, Homo sapiens
  source 1..35: mol_type = genomic DNA
gttaagatggcagagcccggtaatcgcataaaact

SEQ ID NO: 21724 - DNA, 36 bp, Homo sapiens
  source 1..36: mol_type = genomic DNA
gttaagatggcagagcccggtaatcgcataaaactt

SEQ ID NO: 21725 - DNA, 37 bp, Homo sapiens
  source 1..37: mol_type = genomic DNA
gttaagatggcagagcccggtaatcgcataaaactta

SEQ ID NO: 21726 - DNA, 38 bp, Homo sapiens
  source 1..38: mol_type = genomic DNA
gttaagatggcagagcccggtaatcgcataaaacttaa

SEQ ID NO: 21727 - DNA, 39 bp, Homo sapiens
  source 1..39: mol_type = genomic DNA
gttaagatggcagagcccggtaatcgcataaaacttaaa

SEQ ID NO: 21728 - DNA, 40 bp, Homo sapiens
  source 1..40: mol_type = genomic DNA
gttaagatggcagagcccggtaatcgcataaaacttaaaa

SEQ ID NO: 21729 - DNA, 41 bp, Homo sapiens
  source 1..41: mol_type = genomic DNA
gttaagatggcagagcccggtaatcgcataaaacttaaaac

SEQ ID NO: 21730 - DNA, 42 bp, Homo sapiens
  source 1..42: mol_type = genomic DNA
gttaagatggcagagcccggtaatcgcataaaacttaaaact

SEQ ID NO: 21731 - DNA, 43 bp, Homo sapiens
  source 1..43: mol_type = genomic DNA
gttaagatggcagagcccggtaatcgcataaaacttaaaactt

SEQ ID NO: 21732 - DNA, 44 bp, Homo sapiens
  source 1..44: mol_type = genomic DNA
gttaagatggcagagcccggtaatcgcataaaacttaaaacttt

SEQ ID NO: 21733 - DNA, 45 bp, Homo sapiens
  source 1..45: mol_type = genomic DNA
gttaagatggcagagcccggtaatcgcataaaacttaaaacttta

SEQ ID NO: 21734 - DNA, 46 bp, Homo sapiens
  source 1..46: mol_type = genomic DNA
gttaagatggcagagcccggtaatcgcataaaacttaaaactttac

SEQ ID NO: 21735 - DNA, 47 bp, Homo sapiens
  source 1..47: mol_type = genomic DNA
gttaagatggcagagcccggtaatcgcataaaacttaaaactttaca

SEQ ID NO: 21736 - DNA, 48 bp, Homo sapiens
  source 1..48: mol_type = genomic DNA
gttaagatggcagagcccggtaatcgcataaaacttaaaactttacag

SEQ ID NO: 21737 - DNA, 18 bp, Homo sapiens
  source 1..18: mol_type = genomic DNA
gttaagatggcagagcct

SEQ ID NO: 21738 - DNA, 20 bp, Homo sapiens
  source 1..20: mol_type = genomic DNA
gttaagatggcagagcctgg

SEQ ID NO: 21739 - DNA, 18 bp, Homo sapiens
  source 1..18: mol_type = genomic DNA
gttaagatggcatagccc

SEQ ID NO: 21740 - DNA, 16 bp, Homo sapiens
  source 1..16: mol_type = genomic DNA
gttagagcactggtct

SEQ ID NO: 21741 - DNA, 16 bp, Homo sapiens
  source 1..16: mol_type = genomic DNA
gttagcactctggact

SEQ ID NO: 21742 - DNA, 17 bp, Homo sapiens
  source 1..17: mol_type = genomic DNA
gttagcactctggactc

SEQ ID NO: 21743 - DNA, 18 bp, Homo sapiens
  source 1..18: mol_type = genomic DNA
gttagcactctggactct

SEQ ID NO: 21744 - DNA, 19 bp, Homo sapiens
  source 1..19: mol_type = genomic DNA
gttagcactctggactctg

SEQ ID NO: 21745 - DNA, 20 bp, Homo sapiens
  source 1..20: mol_type = genomic DNA
gttagcactctggactctga

SEQ ID NO: 21746 - DNA, 21 bp, Homo sapiens
  source 1..21: mol_type = genomic DNA
gttagcactctggactctgaa

SEQ ID NO: 21747 - DNA, 22 bp, Homo sapiens
  source 1..22: mol_type = genomic DNA
gttagcactctggactctgaat

SEQ ID NO: 21748 - DNA, 23 bp, Homo sapiens
  source 1..23: mol_type = genomic DNA
gttagcactctggactctgaatc

SEQ ID NO: 21749 - DNA, 24 bp, Homo sapiens
  source 1..24: mol_type = genomic DNA
gttagcactctggactctgaatcc

SEQ ID NO: 21750 - DNA, 25 bp, Homo sapiens
  source 1..25: mol_type = genomic DNA
gttagcactctggactctgaatcca

SEQ ID NO: 21751 - DNA, 26 bp, Homo sapiens
  source 1..26: mol_type = genomic DNA
gttagcactctggactctgaatccag

SEQ ID NO: 21752 - DNA, 27 bp, Homo sapiens
  source 1..27: mol_type = genomic DNA
gttagcactctggactctgaatccagc

SEQ ID NO: 21753 - DNA, 28 bp, Homo sapiens
  source 1..28: mol_type = genomic DNA
gttagcactctggactctgaatccagcg

SEQ ID NO: 21754 - DNA, 33 bp, Homo sapiens
  source 1..33: mol_type = genomic DNA
gttagcactctggactctgaatccagcgatccg

SEQ ID NO: 21755 - DNA, 34 bp, Homo sapiens
  source 1..34: mol_type = genomic DNA
gttagcactctggactctgaatccagcgatccga

SEQ ID NO: 21756 - DNA, 35 bp, Homo sapiens
  source 1..35: mol_type = genomic DNA
gttagcactctggactctgaatccagcgatccgag

SEQ ID NO: 21757 - DNA, 36 bp, Homo sapiens
  source 1..36: mol_type = genomic DNA
gttagcactctggactctgaatccagcgatccgagt

SEQ ID NO: 21758 - DNA, 37 bp, Homo sapiens
  source 1..37: mol_type = genomic DNA
gttagcactctggactctgaatccagcgatccgagtt

SEQ ID NO: 21759 - DNA, 38 bp, Homo sapiens
  source 1..38: mol_type = genomic DNA
gttagcactctggactctgaatccagcgatccgagttc

SEQ ID NO: 21760 - DNA, 39 bp, Homo sapiens
  source 1..39: mol_type = genomic DNA
gttagcactctggactctgaatccagcgatccgagttca

SEQ ID NO: 21761 - DNA, 19 bp, Homo sapiens
  source 1..19: mol_type = genomic DNA
gttagcactctggactttg

SEQ ID NO: 21762 - DNA, 23 bp, Homo sapiens
  source 1..23: mol_type = genomic DNA
gttagcactctggactttgaatc

SEQ ID NO: 21763 - DNA, 24 bp, Homo sapiens
  source 1..24: mol_type = genomic DNA
gttagcactctggactttgaatcc

SEQ ID NO: 21764 - DNA, 35 bp, Homo sapiens
  source 1..35: mol_type = genomic DNA
gttagcactctggactttgaatccagcaatccgag

SEQ ID NO: 21765 - DNA, 34 bp, Homo sapiens
  source 1..34: mol_type = genomic DNA
gttagcactctggactttgaatccagcgatccga

SEQ ID NO: 21766 - DNA, 35 bp, Homo sapiens
  source 1..35: mol_type = genomic DNA
gttagcactctggactttgaatccagcgatccgag

SEQ ID NO: 21767 - DNA, 36 bp, Homo sapiens
  source 1..36: mol_type = genomic DNA
gttagcactctggactttgaatccagcgatccgagt

SEQ ID NO: 21768 - DNA, 18 bp, Homo sapiens
  source 1..18: mol_type = genomic DNA
gttagcatagctgccttc

SEQ ID NO: 21769 - DNA, 19 bp, Homo sapiens
  source 1..19: mol_type = genomic DNA
gttagcatagctgccttcc

SEQ ID NO: 21770 - DNA, 19 bp, Homo sapiens
  source 1..19: mol_type = genomic DNA
gttagcgcagtaggtagcg

SEQ ID NO: 21771 - DNA, 18 bp, Homo sapiens
  source 1..18: mol_type = genomic DNA
gttagcgcgcggtactta

SEQ ID NO: 21772 - DNA, 38 bp, Homo sapiens
  source 1..38: mol_type = genomic DNA
gttagcgcgttcggctgttaaccgaaaggttggtggtt

SEQ ID NO: 21773 - DNA, 19 bp, Homo sapiens
  source 1..19: mol_type = genomic DNA
gttagctcagtcggctaga

SEQ ID NO: 21774 - DNA, 21 bp, Homo sapiens
  source 1..21: mol_type = genomic DNA
gttagctcagtcggctagagc

SEQ ID NO: 21775 - DNA, 16 bp, Homo sapiens
  source 1..16: mol_type = genomic DNA
gttaggattcctggtt

SEQ ID NO: 21776 - DNA, 17 bp, Homo sapiens
  source 1..17: mol_type = genomic DNA
gttaggattcctggttt

SEQ ID NO: 21777 - DNA, 18 bp, Homo sapiens
  source 1..18: mol_type = genomic DNA
gttaggattcctggtttt

SEQ ID NO: 21778 - DNA, 19 bp, Homo sapiens
  source 1..19: mol_type = genomic DNA
gttaggattcctggttttc

SEQ ID NO: 21779 - DNA, 20 bp, Homo sapiens
  source 1..20: mol_type = genomic DNA
gttaggattcctggttttca

SEQ ID NO: 21780 - DNA, 36 bp, Homo sapiens
  source 1..36: mol_type = genomic DNA
gttaggattcctggttttcacccaggcggcccgggt

SEQ ID NO: 21781 - DNA, 38 bp, Homo sapiens
  source 1..38: mol_type = genomic DNA
gttaggattcctggttttcacccaggcggcccgggttc

SEQ ID NO: 21782 - DNA, 43 bp, Homo sapiens
  source 1..43: mol_type = genomic DNA
gttaggattcctggttttcacccaggcggcccgggttcgactc

SEQ ID NO: 21783 - DNA, 16 bp, Homo sapiens
  source 1..16: mol_type = genomic DNA
gttaggattcggcgct

SEQ ID NO: 21784 - DNA, 17 bp, Homo sapiens
  source 1..17: mol_type = genomic DNA
gttaggattcggcgctc

SEQ ID NO: 21785 - DNA, 18 bp, Homo sapiens
  source 1..18: mol_type = genomic DNA
gttaggattcggcgctct

SEQ ID NO: 21786 - DNA, 19 bp, Homo sapiens
  source 1..19: mol_type = genomic DNA
gttaggattcggcgctctc

SEQ ID NO: 21787 - DNA, 20 bp, Homo sapiens
  source 1..20: mol_type = genomic DNA
gttaggattcggcgctctca

SEQ ID NO: 21788 - DNA, 21 bp, Homo sapiens
  source 1..21: mol_type = genomic DNA
gttaggattcggcgctctcac

SEQ ID NO: 21789 - DNA, 22 bp, Homo sapiens
  source 1..22: mol_type = genomic DNA
gttaggattcggcgctctcacc

SEQ ID NO: 21790 - DNA, 23 bp, Homo sapiens
  source 1..23: mol_type = genomic DNA
gttaggattcggcgctctcaccg

SEQ ID NO: 21791 - DNA, 24 bp, Homo sapiens
  source 1..24: mol_type = genomic DNA
gttaggattcggcgctctcaccgc

SEQ ID NO: 21792 - DNA, 25 bp, Homo sapiens
  source 1..25: mol_type = genomic DNA
gttaggattcggcgctctcaccgcc

SEQ ID NO: 21793 - DNA, 27 bp, Homo sapiens
  source 1..27: mol_type = genomic DNA
gttaggattcggcgctctcaccgccgc

SEQ ID NO: 21794 - DNA, 28 bp, Homo sapiens
  source 1..28: mol_type = genomic DNA
gttaggattcggcgctctcaccgccgcg

SEQ ID NO: 21795 - DNA, 30 bp, Homo sapiens
  source 1..30: mol_type = genomic DNA
gttaggattcggcgctctcaccgccgcggc

SEQ ID NO: 21796 - DNA, 31 bp, Homo sapiens
  source 1..31: mol_type = genomic DNA
gttaggattcggcgctctcaccgccgcggcc

SEQ ID NO: 21797 - DNA, 32 bp, Homo sapiens
  source 1..32: mol_type = genomic DNA
gttaggattcggcgctctcaccgccgcggccc

SEQ ID NO: 21798 - DNA, 33 bp, Homo sapiens
  source 1..33: mol_type = genomic DNA
gttaggattcggcgctctcaccgccgcggcccg

SEQ ID NO: 21799 - DNA, 34 bp, Homo sapiens
  source 1..34: mol_type = genomic DNA
gttaggattcggcgctctcaccgccgcggcccgg

SEQ ID NO: 21800 - DNA, 35 bp, Homo sapiens
  source 1..35: mol_type = genomic DNA
gttaggattcggcgctctcaccgccgcggcccggg

SEQ ID NO: 21801 - DNA, 36 bp, Homo sapiens
  source 1..36: mol_type = genomic DNA
gttaggattcggcgctctcaccgccgcggcccgggt

SEQ ID NO: 21802 - DNA, 37 bp, Homo sapiens
  source 1..37: mol_type = genomic DNA
gttaggattcggcgctctcaccgccgcggcccgggtt

SEQ ID NO: 21803 - DNA, 38 bp, Homo sapiens
  source 1..38: mol_type = genomic DNA
gttaggattcggcgctctcaccgccgcggcccgggttc

SEQ ID NO: 21804 - DNA, 43 bp, Homo sapiens
  source 1..43: mol_type = genomic DNA
gttaggattcggcgctctcaccgccgcggcccgggttcgattc

SEQ ID NO: 21805 - DNA, 48 bp, Homo sapiens
  source 1..48: mol_type = genomic DNA
gttaggattcggcgctctcaccgccgcggcccgggttcgattcccggt

SEQ ID NO: 21806 - DNA, 16 bp, Homo sapiens
  source 1..16: mol_type = genomic DNA
gttaggcctcttttta

SEQ ID NO: 21807 - DNA, 17 bp, Homo sapiens
  source 1..17: mol_type = genomic DNA
gttaggcctctttttac

SEQ ID NO: 21808 - DNA, 18 bp, Homo sapiens
  source 1..18: mol_type = genomic DNA
gttaggcctctttttacc

SEQ ID NO: 21809 - DNA, 19 bp, Homo sapiens
  source 1..19: mol_type = genomic DNA
gttaggcctctttttacca

SEQ ID NO: 21810 - DNA, 20 bp, Homo sapiens
  source 1..20: mol_type = genomic DNA
gttaggcctctttttaccac

SEQ ID NO: 21811 - DNA, 21 bp, Homo sapiens
  source 1..21: mol_type = genomic DNA
gttaggcctctttttaccacc

SEQ ID NO: 21812 - DNA, 22 bp, Homo sapiens
  source 1..22: mol_type = genomic DNA
gttaggcctctttttaccacca

SEQ ID NO: 21813 - DNA, 16 bp, Homo sapiens
  source 1..16: mol_type = genomic DNA
gttagtactctgcgtt

SEQ ID NO: 21814 - DNA, 17 bp, Homo sapiens
  source 1..17: mol_type = genomic DNA
gttagtactctgcgttg

SEQ ID NO: 21815 - DNA, 18 bp, Homo sapiens
  source 1..18: mol_type = genomic DNA
gttagtactctgcgttgt

SEQ ID NO: 21816 - DNA, 19 bp, Homo sapiens
  source 1..19: mol_type = genomic DNA
gttagtactctgcgttgtg

SEQ ID NO: 21817 - DNA, 22 bp, Homo sapiens
  source 1..22: mol_type = genomic DNA
gttagtactctgcgttgtggcc

SEQ ID NO: 21818 - DNA, 23 bp, Homo sapiens
  source 1..23: mol_type = genomic DNA
gttagtactctgcgttgtggccg

SEQ ID NO: 21819 - DNA, 25 bp, Homo sapiens
  source 1..25: mol_type = genomic DNA
gttagtactctgcgttgtggccgca

SEQ ID NO: 21820 - DNA, 27 bp, Homo sapiens
  source 1..27: mol_type = genomic DNA
gttagtactctgcgttgtggccgcagc

SEQ ID NO: 21821 - DNA, 31 bp, Homo sapiens
  source 1..31: mol_type = genomic DNA
gttagtactctgcgttgtggccgcagcaacc

SEQ ID NO: 21822 - DNA, 32 bp, Homo sapiens
  source 1..32: mol_type = genomic DNA
gttagtactctgcgttgtggccgcagcaacct

SEQ ID NO: 21823 - DNA, 34 bp, Homo sapiens
  source 1..34: mol_type = genomic DNA
gttagtactctgcgttgtggccgcagcaacctcg

SEQ ID NO: 21824 - DNA, 36 bp, Homo sapiens
  source 1..36: mol_type = genomic DNA
gttagtactctgcgttgtggccgcagcaacctcggt

SEQ ID NO: 21825 - DNA, 21 bp, Homo sapiens
  source 1..21: mol_type = genomic DNA
gttagtatagtggtgagtatc

SEQ ID NO: 21826 - DNA, 24 bp, Homo sapiens
  source 1..24: mol_type = genomic DNA
gttagtatagtggtgcgtatcccc

SEQ ID NO: 21827 - DNA, 23 bp, Homo sapiens
  source 1..23: mol_type = genomic DNA
gttagtatagtggttagtatccc

SEQ ID NO: 21828 - DNA, 18 bp, Homo sapiens
  source 1..18: mol_type = genomic DNA
gttagtatccccgcctgt

SEQ ID NO: 21829 - DNA, 19 bp, Homo sapiens
  source 1..19: mol_type = genomic DNA
gttagtatccccgcctgtc

SEQ ID NO: 21830 - DNA, 16 bp, Homo sapiens
  source 1..16: mol_type = genomic DNA
gttatacccttcccgt

SEQ ID NO: 21831 - DNA, 17 bp, Homo sapiens
  source 1..17: mol_type = genomic DNA
gttatacccttcccgta

SEQ ID NO: 21832 - DNA, 18 bp, Homo sapiens
  source 1..18: mol_type = genomic DNA
gttatacccttcccgtac

SEQ ID NO: 21833 - DNA, 19 bp, Homo sapiens
  source 1..19: mol_type = genomic DNA
gttatacccttcccgtact

SEQ ID NO: 21834 - DNA, 20 bp, Homo sapiens
  source 1..20: mol_type = genomic DNA
gttatacccttcccgtacta

SEQ ID NO: 21835 - DNA, 21 bp, Homo sapiens
  source 1..21: mol_type = genomic DNA
gttatacccttcccgtactac

SEQ ID NO: 21836 - DNA, 22 bp, Homo sapiens
  source 1..22: mol_type = genomic DNA
gttatacccttcccgtactacc

SEQ ID NO: 21837 - DNA, 23 bp, Homo sapiens
  source 1..23: mol_type = genomic DNA
gttatacccttcccgtactacca

SEQ ID NO: 21838 - DNA, 16 bp, Homo sapiens
  source 1..16: mol_type = genomic DNA
gttatcacatctgctt

SEQ ID NO: 21839 - DNA, 17 bp, Homo sapiens
  source 1..17: mol_type = genomic DNA
gttatcacatctgcttt

SEQ ID NO: 21840 - DNA, 19 bp, Homo sapiens
  source 1..19: mol_type = genomic DNA
gttatcacatctgctttac

SEQ ID NO: 21841 - DNA, 16 bp, Homo sapiens
  source 1..16: mol_type = genomic DNA
gttatcacattcgcct

SEQ ID NO: 21842 - DNA, 19 bp, Homo sapiens
  source 1..19: mol_type = genomic DNA
gttatcacattcgcctcac

SEQ ID NO: 21843 - DNA, 16 bp, Homo sapiens
  source 1..16: mol_type = genomic DNA
gttatcacgtctgctt

SEQ ID NO: 21844 - DNA, 17 bp, Homo sapiens
  source 1..17: mol_type = genomic DNA
gttatcacgtctgcttt

SEQ ID NO: 21845 - DNA, 18 bp, Homo sapiens
  source 1..18: mol_type = genomic DNA
gttatcacgtctgcttta

SEQ ID NO: 21846 - DNA, 19 bp, Homo sapiens
  source 1..19: mol_type = genomic DNA
gttatcacgtctgctttac

SEQ ID NO: 21847 - DNA, 20 bp, Homo sapiens
  source 1..20: mol_type = genomic DNA
gttatcacgtctgctttaca

SEQ ID NO: 21848 - DNA, 22 bp, Homo sapiens
  source 1..22: mol_type = genomic DNA
gttatcacgtctgctttacacg

SEQ ID NO: 21849 - DNA, 23 bp, Homo sapiens
  source 1..23: mol_type = genomic DNA
gttatcacgtctgctttacacgc

SEQ ID NO: 21850 - DNA, 34 bp, Homo sapiens
  source 1..34: mol_type = genomic DNA
gttatcacgtctgctttacacgcagaaggtcctg

SEQ ID NO: 21851 - DNA, 16 bp, Homo sapiens
  source 1..16: mol_type = genomic DNA
gttatcacgttcgcct

SEQ ID NO: 21852 - DNA, 17 bp, Homo sapiens
  source 1..17: mol_type = genomic DNA
gttatcacgttcgcctc

SEQ ID NO: 21853 - DNA, 18 bp, Homo sapiens
  source 1..18: mol_type = genomic DNA
gttatcacgttcgcctca

SEQ ID NO: 21854 - DNA, 19 bp, Homo sapiens
  source 1..19: mol_type = genomic DNA
gttatcacgttcgcctcac

SEQ ID NO: 21855 - DNA, 20 bp, Homo sapiens
  source 1..20: mol_type = genomic DNA
gttatcacgttcgcctcaca

SEQ ID NO: 21856 - DNA, 21 bp, Homo sapiens
  source 1..21: mol_type = genomic DNA
gttatcacgttcgcctcacac

SEQ ID NO: 21857 - DNA, 22 bp, Homo sapiens
  source 1..22: mol_type = genomic DNA
gttatcacgttcgcctcacacg

SEQ ID NO: 21858 - DNA, 23 bp, Homo sapiens
  source 1..23: mol_type = genomic DNA
gttcaaatcacgtcggggtcacc

SEQ ID NO: 21859 - DNA, 16 bp, Homo sapiens
  source 1..16: mol_type = genomic DNA
gttcaaatccaggtgc

SEQ ID NO: 21860 - DNA, 18 bp, Homo sapiens
  source 1..18: mol_type = genomic DNA
gttcaaatccaggtgccc

SEQ ID NO: 21861 - DNA, 22 bp, Homo sapiens
  source 1..22: mol_type = genomic DNA
gttcaaatccaggtgccccctc

SEQ ID NO: 21862 - DNA, 23 bp, Homo sapiens
  source 1..23: mol_type = genomic DNA
gttcaaatccaggtgccccctcc

SEQ ID NO: 21863 - DNA, 16 bp, Homo sapiens
  source 1..16: mol_type = genomic DNA
gttcaaatcccggacg

SEQ ID NO: 21864 - DNA, 18 bp, Homo sapiens
  source 1..18: mol_type = genomic DNA
gttcaaatcccggacgag

SEQ ID NO: 21865 - DNA, 19 bp, Homo sapiens
  source 1..19: mol_type = genomic DNA
gttcaaatcccggacgagc

SEQ ID NO: 21866 - DNA, 20 bp, Homo sapiens
  source 1..20: mol_type = genomic DNA
gttcaaatcccggacgagcc

SEQ ID NO: 21867 - DNA, 21 bp, Homo sapiens
  source 1..21: mol_type = genomic DNA
gttcaaatcccggacgagccc

SEQ ID NO: 21868 - DNA, 22 bp, Homo sapiens
  source 1..22: mol_type = genomic DNA
gttcaaatcccggacgagcccc

SEQ ID NO: 21869 - DNA, 23 bp, Homo sapiens
  source 1..23: mol_type = genomic DNA
gttcaaatcccggacgagccccc

SEQ ID NO: 21870 - DNA, 24 bp, Homo sapiens
  source 1..24: mol_type = genomic DNA
gttcaaatcccggacgagccccca

SEQ ID NO: 21871 - DNA, 16 bp, Homo sapiens
  source 1..16: mol_type = genomic DNA
gttcaaatccgggtgc

SEQ ID NO: 21872 - DNA, 17 bp, Homo sapiens
  source 1..17: mol_type = genomic DNA
gttcaaatccgggtgcc

SEQ ID NO: 21873 - DNA, 18 bp, Homo sapiens
  source 1..18: mol_type = genomic DNA
gttcaaatccgggtgccc

SEQ ID NO: 21874 - DNA, 19 bp, Homo sapiens
  source 1..19: mol_type = genomic DNA
gttcaaatccgggtgcccc

SEQ ID NO: 21875 - DNA, 20 bp, Homo sapiens
  source 1..20: mol_type = genomic DNA
gttcaaatccgggtgccccc

SEQ ID NO: 21876 - DNA, 21 bp, Homo sapiens
  source 1..21: mol_type = genomic DNA
gttcaaatccgggtgccccct

SEQ ID NO: 21877 - DNA, 22 bp, Homo sapiens
  source 1..22: mol_type = genomic DNA
gttcaaatccgggtgccccctc

SEQ ID NO: 21878 - DNA, 23 bp, Homo sapiens
  source 1..23: mol_type = genomic DNA
gttcaaatccgggtgccccctcc

SEQ ID NO: 21879 - DNA, 24 bp, Homo sapiens
  source 1..24: mol_type = genomic DNA
gttcaaatccgggtgccccctcca

SEQ ID NO: 21880 - DNA, 19 bp, Homo sapiens
  source 1..19: mol_type = genomic DNA
gttcaaatctcgctggggc

SEQ ID NO: 21881 - DNA, 20 bp, Homo sapiens
  source 1..20: mol_type = genomic DNA
gttcaaatctcgctggggcc

SEQ ID NO: 21882 - DNA, 21 bp, Homo sapiens
  source 1..21: mol_type = genomic DNA
gttcaaatctcgctggggcct

SEQ ID NO: 21883 - DNA, 22 bp, Homo sapiens
  source 1..22: mol_type = genomic DNA
gttcaaatctcgctggggcctc

SEQ ID NO: 21884 - DNA, 23 bp, Homo sapiens
  source 1..23: mol_type = genomic DNA
gttcaaatctcgctggggcctcc

SEQ ID NO: 21885 - DNA, 17 bp, Homo sapiens
  source 1..17: mol_type = genomic DNA
gttcaaatctcggtgga

SEQ ID NO: 21886 - DNA, 18 bp, Homo sapiens
  source 1..18: mol_type = genomic DNA
gttcaaatctcggtggaa

SEQ ID NO: 21887 - DNA, 20 bp, Homo sapiens
  source 1..20: mol_type = genomic DNA
gttcaaatctcggtggaacc

SEQ ID NO: 21888 - DNA, 21 bp, Homo sapiens
  source 1..21: mol_type = genomic DNA
gttcaaatctcggtggaacct

SEQ ID NO: 21889 - DNA, 22 bp, Homo sapiens
  source 1..22: mol_type = genomic DNA
gttcaaatctcggtggaacctc

SEQ ID NO: 21890 - DNA, 23 bp, Homo sapiens
  source 1..23: mol_type = genomic DNA
gttcaaatctcggtggaacctcc

SEQ ID NO: 21891 - DNA, 24 bp, Homo sapiens
  source 1..24: mol_type = genomic DNA
gttcaaatctcggtggaacctcca

SEQ ID NO: 21892 - DNA, 21 bp, Homo sapiens
  source 1..21: mol_type = genomic DNA
gttcaaatctcggtgggacct

SEQ ID NO: 21893 - DNA, 22 bp, Homo sapiens
  source 1..22: mol_type = genomic DNA
gttcaaatctcggtgggacctc

SEQ ID NO: 21894 - DNA, 23 bp, Homo sapiens
  source 1..23: mol_type = genomic DNA
gttcaaatctcggtgggacctcc

SEQ ID NO: 21895 - DNA, 20 bp, Homo sapiens
  source 1..20: mol_type = genomic DNA
gttcaagtcacgtcggggtc

SEQ ID NO: 21896 - DNA, 22 bp, Homo sapiens
  source 1..22: mol_type = genomic DNA
gttcaagtcacgtcggggtcac

SEQ ID NO: 21897 - DNA, 23 bp, Homo sapiens
  source 1..23: mol_type = genomic DNA
gttcaagtcacgtcggggtcacc

SEQ ID NO: 21898 - DNA, 24 bp, Homo sapiens
  source 1..24: mol_type = genomic DNA
gttcaagtcacgtcggggtcacca

SEQ ID NO: 21899 - DNA, 23 bp, Homo sapiens
  source 1..23: mol_type = genomic DNA
gttcaagtccctgtccaggcgcc

SEQ ID NO: 21900 - DNA, 23 bp, Homo sapiens
  source 1..23: mol_type = genomic DNA
gttcaagtccctgttcaggcgcc

SEQ ID NO: 21901 - DNA, 20 bp, Homo sapiens
  source 1..20: mol_type = genomic DNA
gttcaagtccctgttcgggc

SEQ ID NO: 21902 - DNA, 21 bp, Homo sapiens
  source 1..21: mol_type = genomic DNA
gttcaagtccctgttcgggcg

SEQ ID NO: 21903 - DNA, 22 bp, Homo sapiens
  source 1..22: mol_type = genomic DNA
gttcaagtccctgttcgggcgc

SEQ ID NO: 21904 - DNA, 23 bp, Homo sapiens
  source 1..23: mol_type = genomic DNA
gttcaagtccctgttcgggcgcc

SEQ ID NO: 21905 - DNA, 24 bp, Homo sapiens
  source 1..24: mol_type = genomic DNA
gttcaagtccctgttcgggcgcca

SEQ ID NO: 21906 - DNA, 21 bp, Homo sapiens
  source 1..21: mol_type = genomic DNA
gttcaagtctcggtggaacct

SEQ ID NO: 21907 - DNA, 16 bp, Homo sapiens
  source 1..16: mol_type = genomic DNA
gttcaatccccggcac

SEQ ID NO: 21908 - DNA, 18 bp, Homo sapiens
  source 1..18: mol_type = genomic DNA
gttcaatccccggcacct

SEQ ID NO: 21909 - DNA, 23 bp, Homo sapiens
  source 1..23: mol_type = genomic DNA
gttcaatccccggcacctccacc

SEQ ID NO: 21910 - DNA, 24 bp, Homo sapiens
  source 1..24: mol_type = genomic DNA
gttcaatccccggcacctccacca

SEQ ID NO: 21911 - DNA, 19 bp, Homo sapiens
  source 1..19: mol_type = genomic DNA
gttcaatccccggcatctc

SEQ ID NO: 21912 - DNA, 24 bp, Homo sapiens
  source 1..24: mol_type = genomic DNA
gttcaatccccggcatctccacca

SEQ ID NO: 21913 - DNA, 24 bp, Homo sapiens
  source 1..24: mol_type = genomic DNA
gttcaatcccgggtttcggcacca

SEQ ID NO: 21914 - DNA, 16 bp, Homo sapiens
  source 1..16: mol_type = genomic DNA
gttcaattccccgacg

SEQ ID NO: 21915 - DNA, 21 bp, Homo sapiens
  source 1..21: mol_type = genomic DNA
gttcaattccccgacggggag

SEQ ID NO: 21916 - DNA, 22 bp, Homo sapiens
  source 1..22: mol_type = genomic DNA
gttcaattccccgacggggagc

SEQ ID NO: 21917 - DNA, 23 bp, Homo sapiens
  source 1..23: mol_type = genomic DNA
gttcaattccccgacggggagcc

SEQ ID NO: 21918 - DNA, 24 bp, Homo sapiens
  source 1..24: mol_type = genomic DNA
gttcaattccccgacggggagcca

SEQ ID NO: 21919 - DNA, 21 bp, Homo sapiens
  source 1..21: mol_type = genomic DNA
gttcaattcctcttcttaaca

SEQ ID NO: 21920 - DNA, 23 bp, Homo sapiens
  source 1..23: mol_type = genomic DNA
gttcaattcctcttcttaacacc

SEQ ID NO: 21921 - DNA, 21 bp, Homo sapiens
  source 1..21: mol_type = genomic DNA
gttcaattctcgctggggcct

SEQ ID NO: 21922 - DNA, 16 bp, Homo sapiens
  source 1..16: mol_type = genomic DNA
gttcaggtcgcagtct

SEQ ID NO: 21923 - DNA, 17 bp, Homo sapiens
  source 1..17: mol_type = genomic DNA
gttcaggtcgcagtctc

SEQ ID NO: 21924 - DNA, 18 bp, Homo sapiens
  source 1..18: mol_type = genomic DNA
gttcaggtcgcagtctcc

SEQ ID NO: 21925 - DNA, 19 bp, Homo sapiens
  source 1..19: mol_type = genomic DNA
gttcaggtcgcagtctccc

SEQ ID NO: 21926 - DNA, 20 bp, Homo sapiens
  source 1..20: mol_type = genomic DNA
gttcaggtcgcagtctcccc

SEQ ID NO: 21927 - DNA, 22 bp, Homo sapiens
  source 1..22: mol_type = genomic DNA
gttcaggtcgcagtctcccctg

SEQ ID NO: 21928 - DNA, 34 bp, Homo sapiens
  source 1..34: mol_type = genomic DNA
gttcaggtcgcagtctcccctggaggcgtgggtt

SEQ ID NO: 21929 - DNA, 16 bp, Homo sapiens
  source 1..16: mol_type = genomic DNA
gttcagtggtagaatt

SEQ ID NO: 21930 - DNA, 17 bp, Homo sapiens
  source 1..17: mol_type = genomic DNA
gttcagtggtagaattc

SEQ ID NO: 21931 - DNA, 18 bp, Homo sapiens
  source 1..18: mol_type = genomic DNA
gttcagtggtagaattct

SEQ ID NO: 21932 - DNA, 19 bp, Homo sapiens
  source 1..19: mol_type = genomic DNA
gttcagtggtagaattctc

SEQ ID NO: 21933 - DNA, 20 bp, Homo sapiens
  source 1..20: mol_type = genomic DNA
gttcagtggtagaattctcg

SEQ ID NO: 21934 - DNA, 21 bp, Homo sapiens
  source 1..21: mol_type = genomic DNA
gttcagtggtagaattctcgc

SEQ ID NO: 21935 - DNA, 22 bp, Homo sapiens
  source 1..22: mol_type = genomic DNA
gttcagtggtagaattctcgcc

SEQ ID NO: 21936 - DNA, 23 bp, Homo sapiens
  source 1..23: mol_type = genomic DNA
gttcagtggtagaattctcgcct

SEQ ID NO: 21937 - DNA, 24 bp, Homo sapiens
  source 1..24: mol_type = genomic DNA
gttcagtggtagaattctcgcctc

SEQ ID NO: 21938 - DNA, 26 bp, Homo sapiens
  source 1..26: mol_type = genomic DNA
gttcagtggtagaattctcgcctccc

SEQ ID NO: 21939 - DNA, 27 bp, Homo sapiens
  source 1..27: mol_type = genomic DNA
gttcagtggtagaattctcgcctccca

SEQ ID NO: 21940 - DNA, 24 bp, Homo sapiens
  source 1..24: mol_type = genomic DNA
gttcagtggtagaattctcgcctg

SEQ ID NO: 21941 - DNA, 25 bp, Homo sapiens
  source 1..25: mol_type = genomic DNA
gttcagtggtagaattctcgcctgc

SEQ ID NO: 21942 - DNA, 26 bp, Homo sapiens
  source 1..26: mol_type = genomic DNA
gttcagtggtagaattctcgcctgcc

SEQ ID NO: 21943 - DNA, 27 bp, Homo sapiens
  source 1..27: mol_type = genomic DNA
gttcagtggtagaattctcgcctgcca

SEQ ID NO: 21944 - DNA, 29 bp, Homo sapiens
  source 1..29: mol_type = genomic DNA
gttcagtggtagaattctcgcctgccacg

SEQ ID NO: 21945 - DNA, 30 bp, Homo sapiens
  source 1..30: mol_type = genomic DNA
gttcagtggtagaattctcgcctgccacgc

SEQ ID NO: 21946 - DNA, 32 bp, Homo sapiens
  source 1..32: mol_type = genomic DNA
gttcagtggtagaattctcgcctgccacgcgg

SEQ ID NO: 21947 - DNA, 35 bp, Homo sapiens
  source 1..35: mol_type = genomic DNA
gttcagtggtagaattctcgcctgccacgcgggag

SEQ ID NO: 21948 - DNA, 38 bp, Homo sapiens
  source 1..38: mol_type = genomic DNA
gttcagtggtagaattctcgcctgccacgcgggaggcc

SEQ ID NO: 21949 - DNA, 39 bp, Homo sapiens
  source 1..39: mol_type = genomic DNA
gttcagtggtagaattctcgcctgccacgcgggaggccc

SEQ ID NO: 21950 - DNA, 40 bp, Homo sapiens
  source 1..40: mol_type = genomic DNA
gttcagtggtagaattctcgcctgccacgcgggaggcccg

SEQ ID NO: 21951 - DNA, 41 bp, Homo sapiens
  source 1..41: mol_type = genomic DNA
gttcagtggtagaattctcgcctgccacgcgggaggcccgg

SEQ ID NO: 21952 - DNA, 43 bp, Homo sapiens
  source 1..43: mol_type = genomic DNA
gttcagtggtagaattctcgcctgccacgcgggaggcccgggt

SEQ ID NO: 21953 - DNA, 44 bp, Homo sapiens
  source 1..44: mol_type = genomic DNA
gttcagtggtagaattctcgcctgccacgcgggaggcccgggtt

SEQ ID NO: 21954 - DNA, 29 bp, Homo sapiens
  source 1..29: mol_type = genomic DNA
gttcagtggtagaattctcgcctgccatg

SEQ ID NO: 21955 - DNA, 23 bp, Homo sapiens
  source 1..23: mol_type = genomic DNA
gttcagtggtagaattcttgcct

SEQ ID NO: 21956 - DNA, 26 bp, Homo sapiens
  source 1..26: mol_type = genomic DNA
gttcagtggtagaattcttgcctgcc

SEQ ID NO: 21957 - DNA, 34 bp, Homo sapiens
  source 1..34: mol_type = genomic DNA
gttcagttgatgcagagtggggttttgcagtcct

SEQ ID NO: 21958 - DNA, 36 bp, Homo sapiens
  source 1..36: mol_type = genomic DNA
gttcagttgatgcagagtggggttttgcagtcctta

SEQ ID NO: 21959 - DNA, 37 bp, Homo sapiens
  source 1..37: mol_type = genomic DNA
gttcagttgatgcagagtggggttttgcagtccttac

SEQ ID NO: 21960 - DNA, 38 bp, Homo sapiens
  source 1..38: mol_type = genomic DNA
gttcagttgatgcagagtggggttttgcagtccttacc

SEQ ID NO: 21961 - DNA, 39 bp, Homo sapiens
  source 1..39: mol_type = genomic DNA
gttcagttgatgcagagtggggttttgcagtccttacca

SEQ ID NO: 21962 - DNA, 16 bp, Homo sapiens
  source 1..16: mol_type = genomic DNA
gttcatgtccctgttc

SEQ ID NO: 21963 - DNA, 16 bp, Homo sapiens
  source 1..16: mol_type = genomic DNA
gttccatagtgtagcg

SEQ ID NO: 21964 - DNA, 22 bp, Homo sapiens
  source 1..22: mol_type = genomic DNA
gttccatagtgtagcggttatc

SEQ ID NO: 21965 - DNA, 27 bp, Homo sapiens
  source 1..27: mol_type = genomic DNA
gttccatagtgtagcggttatcacgtc

SEQ ID NO: 21966 - DNA, 29 bp, Homo sapiens
  source 1..29: mol_type = genomic DNA
gttccatagtgtagcggttatcacgtctg

SEQ ID NO: 21967 - DNA, 30 bp, Homo sapiens
  source 1..30: mol_type = genomic DNA
gttccatagtgtagcggttatcacgtctgc

SEQ ID NO: 21968 - DNA, 31 bp, Homo sapiens
  source 1..31: mol_type = genomic DNA
gttccatagtgtagcggttatcacgtctgct

SEQ ID NO: 21969 - DNA, 32 bp, Homo sapiens
  source 1..32: mol_type = genomic DNA
gttccatagtgtagcggttatcacgtctgctt

SEQ ID NO: 21970 - DNA, 33 bp, Homo sapiens
  source 1..33: mol_type = genomic DNA
gttccatagtgtagcggttatcacgtctgcttt

SEQ ID NO: 21971 - DNA, 35 bp, Homo sapiens
  source 1..35: mol_type = genomic DNA
gttccatagtgtagcggttatcacgtctgctttac

SEQ ID NO: 21972 - DNA, 41 bp, Homo sapiens
  source 1..41: mol_type = genomic DNA
gttccatagtgtagcggttatcacgtctgctttacacgcag

SEQ ID NO: 21973 - DNA, 22 bp, Homo sapiens
  source 1..22: mol_type = genomic DNA
gttccatagtgtagtggttatc

SEQ ID NO: 21974 - DNA, 31 bp, Homo sapiens
  source 1..31: mol_type = genomic DNA
gttccatagtgtagtggttatcacatctgct

SEQ ID NO: 21975 - DNA, 33 bp, Homo sapiens
  source 1..33: mol_type = genomic DNA
gttccatagtgtagtggttatcacatctgcttt

SEQ ID NO: 21976 - DNA, 35 bp, Homo sapiens
  source 1..35: mol_type = genomic DNA
gttccatagtgtagtggttatcacatctgctttac

SEQ ID NO: 21977 - DNA, 25 bp, Homo sapiens
  source 1..25: mol_type = genomic DNA
gttccatagtgtagtggttatcacg

SEQ ID NO: 21978 - DNA, 28 bp, Homo sapiens
  source 1..28: mol_type = genomic DNA
gttccatagtgtagtggttatcacgtct

SEQ ID NO: 21979 - DNA, 29 bp, Homo sapiens
  source 1..29: mol_type = genomic DNA
gttccatagtgtagtggttatcacgtctg

SEQ ID NO: 21980 - DNA, 30 bp, Homo sapiens
  source 1..30: mol_type = genomic DNA
gttccatagtgtagtggttatcacgtctgc

SEQ ID NO: 21981 - DNA, 31 bp, Homo sapiens
  source 1..31: mol_type = genomic DNA
gttccatagtgtagtggttatcacgtctgct

SEQ ID NO: 21982 - DNA, 32 bp, Homo sapiens
  source 1..32: mol_type = genomic DNA
gttccatagtgtagtggttatcacgtctgctt

SEQ ID NO: 21983 - DNA, 33 bp, Homo sapiens
  source 1..33: mol_type = genomic DNA
gttccatagtgtagtggttatcacgtctgcttt

SEQ ID NO: 21984 - DNA, 34 bp, Homo sapiens
  source 1..34: mol_type = genomic DNA
gttccatagtgtagtggttatcacgtctgcttta

SEQ ID NO: 21985 - DNA, 35 bp, Homo sapiens
  source 1..35: mol_type = genomic DNA
gttccatagtgtagtggttatcacgtctgctttac

SEQ ID NO: 21986 - DNA, 36 bp, Homo sapiens
  source 1..36: mol_type = genomic DNA
gttccatagtgtagtggttatcacgtctgctttaca

SEQ ID NO: 21987 - DNA, 42 bp, Homo sapiens
  source 1..42: mol_type = genomic DNA
gttccatagtgtagtggttatcacgtctgctttacacgcaga

SEQ ID NO: 21988 - DNA, 28 bp, Homo sapiens
  source 1..28: mol_type = genomic DNA
gttccatggtgtaatggtgagcactctg

SEQ ID NO: 21989 - DNA, 32 bp, Homo sapiens
  source 1..32: mol_type = genomic DNA
gttccatggtgtaatggtgagcactctggact

SEQ ID NO: 21990 - DNA, 22 bp, Homo sapiens
  source 1..22: mol_type = genomic DNA
gttccatggtgtaatggttagc

SEQ ID NO: 21991 - DNA, 26 bp, Homo sapiens
  source 1..26: mol_type = genomic DNA
gttccatggtgtaatggttagcactc

SEQ ID NO: 21992 - DNA, 27 bp, Homo sapiens
  source 1..27: mol_type = genomic DNA
gttccatggtgtaatggttagcactct

SEQ ID NO: 21993 - DNA, 28 bp, Homo sapiens
  source 1..28: mol_type = genomic DNA
gttccatggtgtaatggttagcactctg

SEQ ID NO: 21994 - DNA, 29 bp, Homo sapiens
  source 1..29: mol_type = genomic DNA
gttccatggtgtaatggttagcactctgg

SEQ ID NO: 21995 - DNA, 30 bp, Homo sapiens
  source 1..30: mol_type = genomic DNA
gttccatggtgtaatggttagcactctgga

SEQ ID NO: 21996 - DNA, 31 bp, Homo sapiens
  source 1..31: mol_type = genomic DNA
gttccatggtgtaatggttagcactctggac

SEQ ID NO: 21997 - DNA, 32 bp, Homo sapiens
  source 1..32: mol_type = genomic DNA
gttccatggtgtaatggttagcactctggact

SEQ ID NO: 21998 - DNA, 33 bp, Homo sapiens
  source 1..33: mol_type = genomic DNA
gttccatggtgtaatggttagcactctggactc

SEQ ID NO: 21999 - DNA, 34 bp, Homo sapiens
  source 1..34: mol_type = genomic DNA
gttccatggtgtaatggttagcactctggactct

SEQ ID NO: 22000 - DNA, 35 bp, Homo sapiens
  source 1..35: mol_type = genomic DNA
gttccatggtgtaatggttagcactctggactctg

SEQ ID NO: 22001 - DNA, 40 bp, Homo sapiens
  source 1..40: mol_type = genomic DNA
gttccatggtgtaatggttagcactctggactctgaatcc

SEQ ID NO: 22002 - DNA, 44 bp, Homo sapiens
  source 1..44: mol_type = genomic DNA
gttccatggtgtaatggttagcactctggactctgaatccagcg

SEQ ID NO: 22003 - DNA, 16 bp, Homo sapiens
  source 1..16: mol_type = genomic DNA
gttccgggttcgagtc

SEQ ID NO: 22004 - DNA, 27 bp, Homo sapiens
  source 1..27: mol_type = genomic DNA
gttccgggttcgagtcccggcggagtc

SEQ ID NO: 22005 - DNA, 29 bp, Homo sapiens
  source 1..29: mol_type = genomic DNA
gttccgggttcgagtcccggcggagtcgc

SEQ ID NO: 22006 - DNA, 30 bp, Homo sapiens
  source 1..30: mol_type = genomic DNA
gttccgggttcgagtcccggcggagtcgcc

SEQ ID NO: 22007 - DNA, 31 bp, Homo sapiens
  source 1..31: mol_type = genomic DNA
gttccgggttcgagtcccggcggagtcgcca

SEQ ID NO: 22008 - DNA, 20 bp, Homo sapiens
  source 1..20: mol_type = genomic DNA
gttcgaaaccgggcggaaac

SEQ ID NO: 22009 - DNA, 23 bp, Homo sapiens
  source 1..23: mol_type = genomic DNA
gttcgaaaccgggcggaaacacc

SEQ ID NO: 22010 - DNA, 24 bp, Homo sapiens
  source 1..24: mol_type = genomic DNA
gttcgaaaccgggcggaaacacca

SEQ ID NO: 22011 - DNA, 23 bp, Homo sapiens
  source 1..23: mol_type = genomic DNA
gttcgaaccccactcctggtacc

SEQ ID NO: 22012 - DNA, 21 bp, Homo sapiens
  source 1..21: mol_type = genomic DNA
gttcgaaccccgtccgtgcct

SEQ ID NO: 22013 - DNA, 22 bp, Homo sapiens
  source 1..22: mol_type = genomic DNA
gttcgaaccccgtccgtgcctc

SEQ ID NO: 22014 - DNA, 23 bp, Homo sapiens
  source 1..23: mol_type = genomic DNA
gttcgaaccccgtccgtgcctcc

SEQ ID NO: 22015 - DNA, 24 bp, Homo sapiens
  source 1..24: mol_type = genomic DNA
gttcgaaccccgtccgtgcctcca

SEQ ID NO: 22016 - DNA, 23 bp, Homo sapiens
  source 1..23: mol_type = genomic DNA
gttcgaaccctgctcgctgcgcc

SEQ ID NO: 22017 - DNA, 24 bp, Homo sapiens
  source 1..24: mol_type = genomic DNA
gttcgaaccctgctcgctgcgcca

SEQ ID NO: 22018 - DNA, 16 bp, Homo sapiens
  source 1..16: mol_type = genomic DNA
gttcgaacctcagagg

SEQ ID NO: 22019 - DNA, 23 bp, Homo sapiens
  source 1..23: mol_type = genomic DNA
gttcgaacctcagagggggcacc

SEQ ID NO: 22020 - DNA, 24 bp, Homo sapiens
  source 1..24: mol_type = genomic DNA
gttcgaacctcagagggggcacca

SEQ ID NO: 22021 - DNA, 21 bp, Homo sapiens
  source 1..21: mol_type = genomic DNA
gttcgaatcacgtcggggtca

SEQ ID NO: 22022 - DNA, 23 bp, Homo sapiens
  source 1..23: mol_type = genomic DNA
gttcgaatcacgtcggggtcacc

SEQ ID NO: 22023 - DNA, 23 bp, Homo sapiens
  source 1..23: mol_type = genomic DNA
gttcgaatcccaccgctgccacc

SEQ ID NO: 22024 - DNA, 24 bp, Homo sapiens
  source 1..24: mol_type = genomic DNA
gttcgaatcccaccgctgccacca

SEQ ID NO: 22025 - DNA, 17 bp, Homo sapiens
  source 1..17: mol_type = genomic DNA
gttcgaatcccactcct

SEQ ID NO: 22026 - DNA, 18 bp, Homo sapiens
  source 1..18: mol_type = genomic DNA
gttcgaatcccactcctg

SEQ ID NO: 22027 - DNA, 23 bp, Homo sapiens
  source 1..23: mol_type = genomic DNA
gttcgaatcccactcctgacacc

SEQ ID NO: 22028 - DNA, 24 bp, Homo sapiens
  source 1..24: mol_type = genomic DNA
gttcgaatcccactcctgacacca

SEQ ID NO: 22029 - DNA, 18 bp, Homo sapiens
  source 1..18: mol_type = genomic DNA
gttcgaatcccacttctg

SEQ ID NO: 22030 - DNA, 21 bp, Homo sapiens
  source 1..21: mol_type = genomic DNA
gttcgaatcccacttctgaca

SEQ ID NO: 22031 - DNA, 23 bp, Homo sapiens
  source 1..23: mol_type = genomic DNA
gttcgaatcccacttctgacacc

SEQ ID NO: 22032 - DNA, 24 bp, Homo sapiens
  source 1..24: mol_type = genomic DNA
gttcgaatcccacttctgacacca

SEQ ID NO: 22033 - DNA, 16 bp, Homo sapiens
  source 1..16: mol_type = genomic DNA
gttcgaatcccagcgg

SEQ ID NO: 22034 - DNA, 21 bp, Homo sapiens
  source 1..21: mol_type = genomic DNA
gttcgaatcccagcggggcct

SEQ ID NO: 22035 - DNA, 22 bp, Homo sapiens
  source 1..22: mol_type = genomic DNA
gttcgaatcccagcggggcctc

SEQ ID NO: 22036 - DNA, 23 bp, Homo sapiens
  source 1..23: mol_type = genomic DNA
gttcgaatcccagcggggcctcc

SEQ ID NO: 22037 - DNA, 18 bp, Homo sapiens
  source 1..18: mol_type = genomic DNA
gttcgaatcccagcggtg

SEQ ID NO: 22038 - DNA, 21 bp, Homo sapiens
  source 1..21: mol_type = genomic DNA
gttcgaatcccagcggtgcct

SEQ ID NO: 22039 - DNA, 22 bp, Homo sapiens
  source 1..22: mol_type = genomic DNA
gttcgaatcccagcggtgcctc

SEQ ID NO: 22040 - DNA, 23 bp, Homo sapiens
  source 1..23: mol_type = genomic DNA
gttcgaatcccagcggtgcctcc

SEQ ID NO: 22041 - DNA, 24 bp, Homo sapiens
  source 1..24: mol_type = genomic DNA
gttcgaatcccagcggtgcctcca

SEQ ID NO: 22042 - DNA, 21 bp, Homo sapiens
  source 1..21: mol_type = genomic DNA
gttcgaatcccagtagagcct

SEQ ID NO: 22043 - DNA, 22 bp, Homo sapiens
  source 1..22: mol_type = genomic DNA
gttcgaatcccatcctcgtcgc

SEQ ID NO: 22044 - DNA, 23 bp, Homo sapiens
  source 1..23: mol_type = genomic DNA
gttcgaatcccatcctcgtcgcc

SEQ ID NO: 22045 - DNA, 24 bp, Homo sapiens
  source 1..24: mol_type = genomic DNA
gttcgaatcccatcctcgtcgcca

SEQ ID NO: 22046 - DNA, 16 bp, Homo sapiens
  source 1..16: mol_type = genomic DNA
gttcgaatcccttcgt

SEQ ID NO: 22047 - DNA, 23 bp, Homo sapiens
  source 1..23: mol_type = genomic DNA
gttcgaatcccttcgtggttgcc

SEQ ID NO: 22048 - DNA, 24 bp, Homo sapiens
  source 1..24: mol_type = genomic DNA
gttcgaatcccttcgtggttgcca

SEQ ID NO: 22049 - DNA, 17 bp, Homo sapiens
  source 1..17: mol_type = genomic DNA
gttcgaatccgagtcac

SEQ ID NO: 22050 - DNA, 18 bp, Homo sapiens
  source 1..18: mol_type = genomic DNA
gttcgaatccgagtcacg

SEQ ID NO: 22051 - DNA, 19 bp, Homo sapiens
  source 1..19: mol_type = genomic DNA
gttcgaatccgagtcacgg

SEQ ID NO: 22052 - DNA, 20 bp, Homo sapiens
  source 1..20: mol_type = genomic DNA
gttcgaatccgagtcacggc

SEQ ID NO: 22053 - DNA, 21 bp, Homo sapiens
  source 1..21: mol_type = genomic DNA
gttcgaatccgagtcacggca

SEQ ID NO: 22054 - DNA, 22 bp, Homo sapiens
  source 1..22: mol_type = genomic DNA
gttcgaatccgagtcacggcac

SEQ ID NO: 22055 - DNA, 23 bp, Homo sapiens
  source 1..23: mol_type = genomic DNA
gttcgaatccgagtcacggcacc

SEQ ID NO: 22056 - DNA, 24 bp, Homo sapiens
  source 1..24: mol_type = genomic DNA
gttcgaatccgagtcacggcacca

SEQ ID NO: 22057 - DNA, 18 bp, Homo sapiens
  source 1..18: mol_type = genomic DNA
gttcgaatccggctcgaa

SEQ ID NO: 22058 - DNA, 23 bp, Homo sapiens
  source 1..23: mol_type = genomic DNA
gttcgaatccggctcgaaggacc

SEQ ID NO: 22059 - DNA, 18 bp, Homo sapiens
  source 1..18: mol_type = genomic DNA
gttcgaatccggctcgga

SEQ ID NO: 22060 - DNA, 18 bp, Homo sapiens
  source 1..18: mol_type = genomic DNA
gttcgaatcctgccgact

SEQ ID NO: 22061 - DNA, 24 bp, Homo sapiens
  source 1..24: mol_type = genomic DNA
gttcgaatcctgccgactacgcca

SEQ ID NO: 22062 - DNA, 23 bp, Homo sapiens
  source 1..23: mol_type = genomic DNA
gttcgaatcctgttcgtgacgcc

SEQ ID NO: 22063 - DNA, 24 bp, Homo sapiens
  source 1..24: mol_type = genomic DNA
gttcgaatcctgttcgtgacgcca

SEQ ID NO: 22064 - DNA, 19 bp, Homo sapiens
  source 1..19: mol_type = genomic DNA
gttcgactcccagtggggc

SEQ ID NO: 22065 - DNA, 21 bp, Homo sapiens
  source 1..21: mol_type = genomic DNA
gttcgactcccagtggggcct

SEQ ID NO: 22066 - DNA, 16 bp, Homo sapiens
  source 1..16: mol_type = genomic DNA
gttcgactcccggtat

SEQ ID NO: 22067 - DNA, 17 bp, Homo sapiens
  source 1..17: mol_type = genomic DNA
gttcgactcccggtatg

SEQ ID NO: 22068 - DNA, 21 bp, Homo sapiens
  source 1..21: mol_type = genomic DNA
gttcgactcccggtatgggaa

SEQ ID NO: 22069 - DNA, 22 bp, Homo sapiens
  source 1..22: mol_type = genomic DNA
gttcgactcccggtatgggaac

SEQ ID NO: 22070 - DNA, 23 bp, Homo sapiens
  source 1..23: mol_type = genomic DNA
gttcgactcccggtatgggaacc

SEQ ID NO: 22071 - DNA, 24 bp, Homo sapiens
  source 1..24: mol_type = genomic DNA
gttcgactcccggtatgggaacca

SEQ ID NO: 22072 - DNA, 16 bp, Homo sapiens
  source 1..16: mol_type = genomic DNA
gttcgactcccggtgt

SEQ ID NO: 22073 - DNA, 17 bp, Homo sapiens
  source 1..17: mol_type = genomic DNA
gttcgactcccggtgtg

SEQ ID NO: 22074 - DNA, 18 bp, Homo sapiens
  source 1..18: mol_type = genomic DNA
gttcgactcccggtgtgg

SEQ ID NO: 22075 - DNA, 21 bp, Homo sapiens
  source 1..21: mol_type = genomic DNA
gttcgactcccggtgtgggaa

SEQ ID NO: 22076 - DNA, 22 bp, Homo sapiens
  source 1..22: mol_type = genomic DNA
gttcgactcccggtgtgggaac

SEQ ID NO: 22077 - DNA, 23 bp, Homo sapiens
  source 1..23: mol_type = genomic DNA
gttcgactcccggtgtgggaacc

SEQ ID NO: 22078 - DNA, 24 bp, Homo sapiens
  source 1..24: mol_type = genomic DNA
gttcgactcccggtgtgggaacca

SEQ ID NO: 22079 - DNA, 23 bp, Homo sapiens
  source 1..23: mol_type = genomic DNA
gttcgactcctggctggctcgcc

SEQ ID NO: 22080 - DNA, 24 bp, Homo sapiens
  source 1..24: mol_type = genomic DNA
gttcgactcctggctggctcgcca

SEQ ID NO: 22081 - DNA, 22 bp, Homo sapiens
  source 1..22: mol_type = genomic DNA
gttcgagcccacccagggacgc

SEQ ID NO: 22082 - DNA, 23 bp, Homo sapiens
  source 1..23: mol_type = genomic DNA
gttcgagcccacccagggacgcc

SEQ ID NO: 22083 - DNA, 24 bp, Homo sapiens
  source 1..24: mol_type = genomic DNA
gttcgagcccacccagggacgcca

SEQ ID NO: 22084 - DNA, 23 bp, Homo sapiens
  source 1..23: mol_type = genomic DNA
gttcgagccccacgttgggcgcc

SEQ ID NO: 22085 - DNA, 24 bp, Homo sapiens
  source 1..24: mol_type = genomic DNA
gttcgagccccacgttgggcgcca

SEQ ID NO: 22086 - DNA, 17 bp, Homo sapiens
  source 1..17: mol_type = genomic DNA
gttcgagccccagtgga

SEQ ID NO: 22087 - DNA, 19 bp, Homo sapiens
  source 1..19: mol_type = genomic DNA
gttcgagccccagtggaac

SEQ ID NO: 22088 - DNA, 20 bp, Homo sapiens
  source 1..20: mol_type = genomic DNA
gttcgagccccagtggaacc

SEQ ID NO: 22089 - DNA, 23 bp, Homo sapiens
  source 1..23: mol_type = genomic DNA
gttcgagccccagtggaaccacc

SEQ ID NO: 22090 - DNA, 24 bp, Homo sapiens
  source 1..24: mol_type = genomic DNA
gttcgagccccagtggaaccacca

SEQ ID NO: 22091 - DNA, 21 bp, Homo sapiens
  source 1..21: mol_type = genomic DNA
gttcgagcctcacacggggca

SEQ ID NO: 22092 - DNA, 24 bp, Homo sapiens
  source 1..24: mol_type = genomic DNA
gttcgagcctcacacggggcacca

SEQ ID NO: 22093 - DNA, 16 bp, Homo sapiens
  source 1..16: mol_type = genomic DNA
gttcgagcctcacctg

SEQ ID NO: 22094 - DNA, 18 bp, Homo sapiens
  source 1..18: mol_type = genomic DNA
gttcgagcctcacctgga

SEQ ID NO: 22095 - DNA, 23 bp, Homo sapiens
  source 1..23: mol_type = genomic DNA
gttcgagcctcacctggagcacc

SEQ ID NO: 22096 - DNA, 23 bp, Homo sapiens
  source 1..23: mol_type = genomic DNA
gttcgagtcccacctggggtacc

SEQ ID NO: 22097 - DNA, 23 bp, Homo sapiens
  source 1..23: mol_type = genomic DNA
gttcgagtcccacctggggtgcc

SEQ ID NO: 22098 - DNA, 16 bp, Homo sapiens
  source 1..16: mol_type = genomic DNA
gttcgagtcccatctg

SEQ ID NO: 22099 - DNA, 23 bp, Homo sapiens
  source 1..23: mol_type = genomic DNA
gttcgagtcccatctggggtgcc

SEQ ID NO: 22100 - DNA, 24 bp, Homo sapiens
  source 1..24: mol_type = genomic DNA
gttcgagtcccatctggggtgcca

SEQ ID NO: 22101 - DNA, 23 bp, Homo sapiens
  source 1..23: mol_type = genomic DNA
gttcgagtcccatctgggtcgcc

SEQ ID NO: 22102 - DNA, 24 bp, Homo sapiens
  source 1..24: mol_type = genomic DNA
gttcgagtcccatctgggtcgcca

SEQ ID NO: 22103 - DNA, 23 bp, Homo sapiens
  source 1..23: mol_type = genomic DNA
gttcgagtcccggcagagatgcc

SEQ ID NO: 22104 - DNA, 24 bp, Homo sapiens
  source 1..24: mol_type = genomic DNA
gttcgagtcccggcagagatgcca

SEQ ID NO: 22105 - DNA, 17 bp, Homo sapiens
  source 1..17: mol_type = genomic DNA
gttcgagtcccggcgga

SEQ ID NO: 22106 - DNA, 18 bp, Homo sapiens
  source 1..18: mol_type = genomic DNA
gttcgagtcccggcggag

SEQ ID NO: 22107 - DNA, 21 bp, Homo sapiens
  source 1..21: mol_type = genomic DNA
gttcgagtcccggcggagtcg

SEQ ID NO: 22108 - DNA, 22 bp, Homo sapiens
  source 1..22: mol_type = genomic DNA
gttcgagtcccggcggagtcgc

SEQ ID NO: 22109 - DNA, 24 bp, Homo sapiens
  source 1..24: mol_type = genomic DNA
gttcgagtcccggcggagtcgcca

SEQ ID NO: 22110 - DNA, 16 bp, Homo sapiens
  source 1..16: mol_type = genomic DNA
gttcgagtcccttcgt

SEQ ID NO: 22111 - DNA, 23 bp, Homo sapiens
  source 1..23: mol_type = genomic DNA
gttcgagtcccttcgtggtcgcc

SEQ ID NO: 22112 - DNA, 24 bp, Homo sapiens
  source 1..24: mol_type = genomic DNA
gttcgagtcccttcgtggtcgcca

SEQ ID NO: 22113 - DNA, 23 bp, Homo sapiens
  source 1..23: mol_type = genomic DNA
gttcgagtcctgccgcggtcgcc

SEQ ID NO: 22114 - DNA, 24 bp, Homo sapiens
  source 1..24: mol_type = genomic DNA
gttcgagtcctgccgcggtcgcca

SEQ ID NO: 22115 - DNA, 20 bp, Homo sapiens
  source 1..20: mol_type = genomic DNA
gttcgagtctcggtggaacc

SEQ ID NO: 22116 - DNA, 21 bp, Homo sapiens
  source 1..21: mol_type = genomic DNA
gttcgagtctcggtggaacct

SEQ ID NO: 22117 - DNA, 22 bp, Homo sapiens
  source 1..22: mol_type = genomic DNA
gttcgagtctcggtggaacctc

SEQ ID NO: 22118 - DNA, 23 bp, Homo sapiens
  source 1..23: mol_type = genomic DNA
gttcgagtctcggtggaacctcc

SEQ ID NO: 22119 - DNA, 24 bp, Homo sapiens
  source 1..24: mol_type = genomic DNA
gttcgagtctcggtggaacctcca

SEQ ID NO: 22120 - DNA, 23 bp, Homo sapiens
  source 1..23: mol_type = genomic DNA
gttcgatccccagcatctccacc

SEQ ID NO: 22121 - DNA, 17 bp, Homo sapiens
  source 1..17: mol_type = genomic DNA
gttcgatccccagtacc

SEQ ID NO: 22122 - DNA, 17 bp, Homo sapiens
  source 1..17: mol_type = genomic DNA
gttcgatccccggcatc

SEQ ID NO: 22123 - DNA, 18 bp, Homo sapiens
  source 1..18: mol_type = genomic DNA
gttcgatccccggcatct

SEQ ID NO: 22124 - DNA, 19 bp, Homo sapiens
  source 1..19: mol_type = genomic DNA
gttcgatccccggcatctc

SEQ ID NO: 22125 - DNA, 21 bp, Homo sapiens
  source 1..21: mol_type = genomic DNA
gttcgatccccggcatctcca

SEQ ID NO: 22126 - DNA, 22 bp, Homo sapiens
  source 1..22: mol_type = genomic DNA
gttcgatccccggcatctccac

SEQ ID NO: 22127 - DNA, 23 bp, Homo sapiens
  source 1..23: mol_type = genomic DNA
gttcgatccccggcatctccacc

SEQ ID NO: 22128 - DNA, 24 bp, Homo sapiens
  source 1..24: mol_type = genomic DNA
gttcgatccccggcatctccacca

SEQ ID NO: 22129 - DNA, 16 bp, Homo sapiens
  source 1..16: mol_type = genomic DNA
gttcgatccccgtacg

SEQ ID NO: 22130 - DNA, 17 bp, Homo sapiens
  source 1..17: mol_type = genomic DNA
gttcgatccccgtacgg

SEQ ID NO: 22131 - DNA, 19 bp, Homo sapiens
  source 1..19: mol_type = genomic DNA
gttcgatccccgtacgggc

SEQ ID NO: 22132 - DNA, 20 bp, Homo sapiens
  source 1..20: mol_type = genomic DNA
gttcgatccccgtacgggcc

SEQ ID NO: 22133 - DNA, 21 bp, Homo sapiens
  source 1..21: mol_type = genomic DNA
gttcgatccccgtacgggcca

SEQ ID NO: 22134 - DNA, 22 bp, Homo sapiens
  source 1..22: mol_type = genomic DNA
gttcgatccccgtacgggccac

SEQ ID NO: 22135 - DNA, 23 bp, Homo sapiens
  source 1..23: mol_type = genomic DNA
gttcgatcccgggcggaaacacc

SEQ ID NO: 22136 - DNA, 24 bp, Homo sapiens
  source 1..24: mol_type = genomic DNA
gttcgatcccgggcggaaacacca

SEQ ID NO: 22137 - DNA, 21 bp, Homo sapiens
  source 1..21: mol_type = genomic DNA
gttcgatcccgggtttcggca

SEQ ID NO: 22138 - DNA, 22 bp, Homo sapiens
  source 1..22: mol_type = genomic DNA
gttcgatcccgggtttcggcac

SEQ ID NO: 22139 - DNA, 23 bp, Homo sapiens
  source 1..23: mol_type = genomic DNA
gttcgatcccgggtttcggcacc

SEQ ID NO: 22140 - DNA, 24 bp, Homo sapiens
  source 1..24: mol_type = genomic DNA
gttcgatcccgggtttcggcacca

SEQ ID NO: 22141 - DNA, 23 bp, Homo sapiens
  source 1..23: mol_type = genomic DNA
gttcgatcctcacacggggcacc

SEQ ID NO: 22142 - DNA, 21 bp, Homo sapiens
  source 1..21: mol_type = genomic DNA
gttcgatcctcgctggggcct

SEQ ID NO: 22143 - DNA, 23 bp, Homo sapiens
  source 1..23: mol_type = genomic DNA
gttcgatcctcgctggggcctcc

SEQ ID NO: 22144 - DNA, 23 bp, Homo sapiens
  source 1..23: mol_type = genomic DNA
gttcgattccccaacggggagcc

SEQ ID NO: 22145 - DNA, 24 bp, Homo sapiens
  source 1..24: mol_type = genomic DNA
gttcgattccccaacggggagcca

SEQ ID NO: 22146 - DNA, 16 bp, Homo sapiens
  source 1..16: mol_type = genomic DNA
gttcgattccccgacg

SEQ ID NO: 22147 - DNA, 17 bp, Homo sapiens
  source 1..17: mol_type = genomic DNA
gttcgattccccgacgg

SEQ ID NO: 22148 - DNA, 18 bp, Homo sapiens
  source 1..18: mol_type = genomic DNA
gttcgattccccgacggg

SEQ ID NO: 22149 - DNA, 19 bp, Homo sapiens
  source 1..19: mol_type = genomic DNA
gttcgattccccgacgggg

SEQ ID NO: 22150 - DNA, 20 bp, Homo sapiens
  source 1..20: mol_type = genomic DNA
gttcgattccccgacgggga

SEQ ID NO: 22151 - DNA, 21 bp, Homo sapiens
  source 1..21: mol_type = genomic DNA
gttcgattccccgacggggag

SEQ ID NO: 22152 - DNA, 22 bp, Homo sapiens
  source 1..22: mol_type = genomic DNA
gttcgattccccgacggggagc

SEQ ID NO: 22153 - DNA, 23 bp, Homo sapiens
  source 1..23: mol_type = genomic DNA
gttcgattccccgacggggagcc

SEQ ID NO: 22154 - DNA, 24 bp, Homo sapiens
  source 1..24: mol_type = genomic DNA
gttcgattccccgacggggagcca

SEQ ID NO: 22155 - DNA, 16 bp, Homo sapiens
  source 1..16: mol_type = genomic DNA
gttcgattcccggcca

SEQ ID NO: 22156 - DNA, 17 bp, Homo sapiens
  source 1..17: mol_type = genomic DNA
gttcgattcccggccaa

SEQ ID NO: 22157 - DNA, 18 bp, Homo sapiens
  source 1..18: mol_type = genomic DNA
gttcgattcccggccaac

SEQ ID NO: 22158 - DNA, 19 bp, Homo sapiens
  source 1..19: mol_type = genomic DNA
gttcgattcccggccaacg

SEQ ID NO: 22159 - DNA, 23 bp, Homo sapiens
  source 1..23: mol_type = genomic DNA
gttcgattcccggccaacgcacc

SEQ ID NO: 22160 - DNA, 24 bp, Homo sapiens
  source 1..24: mol_type = genomic DNA
gttcgattcccggccaacgcacca

SEQ ID NO: 22161 - DNA, 18 bp, Homo sapiens
  source 1..18: mol_type = genomic DNA
gttcgattcccggccaat

SEQ ID NO: 22162 - DNA, 19 bp, Homo sapiens
  source 1..19: mol_type = genomic DNA
gttcgattcccggccaatg

SEQ ID NO: 22163 - DNA, 23 bp, Homo sapiens
  source 1..23: mol_type = genomic DNA
gttcgattcccggccaatgcacc

SEQ ID NO: 22164 - DNA, 24 bp, Homo sapiens
  source 1..24: mol_type = genomic DNA
gttcgattcccggccaatgcacca

SEQ ID NO: 22165 - DNA, 16 bp, Homo sapiens
  source 1..16: mol_type = genomic DNA
gttcgattcccggccc

SEQ ID NO: 22166 - DNA, 18 bp, Homo sapiens
  source 1..18: mol_type = genomic DNA
gttcgattcccgggcggc

SEQ ID NO: 22167 - DNA, 21 bp, Homo sapiens
  source 1..21: mol_type = genomic DNA
gttcgattcccgggcggcgca

SEQ ID NO: 22168 - DNA, 23 bp, Homo sapiens
  source 1..23: mol_type = genomic DNA
gttcgattcccgggcggcgcacc

SEQ ID NO: 22169 - DNA, 24 bp, Homo sapiens
  source 1..24: mol_type = genomic DNA
gttcgattcccgggcggcgcacca

SEQ ID NO: 22170 - DNA, 16 bp, Homo sapiens
  source 1..16: mol_type = genomic DNA
gttcgattcccggtca

SEQ ID NO: 22171 - DNA, 17 bp, Homo sapiens
  source 1..17: mol_type = genomic DNA
gttcgattcccggtcag

SEQ ID NO: 22172 - DNA, 18 bp, Homo sapiens
  source 1..18: mol_type = genomic DNA
gttcgattcccggtcagg

SEQ ID NO: 22173 - DNA, 19 bp, Homo sapiens
  source 1..19: mol_type = genomic DNA
gttcgattcccggtcaggg

SEQ ID NO: 22174 - DNA, 20 bp, Homo sapiens
  source 1..20: mol_type = genomic DNA
gttcgattcccggtcaggga

SEQ ID NO: 22175 - DNA, 21 bp, Homo sapiens
  source 1..21: mol_type = genomic DNA
gttcgattcccggtcagggaa

SEQ ID NO: 22176 - DNA, 22 bp, Homo sapiens
  source 1..22: mol_type = genomic DNA
gttcgattcccggtcagggaac

SEQ ID NO: 22177 - DNA, 23 bp, Homo sapiens
  source 1..23: mol_type = genomic DNA
gttcgattcccggtcagggaacc

SEQ ID NO: 22178 - DNA, 24 bp, Homo sapiens
  source 1..24: mol_type = genomic DNA
gttcgattcccggtcagggaacca

SEQ ID NO: 22179 - DNA, 18 bp, Homo sapiens
  source 1..18: mol_type = genomic DNA
gttcgattccggctcgaa

SEQ ID NO: 22180 - DNA, 21 bp, Homo sapiens
  source 1..21: mol_type = genomic DNA
gttcgattccggctcgaagga

SEQ ID NO: 22181 - DNA, 22 bp, Homo sapiens
  source 1..22: mol_type = genomic DNA
gttcgattccggctcgaaggac

SEQ ID NO: 22182 - DNA, 23 bp, Homo sapiens
  source 1..23: mol_type = genomic DNA
gttcgattccggctcgaaggacc

SEQ ID NO: 22183 - DNA, 24 bp, Homo sapiens
  source 1..24: mol_type = genomic DNA
gttcgattccggctcgaaggacca

SEQ ID NO: 22184 - DNA, 16 bp, Homo sapiens
  source 1..16: mol_type = genomic DNA
gttcgattccttcctt

SEQ ID NO: 22185 - DNA, 19 bp, Homo sapiens
  source 1..19: mol_type = genomic DNA
gttcgattccttccttttt

SEQ ID NO: 22186 - DNA, 21 bp, Homo sapiens
  source 1..21: mol_type = genomic DNA
gttcgattccttccttttttg

SEQ ID NO: 22187 - DNA, 22 bp, Homo sapiens
  source 1..22: mol_type = genomic DNA
gttcgattccttccttttttgc

SEQ ID NO: 22188 - DNA, 23 bp, Homo sapiens
  source 1..23: mol_type = genomic DNA
gttcgattccttccttttttgcc

SEQ ID NO: 22189 - DNA, 24 bp, Homo sapiens
  source 1..24: mol_type = genomic DNA
gttcgattccttccttttttgcca

SEQ ID NO: 22190 - DNA, 16 bp, Homo sapiens
  source 1..16: mol_type = genomic DNA
gttcgattctcatagt

SEQ ID NO: 22191 - DNA, 17 bp, Homo sapiens
  source 1..17: mol_type = genomic DNA
gttcgattctcatagtc

SEQ ID NO: 22192 - DNA, 18 bp, Homo sapiens
  source 1..18: mol_type = genomic DNA
gttcgattctcatagtcc

SEQ ID NO: 22193 - DNA, 19 bp, Homo sapiens
  source 1..19: mol_type = genomic DNA
gttcgattctcatagtcct

SEQ ID NO: 22194 - DNA, 20 bp, Homo sapiens
  source 1..20: mol_type = genomic DNA
gttcgattctcatagtccta

SEQ ID NO: 22195 - DNA, 21 bp, Homo sapiens
  source 1..21: mol_type = genomic DNA
gttcgattctcatagtcctag

SEQ ID NO: 22196 - DNA, 22 bp, Homo sapiens
  source 1..22: mol_type = genomic DNA
gttcgattctcatagtcctagc

SEQ ID NO: 22197 - DNA, 23 bp, Homo sapiens
  source 1..23: mol_type = genomic DNA
gttcgattctcatagtcctagcc

SEQ ID NO: 22198 - DNA, 24 bp, Homo sapiens
  source 1..24: mol_type = genomic DNA
gttcgattctcatagtcctagcca

SEQ ID NO: 22199 - DNA, 16 bp, Homo sapiens
  source 1..16: mol_type = genomic DNA
gttctggtctccaatg

SEQ ID NO: 22200 - DNA, 48 bp, Homo sapiens
  source 1..48: mol_type = genomic DNA
gttctggtctccaatggaggcgtgggttcgaatcccacttctgacacc

SEQ ID NO: 22201 - DNA, 16 bp, Homo sapiens
  source 1..16: mol_type = genomic DNA
gttctggtctccggat

SEQ ID NO: 22202 - DNA, 19 bp, Homo sapiens
  source 1..19: mol_type = genomic DNA
gttctggtctccggatgga

SEQ ID NO: 22203 - DNA, 23 bp, Homo sapiens
  source 1..23: mol_type = genomic DNA
gttctggtctccggatggaggcg

SEQ ID NO: 22204 - DNA, 24 bp, Homo sapiens
  source 1..24: mol_type = genomic DNA
gttctggtctccggatggaggcgt

SEQ ID NO: 22205 - DNA, 28 bp, Homo sapiens
  source 1..28: mol_type = genomic DNA
gttctggtctccggatggaggcgtgggt

SEQ ID NO: 22206 - DNA, 16 bp, Homo sapiens
  source 1..16: mol_type = genomic DNA
gttcttgtagttgaaa

SEQ ID NO: 22207 - DNA, 17 bp, Homo sapiens
  source 1..17: mol_type = genomic DNA
gttcttgtagttgaaat

SEQ ID NO: 22208 - DNA, 18 bp, Homo sapiens
  source 1..18: mol_type = genomic DNA
gttcttgtagttgaaata

SEQ ID NO: 22209 - DNA, 19 bp, Homo sapiens
  source 1..19: mol_type = genomic DNA
gttcttgtagttgaaatac

SEQ ID NO: 22210 - DNA, 20 bp, Homo sapiens
  source 1..20: mol_type = genomic DNA
gttcttgtagttgaaataca

SEQ ID NO: 22211 - DNA, 21 bp, Homo sapiens
  source 1..21: mol_type = genomic DNA
gttcttgtagttgaaatacaa

SEQ ID NO: 22212 - DNA, 22 bp, Homo sapiens
  source 1..22: mol_type = genomic DNA
gttcttgtagttgaaatacaac

SEQ ID NO: 22213 - DNA, 23 bp, Homo sapiens
  source 1..23: mol_type = genomic DNA
gttcttgtagttgaaatacaacg

SEQ ID NO: 22214 - DNA, 24 bp, Homo sapiens
  source 1..24: mol_type = genomic DNA
gttcttgtagttgaaatacaacga

SEQ ID NO: 22215 - DNA, 25 bp, Homo sapiens
  source 1..25: mol_type = genomic DNA
gttcttgtagttgaaatacaacgat

SEQ ID NO: 22216 - DNA, 26 bp, Homo sapiens
  source 1..26: mol_type = genomic DNA
gttcttgtagttgaaatacaacgatg

SEQ ID NO: 22217 - DNA, 27 bp, Homo sapiens
  source 1..27: mol_type = genomic DNA
gttcttgtagttgaaatacaacgatgg

SEQ ID NO: 22218 - DNA, 28 bp, Homo sapiens
  source 1..28: mol_type = genomic DNA
gttcttgtagttgaaatacaacgatggt

SEQ ID NO: 22219 - DNA, 29 bp, Homo sapiens
  source 1..29: mol_type = genomic DNA
gttcttgtagttgaaatacaacgatggtt

SEQ ID NO: 22220 - DNA, 30 bp, Homo sapiens
  source 1..30: mol_type = genomic DNA
gttcttgtagttgaaatacaacgatggttt

SEQ ID NO: 22221 - DNA, 31 bp, Homo sapiens
  source 1..31: mol_type = genomic DNA
gttcttgtagttgaaatacaacgatggtttt

SEQ ID NO: 22222 - DNA, 32 bp, Homo sapiens
  source 1..32: mol_type = genomic DNA
gttcttgtagttgaaatacaacgatggttttt

SEQ ID NO: 22223 - DNA, 33 bp, Homo sapiens
  source 1..33: mol_type = genomic DNA
gttcttgtagttgaaatacaacgatggtttttc

SEQ ID NO: 22224 - DNA, 34 bp, Homo sapiens
  source 1..34: mol_type = genomic DNA
gttcttgtagttgaaatacaacgatggtttttca

SEQ ID NO: 22225 - DNA, 35 bp, Homo sapiens
  source 1..35: mol_type = genomic DNA
gttcttgtagttgaaatacaacgatggtttttcat

SEQ ID NO: 22226 - DNA, 36 bp, Homo sapiens
  source 1..36: mol_type = genomic DNA
gttcttgtagttgaaatacaacgatggtttttcata

SEQ ID NO: 22227 - DNA, 37 bp, Homo sapiens
  source 1..37: mol_type = genomic DNA
gttcttgtagttgaaatacaacgatggtttttcatat

SEQ ID NO: 22228 - DNA, 38 bp, Homo sapiens
  source 1..38: mol_type = genomic DNA
gttcttgtagttgaaatacaacgatggtttttcatatc

SEQ ID NO: 22229 - DNA, 39 bp, Homo sapiens
  source 1..39: mol_type = genomic DNA
gttcttgtagttgaaatacaacgatggtttttcatatca

SEQ ID NO: 22230 - DNA, 40 bp, Homo sapiens
  source 1..40: mol_type = genomic DNA
gttcttgtagttgaaatacaacgatggtttttcatatcat

SEQ ID NO: 22231 - DNA, 41 bp, Homo sapiens
  source 1..41: mol_type = genomic DNA
gttcttgtagttgaaatacaacgatggtttttcatatcatt

SEQ ID NO: 22232 - DNA, 42 bp, Homo sapiens
  source 1..42: mol_type = genomic DNA
gttcttgtagttgaaatacaacgatggtttttcatatcattg

SEQ ID NO: 22233 - DNA, 43 bp, Homo sapiens
  source 1..43: mol_type = genomic DNA
gttcttgtagttgaaatacaacgatggtttttcatatcattgg

SEQ ID NO: 22234 - DNA, 44 bp, Homo sapiens
  source 1..44: mol_type = genomic DNA
gttcttgtagttgaaatacaacgatggtttttcatatcattggt

SEQ ID NO: 22235 - DNA, 45 bp, Homo sapiens
  source 1..45: mol_type = genomic DNA
gttcttgtagttgaaatacaacgatggtttttcatatcattggtc

SEQ ID NO: 22236 - DNA, 46 bp, Homo sapiens
  source 1..46: mol_type = genomic DNA
gttcttgtagttgaaatacaacgatggtttttcatatcattggtcg

SEQ ID NO: 22237 - DNA, 47 bp, Homo sapiens
  source 1..47: mol_type = genomic DNA
gttcttgtagttgaaatacaacgatggtttttcatatcattggtcgt

SEQ ID NO: 22238 - DNA, 48 bp, Homo sapiens
  source 1..48: mol_type = genomic DNA
gttcttgtagttgaaatacaacgatggtttttcatatcattggtcgtg

SEQ ID NO: 22239 - DNA, 17 bp, Homo sapiens
  source 1..17: mol_type = genomic DNA
gttgaaatacaacgatg

SEQ ID NO: 22240 - DNA, 19 bp, Homo sapiens
  source 1..19: mol_type = genomic DNA
gttgaaatacaacgatggt

SEQ ID NO: 22241 - DNA, 20 bp, Homo sapiens
  source 1..20: mol_type = genomic DNA
gttgaaatacaacgatggtt

SEQ ID NO: 22242 - DNA, 21 bp, Homo sapiens
  source 1..21: mol_type = genomic DNA
gttgaaatacaacgatggttt

SEQ ID NO: 22243 - DNA, 22 bp, Homo sapiens
  source 1..22: mol_type = genomic DNA
gttgaaatacaacgatggtttt

SEQ ID NO: 22244 - DNA, 23 bp, Homo sapiens
  source 1..23: mol_type = genomic DNA
gttgaaatacaacgatggttttt

SEQ ID NO: 22245 - DNA, 25 bp, Homo sapiens
  source 1..25: mol_type = genomic DNA
gttgaaatacaacgatggtttttca

SEQ ID NO: 22246 - DNA, 26 bp, Homo sapiens
  source 1..26: mol_type = genomic DNA
gttgaaatacaacgatggtttttcat

SEQ ID NO: 22247 - DNA, 28 bp, Homo sapiens
  source 1..28: mol_type = genomic DNA
gttgaaatacaacgatggtttttcatat

SEQ ID NO: 22248 - DNA, 29 bp, Homo sapiens
  source 1..29: mol_type = genomic DNA
gttgaaatacaacgatggtttttcatatc

SEQ ID NO: 22249 - DNA, 36 bp, Homo sapiens
  source 1..36: mol_type = genomic DNA
gttgaaatacaacgatggtttttcatatcattggtc

SEQ ID NO: 22250 - DNA, 37 bp, Homo sapiens
  source 1..37: mol_type = genomic DNA
gttgaaatacaacgatggtttttcatatcattggtcg

SEQ ID NO: 22251 - DNA, 38 bp, Homo sapiens
  source 1..38: mol_type = genomic DNA
gttgaaatacaacgatggtttttcatatcattggtcgt

SEQ ID NO: 22252 - DNA, 44 bp, Homo sapiens
  source 1..44: mol_type = genomic DNA
gttgaaatacaacgatggtttttcatatcattggtcgtggttgt

SEQ ID NO: 22253 - DNA, 45 bp, Homo sapiens
  source 1..45: mol_type = genomic DNA
gttgaaatacaacgatggtttttcatatcattggtcgtggttgta

SEQ ID NO: 22254 - DNA, 48 bp, Homo sapiens
  source 1..48: mol_type = genomic DNA
gttgaaatacaacgatggtttttcatatcattggtcgtggttgtagtc

SEQ ID NO: 22255 - DNA, 24 bp, Homo sapiens
  source 1..24: mol_type = genomic DNA
gttgacccgggttcgattcccggc

SEQ ID NO: 22256 - DNA, 25 bp, Homo sapiens
  source 1..25: mol_type = genomic DNA
gttgacccgggttcgattcccggcc

SEQ ID NO: 22257 - DNA, 29 bp, Homo sapiens
  source 1..29: mol_type = genomic DNA
gttgacccgggttcgattcccggccaacg

SEQ ID NO: 22258 - DNA, 16 bp, Homo sapiens
  source 1..16: mol_type = genomic DNA
gttgatgcagagtggg

SEQ ID NO: 22259 - DNA, 17 bp, Homo sapiens
  source 1..17: mol_type = genomic DNA
gttgatgcagagtgggg

SEQ ID NO: 22260 - DNA, 18 bp, Homo sapiens
  source 1..18: mol_type = genomic DNA
gttgatgcagagtggggt

SEQ ID NO: 22261 - DNA, 19 bp, Homo sapiens
  source 1..19: mol_type = genomic DNA
gttgatgcagagtggggtt

SEQ ID NO: 22262 - DNA, 20 bp, Homo sapiens
  source 1..20: mol_type = genomic DNA
gttgatgcagagtggggttt

SEQ ID NO: 22263 - DNA, 21 bp, Homo sapiens
  source 1..21: mol_type = genomic DNA
gttgatgcagagtggggtttt

SEQ ID NO: 22264 - DNA, 22 bp, Homo sapiens
  source 1..22: mol_type = genomic DNA
gttgatgcagagtggggttttg

SEQ ID NO: 22265 - DNA, 24 bp, Homo sapiens
  source 1..24: mol_type = genomic DNA
gttgatgcagagtggggttttgca

SEQ ID NO: 22266 - DNA, 25 bp, Homo sapiens
  source 1..25: mol_type = genomic DNA
gttgatgcagagtggggttttgcag

SEQ ID NO: 22267 - DNA, 26 bp, Homo sapiens
  source 1..26: mol_type = genomic DNA
gttgatgcagagtggggttttgcagt

SEQ ID NO: 22268 - DNA, 27 bp, Homo sapiens
  source 1..27: mol_type = genomic DNA
gttgatgcagagtggggttttgcagtc

SEQ ID NO: 22269 - DNA, 28 bp, Homo sapiens
  source 1..28: mol_type = genomic DNA
gttgatgcagagtggggttttgcagtcc

SEQ ID NO: 22270 - DNA, 29 bp, Homo sapiens
  source 1..29: mol_type = genomic DNA
gttgatgcagagtggggttttgcagtcct

SEQ ID NO: 22271 - DNA, 30 bp, Homo sapiens
  source 1..30: mol_type = genomic DNA
gttgatgcagagtggggttttgcagtcctt

SEQ ID NO: 22272 - DNA, 31 bp, Homo sapiens
  source 1..31: mol_type = genomic DNA
gttgatgcagagtggggttttgcagtcctta

SEQ ID NO: 22273 - DNA, 32 bp, Homo sapiens
  source 1..32: mol_type = genomic DNA
gttgatgcagagtggggttttgcagtccttac

SEQ ID NO: 22274 - DNA, 33 bp, Homo sapiens
  source 1..33: mol_type = genomic DNA
gttgatgcagagtggggttttgcagtccttacc

SEQ ID NO: 22275 - DNA, 34 bp, Homo sapiens
  source 1..34: mol_type = genomic DNA
gttgatgcagagtggggttttgcagtccttacca

SEQ ID NO: 22276 - DNA, 19 bp, Homo sapiens
  source 1..19: mol_type = genomic DNA
gttgattagggtgcttagc

SEQ ID NO: 22277 - DNA, 20 bp, Homo sapiens
  source 1..20: mol_type = genomic DNA
gttgattagggtgcttagct

SEQ ID NO: 22278 - DNA, 22 bp, Homo sapiens
  source 1..22: mol_type = genomic DNA
gttgattagggtgcttagctgt

SEQ ID NO: 22279 - DNA, 23 bp, Homo sapiens
  source 1..23: mol_type = genomic DNA
gttgattagggtgcttagctgtt

SEQ ID NO: 22280 - DNA, 24 bp, Homo sapiens
  source 1..24: mol_type = genomic DNA
gttgattagggtgcttagctgtta

SEQ ID NO: 22281 - DNA, 28 bp, Homo sapiens
  source 1..28: mol_type = genomic DNA
gttgattagggtgcttagctgttaacta

SEQ ID NO: 22282 - DNA, 29 bp, Homo sapiens
  source 1..29: mol_type = genomic DNA
gttgattagggtgcttagctgttaactaa

SEQ ID NO: 22283 - DNA, 42 bp, Homo sapiens
  source 1..42: mol_type = genomic DNA
gttgattagggtgcttagctgttaactaagtgtttgtgggtt

SEQ ID NO: 22284 - DNA, 44 bp, Homo sapiens
  source 1..44: mol_type = genomic DNA
gttgattagggtgcttagctgttaactaagtgtttgtgggttta

SEQ ID NO: 22285 - DNA, 19 bp, Homo sapiens
  source 1..19: mol_type = genomic DNA
gttgcaatacttaatttct

SEQ ID NO: 22286 - DNA, 20 bp, Homo sapiens
  source 1..20: mol_type = genomic DNA
gttgcaatacttaatttctg

SEQ ID NO: 22287 - DNA, 21 bp, Homo sapiens
  source 1..21: mol_type = genomic DNA
gttgcaatacttaatttctgc

SEQ ID NO: 22288 - DNA, 22 bp, Homo sapiens
  source 1..22: mol_type = genomic DNA
gttgcaatacttaatttctgcc

SEQ ID NO: 22289 - DNA, 23 bp, Homo sapiens
  source 1..23: mol_type = genomic DNA
gttgcaatacttaatttctgcca

SEQ ID NO: 22290 - DNA, 27 bp, Homo sapiens
  source 1..27: mol_type = genomic DNA
gttgcgtgttcaagtcacgtcggggtc

SEQ ID NO: 22291 - DNA, 29 bp, Homo sapiens
  source 1..29: mol_type = genomic DNA
gttgcgtgttcaagtcacgtcggggtcac

SEQ ID NO: 22292 - DNA, 26 bp, Homo sapiens
  source 1..26: mol_type = genomic DNA
gttgggagagcgttagactgaagatc

SEQ ID NO: 22293 - DNA, 19 bp, Homo sapiens
  source 1..19: mol_type = genomic DNA
gttggtagagcatcagact

SEQ ID NO: 22294 - DNA, 22 bp, Homo sapiens
  source 1..22: mol_type = genomic DNA
gttggtagagcatcagactttt

SEQ ID NO: 22295 - DNA, 19 bp, Homo sapiens
  source 1..19: mol_type = genomic DNA
gttggtagagcatgggact

SEQ ID NO: 22296 - DNA, 27 bp, Homo sapiens
  source 1..27: mol_type = genomic DNA
gttggtagagcatgggactcttaatcc

SEQ ID NO: 22297 - DNA, 17 bp, Homo sapiens
  source 1..17: mol_type = genomic DNA
gttggtagagcggagga

SEQ ID NO: 22298 - DNA, 19 bp, Homo sapiens
  source 1..19: mol_type = genomic DNA
gttggtagagcggaggact

SEQ ID NO: 22299 - DNA, 22 bp, Homo sapiens
  source 1..22: mol_type = genomic DNA
gttggtagagcggaggactgta

SEQ ID NO: 22300 - DNA, 23 bp, Homo sapiens
  source 1..23: mol_type = genomic DNA
gttggtagagcggaggactgtag

SEQ ID NO: 22301 - DNA, 23 bp, Homo sapiens
  source 1..23: mol_type = genomic DNA
gttggtctaggggtatgattctc

SEQ ID NO: 22302 - DNA, 25 bp, Homo sapiens
  source 1..25: mol_type = genomic DNA
gttggtctaggggtatgattctcgc

SEQ ID NO: 22303 - DNA, 26 bp, Homo sapiens
  source 1..26: mol_type = genomic DNA
gttggtctaggggtatgattctcgct

SEQ ID NO: 22304 - DNA, 27 bp, Homo sapiens
  source 1..27: mol_type = genomic DNA
gttggtctaggggtatgattctcgctt

SEQ ID NO: 22305 - DNA, 16 bp, Homo sapiens
  source 1..16: mol_type = genomic DNA
gttggtggtatagtgg

SEQ ID NO: 22306 - DNA, 17 bp, Homo sapiens
  source 1..17: mol_type = genomic DNA
gttggtggtatagtggt

SEQ ID NO: 22307 - DNA, 19 bp, Homo sapiens
  source 1..19: mol_type = genomic DNA
gttggtggtatagtggtaa

SEQ ID NO: 22308 - DNA, 20 bp, Homo sapiens
  source 1..20: mol_type = genomic DNA
gttggtggtatagtggtaag

SEQ ID NO: 22309 - DNA, 26 bp, Homo sapiens
  source 1..26: mol_type = genomic DNA
gttggtggtatagtggtaagcatagc

SEQ ID NO: 22310 - DNA, 27 bp, Homo sapiens
  source 1..27: mol_type = genomic DNA
gttggtggtatagtggtaagcatagct

SEQ ID NO: 22311 - DNA, 28 bp, Homo sapiens
  source 1..28: mol_type = genomic DNA
gttggtggtatagtggtaagcatagctg

SEQ ID NO: 22312 - DNA, 29 bp, Homo sapiens
  source 1..29: mol_type = genomic DNA
gttggtggtatagtggtaagcatagctgc

SEQ ID NO: 22313 - DNA, 30 bp, Homo sapiens
  source 1..30: mol_type = genomic DNA
gttggtggtatagtggtaagcatagctgcc

SEQ ID NO: 22314 - DNA, 31 bp, Homo sapiens
  source 1..31: mol_type = genomic DNA
gttggtggtatagtggtaagcatagctgcct

SEQ ID NO: 22315 - DNA, 32 bp, Homo sapiens
  source 1..32: mol_type = genomic DNA
gttggtggtatagtggtaagcatagctgcctt

SEQ ID NO: 22316 - DNA, 34 bp, Homo sapiens
  source 1..34: mol_type = genomic DNA
gttggtggtatagtggtaagcatagctgccttcc

SEQ ID NO: 22317 - DNA, 47 bp, Homo sapiens
  source 1..47: mol_type = genomic DNA
gttggtggtatagtggtaagcatagctgccttccaagcagttgaccc

SEQ ID NO: 22318 - DNA, 19 bp, Homo sapiens
  source 1..19: mol_type = genomic DNA
gttggtggtatagtggtga

SEQ ID NO: 22319 - DNA, 20 bp, Homo sapiens
  source 1..20: mol_type = genomic DNA
gttggtggtatagtggtgag

SEQ ID NO: 22320 - DNA, 21 bp, Homo sapiens
  source 1..21: mol_type = genomic DNA
gttggtggtatagtggtgagc

SEQ ID NO: 22321 - DNA, 22 bp, Homo sapiens
  source 1..22: mol_type = genomic DNA
gttggtggtatagtggtgagca

SEQ ID NO: 22322 - DNA, 23 bp, Homo sapiens
  source 1..23: mol_type = genomic DNA
gttggtggtatagtggtgagcat

SEQ ID NO: 22323 - DNA, 24 bp, Homo sapiens
  source 1..24: mol_type = genomic DNA
gttggtggtatagtggtgagcata

SEQ ID NO: 22324 - DNA, 25 bp, Homo sapiens
  source 1..25: mol_type = genomic DNA
gttggtggtatagtggtgagcatag

SEQ ID NO: 22325 - DNA, 26 bp, Homo sapiens
  source 1..26: mol_type = genomic DNA
gttggtggtatagtggtgagcatagc

SEQ ID NO: 22326 - DNA, 27 bp, Homo sapiens
  source 1..27: mol_type = genomic DNA
gttggtggtatagtggtgagcatagct

SEQ ID NO: 22327 - DNA, 28 bp, Homo sapiens
  source 1..28: mol_type = genomic DNA
gttggtggtatagtggtgagcatagctg

SEQ ID NO: 22328 - DNA, 29 bp, Homo sapiens
  source 1..29: mol_type = genomic DNA
gttggtggtatagtggtgagcatagctgc

SEQ ID NO: 22329 - DNA, 30 bp, Homo sapiens
  source 1..30: mol_type = genomic DNA
gttggtggtatagtggtgagcatagctgcc

SEQ ID NO: 22330 - DNA, 31 bp, Homo sapiens
  source 1..31: mol_type = genomic DNA
gttggtggtatagtggtgagcatagctgcct

SEQ ID NO: 22331 - DNA, 32 bp, Homo sapiens
  source 1..32: mol_type = genomic DNA
gttggtggtatagtggtgagcatagctgcctt

SEQ ID NO: 22332 - DNA, 33 bp, Homo sapiens
  source 1..33: mol_type = genomic DNA
gttggtggtatagtggtgagcatagctgccttc

SEQ ID NO: 22333 - DNA, 34 bp, Homo sapiens
  source 1..34: mol_type = genomic DNA
gttggtggtatagtggtgagcatagctgccttcc

SEQ ID NO: 22334 - DNA, 35 bp, Homo sapiens
  source 1..35: mol_type = genomic DNA
gttggtggtatagtggtgagcatagctgccttcca

SEQ ID NO: 22335 - DNA, 42 bp, Homo sapiens
  source 1..42: mol_type = genomic DNA
gttggtggtatagtggtgagcatagctgccttccaagcagtt

SEQ ID NO: 22336 - DNA, 44 bp, Homo sapiens
  source 1..44: mol_type = genomic DNA
gttggtggtatagtggtgagcatagctgccttccaagcagttga

SEQ ID NO: 22337 - DNA, 26 bp, Homo sapiens
  source 1..26: mol_type = genomic DNA
gttggtggtatagtggttagcatagc

SEQ ID NO: 22338 - DNA, 27 bp, Homo sapiens
  source 1..27: mol_type = genomic DNA
gttggtggtatagtggttagcatagct

SEQ ID NO: 22339 - DNA, 28 bp, Homo sapiens
  source 1..28: mol_type = genomic DNA
gttggtggtatagtggttagcatagctg

SEQ ID NO: 22340 - DNA, 29 bp, Homo sapiens
  source 1..29: mol_type = genomic DNA
gttggtggtatagtggttagcatagctgc

SEQ ID NO: 22341 - DNA, 30 bp, Homo sapiens
  source 1..30: mol_type = genomic DNA
gttggtggtatagtggttagcatagctgcc

SEQ ID NO: 22342 - DNA, 31 bp, Homo sapiens
  source 1..31: mol_type = genomic DNA
gttggtggtatagtggttagcatagctgcct

SEQ ID NO: 22343 - DNA, 32 bp, Homo sapiens
  source 1..32: mol_type = genomic DNA
gttggtggtatagtggttagcatagctgcctt

SEQ ID NO: 22344 - DNA, 33 bp, Homo sapiens
  source 1..33: mol_type = genomic DNA
gttggtggtatagtggttagcatagctgccttc

SEQ ID NO: 22345 - DNA, 34 bp, Homo sapiens
  source 1..34: mol_type = genomic DNA
gttggtggtatagtggttagcatagctgccttcc

SEQ ID NO: 22346 - DNA, 35 bp, Homo sapiens
  source 1..35: mol_type = genomic DNA
gttggtggtatagtggttagcatagctgccttcca

SEQ ID NO: 22347 - DNA, 48 bp, Homo sapiens
  source 1..48: mol_type = genomic DNA
gttggtggtatagtggttagcatagctgccttccaagcagttgacccg

SEQ ID NO: 22348 - DNA, 27 bp, Homo sapiens
  source 1..27: mol_type = genomic DNA
gttggtggttcgagcccacccagggac

SEQ ID NO: 22349 - DNA, 30 bp, Homo sapiens
  source 1..30: mol_type = genomic DNA
gttggtggttcgagcccacccagggacgcc

SEQ ID NO: 22350 - DNA, 31 bp, Homo sapiens
  source 1..31: mol_type = genomic DNA
gttggtggttcgagcccacccagggacgcca

SEQ ID NO: 22351 - DNA, 30 bp, Homo sapiens
  source 1..30: mol_type = genomic DNA
gttggtggtttagtggtagaattctcgcct

SEQ ID NO: 22352 - DNA, 31 bp, Homo sapiens
  source 1..31: mol_type = genomic DNA
gttggtggtttagtggtagaattctcgcctc

SEQ ID NO: 22353 - DNA, 19 bp, Homo sapiens
  source 1..19: mol_type = genomic DNA
gttggttagagcgtggtgc

SEQ ID NO: 22354 - DNA, 16 bp, Homo sapiens
  source 1..16: mol_type = genomic DNA
gttggttatacccttc

SEQ ID NO: 22355 - DNA, 17 bp, Homo sapiens
  source 1..17: mol_type = genomic DNA
gttggttatacccttcc

SEQ ID NO: 22356 - DNA, 18 bp, Homo sapiens
  source 1..18: mol_type = genomic DNA
gttggttatacccttccc

SEQ ID NO: 22357 - DNA, 21 bp, Homo sapiens
  source 1..21: mol_type = genomic DNA
gttggttatacccttcccgta

SEQ ID NO: 22358 - DNA, 22 bp, Homo sapiens
  source 1..22: mol_type = genomic DNA
gttggttatacccttcccgtac

SEQ ID NO: 22359 - DNA, 23 bp, Homo sapiens
  source 1..23: mol_type = genomic DNA
gttggttatacccttcccgtact

SEQ ID NO: 22360 - DNA, 24 bp, Homo sapiens
  source 1..24: mol_type = genomic DNA
gttggttatacccttcccgtacta

SEQ ID NO: 22361 - DNA, 25 bp, Homo sapiens
  source 1..25: mol_type = genomic DNA
gttggttatacccttcccgtactac

SEQ ID NO: 22362 - DNA, 26 bp, Homo sapiens
  source 1..26: mol_type = genomic DNA
gttggttatacccttcccgtactacc

SEQ ID NO: 22363 - DNA, 27 bp, Homo sapiens
  source 1..27: mol_type = genomic DNA
gttggttatacccttcccgtactacca

SEQ ID NO: 22364 - DNA, 16 bp, Homo sapiens
  source 1..16: mol_type = genomic DNA
gttgtagtccgtgcga

SEQ ID NO: 22365 - DNA, 17 bp, Homo sapiens
  source 1..17: mol_type = genomic DNA
gttgtagtccgtgcgag

SEQ ID NO: 22366 - DNA, 18 bp, Homo sapiens
  source 1..18: mol_type = genomic DNA
gttgtagtccgtgcgaga

SEQ ID NO: 22367 - DNA, 19 bp, Homo sapiens
  source 1..19: mol_type = genomic DNA
gttgtagtccgtgcgagaa

SEQ ID NO: 22368 - DNA, 20 bp, Homo sapiens
  source 1..20: mol_type = genomic DNA
gttgtagtccgtgcgagaat

SEQ ID NO: 22369 - DNA, 21 bp, Homo sapiens
  source 1..21: mol_type = genomic DNA
gttgtagtccgtgcgagaata

SEQ ID NO: 22370 - DNA, 22 bp, Homo sapiens
  source 1..22: mol_type = genomic DNA
gttgtagtccgtgcgagaatac

SEQ ID NO: 22371 - DNA, 23 bp, Homo sapiens
  source 1..23: mol_type = genomic DNA
gttgtagtccgtgcgagaatacc

SEQ ID NO: 22372 - DNA, 24 bp, Homo sapiens
  source 1..24: mol_type = genomic DNA
gttgtagtccgtgcgagaatacca

SEQ ID NO: 22373 - DNA, 30 bp, Homo sapiens
  source 1..30: mol_type = genomic DNA
gttgtgggttcgaatcccaccagagtcgcc

SEQ ID NO: 22374 - DNA, 31 bp, Homo sapiens
  source 1..31: mol_type = genomic DNA
gttgtgggttcgaatcccaccagagtcgcca

SEQ ID NO: 22375 - DNA, 30 bp, Homo sapiens
  source 1..30: mol_type = genomic DNA
gttgtgggttcgagtcccaccagagtcgcc

SEQ ID NO: 22376 - DNA, 24 bp, Homo sapiens
  source 1..24: mol_type = genomic DNA
gtttaaacaaaacgaatgatttcg

SEQ ID NO: 22377 - DNA, 26 bp, Homo sapiens
  source 1..26: mol_type = genomic DNA
gtttaaacaaaacgaatgatttcgac

SEQ ID NO: 22378 - DNA, 27 bp, Homo sapiens
  source 1..27: mol_type = genomic DNA
gtttaaacaaaacgaatgatttcgact

SEQ ID NO: 22379 - DNA, 28 bp, Homo sapiens
  source 1..28: mol_type = genomic DNA
gtttaaacaaaacgaatgatttcgactc

SEQ ID NO: 22380 - DNA, 29 bp, Homo sapiens
  source 1..29: mol_type = genomic DNA
gtttaaacaaaacgaatgatttcgactca

SEQ ID NO: 22381 - DNA, 30 bp, Homo sapiens
  source 1..30: mol_type = genomic DNA
gtttaaacaaaacgaatgatttcgactcat

SEQ ID NO: 22382 - DNA, 31 bp, Homo sapiens
  source 1..31: mol_type = genomic DNA
gtttaaacaaaacgaatgatttcgactcatt

SEQ ID NO: 22383 - DNA, 16 bp, Homo sapiens
  source 1..16: mol_type = genomic DNA
gtttaaattagaatct

SEQ ID NO: 22384 - DNA, 17 bp, Homo sapiens
  source 1..17: mol_type = genomic DNA
gtttaaattagaatctt

SEQ ID NO: 22385 - DNA, 20 bp, Homo sapiens
  source 1..20: mol_type = genomic DNA
gtttaaattagaatcttagc

SEQ ID NO: 22386 - DNA, 21 bp, Homo sapiens
  source 1..21: mol_type = genomic DNA
gtttaaattagaatcttagct

SEQ ID NO: 22387 - DNA, 22 bp, Homo sapiens
  source 1..22: mol_type = genomic DNA
gtttaaattagaatcttagctt

SEQ ID NO: 22388 - DNA, 23 bp, Homo sapiens
  source 1..23: mol_type = genomic DNA
gtttaaattagaatcttagcttt

SEQ ID NO: 22389 - DNA, 24 bp, Homo sapiens
  source 1..24: mol_type = genomic DNA
gtttaaattagaatcttagctttg

SEQ ID NO: 22390 - DNA, 25 bp, Homo sapiens
  source 1..25: mol_type = genomic DNA
gtttaaattagaatcttagctttgg

SEQ ID NO: 22391 - DNA, 29 bp, Homo sapiens
  source 1..29: mol_type = genomic DNA
gtttaaattagaatcttagctttgggtgc

SEQ ID NO: 22392 - DNA, 30 bp, Homo sapiens
  source 1..30: mol_type = genomic DNA
gtttaaattagaatcttagctttgggtgct

SEQ ID NO: 22393 - DNA, 31 bp, Homo sapiens
  source 1..31: mol_type = genomic DNA
gtttaaattagaatcttagctttgggtgcta

SEQ ID NO: 22394 - DNA, 41 bp, Homo sapiens
  source 1..41: mol_type = genomic DNA
gtttaaattagaatcttagctttgggtgctaatggtggagt

SEQ ID NO: 22395 - DNA, 42 bp, Homo sapiens
  source 1..42: mol_type = genomic DNA
gtttaaattagaatcttagctttgggtgctaatggtggagtt

SEQ ID NO: 22396 - DNA, 47 bp, Homo sapiens
  source 1..47: mol_type = genomic DNA
gtttaaattagaatcttagctttgggtgctaatggtggagttaaaga

SEQ ID NO: 22397 - DNA, 48 bp, Homo sapiens
  source 1..48: mol_type = genomic DNA
gtttaaattagaatcttagctttgggtgctaatggtggagttaaagac

SEQ ID NO: 22398 - DNA, 23 bp, Homo sapiens
  source 1..23: mol_type = genomic DNA
gtttaaccaaaacatcagattgt

SEQ ID NO: 22399 - DNA, 24 bp, Homo sapiens
  source 1..24: mol_type = genomic DNA
gtttaaccaaaacatcagattgtg

SEQ ID NO: 22400 - DNA, 25 bp, Homo sapiens
  source 1..25: mol_type = genomic DNA
gtttaaccaaaacatcagattgtga

SEQ ID NO: 22401 - DNA, 27 bp, Homo sapiens
  source 1..27: mol_type = genomic DNA
gtttaaccaaaacatcagattgtgaat

SEQ ID NO: 22402 - DNA, 28 bp, Homo sapiens
  source 1..28: mol_type = genomic DNA
gtttaaccaaaacatcagattgtgaatc

SEQ ID NO: 22403 - DNA, 29 bp, Homo sapiens
  source 1..29: mol_type = genomic DNA
gtttaaccaaaacatcagattgtgaatct

SEQ ID NO: 22404 - DNA, 31 bp, Homo sapiens
  source 1..31: mol_type = genomic DNA
gtttaaccaaaacatcagattgtgaatctga

SEQ ID NO: 22405 - DNA, 32 bp, Homo sapiens
  source 1..32: mol_type = genomic DNA
gtttaaccaaaacatcagattgtgaatctgac

SEQ ID NO: 22406 - DNA, 33 bp, Homo sapiens
  source 1..33: mol_type = genomic DNA
gtttaaccaaaacatcagattgtgaatctgaca

SEQ ID NO: 22407 - DNA, 36 bp, Homo sapiens
  source 1..36: mol_type = genomic DNA
gtttaaccaaaacatcagattgtgaatctgacaaca

SEQ ID NO: 22408 - DNA, 37 bp, Homo sapiens
  source 1..37: mol_type = genomic DNA
gtttaaccaaaacatcagattgtgaatctgacaacag

SEQ ID NO: 22409 - DNA, 40 bp, Homo sapiens
  source 1..40: mol_type = genomic DNA
gtttaaccaaaacatcagattgtgaatctgacaacagagg

SEQ ID NO: 22410 - DNA, 41 bp, Homo sapiens
  source 1..41: mol_type = genomic DNA
gtttaaccaaaacatcagattgtgaatctgacaacagaggc

SEQ ID NO: 22411 - DNA, 42 bp, Homo sapiens
  source 1..42: mol_type = genomic DNA
gtttaaccaaaacatcagattgtgaatctgacaacagaggct

SEQ ID NO: 22412 - DNA, 43 bp, Homo sapiens
  source 1..43: mol_type = genomic DNA
gtttaaccaaaacatcagattgtgaatctgacaacagaggctt

SEQ ID NO: 22413 - DNA, 45 bp, Homo sapiens
  source 1..45: mol_type = genomic DNA
gtttaaccaaaacatcagattgtgaatctgacaacagaggcttac

SEQ ID NO: 22414 - DNA, 18 bp, Homo sapiens
  source 1..18: mol_type = genomic DNA
gtttaagtcccattggtc

SEQ ID NO: 22415 - DNA, 19 bp, Homo sapiens
  source 1..19: mol_type = genomic DNA
gtttaagtcccattggtct

SEQ ID NO: 22416 - DNA, 20 bp, Homo sapiens
  source 1..20: mol_type = genomic DNA
gtttaagtcccattggtcta

SEQ ID NO: 22417 - DNA, 22 bp, Homo sapiens
  source 1..22: mol_type = genomic DNA
gtttaagtcccattggtctagc

SEQ ID NO: 22418 - DNA, 23 bp, Homo sapiens
  source 1..23: mol_type = genomic DNA
gtttaagtcccattggtctagcc

SEQ ID NO: 22419 - DNA, 24 bp, Homo sapiens
  source 1..24: mol_type = genomic DNA
gtttaagtcccattggtctagcca

SEQ ID NO: 22420 - DNA, 16 bp, Homo sapiens
  source 1..16: mol_type = genomic DNA
gtttagacgggctcac

SEQ ID NO: 22421 - DNA, 17 bp, Homo sapiens
  source 1..17: mol_type = genomic DNA
gtttagacgggctcaca

SEQ ID NO: 22422 - DNA, 18 bp, Homo sapiens
  source 1..18: mol_type = genomic DNA
gtttagacgggctcacat

SEQ ID NO: 22423 - DNA, 19 bp, Homo sapiens
  source 1..19: mol_type = genomic DNA
gtttagacgggctcacatc

SEQ ID NO: 22424 - DNA, 20 bp, Homo sapiens
  source 1..20: mol_type = genomic DNA
gtttagacgggctcacatca

SEQ ID NO: 22425 - DNA, 21 bp, Homo sapiens
  source 1..21: mol_type = genomic DNA
gtttagacgggctcacatcac

SEQ ID NO: 22426 - DNA, 22 bp, Homo sapiens
  source 1..22: mol_type = genomic DNA
gtttagacgggctcacatcacc

SEQ ID NO: 22427 - DNA, 23 bp, Homo sapiens
  source 1..23: mol_type = genomic DNA
gtttagacgggctcacatcaccc

SEQ ID NO: 22428 - DNA, 24 bp, Homo sapiens
  source 1..24: mol_type = genomic DNA
gtttagacgggctcacatcacccc

SEQ ID NO: 22429 - DNA, 25 bp, Homo sapiens
  source 1..25: mol_type = genomic DNA
gtttagacgggctcacatcacccca

SEQ ID NO: 22430 - DNA, 26 bp, Homo sapiens
  source 1..26: mol_type = genomic DNA
gtttagacgggctcacatcaccccat

SEQ ID NO: 22431 - DNA, 27 bp, Homo sapiens
  source 1..27: mol_type = genomic DNA
gtttagacgggctcacatcaccccata

SEQ ID NO: 22432 - DNA, 28 bp, Homo sapiens
  source 1..28: mol_type = genomic DNA
gtttagacgggctcacatcaccccataa

SEQ ID NO: 22433 - DNA, 29 bp, Homo sapiens
  source 1..29: mol_type = genomic DNA
gtttagacgggctcacatcaccccataaa

SEQ ID NO: 22434 - DNA, 30 bp, Homo sapiens
  source 1..30: mol_type = genomic DNA
gtttagacgggctcacatcaccccataaac

SEQ ID NO: 22435 - DNA, 31 bp, Homo sapiens
  source 1..31: mol_type = genomic DNA
gtttagacgggctcacatcaccccataaaca

SEQ ID NO: 22436 - DNA, 32 bp, Homo sapiens
  source 1..32: mol_type = genomic DNA
gtttagacgggctcacatcaccccataaacac

SEQ ID NO: 22437 - DNA, 33 bp, Homo sapiens
  source 1..33: mol_type = genomic DNA
gtttagacgggctcacatcaccccataaacacc

SEQ ID NO: 22438 - DNA, 34 bp, Homo sapiens
  source 1..34: mol_type = genomic DNA
gtttagacgggctcacatcaccccataaacacca

SEQ ID NO: 22439 - DNA, 16 bp, Homo sapiens
  source 1..16: mol_type = genomic DNA
gtttatgtagcttacc

SEQ ID NO: 22440 - DNA, 17 bp, Homo sapiens
  source 1..17: mol_type = genomic DNA
gtttatgtagcttacct

SEQ ID NO: 22441 - DNA, 18 bp, Homo sapiens
  source 1..18: mol_type = genomic DNA
gtttatgtagcttacctc

SEQ ID NO: 22442 - DNA, 19 bp, Homo sapiens
  source 1..19: mol_type = genomic DNA
gtttatgtagcttacctcc

SEQ ID NO: 22443 - DNA, 20 bp, Homo sapiens
  source 1..20: mol_type = genomic DNA
gtttatgtagcttacctcct

SEQ ID NO: 22444 - DNA, 21 bp, Homo sapiens
  source 1..21: mol_type = genomic DNA
gtttatgtagcttacctcctc

SEQ ID NO: 22445 - DNA, 22 bp, Homo sapiens
  source 1..22: mol_type = genomic DNA
gtttatgtagcttacctcctca

SEQ ID NO: 22446 - DNA, 23 bp, Homo sapiens
  source 1..23: mol_type = genomic DNA
gtttatgtagcttacctcctcaa

SEQ ID NO: 22447 - DNA, 24 bp, Homo sapiens
  source 1..24: mol_type = genomic DNA
gtttatgtagcttacctcctcaaa

SEQ ID NO: 22448 - DNA, 25 bp, Homo sapiens
  source 1..25: mol_type = genomic DNA
gtttatgtagcttacctcctcaaag

SEQ ID NO: 22449 - DNA, 26 bp, Homo sapiens
  source 1..26: mol_type = genomic DNA
gtttatgtagcttacctcctcaaagc

SEQ ID NO: 22450 - DNA, 27 bp, Homo sapiens
  source 1..27: mol_type = genomic DNA
gtttatgtagcttacctcctcaaagca

SEQ ID NO: 22451 - DNA, 28 bp, Homo sapiens
  source 1..28: mol_type = genomic DNA
gtttatgtagcttacctcctcaaagcaa

SEQ ID NO: 22452 - DNA, 29 bp, Homo sapiens
  source 1..29: mol_type = genomic DNA
gtttatgtagcttacctcctcaaagcaat

SEQ ID NO: 22453 - DNA, 30 bp, Homo sapiens
  source 1..30: mol_type = genomic DNA
gtttatgtagcttacctcctcaaagcaata

SEQ ID NO: 22454 - DNA, 31 bp, Homo sapiens
  source 1..31: mol_type = genomic DNA
gtttatgtagcttacctcctcaaagcaatac

SEQ ID NO: 22455 - DNA, 32 bp, Homo sapiens
  source 1..32: mol_type = genomic DNA
gtttatgtagcttacctcctcaaagcaataca

SEQ ID NO: 22456 - DNA, 33 bp, Homo sapiens
  source 1..33: mol_type = genomic DNA
gtttatgtagcttacctcctcaaagcaatacac

SEQ ID NO: 22457 - DNA, 34 bp, Homo sapiens
  source 1..34: mol_type = genomic DNA
gtttatgtagcttacctcctcaaagcaatacact

SEQ ID NO: 22458 - DNA, 35 bp, Homo sapiens
  source 1..35: mol_type = genomic DNA
gtttatgtagcttacctcctcaaagcaatacactg

SEQ ID NO: 22459 - DNA, 36 bp, Homo sapiens
  source 1..36: mol_type = genomic DNA
gtttatgtagcttacctcctcaaagcaatacactga

SEQ ID NO: 22460 - DNA, 37 bp, Homo sapiens
  source 1..37: mol_type = genomic DNA
gtttatgtagcttacctcctcaaagcaatacactgaa

SEQ ID NO: 22461 - DNA, 38 bp, Homo sapiens
  source 1..38: mol_type = genomic DNA
gtttatgtagcttacctcctcaaagcaatacactgaaa

SEQ ID NO: 22462 - DNA, 41 bp, Homo sapiens
  source 1..41: mol_type = genomic DNA
gtttatgtagcttacctcctcaaagcaatacactgaaaatg

SEQ ID NO: 22463 - DNA, 46 bp, Homo sapiens
  source 1..46: mol_type = genomic DNA
gtttatgtagcttacctcctcaaagcaatacactgaaaatgtttag

SEQ ID NO: 22464 - DNA, 16 bp, Homo sapiens
  source 1..16: mol_type = genomic DNA
gtttccccgcgcaggt

SEQ ID NO: 22465 - DNA, 17 bp, Homo sapiens
  source 1..17: mol_type = genomic DNA
gtttccccgcgcaggtt

SEQ ID NO: 22466 - DNA, 37 bp, Homo sapiens
  source 1..37: mol_type = genomic DNA
gtttccccgcgcaggttcgaatcctgccgactacgcc

SEQ ID NO: 22467 - DNA, 38 bp, Homo sapiens
  source 1..38: mol_type = genomic DNA
gtttccccgcgcaggttcgaatcctgccgactacgcca

SEQ ID NO: 22468 - DNA, 18 bp, Homo sapiens
  source 1..18: mol_type = genomic DNA
gtttccgtagtggagtgg

SEQ ID NO: 22469 - DNA, 23 bp, Homo sapiens
  source 1..23: mol_type = genomic DNA
gtttccgtagtggagtggttatc

SEQ ID NO: 22470 - DNA, 24 bp, Homo sapiens
  source 1..24: mol_type = genomic DNA
gtttccgtagtggagtggttatca

SEQ ID NO: 22471 - DNA, 30 bp, Homo sapiens
  source 1..30: mol_type = genomic DNA
gtttccgtagtggagtggttatcacgttcg

SEQ ID NO: 22472 - DNA, 31 bp, Homo sapiens
  source 1..31: mol_type = genomic DNA
gtttccgtagtggagtggttatcacgttcgc

SEQ ID NO: 22473 - DNA, 32 bp, Homo sapiens
  source 1..32: mol_type = genomic DNA
gtttccgtagtggagtggttatcacgttcgcc

SEQ ID NO: 22474 - DNA, 33 bp, Homo sapiens
  source 1..33: mol_type = genomic DNA
gtttccgtagtggagtggttatcacgttcgcct

SEQ ID NO: 22475 - DNA, 34 bp, Homo sapiens
  source 1..34: mol_type = genomic DNA
gtttccgtagtggagtggttatcacgttcgcctc

SEQ ID NO: 22476 - DNA, 35 bp, Homo sapiens
  source 1..35: mol_type = genomic DNA
gtttccgtagtggagtggttatcacgttcgcctca

SEQ ID NO: 22477 - DNA, 36 bp, Homo sapiens
  source 1..36: mol_type = genomic DNA
gtttccgtagtggagtggttatcacgttcgcctcac

SEQ ID NO: 22478 - DNA, 37 bp, Homo sapiens
  source 1..37: mol_type = genomic DNA
gtttccgtagtggagtggttatcacgttcgcctcaca

SEQ ID NO: 22479 - DNA, 38 bp, Homo sapiens
  source 1..38: mol_type = genomic DNA
gtttccgtagtggagtggttatcacgttcgcctcacac

SEQ ID NO: 22480 - DNA, 16 bp, Homo sapiens
  source 1..16: mol_type = genomic DNA
gtttccgtagtgtagc

SEQ ID NO: 22481 - DNA, 17 bp, Homo sapiens
  source 1..17: mol_type = genomic DNA
gtttccgtagtgtagcg

SEQ ID NO: 22482 - DNA, 19 bp, Homo sapiens
  source 1..19: mol_type = genomic DNA
gtttccgtagtgtagcggt

SEQ ID NO: 22483 - DNA, 23 bp, Homo sapiens
  source 1..23: mol_type = genomic DNA
gtttccgtagtgtagcggttatc

SEQ ID NO: 22484 - DNA, 24 bp, Homo sapiens
  source 1..24: mol_type = genomic DNA
gtttccgtagtgtagcggttatca

SEQ ID NO: 22485 - DNA, 25 bp, Homo sapiens
  source 1..25: mol_type = genomic DNA
gtttccgtagtgtagcggttatcac

SEQ ID NO: 22486 - DNA, 26 bp, Homo sapiens
  source 1..26: mol_type = genomic DNA
gtttccgtagtgtagcggttatcaca

SEQ ID NO: 22487 - DNA, 27 bp, Homo sapiens
  source 1..27: mol_type = genomic DNA
gtttccgtagtgtagcggttatcacat

SEQ ID NO: 22488 - DNA, 28 bp, Homo sapiens
  source 1..28: mol_type = genomic DNA
gtttccgtagtgtagcggttatcacatt

SEQ ID NO: 22489 - DNA, 29 bp, Homo sapiens
  source 1..29: mol_type = genomic DNA
gtttccgtagtgtagcggttatcacattc

SEQ ID NO: 22490 - DNA, 30 bp, Homo sapiens
  source 1..30: mol_type = genomic DNA
gtttccgtagtgtagcggttatcacattcg

SEQ ID NO: 22491 - DNA, 31 bp, Homo sapiens
  source 1..31: mol_type = genomic DNA
gtttccgtagtgtagcggttatcacattcgc

SEQ ID NO: 22492 - DNA, 32 bp, Homo sapiens
  source 1..32: mol_type = genomic DNA
gtttccgtagtgtagcggttatcacattcgcc

SEQ ID NO: 22493 - DNA, 33 bp, Homo sapiens
  source 1..33: mol_type = genomic DNA
gtttccgtagtgtagcggttatcacattcgcct

SEQ ID NO: 22494 - DNA, 34 bp, Homo sapiens
  source 1..34: mol_type = genomic DNA
gtttccgtagtgtagcggttatcacattcgcctc

SEQ ID NO: 22495 - DNA, 35 bp, Homo sapiens
  source 1..35: mol_type = genomic DNA
gtttccgtagtgtagcggttatcacattcgcctca

SEQ ID NO: 22496 - DNA, 36 bp, Homo sapiens
  source 1..36: mol_type = genomic DNA
gtttccgtagtgtagcggttatcacattcgcctcac

SEQ ID NO: 22497 - DNA, 37 bp, Homo sapiens
  source 1..37: mol_type = genomic DNA
gtttccgtagtgtagcggttatcacattcgcctcaca

SEQ ID NO: 22498 - DNA, 38 bp, Homo sapiens
  source 1..38: mol_type = genomic DNA
gtttccgtagtgtagcggttatcacattcgcctcacac

SEQ ID NO: 22499 - DNA, 39 bp, Homo sapiens
  source 1..39: mol_type = genomic DNA
gtttccgtagtgtagcggttatcacattcgcctcacacg

SEQ ID NO: 22500 - DNA, 43 bp, Homo sapiens
  source 1..43: mol_type = genomic DNA
gtttccgtagtgtagcggttatcacattcgcctcacacgcgaa

SEQ ID NO: 22501 - DNA, 16 bp, Homo sapiens
  source 1..16: mol_type = genomic DNA
gtttccgtagtgtagt

SEQ ID NO: 22502 - DNA, 17 bp, Homo sapiens
  source 1..17: mol_type = genomic DNA
gtttccgtagtgtagtg

SEQ ID NO: 22503 - DNA, 18 bp, Homo sapiens
  source 1..18: mol_type = genomic DNA
gtttccgtagtgtagtgg

SEQ ID NO: 22504 - DNA, 19 bp, Homo sapiens
  source 1..19: mol_type = genomic DNA
gtttccgtagtgtagtggt

SEQ ID NO: 22505 - DNA, 20 bp, Homo sapiens
  source 1..20: mol_type = genomic DNA
gtttccgtagtgtagtggtc

SEQ ID NO: 22506 - DNA, 21 bp, Homo sapiens
  source 1..21: mol_type = genomic DNA
gtttccgtagtgtagtggtca

SEQ ID NO: 22507 - DNA, 22 bp, Homo sapiens
  source 1..22: mol_type = genomic DNA
gtttccgtagtgtagtggtcat

SEQ ID NO: 22508 - DNA, 23 bp, Homo sapiens
  source 1..23: mol_type = genomic DNA
gtttccgtagtgtagtggtcatc

SEQ ID NO: 22509 - DNA, 24 bp, Homo sapiens
  source 1..24: mol_type = genomic DNA
gtttccgtagtgtagtggtcatca

SEQ ID NO: 22510 - DNA, 25 bp, Homo sapiens
  source 1..25: mol_type = genomic DNA
gtttccgtagtgtagtggtcatcac

SEQ ID NO: 22511 - DNA, 26 bp, Homo sapiens
  source 1..26: mol_type = genomic DNA
gtttccgtagtgtagtggtcatcacg

SEQ ID NO: 22512 - DNA, 27 bp, Homo sapiens
  source 1..27: mol_type = genomic DNA
gtttccgtagtgtagtggtcatcacgt

SEQ ID NO: 22513 - DNA, 28 bp, Homo sapiens
  source 1..28: mol_type = genomic DNA
gtttccgtagtgtagtggtcatcacgtt

SEQ ID NO: 22514 - DNA, 29 bp, Homo sapiens
  source 1..29: mol_type = genomic DNA
gtttccgtagtgtagtggtcatcacgttc

SEQ ID NO: 22515 - DNA, 30 bp, Homo sapiens
  source 1..30: mol_type = genomic DNA
gtttccgtagtgtagtggtcatcacgttcg

SEQ ID NO: 22516 - DNA, 31 bp, Homo sapiens
  source 1..31: mol_type = genomic DNA
gtttccgtagtgtagtggtcatcacgttcgc

SEQ ID NO: 22517 - DNA, 32 bp, Homo sapiens
  source 1..32: mol_type = genomic DNA
gtttccgtagtgtagtggtcatcacgttcgcc

SEQ ID NO: 22518 - DNA, 33 bp, Homo sapiens
  source 1..33: mol_type = genomic DNA
gtttccgtagtgtagtggtcatcacgttcgcct

SEQ ID NO: 22519 - DNA, 34 bp, Homo sapiens
  source 1..34: mol_type = genomic DNA
gtttccgtagtgtagtggtcatcacgttcgccta

SEQ ID NO: 22520 - DNA, 35 bp, Homo sapiens
  source 1..35: mol_type = genomic DNA
gtttccgtagtgtagtggtcatcacgttcgcctaa

SEQ ID NO: 22521 - DNA, 36 bp, Homo sapiens
  source 1..36: mol_type = genomic DNA
gtttccgtagtgtagtggtcatcacgttcgcctaac

SEQ ID NO: 22522 - DNA, 37 bp, Homo sapiens
  source 1..37: mol_type = genomic DNA
gtttccgtagtgtagtggtcatcacgttcgcctaaca

SEQ ID NO: 22523 - DNA, 20 bp, Homo sapiens
  source 1..20: mol_type = genomic DNA
gtttccgtagtgtagtggtt

SEQ ID NO: 22524 - DNA, 21 bp, Homo sapiens
  source 1..21: mol_type = genomic DNA
gtttccgtagtgtagtggtta

SEQ ID NO: 22525 - DNA, 22 bp, Homo sapiens
  source 1..22: mol_type = genomic DNA
gtttccgtagtgtagtggttat

SEQ ID NO: 22526 - DNA, 23 bp, Homo sapiens
  source 1..23: mol_type = genomic DNA
gtttccgtagtgtagtggttatc

SEQ ID NO: 22527 - DNA, 24 bp, Homo sapiens
  source 1..24: mol_type = genomic DNA
gtttccgtagtgtagtggttatca

SEQ ID NO: 22528 - DNA, 25 bp, Homo sapiens
  source 1..25: mol_type = genomic DNA
gtttccgtagtgtagtggttatcac

SEQ ID NO: 22529 - DNA, 26 bp, Homo sapiens
  source 1..26: mol_type = genomic DNA
gtttccgtagtgtagtggttatcacg

SEQ ID NO: 22530 - DNA, 27 bp, Homo sapiens
  source 1..27: mol_type = genomic DNA
gtttccgtagtgtagtggttatcacgt

SEQ ID NO: 22531 - DNA, 28 bp, Homo sapiens
  source 1..28: mol_type = genomic DNA
gtttccgtagtgtagtggttatcacgtt

SEQ ID NO: 22532 - DNA, 29 bp, Homo sapiens
  source 1..29: mol_type = genomic DNA
gtttccgtagtgtagtggttatcacgttc

SEQ ID NO: 22533 - DNA, 30 bp, Homo sapiens
  source 1..30: mol_type = genomic DNA
gtttccgtagtgtagtggttatcacgttcg

SEQ ID NO: 22534 - DNA, 31 bp, Homo sapiens
  source 1..31: mol_type = genomic DNA
gtttccgtagtgtagtggttatcacgttcgc

SEQ ID NO: 22535 - DNA, 32 bp, Homo sapiens
  source 1..32: mol_type = genomic DNA
gtttccgtagtgtagtggttatcacgttcgcc

SEQ ID NO: 22536 - DNA, 33 bp, Homo sapiens
  source 1..33: mol_type = genomic DNA
gtttccgtagtgtagtggttatcacgttcgcct

SEQ ID NO: 22537 - DNA, 34 bp, Homo sapiens
  source 1..34: mol_type = genomic DNA
gtttccgtagtgtagtggttatcacgttcgccta

SEQ ID NO: 22538 - DNA, 35 bp, Homo sapiens
  source 1..35: mol_type = genomic DNA
gtttccgtagtgtagtggttatcacgttcgcctaa

SEQ ID NO: 22539 - DNA, 36 bp, Homo sapiens
  source 1..36: mol_type = genomic DNA
gtttccgtagtgtagtggttatcacgttcgcctaac

SEQ ID NO: 22540 - DNA, 37 bp, Homo sapiens
  source 1..37: mol_type = genomic DNA
gtttccgtagtgtagtggttatcacgttcgcctaaca

SEQ ID NO: 22541 - DNA, 39 bp, Homo sapiens
  source 1..39: mol_type = genomic DNA
gtttccgtagtgtagtggttatcacgttcgcctaacacg

SEQ ID NO: 22542 - DNA, 34 bp, Homo sapiens
  source 1..34: mol_type = genomic DNA
gtttccgtagtgtagtggttatcacgttcgcctc

SEQ ID NO: 22543 - DNA, 35 bp, Homo sapiens
  source 1..35: mol_type = genomic DNA
gtttccgtagtgtagtggttatcacgttcgcctca

SEQ ID NO: 22544 - DNA, 36 bp, Homo sapiens
  source 1..36: mol_type = genomic DNA
gtttccgtagtgtagtggttatcacgttcgcctcac

SEQ ID NO: 22545 - DNA, 37 bp, Homo sapiens
  source 1..37: mol_type = genomic DNA
gtttccgtagtgtagtggttatcacgttcgcctcaca

SEQ ID NO: 22546 - DNA, 38 bp, Homo sapiens
  source 1..38: mol_type = genomic DNA
gtttccgtagtgtagtggttatcacgttcgcctcacac

SEQ ID NO: 22547 - DNA, 39 bp, Homo sapiens
  source 1..39: mol_type = genomic DNA
gtttccgtagtgtagtggttatcacgttcgcctcacacg

SEQ ID NO: 22548 - DNA, 40 bp, Homo sapiens
  source 1..40: mol_type = genomic DNA
gtttccgtagtgtagtggttatcacgttcgcctcacacgc

SEQ ID NO: 22549 - DNA, 41 bp, Homo sapiens
  source 1..41: mol_type = genomic DNA
gtttccgtagtgtagtggttatcacgttcgcctcacacgcg

SEQ ID NO: 22550 - DNA, 42 bp, Homo sapiens
  source 1..42: mol_type = genomic DNA
gtttccgtagtgtagtggttatcacgttcgcctcacacgcga

SEQ ID NO: 22551 - DNA, 43 bp, Homo sapiens
  source 1..43: mol_type = genomic DNA
gtttccgtagtgtagtggttatcacgttcgcctcacacgcgaa

SEQ ID NO: 22552 - DNA, 44 bp, Homo sapiens
  source 1..44: mol_type = genomic DNA
gtttccgtagtgtagtggttatcacgttcgcctcacacgcgaaa

SEQ ID NO: 22553 - DNA, 32 bp, Homo sapiens
  source 1..32: mol_type = genomic DNA
gtttccgtagtgtagtggttatcacgtttgcc

SEQ ID NO: 22554 - DNA, 33 bp, Homo sapiens
  source 1..33: mol_type = genomic DNA
gtttccgtagtgtagtggttatcacgtttgcct

SEQ ID NO: 22555 - DNA, 23 bp, Homo sapiens
  source 1..23: mol_type = genomic DNA
gtttccgtagtgtagtggttatt

SEQ ID NO: 22556 - DNA, 32 bp, Homo sapiens
  source 1..32: mol_type = genomic DNA
gtttccgtagtgtagtggttattatgttcgcc

SEQ ID NO: 22557 - DNA, 33 bp, Homo sapiens
  source 1..33: mol_type = genomic DNA
gtttccgtagtgtagtggttattatgttcgcct

SEQ ID NO: 22558 - DNA, 18 bp, Homo sapiens
  source 1..18: mol_type = genomic DNA
gtttccgtggtgtagtgg

SEQ ID NO: 22559 - DNA, 23 bp, Homo sapiens
  source 1..23: mol_type = genomic DNA
gtttccgtggtgtagtggttatc

SEQ ID NO: 22560 - DNA, 32 bp, Homo sapiens
  source 1..32: mol_type = genomic DNA
gtttccgtggtgtagtggttatcacattcgcc

SEQ ID NO: 22561 - DNA, 33 bp, Homo sapiens
  source 1..33: mol_type = genomic DNA
gtttccgtggtgtagtggttatcacattcgcct

SEQ ID NO: 22562 - DNA, 16 bp, Homo sapiens
  source 1..16: mol_type = genomic DNA
gtttgtgggtttaagt

SEQ ID NO: 22563 - DNA, 17 bp, Homo sapiens
  source 1..17: mol_type = genomic DNA
gtttgtgggtttaagtc

SEQ ID NO: 22564 - DNA, 18 bp, Homo sapiens
  source 1..18: mol_type = genomic DNA
gtttgtgggtttaagtcc

SEQ ID NO: 22565 - DNA, 19 bp, Homo sapiens
  source 1..19: mol_type = genomic DNA
gtttgtgggtttaagtccc

SEQ ID NO: 22566 - DNA, 20 bp, Homo sapiens
  source 1..20: mol_type = genomic DNA
gtttgtgggtttaagtccca

SEQ ID NO: 22567 - DNA, 22 bp, Homo sapiens
  source 1..22: mol_type = genomic DNA
gtttgtgggtttaagtcccatt

SEQ ID NO: 22568 - DNA, 26 bp, Homo sapiens
  source 1..26: mol_type = genomic DNA
gtttgtgggtttaagtcccattggtc

SEQ ID NO: 22569 - DNA, 27 bp, Homo sapiens
  source 1..27: mol_type = genomic DNA
gtttgtgggtttaagtcccattggtct

SEQ ID NO: 22570 - DNA, 28 bp, Homo sapiens
  source 1..28: mol_type = genomic DNA
gtttgtgggtttaagtcccattggtcta

SEQ ID NO: 22571 - DNA, 29 bp, Homo sapiens
  source 1..29: mol_type = genomic DNA
gtttgtgggtttaagtcccattggtctag

SEQ ID NO: 22572 - DNA, 30 bp, Homo sapiens
  source 1..30: mol_type = genomic DNA
gtttgtgggtttaagtcccattggtctagc

SEQ ID NO: 22573 - DNA, 31 bp, Homo sapiens
  source 1..31: mol_type = genomic DNA
gtttgtgggtttaagtcccattggtctagcc

SEQ ID NO: 22574 - DNA, 32 bp, Homo sapiens
  source 1..32: mol_type = genomic DNA
gtttgtgggtttaagtcccattggtctagcca

SEQ ID NO: 22575 - DNA, 27 bp, Homo sapiens
  source 1..27: mol_type = genomic DNA
gttttcacccaggcggcccgggttcga

SEQ ID NO: 22576 - DNA, 36 bp, Homo sapiens
  source 1..36: mol_type = genomic DNA
gttttcacccaggcggcccgggttcgactcccggtg

SEQ ID NO: 22577 - DNA, 37 bp, Homo sapiens
  source 1..37: mol_type = genomic DNA
gttttcacccaggcggcccgggttcgactcccggtgt

SEQ ID NO: 22578 - DNA, 38 bp, Homo sapiens
  source 1..38: mol_type = genomic DNA
gttttcacccaggcggcccgggttcgactcccggtgtg

SEQ ID NO: 22579 - DNA, 39 bp, Homo sapiens
  source 1..39: mol_type = genomic DNA
gttttcacccaggcggcccgggttcgactcccggtgtgg

SEQ ID NO: 22580 - DNA, 41 bp, Homo sapiens
  source 1..41: mol_type = genomic DNA
gttttcacccaggcggcccgggttcgactcccggtgtggga

SEQ ID NO: 22581 - DNA, 42 bp, Homo sapiens
  source 1..42: mol_type = genomic DNA
gttttcacccaggcggcccgggttcgactcccggtgtgggaa

SEQ ID NO: 22582 - DNA, 43 bp, Homo sapiens
  source 1..43: mol_type = genomic DNA
gttttcacccaggcggcccgggttcgactcccggtgtgggaac

SEQ ID NO: 22583 - DNA, 44 bp, Homo sapiens
  source 1..44: mol_type = genomic DNA
gttttcacccaggcggcccgggttcgactcccggtgtgggaacc

SEQ ID NO: 22584 - DNA, 45 bp, Homo sapiens
  source 1..45: mol_type = genomic DNA
gttttcacccaggcggcccgggttcgactcccggtgtgggaacca

SEQ ID NO: 22585 - DNA, 28 bp, Homo sapiens
  source 1..28: mol_type = genomic DNA
gttttgacaacattcaaaaaagagtacc

SEQ ID NO: 22586 - DNA, 29 bp, Homo sapiens
  source 1..29: mol_type = genomic DNA
gttttgacaacattcaaaaaagagtacca

SEQ ID NO: 22587 - DNA, 16 bp, Homo sapiens
  source 1..16: mol_type = genomic DNA
gttttgcagtccttac

SEQ ID NO: 22588 - DNA, 17 bp, Homo sapiens
  source 1..17: mol_type = genomic DNA
gttttgcagtccttacc

SEQ ID NO: 22589 - DNA, 18 bp, Homo sapiens
  source 1..18: mol_type = genomic DNA
gttttgcagtccttacca

SEQ ID NO: 22590 - DNA, 16 bp, Homo sapiens
  source 1..16: mol_type = genomic DNA
gtttttcatatcattg

SEQ ID NO: 22591 - DNA, 17 bp, Homo sapiens
  source 1..17: mol_type = genomic DNA
gtttttcatatcattgg

SEQ ID NO: 22592 - DNA, 18 bp, Homo sapiens
  source 1..18: mol_type = genomic DNA
gtttttcatatcattggt

SEQ ID NO: 22593 - DNA, 19 bp, Homo sapiens
  source 1..19: mol_type = genomic DNA
gtttttcatatcattggtc

SEQ ID NO: 22594 - DNA, 20 bp, Homo sapiens
  source 1..20: mol_type = genomic DNA
gtttttcatatcattggtcg

SEQ ID NO: 22595 - DNA, 21 bp, Homo sapiens
  source 1..21: mol_type = genomic DNA
gtttttcatatcattggtcgt

SEQ ID NO: 22596 - DNA, 22 bp, Homo sapiens
  source 1..22: mol_type = genomic DNA
gtttttcatatcattggtcgtg

SEQ ID NO: 22597 - DNA, 23 bp, Homo sapiens
  source 1..23: mol_type = genomic DNA
gtttttcatatcattggtcgtgg

SEQ ID NO: 22598 - DNA, 24 bp, Homo sapiens
  source 1..24: mol_type = genomic DNA
gtttttcatatcattggtcgtggt

SEQ ID NO: 22599 - DNA, 25 bp, Homo sapiens
  source 1..25: mol_type = genomic DNA
gtttttcatatcattggtcgtggtt

SEQ ID NO: 22600 - DNA, 26 bp, Homo sapiens
  source 1..26: mol_type = genomic DNA
gtttttcatatcattggtcgtggttg

SEQ ID NO: 22601 - DNA, 27 bp, Homo sapiens
  source 1..27: mol_type = genomic DNA
gtttttcatatcattggtcgtggttgt

SEQ ID NO: 22602 - DNA, 28 bp, Homo sapiens
  source 1..28: mol_type = genomic DNA
gtttttcatatcattggtcgtggttgta

SEQ ID NO: 22603 - DNA, 29 bp, Homo sapiens
  source 1..29: mol_type = genomic DNA
gtttttcatatcattggtcgtggttgtag

SEQ ID NO: 22604 - DNA, 30 bp, Homo sapiens
  source 1..30: mol_type = genomic DNA
gtttttcatatcattggtcgtggttgtagt

SEQ ID NO: 22605 - DNA, 31 bp, Homo sapiens
  source 1..31: mol_type = genomic DNA
gtttttcatatcattggtcgtggttgtagtc

SEQ ID NO: 22606 - DNA, 32 bp, Homo sapiens
  source 1..32: mol_type = genomic DNA
gtttttcatatcattggtcgtggttgtagtcc

SEQ ID NO: 22607 - DNA, 33 bp, Homo sapiens
  source 1..33: mol_type = genomic DNA
gtttttcatatcattggtcgtggttgtagtccg

SEQ ID NO: 22608 - DNA, 34 bp, Homo sapiens
  source 1..34: mol_type = genomic DNA
gtttttcatatcattggtcgtggttgtagtccgt

SEQ ID NO: 22609 - DNA, 35 bp, Homo sapiens
  source 1..35: mol_type = genomic DNA
gtttttcatatcattggtcgtggttgtagtccgtg

SEQ ID NO: 22610 - DNA, 36 bp, Homo sapiens
  source 1..36: mol_type = genomic DNA
gtttttcatatcattggtcgtggttgtagtccgtgc

SEQ ID NO: 22611 - DNA, 37 bp, Homo sapiens
  source 1..37: mol_type = genomic DNA
gtttttcatatcattggtcgtggttgtagtccgtgcg

SEQ ID NO: 22612 - DNA, 38 bp, Homo sapiens
  source 1..38: mol_type = genomic DNA
gtttttcatatcattggtcgtggttgtagtccgtgcga

SEQ ID NO: 22613 - DNA, 39 bp, Homo sapiens
  source 1..39: mol_type = genomic DNA
gtttttcatatcattggtcgtggttgtagtccgtgcgag

SEQ ID NO: 22614 - DNA, 40 bp, Homo sapiens
  source 1..40: mol_type = genomic DNA
gtttttcatatcattggtcgtggttgtagtccgtgcgaga

SEQ ID NO: 22615 - DNA, 41 bp, Homo sapiens
  source 1..41: mol_type = genomic DNA
gtttttcatatcattggtcgtggttgtagtccgtgcgagaa

SEQ ID NO: 22616 - DNA, 42 bp, Homo sapiens
  source 1..42: mol_type = genomic DNA
gtttttcatatcattggtcgtggttgtagtccgtgcgagaat

SEQ ID NO: 22617 - DNA, 43 bp, Homo sapiens
  source 1..43: mol_type = genomic DNA
gtttttcatatcattggtcgtggttgtagtccgtgcgagaata

SEQ ID NO: 22618 - DNA, 44 bp, Homo sapiens
  source 1..44: mol_type = genomic DNA
gtttttcatatcattggtcgtggttgtagtccgtgcgagaatac

SEQ ID NO: 22619 - DNA, 45 bp, Homo sapiens
  source 1..45: mol_type = genomic DNA
gtttttcatatcattggtcgtggttgtagtccgtgcgagaatacc

SEQ ID NO: 22620 - DNA, 46 bp, Homo sapiens
  source 1..46: mol_type = genomic DNA
gtttttcatatcattggtcgtggttgtagtccgtgcgagaatacca

SEQ ID NO: 22621 - DNA, 18 bp, Homo sapiens
  source 1..18: mol_type = genomic DNA
taaaacttaaaactttac

SEQ ID NO: 22622 - DNA, 19 bp, Homo sapiens
  source 1..19: mol_type = genomic DNA
taaaacttaaaactttaca

SEQ ID NO: 22623 - DNA, 22 bp, Homo sapiens
  source 1..22: mol_type = genomic DNA
taaaacttaaaactttacagtc

SEQ ID NO: 22624 - DNA, 23 bp, Homo sapiens
  source 1..23: mol_type = genomic DNA
taaaacttaaaactttacagtca

SEQ ID NO: 22625 - DNA, 24 bp, Homo sapiens
  source 1..24: mol_type = genomic DNA
taaaacttaaaactttacagtcag

SEQ ID NO: 22626 - DNA, 25 bp, Homo sapiens
  source 1..25: mol_type = genomic DNA
taaaacttaaaactttacagtcaga

SEQ ID NO: 22627 - DNA, 26 bp, Homo sapiens
  source 1..26: mol_type = genomic DNA
taaaacttaaaactttacagtcagag

SEQ ID NO: 22628 - DNA, 27 bp, Homo sapiens
  source 1..27: mol_type = genomic DNA
taaaacttaaaactttacagtcagagg

SEQ ID NO: 22629 - DNA, 28 bp, Homo sapiens
  source 1..28: mol_type = genomic DNA
taaaacttaaaactttacagtcagaggt

SEQ ID NO: 22630 - DNA, 29 bp, Homo sapiens
  source 1..29: mol_type = genomic DNA
taaaacttaaaactttacagtcagaggtt

SEQ ID NO: 22631 - DNA, 30 bp, Homo sapiens
  source 1..30: mol_type = genomic DNA
taaaacttaaaactttacagtcagaggttc

SEQ ID NO: 22632 - DNA, 31 bp, Homo sapiens
  source 1..31: mol_type = genomic DNA
taaaacttaaaactttacagtcagaggttca

SEQ ID NO: 22633 - DNA, 39 bp, Homo sapiens
  source 1..39: mol_type = genomic DNA
taaaacttaaaactttacagtcagaggttcaattcctct

SEQ ID NO: 22634 - DNA, 21 bp, Homo sapiens
  source 1..21: mol_type = genomic DNA
taaaactttacagtcagaggt

SEQ ID NO: 22635 - DNA, 22 bp, Homo sapiens
  source 1..22: mol_type = genomic DNA
taaaactttacagtcagaggtt

SEQ ID NO: 22636 - DNA, 23 bp, Homo sapiens
  source 1..23: mol_type = genomic DNA
taaaactttacagtcagaggttc

SEQ ID NO: 22637 - DNA, 28 bp, Homo sapiens
  source 1..28: mol_type = genomic DNA
taaaactttacagtcagaggttcaattc

SEQ ID NO: 22638 - DNA, 34 bp, Homo sapiens
  source 1..34: mol_type = genomic DNA
taaaactttacagtcagaggttcaattcctcttc

SEQ ID NO: 22639 - DNA, 19 bp, Homo sapiens
  source 1..19: mol_type = genomic DNA
taaaagagttactttgata

SEQ ID NO: 22640 - DNA, 23 bp, Homo sapiens
  source 1..23: mol_type = genomic DNA
taaaagagttactttgatagagt

SEQ ID NO: 22641 - DNA, 36 bp, Homo sapiens
  source 1..36: mol_type = genomic DNA
taaaagagttactttgatagagtaaataataggagc

SEQ ID NO: 22642 - DNA, 37 bp, Homo sapiens
  source 1..37: mol_type = genomic DNA
taaaaggttggtggttcgaacccacccagaggcgcca

SEQ ID NO: 22643 - DNA, 18 bp, Homo sapiens
  source 1..18: mol_type = genomic DNA
taaaatggctgagtgaag

SEQ ID NO: 22644 - DNA, 26 bp, Homo sapiens
  source 1..26: mol_type = genomic DNA
taaaatggctgagtgaagcattggac

SEQ ID NO: 22645 - DNA, 27 bp, Homo sapiens
  source 1..27: mol_type = genomic DNA
taaaatggctgagtgaagcattggact

SEQ ID NO: 22646 - DNA, 28 bp, Homo sapiens
  source 1..28: mol_type = genomic DNA
taaaatggctgagtgaagcattggactg

SEQ ID NO: 22647 - DNA, 29 bp, Homo sapiens
  source 1..29: mol_type = genomic DNA
taaaatggctgagtgaagcattggactgt

SEQ ID NO: 22648 - DNA, 30 bp, Homo sapiens
  source 1..30: mol_type = genomic DNA
taaaatggctgagtgaagcattggactgta

SEQ ID NO: 22649 - DNA, 31 bp, Homo sapiens
  source 1..31: mol_type = genomic DNA
taaaatggctgagtgaagcattggactgtaa

SEQ ID NO: 22650 - DNA, 34 bp, Homo sapiens
  source 1..34: mol_type = genomic DNA
taaaatggctgagtgaagcattggactgtaaatc

SEQ ID NO: 22651 - DNA, 35 bp, Homo sapiens
  source 1..35: mol_type = genomic DNA
taaaatggctgagtgaagcattggactgtaaatct

SEQ ID NO: 22652 - DNA, 18 bp, Homo sapiens
  source 1..18: mol_type = genomic DNA
taaacaaaacgaatgatt

SEQ ID NO: 22653 - DNA, 21 bp, Homo sapiens
  source 1..21: mol_type = genomic DNA
taaacaaaacgaatgatttcg

SEQ ID NO: 22654 - DNA, 23 bp, Homo sapiens
  source 1..23: mol_type = genomic DNA
taaacaaaacgaatgatttcgac

SEQ ID NO: 22655 - DNA, 24 bp, Homo sapiens
  source 1..24: mol_type = genomic DNA
taaacaaaacgaatgatttcgact

SEQ ID NO: 22656 - DNA, 25 bp, Homo sapiens
  source 1..25: mol_type = genomic DNA
taaacaaaacgaatgatttcgactc

SEQ ID NO: 22657 - DNA, 26 bp, Homo sapiens
  source 1..26: mol_type = genomic DNA
taaacaaaacgaatgatttcgactca

SEQ ID NO: 22658 - DNA, 27 bp, Homo sapiens
  source 1..27: mol_type = genomic DNA
taaacaaaacgaatgatttcgactcat

SEQ ID NO: 22659 - DNA, 28 bp, Homo sapiens
  source 1..28: mol_type = genomic DNA
taaacaaaacgaatgatttcgactcatt

SEQ ID NO: 22660 - DNA, 29 bp, Homo sapiens
  source 1..29: mol_type = genomic DNA
taaacaaaacgaatgatttcgactcatta

SEQ ID NO: 22661 - DNA, 31 bp, Homo sapiens
  source 1..31: mol_type = genomic DNA
taaacaaaacgaatgatttcgactcattaaa

SEQ ID NO: 22662 - DNA, 32 bp, Homo sapiens
  source 1..32: mol_type = genomic DNA
taaacaaaacgaatgatttcgactcattaaat

SEQ ID NO: 22663 - DNA, 33 bp, Homo sapiens
  source 1..33: mol_type = genomic DNA
taaacaaaacgaatgatttcgactcattaaatt

SEQ ID NO: 22664 - DNA, 36 bp, Homo sapiens
  source 1..36: mol_type = genomic DNA
taaacaaaacgaatgatttcgactcattaaattatg

SEQ ID NO: 22665 - DNA, 37 bp, Homo sapiens
  source 1..37: mol_type = genomic DNA
taaacaaaacgaatgatttcgactcattaaattatga

SEQ ID NO: 22666 - DNA, 38 bp, Homo sapiens
  source 1..38: mol_type = genomic DNA
taaacaaaacgaatgatttcgactcattaaattatgat

SEQ ID NO: 22667 - DNA, 39 bp, Homo sapiens
  source 1..39: mol_type = genomic DNA
taaacaaaacgaatgatttcgactcattaaattatgata

SEQ ID NO: 22668 - DNA, 41 bp, Homo sapiens
  source 1..41: mol_type = genomic DNA
taaacaaaacgaatgatttcgactcattaaattatgataat

SEQ ID NO: 22669 - DNA, 42 bp, Homo sapiens
  source 1..42: mol_type = genomic DNA
taaacaaaacgaatgatttcgactcattaaattatgataatc

SEQ ID NO: 22670 - DNA, 21 bp, Homo sapiens
  source 1..21: mol_type = genomic DNA
taaacaggagatcctgggttc

SEQ ID NO: 22671 - DNA, 22 bp, Homo sapiens
  source 1..22: mol_type = genomic DNA
taaacaggagatcctgggttcg

SEQ ID NO: 22672 - DNA, 23 bp, Homo sapiens
  source 1..23: mol_type = genomic DNA
taaacaggagatcctgggttcga

SEQ ID NO: 22673 - DNA, 25 bp, Homo sapiens
  source 1..25: mol_type = genomic DNA
taaacaggagatcctgggttcgaat

SEQ ID NO: 22674 - DNA, 31 bp, Homo sapiens
  source 1..31: mol_type = genomic DNA
taaacaggagatcctgggttcgaatcccagc

SEQ ID NO: 22675 - DNA, 32 bp, Homo sapiens
  source 1..32: mol_type = genomic DNA
taaacaggagatcctgggttcgaatcccagcg

SEQ ID NO: 22676 - DNA, 38 bp, Homo sapiens
  source 1..38: mol_type = genomic DNA
taaacaggagatcctgggttcgaatcccagcgaggcct

SEQ ID NO: 22677 - DNA, 35 bp, Homo sapiens
  source 1..35: mol_type = genomic DNA
taaacaggagatcctgggttcgaatcccagcgggg

SEQ ID NO: 22678 - DNA, 36 bp, Homo sapiens
  source 1..36: mol_type = genomic DNA
taaacaggagatcctgggttcgaatcccagcggggc

SEQ ID NO: 22679 - DNA, 37 bp, Homo sapiens
  source 1..37: mol_type = genomic DNA
taaacaggagatcctgggttcgaatcccagcggggcc

SEQ ID NO: 22680 - DNA, 38 bp, Homo sapiens
  source 1..38: mol_type = genomic DNA
taaacaggagatcctgggttcgaatcccagcggggcct

SEQ ID NO: 22681 - DNA, 39 bp, Homo sapiens
  source 1..39: mol_type = genomic DNA
taaacaggagatcctgggttcgaatcccagcggggcctc

SEQ ID NO: 22682 - DNA, 40 bp, Homo sapiens
  source 1..40: mol_type = genomic DNA
taaacaggagatcctgggttcgaatcccagcggggcctcc

SEQ ID NO: 22683 - DNA, 41 bp, Homo sapiens
  source 1..41: mol_type = genomic DNA
taaacaggagatcctgggttcgaatcccagcggggcctcca

SEQ ID NO: 22684 - DNA, 34 bp, Homo sapiens
  source 1..34: mol_type = genomic DNA
taaacaggagatcctgggttcgaatcccagcggt

SEQ ID NO: 22685 - DNA, 35 bp, Homo sapiens
  source 1..35: mol_type = genomic DNA
taaacaggagatcctgggttcgaatcccagcggtg

SEQ ID NO: 22686 - DNA, 36 bp, Homo sapiens
  source 1..36: mol_type = genomic DNA
taaacaggagatcctgggttcgaatcccagcggtgc

SEQ ID NO: 22687 - DNA, 37 bp, Homo sapiens
  source 1..37: mol_type = genomic DNA
taaacaggagatcctgggttcgaatcccagcggtgcc

SEQ ID NO: 22688 - DNA, 38 bp, Homo sapiens
  source 1..38: mol_type = genomic DNA
taaacaggagatcctgggttcgaatcccagcggtgcct

SEQ ID NO: 22689 - DNA, 39 bp, Homo sapiens
  source 1..39: mol_type = genomic DNA
taaacaggagatcctgggttcgaatcccagcggtgcctc

SEQ ID NO: 22690 - DNA, 40 bp, Homo sapiens
  source 1..40: mol_type = genomic DNA
taaacaggagatcctgggttcgaatcccagcggtgcctcc

SEQ ID NO: 22691 - DNA, 41 bp, Homo sapiens
  source 1..41: mol_type = genomic DNA
taaacaggagatcctgggttcgaatcccagcggtgcctcca

SEQ ID NO: 22692 - DNA, 24 bp, Homo sapiens
  source 1..24: mol_type = genomic DNA
taaacaggagatcctgggttcgac

SEQ ID NO: 22693 - DNA, 38 bp, Homo sapiens
  source 1..38: mol_type = genomic DNA
taaacaggagatcctgggttcgactcccagcggggcct

SEQ ID NO: 22694 - DNA, 16 bp, Homo sapiens
  source 1..16: mol_type = genomic DNA
taaaccaggggtcgcg

SEQ ID NO: 22695 - DNA, 17 bp, Homo sapiens
  source 1..17: mol_type = genomic DNA
taaaccaggggtcgcga

SEQ ID NO: 22696 - DNA, 20 bp, Homo sapiens
  source 1..20: mol_type = genomic DNA
taaaccaggggtcgcgagtt

SEQ ID NO: 22697 - DNA, 21 bp, Homo sapiens
  source 1..21: mol_type = genomic DNA
taaaccaggggtcgcgagttc

SEQ ID NO: 22698 - DNA, 22 bp, Homo sapiens
  source 1..22: mol_type = genomic DNA
taaaccaggggtcgcgagttca

SEQ ID NO: 22699 - DNA, 23 bp, Homo sapiens
  source 1..23: mol_type = genomic DNA
taaaccaggggtcgcgagttcaa

SEQ ID NO: 22700 - DNA, 25 bp, Homo sapiens
  source 1..25: mol_type = genomic DNA
taaaccaggggtcgcgagttcaaat

SEQ ID NO: 22701 - DNA, 26 bp, Homo sapiens
  source 1..26: mol_type = genomic DNA
taaaccaggggtcgcgagttcaaatc

SEQ ID NO: 22702 - DNA, 35 bp, Homo sapiens
  source 1..35: mol_type = genomic DNA
taaaccaggggtcgcgagttcaaatctcgctgggg

SEQ ID NO: 22703 - DNA, 36 bp, Homo sapiens
  source 1..36: mol_type = genomic DNA
taaaccaggggtcgcgagttcaaatctcgctggggc

SEQ ID NO: 22704 - DNA, 38 bp, Homo sapiens
  source 1..38: mol_type = genomic DNA
taaaccaggggtcgcgagttcaaatctcgctggggcct

SEQ ID NO: 22705 - DNA, 40 bp, Homo sapiens
  source 1..40: mol_type = genomic DNA
taaaccaggggtcgcgagttcaaatctcgctggggcctcc

SEQ ID NO: 22706 - DNA, 41 bp, Homo sapiens
  source 1..41: mol_type = genomic DNA
taaaccaggggtcgcgagttcaaatctcgctggggcctcca

SEQ ID NO: 22707 - DNA, 38 bp, Homo sapiens
  source 1..38: mol_type = genomic DNA
taaaccaggggtcgcgagttcaattctcgctggggcct

SEQ ID NO: 22708 - DNA, 38 bp, Homo sapiens
  source 1..38: mol_type = genomic DNA
taaaccaggggtcgcgagttcgatcctcgctggggcct

SEQ ID NO: 22709 - DNA, 17 bp, Homo sapiens
  source 1..17: mol_type = genomic DNA
taaacccccttatttct

SEQ ID NO: 22710 - DNA, 18 bp, Homo sapiens
  source 1..18: mol_type = genomic DNA
taaacccccttatttcta

SEQ ID NO: 22711 - DNA, 19 bp, Homo sapiens
  source 1..19: mol_type = genomic DNA
taaacccccttatttctac

SEQ ID NO: 22712 - DNA, 20 bp, Homo sapiens
  source 1..20: mol_type = genomic DNA
taaacccccttatttctacc

SEQ ID NO: 22713 - DNA, 21 bp, Homo sapiens
  source 1..21: mol_type = genomic DNA
taaacccccttatttctacca

SEQ ID NO: 22714 - DNA, 19 bp, Homo sapiens
  source 1..19: mol_type = genomic DNA
taaaccgaagatcacgggt

SEQ ID NO: 22715 - DNA, 22 bp, Homo sapiens
  source 1..22: mol_type = genomic DNA
taaaccgaagatcacgggttcg

SEQ ID NO: 22716 - DNA, 23 bp, Homo sapiens
  source 1..23: mol_type = genomic DNA
taaaccgaagatcacgggttcga

SEQ ID NO: 22717 - DNA, 38 bp, Homo sapiens
  source 1..38: mol_type = genomic DNA
taaaccgaagatcacgggttcgaaccccgtccgtgcct

SEQ ID NO: 22718 - DNA, 39 bp, Homo sapiens
  source 1..39: mol_type = genomic DNA
taaaccgaagatcacgggttcgaaccccgtccgtgcctc

SEQ ID NO: 22719 - DNA, 40 bp, Homo sapiens
  source 1..40: mol_type = genomic DNA
taaaccgaagatcacgggttcgaaccccgtccgtgcctcc

SEQ ID NO: 22720 - DNA, 41 bp, Homo sapiens
  source 1..41: mol_type = genomic DNA
taaaccgaagatcacgggttcgaaccccgtccgtgcctcca

SEQ ID NO: 22721 - DNA, 19 bp, Homo sapiens
  source 1..19: mol_type = genomic DNA
taaaccgaagatcgcgggt

SEQ ID NO: 22722 - DNA, 22 bp, Homo sapiens
  source 1..22: mol_type = genomic DNA
taaaccgaagatcgcgggttcg

SEQ ID NO: 22723 - DNA, 23 bp, Homo sapiens
  source 1..23: mol_type = genomic DNA
taaaccgaagatcgcgggttcga

SEQ ID NO: 22724 - DNA, 25 bp, Homo sapiens
  source 1..25: mol_type = genomic DNA
taaaccgaagatcgcgggttcgaac

SEQ ID NO: 22725 - DNA, 26 bp, Homo sapiens
  source 1..26: mol_type = genomic DNA
taaaccgaagatcgcgggttcgaacc

SEQ ID NO: 22726 - DNA, 27 bp, Homo sapiens
  source 1..27: mol_type = genomic DNA
taaaccgaagatcgcgggttcgaaccc

SEQ ID NO: 22727 - DNA, 38 bp, Homo sapiens
  source 1..38: mol_type = genomic DNA
taaaccgaagatcgcgggttcgaaccccgtccgtgcct

SEQ ID NO: 22728 - DNA, 39 bp, Homo sapiens
  source 1..39: mol_type = genomic DNA
taaaccgaagatcgcgggttcgaaccccgtccgtgcctc

SEQ ID NO: 22729 - DNA, 40 bp, Homo sapiens
  source 1..40: mol_type = genomic DNA
taaaccgaagatcgcgggttcgaaccccgtccgtgcctcc

SEQ ID NO: 22730 - DNA, 41 bp, Homo sapiens
  source 1..41: mol_type = genomic DNA
taaaccgaagatcgcgggttcgaaccccgtccgtgcctcca

SEQ ID NO: 22731 - DNA, 16 bp, Homo sapiens
  source 1..16: mol_type = genomic DNA
taaaccggagatgaaa

SEQ ID NO: 22732 - DNA, 17 bp, Homo sapiens
  source 1..17: mol_type = genomic DNA
taaaccggagatgaaaa

SEQ ID NO: 22733 - DNA, 18 bp, Homo sapiens
  source 1..18: mol_type = genomic DNA
taaaccggagatgaaaac

SEQ ID NO: 22734 - DNA, 19 bp, Homo sapiens
  source 1..19: mol_type = genomic DNA
taaaccggagatgaaaacc

SEQ ID NO: 22735 - DNA, 20 bp, Homo sapiens
  source 1..20: mol_type = genomic DNA
taaaccggagatgaaaacct

SEQ ID NO: 22736 - DNA, 21 bp, Homo sapiens
  source 1..21: mol_type = genomic DNA
taaaccggagatgaaaacctt

SEQ ID NO: 22737 - DNA, 22 bp, Homo sapiens
  source 1..22: mol_type = genomic DNA
taaaccggagatgaaaaccttt

SEQ ID NO: 22738 - DNA, 23 bp, Homo sapiens
  source 1..23: mol_type = genomic DNA
taaaccggagatgaaaacctttt

SEQ ID NO: 22739 - DNA, 24 bp, Homo sapiens
  source 1..24: mol_type = genomic DNA
taaaccggagatgaaaaccttttt

SEQ ID NO: 22740 - DNA, 25 bp, Homo sapiens
  source 1..25: mol_type = genomic DNA
taaaccggagatgaaaacctttttc

SEQ ID NO: 22741 - DNA, 29 bp, Homo sapiens
  source 1..29: mol_type = genomic DNA
taaaccggagatgaaaacctttttccaag

SEQ ID NO: 22742 - DNA, 30 bp, Homo sapiens
  source 1..30: mol_type = genomic DNA
taaaccggagatgaaaacctttttccaagg

SEQ ID NO: 22743 - DNA, 31 bp, Homo sapiens
  source 1..31: mol_type = genomic DNA
taaaccggagatgaaaacctttttccaagga

SEQ ID NO: 22744 - DNA, 32 bp, Homo sapiens
  source 1..32: mol_type = genomic DNA
taaaccggagatgaaaacctttttccaaggac

SEQ ID NO: 22745 - DNA, 33 bp, Homo sapiens
  source 1..33: mol_type = genomic DNA
taaaccggagatgaaaacctttttccaaggaca

SEQ ID NO: 22746 - DNA, 34 bp, Homo sapiens
  source 1..34: mol_type = genomic DNA
taaaccggagatgaaaacctttttccaaggacac

SEQ ID NO: 22747 - DNA, 35 bp, Homo sapiens
  source 1..35: mol_type = genomic DNA
taaaccggagatgaaaacctttttccaaggacacc

SEQ ID NO: 22748 - DNA, 36 bp, Homo sapiens
  source 1..36: mol_type = genomic DNA
taaaccggagatgaaaacctttttccaaggacacca

SEQ ID NO: 22749 - DNA, 16 bp, Homo sapiens
  source 1..16: mol_type = genomic DNA
taaagacaggggttag

SEQ ID NO: 22750 - DNA, 17 bp, Homo sapiens
  source 1..17: mol_type = genomic DNA
taaagacaggggttagg

SEQ ID NO: 22751 - DNA, 18 bp, Homo sapiens
  source 1..18: mol_type = genomic DNA
taaagacaggggttaggc

SEQ ID NO: 22752 - DNA, 19 bp, Homo sapiens
  source 1..19: mol_type = genomic DNA
taaagacaggggttaggcc

SEQ ID NO: 22753 - DNA, 20 bp, Homo sapiens
  source 1..20: mol_type = genomic DNA
taaagacaggggttaggcct

SEQ ID NO: 22754 - DNA, 21 bp, Homo sapiens
  source 1..21: mol_type = genomic DNA
taaagacaggggttaggcctc

SEQ ID NO: 22755 - DNA, 22 bp, Homo sapiens
  source 1..22: mol_type = genomic DNA
taaagacaggggttaggcctct

SEQ ID NO: 22756 - DNA, 23 bp, Homo sapiens
  source 1..23: mol_type = genomic DNA
taaagacaggggttaggcctctt

SEQ ID NO: 22757 - DNA, 24 bp, Homo sapiens
  source 1..24: mol_type = genomic DNA
taaagacaggggttaggcctcttt

SEQ ID NO: 22758 - DNA, 25 bp, Homo sapiens
  source 1..25: mol_type = genomic DNA
taaagacaggggttaggcctctttt

SEQ ID NO: 22759 - DNA, 26 bp, Homo sapiens
  source 1..26: mol_type = genomic DNA
taaagacaggggttaggcctcttttt

SEQ ID NO: 22760 - DNA, 27 bp, Homo sapiens
  source 1..27: mol_type = genomic DNA
taaagacaggggttaggcctcttttta

SEQ ID NO: 22761 - DNA, 29 bp, Homo sapiens
  source 1..29: mol_type = genomic DNA
taaagacaggggttaggcctctttttacc

SEQ ID NO: 22762 - DNA, 30 bp, Homo sapiens
  source 1..30: mol_type = genomic DNA
taaagacaggggttaggcctctttttacca

SEQ ID NO: 22763 - DNA, 32 bp, Homo sapiens
  source 1..32: mol_type = genomic DNA
taaagacaggggttaggcctctttttaccacc

SEQ ID NO: 22764 - DNA, 33 bp, Homo sapiens
  source 1..33: mol_type = genomic DNA
taaagacaggggttaggcctctttttaccacca

SEQ ID NO: 22765 - DNA, 16 bp, Homo sapiens
  source 1..16: mol_type = genomic DNA
taaagactttttctct

SEQ ID NO: 22766 - DNA, 17 bp, Homo sapiens
  source 1..17: mol_type = genomic DNA
taaagactttttctctg

SEQ ID NO: 22767 - DNA, 18 bp, Homo sapiens
  source 1..18: mol_type = genomic DNA
taaagactttttctctga

SEQ ID NO: 22768 - DNA, 19 bp, Homo sapiens
  source 1..19: mol_type = genomic DNA
taaagactttttctctgac

SEQ ID NO: 22769 - DNA, 20 bp, Homo sapiens
  source 1..20: mol_type = genomic DNA
taaagactttttctctgacc

SEQ ID NO: 22770 - DNA, 21 bp, Homo sapiens
  source 1..21: mol_type = genomic DNA
taaagactttttctctgacca

SEQ ID NO: 22771 - DNA, 16 bp, Homo sapiens
  source 1..16: mol_type = genomic DNA
taaagattaagagaac

SEQ ID NO: 22772 - DNA, 17 bp, Homo sapiens
  source 1..17: mol_type = genomic DNA
taaagattaagagaacc

SEQ ID NO: 22773 - DNA, 18 bp, Homo sapiens
  source 1..18: mol_type = genomic DNA
taaagattaagagaacca

SEQ ID NO: 22774 - DNA, 19 bp, Homo sapiens
  source 1..19: mol_type = genomic DNA
taaagattaagagaaccaa

SEQ ID NO: 22775 - DNA, 20 bp, Homo sapiens
  source 1..20: mol_type = genomic DNA
taaagattaagagaaccaac

SEQ ID NO: 22776 - DNA, 21 bp, Homo sapiens
  source 1..21: mol_type = genomic DNA
taaagattaagagaaccaaca

SEQ ID NO: 22777 - DNA, 22 bp, Homo sapiens
  source 1..22: mol_type = genomic DNA
taaagattaagagaaccaacac

SEQ ID NO: 22778 - DNA, 23 bp, Homo sapiens
  source 1..23: mol_type = genomic DNA
taaagattaagagaaccaacacc

SEQ ID NO: 22779 - DNA, 24 bp, Homo sapiens
  source 1..24: mol_type = genomic DNA
taaagattaagagaaccaacacct

SEQ ID NO: 22780 - DNA, 25 bp, Homo sapiens
  source 1..25: mol_type = genomic DNA
taaagattaagagaaccaacacctc

SEQ ID NO: 22781 - DNA, 26 bp, Homo sapiens
  source 1..26: mol_type = genomic DNA
taaagattaagagaaccaacacctct

SEQ ID NO: 22782 - DNA, 27 bp, Homo sapiens
  source 1..27: mol_type = genomic DNA
taaagattaagagaaccaacacctctt

SEQ ID NO: 22783 - DNA, 28 bp, Homo sapiens
  source 1..28: mol_type = genomic DNA
taaagattaagagaaccaacacctcttt

SEQ ID NO: 22784 - DNA, 29 bp, Homo sapiens
  source 1..29: mol_type = genomic DNA
taaagattaagagaaccaacacctcttta

SEQ ID NO: 22785 - DNA, 30 bp, Homo sapiens
  source 1..30: mol_type = genomic DNA
taaagattaagagaaccaacacctctttac

SEQ ID NO: 22786 - DNA, 31 bp, Homo sapiens
  source 1..31: mol_type = genomic DNA
taaagattaagagaaccaacacctctttaca

SEQ ID NO: 22787 - DNA, 32 bp, Homo sapiens
  source 1..32: mol_type = genomic DNA
taaagattaagagaaccaacacctctttacag

SEQ ID NO: 22788 - DNA, 33 bp, Homo sapiens
  source 1..33: mol_type = genomic DNA
taaagattaagagaaccaacacctctttacagt

SEQ ID NO: 22789 - DNA, 34 bp, Homo sapiens
  source 1..34: mol_type = genomic DNA
taaagattaagagaaccaacacctctttacagtg

SEQ ID NO: 22790 - DNA, 35 bp, Homo sapiens
  source 1..35: mol_type = genomic DNA
taaagattaagagaaccaacacctctttacagtga

SEQ ID NO: 22791 - DNA, 36 bp, Homo sapiens
  source 1..36: mol_type = genomic DNA
taaagattaagagaaccaacacctctttacagtgac

SEQ ID NO: 22792 - DNA, 37 bp, Homo sapiens
  source 1..37: mol_type = genomic DNA
taaagattaagagaaccaacacctctttacagtgacc

SEQ ID NO: 22793 - DNA, 38 bp, Homo sapiens
  source 1..38: mol_type = genomic DNA
taaagattaagagaaccaacacctctttacagtgacca

SEQ ID NO: 22794 - DNA, 26 bp, Homo sapiens
  source 1..26: mol_type = genomic DNA
taaaggataacagctatccattggtc

SEQ ID NO: 22795 - DNA, 27 bp, Homo sapiens
  source 1..27: mol_type = genomic DNA
taaaggataacagctatccattggtct

SEQ ID NO: 22796 - DNA, 28 bp, Homo sapiens
  source 1..28: mol_type = genomic DNA
taaaggataacagctatccattggtctt

SEQ ID NO: 22797 - DNA, 29 bp, Homo sapiens
  source 1..29: mol_type = genomic DNA
taaaggataacagctatccattggtctta

SEQ ID NO: 22798 - DNA, 30 bp, Homo sapiens
  source 1..30: mol_type = genomic DNA
taaaggataacagctatccattggtcttag

SEQ ID NO: 22799 - DNA, 36 bp, Homo sapiens
  source 1..36: mol_type = genomic DNA
taaaggataacagctatccattggtcttaggcccca

SEQ ID NO: 22800 - DNA, 16 bp, Homo sapiens
  source 1..16: mol_type = genomic DNA
taaaggtccctggttc

SEQ ID NO: 22801 - DNA, 32 bp, Homo sapiens
  source 1..32: mol_type = genomic DNA
taaaggtccctggttcgatcccgggtttcggc

SEQ ID NO: 22802 - DNA, 34 bp, Homo sapiens
  source 1..34: mol_type = genomic DNA
taaaggtccctggttcgatcccgggtttcggcac

SEQ ID NO: 22803 - DNA, 35 bp, Homo sapiens
  source 1..35: mol_type = genomic DNA
taaaggtccctggttcgatcccgggtttcggcacc

SEQ ID NO: 22804 - DNA, 16 bp, Homo sapiens
  source 1..16: mol_type = genomic DNA
taaagtggctgatttg

SEQ ID NO: 22805 - DNA, 17 bp, Homo sapiens
  source 1..17: mol_type = genomic DNA
taaagtggctgatttgc

SEQ ID NO: 22806 - DNA, 16 bp, Homo sapiens
  source 1..16: mol_type = genomic DNA
taaataagctatcggg

SEQ ID NO: 22807 - DNA, 17 bp, Homo sapiens
  source 1..17: mol_type = genomic DNA
taaataagctatcgggc

SEQ ID NO: 22808 - DNA, 18 bp, Homo sapiens
  source 1..18: mol_type = genomic DNA
taaataagctatcgggcc

SEQ ID NO: 22809 - DNA, 19 bp, Homo sapiens
  source 1..19: mol_type = genomic DNA
taaataagctatcgggccc

SEQ ID NO: 22810 - DNA, 20 bp, Homo sapiens
  source 1..20: mol_type = genomic DNA
taaataagctatcgggccca

SEQ ID NO: 22811 - DNA, 21 bp, Homo sapiens
  source 1..21: mol_type = genomic DNA
taaataagctatcgggcccat

SEQ ID NO: 22812 - DNA, 22 bp, Homo sapiens
  source 1..22: mol_type = genomic DNA
taaataagctatcgggcccata

SEQ ID NO: 22813 - DNA, 23 bp, Homo sapiens
  source 1..23: mol_type = genomic DNA
taaataagctatcgggcccatac

SEQ ID NO: 22814 - DNA, 24 bp, Homo sapiens
  source 1..24: mol_type = genomic DNA
taaataagctatcgggcccatacc

SEQ ID NO: 22815 - DNA, 25 bp, Homo sapiens
  source 1..25: mol_type = genomic DNA
taaataagctatcgggcccataccc

SEQ ID NO: 22816 - DNA, 26 bp, Homo sapiens
  source 1..26: mol_type = genomic DNA
taaataagctatcgggcccatacccc

SEQ ID NO: 22817 - DNA, 27 bp, Homo sapiens
  source 1..27: mol_type = genomic DNA
taaataagctatcgggcccataccccg

SEQ ID NO: 22818 - DNA, 28 bp, Homo sapiens
  source 1..28: mol_type = genomic DNA
taaataagctatcgggcccataccccga

SEQ ID NO: 22819 - DNA, 29 bp, Homo sapiens
  source 1..29: mol_type = genomic DNA
taaataagctatcgggcccataccccgaa

SEQ ID NO: 22820 - DNA, 30 bp, Homo sapiens
  source 1..30: mol_type = genomic DNA
taaataagctatcgggcccataccccgaaa

SEQ ID NO: 22821 - DNA, 31 bp, Homo sapiens
  source 1..31: mol_type = genomic DNA
taaataagctatcgggcccataccccgaaaa

SEQ ID NO: 22822 - DNA, 33 bp, Homo sapiens
  source 1..33: mol_type = genomic DNA
taaataagctatcgggcccataccccgaaaatg

SEQ ID NO: 22823 - DNA, 34 bp, Homo sapiens
  source 1..34: mol_type = genomic DNA
taaataagctatcgggcccataccccgaaaatgt

SEQ ID NO: 22824 - DNA, 35 bp, Homo sapiens
  source 1..35: mol_type = genomic DNA
taaataagctatcgggcccataccccgaaaatgtt

SEQ ID NO: 22825 - DNA, 36 bp, Homo sapiens
  source 1..36: mol_type = genomic DNA
taaataagctatcgggcccataccccgaaaatgttg

SEQ ID NO: 22826 - DNA, 39 bp, Homo sapiens
  source 1..39: mol_type = genomic DNA
taaataagctatcgggcccataccccgaaaatgttggtt

SEQ ID NO: 22827 - DNA, 40 bp, Homo sapiens
  source 1..40: mol_type = genomic DNA
taaataagctatcgggcccataccccgaaaatgttggtta

SEQ ID NO: 22828 - DNA, 41 bp, Homo sapiens
  source 1..41: mol_type = genomic DNA
taaataagctatcgggcccataccccgaaaatgttggttat

SEQ ID NO: 22829 - DNA, 16 bp, Homo sapiens
  source 1..16: mol_type = genomic DNA
taaataataggagctt

SEQ ID NO: 22830 - DNA, 17 bp, Homo sapiens
  source 1..17: mol_type = genomic DNA
taaataataggagctta

SEQ ID NO: 22831 - DNA, 18 bp, Homo sapiens
  source 1..18: mol_type = genomic DNA
taaataataggagcttaa

SEQ ID NO: 22832 - DNA, 19 bp, Homo sapiens
  source 1..19: mol_type = genomic DNA
taaataataggagcttaaa

SEQ ID NO: 22833 - DNA, 20 bp, Homo sapiens
  source 1..20: mol_type = genomic DNA
taaataataggagcttaaac

SEQ ID NO: 22834 - DNA, 21 bp, Homo sapiens
  source 1..21: mol_type = genomic DNA
taaataataggagcttaaacc

SEQ ID NO: 22835 - DNA, 22 bp, Homo sapiens
  source 1..22: mol_type = genomic DNA
taaataataggagcttaaaccc

SEQ ID NO: 22836 - DNA, 23 bp, Homo sapiens
  source 1..23: mol_type = genomic DNA
taaataataggagcttaaacccc

SEQ ID NO: 22837 - DNA, 24 bp, Homo sapiens
  source 1..24: mol_type = genomic DNA
taaataataggagcttaaaccccc

SEQ ID NO: 22838 - DNA, 25 bp, Homo sapiens
  source 1..25: mol_type = genomic DNA
taaataataggagcttaaaccccct

SEQ ID NO: 22839 - DNA, 27 bp, Homo sapiens
  source 1..27: mol_type = genomic DNA
taaataataggagcttaaaccccctta

SEQ ID NO: 22840 - DNA, 29 bp, Homo sapiens
  source 1..29: mol_type = genomic DNA
taaataataggagcttaaacccccttatt

SEQ ID NO: 22841 - DNA, 32 bp, Homo sapiens
  source 1..32: mol_type = genomic DNA
taaataataggagcttaaacccccttatttct

SEQ ID NO: 22842 - DNA, 33 bp, Homo sapiens
  source 1..33: mol_type = genomic DNA
taaataataggagcttaaacccccttatttcta

SEQ ID NO: 22843 - DNA, 34 bp, Homo sapiens
  source 1..34: mol_type = genomic DNA
taaataataggagcttaaacccccttatttctac

SEQ ID NO: 22844 - DNA, 35 bp, Homo sapiens
  source 1..35: mol_type = genomic DNA
taaataataggagcttaaacccccttatttctacc

SEQ ID NO: 22845 - DNA, 36 bp, Homo sapiens
  source 1..36: mol_type = genomic DNA
taaataataggagcttaaacccccttatttctacca

SEQ ID NO: 22846 - DNA, 18 bp, Homo sapiens
  source 1..18: mol_type = genomic DNA
taaatacagaccaagagc

SEQ ID NO: 22847 - DNA, 19 bp, Homo sapiens
  source 1..19: mol_type = genomic DNA
taaatacagaccaagagcc

SEQ ID NO: 22848 - DNA, 20 bp, Homo sapiens
  source 1..20: mol_type = genomic DNA
taaatacagaccaagagcct

SEQ ID NO: 22849 - DNA, 21 bp, Homo sapiens
  source 1..21: mol_type = genomic DNA
taaatacagaccaagagcctt

SEQ ID NO: 22850 - DNA, 22 bp, Homo sapiens
  source 1..22: mol_type = genomic DNA
taaatacagaccaagagccttc

SEQ ID NO: 22851 - DNA, 23 bp, Homo sapiens
  source 1..23: mol_type = genomic DNA
taaatacagaccaagagccttca

SEQ ID NO: 22852 - DNA, 24 bp, Homo sapiens
  source 1..24: mol_type = genomic DNA
taaatacagaccaagagccttcaa

SEQ ID NO: 22853 - DNA, 25 bp, Homo sapiens
  source 1..25: mol_type = genomic DNA
taaatacagaccaagagccttcaaa

SEQ ID NO: 22854 - DNA, 26 bp, Homo sapiens
  source 1..26: mol_type = genomic DNA
taaatacagaccaagagccttcaaag

SEQ ID NO: 22855 - DNA, 28 bp, Homo sapiens
  source 1..28: mol_type = genomic DNA
taaatacagaccaagagccttcaaagcc

SEQ ID NO: 22856 - DNA, 29 bp, Homo sapiens
  source 1..29: mol_type = genomic DNA
taaatacagaccaagagccttcaaagccc

SEQ ID NO: 22857 - DNA, 32 bp, Homo sapiens
  source 1..32: mol_type = genomic DNA
taaatacagaccaagagccttcaaagccctca

SEQ ID NO: 22858 - DNA, 35 bp, Homo sapiens
  source 1..35: mol_type = genomic DNA
taaatacagaccaagagccttcaaagccctcagta

SEQ ID NO: 22859 - DNA, 17 bp, Homo sapiens
  source 1..17: mol_type = genomic DNA
taaatagtaccgttaac

SEQ ID NO: 22860 - DNA, 18 bp, Homo sapiens
  source 1..18: mol_type = genomic DNA
taaatagtaccgttaact

SEQ ID NO: 22861 - DNA, 19 bp, Homo sapiens
  source 1..19: mol_type = genomic DNA
taaatagtaccgttaactt

SEQ ID NO: 22862 - DNA, 20 bp, Homo sapiens
  source 1..20: mol_type = genomic DNA
taaatagtaccgttaacttc

SEQ ID NO: 22863 - DNA, 21 bp, Homo sapiens
  source 1..21: mol_type = genomic DNA
taaatagtaccgttaacttcc

SEQ ID NO: 22864 - DNA, 22 bp, Homo sapiens
  source 1..22: mol_type = genomic DNA
taaatagtaccgttaacttcca

SEQ ID NO: 22865 - DNA, 23 bp, Homo sapiens
  source 1..23: mol_type = genomic DNA
taaatagtaccgttaacttccaa

SEQ ID NO: 22866 - DNA, 26 bp, Homo sapiens
  source 1..26: mol_type = genomic DNA
taaatagtaccgttaacttccaatta

SEQ ID NO: 22867 - DNA, 28 bp, Homo sapiens
  source 1..28: mol_type = genomic DNA
taaatagtaccgttaacttccaattaac

SEQ ID NO: 22868 - DNA, 38 bp, Homo sapiens
  source 1..38: mol_type = genomic DNA
taaatagtaccgttaacttccaattaactagttttgac

SEQ ID NO: 22869 - DNA, 16 bp, Homo sapiens
  source 1..16: mol_type = genomic DNA
taaatatagtttaacc

SEQ ID NO: 22870 - DNA, 31 bp, Homo sapiens
  source 1..31: mol_type = genomic DNA
taaatatagtttaaccaaaacatcagattgt

SEQ ID NO: 22871 - DNA, 32 bp, Homo sapiens
  source 1..32: mol_type = genomic DNA
taaatatagtttaaccaaaacatcagattgtg

SEQ ID NO: 22872 - DNA, 33 bp, Homo sapiens
  source 1..33: mol_type = genomic DNA
taaatatagtttaaccaaaacatcagattgtga

SEQ ID NO: 22873 - DNA, 35 bp, Homo sapiens
  source 1..35: mol_type = genomic DNA
taaatatagtttaaccaaaacatcagattgtgaat

SEQ ID NO: 22874 - DNA, 36 bp, Homo sapiens
  source 1..36: mol_type = genomic DNA
taaatatagtttaaccaaaacatcagattgtgaatc

SEQ ID NO: 22875 - DNA, 20 bp, Homo sapiens
  source 1..20: mol_type = genomic DNA
taaatcctatatatcttacc

SEQ ID NO: 22876 - DNA, 21 bp, Homo sapiens
  source 1..21: mol_type = genomic DNA
taaatcctatatatcttacca

SEQ ID NO: 22877 - DNA, 25 bp, Homo sapiens
  source 1..25: mol_type = genomic DNA
taaatctaaagacaggggttaggcc

SEQ ID NO: 22878 - DNA, 26 bp, Homo sapiens
  source 1..26: mol_type = genomic DNA
taaatctaaagacaggggttaggcct

SEQ ID NO: 22879 - DNA, 27 bp, Homo sapiens
  source 1..27: mol_type = genomic DNA
taaatctaaagacaggggttaggcctc

SEQ ID NO: 22880 - DNA, 28 bp, Homo sapiens
  source 1..28: mol_type = genomic DNA
taaatctaaagacaggggttaggcctct

SEQ ID NO: 22881 - DNA, 30 bp, Homo sapiens
  source 1..30: mol_type = genomic DNA
taaatctaaagacaggggttaggcctcttt

SEQ ID NO: 22882 - DNA, 31 bp, Homo sapiens
  source 1..31: mol_type = genomic DNA
taaatctaaagacaggggttaggcctctttt

SEQ ID NO: 22883 - DNA, 33 bp, Homo sapiens
  source 1..33: mol_type = genomic DNA
taaatctaaagacaggggttaggcctcttttta

SEQ ID NO: 22884 - DNA, 35 bp, Homo sapiens
  source 1..35: mol_type = genomic DNA
taaatctaaagacaggggttaggcctctttttacc

SEQ ID NO: 22885 - DNA, 38 bp, Homo sapiens
  source 1..38: mol_type = genomic DNA
taaatctaaagacaggggttaggcctctttttaccacc

SEQ ID NO: 22886 - DNA, 39 bp, Homo sapiens
  source 1..39: mol_type = genomic DNA
taaatctaaagacaggggttaggcctctttttaccacca

SEQ ID NO: 22887 - DNA, 17 bp, Homo sapiens
  source 1..17: mol_type = genomic DNA
taaattagaatcttagc

SEQ ID NO: 22888 - DNA, 18 bp, Homo sapiens
  source 1..18: mol_type = genomic DNA
taaattagaatcttagct

SEQ ID NO: 22889 - DNA, 19 bp, Homo sapiens
  source 1..19: mol_type = genomic DNA
taaattagaatcttagctt

SEQ ID NO: 22890 - DNA, 20 bp, Homo sapiens
  source 1..20: mol_type = genomic DNA
taaattagaatcttagcttt

SEQ ID NO: 22891 - DNA, 21 bp, Homo sapiens
  source 1..21: mol_type = genomic DNA
taaattagaatcttagctttg

SEQ ID NO: 22892 - DNA, 22 bp, Homo sapiens
  source 1..22: mol_type = genomic DNA
taaattagaatcttagctttgg

SEQ ID NO: 22893 - DNA, 25 bp, Homo sapiens
  source 1..25: mol_type = genomic DNA
taaattagaatcttagctttgggtg

SEQ ID NO: 22894 - DNA, 27 bp, Homo sapiens
  source 1..27: mol_type = genomic DNA
taaattagaatcttagctttgggtgct

SEQ ID NO: 22895 - DNA, 35 bp, Homo sapiens
  source 1..35: mol_type = genomic DNA
taaattagaatcttagctttgggtgctaatggtgg

SEQ ID NO: 22896 - DNA, 37 bp, Homo sapiens
  source 1..37: mol_type = genomic DNA
taaattagaatcttagctttgggtgctaatggtggag

SEQ ID NO: 22897 - DNA, 39 bp, Homo sapiens
  source 1..39: mol_type = genomic DNA
taaattagaatcttagctttgggtgctaatggtggagtt

SEQ ID NO: 22898 - DNA, 40 bp, Homo sapiens
  source 1..40: mol_type = genomic DNA
taaattagaatcttagctttgggtgctaatggtggagtta

SEQ ID NO: 22899 - DNA, 45 bp, Homo sapiens
  source 1..45: mol_type = genomic DNA
taaattagaatcttagctttgggtgctaatggtggagttaaagac

SEQ ID NO: 22900 - DNA, 46 bp, Homo sapiens
  source 1..46: mol_type = genomic DNA
taaattagaatcttagctttgggtgctaatggtggagttaaagact

SEQ ID NO: 22901 - DNA, 16 bp, Homo sapiens
  source 1..16: mol_type = genomic DNA
taaattataggctaaa

SEQ ID NO: 22902 - DNA, 17 bp, Homo sapiens
  source 1..17: mol_type = genomic DNA
taaattataggctaaat

SEQ ID NO: 22903 - DNA, 18 bp, Homo sapiens
  source 1..18: mol_type = genomic DNA
taaattataggctaaatc

SEQ ID NO: 22904 - DNA, 19 bp, Homo sapiens
  source 1..19: mol_type = genomic DNA
taaattataggctaaatcc

SEQ ID NO: 22905 - DNA, 28 bp, Homo sapiens
  source 1..28: mol_type = genomic DNA
taaattatgataatcatatttaccaacc

SEQ ID NO: 22906 - DNA, 16 bp, Homo sapiens
  source 1..16: mol_type = genomic DNA
taacaacatggctttc

SEQ ID NO: 22907 - DNA, 18 bp, Homo sapiens
  source 1..18: mol_type = genomic DNA
taacaacatggctttctc

SEQ ID NO: 22908 - DNA, 19 bp, Homo sapiens
  source 1..19: mol_type = genomic DNA
taacaacatggctttctca

SEQ ID NO: 22909 - DNA, 20 bp, Homo sapiens
  source 1..20: mol_type = genomic DNA
taacaacatggctttctcac

SEQ ID NO: 22910 - DNA, 21 bp, Homo sapiens
  source 1..21: mol_type = genomic DNA
taacaacatggctttctcacc

SEQ ID NO: 22911 - DNA, 22 bp, Homo sapiens
  source 1..22: mol_type = genomic DNA
taacaacatggctttctcacca

SEQ ID NO: 22912 - DNA, 16 bp, Homo sapiens
  source 1..16: mol_type = genomic DNA
taacacaaagcaccca

SEQ ID NO: 22913 - DNA, 17 bp, Homo sapiens
  source 1..17: mol_type = genomic DNA
taacacaaagcacccaa

SEQ ID NO: 22914 - DNA, 18 bp, Homo sapiens
  source 1..18: mol_type = genomic DNA
taacacaaagcacccaac

SEQ ID NO: 22915 - DNA, 19 bp, Homo sapiens
  source 1..19: mol_type = genomic DNA
taacacaaagcacccaact

SEQ ID NO: 22916 - DNA, 20 bp, Homo sapiens
  source 1..20: mol_type = genomic DNA
taacacaaagcacccaactt

SEQ ID NO: 22917 - DNA, 22 bp, Homo sapiens
  source 1..22: mol_type = genomic DNA
taacacaaagcacccaacttac

SEQ ID NO: 22918 - DNA, 23 bp, Homo sapiens
  source 1..23: mol_type = genomic DNA
taacacaaagcacccaacttaca

SEQ ID NO: 22919 - DNA, 24 bp, Homo sapiens
  source 1..24: mol_type = genomic DNA
taacacaaagcacccaacttacac

SEQ ID NO: 22920 - DNA, 25 bp, Homo sapiens
  source 1..25: mol_type = genomic DNA
taacacaaagcacccaacttacact

SEQ ID NO: 22921 - DNA, 26 bp, Homo sapiens
  source 1..26: mol_type = genomic DNA
taacacaaagcacccaacttacactt

SEQ ID NO: 22922 - DNA, 27 bp, Homo sapiens
  source 1..27: mol_type = genomic DNA
taacacaaagcacccaacttacactta

SEQ ID NO: 22923 - DNA, 28 bp, Homo sapiens
  source 1..28: mol_type = genomic DNA
taacacaaagcacccaacttacacttag

SEQ ID NO: 22924 - DNA, 29 bp, Homo sapiens
  source 1..29: mol_type = genomic DNA
taacacaaagcacccaacttacacttagg

SEQ ID NO: 22925 - DNA, 30 bp, Homo sapiens
  source 1..30: mol_type = genomic DNA
taacacaaagcacccaacttacacttagga

SEQ ID NO: 22926 - DNA, 31 bp, Homo sapiens
  source 1..31: mol_type = genomic DNA
taacacaaagcacccaacttacacttaggag

SEQ ID NO: 22927 - DNA, 32 bp, Homo sapiens
  source 1..32: mol_type = genomic DNA
taacacaaagcacccaacttacacttaggaga

SEQ ID NO: 22928 - DNA, 33 bp, Homo sapiens
  source 1..33: mol_type = genomic DNA
taacacaaagcacccaacttacacttaggagat

SEQ ID NO: 22929 - DNA, 34 bp, Homo sapiens
  source 1..34: mol_type = genomic DNA
taacacaaagcacccaacttacacttaggagatt

SEQ ID NO: 22930 - DNA, 35 bp, Homo sapiens
  source 1..35: mol_type = genomic DNA
taacacaaagcacccaacttacacttaggagattt

SEQ ID NO: 22931 - DNA, 36 bp, Homo sapiens
  source 1..36: mol_type = genomic DNA
taacacaaagcacccaacttacacttaggagatttc

SEQ ID NO: 22932 - DNA, 37 bp, Homo sapiens
  source 1..37: mol_type = genomic DNA
taacacaaagcacccaacttacacttaggagatttca

SEQ ID NO: 22933 - DNA, 38 bp, Homo sapiens
  source 1..38: mol_type = genomic DNA
taacacaaagcacccaacttacacttaggagatttcaa

SEQ ID NO: 22934 - DNA, 39 bp, Homo sapiens
  source 1..39: mol_type = genomic DNA
taacacaaagcacccaacttacacttaggagatttcaac

SEQ ID NO: 22935 - DNA, 40 bp, Homo sapiens
  source 1..40: mol_type = genomic DNA
taacacaaagcacccaacttacacttaggagatttcaact

SEQ ID NO: 22936 - DNA, 41 bp, Homo sapiens
  source 1..41: mol_type = genomic DNA
taacacaaagcacccaacttacacttaggagatttcaactt

SEQ ID NO: 22937 - DNA, 42 bp, Homo sapiens
  source 1..42: mol_type = genomic DNA
taacacaaagcacccaacttacacttaggagatttcaactta

SEQ ID NO: 22938 - DNA, 43 bp, Homo sapiens
  source 1..43: mol_type = genomic DNA
taacacaaagcacccaacttacacttaggagatttcaacttaa

SEQ ID NO: 22939 - DNA, 44 bp, Homo sapiens
  source 1..44: mol_type = genomic DNA
taacacaaagcacccaacttacacttaggagatttcaacttaac

SEQ ID NO: 22940 - DNA, 45 bp, Homo sapiens
  source 1..45: mol_type = genomic DNA
taacacaaagcacccaacttacacttaggagatttcaacttaact

SEQ ID NO: 22941 - DNA, 46 bp, Homo sapiens
  source 1..46: mol_type = genomic DNA
taacacaaagcacccaacttacacttaggagatttcaacttaactt

SEQ ID NO: 22942 - DNA, 16 bp, Homo sapiens
  source 1..16: mol_type = genomic DNA
taacagctatccattg

SEQ ID NO: 22943 - DNA, 19 bp, Homo sapiens
  source 1..19: mol_type = genomic DNA
taacagctatccattggtc

SEQ ID NO: 22944 - DNA, 20 bp, Homo sapiens
  source 1..20: mol_type = genomic DNA
taacagctatccattggtct

SEQ ID NO: 22945 - DNA, 21 bp, Homo sapiens
  source 1..21: mol_type = genomic DNA
taacagctatccattggtctt

SEQ ID NO: 22946 - DNA, 22 bp, Homo sapiens
  source 1..22: mol_type = genomic DNA
taacagctatccattggtctta

SEQ ID NO: 22947 - DNA, 23 bp, Homo sapiens
  source 1..23: mol_type = genomic DNA
taacagctatccattggtcttag

SEQ ID NO: 22948 - DNA, 27 bp, Homo sapiens
  source 1..27: mol_type = genomic DNA
taacagctatccattggtcttaggccc

SEQ ID NO: 22949 - DNA, 28 bp, Homo sapiens
  source 1..28: mol_type = genomic DNA
taacagctatccattggtcttaggcccc

SEQ ID NO: 22950 - DNA, 29 bp, Homo sapiens
  source 1..29: mol_type = genomic DNA
taacagctatccattggtcttaggcccca

SEQ ID NO: 22951 - DNA, 33 bp, Homo sapiens
  source 1..33: mol_type = genomic DNA
taacagctatccattggtcttaggccccaaaaa

SEQ ID NO: 22952 - DNA, 17 bp, Homo sapiens
  source 1..17: mol_type = genomic DNA
taaccaaaacatcagat

SEQ ID NO: 22953 - DNA, 19 bp, Homo sapiens
  source 1..19: mol_type = genomic DNA
taaccaaaacatcagattg

SEQ ID NO: 22954 - DNA, 20 bp, Homo sapiens
  source 1..20: mol_type = genomic DNA
taaccaaaacatcagattgt

SEQ ID NO: 22955 - DNA, 21 bp, Homo sapiens
  source 1..21: mol_type = genomic DNA
taaccaaaacatcagattgtg

SEQ ID NO: 22956 - DNA, 22 bp, Homo sapiens
  source 1..22: mol_type = genomic DNA
taaccaaaacatcagattgtga

SEQ ID NO: 22957 - DNA, 23 bp, Homo sapiens
  source 1..23: mol_type = genomic DNA
taaccaaaacatcagattgtgaa

SEQ ID NO: 22958 - DNA, 24 bp, Homo sapiens
  source 1..24: mol_type = genomic DNA
taaccaaaacatcagattgtgaat

SEQ ID NO: 22959 - DNA, 25 bp, Homo sapiens
  source 1..25: mol_type = genomic DNA
taaccaaaacatcagattgtgaatc

SEQ ID NO: 22960 - DNA, 26 bp, Homo sapiens
  source 1..26: mol_type = genomic DNA
taaccaaaacatcagattgtgaatct

SEQ ID NO: 22961 - DNA, 27 bp, Homo sapiens
  source 1..27: mol_type = genomic DNA
taaccaaaacatcagattgtgaatctg

SEQ ID NO: 22962 - DNA, 28 bp, Homo sapiens
  source 1..28: mol_type = genomic DNA
taaccaaaacatcagattgtgaatctga

SEQ ID NO: 22963 - DNA, 29 bp, Homo sapiens
  source 1..29: mol_type = genomic DNA
taaccaaaacatcagattgtgaatctgac

SEQ ID NO: 22964 - DNA, 30 bp, Homo sapiens
  source 1..30: mol_type = genomic DNA
taaccaaaacatcagattgtgaatctgaca

SEQ ID NO: 22965 - DNA, 31 bp, Homo sapiens
  source 1..31: mol_type = genomic DNA
taaccaaaacatcagattgtgaatctgacaa

SEQ ID NO: 22966 - DNA, 32 bp, Homo sapiens
  source 1..32: mol_type = genomic DNA
taaccaaaacatcagattgtgaatctgacaac

SEQ ID NO: 22967 - DNA, 33 bp, Homo sapiens
  source 1..33: mol_type = genomic DNA
taaccaaaacatcagattgtgaatctgacaaca

SEQ ID NO: 22968 - DNA, 34 bp, Homo sapiens
  source 1..34: mol_type = genomic DNA
taaccaaaacatcagattgtgaatctgacaacag

SEQ ID NO: 22969 - DNA, 35 bp, Homo sapiens
  source 1..35: mol_type = genomic DNA
taaccaaaacatcagattgtgaatctgacaacaga

SEQ ID NO: 22970 - DNA, 36 bp, Homo sapiens
  source 1..36: mol_type = genomic DNA
taaccaaaacatcagattgtgaatctgacaacagag

SEQ ID NO: 22971 - DNA, 37 bp, Homo sapiens
  source 1..37: mol_type = genomic DNA
taaccaaaacatcagattgtgaatctgacaacagagg

SEQ ID NO: 22972 - DNA, 38 bp, Homo sapiens
  source 1..38: mol_type = genomic DNA
taaccaaaacatcagattgtgaatctgacaacagaggc

SEQ ID NO: 22973 - DNA, 39 bp, Homo sapiens
  source 1..39: mol_type = genomic DNA
taaccaaaacatcagattgtgaatctgacaacagaggct

SEQ ID NO: 22974 - DNA, 40 bp, Homo sapiens
  source 1..40: mol_type = genomic DNA
taaccaaaacatcagattgtgaatctgacaacagaggctt

SEQ ID NO: 22975 - DNA, 43 bp, Homo sapiens
  source 1..43: mol_type = genomic DNA
taaccaaaacatcagattgtgaatctgacaacagaggcttacg

SEQ ID NO: 22976 - DNA, 44 bp, Homo sapiens
  source 1..44: mol_type = genomic DNA
taaccaaaacatcagattgtgaatctgacaacagaggcttacga

SEQ ID NO: 22977 - DNA, 46 bp, Homo sapiens
  source 1..46: mol_type = genomic DNA
taaccaaaacatcagattgtgaatctgacaacagaggcttacgacc

SEQ ID NO: 22978 - DNA, 47 bp, Homo sapiens
  source 1..47: mol_type = genomic DNA
taaccaaaacatcagattgtgaatctgacaacagaggcttacgaccc

SEQ ID NO: 22979 - DNA, 48 bp, Homo sapiens
  source 1..48: mol_type = genomic DNA
taaccaaaacatcagattgtgaatctgacaacagaggcttacgacccc

SEQ ID NO: 22980 - DNA, 17 bp, Homo sapiens
  source 1..17: mol_type = genomic DNA
taacccagaggtcgatg

SEQ ID NO: 22981 - DNA, 18 bp, Homo sapiens
  source 1..18: mol_type = genomic DNA
taacccagaggtcgatgg

SEQ ID NO: 22982 - DNA, 19 bp, Homo sapiens
  source 1..19: mol_type = genomic DNA
taacccagaggtcgatgga

SEQ ID NO: 22983 - DNA, 20 bp, Homo sapiens
  source 1..20: mol_type = genomic DNA
taacccagaggtcgatggat

SEQ ID NO: 22984 - DNA, 21 bp, Homo sapiens
  source 1..21: mol_type = genomic DNA
taacccagaggtcgatggatc

SEQ ID NO: 22985 - DNA, 22 bp, Homo sapiens
  source 1..22: mol_type = genomic DNA
taacccagaggtcgatggatcg

SEQ ID NO: 22986 - DNA, 23 bp, Homo sapiens
  source 1..23: mol_type = genomic DNA
taacccagaggtcgatggatcga

SEQ ID NO: 22987 - DNA, 24 bp, Homo sapiens
  source 1..24: mol_type = genomic DNA
taacccagaggtcgatggatcgaa

SEQ ID NO: 22988 - DNA, 26 bp, Homo sapiens
  source 1..26: mol_type = genomic DNA
taacccagaggtcgatggatcgaaac

SEQ ID NO: 22989 - DNA, 40 bp, Homo sapiens
  source 1..40: mol_type = genomic DNA
taacccagaggtcgatggatcgaaaccatcctctgctacc

SEQ ID NO: 22990 - DNA, 41 bp, Homo sapiens
  source 1..41: mol_type = genomic DNA
taacccagaggtcgatggatcgaaaccatcctctgctacca

SEQ ID NO: 22991 - DNA, 21 bp, Homo sapiens
  source 1..21: mol_type = genomic DNA
taaccgaaaggttggtggttc

SEQ ID NO: 22992 - DNA, 22 bp, Homo sapiens
  source 1..22: mol_type = genomic DNA
taaccgaaaggttggtggttcg

SEQ ID NO: 22993 - DNA, 23 bp, Homo sapiens
  source 1..23: mol_type = genomic DNA
taaccgaaaggttggtggttcga

SEQ ID NO: 22994 - DNA, 24 bp, Homo sapiens
  source 1..24: mol_type = genomic DNA
taaccgaaaggttggtggttcgag

SEQ ID NO: 22995 - DNA, 25 bp, Homo sapiens
  source 1..25: mol_type = genomic DNA
taaccgaaaggttggtggttcgagc

SEQ ID NO: 22996 - DNA, 26 bp, Homo sapiens
  source 1..26: mol_type = genomic DNA
taaccgaaaggttggtggttcgagcc

SEQ ID NO: 22997 - DNA, 37 bp, Homo sapiens
  source 1..37: mol_type = genomic DNA
taaccgaaaggttggtggttcgagcccacccagggac

SEQ ID NO: 22998 - DNA, 38 bp, Homo sapiens
  source 1..38: mol_type = genomic DNA
taaccgaaaggttggtggttcgagcccacccagggacg

SEQ ID NO: 22999 - DNA, 39 bp, Homo sapiens
  source 1..39: mol_type = genomic DNA
taaccgaaaggttggtggttcgagcccacccagggacgc

SEQ ID NO: 23000 - DNA, 40 bp, Homo sapiens
  source 1..40: mol_type = genomic DNA
taaccgaaaggttggtggttcgagcccacccagggacgcc

SEQ ID NO: 23001 - DNA, 41 bp, Homo sapiens
  source 1..41: mol_type = genomic DNA
taaccgaaaggttggtggttcgagcccacccagggacgcca

SEQ ID NO: 23002 - DNA, 29 bp, Homo sapiens
  source 1..29: mol_type = genomic DNA
taaccttttaagttaaagattaagagaac

SEQ ID NO: 23003 - DNA, 30 bp, Homo sapiens
  source 1..30: mol_type = genomic DNA
taaccttttaagttaaagattaagagaacc

SEQ ID NO: 23004 - DNA, 31 bp, Homo sapiens
  source 1..31: mol_type = genomic DNA
taaccttttaagttaaagattaagagaacca

SEQ ID NO: 23005 - DNA, 32 bp, Homo sapiens
  source 1..32: mol_type = genomic DNA
taaccttttaagttaaagattaagagaaccaa

SEQ ID NO: 23006 - DNA, 33 bp, Homo sapiens
  source 1..33: mol_type = genomic DNA
taaccttttaagttaaagattaagagaaccaac

SEQ ID NO: 23007 - DNA, 35 bp, Homo sapiens
  source 1..35: mol_type = genomic DNA
taaccttttaagttaaagattaagagaaccaacac

SEQ ID NO: 23008 - DNA, 36 bp, Homo sapiens
  source 1..36: mol_type = genomic DNA
taaccttttaagttaaagattaagagaaccaacacc

SEQ ID NO: 23009 - DNA, 37 bp, Homo sapiens
  source 1..37: mol_type = genomic DNA
taaccttttaagttaaagattaagagaaccaacacct

SEQ ID NO: 23010 - DNA, 48 bp, Homo sapiens
  source 1..48: mol_type = genomic DNA
taaccttttaagttaaagattaagagaaccaacacctctttacagtga

SEQ ID NO: 23011 - DNA, 20 bp, Homo sapiens
  source 1..20: mol_type = genomic DNA
taacgccaaggtcgcgggtt

SEQ ID NO: 23012 - DNA, 21 bp, Homo sapiens
  source 1..21: mol_type = genomic DNA
taacgccaaggtcgcgggttc

SEQ ID NO: 23013 - DNA, 22 bp, Homo sapiens
  source 1..22: mol_type = genomic DNA
taacgccaaggtcgcgggttcg

SEQ ID NO: 23014 - DNA, 23 bp, Homo sapiens
  source 1..23: mol_type = genomic DNA
taacgccaaggtcgcgggttcga

SEQ ID NO: 23015 - DNA, 25 bp, Homo sapiens
  source 1..25: mol_type = genomic DNA
taacgccaaggtcgcgggttcgaac

SEQ ID NO: 23016 - DNA, 36 bp, Homo sapiens
  source 1..36: mol_type = genomic DNA
taacgccaaggtcgcgggttcgaaccccgtacgggc

SEQ ID NO: 23017 - DNA, 40 bp, Homo sapiens
  source 1..40: mol_type = genomic DNA
taacgccaaggtcgcgggttcgaaccccgtacgggccacc

SEQ ID NO: 23018 - DNA, 41 bp, Homo sapiens
  source 1..41: mol_type = genomic DNA
taacgccaaggtcgcgggttcgaaccccgtacgggccacca

SEQ ID NO: 23019 - DNA, 24 bp, Homo sapiens
  source 1..24: mol_type = genomic DNA
taacgccaaggtcgcgggttcgat

SEQ ID NO: 23020 - DNA, 25 bp, Homo sapiens
  source 1..25: mol_type = genomic DNA
taacgccaaggtcgcgggttcgatc

SEQ ID NO: 23021 - DNA, 26 bp, Homo sapiens
  source 1..26: mol_type = genomic DNA
taacgccaaggtcgcgggttcgatcc

SEQ ID NO: 23022 - DNA, 27 bp, Homo sapiens
  source 1..27: mol_type = genomic DNA
taacgccaaggtcgcgggttcgatccc

SEQ ID NO: 23023 - DNA, 29 bp, Homo sapiens
  source 1..29: mol_type = genomic DNA
taacgccaaggtcgcgggttcgatccccg

SEQ ID NO: 23024 - DNA, 31 bp, Homo sapiens
  source 1..31: mol_type = genomic DNA
taacgccaaggtcgcgggttcgatccccgta

SEQ ID NO: 23025 - DNA, 32 bp, Homo sapiens
  source 1..32: mol_type = genomic DNA
taacgccaaggtcgcgggttcgatccccgtac

SEQ ID NO: 23026 - DNA, 33 bp, Homo sapiens
  source 1..33: mol_type = genomic DNA
taacgccaaggtcgcgggttcgatccccgtacg

SEQ ID NO: 23027 - DNA, 36 bp, Homo sapiens
  source 1..36: mol_type = genomic DNA
taacgccaaggtcgcgggttcgatccccgtacgggc

SEQ ID NO: 23028 - DNA, 40 bp, Homo sapiens
  source 1..40: mol_type = genomic DNA
taacgccaaggtcgcgggttcgatccccgtacgggccacc

SEQ ID NO: 23029 - DNA, 41 bp, Homo sapiens
  source 1..41: mol_type = genomic DNA
taacgccaaggtcgcgggttcgatccccgtacgggccacca

SEQ ID NO: 23030 - DNA, 34 bp, Homo sapiens
  source 1..34: mol_type = genomic DNA
taacgccaaggtcgcgggttcgatccccgtactg

SEQ ID NO: 23031 - DNA, 35 bp, Homo sapiens
  source 1..35: mol_type = genomic DNA
taacgccaaggtcgcgggttcgatccccgtactgg

SEQ ID NO: 23032 - DNA, 41 bp, Homo sapiens
  source 1..41: mol_type = genomic DNA
taacgccaaggtcgcgggttcgatccccgtactggccacca

SEQ ID NO: 23033 - DNA, 18 bp, Homo sapiens
  source 1..18: mol_type = genomic DNA
taactaagtgtttgtggg

SEQ ID NO: 23034 - DNA, 19 bp, Homo sapiens
  source 1..19: mol_type = genomic DNA
taactaagtgtttgtgggt

SEQ ID NO: 23035 - DNA, 20 bp, Homo sapiens
  source 1..20: mol_type = genomic DNA
taactaagtgtttgtgggtt

SEQ ID NO: 23036 - DNA, 21 bp, Homo sapiens
  source 1..21: mol_type = genomic DNA
taactaagtgtttgtgggttt

SEQ ID NO: 23037 - DNA, 22 bp, Homo sapiens
  source 1..22: mol_type = genomic DNA
taactaagtgtttgtgggttta

SEQ ID NO: 23038 - DNA, 26 bp, Homo sapiens
  source 1..26: mol_type = genomic DNA
taactaagtgtttgtgggtttaagtc

SEQ ID NO: 23039 - DNA, 31 bp, Homo sapiens
  source 1..31: mol_type = genomic DNA
taactaagtgtttgtgggtttaagtcccatt

SEQ ID NO: 23040 - DNA, 35 bp, Homo sapiens
  source 1..35: mol_type = genomic DNA
taactaagtgtttgtgggtttaagtcccattggtc

SEQ ID NO: 23041 - DNA, 36 bp, Homo sapiens
  source 1..36: mol_type = genomic DNA
taactaagtgtttgtgggtttaagtcccattggtct

SEQ ID NO: 23042 - DNA, 38 bp, Homo sapiens
  source 1..38: mol_type = genomic DNA
taactaagtgtttgtgggtttaagtcccattggtctag

SEQ ID NO: 23043 - DNA, 39 bp, Homo sapiens
  source 1..39: mol_type = genomic DNA
taactaagtgtttgtgggtttaagtcccattggtctagc

SEQ ID NO: 23044 - DNA, 40 bp, Homo sapiens
  source 1..40: mol_type = genomic DNA
taactaagtgtttgtgggtttaagtcccattggtctagcc

SEQ ID NO: 23045 - DNA, 41 bp, Homo sapiens
  source 1..41: mol_type = genomic DNA
taactaagtgtttgtgggtttaagtcccattggtctagcca

SEQ ID NO: 23046 - DNA, 16 bp, Homo sapiens
  source 1..16: mol_type = genomic DNA
taactagttttgacaa

SEQ ID NO: 23047 - DNA, 17 bp, Homo sapiens
  source 1..17: mol_type = genomic DNA
taactagttttgacaac

SEQ ID NO: 23048 - DNA, 18 bp, Homo sapiens
  source 1..18: mol_type = genomic DNA
taactagttttgacaaca

SEQ ID NO: 23049 - DNA, 30 bp, Homo sapiens
  source 1..30: mol_type = genomic DNA
taactagttttgacaacattcaaaaaagag

SEQ ID NO: 23050 - DNA, 31 bp, Homo sapiens
  source 1..31: mol_type = genomic DNA
taactagttttgacaacattcaaaaaagagt

SEQ ID NO: 23051 - DNA, 32 bp, Homo sapiens
  source 1..32: mol_type = genomic DNA
taactagttttgacaacattcaaaaaagagta

SEQ ID NO: 23052 - DNA, 33 bp, Homo sapiens
  source 1..33: mol_type = genomic DNA
taactagttttgacaacattcaaaaaagagtac

SEQ ID NO: 23053 - DNA, 34 bp, Homo sapiens
  source 1..34: mol_type = genomic DNA
taactagttttgacaacattcaaaaaagagtacc

SEQ ID NO: 23054 - DNA, 35 bp, Homo sapiens
  source 1..35: mol_type = genomic DNA
taactagttttgacaacattcaaaaaagagtacca

SEQ ID NO: 23055 - DNA, 17 bp, Homo sapiens
  source 1..17: mol_type = genomic DNA
taactcatgcccccatg

SEQ ID NO: 23056 - DNA, 19 bp, Homo sapiens
  source 1..19: mol_type = genomic DNA
taactcatgcccccatgtc

SEQ ID NO: 23057 - DNA, 20 bp, Homo sapiens
  source 1..20: mol_type = genomic DNA
taactcatgcccccatgtct

SEQ ID NO: 23058 - DNA, 22 bp, Homo sapiens
  source 1..22: mol_type = genomic DNA
taactcatgcccccatgtctaa

SEQ ID NO: 23059 - DNA, 23 bp, Homo sapiens
  source 1..23: mol_type = genomic DNA
taactcatgcccccatgtctaac

SEQ ID NO: 23060 - DNA, 24 bp, Homo sapiens
  source 1..24: mol_type = genomic DNA
taactcatgcccccatgtctaaca

SEQ ID NO: 23061 - DNA, 25 bp, Homo sapiens
  source 1..25: mol_type = genomic DNA
taactcatgcccccatgtctaacaa

SEQ ID NO: 23062 - DNA, 26 bp, Homo sapiens
  source 1..26: mol_type = genomic DNA
taactcatgcccccatgtctaacaac

SEQ ID NO: 23063 - DNA, 27 bp, Homo sapiens
  source 1..27: mol_type = genomic DNA
taactcatgcccccatgtctaacaaca

SEQ ID NO: 23064 - DNA, 28 bp, Homo sapiens
  source 1..28: mol_type = genomic DNA
taactcatgcccccatgtctaacaacat

SEQ ID NO: 23065 - DNA, 29 bp, Homo sapiens
  source 1..29: mol_type = genomic DNA
taactcatgcccccatgtctaacaacatg

SEQ ID NO: 23066 - DNA, 30 bp, Homo sapiens
  source 1..30: mol_type = genomic DNA
taactcatgcccccatgtctaacaacatgg

SEQ ID NO: 23067 - DNA, 31 bp, Homo sapiens
  source 1..31: mol_type = genomic DNA
taactcatgcccccatgtctaacaacatggc

SEQ ID NO: 23068 - DNA, 32 bp, Homo sapiens
  source 1..32: mol_type = genomic DNA
taactcatgcccccatgtctaacaacatggct

SEQ ID NO: 23069 - DNA, 33 bp, Homo sapiens
  source 1..33: mol_type = genomic DNA
taactcatgcccccatgtctaacaacatggctt

SEQ ID NO: 23070 - DNA, 34 bp, Homo sapiens
  source 1..34: mol_type = genomic DNA
taactcatgcccccatgtctaacaacatggcttt

SEQ ID NO: 23071 - DNA, 35 bp, Homo sapiens
  source 1..35: mol_type = genomic DNA
taactcatgcccccatgtctaacaacatggctttc

SEQ ID NO: 23072 - DNA, 36 bp, Homo sapiens
  source 1..36: mol_type = genomic DNA
taactcatgcccccatgtctaacaacatggctttct

SEQ ID NO: 23073 - DNA, 37 bp, Homo sapiens
  source 1..37: mol_type = genomic DNA
taactcatgcccccatgtctaacaacatggctttctc

SEQ ID NO: 23074 - DNA, 38 bp, Homo sapiens
  source 1..38: mol_type = genomic DNA
taactcatgcccccatgtctaacaacatggctttctca

SEQ ID NO: 23075 - DNA, 39 bp, Homo sapiens
  source 1..39: mol_type = genomic DNA
taactcatgcccccatgtctaacaacatggctttctcac

SEQ ID NO: 23076 - DNA, 40 bp, Homo sapiens
  source 1..40: mol_type = genomic DNA
taactcatgcccccatgtctaacaacatggctttctcacc

SEQ ID NO: 23077 - DNA, 41 bp, Homo sapiens
  source 1..41: mol_type = genomic DNA
taactcatgcccccatgtctaacaacatggctttctcacca

SEQ ID NO: 23078 - DNA, 16 bp, Homo sapiens
  source 1..16: mol_type = genomic DNA
taacttagcattaacc

SEQ ID NO: 23079 - DNA, 17 bp, Homo sapiens
  source 1..17: mol_type = genomic DNA
taacttagcattaacct

SEQ ID NO: 23080 - DNA, 19 bp, Homo sapiens
  source 1..19: mol_type = genomic DNA
taacttagcattaaccttt

SEQ ID NO: 23081 - DNA, 26 bp, Homo sapiens
  source 1..26: mol_type = genomic DNA
taacttagcattaaccttttaagtta

SEQ ID NO: 23082 - DNA, 41 bp, Homo sapiens
  source 1..41: mol_type = genomic DNA
taacttagcattaaccttttaagttaaagattaagagaacc

SEQ ID NO: 23083 - DNA, 17 bp, Homo sapiens
  source 1..17: mol_type = genomic DNA
taacttccaattaacta

SEQ ID NO: 23084 - DNA, 19 bp, Homo sapiens
  source 1..19: mol_type = genomic DNA
taacttccaattaactagt

SEQ ID NO: 23085 - DNA, 20 bp, Homo sapiens
  source 1..20: mol_type = genomic DNA
taacttccaattaactagtt

SEQ ID NO: 23086 - DNA, 22 bp, Homo sapiens
  source 1..22: mol_type = genomic DNA
taacttccaattaactagtttt

SEQ ID NO: 23087 - DNA, 23 bp, Homo sapiens
  source 1..23: mol_type = genomic DNA
taacttccaattaactagttttg

SEQ ID NO: 23088 - DNA, 24 bp, Homo sapiens
  source 1..24: mol_type = genomic DNA
taacttccaattaactagttttga

SEQ ID NO: 23089 - DNA, 25 bp, Homo sapiens
  source 1..25: mol_type = genomic DNA
taacttccaattaactagttttgac

SEQ ID NO: 23090 - DNA, 26 bp, Homo sapiens
  source 1..26: mol_type = genomic DNA
taacttccaattaactagttttgaca

SEQ ID NO: 23091 - DNA, 27 bp, Homo sapiens
  source 1..27: mol_type = genomic DNA
taacttccaattaactagttttgacaa

SEQ ID NO: 23092 - DNA, 28 bp, Homo sapiens
  source 1..28: mol_type = genomic DNA
taacttccaattaactagttttgacaac

SEQ ID NO: 23093 - DNA, 29 bp, Homo sapiens
  source 1..29: mol_type = genomic DNA
taacttccaattaactagttttgacaaca

SEQ ID NO: 23094 - DNA, 31 bp, Homo sapiens
  source 1..31: mol_type = genomic DNA
taacttccaattaactagttttgacaacatt

SEQ ID NO: 23095 - DNA, 33 bp, Homo sapiens
  source 1..33: mol_type = genomic DNA
taacttccaattaactagttttgacaacattca

SEQ ID NO: 23096 - DNA, 45 bp, Homo sapiens
  source 1..45: mol_type = genomic DNA
taacttccaattaactagttttgacaacattcaaaaaagagtacc

SEQ ID NO: 23097 - DNA, 46 bp, Homo sapiens
  source 1..46: mol_type = genomic DNA
taacttccaattaactagttttgacaacattcaaaaaagagtacca

SEQ ID NO: 23098 - DNA, 16 bp, Homo sapiens
  source 1..16: mol_type = genomic DNA
taacttgaccgctctg

SEQ ID NO: 23099 - DNA, 17 bp, Homo sapiens
  source 1..17: mol_type = genomic DNA
taacttgaccgctctga

SEQ ID NO: 23100 - DNA, 18 bp, Homo sapiens
  source 1..18: mol_type = genomic DNA
taacttgaccgctctgac

SEQ ID NO: 23101 - DNA, 19 bp, Homo sapiens
  source 1..19: mol_type = genomic DNA
taacttgaccgctctgacc

SEQ ID NO: 23102 - DNA, 20 bp, Homo sapiens
  source 1..20: mol_type = genomic DNA
taacttgaccgctctgacca

SEQ ID NO: 23103 - DNA, 20 bp, Homo sapiens
  source 1..20: mol_type = genomic DNA
taactttgtcaaagttaaat

SEQ ID NO: 23104 - DNA, 27 bp, Homo sapiens
  source 1..27: mol_type = genomic DNA
taactttgtcaaagttaaattataggc

SEQ ID NO: 23105 - DNA, 28 bp, Homo sapiens
  source 1..28: mol_type = genomic DNA
taactttgtcaaagttaaattataggct

SEQ ID NO: 23106 - DNA, 29 bp, Homo sapiens
  source 1..29: mol_type = genomic DNA
taactttgtcaaagttaaattataggcta

SEQ ID NO: 23107 - DNA, 30 bp, Homo sapiens
  source 1..30: mol_type = genomic DNA
taactttgtcaaagttaaattataggctaa

SEQ ID NO: 23108 - DNA, 31 bp, Homo sapiens
  source 1..31: mol_type = genomic DNA
taactttgtcaaagttaaattataggctaaa

SEQ ID NO: 23109 - DNA, 16 bp, Homo sapiens
  source 1..16: mol_type = genomic DNA
taagagaaccaacacc

SEQ ID NO: 23110 - DNA, 17 bp, Homo sapiens
  source 1..17: mol_type = genomic DNA
taagagaaccaacacct

SEQ ID NO: 23111 - DNA, 18 bp, Homo sapiens
  source 1..18: mol_type = genomic DNA
taagagaaccaacacctc

SEQ ID NO: 23112 - DNA, 19 bp, Homo sapiens
  source 1..19: mol_type = genomic DNA
taagagaaccaacacctct

SEQ ID NO: 23113 - DNA, 20 bp, Homo sapiens
  source 1..20: mol_type = genomic DNA
taagagaaccaacacctctt

SEQ ID NO: 23114 - DNA, 22 bp, Homo sapiens
  source 1..22: mol_type = genomic DNA
taagagaaccaacacctcttta

SEQ ID NO: 23115 - DNA, 23 bp, Homo sapiens
  source 1..23: mol_type = genomic DNA
taagagaaccaacacctctttac

SEQ ID NO: 23116 - DNA, 27 bp, Homo sapiens
  source 1..27: mol_type = genomic DNA
taagagaaccaacacctctttacagtg

SEQ ID NO: 23117 - DNA, 28 bp, Homo sapiens
  source 1..28: mol_type = genomic DNA
taagagaaccaacacctctttacagtga

SEQ ID NO: 23118 - DNA, 29 bp, Homo sapiens
  source 1..29: mol_type = genomic DNA
taagagaaccaacacctctttacagtgac

SEQ ID NO: 23119 - DNA, 30 bp, Homo sapiens
  source 1..30: mol_type = genomic DNA
taagagaaccaacacctctttacagtgacc

SEQ ID NO: 23120 - DNA, 31 bp, Homo sapiens
  source 1..31: mol_type = genomic DNA
taagagaaccaacacctctttacagtgacca

SEQ ID NO: 23121 - DNA, 17 bp, Homo sapiens
  source 1..17: mol_type = genomic DNA
taagatccaatggacat

SEQ ID NO: 23122 - DNA, 19 bp, Homo sapiens
  source 1..19: mol_type = genomic DNA
taagatccaatggacatat

SEQ ID NO: 23123 - DNA, 16 bp, Homo sapiens
  source 1..16: mol_type = genomic DNA
taagatggcagagccc

SEQ ID NO: 23124 - DNA, 17 bp, Homo sapiens
  source 1..17: mol_type = genomic DNA
taagatggcagagcccg

SEQ ID NO: 23125 - DNA, 18 bp, Homo sapiens
  source 1..18: mol_type = genomic DNA
taagatggcagagcccgg

SEQ ID NO: 23126 - DNA, 19 bp, Homo sapiens
  source 1..19: mol_type = genomic DNA
taagatggcagagcccggt

SEQ ID NO: 23127 - DNA, 20 bp, Homo sapiens
  source 1..20: mol_type = genomic DNA
taagatggcagagcccggta

SEQ ID NO: 23128 - DNA, 21 bp, Homo sapiens
  source 1..21: mol_type = genomic DNA
taagatggcagagcccggtaa

SEQ ID NO: 23129 - DNA, 22 bp, Homo sapiens
  source 1..22: mol_type = genomic DNA
taagatggcagagcccggtaat

SEQ ID NO: 23130 - DNA, 23 bp, Homo sapiens
  source 1..23: mol_type = genomic DNA
taagatggcagagcccggtaatc

SEQ ID NO: 23131 - DNA, 24 bp, Homo sapiens
  source 1..24: mol_type = genomic DNA
taagatggcagagcccggtaatcg

SEQ ID NO: 23132 - DNA, 25 bp, Homo sapiens
  source 1..25: mol_type = genomic DNA
taagatggcagagcccggtaatcgc

SEQ ID NO: 23133 - DNA, 26 bp, Homo sapiens
  source 1..26: mol_type = genomic DNA
taagatggcagagcccggtaatcgca

SEQ ID NO: 23134 - DNA, 27 bp, Homo sapiens
  source 1..27: mol_type = genomic DNA
taagatggcagagcccggtaatcgcat

SEQ ID NO: 23135 - DNA, 28 bp, Homo sapiens
  source 1..28: mol_type = genomic DNA
taagatggcagagcccggtaatcgcata

SEQ ID NO: 23136 - DNA, 29 bp, Homo sapiens
  source 1..29: mol_type = genomic DNA
taagatggcagagcccggtaatcgcataa

SEQ ID NO: 23137 - DNA, 30 bp, Homo sapiens
  source 1..30: mol_type = genomic DNA
taagatggcagagcccggtaatcgcataaa

SEQ ID NO: 23138 - DNA, 31 bp, Homo sapiens
  source 1..31: mol_type = genomic DNA
taagatggcagagcccggtaatcgcataaaa

SEQ ID NO: 23139 - DNA, 32 bp, Homo sapiens
  source 1..32: mol_type = genomic DNA
taagatggcagagcccggtaatcgcataaaac

SEQ ID NO: 23140 - DNA, 33 bp, Homo sapiens
  source 1..33: mol_type = genomic DNA
taagatggcagagcccggtaatcgcataaaact

SEQ ID NO: 23141 - DNA, 35 bp, Homo sapiens
  source 1..35: mol_type = genomic DNA
taagatggcagagcccggtaatcgcataaaactta

SEQ ID NO: 23142 - DNA, 36 bp, Homo sapiens
  source 1..36: mol_type = genomic DNA
taagatggcagagcccggtaatcgcataaaacttaa

SEQ ID NO: 23143 - DNA, 37 bp, Homo sapiens
  source 1..37: mol_type = genomic DNA
taagatggcagagcccggtaatcgcataaaacttaaa

SEQ ID NO: 23144 - DNA, 38 bp, Homo sapiens
  source 1..38: mol_type = genomic DNA
taagatggcagagcccggtaatcgcataaaacttaaaa

SEQ ID NO: 23145 - DNA, 39 bp, Homo sapiens
  source 1..39: mol_type = genomic DNA
taagatggcagagcccggtaatcgcataaaacttaaaac

SEQ ID NO: 23146 - DNA, 40 bp, Homo sapiens
  source 1..40: mol_type = genomic DNA
taagatggcagagcccggtaatcgcataaaacttaaaact

SEQ ID NO: 23147 - DNA, 41 bp, Homo sapiens
  source 1..41: mol_type = genomic DNA
taagatggcagagcccggtaatcgcataaaacttaaaactt

SEQ ID NO: 23148 - DNA, 45 bp, Homo sapiens
  source 1..45: mol_type = genomic DNA
taagatggcagagcccggtaatcgcataaaacttaaaactttaca

SEQ ID NO: 23149 - DNA, 23 bp, Homo sapiens
  source 1..23: mol_type = genomic DNA
taagcactctggactctgaatcc

SEQ ID NO: 23150 - DNA, 40 bp, Homo sapiens
  source 1..40: mol_type = genomic DNA
taagcactctggactctgaatccagcgatccgagttcgag

SEQ ID NO: 23151 - DNA, 18 bp, Homo sapiens
  source 1..18: mol_type = genomic DNA
taagcatagctgccttcc

SEQ ID NO: 23152 - DNA, 16 bp, Homo sapiens
  source 1..16: mol_type = genomic DNA
taagccagggattgtg

SEQ ID NO: 23153 - DNA, 17 bp, Homo sapiens
  source 1..17: mol_type = genomic DNA
taagccagggattgtgg

SEQ ID NO: 23154 - DNA, 19 bp, Homo sapiens
  source 1..19: mol_type = genomic DNA
taagccagggattgtgggt

SEQ ID NO: 23155 - DNA, 20 bp, Homo sapiens
  source 1..20: mol_type = genomic DNA
taagccagggattgtgggtt

SEQ ID NO: 23156 - DNA, 21 bp, Homo sapiens
  source 1..21: mol_type = genomic DNA
taagccagggattgtgggttc

SEQ ID NO: 23157 - DNA, 22 bp, Homo sapiens
  source 1..22: mol_type = genomic DNA
taagccagggattgtgggttcg

SEQ ID NO: 23158 - DNA, 23 bp, Homo sapiens
  source 1..23: mol_type = genomic DNA
taagccagggattgtgggttcga

SEQ ID NO: 23159 - DNA, 24 bp, Homo sapiens
  source 1..24: mol_type = genomic DNA
taagccagggattgtgggttcgag

SEQ ID NO: 23160 - DNA, 31 bp, Homo sapiens
  source 1..31: mol_type = genomic DNA
taagccagggattgtgggttcgagtcccacc

SEQ ID NO: 23161 - DNA, 33 bp, Homo sapiens
  source 1..33: mol_type = genomic DNA
taagccagggattgtgggttcgagtcccacccg

SEQ ID NO: 23162 - DNA, 38 bp, Homo sapiens
  source 1..38: mol_type = genomic DNA
taagccagggattgtgggttcgagtcccacccggggta

SEQ ID NO: 23163 - DNA, 40 bp, Homo sapiens
  source 1..40: mol_type = genomic DNA
taagccagggattgtgggttcgagtcccacccggggtacc

SEQ ID NO: 23164 - DNA, 41 bp, Homo sapiens
  source 1..41: mol_type = genomic DNA
taagccagggattgtgggttcgagtcccacccggggtacca

SEQ ID NO: 23165 - DNA, 32 bp, Homo sapiens
  source 1..32: mol_type = genomic DNA
taagccagggattgtgggttcgagtcccacct

SEQ ID NO: 23166 - DNA, 33 bp, Homo sapiens
  source 1..33: mol_type = genomic DNA
taagccagggattgtgggttcgagtcccacctg

SEQ ID NO: 23167 - DNA, 34 bp, Homo sapiens
  source 1..34: mol_type = genomic DNA
taagccagggattgtgggttcgagtcccacctgg

SEQ ID NO: 23168 - DNA, 38 bp, Homo sapiens
  source 1..38: mol_type = genomic DNA
taagccagggattgtgggttcgagtcccacctggggta

SEQ ID NO: 23169 - DNA, 39 bp, Homo sapiens
  source 1..39: mol_type = genomic DNA
taagccagggattgtgggttcgagtcccacctggggtac

SEQ ID NO: 23170 - DNA, 40 bp, Homo sapiens
  source 1..40: mol_type = genomic DNA
taagccagggattgtgggttcgagtcccacctggggtacc

SEQ ID NO: 23171 - DNA, 41 bp, Homo sapiens
  source 1..41: mol_type = genomic DNA
taagccagggattgtgggttcgagtcccacctggggtacca

SEQ ID NO: 23172 - DNA, 38 bp, Homo sapiens
  source 1..38: mol_type = genomic DNA
taagccagggattgtgggttcgagtcccacctggggtg

SEQ ID NO: 23173 - DNA, 39 bp, Homo sapiens
  source 1..39: mol_type = genomic DNA
taagccagggattgtgggttcgagtcccacctggggtgc

SEQ ID NO: 23174 - DNA, 40 bp, Homo sapiens
  source 1..40: mol_type = genomic DNA
taagccagggattgtgggttcgagtcccacctggggtgcc

SEQ ID NO: 23175 - DNA, 41 bp, Homo sapiens
  source 1..41: mol_type = genomic DNA
taagccagggattgtgggttcgagtcccacctggggtgcca

SEQ ID NO: 23176 - DNA, 31 bp, Homo sapiens
  source 1..31: mol_type = genomic DNA
taagccagggattgtgggttcgagtcccatc

SEQ ID NO: 23177 - DNA, 38 bp, Homo sapiens
  source 1..38: mol_type = genomic DNA
taagccagggattgtgggttcgagtcccatctggggtg

SEQ ID NO: 23178 - DNA, 39 bp, Homo sapiens
  source 1..39: mol_type = genomic DNA
taagccagggattgtgggttcgagtcccatctggggtgc

SEQ ID NO: 23179 - DNA, 40 bp, Homo sapiens
  source 1..40: mol_type = genomic DNA
taagccagggattgtgggttcgagtcccatctggggtgcc

SEQ ID NO: 23180 - DNA, 41 bp, Homo sapiens
  source 1..41: mol_type = genomic DNA
taagccagggattgtgggttcgagtcccatctggggtgcca

SEQ ID NO: 23181 - DNA, 16 bp, Homo sapiens
  source 1..16: mol_type = genomic DNA
taagctatcgggccca

SEQ ID NO: 23182 - DNA, 17 bp, Homo sapiens
  source 1..17: mol_type = genomic DNA
taagctatcgggcccat

SEQ ID NO: 23183 - DNA, 18 bp, Homo sapiens
  source 1..18: mol_type = genomic DNA
taagctatcgggcccata

SEQ ID NO: 23184 - DNA, 19 bp, Homo sapiens
  source 1..19: mol_type = genomic DNA
taagctatcgggcccatac

SEQ ID NO: 23185 - DNA, 20 bp, Homo sapiens
  source 1..20: mol_type = genomic DNA
taagctatcgggcccatacc

SEQ ID NO: 23186 - DNA, 21 bp, Homo sapiens
  source 1..21: mol_type = genomic DNA
taagctatcgggcccataccc

SEQ ID NO: 23187 - DNA, 22 bp, Homo sapiens
  source 1..22: mol_type = genomic DNA
taagctatcgggcccatacccc

SEQ ID NO: 23188 - DNA, 23 bp, Homo sapiens
  source 1..23: mol_type = genomic DNA
taagctatcgggcccataccccg

SEQ ID NO: 23189 - DNA, 24 bp, Homo sapiens
  source 1..24: mol_type = genomic DNA
taagctatcgggcccataccccga

SEQ ID NO: 23190 - DNA, 25 bp, Homo sapiens
  source 1..25: mol_type = genomic DNA
taagctatcgggcccataccccgaa

SEQ ID NO: 23191 - DNA, 26 bp, Homo sapiens
  source 1..26: mol_type = genomic DNA
taagctatcgggcccataccccgaaa

SEQ ID NO: 23192 - DNA, 27 bp, Homo sapiens
  source 1..27: mol_type = genomic DNA
taagctatcgggcccataccccgaaaa

SEQ ID NO: 23193 - DNA, 28 bp, Homo sapiens
  source 1..28: mol_type = genomic DNA
taagctatcgggcccataccccgaaaat

SEQ ID NO: 23194 - DNA, 29 bp, Homo sapiens
  source 1..29: mol_type = genomic DNA
taagctatcgggcccataccccgaaaatg

SEQ ID NO: 23195 - DNA, 30 bp, Homo sapiens
  source 1..30: mol_type = genomic DNA
taagctatcgggcccataccccgaaaatgt

SEQ ID NO: 23196 - DNA, 31 bp, Homo sapiens
  source 1..31: mol_type = genomic DNA
taagctatcgggcccataccccgaaaatgtt

SEQ ID NO: 23197 - DNA, 32 bp, Homo sapiens
  source 1..32: mol_type = genomic DNA
taagctatcgggcccataccccgaaaatgttg

SEQ ID NO: 23198 - DNA, 33 bp, Homo sapiens
  source 1..33: mol_type = genomic DNA
taagctatcgggcccataccccgaaaatgttgg

SEQ ID NO: 23199 - DNA, 34 bp, Homo sapiens
  source 1..34: mol_type = genomic DNA
taagctatcgggcccataccccgaaaatgttggt

SEQ ID NO: 23200 - DNA, 35 bp, Homo sapiens
  source 1..35: mol_type = genomic DNA
taagctatcgggcccataccccgaaaatgttggtt

SEQ ID NO: 23201 - DNA, 36 bp, Homo sapiens
  source 1..36: mol_type = genomic DNA
taagctatcgggcccataccccgaaaatgttggtta

SEQ ID NO: 23202 - DNA, 37 bp, Homo sapiens
  source 1..37: mol_type = genomic DNA
taagctatcgggcccataccccgaaaatgttggttat

SEQ ID NO: 23203 - DNA, 38 bp, Homo sapiens
  source 1..38: mol_type = genomic DNA
taagctatcgggcccataccccgaaaatgttggttata

SEQ ID NO: 23204 - DNA, 39 bp, Homo sapiens
  source 1..39: mol_type = genomic DNA
taagctatcgggcccataccccgaaaatgttggttatac

SEQ ID NO: 23205 - DNA, 40 bp, Homo sapiens
  source 1..40: mol_type = genomic DNA
taagctatcgggcccataccccgaaaatgttggttatacc

SEQ ID NO: 23206 - DNA, 44 bp, Homo sapiens
  source 1..44: mol_type = genomic DNA
taagctatcgggcccataccccgaaaatgttggttatacccttc

SEQ ID NO: 23207 - DNA, 47 bp, Homo sapiens
  source 1..47: mol_type = genomic DNA
taagctatcgggcccataccccgaaaatgttggttatacccttcccg

SEQ ID NO: 23208 - DNA, 27 bp, Homo sapiens
  source 1..27: mol_type = genomic DNA
taaggcatcagcctccggagctgggga

SEQ ID NO: 23209 - DNA, 31 bp, Homo sapiens
  source 1..31: mol_type = genomic DNA
taaggcatcagcctccggagctggggattgt

SEQ ID NO: 23210 - DNA, 27 bp, Homo sapiens
  source 1..27: mol_type = genomic DNA
taaggcattggcctcctaagccaggga

SEQ ID NO: 23211 - DNA, 17 bp, Homo sapiens
  source 1..17: mol_type = genomic DNA
taaggcgccagactcaa

SEQ ID NO: 23212 - DNA, 22 bp, Homo sapiens
  source 1..22: mol_type = genomic DNA
taaggcgctgcgttcaggtcgc

SEQ ID NO: 23213 - DNA, 36 bp, Homo sapiens
  source 1..36: mol_type = genomic DNA
taagggcttagcttaattaaagtggctgatttgcgt

SEQ ID NO: 23214 - DNA, 16 bp, Homo sapiens
  source 1..16: mol_type = genomic DNA
taaggtcagctaaata

SEQ ID NO: 23215 - DNA, 17 bp, Homo sapiens
  source 1..17: mol_type = genomic DNA
taaggtcagctaaataa

SEQ ID NO: 23216 - DNA, 18 bp, Homo sapiens
  source 1..18: mol_type = genomic DNA
taaggtcagctaaataag

SEQ ID NO: 23217 - DNA, 19 bp, Homo sapiens
  source 1..19: mol_type = genomic DNA
taaggtcagctaaataagc

SEQ ID NO: 23218 - DNA, 20 bp, Homo sapiens
  source 1..20: mol_type = genomic DNA
taaggtcagctaaataagct

SEQ ID NO: 23219 - DNA, 23 bp, Homo sapiens
  source 1..23: mol_type = genomic DNA
taaggtcagctaaataagctatc

SEQ ID NO: 23220 - DNA, 24 bp, Homo sapiens
  source 1..24: mol_type = genomic DNA
taaggtcagctaaataagctatcg

SEQ ID NO: 23221 - DNA, 26 bp, Homo sapiens
  source 1..26: mol_type = genomic DNA
taaggtcagctaaataagctatcggg

SEQ ID NO: 23222 - DNA, 27 bp, Homo sapiens
  source 1..27: mol_type = genomic DNA
taaggtcagctaaataagctatcgggc

SEQ ID NO: 23223 - DNA, 28 bp, Homo sapiens
  source 1..28: mol_type = genomic DNA
taaggtcagctaaataagctatcgggcc

SEQ ID NO: 23224 - DNA, 29 bp, Homo sapiens
  source 1..29: mol_type = genomic DNA
taaggtcagctaaataagctatcgggccc

SEQ ID NO: 23225 - DNA, 30 bp, Homo sapiens
  source 1..30: mol_type = genomic DNA
taaggtcagctaaataagctatcgggccca

SEQ ID NO: 23226 - DNA, 31 bp, Homo sapiens
  source 1..31: mol_type = genomic DNA
taaggtcagctaaataagctatcgggcccat

SEQ ID NO: 23227 - DNA, 32 bp, Homo sapiens
  source 1..32: mol_type = genomic DNA
taaggtcagctaaataagctatcgggcccata

SEQ ID NO: 23228 - DNA, 33 bp, Homo sapiens
  source 1..33: mol_type = genomic DNA
taaggtcagctaaataagctatcgggcccatac

SEQ ID NO: 23229 - DNA, 34 bp, Homo sapiens
  source 1..34: mol_type = genomic DNA
taaggtcagctaaataagctatcgggcccatacc

SEQ ID NO: 23230 - DNA, 35 bp, Homo sapiens
  source 1..35: mol_type = genomic DNA
taaggtcagctaaataagctatcgggcccataccc

SEQ ID NO: 23231 - DNA, 36 bp, Homo sapiens
  source 1..36: mol_type = genomic DNA
taaggtcagctaaataagctatcgggcccatacccc

SEQ ID NO: 23232 - DNA, 38 bp, Homo sapiens
  source 1..38: mol_type = genomic DNA
taaggtcagctaaataagctatcgggcccataccccga

SEQ ID NO: 23233 - DNA, 39 bp, Homo sapiens
  source 1..39: mol_type = genomic DNA
taaggtcagctaaataagctatcgggcccataccccgaa

SEQ ID NO: 23234 - DNA, 40 bp, Homo sapiens
  source 1..40: mol_type = genomic DNA
taaggtcagctaaataagctatcgggcccataccccgaaa

SEQ ID NO: 23235 - DNA, 43 bp, Homo sapiens
  source 1..43: mol_type = genomic DNA
taaggtcagctaaataagctatcgggcccataccccgaaaatg

SEQ ID NO: 23236 - DNA, 45 bp, Homo sapiens
  source 1..45: mol_type = genomic DNA
taaggtcagctaaataagctatcgggcccataccccgaaaatgtt

SEQ ID NO: 23237 - DNA, 47 bp, Homo sapiens
  source 1..47: mol_type = genomic DNA
taaggtcagctaaataagctatcgggcccataccccgaaaatgttgg

SEQ ID NO: 23238 - DNA, 48 bp, Homo sapiens
  source 1..48: mol_type = genomic DNA
taaggtcagctaaataagctatcgggcccataccccgaaaatgttggt

SEQ ID NO: 23239 - DNA, 16 bp, Homo sapiens
  source 1..16: mol_type = genomic DNA
taagtcccattggtct

SEQ ID NO: 23240 - DNA, 19 bp, Homo sapiens
  source 1..19: mol_type = genomic DNA
taagtcccattggtctagc

SEQ ID NO: 23241 - DNA, 20 bp, Homo sapiens
  source 1..20: mol_type = genomic DNA
taagtcccattggtctagcc

SEQ ID NO: 23242 - DNA, 21 bp, Homo sapiens
  source 1..21: mol_type = genomic DNA
taagtcccattggtctagcca

SEQ ID NO: 23243 - DNA, 16 bp, Homo sapiens
  source 1..16: mol_type = genomic DNA
taagtgtttgtgggtt

SEQ ID NO: 23244 - DNA, 17 bp, Homo sapiens
  source 1..17: mol_type = genomic DNA
taagtgtttgtgggttt

SEQ ID NO: 23245 - DNA, 18 bp, Homo sapiens
  source 1..18: mol_type = genomic DNA
taagtgtttgtgggttta

SEQ ID NO: 23246 - DNA, 19 bp, Homo sapiens
  source 1..19: mol_type = genomic DNA
taagtgtttgtgggtttaa

SEQ ID NO: 23247 - DNA, 20 bp, Homo sapiens
  source 1..20: mol_type = genomic DNA
taagtgtttgtgggtttaag

SEQ ID NO: 23248 - DNA, 22 bp, Homo sapiens
  source 1..22: mol_type = genomic DNA
taagtgtttgtgggtttaagtc

SEQ ID NO: 23249 - DNA, 23 bp, Homo sapiens
  source 1..23: mol_type = genomic DNA
taagtgtttgtgggtttaagtcc

SEQ ID NO: 23250 - DNA, 29 bp, Homo sapiens
  source 1..29: mol_type = genomic DNA
taagtgtttgtgggtttaagtcccattgg

SEQ ID NO: 23251 - DNA, 31 bp, Homo sapiens
  source 1..31: mol_type = genomic DNA
taagtgtttgtgggtttaagtcccattggtc

SEQ ID NO: 23252 - DNA, 32 bp, Homo sapiens
  source 1..32: mol_type = genomic DNA
taagtgtttgtgggtttaagtcccattggtct

SEQ ID NO: 23253 - DNA, 33 bp, Homo sapiens
  source 1..33: mol_type = genomic DNA
taagtgtttgtgggtttaagtcccattggtcta

SEQ ID NO: 23254 - DNA, 34 bp, Homo sapiens
  source 1..34: mol_type = genomic DNA
taagtgtttgtgggtttaagtcccattggtctag

SEQ ID NO: 23255 - DNA, 35 bp, Homo sapiens
  source 1..35: mol_type = genomic DNA
taagtgtttgtgggtttaagtcccattggtctagc

SEQ ID NO: 23256 - DNA, 36 bp, Homo sapiens
  source 1..36: mol_type = genomic DNA
taagtgtttgtgggtttaagtcccattggtctagcc

SEQ ID NO: 23257 - DNA, 37 bp, Homo sapiens
  source 1..37: mol_type = genomic DNA
taagtgtttgtgggtttaagtcccattggtctagcca

SEQ ID NO: 23258 - DNA, 19 bp, Homo sapiens
  source 1..19: mol_type = genomic DNA
taagttaaagattaagaga

SEQ ID NO: 23259 - DNA, 20 bp, Homo sapiens
  source 1..20: mol_type = genomic DNA
taagttaaagattaagagaa

SEQ ID NO: 23260 - DNA, 21 bp, Homo sapiens
  source 1..21: mol_type = genomic DNA
taagttaaagattaagagaac

SEQ ID NO: 23261 - DNA, 22 bp, Homo sapiens
  source 1..22: mol_type = genomic DNA
taagttaaagattaagagaacc

SEQ ID NO: 23262 - DNA, 23 bp, Homo sapiens
  source 1..23: mol_type = genomic DNA
taagttaaagattaagagaacca

SEQ ID NO: 23263 - DNA, 24 bp, Homo sapiens
  source 1..24: mol_type = genomic DNA
taagttaaagattaagagaaccaa

SEQ ID NO: 23264 - DNA, 25 bp, Homo sapiens
  source 1..25: mol_type = genomic DNA
taagttaaagattaagagaaccaac

SEQ ID NO: 23265 - DNA, 26 bp, Homo sapiens
  source 1..26: mol_type = genomic DNA
taagttaaagattaagagaaccaaca

SEQ ID NO: 23266 - DNA, 27 bp, Homo sapiens
  source 1..27: mol_type = genomic DNA
taagttaaagattaagagaaccaacac

SEQ ID NO: 23267 - DNA, 28 bp, Homo sapiens
  source 1..28: mol_type = genomic DNA
taagttaaagattaagagaaccaacacc

SEQ ID NO: 23268 - DNA, 29 bp, Homo sapiens
  source 1..29: mol_type = genomic DNA
taagttaaagattaagagaaccaacacct

SEQ ID NO: 23269 - DNA, 30 bp, Homo sapiens
  source 1..30: mol_type = genomic DNA
taagttaaagattaagagaaccaacacctc

SEQ ID NO: 23270 - DNA, 31 bp, Homo sapiens
  source 1..31: mol_type = genomic DNA
taagttaaagattaagagaaccaacacctct

SEQ ID NO: 23271 - DNA, 32 bp, Homo sapiens
  source 1..32: mol_type = genomic DNA
taagttaaagattaagagaaccaacacctctt

SEQ ID NO: 23272 - DNA, 33 bp, Homo sapiens
  source 1..33: mol_type = genomic DNA
taagttaaagattaagagaaccaacacctcttt

SEQ ID NO: 23273 - DNA, 34 bp, Homo sapiens
  source 1..34: mol_type = genomic DNA
taagttaaagattaagagaaccaacacctcttta

SEQ ID NO: 23274 - DNA, 36 bp, Homo sapiens
  source 1..36: mol_type = genomic DNA
taagttaaagattaagagaaccaacacctctttaca

SEQ ID NO: 23275 - DNA, 37 bp, Homo sapiens
  source 1..37: mol_type = genomic DNA
taagttaaagattaagagaaccaacacctctttacag

SEQ ID NO: 23276 - DNA, 38 bp, Homo sapiens
  source 1..38: mol_type = genomic DNA
taagttaaagattaagagaaccaacacctctttacagt

SEQ ID NO: 23277 - DNA, 39 bp, Homo sapiens
  source 1..39: mol_type = genomic DNA
taagttaaagattaagagaaccaacacctctttacagtg

SEQ ID NO: 23278 - DNA, 40 bp, Homo sapiens
  source 1..40: mol_type = genomic DNA
taagttaaagattaagagaaccaacacctctttacagtga

SEQ ID NO: 23279 - DNA, 41 bp, Homo sapiens
  source 1..41: mol_type = genomic DNA
taagttaaagattaagagaaccaacacctctttacagtgac

SEQ ID NO: 23280 - DNA, 42 bp, Homo sapiens
  source 1..42: mol_type = genomic DNA
taagttaaagattaagagaaccaacacctctttacagtgacc

SEQ ID NO: 23281 - DNA, 43 bp, Homo sapiens
  source 1..43: mol_type = genomic DNA
taagttaaagattaagagaaccaacacctctttacagtgacca

SEQ ID NO: 23282 - DNA, 23 bp, Homo sapiens
  source 1..23: mol_type = genomic DNA
taagttgcaatacttaatttctg

SEQ ID NO: 23283 - DNA, 24 bp, Homo sapiens
  source 1..24: mol_type = genomic DNA
taagttgcaatacttaatttctgc

SEQ ID NO: 23284 - DNA, 25 bp, Homo sapiens
  source 1..25: mol_type = genomic DNA
taagttgcaatacttaatttctgcc

SEQ ID NO: 23285 - DNA, 26 bp, Homo sapiens
  source 1..26: mol_type = genomic DNA
taagttgcaatacttaatttctgcca

SEQ ID NO: 23286 - DNA, 16 bp, Homo sapiens
  source 1..16: mol_type = genomic DNA
taatacaccagtcttg

SEQ ID NO: 23287 - DNA, 17 bp, Homo sapiens
  source 1..17: mol_type = genomic DNA
taatacaccagtcttgt

SEQ ID NO: 23288 - DNA, 27 bp, Homo sapiens
  source 1..27: mol_type = genomic DNA
taatacaccagtcttgtaaaccggaga

SEQ ID NO: 23289 - DNA, 34 bp, Homo sapiens
  source 1..34: mol_type = genomic DNA
taatacaccagtcttgtaaaccggagatgaaaac

SEQ ID NO: 23290 - DNA, 35 bp, Homo sapiens
  source 1..35: mol_type = genomic DNA
taatacaccagtcttgtaaaccggagatgaaaacc

SEQ ID NO: 23291 - DNA, 36 bp, Homo sapiens
  source 1..36: mol_type = genomic DNA
taatacaccagtcttgtaaaccggagatgaaaacct

SEQ ID NO: 23292 - DNA, 16 bp, Homo sapiens
  source 1..16: mol_type = genomic DNA
taataggagcttaaac

SEQ ID NO: 23293 - DNA, 17 bp, Homo sapiens
  source 1..17: mol_type = genomic DNA
taataggagcttaaacc

SEQ ID NO: 23294 - DNA, 18 bp, Homo sapiens
  source 1..18: mol_type = genomic DNA
taataggagcttaaaccc

SEQ ID NO: 23295 - DNA, 19 bp, Homo sapiens
  source 1..19: mol_type = genomic DNA
taataggagcttaaacccc

SEQ ID NO: 23296 - DNA, 20 bp, Homo sapiens
  source 1..20: mol_type = genomic DNA
taataggagcttaaaccccc

SEQ ID NO: 23297 - DNA, 21 bp, Homo sapiens
  source 1..21: mol_type = genomic DNA
taataggagcttaaaccccct

SEQ ID NO: 23298 - DNA, 22 bp, Homo sapiens
  source 1..22: mol_type = genomic DNA
taataggagcttaaaccccctt

SEQ ID NO: 23299 - DNA, 23 bp, Homo sapiens
  source 1..23: mol_type = genomic DNA
taataggagcttaaaccccctta

SEQ ID NO: 23300 - DNA, 27 bp, Homo sapiens
  source 1..27: mol_type = genomic DNA
taataggagcttaaacccccttatttc

SEQ ID NO: 23301 - DNA, 28 bp, Homo sapiens
  source 1..28: mol_type = genomic DNA
taataggagcttaaacccccttatttct

SEQ ID NO: 23302 - DNA, 31 bp, Homo sapiens
  source 1..31: mol_type = genomic DNA
taataggagcttaaacccccttatttctacc

SEQ ID NO: 23303 - DNA, 32 bp, Homo sapiens
  source 1..32: mol_type = genomic DNA
taataggagcttaaacccccttatttctacca

SEQ ID NO: 23304 - DNA, 17 bp, Homo sapiens
  source 1..17: mol_type = genomic DNA
taatcatatttaccaac

SEQ ID NO: 23305 - DNA, 18 bp, Homo sapiens
  source 1..18: mol_type = genomic DNA
taatcatatttaccaacc

SEQ ID NO: 23306 - DNA, 19 bp, Homo sapiens
  source 1..19: mol_type = genomic DNA
taatcatatttaccaacca

SEQ ID NO: 23307 - DNA, 38 bp, Homo sapiens
  source 1..38: mol_type = genomic DNA
taatccagaggttccgggttcgagtcccggcagagatg

SEQ ID NO: 23308 - DNA, 40 bp, Homo sapiens
  source 1..40: mol_type = genomic DNA
taatccagaggttccgggttcgagtcccggcagagatgcc

SEQ ID NO: 23309 - DNA, 41 bp, Homo sapiens
  source 1..41: mol_type = genomic DNA
taatccagaggttccgggttcgagtcccggcagagatgcca

SEQ ID NO: 23310 - DNA, 18 bp, Homo sapiens
  source 1..18: mol_type = genomic DNA
taatccattgtgctctgc

SEQ ID NO: 23311 - DNA, 19 bp, Homo sapiens
  source 1..19: mol_type = genomic DNA
taatccattgtgctctgca

SEQ ID NO: 23312 - DNA, 20 bp, Homo sapiens
  source 1..20: mol_type = genomic DNA
taatccattgtgctctgcac

SEQ ID NO: 23313 - DNA, 21 bp, Homo sapiens
  source 1..21: mol_type = genomic DNA
taatccattgtgctctgcacg

SEQ ID NO: 23314 - DNA, 22 bp, Homo sapiens
  source 1..22: mol_type = genomic DNA
taatccattgtgctctgcacgc

SEQ ID NO: 23315 - DNA, 23 bp, Homo sapiens
  source 1..23: mol_type = genomic DNA
taatccattgtgctctgcacgcg

SEQ ID NO: 23316 - DNA, 24 bp, Homo sapiens
  source 1..24: mol_type = genomic DNA
taatccattgtgctctgcacgcgt

SEQ ID NO: 23317 - DNA, 42 bp, Homo sapiens
  source 1..42: mol_type = genomic DNA
taatccattgtgctctgcacgcgtgggttcgaatcccaccct

SEQ ID NO: 23318 - DNA, 42 bp, Homo sapiens
  source 1..42: mol_type = genomic DNA
taatccattgtgctctgcacgcgtgggttcgaatcccatcct

SEQ ID NO: 23319 - DNA, 21 bp, Homo sapiens
  source 1..21: mol_type = genomic DNA
taatccattgtgctttgcacg

SEQ ID NO: 23320 - DNA, 23 bp, Homo sapiens
  source 1..23: mol_type = genomic DNA
taatccattgtgctttgcacgcg

SEQ ID NO: 23321 - DNA, 24 bp, Homo sapiens
  source 1..24: mol_type = genomic DNA
taatccattgtgctttgcacgcgt

SEQ ID NO: 23322 - DNA, 42 bp, Homo sapiens
  source 1..42: mol_type = genomic DNA
taatccattgtgctttgcacgcgtgggttcgaatcccatcct

SEQ ID NO: 23323 - DNA, 16 bp, Homo sapiens
  source 1..16: mol_type = genomic DNA
taatcccagggtcgtg

SEQ ID NO: 23324 - DNA, 40 bp, Homo sapiens
  source 1..40: mol_type = genomic DNA
taatcccagggtcgtgggttcgagccccacgttgggcgcc

SEQ ID NO: 23325 - DNA, 41 bp, Homo sapiens
  source 1..41: mol_type = genomic DNA
taatcccagggtcgtgggttcgagccccacgttgggcgcca

SEQ ID NO: 23326 - DNA, 22 bp, Homo sapiens
  source 1..22: mol_type = genomic DNA
taatcgcataaaacttaaaact

SEQ ID NO: 23327 - DNA, 23 bp, Homo sapiens
  source 1..23: mol_type = genomic DNA
taatcgcataaaacttaaaactt

SEQ ID NO: 23328 - DNA, 24 bp, Homo sapiens
  source 1..24: mol_type = genomic DNA
taatcgcataaaacttaaaacttt

SEQ ID NO: 23329 - DNA, 27 bp, Homo sapiens
  source 1..27: mol_type = genomic DNA
taatcgcataaaacttaaaactttaca

SEQ ID NO: 23330 - DNA, 28 bp, Homo sapiens
  source 1..28: mol_type = genomic DNA
taatcgcataaaacttaaaactttacag

SEQ ID NO: 23331 - DNA, 34 bp, Homo sapiens
  source 1..34: mol_type = genomic DNA
taatcgcataaaacttaaaactttacagtcagag

SEQ ID NO: 23332 - DNA, 38 bp, Homo sapiens
  source 1..38: mol_type = genomic DNA
taatcgcataaaacttaaaactttacagtcagaggttc

SEQ ID NO: 23333 - DNA, 37 bp, Homo sapiens
  source 1..37: mol_type = genomic DNA
taatctcagggtcgtgggttcgagccccacgttgggc

SEQ ID NO: 23334 - DNA, 38 bp, Homo sapiens
  source 1..38: mol_type = genomic DNA
taatctcagggtcgtgggttcgagccccacgttgggcg

SEQ ID NO: 23335 - DNA, 39 bp, Homo sapiens
  source 1..39: mol_type = genomic DNA
taatctcagggtcgtgggttcgagccccacgttgggcgc

SEQ ID NO: 23336 - DNA, 40 bp, Homo sapiens
  source 1..40: mol_type = genomic DNA
taatctcagggtcgtgggttcgagccccacgttgggcgcc

SEQ ID NO: 23337 - DNA, 41 bp, Homo sapiens
  source 1..41: mol_type = genomic DNA
taatctcagggtcgtgggttcgagccccacgttgggcgcca

SEQ ID NO: 23338 - DNA, 16 bp, Homo sapiens
  source 1..16: mol_type = genomic DNA
taatctgaaggtcctg

SEQ ID NO: 23339 - DNA, 17 bp, Homo sapiens
  source 1..17: mol_type = genomic DNA
taatctgaaggtcctga

SEQ ID NO: 23340 - DNA, 18 bp, Homo sapiens
  source 1..18: mol_type = genomic DNA
taatctgaaggtcctgag

SEQ ID NO: 23341 - DNA, 19 bp, Homo sapiens
  source 1..19: mol_type = genomic DNA
taatctgaaggtcctgagt

SEQ ID NO: 23342 - DNA, 20 bp, Homo sapiens
  source 1..20: mol_type = genomic DNA
taatctgaaggtcctgagtt

SEQ ID NO: 23343 - DNA, 21 bp, Homo sapiens
  source 1..21: mol_type = genomic DNA
taatctgaaggtcctgagttc

SEQ ID NO: 23344 - DNA, 22 bp, Homo sapiens
  source 1..22: mol_type = genomic DNA
taatctgaaggtcctgagttcg

SEQ ID NO: 23345 - DNA, 26 bp, Homo sapiens
  source 1..26: mol_type = genomic DNA
taatctgaaggtcctgagttcgaacc

SEQ ID NO: 23346 - DNA, 35 bp, Homo sapiens
  source 1..35: mol_type = genomic DNA
taatctgaaggtcctgagttcgaacctcagagggg

SEQ ID NO: 23347 - DNA, 37 bp, Homo sapiens
  source 1..37: mol_type = genomic DNA
taatctgaaggtcctgagttcgaacctcagagggggc

SEQ ID NO: 23348 - DNA, 38 bp, Homo sapiens
  source 1..38: mol_type = genomic DNA
taatctgaaggtcctgagttcgaacctcagagggggca

SEQ ID NO: 23349 - DNA, 39 bp, Homo sapiens
  source 1..39: mol_type = genomic DNA
taatctgaaggtcctgagttcgaacctcagagggggcac

SEQ ID NO: 23350 - DNA, 40 bp, Homo sapiens
  source 1..40: mol_type = genomic DNA
taatctgaaggtcctgagttcgaacctcagagggggcacc

SEQ ID NO: 23351 - DNA, 41 bp, Homo sapiens
  source 1..41: mol_type = genomic DNA
taatctgaaggtcctgagttcgaacctcagagggggcacca

SEQ ID NO: 23352 - DNA, 38 bp, Homo sapiens
  source 1..38: mol_type = genomic DNA
taatctgaaggtcctgagttcgagcctcagagagggca

SEQ ID NO: 23353 - DNA, 41 bp, Homo sapiens
  source 1..41: mol_type = genomic DNA
taatctgaaggtcctgagttcgagcctcagagagggcacca

SEQ ID NO: 23354 - DNA, 16 bp, Homo sapiens
  source 1..16: mol_type = genomic DNA
taatctgaaggtcgtg

SEQ ID NO: 23355 - DNA, 17 bp, Homo sapiens
  source 1..17: mol_type = genomic DNA
taatctgaaggtcgtga

SEQ ID NO: 23356 - DNA, 19 bp, Homo sapiens
  source 1..19: mol_type = genomic DNA
taatctgaaggtcgtgagt

SEQ ID NO: 23357 - DNA, 20 bp, Homo sapiens
  source 1..20: mol_type = genomic DNA
taatctgaaggtcgtgagtt

SEQ ID NO: 23358 - DNA, 21 bp, Homo sapiens
  source 1..21: mol_type = genomic DNA
taatctgaaggtcgtgagttc

SEQ ID NO: 23359 - DNA, 22 bp, Homo sapiens
  source 1..22: mol_type = genomic DNA
taatctgaaggtcgtgagttcg

SEQ ID NO: 23360 - DNA, 35 bp, Homo sapiens
  source 1..35: mol_type = genomic DNA
taatctgaaggtcgtgagttcgagcctcacacggg

SEQ ID NO: 23361 - DNA, 36 bp, Homo sapiens
  source 1..36: mol_type = genomic DNA
taatctgaaggtcgtgagttcgagcctcacacgggg

SEQ ID NO: 23362 - DNA, 37 bp, Homo sapiens
  source 1..37: mol_type = genomic DNA
taatctgaaggtcgtgagttcgagcctcacacggggc

SEQ ID NO: 23363 - DNA, 38 bp, Homo sapiens
  source 1..38: mol_type = genomic DNA
taatctgaaggtcgtgagttcgagcctcacacggggca

SEQ ID NO: 23364 - DNA, 39 bp, Homo sapiens
  source 1..39: mol_type = genomic DNA
taatctgaaggtcgtgagttcgagcctcacacggggcac

SEQ ID NO: 23365 - DNA, 40 bp, Homo sapiens
  source 1..40: mol_type = genomic DNA
taatctgaaggtcgtgagttcgagcctcacacggggcacc

SEQ ID NO: 23366 - DNA, 41 bp, Homo sapiens
  source 1..41: mol_type = genomic DNA
taatctgaaggtcgtgagttcgagcctcacacggggcacca

SEQ ID NO: 23367 - DNA, 25 bp, Homo sapiens
  source 1..25: mol_type = genomic DNA
taatctgaaggtcgtgagttcgatc

SEQ ID NO: 23368 - DNA, 28 bp, Homo sapiens
  source 1..28: mol_type = genomic DNA
taatctgaaggtcgtgagttcgatcctc

SEQ ID NO: 23369 - DNA, 38 bp, Homo sapiens
  source 1..38: mol_type = genomic DNA
taatctgaaggtcgtgagttcgatcctcacacggggca

SEQ ID NO: 23370 - DNA, 39 bp, Homo sapiens
  source 1..39: mol_type = genomic DNA
taatctgaaggtcgtgagttcgatcctcacacggggcac

SEQ ID NO: 23371 - DNA, 40 bp, Homo sapiens
  source 1..40: mol_type = genomic DNA
taatctgaaggtcgtgagttcgatcctcacacggggcacc

SEQ ID NO: 23372 - DNA, 41 bp, Homo sapiens
  source 1..41: mol_type = genomic DNA
taatctgaaggtcgtgagttcgatcctcacacggggcacca

SEQ ID NO: 23373 - DNA, 22 bp, Homo sapiens
  source 1..22: mol_type = genomic DNA
taatctgagggtccagggttca

SEQ ID NO: 23374 - DNA, 23 bp, Homo sapiens
  source 1..23: mol_type = genomic DNA
taatctgagggtccagggttcaa

SEQ ID NO: 23375 - DNA, 24 bp, Homo sapiens
  source 1..24: mol_type = genomic DNA
taatctgagggtccagggttcaag

SEQ ID NO: 23376 - DNA, 40 bp, Homo sapiens
  source 1..40: mol_type = genomic DNA
taatctgagggtccagggttcaagtccctgttcgggcgcc

SEQ ID NO: 23377 - DNA, 16 bp, Homo sapiens
  source 1..16: mol_type = genomic DNA
taatgccgaggttgtg

SEQ ID NO: 23378 - DNA, 20 bp, Homo sapiens
  source 1..20: mol_type = genomic DNA
taatgccgaggttgtgagtt

SEQ ID NO: 23379 - DNA, 21 bp, Homo sapiens
  source 1..21: mol_type = genomic DNA
taatgccgaggttgtgagttc

SEQ ID NO: 23380 - DNA, 22 bp, Homo sapiens
  source 1..22: mol_type = genomic DNA
taatgccgaggttgtgagttcg

SEQ ID NO: 23381 - DNA, 23 bp, Homo sapiens
  source 1..23: mol_type = genomic DNA
taatgccgaggttgtgagttcga

SEQ ID NO: 23382 - DNA, 24 bp, Homo sapiens
  source 1..24: mol_type = genomic DNA
taatgccgaggttgtgagttcgag

SEQ ID NO: 23383 - DNA, 25 bp, Homo sapiens
  source 1..25: mol_type = genomic DNA
taatgccgaggttgtgagttcgagc

SEQ ID NO: 23384 - DNA, 35 bp, Homo sapiens
  source 1..35: mol_type = genomic DNA
taatgccgaggttgtgagttcgagcctcacctgga

SEQ ID NO: 23385 - DNA, 40 bp, Homo sapiens
  source 1..40: mol_type = genomic DNA
taatgccgaggttgtgagttcgagcctcacctggagcacc

SEQ ID NO: 23386 - DNA, 16 bp, Homo sapiens
  source 1..16: mol_type = genomic DNA
taatggataaggcact

SEQ ID NO: 23387 - DNA, 17 bp, Homo sapiens
  source 1..17: mol_type = genomic DNA
taatggataaggcactg

SEQ ID NO: 23388 - DNA, 18 bp, Homo sapiens
  source 1..18: mol_type = genomic DNA
taatggataaggcactgg

SEQ ID NO: 23389 - DNA, 19 bp, Homo sapiens
  source 1..19: mol_type = genomic DNA
taatggataaggcactggc

SEQ ID NO: 23390 - DNA, 24 bp, Homo sapiens
  source 1..24: mol_type = genomic DNA
taatggataaggcactggcctcct

SEQ ID NO: 23391 - DNA, 16 bp, Homo sapiens
  source 1..16: mol_type = genomic DNA
taatggataaggcatc

SEQ ID NO: 23392 - DNA, 17 bp, Homo sapiens
  source 1..17: mol_type = genomic DNA
taatggataaggcatca

SEQ ID NO: 23393 - DNA, 18 bp, Homo sapiens
  source 1..18: mol_type = genomic DNA
taatggataaggcatcag

SEQ ID NO: 23394 - DNA, 19 bp, Homo sapiens
  source 1..19: mol_type = genomic DNA
taatggataaggcatcagc

SEQ ID NO: 23395 - DNA, 21 bp, Homo sapiens
  source 1..21: mol_type = genomic DNA
taatggataaggcatcagcct

SEQ ID NO: 23396 - DNA, 22 bp, Homo sapiens
  source 1..22: mol_type = genomic DNA
taatggataaggcatcagcctc

SEQ ID NO: 23397 - DNA, 23 bp, Homo sapiens
  source 1..23: mol_type = genomic DNA
taatggataaggcatcagcctcc

SEQ ID NO: 23398 - DNA, 24 bp, Homo sapiens
  source 1..24: mol_type = genomic DNA
taatggataaggcatcagcctccg

SEQ ID NO: 23399 - DNA, 29 bp, Homo sapiens
  source 1..29: mol_type = genomic DNA
taatggataaggcatcagcctccggagct

SEQ ID NO: 23400 - DNA, 30 bp, Homo sapiens
  source 1..30: mol_type = genomic DNA
taatggataaggcatcagcctccggagctg

SEQ ID NO: 23401 - DNA, 31 bp, Homo sapiens
  source 1..31: mol_type = genomic DNA
taatggataaggcatcagcctccggagctgg

SEQ ID NO: 23402 - DNA, 32 bp, Homo sapiens
  source 1..32: mol_type = genomic DNA
taatggataaggcatcagcctccggagctggg

SEQ ID NO: 23403 - DNA, 16 bp, Homo sapiens
  source 1..16: mol_type = genomic DNA
taatggataaggcatt

SEQ ID NO: 23404 - DNA, 17 bp, Homo sapiens
  source 1..17: mol_type = genomic DNA
taatggataaggcattg

SEQ ID NO: 23405 - DNA, 18 bp, Homo sapiens
  source 1..18: mol_type = genomic DNA
taatggataaggcattgg

SEQ ID NO: 23406 - DNA, 19 bp, Homo sapiens
  source 1..19: mol_type = genomic DNA
taatggataaggcattggc

SEQ ID NO: 23407 - DNA, 29 bp, Homo sapiens
  source 1..29: mol_type = genomic DNA
taatggataaggcattggcctcctaagcc

SEQ ID NO: 23408 - DNA, 16 bp, Homo sapiens
  source 1..16: mol_type = genomic DNA
taatggataaggcgtc

SEQ ID NO: 23409 - DNA, 17 bp, Homo sapiens
  source 1..17: mol_type = genomic DNA
taatggataaggcgtct

SEQ ID NO: 23410 - DNA, 18 bp, Homo sapiens
  source 1..18: mol_type = genomic DNA
taatggataaggcgtctg

SEQ ID NO: 23411 - DNA, 19 bp, Homo sapiens
  source 1..19: mol_type = genomic DNA
taatggataaggcgtctga

SEQ ID NO: 23412 - DNA, 21 bp, Homo sapiens
  source 1..21: mol_type = genomic DNA
taatggataaggcgtctgact

SEQ ID NO: 23413 - DNA, 33 bp, Homo sapiens
  source 1..33: mol_type = genomic DNA
taatggataaggcgtctgacttcggatcagaag

SEQ ID NO: 23414 - DNA, 23 bp, Homo sapiens
  source 1..23: mol_type = genomic DNA
taatggataaggcgtctgattcc

SEQ ID NO: 23415 - DNA, 24 bp, Homo sapiens
  source 1..24: mol_type = genomic DNA
taatggataaggcgtctgattccg

SEQ ID NO: 23416 - DNA, 18 bp, Homo sapiens
  source 1..18: mol_type = genomic DNA
taatggtaagcactctgg

SEQ ID NO: 23417 - DNA, 16 bp, Homo sapiens
  source 1..16: mol_type = genomic DNA
taatggtgagcactct

SEQ ID NO: 23418 - DNA, 17 bp, Homo sapiens
  source 1..17: mol_type = genomic DNA
taatggtgagcactctg

SEQ ID NO: 23419 - DNA, 18 bp, Homo sapiens
  source 1..18: mol_type = genomic DNA
taatggtgagcactctgg

SEQ ID NO: 23420 - DNA, 19 bp, Homo sapiens
  source 1..19: mol_type = genomic DNA
taatggtgagcactctgga

SEQ ID NO: 23421 - DNA, 20 bp, Homo sapiens
  source 1..20: mol_type = genomic DNA
taatggtgagcactctggac

SEQ ID NO: 23422 - DNA, 21 bp, Homo sapiens
  source 1..21: mol_type = genomic DNA
taatggtgagcactctggact

SEQ ID NO: 23423 - DNA, 29 bp, Homo sapiens
  source 1..29: mol_type = genomic DNA
taatggtgagcactctggactctgaatcc

SEQ ID NO: 23424 - DNA, 30 bp, Homo sapiens
  source 1..30: mol_type = genomic DNA
taatggtgagcactctggactctgaatcca

SEQ ID NO: 23425 - DNA, 16 bp, Homo sapiens
  source 1..16: mol_type = genomic DNA
taatggtggagttaaa

SEQ ID NO: 23426 - DNA, 17 bp, Homo sapiens
  source 1..17: mol_type = genomic DNA
taatggtggagttaaag

SEQ ID NO: 23427 - DNA, 18 bp, Homo sapiens
  source 1..18: mol_type = genomic DNA
taatggtggagttaaaga

SEQ ID NO: 23428 - DNA, 19 bp, Homo sapiens
  source 1..19: mol_type = genomic DNA
taatggtggagttaaagac

SEQ ID NO: 23429 - DNA, 20 bp, Homo sapiens
  source 1..20: mol_type = genomic DNA
taatggtggagttaaagact

SEQ ID NO: 23430 - DNA, 21 bp, Homo sapiens
  source 1..21: mol_type = genomic DNA
taatggtggagttaaagactt

SEQ ID NO: 23431 - DNA, 22 bp, Homo sapiens
  source 1..22: mol_type = genomic DNA
taatggtggagttaaagacttt

SEQ ID NO: 23432 - DNA, 23 bp, Homo sapiens
  source 1..23: mol_type = genomic DNA
taatggtggagttaaagactttt

SEQ ID NO: 23433 - DNA, 24 bp, Homo sapiens
  source 1..24: mol_type = genomic DNA
taatggtggagttaaagacttttt

SEQ ID NO: 23434 - DNA, 25 bp, Homo sapiens
  source 1..25: mol_type = genomic DNA
taatggtggagttaaagactttttc

SEQ ID NO: 23435 - DNA, 26 bp, Homo sapiens
  source 1..26: mol_type = genomic DNA
taatggtggagttaaagactttttct

SEQ ID NO: 23436 - DNA, 27 bp, Homo sapiens
  source 1..27: mol_type = genomic DNA
taatggtggagttaaagactttttctc

SEQ ID NO: 23437 - DNA, 28 bp, Homo sapiens
  source 1..28: mol_type = genomic DNA
taatggtggagttaaagactttttctct

SEQ ID NO: 23438 - DNA, 29 bp, Homo sapiens
  source 1..29: mol_type = genomic DNA
taatggtggagttaaagactttttctctg

SEQ ID NO: 23439 - DNA, 30 bp, Homo sapiens
  source 1..30: mol_type = genomic DNA
taatggtggagttaaagactttttctctga

SEQ ID NO: 23440 - DNA, 31 bp, Homo sapiens
  source 1..31: mol_type = genomic DNA
taatggtggagttaaagactttttctctgac

SEQ ID NO: 23441 - DNA, 32 bp, Homo sapiens
  source 1..32: mol_type = genomic DNA
taatggtggagttaaagactttttctctgacc

SEQ ID NO: 23442 - DNA, 33 bp, Homo sapiens
  source 1..33: mol_type = genomic DNA
taatggtggagttaaagactttttctctgacca

SEQ ID NO: 23443 - DNA, 16 bp, Homo sapiens
  source 1..16: mol_type = genomic DNA
taatggttagcactct

SEQ ID NO: 23444 - DNA, 17 bp, Homo sapiens
  source 1..17: mol_type = genomic DNA
taatggttagcactctg

SEQ ID NO: 23445 - DNA, 18 bp, Homo sapiens
  source 1..18: mol_type = genomic DNA
taatggttagcactctgg

SEQ ID NO: 23446 - DNA, 19 bp, Homo sapiens
  source 1..19: mol_type = genomic DNA
taatggttagcactctgga

SEQ ID NO: 23447 - DNA, 20 bp, Homo sapiens
  source 1..20: mol_type = genomic DNA
taatggttagcactctggac

SEQ ID NO: 23448 - DNA, 21 bp, Homo sapiens
  source 1..21: mol_type = genomic DNA
taatggttagcactctggact

SEQ ID NO: 23449 - DNA, 22 bp, Homo sapiens
  source 1..22: mol_type = genomic DNA
taatggttagcactctggactc

SEQ ID NO: 23450 - DNA, 23 bp, Homo sapiens
  source 1..23: mol_type = genomic DNA
taatggttagcactctggactct

SEQ ID NO: 23451 - DNA, 24 bp, Homo sapiens
  source 1..24: mol_type = genomic DNA
taatggttagcactctggactctg

SEQ ID NO: 23452 - DNA, 25 bp, Homo sapiens
  source 1..25: mol_type = genomic DNA
taatggttagcactctggactctga

SEQ ID NO: 23453 - DNA, 26 bp, Homo sapiens
  source 1..26: mol_type = genomic DNA
taatggttagcactctggactctgaa

SEQ ID NO: 23454 - DNA, 28 bp, Homo sapiens
  source 1..28: mol_type = genomic DNA
taatggttagcactctggactctgaatc

SEQ ID NO: 23455 - DNA, 29 bp, Homo sapiens
  source 1..29: mol_type = genomic DNA
taatggttagcactctggactctgaatcc

SEQ ID NO: 23456 - DNA, 30 bp, Homo sapiens
  source 1..30: mol_type = genomic DNA
taatggttagcactctggactctgaatcca

SEQ ID NO: 23457 - DNA, 33 bp, Homo sapiens
  source 1..33: mol_type = genomic DNA
taatggttagcactctggactctgaatccagcg

SEQ ID NO: 23458 - DNA, 40 bp, Homo sapiens
  source 1..40: mol_type = genomic DNA
taatggttagcactctggactctgaatccagcgatccgag

SEQ ID NO: 23459 - DNA, 41 bp, Homo sapiens
  source 1..41: mol_type = genomic DNA
taatggttagcactctggactctgaatccagcgatccgagt

SEQ ID NO: 23460 - DNA, 42 bp, Homo sapiens
  source 1..42: mol_type = genomic DNA
taatggttagcactctggactctgaatccagcgatccgagtt

SEQ ID NO: 23461 - DNA, 44 bp, Homo sapiens
  source 1..44: mol_type = genomic DNA
taatggttagcactctggactctgaatccagcgatccgagttca

SEQ ID NO: 23462 - DNA, 24 bp, Homo sapiens
  source 1..24: mol_type = genomic DNA
taatggttagcactctggactttg

SEQ ID NO: 23463 - DNA, 25 bp, Homo sapiens
  source 1..25: mol_type = genomic DNA
taatggttagcactctggactttga

SEQ ID NO: 23464 - DNA, 28 bp, Homo sapiens
  source 1..28: mol_type = genomic DNA
taatggttagcactctggactttgaatc

SEQ ID NO: 23465 - DNA, 29 bp, Homo sapiens
  source 1..29: mol_type = genomic DNA
taatggttagcactctggactttgaatcc

SEQ ID NO: 23466 - DNA, 42 bp, Homo sapiens
  source 1..42: mol_type = genomic DNA
taatggttagcactctggactttgaatccagcgatccgagtt

SEQ ID NO: 23467 - DNA, 16 bp, Homo sapiens
  source 1..16: mol_type = genomic DNA
taattaaagtggctga

SEQ ID NO: 23468 - DNA, 17 bp, Homo sapiens
  source 1..17: mol_type = genomic DNA
taattaaagtggctgat

SEQ ID NO: 23469 - DNA, 18 bp, Homo sapiens
  source 1..18: mol_type = genomic DNA
taattaaagtggctgatt

SEQ ID NO: 23470 - DNA, 19 bp, Homo sapiens
  source 1..19: mol_type = genomic DNA
taattaaagtggctgattt

SEQ ID NO: 23471 - DNA, 20 bp, Homo sapiens
  source 1..20: mol_type = genomic DNA
taattaaagtggctgatttg

SEQ ID NO: 23472 - DNA, 21 bp, Homo sapiens
  source 1..21: mol_type = genomic DNA
taattaaagtggctgatttgc

SEQ ID NO: 23473 - DNA, 19 bp, Homo sapiens
  source 1..19: mol_type = genomic DNA
taattcaaaggttccgggt

SEQ ID NO: 23474 - DNA, 40 bp, Homo sapiens
  source 1..40: mol_type = genomic DNA
taattcaaaggttccgggttcgagtcccggcggagtcgcc

SEQ ID NO: 23475 - DNA, 41 bp, Homo sapiens
  source 1..41: mol_type = genomic DNA
taattcaaaggttccgggttcgagtcccggcggagtcgcca

SEQ ID NO: 23476 - DNA, 40 bp, Homo sapiens
  source 1..40: mol_type = genomic DNA
taattcaaaggttgtgggttcgaatcccaccagagtcgcc

SEQ ID NO: 23477 - DNA, 41 bp, Homo sapiens
  source 1..41: mol_type = genomic DNA
taattcaaaggttgtgggttcgaatcccaccagagtcgcca

SEQ ID NO: 23478 - DNA, 16 bp, Homo sapiens
  source 1..16: mol_type = genomic DNA
tacaacgatggttttt

SEQ ID NO: 23479 - DNA, 17 bp, Homo sapiens
  source 1..17: mol_type = genomic DNA
tacaacgatggtttttc

SEQ ID NO: 23480 - DNA, 18 bp, Homo sapiens
  source 1..18: mol_type = genomic DNA
tacaacgatggtttttca

SEQ ID NO: 23481 - DNA, 19 bp, Homo sapiens
  source 1..19: mol_type = genomic DNA
tacaacgatggtttttcat

SEQ ID NO: 23482 - DNA, 21 bp, Homo sapiens
  source 1..21: mol_type = genomic DNA
tacaacgatggtttttcatat

SEQ ID NO: 23483 - DNA, 22 bp, Homo sapiens
  source 1..22: mol_type = genomic DNA
tacaacgatggtttttcatatc

SEQ ID NO: 23484 - DNA, 29 bp, Homo sapiens
  source 1..29: mol_type = genomic DNA
tacaacgatggtttttcatatcattggtc

SEQ ID NO: 23485 - DNA, 30 bp, Homo sapiens
  source 1..30: mol_type = genomic DNA
tacaacgatggtttttcatatcattggtcg

SEQ ID NO: 23486 - DNA, 31 bp, Homo sapiens
  source 1..31: mol_type = genomic DNA
tacaacgatggtttttcatatcattggtcgt

SEQ ID NO: 23487 - DNA, 36 bp, Homo sapiens
  source 1..36: mol_type = genomic DNA
tacaacgatggtttttcatatcattggtcgtggttg

SEQ ID NO: 23488 - DNA, 37 bp, Homo sapiens
  source 1..37: mol_type = genomic DNA
tacaacgatggtttttcatatcattggtcgtggttgt

SEQ ID NO: 23489 - DNA, 38 bp, Homo sapiens
  source 1..38: mol_type = genomic DNA
tacaacgatggtttttcatatcattggtcgtggttgta

SEQ ID NO: 23490 - DNA, 40 bp, Homo sapiens
  source 1..40: mol_type = genomic DNA
tacaacgatggtttttcatatcattggtcgtggttgtagt

SEQ ID NO: 23491 - DNA, 41 bp, Homo sapiens
  source 1..41: mol_type = genomic DNA
tacaacgatggtttttcatatcattggtcgtggttgtagtc

SEQ ID NO: 23492 - DNA, 42 bp, Homo sapiens
  source 1..42: mol_type = genomic DNA
tacaacgatggtttttcatatcattggtcgtggttgtagtcc

SEQ ID NO: 23493 - DNA, 44 bp, Homo sapiens
  source 1..44: mol_type = genomic DNA
tacaacgatggtttttcatatcattggtcgtggttgtagtccgt

SEQ ID NO: 23494 - DNA, 47 bp, Homo sapiens
  source 1..47: mol_type = genomic DNA
tacaacgatggtttttcatatcattggtcgtggttgtagtccgtgcg

SEQ ID NO: 23495 - DNA, 48 bp, Homo sapiens
  source 1..48: mol_type = genomic DNA
tacaacgatggtttttcatatcattggtcgtggttgtagtccgtgcga

SEQ ID NO: 23496 - DNA, 48 bp, Homo sapiens
  source 1..48: mol_type = genomic DNA
tacaccagtcttgtaaaccggagatgaaaacctttttccaaggacacc

SEQ ID NO: 23497 - DNA, 18 bp, Homo sapiens
  source 1..18: mol_type = genomic DNA
tacacgcagaaggtcctg

SEQ ID NO: 23498 - DNA, 21 bp, Homo sapiens
  source 1..21: mol_type = genomic DNA
tacacgcagaaggtcctgggt

SEQ ID NO: 23499 - DNA, 42 bp, Homo sapiens
  source 1..42: mol_type = genomic DNA
tacacgcagaaggtcctgggttcgagccccagtggaaccacc

SEQ ID NO: 23500 - DNA, 24 bp, Homo sapiens
  source 1..24: mol_type = genomic DNA
tacactgaaaatgtttagacgggc

SEQ ID NO: 23501 - DNA, 25 bp, Homo sapiens
  source 1..25: mol_type = genomic DNA
tacactgaaaatgtttagacgggct

SEQ ID NO: 23502 - DNA, 26 bp, Homo sapiens
  source 1..26: mol_type = genomic DNA
tacactgaaaatgtttagacgggctc

SEQ ID NO: 23503 - DNA, 27 bp, Homo sapiens
  source 1..27: mol_type = genomic DNA
tacactgaaaatgtttagacgggctca

SEQ ID NO: 23504 - DNA, 28 bp, Homo sapiens
  source 1..28: mol_type = genomic DNA
tacactgaaaatgtttagacgggctcac

SEQ ID NO: 23505 - DNA, 29 bp, Homo sapiens
  source 1..29: mol_type = genomic DNA
tacactgaaaatgtttagacgggctcaca

SEQ ID NO: 23506 - DNA, 30 bp, Homo sapiens
  source 1..30: mol_type = genomic DNA
tacactgaaaatgtttagacgggctcacat

SEQ ID NO: 23507 - DNA, 31 bp, Homo sapiens
  source 1..31: mol_type = genomic DNA
tacactgaaaatgtttagacgggctcacatc

SEQ ID NO: 23508 - DNA, 34 bp, Homo sapiens
  source 1..34: mol_type = genomic DNA
tacactgaaaatgtttagacgggctcacatcacc

SEQ ID NO: 23509 - DNA, 35 bp, Homo sapiens
  source 1..35: mol_type = genomic DNA
tacactgaaaatgtttagacgggctcacatcaccc

SEQ ID NO: 23510 - DNA, 43 bp, Homo sapiens
  source 1..43: mol_type = genomic DNA
tacactgaaaatgtttagacgggctcacatcaccccataaaca

SEQ ID NO: 23511 - DNA, 45 bp, Homo sapiens
  source 1..45: mol_type = genomic DNA
tacactgaaaatgtttagacgggctcacatcaccccataaacacc

SEQ ID NO: 23512 - DNA, 46 bp, Homo sapiens
  source 1..46: mol_type = genomic DNA
tacactgaaaatgtttagacgggctcacatcaccccataaacacca

SEQ ID NO: 23513 - DNA, 16 bp, Homo sapiens
  source 1..16: mol_type = genomic DNA
tacacttaggagattt

SEQ ID NO: 23514 - DNA, 17 bp, Homo sapiens
  source 1..17: mol_type = genomic DNA
tacacttaggagatttc

SEQ ID NO: 23515 - DNA, 18 bp, Homo sapiens
  source 1..18: mol_type = genomic DNA
tacacttaggagatttca

SEQ ID NO: 23516 - DNA, 19 bp, Homo sapiens
  source 1..19: mol_type = genomic DNA
tacacttaggagatttcaa

SEQ ID NO: 23517 - DNA, 20 bp, Homo sapiens
  source 1..20: mol_type = genomic DNA
tacacttaggagatttcaac

SEQ ID NO: 23518 - DNA, 21 bp, Homo sapiens
  source 1..21: mol_type = genomic DNA
tacacttaggagatttcaact

SEQ ID NO: 23519 - DNA, 22 bp, Homo sapiens
  source 1..22: mol_type = genomic DNA
tacacttaggagatttcaactt

SEQ ID NO: 23520 - DNA, 23 bp, Homo sapiens
  source 1..23: mol_type = genomic DNA
tacacttaggagatttcaactta

SEQ ID NO: 23521 - DNA, 24 bp, Homo sapiens
  source 1..24: mol_type = genomic DNA
tacacttaggagatttcaacttaa

SEQ ID NO: 23522 - DNA, 25 bp, Homo sapiens
  source 1..25: mol_type = genomic DNA
tacacttaggagatttcaacttaac

SEQ ID NO: 23523 - DNA, 26 bp, Homo sapiens
  source 1..26: mol_type = genomic DNA
tacacttaggagatttcaacttaact

SEQ ID NO: 23524 - DNA, 27 bp, Homo sapiens
  source 1..27: mol_type = genomic DNA
tacacttaggagatttcaacttaactt

SEQ ID NO: 23525 - DNA, 28 bp, Homo sapiens
  source 1..28: mol_type = genomic DNA
tacacttaggagatttcaacttaacttg

SEQ ID NO: 23526 - DNA, 29 bp, Homo sapiens
  source 1..29: mol_type = genomic DNA
tacacttaggagatttcaacttaacttga

SEQ ID NO: 23527 - DNA, 30 bp, Homo sapiens
  source 1..30: mol_type = genomic DNA
tacacttaggagatttcaacttaacttgac

SEQ ID NO: 23528 - DNA, 31 bp, Homo sapiens
  source 1..31: mol_type = genomic DNA
tacacttaggagatttcaacttaacttgacc

SEQ ID NO: 23529 - DNA, 32 bp, Homo sapiens
  source 1..32: mol_type = genomic DNA
tacacttaggagatttcaacttaacttgaccg

SEQ ID NO: 23530 - DNA, 33 bp, Homo sapiens
  source 1..33: mol_type = genomic DNA
tacacttaggagatttcaacttaacttgaccgc

SEQ ID NO: 23531 - DNA, 34 bp, Homo sapiens
  source 1..34: mol_type = genomic DNA
tacacttaggagatttcaacttaacttgaccgct

SEQ ID NO: 23532 - DNA, 35 bp, Homo sapiens
  source 1..35: mol_type = genomic DNA
tacacttaggagatttcaacttaacttgaccgctc

SEQ ID NO: 23533 - DNA, 36 bp, Homo sapiens
  source 1..36: mol_type = genomic DNA
tacacttaggagatttcaacttaacttgaccgctct

SEQ ID NO: 23534 - DNA, 37 bp, Homo sapiens
  source 1..37: mol_type = genomic DNA
tacacttaggagatttcaacttaacttgaccgctctg

SEQ ID NO: 23535 - DNA, 38 bp, Homo sapiens
  source 1..38: mol_type = genomic DNA
tacacttaggagatttcaacttaacttgaccgctctga

SEQ ID NO: 23536 - DNA, 39 bp, Homo sapiens
  source 1..39: mol_type = genomic DNA
tacacttaggagatttcaacttaacttgaccgctctgac

SEQ ID NO: 23537 - DNA, 40 bp, Homo sapiens
  source 1..40: mol_type = genomic DNA
tacacttaggagatttcaacttaacttgaccgctctgacc

SEQ ID NO: 23538 - DNA, 41 bp, Homo sapiens
  source 1..41: mol_type = genomic DNA
tacacttaggagatttcaacttaacttgaccgctctgacca

SEQ ID NO: 23539 - DNA, 16 bp, Homo sapiens
  source 1..16: mol_type = genomic DNA
tacagaccaagagcct

SEQ ID NO: 23540 - DNA, 18 bp, Homo sapiens
  source 1..18: mol_type = genomic DNA
tacagaccaagagccttc

SEQ ID NO: 23541 - DNA, 19 bp, Homo sapiens
  source 1..19: mol_type = genomic DNA
tacagaccaagagccttca

SEQ ID NO: 23542 - DNA, 20 bp, Homo sapiens
  source 1..20: mol_type = genomic DNA
tacagaccaagagccttcaa

SEQ ID NO: 23543 - DNA, 21 bp, Homo sapiens
  source 1..21: mol_type = genomic DNA
tacagaccaagagccttcaaa

SEQ ID NO: 23544 - DNA, 22 bp, Homo sapiens
  source 1..22: mol_type = genomic DNA
tacagaccaagagccttcaaag

SEQ ID NO: 23545 - DNA, 24 bp, Homo sapiens
  source 1..24: mol_type = genomic DNA
tacagaccaagagccttcaaagcc

SEQ ID NO: 23546 - DNA, 25 bp, Homo sapiens
  source 1..25: mol_type = genomic DNA
tacagaccaagagccttcaaagccc

SEQ ID NO: 23547 - DNA, 27 bp, Homo sapiens
  source 1..27: mol_type = genomic DNA
tacagaccaagagccttcaaagccctc

SEQ ID NO: 23548 - DNA, 28 bp, Homo sapiens
  source 1..28: mol_type = genomic DNA
tacagaccaagagccttcaaagccctca

SEQ ID NO: 23549 - DNA, 30 bp, Homo sapiens
  source 1..30: mol_type = genomic DNA
tacagaccaagagccttcaaagccctcagt

SEQ ID NO: 23550 - DNA, 31 bp, Homo sapiens
  source 1..31: mol_type = genomic DNA
tacagaccaagagccttcaaagccctcagta

SEQ ID NO: 23551 - DNA, 34 bp, Homo sapiens
  source 1..34: mol_type = genomic DNA
tacagaccaagagccttcaaagccctcagtaagt

SEQ ID NO: 23552 - DNA, 37 bp, Homo sapiens
  source 1..37: mol_type = genomic DNA
tacagaccaagagccttcaaagccctcagtaagttgc

SEQ ID NO: 23553 - DNA, 38 bp, Homo sapiens
  source 1..38: mol_type = genomic DNA
tacagaccaagagccttcaaagccctcagtaagttgca

SEQ ID NO: 23554 - DNA, 16 bp, Homo sapiens
  source 1..16: mol_type = genomic DNA
tacagtcagaggttca

SEQ ID NO: 23555 - DNA, 20 bp, Homo sapiens
  source 1..20: mol_type = genomic DNA
tacagtcagaggttcaattc

SEQ ID NO: 23556 - DNA, 21 bp, Homo sapiens
  source 1..21: mol_type = genomic DNA
tacagtcagaggttcaattcc

SEQ ID NO: 23557 - DNA, 22 bp, Homo sapiens
  source 1..22: mol_type = genomic DNA
tacagtcagaggttcaattcct

SEQ ID NO: 23558 - DNA, 23 bp, Homo sapiens
  source 1..23: mol_type = genomic DNA
tacagtcagaggttcaattcctc

SEQ ID NO: 23559 - DNA, 24 bp, Homo sapiens
  source 1..24: mol_type = genomic DNA
tacagtcagaggttcaattcctct

SEQ ID NO: 23560 - DNA, 26 bp, Homo sapiens
  source 1..26: mol_type = genomic DNA
tacagtcagaggttcaattcctcttc

SEQ ID NO: 23561 - DNA, 32 bp, Homo sapiens
  source 1..32: mol_type = genomic DNA
tacagtcagaggttcaattcctcttcttaaca

SEQ ID NO: 23562 - DNA, 33 bp, Homo sapiens
  source 1..33: mol_type = genomic DNA
tacagtcagaggttcaattcctcttcttaacac

SEQ ID NO: 23563 - DNA, 34 bp, Homo sapiens
  source 1..34: mol_type = genomic DNA
tacagtcagaggttcaattcctcttcttaacacc

SEQ ID NO: 23564 - DNA, 20 bp, Homo sapiens
  source 1..20: mol_type = genomic DNA
taccccgaaaatgttggtta

SEQ ID NO: 23565 - DNA, 21 bp, Homo sapiens
  source 1..21: mol_type = genomic DNA
taccccgaaaatgttggttat

SEQ ID NO: 23566 - DNA, 31 bp, Homo sapiens
  source 1..31: mol_type = genomic DNA
taccccgaaaatgttggttatacccttcccg

SEQ ID NO: 23567 - DNA, 33 bp, Homo sapiens
  source 1..33: mol_type = genomic DNA
taccccgaaaatgttggttatacccttcccgta

SEQ ID NO: 23568 - DNA, 35 bp, Homo sapiens
  source 1..35: mol_type = genomic DNA
taccccgaaaatgttggttatacccttcccgtact

SEQ ID NO: 23569 - DNA, 36 bp, Homo sapiens
  source 1..36: mol_type = genomic DNA
taccccgaaaatgttggttatacccttcccgtacta

SEQ ID NO: 23570 - DNA, 37 bp, Homo sapiens
  source 1..37: mol_type = genomic DNA
taccccgaaaatgttggttatacccttcccgtactac

SEQ ID NO: 23571 - DNA, 38 bp, Homo sapiens
  source 1..38: mol_type = genomic DNA
taccccgaaaatgttggttatacccttcccgtactacc

SEQ ID NO: 23572 - DNA, 39 bp, Homo sapiens
  source 1..39: mol_type = genomic DNA
taccccgaaaatgttggttatacccttcccgtactacca

SEQ ID NO: 23573 - DNA, 16 bp, Homo sapiens
  source 1..16: mol_type = genomic DNA
tacccttcccgtacta

SEQ ID NO: 23574 - DNA, 17 bp, Homo sapiens
  source 1..17: mol_type = genomic DNA
tacccttcccgtactac

SEQ ID NO: 23575 - DNA, 18 bp, Homo sapiens
  source 1..18: mol_type = genomic DNA
tacccttcccgtactacc

SEQ ID NO: 23576 - DNA, 19 bp, Homo sapiens
  source 1..19: mol_type = genomic DNA
tacccttcccgtactacca

SEQ ID NO: 23577 - DNA, 24 bp, Homo sapiens
  source 1..24: mol_type = genomic DNA
taccgttaacttccaattaactag

SEQ ID NO: 23578 - DNA, 26 bp, Homo sapiens
  source 1..26: mol_type = genomic DNA
taccgttaacttccaattaactagtt

SEQ ID NO: 23579 - DNA, 29 bp, Homo sapiens
  source 1..29: mol_type = genomic DNA
taccgttaacttccaattaactagttttg

SEQ ID NO: 23580 - DNA, 31 bp, Homo sapiens
  source 1..31: mol_type = genomic DNA
taccgttaacttccaattaactagttttgac

SEQ ID NO: 23581 - DNA, 32 bp, Homo sapiens
  source 1..32: mol_type = genomic DNA
taccgttaacttccaattaactagttttgaca

SEQ ID NO: 23582 - DNA, 33 bp, Homo sapiens
  source 1..33: mol_type = genomic DNA
taccgttaacttccaattaactagttttgacaa

SEQ ID NO: 23583 - DNA, 34 bp, Homo sapiens
  source 1..34: mol_type = genomic DNA
taccgttaacttccaattaactagttttgacaac

SEQ ID NO: 23584 - DNA, 35 bp, Homo sapiens
  source 1..35: mol_type = genomic DNA
taccgttaacttccaattaactagttttgacaaca

SEQ ID NO: 23585 - DNA, 18 bp, Homo sapiens
  source 1..18: mol_type = genomic DNA
tacctcctcaaagcaata

SEQ ID NO: 23586 - DNA, 19 bp, Homo sapiens
  source 1..19: mol_type = genomic DNA
tacctcctcaaagcaatac

SEQ ID NO: 23587 - DNA, 21 bp, Homo sapiens
  source 1..21: mol_type = genomic DNA
tacctcctcaaagcaatacac

SEQ ID NO: 23588 - DNA, 22 bp, Homo sapiens
  source 1..22: mol_type = genomic DNA
tacctcctcaaagcaatacact

SEQ ID NO: 23589 - DNA, 23 bp, Homo sapiens
  source 1..23: mol_type = genomic DNA
tacctcctcaaagcaatacactg

SEQ ID NO: 23590 - DNA, 24 bp, Homo sapiens
  source 1..24: mol_type = genomic DNA
tacctcctcaaagcaatacactga

SEQ ID NO: 23591 - DNA, 25 bp, Homo sapiens
  source 1..25: mol_type = genomic DNA
tacctcctcaaagcaatacactgaa

SEQ ID NO: 23592 - DNA, 40 bp, Homo sapiens
  source 1..40: mol_type = genomic DNA
tacctcctcaaagcaatacactgaaaatgtttagacgggc

SEQ ID NO: 23593 - DNA, 41 bp, Homo sapiens
  source 1..41: mol_type = genomic DNA
tacctcctcaaagcaatacactgaaaatgtttagacgggct

SEQ ID NO: 23594 - DNA, 42 bp, Homo sapiens
  source 1..42: mol_type = genomic DNA
tacctcctcaaagcaatacactgaaaatgtttagacgggctc

SEQ ID NO: 23595 - DNA, 18 bp, Homo sapiens
  source 1..18: mol_type = genomic DNA
tacgaccccttatttacc

SEQ ID NO: 23596 - DNA, 19 bp, Homo sapiens
  source 1..19: mol_type = genomic DNA
tacgaccccttatttaccc

SEQ ID NO: 23597 - DNA, 20 bp, Homo sapiens
  source 1..20: mol_type = genomic DNA
tacgaccccttatttacccc

SEQ ID NO: 23598 - DNA, 21 bp, Homo sapiens
  source 1..21: mol_type = genomic DNA
tacgaccccttatttacccca

SEQ ID NO: 23599 - DNA, 24 bp, Homo sapiens
  source 1..24: mol_type = genomic DNA
tacggatcagaagattccaggttc

SEQ ID NO: 23600 - DNA, 17 bp, Homo sapiens
  source 1..17: mol_type = genomic DNA
tactctgcgttgtggcc

SEQ ID NO: 23601 - DNA, 18 bp, Homo sapiens
  source 1..18: mol_type = genomic DNA
tactctgcgttgtggccg

SEQ ID NO: 23602 - DNA, 19 bp, Homo sapiens
  source 1..19: mol_type = genomic DNA
tactctgcgttgtggccgc

SEQ ID NO: 23603 - DNA, 20 bp, Homo sapiens
  source 1..20: mol_type = genomic DNA
tactctgcgttgtggccgca

SEQ ID NO: 23604 - DNA, 21 bp, Homo sapiens
  source 1..21: mol_type = genomic DNA
tactctgcgttgtggccgcag

SEQ ID NO: 23605 - DNA, 22 bp, Homo sapiens
  source 1..22: mol_type = genomic DNA
tactctgcgttgtggccgcagc

SEQ ID NO: 23606 - DNA, 30 bp, Homo sapiens
  source 1..30: mol_type = genomic DNA
tactctgcgttgtggccgcagcaacctcgg

SEQ ID NO: 23607 - DNA, 16 bp, Homo sapiens
  source 1..16: mol_type = genomic DNA
tacttaatttctgcca

SEQ ID NO: 23608 - DNA, 25 bp, Homo sapiens
  source 1..25: mol_type = genomic DNA
tactttgatagagtaaataatagga

SEQ ID NO: 23609 - DNA, 26 bp, Homo sapiens
  source 1..26: mol_type = genomic DNA
tactttgatagagtaaataataggag

SEQ ID NO: 23610 - DNA, 27 bp, Homo sapiens
  source 1..27: mol_type = genomic DNA
tactttgatagagtaaataataggagc

SEQ ID NO: 23611 - DNA, 28 bp, Homo sapiens
  source 1..28: mol_type = genomic DNA
tactttgatagagtaaataataggagct

SEQ ID NO: 23612 - DNA, 29 bp, Homo sapiens
  source 1..29: mol_type = genomic DNA
tactttgatagagtaaataataggagctt

SEQ ID NO: 23613 - DNA, 30 bp, Homo sapiens
  source 1..30: mol_type = genomic DNA
tactttgatagagtaaataataggagctta

SEQ ID NO: 23614 - DNA, 31 bp, Homo sapiens
  source 1..31: mol_type = genomic DNA
tactttgatagagtaaataataggagcttaa

SEQ ID NO: 23615 - DNA, 33 bp, Homo sapiens
  source 1..33: mol_type = genomic DNA
tactttgatagagtaaataataggagcttaaac

SEQ ID NO: 23616 - DNA, 34 bp, Homo sapiens
  source 1..34: mol_type = genomic DNA
tactttgatagagtaaataataggagcttaaacc

SEQ ID NO: 23617 - DNA, 35 bp, Homo sapiens
  source 1..35: mol_type = genomic DNA
tactttgatagagtaaataataggagcttaaaccc

SEQ ID NO: 23618 - DNA, 36 bp, Homo sapiens
  source 1..36: mol_type = genomic DNA
tactttgatagagtaaataataggagcttaaacccc

SEQ ID NO: 23619 - DNA, 37 bp, Homo sapiens
  source 1..37: mol_type = genomic DNA
tactttgatagagtaaataataggagcttaaaccccc

SEQ ID NO: 23620 - DNA, 38 bp, Homo sapiens
  source 1..38: mol_type = genomic DNA
tactttgatagagtaaataataggagcttaaaccccct

SEQ ID NO: 23621 - DNA, 40 bp, Homo sapiens
  source 1..40: mol_type = genomic DNA
tactttgatagagtaaataataggagcttaaaccccctta

SEQ ID NO: 23622 - DNA, 48 bp, Homo sapiens
  source 1..48: mol_type = genomic DNA
tactttgatagagtaaataataggagcttaaacccccttatttctacc

SEQ ID NO: 23623 - DNA, 16 bp, Homo sapiens
  source 1..16: mol_type = genomic DNA
tagaatcttagctttg

SEQ ID NO: 23624 - DNA, 17 bp, Homo sapiens
  source 1..17: mol_type = genomic DNA
tagaatcttagctttgg

SEQ ID NO: 23625 - DNA, 22 bp, Homo sapiens
  source 1..22: mol_type = genomic DNA
tagaatcttagctttgggtgct

SEQ ID NO: 23626 - DNA, 23 bp, Homo sapiens
  source 1..23: mol_type = genomic DNA
tagaatcttagctttgggtgcta

SEQ ID NO: 23627 - DNA, 24 bp, Homo sapiens
  source 1..24: mol_type = genomic DNA
tagaatcttagctttgggtgctaa

SEQ ID NO: 23628 - DNA, 27 bp, Homo sapiens
  source 1..27: mol_type = genomic DNA
tagaatcttagctttgggtgctaatgg

SEQ ID NO: 23629 - DNA, 32 bp, Homo sapiens
  source 1..32: mol_type = genomic DNA
tagaatcttagctttgggtgctaatggtggag

SEQ ID NO: 23630 - DNA, 34 bp, Homo sapiens
  source 1..34: mol_type = genomic DNA
tagaatcttagctttgggtgctaatggtggagtt

SEQ ID NO: 23631 - DNA, 35 bp, Homo sapiens
  source 1..35: mol_type = genomic DNA
tagaatcttagctttgggtgctaatggtggagtta

SEQ ID NO: 23632 - DNA, 36 bp, Homo sapiens
  source 1..36: mol_type = genomic DNA
tagaatcttagctttgggtgctaatggtggagttaa

SEQ ID NO: 23633 - DNA, 37 bp, Homo sapiens
  source 1..37: mol_type = genomic DNA
tagaatcttagctttgggtgctaatggtggagttaaa

SEQ ID NO: 23634 - DNA, 38 bp, Homo sapiens
  source 1..38: mol_type = genomic DNA
tagaatcttagctttgggtgctaatggtggagttaaag

SEQ ID NO: 23635 - DNA, 39 bp, Homo sapiens
  source 1..39: mol_type = genomic DNA
tagaatcttagctttgggtgctaatggtggagttaaaga

SEQ ID NO: 23636 - DNA, 40 bp, Homo sapiens
  source 1..40: mol_type = genomic DNA
tagaatcttagctttgggtgctaatggtggagttaaagac

SEQ ID NO: 23637 - DNA, 41 bp, Homo sapiens
  source 1..41: mol_type = genomic DNA
tagaatcttagctttgggtgctaatggtggagttaaagact

SEQ ID NO: 23638 - DNA, 43 bp, Homo sapiens
  source 1..43: mol_type = genomic DNA
tagaatcttagctttgggtgctaatggtggagttaaagacttt

SEQ ID NO: 23639 - DNA, 47 bp, Homo sapiens
  source 1..47: mol_type = genomic DNA
tagaatcttagctttgggtgctaatggtggagttaaagactttttct

SEQ ID NO: 23640 - DNA, 48 bp, Homo sapiens
  source 1..48: mol_type = genomic DNA
tagaatcttagctttgggtgctaatggtggagttaaagactttttctc

SEQ ID NO: 23641 - DNA, 32 bp, Homo sapiens
  source 1..32: mol_type = genomic DNA
tagaattctcgcctcccacgcgggagacccgg

SEQ ID NO: 23642 - DNA, 33 bp, Homo sapiens
  source 1..33: mol_type = genomic DNA
tagaattctcgcctcccacgcgggagacccggg

SEQ ID NO: 23643 - DNA, 16 bp, Homo sapiens
  source 1..16: mol_type = genomic DNA
tagaattctcgcctgc

SEQ ID NO: 23644 - DNA, 17 bp, Homo sapiens
  source 1..17: mol_type = genomic DNA
tagaattctcgcctgcc

SEQ ID NO: 23645 - DNA, 18 bp, Homo sapiens
  source 1..18: mol_type = genomic DNA
tagaattctcgcctgcca

SEQ ID NO: 23646 - DNA, 19 bp, Homo sapiens
  source 1..19: mol_type = genomic DNA
tagaattctcgcctgccac

SEQ ID NO: 23647 - DNA, 20 bp, Homo sapiens
  source 1..20: mol_type = genomic DNA
tagaattctcgcctgccacg

SEQ ID NO: 23648 - DNA, 21 bp, Homo sapiens
  source 1..21: mol_type = genomic DNA
tagaattctcgcctgccacgc

SEQ ID NO: 23649 - DNA, 23 bp, Homo sapiens
  source 1..23: mol_type = genomic DNA
tagaattctcgcctgccacgcgg

SEQ ID NO: 23650 - DNA, 25 bp, Homo sapiens
  source 1..25: mol_type = genomic DNA
tagaattctcgcctgccacgcggga

SEQ ID NO: 23651 - DNA, 29 bp, Homo sapiens
  source 1..29: mol_type = genomic DNA
tagaattctcgcctgccacgcgggaggcc

SEQ ID NO: 23652 - DNA, 30 bp, Homo sapiens
  source 1..30: mol_type = genomic DNA
tagaattctcgcctgccacgcgggaggccc

SEQ ID NO: 23653 - DNA, 31 bp, Homo sapiens
  source 1..31: mol_type = genomic DNA
tagaattctcgcctgccacgcgggaggcccg

SEQ ID NO: 23654 - DNA, 32 bp, Homo sapiens
  source 1..32: mol_type = genomic DNA
tagaattctcgcctgccacgcgggaggcccgg

SEQ ID NO: 23655 - DNA, 33 bp, Homo sapiens
  source 1..33: mol_type = genomic DNA
tagaattctcgcctgccacgcgggaggcccggg

SEQ ID NO: 23656 - DNA, 34 bp, Homo sapiens
  source 1..34: mol_type = genomic DNA
tagaattctcgcctgccacgcgggaggcccgggt

SEQ ID NO: 23657 - DNA, 35 bp, Homo sapiens
  source 1..35: mol_type = genomic DNA
tagaattctcgcctgccacgcgggaggcccgggtt

SEQ ID NO: 23658 - DNA, 46 bp, Homo sapiens
  source 1..46: mol_type = genomic DNA
tagaattctcgcctgccacgcgggaggcccgggttcgattcccggc

SEQ ID NO: 23659 - DNA, 47 bp, Homo sapiens
  source 1..47: mol_type = genomic DNA
tagaattctcgcctgccacgcgggaggcccgggttcgattcccggcc

SEQ ID NO: 23660 - DNA, 16 bp, Homo sapiens
  source 1..16: mol_type = genomic DNA
tagacgggctcacatc

SEQ ID NO: 23661 - DNA, 17 bp, Homo sapiens
  source 1..17: mol_type = genomic DNA
tagacgggctcacatca

SEQ ID NO: 23662 - DNA, 18 bp, Homo sapiens
  source 1..18: mol_type = genomic DNA
tagacgggctcacatcac

SEQ ID NO: 23663 - DNA, 19 bp, Homo sapiens
  source 1..19: mol_type = genomic DNA
tagacgggctcacatcacc

SEQ ID NO: 23664 - DNA, 20 bp, Homo sapiens
  source 1..20: mol_type = genomic DNA
tagacgggctcacatcaccc

SEQ ID NO: 23665 - DNA, 21 bp, Homo sapiens
  source 1..21: mol_type = genomic DNA
tagacgggctcacatcacccc

SEQ ID NO: 23666 - DNA, 22 bp, Homo sapiens
  source 1..22: mol_type = genomic DNA
tagacgggctcacatcacccca

SEQ ID NO: 23667 - DNA, 23 bp, Homo sapiens
  source 1..23: mol_type = genomic DNA
tagacgggctcacatcaccccat

SEQ ID NO: 23668 - DNA, 24 bp, Homo sapiens
  source 1..24: mol_type = genomic DNA
tagacgggctcacatcaccccata

SEQ ID NO: 23669 - DNA, 25 bp, Homo sapiens
  source 1..25: mol_type = genomic DNA
tagacgggctcacatcaccccataa

SEQ ID NO: 23670 - DNA, 26 bp, Homo sapiens
  source 1..26: mol_type = genomic DNA
tagacgggctcacatcaccccataaa

SEQ ID NO: 23671 - DNA, 27 bp, Homo sapiens
  source 1..27: mol_type = genomic DNA
tagacgggctcacatcaccccataaac

SEQ ID NO: 23672 - DNA, 28 bp, Homo sapiens
  source 1..28: mol_type = genomic DNA
tagacgggctcacatcaccccataaaca

SEQ ID NO: 23673 - DNA, 29 bp, Homo sapiens
  source 1..29: mol_type = genomic DNA
tagacgggctcacatcaccccataaacac

SEQ ID NO: 23674 - DNA, 30 bp, Homo sapiens
  source 1..30: mol_type = genomic DNA
tagacgggctcacatcaccccataaacacc

SEQ ID NO: 23675 - DNA, 31 bp, Homo sapiens
  source 1..31: mol_type = genomic DNA
tagacgggctcacatcaccccataaacacca

SEQ ID NO: 23676 - DNA, 24 bp, Homo sapiens
  source 1..24: mol_type = genomic DNA
tagactgaagatctaaaggtccct

SEQ ID NO: 23677 - DNA, 25 bp, Homo sapiens
  source 1..25: mol_type = genomic DNA
tagactgaagatctaaaggtccctg

SEQ ID NO: 23678 - DNA, 17 bp, Homo sapiens
  source 1..17: mol_type = genomic DNA
tagagcatcagactttt

SEQ ID NO: 23679 - DNA, 23 bp, Homo sapiens
  source 1..23: mol_type = genomic DNA
tagagcatcagacttttaatctg

SEQ ID NO: 23680 - DNA, 32 bp, Homo sapiens
  source 1..32: mol_type = genomic DNA
tagagcatgagacccttaatctcagggtcgtg

SEQ ID NO: 23681 - DNA, 16 bp, Homo sapiens
  source 1..16: mol_type = genomic DNA
tagagcatgagactct

SEQ ID NO: 23682 - DNA, 17 bp, Homo sapiens
  source 1..17: mol_type = genomic DNA
tagagcatgagactctt

SEQ ID NO: 23683 - DNA, 19 bp, Homo sapiens
  source 1..19: mol_type = genomic DNA
tagagcatgagactcttaa

SEQ ID NO: 23684 - DNA, 21 bp, Homo sapiens
  source 1..21: mol_type = genomic DNA
tagagcatgagactcttaatc

SEQ ID NO: 23685 - DNA, 22 bp, Homo sapiens
  source 1..22: mol_type = genomic DNA
tagagcatgagactcttaatct

SEQ ID NO: 23686 - DNA, 23 bp, Homo sapiens
  source 1..23: mol_type = genomic DNA
tagagcatgagactcttaatctc

SEQ ID NO: 23687 - DNA, 29 bp, Homo sapiens
  source 1..29: mol_type = genomic DNA
tagagcatgagactcttaatctcagggtc

SEQ ID NO: 23688 - DNA, 36 bp, Homo sapiens
  source 1..36: mol_type = genomic DNA
tagagcatgagactcttaatctcagggtcatgggtt

SEQ ID NO: 23689 - DNA, 30 bp, Homo sapiens
  source 1..30: mol_type = genomic DNA
tagagcatgagactcttaatctcagggtcg

SEQ ID NO: 23690 - DNA, 31 bp, Homo sapiens
  source 1..31: mol_type = genomic DNA
tagagcatgagactcttaatctcagggtcgt

SEQ ID NO: 23691 - DNA, 32 bp, Homo sapiens
  source 1..32: mol_type = genomic DNA
tagagcatgagactcttaatctcagggtcgtg

SEQ ID NO: 23692 - DNA, 33 bp, Homo sapiens
  source 1..33: mol_type = genomic DNA
tagagcatgagactcttaatctcagggtcgtgg

SEQ ID NO: 23693 - DNA, 34 bp, Homo sapiens
  source 1..34: mol_type = genomic DNA
tagagcatgagactcttaatctcagggtcgtggg

SEQ ID NO: 23694 - DNA, 35 bp, Homo sapiens
  source 1..35: mol_type = genomic DNA
tagagcatgagactcttaatctcagggtcgtgggt

SEQ ID NO: 23695 - DNA, 36 bp, Homo sapiens
  source 1..36: mol_type = genomic DNA
tagagcatgagactcttaatctcagggtcgtgggtt

SEQ ID NO: 23696 - DNA, 37 bp, Homo sapiens
  source 1..37: mol_type = genomic DNA
tagagcatgagactcttaatctcagggtcgtgggttc

SEQ ID NO: 23697 - DNA, 38 bp, Homo sapiens
  source 1..38: mol_type = genomic DNA
tagagcatgagactcttaatctcagggtcgtgggttcg

SEQ ID NO: 23698 - DNA, 42 bp, Homo sapiens
  source 1..42: mol_type = genomic DNA
tagagcatgagactcttaatctcagggtcgtgggttcgagcc

SEQ ID NO: 23699 - DNA, 44 bp, Homo sapiens
  source 1..44: mol_type = genomic DNA
tagagcatgagactcttaatctcagggtcgtgggttcgagcccc

SEQ ID NO: 23700 - DNA, 45 bp, Homo sapiens
  source 1..45: mol_type = genomic DNA
tagagcatgagactcttaatctcagggtcgtgggttcgagcccca

SEQ ID NO: 23701 - DNA, 16 bp, Homo sapiens
  source 1..16: mol_type = genomic DNA
tagagcatgggactct

SEQ ID NO: 23702 - DNA, 17 bp, Homo sapiens
  source 1..17: mol_type = genomic DNA
tagagcatgggactctt

SEQ ID NO: 23703 - DNA, 20 bp, Homo sapiens
  source 1..20: mol_type = genomic DNA
tagagcatgggactcttaat

SEQ ID NO: 23704 - DNA, 21 bp, Homo sapiens
  source 1..21: mol_type = genomic DNA
tagagcatgggactcttaatc

SEQ ID NO: 23705 - DNA, 22 bp, Homo sapiens
  source 1..22: mol_type = genomic DNA
tagagcatgggactcttaatcc

SEQ ID NO: 23706 - DNA, 23 bp, Homo sapiens
  source 1..23: mol_type = genomic DNA
tagagcatgggactcttaatccc

SEQ ID NO: 23707 - DNA, 26 bp, Homo sapiens
  source 1..26: mol_type = genomic DNA
tagagcatgggactcttaatcccagg

SEQ ID NO: 23708 - DNA, 30 bp, Homo sapiens
  source 1..30: mol_type = genomic DNA
tagagcatgggactcttaatcccagggtcg

SEQ ID NO: 23709 - DNA, 31 bp, Homo sapiens
  source 1..31: mol_type = genomic DNA
tagagcatgggactcttaatcccagggtcgt

SEQ ID NO: 23710 - DNA, 32 bp, Homo sapiens
  source 1..32: mol_type = genomic DNA
tagagcatgggactcttaatcccagggtcgtg

SEQ ID NO: 23711 - DNA, 33 bp, Homo sapiens
  source 1..33: mol_type = genomic DNA
tagagcatgggactcttaatcccagggtcgtgg

SEQ ID NO: 23712 - DNA, 34 bp, Homo sapiens
  source 1..34: mol_type = genomic DNA
tagagcatgggactcttaatcccagggtcgtggg

SEQ ID NO: 23713 - DNA, 35 bp, Homo sapiens
  source 1..35: mol_type = genomic DNA
tagagcatgggactcttaatcccagggtcgtgggt

SEQ ID NO: 23714 - DNA, 36 bp, Homo sapiens
  source 1..36: mol_type = genomic DNA
tagagcatgggactcttaatcccagggtcgtgggtt

SEQ ID NO: 23715 - DNA, 38 bp, Homo sapiens
  source 1..38: mol_type = genomic DNA
tagagcatgggactcttaatcccagggtcgtgggttcg

SEQ ID NO: 23716 - DNA, 42 bp, Homo sapiens
  source 1..42: mol_type = genomic DNA
tagagcatgggactcttaatcccagggtcgtgggttcgagcc

SEQ ID NO: 23717 - DNA, 44 bp, Homo sapiens
  source 1..44: mol_type = genomic DNA
tagagcatgggactcttaatcccagggtcgtgggttcgagcccc

SEQ ID NO: 23718 - DNA, 22 bp, Homo sapiens
  source 1..22: mol_type = genomic DNA
tagagcatgggactcttaatct

SEQ ID NO: 23719 - DNA, 23 bp, Homo sapiens
  source 1..23: mol_type = genomic DNA
tagagcatgggactcttaatctc

SEQ ID NO: 23720 - DNA, 30 bp, Homo sapiens
  source 1..30: mol_type = genomic DNA
tagagcatgggactcttaatctcagggtcg

SEQ ID NO: 23721 - DNA, 32 bp, Homo sapiens
  source 1..32: mol_type = genomic DNA
tagagcatgggactcttaatctcagggtcgtg

SEQ ID NO: 23722 - DNA, 33 bp, Homo sapiens
  source 1..33: mol_type = genomic DNA
tagagcatgggactcttaatctcagggtcgtgg

SEQ ID NO: 23723 - DNA, 35 bp, Homo sapiens
  source 1..35: mol_type = genomic DNA
tagagcatgggactcttaatctcagggtcgtgggt

SEQ ID NO: 23724 - DNA, 36 bp, Homo sapiens
  source 1..36: mol_type = genomic DNA
tagagcatgggactcttaatctcagggtcgtgggtt

SEQ ID NO: 23725 - DNA, 16 bp, Homo sapiens
  source 1..16: mol_type = genomic DNA
tagagcatttgactgc

SEQ ID NO: 23726 - DNA, 17 bp, Homo sapiens
  source 1..17: mol_type = genomic DNA
tagagcatttgactgca

SEQ ID NO: 23727 - DNA, 21 bp, Homo sapiens
  source 1..21: mol_type = genomic DNA
tagagccagactgcctgggtt

SEQ ID NO: 23728 - DNA, 22 bp, Homo sapiens
  source 1..22: mol_type = genomic DNA
tagagccagactgcctgggttt

SEQ ID NO: 23729 - DNA, 23 bp, Homo sapiens
  source 1..23: mol_type = genomic DNA
tagagccagactgcctgggtttg

SEQ ID NO: 23730 - DNA, 16 bp, Homo sapiens
  source 1..16: mol_type = genomic DNA
tagaggtatgattctc

SEQ ID NO: 23731 - DNA, 17 bp, Homo sapiens
  source 1..17: mol_type = genomic DNA
tagagtaaataatagga

SEQ ID NO: 23732 - DNA, 18 bp, Homo sapiens
  source 1..18: mol_type = genomic DNA
tagagtaaataataggag

SEQ ID NO: 23733 - DNA, 19 bp, Homo sapiens
  source 1..19: mol_type = genomic DNA
tagagtaaataataggagc

SEQ ID NO: 23734 - DNA, 20 bp, Homo sapiens
  source 1..20: mol_type = genomic DNA
tagagtaaataataggagct

SEQ ID NO: 23735 - DNA, 21 bp, Homo sapiens
  source 1..21: mol_type = genomic DNA
tagagtaaataataggagctt

SEQ ID NO: 23736 - DNA, 22 bp, Homo sapiens
  source 1..22: mol_type = genomic DNA
tagagtaaataataggagctta

SEQ ID NO: 23737 - DNA, 23 bp, Homo sapiens
  source 1..23: mol_type = genomic DNA
tagagtaaataataggagcttaa

SEQ ID NO: 23738 - DNA, 25 bp, Homo sapiens
  source 1..25: mol_type = genomic DNA
tagagtaaataataggagcttaaac

SEQ ID NO: 23739 - DNA, 26 bp, Homo sapiens
  source 1..26: mol_type = genomic DNA
tagagtaaataataggagcttaaacc

SEQ ID NO: 23740 - DNA, 27 bp, Homo sapiens
  source 1..27: mol_type = genomic DNA
tagagtaaataataggagcttaaaccc

SEQ ID NO: 23741 - DNA, 28 bp, Homo sapiens
  source 1..28: mol_type = genomic DNA
tagagtaaataataggagcttaaacccc

SEQ ID NO: 23742 - DNA, 29 bp, Homo sapiens
  source 1..29: mol_type = genomic DNA
tagagtaaataataggagcttaaaccccc

SEQ ID NO: 23743 - DNA, 30 bp, Homo sapiens
  source 1..30: mol_type = genomic DNA
tagagtaaataataggagcttaaaccccct

SEQ ID NO: 23744 - DNA, 31 bp, Homo sapiens
  source 1..31: mol_type = genomic DNA
tagagtaaataataggagcttaaaccccctt

SEQ ID NO: 23745 - DNA, 32 bp, Homo sapiens
  source 1..32: mol_type = genomic DNA
tagagtaaataataggagcttaaaccccctta

SEQ ID NO: 23746 - DNA, 33 bp, Homo sapiens
  source 1..33: mol_type = genomic DNA
tagagtaaataataggagcttaaacccccttat

SEQ ID NO: 23747 - DNA, 34 bp, Homo sapiens
  source 1..34: mol_type = genomic DNA
tagagtaaataataggagcttaaacccccttatt

SEQ ID NO: 23748 - DNA, 37 bp, Homo sapiens
  source 1..37: mol_type = genomic DNA
tagagtaaataataggagcttaaacccccttatttct

SEQ ID NO: 23749 - DNA, 17 bp, Homo sapiens
  source 1..17: mol_type = genomic DNA
tagattgaagccagttg

SEQ ID NO: 23750 - DNA, 18 bp, Homo sapiens
  source 1..18: mol_type = genomic DNA
tagattgaagccagttga

SEQ ID NO: 23751 - DNA, 22 bp, Homo sapiens
  source 1..22: mol_type = genomic DNA
tagattgaagccagttgattag

SEQ ID NO: 23752 - DNA, 24 bp, Homo sapiens
  source 1..24: mol_type = genomic DNA
tagattgaagccagttgattaggg

SEQ ID NO: 23753 - DNA, 25 bp, Homo sapiens
  source 1..25: mol_type = genomic DNA
tagattgaagccagttgattagggt

SEQ ID NO: 23754 - DNA, 26 bp, Homo sapiens
  source 1..26: mol_type = genomic DNA
tagattgaagccagttgattagggtg

SEQ ID NO: 23755 - DNA, 27 bp, Homo sapiens
  source 1..27: mol_type = genomic DNA
tagattgaagccagttgattagggtgc

SEQ ID NO: 23756 - DNA, 28 bp, Homo sapiens
  source 1..28: mol_type = genomic DNA
tagattgaagccagttgattagggtgct

SEQ ID NO: 23757 - DNA, 29 bp, Homo sapiens
  source 1..29: mol_type = genomic DNA
tagattgaagccagttgattagggtgctt

SEQ ID NO: 23758 - DNA, 30 bp, Homo sapiens
  source 1..30: mol_type = genomic DNA
tagattgaagccagttgattagggtgctta

SEQ ID NO: 23759 - DNA, 31 bp, Homo sapiens
  source 1..31: mol_type = genomic DNA
tagattgaagccagttgattagggtgcttag

SEQ ID NO: 23760 - DNA, 32 bp, Homo sapiens
  source 1..32: mol_type = genomic DNA
tagattgaagccagttgattagggtgcttagc

SEQ ID NO: 23761 - DNA, 33 bp, Homo sapiens
  source 1..33: mol_type = genomic DNA
tagattgaagccagttgattagggtgcttagct

SEQ ID NO: 23762 - DNA, 34 bp, Homo sapiens
  source 1..34: mol_type = genomic DNA
tagattgaagccagttgattagggtgcttagctg

SEQ ID NO: 23763 - DNA, 35 bp, Homo sapiens
  source 1..35: mol_type = genomic DNA
tagattgaagccagttgattagggtgcttagctgt

SEQ ID NO: 23764 - DNA, 36 bp, Homo sapiens
  source 1..36: mol_type = genomic DNA
tagattgaagccagttgattagggtgcttagctgtt

SEQ ID NO: 23765 - DNA, 37 bp, Homo sapiens
  source 1..37: mol_type = genomic DNA
tagattgaagccagttgattagggtgcttagctgtta

SEQ ID NO: 23766 - DNA, 38 bp, Homo sapiens
  source 1..38: mol_type = genomic DNA
tagattgaagccagttgattagggtgcttagctgttaa

SEQ ID NO: 23767 - DNA, 39 bp, Homo sapiens
  source 1..39: mol_type = genomic DNA
tagattgaagccagttgattagggtgcttagctgttaac

SEQ ID NO: 23768 - DNA, 40 bp, Homo sapiens
  source 1..40: mol_type = genomic DNA
tagattgaagccagttgattagggtgcttagctgttaact

SEQ ID NO: 23769 - DNA, 41 bp, Homo sapiens
  source 1..41: mol_type = genomic DNA
tagattgaagccagttgattagggtgcttagctgttaacta

SEQ ID NO: 23770 - DNA, 42 bp, Homo sapiens
  source 1..42: mol_type = genomic DNA
tagattgaagccagttgattagggtgcttagctgttaactaa

SEQ ID NO: 23771 - DNA, 46 bp, Homo sapiens
  source 1..46: mol_type = genomic DNA
tagattgaagccagttgattagggtgcttagctgttaactaagtgt

SEQ ID NO: 23772 - DNA, 48 bp, Homo sapiens
  source 1..48: mol_type = genomic DNA
tagattgaagccagttgattagggtgcttagctgttaactaagtgttt

SEQ ID NO: 23773 - DNA, 16 bp, Homo sapiens
  source 1..16: mol_type = genomic DNA
tagcactctggactct

SEQ ID NO: 23774 - DNA, 17 bp, Homo sapiens
  source 1..17: mol_type = genomic DNA
tagcactctggactctg

SEQ ID NO: 23775 - DNA, 18 bp, Homo sapiens
  source 1..18: mol_type = genomic DNA
tagcactctggactctga

SEQ ID NO: 23776 - DNA, 19 bp, Homo sapiens
  source 1..19: mol_type = genomic DNA
tagcactctggactctgaa

SEQ ID NO: 23777 - DNA, 20 bp, Homo sapiens
  source 1..20: mol_type = genomic DNA
tagcactctggactctgaat

SEQ ID NO: 23778 - DNA, 21 bp, Homo sapiens
  source 1..21: mol_type = genomic DNA
tagcactctggactctgaatc

SEQ ID NO: 23779 - DNA, 22 bp, Homo sapiens
  source 1..22: mol_type = genomic DNA
tagcactctggactctgaatcc

SEQ ID NO: 23780 - DNA, 23 bp, Homo sapiens
  source 1..23: mol_type = genomic DNA
tagcactctggactctgaatcca

SEQ ID NO: 23781 - DNA, 24 bp, Homo sapiens
  source 1..24: mol_type = genomic DNA
tagcactctggactctgaatccag

SEQ ID NO: 23782 - DNA, 25 bp, Homo sapiens
  source 1..25: mol_type = genomic DNA
tagcactctggactctgaatccagc

SEQ ID NO: 23783 - DNA, 26 bp, Homo sapiens
  source 1..26: mol_type = genomic DNA
tagcactctggactctgaatccagcg

SEQ ID NO: 23784 - DNA, 27 bp, Homo sapiens
  source 1..27: mol_type = genomic DNA
tagcactctggactctgaatccagcga

SEQ ID NO: 23785 - DNA, 28 bp, Homo sapiens
  source 1..28: mol_type = genomic DNA
tagcactctggactctgaatccagcgat

SEQ ID NO: 23786 - DNA, 32 bp, Homo sapiens
  source 1..32: mol_type = genomic DNA
tagcactctggactctgaatccagcgatccga

SEQ ID NO: 23787 - DNA, 33 bp, Homo sapiens
  source 1..33: mol_type = genomic DNA
tagcactctggactctgaatccagcgatccgag

SEQ ID NO: 23788 - DNA, 34 bp, Homo sapiens
  source 1..34: mol_type = genomic DNA
tagcactctggactctgaatccagcgatccgagt

SEQ ID NO: 23789 - DNA, 35 bp, Homo sapiens
  source 1..35: mol_type = genomic DNA
tagcactctggactctgaatccagcgatccgagtt

SEQ ID NO: 23790 - DNA, 36 bp, Homo sapiens
  source 1..36: mol_type = genomic DNA
tagcactctggactctgaatccagcgatccgagttc

SEQ ID NO: 23791 - DNA, 37 bp, Homo sapiens
  source 1..37: mol_type = genomic DNA
tagcactctggactctgaatccagcgatccgagttca

SEQ ID NO: 23792 - DNA, 38 bp, Homo sapiens
  source 1..38: mol_type = genomic DNA
tagcactctggactctgaatccagcgatccgagttcaa

SEQ ID NO: 23793 - DNA, 42 bp, Homo sapiens
  source 1..42: mol_type = genomic DNA
tagcactctggactctgaatccagcgatccgagttcaaatct

SEQ ID NO: 23794 - DNA, 45 bp, Homo sapiens
  source 1..45: mol_type = genomic DNA
tagcactctggactctgaatccagcgatccgagttcaaatctcgg

SEQ ID NO: 23795 - DNA, 46 bp, Homo sapiens
  source 1..46: mol_type = genomic DNA
tagcactctggactctgaatccagcgatccgagttcaaatctcggt

SEQ ID NO: 23796 - DNA, 47 bp, Homo sapiens
  source 1..47: mol_type = genomic DNA
tagcactctggactctgaatccagcgatccgagttcaaatctcggtg

SEQ ID NO: 23797 - DNA, 39 bp, Homo sapiens
  source 1..39: mol_type = genomic DNA
tagcactctggactctgaatccagcgatccgagttcaag

SEQ ID NO: 23798 - DNA, 17 bp, Homo sapiens
  source 1..17: mol_type = genomic DNA
tagcactctggactttg

SEQ ID NO: 23799 - DNA, 18 bp, Homo sapiens
  source 1..18: mol_type = genomic DNA
tagcactctggactttga

SEQ ID NO: 23800 - DNA, 19 bp, Homo sapiens
  source 1..19: mol_type = genomic DNA
tagcactctggactttgaa

SEQ ID NO: 23801 - DNA, 20 bp, Homo sapiens
  source 1..20: mol_type = genomic DNA
tagcactctggactttgaat

SEQ ID NO: 23802 - DNA, 21 bp, Homo sapiens
  source 1..21: mol_type = genomic DNA
tagcactctggactttgaatc

SEQ ID NO: 23803 - DNA, 22 bp, Homo sapiens
  source 1..22: mol_type = genomic DNA
tagcactctggactttgaatcc

SEQ ID NO: 23804 - DNA, 23 bp, Homo sapiens
  source 1..23: mol_type = genomic DNA
tagcactctggactttgaatcca

SEQ ID NO: 23805 - DNA, 25 bp, Homo sapiens
  source 1..25: mol_type = genomic DNA
tagcactctggactttgaatccagc

SEQ ID NO: 23806 - DNA, 34 bp, Homo sapiens
  source 1..34: mol_type = genomic DNA
tagcactctggactttgaatccagcaatccgagt

SEQ ID NO: 23807 - DNA, 33 bp, Homo sapiens
  source 1..33: mol_type = genomic DNA
tagcactctggactttgaatccagcgatccgag

SEQ ID NO: 23808 - DNA, 34 bp, Homo sapiens
  source 1..34: mol_type = genomic DNA
tagcactctggactttgaatccagcgatccgagt

SEQ ID NO: 23809 - DNA, 35 bp, Homo sapiens
  source 1..35: mol_type = genomic DNA
tagcactctggactttgaatccagcgatccgagtt

SEQ ID NO: 23810 - DNA, 36 bp, Homo sapiens
  source 1..36: mol_type = genomic DNA
tagcactctggactttgaatccagcgatccgagttc

SEQ ID NO: 23811 - DNA, 37 bp, Homo sapiens
  source 1..37: mol_type = genomic DNA
tagcactctggactttgaatccagcgatccgagttca

SEQ ID NO: 23812 - DNA, 40 bp, Homo sapiens
  source 1..40: mol_type = genomic DNA
tagcactctggactttgaatccagcgatccgagttcaaat

SEQ ID NO: 23813 - DNA, 47 bp, Homo sapiens
  source 1..47: mol_type = genomic DNA
tagcactctggactttgaatccagcgatccgagttcaaatctcggtg

SEQ ID NO: 23814 - DNA, 22 bp, Homo sapiens
  source 1..22: mol_type = genomic DNA
tagcactctgggctttgaatcc

SEQ ID NO: 23815 - DNA, 32 bp, Homo sapiens
  source 1..32: mol_type = genomic DNA
tagcatagctgccttccaagcagttgacccgg

SEQ ID NO: 23816 - DNA, 17 bp, Homo sapiens
  source 1..17: mol_type = genomic DNA
tagcattaaccttttaa

SEQ ID NO: 23817 - DNA, 18 bp, Homo sapiens
  source 1..18: mol_type = genomic DNA
tagcattaaccttttaag

SEQ ID NO: 23818 - DNA, 19 bp, Homo sapiens
  source 1..19: mol_type = genomic DNA
tagcattaaccttttaagt

SEQ ID NO: 23819 - DNA, 25 bp, Homo sapiens
  source 1..25: mol_type = genomic DNA
tagcattaaccttttaagttaaaga

SEQ ID NO: 23820 - DNA, 30 bp, Homo sapiens
  source 1..30: mol_type = genomic DNA
tagcattaaccttttaagttaaagattaag

SEQ ID NO: 23821 - DNA, 33 bp, Homo sapiens
  source 1..33: mol_type = genomic DNA
tagcattaaccttttaagttaaagattaagaga

SEQ ID NO: 23822 - DNA, 35 bp, Homo sapiens
  source 1..35: mol_type = genomic DNA
tagcattaaccttttaagttaaagattaagagaac

SEQ ID NO: 23823 - DNA, 36 bp, Homo sapiens
  source 1..36: mol_type = genomic DNA
tagcattaaccttttaagttaaagattaagagaacc

SEQ ID NO: 23824 - DNA, 38 bp, Homo sapiens
  source 1..38: mol_type = genomic DNA
tagcattaaccttttaagttaaagattaagagaaccaa

SEQ ID NO: 23825 - DNA, 39 bp, Homo sapiens
  source 1..39: mol_type = genomic DNA
tagcattaaccttttaagttaaagattaagagaaccaac

SEQ ID NO: 23826 - DNA, 41 bp, Homo sapiens
  source 1..41: mol_type = genomic DNA
tagcattaaccttttaagttaaagattaagagaaccaacac

SEQ ID NO: 23827 - DNA, 42 bp, Homo sapiens
  source 1..42: mol_type = genomic DNA
tagcattaaccttttaagttaaagattaagagaaccaacacc

SEQ ID NO: 23828 - DNA, 43 bp, Homo sapiens
  source 1..43: mol_type = genomic DNA
tagcattaaccttttaagttaaagattaagagaaccaacacct

SEQ ID NO: 23829 - DNA, 44 bp, Homo sapiens
  source 1..44: mol_type = genomic DNA
tagcattaaccttttaagttaaagattaagagaaccaacacctc

SEQ ID NO: 23830 - DNA, 16 bp, Homo sapiens
  source 1..16: mol_type = genomic DNA
tagcgcagtaggcagc

SEQ ID NO: 23831 - DNA, 16 bp, Homo sapiens
  source 1..16: mol_type = genomic DNA
tagcgcagtaggtagc

SEQ ID NO: 23832 - DNA, 16 bp, Homo sapiens
  source 1..16: mol_type = genomic DNA
tagcgcattggacttc

SEQ ID NO: 23833 - DNA, 21 bp, Homo sapiens
  source 1..21: mol_type = genomic DNA
tagcgcattggacttctaatt

SEQ ID NO: 23834 - DNA, 22 bp, Homo sapiens
  source 1..22: mol_type = genomic DNA
tagcgcattggacttctaattc

SEQ ID NO: 23835 - DNA, 34 bp, Homo sapiens
  source 1..34: mol_type = genomic DNA
tagcgcattggacttctaattcaaaggttccggg

SEQ ID NO: 23836 - DNA, 35 bp, Homo sapiens
  source 1..35: mol_type = genomic DNA
tagcgcattggacttctaattcaaaggttgtgggt

SEQ ID NO: 23837 - DNA, 21 bp, Homo sapiens
  source 1..21: mol_type = genomic DNA
tagcgcgtctgactccagatc

SEQ ID NO: 23838 - DNA, 17 bp, Homo sapiens
  source 1..17: mol_type = genomic DNA
tagcgcgttcggctgtt

SEQ ID NO: 23839 - DNA, 21 bp, Homo sapiens
  source 1..21: mol_type = genomic DNA
tagcgcgttcggctgttaacc

SEQ ID NO: 23840 - DNA, 23 bp, Homo sapiens
  source 1..23: mol_type = genomic DNA
tagcgcgttcggctgttaaccga

SEQ ID NO: 23841 - DNA, 24 bp, Homo sapiens
  source 1..24: mol_type = genomic DNA
tagcgcgttcggctgttaaccgaa

SEQ ID NO: 23842 - DNA, 33 bp, Homo sapiens
  source 1..33: mol_type = genomic DNA
tagcgcgttcggctgttaaccgaaaggttggtg

SEQ ID NO: 23843 - DNA, 36 bp, Homo sapiens
  source 1..36: mol_type = genomic DNA
tagcgcgttcggctgttaaccgaaaggttggtggtt

SEQ ID NO: 23844 - DNA, 29 bp, Homo sapiens
  source 1..29: mol_type = genomic DNA
tagcgggatcgatgcccgcatcctccacc

SEQ ID NO: 23845 - DNA, 22 bp, Homo sapiens
  source 1..22: mol_type = genomic DNA
tagcggtagagcatttgactgc

SEQ ID NO: 23846 - DNA, 16 bp, Homo sapiens
  source 1..16: mol_type = genomic DNA
tagcggttaggattcc

SEQ ID NO: 23847 - DNA, 17 bp, Homo sapiens
  source 1..17: mol_type = genomic DNA
tagcggttaggattcct

SEQ ID NO: 23848 - DNA, 18 bp, Homo sapiens
  source 1..18: mol_type = genomic DNA
tagcggttaggattcctg

SEQ ID NO: 23849 - DNA, 20 bp, Homo sapiens
  source 1..20: mol_type = genomic DNA
tagcggttaggattcctggt

SEQ ID NO: 23850 - DNA, 21 bp, Homo sapiens
  source 1..21: mol_type = genomic DNA
tagcggttaggattcctggtt

SEQ ID NO: 23851 - DNA, 22 bp, Homo sapiens
  source 1..22: mol_type = genomic DNA
tagcggttaggattcctggttt

SEQ ID NO: 23852 - DNA, 23 bp, Homo sapiens
  source 1..23: mol_type = genomic DNA
tagcggttaggattcctggtttt

SEQ ID NO: 23853 - DNA, 24 bp, Homo sapiens
  source 1..24: mol_type = genomic DNA
tagcggttaggattcctggttttc

SEQ ID NO: 23854 - DNA, 27 bp, Homo sapiens
  source 1..27: mol_type = genomic DNA
tagcggttaggattcctggttttcacc

SEQ ID NO: 23855 - DNA, 28 bp, Homo sapiens
  source 1..28: mol_type = genomic DNA
tagcggttaggattcctggttttcaccc

SEQ ID NO: 23856 - DNA, 30 bp, Homo sapiens
  source 1..30: mol_type = genomic DNA
tagcggttaggattcctggttttcacccag

SEQ ID NO: 23857 - DNA, 32 bp, Homo sapiens
  source 1..32: mol_type = genomic DNA
tagcggttaggattcctggttttcacccaggt

SEQ ID NO: 23858 - DNA, 17 bp, Homo sapiens
  source 1..17: mol_type = genomic DNA
tagcggttatcacattc

SEQ ID NO: 23859 - DNA, 21 bp, Homo sapiens
  source 1..21: mol_type = genomic DNA
tagcggttatcacattcgcct

SEQ ID NO: 23860 - DNA, 22 bp, Homo sapiens
  source 1..22: mol_type = genomic DNA
tagcggttatcacattcgcctc

SEQ ID NO: 23861 - DNA, 18 bp, Homo sapiens
  source 1..18: mol_type = genomic DNA
tagcggttatcacgtctg

SEQ ID NO: 23862 - DNA, 21 bp, Homo sapiens
  source 1..21: mol_type = genomic DNA
tagcggttatcacgtctgctt

SEQ ID NO: 23863 - DNA, 16 bp, Homo sapiens
  source 1..16: mol_type = genomic DNA
tagcgtggccgagcgg

SEQ ID NO: 23864 - DNA, 19 bp, Homo sapiens
  source 1..19: mol_type = genomic DNA
tagcgtggccgagcggtct

SEQ ID NO: 23865 - DNA, 20 bp, Homo sapiens
  source 1..20: mol_type = genomic DNA
tagcgtggccgagcggtcta

SEQ ID NO: 23866 - DNA, 22 bp, Homo sapiens
  source 1..22: mol_type = genomic DNA
tagcgtggccgagcggtctaag

SEQ ID NO: 23867 - DNA, 23 bp, Homo sapiens
  source 1..23: mol_type = genomic DNA
tagcgtggccgagcggtctaagg

SEQ ID NO: 23868 - DNA, 24 bp, Homo sapiens
  source 1..24: mol_type = genomic DNA
tagcgtggccgagcggtctaaggc

SEQ ID NO: 23869 - DNA, 35 bp, Homo sapiens
  source 1..35: mol_type = genomic DNA
tagcgtggccgagcggtctaaggcgctggatttag

SEQ ID NO: 23870 - DNA, 19 bp, Homo sapiens
  source 1..19: mol_type = genomic DNA
tagcgtggccgagtggtct

SEQ ID NO: 23871 - DNA, 22 bp, Homo sapiens
  source 1..22: mol_type = genomic DNA
tagcgtggccgagtggtctaag

SEQ ID NO: 23872 - DNA, 24 bp, Homo sapiens
  source 1..24: mol_type = genomic DNA
tagcgtggccgagtggtctaaggc

SEQ ID NO: 23873 - DNA, 32 bp, Homo sapiens
  source 1..32: mol_type = genomic DNA
tagcgtggccgagtggtctaaggcgctggatt

SEQ ID NO: 23874 - DNA, 35 bp, Homo sapiens
  source 1..35: mol_type = genomic DNA
tagcgtggccgagtggtctaaggcgctggatttag

SEQ ID NO: 23875 - DNA, 16 bp, Homo sapiens
  source 1..16: mol_type = genomic DNA
tagctcaggcggtaga

SEQ ID NO: 23876 - DNA, 17 bp, Homo sapiens
  source 1..17: mol_type = genomic DNA
tagctcaggcggtagag

SEQ ID NO: 23877 - DNA, 25 bp, Homo sapiens
  source 1..25: mol_type = genomic DNA
tagctcaggggtagagcatttgact

SEQ ID NO: 23878 - DNA, 26 bp, Homo sapiens
  source 1..26: mol_type = genomic DNA
tagctcaggggtagagcatttgactg

SEQ ID NO: 23879 - DNA, 27 bp, Homo sapiens
  source 1..27: mol_type = genomic DNA
tagctcaggggtagagcatttgactgc

SEQ ID NO: 23880 - DNA, 18 bp, Homo sapiens
  source 1..18: mol_type = genomic DNA
tagctcaggggttagagc

SEQ ID NO: 23881 - DNA, 25 bp, Homo sapiens
  source 1..25: mol_type = genomic DNA
tagctcaggggttagagcactggtc

SEQ ID NO: 23882 - DNA, 26 bp, Homo sapiens
  source 1..26: mol_type = genomic DNA
tagctcaggggttagagcactggtct

SEQ ID NO: 23883 - DNA, 27 bp, Homo sapiens
  source 1..27: mol_type = genomic DNA
tagctcaggggttagagcactggtctt

SEQ ID NO: 23884 - DNA, 35 bp, Homo sapiens
  source 1..35: mol_type = genomic DNA
tagctcaggggttagagcactggtcttgtaaacca

SEQ ID NO: 23885 - DNA, 16 bp, Homo sapiens
  source 1..16: mol_type = genomic DNA
tagctcagtcggtaga

SEQ ID NO: 23886 - DNA, 17 bp, Homo sapiens
  source 1..17: mol_type = genomic DNA
tagctcagtcggtagag

SEQ ID NO: 23887 - DNA, 18 bp, Homo sapiens
  source 1..18: mol_type = genomic DNA
tagctcagtcggtagagc

SEQ ID NO: 23888 - DNA, 20 bp, Homo sapiens
  source 1..20: mol_type = genomic DNA
tagctcagtcggtagagcat

SEQ ID NO: 23889 - DNA, 25 bp, Homo sapiens
  source 1..25: mol_type = genomic DNA
tagctcagtcggtagagcataagac

SEQ ID NO: 23890 - DNA, 26 bp, Homo sapiens
  source 1..26: mol_type = genomic DNA
tagctcagtcggtagagcataagact

SEQ ID NO: 23891 - DNA, 21 bp, Homo sapiens
  source 1..21: mol_type = genomic DNA
tagctcagtcggtagagcatc

SEQ ID NO: 23892 - DNA, 25 bp, Homo sapiens
  source 1..25: mol_type = genomic DNA
tagctcagtcggtagagcatcagac

SEQ ID NO: 23893 - DNA, 26 bp, Homo sapiens
  source 1..26: mol_type = genomic DNA
tagctcagtcggtagagcatcagact

SEQ ID NO: 23894 - DNA, 27 bp, Homo sapiens
  source 1..27: mol_type = genomic DNA
tagctcagtcggtagagcatcagactt

SEQ ID NO: 23895 - DNA, 28 bp, Homo sapiens
  source 1..28: mol_type = genomic DNA
tagctcagtcggtagagcatcagacttt

SEQ ID NO: 23896 - DNA, 29 bp, Homo sapiens
  source 1..29: mol_type = genomic DNA
tagctcagtcggtagagcatcagactttt

SEQ ID NO: 23897 - DNA, 21 bp, Homo sapiens
  source 1..21: mol_type = genomic DNA
tagctcagtcggtagagcatg

SEQ ID NO: 23898 - DNA, 25 bp, Homo sapiens
  source 1..25: mol_type = genomic DNA
tagctcagtcggtagagcatgagac

SEQ ID NO: 23899 - DNA, 27 bp, Homo sapiens
  source 1..27: mol_type = genomic DNA
tagctcagtcggtagagcatgagaccc

SEQ ID NO: 23900 - DNA, 28 bp, Homo sapiens
  source 1..28: mol_type = genomic DNA
tagctcagtcggtagagcatgagaccct

SEQ ID NO: 23901 - DNA, 34 bp, Homo sapiens
  source 1..34: mol_type = genomic DNA
tagctcagtcggtagagcatgagacccttaatct

SEQ ID NO: 23902 - DNA, 26 bp, Homo sapiens
  source 1..26: mol_type = genomic DNA
tagctcagtcggtagagcatgagact

SEQ ID NO: 23903 - DNA, 27 bp, Homo sapiens
  source 1..27: mol_type = genomic DNA
tagctcagtcggtagagcatgagactc

SEQ ID NO: 23904 - DNA, 28 bp, Homo sapiens
  source 1..28: mol_type = genomic DNA
tagctcagtcggtagagcatgagactct

SEQ ID NO: 23905 - DNA, 29 bp, Homo sapiens
  source 1..29: mol_type = genomic DNA
tagctcagtcggtagagcatgagactctt

SEQ ID NO: 23906 - DNA, 30 bp, Homo sapiens
  source 1..30: mol_type = genomic DNA
tagctcagtcggtagagcatgagactctta

SEQ ID NO: 23907 - DNA, 31 bp, Homo sapiens
  source 1..31: mol_type = genomic DNA
tagctcagtcggtagagcatgagactcttaa

SEQ ID NO: 23908 - DNA, 32 bp, Homo sapiens
  source 1..32: mol_type = genomic DNA
tagctcagtcggtagagcatgagactcttaat

SEQ ID NO: 23909 - DNA, 33 bp, Homo sapiens
  source 1..33: mol_type = genomic DNA
tagctcagtcggtagagcatgagactcttaatc

SEQ ID NO: 23910 - DNA, 34 bp, Homo sapiens
  source 1..34: mol_type = genomic DNA
tagctcagtcggtagagcatgagactcttaatct

SEQ ID NO: 23911 - DNA, 42 bp, Homo sapiens
  source 1..42: mol_type = genomic DNA
tagctcagtcggtagagcatgagactcttaatctcagggtcg

SEQ ID NO: 23912 - DNA, 44 bp, Homo sapiens
  source 1..44: mol_type = genomic DNA
tagctcagtcggtagagcatgagactcttaatctcagggtcgtg

SEQ ID NO: 23913 - DNA, 45 bp, Homo sapiens
  source 1..45: mol_type = genomic DNA
tagctcagtcggtagagcatgagactcttaatctcagggtcgtgg

SEQ ID NO: 23914 - DNA, 47 bp, Homo sapiens
  source 1..47: mol_type = genomic DNA
tagctcagtcggtagagcatgagactcttaatctcagggtcgtgggt

SEQ ID NO: 23915 - DNA, 48 bp, Homo sapiens
  source 1..48: mol_type = genomic DNA
tagctcagtcggtagagcatgagactcttaatctcagggtcgtgggtt

SEQ ID NO: 23916 - DNA, 23 bp, Homo sapiens
  source 1..23: mol_type = genomic DNA
tagctcagtcggtagagcatggg

SEQ ID NO: 23917 - DNA, 24 bp, Homo sapiens
  source 1..24: mol_type = genomic DNA
tagctcagtcggtagagcatggga

SEQ ID NO: 23918 - DNA, 25 bp, Homo sapiens
  source 1..25: mol_type = genomic DNA
tagctcagtcggtagagcatgggac

SEQ ID NO: 23919 - DNA, 26 bp, Homo sapiens
  source 1..26: mol_type = genomic DNA
tagctcagtcggtagagcatgggact

SEQ ID NO: 23920 - DNA, 27 bp, Homo sapiens
  source 1..27: mol_type = genomic DNA
tagctcagtcggtagagcatgggactc

SEQ ID NO: 23921 - DNA, 28 bp, Homo sapiens
  source 1..28: mol_type = genomic DNA
tagctcagtcggtagagcatgggactct

SEQ ID NO: 23922 - DNA, 29 bp, Homo sapiens
  source 1..29: mol_type = genomic DNA
tagctcagtcggtagagcatgggactctt

SEQ ID NO: 23923 - DNA, 30 bp, Homo sapiens
  source 1..30: mol_type = genomic DNA
tagctcagtcggtagagcatgggactctta

SEQ ID NO: 23924 - DNA, 31 bp, Homo sapiens
  source 1..31: mol_type = genomic DNA
tagctcagtcggtagagcatgggactcttaa

SEQ ID NO: 23925 - DNA, 32 bp, Homo sapiens
  source 1..32: mol_type = genomic DNA
tagctcagtcggtagagcatgggactcttaat

SEQ ID NO: 23926 - DNA, 33 bp, Homo sapiens
  source 1..33: mol_type = genomic DNA
tagctcagtcggtagagcatgggactcttaatc

SEQ ID NO: 23927 - DNA, 34 bp, Homo sapiens
  source 1..34: mol_type = genomic DNA
tagctcagtcggtagagcatgggactcttaatcc

SEQ ID NO: 23928 - DNA, 42 bp, Homo sapiens
  source 1..42: mol_type = genomic DNA
tagctcagtcggtagagcatgggactcttaatcccagggtcg

SEQ ID NO: 23929 - DNA, 45 bp, Homo sapiens
  source 1..45: mol_type = genomic DNA
tagctcagtcggtagagcatgggactcttaatcccagggtcgtgg

SEQ ID NO: 23930 - DNA, 46 bp, Homo sapiens
  source 1..46: mol_type = genomic DNA
tagctcagtcggtagagcatgggactcttaatcccagggtcgtggg

SEQ ID NO: 23931 - DNA, 47 bp, Homo sapiens
  source 1..47: mol_type = genomic DNA
tagctcagtcggtagagcatgggactcttaatcccagggtcgtgggt

SEQ ID NO: 23932 - DNA, 48 bp, Homo sapiens
  source 1..48: mol_type = genomic DNA
tagctcagtcggtagagcatgggactcttaatcccagggtcgtgggtt

SEQ ID NO: 23933 - DNA, 48 bp, Homo sapiens
  source 1..48: mol_type = genomic DNA
tagctcagtcggtagagcatgggactcttaatctcagggtcgtgggtt

SEQ ID NO: 23934 - DNA, 25 bp, Homo sapiens
  source 1..25: mol_type = genomic DNA
tagctcagtggtagagcatttgact

SEQ ID NO: 23935 - DNA, 26 bp, Homo sapiens
  source 1..26: mol_type = genomic DNA
tagctcagtggtagagcatttgactg

SEQ ID NO: 23936 - DNA, 27 bp, Homo sapiens
  source 1..27: mol_type = genomic DNA
tagctcagtggtagagcatttgactgc

SEQ ID NO: 23937 - DNA, 28 bp, Homo sapiens
  source 1..28: mol_type = genomic DNA
tagctcagtggtagagcatttgactgca

SEQ ID NO: 23938 - DNA, 42 bp, Homo sapiens
  source 1..42: mol_type = genomic DNA
tagctcagttgggagagcgttagactgaagatctaaaggtcc

SEQ ID NO: 23939 - DNA, 25 bp, Homo sapiens
  source 1..25: mol_type = genomic DNA
tagctcagttggtagagcatcagac

SEQ ID NO: 23940 - DNA, 26 bp, Homo sapiens
  source 1..26: mol_type = genomic DNA
tagctcagttggtagagcatcagact

SEQ ID NO: 23941 - DNA, 29 bp, Homo sapiens
  source 1..29: mol_type = genomic DNA
tagctgccttccaagcagttgacccgggt

SEQ ID NO: 23942 - DNA, 30 bp, Homo sapiens
  source 1..30: mol_type = genomic DNA
tagctgccttccaagcagttgacccgggtt

SEQ ID NO: 23943 - DNA, 31 bp, Homo sapiens
  source 1..31: mol_type = genomic DNA
tagctgccttccaagcagttgacccgggttc

SEQ ID NO: 23944 - DNA, 19 bp, Homo sapiens
  source 1..19: mol_type = genomic DNA
tagctgttaactaagtgtt

SEQ ID NO: 23945 - DNA, 20 bp, Homo sapiens
  source 1..20: mol_type = genomic DNA
tagctgttaactaagtgttt

SEQ ID NO: 23946 - DNA, 21 bp, Homo sapiens
  source 1..21: mol_type = genomic DNA
tagctgttaactaagtgtttg

SEQ ID NO: 23947 - DNA, 22 bp, Homo sapiens
  source 1..22: mol_type = genomic DNA
tagctgttaactaagtgtttgt

SEQ ID NO: 23948 - DNA, 23 bp, Homo sapiens
  source 1..23: mol_type = genomic DNA
tagctgttaactaagtgtttgtg

SEQ ID NO: 23949 - DNA, 25 bp, Homo sapiens
  source 1..25: mol_type = genomic DNA
tagctgttaactaagtgtttgtggg

SEQ ID NO: 23950 - DNA, 26 bp, Homo sapiens
  source 1..26: mol_type = genomic DNA
tagctgttaactaagtgtttgtgggt

SEQ ID NO: 23951 - DNA, 27 bp, Homo sapiens
  source 1..27: mol_type = genomic DNA
tagctgttaactaagtgtttgtgggtt

SEQ ID NO: 23952 - DNA, 28 bp, Homo sapiens
  source 1..28: mol_type = genomic DNA
tagctgttaactaagtgtttgtgggttt

SEQ ID NO: 23953 - DNA, 29 bp, Homo sapiens
  source 1..29: mol_type = genomic DNA
tagctgttaactaagtgtttgtgggttta

SEQ ID NO: 23954 - DNA, 30 bp, Homo sapiens
  source 1..30: mol_type = genomic DNA
tagctgttaactaagtgtttgtgggtttaa

SEQ ID NO: 23955 - DNA, 31 bp, Homo sapiens
  source 1..31: mol_type = genomic DNA
tagctgttaactaagtgtttgtgggtttaag

SEQ ID NO: 23956 - DNA, 33 bp, Homo sapiens
  source 1..33: mol_type = genomic DNA
tagctgttaactaagtgtttgtgggtttaagtc

SEQ ID NO: 23957 - DNA, 35 bp, Homo sapiens
  source 1..35: mol_type = genomic DNA
tagctgttaactaagtgtttgtgggtttaagtccc

SEQ ID NO: 23958 - DNA, 36 bp, Homo sapiens
  source 1..36: mol_type = genomic DNA
tagctgttaactaagtgtttgtgggtttaagtccca

SEQ ID NO: 23959 - DNA, 38 bp, Homo sapiens
  source 1..38: mol_type = genomic DNA
tagctgttaactaagtgtttgtgggtttaagtcccatt

SEQ ID NO: 23960 - DNA, 41 bp, Homo sapiens
  source 1..41: mol_type = genomic DNA
tagctgttaactaagtgtttgtgggtttaagtcccattggt

SEQ ID NO: 23961 - DNA, 42 bp, Homo sapiens
  source 1..42: mol_type = genomic DNA
tagctgttaactaagtgtttgtgggtttaagtcccattggtc

SEQ ID NO: 23962 - DNA, 43 bp, Homo sapiens
  source 1..43: mol_type = genomic DNA
tagctgttaactaagtgtttgtgggtttaagtcccattggtct

SEQ ID NO: 23963 - DNA, 44 bp, Homo sapiens
  source 1..44: mol_type = genomic DNA
tagctgttaactaagtgtttgtgggtttaagtcccattggtcta

SEQ ID NO: 23964 - DNA, 45 bp, Homo sapiens
  source 1..45: mol_type = genomic DNA
tagctgttaactaagtgtttgtgggtttaagtcccattggtctag

SEQ ID NO: 23965 - DNA, 46 bp, Homo sapiens
  source 1..46: mol_type = genomic DNA
tagctgttaactaagtgtttgtgggtttaagtcccattggtctagc

SEQ ID NO: 23966 - DNA, 47 bp, Homo sapiens
  source 1..47: mol_type = genomic DNA
tagctgttaactaagtgtttgtgggtttaagtcccattggtctagcc

SEQ ID NO: 23967 - DNA, 48 bp, Homo sapiens
  source 1..48: mol_type = genomic DNA
tagctgttaactaagtgtttgtgggtttaagtcccattggtctagcca

SEQ ID NO: 23968 - DNA, 31 bp, Homo sapiens
  source 1..31: mol_type = genomic DNA
tagcttaacacaaagcacccaacttacactt

SEQ ID NO: 23969 - DNA, 32 bp, Homo sapiens
  source 1..32: mol_type = genomic DNA
tagcttaacacaaagcacccaacttacactta

SEQ ID NO: 23970 - DNA, 26 bp, Homo sapiens
  source 1..26: mol_type = genomic DNA
tagcttaattaaagtggctgatttgc

SEQ ID NO: 23971 - DNA, 28 bp, Homo sapiens
  source 1..28: mol_type = genomic DNA
tagcttacctcctcaaagcaatacactg

SEQ ID NO: 23972 - DNA, 30 bp, Homo sapiens
  source 1..30: mol_type = genomic DNA
tagcttacctcctcaaagcaatacactgaa

SEQ ID NO: 23973 - DNA, 25 bp, Homo sapiens
  source 1..25: mol_type = genomic DNA
tagcttagcggtagagcatttgact

SEQ ID NO: 23974 - DNA, 23 bp, Homo sapiens
  source 1..23: mol_type = genomic DNA
tagcttagttggtagagcattgg

SEQ ID NO: 23975 - DNA, 21 bp, Homo sapiens
  source 1..21: mol_type = genomic DNA
tagctttgggtgctaatggtg

SEQ ID NO: 23976 - DNA, 22 bp, Homo sapiens
  source 1..22: mol_type = genomic DNA
tagctttgggtgctaatggtgg

SEQ ID NO: 23977 - DNA, 23 bp, Homo sapiens
  source 1..23: mol_type = genomic DNA
tagctttgggtgctaatggtgga

SEQ ID NO: 23978 - DNA, 24 bp, Homo sapiens
  source 1..24: mol_type = genomic DNA
tagctttgggtgctaatggtggag

SEQ ID NO: 23979 - DNA, 26 bp, Homo sapiens
  source 1..26: mol_type = genomic DNA
tagctttgggtgctaatggtggagtt

SEQ ID NO: 23980 - DNA, 27 bp, Homo sapiens
  source 1..27: mol_type = genomic DNA
tagctttgggtgctaatggtggagtta

SEQ ID NO: 23981 - DNA, 28 bp, Homo sapiens
  source 1..28: mol_type = genomic DNA
tagctttgggtgctaatggtggagttaa

SEQ ID NO: 23982 - DNA, 29 bp, Homo sapiens
  source 1..29: mol_type = genomic DNA
tagctttgggtgctaatggtggagttaaa

SEQ ID NO: 23983 - DNA, 30 bp, Homo sapiens
  source 1..30: mol_type = genomic DNA
tagctttgggtgctaatggtggagttaaag

SEQ ID NO: 23984 - DNA, 31 bp, Homo sapiens
  source 1..31: mol_type = genomic DNA
tagctttgggtgctaatggtggagttaaaga

SEQ ID NO: 23985 - DNA, 32 bp, Homo sapiens
  source 1..32: mol_type = genomic DNA
tagctttgggtgctaatggtggagttaaagac

SEQ ID NO: 23986 - DNA, 33 bp, Homo sapiens
  source 1..33: mol_type = genomic DNA
tagctttgggtgctaatggtggagttaaagact

SEQ ID NO: 23987 - DNA, 34 bp, Homo sapiens
  source 1..34: mol_type = genomic DNA
tagctttgggtgctaatggtggagttaaagactt

SEQ ID NO: 23988 - DNA, 35 bp, Homo sapiens
  source 1..35: mol_type = genomic DNA
tagctttgggtgctaatggtggagttaaagacttt

SEQ ID NO: 23989 - DNA, 43 bp, Homo sapiens
  source 1..43: mol_type = genomic DNA
tagctttgggtgctaatggtggagttaaagactttttctctga

SEQ ID NO: 23990 - DNA, 44 bp, Homo sapiens
  source 1..44: mol_type = genomic DNA
tagctttgggtgctaatggtggagttaaagactttttctctgac

SEQ ID NO: 23991 - DNA, 45 bp, Homo sapiens
  source 1..45: mol_type = genomic DNA
tagctttgggtgctaatggtggagttaaagactttttctctgacc

SEQ ID NO: 23992 - DNA, 46 bp, Homo sapiens
  source 1..46: mol_type = genomic DNA
tagctttgggtgctaatggtggagttaaagactttttctctgacca

SEQ ID NO: 23993 - DNA, 16 bp, Homo sapiens
  source 1..16: mol_type = genomic DNA
taggagatttcaactt

SEQ ID NO: 23994 - DNA, 17 bp, Homo sapiens
  source 1..17: mol_type = genomic DNA
taggagatttcaactta

SEQ ID NO: 23995 - DNA, 18 bp, Homo sapiens
  source 1..18: mol_type = genomic DNA
taggagatttcaacttaa

SEQ ID NO: 23996 - DNA, 19 bp, Homo sapiens
  source 1..19: mol_type = genomic DNA
taggagatttcaacttaac

SEQ ID NO: 23997 - DNA, 20 bp, Homo sapiens
  source 1..20: mol_type = genomic DNA
taggagatttcaacttaact

SEQ ID NO: 23998 - DNA, 21 bp, Homo sapiens
  source 1..21: mol_type = genomic DNA
taggagatttcaacttaactt

SEQ ID NO: 23999 - DNA, 22 bp, Homo sapiens
  source 1..22: mol_type = genomic DNA
taggagatttcaacttaacttg

SEQ ID NO: 24000 - DNA, 23 bp, Homo sapiens
  source 1..23: mol_type = genomic DNA
taggagatttcaacttaacttga

SEQ ID NO: 24001 - DNA, 24 bp, Homo sapiens
  source 1..24: mol_type = genomic DNA
taggagatttcaacttaacttgac

SEQ ID NO: 24002 - DNA, 25 bp, Homo sapiens
  source 1..25: mol_type = genomic DNA
taggagatttcaacttaacttgacc

SEQ ID NO: 24003 - DNA, 26 bp, Homo sapiens
  source 1..26: mol_type = genomic DNA
taggagatttcaacttaacttgaccg

SEQ ID NO: 24004 - DNA, 27 bp, Homo sapiens
  source 1..27: mol_type = genomic DNA
taggagatttcaacttaacttgaccgc

SEQ ID NO: 24005 - DNA, 28 bp, Homo sapiens
  source 1..28: mol_type = genomic DNA
taggagatttcaacttaacttgaccgct

SEQ ID NO: 24006 - DNA, 29 bp, Homo sapiens
  source 1..29: mol_type = genomic DNA
taggagatttcaacttaacttgaccgctc

SEQ ID NO: 24007 - DNA, 30 bp, Homo sapiens
  source 1..30: mol_type = genomic DNA
taggagatttcaacttaacttgaccgctct

SEQ ID NO: 24008 - DNA, 31 bp, Homo sapiens
  source 1..31: mol_type = genomic DNA
taggagatttcaacttaacttgaccgctctg

SEQ ID NO: 24009 - DNA, 32 bp, Homo sapiens
  source 1..32: mol_type = genomic DNA
taggagatttcaacttaacttgaccgctctga

SEQ ID NO: 24010 - DNA, 33 bp, Homo sapiens
  source 1..33: mol_type = genomic DNA
taggagatttcaacttaacttgaccgctctgac

SEQ ID NO: 24011 - DNA, 34 bp, Homo sapiens
  source 1..34: mol_type = genomic DNA
taggagatttcaacttaacttgaccgctctgacc

SEQ ID NO: 24012 - DNA, 35 bp, Homo sapiens
  source 1..35: mol_type = genomic DNA
taggagatttcaacttaacttgaccgctctgacca

SEQ ID NO: 24013 - DNA, 16 bp, Homo sapiens
  source 1..16: mol_type = genomic DNA
taggagcttaaacccc

SEQ ID NO: 24014 - DNA, 17 bp, Homo sapiens
  source 1..17: mol_type = genomic DNA
taggagcttaaaccccc

SEQ ID NO: 24015 - DNA, 18 bp, Homo sapiens
  source 1..18: mol_type = genomic DNA
taggagcttaaaccccct

SEQ ID NO: 24016 - DNA, 19 bp, Homo sapiens
  source 1..19: mol_type = genomic DNA
taggagcttaaaccccctt

SEQ ID NO: 24017 - DNA, 20 bp, Homo sapiens
  source 1..20: mol_type = genomic DNA
taggagcttaaaccccctta

SEQ ID NO: 24018 - DNA, 21 bp, Homo sapiens
  source 1..21: mol_type = genomic DNA
taggagcttaaacccccttat

SEQ ID NO: 24019 - DNA, 22 bp, Homo sapiens
  source 1..22: mol_type = genomic DNA
taggagcttaaacccccttatt

SEQ ID NO: 24020 - DNA, 25 bp, Homo sapiens
  source 1..25: mol_type = genomic DNA
taggagcttaaacccccttatttct

SEQ ID NO: 24021 - DNA, 26 bp, Homo sapiens
  source 1..26: mol_type = genomic DNA
taggagcttaaacccccttatttcta

SEQ ID NO: 24022 - DNA, 27 bp, Homo sapiens
  source 1..27: mol_type = genomic DNA
taggagcttaaacccccttatttctac

SEQ ID NO: 24023 - DNA, 28 bp, Homo sapiens
  source 1..28: mol_type = genomic DNA
taggagcttaaacccccttatttctacc

SEQ ID NO: 24024 - DNA, 29 bp, Homo sapiens
  source 1..29: mol_type = genomic DNA
taggagcttaaacccccttatttctacca

SEQ ID NO: 24025 - DNA, 16 bp, Homo sapiens
  source 1..16: mol_type = genomic DNA
taggatggggtgtgat

SEQ ID NO: 24026 - DNA, 17 bp, Homo sapiens
  source 1..17: mol_type = genomic DNA
taggatggggtgtgata

SEQ ID NO: 24027 - DNA, 18 bp, Homo sapiens
  source 1..18: mol_type = genomic DNA
taggatggggtgtgatag

SEQ ID NO: 24028 - DNA, 19 bp, Homo sapiens
  source 1..19: mol_type = genomic DNA
taggatggggtgtgatagg

SEQ ID NO: 24029 - DNA, 20 bp, Homo sapiens
  source 1..20: mol_type = genomic DNA
taggatggggtgtgataggt

SEQ ID NO: 24030 - DNA, 21 bp, Homo sapiens
  source 1..21: mol_type = genomic DNA
taggatggggtgtgataggtg

SEQ ID NO: 24031 - DNA, 22 bp, Homo sapiens
  source 1..22: mol_type = genomic DNA
taggatggggtgtgataggtgg

SEQ ID NO: 24032 - DNA, 23 bp, Homo sapiens
  source 1..23: mol_type = genomic DNA
taggatggggtgtgataggtggc

SEQ ID NO: 24033 - DNA, 24 bp, Homo sapiens
  source 1..24: mol_type = genomic DNA
taggatggggtgtgataggtggca

SEQ ID NO: 24034 - DNA, 25 bp, Homo sapiens
  source 1..25: mol_type = genomic DNA
taggatggggtgtgataggtggcac

SEQ ID NO: 24035 - DNA, 26 bp, Homo sapiens
  source 1..26: mol_type = genomic DNA
taggatggggtgtgataggtggcacg

SEQ ID NO: 24036 - DNA, 27 bp, Homo sapiens
  source 1..27: mol_type = genomic DNA
taggatggggtgtgataggtggcacgg

SEQ ID NO: 24037 - DNA, 28 bp, Homo sapiens
  source 1..28: mol_type = genomic DNA
taggatggggtgtgataggtggcacgga

SEQ ID NO: 24038 - DNA, 29 bp, Homo sapiens
  source 1..29: mol_type = genomic DNA
taggatggggtgtgataggtggcacggag

SEQ ID NO: 24039 - DNA, 30 bp, Homo sapiens
  source 1..30: mol_type = genomic DNA
taggatggggtgtgataggtggcacggaga

SEQ ID NO: 24040 - DNA, 31 bp, Homo sapiens
  source 1..31: mol_type = genomic DNA
taggatggggtgtgataggtggcacggagaa

SEQ ID NO: 24041 - DNA, 32 bp, Homo sapiens
  source 1..32: mol_type = genomic DNA
taggatggggtgtgataggtggcacggagaat

SEQ ID NO: 24042 - DNA, 33 bp, Homo sapiens
  source 1..33: mol_type = genomic DNA
taggatggggtgtgataggtggcacggagaatt

SEQ ID NO: 24043 - DNA, 34 bp, Homo sapiens
  source 1..34: mol_type = genomic DNA
taggatggggtgtgataggtggcacggagaattt

SEQ ID NO: 24044 - DNA, 35 bp, Homo sapiens
  source 1..35: mol_type = genomic DNA
taggatggggtgtgataggtggcacggagaatttt

SEQ ID NO: 24045 - DNA, 36 bp, Homo sapiens
  source 1..36: mol_type = genomic DNA
taggatggggtgtgataggtggcacggagaattttg

SEQ ID NO: 24046 - DNA, 37 bp, Homo sapiens
  source 1..37: mol_type = genomic DNA
taggatggggtgtgataggtggcacggagaattttgg

SEQ ID NO: 24047 - DNA, 38 bp, Homo sapiens
  source 1..38: mol_type = genomic DNA
taggatggggtgtgataggtggcacggagaattttgga

SEQ ID NO: 24048 - DNA, 39 bp, Homo sapiens
  source 1..39: mol_type = genomic DNA
taggatggggtgtgataggtggcacggagaattttggat

SEQ ID NO: 24049 - DNA, 40 bp, Homo sapiens
  source 1..40: mol_type = genomic DNA
taggatggggtgtgataggtggcacggagaattttggatt

SEQ ID NO: 24050 - DNA, 41 bp, Homo sapiens
  source 1..41: mol_type = genomic DNA
taggatggggtgtgataggtggcacggagaattttggattc

SEQ ID NO: 24051 - DNA, 42 bp, Homo sapiens
  source 1..42: mol_type = genomic DNA
taggatggggtgtgataggtggcacggagaattttggattct

SEQ ID NO: 24052 - DNA, 43 bp, Homo sapiens
  source 1..43: mol_type = genomic DNA
taggatggggtgtgataggtggcacggagaattttggattctc

SEQ ID NO: 24053 - DNA, 44 bp, Homo sapiens
  source 1..44: mol_type = genomic DNA
taggatggggtgtgataggtggcacggagaattttggattctca

SEQ ID NO: 24054 - DNA, 48 bp, Homo sapiens
  source 1..48: mol_type = genomic DNA
taggatggggtgtgataggtggcacggagaattttggattctcaggga

SEQ ID NO: 24055 - DNA, 16 bp, Homo sapiens
  source 1..16: mol_type = genomic DNA
taggattcctggtttt

SEQ ID NO: 24056 - DNA, 17 bp, Homo sapiens
  source 1..17: mol_type = genomic DNA
taggattcctggttttc

SEQ ID NO: 24057 - DNA, 24 bp, Homo sapiens
  source 1..24: mol_type = genomic DNA
taggattcctggttttcacccagg

SEQ ID NO: 24058 - DNA, 33 bp, Homo sapiens
  source 1..33: mol_type = genomic DNA
taggattcctggttttcacccaggcggcccggg

SEQ ID NO: 24059 - DNA, 35 bp, Homo sapiens
  source 1..35: mol_type = genomic DNA
taggattcctggttttcacccaggcggcccgggtt

SEQ ID NO: 24060 - DNA, 36 bp, Homo sapiens
  source 1..36: mol_type = genomic DNA
taggattcctggttttcacccaggcggcccgggttc

SEQ ID NO: 24061 - DNA, 41 bp, Homo sapiens
  source 1..41: mol_type = genomic DNA
taggattcctggttttcacccaggcggcccgggttcgactc

SEQ ID NO: 24062 - DNA, 43 bp, Homo sapiens
  source 1..43: mol_type = genomic DNA
taggattcctggttttcacccaggcggcccgggttcgactccc

SEQ ID NO: 24063 - DNA, 47 bp, Homo sapiens
  source 1..47: mol_type = genomic DNA
taggattcctggttttcacccaggcggcccgggttcgactcccggtg

SEQ ID NO: 24064 - DNA, 26 bp, Homo sapiens
  source 1..26: mol_type = genomic DNA
taggattcctggttttcacccaggtg

SEQ ID NO: 24065 - DNA, 36 bp, Homo sapiens
  source 1..36: mol_type = genomic DNA
taggattcctggttttcacccaggtggcccgggttc

SEQ ID NO: 24066 - DNA, 41 bp, Homo sapiens
  source 1..41: mol_type = genomic DNA
taggattcctggttttcacccaggtggcccgggttcgactc

SEQ ID NO: 24067 - DNA, 16 bp, Homo sapiens
  source 1..16: mol_type = genomic DNA
taggattcggcgctct

SEQ ID NO: 24068 - DNA, 17 bp, Homo sapiens
  source 1..17: mol_type = genomic DNA
taggattcggcgctctc

SEQ ID NO: 24069 - DNA, 18 bp, Homo sapiens
  source 1..18: mol_type = genomic DNA
taggattcggcgctctca

SEQ ID NO: 24070 - DNA, 19 bp, Homo sapiens
  source 1..19: mol_type = genomic DNA
taggattcggcgctctcac

SEQ ID NO: 24071 - DNA, 20 bp, Homo sapiens
  source 1..20: mol_type = genomic DNA
taggattcggcgctctcacc

SEQ ID NO: 24072 - DNA, 21 bp, Homo sapiens
  source 1..21: mol_type = genomic DNA
taggattcggcgctctcaccg

SEQ ID NO: 24073 - DNA, 22 bp, Homo sapiens
  source 1..22: mol_type = genomic DNA
taggattcggcgctctcaccgc

SEQ ID NO: 24074 - DNA, 23 bp, Homo sapiens
  source 1..23: mol_type = genomic DNA
taggattcggcgctctcaccgcc

SEQ ID NO: 24075 - DNA, 24 bp, Homo sapiens
  source 1..24: mol_type = genomic DNA
taggattcggcgctctcaccgcca

SEQ ID NO: 24076 - DNA, 24 bp, Homo sapiens
  source 1..24: mol_type = genomic DNA
taggattcggcgctctcaccgccg

SEQ ID NO: 24077 - DNA, 29 bp, Homo sapiens
  source 1..29: mol_type = genomic DNA
taggattcggcgctctcaccgccgcggcc

SEQ ID NO: 24078 - DNA, 30 bp, Homo sapiens
  source 1..30: mol_type = genomic DNA
taggattcggcgctctcaccgccgcggccc

SEQ ID NO: 24079 - DNA, 31 bp, Homo sapiens
  source 1..31: mol_type = genomic DNA
taggattcggcgctctcaccgccgcggcccg

SEQ ID NO: 24080 - DNA, 32 bp, Homo sapiens
  source 1..32: mol_type = genomic DNA
taggattcggcgctctcaccgccgcggcccgg

SEQ ID NO: 24081 - DNA, 33 bp, Homo sapiens
  source 1..33: mol_type = genomic DNA
taggattcggcgctctcaccgccgcggcccggg

SEQ ID NO: 24082 - DNA, 34 bp, Homo sapiens
  source 1..34: mol_type = genomic DNA
taggattcggcgctctcaccgccgcggcccgggt

SEQ ID NO: 24083 - DNA, 35 bp, Homo sapiens
  source 1..35: mol_type = genomic DNA
taggattcggcgctctcaccgccgcggcccgggtt

SEQ ID NO: 24084 - DNA, 36 bp, Homo sapiens
  source 1..36: mol_type = genomic DNA
taggattcggcgctctcaccgccgcggcccgggttc

SEQ ID NO: 24085 - DNA, 37 bp, Homo sapiens
  source 1..37: mol_type = genomic DNA
taggattcggcgctctcaccgccgcggcccgggttcg

SEQ ID NO: 24086 - DNA, 46 bp, Homo sapiens
  source 1..46: mol_type = genomic DNA
taggattcggcgctctcaccgccgcggcccgggttcgattcccggt

SEQ ID NO: 24087 - DNA, 47 bp, Homo sapiens
  source 1..47: mol_type = genomic DNA
taggattcggcgctctcaccgccgcggcccgggttcgattcccggtc

SEQ ID NO: 24088 - DNA, 48 bp, Homo sapiens
  source 1..48: mol_type = genomic DNA
taggattcggcgctctcaccgccgcggcccgggttcgattcccggtca

SEQ ID NO: 24089 - DNA, 16 bp, Homo sapiens
  source 1..16: mol_type = genomic DNA
taggattcggcgcttt

SEQ ID NO: 24090 - DNA, 17 bp, Homo sapiens
  source 1..17: mol_type = genomic DNA
taggattcggcgctttc

SEQ ID NO: 24091 - DNA, 19 bp, Homo sapiens
  source 1..19: mol_type = genomic DNA
taggattcggcgctttcac

SEQ ID NO: 24092 - DNA, 20 bp, Homo sapiens
  source 1..20: mol_type = genomic DNA
taggattcggcgctttcacc

SEQ ID NO: 24093 - DNA, 21 bp, Homo sapiens
  source 1..21: mol_type = genomic DNA
taggattcggcgctttcaccg

SEQ ID NO: 24094 - DNA, 23 bp, Homo sapiens
  source 1..23: mol_type = genomic DNA
taggattcggcgctttcaccgcc

SEQ ID NO: 24095 - DNA, 30 bp, Homo sapiens
  source 1..30: mol_type = genomic DNA
taggattcggcgctttcaccgccgcggccc

SEQ ID NO: 24096 - DNA, 40 bp, Homo sapiens
  source 1..40: mol_type = genomic DNA
taggccccaaaaattttggtgcaactccaaataaaagtac

SEQ ID NO: 24097 - DNA, 41 bp, Homo sapiens
  source 1..41: mol_type = genomic DNA
taggccccaaaaattttggtgcaactccaaataaaagtacc

SEQ ID NO: 24098 - DNA, 16 bp, Homo sapiens
  source 1..16: mol_type = genomic DNA
taggcctctttttacc

SEQ ID NO: 24099 - DNA, 19 bp, Homo sapiens
  source 1..19: mol_type = genomic DNA
taggcctctttttaccacc

SEQ ID NO: 24100 - DNA, 20 bp, Homo sapiens
  source 1..20: mol_type = genomic DNA
taggcctctttttaccacca

SEQ ID NO: 24101 - DNA, 20 bp, Homo sapiens
  source 1..20: mol_type = genomic DNA
taggctaaatcctatatatc

SEQ ID NO: 24102 - DNA, 22 bp, Homo sapiens
  source 1..22: mol_type = genomic DNA
taggctaaatcctatatatctt

SEQ ID NO: 24103 - DNA, 24 bp, Homo sapiens
  source 1..24: mol_type = genomic DNA
taggctaaatcctatatatcttac

SEQ ID NO: 24104 - DNA, 25 bp, Homo sapiens
  source 1..25: mol_type = genomic DNA
taggctaaatcctatatatcttacc

SEQ ID NO: 24105 - DNA, 26 bp, Homo sapiens
  source 1..26: mol_type = genomic DNA
taggctaaatcctatatatcttacca

SEQ ID NO: 24106 - DNA, 20 bp, Homo sapiens
  source 1..20: mol_type = genomic DNA
taggctccagtctcttcgga

SEQ ID NO: 24107 - DNA, 16 bp, Homo sapiens
  source 1..16: mol_type = genomic DNA
taggggtatgattctc

SEQ ID NO: 24108 - DNA, 17 bp, Homo sapiens
  source 1..17: mol_type = genomic DNA
taggggtatgattctcg

SEQ ID NO: 24109 - DNA, 18 bp, Homo sapiens
  source 1..18: mol_type = genomic DNA
taggggtatgattctcgc

SEQ ID NO: 24110 - DNA, 19 bp, Homo sapiens
  source 1..19: mol_type = genomic DNA
taggggtatgattctcgct

SEQ ID NO: 24111 - DNA, 20 bp, Homo sapiens
  source 1..20: mol_type = genomic DNA
taggggtatgattctcgctt

SEQ ID NO: 24112 - DNA, 21 bp, Homo sapiens
  source 1..21: mol_type = genomic DNA
taggggtatgattctcgcttc

SEQ ID NO: 24113 - DNA, 22 bp, Homo sapiens
  source 1..22: mol_type = genomic DNA
taggggtatgattctcgctttg

SEQ ID NO: 24114 - DNA, 23 bp, Homo sapiens
  source 1..23: mol_type = genomic DNA
taggggtatgattctcgctttgg

SEQ ID NO: 24115 - DNA, 19 bp, Homo sapiens
  source 1..19: mol_type = genomic DNA
taggggtatgattctcggt

SEQ ID NO: 24116 - DNA, 20 bp, Homo sapiens
  source 1..20: mol_type = genomic DNA
taggggtatgattctcggtt

SEQ ID NO: 24117 - DNA, 22 bp, Homo sapiens
  source 1..22: mol_type = genomic DNA
taggggtatgattctcggtttg

SEQ ID NO: 24118 - DNA, 23 bp, Homo sapiens
  source 1..23: mol_type = genomic DNA
taggggtatgattctcggtttgg

SEQ ID NO: 24119 - DNA, 16 bp, Homo sapiens
  source 1..16: mol_type = genomic DNA
tagggtgcttagctgt

SEQ ID NO: 24120 - DNA, 17 bp, Homo sapiens
  source 1..17: mol_type = genomic DNA
tagggtgcttagctgtt

SEQ ID NO: 24121 - DNA, 18 bp, Homo sapiens
  source 1..18: mol_type = genomic DNA
tagggtgcttagctgtta

SEQ ID NO: 24122 - DNA, 20 bp, Homo sapiens
  source 1..20: mol_type = genomic DNA
tagggtgcttagctgttaac

SEQ ID NO: 24123 - DNA, 21 bp, Homo sapiens
  source 1..21: mol_type = genomic DNA
tagggtgcttagctgttaact

SEQ ID NO: 24124 - DNA, 22 bp, Homo sapiens
  source 1..22: mol_type = genomic DNA
tagggtgcttagctgttaacta

SEQ ID NO: 24125 - DNA, 32 bp, Homo sapiens
  source 1..32: mol_type = genomic DNA
tagggtgcttagctgttaactaagtgtttgtg

SEQ ID NO: 24126 - DNA, 35 bp, Homo sapiens
  source 1..35: mol_type = genomic DNA
tagggtgcttagctgttaactaagtgtttgtgggt

SEQ ID NO: 24127 - DNA, 36 bp, Homo sapiens
  source 1..36: mol_type = genomic DNA
tagggtgcttagctgttaactaagtgtttgtgggtt

SEQ ID NO: 24128 - DNA, 37 bp, Homo sapiens
  source 1..37: mol_type = genomic DNA
tagggtgcttagctgttaactaagtgtttgtgggttt

SEQ ID NO: 24129 - DNA, 38 bp, Homo sapiens
  source 1..38: mol_type = genomic DNA
tagggtgcttagctgttaactaagtgtttgtgggttta

SEQ ID NO: 24130 - DNA, 39 bp, Homo sapiens
  source 1..39: mol_type = genomic DNA
tagggtgcttagctgttaactaagtgtttgtgggtttaa

SEQ ID NO: 24131 - DNA, 47 bp, Homo sapiens
  source 1..47: mol_type = genomic DNA
tagggtgcttagctgttaactaagtgtttgtgggtttaagtcccatt

SEQ ID NO: 24132 - DNA, 18 bp, Homo sapiens
  source 1..18: mol_type = genomic DNA
taggtagcgcatcagtct

SEQ ID NO: 24133 - DNA, 20 bp, Homo sapiens
  source 1..20: mol_type = genomic DNA
taggtcgctggttcgaatcc

SEQ ID NO: 24134 - DNA, 23 bp, Homo sapiens
  source 1..23: mol_type = genomic DNA
taggtcgctggttcgaatccggc

SEQ ID NO: 24135 - DNA, 32 bp, Homo sapiens
  source 1..32: mol_type = genomic DNA
taggtcgctggttcgaatccggctcgaaggac

SEQ ID NO: 24136 - DNA, 33 bp, Homo sapiens
  source 1..33: mol_type = genomic DNA
taggtcgctggttcgaatccggctcgaaggacc

SEQ ID NO: 24137 - DNA, 32 bp, Homo sapiens
  source 1..32: mol_type = genomic DNA
taggtcgctggttcgaatccggctcggaggac

SEQ ID NO: 24138 - DNA, 33 bp, Homo sapiens
  source 1..33: mol_type = genomic DNA
taggtcgctggttcgaatccggctcggaggacc

SEQ ID NO: 24139 - DNA, 33 bp, Homo sapiens
  source 1..33: mol_type = genomic DNA
taggtcgctggttcgattccagctcgaaggacc

SEQ ID NO: 24140 - DNA, 23 bp, Homo sapiens
  source 1..23: mol_type = genomic DNA
taggtcgctggttcgattccggc

SEQ ID NO: 24141 - DNA, 24 bp, Homo sapiens
  source 1..24: mol_type = genomic DNA
taggtcgctggttcgattccggct

SEQ ID NO: 24142 - DNA, 25 bp, Homo sapiens
  source 1..25: mol_type = genomic DNA
taggtcgctggttcgattccggctc

SEQ ID NO: 24143 - DNA, 32 bp, Homo sapiens
  source 1..32: mol_type = genomic DNA
taggtcgctggttcgattccggctcgaaggac

SEQ ID NO: 24144 - DNA, 33 bp, Homo sapiens
  source 1..33: mol_type = genomic DNA
taggtcgctggttcgattccggctcgaaggacc

SEQ ID NO: 24145 - DNA, 16 bp, Homo sapiens
  source 1..16: mol_type = genomic DNA
taggtggcacggagaa

SEQ ID NO: 24146 - DNA, 17 bp, Homo sapiens
  source 1..17: mol_type = genomic DNA
taggtggcacggagaat

SEQ ID NO: 24147 - DNA, 19 bp, Homo sapiens
  source 1..19: mol_type = genomic DNA
taggtggcacggagaattt

SEQ ID NO: 24148 - DNA, 20 bp, Homo sapiens
  source 1..20: mol_type = genomic DNA
taggtggcacggagaatttt

SEQ ID NO: 24149 - DNA, 21 bp, Homo sapiens
  source 1..21: mol_type = genomic DNA
taggtggcacggagaattttg

SEQ ID NO: 24150 - DNA, 16 bp, Homo sapiens
  source 1..16: mol_type = genomic DNA
taggttaaatacagac

SEQ ID NO: 24151 - DNA, 20 bp, Homo sapiens
  source 1..20: mol_type = genomic DNA
taggttcgactcctggctgg

SEQ ID NO: 24152 - DNA, 21 bp, Homo sapiens
  source 1..21: mol_type = genomic DNA
taggttcgactcctggctggc

SEQ ID NO: 24153 - DNA, 22 bp, Homo sapiens
  source 1..22: mol_type = genomic DNA
taggttcgactcctggctggct

SEQ ID NO: 24154 - DNA, 23 bp, Homo sapiens
  source 1..23: mol_type = genomic DNA
taggttcgactcctggctggctc

SEQ ID NO: 24155 - DNA, 24 bp, Homo sapiens
  source 1..24: mol_type = genomic DNA
taggttcgactcctggctggctcg

SEQ ID NO: 24156 - DNA, 25 bp, Homo sapiens
  source 1..25: mol_type = genomic DNA
taggttcgactcctggctggctcgc

SEQ ID NO: 24157 - DNA, 26 bp, Homo sapiens
  source 1..26: mol_type = genomic DNA
taggttcgactcctggctggctcgcc

SEQ ID NO: 24158 - DNA, 27 bp, Homo sapiens
  source 1..27: mol_type = genomic DNA
taggttcgactcctggctggctcgcca

SEQ ID NO: 24159 - DNA, 16 bp, Homo sapiens
  source 1..16: mol_type = genomic DNA
tagtaccgttaacttc

SEQ ID NO: 24160 - DNA, 17 bp, Homo sapiens
  source 1..17: mol_type = genomic DNA
tagtaccgttaacttcc

SEQ ID NO: 24161 - DNA, 18 bp, Homo sapiens
  source 1..18: mol_type = genomic DNA
tagtaccgttaacttcca

SEQ ID NO: 24162 - DNA, 19 bp, Homo sapiens
  source 1..19: mol_type = genomic DNA
tagtaccgttaacttccaa

SEQ ID NO: 24163 - DNA, 21 bp, Homo sapiens
  source 1..21: mol_type = genomic DNA
tagtaccgttaacttccaatt

SEQ ID NO: 24164 - DNA, 22 bp, Homo sapiens
  source 1..22: mol_type = genomic DNA
tagtaccgttaacttccaatta

SEQ ID NO: 24165 - DNA, 23 bp, Homo sapiens
  source 1..23: mol_type = genomic DNA
tagtaccgttaacttccaattaa

SEQ ID NO: 24166 - DNA, 24 bp, Homo sapiens
  source 1..24: mol_type = genomic DNA
tagtaccgttaacttccaattaac

SEQ ID NO: 24167 - DNA, 25 bp, Homo sapiens
  source 1..25: mol_type = genomic DNA
tagtaccgttaacttccaattaact

SEQ ID NO: 24168 - DNA, 28 bp, Homo sapiens
  source 1..28: mol_type = genomic DNA
tagtaccgttaacttccaattaactagt

SEQ ID NO: 24169 - DNA, 29 bp, Homo sapiens
  source 1..29: mol_type = genomic DNA
tagtaccgttaacttccaattaactagtt

SEQ ID NO: 24170 - DNA, 32 bp, Homo sapiens
  source 1..32: mol_type = genomic DNA
tagtaccgttaacttccaattaactagttttg

SEQ ID NO: 24171 - DNA, 33 bp, Homo sapiens
  source 1..33: mol_type = genomic DNA
tagtaccgttaacttccaattaactagttttga

SEQ ID NO: 24172 - DNA, 34 bp, Homo sapiens
  source 1..34: mol_type = genomic DNA
tagtaccgttaacttccaattaactagttttgac

SEQ ID NO: 24173 - DNA, 35 bp, Homo sapiens
  source 1..35: mol_type = genomic DNA
tagtaccgttaacttccaattaactagttttgaca

SEQ ID NO: 24174 - DNA, 36 bp, Homo sapiens
  source 1..36: mol_type = genomic DNA
tagtaccgttaacttccaattaactagttttgacaa

SEQ ID NO: 24175 - DNA, 37 bp, Homo sapiens
  source 1..37: mol_type = genomic DNA
tagtaccgttaacttccaattaactagttttgacaac

SEQ ID NO: 24176 - DNA, 38 bp, Homo sapiens
  source 1..38: mol_type = genomic DNA
tagtaccgttaacttccaattaactagttttgacaaca

SEQ ID NO: 24177 - DNA, 16 bp, Homo sapiens
  source 1..16: mol_type = genomic DNA
tagtactctgcgttgt

SEQ ID NO: 24178 - DNA, 17 bp, Homo sapiens
  source 1..17: mol_type = genomic DNA
tagtactctgcgttgtg

SEQ ID NO: 24179 - DNA, 21 bp, Homo sapiens
  source 1..21: mol_type = genomic DNA
tagtactctgcgttgtggccg

SEQ ID NO: 24180 - DNA, 22 bp, Homo sapiens
  source 1..22: mol_type = genomic DNA
tagtactctgcgttgtggccgc

SEQ ID NO: 24181 - DNA, 23 bp, Homo sapiens
  source 1..23: mol_type = genomic DNA
tagtactctgcgttgtggccgca

SEQ ID NO: 24182 - DNA, 34 bp, Homo sapiens
  source 1..34: mol_type = genomic DNA
tagtactctgcgttgtggccgcagcaacctcggt

SEQ ID NO: 24183 - DNA, 35 bp, Homo sapiens
  source 1..35: mol_type = genomic DNA
tagtactctgcgttgtggccgcagcaacctcggtt

SEQ ID NO: 24184 - DNA, 16 bp, Homo sapiens
  source 1..16: mol_type = genomic DNA
tagtatccccgcctgt

SEQ ID NO: 24185 - DNA, 17 bp, Homo sapiens
  source 1..17: mol_type = genomic DNA
tagtatccccgcctgtc

SEQ ID NO: 24186 - DNA, 16 bp, Homo sapiens
  source 1..16: mol_type = genomic DNA
tagtccgtgcgagaat

SEQ ID NO: 24187 - DNA, 17 bp, Homo sapiens
  source 1..17: mol_type = genomic DNA
tagtccgtgcgagaata

SEQ ID NO: 24188 - DNA, 18 bp, Homo sapiens
  source 1..18: mol_type = genomic DNA
tagtccgtgcgagaatac

SEQ ID NO: 24189 - DNA, 19 bp, Homo sapiens
  source 1..19: mol_type = genomic DNA
tagtccgtgcgagaatacc

SEQ ID NO: 24190 - DNA, 20 bp, Homo sapiens
  source 1..20: mol_type = genomic DNA
tagtccgtgcgagaatacca

SEQ ID NO: 24191 - DNA, 16 bp, Homo sapiens
  source 1..16: mol_type = genomic DNA
tagtcgtggccgagtg

SEQ ID NO: 24192 - DNA, 17 bp, Homo sapiens
  source 1..17: mol_type = genomic DNA
tagtcgtggccgagtgg

SEQ ID NO: 24193 - DNA, 19 bp, Homo sapiens
  source 1..19: mol_type = genomic DNA
tagtcgtggccgagtggtt

SEQ ID NO: 24194 - DNA, 20 bp, Homo sapiens
  source 1..20: mol_type = genomic DNA
tagtcgtggccgagtggtta

SEQ ID NO: 24195 - DNA, 21 bp, Homo sapiens
  source 1..21: mol_type = genomic DNA
tagtcgtggccgagtggttaa

SEQ ID NO: 24196 - DNA, 22 bp, Homo sapiens
  source 1..22: mol_type = genomic DNA
tagtcgtggccgagtggttaag

SEQ ID NO: 24197 - DNA, 23 bp, Homo sapiens
  source 1..23: mol_type = genomic DNA
tagtcgtggccgagtggttaagg

SEQ ID NO: 24198 - DNA, 24 bp, Homo sapiens
  source 1..24: mol_type = genomic DNA
tagtcgtggccgagtggttaaggc

SEQ ID NO: 24199 - DNA, 16 bp, Homo sapiens
  source 1..16: mol_type = genomic DNA
tagtggctaggattcg

SEQ ID NO: 24200 - DNA, 18 bp, Homo sapiens
  source 1..18: mol_type = genomic DNA
tagtggctaggattcggc

SEQ ID NO: 24201 - DNA, 19 bp, Homo sapiens
  source 1..19: mol_type = genomic DNA
tagtggctaggattcggcg

SEQ ID NO: 24202 - DNA, 20 bp, Homo sapiens
  source 1..20: mol_type = genomic DNA
tagtggctaggattcggcgc

SEQ ID NO: 24203 - DNA, 21 bp, Homo sapiens
  source 1..21: mol_type = genomic DNA
tagtggctaggattcggcgct

SEQ ID NO: 24204 - DNA, 22 bp, Homo sapiens
  source 1..22: mol_type = genomic DNA
tagtggctaggattcggcgctt

SEQ ID NO: 24205 - DNA, 23 bp, Homo sapiens
  source 1..23: mol_type = genomic DNA
tagtggctaggattcggcgcttt

SEQ ID NO: 24206 - DNA, 24 bp, Homo sapiens
  source 1..24: mol_type = genomic DNA
tagtggctaggattcggcgctttc

SEQ ID NO: 24207 - DNA, 27 bp, Homo sapiens
  source 1..27: mol_type = genomic DNA
tagtggctaggattcggcgctttcacc

SEQ ID NO: 24208 - DNA, 20 bp, Homo sapiens
  source 1..20: mol_type = genomic DNA
tagtggtaagcatagctgcc

SEQ ID NO: 24209 - DNA, 21 bp, Homo sapiens
  source 1..21: mol_type = genomic DNA
tagtggtagaattctcgcctc

SEQ ID NO: 24210 - DNA, 17 bp, Homo sapiens
  source 1..17: mol_type = genomic DNA
tagtggtatcatgcaag

SEQ ID NO: 24211 - DNA, 20 bp, Homo sapiens
  source 1..20: mol_type = genomic DNA
tagtggtatcatgcaagatt

SEQ ID NO: 24212 - DNA, 21 bp, Homo sapiens
  source 1..21: mol_type = genomic DNA
tagtggtatcatgcaagattc

SEQ ID NO: 24213 - DNA, 22 bp, Homo sapiens
  source 1..22: mol_type = genomic DNA
tagtggtatcatgcaagattcc

SEQ ID NO: 24214 - DNA, 23 bp, Homo sapiens
  source 1..23: mol_type = genomic DNA
tagtggtatcatgcaagattccc

SEQ ID NO: 24215 - DNA, 24 bp, Homo sapiens
  source 1..24: mol_type = genomic DNA
tagtggtatcatgcaagattccca

SEQ ID NO: 24216 - DNA, 29 bp, Homo sapiens
  source 1..29: mol_type = genomic DNA
tagtggtatcatgcaagattcccattctt

SEQ ID NO: 24217 - DNA, 39 bp, Homo sapiens
  source 1..39: mol_type = genomic DNA
tagtggtatcatgcaagattcccattcttgcgacccggg

SEQ ID NO: 24218 - DNA, 18 bp, Homo sapiens
  source 1..18: mol_type = genomic DNA
tagtggtatgattctcgc

SEQ ID NO: 24219 - DNA, 19 bp, Homo sapiens
  source 1..19: mol_type = genomic DNA
tagtggtatgattctcgct

SEQ ID NO: 24220 - DNA, 19 bp, Homo sapiens
  source 1..19: mol_type = genomic DNA
tagtggtcatcacgttcgc

SEQ ID NO: 24221 - DNA, 20 bp, Homo sapiens
  source 1..20: mol_type = genomic DNA
tagtggtcatcacgttcgcc

SEQ ID NO: 24222 - DNA, 21 bp, Homo sapiens
  source 1..21: mol_type = genomic DNA
tagtggtcatcacgttcgcct

SEQ ID NO: 24223 - DNA, 20 bp, Homo sapiens
  source 1..20: mol_type = genomic DNA
tagtggtgagcatagctgcc

SEQ ID NO: 24224 - DNA, 21 bp, Homo sapiens
  source 1..21: mol_type = genomic DNA
tagtggtgagcatagctgcct

SEQ ID NO: 24225 - DNA, 24 bp, Homo sapiens
  source 1..24: mol_type = genomic DNA
tagtggtgagcatagctgccttcc

SEQ ID NO: 24226 - DNA, 26 bp, Homo sapiens
  source 1..26: mol_type = genomic DNA
tagtggtgagcatagctgccttccaa

SEQ ID NO: 24227 - DNA, 41 bp, Homo sapiens
  source 1..41: mol_type = genomic DNA
tagtggtgagcatagctgccttccaagcagttgacccgggt

SEQ ID NO: 24228 - DNA, 16 bp, Homo sapiens
  source 1..16: mol_type = genomic DNA
tagtggtgagtatccc

SEQ ID NO: 24229 - DNA, 19 bp, Homo sapiens
  source 1..19: mol_type = genomic DNA
tagtggtgagtatccccgc

SEQ ID NO: 24230 - DNA, 21 bp, Homo sapiens
  source 1..21: mol_type = genomic DNA
tagtggtgagtatccccgcct

SEQ ID NO: 24231 - DNA, 23 bp, Homo sapiens
  source 1..23: mol_type = genomic DNA
tagtggtgagtatccccgcctgt

SEQ ID NO: 24232 - DNA, 24 bp, Homo sapiens
  source 1..24: mol_type = genomic DNA
tagtggtgagtatccccgcctgtc

SEQ ID NO: 24233 - DNA, 26 bp, Homo sapiens
  source 1..26: mol_type = genomic DNA
tagtggtgagtatccccgcctgtcac

SEQ ID NO: 24234 - DNA, 27 bp, Homo sapiens
  source 1..27: mol_type = genomic DNA
tagtggtgagtatccccgcctgtcacg

SEQ ID NO: 24235 - DNA, 29 bp, Homo sapiens
  source 1..29: mol_type = genomic DNA
tagtggtgagtatccccgcctgtcacgcg

SEQ ID NO: 24236 - DNA, 17 bp, Homo sapiens
  source 1..17: mol_type = genomic DNA
tagtggttagcatagct

SEQ ID NO: 24237 - DNA, 19 bp, Homo sapiens
  source 1..19: mol_type = genomic DNA
tagtggttagcatagctgc

SEQ ID NO: 24238 - DNA, 20 bp, Homo sapiens
  source 1..20: mol_type = genomic DNA
tagtggttagcatagctgcc

SEQ ID NO: 24239 - DNA, 21 bp, Homo sapiens
  source 1..21: mol_type = genomic DNA
tagtggttagcatagctgcct

SEQ ID NO: 24240 - DNA, 28 bp, Homo sapiens
  source 1..28: mol_type = genomic DNA
tagtggttagcatagctgccttccaagc

SEQ ID NO: 24241 - DNA, 40 bp, Homo sapiens
  source 1..40: mol_type = genomic DNA
tagtggttagcatagctgccttccaagcagttgacccggg

SEQ ID NO: 24242 - DNA, 41 bp, Homo sapiens
  source 1..41: mol_type = genomic DNA
tagtggttagcatagctgccttccaagcagttgacccgggt

SEQ ID NO: 24243 - DNA, 42 bp, Homo sapiens
  source 1..42: mol_type = genomic DNA
tagtggttagcatagctgccttccaagcagttgacccgggtt

SEQ ID NO: 24244 - DNA, 16 bp, Homo sapiens
  source 1..16: mol_type = genomic DNA
tagtggttaggattcg

SEQ ID NO: 24245 - DNA, 17 bp, Homo sapiens
  source 1..17: mol_type = genomic DNA
tagtggttaggattcgg

SEQ ID NO: 24246 - DNA, 18 bp, Homo sapiens
  source 1..18: mol_type = genomic DNA
tagtggttaggattcggc

SEQ ID NO: 24247 - DNA, 19 bp, Homo sapiens
  source 1..19: mol_type = genomic DNA
tagtggttaggattcggcg

SEQ ID NO: 24248 - DNA, 20 bp, Homo sapiens
  source 1..20: mol_type = genomic DNA
tagtggttaggattcggcgc

SEQ ID NO: 24249 - DNA, 21 bp, Homo sapiens
  source 1..21: mol_type = genomic DNA
tagtggttaggattcggcgct

SEQ ID NO: 24250 - DNA, 22 bp, Homo sapiens
  source 1..22: mol_type = genomic DNA
tagtggttaggattcggcgctc

SEQ ID NO: 24251 - DNA, 23 bp, Homo sapiens
  source 1..23: mol_type = genomic DNA
tagtggttaggattcggcgctct

SEQ ID NO: 24252 - DNA, 24 bp, Homo sapiens
  source 1..24: mol_type = genomic DNA
tagtggttaggattcggcgctctc

SEQ ID NO: 24253 - DNA, 25 bp, Homo sapiens
  source 1..25: mol_type = genomic DNA
tagtggttaggattcggcgctctca

SEQ ID NO: 24254 - DNA, 26 bp, Homo sapiens
  source 1..26: mol_type = genomic DNA
tagtggttaggattcggcgctctcac

SEQ ID NO: 24255 - DNA, 27 bp, Homo sapiens
  source 1..27: mol_type = genomic DNA
tagtggttaggattcggcgctctcacc

SEQ ID NO: 24256 - DNA, 28 bp, Homo sapiens
  source 1..28: mol_type = genomic DNA
tagtggttaggattcggcgctctcaccg

SEQ ID NO: 24257 - DNA, 29 bp, Homo sapiens
  source 1..29: mol_type = genomic DNA
tagtggttaggattcggcgctctcaccgc

SEQ ID NO: 24258 - DNA, 30 bp, Homo sapiens
  source 1..30: mol_type = genomic DNA
tagtggttaggattcggcgctctcaccgcc

SEQ ID NO: 24259 - DNA, 32 bp, Homo sapiens
  source 1..32: mol_type = genomic DNA
tagtggttaggattcggcgctctcaccgccgc

SEQ ID NO: 24260 - DNA, 35 bp, Homo sapiens
  source 1..35: mol_type = genomic DNA
tagtggttaggattcggcgctctcaccgccgcggc

SEQ ID NO: 24261 - DNA, 37 bp, Homo sapiens
  source 1..37: mol_type = genomic DNA
tagtggttaggattcggcgctctcaccgccgcggccc

SEQ ID NO: 24262 - DNA, 38 bp, Homo sapiens
  source 1..38: mol_type = genomic DNA
tagtggttaggattcggcgctctcaccgccgcggcccg

SEQ ID NO: 24263 - DNA, 39 bp, Homo sapiens
  source 1..39: mol_type = genomic DNA
tagtggttaggattcggcgctctcaccgccgcggcccgg

SEQ ID NO: 24264 - DNA, 40 bp, Homo sapiens
  source 1..40: mol_type = genomic DNA
tagtggttaggattcggcgctctcaccgccgcggcccggg

SEQ ID NO: 24265 - DNA, 41 bp, Homo sapiens
  source 1..41: mol_type = genomic DNA
tagtggttaggattcggcgctctcaccgccgcggcccgggt

SEQ ID NO: 24266 - DNA, 42 bp, Homo sapiens
  source 1..42: mol_type = genomic DNA
tagtggttaggattcggcgctctcaccgccgcggcccgggtt

SEQ ID NO: 24267 - DNA, 43 bp, Homo sapiens
  source 1..43: mol_type = genomic DNA
tagtggttaggattcggcgctctcaccgccgcggcccgggttc

SEQ ID NO: 24268 - DNA, 16 bp, Homo sapiens
  source 1..16: mol_type = genomic DNA
tagtggttagtactct

SEQ ID NO: 24269 - DNA, 17 bp, Homo sapiens
  source 1..17: mol_type = genomic DNA
tagtggttagtactctg

SEQ ID NO: 24270 - DNA, 18 bp, Homo sapiens
  source 1..18: mol_type = genomic DNA
tagtggttagtactctgc

SEQ ID NO: 24271 - DNA, 19 bp, Homo sapiens
  source 1..19: mol_type = genomic DNA
tagtggttagtactctgcg

SEQ ID NO: 24272 - DNA, 20 bp, Homo sapiens
  source 1..20: mol_type = genomic DNA
tagtggttagtactctgcgc

SEQ ID NO: 24273 - DNA, 21 bp, Homo sapiens
  source 1..21: mol_type = genomic DNA
tagtggttagtactctgcgct

SEQ ID NO: 24274 - DNA, 22 bp, Homo sapiens
  source 1..22: mol_type = genomic DNA
tagtggttagtactctgcgctg

SEQ ID NO: 24275 - DNA, 20 bp, Homo sapiens
  source 1..20: mol_type = genomic DNA
tagtggttagtactctgcgt

SEQ ID NO: 24276 - DNA, 21 bp, Homo sapiens
  source 1..21: mol_type = genomic DNA
tagtggttagtactctgcgtt

SEQ ID NO: 24277 - DNA, 22 bp, Homo sapiens
  source 1..22: mol_type = genomic DNA
tagtggttagtactctgcgttg

SEQ ID NO: 24278 - DNA, 23 bp, Homo sapiens
  source 1..23: mol_type = genomic DNA
tagtggttagtactctgcgttgt

SEQ ID NO: 24279 - DNA, 24 bp, Homo sapiens
  source 1..24: mol_type = genomic DNA
tagtggttagtactctgcgttgtg

SEQ ID NO: 24280 - DNA, 26 bp, Homo sapiens
  source 1..26: mol_type = genomic DNA
tagtggttagtactctgcgttgtggc

SEQ ID NO: 24281 - DNA, 27 bp, Homo sapiens
  source 1..27: mol_type = genomic DNA
tagtggttagtactctgcgttgtggcc

SEQ ID NO: 24282 - DNA, 28 bp, Homo sapiens
  source 1..28: mol_type = genomic DNA
tagtggttagtactctgcgttgtggccg

SEQ ID NO: 24283 - DNA, 32 bp, Homo sapiens
  source 1..32: mol_type = genomic DNA
tagtggttagtactctgcgttgtggccgcagc

SEQ ID NO: 24284 - DNA, 33 bp, Homo sapiens
  source 1..33: mol_type = genomic DNA
tagtggttagtactctgcgttgtggccgcagca

SEQ ID NO: 24285 - DNA, 34 bp, Homo sapiens
  source 1..34: mol_type = genomic DNA
tagtggttagtactctgcgttgtggccgcagcaa

SEQ ID NO: 24286 - DNA, 36 bp, Homo sapiens
  source 1..36: mol_type = genomic DNA
tagtggttagtactctgcgttgtggccgcagcaacc

SEQ ID NO: 24287 - DNA, 37 bp, Homo sapiens
  source 1..37: mol_type = genomic DNA
tagtggttagtactctgcgttgtggccgcagcaacct

SEQ ID NO: 24288 - DNA, 39 bp, Homo sapiens
  source 1..39: mol_type = genomic DNA
tagtggttagtactctgcgttgtggccgcagcaacctcg

SEQ ID NO: 24289 - DNA, 16 bp, Homo sapiens
  source 1..16: mol_type = genomic DNA
tagtggttagtatccc

SEQ ID NO: 24290 - DNA, 19 bp, Homo sapiens
  source 1..19: mol_type = genomic DNA
tagtggttagtatccccgc

SEQ ID NO: 24291 - DNA, 20 bp, Homo sapiens
  source 1..20: mol_type = genomic DNA
tagtggttagtatccccgcc

SEQ ID NO: 24292 - DNA, 23 bp, Homo sapiens
  source 1..23: mol_type = genomic DNA
tagtggttagtatccccgcctgt

SEQ ID NO: 24293 - DNA, 24 bp, Homo sapiens
  source 1..24: mol_type = genomic DNA
tagtggttagtatccccgcctgtc

SEQ ID NO: 24294 - DNA, 27 bp, Homo sapiens
  source 1..27: mol_type = genomic DNA
tagtggttagtatccccgcctgtcacg

SEQ ID NO: 24295 - DNA, 20 bp, Homo sapiens
  source 1..20: mol_type = genomic DNA
tagtggttatcacatctgct

SEQ ID NO: 24296 - DNA, 21 bp, Homo sapiens
  source 1..21: mol_type = genomic DNA
tagtggttatcacatctgctt

SEQ ID NO: 24297 - DNA, 22 bp, Homo sapiens
  source 1..22: mol_type = genomic DNA
tagtggttatcacatctgcttt

SEQ ID NO: 24298 - DNA, 22 bp, Homo sapiens
  source 1..22: mol_type = genomic DNA
tagtggttatcacattcgcctc

SEQ ID NO: 24299 - DNA, 16 bp, Homo sapiens
  source 1..16: mol_type = genomic DNA
tagtggttatcacgtc

SEQ ID NO: 24300 - DNA, 18 bp, Homo sapiens
  source 1..18: mol_type = genomic DNA
tagtggttatcacgtctg

SEQ ID NO: 24301 - DNA, 19 bp, Homo sapiens
  source 1..19: mol_type = genomic DNA
tagtggttatcacgtctgc

SEQ ID NO: 24302 - DNA, 20 bp, Homo sapiens
  source 1..20: mol_type = genomic DNA
tagtggttatcacgtctgct

SEQ ID NO: 24303 - DNA, 21 bp, Homo sapiens
  source 1..21: mol_type = genomic DNA
tagtggttatcacgtctgctt

SEQ ID NO: 24304 - DNA, 22 bp, Homo sapiens
  source 1..22: mol_type = genomic DNA
tagtggttatcacgtctgcttt

SEQ ID NO: 24305 - DNA, 23 bp, Homo sapiens
  source 1..23: mol_type = genomic DNA
tagtggttatcacgtctgcttta

SEQ ID NO: 24306 - DNA, 24 bp, Homo sapiens
  source 1..24: mol_type = genomic DNA
tagtggttatcacgtctgctttac

SEQ ID NO: 24307 - DNA, 26 bp, Homo sapiens
  source 1..26: mol_type = genomic DNA
tagtggttatcacgtctgctttacac

SEQ ID NO: 24308 - DNA, 19 bp, Homo sapiens
  source 1..19: mol_type = genomic DNA
tagtggttatcacgttcgc

SEQ ID NO: 24309 - DNA, 20 bp, Homo sapiens
  source 1..20: mol_type = genomic DNA
tagtggttatcacgttcgcc

SEQ ID NO: 24310 - DNA, 21 bp, Homo sapiens
  source 1..21: mol_type = genomic DNA
tagtggttatcacgttcgcct

SEQ ID NO: 24311 - DNA, 22 bp, Homo sapiens
  source 1..22: mol_type = genomic DNA
tagtggttatcacgttcgcctc

SEQ ID NO: 24312 - DNA, 23 bp, Homo sapiens
  source 1..23: mol_type = genomic DNA
tagtggttatcacgttcgcctca

SEQ ID NO: 24313 - DNA, 24 bp, Homo sapiens
  source 1..24: mol_type = genomic DNA
tagtggttatcacgttcgcctcac

SEQ ID NO: 24314 - DNA, 27 bp, Homo sapiens
  source 1..27: mol_type = genomic DNA
tagtggttatcacgttcgcctcacacg

SEQ ID NO: 24315 - DNA, 28 bp, Homo sapiens
  source 1..28: mol_type = genomic DNA
tagtggttatcacgttcgcctcacacgc

SEQ ID NO: 24316 - DNA, 21 bp, Homo sapiens
  source 1..21: mol_type = genomic DNA
tagtggttatcacgtttgcct

SEQ ID NO: 24317 - DNA, 16 bp, Homo sapiens
  source 1..16: mol_type = genomic DNA
tagtgtagcggttatc

SEQ ID NO: 24318 - DNA, 17 bp, Homo sapiens
  source 1..17: mol_type = genomic DNA
tagtgtagcggttatca

SEQ ID NO: 24319 - DNA, 18 bp, Homo sapiens
  source 1..18: mol_type = genomic DNA
tagtgtagcggttatcac

SEQ ID NO: 24320 - DNA, 23 bp, Homo sapiens
  source 1..23: mol_type = genomic DNA
tagtgtagcggttatcacattcg

SEQ ID NO: 24321 - DNA, 25 bp, Homo sapiens
  source 1..25: mol_type = genomic DNA
tagtgtagcggttatcacattcgcc

SEQ ID NO: 24322 - DNA, 23 bp, Homo sapiens
  source 1..23: mol_type = genomic DNA
tagtgtagcggttatcacgtctg

SEQ ID NO: 24323 - DNA, 24 bp, Homo sapiens
  source 1..24: mol_type = genomic DNA
tagtgtagcggttatcacgtctgc

SEQ ID NO: 24324 - DNA, 26 bp, Homo sapiens
  source 1..26: mol_type = genomic DNA
tagtgtagcggttatcacgtctgctt

SEQ ID NO: 24325 - DNA, 16 bp, Homo sapiens
  source 1..16: mol_type = genomic DNA
tagtgtagtggtcatc

SEQ ID NO: 24326 - DNA, 24 bp, Homo sapiens
  source 1..24: mol_type = genomic DNA
tagtgtagtggtcatcacgttcgc

SEQ ID NO: 24327 - DNA, 25 bp, Homo sapiens
  source 1..25: mol_type = genomic DNA
tagtgtagtggtcatcacgttcgcc

SEQ ID NO: 24328 - DNA, 26 bp, Homo sapiens
  source 1..26: mol_type = genomic DNA
tagtgtagtggtcatcacgttcgcct

SEQ ID NO: 24329 - DNA, 16 bp, Homo sapiens
  source 1..16: mol_type = genomic DNA
tagtgtagtggttatc

SEQ ID NO: 24330 - DNA, 17 bp, Homo sapiens
  source 1..17: mol_type = genomic DNA
tagtgtagtggttatca

SEQ ID NO: 24331 - DNA, 26 bp, Homo sapiens
  source 1..26: mol_type = genomic DNA
tagtgtagtggttatcacatctgctt

SEQ ID NO: 24332 - DNA, 19 bp, Homo sapiens
  source 1..19: mol_type = genomic DNA
tagtgtagtggttatcacg

SEQ ID NO: 24333 - DNA, 23 bp, Homo sapiens
  source 1..23: mol_type = genomic DNA
tagtgtagtggttatcacgtctg

SEQ ID NO: 24334 - DNA, 24 bp, Homo sapiens
  source 1..24: mol_type = genomic DNA
tagtgtagtggttatcacgtctgc

SEQ ID NO: 24335 - DNA, 25 bp, Homo sapiens
  source 1..25: mol_type = genomic DNA
tagtgtagtggttatcacgtctgct

SEQ ID NO: 24336 - DNA, 26 bp, Homo sapiens
  source 1..26: mol_type = genomic DNA
tagtgtagtggttatcacgtctgctt

SEQ ID NO: 24337 - DNA, 27 bp, Homo sapiens
  source 1..27: mol_type = genomic DNA
tagtgtagtggttatcacgtctgcttt

SEQ ID NO: 24338 - DNA, 28 bp, Homo sapiens
  source 1..28: mol_type = genomic DNA
tagtgtagtggttatcacgtctgcttta

SEQ ID NO: 24339 - DNA, 29 bp, Homo sapiens
  source 1..29: mol_type = genomic DNA
tagtgtagtggttatcacgtctgctttac

SEQ ID NO: 24340 - DNA, 30 bp, Homo sapiens
  source 1..30: mol_type = genomic DNA
tagtgtagtggttatcacgtctgctttaca

SEQ ID NO: 24341 - DNA, 24 bp, Homo sapiens
  source 1..24: mol_type = genomic DNA
tagtgtagtggttatcacgttcgc

SEQ ID NO: 24342 - DNA, 25 bp, Homo sapiens
  source 1..25: mol_type = genomic DNA
tagtgtagtggttatcacgttcgcc

SEQ ID NO: 24343 - DNA, 26 bp, Homo sapiens
  source 1..26: mol_type = genomic DNA
tagtgtagtggttatcacgttcgcct

SEQ ID NO: 24344 - DNA, 27 bp, Homo sapiens
  source 1..27: mol_type = genomic DNA
tagtgtagtggttatcacgttcgcctc

SEQ ID NO: 24345 - DNA, 28 bp, Homo sapiens
  source 1..28: mol_type = genomic DNA
tagtgtagtggttatcacgttcgcctca

SEQ ID NO: 24346 - DNA, 29 bp, Homo sapiens
  source 1..29: mol_type = genomic DNA
tagtgtagtggttatcacgttcgcctcac

SEQ ID NO: 24347 - DNA, 29 bp, Homo sapiens
  source 1..29: mol_type = genomic DNA
tagtttaaacaaaacgaatgatttcgact

SEQ ID NO: 24348 - DNA, 30 bp, Homo sapiens
  source 1..30: mol_type = genomic DNA
tagtttaaacaaaacgaatgatttcgactc

SEQ ID NO: 24349 - DNA, 20 bp, Homo sapiens
  source 1..20: mol_type = genomic DNA
tagtttaaattagaatctta

SEQ ID NO: 24350 - DNA, 23 bp, Homo sapiens
  source 1..23: mol_type = genomic DNA
tagtttaaattagaatcttagct

SEQ ID NO: 24351 - DNA, 24 bp, Homo sapiens
  source 1..24: mol_type = genomic DNA
tagtttaaattagaatcttagctt

SEQ ID NO: 24352 - DNA, 26 bp, Homo sapiens
  source 1..26: mol_type = genomic DNA
tagtttaaattagaatcttagctttg

SEQ ID NO: 24353 - DNA, 27 bp, Homo sapiens
  source 1..27: mol_type = genomic DNA
tagtttaaattagaatcttagctttgg

SEQ ID NO: 24354 - DNA, 36 bp, Homo sapiens
  source 1..36: mol_type = genomic DNA
tagtttaaattagaatcttagctttgggtgctaatg

SEQ ID NO: 24355 - DNA, 25 bp, Homo sapiens
  source 1..25: mol_type = genomic DNA
tagtttaaccaaaacatcagattgt

SEQ ID NO: 24356 - DNA, 26 bp, Homo sapiens
  source 1..26: mol_type = genomic DNA
tagtttaaccaaaacatcagattgtg

SEQ ID NO: 24357 - DNA, 27 bp, Homo sapiens
  source 1..27: mol_type = genomic DNA
tagtttaaccaaaacatcagattgtga

SEQ ID NO: 24358 - DNA, 29 bp, Homo sapiens
  source 1..29: mol_type = genomic DNA
tagtttaaccaaaacatcagattgtgaat

SEQ ID NO: 24359 - DNA, 30 bp, Homo sapiens
  source 1..30: mol_type = genomic DNA
tagtttaaccaaaacatcagattgtgaatc

SEQ ID NO: 24360 - DNA, 31 bp, Homo sapiens
  source 1..31: mol_type = genomic DNA
tagtttaaccaaaacatcagattgtgaatct

SEQ ID NO: 24361 - DNA, 33 bp, Homo sapiens
  source 1..33: mol_type = genomic DNA
tagtttaaccaaaacatcagattgtgaatctga

SEQ ID NO: 24362 - DNA, 35 bp, Homo sapiens
  source 1..35: mol_type = genomic DNA
tagtttaaccaaaacatcagattgtgaatctgaca

SEQ ID NO: 24363 - DNA, 26 bp, Homo sapiens
  source 1..26: mol_type = genomic DNA
tagttttgacaacattcaaaaaagag

SEQ ID NO: 24364 - DNA, 27 bp, Homo sapiens
  source 1..27: mol_type = genomic DNA
tagttttgacaacattcaaaaaagagt

SEQ ID NO: 24365 - DNA, 28 bp, Homo sapiens
  source 1..28: mol_type = genomic DNA
tagttttgacaacattcaaaaaagagta

SEQ ID NO: 24366 - DNA, 29 bp, Homo sapiens
  source 1..29: mol_type = genomic DNA
tagttttgacaacattcaaaaaagagtac

SEQ ID NO: 24367 - DNA, 30 bp, Homo sapiens
  source 1..30: mol_type = genomic DNA
tagttttgacaacattcaaaaaagagtacc

SEQ ID NO: 24368 - DNA, 31 bp, Homo sapiens
  source 1..31: mol_type = genomic DNA
tagttttgacaacattcaaaaaagagtacca

SEQ ID NO: 24369 - DNA, 19 bp, Homo sapiens
  source 1..19: mol_type = genomic DNA
tataaatagtaccgttaac

SEQ ID NO: 24370 - DNA, 20 bp, Homo sapiens
  source 1..20: mol_type = genomic DNA
tataaatagtaccgttaact

SEQ ID NO: 24371 - DNA, 21 bp, Homo sapiens
  source 1..21: mol_type = genomic DNA
tataaatagtaccgttaactt

SEQ ID NO: 24372 - DNA, 22 bp, Homo sapiens
  source 1..22: mol_type = genomic DNA
tataaatagtaccgttaacttc

SEQ ID NO: 24373 - DNA, 23 bp, Homo sapiens
  source 1..23: mol_type = genomic DNA
tataaatagtaccgttaacttcc

SEQ ID NO: 24374 - DNA, 24 bp, Homo sapiens
  source 1..24: mol_type = genomic DNA
tataaatagtaccgttaacttcca

SEQ ID NO: 24375 - DNA, 28 bp, Homo sapiens
  source 1..28: mol_type = genomic DNA
tataaatagtaccgttaacttccaatta

SEQ ID NO: 24376 - DNA, 40 bp, Homo sapiens
  source 1..40: mol_type = genomic DNA
tataaatagtaccgttaacttccaattaactagttttgac

SEQ ID NO: 24377 - DNA, 18 bp, Homo sapiens
  source 1..18: mol_type = genomic DNA
tataatgccgaggttgtg

SEQ ID NO: 24378 - DNA, 23 bp, Homo sapiens
  source 1..23: mol_type = genomic DNA
tataatgccgaggttgtgagttc

SEQ ID NO: 24379 - DNA, 24 bp, Homo sapiens
  source 1..24: mol_type = genomic DNA
tataatgccgaggttgtgagttcg

SEQ ID NO: 24380 - DNA, 33 bp, Homo sapiens
  source 1..33: mol_type = genomic DNA
tataatgccgaggttgtgagttcgagcctcacc

SEQ ID NO: 24381 - DNA, 34 bp, Homo sapiens
  source 1..34: mol_type = genomic DNA
tataatgccgaggttgtgagttcgagcctcacct

SEQ ID NO: 24382 - DNA, 35 bp, Homo sapiens
  source 1..35: mol_type = genomic DNA
tataatgccgaggttgtgagttcgagcctcacctg

SEQ ID NO: 24383 - DNA, 42 bp, Homo sapiens
  source 1..42: mol_type = genomic DNA
tataatgccgaggttgtgagttcgagcctcacctggagcacc

SEQ ID NO: 24384 - DNA, 42 bp, Homo sapiens
  source 1..42: mol_type = genomic DNA
tataatgccgaggttgtgagttcgatcctcacctggagcacc

SEQ ID NO: 24385 - DNA, 16 bp, Homo sapiens
  source 1..16: mol_type = genomic DNA
tatacccttcccgtac

SEQ ID NO: 24386 - DNA, 17 bp, Homo sapiens
  source 1..17: mol_type = genomic DNA
tatacccttcccgtact

SEQ ID NO: 24387 - DNA, 18 bp, Homo sapiens
  source 1..18: mol_type = genomic DNA
tatacccttcccgtacta

SEQ ID NO: 24388 - DNA, 19 bp, Homo sapiens
  source 1..19: mol_type = genomic DNA
tatacccttcccgtactac

SEQ ID NO: 24389 - DNA, 20 bp, Homo sapiens
  source 1..20: mol_type = genomic DNA
tatacccttcccgtactacc

SEQ ID NO: 24390 - DNA, 21 bp, Homo sapiens
  source 1..21: mol_type = genomic DNA
tatacccttcccgtactacca

SEQ ID NO: 24391 - DNA, 27 bp, Homo sapiens
  source 1..27: mol_type = genomic DNA
tatagctcaggggtagagcatttgact

SEQ ID NO: 24392 - DNA, 29 bp, Homo sapiens
  source 1..29: mol_type = genomic DNA
tatagctcaggggtagagcatttgactgc

SEQ ID NO: 24393 - DNA, 32 bp, Homo sapiens
  source 1..32: mol_type = genomic DNA
tatagctcaggggtagagcatttgactgcaga

SEQ ID NO: 24394 - DNA, 24 bp, Homo sapiens
  source 1..24: mol_type = genomic DNA
tatagctcaggggttagagcactg

SEQ ID NO: 24395 - DNA, 28 bp, Homo sapiens
  source 1..28: mol_type = genomic DNA
tatagctcaggggttagagcactggtct

SEQ ID NO: 24396 - DNA, 18 bp, Homo sapiens
  source 1..18: mol_type = genomic DNA
tatagctcagtggtagag

SEQ ID NO: 24397 - DNA, 27 bp, Homo sapiens
  source 1..27: mol_type = genomic DNA
tatagctcagtggtagagcatttgact

SEQ ID NO: 24398 - DNA, 28 bp, Homo sapiens
  source 1..28: mol_type = genomic DNA
tatagctcagtggtagagcatttgactg

SEQ ID NO: 24399 - DNA, 29 bp, Homo sapiens
  source 1..29: mol_type = genomic DNA
tatagctcagtggtagagcatttgactgc

SEQ ID NO: 24400 - DNA, 30 bp, Homo sapiens
  source 1..30: mol_type = genomic DNA
tatagctcagtggtagagcatttgactgca

SEQ ID NO: 24401 - DNA, 47 bp, Homo sapiens
  source 1..47: mol_type = genomic DNA
tatagctcagtggtagagcatttgactgcagatcaagaggtccccgg

SEQ ID NO: 24402 - DNA, 27 bp, Homo sapiens
  source 1..27: mol_type = genomic DNA
tatagcttagcggtagagcatttgact

SEQ ID NO: 24403 - DNA, 27 bp, Homo sapiens
  source 1..27: mol_type = genomic DNA
tataggctaaatcctatatatcttacc

SEQ ID NO: 24404 - DNA, 21 bp, Homo sapiens
  source 1..21: mol_type = genomic DNA
tatagtggtaagcatagctgc

SEQ ID NO: 24405 - DNA, 23 bp, Homo sapiens
  source 1..23: mol_type = genomic DNA
tatagtggtaagcatagctgcct

SEQ ID NO: 24406 - DNA, 21 bp, Homo sapiens
  source 1..21: mol_type = genomic DNA
tatagtggtgagcatagctgc

SEQ ID NO: 24407 - DNA, 22 bp, Homo sapiens
  source 1..22: mol_type = genomic DNA
tatagtggtgagcatagctgcc

SEQ ID NO: 24408 - DNA, 23 bp, Homo sapiens
  source 1..23: mol_type = genomic DNA
tatagtggtgagcatagctgcct

SEQ ID NO: 24409 - DNA, 26 bp, Homo sapiens
  source 1..26: mol_type = genomic DNA
tatagtggtgagcatagctgccttcc

SEQ ID NO: 24410 - DNA, 39 bp, Homo sapiens
  source 1..39: mol_type = genomic DNA
tatagtggtgagcatagctgccttccaagcagttgaccc

SEQ ID NO: 24411 - DNA, 43 bp, Homo sapiens
  source 1..43: mol_type = genomic DNA
tatagtggtgagcatagctgccttccaagcagttgacccgggt

SEQ ID NO: 24412 - DNA, 45 bp, Homo sapiens
  source 1..45: mol_type = genomic DNA
tatagtggtgagcatagctgccttccaagcagttgacccgggttc

SEQ ID NO: 24413 - DNA, 16 bp, Homo sapiens
  source 1..16: mol_type = genomic DNA
tatagtggtgagtatc

SEQ ID NO: 24414 - DNA, 18 bp, Homo sapiens
  source 1..18: mol_type = genomic DNA
tatagtggtgagtatccc

SEQ ID NO: 24415 - DNA, 19 bp, Homo sapiens
  source 1..19: mol_type = genomic DNA
tatagtggttagcatagct

SEQ ID NO: 24416 - DNA, 21 bp, Homo sapiens
  source 1..21: mol_type = genomic DNA
tatagtggttagcatagctgc

SEQ ID NO: 24417 - DNA, 22 bp, Homo sapiens
  source 1..22: mol_type = genomic DNA
tatagtggttagcatagctgcc

SEQ ID NO: 24418 - DNA, 23 bp, Homo sapiens
  source 1..23: mol_type = genomic DNA
tatagtggttagcatagctgcct

SEQ ID NO: 24419 - DNA, 26 bp, Homo sapiens
  source 1..26: mol_type = genomic DNA
tatagtggttagcatagctgccttcc

SEQ ID NO: 24420 - DNA, 42 bp, Homo sapiens
  source 1..42: mol_type = genomic DNA
tatagtggttagcatagctgccttccaagcagttgacccggg

SEQ ID NO: 24421 - DNA, 16 bp, Homo sapiens
  source 1..16: mol_type = genomic DNA
tatagtggttagtact

SEQ ID NO: 24422 - DNA, 17 bp, Homo sapiens
  source 1..17: mol_type = genomic DNA
tatagtggttagtactc

SEQ ID NO: 24423 - DNA, 18 bp, Homo sapiens
  source 1..18: mol_type = genomic DNA
tatagtggttagtactct

SEQ ID NO: 24424 - DNA, 19 bp, Homo sapiens
  source 1..19: mol_type = genomic DNA
tatagtggttagtactctg

SEQ ID NO: 24425 - DNA, 20 bp, Homo sapiens
  source 1..20: mol_type = genomic DNA
tatagtggttagtactctgc

SEQ ID NO: 24426 - DNA, 21 bp, Homo sapiens
  source 1..21: mol_type = genomic DNA
tatagtggttagtactctgcg

SEQ ID NO: 24427 - DNA, 22 bp, Homo sapiens
  source 1..22: mol_type = genomic DNA
tatagtggttagtactctgcgt

SEQ ID NO: 24428 - DNA, 23 bp, Homo sapiens
  source 1..23: mol_type = genomic DNA
tatagtggttagtactctgcgtt

SEQ ID NO: 24429 - DNA, 24 bp, Homo sapiens
  source 1..24: mol_type = genomic DNA
tatagtggttagtactctgcgttg

SEQ ID NO: 24430 - DNA, 25 bp, Homo sapiens
  source 1..25: mol_type = genomic DNA
tatagtggttagtactctgcgttgt

SEQ ID NO: 24431 - DNA, 26 bp, Homo sapiens
  source 1..26: mol_type = genomic DNA
tatagtggttagtactctgcgttgtg

SEQ ID NO: 24432 - DNA, 28 bp, Homo sapiens
  source 1..28: mol_type = genomic DNA
tatagtggttagtactctgcgttgtggc

SEQ ID NO: 24433 - DNA, 29 bp, Homo sapiens
  source 1..29: mol_type = genomic DNA
tatagtggttagtactctgcgttgtggcc

SEQ ID NO: 24434 - DNA, 30 bp, Homo sapiens
  source 1..30: mol_type = genomic DNA
tatagtggttagtactctgcgttgtggccg

SEQ ID NO: 24435 - DNA, 38 bp, Homo sapiens
  source 1..38: mol_type = genomic DNA
tatagtggttagtactctgcgttgtggccgcagcaacc

SEQ ID NO: 24436 - DNA, 39 bp, Homo sapiens
  source 1..39: mol_type = genomic DNA
tatagtggttagtactctgcgttgtggccgcagcaacct

SEQ ID NO: 24437 - DNA, 43 bp, Homo sapiens
  source 1..43: mol_type = genomic DNA
tatagtggttagtactctgcgttgtggccgcagcaacctcggt

SEQ ID NO: 24438 - DNA, 17 bp, Homo sapiens
  source 1..17: mol_type = genomic DNA
tatagtggttagtatcc

SEQ ID NO: 24439 - DNA, 18 bp, Homo sapiens
  source 1..18: mol_type = genomic DNA
tatagtggttagtatccc

SEQ ID NO: 24440 - DNA, 31 bp, Homo sapiens
  source 1..31: mol_type = genomic DNA
tatagtttaaacaaaacgaatgatttcgact

SEQ ID NO: 24441 - DNA, 27 bp, Homo sapiens
  source 1..27: mol_type = genomic DNA
tatagtttaaccaaaacatcagattgt

SEQ ID NO: 24442 - DNA, 28 bp, Homo sapiens
  source 1..28: mol_type = genomic DNA
tatagtttaaccaaaacatcagattgtg

SEQ ID NO: 24443 - DNA, 29 bp, Homo sapiens
  source 1..29: mol_type = genomic DNA
tatagtttaaccaaaacatcagattgtga

SEQ ID NO: 24444 - DNA, 32 bp, Homo sapiens
  source 1..32: mol_type = genomic DNA
tatagtttaaccaaaacatcagattgtgaatc

SEQ ID NO: 24445 - DNA, 37 bp, Homo sapiens
  source 1..37: mol_type = genomic DNA
tatagtttaaccaaaacatcagattgtgaatctgaca

SEQ ID NO: 24446 - DNA, 32 bp, Homo sapiens
  source 1..32: mol_type = genomic DNA
tatatagtttaaacaaaacgaatgatttcgac

SEQ ID NO: 24447 - DNA, 33 bp, Homo sapiens
  source 1..33: mol_type = genomic DNA
tatatagtttaaacaaaacgaatgatttcgact

SEQ ID NO: 24448 - DNA, 20 bp, Homo sapiens
  source 1..20: mol_type = genomic DNA
tatcacgtctgctttacacg

SEQ ID NO: 24449 - DNA, 21 bp, Homo sapiens
  source 1..21: mol_type = genomic DNA
tatcacgtctgctttacacgc

SEQ ID NO: 24450 - DNA, 17 bp, Homo sapiens
  source 1..17: mol_type = genomic DNA
tatcacgttcgcctcac

SEQ ID NO: 24451 - DNA, 20 bp, Homo sapiens
  source 1..20: mol_type = genomic DNA
tatcacgttcgcctcacacg

SEQ ID NO: 24452 - DNA, 21 bp, Homo sapiens
  source 1..21: mol_type = genomic DNA
tatcacgttcgcctcacacgc

SEQ ID NO: 24453 - DNA, 22 bp, Homo sapiens
  source 1..22: mol_type = genomic DNA
tatcacgttcgcctcacacgcg

SEQ ID NO: 24454 - DNA, 24 bp, Homo sapiens
  source 1..24: mol_type = genomic DNA
tatcatgcaagattcccattcttg

SEQ ID NO: 24455 - DNA, 32 bp, Homo sapiens
  source 1..32: mol_type = genomic DNA
tatcatgcaagattcccattcttgcgacccgg

SEQ ID NO: 24456 - DNA, 34 bp, Homo sapiens
  source 1..34: mol_type = genomic DNA
tatcatgcaagattcccattcttgcgacccgggt

SEQ ID NO: 24457 - DNA, 37 bp, Homo sapiens
  source 1..37: mol_type = genomic DNA
tatcatgcaagattcccattcttgcgacccgggttcg

SEQ ID NO: 24458 - DNA, 17 bp, Homo sapiens
  source 1..17: mol_type = genomic DNA
tatcattggtcgtggtt

SEQ ID NO: 24459 - DNA, 18 bp, Homo sapiens
  source 1..18: mol_type = genomic DNA
tatcattggtcgtggttg

SEQ ID NO: 24460 - DNA, 19 bp, Homo sapiens
  source 1..19: mol_type = genomic DNA
tatcattggtcgtggttgt

SEQ ID NO: 24461 - DNA, 20 bp, Homo sapiens
  source 1..20: mol_type = genomic DNA
tatcattggtcgtggttgta

SEQ ID NO: 24462 - DNA, 21 bp, Homo sapiens
  source 1..21: mol_type = genomic DNA
tatcattggtcgtggttgtag

SEQ ID NO: 24463 - DNA, 22 bp, Homo sapiens
  source 1..22: mol_type = genomic DNA
tatcattggtcgtggttgtagt

SEQ ID NO: 24464 - DNA, 23 bp, Homo sapiens
  source 1..23: mol_type = genomic DNA
tatcattggtcgtggttgtagtc

SEQ ID NO: 24465 - DNA, 24 bp, Homo sapiens
  source 1..24: mol_type = genomic DNA
tatcattggtcgtggttgtagtcc

SEQ ID NO: 24466 - DNA, 25 bp, Homo sapiens
  source 1..25: mol_type = genomic DNA
tatcattggtcgtggttgtagtccg

SEQ ID NO: 24467 - DNA, 26 bp, Homo sapiens
  source 1..26: mol_type = genomic DNA
tatcattggtcgtggttgtagtccgt

SEQ ID NO: 24468 - DNA, 27 bp, Homo sapiens
  source 1..27: mol_type = genomic DNA
tatcattggtcgtggttgtagtccgtg

SEQ ID NO: 24469 - DNA, 28 bp, Homo sapiens
  source 1..28: mol_type = genomic DNA
tatcattggtcgtggttgtagtccgtgc

SEQ ID NO: 24470 - DNA, 29 bp, Homo sapiens
  source 1..29: mol_type = genomic DNA
tatcattggtcgtggttgtagtccgtgcg

SEQ ID NO: 24471 - DNA, 30 bp, Homo sapiens
  source 1..30: mol_type = genomic DNA
tatcattggtcgtggttgtagtccgtgcga

SEQ ID NO: 24472 - DNA, 31 bp, Homo sapiens
  source 1..31: mol_type = genomic DNA
tatcattggtcgtggttgtagtccgtgcgag

SEQ ID NO: 24473 - DNA, 32 bp, Homo sapiens
  source 1..32: mol_type = genomic DNA
tatcattggtcgtggttgtagtccgtgcgaga

SEQ ID NO: 24474 - DNA, 33 bp, Homo sapiens
  source 1..33: mol_type = genomic DNA
tatcattggtcgtggttgtagtccgtgcgagaa

SEQ ID NO: 24475 - DNA, 34 bp, Homo sapiens
  source 1..34: mol_type = genomic DNA
tatcattggtcgtggttgtagtccgtgcgagaat

SEQ ID NO: 24476 - DNA, 35 bp, Homo sapiens
  source 1..35: mol_type = genomic DNA
tatcattggtcgtggttgtagtccgtgcgagaata

SEQ ID NO: 24477 - DNA, 36 bp, Homo sapiens
  source 1..36: mol_type = genomic DNA
tatcattggtcgtggttgtagtccgtgcgagaatac

SEQ ID NO: 24478 - DNA, 37 bp, Homo sapiens
  source 1..37: mol_type = genomic DNA
tatcattggtcgtggttgtagtccgtgcgagaatacc

SEQ ID NO: 24479 - DNA, 38 bp, Homo sapiens
  source 1..38: mol_type = genomic DNA
tatcattggtcgtggttgtagtccgtgcgagaatacca

SEQ ID NO: 24480 - DNA, 16 bp, Homo sapiens
  source 1..16: mol_type = genomic DNA
tatccattggtcttag

SEQ ID NO: 24481 - DNA, 18 bp, Homo sapiens
  source 1..18: mol_type = genomic DNA
tatccattggtcttaggc

SEQ ID NO: 24482 - DNA, 19 bp, Homo sapiens
  source 1..19: mol_type = genomic DNA
tatccattggtcttaggcc

SEQ ID NO: 24483 - DNA, 20 bp, Homo sapiens
  source 1..20: mol_type = genomic DNA
tatccattggtcttaggccc

SEQ ID NO: 24484 - DNA, 21 bp, Homo sapiens
  source 1..21: mol_type = genomic DNA
tatccattggtcttaggcccc

SEQ ID NO: 24485 - DNA, 22 bp, Homo sapiens
  source 1..22: mol_type = genomic DNA
tatccattggtcttaggcccca

SEQ ID NO: 24486 - DNA, 24 bp, Homo sapiens
  source 1..24: mol_type = genomic DNA
tatccattggtcttaggccccaaa

SEQ ID NO: 24487 - DNA, 25 bp, Homo sapiens
  source 1..25: mol_type = genomic DNA
tatccattggtcttaggccccaaaa

SEQ ID NO: 24488 - DNA, 26 bp, Homo sapiens
  source 1..26: mol_type = genomic DNA
tatccattggtcttaggccccaaaaa

SEQ ID NO: 24489 - DNA, 27 bp, Homo sapiens
  source 1..27: mol_type = genomic DNA
tatccattggtcttaggccccaaaaat

SEQ ID NO: 24490 - DNA, 28 bp, Homo sapiens
  source 1..28: mol_type = genomic DNA
tatccattggtcttaggccccaaaaatt

SEQ ID NO: 24491 - DNA, 32 bp, Homo sapiens
  source 1..32: mol_type = genomic DNA
tatccattggtcttaggccccaaaaattttgg

SEQ ID NO: 24492 - DNA, 33 bp, Homo sapiens
  source 1..33: mol_type = genomic DNA
tatccattggtcttaggccccaaaaattttggt

SEQ ID NO: 24493 - DNA, 34 bp, Homo sapiens
  source 1..34: mol_type = genomic DNA
tatccattggtcttaggccccaaaaattttggtg

SEQ ID NO: 24494 - DNA, 36 bp, Homo sapiens
  source 1..36: mol_type = genomic DNA
tatccattggtcttaggccccaaaaattttggtgca

SEQ ID NO: 24495 - DNA, 39 bp, Homo sapiens
  source 1..39: mol_type = genomic DNA
tatccattggtcttaggccccaaaaattttggtgcaact

SEQ ID NO: 24496 - DNA, 40 bp, Homo sapiens
  source 1..40: mol_type = genomic DNA
tatccattggtcttaggccccaaaaattttggtgcaactc

SEQ ID NO: 24497 - DNA, 41 bp, Homo sapiens
  source 1..41: mol_type = genomic DNA
tatccattggtcttaggccccaaaaattttggtgcaactcc

SEQ ID NO: 24498 - DNA, 42 bp, Homo sapiens
  source 1..42: mol_type = genomic DNA
tatccattggtcttaggccccaaaaattttggtgcaactcca

SEQ ID NO: 24499 - DNA, 44 bp, Homo sapiens
  source 1..44: mol_type = genomic DNA
tatccattggtcttaggccccaaaaattttggtgcaactccaaa

SEQ ID NO: 24500 - DNA, 46 bp, Homo sapiens
  source 1..46: mol_type = genomic DNA
tatccattggtcttaggccccaaaaattttggtgcaactccaaata

SEQ ID NO: 24501 - DNA, 29 bp, Homo sapiens
  source 1..29: mol_type = genomic DNA
tatccgcgtgggttcgaaccccacttctg

SEQ ID NO: 24502 - DNA, 16 bp, Homo sapiens
  source 1..16: mol_type = genomic DNA
tatcgggcccataccc

SEQ ID NO: 24503 - DNA, 17 bp, Homo sapiens
  source 1..17: mol_type = genomic DNA
tatcgggcccatacccc

SEQ ID NO: 24504 - DNA, 18 bp, Homo sapiens
  source 1..18: mol_type = genomic DNA
tatcgggcccataccccg

SEQ ID NO: 24505 - DNA, 19 bp, Homo sapiens
  source 1..19: mol_type = genomic DNA
tatcgggcccataccccga

SEQ ID NO: 24506 - DNA, 20 bp, Homo sapiens
  source 1..20: mol_type = genomic DNA
tatcgggcccataccccgaa

SEQ ID NO: 24507 - DNA, 21 bp, Homo sapiens
  source 1..21: mol_type = genomic DNA
tatcgggcccataccccgaaa

SEQ ID NO: 24508 - DNA, 22 bp, Homo sapiens
  source 1..22: mol_type = genomic DNA
tatcgggcccataccccgaaaa

SEQ ID NO: 24509 - DNA, 23 bp, Homo sapiens
  source 1..23: mol_type = genomic DNA
tatcgggcccataccccgaaaat

SEQ ID NO: 24510 - DNA, 24 bp, Homo sapiens
  source 1..24: mol_type = genomic DNA
tatcgggcccataccccgaaaatg

SEQ ID NO: 24511 - DNA, 25 bp, Homo sapiens
  source 1..25: mol_type = genomic DNA
tatcgggcccataccccgaaaatgt

SEQ ID NO: 24512 - DNA, 26 bp, Homo sapiens
  source 1..26: mol_type = genomic DNA
tatcgggcccataccccgaaaatgtt

SEQ ID NO: 24513 - DNA, 27 bp, Homo sapiens
  source 1..27: mol_type = genomic DNA
tatcgggcccataccccgaaaatgttg

SEQ ID NO: 24514 - DNA, 28 bp, Homo sapiens
  source 1..28: mol_type = genomic DNA
tatcgggcccataccccgaaaatgttgg

SEQ ID NO: 24515 - DNA, 29 bp, Homo sapiens
  source 1..29: mol_type = genomic DNA
tatcgggcccataccccgaaaatgttggt

SEQ ID NO: 24516 - DNA, 30 bp, Homo sapiens
  source 1..30: mol_type = genomic DNA
tatcgggcccataccccgaaaatgttggtt

SEQ ID NO: 24517 - DNA, 31 bp, Homo sapiens
  source 1..31: mol_type = genomic DNA
tatcgggcccataccccgaaaatgttggtta

SEQ ID NO: 24518 - DNA, 32 bp, Homo sapiens
  source 1..32: mol_type = genomic DNA
tatcgggcccataccccgaaaatgttggttat

SEQ ID NO: 24519 - DNA, 33 bp, Homo sapiens
  source 1..33: mol_type = genomic DNA
tatcgggcccataccccgaaaatgttggttata

SEQ ID NO: 24520 - DNA, 34 bp, Homo sapiens
  source 1..34: mol_type = genomic DNA
tatcgggcccataccccgaaaatgttggttatac

SEQ ID NO: 24521 - DNA, 35 bp, Homo sapiens
  source 1..35: mol_type = genomic DNA
tatcgggcccataccccgaaaatgttggttatacc

SEQ ID NO: 24522 - DNA, 36 bp, Homo sapiens
  source 1..36: mol_type = genomic DNA
tatcgggcccataccccgaaaatgttggttataccc

SEQ ID NO: 24523 - DNA, 37 bp, Homo sapiens
  source 1..37: mol_type = genomic DNA
tatcgggcccataccccgaaaatgttggttataccct

SEQ ID NO: 24524 - DNA, 39 bp, Homo sapiens
  source 1..39: mol_type = genomic DNA
tatcgggcccataccccgaaaatgttggttatacccttc

SEQ ID NO: 24525 - DNA, 40 bp, Homo sapiens
  source 1..40: mol_type = genomic DNA
tatcgggcccataccccgaaaatgttggttatacccttcc

SEQ ID NO: 24526 - DNA, 41 bp, Homo sapiens
  source 1..41: mol_type = genomic DNA
tatcgggcccataccccgaaaatgttggttatacccttccc

SEQ ID NO: 24527 - DNA, 42 bp, Homo sapiens
  source 1..42: mol_type = genomic DNA
tatcgggcccataccccgaaaatgttggttatacccttcccg

SEQ ID NO: 24528 - DNA, 44 bp, Homo sapiens
  source 1..44: mol_type = genomic DNA
tatcgggcccataccccgaaaatgttggttatacccttcccgta

SEQ ID NO: 24529 - DNA, 33 bp, Homo sapiens
  source 1..33: mol_type = genomic DNA
tatgaggccccgggttcaatccccggcatctcc

SEQ ID NO: 24530 - DNA, 34 bp, Homo sapiens
  source 1..34: mol_type = genomic DNA
tatgaggccccgggttcaatccccggcatctcca

SEQ ID NO: 24531 - DNA, 35 bp, Homo sapiens
  source 1..35: mol_type = genomic DNA
tatgaggccccgggttcaatccccggcatctccac

SEQ ID NO: 24532 - DNA, 36 bp, Homo sapiens
  source 1..36: mol_type = genomic DNA
tatgaggccccgggttcaatccccggcatctccacc

SEQ ID NO: 24533 - DNA, 31 bp, Homo sapiens
  source 1..31: mol_type = genomic DNA
tatgaggccccgggttcgatccccggcatct

SEQ ID NO: 24534 - DNA, 35 bp, Homo sapiens
  source 1..35: mol_type = genomic DNA
tatgaggccccgggttcgatccccggcatctccac

SEQ ID NO: 24535 - DNA, 36 bp, Homo sapiens
  source 1..36: mol_type = genomic DNA
tatgaggccccgggttcgatccccggcatctccacc

SEQ ID NO: 24536 - DNA, 37 bp, Homo sapiens
  source 1..37: mol_type = genomic DNA
tatgaggccccgggttcgatccccggcatctccacca

SEQ ID NO: 24537 - DNA, 35 bp, Homo sapiens
  source 1..35: mol_type = genomic DNA
tatgaggtcccgggttcgatccccggcatctccac

SEQ ID NO: 24538 - DNA, 36 bp, Homo sapiens
  source 1..36: mol_type = genomic DNA
tatgaggtcccgggttcgatccccggcatctccacc

SEQ ID NO: 24539 - DNA, 19 bp, Homo sapiens
  source 1..19: mol_type = genomic DNA
tatgataatcatatttacc

SEQ ID NO: 24540 - DNA, 22 bp, Homo sapiens
  source 1..22: mol_type = genomic DNA
tatgataatcatatttaccaac

SEQ ID NO: 24541 - DNA, 23 bp, Homo sapiens
  source 1..23: mol_type = genomic DNA
tatgataatcatatttaccaacc

SEQ ID NO: 24542 - DNA, 24 bp, Homo sapiens
  source 1..24: mol_type = genomic DNA
tatgataatcatatttaccaacca

SEQ ID NO: 24543 - DNA, 16 bp, Homo sapiens
  source 1..16: mol_type = genomic DNA
tatgattctcgcttcg

SEQ ID NO: 24544 - DNA, 17 bp, Homo sapiens
  source 1..17: mol_type = genomic DNA
tatgattctcgcttcgg

SEQ ID NO: 24545 - DNA, 22 bp, Homo sapiens
  source 1..22: mol_type = genomic DNA
tatgattctcgcttcgggtgcg

SEQ ID NO: 24546 - DNA, 23 bp, Homo sapiens
  source 1..23: mol_type = genomic DNA
tatgattctcgcttcgggtgcga

SEQ ID NO: 24547 - DNA, 33 bp, Homo sapiens
  source 1..33: mol_type = genomic DNA
tatgattctcgcttcgggtgcgagaggtcccgg

SEQ ID NO: 24548 - DNA, 35 bp, Homo sapiens
  source 1..35: mol_type = genomic DNA
tatgattctcgcttcgggtgcgagaggtcccgggt

SEQ ID NO: 24549 - DNA, 35 bp, Homo sapiens
  source 1..35: mol_type = genomic DNA
tatgattctcgcttcgggtgtgagaggtcccgggt

SEQ ID NO: 24550 - DNA, 17 bp, Homo sapiens
  source 1..17: mol_type = genomic DNA
tatgattctcgctttgg

SEQ ID NO: 24551 - DNA, 33 bp, Homo sapiens
  source 1..33: mol_type = genomic DNA
tatgattctcgctttgggtgcgagaggtcccgg

SEQ ID NO: 24552 - DNA, 16 bp, Homo sapiens
  source 1..16: mol_type = genomic DNA
tatgattctcggtttg

SEQ ID NO: 24553 - DNA, 17 bp, Homo sapiens
  source 1..17: mol_type = genomic DNA
tatgattctcggtttgg

SEQ ID NO: 24554 - DNA, 21 bp, Homo sapiens
  source 1..21: mol_type = genomic DNA
tatgattctcggtttgggtcc

SEQ ID NO: 24555 - DNA, 22 bp, Homo sapiens
  source 1..22: mol_type = genomic DNA
tatgattctcggtttgggtccg

SEQ ID NO: 24556 - DNA, 23 bp, Homo sapiens
  source 1..23: mol_type = genomic DNA
tatgattctcggtttgggtccga

SEQ ID NO: 24557 - DNA, 25 bp, Homo sapiens
  source 1..25: mol_type = genomic DNA
tatgattctcggtttgggtccgaga

SEQ ID NO: 24558 - DNA, 32 bp, Homo sapiens
  source 1..32: mol_type = genomic DNA
tatgattctcggtttgggtccgagaggtcccg

SEQ ID NO: 24559 - DNA, 33 bp, Homo sapiens
  source 1..33: mol_type = genomic DNA
tatgattctcggtttgggtccgagaggtcccgg

SEQ ID NO: 24560 - DNA, 35 bp, Homo sapiens
  source 1..35: mol_type = genomic DNA
tatgattctcggtttgggtccgagaggtcccgggt

SEQ ID NO: 24561 - DNA, 34 bp, Homo sapiens
  source 1..34: mol_type = genomic DNA
tatggaggcgtgggttcgaatcccacttctgaca

SEQ ID NO: 24562 - DNA, 36 bp, Homo sapiens
  source 1..36: mol_type = genomic DNA
tatggaggcgtgggttcgaatcccacttctgacacc

SEQ ID NO: 24563 - DNA, 37 bp, Homo sapiens
  source 1..37: mol_type = genomic DNA
tatggaggcgtgggttcgaatcccacttctgacacca

SEQ ID NO: 24564 - DNA, 20 bp, Homo sapiens
  source 1..20: mol_type = genomic DNA
tatggtctagcggttaggat

SEQ ID NO: 24565 - DNA, 21 bp, Homo sapiens
  source 1..21: mol_type = genomic DNA
tatggtctagcggttaggatt

SEQ ID NO: 24566 - DNA, 23 bp, Homo sapiens
  source 1..23: mol_type = genomic DNA
tatggtctagcggttaggattcc

SEQ ID NO: 24567 - DNA, 24 bp, Homo sapiens
  source 1..24: mol_type = genomic DNA
tatggtctagcggttaggattcct

SEQ ID NO: 24568 - DNA, 26 bp, Homo sapiens
  source 1..26: mol_type = genomic DNA
tatggtctagcggttaggattcctgg

SEQ ID NO: 24569 - DNA, 27 bp, Homo sapiens
  source 1..27: mol_type = genomic DNA
tatggtctagcggttaggattcctggt

SEQ ID NO: 24570 - DNA, 28 bp, Homo sapiens
  source 1..28: mol_type = genomic DNA
tatggtctagcggttaggattcctggtt

SEQ ID NO: 24571 - DNA, 29 bp, Homo sapiens
  source 1..29: mol_type = genomic DNA
tatggtctagcggttaggattcctggttt

SEQ ID NO: 24572 - DNA, 30 bp, Homo sapiens
  source 1..30: mol_type = genomic DNA
tatggtctagcggttaggattcctggtttt

SEQ ID NO: 24573 - DNA, 31 bp, Homo sapiens
  source 1..31: mol_type = genomic DNA
tatggtctagcggttaggattcctggttttc

SEQ ID NO: 24574 - DNA, 37 bp, Homo sapiens
  source 1..37: mol_type = genomic DNA
tatggtctagcggttaggattcctggttttcacccag

SEQ ID NO: 24575 - DNA, 16 bp, Homo sapiens
  source 1..16: mol_type = genomic DNA
tatgtagcttacctcc

SEQ ID NO: 24576 - DNA, 17 bp, Homo sapiens
  source 1..17: mol_type = genomic DNA
tatgtagcttacctcct

SEQ ID NO: 24577 - DNA, 34 bp, Homo sapiens
  source 1..34: mol_type = genomic DNA
tatgtagcttacctcctcaaagcaatacactgaa

SEQ ID NO: 24578 - DNA, 16 bp, Homo sapiens
  source 1..16: mol_type = genomic DNA
tatgtccgcgtgggtt

SEQ ID NO: 24579 - DNA, 18 bp, Homo sapiens
  source 1..18: mol_type = genomic DNA
tatgtccgcgtgggttcg

SEQ ID NO: 24580 - DNA, 19 bp, Homo sapiens
  source 1..19: mol_type = genomic DNA
tatgtccgcgtgggttcga

SEQ ID NO: 24581 - DNA, 21 bp, Homo sapiens
  source 1..21: mol_type = genomic DNA
tatgtccgcgtgggttcgaac

SEQ ID NO: 24582 - DNA, 22 bp, Homo sapiens
  source 1..22: mol_type = genomic DNA
tatgtccgcgtgggttcgaacc

SEQ ID NO: 24583 - DNA, 23 bp, Homo sapiens
  source 1..23: mol_type = genomic DNA
tatgtccgcgtgggttcgaaccc

SEQ ID NO: 24584 - DNA, 24 bp, Homo sapiens
  source 1..24: mol_type = genomic DNA
tatgtccgcgtgggttcgaacccc

SEQ ID NO: 24585 - DNA, 25 bp, Homo sapiens
  source 1..25: mol_type = genomic DNA
tatgtccgcgtgggttcgaacccca

SEQ ID NO: 24586 - DNA, 27 bp, Homo sapiens
  source 1..27: mol_type = genomic DNA
tatgtccgcgtgggttcgaaccccact

SEQ ID NO: 24587 - DNA, 28 bp, Homo sapiens
  source 1..28: mol_type = genomic DNA
tatgtccgcgtgggttcgaaccccactc

SEQ ID NO: 24588 - DNA, 30 bp, Homo sapiens
  source 1..30: mol_type = genomic DNA
tatgtccgcgtgggttcgaaccccactcct

SEQ ID NO: 24589 - DNA, 31 bp, Homo sapiens
  source 1..31: mol_type = genomic DNA
tatgtccgcgtgggttcgaaccccactcctg

SEQ ID NO: 24590 - DNA, 32 bp, Homo sapiens
  source 1..32: mol_type = genomic DNA
tatgtccgcgtgggttcgaaccccactcctgg

SEQ ID NO: 24591 - DNA, 33 bp, Homo sapiens
  source 1..33: mol_type = genomic DNA
tatgtccgcgtgggttcgaaccccactcctggt

SEQ ID NO: 24592 - DNA, 34 bp, Homo sapiens
  source 1..34: mol_type = genomic DNA
tatgtccgcgtgggttcgaaccccactcctggta

SEQ ID NO: 24593 - DNA, 35 bp, Homo sapiens
  source 1..35: mol_type = genomic DNA
tatgtccgcgtgggttcgaaccccactcctggtac

SEQ ID NO: 24594 - DNA, 36 bp, Homo sapiens
  source 1..36: mol_type = genomic DNA
tatgtccgcgtgggttcgaaccccactcctggtacc

SEQ ID NO: 24595 - DNA, 37 bp, Homo sapiens
  source 1..37: mol_type = genomic DNA
tatgtccgcgtgggttcgaaccccactcctggtacca

SEQ ID NO: 24596 - DNA, 29 bp, Homo sapiens
  source 1..29: mol_type = genomic DNA
tattagaaaaaccatttcataactttgtc

SEQ ID NO: 24597 - DNA, 17 bp, Homo sapiens
  source 1..17: mol_type = genomic DNA
tattgaattgcaaattc

SEQ ID NO: 24598 - DNA, 27 bp, Homo sapiens
  source 1..27: mol_type = genomic DNA
tattgaattgcaaattcgaagaagcag

SEQ ID NO: 24599 - DNA, 28 bp, Homo sapiens
  source 1..28: mol_type = genomic DNA
tattgaattgcaaattcgaagaagcagc

SEQ ID NO: 24600 - DNA, 30 bp, Homo sapiens
  source 1..30: mol_type = genomic DNA
tattgaattgcaaattcgaagaagcagctt

SEQ ID NO: 24601 - DNA, 32 bp, Homo sapiens
  source 1..32: mol_type = genomic DNA
tattgaattgcaaattcgaagaagcagcttca

SEQ ID NO: 24602 - DNA, 38 bp, Homo sapiens
  source 1..38: mol_type = genomic DNA
tattgaattgcaaattcgaagaagcagcttcaaacctg

SEQ ID NO: 24603 - DNA, 44 bp, Homo sapiens
  source 1..44: mol_type = genomic DNA
tattgaattgcaaattcgaagaagcagcttcaaacctgccgggg

SEQ ID NO: 24604 - DNA, 45 bp, Homo sapiens
  source 1..45: mol_type = genomic DNA
tattgaattgcaaattcgaagaagcagcttcaaacctgccggggc

SEQ ID NO: 24605 - DNA, 46 bp, Homo sapiens
  source 1..46: mol_type = genomic DNA
tattgaattgcaaattcgaagaagcagcttcaaacctgccggggct

SEQ ID NO: 24606 - DNA, 47 bp, Homo sapiens
  source 1..47: mol_type = genomic DNA
tattgaattgcaaattcgaagaagcagcttcaaacctgccggggctt

SEQ ID NO: 24607 - DNA, 48 bp, Homo sapiens
  source 1..48: mol_type = genomic DNA
tattgaattgcaaattcgaagaagcagcttcaaacctgccggggcttc

SEQ ID NO: 24608 - DNA, 16 bp, Homo sapiens
  source 1..16: mol_type = genomic DNA
tcaaaaaagagtacca

SEQ ID NO: 24609 - DNA, 19 bp, Homo sapiens
  source 1..19: mol_type = genomic DNA
tcaaaaccaggcggaaaca

SEQ ID NO: 24610 - DNA, 20 bp, Homo sapiens
  source 1..20: mol_type = genomic DNA
tcaaaaccaggcggaaacac

SEQ ID NO: 24611 - DNA, 22 bp, Homo sapiens
  source 1..22: mol_type = genomic DNA
tcaaaaccaggcggaaacacca

SEQ ID NO: 24612 - DNA, 16 bp, Homo sapiens
  source 1..16: mol_type = genomic DNA
tcaaacctgccggggc

SEQ ID NO: 24613 - DNA, 17 bp, Homo sapiens
  source 1..17: mol_type = genomic DNA
tcaaacctgccggggct

SEQ ID NO: 24614 - DNA, 18 bp, Homo sapiens
  source 1..18: mol_type = genomic DNA
tcaaacctgccggggctt

SEQ ID NO: 24615 - DNA, 19 bp, Homo sapiens
  source 1..19: mol_type = genomic DNA
tcaaacctgccggggcttc

SEQ ID NO: 24616 - DNA, 20 bp, Homo sapiens
  source 1..20: mol_type = genomic DNA
tcaaacctgccggggcttcc

SEQ ID NO: 24617 - DNA, 21 bp, Homo sapiens
  source 1..21: mol_type = genomic DNA
tcaaacctgccggggcttcca

SEQ ID NO: 24618 - DNA, 16 bp, Homo sapiens
  source 1..16: mol_type = genomic DNA
tcaaagcaatacactg

SEQ ID NO: 24619 - DNA, 17 bp, Homo sapiens
  source 1..17: mol_type = genomic DNA
tcaaagcaatacactga

SEQ ID NO: 24620 - DNA, 18 bp, Homo sapiens
  source 1..18: mol_type = genomic DNA
tcaaagcaatacactgaa

SEQ ID NO: 24621 - DNA, 29 bp, Homo sapiens
  source 1..29: mol_type = genomic DNA
tcaaagcaatacactgaaaatgtttagac

SEQ ID NO: 24622 - DNA, 30 bp, Homo sapiens
  source 1..30: mol_type = genomic DNA
tcaaagcaatacactgaaaatgtttagacg

SEQ ID NO: 24623 - DNA, 31 bp, Homo sapiens
  source 1..31: mol_type = genomic DNA
tcaaagcaatacactgaaaatgtttagacgg

SEQ ID NO: 24624 - DNA, 33 bp, Homo sapiens
  source 1..33: mol_type = genomic DNA
tcaaagcaatacactgaaaatgtttagacgggc

SEQ ID NO: 24625 - DNA, 34 bp, Homo sapiens
  source 1..34: mol_type = genomic DNA
tcaaagcaatacactgaaaatgtttagacgggct

SEQ ID NO: 24626 - DNA, 35 bp, Homo sapiens
  source 1..35: mol_type = genomic DNA
tcaaagcaatacactgaaaatgtttagacgggctc

SEQ ID NO: 24627 - DNA, 36 bp, Homo sapiens
  source 1..36: mol_type = genomic DNA
tcaaagcaatacactgaaaatgtttagacgggctca

SEQ ID NO: 24628 - DNA, 37 bp, Homo sapiens
  source 1..37: mol_type = genomic DNA
tcaaagcaatacactgaaaatgtttagacgggctcac

SEQ ID NO: 24629 - DNA, 38 bp, Homo sapiens
  source 1..38: mol_type = genomic DNA
tcaaagcaatacactgaaaatgtttagacgggctcaca

SEQ ID NO: 24630 - DNA, 39 bp, Homo sapiens
  source 1..39: mol_type = genomic DNA
tcaaagcaatacactgaaaatgtttagacgggctcacat

SEQ ID NO: 24631 - DNA, 43 bp, Homo sapiens
  source 1..43: mol_type = genomic DNA
tcaaagcaatacactgaaaatgtttagacgggctcacatcacc

SEQ ID NO: 24632 - DNA, 44 bp, Homo sapiens
  source 1..44: mol_type = genomic DNA
tcaaagcaatacactgaaaatgtttagacgggctcacatcaccc

SEQ ID NO: 24633 - DNA, 21 bp, Homo sapiens
  source 1..21: mol_type = genomic DNA
tcaaagccctcagtaagttgc

SEQ ID NO: 24634 - DNA, 23 bp, Homo sapiens
  source 1..23: mol_type = genomic DNA
tcaaagccctcagtaagttgcaa

SEQ ID NO: 24635 - DNA, 27 bp, Homo sapiens
  source 1..27: mol_type = genomic DNA
tcaaagccctcagtaagttgcaatact

SEQ ID NO: 24636 - DNA, 28 bp, Homo sapiens
  source 1..28: mol_type = genomic DNA
tcaaagccctcagtaagttgcaatactt

SEQ ID NO: 24637 - DNA, 38 bp, Homo sapiens
  source 1..38: mol_type = genomic DNA
tcaaagccctcagtaagttgcaatacttaatttctgcc

SEQ ID NO: 24638 - DNA, 39 bp, Homo sapiens
  source 1..39: mol_type = genomic DNA
tcaaagccctcagtaagttgcaatacttaatttctgcca

SEQ ID NO: 24639 - DNA, 18 bp, Homo sapiens
  source 1..18: mol_type = genomic DNA
tcaaaggttccgggttcg

SEQ ID NO: 24640 - DNA, 32 bp, Homo sapiens
  source 1..32: mol_type = genomic DNA
tcaaaggttccgggttcgagtcccggcggagt

SEQ ID NO: 24641 - DNA, 33 bp, Homo sapiens
  source 1..33: mol_type = genomic DNA
tcaaaggttccgggttcgagtcccggcggagtc

SEQ ID NO: 24642 - DNA, 34 bp, Homo sapiens
  source 1..34: mol_type = genomic DNA
tcaaaggttccgggttcgagtcccggcggagtcg

SEQ ID NO: 24643 - DNA, 35 bp, Homo sapiens
  source 1..35: mol_type = genomic DNA
tcaaaggttccgggttcgagtcccggcggagtcgc

SEQ ID NO: 24644 - DNA, 36 bp, Homo sapiens
  source 1..36: mol_type = genomic DNA
tcaaaggttccgggttcgagtcccggcggagtcgcc

SEQ ID NO: 24645 - DNA, 37 bp, Homo sapiens
  source 1..37: mol_type = genomic DNA
tcaaaggttccgggttcgagtcccggcggagtcgcca

SEQ ID NO: 24646 - DNA, 35 bp, Homo sapiens
  source 1..35: mol_type = genomic DNA
tcaaaggttgtgggttcgaatcccaccagagtcgc

SEQ ID NO: 24647 - DNA, 36 bp, Homo sapiens
  source 1..36: mol_type = genomic DNA
tcaaaggttgtgggttcgaatcccaccagagtcgcc

SEQ ID NO: 24648 - DNA, 37 bp, Homo sapiens
  source 1..37: mol_type = genomic DNA
tcaaaggttgtgggttcgaatcccaccagagtcgcca

SEQ ID NO: 24649 - DNA, 35 bp, Homo sapiens
  source 1..35: mol_type = genomic DNA
tcaaaggttgtgggttcgagtcccaccagagtcgc

SEQ ID NO: 24650 - DNA, 36 bp, Homo sapiens
  source 1..36: mol_type = genomic DNA
tcaaaggttgtgggttcgagtcccaccagagtcgcc

SEQ ID NO: 24651 - DNA, 37 bp, Homo sapiens
  source 1..37: mol_type = genomic DNA
tcaaaggttgtgggttcgagtcccaccagagtcgcca

SEQ ID NO: 24652 - DNA, 17 bp, Homo sapiens
  source 1..17: mol_type = genomic DNA
tcaaagttaaattatag

SEQ ID NO: 24653 - DNA, 18 bp, Homo sapiens
  source 1..18: mol_type = genomic DNA
tcaaagttaaattatagg

SEQ ID NO: 24654 - DNA, 19 bp, Homo sapiens
  source 1..19: mol_type = genomic DNA
tcaaagttaaattataggc

SEQ ID NO: 24655 - DNA, 20 bp, Homo sapiens
  source 1..20: mol_type = genomic DNA
tcaaagttaaattataggct

SEQ ID NO: 24656 - DNA, 21 bp, Homo sapiens
  source 1..21: mol_type = genomic DNA
tcaaagttaaattataggcta

SEQ ID NO: 24657 - DNA, 22 bp, Homo sapiens
  source 1..22: mol_type = genomic DNA
tcaaagttaaattataggctaa

SEQ ID NO: 24658 - DNA, 23 bp, Homo sapiens
  source 1..23: mol_type = genomic DNA
tcaaagttaaattataggctaaa

SEQ ID NO: 24659 - DNA, 24 bp, Homo sapiens
  source 1..24: mol_type = genomic DNA
tcaaagttaaattataggctaaat

SEQ ID NO: 24660 - DNA, 25 bp, Homo sapiens
  source 1..25: mol_type = genomic DNA
tcaaagttaaattataggctaaatc

SEQ ID NO: 24661 - DNA, 26 bp, Homo sapiens
  source 1..26: mol_type = genomic DNA
tcaaagttaaattataggctaaatcc

SEQ ID NO: 24662 - DNA, 27 bp, Homo sapiens
  source 1..27: mol_type = genomic DNA
tcaaagttaaattataggctaaatcct

SEQ ID NO: 24663 - DNA, 28 bp, Homo sapiens
  source 1..28: mol_type = genomic DNA
tcaaagttaaattataggctaaatccta

SEQ ID NO: 24664 - DNA, 30 bp, Homo sapiens
  source 1..30: mol_type = genomic DNA
tcaaagttaaattataggctaaatcctata

SEQ ID NO: 24665 - DNA, 31 bp, Homo sapiens
  source 1..31: mol_type = genomic DNA
tcaaagttaaattataggctaaatcctatat

SEQ ID NO: 24666 - DNA, 32 bp, Homo sapiens
  source 1..32: mol_type = genomic DNA
tcaaagttaaattataggctaaatcctatata

SEQ ID NO: 24667 - DNA, 33 bp, Homo sapiens
  source 1..33: mol_type = genomic DNA
tcaaagttaaattataggctaaatcctatatat

SEQ ID NO: 24668 - DNA, 34 bp, Homo sapiens
  source 1..34: mol_type = genomic DNA
tcaaagttaaattataggctaaatcctatatatc

SEQ ID NO: 24669 - DNA, 35 bp, Homo sapiens
  source 1..35: mol_type = genomic DNA
tcaaagttaaattataggctaaatcctatatatct

SEQ ID NO: 24670 - DNA, 36 bp, Homo sapiens
  source 1..36: mol_type = genomic DNA
tcaaagttaaattataggctaaatcctatatatctt

SEQ ID NO: 24671 - DNA, 38 bp, Homo sapiens
  source 1..38: mol_type = genomic DNA
tcaaagttaaattataggctaaatcctatatatcttac

SEQ ID NO: 24672 - DNA, 39 bp, Homo sapiens
  source 1..39: mol_type = genomic DNA
tcaaagttaaattataggctaaatcctatatatcttacc

SEQ ID NO: 24673 - DNA, 40 bp, Homo sapiens
  source 1..40: mol_type = genomic DNA
tcaaagttaaattataggctaaatcctatatatcttacca

SEQ ID NO: 24674 - DNA, 21 bp, Homo sapiens
  source 1..21: mol_type = genomic DNA
tcaaatcacgtcggggtcacc

SEQ ID NO: 24675 - DNA, 22 bp, Homo sapiens
  source 1..22: mol_type = genomic DNA
tcaaatcacgtcggggtcacca

SEQ ID NO: 24676 - DNA, 16 bp, Homo sapiens
  source 1..16: mol_type = genomic DNA
tcaaatcccggacgag

SEQ ID NO: 24677 - DNA, 17 bp, Homo sapiens
  source 1..17: mol_type = genomic DNA
tcaaatcccggacgagc

SEQ ID NO: 24678 - DNA, 18 bp, Homo sapiens
  source 1..18: mol_type = genomic DNA
tcaaatcccggacgagcc

SEQ ID NO: 24679 - DNA, 19 bp, Homo sapiens
  source 1..19: mol_type = genomic DNA
tcaaatcccggacgagccc

SEQ ID NO: 24680 - DNA, 20 bp, Homo sapiens
  source 1..20: mol_type = genomic DNA
tcaaatcccggacgagcccc

SEQ ID NO: 24681 - DNA, 21 bp, Homo sapiens
  source 1..21: mol_type = genomic DNA
tcaaatcccggacgagccccc

SEQ ID NO: 24682 - DNA, 22 bp, Homo sapiens
  source 1..22: mol_type = genomic DNA
tcaaatcccggacgagccccca

SEQ ID NO: 24683 - DNA, 20 bp, Homo sapiens
  source 1..20: mol_type = genomic DNA
tcaaatccgggtgccccctc

SEQ ID NO: 24684 - DNA, 21 bp, Homo sapiens
  source 1..21: mol_type = genomic DNA
tcaaatccgggtgccccctcc

SEQ ID NO: 24685 - DNA, 22 bp, Homo sapiens
  source 1..22: mol_type = genomic DNA
tcaaatccgggtgccccctcca

SEQ ID NO: 24686 - DNA, 16 bp, Homo sapiens
  source 1..16: mol_type = genomic DNA
tcaaatctcgctgggg

SEQ ID NO: 24687 - DNA, 19 bp, Homo sapiens
  source 1..19: mol_type = genomic DNA
tcaaatctcgctggggcct

SEQ ID NO: 24688 - DNA, 20 bp, Homo sapiens
  source 1..20: mol_type = genomic DNA
tcaaatctcgctggggcctc

SEQ ID NO: 24689 - DNA, 21 bp, Homo sapiens
  source 1..21: mol_type = genomic DNA
tcaaatctcgctggggcctcc

SEQ ID NO: 24690 - DNA, 22 bp, Homo sapiens
  source 1..22: mol_type = genomic DNA
tcaaatctcgctggggcctcca

SEQ ID NO: 24691 - DNA, 18 bp, Homo sapiens
  source 1..18: mol_type = genomic DNA
tcaaatctcggtggaacc

SEQ ID NO: 24692 - DNA, 19 bp, Homo sapiens
  source 1..19: mol_type = genomic DNA
tcaaatctcggtggaacct

SEQ ID NO: 24693 - DNA, 20 bp, Homo sapiens
  source 1..20: mol_type = genomic DNA
tcaaatctcggtggaacctc

SEQ ID NO: 24694 - DNA, 21 bp, Homo sapiens
  source 1..21: mol_type = genomic DNA
tcaaatctcggtggaacctcc

SEQ ID NO: 24695 - DNA, 22 bp, Homo sapiens
  source 1..22: mol_type = genomic DNA
tcaaatctcggtggaacctcca

SEQ ID NO: 24696 - DNA, 18 bp, Homo sapiens
  source 1..18: mol_type = genomic DNA
tcaaatctcggtgggacc

SEQ ID NO: 24697 - DNA, 19 bp, Homo sapiens
  source 1..19: mol_type = genomic DNA
tcaaatctcggtgggacct

SEQ ID NO: 24698 - DNA, 20 bp, Homo sapiens
  source 1..20: mol_type = genomic DNA
tcaaatctcggtgggacctc

SEQ ID NO: 24699 - DNA, 21 bp, Homo sapiens
  source 1..21: mol_type = genomic DNA
tcaaatctcggtgggacctcc

SEQ ID NO: 24700 - DNA, 22 bp, Homo sapiens
  source 1..22: mol_type = genomic DNA
tcaaatctcggtgggacctcca

SEQ ID NO: 24701 - DNA, 22 bp, Homo sapiens
  source 1..22: mol_type = genomic DNA
tcaaatggtagagcgctcgctt

SEQ ID NO: 24702 - DNA, 16 bp, Homo sapiens
  source 1..16: mol_type = genomic DNA
tcaacttaacttgacc

SEQ ID NO: 24703 - DNA, 17 bp, Homo sapiens
  source 1..17: mol_type = genomic DNA
tcaacttaacttgaccg

SEQ ID NO: 24704 - DNA, 18 bp, Homo sapiens
  source 1..18: mol_type = genomic DNA
tcaacttaacttgaccgc

SEQ ID NO: 24705 - DNA, 19 bp, Homo sapiens
  source 1..19: mol_type = genomic DNA
tcaacttaacttgaccgct

SEQ ID NO: 24706 - DNA, 20 bp, Homo sapiens
  source 1..20: mol_type = genomic DNA
tcaacttaacttgaccgctc

SEQ ID NO: 24707 - DNA, 21 bp, Homo sapiens
  source 1..21: mol_type = genomic DNA
tcaacttaacttgaccgctct

SEQ ID NO: 24708 - DNA, 22 bp, Homo sapiens
  source 1..22: mol_type = genomic DNA
tcaacttaacttgaccgctctg

SEQ ID NO: 24709 - DNA, 23 bp, Homo sapiens
  source 1..23: mol_type = genomic DNA
tcaacttaacttgaccgctctga

SEQ ID NO: 24710 - DNA, 24 bp, Homo sapiens
  source 1..24: mol_type = genomic DNA
tcaacttaacttgaccgctctgac

SEQ ID NO: 24711 - DNA, 25 bp, Homo sapiens
  source 1..25: mol_type = genomic DNA
tcaacttaacttgaccgctctgacc

SEQ ID NO: 24712 - DNA, 26 bp, Homo sapiens
  source 1..26: mol_type = genomic DNA
tcaacttaacttgaccgctctgacca

SEQ ID NO: 24713 - DNA, 37 bp, Homo sapiens
  source 1..37: mol_type = genomic DNA
tcaagaagtccccggttcaaatccgggtgccccctcc

SEQ ID NO: 24714 - DNA, 17 bp, Homo sapiens
  source 1..17: mol_type = genomic DNA
tcaagaggtccccggtt

SEQ ID NO: 24715 - DNA, 35 bp, Homo sapiens
  source 1..35: mol_type = genomic DNA
tcaagaggtccccggttcaaatccgggtgccccct

SEQ ID NO: 24716 - DNA, 36 bp, Homo sapiens
  source 1..36: mol_type = genomic DNA
tcaagaggtccccggttcaaatccgggtgccccctc

SEQ ID NO: 24717 - DNA, 37 bp, Homo sapiens
  source 1..37: mol_type = genomic DNA
tcaagaggtccccggttcaaatccgggtgccccctcc

SEQ ID NO: 24718 - DNA, 18 bp, Homo sapiens
  source 1..18: mol_type = genomic DNA
tcaagaggtccctggttc

SEQ ID NO: 24719 - DNA, 35 bp, Homo sapiens
  source 1..35: mol_type = genomic DNA
tcaagaggtccctggttcaaatccaggtgccccct

SEQ ID NO: 24720 - DNA, 36 bp, Homo sapiens
  source 1..36: mol_type = genomic DNA
tcaagaggtccctggttcaaatccaggtgccccctc

SEQ ID NO: 24721 - DNA, 37 bp, Homo sapiens
  source 1..37: mol_type = genomic DNA
tcaagaggtccctggttcaaatccaggtgccccctcc

SEQ ID NO: 24722 - DNA, 35 bp, Homo sapiens
  source 1..35: mol_type = genomic DNA
tcaagaggtccctggttcaaatccgggtgccccct

SEQ ID NO: 24723 - DNA, 36 bp, Homo sapiens
  source 1..36: mol_type = genomic DNA
tcaagaggtccctggttcaaatccgggtgccccctc

SEQ ID NO: 24724 - DNA, 37 bp, Homo sapiens
  source 1..37: mol_type = genomic DNA
tcaagaggtccctggttcaaatccgggtgccccctcc

SEQ ID NO: 24725 - DNA, 21 bp, Homo sapiens
  source 1..21: mol_type = genomic DNA
tcaagcctcacctggagcacc

SEQ ID NO: 24726 - DNA, 21 bp, Homo sapiens
  source 1..21: mol_type = genomic DNA
tcaagtcacgtcggggtcacc

SEQ ID NO: 24727 - DNA, 22 bp, Homo sapiens
  source 1..22: mol_type = genomic DNA
tcaagtcacgtcggggtcacca

SEQ ID NO: 24728 - DNA, 22 bp, Homo sapiens
  source 1..22: mol_type = genomic DNA
tcaagtccctgtccaggcgcca

SEQ ID NO: 24729 - DNA, 19 bp, Homo sapiens
  source 1..19: mol_type = genomic DNA
tcaagtccctgttcgggcg

SEQ ID NO: 24730 - DNA, 21 bp, Homo sapiens
  source 1..21: mol_type = genomic DNA
tcaagtccctgttcgggcgcc

SEQ ID NO: 24731 - DNA, 22 bp, Homo sapiens
  source 1..22: mol_type = genomic DNA
tcaagtccctgttcgggcgcca

SEQ ID NO: 24732 - DNA, 16 bp, Homo sapiens
  source 1..16: mol_type = genomic DNA
tcaagttctggtctcc

SEQ ID NO: 24733 - DNA, 20 bp, Homo sapiens
  source 1..20: mol_type = genomic DNA
tcaagttctggtctccaatg

SEQ ID NO: 24734 - DNA, 17 bp, Homo sapiens
  source 1..17: mol_type = genomic DNA
tcaagttctggtctccg

SEQ ID NO: 24735 - DNA, 18 bp, Homo sapiens
  source 1..18: mol_type = genomic DNA
tcaagttctggtctccgg

SEQ ID NO: 24736 - DNA, 19 bp, Homo sapiens
  source 1..19: mol_type = genomic DNA
tcaagttctggtctccgga

SEQ ID NO: 24737 - DNA, 20 bp, Homo sapiens
  source 1..20: mol_type = genomic DNA
tcaagttctggtctccggat

SEQ ID NO: 24738 - DNA, 21 bp, Homo sapiens
  source 1..21: mol_type = genomic DNA
tcaagttctggtctccggatg

SEQ ID NO: 24739 - DNA, 20 bp, Homo sapiens
  source 1..20: mol_type = genomic DNA
tcaatccccggcacctccac

SEQ ID NO: 24740 - DNA, 21 bp, Homo sapiens
  source 1..21: mol_type = genomic DNA
tcaatccccggcacctccacc

SEQ ID NO: 24741 - DNA, 22 bp, Homo sapiens
  source 1..22: mol_type = genomic DNA
tcaatccccggcacctccacca

SEQ ID NO: 24742 - DNA, 17 bp, Homo sapiens
  source 1..17: mol_type = genomic DNA
tcaatccccggcatctc

SEQ ID NO: 24743 - DNA, 22 bp, Homo sapiens
  source 1..22: mol_type = genomic DNA
tcaatccccggcatctccacca

SEQ ID NO: 24744 - DNA, 19 bp, Homo sapiens
  source 1..19: mol_type = genomic DNA
tcaatcccgggtttcggca

SEQ ID NO: 24745 - DNA, 20 bp, Homo sapiens
  source 1..20: mol_type = genomic DNA
tcaatcccgggtttcggcac

SEQ ID NO: 24746 - DNA, 22 bp, Homo sapiens
  source 1..22: mol_type = genomic DNA
tcaatcccgggtttcggcacca

SEQ ID NO: 24747 - DNA, 21 bp, Homo sapiens
  source 1..21: mol_type = genomic DNA
tcaatggtagaattctcgcct

SEQ ID NO: 24748 - DNA, 20 bp, Homo sapiens
  source 1..20: mol_type = genomic DNA
tcaattccccgacggggagc

SEQ ID NO: 24749 - DNA, 21 bp, Homo sapiens
  source 1..21: mol_type = genomic DNA
tcaattccccgacggggagcc

SEQ ID NO: 24750 - DNA, 22 bp, Homo sapiens
  source 1..22: mol_type = genomic DNA
tcaattccccgacggggagcca

SEQ ID NO: 24751 - DNA, 22 bp, Homo sapiens
  source 1..22: mol_type = genomic DNA
tcaattcccggccaatgcacca

SEQ ID NO: 24752 - DNA, 19 bp, Homo sapiens
  source 1..19: mol_type = genomic DNA
tcaattctcgctggggcct

SEQ ID NO: 24753 - DNA, 22 bp, Homo sapiens
  source 1..22: mol_type = genomic DNA
tcaattctcgctggggcctcca

SEQ ID NO: 24754 - DNA, 16 bp, Homo sapiens
  source 1..16: mol_type = genomic DNA
tcacaagaactgctaa

SEQ ID NO: 24755 - DNA, 17 bp, Homo sapiens
  source 1..17: mol_type = genomic DNA
tcacaagaactgctaac

SEQ ID NO: 24756 - DNA, 18 bp, Homo sapiens
  source 1..18: mol_type = genomic DNA
tcacaagaactgctaact

SEQ ID NO: 24757 - DNA, 19 bp, Homo sapiens
  source 1..19: mol_type = genomic DNA
tcacaagaactgctaactc

SEQ ID NO: 24758 - DNA, 20 bp, Homo sapiens
  source 1..20: mol_type = genomic DNA
tcacaagaactgctaactca

SEQ ID NO: 24759 - DNA, 21 bp, Homo sapiens
  source 1..21: mol_type = genomic DNA
tcacaagaactgctaactcat

SEQ ID NO: 24760 - DNA, 22 bp, Homo sapiens
  source 1..22: mol_type = genomic DNA
tcacaagaactgctaactcatg

SEQ ID NO: 24761 - DNA, 23 bp, Homo sapiens
  source 1..23: mol_type = genomic DNA
tcacaagaactgctaactcatgc

SEQ ID NO: 24762 - DNA, 24 bp, Homo sapiens
  source 1..24: mol_type = genomic DNA
tcacaagaactgctaactcatgcc

SEQ ID NO: 24763 - DNA, 25 bp, Homo sapiens
  source 1..25: mol_type = genomic DNA
tcacaagaactgctaactcatgccc

SEQ ID NO: 24764 - DNA, 26 bp, Homo sapiens
  source 1..26: mol_type = genomic DNA
tcacaagaactgctaactcatgcccc

SEQ ID NO: 24765 - DNA, 27 bp, Homo sapiens
  source 1..27: mol_type = genomic DNA
tcacaagaactgctaactcatgccccc

SEQ ID NO: 24766 - DNA, 28 bp, Homo sapiens
  source 1..28: mol_type = genomic DNA
tcacaagaactgctaactcatgccccca

SEQ ID NO: 24767 - DNA, 29 bp, Homo sapiens
  source 1..29: mol_type = genomic DNA
tcacaagaactgctaactcatgcccccat

SEQ ID NO: 24768 - DNA, 30 bp, Homo sapiens
  source 1..30: mol_type = genomic DNA
tcacaagaactgctaactcatgcccccatg

SEQ ID NO: 24769 - DNA, 31 bp, Homo sapiens
  source 1..31: mol_type = genomic DNA
tcacaagaactgctaactcatgcccccatgt

SEQ ID NO: 24770 - DNA, 32 bp, Homo sapiens
  source 1..32: mol_type = genomic DNA
tcacaagaactgctaactcatgcccccatgtc

SEQ ID NO: 24771 - DNA, 33 bp, Homo sapiens
  source 1..33: mol_type = genomic DNA
tcacaagaactgctaactcatgcccccatgtct

SEQ ID NO: 24772 - DNA, 34 bp, Homo sapiens
  source 1..34: mol_type = genomic DNA
tcacaagaactgctaactcatgcccccatgtcta

SEQ ID NO: 24773 - DNA, 35 bp, Homo sapiens
  source 1..35: mol_type = genomic DNA
tcacaagaactgctaactcatgcccccatgtctaa

SEQ ID NO: 24774 - DNA, 36 bp, Homo sapiens
  source 1..36: mol_type = genomic DNA
tcacaagaactgctaactcatgcccccatgtctaac

SEQ ID NO: 24775 - DNA, 37 bp, Homo sapiens
  source 1..37: mol_type = genomic DNA
tcacaagaactgctaactcatgcccccatgtctaaca

SEQ ID NO: 24776 - DNA, 39 bp, Homo sapiens
  source 1..39: mol_type = genomic DNA
tcacaagaactgctaactcatgcccccatgtctaacaac

SEQ ID NO: 24777 - DNA, 40 bp, Homo sapiens
  source 1..40: mol_type = genomic DNA
tcacaagaactgctaactcatgcccccatgtctaacaaca

SEQ ID NO: 24778 - DNA, 41 bp, Homo sapiens
  source 1..41: mol_type = genomic DNA
tcacaagaactgctaactcatgcccccatgtctaacaacat

SEQ ID NO: 24779 - DNA, 42 bp, Homo sapiens
  source 1..42: mol_type = genomic DNA
tcacaagaactgctaactcatgcccccatgtctaacaacatg

SEQ ID NO: 24780 - DNA, 43 bp, Homo sapiens
  source 1..43: mol_type = genomic DNA
tcacaagaactgctaactcatgcccccatgtctaacaacatgg

SEQ ID NO: 24781 - DNA, 44 bp, Homo sapiens
  source 1..44: mol_type = genomic DNA
tcacaagaactgctaactcatgcccccatgtctaacaacatggc

SEQ ID NO: 24782 - DNA, 45 bp, Homo sapiens
  source 1..45: mol_type = genomic DNA
tcacaagaactgctaactcatgcccccatgtctaacaacatggct

SEQ ID NO: 24783 - DNA, 46 bp, Homo sapiens
  source 1..46: mol_type = genomic DNA
tcacaagaactgctaactcatgcccccatgtctaacaacatggctt

SEQ ID NO: 24784 - DNA, 47 bp, Homo sapiens
  source 1..47: mol_type = genomic DNA
tcacaagaactgctaactcatgcccccatgtctaacaacatggcttt

SEQ ID NO: 24785 - DNA, 48 bp, Homo sapiens
  source 1..48: mol_type = genomic DNA
tcacaagaactgctaactcatgcccccatgtctaacaacatggctttc

SEQ ID NO: 24786 - DNA, 22 bp, Homo sapiens
  source 1..22: mol_type = genomic DNA
tcacacgcgaaaggtccccggt

SEQ ID NO: 24787 - DNA, 25 bp, Homo sapiens
  source 1..25: mol_type = genomic DNA
tcacacgcgaaaggtccccggttcg

SEQ ID NO: 24788 - DNA, 26 bp, Homo sapiens
  source 1..26: mol_type = genomic DNA
tcacacgcgaaaggtccccggttcga

SEQ ID NO: 24789 - DNA, 24 bp, Homo sapiens
  source 1..24: mol_type = genomic DNA
tcacacgcgaaaggtccccggttt

SEQ ID NO: 24790 - DNA, 16 bp, Homo sapiens
  source 1..16: mol_type = genomic DNA
tcacatcaccccataa

SEQ ID NO: 24791 - DNA, 17 bp, Homo sapiens
  source 1..17: mol_type = genomic DNA
tcacatcaccccataaa

SEQ ID NO: 24792 - DNA, 18 bp, Homo sapiens
  source 1..18: mol_type = genomic DNA
tcacatcaccccataaac

SEQ ID NO: 24793 - DNA, 19 bp, Homo sapiens
  source 1..19: mol_type = genomic DNA
tcacatcaccccataaaca

SEQ ID NO: 24794 - DNA, 20 bp, Homo sapiens
  source 1..20: mol_type = genomic DNA
tcacatcaccccataaacac

SEQ ID NO: 24795 - DNA, 21 bp, Homo sapiens
  source 1..21: mol_type = genomic DNA
tcacatcaccccataaacacc

SEQ ID NO: 24796 - DNA, 22 bp, Homo sapiens
  source 1..22: mol_type = genomic DNA
tcacatcaccccataaacacca

SEQ ID NO: 24797 - DNA, 30 bp, Homo sapiens
  source 1..30: mol_type = genomic DNA
tcacccaggcggcccgggttcgactcccgg

SEQ ID NO: 24798 - DNA, 31 bp, Homo sapiens
  source 1..31: mol_type = genomic DNA
tcacccaggcggcccgggttcgactcccggt

SEQ ID NO: 24799 - DNA, 32 bp, Homo sapiens
  source 1..32: mol_type = genomic DNA
tcacccaggcggcccgggttcgactcccggtg

SEQ ID NO: 24800 - DNA, 34 bp, Homo sapiens
  source 1..34: mol_type = genomic DNA
tcacccaggcggcccgggttcgactcccggtgtg

SEQ ID NO: 24801 - DNA, 35 bp, Homo sapiens
  source 1..35: mol_type = genomic DNA
tcacccaggcggcccgggttcgactcccggtgtgg

SEQ ID NO: 24802 - DNA, 36 bp, Homo sapiens
  source 1..36: mol_type = genomic DNA
tcacccaggcggcccgggttcgactcccggtgtggg

SEQ ID NO: 24803 - DNA, 37 bp, Homo sapiens
  source 1..37: mol_type = genomic DNA
tcacccaggcggcccgggttcgactcccggtgtggga

SEQ ID NO: 24804 - DNA, 38 bp, Homo sapiens
  source 1..38: mol_type = genomic DNA
tcacccaggcggcccgggttcgactcccggtgtgggaa

SEQ ID NO: 24805 - DNA, 39 bp, Homo sapiens
  source 1..39: mol_type = genomic DNA
tcacccaggcggcccgggttcgactcccggtgtgggaac

SEQ ID NO: 24806 - DNA, 40 bp, Homo sapiens
  source 1..40: mol_type = genomic DNA
tcacccaggcggcccgggttcgactcccggtgtgggaacc

SEQ ID NO: 24807 - DNA, 41 bp, Homo sapiens
  source 1..41: mol_type = genomic DNA
tcacccaggcggcccgggttcgactcccggtgtgggaacca

SEQ ID NO: 24808 - DNA, 38 bp, Homo sapiens
  source 1..38: mol_type = genomic DNA
tcacccaggtggcccgggttcgactcccggtatgggaa

SEQ ID NO: 24809 - DNA, 39 bp, Homo sapiens
  source 1..39: mol_type = genomic DNA
tcacccaggtggcccgggttcgactcccggtatgggaac

SEQ ID NO: 24810 - DNA, 40 bp, Homo sapiens
  source 1..40: mol_type = genomic DNA
tcacccaggtggcccgggttcgactcccggtatgggaacc

SEQ ID NO: 24811 - DNA, 41 bp, Homo sapiens
  source 1..41: mol_type = genomic DNA
tcacccaggtggcccgggttcgactcccggtatgggaacca

SEQ ID NO: 24812 - DNA, 16 bp, Homo sapiens
  source 1..16: mol_type = genomic DNA
tcaccccataaacacc

SEQ ID NO: 24813 - DNA, 17 bp, Homo sapiens
  source 1..17: mol_type = genomic DNA
tcaccccataaacacca

SEQ ID NO: 24814 - DNA, 16 bp, Homo sapiens
  source 1..16: mol_type = genomic DNA
tcaccgccgcggcccg

SEQ ID NO: 24815 - DNA, 17 bp, Homo sapiens
  source 1..17: mol_type = genomic DNA
tcaccgccgcggcccgg

SEQ ID NO: 24816 - DNA, 19 bp, Homo sapiens
  source 1..19: mol_type = genomic DNA
tcaccgccgcggcccgggt

SEQ ID NO: 24817 - DNA, 20 bp, Homo sapiens
  source 1..20: mol_type = genomic DNA
tcaccgccgcggcccgggtt

SEQ ID NO: 24818 - DNA, 21 bp, Homo sapiens
  source 1..21: mol_type = genomic DNA
tcaccgccgcggcccgggttc

SEQ ID NO: 24819 - DNA, 22 bp, Homo sapiens
  source 1..22: mol_type = genomic DNA
tcaccgccgcggcccgggttcg

SEQ ID NO: 24820 - DNA, 24 bp, Homo sapiens
  source 1..24: mol_type = genomic DNA
tcaccgccgcggcccgggttcgat

SEQ ID NO: 24821 - DNA, 25 bp, Homo sapiens
  source 1..25: mol_type = genomic DNA
tcaccgccgcggcccgggttcgatt

SEQ ID NO: 24822 - DNA, 41 bp, Homo sapiens
  source 1..41: mol_type = genomic DNA
tcaccgccgcggcccgggttcgattcccggccagggaacca

SEQ ID NO: 24823 - DNA, 31 bp, Homo sapiens
  source 1..31: mol_type = genomic DNA
tcaccgccgcggcccgggttcgattcccggt

SEQ ID NO: 24824 - DNA, 32 bp, Homo sapiens
  source 1..32: mol_type = genomic DNA
tcaccgccgcggcccgggttcgattcccggtc

SEQ ID NO: 24825 - DNA, 33 bp, Homo sapiens
  source 1..33: mol_type = genomic DNA
tcaccgccgcggcccgggttcgattcccggtca

SEQ ID NO: 24826 - DNA, 34 bp, Homo sapiens
  source 1..34: mol_type = genomic DNA
tcaccgccgcggcccgggttcgattcccggtcag

SEQ ID NO: 24827 - DNA, 35 bp, Homo sapiens
  source 1..35: mol_type = genomic DNA
tcaccgccgcggcccgggttcgattcccggtcagg

SEQ ID NO: 24828 - DNA, 41 bp, Homo sapiens
  source 1..41: mol_type = genomic DNA
tcaccgccgcggcccgggttcgattcccggtcaggaaacca

SEQ ID NO: 24829 - DNA, 36 bp, Homo sapiens
  source 1..36: mol_type = genomic DNA
tcaccgccgcggcccgggttcgattcccggtcaggg

SEQ ID NO: 24830 - DNA, 37 bp, Homo sapiens
  source 1..37: mol_type = genomic DNA
tcaccgccgcggcccgggttcgattcccggtcaggga

SEQ ID NO: 24831 - DNA, 38 bp, Homo sapiens
  source 1..38: mol_type = genomic DNA
tcaccgccgcggcccgggttcgattcccggtcagggaa

SEQ ID NO: 24832 - DNA, 39 bp, Homo sapiens
  source 1..39: mol_type = genomic DNA
tcaccgccgcggcccgggttcgattcccggtcagggaac

SEQ ID NO: 24833 - DNA, 40 bp, Homo sapiens
  source 1..40: mol_type = genomic DNA
tcaccgccgcggcccgggttcgattcccggtcagggaacc

SEQ ID NO: 24834 - DNA, 41 bp, Homo sapiens
  source 1..41: mol_type = genomic DNA
tcaccgccgcggcccgggttcgattcccggtcagggaacca

SEQ ID NO: 24835 - DNA, 21 bp, Homo sapiens
  source 1..21: mol_type = genomic DNA
tcacgcgggagaccggggttc

SEQ ID NO: 24836 - DNA, 30 bp, Homo sapiens
  source 1..30: mol_type = genomic DNA
tcacgcgggagaccggggttcaattccccg

SEQ ID NO: 24837 - DNA, 31 bp, Homo sapiens
  source 1..31: mol_type = genomic DNA
tcacgcgggagaccggggttcaattccccga

SEQ ID NO: 24838 - DNA, 32 bp, Homo sapiens
  source 1..32: mol_type = genomic DNA
tcacgcgggagaccggggttcaattccccgac

SEQ ID NO: 24839 - DNA, 33 bp, Homo sapiens
  source 1..33: mol_type = genomic DNA
tcacgcgggagaccggggttcaattccccgacg

SEQ ID NO: 24840 - DNA, 34 bp, Homo sapiens
  source 1..34: mol_type = genomic DNA
tcacgcgggagaccggggttcaattccccgacgg

SEQ ID NO: 24841 - DNA, 35 bp, Homo sapiens
  source 1..35: mol_type = genomic DNA
tcacgcgggagaccggggttcaattccccgacggg

SEQ ID NO: 24842 - DNA, 36 bp, Homo sapiens
  source 1..36: mol_type = genomic DNA
tcacgcgggagaccggggttcaattccccgacgggg

SEQ ID NO: 24843 - DNA, 37 bp, Homo sapiens
  source 1..37: mol_type = genomic DNA
tcacgcgggagaccggggttcaattccccgacgggga

SEQ ID NO: 24844 - DNA, 38 bp, Homo sapiens
  source 1..38: mol_type = genomic DNA
tcacgcgggagaccggggttcaattccccgacggggag

SEQ ID NO: 24845 - DNA, 39 bp, Homo sapiens
  source 1..39: mol_type = genomic DNA
tcacgcgggagaccggggttcaattccccgacggggagc

SEQ ID NO: 24846 - DNA, 40 bp, Homo sapiens
  source 1..40: mol_type = genomic DNA
tcacgcgggagaccggggttcaattccccgacggggagcc

SEQ ID NO: 24847 - DNA, 41 bp, Homo sapiens
  source 1..41: mol_type = genomic DNA
tcacgcgggagaccggggttcaattccccgacggggagcca

SEQ ID NO: 24848 - DNA, 23 bp, Homo sapiens
  source 1..23: mol_type = genomic DNA
tcacgcgggagaccggggttcga

SEQ ID NO: 24849 - DNA, 29 bp, Homo sapiens
  source 1..29: mol_type = genomic DNA
tcacgcgggagaccggggttcgattcccc

SEQ ID NO: 24850 - DNA, 30 bp, Homo sapiens
  source 1..30: mol_type = genomic DNA
tcacgcgggagaccggggttcgattccccg

SEQ ID NO: 24851 - DNA, 31 bp, Homo sapiens
  source 1..31: mol_type = genomic DNA
tcacgcgggagaccggggttcgattccccga

SEQ ID NO: 24852 - DNA, 32 bp, Homo sapiens
  source 1..32: mol_type = genomic DNA
tcacgcgggagaccggggttcgattccccgac

SEQ ID NO: 24853 - DNA, 33 bp, Homo sapiens
  source 1..33: mol_type = genomic DNA
tcacgcgggagaccggggttcgattccccgacg

SEQ ID NO: 24854 - DNA, 34 bp, Homo sapiens
  source 1..34: mol_type = genomic DNA
tcacgcgggagaccggggttcgattccccgacgg

SEQ ID NO: 24855 - DNA, 35 bp, Homo sapiens
  source 1..35: mol_type = genomic DNA
tcacgcgggagaccggggttcgattccccgacggg

SEQ ID NO: 24856 - DNA, 36 bp, Homo sapiens
  source 1..36: mol_type = genomic DNA
tcacgcgggagaccggggttcgattccccgacgggg

SEQ ID NO: 24857 - DNA, 37 bp, Homo sapiens
  source 1..37: mol_type = genomic DNA
tcacgcgggagaccggggttcgattccccgacgggga

SEQ ID NO: 24858 - DNA, 38 bp, Homo sapiens
  source 1..38: mol_type = genomic DNA
tcacgcgggagaccggggttcgattccccgacggggag

SEQ ID NO: 24859 - DNA, 39 bp, Homo sapiens
  source 1..39: mol_type = genomic DNA
tcacgcgggagaccggggttcgattccccgacggggagc

SEQ ID NO: 24860 - DNA, 40 bp, Homo sapiens
  source 1..40: mol_type = genomic DNA
tcacgcgggagaccggggttcgattccccgacggggagcc

SEQ ID NO: 24861 - DNA, 41 bp, Homo sapiens
  source 1..41: mol_type = genomic DNA
tcacgcgggagaccggggttcgattccccgacggggagcca

SEQ ID NO: 24862 - DNA, 16 bp, Homo sapiens
  source 1..16: mol_type = genomic DNA
tcacgtcggggtcacc

SEQ ID NO: 24863 - DNA, 17 bp, Homo sapiens
  source 1..17: mol_type = genomic DNA
tcacgtcggggtcacca

SEQ ID NO: 24864 - DNA, 18 bp, Homo sapiens
  source 1..18: mol_type = genomic DNA
tcacgtctgctttacacg

SEQ ID NO: 24865 - DNA, 19 bp, Homo sapiens
  source 1..19: mol_type = genomic DNA
tcacgtctgctttacacgc

SEQ ID NO: 24866 - DNA, 30 bp, Homo sapiens
  source 1..30: mol_type = genomic DNA
tcacgtctgctttacacgcagaaggtcctg

SEQ ID NO: 24867 - DNA, 16 bp, Homo sapiens
  source 1..16: mol_type = genomic DNA
tcacgttcgcctcaca

SEQ ID NO: 24868 - DNA, 18 bp, Homo sapiens
  source 1..18: mol_type = genomic DNA
tcacgttcgcctcacacg

SEQ ID NO: 24869 - DNA, 32 bp, Homo sapiens
  source 1..32: mol_type = genomic DNA
tcacgttcgcctcacacgcgaaaggtccccgg

SEQ ID NO: 24870 - DNA, 16 bp, Homo sapiens
  source 1..16: mol_type = genomic DNA
tcagaagattccaggt

SEQ ID NO: 24871 - DNA, 18 bp, Homo sapiens
  source 1..18: mol_type = genomic DNA
tcagaagattccaggttc

SEQ ID NO: 24872 - DNA, 19 bp, Homo sapiens
  source 1..19: mol_type = genomic DNA
tcagaagattccaggttcg

SEQ ID NO: 24873 - DNA, 21 bp, Homo sapiens
  source 1..21: mol_type = genomic DNA
tcagaagattccaggttcgac

SEQ ID NO: 24874 - DNA, 22 bp, Homo sapiens
  source 1..22: mol_type = genomic DNA
tcagaagattccaggttcgact

SEQ ID NO: 24875 - DNA, 29 bp, Homo sapiens
  source 1..29: mol_type = genomic DNA
tcagaagattccaggttcgactcctggct

SEQ ID NO: 24876 - DNA, 32 bp, Homo sapiens
  source 1..32: mol_type = genomic DNA
tcagaagattccaggttcgactcctggctggc

SEQ ID NO: 24877 - DNA, 33 bp, Homo sapiens
  source 1..33: mol_type = genomic DNA
tcagaagattccaggttcgactcctggctggct

SEQ ID NO: 24878 - DNA, 34 bp, Homo sapiens
  source 1..34: mol_type = genomic DNA
tcagaagattccaggttcgactcctggctggctc

SEQ ID NO: 24879 - DNA, 35 bp, Homo sapiens
  source 1..35: mol_type = genomic DNA
tcagaagattccaggttcgactcctggctggctcg

SEQ ID NO: 24880 - DNA, 36 bp, Homo sapiens
  source 1..36: mol_type = genomic DNA
tcagaagattccaggttcgactcctggctggctcgc

SEQ ID NO: 24881 - DNA, 37 bp, Homo sapiens
  source 1..37: mol_type = genomic DNA
tcagaagattccaggttcgactcctggctggctcgcc

SEQ ID NO: 24882 - DNA, 38 bp, Homo sapiens
  source 1..38: mol_type = genomic DNA
tcagaagattccaggttcgactcctggctggctcgcca

SEQ ID NO: 24883 - DNA, 18 bp, Homo sapiens
  source 1..18: mol_type = genomic DNA
tcagaagattctaggttc

SEQ ID NO: 24884 - DNA, 22 bp, Homo sapiens
  source 1..22: mol_type = genomic DNA
tcagaagattctaggttcgact

SEQ ID NO: 24885 - DNA, 28 bp, Homo sapiens
  source 1..28: mol_type = genomic DNA
tcagaagattctaggttcgactcctggc

SEQ ID NO: 24886 - DNA, 30 bp, Homo sapiens
  source 1..30: mol_type = genomic DNA
tcagaagattctaggttcgactcctggctg

SEQ ID NO: 24887 - DNA, 32 bp, Homo sapiens
  source 1..32: mol_type = genomic DNA
tcagaagattctaggttcgactcctggctggc

SEQ ID NO: 24888 - DNA, 33 bp, Homo sapiens
  source 1..33: mol_type = genomic DNA
tcagaagattctaggttcgactcctggctggct

SEQ ID NO: 24889 - DNA, 34 bp, Homo sapiens
  source 1..34: mol_type = genomic DNA
tcagaagattctaggttcgactcctggctggctc

SEQ ID NO: 24890 - DNA, 35 bp, Homo sapiens
  source 1..35: mol_type = genomic DNA
tcagaagattctaggttcgactcctggctggctcg

SEQ ID NO: 24891 - DNA, 36 bp, Homo sapiens
  source 1..36: mol_type = genomic DNA
tcagaagattctaggttcgactcctggctggctcgc

SEQ ID NO: 24892 - DNA, 37 bp, Homo sapiens
  source 1..37: mol_type = genomic DNA
tcagaagattctaggttcgactcctggctggctcgcc

SEQ ID NO: 24893 - DNA, 38 bp, Homo sapiens
  source 1..38: mol_type = genomic DNA
tcagaagattctaggttcgactcctggctggctcgcca

SEQ ID NO: 24894 - DNA, 17 bp, Homo sapiens
  source 1..17: mol_type = genomic DNA
tcagaagattgagggtt

SEQ ID NO: 24895 - DNA, 18 bp, Homo sapiens
  source 1..18: mol_type = genomic DNA
tcagaagattgagggttc

SEQ ID NO: 24896 - DNA, 19 bp, Homo sapiens
  source 1..19: mol_type = genomic DNA
tcagaagattgagggttcg

SEQ ID NO: 24897 - DNA, 33 bp, Homo sapiens
  source 1..33: mol_type = genomic DNA
tcagaagattgagggttcgaatccctccgtggt

SEQ ID NO: 24898 - DNA, 35 bp, Homo sapiens
  source 1..35: mol_type = genomic DNA
tcagaagattgagggttcgaatccctccgtggtta

SEQ ID NO: 24899 - DNA, 36 bp, Homo sapiens
  source 1..36: mol_type = genomic DNA
tcagaagattgagggttcgaatccctccgtggttac

SEQ ID NO: 24900 - DNA, 37 bp, Homo sapiens
  source 1..37: mol_type = genomic DNA
tcagaagattgagggttcgaatccctccgtggttacc

SEQ ID NO: 24901 - DNA, 35 bp, Homo sapiens
  source 1..35: mol_type = genomic DNA
tcagaagattgagggttcgaatcccttcgtggtta

SEQ ID NO: 24902 - DNA, 36 bp, Homo sapiens
  source 1..36: mol_type = genomic DNA
tcagaagattgagggttcgaatcccttcgtggttac

SEQ ID NO: 24903 - DNA, 37 bp, Homo sapiens
  source 1..37: mol_type = genomic DNA
tcagaagattgagggttcgaatcccttcgtggttacc

SEQ ID NO: 24904 - DNA, 35 bp, Homo sapiens
  source 1..35: mol_type = genomic DNA
tcagaagattgagggttcgaatcccttcgtggttg

SEQ ID NO: 24905 - DNA, 36 bp, Homo sapiens
  source 1..36: mol_type = genomic DNA
tcagaagattgagggttcgaatcccttcgtggttgc

SEQ ID NO: 24906 - DNA, 37 bp, Homo sapiens
  source 1..37: mol_type = genomic DNA
tcagaagattgagggttcgaatcccttcgtggttgcc

SEQ ID NO: 24907 - DNA, 38 bp, Homo sapiens
  source 1..38: mol_type = genomic DNA
tcagaagattgagggttcgaatcccttcgtggttgcca

SEQ ID NO: 24908 - DNA, 32 bp, Homo sapiens
  source 1..32: mol_type = genomic DNA
tcagaagattgagggttcgagtcccttcgtgg

SEQ ID NO: 24909 - DNA, 34 bp, Homo sapiens
  source 1..34: mol_type = genomic DNA
tcagaagattgagggttcgagtcccttcgtggtc

SEQ ID NO: 24910 - DNA, 35 bp, Homo sapiens
  source 1..35: mol_type = genomic DNA
tcagaagattgagggttcgagtcccttcgtggtcg

SEQ ID NO: 24911 - DNA, 36 bp, Homo sapiens
  source 1..36: mol_type = genomic DNA
tcagaagattgagggttcgagtcccttcgtggtcgc

SEQ ID NO: 24912 - DNA, 37 bp, Homo sapiens
  source 1..37: mol_type = genomic DNA
tcagaagattgagggttcgagtcccttcgtggtcgcc

SEQ ID NO: 24913 - DNA, 38 bp, Homo sapiens
  source 1..38: mol_type = genomic DNA
tcagaagattgagggttcgagtcccttcgtggtcgcca

SEQ ID NO: 24914 - DNA, 18 bp, Homo sapiens
  source 1..18: mol_type = genomic DNA
tcagaagattgcaggttc

SEQ ID NO: 24915 - DNA, 19 bp, Homo sapiens
  source 1..19: mol_type = genomic DNA
tcagaagattgcaggttcg

SEQ ID NO: 24916 - DNA, 22 bp, Homo sapiens
  source 1..22: mol_type = genomic DNA
tcagaagattgcaggttcgagt

SEQ ID NO: 24917 - DNA, 23 bp, Homo sapiens
  source 1..23: mol_type = genomic DNA
tcagaagattgcaggttcgagtc

SEQ ID NO: 24918 - DNA, 29 bp, Homo sapiens
  source 1..29: mol_type = genomic DNA
tcagaagattgcaggttcgagtcctgccg

SEQ ID NO: 24919 - DNA, 33 bp, Homo sapiens
  source 1..33: mol_type = genomic DNA
tcagaagattgcaggttcgagtcctgccgcggt

SEQ ID NO: 24920 - DNA, 34 bp, Homo sapiens
  source 1..34: mol_type = genomic DNA
tcagaagattgcaggttcgagtcctgccgcggtc

SEQ ID NO: 24921 - DNA, 35 bp, Homo sapiens
  source 1..35: mol_type = genomic DNA
tcagaagattgcaggttcgagtcctgccgcggtcg

SEQ ID NO: 24922 - DNA, 36 bp, Homo sapiens
  source 1..36: mol_type = genomic DNA
tcagaagattgcaggttcgagtcctgccgcggtcgc

SEQ ID NO: 24923 - DNA, 37 bp, Homo sapiens
  source 1..37: mol_type = genomic DNA
tcagaagattgcaggttcgagtcctgccgcggtcgcc

SEQ ID NO: 24924 - DNA, 38 bp, Homo sapiens
  source 1..38: mol_type = genomic DNA
tcagaagattgcaggttcgagtcctgccgcggtcgcca

SEQ ID NO: 24925 - DNA, 16 bp, Homo sapiens
  source 1..16: mol_type = genomic DNA
tcagaaggctgcgtgt

SEQ ID NO: 24926 - DNA, 17 bp, Homo sapiens
  source 1..17: mol_type = genomic DNA
tcagaaggctgcgtgtt

SEQ ID NO: 24927 - DNA, 18 bp, Homo sapiens
  source 1..18: mol_type = genomic DNA
tcagaaggctgcgtgttc

SEQ ID NO: 24928 - DNA, 19 bp, Homo sapiens
  source 1..19: mol_type = genomic DNA
tcagaaggctgcgtgttcg

SEQ ID NO: 24929 - DNA, 23 bp, Homo sapiens
  source 1..23: mol_type = genomic DNA
tcagaaggctgcgtgttcgaatc

SEQ ID NO: 24930 - DNA, 24 bp, Homo sapiens
  source 1..24: mol_type = genomic DNA
tcagaaggctgcgtgttcgaatca

SEQ ID NO: 24931 - DNA, 26 bp, Homo sapiens
  source 1..26: mol_type = genomic DNA
tcagaaggctgcgtgttcgaatcacg

SEQ ID NO: 24932 - DNA, 27 bp, Homo sapiens
  source 1..27: mol_type = genomic DNA
tcagaaggctgcgtgttcgaatcacgt

SEQ ID NO: 24933 - DNA, 28 bp, Homo sapiens
  source 1..28: mol_type = genomic DNA
tcagaaggctgcgtgttcgaatcacgtc

SEQ ID NO: 24934 - DNA, 29 bp, Homo sapiens
  source 1..29: mol_type = genomic DNA
tcagaaggctgcgtgttcgaatcacgtcg

SEQ ID NO: 24935 - DNA, 30 bp, Homo sapiens
  source 1..30: mol_type = genomic DNA
tcagaaggctgcgtgttcgaatcacgtcgg

SEQ ID NO: 24936 - DNA, 31 bp, Homo sapiens
  source 1..31: mol_type = genomic DNA
tcagaaggctgcgtgttcgaatcacgtcggg

SEQ ID NO: 24937 - DNA, 32 bp, Homo sapiens
  source 1..32: mol_type = genomic DNA
tcagaaggctgcgtgttcgaatcacgtcgggg

SEQ ID NO: 24938 - DNA, 33 bp, Homo sapiens
  source 1..33: mol_type = genomic DNA
tcagaaggctgcgtgttcgaatcacgtcggggt

SEQ ID NO: 24939 - DNA, 34 bp, Homo sapiens
  source 1..34: mol_type = genomic DNA
tcagaaggctgcgtgttcgaatcacgtcggggtc

SEQ ID NO: 24940 - DNA, 35 bp, Homo sapiens
  source 1..35: mol_type = genomic DNA
tcagaaggctgcgtgttcgaatcacgtcggggtca

SEQ ID NO: 24941 - DNA, 36 bp, Homo sapiens
  source 1..36: mol_type = genomic DNA
tcagaaggctgcgtgttcgaatcacgtcggggtcac

SEQ ID NO: 24942 - DNA, 37 bp, Homo sapiens
  source 1..37: mol_type = genomic DNA
tcagaaggctgcgtgttcgaatcacgtcggggtcacc

SEQ ID NO: 24943 - DNA, 38 bp, Homo sapiens
  source 1..38: mol_type = genomic DNA
tcagaaggctgcgtgttcgaatcacgtcggggtcacca

SEQ ID NO: 24944 - DNA, 16 bp, Homo sapiens
  source 1..16: mol_type = genomic DNA
tcagaaggttgcgtgt

SEQ ID NO: 24945 - DNA, 18 bp, Homo sapiens
  source 1..18: mol_type = genomic DNA
tcagaaggttgcgtgttc

SEQ ID NO: 24946 - DNA, 19 bp, Homo sapiens
  source 1..19: mol_type = genomic DNA
tcagaaggttgcgtgttca

SEQ ID NO: 24947 - DNA, 23 bp, Homo sapiens
  source 1..23: mol_type = genomic DNA
tcagaaggttgcgtgttcaaatc

SEQ ID NO: 24948 - DNA, 29 bp, Homo sapiens
  source 1..29: mol_type = genomic DNA
tcagaaggttgcgtgttcaaatcacgtcg

SEQ ID NO: 24949 - DNA, 30 bp, Homo sapiens
  source 1..30: mol_type = genomic DNA
tcagaaggttgcgtgttcaaatcacgtcgg

SEQ ID NO: 24950 - DNA, 31 bp, Homo sapiens
  source 1..31: mol_type = genomic DNA
tcagaaggttgcgtgttcaaatcacgtcggg

SEQ ID NO: 24951 - DNA, 33 bp, Homo sapiens
  source 1..33: mol_type = genomic DNA
tcagaaggttgcgtgttcaaatcacgtcggggt

SEQ ID NO: 24952 - DNA, 34 bp, Homo sapiens
  source 1..34: mol_type = genomic DNA
tcagaaggttgcgtgttcaaatcacgtcggggtc

SEQ ID NO: 24953 - DNA, 35 bp, Homo sapiens
  source 1..35: mol_type = genomic DNA
tcagaaggttgcgtgttcaaatcacgtcggggtca

SEQ ID NO: 24954 - DNA, 36 bp, Homo sapiens
  source 1..36: mol_type = genomic DNA
tcagaaggttgcgtgttcaaatcacgtcggggtcac

SEQ ID NO: 24955 - DNA, 37 bp, Homo sapiens
  source 1..37: mol_type = genomic DNA
tcagaaggttgcgtgttcaaatcacgtcggggtcacc

SEQ ID NO: 24956 - DNA, 38 bp, Homo sapiens
  source 1..38: mol_type = genomic DNA
tcagaaggttgcgtgttcaaatcacgtcggggtcacca

SEQ ID NO: 24957 - DNA, 29 bp, Homo sapiens
  source 1..29: mol_type = genomic DNA
tcagaaggttgcgtgttcaagtcacgtcg

SEQ ID NO: 24958 - DNA, 30 bp, Homo sapiens
  source 1..30: mol_type = genomic DNA
tcagaaggttgcgtgttcaagtcacgtcgg

SEQ ID NO: 24959 - DNA, 31 bp, Homo sapiens
  source 1..31: mol_type = genomic DNA
tcagaaggttgcgtgttcaagtcacgtcggg

SEQ ID NO: 24960 - DNA, 32 bp, Homo sapiens
  source 1..32: mol_type = genomic DNA
tcagaaggttgcgtgttcaagtcacgtcgggg

SEQ ID NO: 24961 - DNA, 33 bp, Homo sapiens
  source 1..33: mol_type = genomic DNA
tcagaaggttgcgtgttcaagtcacgtcggggt

SEQ ID NO: 24962 - DNA, 34 bp, Homo sapiens
  source 1..34: mol_type = genomic DNA
tcagaaggttgcgtgttcaagtcacgtcggggtc

SEQ ID NO: 24963 - DNA, 35 bp, Homo sapiens
  source 1..35: mol_type = genomic DNA
tcagaaggttgcgtgttcaagtcacgtcggggtca

SEQ ID NO: 24964 - DNA, 36 bp, Homo sapiens
  source 1..36: mol_type = genomic DNA
tcagaaggttgcgtgttcaagtcacgtcggggtcac

SEQ ID NO: 24965 - DNA, 37 bp, Homo sapiens
  source 1..37: mol_type = genomic DNA
tcagaaggttgcgtgttcaagtcacgtcggggtcacc

SEQ ID NO: 24966 - DNA, 38 bp, Homo sapiens
  source 1..38: mol_type = genomic DNA
tcagaaggttgcgtgttcaagtcacgtcggggtcacca

SEQ ID NO: 24967 - DNA, 17 bp, Homo sapiens
  source 1..17: mol_type = genomic DNA
tcagaggttcaattcct

SEQ ID NO: 24968 - DNA, 16 bp, Homo sapiens
  source 1..16: mol_type = genomic DNA
tcagattgtgaatctg

SEQ ID NO: 24969 - DNA, 17 bp, Homo sapiens
  source 1..17: mol_type = genomic DNA
tcagattgtgaatctga

SEQ ID NO: 24970 - DNA, 18 bp, Homo sapiens
  source 1..18: mol_type = genomic DNA
tcagattgtgaatctgac

SEQ ID NO: 24971 - DNA, 19 bp, Homo sapiens
  source 1..19: mol_type = genomic DNA
tcagattgtgaatctgaca

SEQ ID NO: 24972 - DNA, 24 bp, Homo sapiens
  source 1..24: mol_type = genomic DNA
tcagattgtgaatctgacaacaga

SEQ ID NO: 24973 - DNA, 25 bp, Homo sapiens
  source 1..25: mol_type = genomic DNA
tcagattgtgaatctgacaacagag

SEQ ID NO: 24974 - DNA, 26 bp, Homo sapiens
  source 1..26: mol_type = genomic DNA
tcagattgtgaatctgacaacagagg

SEQ ID NO: 24975 - DNA, 27 bp, Homo sapiens
  source 1..27: mol_type = genomic DNA
tcagattgtgaatctgacaacagaggc

SEQ ID NO: 24976 - DNA, 28 bp, Homo sapiens
  source 1..28: mol_type = genomic DNA
tcagattgtgaatctgacaacagaggct

SEQ ID NO: 24977 - DNA, 29 bp, Homo sapiens
  source 1..29: mol_type = genomic DNA
tcagattgtgaatctgacaacagaggctt

SEQ ID NO: 24978 - DNA, 30 bp, Homo sapiens
  source 1..30: mol_type = genomic DNA
tcagattgtgaatctgacaacagaggctta

SEQ ID NO: 24979 - DNA, 31 bp, Homo sapiens
  source 1..31: mol_type = genomic DNA
tcagattgtgaatctgacaacagaggcttac

SEQ ID NO: 24980 - DNA, 32 bp, Homo sapiens
  source 1..32: mol_type = genomic DNA
tcagattgtgaatctgacaacagaggcttacg

SEQ ID NO: 24981 - DNA, 33 bp, Homo sapiens
  source 1..33: mol_type = genomic DNA
tcagattgtgaatctgacaacagaggcttacga

SEQ ID NO: 24982 - DNA, 34 bp, Homo sapiens
  source 1..34: mol_type = genomic DNA
tcagattgtgaatctgacaacagaggcttacgac

SEQ ID NO: 24983 - DNA, 35 bp, Homo sapiens
  source 1..35: mol_type = genomic DNA
tcagattgtgaatctgacaacagaggcttacgacc

SEQ ID NO: 24984 - DNA, 36 bp, Homo sapiens
  source 1..36: mol_type = genomic DNA
tcagattgtgaatctgacaacagaggcttacgaccc

SEQ ID NO: 24985 - DNA, 37 bp, Homo sapiens
  source 1..37: mol_type = genomic DNA
tcagattgtgaatctgacaacagaggcttacgacccc

SEQ ID NO: 24986 - DNA, 38 bp, Homo sapiens
  source 1..38: mol_type = genomic DNA
tcagattgtgaatctgacaacagaggcttacgacccct

SEQ ID NO: 24987 - DNA, 39 bp, Homo sapiens
  source 1..39: mol_type = genomic DNA
tcagattgtgaatctgacaacagaggcttacgacccctt

SEQ ID NO: 24988 - DNA, 40 bp, Homo sapiens
  source 1..40: mol_type = genomic DNA
tcagattgtgaatctgacaacagaggcttacgacccctta

SEQ ID NO: 24989 - DNA, 41 bp, Homo sapiens
  source 1..41: mol_type = genomic DNA
tcagattgtgaatctgacaacagaggcttacgaccccttat

SEQ ID NO: 24990 - DNA, 42 bp, Homo sapiens
  source 1..42: mol_type = genomic DNA
tcagattgtgaatctgacaacagaggcttacgaccccttatt

SEQ ID NO: 24991 - DNA, 46 bp, Homo sapiens
  source 1..46: mol_type = genomic DNA
tcagattgtgaatctgacaacagaggcttacgaccccttatttacc

SEQ ID NO: 24992 - DNA, 47 bp, Homo sapiens
  source 1..47: mol_type = genomic DNA
tcagattgtgaatctgacaacagaggcttacgaccccttatttaccc

SEQ ID NO: 24993 - DNA, 48 bp, Homo sapiens
  source 1..48: mol_type = genomic DNA
tcagattgtgaatctgacaacagaggcttacgaccccttatttacccc

SEQ ID NO: 24994 - DNA, 19 bp, Homo sapiens
  source 1..19: mol_type = genomic DNA
tcagcactctggactctga

SEQ ID NO: 24995 - DNA, 23 bp, Homo sapiens
  source 1..23: mol_type = genomic DNA
tcagcactctggactctgaatcc

SEQ ID NO: 24996 - DNA, 38 bp, Homo sapiens
  source 1..38: mol_type = genomic DNA
tcagcactctggactctgaatccagcgatccgagttca

SEQ ID NO: 24997 - DNA, 16 bp, Homo sapiens
  source 1..16: mol_type = genomic DNA
tcagcctccggagctg

SEQ ID NO: 24998 - DNA, 24 bp, Homo sapiens
  source 1..24: mol_type = genomic DNA
tcagcctccggagctggggattgt

SEQ ID NO: 24999 - DNA, 31 bp, Homo sapiens
  source 1..31: mol_type = genomic DNA
tcagcctccggagctggggattgtgggttcg

SEQ ID NO: 25000 - DNA, 21 bp, Homo sapiens
  source 1..21: mol_type = genomic DNA
tcagctaaataagctatcggg

SEQ ID NO: 25001 - DNA, 22 bp, Homo sapiens
  source 1..22: mol_type = genomic DNA
tcagctaaataagctatcgggc

SEQ ID NO: 25002 - DNA, 23 bp, Homo sapiens
  source 1..23: mol_type = genomic DNA
tcagctaaataagctatcgggcc

SEQ ID NO: 25003 - DNA, 24 bp, Homo sapiens
  source 1..24: mol_type = genomic DNA
tcagctaaataagctatcgggccc

SEQ ID NO: 25004 - DNA, 25 bp, Homo sapiens
  source 1..25: mol_type = genomic DNA
tcagctaaataagctatcgggccca

SEQ ID NO: 25005 - DNA, 26 bp, Homo sapiens
  source 1..26: mol_type = genomic DNA
tcagctaaataagctatcgggcccat

SEQ ID NO: 25006 - DNA, 27 bp, Homo sapiens
  source 1..27: mol_type = genomic DNA
tcagctaaataagctatcgggcccata

SEQ ID NO: 25007 - DNA, 28 bp, Homo sapiens
  source 1..28: mol_type = genomic DNA
tcagctaaataagctatcgggcccatac

SEQ ID NO: 25008 - DNA, 29 bp, Homo sapiens
  source 1..29: mol_type = genomic DNA
tcagctaaataagctatcgggcccatacc

SEQ ID NO: 25009 - DNA, 30 bp, Homo sapiens
  source 1..30: mol_type = genomic DNA
tcagctaaataagctatcgggcccataccc

SEQ ID NO: 25010 - DNA, 31 bp, Homo sapiens
  source 1..31: mol_type = genomic DNA
tcagctaaataagctatcgggcccatacccc

SEQ ID NO: 25011 - DNA, 35 bp, Homo sapiens
  source 1..35: mol_type = genomic DNA
tcagctaaataagctatcgggcccataccccgaaa

SEQ ID NO: 25012 - DNA, 42 bp, Homo sapiens
  source 1..42: mol_type = genomic DNA
tcagctaaataagctatcgggcccataccccgaaaatgttgg

SEQ ID NO: 25013 - DNA, 43 bp, Homo sapiens
  source 1..43: mol_type = genomic DNA
tcagctaaataagctatcgggcccataccccgaaaatgttggt

SEQ ID NO: 25014 - DNA, 44 bp, Homo sapiens
  source 1..44: mol_type = genomic DNA
tcagctaaataagctatcgggcccataccccgaaaatgttggtt

SEQ ID NO: 25015 - DNA, 46 bp, Homo sapiens
  source 1..46: mol_type = genomic DNA
tcagctaaataagctatcgggcccataccccgaaaatgttggttat

SEQ ID NO: 25016 - DNA, 22 bp, Homo sapiens
  source 1..22: mol_type = genomic DNA
tcagctggtagagcggaggact

SEQ ID NO: 25017 - DNA, 26 bp, Homo sapiens
  source 1..26: mol_type = genomic DNA
tcagctggtagagcggaggactgtag

SEQ ID NO: 25018 - DNA, 16 bp, Homo sapiens
  source 1..16: mol_type = genomic DNA
tcaggatggccgagcg

SEQ ID NO: 25019 - DNA, 17 bp, Homo sapiens
  source 1..17: mol_type = genomic DNA
tcaggatggccgagcgg

SEQ ID NO: 25020 - DNA, 18 bp, Homo sapiens
  source 1..18: mol_type = genomic DNA
tcaggatggccgagcggt

SEQ ID NO: 25021 - DNA, 19 bp, Homo sapiens
  source 1..19: mol_type = genomic DNA
tcaggatggccgagcggtc

SEQ ID NO: 25022 - DNA, 20 bp, Homo sapiens
  source 1..20: mol_type = genomic DNA
tcaggatggccgagcggtct

SEQ ID NO: 25023 - DNA, 21 bp, Homo sapiens
  source 1..21: mol_type = genomic DNA
tcaggatggccgagcggtcta

SEQ ID NO: 25024 - DNA, 23 bp, Homo sapiens
  source 1..23: mol_type = genomic DNA
tcaggatggccgagcggtctaag

SEQ ID NO: 25025 - DNA, 24 bp, Homo sapiens
  source 1..24: mol_type = genomic DNA
tcaggatggccgagcggtctaagg

SEQ ID NO: 25026 - DNA, 25 bp, Homo sapiens
  source 1..25: mol_type = genomic DNA
tcaggatggccgagcggtctaaggc

SEQ ID NO: 25027 - DNA, 29 bp, Homo sapiens
  source 1..29: mol_type = genomic DNA
tcaggatggccgagcggtctaaggcgctg

SEQ ID NO: 25028 - DNA, 30 bp, Homo sapiens
  source 1..30: mol_type = genomic DNA
tcaggatggccgagcggtctaaggcgctgc

SEQ ID NO: 25029 - DNA, 33 bp, Homo sapiens
  source 1..33: mol_type = genomic DNA
tcaggatggccgagcggtctaaggcgctgcgtt

SEQ ID NO: 25030 - DNA, 34 bp, Homo sapiens
  source 1..34: mol_type = genomic DNA
tcaggatggccgagcggtctaaggcgctgcgttc

SEQ ID NO: 25031 - DNA, 36 bp, Homo sapiens
  source 1..36: mol_type = genomic DNA
tcaggatggccgagcggtctaaggcgctgcgttcag

SEQ ID NO: 25032 - DNA, 16 bp, Homo sapiens
  source 1..16: mol_type = genomic DNA
tcaggatggccgagtg

SEQ ID NO: 25033 - DNA, 20 bp, Homo sapiens
  source 1..20: mol_type = genomic DNA
tcaggatggccgagtggtct

SEQ ID NO: 25034 - DNA, 21 bp, Homo sapiens
  source 1..21: mol_type = genomic DNA
tcaggatggccgagtggtcta

SEQ ID NO: 25035 - DNA, 22 bp, Homo sapiens
  source 1..22: mol_type = genomic DNA
tcaggatggccgagtggtctaa

SEQ ID NO: 25036 - DNA, 23 bp, Homo sapiens
  source 1..23: mol_type = genomic DNA
tcaggatggccgagtggtctaag

SEQ ID NO: 25037 - DNA, 25 bp, Homo sapiens
  source 1..25: mol_type = genomic DNA
tcaggatggccgagtggtctaaggc

SEQ ID NO: 25038 - DNA, 34 bp, Homo sapiens
  source 1..34: mol_type = genomic DNA
tcaggatggccgagtggtctaaggcgccagactc

SEQ ID NO: 25039 - DNA, 35 bp, Homo sapiens
  source 1..35: mol_type = genomic DNA
tcaggatggccgagtggtctaaggcgccagactca

SEQ ID NO: 25040 - DNA, 17 bp, Homo sapiens
  source 1..17: mol_type = genomic DNA
tcagggatgggttcgat

SEQ ID NO: 25041 - DNA, 18 bp, Homo sapiens
  source 1..18: mol_type = genomic DNA
tcagggatgggttcgatt

SEQ ID NO: 25042 - DNA, 19 bp, Homo sapiens
  source 1..19: mol_type = genomic DNA
tcagggatgggttcgattc

SEQ ID NO: 25043 - DNA, 20 bp, Homo sapiens
  source 1..20: mol_type = genomic DNA
tcagggatgggttcgattct

SEQ ID NO: 25044 - DNA, 21 bp, Homo sapiens
  source 1..21: mol_type = genomic DNA
tcagggatgggttcgattctc

SEQ ID NO: 25045 - DNA, 22 bp, Homo sapiens
  source 1..22: mol_type = genomic DNA
tcagggatgggttcgattctca

SEQ ID NO: 25046 - DNA, 26 bp, Homo sapiens
  source 1..26: mol_type = genomic DNA
tcagggatgggttcgattctcatagt

SEQ ID NO: 25047 - DNA, 27 bp, Homo sapiens
  source 1..27: mol_type = genomic DNA
tcagggatgggttcgattctcatagtc

SEQ ID NO: 25048 - DNA, 28 bp, Homo sapiens
  source 1..28: mol_type = genomic DNA
tcagggatgggttcgattctcatagtcc

SEQ ID NO: 25049 - DNA, 29 bp, Homo sapiens
  source 1..29: mol_type = genomic DNA
tcagggatgggttcgattctcatagtcct

SEQ ID NO: 25050 - DNA, 31 bp, Homo sapiens
  source 1..31: mol_type = genomic DNA
tcagggatgggttcgattctcatagtcctag

SEQ ID NO: 25051 - DNA, 32 bp, Homo sapiens
  source 1..32: mol_type = genomic DNA
tcagggatgggttcgattctcatagtcctagc

SEQ ID NO: 25052 - DNA, 33 bp, Homo sapiens
  source 1..33: mol_type = genomic DNA
tcagggatgggttcgattctcatagtcctagcc

SEQ ID NO: 25053 - DNA, 34 bp, Homo sapiens
  source 1..34: mol_type = genomic DNA
tcagggatgggttcgattctcatagtcctagcca

SEQ ID NO: 25054 - DNA, 16 bp, Homo sapiens
  source 1..16: mol_type = genomic DNA
tcaggggtagagcatt

SEQ ID NO: 25055 - DNA, 19 bp, Homo sapiens
  source 1..19: mol_type = genomic DNA
tcaggggtagagcatttga

SEQ ID NO: 25056 - DNA, 21 bp, Homo sapiens
  source 1..21: mol_type = genomic DNA
tcaggggtagagcatttgact

SEQ ID NO: 25057 - DNA, 24 bp, Homo sapiens
  source 1..24: mol_type = genomic DNA
tcaggggtagagcatttgactgca

SEQ ID NO: 25058 - DNA, 21 bp, Homo sapiens
  source 1..21: mol_type = genomic DNA
tcaggggttagagcactggtc

SEQ ID NO: 25059 - DNA, 22 bp, Homo sapiens
  source 1..22: mol_type = genomic DNA
tcaggggttagagcactggtct

SEQ ID NO: 25060 - DNA, 17 bp, Homo sapiens
  source 1..17: mol_type = genomic DNA
tcagggtcgtgggttcg

SEQ ID NO: 25061 - DNA, 21 bp, Homo sapiens
  source 1..21: mol_type = genomic DNA
tcagggtcgtgggttcgagcc

SEQ ID NO: 25062 - DNA, 31 bp, Homo sapiens
  source 1..31: mol_type = genomic DNA
tcagggtcgtgggttcgagccccacgttggg

SEQ ID NO: 25063 - DNA, 32 bp, Homo sapiens
  source 1..32: mol_type = genomic DNA
tcagggtcgtgggttcgagccccacgttgggc

SEQ ID NO: 25064 - DNA, 33 bp, Homo sapiens
  source 1..33: mol_type = genomic DNA
tcagggtcgtgggttcgagccccacgttgggcg

SEQ ID NO: 25065 - DNA, 34 bp, Homo sapiens
  source 1..34: mol_type = genomic DNA
tcagggtcgtgggttcgagccccacgttgggcgc

SEQ ID NO: 25066 - DNA, 35 bp, Homo sapiens
  source 1..35: mol_type = genomic DNA
tcagggtcgtgggttcgagccccacgttgggcgcc

SEQ ID NO: 25067 - DNA, 36 bp, Homo sapiens
  source 1..36: mol_type = genomic DNA
tcagggtcgtgggttcgagccccacgttgggcgcca

SEQ ID NO: 25068 - DNA, 17 bp, Homo sapiens
  source 1..17: mol_type = genomic DNA
tcagtaagttgcaatac

SEQ ID NO: 25069 - DNA, 18 bp, Homo sapiens
  source 1..18: mol_type = genomic DNA
tcagtaagttgcaatact

SEQ ID NO: 25070 - DNA, 20 bp, Homo sapiens
  source 1..20: mol_type = genomic DNA
tcagtaagttgcaatactta

SEQ ID NO: 25071 - DNA, 25 bp, Homo sapiens
  source 1..25: mol_type = genomic DNA
tcagtaagttgcaatacttaatttc

SEQ ID NO: 25072 - DNA, 27 bp, Homo sapiens
  source 1..27: mol_type = genomic DNA
tcagtaagttgcaatacttaatttctg

SEQ ID NO: 25073 - DNA, 28 bp, Homo sapiens
  source 1..28: mol_type = genomic DNA
tcagtaagttgcaatacttaatttctgc

SEQ ID NO: 25074 - DNA, 29 bp, Homo sapiens
  source 1..29: mol_type = genomic DNA
tcagtaagttgcaatacttaatttctgcc

SEQ ID NO: 25075 - DNA, 30 bp, Homo sapiens
  source 1..30: mol_type = genomic DNA
tcagtaagttgcaatacttaatttctgcca

SEQ ID NO: 25076 - DNA, 18 bp, Homo sapiens
  source 1..18: mol_type = genomic DNA
tcagtcagtagagcatca

SEQ ID NO: 25077 - DNA, 22 bp, Homo sapiens
  source 1..22: mol_type = genomic DNA
tcagtcgatagagcatgagact

SEQ ID NO: 25078 - DNA, 16 bp, Homo sapiens
  source 1..16: mol_type = genomic DNA
tcagtcggtagagcat

SEQ ID NO: 25079 - DNA, 20 bp, Homo sapiens
  source 1..20: mol_type = genomic DNA
tcagtcggtagagcataaga

SEQ ID NO: 25080 - DNA, 21 bp, Homo sapiens
  source 1..21: mol_type = genomic DNA
tcagtcggtagagcataagac

SEQ ID NO: 25081 - DNA, 22 bp, Homo sapiens
  source 1..22: mol_type = genomic DNA
tcagtcggtagagcataagact

SEQ ID NO: 25082 - DNA, 17 bp, Homo sapiens
  source 1..17: mol_type = genomic DNA
tcagtcggtagagcatc

SEQ ID NO: 25083 - DNA, 18 bp, Homo sapiens
  source 1..18: mol_type = genomic DNA
tcagtcggtagagcatca

SEQ ID NO: 25084 - DNA, 19 bp, Homo sapiens
  source 1..19: mol_type = genomic DNA
tcagtcggtagagcatcag

SEQ ID NO: 25085 - DNA, 20 bp, Homo sapiens
  source 1..20: mol_type = genomic DNA
tcagtcggtagagcatcaga

SEQ ID NO: 25086 - DNA, 21 bp, Homo sapiens
  source 1..21: mol_type = genomic DNA
tcagtcggtagagcatcagac

SEQ ID NO: 25087 - DNA, 22 bp, Homo sapiens
  source 1..22: mol_type = genomic DNA
tcagtcggtagagcatcagact

SEQ ID NO: 25088 - DNA, 23 bp, Homo sapiens
  source 1..23: mol_type = genomic DNA
tcagtcggtagagcatcagactt

SEQ ID NO: 25089 - DNA, 24 bp, Homo sapiens
  source 1..24: mol_type = genomic DNA
tcagtcggtagagcatcagacttt

SEQ ID NO: 25090 - DNA, 25 bp, Homo sapiens
  source 1..25: mol_type = genomic DNA
tcagtcggtagagcatcagactttt

SEQ ID NO: 25091 - DNA, 17 bp, Homo sapiens
  source 1..17: mol_type = genomic DNA
tcagtcggtagagcatg

SEQ ID NO: 25092 - DNA, 18 bp, Homo sapiens
  source 1..18: mol_type = genomic DNA
tcagtcggtagagcatga

SEQ ID NO: 25093 - DNA, 19 bp, Homo sapiens
  source 1..19: mol_type = genomic DNA
tcagtcggtagagcatgag

SEQ ID NO: 25094 - DNA, 20 bp, Homo sapiens
  source 1..20: mol_type = genomic DNA
tcagtcggtagagcatgaga

SEQ ID NO: 25095 - DNA, 21 bp, Homo sapiens
  source 1..21: mol_type = genomic DNA
tcagtcggtagagcatgagac

SEQ ID NO: 25096 - DNA, 22 bp, Homo sapiens
  source 1..22: mol_type = genomic DNA
tcagtcggtagagcatgagacc

SEQ ID NO: 25097 - DNA, 23 bp, Homo sapiens
  source 1..23: mol_type = genomic DNA
tcagtcggtagagcatgagaccc

SEQ ID NO: 25098 - DNA, 24 bp, Homo sapiens
  source 1..24: mol_type = genomic DNA
tcagtcggtagagcatgagaccct

SEQ ID NO: 25099 - DNA, 25 bp, Homo sapiens
  source 1..25: mol_type = genomic DNA
tcagtcggtagagcatgagaccctt

SEQ ID NO: 25100 - DNA, 26 bp, Homo sapiens
  source 1..26: mol_type = genomic DNA
tcagtcggtagagcatgagaccctta

SEQ ID NO: 25101 - DNA, 22 bp, Homo sapiens
  source 1..22: mol_type = genomic DNA
tcagtcggtagagcatgagact

SEQ ID NO: 25102 - DNA, 23 bp, Homo sapiens
  source 1..23: mol_type = genomic DNA
tcagtcggtagagcatgagactc

SEQ ID NO: 25103 - DNA, 24 bp, Homo sapiens
  source 1..24: mol_type = genomic DNA
tcagtcggtagagcatgagactct

SEQ ID NO: 25104 - DNA, 25 bp, Homo sapiens
  source 1..25: mol_type = genomic DNA
tcagtcggtagagcatgagactctt

SEQ ID NO: 25105 - DNA, 26 bp, Homo sapiens
  source 1..26: mol_type = genomic DNA
tcagtcggtagagcatgagactctta

SEQ ID NO: 25106 - DNA, 27 bp, Homo sapiens
  source 1..27: mol_type = genomic DNA
tcagtcggtagagcatgagactcttaa

SEQ ID NO: 25107 - DNA, 28 bp, Homo sapiens
  source 1..28: mol_type = genomic DNA
tcagtcggtagagcatgagactcttaat

SEQ ID NO: 25108 - DNA, 29 bp, Homo sapiens
  source 1..29: mol_type = genomic DNA
tcagtcggtagagcatgagactcttaatc

SEQ ID NO: 25109 - DNA, 30 bp, Homo sapiens
  source 1..30: mol_type = genomic DNA
tcagtcggtagagcatgagactcttaatct

SEQ ID NO: 25110 - DNA, 31 bp, Homo sapiens
  source 1..31: mol_type = genomic DNA
tcagtcggtagagcatgagactcttaatctc

SEQ ID NO: 25111 - DNA, 32 bp, Homo sapiens
  source 1..32: mol_type = genomic DNA
tcagtcggtagagcatgagactcttaatctca

SEQ ID NO: 25112 - DNA, 39 bp, Homo sapiens
  source 1..39: mol_type = genomic DNA
tcagtcggtagagcatgagactcttaatctcagggtcgt

SEQ ID NO: 25113 - DNA, 40 bp, Homo sapiens
  source 1..40: mol_type = genomic DNA
tcagtcggtagagcatgagactcttaatctcagggtcgtg

SEQ ID NO: 25114 - DNA, 41 bp, Homo sapiens
  source 1..41: mol_type = genomic DNA
tcagtcggtagagcatgagactcttaatctcagggtcgtgg

SEQ ID NO: 25115 - DNA, 44 bp, Homo sapiens
  source 1..44: mol_type = genomic DNA
tcagtcggtagagcatgagactcttaatctcagggtcgtgggtt

SEQ ID NO: 25116 - DNA, 46 bp, Homo sapiens
  source 1..46: mol_type = genomic DNA
tcagtcggtagagcatgagactcttaatctcagggtcgtgggttcg

SEQ ID NO: 25117 - DNA, 18 bp, Homo sapiens
  source 1..18: mol_type = genomic DNA
tcagtcggtagagcatgg

SEQ ID NO: 25118 - DNA, 19 bp, Homo sapiens
  source 1..19: mol_type = genomic DNA
tcagtcggtagagcatggg

SEQ ID NO: 25119 - DNA, 20 bp, Homo sapiens
  source 1..20: mol_type = genomic DNA
tcagtcggtagagcatggga

SEQ ID NO: 25120 - DNA, 21 bp, Homo sapiens
  source 1..21: mol_type = genomic DNA
tcagtcggtagagcatgggac

SEQ ID NO: 25121 - DNA, 22 bp, Homo sapiens
  source 1..22: mol_type = genomic DNA
tcagtcggtagagcatgggact

SEQ ID NO: 25122 - DNA, 23 bp, Homo sapiens
  source 1..23: mol_type = genomic DNA
tcagtcggtagagcatgggactc

SEQ ID NO: 25123 - DNA, 24 bp, Homo sapiens
  source 1..24: mol_type = genomic DNA
tcagtcggtagagcatgggactct

SEQ ID NO: 25124 - DNA, 25 bp, Homo sapiens
  source 1..25: mol_type = genomic DNA
tcagtcggtagagcatgggactctt

SEQ ID NO: 25125 - DNA, 27 bp, Homo sapiens
  source 1..27: mol_type = genomic DNA
tcagtcggtagagcatgggactcttaa

SEQ ID NO: 25126 - DNA, 30 bp, Homo sapiens
  source 1..30: mol_type = genomic DNA
tcagtcggtagagcatgggactcttaatcc

SEQ ID NO: 25127 - DNA, 31 bp, Homo sapiens
  source 1..31: mol_type = genomic DNA
tcagtcggtagagcatgggactcttaatccc

SEQ ID NO: 25128 - DNA, 32 bp, Homo sapiens
  source 1..32: mol_type = genomic DNA
tcagtcggtagagcatgggactcttaatccca

SEQ ID NO: 25129 - DNA, 40 bp, Homo sapiens
  source 1..40: mol_type = genomic DNA
tcagtcggtagagcatgggactcttaatcccagggtcgtg

SEQ ID NO: 25130 - DNA, 41 bp, Homo sapiens
  source 1..41: mol_type = genomic DNA
tcagtcggtagagcatgggactcttaatcccagggtcgtgg

SEQ ID NO: 25131 - DNA, 44 bp, Homo sapiens
  source 1..44: mol_type = genomic DNA
tcagtcggtagagcatgggactcttaatcccagggtcgtgggtt

SEQ ID NO: 25132 - DNA, 31 bp, Homo sapiens
  source 1..31: mol_type = genomic DNA
tcagtcggtagagcatgggactcttaatctc

SEQ ID NO: 25133 - DNA, 41 bp, Homo sapiens
  source 1..41: mol_type = genomic DNA
tcagtcggtagagcatgggactcttaatctcagggtcgtgg

SEQ ID NO: 25134 - DNA, 16 bp, Homo sapiens
  source 1..16: mol_type = genomic DNA
tcagtctcataatctg

SEQ ID NO: 25135 - DNA, 25 bp, Homo sapiens
  source 1..25: mol_type = genomic DNA
tcagtctcataatctgaaggtcctg

SEQ ID NO: 25136 - DNA, 27 bp, Homo sapiens
  source 1..27: mol_type = genomic DNA
tcagtctcataatctgaaggtcctgag

SEQ ID NO: 25137 - DNA, 25 bp, Homo sapiens
  source 1..25: mol_type = genomic DNA
tcagtctcataatctgaaggtcgtg

SEQ ID NO: 25138 - DNA, 27 bp, Homo sapiens
  source 1..27: mol_type = genomic DNA
tcagtctcataatctgaaggtcgtgag

SEQ ID NO: 25139 - DNA, 28 bp, Homo sapiens
  source 1..28: mol_type = genomic DNA
tcagtctcataatctgaaggtcgtgagt

SEQ ID NO: 25140 - DNA, 30 bp, Homo sapiens
  source 1..30: mol_type = genomic DNA
tcagtctcataatctgaaggtcgtgagttc

SEQ ID NO: 25141 - DNA, 31 bp, Homo sapiens
  source 1..31: mol_type = genomic DNA
tcagtctcataatctgaaggtcgtgagttcg

SEQ ID NO: 25142 - DNA, 16 bp, Homo sapiens
  source 1..16: mol_type = genomic DNA
tcagtggtagaattct

SEQ ID NO: 25143 - DNA, 17 bp, Homo sapiens
  source 1..17: mol_type = genomic DNA
tcagtggtagaattctc

SEQ ID NO: 25144 - DNA, 18 bp, Homo sapiens
  source 1..18: mol_type = genomic DNA
tcagtggtagaattctcg

SEQ ID NO: 25145 - DNA, 19 bp, Homo sapiens
  source 1..19: mol_type = genomic DNA
tcagtggtagaattctcgc

SEQ ID NO: 25146 - DNA, 20 bp, Homo sapiens
  source 1..20: mol_type = genomic DNA
tcagtggtagaattctcgcc

SEQ ID NO: 25147 - DNA, 21 bp, Homo sapiens
  source 1..21: mol_type = genomic DNA
tcagtggtagaattctcgcct

SEQ ID NO: 25148 - DNA, 22 bp, Homo sapiens
  source 1..22: mol_type = genomic DNA
tcagtggtagaattctcgcctc

SEQ ID NO: 25149 - DNA, 24 bp, Homo sapiens
  source 1..24: mol_type = genomic DNA
tcagtggtagaattctcgcctccc

SEQ ID NO: 25150 - DNA, 25 bp, Homo sapiens
  source 1..25: mol_type = genomic DNA
tcagtggtagaattctcgcctccca

SEQ ID NO: 25151 - DNA, 22 bp, Homo sapiens
  source 1..22: mol_type = genomic DNA
tcagtggtagaattctcgcctg

SEQ ID NO: 25152 - DNA, 23 bp, Homo sapiens
  source 1..23: mol_type = genomic DNA
tcagtggtagaattctcgcctgc

SEQ ID NO: 25153 - DNA, 24 bp, Homo sapiens
  source 1..24: mol_type = genomic DNA
tcagtggtagaattctcgcctgcc

SEQ ID NO: 25154 - DNA, 25 bp, Homo sapiens
  source 1..25: mol_type = genomic DNA
tcagtggtagaattctcgcctgcca

SEQ ID NO: 25155 - DNA, 26 bp, Homo sapiens
  source 1..26: mol_type = genomic DNA
tcagtggtagaattctcgcctgccac

SEQ ID NO: 25156 - DNA, 27 bp, Homo sapiens
  source 1..27: mol_type = genomic DNA
tcagtggtagaattctcgcctgccacg

SEQ ID NO: 25157 - DNA, 28 bp, Homo sapiens
  source 1..28: mol_type = genomic DNA
tcagtggtagaattctcgcctgccacgc

SEQ ID NO: 25158 - DNA, 29 bp, Homo sapiens
  source 1..29: mol_type = genomic DNA
tcagtggtagaattctcgcctgccacgcg

SEQ ID NO: 25159 - DNA, 31 bp, Homo sapiens
  source 1..31: mol_type = genomic DNA
tcagtggtagaattctcgcctgccacgcggg

SEQ ID NO: 25160 - DNA, 32 bp, Homo sapiens
  source 1..32: mol_type = genomic DNA
tcagtggtagaattctcgcctgccacgcggga

SEQ ID NO: 25161 - DNA, 33 bp, Homo sapiens
  source 1..33: mol_type = genomic DNA
tcagtggtagaattctcgcctgccacgcgggag

SEQ ID NO: 25162 - DNA, 37 bp, Homo sapiens
  source 1..37: mol_type = genomic DNA
tcagtggtagaattctcgcctgccacgcgggaggccc

SEQ ID NO: 25163 - DNA, 38 bp, Homo sapiens
  source 1..38: mol_type = genomic DNA
tcagtggtagaattctcgcctgccacgcgggaggcccg

SEQ ID NO: 25164 - DNA, 39 bp, Homo sapiens
  source 1..39: mol_type = genomic DNA
tcagtggtagaattctcgcctgccacgcgggaggcccgg

SEQ ID NO: 25165 - DNA, 40 bp, Homo sapiens
  source 1..40: mol_type = genomic DNA
tcagtggtagaattctcgcctgccacgcgggaggcccggg

SEQ ID NO: 25166 - DNA, 41 bp, Homo sapiens
  source 1..41: mol_type = genomic DNA
tcagtggtagaattctcgcctgccacgcgggaggcccgggt

SEQ ID NO: 25167 - DNA, 23 bp, Homo sapiens
  source 1..23: mol_type = genomic DNA
tcagtggtagaattcttgcctgc

SEQ ID NO: 25168 - DNA, 16 bp, Homo sapiens
  source 1..16: mol_type = genomic DNA
tcagtggtagagcatt

SEQ ID NO: 25169 - DNA, 17 bp, Homo sapiens
  source 1..17: mol_type = genomic DNA
tcagtggtagagcattt

SEQ ID NO: 25170 - DNA, 18 bp, Homo sapiens
  source 1..18: mol_type = genomic DNA
tcagtggtagagcatttg

SEQ ID NO: 25171 - DNA, 19 bp, Homo sapiens
  source 1..19: mol_type = genomic DNA
tcagtggtagagcatttga

SEQ ID NO: 25172 - DNA, 20 bp, Homo sapiens
  source 1..20: mol_type = genomic DNA
tcagtggtagagcatttgac

SEQ ID NO: 25173 - DNA, 21 bp, Homo sapiens
  source 1..21: mol_type = genomic DNA
tcagtggtagagcatttgact

SEQ ID NO: 25174 - DNA, 22 bp, Homo sapiens
  source 1..22: mol_type = genomic DNA
tcagtggtagagcatttgactg

SEQ ID NO: 25175 - DNA, 23 bp, Homo sapiens
  source 1..23: mol_type = genomic DNA
tcagtggtagagcatttgactgc

SEQ ID NO: 25176 - DNA, 24 bp, Homo sapiens
  source 1..24: mol_type = genomic DNA
tcagtggtagagcatttgactgca

SEQ ID NO: 25177 - DNA, 17 bp, Homo sapiens
  source 1..17: mol_type = genomic DNA
tcagtggtagagcgcat

SEQ ID NO: 25178 - DNA, 20 bp, Homo sapiens
  source 1..20: mol_type = genomic DNA
tcagtggtagagcgcatgct

SEQ ID NO: 25179 - DNA, 21 bp, Homo sapiens
  source 1..21: mol_type = genomic DNA
tcagtggtagagcgcatgctt

SEQ ID NO: 25180 - DNA, 21 bp, Homo sapiens
  source 1..21: mol_type = genomic DNA
tcagtggtagagcgcgtgctt

SEQ ID NO: 25181 - DNA, 20 bp, Homo sapiens
  source 1..20: mol_type = genomic DNA
tcagttgatgcagagtgggg

SEQ ID NO: 25182 - DNA, 23 bp, Homo sapiens
  source 1..23: mol_type = genomic DNA
tcagttgatgcagagtggggttt

SEQ ID NO: 25183 - DNA, 31 bp, Homo sapiens
  source 1..31: mol_type = genomic DNA
tcagttgatgcagagtggggttttgcagtcc

SEQ ID NO: 25184 - DNA, 32 bp, Homo sapiens
  source 1..32: mol_type = genomic DNA
tcagttgatgcagagtggggttttgcagtcct

SEQ ID NO: 25185 - DNA, 33 bp, Homo sapiens
  source 1..33: mol_type = genomic DNA
tcagttgatgcagagtggggttttgcagtcctt

SEQ ID NO: 25186 - DNA, 34 bp, Homo sapiens
  source 1..34: mol_type = genomic DNA
tcagttgatgcagagtggggttttgcagtcctta

SEQ ID NO: 25187 - DNA, 35 bp, Homo sapiens
  source 1..35: mol_type = genomic DNA
tcagttgatgcagagtggggttttgcagtccttac

SEQ ID NO: 25188 - DNA, 36 bp, Homo sapiens
  source 1..36: mol_type = genomic DNA
tcagttgatgcagagtggggttttgcagtccttacc

SEQ ID NO: 25189 - DNA, 37 bp, Homo sapiens
  source 1..37: mol_type = genomic DNA
tcagttgatgcagagtggggttttgcagtccttacca

SEQ ID NO: 25190 - DNA, 17 bp, Homo sapiens
  source 1..17: mol_type = genomic DNA
tcagttggtagagcatc

SEQ ID NO: 25191 - DNA, 18 bp, Homo sapiens
  source 1..18: mol_type = genomic DNA
tcagttggtagagcatca

SEQ ID NO: 25192 - DNA, 21 bp, Homo sapiens
  source 1..21: mol_type = genomic DNA
tcagttggtagagcatcagac

SEQ ID NO: 25193 - DNA, 22 bp, Homo sapiens
  source 1..22: mol_type = genomic DNA
tcagttggtagagcatcagact

SEQ ID NO: 25194 - DNA, 21 bp, Homo sapiens
  source 1..21: mol_type = genomic DNA
tcagttggtagagcatgggac

SEQ ID NO: 25195 - DNA, 22 bp, Homo sapiens
  source 1..22: mol_type = genomic DNA
tcagttggtagagcatgggact

SEQ ID NO: 25196 - DNA, 18 bp, Homo sapiens
  source 1..18: mol_type = genomic DNA
tcataactttgtcaaagt

SEQ ID NO: 25197 - DNA, 30 bp, Homo sapiens
  source 1..30: mol_type = genomic DNA
tcataactttgtcaaagttaaattataggc

SEQ ID NO: 25198 - DNA, 31 bp, Homo sapiens
  source 1..31: mol_type = genomic DNA
tcataactttgtcaaagttaaattataggct

SEQ ID NO: 25199 - DNA, 32 bp, Homo sapiens
  source 1..32: mol_type = genomic DNA
tcataactttgtcaaagttaaattataggcta

SEQ ID NO: 25200 - DNA, 33 bp, Homo sapiens
  source 1..33: mol_type = genomic DNA
tcataactttgtcaaagttaaattataggctaa

SEQ ID NO: 25201 - DNA, 34 bp, Homo sapiens
  source 1..34: mol_type = genomic DNA
tcataactttgtcaaagttaaattataggctaaa

SEQ ID NO: 25202 - DNA, 37 bp, Homo sapiens
  source 1..37: mol_type = genomic DNA
tcataactttgtcaaagttaaattataggctaaatcc

SEQ ID NO: 25203 - DNA, 17 bp, Homo sapiens
  source 1..17: mol_type = genomic DNA
tcataatctgaaggtcc

SEQ ID NO: 25204 - DNA, 18 bp, Homo sapiens
  source 1..18: mol_type = genomic DNA
tcataatctgaaggtcct

SEQ ID NO: 25205 - DNA, 19 bp, Homo sapiens
  source 1..19: mol_type = genomic DNA
tcataatctgaaggtcctg

SEQ ID NO: 25206 - DNA, 20 bp, Homo sapiens
  source 1..20: mol_type = genomic DNA
tcataatctgaaggtcctga

SEQ ID NO: 25207 - DNA, 22 bp, Homo sapiens
  source 1..22: mol_type = genomic DNA
tcataatctgaaggtcctgagt

SEQ ID NO: 25208 - DNA, 38 bp, Homo sapiens
  source 1..38: mol_type = genomic DNA
tcataatctgaaggtcctgagttcgaacctcagagggg

SEQ ID NO: 25209 - DNA, 41 bp, Homo sapiens
  source 1..41: mol_type = genomic DNA
tcataatctgaaggtcctgagttcgaacctcagagggggca

SEQ ID NO: 25210 - DNA, 43 bp, Homo sapiens
  source 1..43: mol_type = genomic DNA
tcataatctgaaggtcctgagttcgaacctcagagggggcacc

SEQ ID NO: 25211 - DNA, 44 bp, Homo sapiens
  source 1..44: mol_type = genomic DNA
tcataatctgaaggtcctgagttcgaacctcagagggggcacca

SEQ ID NO: 25212 - DNA, 32 bp, Homo sapiens
  source 1..32: mol_type = genomic DNA
tcataatctgaaggtcctgagttcgagcctca

SEQ ID NO: 25213 - DNA, 19 bp, Homo sapiens
  source 1..19: mol_type = genomic DNA
tcataatctgaaggtcgtg

SEQ ID NO: 25214 - DNA, 20 bp, Homo sapiens
  source 1..20: mol_type = genomic DNA
tcataatctgaaggtcgtga

SEQ ID NO: 25215 - DNA, 24 bp, Homo sapiens
  source 1..24: mol_type = genomic DNA
tcataatctgaaggtcgtgagttc

SEQ ID NO: 25216 - DNA, 25 bp, Homo sapiens
  source 1..25: mol_type = genomic DNA
tcataatctgaaggtcgtgagttcg

SEQ ID NO: 25217 - DNA, 43 bp, Homo sapiens
  source 1..43: mol_type = genomic DNA
tcataatctgaaggtcgtgagttcgagcctcacacggggcacc

SEQ ID NO: 25218 - DNA, 44 bp, Homo sapiens
  source 1..44: mol_type = genomic DNA
tcataatctgaaggtcgtgagttcgagcctcacacggggcacca

SEQ ID NO: 25219 - DNA, 37 bp, Homo sapiens
  source 1..37: mol_type = genomic DNA
tcataatctgaaggtcgtgagttcgatcctcacacgg

SEQ ID NO: 25220 - DNA, 44 bp, Homo sapiens
  source 1..44: mol_type = genomic DNA
tcataatctgaaggtcgtgagttcgatcctcacacggggcacca

SEQ ID NO: 25221 - DNA, 20 bp, Homo sapiens
  source 1..20: mol_type = genomic DNA
tcatatcattggtcgtggtt

SEQ ID NO: 25222 - DNA, 21 bp, Homo sapiens
  source 1..21: mol_type = genomic DNA
tcatatcattggtcgtggttg

SEQ ID NO: 25223 - DNA, 22 bp, Homo sapiens
  source 1..22: mol_type = genomic DNA
tcatatcattggtcgtggttgt

SEQ ID NO: 25224 - DNA, 23 bp, Homo sapiens
  source 1..23: mol_type = genomic DNA
tcatatcattggtcgtggttgta

SEQ ID NO: 25225 - DNA, 24 bp, Homo sapiens
  source 1..24: mol_type = genomic DNA
tcatatcattggtcgtggttgtag

SEQ ID NO: 25226 - DNA, 25 bp, Homo sapiens
  source 1..25: mol_type = genomic DNA
tcatatcattggtcgtggttgtagt

SEQ ID NO: 25227 - DNA, 26 bp, Homo sapiens
  source 1..26: mol_type = genomic DNA
tcatatcattggtcgtggttgtagtc

SEQ ID NO: 25228 - DNA, 27 bp, Homo sapiens
  source 1..27: mol_type = genomic DNA
tcatatcattggtcgtggttgtagtcc

SEQ ID NO: 25229 - DNA, 28 bp, Homo sapiens
  source 1..28: mol_type = genomic DNA
tcatatcattggtcgtggttgtagtccg

SEQ ID NO: 25230 - DNA, 29 bp, Homo sapiens
  source 1..29: mol_type = genomic DNA
tcatatcattggtcgtggttgtagtccgt

SEQ ID NO: 25231 - DNA, 30 bp, Homo sapiens
  source 1..30: mol_type = genomic DNA
tcatatcattggtcgtggttgtagtccgtg

SEQ ID NO: 25232 - DNA, 31 bp, Homo sapiens
  source 1..31: mol_type = genomic DNA
tcatatcattggtcgtggttgtagtccgtgc

SEQ ID NO: 25233 - DNA, 32 bp, Homo sapiens
  source 1..32: mol_type = genomic DNA
tcatatcattggtcgtggttgtagtccgtgcg

SEQ ID NO: 25234 - DNA, 34 bp, Homo sapiens
  source 1..34: mol_type = genomic DNA
tcatatcattggtcgtggttgtagtccgtgcgag

SEQ ID NO: 25235 - DNA, 35 bp, Homo sapiens
  source 1..35: mol_type = genomic DNA
tcatatcattggtcgtggttgtagtccgtgcgaga

SEQ ID NO: 25236 - DNA, 36 bp, Homo sapiens
  source 1..36: mol_type = genomic DNA
tcatatcattggtcgtggttgtagtccgtgcgagaa

SEQ ID NO: 25237 - DNA, 37 bp, Homo sapiens
  source 1..37: mol_type = genomic DNA
tcatatcattggtcgtggttgtagtccgtgcgagaat

SEQ ID NO: 25238 - DNA, 38 bp, Homo sapiens
  source 1..38: mol_type = genomic DNA
tcatatcattggtcgtggttgtagtccgtgcgagaata

SEQ ID NO: 25239 - DNA, 39 bp, Homo sapiens
  source 1..39: mol_type = genomic DNA
tcatatcattggtcgtggttgtagtccgtgcgagaatac

SEQ ID NO: 25240 - DNA, 40 bp, Homo sapiens
  source 1..40: mol_type = genomic DNA
tcatatcattggtcgtggttgtagtccgtgcgagaatacc

SEQ ID NO: 25241 - DNA, 41 bp, Homo sapiens
  source 1..41: mol_type = genomic DNA
tcatatcattggtcgtggttgtagtccgtgcgagaatacca

SEQ ID NO: 25242 - DNA, 32 bp, Homo sapiens
  source 1..32: mol_type = genomic DNA
tcatatccgcgtgggttcgaaccccacttctg

SEQ ID NO: 25243 - DNA, 19 bp, Homo sapiens
  source 1..19: mol_type = genomic DNA
tcatattgaattgcaaatt

SEQ ID NO: 25244 - DNA, 20 bp, Homo sapiens
  source 1..20: mol_type = genomic DNA
tcatattgaattgcaaattc

SEQ ID NO: 25245 - DNA, 21 bp, Homo sapiens
  source 1..21: mol_type = genomic DNA
tcatattgaattgcaaattcg

SEQ ID NO: 25246 - DNA, 23 bp, Homo sapiens
  source 1..23: mol_type = genomic DNA
tcatattgaattgcaaattcgaa

SEQ ID NO: 25247 - DNA, 32 bp, Homo sapiens
  source 1..32: mol_type = genomic DNA
tcatattgaattgcaaattcgaagaagcagct

SEQ ID NO: 25248 - DNA, 41 bp, Homo sapiens
  source 1..41: mol_type = genomic DNA
tcatattgaattgcaaattcgaagaagcagcttcaaacctg

SEQ ID NO: 25249 - DNA, 47 bp, Homo sapiens
  source 1..47: mol_type = genomic DNA
tcatattgaattgcaaattcgaagaagcagcttcaaacctgccgggg

SEQ ID NO: 25250 - DNA, 48 bp, Homo sapiens
  source 1..48: mol_type = genomic DNA
tcatattgaattgcaaattcgaagaagcagcttcaaacctgccggggc

SEQ ID NO: 25251 - DNA, 16 bp, Homo sapiens
  source 1..16: mol_type = genomic DNA
tcatatttaccaacca

SEQ ID NO: 25252 - DNA, 32 bp, Homo sapiens
  source 1..32: mol_type = genomic DNA
tcatgcaagattcccattcttgcgacccgggt

SEQ ID NO: 25253 - DNA, 16 bp, Homo sapiens
  source 1..16: mol_type = genomic DNA
tcatgcccccatgtct

SEQ ID NO: 25254 - DNA, 17 bp, Homo sapiens
  source 1..17: mol_type = genomic DNA
tcatgcccccatgtcta

SEQ ID NO: 25255 - DNA, 18 bp, Homo sapiens
  source 1..18: mol_type = genomic DNA
tcatgcccccatgtctaa

SEQ ID NO: 25256 - DNA, 19 bp, Homo sapiens
  source 1..19: mol_type = genomic DNA
tcatgcccccatgtctaac

SEQ ID NO: 25257 - DNA, 20 bp, Homo sapiens
  source 1..20: mol_type = genomic DNA
tcatgcccccatgtctaaca

SEQ ID NO: 25258 - DNA, 21 bp, Homo sapiens
  source 1..21: mol_type = genomic DNA
tcatgcccccatgtctaacaa

SEQ ID NO: 25259 - DNA, 22 bp, Homo sapiens
  source 1..22: mol_type = genomic DNA
tcatgcccccatgtctaacaac

SEQ ID NO: 25260 - DNA, 23 bp, Homo sapiens
  source 1..23: mol_type = genomic DNA
tcatgcccccatgtctaacaaca

SEQ ID NO: 25261 - DNA, 24 bp, Homo sapiens
  source 1..24: mol_type = genomic DNA
tcatgcccccatgtctaacaacat

SEQ ID NO: 25262 - DNA, 25 bp, Homo sapiens
  source 1..25: mol_type = genomic DNA
tcatgcccccatgtctaacaacatg

SEQ ID NO: 25263 - DNA, 26 bp, Homo sapiens
  source 1..26: mol_type = genomic DNA
tcatgcccccatgtctaacaacatgg

SEQ ID NO: 25264 - DNA, 27 bp, Homo sapiens
  source 1..27: mol_type = genomic DNA
tcatgcccccatgtctaacaacatggc

SEQ ID NO: 25265 - DNA, 28 bp, Homo sapiens
  source 1..28: mol_type = genomic DNA
tcatgcccccatgtctaacaacatggct

SEQ ID NO: 25266 - DNA, 29 bp, Homo sapiens
  source 1..29: mol_type = genomic DNA
tcatgcccccatgtctaacaacatggctt

SEQ ID NO: 25267 - DNA, 30 bp, Homo sapiens
  source 1..30: mol_type = genomic DNA
tcatgcccccatgtctaacaacatggcttt

SEQ ID NO: 25268 - DNA, 31 bp, Homo sapiens
  source 1..31: mol_type = genomic DNA
tcatgcccccatgtctaacaacatggctttc

SEQ ID NO: 25269 - DNA, 32 bp, Homo sapiens
  source 1..32: mol_type = genomic DNA
tcatgcccccatgtctaacaacatggctttct

SEQ ID NO: 25270 - DNA, 33 bp, Homo sapiens
  source 1..33: mol_type = genomic DNA
tcatgcccccatgtctaacaacatggctttctc

SEQ ID NO: 25271 - DNA, 34 bp, Homo sapiens
  source 1..34: mol_type = genomic DNA
tcatgcccccatgtctaacaacatggctttctca

SEQ ID NO: 25272 - DNA, 35 bp, Homo sapiens
  source 1..35: mol_type = genomic DNA
tcatgcccccatgtctaacaacatggctttctcac

SEQ ID NO: 25273 - DNA, 36 bp, Homo sapiens
  source 1..36: mol_type = genomic DNA
tcatgcccccatgtctaacaacatggctttctcacc

SEQ ID NO: 25274 - DNA, 37 bp, Homo sapiens
  source 1..37: mol_type = genomic DNA
tcatgcccccatgtctaacaacatggctttctcacca

SEQ ID NO: 25275 - DNA, 18 bp, Homo sapiens
  source 1..18: mol_type = genomic DNA
tcatggaggccatggggt

SEQ ID NO: 25276 - DNA, 19 bp, Homo sapiens
  source 1..19: mol_type = genomic DNA
tcatggaggccatggggtt

SEQ ID NO: 25277 - DNA, 20 bp, Homo sapiens
  source 1..20: mol_type = genomic DNA
tcatggaggccatggggttg

SEQ ID NO: 25278 - DNA, 21 bp, Homo sapiens
  source 1..21: mol_type = genomic DNA
tcatggaggccatggggttgg

SEQ ID NO: 25279 - DNA, 24 bp, Homo sapiens
  source 1..24: mol_type = genomic DNA
tcatggaggccatggggttggctt

SEQ ID NO: 25280 - DNA, 26 bp, Homo sapiens
  source 1..26: mol_type = genomic DNA
tcatggaggccatggggttggcttga

SEQ ID NO: 25281 - DNA, 32 bp, Homo sapiens
  source 1..32: mol_type = genomic DNA
tcattaaattatgataatcatatttaccaacc

SEQ ID NO: 25282 - DNA, 16 bp, Homo sapiens
  source 1..16: mol_type = genomic DNA
tcattggtcgtggttg

SEQ ID NO: 25283 - DNA, 17 bp, Homo sapiens
  source 1..17: mol_type = genomic DNA
tcattggtcgtggttgt

SEQ ID NO: 25284 - DNA, 18 bp, Homo sapiens
  source 1..18: mol_type = genomic DNA
tcattggtcgtggttgta

SEQ ID NO: 25285 - DNA, 19 bp, Homo sapiens
  source 1..19: mol_type = genomic DNA
tcattggtcgtggttgtag

SEQ ID NO: 25286 - DNA, 20 bp, Homo sapiens
  source 1..20: mol_type = genomic DNA
tcattggtcgtggttgtagt

SEQ ID NO: 25287 - DNA, 21 bp, Homo sapiens
  source 1..21: mol_type = genomic DNA
tcattggtcgtggttgtagtc

SEQ ID NO: 25288 - DNA, 22 bp, Homo sapiens
  source 1..22: mol_type = genomic DNA
tcattggtcgtggttgtagtcc

SEQ ID NO: 25289 - DNA, 23 bp, Homo sapiens
  source 1..23: mol_type = genomic DNA
tcattggtcgtggttgtagtccg

SEQ ID NO: 25290 - DNA, 24 bp, Homo sapiens
  source 1..24: mol_type = genomic DNA
tcattggtcgtggttgtagtccgt

SEQ ID NO: 25291 - DNA, 25 bp, Homo sapiens
  source 1..25: mol_type = genomic DNA
tcattggtcgtggttgtagtccgtg

SEQ ID NO: 25292 - DNA, 26 bp, Homo sapiens
  source 1..26: mol_type = genomic DNA
tcattggtcgtggttgtagtccgtgc

SEQ ID NO: 25293 - DNA, 27 bp, Homo sapiens
  source 1..27: mol_type = genomic DNA
tcattggtcgtggttgtagtccgtgcg

SEQ ID NO: 25294 - DNA, 28 bp, Homo sapiens
  source 1..28: mol_type = genomic DNA
tcattggtcgtggttgtagtccgtgcga

SEQ ID NO: 25295 - DNA, 29 bp, Homo sapiens
  source 1..29: mol_type = genomic DNA
tcattggtcgtggttgtagtccgtgcgag

SEQ ID NO: 25296 - DNA, 30 bp, Homo sapiens
  source 1..30: mol_type = genomic DNA
tcattggtcgtggttgtagtccgtgcgaga

SEQ ID NO: 25297 - DNA, 31 bp, Homo sapiens
  source 1..31: mol_type = genomic DNA
tcattggtcgtggttgtagtccgtgcgagaa

SEQ ID NO: 25298 - DNA, 32 bp, Homo sapiens
  source 1..32: mol_type = genomic DNA
tcattggtcgtggttgtagtccgtgcgagaat

SEQ ID NO: 25299 - DNA, 33 bp, Homo sapiens
  source 1..33: mol_type = genomic DNA
tcattggtcgtggttgtagtccgtgcgagaata

SEQ ID NO: 25300 - DNA, 34 bp, Homo sapiens
  source 1..34: mol_type = genomic DNA
tcattggtcgtggttgtagtccgtgcgagaatac

SEQ ID NO: 25301 - DNA, 35 bp, Homo sapiens
  source 1..35: mol_type = genomic DNA
tcattggtcgtggttgtagtccgtgcgagaatacc

SEQ ID NO: 25302 - DNA, 36 bp, Homo sapiens
  source 1..36: mol_type = genomic DNA
tcattggtcgtggttgtagtccgtgcgagaatacca

SEQ ID NO: 25303 - DNA, 16 bp, Homo sapiens
  source 1..16: mol_type = genomic DNA
tcatttcgatggcgtg

SEQ ID NO: 25304 - DNA, 19 bp, Homo sapiens
  source 1..19: mol_type = genomic DNA
tcatttcgatggcgtgggt

SEQ ID NO: 25305 - DNA, 40 bp, Homo sapiens
  source 1..40: mol_type = genomic DNA
tcatttcgatggcgtgggttcgaatcccaccgctgccacc

SEQ ID NO: 25306 - DNA, 16 bp, Homo sapiens
  source 1..16: mol_type = genomic DNA
tccaaataaaagtacc

SEQ ID NO: 25307 - DNA, 17 bp, Homo sapiens
  source 1..17: mol_type = genomic DNA
tccaagcagttgacccg

SEQ ID NO: 25308 - DNA, 18 bp, Homo sapiens
  source 1..18: mol_type = genomic DNA
tccaagcagttgacccgg

SEQ ID NO: 25309 - DNA, 20 bp, Homo sapiens
  source 1..20: mol_type = genomic DNA
tccaagcagttgacccgggt

SEQ ID NO: 25310 - DNA, 21 bp, Homo sapiens
  source 1..21: mol_type = genomic DNA
tccaagcagttgacccgggtt

SEQ ID NO: 25311 - DNA, 22 bp, Homo sapiens
  source 1..22: mol_type = genomic DNA
tccaagcagttgacccgggttc

SEQ ID NO: 25312 - DNA, 37 bp, Homo sapiens
  source 1..37: mol_type = genomic DNA
tccaagcagttgacccgggttcgattcccggccaacg

SEQ ID NO: 25313 - DNA, 41 bp, Homo sapiens
  source 1..41: mol_type = genomic DNA
tccaagcagttgacccgggttcgattcccggccaacgcacc

SEQ ID NO: 25314 - DNA, 43 bp, Homo sapiens
  source 1..43: mol_type = genomic DNA
tccaatggacatatgtccgcgtgggttcgaaccccactcctgg

SEQ ID NO: 25315 - DNA, 47 bp, Homo sapiens
  source 1..47: mol_type = genomic DNA
tccaatggacatatgtccgcgtgggttcgaaccccactcctggtacc

SEQ ID NO: 25316 - DNA, 18 bp, Homo sapiens
  source 1..18: mol_type = genomic DNA
tccaatggaggcgtgggt

SEQ ID NO: 25317 - DNA, 19 bp, Homo sapiens
  source 1..19: mol_type = genomic DNA
tccaatggaggcgtgggtt

SEQ ID NO: 25318 - DNA, 34 bp, Homo sapiens
  source 1..34: mol_type = genomic DNA
tccaatggaggcgtgggttcgaatcccacttctg

SEQ ID NO: 25319 - DNA, 35 bp, Homo sapiens
  source 1..35: mol_type = genomic DNA
tccaatggaggcgtgggttcgaatcccacttctga

SEQ ID NO: 25320 - DNA, 39 bp, Homo sapiens
  source 1..39: mol_type = genomic DNA
tccaatggaggcgtgggttcgaatcccacttctgacacc

SEQ ID NO: 25321 - DNA, 40 bp, Homo sapiens
  source 1..40: mol_type = genomic DNA
tccaatggaggcgtgggttcgaatcccacttctgacacca

SEQ ID NO: 25322 - DNA, 35 bp, Homo sapiens
  source 1..35: mol_type = genomic DNA
tccaatggggtctccccgcgcaggttcgaaccctg

SEQ ID NO: 25323 - DNA, 35 bp, Homo sapiens
  source 1..35: mol_type = genomic DNA
tccaatggggtctccccgcgcaggttcgaatcctg

SEQ ID NO: 25324 - DNA, 21 bp, Homo sapiens
  source 1..21: mol_type = genomic DNA
tccaatggggtttccccgcac

SEQ ID NO: 25325 - DNA, 23 bp, Homo sapiens
  source 1..23: mol_type = genomic DNA
tccaatggggtttccccgcacag

SEQ ID NO: 25326 - DNA, 46 bp, Homo sapiens
  source 1..46: mol_type = genomic DNA
tccaatggggtttccccgcacaggttcgaatcctgttcgtgacgcc

SEQ ID NO: 25327 - DNA, 47 bp, Homo sapiens
  source 1..47: mol_type = genomic DNA
tccaatggggtttccccgcacaggttcgaatcctgttcgtgacgcca

SEQ ID NO: 25328 - DNA, 20 bp, Homo sapiens
  source 1..20: mol_type = genomic DNA
tccaattaactagttttgac

SEQ ID NO: 25329 - DNA, 23 bp, Homo sapiens
  source 1..23: mol_type = genomic DNA
tccaattaactagttttgacaac

SEQ ID NO: 25330 - DNA, 24 bp, Homo sapiens
  source 1..24: mol_type = genomic DNA
tccaattaactagttttgacaaca

SEQ ID NO: 25331 - DNA, 38 bp, Homo sapiens
  source 1..38: mol_type = genomic DNA
tccaattaactagttttgacaacattcaaaaaagagta

SEQ ID NO: 25332 - DNA, 39 bp, Homo sapiens
  source 1..39: mol_type = genomic DNA
tccaattaactagttttgacaacattcaaaaaagagtac

SEQ ID NO: 25333 - DNA, 40 bp, Homo sapiens
  source 1..40: mol_type = genomic DNA
tccaattaactagttttgacaacattcaaaaaagagtacc

SEQ ID NO: 25334 - DNA, 41 bp, Homo sapiens
  source 1..41: mol_type = genomic DNA
tccaattaactagttttgacaacattcaaaaaagagtacca

SEQ ID NO: 25335 - DNA, 17 bp, Homo sapiens
  source 1..17: mol_type = genomic DNA
tccagaggttccgggtt

SEQ ID NO: 25336 - DNA, 18 bp, Homo sapiens
  source 1..18: mol_type = genomic DNA
tccagaggttccgggttc

SEQ ID NO: 25337 - DNA, 19 bp, Homo sapiens
  source 1..19: mol_type = genomic DNA
tccagaggttccgggttcg

SEQ ID NO: 25338 - DNA, 35 bp, Homo sapiens
  source 1..35: mol_type = genomic DNA
tccagaggttccgggttcgagtcccggcagagatg

SEQ ID NO: 25339 - DNA, 36 bp, Homo sapiens
  source 1..36: mol_type = genomic DNA
tccagaggttccgggttcgagtcccggcagagatgc

SEQ ID NO: 25340 - DNA, 37 bp, Homo sapiens
  source 1..37: mol_type = genomic DNA
tccagaggttccgggttcgagtcccggcagagatgcc

SEQ ID NO: 25341 - DNA, 38 bp, Homo sapiens
  source 1..38: mol_type = genomic DNA
tccagaggttccgggttcgagtcccggcagagatgcca

SEQ ID NO: 25342 - DNA, 24 bp, Homo sapiens
  source 1..24: mol_type = genomic DNA
tccagatcagaaggctgcgtgttc

SEQ ID NO: 25343 - DNA, 36 bp, Homo sapiens
  source 1..36: mol_type = genomic DNA
tccagcaatccgagttcgaatctcggtgggacctcc

SEQ ID NO: 25344 - DNA, 16 bp, Homo sapiens
  source 1..16: mol_type = genomic DNA
tccagcgatccgagtt

SEQ ID NO: 25345 - DNA, 17 bp, Homo sapiens
  source 1..17: mol_type = genomic DNA
tccagcgatccgagttc

SEQ ID NO: 25346 - DNA, 18 bp, Homo sapiens
  source 1..18: mol_type = genomic DNA
tccagcgatccgagttca

SEQ ID NO: 25347 - DNA, 21 bp, Homo sapiens
  source 1..21: mol_type = genomic DNA
tccagcgatccgagttcaaat

SEQ ID NO: 25348 - DNA, 28 bp, Homo sapiens
  source 1..28: mol_type = genomic DNA
tccagcgatccgagttcaaatctcggtg

SEQ ID NO: 25349 - DNA, 34 bp, Homo sapiens
  source 1..34: mol_type = genomic DNA
tccagcgatccgagttcaaatctcggtggaacct

SEQ ID NO: 25350 - DNA, 35 bp, Homo sapiens
  source 1..35: mol_type = genomic DNA
tccagcgatccgagttcaaatctcggtggaacctc

SEQ ID NO: 25351 - DNA, 36 bp, Homo sapiens
  source 1..36: mol_type = genomic DNA
tccagcgatccgagttcaaatctcggtggaacctcc

SEQ ID NO: 25352 - DNA, 37 bp, Homo sapiens
  source 1..37: mol_type = genomic DNA
tccagcgatccgagttcaaatctcggtggaacctcca

SEQ ID NO: 25353 - DNA, 32 bp, Homo sapiens
  source 1..32: mol_type = genomic DNA
tccagcgatccgagttcaaatctcggtgggac

SEQ ID NO: 25354 - DNA, 33 bp, Homo sapiens
  source 1..33: mol_type = genomic DNA
tccagcgatccgagttcaaatctcggtgggacc

SEQ ID NO: 25355 - DNA, 37 bp, Homo sapiens
  source 1..37: mol_type = genomic DNA
tccagcgatccgagttcaaatctcggtgggaccccca

SEQ ID NO: 25356 - DNA, 34 bp, Homo sapiens
  source 1..34: mol_type = genomic DNA
tccagcgatccgagttcaaatctcggtgggacct

SEQ ID NO: 25357 - DNA, 35 bp, Homo sapiens
  source 1..35: mol_type = genomic DNA
tccagcgatccgagttcaaatctcggtgggacctc

SEQ ID NO: 25358 - DNA, 36 bp, Homo sapiens
  source 1..36: mol_type = genomic DNA
tccagcgatccgagttcaaatctcggtgggacctcc

SEQ ID NO: 25359 - DNA, 23 bp, Homo sapiens
  source 1..23: mol_type = genomic DNA
tccagcgatccgagttcgagtct

SEQ ID NO: 25360 - DNA, 28 bp, Homo sapiens
  source 1..28: mol_type = genomic DNA
tccagcgatccgagttcgagtctcggtg

SEQ ID NO: 25361 - DNA, 34 bp, Homo sapiens
  source 1..34: mol_type = genomic DNA
tccagcgatccgagttcgagtctcggtggaacct

SEQ ID NO: 25362 - DNA, 35 bp, Homo sapiens
  source 1..35: mol_type = genomic DNA
tccagcgatccgagttcgagtctcggtggaacctc

SEQ ID NO: 25363 - DNA, 36 bp, Homo sapiens
  source 1..36: mol_type = genomic DNA
tccagcgatccgagttcgagtctcggtggaacctcc

SEQ ID NO: 25364 - DNA, 27 bp, Homo sapiens
  source 1..27: mol_type = genomic DNA
tccagggttcaagtccctgtccaggcg

SEQ ID NO: 25365 - DNA, 27 bp, Homo sapiens
  source 1..27: mol_type = genomic DNA
tccagggttcaagtccctgttcaggcg

SEQ ID NO: 25366 - DNA, 28 bp, Homo sapiens
  source 1..28: mol_type = genomic DNA
tccagggttcaagtccctgttcaggcgc

SEQ ID NO: 25367 - DNA, 25 bp, Homo sapiens
  source 1..25: mol_type = genomic DNA
tccagggttcaagtccctgttcggg

SEQ ID NO: 25368 - DNA, 26 bp, Homo sapiens
  source 1..26: mol_type = genomic DNA
tccagggttcaagtccctgttcgggc

SEQ ID NO: 25369 - DNA, 27 bp, Homo sapiens
  source 1..27: mol_type = genomic DNA
tccagggttcaagtccctgttcgggcg

SEQ ID NO: 25370 - DNA, 28 bp, Homo sapiens
  source 1..28: mol_type = genomic DNA
tccagggttcaagtccctgttcgggcgc

SEQ ID NO: 25371 - DNA, 29 bp, Homo sapiens
  source 1..29: mol_type = genomic DNA
tccagggttcaagtccctgttcgggcgcc

SEQ ID NO: 25372 - DNA, 30 bp, Homo sapiens
  source 1..30: mol_type = genomic DNA
tccagggttcaagtccctgttcgggcgcca

SEQ ID NO: 25373 - DNA, 16 bp, Homo sapiens
  source 1..16: mol_type = genomic DNA
tccaggtgccccctcc

SEQ ID NO: 25374 - DNA, 16 bp, Homo sapiens
  source 1..16: mol_type = genomic DNA
tccaggttcgactcct

SEQ ID NO: 25375 - DNA, 17 bp, Homo sapiens
  source 1..17: mol_type = genomic DNA
tccaggttcgactcctg

SEQ ID NO: 25376 - DNA, 21 bp, Homo sapiens
  source 1..21: mol_type = genomic DNA
tccaggttcgactcctggctg

SEQ ID NO: 25377 - DNA, 24 bp, Homo sapiens
  source 1..24: mol_type = genomic DNA
tccaggttcgactcctggctggct

SEQ ID NO: 25378 - DNA, 25 bp, Homo sapiens
  source 1..25: mol_type = genomic DNA
tccaggttcgactcctggctggctc

SEQ ID NO: 25379 - DNA, 26 bp, Homo sapiens
  source 1..26: mol_type = genomic DNA
tccaggttcgactcctggctggctcg

SEQ ID NO: 25380 - DNA, 27 bp, Homo sapiens
  source 1..27: mol_type = genomic DNA
tccaggttcgactcctggctggctcgc

SEQ ID NO: 25381 - DNA, 28 bp, Homo sapiens
  source 1..28: mol_type = genomic DNA
tccaggttcgactcctggctggctcgcc

SEQ ID NO: 25382 - DNA, 29 bp, Homo sapiens
  source 1..29: mol_type = genomic DNA
tccaggttcgactcctggctggctcgcca

SEQ ID NO: 25383 - DNA, 45 bp, Homo sapiens
  source 1..45: mol_type = genomic DNA
tccagtcatttcgatggcgtgggttcgaatcccaccgctgccacc

SEQ ID NO: 25384 - DNA, 44 bp, Homo sapiens
  source 1..44: mol_type = genomic DNA
tccagtctcttcggaggcgtgggttcgaatcccaccgctgccac

SEQ ID NO: 25385 - DNA, 45 bp, Homo sapiens
  source 1..45: mol_type = genomic DNA
tccagtctcttcggaggcgtgggttcgaatcccaccgctgccacc

SEQ ID NO: 25386 - DNA, 16 bp, Homo sapiens
  source 1..16: mol_type = genomic DNA
tccagtctcttcgggg

SEQ ID NO: 25387 - DNA, 17 bp, Homo sapiens
  source 1..17: mol_type = genomic DNA
tccagtctcttcggggg

SEQ ID NO: 25388 - DNA, 24 bp, Homo sapiens
  source 1..24: mol_type = genomic DNA
tccagtctcttcgggggcgtgggt

SEQ ID NO: 25389 - DNA, 45 bp, Homo sapiens
  source 1..45: mol_type = genomic DNA
tccagtctcttcgggggcgtgggttcgaatcccaccgctgccacc

SEQ ID NO: 25390 - DNA, 46 bp, Homo sapiens
  source 1..46: mol_type = genomic DNA
tccagtctcttcgggggcgtgggttcgaatcccaccgctgccacca

SEQ ID NO: 25391 - DNA, 16 bp, Homo sapiens
  source 1..16: mol_type = genomic DNA
tccatagctcaggggt

SEQ ID NO: 25392 - DNA, 26 bp, Homo sapiens
  source 1..26: mol_type = genomic DNA
tccatagctcaggggttagagcactg

SEQ ID NO: 25393 - DNA, 27 bp, Homo sapiens
  source 1..27: mol_type = genomic DNA
tccatagtgtagcggttatcacgtctg

SEQ ID NO: 25394 - DNA, 28 bp, Homo sapiens
  source 1..28: mol_type = genomic DNA
tccatagtgtagcggttatcacgtctgc

SEQ ID NO: 25395 - DNA, 29 bp, Homo sapiens
  source 1..29: mol_type = genomic DNA
tccatagtgtagcggttatcacgtctgct

SEQ ID NO: 25396 - DNA, 30 bp, Homo sapiens
  source 1..30: mol_type = genomic DNA
tccatagtgtagcggttatcacgtctgctt

SEQ ID NO: 25397 - DNA, 33 bp, Homo sapiens
  source 1..33: mol_type = genomic DNA
tccatagtgtagcggttatcacgtctgctttac

SEQ ID NO: 25398 - DNA, 20 bp, Homo sapiens
  source 1..20: mol_type = genomic DNA
tccatagtgtagtggttatc

SEQ ID NO: 25399 - DNA, 29 bp, Homo sapiens
  source 1..29: mol_type = genomic DNA
tccatagtgtagtggttatcacatctgct

SEQ ID NO: 25400 - DNA, 33 bp, Homo sapiens
  source 1..33: mol_type = genomic DNA
tccatagtgtagtggttatcacatctgctttac

SEQ ID NO: 25401 - DNA, 27 bp, Homo sapiens
  source 1..27: mol_type = genomic DNA
tccatagtgtagtggttatcacgtctg

SEQ ID NO: 25402 - DNA, 28 bp, Homo sapiens
  source 1..28: mol_type = genomic DNA
tccatagtgtagtggttatcacgtctgc

SEQ ID NO: 25403 - DNA, 29 bp, Homo sapiens
  source 1..29: mol_type = genomic DNA
tccatagtgtagtggttatcacgtctgct

SEQ ID NO: 25404 - DNA, 30 bp, Homo sapiens
  source 1..30: mol_type = genomic DNA
tccatagtgtagtggttatcacgtctgctt

SEQ ID NO: 25405 - DNA, 31 bp, Homo sapiens
  source 1..31: mol_type = genomic DNA
tccatagtgtagtggttatcacgtctgcttt

SEQ ID NO: 25406 - DNA, 32 bp, Homo sapiens
  source 1..32: mol_type = genomic DNA
tccatagtgtagtggttatcacgtctgcttta

SEQ ID NO: 25407 - DNA, 33 bp, Homo sapiens
  source 1..33: mol_type = genomic DNA
tccatagtgtagtggttatcacgtctgctttac

SEQ ID NO: 25408 - DNA, 34 bp, Homo sapiens
  source 1..34: mol_type = genomic DNA
tccatagtgtagtggttatcacgtctgctttaca

SEQ ID NO: 25409 - DNA, 26 bp, Homo sapiens
  source 1..26: mol_type = genomic DNA
tccatggtgtaatggtgagcactctg

SEQ ID NO: 25410 - DNA, 29 bp, Homo sapiens
  source 1..29: mol_type = genomic DNA
tccatggtgtaatggtgagcactctggac

SEQ ID NO: 25411 - DNA, 30 bp, Homo sapiens
  source 1..30: mol_type = genomic DNA
tccatggtgtaatggtgagcactctggact

SEQ ID NO: 25412 - DNA, 31 bp, Homo sapiens
  source 1..31: mol_type = genomic DNA
tccatggtgtaatggtgagcactctggactc

SEQ ID NO: 25413 - DNA, 32 bp, Homo sapiens
  source 1..32: mol_type = genomic DNA
tccatggtgtaatggtgagcactctggactct

SEQ ID NO: 25414 - DNA, 33 bp, Homo sapiens
  source 1..33: mol_type = genomic DNA
tccatggtgtaatggtgagcactctggactctg

SEQ ID NO: 25415 - DNA, 24 bp, Homo sapiens
  source 1..24: mol_type = genomic DNA
tccatggtgtaatggttagcactc

SEQ ID NO: 25416 - DNA, 26 bp, Homo sapiens
  source 1..26: mol_type = genomic DNA
tccatggtgtaatggttagcactctg

SEQ ID NO: 25417 - DNA, 27 bp, Homo sapiens
  source 1..27: mol_type = genomic DNA
tccatggtgtaatggttagcactctgg

SEQ ID NO: 25418 - DNA, 28 bp, Homo sapiens
  source 1..28: mol_type = genomic DNA
tccatggtgtaatggttagcactctgga

SEQ ID NO: 25419 - DNA, 29 bp, Homo sapiens
  source 1..29: mol_type = genomic DNA
tccatggtgtaatggttagcactctggac

SEQ ID NO: 25420 - DNA, 30 bp, Homo sapiens
  source 1..30: mol_type = genomic DNA
tccatggtgtaatggttagcactctggact

SEQ ID NO: 25421 - DNA, 31 bp, Homo sapiens
  source 1..31: mol_type = genomic DNA
tccatggtgtaatggttagcactctggactc

SEQ ID NO: 25422 - DNA, 32 bp, Homo sapiens
  source 1..32: mol_type = genomic DNA
tccatggtgtaatggttagcactctggactct

SEQ ID NO: 25423 - DNA, 33 bp, Homo sapiens
  source 1..33: mol_type = genomic DNA
tccatggtgtaatggttagcactctggactctg

SEQ ID NO: 25424 - DNA, 34 bp, Homo sapiens
  source 1..34: mol_type = genomic DNA
tccatggtgtaatggttagcactctggactctga

SEQ ID NO: 25425 - DNA, 35 bp, Homo sapiens
  source 1..35: mol_type = genomic DNA
tccatggtgtaatggttagcactctggactctgaa

SEQ ID NO: 25426 - DNA, 37 bp, Homo sapiens
  source 1..37: mol_type = genomic DNA
tccatggtgtaatggttagcactctggactctgaatc

SEQ ID NO: 25427 - DNA, 38 bp, Homo sapiens
  source 1..38: mol_type = genomic DNA
tccatggtgtaatggttagcactctggactctgaatcc

SEQ ID NO: 25428 - DNA, 24 bp, Homo sapiens
  source 1..24: mol_type = genomic DNA
tccattggggtctccccgcgcagg

SEQ ID NO: 25429 - DNA, 46 bp, Homo sapiens
  source 1..46: mol_type = genomic DNA
tccattggggtctccccgcgcaggttcgaatcctgccgactacgcc

SEQ ID NO: 25430 - DNA, 47 bp, Homo sapiens
  source 1..47: mol_type = genomic DNA
tccattggggtctccccgcgcaggttcgaatcctgccgactacgcca

SEQ ID NO: 25431 - DNA, 16 bp, Homo sapiens
  source 1..16: mol_type = genomic DNA
tccattggggtttccc

SEQ ID NO: 25432 - DNA, 21 bp, Homo sapiens
  source 1..21: mol_type = genomic DNA
tccattggggtttccccgcgc

SEQ ID NO: 25433 - DNA, 22 bp, Homo sapiens
  source 1..22: mol_type = genomic DNA
tccattggggtttccccgcgca

SEQ ID NO: 25434 - DNA, 23 bp, Homo sapiens
  source 1..23: mol_type = genomic DNA
tccattggggtttccccgcgcag

SEQ ID NO: 25435 - DNA, 24 bp, Homo sapiens
  source 1..24: mol_type = genomic DNA
tccattggggtttccccgcgcagg

SEQ ID NO: 25436 - DNA, 25 bp, Homo sapiens
  source 1..25: mol_type = genomic DNA
tccattggggtttccccgcgcaggt

SEQ ID NO: 25437 - DNA, 26 bp, Homo sapiens
  source 1..26: mol_type = genomic DNA
tccattggggtttccccgcgcaggtt

SEQ ID NO: 25438 - DNA, 35 bp, Homo sapiens
  source 1..35: mol_type = genomic DNA
tccattggggtttccccgcgcaggttcgaatcctg

SEQ ID NO: 25439 - DNA, 37 bp, Homo sapiens
  source 1..37: mol_type = genomic DNA
tccattggggtttccccgcgcaggttcgaatcctgcc

SEQ ID NO: 25440 - DNA, 38 bp, Homo sapiens
  source 1..38: mol_type = genomic DNA
tccattggggtttccccgcgcaggttcgaatcctgccg

SEQ ID NO: 25441 - DNA, 39 bp, Homo sapiens
  source 1..39: mol_type = genomic DNA
tccattggggtttccccgcgcaggttcgaatcctgccga

SEQ ID NO: 25442 - DNA, 41 bp, Homo sapiens
  source 1..41: mol_type = genomic DNA
tccattggggtttccccgcgcaggttcgaatcctgccgact

SEQ ID NO: 25443 - DNA, 42 bp, Homo sapiens
  source 1..42: mol_type = genomic DNA
tccattggggtttccccgcgcaggttcgaatcctgccgacta

SEQ ID NO: 25444 - DNA, 46 bp, Homo sapiens
  source 1..46: mol_type = genomic DNA
tccattggggtttccccgcgcaggttcgaatcctgccgactacgcc

SEQ ID NO: 25445 - DNA, 47 bp, Homo sapiens
  source 1..47: mol_type = genomic DNA
tccattggggtttccccgcgcaggttcgaatcctgccgactacgcca

SEQ ID NO: 25446 - DNA, 16 bp, Homo sapiens
  source 1..16: mol_type = genomic DNA
tccattggtcttaggc

SEQ ID NO: 25447 - DNA, 17 bp, Homo sapiens
  source 1..17: mol_type = genomic DNA
tccattggtcttaggcc

SEQ ID NO: 25448 - DNA, 18 bp, Homo sapiens
  source 1..18: mol_type = genomic DNA
tccattggtcttaggccc

SEQ ID NO: 25449 - DNA, 19 bp, Homo sapiens
  source 1..19: mol_type = genomic DNA
tccattggtcttaggcccc

SEQ ID NO: 25450 - DNA, 23 bp, Homo sapiens
  source 1..23: mol_type = genomic DNA
tccattggtcttaggccccaaaa

SEQ ID NO: 25451 - DNA, 24 bp, Homo sapiens
  source 1..24: mol_type = genomic DNA
tccattggtcttaggccccaaaaa

SEQ ID NO: 25452 - DNA, 25 bp, Homo sapiens
  source 1..25: mol_type = genomic DNA
tccattggtcttaggccccaaaaat

SEQ ID NO: 25453 - DNA, 26 bp, Homo sapiens
  source 1..26: mol_type = genomic DNA
tccattggtcttaggccccaaaaatt

SEQ ID NO: 25454 - DNA, 32 bp, Homo sapiens
  source 1..32: mol_type = genomic DNA
tccattggtcttaggccccaaaaattttggtg

SEQ ID NO: 25455 - DNA, 38 bp, Homo sapiens
  source 1..38: mol_type = genomic DNA
tccattggtcttaggccccaaaaattttggtgcaactc

SEQ ID NO: 25456 - DNA, 44 bp, Homo sapiens
  source 1..44: mol_type = genomic DNA
tccattggtcttaggccccaaaaattttggtgcaactccaaata

SEQ ID NO: 25457 - DNA, 46 bp, Homo sapiens
  source 1..46: mol_type = genomic DNA
tccattgtgctctgcacgcgtgggttcgaatcccatcctcgtcgcc

SEQ ID NO: 25458 - DNA, 47 bp, Homo sapiens
  source 1..47: mol_type = genomic DNA
tccattgtgctctgcacgcgtgggttcgaatcccatcctcgtcgcca

SEQ ID NO: 25459 - DNA, 42 bp, Homo sapiens
  source 1..42: mol_type = genomic DNA
tccattgtgctttgcacgcgtgggttcgaatcccatcctcgt

SEQ ID NO: 25460 - DNA, 45 bp, Homo sapiens
  source 1..45: mol_type = genomic DNA
tccattgtgctttgcacgcgtgggttcgaatcccatcctcgtcgc

SEQ ID NO: 25461 - DNA, 46 bp, Homo sapiens
  source 1..46: mol_type = genomic DNA
tccattgtgctttgcacgcgtgggttcgaatcccatcctcgtcgcc

SEQ ID NO: 25462 - DNA, 47 bp, Homo sapiens
  source 1..47: mol_type = genomic DNA
tccattgtgctttgcacgcgtgggttcgaatcccatcctcgtcgcca

SEQ ID NO: 25463 - DNA, 16 bp, Homo sapiens
  source 1..16: mol_type = genomic DNA
tcccacatggtctagc

SEQ ID NO: 25464 - DNA, 17 bp, Homo sapiens
  source 1..17: mol_type = genomic DNA
tcccacatggtctagcg

SEQ ID NO: 25465 - DNA, 18 bp, Homo sapiens
  source 1..18: mol_type = genomic DNA
tcccacatggtctagcgg

SEQ ID NO: 25466 - DNA, 19 bp, Homo sapiens
  source 1..19: mol_type = genomic DNA
tcccacatggtctagcggt

SEQ ID NO: 25467 - DNA, 20 bp, Homo sapiens
  source 1..20: mol_type = genomic DNA
tcccacatggtctagcggtt

SEQ ID NO: 25468 - DNA, 22 bp, Homo sapiens
  source 1..22: mol_type = genomic DNA
tcccacatggtctagcggttag

SEQ ID NO: 25469 - DNA, 23 bp, Homo sapiens
  source 1..23: mol_type = genomic DNA
tcccacatggtctagcggttagg

SEQ ID NO: 25470 - DNA, 24 bp, Homo sapiens
  source 1..24: mol_type = genomic DNA
tcccacatggtctagcggttagga

SEQ ID NO: 25471 - DNA, 25 bp, Homo sapiens
  source 1..25: mol_type = genomic DNA
tcccacatggtctagcggttaggat

SEQ ID NO: 25472 - DNA, 26 bp, Homo sapiens
  source 1..26: mol_type = genomic DNA
tcccacatggtctagcggttaggatt

SEQ ID NO: 25473 - DNA, 27 bp, Homo sapiens
  source 1..27: mol_type = genomic DNA
tcccacatggtctagcggttaggattc

SEQ ID NO: 25474 - DNA, 28 bp, Homo sapiens
  source 1..28: mol_type = genomic DNA
tcccacatggtctagcggttaggattcc

SEQ ID NO: 25475 - DNA, 29 bp, Homo sapiens
  source 1..29: mol_type = genomic DNA
tcccacatggtctagcggttaggattcct

SEQ ID NO: 25476 - DNA, 30 bp, Homo sapiens
  source 1..30: mol_type = genomic DNA
tcccacatggtctagcggttaggattcctg

SEQ ID NO: 25477 - DNA, 31 bp, Homo sapiens
  source 1..31: mol_type = genomic DNA
tcccacatggtctagcggttaggattcctgg

SEQ ID NO: 25478 - DNA, 32 bp, Homo sapiens
  source 1..32: mol_type = genomic DNA
tcccacatggtctagcggttaggattcctggt

SEQ ID NO: 25479 - DNA, 33 bp, Homo sapiens
  source 1..33: mol_type = genomic DNA
tcccacatggtctagcggttaggattcctggtt

SEQ ID NO: 25480 - DNA, 34 bp, Homo sapiens
  source 1..34: mol_type = genomic DNA
tcccacatggtctagcggttaggattcctggttt

SEQ ID NO: 25481 - DNA, 35 bp, Homo sapiens
  source 1..35: mol_type = genomic DNA
tcccacatggtctagcggttaggattcctggtttt

SEQ ID NO: 25482 - DNA, 36 bp, Homo sapiens
  source 1..36: mol_type = genomic DNA
tcccacatggtctagcggttaggattcctggttttc

SEQ ID NO: 25483 - DNA, 37 bp, Homo sapiens
  source 1..37: mol_type = genomic DNA
tcccacatggtctagcggttaggattcctggttttca

SEQ ID NO: 25484 - DNA, 38 bp, Homo sapiens
  source 1..38: mol_type = genomic DNA
tcccacatggtctagcggttaggattcctggttttcac

SEQ ID NO: 25485 - DNA, 39 bp, Homo sapiens
  source 1..39: mol_type = genomic DNA
tcccacatggtctagcggttaggattcctggttttcacc

SEQ ID NO: 25486 - DNA, 40 bp, Homo sapiens
  source 1..40: mol_type = genomic DNA
tcccacatggtctagcggttaggattcctggttttcaccc

SEQ ID NO: 25487 - DNA, 41 bp, Homo sapiens
  source 1..41: mol_type = genomic DNA
tcccacatggtctagcggttaggattcctggttttcaccca

SEQ ID NO: 25488 - DNA, 42 bp, Homo sapiens
  source 1..42: mol_type = genomic DNA
tcccacatggtctagcggttaggattcctggttttcacccag

SEQ ID NO: 25489 - DNA, 16 bp, Homo sapiens
  source 1..16: mol_type = genomic DNA
tcccaccactgccacc

SEQ ID NO: 25490 - DNA, 17 bp, Homo sapiens
  source 1..17: mol_type = genomic DNA
tcccaccactgccacca

SEQ ID NO: 25491 - DNA, 16 bp, Homo sapiens
  source 1..16: mol_type = genomic DNA
tcccaccagagtcgcc

SEQ ID NO: 25492 - DNA, 17 bp, Homo sapiens
  source 1..17: mol_type = genomic DNA
tcccaccagagtcgcca

SEQ ID NO: 25493 - DNA, 17 bp, Homo sapiens
  source 1..17: mol_type = genomic DNA
tcccacccagggacgcc

SEQ ID NO: 25494 - DNA, 18 bp, Homo sapiens
  source 1..18: mol_type = genomic DNA
tcccacccagggacgcca

SEQ ID NO: 25495 - DNA, 16 bp, Homo sapiens
  source 1..16: mol_type = genomic DNA
tcccacccggggtacc

SEQ ID NO: 25496 - DNA, 16 bp, Homo sapiens
  source 1..16: mol_type = genomic DNA
tcccaccctcgtcgcc

SEQ ID NO: 25497 - DNA, 17 bp, Homo sapiens
  source 1..17: mol_type = genomic DNA
tcccaccctcgtcgcca

SEQ ID NO: 25498 - DNA, 16 bp, Homo sapiens
  source 1..16: mol_type = genomic DNA
tcccaccgctgccacc

SEQ ID NO: 25499 - DNA, 17 bp, Homo sapiens
  source 1..17: mol_type = genomic DNA
tcccaccgctgccacca

SEQ ID NO: 25500 - DNA, 16 bp, Homo sapiens
  source 1..16: mol_type = genomic DNA
tcccaccttcgtcgcc

SEQ ID NO: 25501 - DNA, 17 bp, Homo sapiens
  source 1..17: mol_type = genomic DNA
tcccaccttcgtcgcca

SEQ ID NO: 25502 - DNA, 16 bp, Homo sapiens
  source 1..16: mol_type = genomic DNA
tcccactcctgacacc

SEQ ID NO: 25503 - DNA, 17 bp, Homo sapiens
  source 1..17: mol_type = genomic DNA
tcccactcctgacacca

SEQ ID NO: 25504 - DNA, 16 bp, Homo sapiens
  source 1..16: mol_type = genomic DNA
tcccacttctgacacc

SEQ ID NO: 25505 - DNA, 17 bp, Homo sapiens
  source 1..17: mol_type = genomic DNA
tcccacttctgacacca

SEQ ID NO: 25506 - DNA, 16 bp, Homo sapiens
  source 1..16: mol_type = genomic DNA
tcccagcggggcctcc

SEQ ID NO: 25507 - DNA, 17 bp, Homo sapiens
  source 1..17: mol_type = genomic DNA
tcccagcggggcctcca

SEQ ID NO: 25508 - DNA, 16 bp, Homo sapiens
  source 1..16: mol_type = genomic DNA
tcccagcggtgcctcc

SEQ ID NO: 25509 - DNA, 17 bp, Homo sapiens
  source 1..17: mol_type = genomic DNA
tcccagcggtgcctcca

SEQ ID NO: 25510 - DNA, 33 bp, Homo sapiens
  source 1..33: mol_type = genomic DNA
tcccagggtcgtgggttcgagccccacgttggg

SEQ ID NO: 25511 - DNA, 34 bp, Homo sapiens
  source 1..34: mol_type = genomic DNA
tcccagggtcgtgggttcgagccccacgttgggc

SEQ ID NO: 25512 - DNA, 37 bp, Homo sapiens
  source 1..37: mol_type = genomic DNA
tcccagggtcgtgggttcgagccccacgttgggcgcc

SEQ ID NO: 25513 - DNA, 38 bp, Homo sapiens
  source 1..38: mol_type = genomic DNA
tcccagggtcgtgggttcgagccccacgttgggcgcca

SEQ ID NO: 25514 - DNA, 16 bp, Homo sapiens
  source 1..16: mol_type = genomic DNA
tcccagtagagcctcc

SEQ ID NO: 25515 - DNA, 17 bp, Homo sapiens
  source 1..17: mol_type = genomic DNA
tcccagtagagcctcca

SEQ ID NO: 25516 - DNA, 16 bp, Homo sapiens
  source 1..16: mol_type = genomic DNA
tcccagtggggcctcc

SEQ ID NO: 25517 - DNA, 16 bp, Homo sapiens
  source 1..16: mol_type = genomic DNA
tcccatatggtctagc

SEQ ID NO: 25518 - DNA, 17 bp, Homo sapiens
  source 1..17: mol_type = genomic DNA
tcccatatggtctagcg

SEQ ID NO: 25519 - DNA, 18 bp, Homo sapiens
  source 1..18: mol_type = genomic DNA
tcccatatggtctagcgg

SEQ ID NO: 25520 - DNA, 19 bp, Homo sapiens
  source 1..19: mol_type = genomic DNA
tcccatatggtctagcggt

SEQ ID NO: 25521 - DNA, 20 bp, Homo sapiens
  source 1..20: mol_type = genomic DNA
tcccatatggtctagcggtt

SEQ ID NO: 25522 - DNA, 22 bp, Homo sapiens
  source 1..22: mol_type = genomic DNA
tcccatatggtctagcggttag

SEQ ID NO: 25523 - DNA, 23 bp, Homo sapiens
  source 1..23: mol_type = genomic DNA
tcccatatggtctagcggttagg

SEQ ID NO: 25524 - DNA, 24 bp, Homo sapiens
  source 1..24: mol_type = genomic DNA
tcccatatggtctagcggttagga

SEQ ID NO: 25525 - DNA, 25 bp, Homo sapiens
  source 1..25: mol_type = genomic DNA
tcccatatggtctagcggttaggat

SEQ ID NO: 25526 - DNA, 26 bp, Homo sapiens
  source 1..26: mol_type = genomic DNA
tcccatatggtctagcggttaggatt

SEQ ID NO: 25527 - DNA, 27 bp, Homo sapiens
  source 1..27: mol_type = genomic DNA
tcccatatggtctagcggttaggattc

SEQ ID NO: 25528 - DNA, 28 bp, Homo sapiens
  source 1..28: mol_type = genomic DNA
tcccatatggtctagcggttaggattcc

SEQ ID NO: 25529 - DNA, 29 bp, Homo sapiens
  source 1..29: mol_type = genomic DNA
tcccatatggtctagcggttaggattcct

SEQ ID NO: 25530 - DNA, 30 bp, Homo sapiens
  source 1..30: mol_type = genomic DNA
tcccatatggtctagcggttaggattcctg

SEQ ID NO: 25531 - DNA, 31 bp, Homo sapiens
  source 1..31: mol_type = genomic DNA
tcccatatggtctagcggttaggattcctgg

SEQ ID NO: 25532 - DNA, 32 bp, Homo sapiens
  source 1..32: mol_type = genomic DNA
tcccatatggtctagcggttaggattcctggt

SEQ ID NO: 25533 - DNA, 33 bp, Homo sapiens
  source 1..33: mol_type = genomic DNA
tcccatatggtctagcggttaggattcctggtt

SEQ ID NO: 25534 - DNA, 34 bp, Homo sapiens
  source 1..34: mol_type = genomic DNA
tcccatatggtctagcggttaggattcctggttt

SEQ ID NO: 25535 - DNA, 35 bp, Homo sapiens
  source 1..35: mol_type = genomic DNA
tcccatatggtctagcggttaggattcctggtttt

SEQ ID NO: 25536 - DNA, 36 bp, Homo sapiens
  source 1..36: mol_type = genomic DNA
tcccatatggtctagcggttaggattcctggttttc

SEQ ID NO: 25537 - DNA, 37 bp, Homo sapiens
  source 1..37: mol_type = genomic DNA
tcccatatggtctagcggttaggattcctggttttca

SEQ ID NO: 25538 - DNA, 38 bp, Homo sapiens
  source 1..38: mol_type = genomic DNA
tcccatatggtctagcggttaggattcctggttttcac

SEQ ID NO: 25539 - DNA, 39 bp, Homo sapiens
  source 1..39: mol_type = genomic DNA
tcccatatggtctagcggttaggattcctggttttcacc

SEQ ID NO: 25540 - DNA, 40 bp, Homo sapiens
  source 1..40: mol_type = genomic DNA
tcccatatggtctagcggttaggattcctggttttcaccc

SEQ ID NO: 25541 - DNA, 41 bp, Homo sapiens
  source 1..41: mol_type = genomic DNA
tcccatatggtctagcggttaggattcctggttttcaccca

SEQ ID NO: 25542 - DNA, 42 bp, Homo sapiens
  source 1..42: mol_type = genomic DNA
tcccatatggtctagcggttaggattcctggttttcacccag

SEQ ID NO: 25543 - DNA, 43 bp, Homo sapiens
  source 1..43: mol_type = genomic DNA
tcccatatggtctagcggttaggattcctggttttcacccagg

SEQ ID NO: 25544 - DNA, 45 bp, Homo sapiens
  source 1..45: mol_type = genomic DNA
tcccatatggtctagcggttaggattcctggttttcacccaggtg

SEQ ID NO: 25545 - DNA, 16 bp, Homo sapiens
  source 1..16: mol_type = genomic DNA
tcccatcctcgtcgcc

SEQ ID NO: 25546 - DNA, 17 bp, Homo sapiens
  source 1..17: mol_type = genomic DNA
tcccatcctcgtcgcca

SEQ ID NO: 25547 - DNA, 16 bp, Homo sapiens
  source 1..16: mol_type = genomic DNA
tcccatctggggtgcc

SEQ ID NO: 25548 - DNA, 17 bp, Homo sapiens
  source 1..17: mol_type = genomic DNA
tcccatctggggtgcca

SEQ ID NO: 25549 - DNA, 16 bp, Homo sapiens
  source 1..16: mol_type = genomic DNA
tcccatctgggtcgcc

SEQ ID NO: 25550 - DNA, 17 bp, Homo sapiens
  source 1..17: mol_type = genomic DNA
tcccatctgggtcgcca

SEQ ID NO: 25551 - DNA, 24 bp, Homo sapiens
  source 1..24: mol_type = genomic DNA
tcccatggtgtaatggttagcact

SEQ ID NO: 25552 - DNA, 26 bp, Homo sapiens
  source 1..26: mol_type = genomic DNA
tcccatggtgtaatggttagcactct

SEQ ID NO: 25553 - DNA, 27 bp, Homo sapiens
  source 1..27: mol_type = genomic DNA
tcccatggtgtaatggttagcactctg

SEQ ID NO: 25554 - DNA, 28 bp, Homo sapiens
  source 1..28: mol_type = genomic DNA
tcccatggtgtaatggttagcactctgg

SEQ ID NO: 25555 - DNA, 29 bp, Homo sapiens
  source 1..29: mol_type = genomic DNA
tcccatggtgtaatggttagcactctgga

SEQ ID NO: 25556 - DNA, 30 bp, Homo sapiens
  source 1..30: mol_type = genomic DNA
tcccatggtgtaatggttagcactctggac

SEQ ID NO: 25557 - DNA, 31 bp, Homo sapiens
  source 1..31: mol_type = genomic DNA
tcccatggtgtaatggttagcactctggact

SEQ ID NO: 25558 - DNA, 32 bp, Homo sapiens
  source 1..32: mol_type = genomic DNA
tcccatggtgtaatggttagcactctggactt

SEQ ID NO: 25559 - DNA, 34 bp, Homo sapiens
  source 1..34: mol_type = genomic DNA
tcccatggtgtaatggttagcactctggactttg

SEQ ID NO: 25560 - DNA, 35 bp, Homo sapiens
  source 1..35: mol_type = genomic DNA
tcccatggtgtaatggttagcactctggactttga

SEQ ID NO: 25561 - DNA, 36 bp, Homo sapiens
  source 1..36: mol_type = genomic DNA
tcccatggtgtaatggttagcactctggactttgaa

SEQ ID NO: 25562 - DNA, 38 bp, Homo sapiens
  source 1..38: mol_type = genomic DNA
tcccatggtgtaatggttagcactctggactttgaatc

SEQ ID NO: 25563 - DNA, 39 bp, Homo sapiens
  source 1..39: mol_type = genomic DNA
tcccatggtgtaatggttagcactctggactttgaatcc

SEQ ID NO: 25564 - DNA, 40 bp, Homo sapiens
  source 1..40: mol_type = genomic DNA
tcccatggtgtaatggttagcactctggactttgaatcca

SEQ ID NO: 25565 - DNA, 24 bp, Homo sapiens
  source 1..24: mol_type = genomic DNA
tcccattcttgcgacccgggttcg

SEQ ID NO: 25566 - DNA, 36 bp, Homo sapiens
  source 1..36: mol_type = genomic DNA
tcccattcttgcgacccgggttcgattcccgggcgg

SEQ ID NO: 25567 - DNA, 37 bp, Homo sapiens
  source 1..37: mol_type = genomic DNA
tcccattcttgcgacccgggttcgattcccgggcggc

SEQ ID NO: 25568 - DNA, 38 bp, Homo sapiens
  source 1..38: mol_type = genomic DNA
tcccattcttgcgacccgggttcgattcccgggcggcg

SEQ ID NO: 25569 - DNA, 43 bp, Homo sapiens
  source 1..43: mol_type = genomic DNA
tcccattcttgcgacccgggttcgattcccgggcggcgcacca

SEQ ID NO: 25570 - DNA, 16 bp, Homo sapiens
  source 1..16: mol_type = genomic DNA
tcccattggtctagcc

SEQ ID NO: 25571 - DNA, 17 bp, Homo sapiens
  source 1..17: mol_type = genomic DNA
tcccattggtctagcca

SEQ ID NO: 25572 - DNA, 16 bp, Homo sapiens
  source 1..16: mol_type = genomic DNA
tccccagcacctccac

SEQ ID NO: 25573 - DNA, 17 bp, Homo sapiens
  source 1..17: mol_type = genomic DNA
tccccagcacctccacc

SEQ ID NO: 25574 - DNA, 18 bp, Homo sapiens
  source 1..18: mol_type = genomic DNA
tccccagcacctccacca

SEQ ID NO: 25575 - DNA, 16 bp, Homo sapiens
  source 1..16: mol_type = genomic DNA
tccccagcatctccac

SEQ ID NO: 25576 - DNA, 17 bp, Homo sapiens
  source 1..17: mol_type = genomic DNA
tccccagcatctccacc

SEQ ID NO: 25577 - DNA, 18 bp, Homo sapiens
  source 1..18: mol_type = genomic DNA
tccccagcatctccacca

SEQ ID NO: 25578 - DNA, 17 bp, Homo sapiens
  source 1..17: mol_type = genomic DNA
tccccagtacctccacc

SEQ ID NO: 25579 - DNA, 18 bp, Homo sapiens
  source 1..18: mol_type = genomic DNA
tccccagtacctccacca

SEQ ID NO: 25580 - DNA, 16 bp, Homo sapiens
  source 1..16: mol_type = genomic DNA
tccccgacggggagcc

SEQ ID NO: 25581 - DNA, 17 bp, Homo sapiens
  source 1..17: mol_type = genomic DNA
tccccgacggggagcca

SEQ ID NO: 25582 - DNA, 22 bp, Homo sapiens
  source 1..22: mol_type = genomic DNA
tccccgcacaggttcgaatcct

SEQ ID NO: 25583 - DNA, 23 bp, Homo sapiens
  source 1..23: mol_type = genomic DNA
tccccgcacaggttcgaatcctg

SEQ ID NO: 25584 - DNA, 36 bp, Homo sapiens
  source 1..36: mol_type = genomic DNA
tccccgcctgtcacgcgggagaccggggttcgattc

SEQ ID NO: 25585 - DNA, 22 bp, Homo sapiens
  source 1..22: mol_type = genomic DNA
tccccgcgcaggttcaaatcct

SEQ ID NO: 25586 - DNA, 16 bp, Homo sapiens
  source 1..16: mol_type = genomic DNA
tccccgcgcaggttcg

SEQ ID NO: 25587 - DNA, 19 bp, Homo sapiens
  source 1..19: mol_type = genomic DNA
tccccgcgcaggttcgaac

SEQ ID NO: 25588 - DNA, 21 bp, Homo sapiens
  source 1..21: mol_type = genomic DNA
tccccgcgcaggttcgaaccc

SEQ ID NO: 25589 - DNA, 22 bp, Homo sapiens
  source 1..22: mol_type = genomic DNA
tccccgcgcaggttcgaaccct

SEQ ID NO: 25590 - DNA, 23 bp, Homo sapiens
  source 1..23: mol_type = genomic DNA
tccccgcgcaggttcgaaccctg

SEQ ID NO: 25591 - DNA, 19 bp, Homo sapiens
  source 1..19: mol_type = genomic DNA
tccccgcgcaggttcgaat

SEQ ID NO: 25592 - DNA, 20 bp, Homo sapiens
  source 1..20: mol_type = genomic DNA
tccccgcgcaggttcgaatc

SEQ ID NO: 25593 - DNA, 21 bp, Homo sapiens
  source 1..21: mol_type = genomic DNA
tccccgcgcaggttcgaatcc

SEQ ID NO: 25594 - DNA, 22 bp, Homo sapiens
  source 1..22: mol_type = genomic DNA
tccccgcgcaggttcgaatcct

SEQ ID NO: 25595 - DNA, 23 bp, Homo sapiens
  source 1..23: mol_type = genomic DNA
tccccgcgcaggttcgaatcctg

SEQ ID NO: 25596 - DNA, 34 bp, Homo sapiens
  source 1..34: mol_type = genomic DNA
tccccgcgcaggttcgaatcctgccgactacgcc

SEQ ID NO: 25597 - DNA, 34 bp, Homo sapiens
  source 1..34: mol_type = genomic DNA
tccccgcgcaggttcgaatcctgctcacagcgcc

SEQ ID NO: 25598 - DNA, 16 bp, Homo sapiens
  source 1..16: mol_type = genomic DNA
tccccggcacctccac

SEQ ID NO: 25599 - DNA, 17 bp, Homo sapiens
  source 1..17: mol_type = genomic DNA
tccccggcacctccacc

SEQ ID NO: 25600 - DNA, 18 bp, Homo sapiens
  source 1..18: mol_type = genomic DNA
tccccggcacctccacca

SEQ ID NO: 25601 - DNA, 16 bp, Homo sapiens
  source 1..16: mol_type = genomic DNA
tccccggcatctccac

SEQ ID NO: 25602 - DNA, 17 bp, Homo sapiens
  source 1..17: mol_type = genomic DNA
tccccggcatctccacc

SEQ ID NO: 25603 - DNA, 18 bp, Homo sapiens
  source 1..18: mol_type = genomic DNA
tccccggcatctccacca

SEQ ID NO: 25604 - DNA, 16 bp, Homo sapiens
  source 1..16: mol_type = genomic DNA
tccccggttcgaaacc

SEQ ID NO: 25605 - DNA, 23 bp, Homo sapiens
  source 1..23: mol_type = genomic DNA
tccccggttcgaaaccgggcgga

SEQ ID NO: 25606 - DNA, 27 bp, Homo sapiens
  source 1..27: mol_type = genomic DNA
tccccggttcgaaaccgggcggaaaca

SEQ ID NO: 25607 - DNA, 29 bp, Homo sapiens
  source 1..29: mol_type = genomic DNA
tccccggttcgatcccgggcggaaacacc

SEQ ID NO: 25608 - DNA, 16 bp, Homo sapiens
  source 1..16: mol_type = genomic DNA
tccccgtacgggccac

SEQ ID NO: 25609 - DNA, 17 bp, Homo sapiens
  source 1..17: mol_type = genomic DNA
tccccgtacgggccacc

SEQ ID NO: 25610 - DNA, 18 bp, Homo sapiens
  source 1..18: mol_type = genomic DNA
tccccgtacgggccacca

SEQ ID NO: 25611 - DNA, 16 bp, Homo sapiens
  source 1..16: mol_type = genomic DNA
tccccgtactggccac

SEQ ID NO: 25612 - DNA, 17 bp, Homo sapiens
  source 1..17: mol_type = genomic DNA
tccccgtactggccacc

SEQ ID NO: 25613 - DNA, 18 bp, Homo sapiens
  source 1..18: mol_type = genomic DNA
tccccgtactggccacca

SEQ ID NO: 25614 - DNA, 34 bp, Homo sapiens
  source 1..34: mol_type = genomic DNA
tcccctggaggcgtgggttcgaatcccacttctg

SEQ ID NO: 25615 - DNA, 37 bp, Homo sapiens
  source 1..37: mol_type = genomic DNA
tcccctggaggcgtgggttcgaatcccacttctgaca

SEQ ID NO: 25616 - DNA, 40 bp, Homo sapiens
  source 1..40: mol_type = genomic DNA
tcccctggaggcgtgggttcgaatcccacttctgacacca

SEQ ID NO: 25617 - DNA, 16 bp, Homo sapiens
  source 1..16: mol_type = genomic DNA
tcccggacgagccccc

SEQ ID NO: 25618 - DNA, 17 bp, Homo sapiens
  source 1..17: mol_type = genomic DNA
tcccggacgagccccca

SEQ ID NO: 25619 - DNA, 16 bp, Homo sapiens
  source 1..16: mol_type = genomic DNA
tcccggccaacgcacc

SEQ ID NO: 25620 - DNA, 17 bp, Homo sapiens
  source 1..17: mol_type = genomic DNA
tcccggccaacgcacca

SEQ ID NO: 25621 - DNA, 16 bp, Homo sapiens
  source 1..16: mol_type = genomic DNA
tcccggccaatgcacc

SEQ ID NO: 25622 - DNA, 17 bp, Homo sapiens
  source 1..17: mol_type = genomic DNA
tcccggccaatgcacca

SEQ ID NO: 25623 - DNA, 16 bp, Homo sapiens
  source 1..16: mol_type = genomic DNA
tcccggcccatgcacc

SEQ ID NO: 25624 - DNA, 17 bp, Homo sapiens
  source 1..17: mol_type = genomic DNA
tcccggcccatgcacca

SEQ ID NO: 25625 - DNA, 16 bp, Homo sapiens
  source 1..16: mol_type = genomic DNA
tcccggcggagtcgcc

SEQ ID NO: 25626 - DNA, 17 bp, Homo sapiens
  source 1..17: mol_type = genomic DNA
tcccggcggagtcgcca

SEQ ID NO: 25627 - DNA, 16 bp, Homo sapiens
  source 1..16: mol_type = genomic DNA
tcccgggcggaaacac

SEQ ID NO: 25628 - DNA, 17 bp, Homo sapiens
  source 1..17: mol_type = genomic DNA
tcccgggcggaaacacc

SEQ ID NO: 25629 - DNA, 18 bp, Homo sapiens
  source 1..18: mol_type = genomic DNA
tcccgggcggaaacacca

SEQ ID NO: 25630 - DNA, 16 bp, Homo sapiens
  source 1..16: mol_type = genomic DNA
tcccgggcggcgcacc

SEQ ID NO: 25631 - DNA, 17 bp, Homo sapiens
  source 1..17: mol_type = genomic DNA
tcccgggcggcgcacca

SEQ ID NO: 25632 - DNA, 21 bp, Homo sapiens
  source 1..21: mol_type = genomic DNA
tcccgggttcaaatcccggac

SEQ ID NO: 25633 - DNA, 25 bp, Homo sapiens
  source 1..25: mol_type = genomic DNA
tcccgggttcaaatcccggacgagc

SEQ ID NO: 25634 - DNA, 27 bp, Homo sapiens
  source 1..27: mol_type = genomic DNA
tcccgggttcaaatcccggacgagccc

SEQ ID NO: 25635 - DNA, 28 bp, Homo sapiens
  source 1..28: mol_type = genomic DNA
tcccgggttcaaatcccggacgagcccc

SEQ ID NO: 25636 - DNA, 29 bp, Homo sapiens
  source 1..29: mol_type = genomic DNA
tcccgggttcaaatcccggacgagccccc

SEQ ID NO: 25637 - DNA, 30 bp, Homo sapiens
  source 1..30: mol_type = genomic DNA
tcccgggttcaaatcccggacgagccccca

SEQ ID NO: 25638 - DNA, 29 bp, Homo sapiens
  source 1..29: mol_type = genomic DNA
tcccgggttcaatccccggcatctccacc

SEQ ID NO: 25639 - DNA, 30 bp, Homo sapiens
  source 1..30: mol_type = genomic DNA
tcccgggttcaatccccggcatctccacca

SEQ ID NO: 25640 - DNA, 27 bp, Homo sapiens
  source 1..27: mol_type = genomic DNA
tcccgggttcgatccccagcatctcca

SEQ ID NO: 25641 - DNA, 28 bp, Homo sapiens
  source 1..28: mol_type = genomic DNA
tcccgggttcgatccccagcatctccac

SEQ ID NO: 25642 - DNA, 29 bp, Homo sapiens
  source 1..29: mol_type = genomic DNA
tcccgggttcgatccccagcatctccacc

SEQ ID NO: 25643 - DNA, 30 bp, Homo sapiens
  source 1..30: mol_type = genomic DNA
tcccgggttcgatccccagcatctccacca

SEQ ID NO: 25644 - DNA, 30 bp, Homo sapiens
  source 1..30: mol_type = genomic DNA
tcccgggttcgatccccggcatctccacca

SEQ ID NO: 25645 - DNA, 16 bp, Homo sapiens
  source 1..16: mol_type = genomic DNA
tcccgggtttcggcac

SEQ ID NO: 25646 - DNA, 17 bp, Homo sapiens
  source 1..17: mol_type = genomic DNA
tcccgggtttcggcacc

SEQ ID NO: 25647 - DNA, 18 bp, Homo sapiens
  source 1..18: mol_type = genomic DNA
tcccgggtttcggcacca

SEQ ID NO: 25648 - DNA, 16 bp, Homo sapiens
  source 1..16: mol_type = genomic DNA
tcccggtatgggaacc

SEQ ID NO: 25649 - DNA, 17 bp, Homo sapiens
  source 1..17: mol_type = genomic DNA
tcccggtatgggaacca

SEQ ID NO: 25650 - DNA, 16 bp, Homo sapiens
  source 1..16: mol_type = genomic DNA
tcccggtcagggaacc

SEQ ID NO: 25651 - DNA, 17 bp, Homo sapiens
  source 1..17: mol_type = genomic DNA
tcccggtcagggaacca

SEQ ID NO: 25652 - DNA, 16 bp, Homo sapiens
  source 1..16: mol_type = genomic DNA
tcccggtgtgggaacc

SEQ ID NO: 25653 - DNA, 17 bp, Homo sapiens
  source 1..17: mol_type = genomic DNA
tcccggtgtgggaacca

SEQ ID NO: 25654 - DNA, 16 bp, Homo sapiens
  source 1..16: mol_type = genomic DNA
tccctggtagtctagt

SEQ ID NO: 25655 - DNA, 17 bp, Homo sapiens
  source 1..17: mol_type = genomic DNA
tccctggtagtctagtg

SEQ ID NO: 25656 - DNA, 18 bp, Homo sapiens
  source 1..18: mol_type = genomic DNA
tccctggtagtctagtgg

SEQ ID NO: 25657 - DNA, 19 bp, Homo sapiens
  source 1..19: mol_type = genomic DNA
tccctggtagtctagtggc

SEQ ID NO: 25658 - DNA, 20 bp, Homo sapiens
  source 1..20: mol_type = genomic DNA
tccctggtctagtggttagg

SEQ ID NO: 25659 - DNA, 22 bp, Homo sapiens
  source 1..22: mol_type = genomic DNA
tccctggtctagtggttaggat

SEQ ID NO: 25660 - DNA, 23 bp, Homo sapiens
  source 1..23: mol_type = genomic DNA
tccctggtctagtggttaggatt

SEQ ID NO: 25661 - DNA, 16 bp, Homo sapiens
  source 1..16: mol_type = genomic DNA
tccctggtggtctagt

SEQ ID NO: 25662 - DNA, 17 bp, Homo sapiens
  source 1..17: mol_type = genomic DNA
tccctggtggtctagtg

SEQ ID NO: 25663 - DNA, 18 bp, Homo sapiens
  source 1..18: mol_type = genomic DNA
tccctggtggtctagtgg

SEQ ID NO: 25664 - DNA, 19 bp, Homo sapiens
  source 1..19: mol_type = genomic DNA
tccctggtggtctagtggc

SEQ ID NO: 25665 - DNA, 20 bp, Homo sapiens
  source 1..20: mol_type = genomic DNA
tccctggtggtctagtggct

SEQ ID NO: 25666 - DNA, 21 bp, Homo sapiens
  source 1..21: mol_type = genomic DNA
tccctggtggtctagtggcta

SEQ ID NO: 25667 - DNA, 22 bp, Homo sapiens
  source 1..22: mol_type = genomic DNA
tccctggtggtctagtggctag

SEQ ID NO: 25668 - DNA, 23 bp, Homo sapiens
  source 1..23: mol_type = genomic DNA
tccctggtggtctagtggctagg

SEQ ID NO: 25669 - DNA, 24 bp, Homo sapiens
  source 1..24: mol_type = genomic DNA
tccctggtggtctagtggctagga

SEQ ID NO: 25670 - DNA, 25 bp, Homo sapiens
  source 1..25: mol_type = genomic DNA
tccctggtggtctagtggctaggat

SEQ ID NO: 25671 - DNA, 26 bp, Homo sapiens
  source 1..26: mol_type = genomic DNA
tccctggtggtctagtggctaggatt

SEQ ID NO: 25672 - DNA, 27 bp, Homo sapiens
  source 1..27: mol_type = genomic DNA
tccctggtggtctagtggctaggattc

SEQ ID NO: 25673 - DNA, 28 bp, Homo sapiens
  source 1..28: mol_type = genomic DNA
tccctggtggtctagtggctaggattcg

SEQ ID NO: 25674 - DNA, 29 bp, Homo sapiens
  source 1..29: mol_type = genomic DNA
tccctggtggtctagtggctaggattcgg

SEQ ID NO: 25675 - DNA, 30 bp, Homo sapiens
  source 1..30: mol_type = genomic DNA
tccctggtggtctagtggctaggattcggc

SEQ ID NO: 25676 - DNA, 31 bp, Homo sapiens
  source 1..31: mol_type = genomic DNA
tccctggtggtctagtggctaggattcggcg

SEQ ID NO: 25677 - DNA, 32 bp, Homo sapiens
  source 1..32: mol_type = genomic DNA
tccctggtggtctagtggctaggattcggcgc

SEQ ID NO: 25678 - DNA, 33 bp, Homo sapiens
  source 1..33: mol_type = genomic DNA
tccctggtggtctagtggctaggattcggcgct

SEQ ID NO: 25679 - DNA, 34 bp, Homo sapiens
  source 1..34: mol_type = genomic DNA
tccctggtggtctagtggctaggattcggcgctt

SEQ ID NO: 25680 - DNA, 35 bp, Homo sapiens
  source 1..35: mol_type = genomic DNA
tccctggtggtctagtggctaggattcggcgcttt

SEQ ID NO: 25681 - DNA, 36 bp, Homo sapiens
  source 1..36: mol_type = genomic DNA
tccctggtggtctagtggctaggattcggcgctttc

SEQ ID NO: 25682 - DNA, 37 bp, Homo sapiens
  source 1..37: mol_type = genomic DNA
tccctggtggtctagtggctaggattcggcgctttca

SEQ ID NO: 25683 - DNA, 38 bp, Homo sapiens
  source 1..38: mol_type = genomic DNA
tccctggtggtctagtggctaggattcggcgctttcac

SEQ ID NO: 25684 - DNA, 39 bp, Homo sapiens
  source 1..39: mol_type = genomic DNA
tccctggtggtctagtggctaggattcggcgctttcacc

SEQ ID NO: 25685 - DNA, 40 bp, Homo sapiens
  source 1..40: mol_type = genomic DNA
tccctggtggtctagtggctaggattcggcgctttcaccg

SEQ ID NO: 25686 - DNA, 41 bp, Homo sapiens
  source 1..41: mol_type = genomic DNA
tccctggtggtctagtggctaggattcggcgctttcaccgc

SEQ ID NO: 25687 - DNA, 42 bp, Homo sapiens
  source 1..42: mol_type = genomic DNA
tccctggtggtctagtggctaggattcggcgctttcaccgcc

SEQ ID NO: 25688 - DNA, 43 bp, Homo sapiens
  source 1..43: mol_type = genomic DNA
tccctggtggtctagtggctaggattcggcgctttcaccgccg

SEQ ID NO: 25689 - DNA, 19 bp, Homo sapiens
  source 1..19: mol_type = genomic DNA
tccctggtggtctagtggt

SEQ ID NO: 25690 - DNA, 20 bp, Homo sapiens
  source 1..20: mol_type = genomic DNA
tccctggtggtctagtggtt

SEQ ID NO: 25691 - DNA, 21 bp, Homo sapiens
  source 1..21: mol_type = genomic DNA
tccctggtggtctagtggtta

SEQ ID NO: 25692 - DNA, 22 bp, Homo sapiens
  source 1..22: mol_type = genomic DNA
tccctggtggtctagtggttag

SEQ ID NO: 25693 - DNA, 23 bp, Homo sapiens
  source 1..23: mol_type = genomic DNA
tccctggtggtctagtggttagg

SEQ ID NO: 25694 - DNA, 24 bp, Homo sapiens
  source 1..24: mol_type = genomic DNA
tccctggtggtctagtggttagga

SEQ ID NO: 25695 - DNA, 25 bp, Homo sapiens
  source 1..25: mol_type = genomic DNA
tccctggtggtctagtggttaggat

SEQ ID NO: 25696 - DNA, 26 bp, Homo sapiens
  source 1..26: mol_type = genomic DNA
tccctggtggtctagtggttaggatt

SEQ ID NO: 25697 - DNA, 27 bp, Homo sapiens
  source 1..27: mol_type = genomic DNA
tccctggtggtctagtggttaggattc

SEQ ID NO: 25698 - DNA, 28 bp, Homo sapiens
  source 1..28: mol_type = genomic DNA
tccctggtggtctagtggttaggattcg

SEQ ID NO: 25699 - DNA, 29 bp, Homo sapiens
  source 1..29: mol_type = genomic DNA
tccctggtggtctagtggttaggattcgg

SEQ ID NO: 25700 - DNA, 30 bp, Homo sapiens
  source 1..30: mol_type = genomic DNA
tccctggtggtctagtggttaggattcggc

SEQ ID NO: 25701 - DNA, 31 bp, Homo sapiens
  source 1..31: mol_type = genomic DNA
tccctggtggtctagtggttaggattcggcg

SEQ ID NO: 25702 - DNA, 32 bp, Homo sapiens
  source 1..32: mol_type = genomic DNA
tccctggtggtctagtggttaggattcggcgc

SEQ ID NO: 25703 - DNA, 33 bp, Homo sapiens
  source 1..33: mol_type = genomic DNA
tccctggtggtctagtggttaggattcggcgct

SEQ ID NO: 25704 - DNA, 34 bp, Homo sapiens
  source 1..34: mol_type = genomic DNA
tccctggtggtctagtggttaggattcggcgctc

SEQ ID NO: 25705 - DNA, 35 bp, Homo sapiens
  source 1..35: mol_type = genomic DNA
tccctggtggtctagtggttaggattcggcgctct

SEQ ID NO: 25706 - DNA, 36 bp, Homo sapiens
  source 1..36: mol_type = genomic DNA
tccctggtggtctagtggttaggattcggcgctctc

SEQ ID NO: 25707 - DNA, 37 bp, Homo sapiens
  source 1..37: mol_type = genomic DNA
tccctggtggtctagtggttaggattcggcgctctca

SEQ ID NO: 25708 - DNA, 38 bp, Homo sapiens
  source 1..38: mol_type = genomic DNA
tccctggtggtctagtggttaggattcggcgctctcac

SEQ ID NO: 25709 - DNA, 39 bp, Homo sapiens
  source 1..39: mol_type = genomic DNA
tccctggtggtctagtggttaggattcggcgctctcacc

SEQ ID NO: 25710 - DNA, 40 bp, Homo sapiens
  source 1..40: mol_type = genomic DNA
tccctggtggtctagtggttaggattcggcgctctcaccg

SEQ ID NO: 25711 - DNA, 41 bp, Homo sapiens
  source 1..41: mol_type = genomic DNA
tccctggtggtctagtggttaggattcggcgctctcaccgc

SEQ ID NO: 25712 - DNA, 42 bp, Homo sapiens
  source 1..42: mol_type = genomic DNA
tccctggtggtctagtggttaggattcggcgctctcaccgcc

SEQ ID NO: 25713 - DNA, 43 bp, Homo sapiens
  source 1..43: mol_type = genomic DNA
tccctggtggtctagtggttaggattcggcgctctcaccgccg

SEQ ID NO: 25714 - DNA, 44 bp, Homo sapiens
  source 1..44: mol_type = genomic DNA
tccctggtggtctagtggttaggattcggcgctctcaccgccgc

SEQ ID NO: 25715 - DNA, 45 bp, Homo sapiens
  source 1..45: mol_type = genomic DNA
tccctggtggtctagtggttaggattcggcgctctcaccgccgcg

SEQ ID NO: 25716 - DNA, 46 bp, Homo sapiens
  source 1..46: mol_type = genomic DNA
tccctggtggtctagtggttaggattcggcgctctcaccgccgcgg

SEQ ID NO: 25717 - DNA, 47 bp, Homo sapiens
  source 1..47: mol_type = genomic DNA
tccctggtggtctagtggttaggattcggcgctctcaccgccgcggc

SEQ ID NO: 25718 - DNA, 48 bp, Homo sapiens
  source 1..48: mol_type = genomic DNA
tccctggtggtctagtggttaggattcggcgctctcaccgccgcggcc

SEQ ID NO: 25719 - DNA, 27 bp, Homo sapiens
  source 1..27: mol_type = genomic DNA
tccctggttcaaatccgggtgccccct

SEQ ID NO: 25720 - DNA, 29 bp, Homo sapiens
  source 1..29: mol_type = genomic DNA
tccctggttcaaatccgggtgccccctcc

SEQ ID NO: 25721 - DNA, 26 bp, Homo sapiens
  source 1..26: mol_type = genomic DNA
tccctggttcaatcccgggtttcggc

SEQ ID NO: 25722 - DNA, 27 bp, Homo sapiens
  source 1..27: mol_type = genomic DNA
tccctggttcaatcccgggtttcggca

SEQ ID NO: 25723 - DNA, 28 bp, Homo sapiens
  source 1..28: mol_type = genomic DNA
tccctggttcaatcccgggtttcggcac

SEQ ID NO: 25724 - DNA, 30 bp, Homo sapiens
  source 1..30: mol_type = genomic DNA
tccctggttcaatcccgggtttcggcacca

SEQ ID NO: 25725 - DNA, 26 bp, Homo sapiens
  source 1..26: mol_type = genomic DNA
tccctggttcgatcccgggtttcggc

SEQ ID NO: 25726 - DNA, 27 bp, Homo sapiens
  source 1..27: mol_type = genomic DNA
tccctggttcgatcccgggtttcggca

SEQ ID NO: 25727 - DNA, 28 bp, Homo sapiens
  source 1..28: mol_type = genomic DNA
tccctggttcgatcccgggtttcggcac

SEQ ID NO: 25728 - DNA, 29 bp, Homo sapiens
  source 1..29: mol_type = genomic DNA
tccctggttcgatcccgggtttcggcacc

SEQ ID NO: 25729 - DNA, 30 bp, Homo sapiens
  source 1..30: mol_type = genomic DNA
tccctggttcgatcccgggtttcggcacca

SEQ ID NO: 25730 - DNA, 16 bp, Homo sapiens
  source 1..16: mol_type = genomic DNA
tccctgtggtctagtg

SEQ ID NO: 25731 - DNA, 17 bp, Homo sapiens
  source 1..17: mol_type = genomic DNA
tccctgtggtctagtgg

SEQ ID NO: 25732 - DNA, 18 bp, Homo sapiens
  source 1..18: mol_type = genomic DNA
tccctgtggtctagtggt

SEQ ID NO: 25733 - DNA, 21 bp, Homo sapiens
  source 1..21: mol_type = genomic DNA
tccctgtggtctagtggttag

SEQ ID NO: 25734 - DNA, 22 bp, Homo sapiens
  source 1..22: mol_type = genomic DNA
tccctgtggtctagtggttagg

SEQ ID NO: 25735 - DNA, 23 bp, Homo sapiens
  source 1..23: mol_type = genomic DNA
tccctgtggtctagtggttagga

SEQ ID NO: 25736 - DNA, 25 bp, Homo sapiens
  source 1..25: mol_type = genomic DNA
tccctgtggtctagtggttaggagt

SEQ ID NO: 25737 - DNA, 17 bp, Homo sapiens
  source 1..17: mol_type = genomic DNA
tccctgttcaggcacca

SEQ ID NO: 25738 - DNA, 16 bp, Homo sapiens
  source 1..16: mol_type = genomic DNA
tccctgttcaggcgcc

SEQ ID NO: 25739 - DNA, 17 bp, Homo sapiens
  source 1..17: mol_type = genomic DNA
tccctgttcaggcgcca

SEQ ID NO: 25740 - DNA, 16 bp, Homo sapiens
  source 1..16: mol_type = genomic DNA
tccctgttcgggcgcc

SEQ ID NO: 25741 - DNA, 17 bp, Homo sapiens
  source 1..17: mol_type = genomic DNA
tccctgttcgggcgcca

SEQ ID NO: 25742 - DNA, 16 bp, Homo sapiens
  source 1..16: mol_type = genomic DNA
tcccttcgtggtcgcc

SEQ ID NO: 25743 - DNA, 17 bp, Homo sapiens
  source 1..17: mol_type = genomic DNA
tcccttcgtggtcgcca

SEQ ID NO: 25744 - DNA, 16 bp, Homo sapiens
  source 1..16: mol_type = genomic DNA
tcccttcgtggttgcc

SEQ ID NO: 25745 - DNA, 35 bp, Homo sapiens
  source 1..35: mol_type = genomic DNA
tccgagaggtcccgggttcaaatcccggacgagcc

SEQ ID NO: 25746 - DNA, 37 bp, Homo sapiens
  source 1..37: mol_type = genomic DNA
tccgagaggtcccgggttcaaatcccggacgagcccc

SEQ ID NO: 25747 - DNA, 38 bp, Homo sapiens
  source 1..38: mol_type = genomic DNA
tccgagaggtcccgggttcaaatcccggacgagccccc

SEQ ID NO: 25748 - DNA, 16 bp, Homo sapiens
  source 1..16: mol_type = genomic DNA
tccgaggtgattttca

SEQ ID NO: 25749 - DNA, 17 bp, Homo sapiens
  source 1..17: mol_type = genomic DNA
tccgaggtgattttcat

SEQ ID NO: 25750 - DNA, 18 bp, Homo sapiens
  source 1..18: mol_type = genomic DNA
tccgaggtgattttcata

SEQ ID NO: 25751 - DNA, 19 bp, Homo sapiens
  source 1..19: mol_type = genomic DNA
tccgaggtgattttcatat

SEQ ID NO: 25752 - DNA, 20 bp, Homo sapiens
  source 1..20: mol_type = genomic DNA
tccgaggtgattttcatatt

SEQ ID NO: 25753 - DNA, 21 bp, Homo sapiens
  source 1..21: mol_type = genomic DNA
tccgaggtgattttcatattg

SEQ ID NO: 25754 - DNA, 24 bp, Homo sapiens
  source 1..24: mol_type = genomic DNA
tccgaggtgattttcatattgaat

SEQ ID NO: 25755 - DNA, 26 bp, Homo sapiens
  source 1..26: mol_type = genomic DNA
tccgaggtgattttcatattgaattg

SEQ ID NO: 25756 - DNA, 27 bp, Homo sapiens
  source 1..27: mol_type = genomic DNA
tccgaggtgattttcatattgaattgc

SEQ ID NO: 25757 - DNA, 28 bp, Homo sapiens
  source 1..28: mol_type = genomic DNA
tccgaggtgattttcatattgaattgca

SEQ ID NO: 25758 - DNA, 29 bp, Homo sapiens
  source 1..29: mol_type = genomic DNA
tccgaggtgattttcatattgaattgcaa

SEQ ID NO: 25759 - DNA, 31 bp, Homo sapiens
  source 1..31: mol_type = genomic DNA
tccgaggtgattttcatattgaattgcaaat

SEQ ID NO: 25760 - DNA, 32 bp, Homo sapiens
  source 1..32: mol_type = genomic DNA
tccgaggtgattttcatattgaattgcaaatt

SEQ ID NO: 25761 - DNA, 33 bp, Homo sapiens
  source 1..33: mol_type = genomic DNA
tccgaggtgattttcatattgaattgcaaattc

SEQ ID NO: 25762 - DNA, 34 bp, Homo sapiens
  source 1..34: mol_type = genomic DNA
tccgaggtgattttcatattgaattgcaaattcg

SEQ ID NO: 25763 - DNA, 43 bp, Homo sapiens
  source 1..43: mol_type = genomic DNA
tccgaggtgattttcatattgaattgcaaattcgaagaagcag

SEQ ID NO: 25764 - DNA, 16 bp, Homo sapiens
  source 1..16: mol_type = genomic DNA
tccgagtcacggcacc

SEQ ID NO: 25765 - DNA, 17 bp, Homo sapiens
  source 1..17: mol_type = genomic DNA
tccgagtcacggcacca

SEQ ID NO: 25766 - DNA, 26 bp, Homo sapiens
  source 1..26: mol_type = genomic DNA
tccgagttcaaatctcggtgggacct

SEQ ID NO: 25767 - DNA, 27 bp, Homo sapiens
  source 1..27: mol_type = genomic DNA
tccgagttcaaatctcggtgggacctc

SEQ ID NO: 25768 - DNA, 26 bp, Homo sapiens
  source 1..26: mol_type = genomic DNA
tccgagttcgagtctcggtggaacct

SEQ ID NO: 25769 - DNA, 20 bp, Homo sapiens
  source 1..20: mol_type = genomic DNA
tccgcgtgggttcgaacccc

SEQ ID NO: 25770 - DNA, 27 bp, Homo sapiens
  source 1..27: mol_type = genomic DNA
tccgcgtgggttcgaaccccactcctg

SEQ ID NO: 25771 - DNA, 28 bp, Homo sapiens
  source 1..28: mol_type = genomic DNA
tccgcgtgggttcgaaccccactcctgg

SEQ ID NO: 25772 - DNA, 30 bp, Homo sapiens
  source 1..30: mol_type = genomic DNA
tccgcgtgggttcgaaccccactcctggta

SEQ ID NO: 25773 - DNA, 31 bp, Homo sapiens
  source 1..31: mol_type = genomic DNA
tccgcgtgggttcgaaccccactcctggtac

SEQ ID NO: 25774 - DNA, 32 bp, Homo sapiens
  source 1..32: mol_type = genomic DNA
tccgcgtgggttcgaaccccactcctggtacc

SEQ ID NO: 25775 - DNA, 33 bp, Homo sapiens
  source 1..33: mol_type = genomic DNA
tccgcgtgggttcgaaccccactcctggtacca

SEQ ID NO: 25776 - DNA, 27 bp, Homo sapiens
  source 1..27: mol_type = genomic DNA
tccgcgtgggttcgaaccccacttctg

SEQ ID NO: 25777 - DNA, 17 bp, Homo sapiens
  source 1..17: mol_type = genomic DNA
tccggatcagaagattg

SEQ ID NO: 25778 - DNA, 18 bp, Homo sapiens
  source 1..18: mol_type = genomic DNA
tccggatcagaagattga

SEQ ID NO: 25779 - DNA, 19 bp, Homo sapiens
  source 1..19: mol_type = genomic DNA
tccggatcagaagattgag

SEQ ID NO: 25780 - DNA, 20 bp, Homo sapiens
  source 1..20: mol_type = genomic DNA
tccggatcagaagattgagg

SEQ ID NO: 25781 - DNA, 21 bp, Homo sapiens
  source 1..21: mol_type = genomic DNA
tccggatcagaagattgaggg

SEQ ID NO: 25782 - DNA, 22 bp, Homo sapiens
  source 1..22: mol_type = genomic DNA
tccggatcagaagattgagggt

SEQ ID NO: 25783 - DNA, 24 bp, Homo sapiens
  source 1..24: mol_type = genomic DNA
tccggatcagaagattgagggttc

SEQ ID NO: 25784 - DNA, 25 bp, Homo sapiens
  source 1..25: mol_type = genomic DNA
tccggatcagaagattgagggttcg

SEQ ID NO: 25785 - DNA, 32 bp, Homo sapiens
  source 1..32: mol_type = genomic DNA
tccggatcagaagattgagggttcgagtccct

SEQ ID NO: 25786 - DNA, 16 bp, Homo sapiens
  source 1..16: mol_type = genomic DNA
tccggatggaggcgtg

SEQ ID NO: 25787 - DNA, 17 bp, Homo sapiens
  source 1..17: mol_type = genomic DNA
tccggatggaggcgtgg

SEQ ID NO: 25788 - DNA, 18 bp, Homo sapiens
  source 1..18: mol_type = genomic DNA
tccggatggaggcgtggg

SEQ ID NO: 25789 - DNA, 19 bp, Homo sapiens
  source 1..19: mol_type = genomic DNA
tccggatggaggcgtgggt

SEQ ID NO: 25790 - DNA, 20 bp, Homo sapiens
  source 1..20: mol_type = genomic DNA
tccggatggaggcgtgggtt

SEQ ID NO: 25791 - DNA, 29 bp, Homo sapiens
  source 1..29: mol_type = genomic DNA
tccggatggaggcgtgggttcgaatccca

SEQ ID NO: 25792 - DNA, 31 bp, Homo sapiens
  source 1..31: mol_type = genomic DNA
tccggatggaggcgtgggttcgaatcccact

SEQ ID NO: 25793 - DNA, 35 bp, Homo sapiens
  source 1..35: mol_type = genomic DNA
tccggatggaggcgtgggttcgaatcccacttctg

SEQ ID NO: 25794 - DNA, 38 bp, Homo sapiens
  source 1..38: mol_type = genomic DNA
tccggatggaggcgtgggttcgaatcccacttctgaca

SEQ ID NO: 25795 - DNA, 39 bp, Homo sapiens
  source 1..39: mol_type = genomic DNA
tccggatggaggcgtgggttcgaatcccacttctgacac

SEQ ID NO: 25796 - DNA, 40 bp, Homo sapiens
  source 1..40: mol_type = genomic DNA
tccggatggaggcgtgggttcgaatcccacttctgacacc

SEQ ID NO: 25797 - DNA, 41 bp, Homo sapiens
  source 1..41: mol_type = genomic DNA
tccggatggaggcgtgggttcgaatcccacttctgacacca

SEQ ID NO: 25798 - DNA, 16 bp, Homo sapiens
  source 1..16: mol_type = genomic DNA
tccggctcgaaggacc

SEQ ID NO: 25799 - DNA, 17 bp, Homo sapiens
  source 1..17: mol_type = genomic DNA
tccggctcgaaggacca

SEQ ID NO: 25800 - DNA, 16 bp, Homo sapiens
  source 1..16: mol_type = genomic DNA
tccggctcggaggacc

SEQ ID NO: 25801 - DNA, 17 bp, Homo sapiens
  source 1..17: mol_type = genomic DNA
tccggctcggaggacca

SEQ ID NO: 25802 - DNA, 16 bp, Homo sapiens
  source 1..16: mol_type = genomic DNA
tccgggtgccccctcc

SEQ ID NO: 25803 - DNA, 17 bp, Homo sapiens
  source 1..17: mol_type = genomic DNA
tccgggtgccccctcca

SEQ ID NO: 25804 - DNA, 28 bp, Homo sapiens
  source 1..28: mol_type = genomic DNA
tccgggttcgagtcccggcagagatgcc

SEQ ID NO: 25805 - DNA, 24 bp, Homo sapiens
  source 1..24: mol_type = genomic DNA
tccgggttcgagtcccggcggagt

SEQ ID NO: 25806 - DNA, 25 bp, Homo sapiens
  source 1..25: mol_type = genomic DNA
tccgggttcgagtcccggcggagtc

SEQ ID NO: 25807 - DNA, 26 bp, Homo sapiens
  source 1..26: mol_type = genomic DNA
tccgggttcgagtcccggcggagtcg

SEQ ID NO: 25808 - DNA, 27 bp, Homo sapiens
  source 1..27: mol_type = genomic DNA
tccgggttcgagtcccggcggagtcgc

SEQ ID NO: 25809 - DNA, 28 bp, Homo sapiens
  source 1..28: mol_type = genomic DNA
tccgggttcgagtcccggcggagtcgcc

SEQ ID NO: 25810 - DNA, 29 bp, Homo sapiens
  source 1..29: mol_type = genomic DNA
tccgggttcgagtcccggcggagtcgcca

SEQ ID NO: 25811 - DNA, 20 bp, Homo sapiens
  source 1..20: mol_type = genomic DNA
tccgtagtggagtggttatc

SEQ ID NO: 25812 - DNA, 30 bp, Homo sapiens
  source 1..30: mol_type = genomic DNA
tccgtagtggagtggttatcacgttcgcct

SEQ ID NO: 25813 - DNA, 33 bp, Homo sapiens
  source 1..33: mol_type = genomic DNA
tccgtagtggagtggttatcacgttcgcctcac

SEQ ID NO: 25814 - DNA, 20 bp, Homo sapiens
  source 1..20: mol_type = genomic DNA
tccgtagtgtagcggttatc

SEQ ID NO: 25815 - DNA, 25 bp, Homo sapiens
  source 1..25: mol_type = genomic DNA
tccgtagtgtagcggttatcacatt

SEQ ID NO: 25816 - DNA, 29 bp, Homo sapiens
  source 1..29: mol_type = genomic DNA
tccgtagtgtagcggttatcacattcgcc

SEQ ID NO: 25817 - DNA, 30 bp, Homo sapiens
  source 1..30: mol_type = genomic DNA
tccgtagtgtagcggttatcacattcgcct

SEQ ID NO: 25818 - DNA, 31 bp, Homo sapiens
  source 1..31: mol_type = genomic DNA
tccgtagtgtagcggttatcacattcgcctc

SEQ ID NO: 25819 - DNA, 32 bp, Homo sapiens
  source 1..32: mol_type = genomic DNA
tccgtagtgtagcggttatcacattcgcctca

SEQ ID NO: 25820 - DNA, 33 bp, Homo sapiens
  source 1..33: mol_type = genomic DNA
tccgtagtgtagcggttatcacattcgcctcac

SEQ ID NO: 25821 - DNA, 34 bp, Homo sapiens
  source 1..34: mol_type = genomic DNA
tccgtagtgtagcggttatcacattcgcctcaca

SEQ ID NO: 25822 - DNA, 16 bp, Homo sapiens
  source 1..16: mol_type = genomic DNA
tccgtagtgtagtggt

SEQ ID NO: 25823 - DNA, 17 bp, Homo sapiens
  source 1..17: mol_type = genomic DNA
tccgtagtgtagtggtc

SEQ ID NO: 25824 - DNA, 18 bp, Homo sapiens
  source 1..18: mol_type = genomic DNA
tccgtagtgtagtggtca

SEQ ID NO: 25825 - DNA, 19 bp, Homo sapiens
  source 1..19: mol_type = genomic DNA
tccgtagtgtagtggtcat

SEQ ID NO: 25826 - DNA, 20 bp, Homo sapiens
  source 1..20: mol_type = genomic DNA
tccgtagtgtagtggtcatc

SEQ ID NO: 25827 - DNA, 21 bp, Homo sapiens
  source 1..21: mol_type = genomic DNA
tccgtagtgtagtggtcatca

SEQ ID NO: 25828 - DNA, 27 bp, Homo sapiens
  source 1..27: mol_type = genomic DNA
tccgtagtgtagtggtcatcacgttcg

SEQ ID NO: 25829 - DNA, 28 bp, Homo sapiens
  source 1..28: mol_type = genomic DNA
tccgtagtgtagtggtcatcacgttcgc

SEQ ID NO: 25830 - DNA, 29 bp, Homo sapiens
  source 1..29: mol_type = genomic DNA
tccgtagtgtagtggtcatcacgttcgcc

SEQ ID NO: 25831 - DNA, 30 bp, Homo sapiens
  source 1..30: mol_type = genomic DNA
tccgtagtgtagtggtcatcacgttcgcct

SEQ ID NO: 25832 - DNA, 32 bp, Homo sapiens
  source 1..32: mol_type = genomic DNA
tccgtagtgtagtggtcatcacgttcgcctaa

SEQ ID NO: 25833 - DNA, 33 bp, Homo sapiens
  source 1..33: mol_type = genomic DNA
tccgtagtgtagtggtcatcacgttcgcctaac

SEQ ID NO: 25834 - DNA, 19 bp, Homo sapiens
  source 1..19: mol_type = genomic DNA
tccgtagtgtagtggttat

SEQ ID NO: 25835 - DNA, 20 bp, Homo sapiens
  source 1..20: mol_type = genomic DNA
tccgtagtgtagtggttatc

SEQ ID NO: 25836 - DNA, 21 bp, Homo sapiens
  source 1..21: mol_type = genomic DNA
tccgtagtgtagtggttatca

SEQ ID NO: 25837 - DNA, 22 bp, Homo sapiens
  source 1..22: mol_type = genomic DNA
tccgtagtgtagtggttatcac

SEQ ID NO: 25838 - DNA, 23 bp, Homo sapiens
  source 1..23: mol_type = genomic DNA
tccgtagtgtagtggttatcacg

SEQ ID NO: 25839 - DNA, 26 bp, Homo sapiens
  source 1..26: mol_type = genomic DNA
tccgtagtgtagtggttatcacgttc

SEQ ID NO: 25840 - DNA, 27 bp, Homo sapiens
  source 1..27: mol_type = genomic DNA
tccgtagtgtagtggttatcacgttcg

SEQ ID NO: 25841 - DNA, 28 bp, Homo sapiens
  source 1..28: mol_type = genomic DNA
tccgtagtgtagtggttatcacgttcgc

SEQ ID NO: 25842 - DNA, 29 bp, Homo sapiens
  source 1..29: mol_type = genomic DNA
tccgtagtgtagtggttatcacgttcgcc

SEQ ID NO: 25843 - DNA, 30 bp, Homo sapiens
  source 1..30: mol_type = genomic DNA
tccgtagtgtagtggttatcacgttcgcct

SEQ ID NO: 25844 - DNA, 31 bp, Homo sapiens
  source 1..31: mol_type = genomic DNA
tccgtagtgtagtggttatcacgttcgccta

SEQ ID NO: 25845 - DNA, 32 bp, Homo sapiens
  source 1..32: mol_type = genomic DNA
tccgtagtgtagtggttatcacgttcgcctaa

SEQ ID NO: 25846 - DNA, 33 bp, Homo sapiens
  source 1..33: mol_type = genomic DNA
tccgtagtgtagtggttatcacgttcgcctaac

SEQ ID NO: 25847 - DNA, 31 bp, Homo sapiens
  source 1..31: mol_type = genomic DNA
tccgtagtgtagtggttatcacgttcgcctc

SEQ ID NO: 25848 - DNA, 32 bp, Homo sapiens
  source 1..32: mol_type = genomic DNA
tccgtagtgtagtggttatcacgttcgcctca

SEQ ID NO: 25849 - DNA, 33 bp, Homo sapiens
  source 1..33: mol_type = genomic DNA
tccgtagtgtagtggttatcacgttcgcctcac

SEQ ID NO: 25850 - DNA, 34 bp, Homo sapiens
  source 1..34: mol_type = genomic DNA
tccgtagtgtagtggttatcacgttcgcctcaca

SEQ ID NO: 25851 - DNA, 35 bp, Homo sapiens
  source 1..35: mol_type = genomic DNA
tccgtagtgtagtggttatcacgttcgcctcacac

SEQ ID NO: 25852 - DNA, 36 bp, Homo sapiens
  source 1..36: mol_type = genomic DNA
tccgtagtgtagtggttatcacgttcgcctcacacg

SEQ ID NO: 25853 - DNA, 37 bp, Homo sapiens
  source 1..37: mol_type = genomic DNA
tccgtagtgtagtggttatcacgttcgcctcacacgc

SEQ ID NO: 25854 - DNA, 40 bp, Homo sapiens
  source 1..40: mol_type = genomic DNA
tccgtagtgtagtggttatcacgttcgcctcacacgcgaa

SEQ ID NO: 25855 - DNA, 29 bp, Homo sapiens
  source 1..29: mol_type = genomic DNA
tccgtagtgtagtggttatcacgtttgcc

SEQ ID NO: 25856 - DNA, 30 bp, Homo sapiens
  source 1..30: mol_type = genomic DNA
tccgtagtgtagtggttatcacgtttgcct

SEQ ID NO: 25857 - DNA, 16 bp, Homo sapiens
  source 1..16: mol_type = genomic DNA
tccgtgcgagaatacc

SEQ ID NO: 25858 - DNA, 17 bp, Homo sapiens
  source 1..17: mol_type = genomic DNA
tccgtgcgagaatacca

SEQ ID NO: 25859 - DNA, 16 bp, Homo sapiens
  source 1..16: mol_type = genomic DNA
tccgtggcgcaatgga

SEQ ID NO: 25860 - DNA, 26 bp, Homo sapiens
  source 1..26: mol_type = genomic DNA
tccgtggcgcaatggatagcgcattg

SEQ ID NO: 25861 - DNA, 29 bp, Homo sapiens
  source 1..29: mol_type = genomic DNA
tccgtggcgcaatggatagcgcattggac

SEQ ID NO: 25862 - DNA, 30 bp, Homo sapiens
  source 1..30: mol_type = genomic DNA
tccgtggcgcaatggatagcgcattggact

SEQ ID NO: 25863 - DNA, 33 bp, Homo sapiens
  source 1..33: mol_type = genomic DNA
tccgtggcgcaatggatagcgcattggacttct

SEQ ID NO: 25864 - DNA, 19 bp, Homo sapiens
  source 1..19: mol_type = genomic DNA
tccgtggtggtctagtggc

SEQ ID NO: 25865 - DNA, 32 bp, Homo sapiens
  source 1..32: mol_type = genomic DNA
tccgtggtggtctagtggctaggattcggcgc

SEQ ID NO: 25866 - DNA, 33 bp, Homo sapiens
  source 1..33: mol_type = genomic DNA
tccgtggtggtctagtggctaggattcggcgct

SEQ ID NO: 25867 - DNA, 32 bp, Homo sapiens
  source 1..32: mol_type = genomic DNA
tcctaagccagggattgtgggttcgagtccca

SEQ ID NO: 25868 - DNA, 36 bp, Homo sapiens
  source 1..36: mol_type = genomic DNA
tcctaagccagggattgtgggttcgagtcccacccg

SEQ ID NO: 25869 - DNA, 41 bp, Homo sapiens
  source 1..41: mol_type = genomic DNA
tcctaagccagggattgtgggttcgagtcccacccggggta

SEQ ID NO: 25870 - DNA, 44 bp, Homo sapiens
  source 1..44: mol_type = genomic DNA
tcctaagccagggattgtgggttcgagtcccacccggggtacca

SEQ ID NO: 25871 - DNA, 43 bp, Homo sapiens
  source 1..43: mol_type = genomic DNA
tcctaagccagggattgtgggttcgagtcccacctggggtacc

SEQ ID NO: 25872 - DNA, 43 bp, Homo sapiens
  source 1..43: mol_type = genomic DNA
tcctaagccagggattgtgggttcgagtcccacctggggtgcc

SEQ ID NO: 25873 - DNA, 43 bp, Homo sapiens
  source 1..43: mol_type = genomic DNA
tcctaagccagggattgtgggttcgagtcccatctggggtgcc

SEQ ID NO: 25874 - DNA, 44 bp, Homo sapiens
  source 1..44: mol_type = genomic DNA
tcctaagccagggattgtgggttcgagtcccatctggggtgcca

SEQ ID NO: 25875 - DNA, 16 bp, Homo sapiens
  source 1..16: mol_type = genomic DNA
tcctatatatcttacc

SEQ ID NO: 25876 - DNA, 17 bp, Homo sapiens
  source 1..17: mol_type = genomic DNA
tcctatatatcttacca

SEQ ID NO: 25877 - DNA, 17 bp, Homo sapiens
  source 1..17: mol_type = genomic DNA
tcctcaaagcaatacac

SEQ ID NO: 25878 - DNA, 19 bp, Homo sapiens
  source 1..19: mol_type = genomic DNA
tcctcaaagcaatacactg

SEQ ID NO: 25879 - DNA, 20 bp, Homo sapiens
  source 1..20: mol_type = genomic DNA
tcctcaaagcaatacactga

SEQ ID NO: 25880 - DNA, 21 bp, Homo sapiens
  source 1..21: mol_type = genomic DNA
tcctcaaagcaatacactgaa

SEQ ID NO: 25881 - DNA, 36 bp, Homo sapiens
  source 1..36: mol_type = genomic DNA
tcctcaaagcaatacactgaaaatgtttagacgggc

SEQ ID NO: 25882 - DNA, 37 bp, Homo sapiens
  source 1..37: mol_type = genomic DNA
tcctcaaagcaatacactgaaaatgtttagacgggct

SEQ ID NO: 25883 - DNA, 38 bp, Homo sapiens
  source 1..38: mol_type = genomic DNA
tcctcaaagcaatacactgaaaatgtttagacgggctc

SEQ ID NO: 25884 - DNA, 39 bp, Homo sapiens
  source 1..39: mol_type = genomic DNA
tcctcaaagcaatacactgaaaatgtttagacgggctca

SEQ ID NO: 25885 - DNA, 40 bp, Homo sapiens
  source 1..40: mol_type = genomic DNA
tcctcaaagcaatacactgaaaatgtttagacgggctcac

SEQ ID NO: 25886 - DNA, 17 bp, Homo sapiens
  source 1..17: mol_type = genomic DNA
tcctcacacggggcacc

SEQ ID NO: 25887 - DNA, 18 bp, Homo sapiens
  source 1..18: mol_type = genomic DNA
tcctcacacggggcacca

SEQ ID NO: 25888 - DNA, 17 bp, Homo sapiens
  source 1..17: mol_type = genomic DNA
tcctcacctggagcacc

SEQ ID NO: 25889 - DNA, 18 bp, Homo sapiens
  source 1..18: mol_type = genomic DNA
tcctcacctggagcacca

SEQ ID NO: 25890 - DNA, 16 bp, Homo sapiens
  source 1..16: mol_type = genomic DNA
tcctcgctggggcctc

SEQ ID NO: 25891 - DNA, 17 bp, Homo sapiens
  source 1..17: mol_type = genomic DNA
tcctcgctggggcctcc

SEQ ID NO: 25892 - DNA, 18 bp, Homo sapiens
  source 1..18: mol_type = genomic DNA
tcctcgctggggcctcca

SEQ ID NO: 25893 - DNA, 16 bp, Homo sapiens
  source 1..16: mol_type = genomic DNA
tcctcgttagtatagt

SEQ ID NO: 25894 - DNA, 17 bp, Homo sapiens
  source 1..17: mol_type = genomic DNA
tcctcgttagtatagtg

SEQ ID NO: 25895 - DNA, 18 bp, Homo sapiens
  source 1..18: mol_type = genomic DNA
tcctcgttagtatagtgg

SEQ ID NO: 25896 - DNA, 20 bp, Homo sapiens
  source 1..20: mol_type = genomic DNA
tcctcgttagtatagtggtg

SEQ ID NO: 25897 - DNA, 21 bp, Homo sapiens
  source 1..21: mol_type = genomic DNA
tcctcgttagtatagtggtga

SEQ ID NO: 25898 - DNA, 22 bp, Homo sapiens
  source 1..22: mol_type = genomic DNA
tcctcgttagtatagtggtgag

SEQ ID NO: 25899 - DNA, 23 bp, Homo sapiens
  source 1..23: mol_type = genomic DNA
tcctcgttagtatagtggtgagt

SEQ ID NO: 25900 - DNA, 24 bp, Homo sapiens
  source 1..24: mol_type = genomic DNA
tcctcgttagtatagtggtgagta

SEQ ID NO: 25901 - DNA, 25 bp, Homo sapiens
  source 1..25: mol_type = genomic DNA
tcctcgttagtatagtggtgagtat

SEQ ID NO: 25902 - DNA, 26 bp, Homo sapiens
  source 1..26: mol_type = genomic DNA
tcctcgttagtatagtggtgagtatc

SEQ ID NO: 25903 - DNA, 27 bp, Homo sapiens
  source 1..27: mol_type = genomic DNA
tcctcgttagtatagtggtgagtatcc

SEQ ID NO: 25904 - DNA, 28 bp, Homo sapiens
  source 1..28: mol_type = genomic DNA
tcctcgttagtatagtggtgagtatccc

SEQ ID NO: 25905 - DNA, 29 bp, Homo sapiens
  source 1..29: mol_type = genomic DNA
tcctcgttagtatagtggtgagtatcccc

SEQ ID NO: 25906 - DNA, 30 bp, Homo sapiens
  source 1..30: mol_type = genomic DNA
tcctcgttagtatagtggtgagtatccccg

SEQ ID NO: 25907 - DNA, 31 bp, Homo sapiens
  source 1..31: mol_type = genomic DNA
tcctcgttagtatagtggtgagtatccccgc

SEQ ID NO: 25908 - DNA, 32 bp, Homo sapiens
  source 1..32: mol_type = genomic DNA
tcctcgttagtatagtggtgagtatccccgcc

SEQ ID NO: 25909 - DNA, 33 bp, Homo sapiens
  source 1..33: mol_type = genomic DNA
tcctcgttagtatagtggtgagtatccccgcct

SEQ ID NO: 25910 - DNA, 34 bp, Homo sapiens
  source 1..34: mol_type = genomic DNA
tcctcgttagtatagtggtgagtatccccgcctg

SEQ ID NO: 25911 - DNA, 35 bp, Homo sapiens
  source 1..35: mol_type = genomic DNA
tcctcgttagtatagtggtgagtatccccgcctgt

SEQ ID NO: 25912 - DNA, 36 bp, Homo sapiens
  source 1..36: mol_type = genomic DNA
tcctcgttagtatagtggtgagtatccccgcctgtc

SEQ ID NO: 25913 - DNA, 37 bp, Homo sapiens
  source 1..37: mol_type = genomic DNA
tcctcgttagtatagtggtgagtatccccgcctgtca

SEQ ID NO: 25914 - DNA, 38 bp, Homo sapiens
  source 1..38: mol_type = genomic DNA
tcctcgttagtatagtggtgagtatccccgcctgtcac

SEQ ID NO: 25915 - DNA, 39 bp, Homo sapiens
  source 1..39: mol_type = genomic DNA
tcctcgttagtatagtggtgagtatccccgcctgtcacg

SEQ ID NO: 25916 - DNA, 40 bp, Homo sapiens
  source 1..40: mol_type = genomic DNA
tcctcgttagtatagtggtgagtatccccgcctgtcacgc

SEQ ID NO: 25917 - DNA, 41 bp, Homo sapiens
  source 1..41: mol_type = genomic DNA
tcctcgttagtatagtggtgagtatccccgcctgtcacgcg

SEQ ID NO: 25918 - DNA, 42 bp, Homo sapiens
  source 1..42: mol_type = genomic DNA
tcctcgttagtatagtggtgagtatccccgcctgtcacgcgg

SEQ ID NO: 25919 - DNA, 43 bp, Homo sapiens
  source 1..43: mol_type = genomic DNA
tcctcgttagtatagtggtgagtatccccgcctgtcacgcggg

SEQ ID NO: 25920 - DNA, 24 bp, Homo sapiens
  source 1..24: mol_type = genomic DNA
tcctcgttagtatagtggtgagtg

SEQ ID NO: 25921 - DNA, 22 bp, Homo sapiens
  source 1..22: mol_type = genomic DNA
tcctcgttagtatagtggttag

SEQ ID NO: 25922 - DNA, 23 bp, Homo sapiens
  source 1..23: mol_type = genomic DNA
tcctcgttagtatagtggttagt

SEQ ID NO: 25923 - DNA, 24 bp, Homo sapiens
  source 1..24: mol_type = genomic DNA
tcctcgttagtatagtggttagta

SEQ ID NO: 25924 - DNA, 26 bp, Homo sapiens
  source 1..26: mol_type = genomic DNA
tcctcgttagtatagtggttagtatc

SEQ ID NO: 25925 - DNA, 27 bp, Homo sapiens
  source 1..27: mol_type = genomic DNA
tcctcgttagtatagtggttagtatcc

SEQ ID NO: 25926 - DNA, 28 bp, Homo sapiens
  source 1..28: mol_type = genomic DNA
tcctcgttagtatagtggttagtatccc

SEQ ID NO: 25927 - DNA, 29 bp, Homo sapiens
  source 1..29: mol_type = genomic DNA
tcctcgttagtatagtggttagtatcccc

SEQ ID NO: 25928 - DNA, 30 bp, Homo sapiens
  source 1..30: mol_type = genomic DNA
tcctcgttagtatagtggttagtatccccg

SEQ ID NO: 25929 - DNA, 31 bp, Homo sapiens
  source 1..31: mol_type = genomic DNA
tcctcgttagtatagtggttagtatccccgc

SEQ ID NO: 25930 - DNA, 32 bp, Homo sapiens
  source 1..32: mol_type = genomic DNA
tcctcgttagtatagtggttagtatccccgcc

SEQ ID NO: 25931 - DNA, 33 bp, Homo sapiens
  source 1..33: mol_type = genomic DNA
tcctcgttagtatagtggttagtatccccgcct

SEQ ID NO: 25932 - DNA, 34 bp, Homo sapiens
  source 1..34: mol_type = genomic DNA
tcctcgttagtatagtggttagtatccccgcctg

SEQ ID NO: 25933 - DNA, 35 bp, Homo sapiens
  source 1..35: mol_type = genomic DNA
tcctcgttagtatagtggttagtatccccgcctgt

SEQ ID NO: 25934 - DNA, 36 bp, Homo sapiens
  source 1..36: mol_type = genomic DNA
tcctcgttagtatagtggttagtatccccgcctgtc

SEQ ID NO: 25935 - DNA, 37 bp, Homo sapiens
  source 1..37: mol_type = genomic DNA
tcctcgttagtatagtggttagtatccccgcctgtca

SEQ ID NO: 25936 - DNA, 38 bp, Homo sapiens
  source 1..38: mol_type = genomic DNA
tcctcgttagtatagtggttagtatccccgcctgtcac

SEQ ID NO: 25937 - DNA, 39 bp, Homo sapiens
  source 1..39: mol_type = genomic DNA
tcctcgttagtatagtggttagtatccccgcctgtcacg

SEQ ID NO: 25938 - DNA, 16 bp, Homo sapiens
  source 1..16: mol_type = genomic DNA
tcctcttcttaacacc

SEQ ID NO: 25939 - DNA, 17 bp, Homo sapiens
  source 1..17: mol_type = genomic DNA
tcctcttcttaacacca

SEQ ID NO: 25940 - DNA, 26 bp, Homo sapiens
  source 1..26: mol_type = genomic DNA
tcctgagttcgaacctcagagggggc

SEQ ID NO: 25941 - DNA, 27 bp, Homo sapiens
  source 1..27: mol_type = genomic DNA
tcctgagttcgaacctcagagggggca

SEQ ID NO: 25942 - DNA, 29 bp, Homo sapiens
  source 1..29: mol_type = genomic DNA
tcctgagttcgaacctcagagggggcacc

SEQ ID NO: 25943 - DNA, 27 bp, Homo sapiens
  source 1..27: mol_type = genomic DNA
tcctgagttcgagcctcagagagggca

SEQ ID NO: 25944 - DNA, 16 bp, Homo sapiens
  source 1..16: mol_type = genomic DNA
tcctgccgactacgcc

SEQ ID NO: 25945 - DNA, 17 bp, Homo sapiens
  source 1..17: mol_type = genomic DNA
tcctgccgactacgcca

SEQ ID NO: 25946 - DNA, 16 bp, Homo sapiens
  source 1..16: mol_type = genomic DNA
tcctgccgcggtcgcc

SEQ ID NO: 25947 - DNA, 17 bp, Homo sapiens
  source 1..17: mol_type = genomic DNA
tcctgccgcggtcgcca

SEQ ID NO: 25948 - DNA, 16 bp, Homo sapiens
  source 1..16: mol_type = genomic DNA
tcctgctcacagcgcc

SEQ ID NO: 25949 - DNA, 17 bp, Homo sapiens
  source 1..17: mol_type = genomic DNA
tcctgctcacagcgcca

SEQ ID NO: 25950 - DNA, 16 bp, Homo sapiens
  source 1..16: mol_type = genomic DNA
tcctggctggctcgcc

SEQ ID NO: 25951 - DNA, 17 bp, Homo sapiens
  source 1..17: mol_type = genomic DNA
tcctggctggctcgcca

SEQ ID NO: 25952 - DNA, 25 bp, Homo sapiens
  source 1..25: mol_type = genomic DNA
tcctgggttcgaatcccagcggggc

SEQ ID NO: 25953 - DNA, 26 bp, Homo sapiens
  source 1..26: mol_type = genomic DNA
tcctgggttcgaatcccagcggggcc

SEQ ID NO: 25954 - DNA, 28 bp, Homo sapiens
  source 1..28: mol_type = genomic DNA
tcctgggttcgaatcccagcggggcctc

SEQ ID NO: 25955 - DNA, 29 bp, Homo sapiens
  source 1..29: mol_type = genomic DNA
tcctgggttcgaatcccagcggggcctcc

SEQ ID NO: 25956 - DNA, 24 bp, Homo sapiens
  source 1..24: mol_type = genomic DNA
tcctgggttcgaatcccagcggtg

SEQ ID NO: 25957 - DNA, 28 bp, Homo sapiens
  source 1..28: mol_type = genomic DNA
tcctgggttcgaatcccagcggtgcctc

SEQ ID NO: 25958 - DNA, 29 bp, Homo sapiens
  source 1..29: mol_type = genomic DNA
tcctgggttcgaatcccagcggtgcctcc

SEQ ID NO: 25959 - DNA, 23 bp, Homo sapiens
  source 1..23: mol_type = genomic DNA
tcctgggttcgagccccagtgga

SEQ ID NO: 25960 - DNA, 29 bp, Homo sapiens
  source 1..29: mol_type = genomic DNA
tcctgggttcgagccccagtggaaccacc

SEQ ID NO: 25961 - DNA, 30 bp, Homo sapiens
  source 1..30: mol_type = genomic DNA
tcctgggttcgagccccagtggaaccacca

SEQ ID NO: 25962 - DNA, 23 bp, Homo sapiens
  source 1..23: mol_type = genomic DNA
tcctggttttcacccaggcggcc

SEQ ID NO: 25963 - DNA, 26 bp, Homo sapiens
  source 1..26: mol_type = genomic DNA
tcctggttttcacccaggcggcccgg

SEQ ID NO: 25964 - DNA, 30 bp, Homo sapiens
  source 1..30: mol_type = genomic DNA
tcctggttttcacccaggcggcccgggttc

SEQ ID NO: 25965 - DNA, 35 bp, Homo sapiens
  source 1..35: mol_type = genomic DNA
tcctggttttcacccaggcggcccgggttcgactc

SEQ ID NO: 25966 - DNA, 31 bp, Homo sapiens
  source 1..31: mol_type = genomic DNA
tcctggttttcacccaggtggcccgggttcg

SEQ ID NO: 25967 - DNA, 16 bp, Homo sapiens
  source 1..16: mol_type = genomic DNA
tcctgtcggctacgcc

SEQ ID NO: 25968 - DNA, 17 bp, Homo sapiens
  source 1..17: mol_type = genomic DNA
tcctgtcggctacgcca

SEQ ID NO: 25969 - DNA, 16 bp, Homo sapiens
  source 1..16: mol_type = genomic DNA
tcctgttcgtgacgcc

SEQ ID NO: 25970 - DNA, 17 bp, Homo sapiens
  source 1..17: mol_type = genomic DNA
tcctgttcgtgacgcca

SEQ ID NO: 25971 - DNA, 20 bp, Homo sapiens
  source 1..20: mol_type = genomic DNA
tccttagcgcagtaggcagc

SEQ ID NO: 25972 - DNA, 16 bp, Homo sapiens
  source 1..16: mol_type = genomic DNA
tccttaggtcgctggt

SEQ ID NO: 25973 - DNA, 17 bp, Homo sapiens
  source 1..17: mol_type = genomic DNA
tccttaggtcgctggtt

SEQ ID NO: 25974 - DNA, 18 bp, Homo sapiens
  source 1..18: mol_type = genomic DNA
tccttaggtcgctggttc

SEQ ID NO: 25975 - DNA, 19 bp, Homo sapiens
  source 1..19: mol_type = genomic DNA
tccttaggtcgctggttcg

SEQ ID NO: 25976 - DNA, 29 bp, Homo sapiens
  source 1..29: mol_type = genomic DNA
tccttaggtcgctggttcgaatccggctc

SEQ ID NO: 25977 - DNA, 30 bp, Homo sapiens
  source 1..30: mol_type = genomic DNA
tccttaggtcgctggttcgaatccggctcg

SEQ ID NO: 25978 - DNA, 31 bp, Homo sapiens
  source 1..31: mol_type = genomic DNA
tccttaggtcgctggttcgaatccggctcga

SEQ ID NO: 25979 - DNA, 32 bp, Homo sapiens
  source 1..32: mol_type = genomic DNA
tccttaggtcgctggttcgaatccggctcgaa

SEQ ID NO: 25980 - DNA, 33 bp, Homo sapiens
  source 1..33: mol_type = genomic DNA
tccttaggtcgctggttcgaatccggctcgaag

SEQ ID NO: 25981 - DNA, 37 bp, Homo sapiens
  source 1..37: mol_type = genomic DNA
tccttaggtcgctggttcgaatccggctcgaaggacc

SEQ ID NO: 25982 - DNA, 28 bp, Homo sapiens
  source 1..28: mol_type = genomic DNA
tccttaggtcgctggttcgattccggct

SEQ ID NO: 25983 - DNA, 30 bp, Homo sapiens
  source 1..30: mol_type = genomic DNA
tccttaggtcgctggttcgattccggctcg

SEQ ID NO: 25984 - DNA, 31 bp, Homo sapiens
  source 1..31: mol_type = genomic DNA
tccttaggtcgctggttcgattccggctcga

SEQ ID NO: 25985 - DNA, 32 bp, Homo sapiens
  source 1..32: mol_type = genomic DNA
tccttaggtcgctggttcgattccggctcgaa

SEQ ID NO: 25986 - DNA, 33 bp, Homo sapiens
  source 1..33: mol_type = genomic DNA
tccttaggtcgctggttcgattccggctcgaag

SEQ ID NO: 25987 - DNA, 37 bp, Homo sapiens
  source 1..37: mol_type = genomic DNA
tccttaggtcgctggttcgattccggctcgaaggacc

SEQ ID NO: 25988 - DNA, 16 bp, Homo sapiens
  source 1..16: mol_type = genomic DNA
tccttccttttttgcc

SEQ ID NO: 25989 - DNA, 17 bp, Homo sapiens
  source 1..17: mol_type = genomic DNA
tccttccttttttgcca

SEQ ID NO: 25990 - DNA, 21 bp, Homo sapiens
  source 1..21: mol_type = genomic DNA
tccttggtggtctagtggcta

SEQ ID NO: 25991 - DNA, 16 bp, Homo sapiens
  source 1..16: mol_type = genomic DNA
tcgaaaccatcctctg

SEQ ID NO: 25992 - DNA, 17 bp, Homo sapiens
  source 1..17: mol_type = genomic DNA
tcgaaaccatcctctgc

SEQ ID NO: 25993 - DNA, 18 bp, Homo sapiens
  source 1..18: mol_type = genomic DNA
tcgaaaccatcctctgct

SEQ ID NO: 25994 - DNA, 19 bp, Homo sapiens
  source 1..19: mol_type = genomic DNA
tcgaaaccatcctctgcta

SEQ ID NO: 25995 - DNA, 20 bp, Homo sapiens
  source 1..20: mol_type = genomic DNA
tcgaaaccatcctctgctac

SEQ ID NO: 25996 - DNA, 21 bp, Homo sapiens
  source 1..21: mol_type = genomic DNA
tcgaaaccatcctctgctacc

SEQ ID NO: 25997 - DNA, 22 bp, Homo sapiens
  source 1..22: mol_type = genomic DNA
tcgaaaccatcctctgctacca

SEQ ID NO: 25998 - DNA, 21 bp, Homo sapiens
  source 1..21: mol_type = genomic DNA
tcgaaaccgagcggaaacacc

SEQ ID NO: 25999 - DNA, 20 bp, Homo sapiens
  source 1..20: mol_type = genomic DNA
tcgaaaccgggcagaagcac

SEQ ID NO: 26000 - DNA, 21 bp, Homo sapiens
  source 1..21: mol_type = genomic DNA
tcgaaaccgggcagaagcacc

SEQ ID NO: 26001 - DNA, 22 bp, Homo sapiens
  source 1..22: mol_type = genomic DNA
tcgaaaccgggcagaagcacca

SEQ ID NO: 26002 - DNA, 16 bp, Homo sapiens
  source 1..16: mol_type = genomic DNA
tcgaaaccgggcggaa

SEQ ID NO: 26003 - DNA, 17 bp, Homo sapiens
  source 1..17: mol_type = genomic DNA
tcgaaaccgggcggaaa

SEQ ID NO: 26004 - DNA, 18 bp, Homo sapiens
  source 1..18: mol_type = genomic DNA
tcgaaaccgggcggaaac

SEQ ID NO: 26005 - DNA, 19 bp, Homo sapiens
  source 1..19: mol_type = genomic DNA
tcgaaaccgggcggaaaca

SEQ ID NO: 26006 - DNA, 20 bp, Homo sapiens
  source 1..20: mol_type = genomic DNA
tcgaaaccgggcggaaacac

SEQ ID NO: 26007 - DNA, 21 bp, Homo sapiens
  source 1..21: mol_type = genomic DNA
tcgaaaccgggcggaaacacc

SEQ ID NO: 26008 - DNA, 22 bp, Homo sapiens
  source 1..22: mol_type = genomic DNA
tcgaaaccgggcggaaacacca

SEQ ID NO: 26009 - DNA, 22 bp, Homo sapiens
  source 1..22: mol_type = genomic DNA
tcgaaatccaatggggtctccc

SEQ ID NO: 26010 - DNA, 19 bp, Homo sapiens
  source 1..19: mol_type = genomic DNA
tcgaaccccactcctggta

SEQ ID NO: 26011 - DNA, 20 bp, Homo sapiens
  source 1..20: mol_type = genomic DNA
tcgaaccccactcctggtac

SEQ ID NO: 26012 - DNA, 21 bp, Homo sapiens
  source 1..21: mol_type = genomic DNA
tcgaaccccactcctggtacc

SEQ ID NO: 26013 - DNA, 22 bp, Homo sapiens
  source 1..22: mol_type = genomic DNA
tcgaaccccactcctggtacca

SEQ ID NO: 26014 - DNA, 19 bp, Homo sapiens
  source 1..19: mol_type = genomic DNA
tcgaaccccacttctggta

SEQ ID NO: 26015 - DNA, 21 bp, Homo sapiens
  source 1..21: mol_type = genomic DNA
tcgaaccccacttctggtacc

SEQ ID NO: 26016 - DNA, 21 bp, Homo sapiens
  source 1..21: mol_type = genomic DNA
tcgaaccccgtacgggccacc

SEQ ID NO: 26017 - DNA, 16 bp, Homo sapiens
  source 1..16: mol_type = genomic DNA
tcgaaccccgtccgtg

SEQ ID NO: 26018 - DNA, 18 bp, Homo sapiens
  source 1..18: mol_type = genomic DNA
tcgaaccccgtccgtgcc

SEQ ID NO: 26019 - DNA, 19 bp, Homo sapiens
  source 1..19: mol_type = genomic DNA
tcgaaccccgtccgtgcct

SEQ ID NO: 26020 - DNA, 20 bp, Homo sapiens
  source 1..20: mol_type = genomic DNA
tcgaaccccgtccgtgcctc

SEQ ID NO: 26021 - DNA, 21 bp, Homo sapiens
  source 1..21: mol_type = genomic DNA
tcgaaccccgtccgtgcctcc

SEQ ID NO: 26022 - DNA, 22 bp, Homo sapiens
  source 1..22: mol_type = genomic DNA
tcgaaccccgtccgtgcctcca

SEQ ID NO: 26023 - DNA, 16 bp, Homo sapiens
  source 1..16: mol_type = genomic DNA
tcgaaccctgctcgct

SEQ ID NO: 26024 - DNA, 20 bp, Homo sapiens
  source 1..20: mol_type = genomic DNA
tcgaaccctgctcgctgcgc

SEQ ID NO: 26025 - DNA, 21 bp, Homo sapiens
  source 1..21: mol_type = genomic DNA
tcgaaccctgctcgctgcgcc

SEQ ID NO: 26026 - DNA, 22 bp, Homo sapiens
  source 1..22: mol_type = genomic DNA
tcgaaccctgctcgctgcgcca

SEQ ID NO: 26027 - DNA, 16 bp, Homo sapiens
  source 1..16: mol_type = genomic DNA
tcgaacctcagagggg

SEQ ID NO: 26028 - DNA, 21 bp, Homo sapiens
  source 1..21: mol_type = genomic DNA
tcgaacctcagagggggcacc

SEQ ID NO: 26029 - DNA, 22 bp, Homo sapiens
  source 1..22: mol_type = genomic DNA
tcgaacctcagagggggcacca

SEQ ID NO: 26030 - DNA, 16 bp, Homo sapiens
  source 1..16: mol_type = genomic DNA
tcgaagaagcagcttc

SEQ ID NO: 26031 - DNA, 21 bp, Homo sapiens
  source 1..21: mol_type = genomic DNA
tcgaagaagcagcttcaaacc

SEQ ID NO: 26032 - DNA, 22 bp, Homo sapiens
  source 1..22: mol_type = genomic DNA
tcgaagaagcagcttcaaacct

SEQ ID NO: 26033 - DNA, 23 bp, Homo sapiens
  source 1..23: mol_type = genomic DNA
tcgaagaagcagcttcaaacctg

SEQ ID NO: 26034 - DNA, 24 bp, Homo sapiens
  source 1..24: mol_type = genomic DNA
tcgaagaagcagcttcaaacctgc

SEQ ID NO: 26035 - DNA, 25 bp, Homo sapiens
  source 1..25: mol_type = genomic DNA
tcgaagaagcagcttcaaacctgcc

SEQ ID NO: 26036 - DNA, 26 bp, Homo sapiens
  source 1..26: mol_type = genomic DNA
tcgaagaagcagcttcaaacctgccg

SEQ ID NO: 26037 - DNA, 28 bp, Homo sapiens
  source 1..28: mol_type = genomic DNA
tcgaagaagcagcttcaaacctgccggg

SEQ ID NO: 26038 - DNA, 29 bp, Homo sapiens
  source 1..29: mol_type = genomic DNA
tcgaagaagcagcttcaaacctgccgggg

SEQ ID NO: 26039 - DNA, 30 bp, Homo sapiens
  source 1..30: mol_type = genomic DNA
tcgaagaagcagcttcaaacctgccggggc

SEQ ID NO: 26040 - DNA, 31 bp, Homo sapiens
  source 1..31: mol_type = genomic DNA
tcgaagaagcagcttcaaacctgccggggct

SEQ ID NO: 26041 - DNA, 32 bp, Homo sapiens
  source 1..32: mol_type = genomic DNA
tcgaagaagcagcttcaaacctgccggggctt

SEQ ID NO: 26042 - DNA, 33 bp, Homo sapiens
  source 1..33: mol_type = genomic DNA
tcgaagaagcagcttcaaacctgccggggcttc

SEQ ID NO: 26043 - DNA, 34 bp, Homo sapiens
  source 1..34: mol_type = genomic DNA
tcgaagaagcagcttcaaacctgccggggcttcc

SEQ ID NO: 26044 - DNA, 35 bp, Homo sapiens
  source 1..35: mol_type = genomic DNA
tcgaagaagcagcttcaaacctgccggggcttcca

SEQ ID NO: 26045 - DNA, 19 bp, Homo sapiens
  source 1..19: mol_type = genomic DNA
tcgaatcacgtcggggtca

SEQ ID NO: 26046 - DNA, 20 bp, Homo sapiens
  source 1..20: mol_type = genomic DNA
tcgaatcacgtcggggtcac

SEQ ID NO: 26047 - DNA, 21 bp, Homo sapiens
  source 1..21: mol_type = genomic DNA
tcgaatcacgtcggggtcacc

SEQ ID NO: 26048 - DNA, 22 bp, Homo sapiens
  source 1..22: mol_type = genomic DNA
tcgaatcacgtcggggtcacca

SEQ ID NO: 26049 - DNA, 18 bp, Homo sapiens
  source 1..18: mol_type = genomic DNA
tcgaatcccaccactgcc

SEQ ID NO: 26050 - DNA, 21 bp, Homo sapiens
  source 1..21: mol_type = genomic DNA
tcgaatcccaccactgccacc

SEQ ID NO: 26051 - DNA, 21 bp, Homo sapiens
  source 1..21: mol_type = genomic DNA
tcgaatcccaccctcgtcgcc

SEQ ID NO: 26052 - DNA, 22 bp, Homo sapiens
  source 1..22: mol_type = genomic DNA
tcgaatcccaccctcgtcgcca

SEQ ID NO: 26053 - DNA, 16 bp, Homo sapiens
  source 1..16: mol_type = genomic DNA
tcgaatcccaccgctg

SEQ ID NO: 26054 - DNA, 18 bp, Homo sapiens
  source 1..18: mol_type = genomic DNA
tcgaatcccaccgctgcc

SEQ ID NO: 26055 - DNA, 19 bp, Homo sapiens
  source 1..19: mol_type = genomic DNA
tcgaatcccaccgctgcca

SEQ ID NO: 26056 - DNA, 20 bp, Homo sapiens
  source 1..20: mol_type = genomic DNA
tcgaatcccaccgctgccac

SEQ ID NO: 26057 - DNA, 21 bp, Homo sapiens
  source 1..21: mol_type = genomic DNA
tcgaatcccaccgctgccacc

SEQ ID NO: 26058 - DNA, 22 bp, Homo sapiens
  source 1..22: mol_type = genomic DNA
tcgaatcccaccgctgccacca

SEQ ID NO: 26059 - DNA, 21 bp, Homo sapiens
  source 1..21: mol_type = genomic DNA
tcgaatcccaccttcgtcgcc

SEQ ID NO: 26060 - DNA, 22 bp, Homo sapiens
  source 1..22: mol_type = genomic DNA
tcgaatcccaccttcgtcgcca

SEQ ID NO: 26061 - DNA, 19 bp, Homo sapiens
  source 1..19: mol_type = genomic DNA
tcgaatcccactcctgaca

SEQ ID NO: 26062 - DNA, 20 bp, Homo sapiens
  source 1..20: mol_type = genomic DNA
tcgaatcccactcctgacac

SEQ ID NO: 26063 - DNA, 21 bp, Homo sapiens
  source 1..21: mol_type = genomic DNA
tcgaatcccactcctgacacc

SEQ ID NO: 26064 - DNA, 22 bp, Homo sapiens
  source 1..22: mol_type = genomic DNA
tcgaatcccactcctgacacca

SEQ ID NO: 26065 - DNA, 16 bp, Homo sapiens
  source 1..16: mol_type = genomic DNA
tcgaatcccacttctg

SEQ ID NO: 26066 - DNA, 17 bp, Homo sapiens
  source 1..17: mol_type = genomic DNA
tcgaatcccacttctga

SEQ ID NO: 26067 - DNA, 18 bp, Homo sapiens
  source 1..18: mol_type = genomic DNA
tcgaatcccacttctgac

SEQ ID NO: 26068 - DNA, 19 bp, Homo sapiens
  source 1..19: mol_type = genomic DNA
tcgaatcccacttctgaca

SEQ ID NO: 26069 - DNA, 20 bp, Homo sapiens
  source 1..20: mol_type = genomic DNA
tcgaatcccacttctgacac

SEQ ID NO: 26070 - DNA, 21 bp, Homo sapiens
  source 1..21: mol_type = genomic DNA
tcgaatcccacttctgacacc

SEQ ID NO: 26071 - DNA, 22 bp, Homo sapiens
  source 1..22: mol_type = genomic DNA
tcgaatcccacttctgacacca

SEQ ID NO: 26072 - DNA, 22 bp, Homo sapiens
  source 1..22: mol_type = genomic DNA
tcgaatcccagcggggcctcca

SEQ ID NO: 26073 - DNA, 16 bp, Homo sapiens
  source 1..16: mol_type = genomic DNA
tcgaatcccagcggtg

SEQ ID NO: 26074 - DNA, 18 bp, Homo sapiens
  source 1..18: mol_type = genomic DNA
tcgaatcccagcggtgcc

SEQ ID NO: 26075 - DNA, 19 bp, Homo sapiens
  source 1..19: mol_type = genomic DNA
tcgaatcccagcggtgcct

SEQ ID NO: 26076 - DNA, 20 bp, Homo sapiens
  source 1..20: mol_type = genomic DNA
tcgaatcccagcggtgcctc

SEQ ID NO: 26077 - DNA, 21 bp, Homo sapiens
  source 1..21: mol_type = genomic DNA
tcgaatcccagcggtgcctcc

SEQ ID NO: 26078 - DNA, 22 bp, Homo sapiens
  source 1..22: mol_type = genomic DNA
tcgaatcccagcggtgcctcca

SEQ ID NO: 26079 - DNA, 19 bp, Homo sapiens
  source 1..19: mol_type = genomic DNA
tcgaatcccagtagagcct

SEQ ID NO: 26080 - DNA, 21 bp, Homo sapiens
  source 1..21: mol_type = genomic DNA
tcgaatcccagtagagcctcc

SEQ ID NO: 26081 - DNA, 22 bp, Homo sapiens
  source 1..22: mol_type = genomic DNA
tcgaatcccagtagagcctcca

SEQ ID NO: 26082 - DNA, 19 bp, Homo sapiens
  source 1..19: mol_type = genomic DNA
tcgaatcccatcctcgtcg

SEQ ID NO: 26083 - DNA, 20 bp, Homo sapiens
  source 1..20: mol_type = genomic DNA
tcgaatcccatcctcgtcgc

SEQ ID NO: 26084 - DNA, 21 bp, Homo sapiens
  source 1..21: mol_type = genomic DNA
tcgaatcccatcctcgtcgcc

SEQ ID NO: 26085 - DNA, 22 bp, Homo sapiens
  source 1..22: mol_type = genomic DNA
tcgaatcccatcctcgtcgcca

SEQ ID NO: 26086 - DNA, 22 bp, Homo sapiens
  source 1..22: mol_type = genomic DNA
tcgaatcccttcgtggttgcca

SEQ ID NO: 26087 - DNA, 16 bp, Homo sapiens
  source 1..16: mol_type = genomic DNA
tcgaatccgagtcacg

SEQ ID NO: 26088 - DNA, 17 bp, Homo sapiens
  source 1..17: mol_type = genomic DNA
tcgaatccgagtcacgg

SEQ ID NO: 26089 - DNA, 18 bp, Homo sapiens
  source 1..18: mol_type = genomic DNA
tcgaatccgagtcacggc

SEQ ID NO: 26090 - DNA, 19 bp, Homo sapiens
  source 1..19: mol_type = genomic DNA
tcgaatccgagtcacggca

SEQ ID NO: 26091 - DNA, 20 bp, Homo sapiens
  source 1..20: mol_type = genomic DNA
tcgaatccgagtcacggcac

SEQ ID NO: 26092 - DNA, 21 bp, Homo sapiens
  source 1..21: mol_type = genomic DNA
tcgaatccgagtcacggcacc

SEQ ID NO: 26093 - DNA, 22 bp, Homo sapiens
  source 1..22: mol_type = genomic DNA
tcgaatccgagtcacggcacca

SEQ ID NO: 26094 - DNA, 19 bp, Homo sapiens
  source 1..19: mol_type = genomic DNA
tcgaatccggctcgaagga

SEQ ID NO: 26095 - DNA, 20 bp, Homo sapiens
  source 1..20: mol_type = genomic DNA
tcgaatccggctcgaaggac

SEQ ID NO: 26096 - DNA, 21 bp, Homo sapiens
  source 1..21: mol_type = genomic DNA
tcgaatccggctcgaaggacc

SEQ ID NO: 26097 - DNA, 22 bp, Homo sapiens
  source 1..22: mol_type = genomic DNA
tcgaatccggctcgaaggacca

SEQ ID NO: 26098 - DNA, 21 bp, Homo sapiens
  source 1..21: mol_type = genomic DNA
tcgaatccggctcggaggacc

SEQ ID NO: 26099 - DNA, 16 bp, Homo sapiens
  source 1..16: mol_type = genomic DNA
tcgaatcctgccgact

SEQ ID NO: 26100 - DNA, 20 bp, Homo sapiens
  source 1..20: mol_type = genomic DNA
tcgaatcctgccgactacgc

SEQ ID NO: 26101 - DNA, 21 bp, Homo sapiens
  source 1..21: mol_type = genomic DNA
tcgaatcctgccgactacgcc

SEQ ID NO: 26102 - DNA, 22 bp, Homo sapiens
  source 1..22: mol_type = genomic DNA
tcgaatcctgccgactacgcca

SEQ ID NO: 26103 - DNA, 21 bp, Homo sapiens
  source 1..21: mol_type = genomic DNA
tcgaatcctgctcacagcgcc

SEQ ID NO: 26104 - DNA, 22 bp, Homo sapiens
  source 1..22: mol_type = genomic DNA
tcgaatcctgtcggctacgcca

SEQ ID NO: 26105 - DNA, 21 bp, Homo sapiens
  source 1..21: mol_type = genomic DNA
tcgaatcctgttcgtgacgcc

SEQ ID NO: 26106 - DNA, 22 bp, Homo sapiens
  source 1..22: mol_type = genomic DNA
tcgaatcctgttcgtgacgcca

SEQ ID NO: 26107 - DNA, 18 bp, Homo sapiens
  source 1..18: mol_type = genomic DNA
tcgactcattaaattatg

SEQ ID NO: 26108 - DNA, 20 bp, Homo sapiens
  source 1..20: mol_type = genomic DNA
tcgactcattaaattatgat

SEQ ID NO: 26109 - DNA, 21 bp, Homo sapiens
  source 1..21: mol_type = genomic DNA
tcgactcattaaattatgata

SEQ ID NO: 26110 - DNA, 24 bp, Homo sapiens
  source 1..24: mol_type = genomic DNA
tcgactcattaaattatgataatc

SEQ ID NO: 26111 - DNA, 26 bp, Homo sapiens
  source 1..26: mol_type = genomic DNA
tcgactcattaaattatgataatcat

SEQ ID NO: 26112 - DNA, 29 bp, Homo sapiens
  source 1..29: mol_type = genomic DNA
tcgactcattaaattatgataatcatatt

SEQ ID NO: 26113 - DNA, 30 bp, Homo sapiens
  source 1..30: mol_type = genomic DNA
tcgactcattaaattatgataatcatattt

SEQ ID NO: 26114 - DNA, 31 bp, Homo sapiens
  source 1..31: mol_type = genomic DNA
tcgactcattaaattatgataatcatattta

SEQ ID NO: 26115 - DNA, 32 bp, Homo sapiens
  source 1..32: mol_type = genomic DNA
tcgactcattaaattatgataatcatatttac

SEQ ID NO: 26116 - DNA, 33 bp, Homo sapiens
  source 1..33: mol_type = genomic DNA
tcgactcattaaattatgataatcatatttacc

SEQ ID NO: 26117 - DNA, 34 bp, Homo sapiens
  source 1..34: mol_type = genomic DNA
tcgactcattaaattatgataatcatatttacca

SEQ ID NO: 26118 - DNA, 35 bp, Homo sapiens
  source 1..35: mol_type = genomic DNA
tcgactcattaaattatgataatcatatttaccaa

SEQ ID NO: 26119 - DNA, 36 bp, Homo sapiens
  source 1..36: mol_type = genomic DNA
tcgactcattaaattatgataatcatatttaccaac

SEQ ID NO: 26120 - DNA, 37 bp, Homo sapiens
  source 1..37: mol_type = genomic DNA
tcgactcattaaattatgataatcatatttaccaacc

SEQ ID NO: 26121 - DNA, 38 bp, Homo sapiens
  source 1..38: mol_type = genomic DNA
tcgactcattaaattatgataatcatatttaccaacca

SEQ ID NO: 26122 - DNA, 17 bp, Homo sapiens
  source 1..17: mol_type = genomic DNA
tcgactcccagtggggc

SEQ ID NO: 26123 - DNA, 20 bp, Homo sapiens
  source 1..20: mol_type = genomic DNA
tcgactcccggtatgggaac

SEQ ID NO: 26124 - DNA, 21 bp, Homo sapiens
  source 1..21: mol_type = genomic DNA
tcgactcccggtatgggaacc

SEQ ID NO: 26125 - DNA, 18 bp, Homo sapiens
  source 1..18: mol_type = genomic DNA
tcgactcccggtgtggga

SEQ ID NO: 26126 - DNA, 20 bp, Homo sapiens
  source 1..20: mol_type = genomic DNA
tcgactcccggtgtgggaac

SEQ ID NO: 26127 - DNA, 21 bp, Homo sapiens
  source 1..21: mol_type = genomic DNA
tcgactcccggtgtgggaacc

SEQ ID NO: 26128 - DNA, 22 bp, Homo sapiens
  source 1..22: mol_type = genomic DNA
tcgactcccggtgtgggaacca

SEQ ID NO: 26129 - DNA, 16 bp, Homo sapiens
  source 1..16: mol_type = genomic DNA
tcgactcctggctggc

SEQ ID NO: 26130 - DNA, 17 bp, Homo sapiens
  source 1..17: mol_type = genomic DNA
tcgactcctggctggct

SEQ ID NO: 26131 - DNA, 18 bp, Homo sapiens
  source 1..18: mol_type = genomic DNA
tcgactcctggctggctc

SEQ ID NO: 26132 - DNA, 19 bp, Homo sapiens
  source 1..19: mol_type = genomic DNA
tcgactcctggctggctcg

SEQ ID NO: 26133 - DNA, 20 bp, Homo sapiens
  source 1..20: mol_type = genomic DNA
tcgactcctggctggctcgc

SEQ ID NO: 26134 - DNA, 21 bp, Homo sapiens
  source 1..21: mol_type = genomic DNA
tcgactcctggctggctcgcc

SEQ ID NO: 26135 - DNA, 22 bp, Homo sapiens
  source 1..22: mol_type = genomic DNA
tcgactcctggctggctcgcca

SEQ ID NO: 26136 - DNA, 22 bp, Homo sapiens
  source 1..22: mol_type = genomic DNA
tcgagccccacgttgggcgcca

SEQ ID NO: 26137 - DNA, 21 bp, Homo sapiens
  source 1..21: mol_type = genomic DNA
tcgagccccactcccggtacc

SEQ ID NO: 26138 - DNA, 16 bp, Homo sapiens
  source 1..16: mol_type = genomic DNA
tcgagccccagtggaa

SEQ ID NO: 26139 - DNA, 17 bp, Homo sapiens
  source 1..17: mol_type = genomic DNA
tcgagccccagtggaac

SEQ ID NO: 26140 - DNA, 18 bp, Homo sapiens
  source 1..18: mol_type = genomic DNA
tcgagccccagtggaacc

SEQ ID NO: 26141 - DNA, 19 bp, Homo sapiens
  source 1..19: mol_type = genomic DNA
tcgagccccagtggaacca

SEQ ID NO: 26142 - DNA, 20 bp, Homo sapiens
  source 1..20: mol_type = genomic DNA
tcgagccccagtggaaccac

SEQ ID NO: 26143 - DNA, 21 bp, Homo sapiens
  source 1..21: mol_type = genomic DNA
tcgagccccagtggaaccacc

SEQ ID NO: 26144 - DNA, 22 bp, Homo sapiens
  source 1..22: mol_type = genomic DNA
tcgagccccagtggaaccacca

SEQ ID NO: 26145 - DNA, 19 bp, Homo sapiens
  source 1..19: mol_type = genomic DNA
tcgagcctcacctggagca

SEQ ID NO: 26146 - DNA, 20 bp, Homo sapiens
  source 1..20: mol_type = genomic DNA
tcgagcctcacctggagcac

SEQ ID NO: 26147 - DNA, 21 bp, Homo sapiens
  source 1..21: mol_type = genomic DNA
tcgagcctcacctggagcacc

SEQ ID NO: 26148 - DNA, 22 bp, Homo sapiens
  source 1..22: mol_type = genomic DNA
tcgagcctcacctggagcacca

SEQ ID NO: 26149 - DNA, 21 bp, Homo sapiens
  source 1..21: mol_type = genomic DNA
tcgagcctcagagagggcacc

SEQ ID NO: 26150 - DNA, 22 bp, Homo sapiens
  source 1..22: mol_type = genomic DNA
tcgagcctcagagagggcacca

SEQ ID NO: 26151 - DNA, 21 bp, Homo sapiens
  source 1..21: mol_type = genomic DNA
tcgagtcccaccagagtcgcc

SEQ ID NO: 26152 - DNA, 19 bp, Homo sapiens
  source 1..19: mol_type = genomic DNA
tcgagtcccatctggggtg

SEQ ID NO: 26153 - DNA, 21 bp, Homo sapiens
  source 1..21: mol_type = genomic DNA
tcgagtcccatctggggtgcc

SEQ ID NO: 26154 - DNA, 22 bp, Homo sapiens
  source 1..22: mol_type = genomic DNA
tcgagtcccatctggggtgcca

SEQ ID NO: 26155 - DNA, 19 bp, Homo sapiens
  source 1..19: mol_type = genomic DNA
tcgagtcccatctgggtcg

SEQ ID NO: 26156 - DNA, 21 bp, Homo sapiens
  source 1..21: mol_type = genomic DNA
tcgagtcccatctgggtcgcc

SEQ ID NO: 26157 - DNA, 22 bp, Homo sapiens
  source 1..22: mol_type = genomic DNA
tcgagtcccatctgggtcgcca

SEQ ID NO: 26158 - DNA, 19 bp, Homo sapiens
  source 1..19: mol_type = genomic DNA
tcgagtcccggcggagtcg

SEQ ID NO: 26159 - DNA, 22 bp, Homo sapiens
  source 1..22: mol_type = genomic DNA
tcgagtcccggcggagtcgcca

SEQ ID NO: 26160 - DNA, 21 bp, Homo sapiens
  source 1..21: mol_type = genomic DNA
tcgagtcccttcgtggtcgcc

SEQ ID NO: 26161 - DNA, 22 bp, Homo sapiens
  source 1..22: mol_type = genomic DNA
tcgagtcccttcgtggtcgcca

SEQ ID NO: 26162 - DNA, 21 bp, Homo sapiens
  source 1..21: mol_type = genomic DNA
tcgagtcctgccgcggtcgcc

SEQ ID NO: 26163 - DNA, 22 bp, Homo sapiens
  source 1..22: mol_type = genomic DNA
tcgagtcctgccgcggtcgcca

SEQ ID NO: 26164 - DNA, 19 bp, Homo sapiens
  source 1..19: mol_type = genomic DNA
tcgagtctcggtggaacct

SEQ ID NO: 26165 - DNA, 20 bp, Homo sapiens
  source 1..20: mol_type = genomic DNA
tcgagtctcggtggaacctc

SEQ ID NO: 26166 - DNA, 21 bp, Homo sapiens
  source 1..21: mol_type = genomic DNA
tcgagtctcggtggaacctcc

SEQ ID NO: 26167 - DNA, 19 bp, Homo sapiens
  source 1..19: mol_type = genomic DNA
tcgatagagcatgagactc

SEQ ID NO: 26168 - DNA, 33 bp, Homo sapiens
  source 1..33: mol_type = genomic DNA
tcgatagctcagctggtagagcggaggactgta

SEQ ID NO: 26169 - DNA, 30 bp, Homo sapiens
  source 1..30: mol_type = genomic DNA
tcgatagctcagttggtagagcggaggact

SEQ ID NO: 26170 - DNA, 31 bp, Homo sapiens
  source 1..31: mol_type = genomic DNA
tcgatagctcagttggtagagcggaggactg

SEQ ID NO: 26171 - DNA, 33 bp, Homo sapiens
  source 1..33: mol_type = genomic DNA
tcgatagctcagttggtagagcggaggactgta

SEQ ID NO: 26172 - DNA, 20 bp, Homo sapiens
  source 1..20: mol_type = genomic DNA
tcgatccccagcatctccac

SEQ ID NO: 26173 - DNA, 21 bp, Homo sapiens
  source 1..21: mol_type = genomic DNA
tcgatccccagcatctccacc

SEQ ID NO: 26174 - DNA, 22 bp, Homo sapiens
  source 1..22: mol_type = genomic DNA
tcgatccccagcatctccacca

SEQ ID NO: 26175 - DNA, 19 bp, Homo sapiens
  source 1..19: mol_type = genomic DNA
tcgatccccggcatctcca

SEQ ID NO: 26176 - DNA, 21 bp, Homo sapiens
  source 1..21: mol_type = genomic DNA
tcgatccccggcatctccacc

SEQ ID NO: 26177 - DNA, 22 bp, Homo sapiens
  source 1..22: mol_type = genomic DNA
tcgatccccggcatctccacca

SEQ ID NO: 26178 - DNA, 17 bp, Homo sapiens
  source 1..17: mol_type = genomic DNA
tcgatccccgtacgggc

SEQ ID NO: 26179 - DNA, 18 bp, Homo sapiens
  source 1..18: mol_type = genomic DNA
tcgatccccgtacgggcc

SEQ ID NO: 26180 - DNA, 19 bp, Homo sapiens
  source 1..19: mol_type = genomic DNA
tcgatccccgtacgggcca

SEQ ID NO: 26181 - DNA, 21 bp, Homo sapiens
  source 1..21: mol_type = genomic DNA
tcgatccccgtacgggccacc

SEQ ID NO: 26182 - DNA, 22 bp, Homo sapiens
  source 1..22: mol_type = genomic DNA
tcgatccccgtacgggccacca

SEQ ID NO: 26183 - DNA, 20 bp, Homo sapiens
  source 1..20: mol_type = genomic DNA
tcgatccccgtactggccac

SEQ ID NO: 26184 - DNA, 22 bp, Homo sapiens
  source 1..22: mol_type = genomic DNA
tcgatccccgtactggccacca

SEQ ID NO: 26185 - DNA, 19 bp, Homo sapiens
  source 1..19: mol_type = genomic DNA
tcgatcccgggcggaaaca

SEQ ID NO: 26186 - DNA, 21 bp, Homo sapiens
  source 1..21: mol_type = genomic DNA
tcgatcccgggcggaaacacc

SEQ ID NO: 26187 - DNA, 22 bp, Homo sapiens
  source 1..22: mol_type = genomic DNA
tcgatcccgggcggaaacacca

SEQ ID NO: 26188 - DNA, 19 bp, Homo sapiens
  source 1..19: mol_type = genomic DNA
tcgatcccgggtttcggca

SEQ ID NO: 26189 - DNA, 20 bp, Homo sapiens
  source 1..20: mol_type = genomic DNA
tcgatcccgggtttcggcac

SEQ ID NO: 26190 - DNA, 21 bp, Homo sapiens
  source 1..21: mol_type = genomic DNA
tcgatcccgggtttcggcacc

SEQ ID NO: 26191 - DNA, 22 bp, Homo sapiens
  source 1..22: mol_type = genomic DNA
tcgatcccgggtttcggcacca

SEQ ID NO: 26192 - DNA, 22 bp, Homo sapiens
  source 1..22: mol_type = genomic DNA
tcgatcctcacctggagcacca

SEQ ID NO: 26193 - DNA, 20 bp, Homo sapiens
  source 1..20: mol_type = genomic DNA
tcgatcctcgctggggcctc

SEQ ID NO: 26194 - DNA, 21 bp, Homo sapiens
  source 1..21: mol_type = genomic DNA
tcgatgcccgcatcctccacc

SEQ ID NO: 26195 - DNA, 22 bp, Homo sapiens
  source 1..22: mol_type = genomic DNA
tcgatgcccgcatcctccacca

SEQ ID NO: 26196 - DNA, 21 bp, Homo sapiens
  source 1..21: mol_type = genomic DNA
tcgatgcccgcattctccacc

SEQ ID NO: 26197 - DNA, 16 bp, Homo sapiens
  source 1..16: mol_type = genomic DNA
tcgatggatcgaaacc

SEQ ID NO: 26198 - DNA, 17 bp, Homo sapiens
  source 1..17: mol_type = genomic DNA
tcgatggatcgaaacca

SEQ ID NO: 26199 - DNA, 25 bp, Homo sapiens
  source 1..25: mol_type = genomic DNA
tcgatggatcgaaaccatcctctgc

SEQ ID NO: 26200 - DNA, 26 bp, Homo sapiens
  source 1..26: mol_type = genomic DNA
tcgatggatcgaaaccatcctctgct

SEQ ID NO: 26201 - DNA, 27 bp, Homo sapiens
  source 1..27: mol_type = genomic DNA
tcgatggatcgaaaccatcctctgcta

SEQ ID NO: 26202 - DNA, 28 bp, Homo sapiens
  source 1..28: mol_type = genomic DNA
tcgatggatcgaaaccatcctctgctac

SEQ ID NO: 26203 - DNA, 29 bp, Homo sapiens
  source 1..29: mol_type = genomic DNA
tcgatggatcgaaaccatcctctgctacc

SEQ ID NO: 26204 - DNA, 30 bp, Homo sapiens
  source 1..30: mol_type = genomic DNA
tcgatggatcgaaaccatcctctgctacca

SEQ ID NO: 26205 - DNA, 16 bp, Homo sapiens
  source 1..16: mol_type = genomic DNA
tcgatggcgtgggttc

SEQ ID NO: 26206 - DNA, 17 bp, Homo sapiens
  source 1..17: mol_type = genomic DNA
tcgatggcgtgggttcg

SEQ ID NO: 26207 - DNA, 23 bp, Homo sapiens
  source 1..23: mol_type = genomic DNA
tcgatggcgtgggttcgaatccc

SEQ ID NO: 26208 - DNA, 24 bp, Homo sapiens
  source 1..24: mol_type = genomic DNA
tcgatggcgtgggttcgaatccca

SEQ ID NO: 26209 - DNA, 26 bp, Homo sapiens
  source 1..26: mol_type = genomic DNA
tcgatggcgtgggttcgaatcccacc

SEQ ID NO: 26210 - DNA, 27 bp, Homo sapiens
  source 1..27: mol_type = genomic DNA
tcgatggcgtgggttcgaatcccaccg

SEQ ID NO: 26211 - DNA, 30 bp, Homo sapiens
  source 1..30: mol_type = genomic DNA
tcgatggcgtgggttcgaatcccaccgctg

SEQ ID NO: 26212 - DNA, 35 bp, Homo sapiens
  source 1..35: mol_type = genomic DNA
tcgatggcgtgggttcgaatcccaccgctgccacc

SEQ ID NO: 26213 - DNA, 16 bp, Homo sapiens
  source 1..16: mol_type = genomic DNA
tcgattccccgacggg

SEQ ID NO: 26214 - DNA, 19 bp, Homo sapiens
  source 1..19: mol_type = genomic DNA
tcgattccccgacggggag

SEQ ID NO: 26215 - DNA, 20 bp, Homo sapiens
  source 1..20: mol_type = genomic DNA
tcgattccccgacggggagc

SEQ ID NO: 26216 - DNA, 21 bp, Homo sapiens
  source 1..21: mol_type = genomic DNA
tcgattccccgacggggagcc

SEQ ID NO: 26217 - DNA, 22 bp, Homo sapiens
  source 1..22: mol_type = genomic DNA
tcgattccccgacggggagcca

SEQ ID NO: 26218 - DNA, 17 bp, Homo sapiens
  source 1..17: mol_type = genomic DNA
tcgattcccggccaacg

SEQ ID NO: 26219 - DNA, 19 bp, Homo sapiens
  source 1..19: mol_type = genomic DNA
tcgattcccggccaacgca

SEQ ID NO: 26220 - DNA, 20 bp, Homo sapiens
  source 1..20: mol_type = genomic DNA
tcgattcccggccaacgcac

SEQ ID NO: 26221 - DNA, 21 bp, Homo sapiens
  source 1..21: mol_type = genomic DNA
tcgattcccggccaacgcacc

SEQ ID NO: 26222 - DNA, 22 bp, Homo sapiens
  source 1..22: mol_type = genomic DNA
tcgattcccggccaacgcacca

SEQ ID NO: 26223 - DNA, 17 bp, Homo sapiens
  source 1..17: mol_type = genomic DNA
tcgattcccggccaatg

SEQ ID NO: 26224 - DNA, 19 bp, Homo sapiens
  source 1..19: mol_type = genomic DNA
tcgattcccggccaatgca

SEQ ID NO: 26225 - DNA, 20 bp, Homo sapiens
  source 1..20: mol_type = genomic DNA
tcgattcccggccaatgcac

SEQ ID NO: 26226 - DNA, 21 bp, Homo sapiens
  source 1..21: mol_type = genomic DNA
tcgattcccggccaatgcacc

SEQ ID NO: 26227 - DNA, 22 bp, Homo sapiens
  source 1..22: mol_type = genomic DNA
tcgattcccggccaatgcacca

SEQ ID NO: 26228 - DNA, 21 bp, Homo sapiens
  source 1..21: mol_type = genomic DNA
tcgattcccggcccatgcacc

SEQ ID NO: 26229 - DNA, 22 bp, Homo sapiens
  source 1..22: mol_type = genomic DNA
tcgattcccggcccatgcacca

SEQ ID NO: 26230 - DNA, 16 bp, Homo sapiens
  source 1..16: mol_type = genomic DNA
tcgattcccgggcggc

SEQ ID NO: 26231 - DNA, 18 bp, Homo sapiens
  source 1..18: mol_type = genomic DNA
tcgattcccgggcggcgc

SEQ ID NO: 26232 - DNA, 19 bp, Homo sapiens
  source 1..19: mol_type = genomic DNA
tcgattcccgggcggcgca

SEQ ID NO: 26233 - DNA, 20 bp, Homo sapiens
  source 1..20: mol_type = genomic DNA
tcgattcccgggcggcgcac

SEQ ID NO: 26234 - DNA, 21 bp, Homo sapiens
  source 1..21: mol_type = genomic DNA
tcgattcccgggcggcgcacc

SEQ ID NO: 26235 - DNA, 22 bp, Homo sapiens
  source 1..22: mol_type = genomic DNA
tcgattcccgggcggcgcacca

SEQ ID NO: 26236 - DNA, 20 bp, Homo sapiens
  source 1..20: mol_type = genomic DNA
tcgattcccggtcagggaac

SEQ ID NO: 26237 - DNA, 21 bp, Homo sapiens
  source 1..21: mol_type = genomic DNA
tcgattcccggtcagggaacc

SEQ ID NO: 26238 - DNA, 22 bp, Homo sapiens
  source 1..22: mol_type = genomic DNA
tcgattcccggtcagggaacca

SEQ ID NO: 26239 - DNA, 19 bp, Homo sapiens
  source 1..19: mol_type = genomic DNA
tcgattccggctcgaagga

SEQ ID NO: 26240 - DNA, 20 bp, Homo sapiens
  source 1..20: mol_type = genomic DNA
tcgattccggctcgaaggac

SEQ ID NO: 26241 - DNA, 21 bp, Homo sapiens
  source 1..21: mol_type = genomic DNA
tcgattccggctcgaaggacc

SEQ ID NO: 26242 - DNA, 22 bp, Homo sapiens
  source 1..22: mol_type = genomic DNA
tcgattccggctcgaaggacca

SEQ ID NO: 26243 - DNA, 19 bp, Homo sapiens
  source 1..19: mol_type = genomic DNA
tcgattccttccttttttg

SEQ ID NO: 26244 - DNA, 20 bp, Homo sapiens
  source 1..20: mol_type = genomic DNA
tcgattccttccttttttgc

SEQ ID NO: 26245 - DNA, 21 bp, Homo sapiens
  source 1..21: mol_type = genomic DNA
tcgattccttccttttttgcc

SEQ ID NO: 26246 - DNA, 22 bp, Homo sapiens
  source 1..22: mol_type = genomic DNA
tcgattccttccttttttgcca

SEQ ID NO: 26247 - DNA, 19 bp, Homo sapiens
  source 1..19: mol_type = genomic DNA
tcgattctcatagtcctag

SEQ ID NO: 26248 - DNA, 20 bp, Homo sapiens
  source 1..20: mol_type = genomic DNA
tcgattctcatagtcctagc

SEQ ID NO: 26249 - DNA, 21 bp, Homo sapiens
  source 1..21: mol_type = genomic DNA
tcgattctcatagtcctagcc

SEQ ID NO: 26250 - DNA, 22 bp, Homo sapiens
  source 1..22: mol_type = genomic DNA
tcgattctcatagtcctagcca

SEQ ID NO: 26251 - DNA, 18 bp, Homo sapiens
  source 1..18: mol_type = genomic DNA
tcgcataaaacttaaaac

SEQ ID NO: 26252 - DNA, 20 bp, Homo sapiens
  source 1..20: mol_type = genomic DNA
tcgcataaaacttaaaactt

SEQ ID NO: 26253 - DNA, 21 bp, Homo sapiens
  source 1..21: mol_type = genomic DNA
tcgcataaaacttaaaacttt

SEQ ID NO: 26254 - DNA, 25 bp, Homo sapiens
  source 1..25: mol_type = genomic DNA
tcgcataaaacttaaaactttacag

SEQ ID NO: 26255 - DNA, 27 bp, Homo sapiens
  source 1..27: mol_type = genomic DNA
tcgcataaaacttaaaactttacagtc

SEQ ID NO: 26256 - DNA, 29 bp, Homo sapiens
  source 1..29: mol_type = genomic DNA
tcgcataaaacttaaaactttacagtcag

SEQ ID NO: 26257 - DNA, 30 bp, Homo sapiens
  source 1..30: mol_type = genomic DNA
tcgcataaaacttaaaactttacagtcaga

SEQ ID NO: 26258 - DNA, 31 bp, Homo sapiens
  source 1..31: mol_type = genomic DNA
tcgcataaaacttaaaactttacagtcagag

SEQ ID NO: 26259 - DNA, 32 bp, Homo sapiens
  source 1..32: mol_type = genomic DNA
tcgcataaaacttaaaactttacagtcagagg

SEQ ID NO: 26260 - DNA, 33 bp, Homo sapiens
  source 1..33: mol_type = genomic DNA
tcgcataaaacttaaaactttacagtcagaggt

SEQ ID NO: 26261 - DNA, 34 bp, Homo sapiens
  source 1..34: mol_type = genomic DNA
tcgcataaaacttaaaactttacagtcagaggtt

SEQ ID NO: 26262 - DNA, 35 bp, Homo sapiens
  source 1..35: mol_type = genomic DNA
tcgcataaaacttaaaactttacagtcagaggttc

SEQ ID NO: 26263 - DNA, 46 bp, Homo sapiens
  source 1..46: mol_type = genomic DNA
tcgcataaaacttaaaactttacagtcagaggttcaattcctcttc

SEQ ID NO: 26264 - DNA, 22 bp, Homo sapiens
  source 1..22: mol_type = genomic DNA
tcgcctgccacgcgggaggccc

SEQ ID NO: 26265 - DNA, 24 bp, Homo sapiens
  source 1..24: mol_type = genomic DNA
tcgcctgccacgcgggaggcccgg

SEQ ID NO: 26266 - DNA, 25 bp, Homo sapiens
  source 1..25: mol_type = genomic DNA
tcgcctgccacgcgggaggcccggg

SEQ ID NO: 26267 - DNA, 26 bp, Homo sapiens
  source 1..26: mol_type = genomic DNA
tcgcctgccacgcgggaggcccgggt

SEQ ID NO: 26268 - DNA, 27 bp, Homo sapiens
  source 1..27: mol_type = genomic DNA
tcgcctgccacgcgggaggcccgggtt

SEQ ID NO: 26269 - DNA, 28 bp, Homo sapiens
  source 1..28: mol_type = genomic DNA
tcgcctgccacgcgggaggcccgggttc

SEQ ID NO: 26270 - DNA, 17 bp, Homo sapiens
  source 1..17: mol_type = genomic DNA
tcgcgagttcaaatctc

SEQ ID NO: 26271 - DNA, 25 bp, Homo sapiens
  source 1..25: mol_type = genomic DNA
tcgcgagttcaaatctcgctggggc

SEQ ID NO: 26272 - DNA, 26 bp, Homo sapiens
  source 1..26: mol_type = genomic DNA
tcgcgagttcaaatctcgctggggcc

SEQ ID NO: 26273 - DNA, 27 bp, Homo sapiens
  source 1..27: mol_type = genomic DNA
tcgcgagttcaaatctcgctggggcct

SEQ ID NO: 26274 - DNA, 28 bp, Homo sapiens
  source 1..28: mol_type = genomic DNA
tcgcgagttcaaatctcgctggggcctc

SEQ ID NO: 26275 - DNA, 29 bp, Homo sapiens
  source 1..29: mol_type = genomic DNA
tcgcgagttcaaatctcgctggggcctcc

SEQ ID NO: 26276 - DNA, 25 bp, Homo sapiens
  source 1..25: mol_type = genomic DNA
tcgcgagttcaattctcgctggggc

SEQ ID NO: 26277 - DNA, 26 bp, Homo sapiens
  source 1..26: mol_type = genomic DNA
tcgcgagttcaattctcgctggggcc

SEQ ID NO: 26278 - DNA, 27 bp, Homo sapiens
  source 1..27: mol_type = genomic DNA
tcgcgagttcaattctcgctggggcct

SEQ ID NO: 26279 - DNA, 28 bp, Homo sapiens
  source 1..28: mol_type = genomic DNA
tcgcgagttcaattctcgctggggcctc

SEQ ID NO: 26280 - DNA, 29 bp, Homo sapiens
  source 1..29: mol_type = genomic DNA
tcgcgagttcaattctcgctggggcctcc

SEQ ID NO: 26281 - DNA, 16 bp, Homo sapiens
  source 1..16: mol_type = genomic DNA
tcgcgagttcgatcct

SEQ ID NO: 26282 - DNA, 26 bp, Homo sapiens
  source 1..26: mol_type = genomic DNA
tcgcgagttcgatcctcgctggggcc

SEQ ID NO: 26283 - DNA, 27 bp, Homo sapiens
  source 1..27: mol_type = genomic DNA
tcgcgagttcgatcctcgctggggcct

SEQ ID NO: 26284 - DNA, 28 bp, Homo sapiens
  source 1..28: mol_type = genomic DNA
tcgcgagttcgatcctcgctggggcctc

SEQ ID NO: 26285 - DNA, 29 bp, Homo sapiens
  source 1..29: mol_type = genomic DNA
tcgcgagttcgatcctcgctggggcctcc

SEQ ID NO: 26286 - DNA, 25 bp, Homo sapiens
  source 1..25: mol_type = genomic DNA
tcgcgggttcgaaccccgtacgggc

SEQ ID NO: 26287 - DNA, 26 bp, Homo sapiens
  source 1..26: mol_type = genomic DNA
tcgcgggttcgaaccccgtacgggcc

SEQ ID NO: 26288 - DNA, 27 bp, Homo sapiens
  source 1..27: mol_type = genomic DNA
tcgcgggttcgaaccccgtacgggcca

SEQ ID NO: 26289 - DNA, 28 bp, Homo sapiens
  source 1..28: mol_type = genomic DNA
tcgcgggttcgaaccccgtacgggccac

SEQ ID NO: 26290 - DNA, 29 bp, Homo sapiens
  source 1..29: mol_type = genomic DNA
tcgcgggttcgaaccccgtacgggccacc

SEQ ID NO: 26291 - DNA, 30 bp, Homo sapiens
  source 1..30: mol_type = genomic DNA
tcgcgggttcgaaccccgtacgggccacca

SEQ ID NO: 26292 - DNA, 25 bp, Homo sapiens
  source 1..25: mol_type = genomic DNA
tcgcgggttcgatccccgtacgggc

SEQ ID NO: 26293 - DNA, 26 bp, Homo sapiens
  source 1..26: mol_type = genomic DNA
tcgcgggttcgatccccgtacgggcc

SEQ ID NO: 26294 - DNA, 27 bp, Homo sapiens
  source 1..27: mol_type = genomic DNA
tcgcgggttcgatccccgtacgggcca

SEQ ID NO: 26295 - DNA, 28 bp, Homo sapiens
  source 1..28: mol_type = genomic DNA
tcgcgggttcgatccccgtacgggccac

SEQ ID NO: 26296 - DNA, 29 bp, Homo sapiens
  source 1..29: mol_type = genomic DNA
tcgcgggttcgatccccgtacgggccacc

SEQ ID NO: 26297 - DNA, 30 bp, Homo sapiens
  source 1..30: mol_type = genomic DNA
tcgcgggttcgatccccgtacgggccacca

SEQ ID NO: 26298 - DNA, 25 bp, Homo sapiens
  source 1..25: mol_type = genomic DNA
tcgcgggttcgatccccgtactggc

SEQ ID NO: 26299 - DNA, 19 bp, Homo sapiens
  source 1..19: mol_type = genomic DNA
tcgctggttcgaatccggc

SEQ ID NO: 26300 - DNA, 27 bp, Homo sapiens
  source 1..27: mol_type = genomic DNA
tcgctggttcgaatccggctcgaagga

SEQ ID NO: 26301 - DNA, 28 bp, Homo sapiens
  source 1..28: mol_type = genomic DNA
tcgctggttcgaatccggctcgaaggac

SEQ ID NO: 26302 - DNA, 29 bp, Homo sapiens
  source 1..29: mol_type = genomic DNA
tcgctggttcgaatccggctcgaaggacc

SEQ ID NO: 26303 - DNA, 30 bp, Homo sapiens
  source 1..30: mol_type = genomic DNA
tcgctggttcgaatccggctcgaaggacca

SEQ ID NO: 26304 - DNA, 27 bp, Homo sapiens
  source 1..27: mol_type = genomic DNA
tcgctggttcgaatccggctcggagga

SEQ ID NO: 26305 - DNA, 28 bp, Homo sapiens
  source 1..28: mol_type = genomic DNA
tcgctggttcgaatccggctcggaggac

SEQ ID NO: 26306 - DNA, 29 bp, Homo sapiens
  source 1..29: mol_type = genomic DNA
tcgctggttcgaatccggctcggaggacc

SEQ ID NO: 26307 - DNA, 30 bp, Homo sapiens
  source 1..30: mol_type = genomic DNA
tcgctggttcgaatccggctcggaggacca

SEQ ID NO: 26308 - DNA, 29 bp, Homo sapiens
  source 1..29: mol_type = genomic DNA
tcgctggttcgattccagctcgaaggacc

SEQ ID NO: 26309 - DNA, 19 bp, Homo sapiens
  source 1..19: mol_type = genomic DNA
tcgctggttcgattccggc

SEQ ID NO: 26310 - DNA, 20 bp, Homo sapiens
  source 1..20: mol_type = genomic DNA
tcgctggttcgattccggct

SEQ ID NO: 26311 - DNA, 26 bp, Homo sapiens
  source 1..26: mol_type = genomic DNA
tcgctggttcgattccggctcgaagg

SEQ ID NO: 26312 - DNA, 27 bp, Homo sapiens
  source 1..27: mol_type = genomic DNA
tcgctggttcgattccggctcgaagga

SEQ ID NO: 26313 - DNA, 28 bp, Homo sapiens
  source 1..28: mol_type = genomic DNA
tcgctggttcgattccggctcgaaggac

SEQ ID NO: 26314 - DNA, 29 bp, Homo sapiens
  source 1..29: mol_type = genomic DNA
tcgctggttcgattccggctcgaaggacc

SEQ ID NO: 26315 - DNA, 30 bp, Homo sapiens
  source 1..30: mol_type = genomic DNA
tcgctggttcgattccggctcgaaggacca

SEQ ID NO: 26316 - DNA, 24 bp, Homo sapiens
  source 1..24: mol_type = genomic DNA
tcgctttgggtgcgagaggtcccg

SEQ ID NO: 26317 - DNA, 26 bp, Homo sapiens
  source 1..26: mol_type = genomic DNA
tcggaggcgtgggttcgaatcccacc

SEQ ID NO: 26318 - DNA, 27 bp, Homo sapiens
  source 1..27: mol_type = genomic DNA
tcggaggcgtgggttcgaatcccaccg

SEQ ID NO: 26319 - DNA, 28 bp, Homo sapiens
  source 1..28: mol_type = genomic DNA
tcggaggcgtgggttcgaatcccaccgc

SEQ ID NO: 26320 - DNA, 30 bp, Homo sapiens
  source 1..30: mol_type = genomic DNA
tcggaggcgtgggttcgaatcccaccgctg

SEQ ID NO: 26321 - DNA, 31 bp, Homo sapiens
  source 1..31: mol_type = genomic DNA
tcggaggcgtgggttcgaatcccaccgctgc

SEQ ID NO: 26322 - DNA, 17 bp, Homo sapiens
  source 1..17: mol_type = genomic DNA
tcggatcagaagattga

SEQ ID NO: 26323 - DNA, 21 bp, Homo sapiens
  source 1..21: mol_type = genomic DNA
tcggatcagaagattgagggt

SEQ ID NO: 26324 - DNA, 42 bp, Homo sapiens
  source 1..42: mol_type = genomic DNA
tcggatcagaagattgagggttcgaatcccttcgtggttgcc

SEQ ID NO: 26325 - DNA, 19 bp, Homo sapiens
  source 1..19: mol_type = genomic DNA
tcggatcagaagattgcag

SEQ ID NO: 26326 - DNA, 23 bp, Homo sapiens
  source 1..23: mol_type = genomic DNA
tcggatcagaagattgcaggttc

SEQ ID NO: 26327 - DNA, 29 bp, Homo sapiens
  source 1..29: mol_type = genomic DNA
tcggatcagaagattgcaggttcgagtcc

SEQ ID NO: 26328 - DNA, 31 bp, Homo sapiens
  source 1..31: mol_type = genomic DNA
tcggatcagaagattgcaggttcgagtcctg

SEQ ID NO: 26329 - DNA, 41 bp, Homo sapiens
  source 1..41: mol_type = genomic DNA
tcggatcagaagattgcaggttcgagtcctgccgcggtcgc

SEQ ID NO: 26330 - DNA, 42 bp, Homo sapiens
  source 1..42: mol_type = genomic DNA
tcggatcagaagattgcaggttcgagtcctgccgcggtcgcc

SEQ ID NO: 26331 - DNA, 43 bp, Homo sapiens
  source 1..43: mol_type = genomic DNA
tcggatcagaagattgcaggttcgagtcctgccgcggtcgcca

SEQ ID NO: 26332 - DNA, 16 bp, Homo sapiens
  source 1..16: mol_type = genomic DNA
tcggcgctctcaccgc

SEQ ID NO: 26333 - DNA, 17 bp, Homo sapiens
  source 1..17: mol_type = genomic DNA
tcggcgctctcaccgcc

SEQ ID NO: 26334 - DNA, 23 bp, Homo sapiens
  source 1..23: mol_type = genomic DNA
tcggcgctctcaccgccgcggcc

SEQ ID NO: 26335 - DNA, 24 bp, Homo sapiens
  source 1..24: mol_type = genomic DNA
tcggcgctctcaccgccgcggccc

SEQ ID NO: 26336 - DNA, 25 bp, Homo sapiens
  source 1..25: mol_type = genomic DNA
tcggcgctctcaccgccgcggcccg

SEQ ID NO: 26337 - DNA, 27 bp, Homo sapiens
  source 1..27: mol_type = genomic DNA
tcggcgctctcaccgccgcggcccggg

SEQ ID NO: 26338 - DNA, 28 bp, Homo sapiens
  source 1..28: mol_type = genomic DNA
tcggcgctctcaccgccgcggcccgggt

SEQ ID NO: 26339 - DNA, 29 bp, Homo sapiens
  source 1..29: mol_type = genomic DNA
tcggcgctctcaccgccgcggcccgggtt

SEQ ID NO: 26340 - DNA, 30 bp, Homo sapiens
  source 1..30: mol_type = genomic DNA
tcggcgctctcaccgccgcggcccgggttc

SEQ ID NO: 26341 - DNA, 31 bp, Homo sapiens
  source 1..31: mol_type = genomic DNA
tcggcgctctcaccgccgcggcccgggttcg

SEQ ID NO: 26342 - DNA, 33 bp, Homo sapiens
  source 1..33: mol_type = genomic DNA
tcggcgctctcaccgccgcggcccgggttcgat

SEQ ID NO: 26343 - DNA, 34 bp, Homo sapiens
  source 1..34: mol_type = genomic DNA
tcggcgctctcaccgccgcggcccgggttcgatt

SEQ ID NO: 26344 - DNA, 35 bp, Homo sapiens
  source 1..35: mol_type = genomic DNA
tcggcgctctcaccgccgcggcccgggttcgattc

SEQ ID NO: 26345 - DNA, 39 bp, Homo sapiens
  source 1..39: mol_type = genomic DNA
tcggcgctctcaccgccgcggcccgggttcgattcccgg

SEQ ID NO: 26346 - DNA, 40 bp, Homo sapiens
  source 1..40: mol_type = genomic DNA
tcggcgctctcaccgccgcggcccgggttcgattcccggt

SEQ ID NO: 26347 - DNA, 48 bp, Homo sapiens
  source 1..48: mol_type = genomic DNA
tcggcgctctcaccgccgcggcccgggttcgattcccggtcagggaac

SEQ ID NO: 26348 - DNA, 17 bp, Homo sapiens
  source 1..17: mol_type = genomic DNA
tcggctgttaaccgaaa

SEQ ID NO: 26349 - DNA, 27 bp, Homo sapiens
  source 1..27: mol_type = genomic DNA
tcggctgttaaccgaaaggttggtggt

SEQ ID NO: 26350 - DNA, 16 bp, Homo sapiens
  source 1..16: mol_type = genomic DNA
tcgggcccataccccg

SEQ ID NO: 26351 - DNA, 18 bp, Homo sapiens
  source 1..18: mol_type = genomic DNA
tcgggcccataccccgaa

SEQ ID NO: 26352 - DNA, 19 bp, Homo sapiens
  source 1..19: mol_type = genomic DNA
tcgggcccataccccgaaa

SEQ ID NO: 26353 - DNA, 20 bp, Homo sapiens
  source 1..20: mol_type = genomic DNA
tcgggcccataccccgaaaa

SEQ ID NO: 26354 - DNA, 28 bp, Homo sapiens
  source 1..28: mol_type = genomic DNA
tcgggcccataccccgaaaatgttggtt

SEQ ID NO: 26355 - DNA, 29 bp, Homo sapiens
  source 1..29: mol_type = genomic DNA
tcgggcccataccccgaaaatgttggtta

SEQ ID NO: 26356 - DNA, 30 bp, Homo sapiens
  source 1..30: mol_type = genomic DNA
tcgggcccataccccgaaaatgttggttat

SEQ ID NO: 26357 - DNA, 31 bp, Homo sapiens
  source 1..31: mol_type = genomic DNA
tcgggcccataccccgaaaatgttggttata

SEQ ID NO: 26358 - DNA, 32 bp, Homo sapiens
  source 1..32: mol_type = genomic DNA
tcgggcccataccccgaaaatgttggttatac

SEQ ID NO: 26359 - DNA, 33 bp, Homo sapiens
  source 1..33: mol_type = genomic DNA
tcgggcccataccccgaaaatgttggttatacc

SEQ ID NO: 26360 - DNA, 34 bp, Homo sapiens
  source 1..34: mol_type = genomic DNA
tcgggcccataccccgaaaatgttggttataccc

SEQ ID NO: 26361 - DNA, 47 bp, Homo sapiens
  source 1..47: mol_type = genomic DNA
tcgggcccataccccgaaaatgttggttatacccttcccgtactacc

SEQ ID NO: 26362 - DNA, 48 bp, Homo sapiens
  source 1..48: mol_type = genomic DNA
tcgggcccataccccgaaaatgttggttatacccttcccgtactacca

SEQ ID NO: 26363 - DNA, 16 bp, Homo sapiens
  source 1..16: mol_type = genomic DNA
tcgggggcgtgggttc

SEQ ID NO: 26364 - DNA, 26 bp, Homo sapiens
  source 1..26: mol_type = genomic DNA
tcgggggcgtgggttcgaatcccacc

SEQ ID NO: 26365 - DNA, 27 bp, Homo sapiens
  source 1..27: mol_type = genomic DNA
tcgggggcgtgggttcgaatcccaccg

SEQ ID NO: 26366 - DNA, 29 bp, Homo sapiens
  source 1..29: mol_type = genomic DNA
tcgggggcgtgggttcgaatcccaccgct

SEQ ID NO: 26367 - DNA, 30 bp, Homo sapiens
  source 1..30: mol_type = genomic DNA
tcgggggcgtgggttcgaatcccaccgctg

SEQ ID NO: 26368 - DNA, 16 bp, Homo sapiens
  source 1..16: mol_type = genomic DNA
tcgggggcgtgggttt

SEQ ID NO: 26369 - DNA, 17 bp, Homo sapiens
  source 1..17: mol_type = genomic DNA
tcgggtgcgagaggtcc

SEQ ID NO: 26370 - DNA, 18 bp, Homo sapiens
  source 1..18: mol_type = genomic DNA
tcgggtgcgagaggtccc

SEQ ID NO: 26371 - DNA, 19 bp, Homo sapiens
  source 1..19: mol_type = genomic DNA
tcgggtgcgagaggtcccg

SEQ ID NO: 26372 - DNA, 21 bp, Homo sapiens
  source 1..21: mol_type = genomic DNA
tcgggtgcgagaggtcccggg

SEQ ID NO: 26373 - DNA, 22 bp, Homo sapiens
  source 1..22: mol_type = genomic DNA
tcgggtgcgagaggtcccgggt

SEQ ID NO: 26374 - DNA, 23 bp, Homo sapiens
  source 1..23: mol_type = genomic DNA
tcgggtgcgagaggtcccgggtt

SEQ ID NO: 26375 - DNA, 43 bp, Homo sapiens
  source 1..43: mol_type = genomic DNA
tcgggtgcgagaggtcccgggttcaaatcccggacgagccccc

SEQ ID NO: 26376 - DNA, 18 bp, Homo sapiens
  source 1..18: mol_type = genomic DNA
tcggtagagcataagact

SEQ ID NO: 26377 - DNA, 16 bp, Homo sapiens
  source 1..16: mol_type = genomic DNA
tcggtagagcatcaga

SEQ ID NO: 26378 - DNA, 17 bp, Homo sapiens
  source 1..17: mol_type = genomic DNA
tcggtagagcatcagac

SEQ ID NO: 26379 - DNA, 18 bp, Homo sapiens
  source 1..18: mol_type = genomic DNA
tcggtagagcatcagact

SEQ ID NO: 26380 - DNA, 19 bp, Homo sapiens
  source 1..19: mol_type = genomic DNA
tcggtagagcatcagactt

SEQ ID NO: 26381 - DNA, 20 bp, Homo sapiens
  source 1..20: mol_type = genomic DNA
tcggtagagcatcagacttt

SEQ ID NO: 26382 - DNA, 21 bp, Homo sapiens
  source 1..21: mol_type = genomic DNA
tcggtagagcatcagactttt

SEQ ID NO: 26383 - DNA, 25 bp, Homo sapiens
  source 1..25: mol_type = genomic DNA
tcggtagagcatcagacttttaatc

SEQ ID NO: 26384 - DNA, 37 bp, Homo sapiens
  source 1..37: mol_type = genomic DNA
tcggtagagcatcagacttttaatctgagggtccagg

SEQ ID NO: 26385 - DNA, 16 bp, Homo sapiens
  source 1..16: mol_type = genomic DNA
tcggtagagcatgaga

SEQ ID NO: 26386 - DNA, 17 bp, Homo sapiens
  source 1..17: mol_type = genomic DNA
tcggtagagcatgagac

SEQ ID NO: 26387 - DNA, 18 bp, Homo sapiens
  source 1..18: mol_type = genomic DNA
tcggtagagcatgagacc

SEQ ID NO: 26388 - DNA, 19 bp, Homo sapiens
  source 1..19: mol_type = genomic DNA
tcggtagagcatgagaccc

SEQ ID NO: 26389 - DNA, 20 bp, Homo sapiens
  source 1..20: mol_type = genomic DNA
tcggtagagcatgagaccct

SEQ ID NO: 26390 - DNA, 22 bp, Homo sapiens
  source 1..22: mol_type = genomic DNA
tcggtagagcatgagaccctta

SEQ ID NO: 26391 - DNA, 23 bp, Homo sapiens
  source 1..23: mol_type = genomic DNA
tcggtagagcatgagacccttaa

SEQ ID NO: 26392 - DNA, 24 bp, Homo sapiens
  source 1..24: mol_type = genomic DNA
tcggtagagcatgagacccttaat

SEQ ID NO: 26393 - DNA, 25 bp, Homo sapiens
  source 1..25: mol_type = genomic DNA
tcggtagagcatgagacccttaatc

SEQ ID NO: 26394 - DNA, 26 bp, Homo sapiens
  source 1..26: mol_type = genomic DNA
tcggtagagcatgagacccttaatct

SEQ ID NO: 26395 - DNA, 27 bp, Homo sapiens
  source 1..27: mol_type = genomic DNA
tcggtagagcatgagacccttaatctc

SEQ ID NO: 26396 - DNA, 18 bp, Homo sapiens
  source 1..18: mol_type = genomic DNA
tcggtagagcatgagact

SEQ ID NO: 26397 - DNA, 19 bp, Homo sapiens
  source 1..19: mol_type = genomic DNA
tcggtagagcatgagactc

SEQ ID NO: 26398 - DNA, 20 bp, Homo sapiens
  source 1..20: mol_type = genomic DNA
tcggtagagcatgagactct

SEQ ID NO: 26399 - DNA, 21 bp, Homo sapiens
  source 1..21: mol_type = genomic DNA
tcggtagagcatgagactctt

SEQ ID NO: 26400 - DNA, 22 bp, Homo sapiens
  source 1..22: mol_type = genomic DNA
tcggtagagcatgagactctta

SEQ ID NO: 26401 - DNA, 23 bp, Homo sapiens
  source 1..23: mol_type = genomic DNA
tcggtagagcatgagactcttaa

SEQ ID NO: 26402 - DNA, 24 bp, Homo sapiens
  source 1..24: mol_type = genomic DNA
tcggtagagcatgagactcttaat

SEQ ID NO: 26403 - DNA, 25 bp, Homo sapiens
  source 1..25: mol_type = genomic DNA
tcggtagagcatgagactcttaatc

SEQ ID NO: 26404 - DNA, 26 bp, Homo sapiens
  source 1..26: mol_type = genomic DNA
tcggtagagcatgagactcttaatct

SEQ ID NO: 26405 - DNA, 27 bp, Homo sapiens
  source 1..27: mol_type = genomic DNA
tcggtagagcatgagactcttaatctc

SEQ ID NO: 26406 - DNA, 28 bp, Homo sapiens
  source 1..28: mol_type = genomic DNA
tcggtagagcatgagactcttaatctca

SEQ ID NO: 26407 - DNA, 34 bp, Homo sapiens
  source 1..34: mol_type = genomic DNA
tcggtagagcatgagactcttaatctcagggtcg

SEQ ID NO: 26408 - DNA, 36 bp, Homo sapiens
  source 1..36: mol_type = genomic DNA
tcggtagagcatgagactcttaatctcagggtcgtg

SEQ ID NO: 26409 - DNA, 37 bp, Homo sapiens
  source 1..37: mol_type = genomic DNA
tcggtagagcatgagactcttaatctcagggtcgtgg

SEQ ID NO: 26410 - DNA, 38 bp, Homo sapiens
  source 1..38: mol_type = genomic DNA
tcggtagagcatgagactcttaatctcagggtcgtggg

SEQ ID NO: 26411 - DNA, 39 bp, Homo sapiens
  source 1..39: mol_type = genomic DNA
tcggtagagcatgagactcttaatctcagggtcgtgggt

SEQ ID NO: 26412 - DNA, 40 bp, Homo sapiens
  source 1..40: mol_type = genomic DNA
tcggtagagcatgagactcttaatctcagggtcgtgggtt

SEQ ID NO: 26413 - DNA, 41 bp, Homo sapiens
  source 1..41: mol_type = genomic DNA
tcggtagagcatgagactcttaatctcagggtcgtgggttc

SEQ ID NO: 26414 - DNA, 42 bp, Homo sapiens
  source 1..42: mol_type = genomic DNA
tcggtagagcatgagactcttaatctcagggtcgtgggttcg

SEQ ID NO: 26415 - DNA, 48 bp, Homo sapiens
  source 1..48: mol_type = genomic DNA
tcggtagagcatgagactcttaatctcagggtcgtgggttcgagcccc

SEQ ID NO: 26416 - DNA, 16 bp, Homo sapiens
  source 1..16: mol_type = genomic DNA
tcggtagagcatggga

SEQ ID NO: 26417 - DNA, 17 bp, Homo sapiens
  source 1..17: mol_type = genomic DNA
tcggtagagcatgggac

SEQ ID NO: 26418 - DNA, 18 bp, Homo sapiens
  source 1..18: mol_type = genomic DNA
tcggtagagcatgggact

SEQ ID NO: 26419 - DNA, 19 bp, Homo sapiens
  source 1..19: mol_type = genomic DNA
tcggtagagcatgggactc

SEQ ID NO: 26420 - DNA, 20 bp, Homo sapiens
  source 1..20: mol_type = genomic DNA
tcggtagagcatgggactct

SEQ ID NO: 26421 - DNA, 21 bp, Homo sapiens
  source 1..21: mol_type = genomic DNA
tcggtagagcatgggactctt

SEQ ID NO: 26422 - DNA, 22 bp, Homo sapiens
  source 1..22: mol_type = genomic DNA
tcggtagagcatgggactctta

SEQ ID NO: 26423 - DNA, 23 bp, Homo sapiens
  source 1..23: mol_type = genomic DNA
tcggtagagcatgggactcttaa

SEQ ID NO: 26424 - DNA, 24 bp, Homo sapiens
  source 1..24: mol_type = genomic DNA
tcggtagagcatgggactcttaat

SEQ ID NO: 26425 - DNA, 25 bp, Homo sapiens
  source 1..25: mol_type = genomic DNA
tcggtagagcatgggactcttaatc

SEQ ID NO: 26426 - DNA, 26 bp, Homo sapiens
  source 1..26: mol_type = genomic DNA
tcggtagagcatgggactcttaatcc

SEQ ID NO: 26427 - DNA, 27 bp, Homo sapiens
  source 1..27: mol_type = genomic DNA
tcggtagagcatgggactcttaatccc

SEQ ID NO: 26428 - DNA, 36 bp, Homo sapiens
  source 1..36: mol_type = genomic DNA
tcggtagagcatgggactcttaatcccagggtcgtg

SEQ ID NO: 26429 - DNA, 37 bp, Homo sapiens
  source 1..37: mol_type = genomic DNA
tcggtagagcatgggactcttaatcccagggtcgtgg

SEQ ID NO: 26430 - DNA, 38 bp, Homo sapiens
  source 1..38: mol_type = genomic DNA
tcggtagagcatgggactcttaatcccagggtcgtggg

SEQ ID NO: 26431 - DNA, 39 bp, Homo sapiens
  source 1..39: mol_type = genomic DNA
tcggtagagcatgggactcttaatcccagggtcgtgggt

SEQ ID NO: 26432 - DNA, 40 bp, Homo sapiens
  source 1..40: mol_type = genomic DNA
tcggtagagcatgggactcttaatcccagggtcgtgggtt

SEQ ID NO: 26433 - DNA, 41 bp, Homo sapiens
  source 1..41: mol_type = genomic DNA
tcggtagagcatgggactcttaatcccagggtcgtgggttc

SEQ ID NO: 26434 - DNA, 42 bp, Homo sapiens
  source 1..42: mol_type = genomic DNA
tcggtagagcatgggactcttaatcccagggtcgtgggttcg

SEQ ID NO: 26435 - DNA, 46 bp, Homo sapiens
  source 1..46: mol_type = genomic DNA
tcggtagagcatgggactcttaatcccagggtcgtgggttcgagcc

SEQ ID NO: 26436 - DNA, 48 bp, Homo sapiens
  source 1..48: mol_type = genomic DNA
tcggtagagcatgggactcttaatcccagggtcgtgggttcgagcccc

SEQ ID NO: 26437 - DNA, 26 bp, Homo sapiens
  source 1..26: mol_type = genomic DNA
tcggtagagcatgggactcttaatct

SEQ ID NO: 26438 - DNA, 27 bp, Homo sapiens
  source 1..27: mol_type = genomic DNA
tcggtagagcatgggactcttaatctc

SEQ ID NO: 26439 - DNA, 28 bp, Homo sapiens
  source 1..28: mol_type = genomic DNA
tcggtagagcatgggactcttaatctca

SEQ ID NO: 26440 - DNA, 36 bp, Homo sapiens
  source 1..36: mol_type = genomic DNA
tcggtagagcatgggactcttaatctcagggtcgtg

SEQ ID NO: 26441 - DNA, 37 bp, Homo sapiens
  source 1..37: mol_type = genomic DNA
tcggtagagcatgggactcttaatctcagggtcgtgg

SEQ ID NO: 26442 - DNA, 17 bp, Homo sapiens
  source 1..17: mol_type = genomic DNA
tcggttagcgcgcggta

SEQ ID NO: 26443 - DNA, 18 bp, Homo sapiens
  source 1..18: mol_type = genomic DNA
tcggttagcgcgcggtac

SEQ ID NO: 26444 - DNA, 19 bp, Homo sapiens
  source 1..19: mol_type = genomic DNA
tcggttagcgcgttcggct

SEQ ID NO: 26445 - DNA, 25 bp, Homo sapiens
  source 1..25: mol_type = genomic DNA
tcggttagcgcgttcggctgttaac

SEQ ID NO: 26446 - DNA, 26 bp, Homo sapiens
  source 1..26: mol_type = genomic DNA
tcggttagcgcgttcggctgttaacc

SEQ ID NO: 26447 - DNA, 21 bp, Homo sapiens
  source 1..21: mol_type = genomic DNA
tcggttcgaatccgagtcacg

SEQ ID NO: 26448 - DNA, 23 bp, Homo sapiens
  source 1..23: mol_type = genomic DNA
tcggttcgaatccgagtcacggc

SEQ ID NO: 26449 - DNA, 24 bp, Homo sapiens
  source 1..24: mol_type = genomic DNA
tcggttcgaatccgagtcacggca

SEQ ID NO: 26450 - DNA, 25 bp, Homo sapiens
  source 1..25: mol_type = genomic DNA
tcggttcgaatccgagtcacggcac

SEQ ID NO: 26451 - DNA, 26 bp, Homo sapiens
  source 1..26: mol_type = genomic DNA
tcggttcgaatccgagtcacggcacc

SEQ ID NO: 26452 - DNA, 18 bp, Homo sapiens
  source 1..18: mol_type = genomic DNA
tcgtaaacaggagatcct

SEQ ID NO: 26453 - DNA, 22 bp, Homo sapiens
  source 1..22: mol_type = genomic DNA
tcgtaaaccgaagatcacgggt

SEQ ID NO: 26454 - DNA, 32 bp, Homo sapiens
  source 1..32: mol_type = genomic DNA
tcgtaaaccgaagatcacgggttcgaaccccg

SEQ ID NO: 26455 - DNA, 37 bp, Homo sapiens
  source 1..37: mol_type = genomic DNA
tcgtaaaccgaagatcacgggttcgaaccccgtccgt

SEQ ID NO: 26456 - DNA, 19 bp, Homo sapiens
  source 1..19: mol_type = genomic DNA
tcgtaaaccgaagatcgcg

SEQ ID NO: 26457 - DNA, 22 bp, Homo sapiens
  source 1..22: mol_type = genomic DNA
tcgtaaaccgaagatcgcgggt

SEQ ID NO: 26458 - DNA, 24 bp, Homo sapiens
  source 1..24: mol_type = genomic DNA
tcgtaaaccgaagatcgcgggttc

SEQ ID NO: 26459 - DNA, 29 bp, Homo sapiens
  source 1..29: mol_type = genomic DNA
tcgtaaaccgaagatcgcgggttcgaacc

SEQ ID NO: 26460 - DNA, 36 bp, Homo sapiens
  source 1..36: mol_type = genomic DNA
tcgtaaaccgaagatcgcgggttcgaaccccgtccg

SEQ ID NO: 26461 - DNA, 43 bp, Homo sapiens
  source 1..43: mol_type = genomic DNA
tcgtaaaccgaagatcgcgggttcgaaccccgtccgtgcctcc

SEQ ID NO: 26462 - DNA, 16 bp, Homo sapiens
  source 1..16: mol_type = genomic DNA
tcgtatagtggttagt

SEQ ID NO: 26463 - DNA, 17 bp, Homo sapiens
  source 1..17: mol_type = genomic DNA
tcgtatagtggttagta

SEQ ID NO: 26464 - DNA, 18 bp, Homo sapiens
  source 1..18: mol_type = genomic DNA
tcgtatagtggttagtac

SEQ ID NO: 26465 - DNA, 19 bp, Homo sapiens
  source 1..19: mol_type = genomic DNA
tcgtatagtggttagtact

SEQ ID NO: 26466 - DNA, 20 bp, Homo sapiens
  source 1..20: mol_type = genomic DNA
tcgtatagtggttagtactc

SEQ ID NO: 26467 - DNA, 21 bp, Homo sapiens
  source 1..21: mol_type = genomic DNA
tcgtatagtggttagtactct

SEQ ID NO: 26468 - DNA, 22 bp, Homo sapiens
  source 1..22: mol_type = genomic DNA
tcgtatagtggttagtactctg

SEQ ID NO: 26469 - DNA, 23 bp, Homo sapiens
  source 1..23: mol_type = genomic DNA
tcgtatagtggttagtactctgc

SEQ ID NO: 26470 - DNA, 24 bp, Homo sapiens
  source 1..24: mol_type = genomic DNA
tcgtatagtggttagtactctgcg

SEQ ID NO: 26471 - DNA, 25 bp, Homo sapiens
  source 1..25: mol_type = genomic DNA
tcgtatagtggttagtactctgcgt

SEQ ID NO: 26472 - DNA, 26 bp, Homo sapiens
  source 1..26: mol_type = genomic DNA
tcgtatagtggttagtactctgcgtt

SEQ ID NO: 26473 - DNA, 27 bp, Homo sapiens
  source 1..27: mol_type = genomic DNA
tcgtatagtggttagtactctgcgttg

SEQ ID NO: 26474 - DNA, 28 bp, Homo sapiens
  source 1..28: mol_type = genomic DNA
tcgtatagtggttagtactctgcgttgt

SEQ ID NO: 26475 - DNA, 29 bp, Homo sapiens
  source 1..29: mol_type = genomic DNA
tcgtatagtggttagtactctgcgttgtg

SEQ ID NO: 26476 - DNA, 32 bp, Homo sapiens
  source 1..32: mol_type = genomic DNA
tcgtatagtggttagtactctgcgttgtggcc

SEQ ID NO: 26477 - DNA, 37 bp, Homo sapiens
  source 1..37: mol_type = genomic DNA
tcgtatagtggttagtactctgcgttgtggccgcagc

SEQ ID NO: 26478 - DNA, 41 bp, Homo sapiens
  source 1..41: mol_type = genomic DNA
tcgtatagtggttagtactctgcgttgtggccgcagcaacc

SEQ ID NO: 26479 - DNA, 42 bp, Homo sapiens
  source 1..42: mol_type = genomic DNA
tcgtatagtggttagtactctgcgttgtggccgcagcaacct

SEQ ID NO: 26480 - DNA, 43 bp, Homo sapiens
  source 1..43: mol_type = genomic DNA
tcgtatagtggttagtactctgcgttgtggccgcagcaacctc

SEQ ID NO: 26481 - DNA, 44 bp, Homo sapiens
  source 1..44: mol_type = genomic DNA
tcgtatagtggttagtactctgcgttgtggccgcagcaacctcg

SEQ ID NO: 26482 - DNA, 46 bp, Homo sapiens
  source 1..46: mol_type = genomic DNA
tcgtatagtggttagtactctgcgttgtggccgcagcaacctcggt

SEQ ID NO: 26483 - DNA, 27 bp, Homo sapiens
  source 1..27: mol_type = genomic DNA
tcgtgagttcgagcctcacacggggca

SEQ ID NO: 26484 - DNA, 28 bp, Homo sapiens
  source 1..28: mol_type = genomic DNA
tcgtgagttcgagcctcacacggggcac

SEQ ID NO: 26485 - DNA, 30 bp, Homo sapiens
  source 1..30: mol_type = genomic DNA
tcgtgagttcgagcctcacacggggcacca

SEQ ID NO: 26486 - DNA, 26 bp, Homo sapiens
  source 1..26: mol_type = genomic DNA
tcgtgagttcgatcctcacacggggc

SEQ ID NO: 26487 - DNA, 27 bp, Homo sapiens
  source 1..27: mol_type = genomic DNA
tcgtgagttcgatcctcacacggggca

SEQ ID NO: 26488 - DNA, 28 bp, Homo sapiens
  source 1..28: mol_type = genomic DNA
tcgtgagttcgatcctcacacggggcac

SEQ ID NO: 26489 - DNA, 29 bp, Homo sapiens
  source 1..29: mol_type = genomic DNA
tcgtgagttcgatcctcacacggggcacc

SEQ ID NO: 26490 - DNA, 19 bp, Homo sapiens
  source 1..19: mol_type = genomic DNA
tcgtggccgagtggttaag

SEQ ID NO: 26491 - DNA, 30 bp, Homo sapiens
  source 1..30: mol_type = genomic DNA
tcgtggcgcaacggtagcgcgtctgactcc

SEQ ID NO: 26492 - DNA, 30 bp, Homo sapiens
  source 1..30: mol_type = genomic DNA
tcgtggcgcaatggtagcgcgtctgactcc

SEQ ID NO: 26493 - DNA, 25 bp, Homo sapiens
  source 1..25: mol_type = genomic DNA
tcgtgggttcgagccccacgttggg

SEQ ID NO: 26494 - DNA, 26 bp, Homo sapiens
  source 1..26: mol_type = genomic DNA
tcgtgggttcgagccccacgttgggc

SEQ ID NO: 26495 - DNA, 27 bp, Homo sapiens
  source 1..27: mol_type = genomic DNA
tcgtgggttcgagccccacgttgggcg

SEQ ID NO: 26496 - DNA, 28 bp, Homo sapiens
  source 1..28: mol_type = genomic DNA
tcgtgggttcgagccccacgttgggcgc

SEQ ID NO: 26497 - DNA, 29 bp, Homo sapiens
  source 1..29: mol_type = genomic DNA
tcgtgggttcgagccccacgttgggcgcc

SEQ ID NO: 26498 - DNA, 30 bp, Homo sapiens
  source 1..30: mol_type = genomic DNA
tcgtgggttcgagccccacgttgggcgcca

SEQ ID NO: 26499 - DNA, 28 bp, Homo sapiens
  source 1..28: mol_type = genomic DNA
tcgtgggttcgagccgcacgttgggcgc

SEQ ID NO: 26500 - DNA, 16 bp, Homo sapiens
  source 1..16: mol_type = genomic DNA
tcgtggttgtagtccg

SEQ ID NO: 26501 - DNA, 17 bp, Homo sapiens
  source 1..17: mol_type = genomic DNA
tcgtggttgtagtccgt

SEQ ID NO: 26502 - DNA, 18 bp, Homo sapiens
  source 1..18: mol_type = genomic DNA
tcgtggttgtagtccgtg

SEQ ID NO: 26503 - DNA, 19 bp, Homo sapiens
  source 1..19: mol_type = genomic DNA
tcgtggttgtagtccgtgc

SEQ ID NO: 26504 - DNA, 20 bp, Homo sapiens
  source 1..20: mol_type = genomic DNA
tcgtggttgtagtccgtgcg

SEQ ID NO: 26505 - DNA, 21 bp, Homo sapiens
  source 1..21: mol_type = genomic DNA
tcgtggttgtagtccgtgcga

SEQ ID NO: 26506 - DNA, 22 bp, Homo sapiens
  source 1..22: mol_type = genomic DNA
tcgtggttgtagtccgtgcgag

SEQ ID NO: 26507 - DNA, 23 bp, Homo sapiens
  source 1..23: mol_type = genomic DNA
tcgtggttgtagtccgtgcgaga

SEQ ID NO: 26508 - DNA, 24 bp, Homo sapiens
  source 1..24: mol_type = genomic DNA
tcgtggttgtagtccgtgcgagaa

SEQ ID NO: 26509 - DNA, 25 bp, Homo sapiens
  source 1..25: mol_type = genomic DNA
tcgtggttgtagtccgtgcgagaat

SEQ ID NO: 26510 - DNA, 26 bp, Homo sapiens
  source 1..26: mol_type = genomic DNA
tcgtggttgtagtccgtgcgagaata

SEQ ID NO: 26511 - DNA, 27 bp, Homo sapiens
  source 1..27: mol_type = genomic DNA
tcgtggttgtagtccgtgcgagaatac

SEQ ID NO: 26512 - DNA, 28 bp, Homo sapiens
  source 1..28: mol_type = genomic DNA
tcgtggttgtagtccgtgcgagaatacc

SEQ ID NO: 26513 - DNA, 29 bp, Homo sapiens
  source 1..29: mol_type = genomic DNA
tcgtggttgtagtccgtgcgagaatacca

SEQ ID NO: 26514 - DNA, 16 bp, Homo sapiens
  source 1..16: mol_type = genomic DNA
tcgttagcgcagtagg

SEQ ID NO: 26515 - DNA, 18 bp, Homo sapiens
  source 1..18: mol_type = genomic DNA
tcgttagcgcagtaggca

SEQ ID NO: 26516 - DNA, 19 bp, Homo sapiens
  source 1..19: mol_type = genomic DNA
tcgttagcgcagtaggtag

SEQ ID NO: 26517 - DNA, 20 bp, Homo sapiens
  source 1..20: mol_type = genomic DNA
tcgttagcgcagtaggtagc

SEQ ID NO: 26518 - DNA, 25 bp, Homo sapiens
  source 1..25: mol_type = genomic DNA
tcgttagtatagtggtgagtatccc

SEQ ID NO: 26519 - DNA, 26 bp, Homo sapiens
  source 1..26: mol_type = genomic DNA
tcgttagtatagtggtgagtatcccc

SEQ ID NO: 26520 - DNA, 27 bp, Homo sapiens
  source 1..27: mol_type = genomic DNA
tcgttagtatagtggtgagtatccccg

SEQ ID NO: 26521 - DNA, 29 bp, Homo sapiens
  source 1..29: mol_type = genomic DNA
tcgttagtatagtggtgagtatccccgcc

SEQ ID NO: 26522 - DNA, 30 bp, Homo sapiens
  source 1..30: mol_type = genomic DNA
tcgttagtatagtggtgagtatccccgcct

SEQ ID NO: 26523 - DNA, 31 bp, Homo sapiens
  source 1..31: mol_type = genomic DNA
tcgttagtatagtggtgagtatccccgcctg

SEQ ID NO: 26524 - DNA, 32 bp, Homo sapiens
  source 1..32: mol_type = genomic DNA
tcgttagtatagtggtgagtatccccgcctgt

SEQ ID NO: 26525 - DNA, 33 bp, Homo sapiens
  source 1..33: mol_type = genomic DNA
tcgttagtatagtggtgagtatccccgcctgtc

SEQ ID NO: 26526 - DNA, 35 bp, Homo sapiens
  source 1..35: mol_type = genomic DNA
tcgttagtatagtggtgagtatccccgcctgtcac

SEQ ID NO: 26527 - DNA, 29 bp, Homo sapiens
  source 1..29: mol_type = genomic DNA
tcgttagtatagtggttagtatccccgcc

SEQ ID NO: 26528 - DNA, 30 bp, Homo sapiens
  source 1..30: mol_type = genomic DNA
tcgttagtatagtggttagtatccccgcct

SEQ ID NO: 26529 - DNA, 33 bp, Homo sapiens
  source 1..33: mol_type = genomic DNA
tcgttagtatagtggttagtatccccgcctgtc

SEQ ID NO: 26530 - DNA, 18 bp, Homo sapiens
  source 1..18: mol_type = genomic DNA
tcgttggtctaggggtat

SEQ ID NO: 26531 - DNA, 21 bp, Homo sapiens
  source 1..21: mol_type = genomic DNA
tcgttggtctaggggtatgat

SEQ ID NO: 26532 - DNA, 24 bp, Homo sapiens
  source 1..24: mol_type = genomic DNA
tcgttggtctaggggtatgattct

SEQ ID NO: 26533 - DNA, 25 bp, Homo sapiens
  source 1..25: mol_type = genomic DNA
tcgttggtctaggggtatgattctc

SEQ ID NO: 26534 - DNA, 26 bp, Homo sapiens
  source 1..26: mol_type = genomic DNA
tcgttggtctaggggtatgattctcg

SEQ ID NO: 26535 - DNA, 27 bp, Homo sapiens
  source 1..27: mol_type = genomic DNA
tcgttggtctaggggtatgattctcgc

SEQ ID NO: 26536 - DNA, 28 bp, Homo sapiens
  source 1..28: mol_type = genomic DNA
tcgttggtctaggggtatgattctcgct

SEQ ID NO: 26537 - DNA, 29 bp, Homo sapiens
  source 1..29: mol_type = genomic DNA
tcgttggtctaggggtatgattctcgctt

SEQ ID NO: 26538 - DNA, 32 bp, Homo sapiens
  source 1..32: mol_type = genomic DNA
tcgttggtctaggggtatgattctcgcttagg

SEQ ID NO: 26539 - DNA, 30 bp, Homo sapiens
  source 1..30: mol_type = genomic DNA
tcgttggtctaggggtatgattctcgcttc

SEQ ID NO: 26540 - DNA, 32 bp, Homo sapiens
  source 1..32: mol_type = genomic DNA
tcgttggtctaggggtatgattctcgcttcgg

SEQ ID NO: 26541 - DNA, 31 bp, Homo sapiens
  source 1..31: mol_type = genomic DNA
tcgttggtctaggggtatgattctcgctttg

SEQ ID NO: 26542 - DNA, 32 bp, Homo sapiens
  source 1..32: mol_type = genomic DNA
tcgttggtctaggggtatgattctcgctttgg

SEQ ID NO: 26543 - DNA, 29 bp, Homo sapiens
  source 1..29: mol_type = genomic DNA
tcgttggtctaggggtatgattctcggtt

SEQ ID NO: 26544 - DNA, 31 bp, Homo sapiens
  source 1..31: mol_type = genomic DNA
tcgttggtctaggggtatgattctcggtttg

SEQ ID NO: 26545 - DNA, 32 bp, Homo sapiens
  source 1..32: mol_type = genomic DNA
tcgttggtctaggggtatgattctcggtttgg

SEQ ID NO: 26546 - DNA, 32 bp, Homo sapiens
  source 1..32: mol_type = genomic DNA
tcgttggtctagtggtatgattctcgctttgg

SEQ ID NO: 26547 - DNA, 17 bp, Homo sapiens
  source 1..17: mol_type = genomic DNA
tctaaagacaggggtta

SEQ ID NO: 26548 - DNA, 18 bp, Homo sapiens
  source 1..18: mol_type = genomic DNA
tctaaagacaggggttag

SEQ ID NO: 26549 - DNA, 22 bp, Homo sapiens
  source 1..22: mol_type = genomic DNA
tctaaagacaggggttaggcct

SEQ ID NO: 26550 - DNA, 23 bp, Homo sapiens
  source 1..23: mol_type = genomic DNA
tctaaagacaggggttaggcctc

SEQ ID NO: 26551 - DNA, 24 bp, Homo sapiens
  source 1..24: mol_type = genomic DNA
tctaaagacaggggttaggcctct

SEQ ID NO: 26552 - DNA, 25 bp, Homo sapiens
  source 1..25: mol_type = genomic DNA
tctaaagacaggggttaggcctctt

SEQ ID NO: 26553 - DNA, 26 bp, Homo sapiens
  source 1..26: mol_type = genomic DNA
tctaaagacaggggttaggcctcttt

SEQ ID NO: 26554 - DNA, 27 bp, Homo sapiens
  source 1..27: mol_type = genomic DNA
tctaaagacaggggttaggcctctttt

SEQ ID NO: 26555 - DNA, 29 bp, Homo sapiens
  source 1..29: mol_type = genomic DNA
tctaaagacaggggttaggcctcttttta

SEQ ID NO: 26556 - DNA, 31 bp, Homo sapiens
  source 1..31: mol_type = genomic DNA
tctaaagacaggggttaggcctctttttacc

SEQ ID NO: 26557 - DNA, 32 bp, Homo sapiens
  source 1..32: mol_type = genomic DNA
tctaaagacaggggttaggcctctttttacca

SEQ ID NO: 26558 - DNA, 34 bp, Homo sapiens
  source 1..34: mol_type = genomic DNA
tctaaagacaggggttaggcctctttttaccacc

SEQ ID NO: 26559 - DNA, 35 bp, Homo sapiens
  source 1..35: mol_type = genomic DNA
tctaaagacaggggttaggcctctttttaccacca

SEQ ID NO: 26560 - DNA, 37 bp, Homo sapiens
  source 1..37: mol_type = genomic DNA
tctaaaggtccctggttcaatcccgggtttcggcacc

SEQ ID NO: 26561 - DNA, 19 bp, Homo sapiens
  source 1..19: mol_type = genomic DNA
tctaaaggtccctggttcg

SEQ ID NO: 26562 - DNA, 22 bp, Homo sapiens
  source 1..22: mol_type = genomic DNA
tctaaaggtccctggttcgatc

SEQ ID NO: 26563 - DNA, 23 bp, Homo sapiens
  source 1..23: mol_type = genomic DNA
tctaaaggtccctggttcgatcc

SEQ ID NO: 26564 - DNA, 35 bp, Homo sapiens
  source 1..35: mol_type = genomic DNA
tctaaaggtccctggttcgatcccgggtttcggca

SEQ ID NO: 26565 - DNA, 36 bp, Homo sapiens
  source 1..36: mol_type = genomic DNA
tctaaaggtccctggttcgatcccgggtttcggcac

SEQ ID NO: 26566 - DNA, 37 bp, Homo sapiens
  source 1..37: mol_type = genomic DNA
tctaaaggtccctggttcgatcccgggtttcggcacc

SEQ ID NO: 26567 - DNA, 38 bp, Homo sapiens
  source 1..38: mol_type = genomic DNA
tctaaaggtccctggttcgatcccgggtttcggcacca

SEQ ID NO: 26568 - DNA, 16 bp, Homo sapiens
  source 1..16: mol_type = genomic DNA
tctaacaacatggctt

SEQ ID NO: 26569 - DNA, 17 bp, Homo sapiens
  source 1..17: mol_type = genomic DNA
tctaacaacatggcttt

SEQ ID NO: 26570 - DNA, 18 bp, Homo sapiens
  source 1..18: mol_type = genomic DNA
tctaacaacatggctttc

SEQ ID NO: 26571 - DNA, 19 bp, Homo sapiens
  source 1..19: mol_type = genomic DNA
tctaacaacatggctttct

SEQ ID NO: 26572 - DNA, 20 bp, Homo sapiens
  source 1..20: mol_type = genomic DNA
tctaacaacatggctttctc

SEQ ID NO: 26573 - DNA, 21 bp, Homo sapiens
  source 1..21: mol_type = genomic DNA
tctaacaacatggctttctca

SEQ ID NO: 26574 - DNA, 22 bp, Homo sapiens
  source 1..22: mol_type = genomic DNA
tctaacaacatggctttctcac

SEQ ID NO: 26575 - DNA, 23 bp, Homo sapiens
  source 1..23: mol_type = genomic DNA
tctaacaacatggctttctcacc

SEQ ID NO: 26576 - DNA, 24 bp, Homo sapiens
  source 1..24: mol_type = genomic DNA
tctaacaacatggctttctcacca

SEQ ID NO: 26577 - DNA, 17 bp, Homo sapiens
  source 1..17: mol_type = genomic DNA
tctaaggcgccagactc

SEQ ID NO: 26578 - DNA, 19 bp, Homo sapiens
  source 1..19: mol_type = genomic DNA
tctaaggcgccagactcaa

SEQ ID NO: 26579 - DNA, 19 bp, Homo sapiens
  source 1..19: mol_type = genomic DNA
tctaaggcgctgcgttcag

SEQ ID NO: 26580 - DNA, 16 bp, Homo sapiens
  source 1..16: mol_type = genomic DNA
tctaaggcgctggatt

SEQ ID NO: 26581 - DNA, 25 bp, Homo sapiens
  source 1..25: mol_type = genomic DNA
tctaaggcgctggatttaggctcca

SEQ ID NO: 26582 - DNA, 43 bp, Homo sapiens
  source 1..43: mol_type = genomic DNA
tctaatccagaggttccgggttcgagtcccggcagagatgcca

SEQ ID NO: 26583 - DNA, 18 bp, Homo sapiens
  source 1..18: mol_type = genomic DNA
tctaattcaaaggttccg

SEQ ID NO: 26584 - DNA, 40 bp, Homo sapiens
  source 1..40: mol_type = genomic DNA
tctaattcaaaggttccgggttcgagtcccggcggagtcg

SEQ ID NO: 26585 - DNA, 42 bp, Homo sapiens
  source 1..42: mol_type = genomic DNA
tctaattcaaaggttccgggttcgagtcccggcggagtcgcc

SEQ ID NO: 26586 - DNA, 43 bp, Homo sapiens
  source 1..43: mol_type = genomic DNA
tctaattcaaaggttccgggttcgagtcccggcggagtcgcca

SEQ ID NO: 26587 - DNA, 16 bp, Homo sapiens
  source 1..16: mol_type = genomic DNA
tctagcggttaggatt

SEQ ID NO: 26588 - DNA, 17 bp, Homo sapiens
  source 1..17: mol_type = genomic DNA
tctagcggttaggattc

SEQ ID NO: 26589 - DNA, 18 bp, Homo sapiens
  source 1..18: mol_type = genomic DNA
tctagcggttaggattcc

SEQ ID NO: 26590 - DNA, 19 bp, Homo sapiens
  source 1..19: mol_type = genomic DNA
tctagcggttaggattcct

SEQ ID NO: 26591 - DNA, 20 bp, Homo sapiens
  source 1..20: mol_type = genomic DNA
tctagcggttaggattcctg

SEQ ID NO: 26592 - DNA, 21 bp, Homo sapiens
  source 1..21: mol_type = genomic DNA
tctagcggttaggattcctgg

SEQ ID NO: 26593 - DNA, 23 bp, Homo sapiens
  source 1..23: mol_type = genomic DNA
tctagcggttaggattcctggtt

SEQ ID NO: 26594 - DNA, 24 bp, Homo sapiens
  source 1..24: mol_type = genomic DNA
tctagcggttaggattcctggttt

SEQ ID NO: 26595 - DNA, 25 bp, Homo sapiens
  source 1..25: mol_type = genomic DNA
tctagcggttaggattcctggtttt

SEQ ID NO: 26596 - DNA, 26 bp, Homo sapiens
  source 1..26: mol_type = genomic DNA
tctagcggttaggattcctggttttc

SEQ ID NO: 26597 - DNA, 27 bp, Homo sapiens
  source 1..27: mol_type = genomic DNA
tctagcggttaggattcctggttttca

SEQ ID NO: 26598 - DNA, 29 bp, Homo sapiens
  source 1..29: mol_type = genomic DNA
tctagcggttaggattcctggttttcacc

SEQ ID NO: 26599 - DNA, 18 bp, Homo sapiens
  source 1..18: mol_type = genomic DNA
tctaggggtatgattctc

SEQ ID NO: 26600 - DNA, 20 bp, Homo sapiens
  source 1..20: mol_type = genomic DNA
tctaggggtatgattctcgc

SEQ ID NO: 26601 - DNA, 21 bp, Homo sapiens
  source 1..21: mol_type = genomic DNA
tctaggggtatgattctcgct

SEQ ID NO: 26602 - DNA, 22 bp, Homo sapiens
  source 1..22: mol_type = genomic DNA
tctaggggtatgattctcgctt

SEQ ID NO: 26603 - DNA, 25 bp, Homo sapiens
  source 1..25: mol_type = genomic DNA
tctaggggtatgattctcgctttgg

SEQ ID NO: 26604 - DNA, 21 bp, Homo sapiens
  source 1..21: mol_type = genomic DNA
tctaggggtatgattctcggt

SEQ ID NO: 26605 - DNA, 25 bp, Homo sapiens
  source 1..25: mol_type = genomic DNA
tctaggggtatgattctcggtttgg

SEQ ID NO: 26606 - DNA, 16 bp, Homo sapiens
  source 1..16: mol_type = genomic DNA
tctaggttcgactcct

SEQ ID NO: 26607 - DNA, 19 bp, Homo sapiens
  source 1..19: mol_type = genomic DNA
tctaggttcgactcctggc

SEQ ID NO: 26608 - DNA, 24 bp, Homo sapiens
  source 1..24: mol_type = genomic DNA
tctaggttcgactcctggctggct

SEQ ID NO: 26609 - DNA, 25 bp, Homo sapiens
  source 1..25: mol_type = genomic DNA
tctaggttcgactcctggctggctc

SEQ ID NO: 26610 - DNA, 26 bp, Homo sapiens
  source 1..26: mol_type = genomic DNA
tctaggttcgactcctggctggctcg

SEQ ID NO: 26611 - DNA, 27 bp, Homo sapiens
  source 1..27: mol_type = genomic DNA
tctaggttcgactcctggctggctcgc

SEQ ID NO: 26612 - DNA, 28 bp, Homo sapiens
  source 1..28: mol_type = genomic DNA
tctaggttcgactcctggctggctcgcc

SEQ ID NO: 26613 - DNA, 29 bp, Homo sapiens
  source 1..29: mol_type = genomic DNA
tctaggttcgactcctggctggctcgcca

SEQ ID NO: 26614 - DNA, 16 bp, Homo sapiens
  source 1..16: mol_type = genomic DNA
tctagtggctaggatt

SEQ ID NO: 26615 - DNA, 17 bp, Homo sapiens
  source 1..17: mol_type = genomic DNA
tctagtggctaggattc

SEQ ID NO: 26616 - DNA, 18 bp, Homo sapiens
  source 1..18: mol_type = genomic DNA
tctagtggctaggattcg

SEQ ID NO: 26617 - DNA, 20 bp, Homo sapiens
  source 1..20: mol_type = genomic DNA
tctagtggctaggattcggc

SEQ ID NO: 26618 - DNA, 21 bp, Homo sapiens
  source 1..21: mol_type = genomic DNA
tctagtggctaggattcggcg

SEQ ID NO: 26619 - DNA, 22 bp, Homo sapiens
  source 1..22: mol_type = genomic DNA
tctagtggctaggattcggcgc

SEQ ID NO: 26620 - DNA, 23 bp, Homo sapiens
  source 1..23: mol_type = genomic DNA
tctagtggctaggattcggcgct

SEQ ID NO: 26621 - DNA, 25 bp, Homo sapiens
  source 1..25: mol_type = genomic DNA
tctagtggctaggattcggcgcttt

SEQ ID NO: 26622 - DNA, 29 bp, Homo sapiens
  source 1..29: mol_type = genomic DNA
tctagtggctaggattcggcgctttcacc

SEQ ID NO: 26623 - DNA, 30 bp, Homo sapiens
  source 1..30: mol_type = genomic DNA
tctagtggctaggattcggcgctttcaccg

SEQ ID NO: 26624 - DNA, 32 bp, Homo sapiens
  source 1..32: mol_type = genomic DNA
tctagtggctaggattcggcgctttcaccgcc

SEQ ID NO: 26625 - DNA, 22 bp, Homo sapiens
  source 1..22: mol_type = genomic DNA
tctagtggtatgattctcgctt

SEQ ID NO: 26626 - DNA, 16 bp, Homo sapiens
  source 1..16: mol_type = genomic DNA
tctagtggttaggatt

SEQ ID NO: 26627 - DNA, 17 bp, Homo sapiens
  source 1..17: mol_type = genomic DNA
tctagtggttaggattc

SEQ ID NO: 26628 - DNA, 24 bp, Homo sapiens
  source 1..24: mol_type = genomic DNA
tctagtggttaggattcagcgctc

SEQ ID NO: 26629 - DNA, 18 bp, Homo sapiens
  source 1..18: mol_type = genomic DNA
tctagtggttaggattcg

SEQ ID NO: 26630 - DNA, 19 bp, Homo sapiens
  source 1..19: mol_type = genomic DNA
tctagtggttaggattcgg

SEQ ID NO: 26631 - DNA, 20 bp, Homo sapiens
  source 1..20: mol_type = genomic DNA
tctagtggttaggattcggc

SEQ ID NO: 26632 - DNA, 21 bp, Homo sapiens
  source 1..21: mol_type = genomic DNA
tctagtggttaggattcggcg

SEQ ID NO: 26633 - DNA, 22 bp, Homo sapiens
  source 1..22: mol_type = genomic DNA
tctagtggttaggattcggcgc

SEQ ID NO: 26634 - DNA, 23 bp, Homo sapiens
  source 1..23: mol_type = genomic DNA
tctagtggttaggattcggcgct

SEQ ID NO: 26635 - DNA, 24 bp, Homo sapiens
  source 1..24: mol_type = genomic DNA
tctagtggttaggattcggcgctc

SEQ ID NO: 26636 - DNA, 25 bp, Homo sapiens
  source 1..25: mol_type = genomic DNA
tctagtggttaggattcggcgctct

SEQ ID NO: 26637 - DNA, 26 bp, Homo sapiens
  source 1..26: mol_type = genomic DNA
tctagtggttaggattcggcgctctc

SEQ ID NO: 26638 - DNA, 27 bp, Homo sapiens
  source 1..27: mol_type = genomic DNA
tctagtggttaggattcggcgctctca

SEQ ID NO: 26639 - DNA, 28 bp, Homo sapiens
  source 1..28: mol_type = genomic DNA
tctagtggttaggattcggcgctctcac

SEQ ID NO: 26640 - DNA, 29 bp, Homo sapiens
  source 1..29: mol_type = genomic DNA
tctagtggttaggattcggcgctctcacc

SEQ ID NO: 26641 - DNA, 30 bp, Homo sapiens
  source 1..30: mol_type = genomic DNA
tctagtggttaggattcggcgctctcaccg

SEQ ID NO: 26642 - DNA, 31 bp, Homo sapiens
  source 1..31: mol_type = genomic DNA
tctagtggttaggattcggcgctctcaccgc

SEQ ID NO: 26643 - DNA, 32 bp, Homo sapiens
  source 1..32: mol_type = genomic DNA
tctagtggttaggattcggcgctctcaccgcc

SEQ ID NO: 26644 - DNA, 39 bp, Homo sapiens
  source 1..39: mol_type = genomic DNA
tctagtggttaggattcggcgctctcaccgccgcggccc

SEQ ID NO: 26645 - DNA, 40 bp, Homo sapiens
  source 1..40: mol_type = genomic DNA
tctagtggttaggattcggcgctctcaccgccgcggcccg

SEQ ID NO: 26646 - DNA, 41 bp, Homo sapiens
  source 1..41: mol_type = genomic DNA
tctagtggttaggattcggcgctctcaccgccgcggcccgg

SEQ ID NO: 26647 - DNA, 43 bp, Homo sapiens
  source 1..43: mol_type = genomic DNA
tctagtggttaggattcggcgctctcaccgccgcggcccgggt

SEQ ID NO: 26648 - DNA, 44 bp, Homo sapiens
  source 1..44: mol_type = genomic DNA
tctagtggttaggattcggcgctctcaccgccgcggcccgggtt

SEQ ID NO: 26649 - DNA, 45 bp, Homo sapiens
  source 1..45: mol_type = genomic DNA
tctagtggttaggattcggcgctctcaccgccgcggcccgggttc

SEQ ID NO: 26650 - DNA, 28 bp, Homo sapiens
  source 1..28: mol_type = genomic DNA
tctagtggttaggattcggcgctctcat

SEQ ID NO: 26651 - DNA, 16 bp, Homo sapiens
  source 1..16: mol_type = genomic DNA
tctcaccgccgcggcc

SEQ ID NO: 26652 - DNA, 17 bp, Homo sapiens
  source 1..17: mol_type = genomic DNA
tctcaccgccgcggccc

SEQ ID NO: 26653 - DNA, 18 bp, Homo sapiens
  source 1..18: mol_type = genomic DNA
tctcaccgccgcggcccg

SEQ ID NO: 26654 - DNA, 19 bp, Homo sapiens
  source 1..19: mol_type = genomic DNA
tctcaccgccgcggcccgg

SEQ ID NO: 26655 - DNA, 21 bp, Homo sapiens
  source 1..21: mol_type = genomic DNA
tctcaccgccgcggcccgggt

SEQ ID NO: 26656 - DNA, 22 bp, Homo sapiens
  source 1..22: mol_type = genomic DNA
tctcaccgccgcggcccgggtt

SEQ ID NO: 26657 - DNA, 23 bp, Homo sapiens
  source 1..23: mol_type = genomic DNA
tctcaccgccgcggcccgggttc

SEQ ID NO: 26658 - DNA, 31 bp, Homo sapiens
  source 1..31: mol_type = genomic DNA
tctcaccgccgcggcccgggttcgattcccg

SEQ ID NO: 26659 - DNA, 33 bp, Homo sapiens
  source 1..33: mol_type = genomic DNA
tctcaccgccgcggcccgggttcgattcccggt

SEQ ID NO: 26660 - DNA, 34 bp, Homo sapiens
  source 1..34: mol_type = genomic DNA
tctcaccgccgcggcccgggttcgattcccggtc

SEQ ID NO: 26661 - DNA, 35 bp, Homo sapiens
  source 1..35: mol_type = genomic DNA
tctcaccgccgcggcccgggttcgattcccggtca

SEQ ID NO: 26662 - DNA, 36 bp, Homo sapiens
  source 1..36: mol_type = genomic DNA
tctcaccgccgcggcccgggttcgattcccggtcag

SEQ ID NO: 26663 - DNA, 37 bp, Homo sapiens
  source 1..37: mol_type = genomic DNA
tctcaccgccgcggcccgggttcgattcccggtcagg

SEQ ID NO: 26664 - DNA, 39 bp, Homo sapiens
  source 1..39: mol_type = genomic DNA
tctcaccgccgcggcccgggttcgattcccggtcaggga

SEQ ID NO: 26665 - DNA, 40 bp, Homo sapiens
  source 1..40: mol_type = genomic DNA
tctcaccgccgcggcccgggttcgattcccggtcagggaa

SEQ ID NO: 26666 - DNA, 41 bp, Homo sapiens
  source 1..41: mol_type = genomic DNA
tctcaccgccgcggcccgggttcgattcccggtcagggaac

SEQ ID NO: 26667 - DNA, 42 bp, Homo sapiens
  source 1..42: mol_type = genomic DNA
tctcaccgccgcggcccgggttcgattcccggtcagggaacc

SEQ ID NO: 26668 - DNA, 43 bp, Homo sapiens
  source 1..43: mol_type = genomic DNA
tctcaccgccgcggcccgggttcgattcccggtcagggaacca

SEQ ID NO: 26669 - DNA, 19 bp, Homo sapiens
  source 1..19: mol_type = genomic DNA
tctcagggatgggttcgat

SEQ ID NO: 26670 - DNA, 21 bp, Homo sapiens
  source 1..21: mol_type = genomic DNA
tctcagggatgggttcgattc

SEQ ID NO: 26671 - DNA, 23 bp, Homo sapiens
  source 1..23: mol_type = genomic DNA
tctcagggatgggttcgattctc

SEQ ID NO: 26672 - DNA, 29 bp, Homo sapiens
  source 1..29: mol_type = genomic DNA
tctcagggatgggttcgattctcatagtc

SEQ ID NO: 26673 - DNA, 30 bp, Homo sapiens
  source 1..30: mol_type = genomic DNA
tctcagggatgggttcgattctcatagtcc

SEQ ID NO: 26674 - DNA, 31 bp, Homo sapiens
  source 1..31: mol_type = genomic DNA
tctcagggatgggttcgattctcatagtcct

SEQ ID NO: 26675 - DNA, 32 bp, Homo sapiens
  source 1..32: mol_type = genomic DNA
tctcagggatgggttcgattctcatagtccta

SEQ ID NO: 26676 - DNA, 33 bp, Homo sapiens
  source 1..33: mol_type = genomic DNA
tctcagggatgggttcgattctcatagtcctag

SEQ ID NO: 26677 - DNA, 34 bp, Homo sapiens
  source 1..34: mol_type = genomic DNA
tctcagggatgggttcgattctcatagtcctagc

SEQ ID NO: 26678 - DNA, 35 bp, Homo sapiens
  source 1..35: mol_type = genomic DNA
tctcagggatgggttcgattctcatagtcctagcc

SEQ ID NO: 26679 - DNA, 36 bp, Homo sapiens
  source 1..36: mol_type = genomic DNA
tctcagggatgggttcgattctcatagtcctagcca

SEQ ID NO: 26680 - DNA, 19 bp, Homo sapiens
  source 1..19: mol_type = genomic DNA
tctcagggtcgtgggttcg

SEQ ID NO: 26681 - DNA, 32 bp, Homo sapiens
  source 1..32: mol_type = genomic DNA
tctcagggtcgtgggttcgagccccacgttgg

SEQ ID NO: 26682 - DNA, 33 bp, Homo sapiens
  source 1..33: mol_type = genomic DNA
tctcagggtcgtgggttcgagccccacgttggg

SEQ ID NO: 26683 - DNA, 34 bp, Homo sapiens
  source 1..34: mol_type = genomic DNA
tctcagggtcgtgggttcgagccccacgttgggc

SEQ ID NO: 26684 - DNA, 35 bp, Homo sapiens
  source 1..35: mol_type = genomic DNA
tctcagggtcgtgggttcgagccccacgttgggcg

SEQ ID NO: 26685 - DNA, 36 bp, Homo sapiens
  source 1..36: mol_type = genomic DNA
tctcagggtcgtgggttcgagccccacgttgggcgc

SEQ ID NO: 26686 - DNA, 37 bp, Homo sapiens
  source 1..37: mol_type = genomic DNA
tctcagggtcgtgggttcgagccccacgttgggcgcc

SEQ ID NO: 26687 - DNA, 38 bp, Homo sapiens
  source 1..38: mol_type = genomic DNA
tctcagggtcgtgggttcgagccccacgttgggcgcca

SEQ ID NO: 26688 - DNA, 17 bp, Homo sapiens
  source 1..17: mol_type = genomic DNA
tctcagtgggacctcca

SEQ ID NO: 26689 - DNA, 19 bp, Homo sapiens
  source 1..19: mol_type = genomic DNA
tctcataatctgaaggtcc

SEQ ID NO: 26690 - DNA, 20 bp, Homo sapiens
  source 1..20: mol_type = genomic DNA
tctcataatctgaaggtcct

SEQ ID NO: 26691 - DNA, 21 bp, Homo sapiens
  source 1..21: mol_type = genomic DNA
tctcataatctgaaggtcctg

SEQ ID NO: 26692 - DNA, 22 bp, Homo sapiens
  source 1..22: mol_type = genomic DNA
tctcataatctgaaggtcctga

SEQ ID NO: 26693 - DNA, 23 bp, Homo sapiens
  source 1..23: mol_type = genomic DNA
tctcataatctgaaggtcctgag

SEQ ID NO: 26694 - DNA, 24 bp, Homo sapiens
  source 1..24: mol_type = genomic DNA
tctcataatctgaaggtcctgagt

SEQ ID NO: 26695 - DNA, 21 bp, Homo sapiens
  source 1..21: mol_type = genomic DNA
tctcataatctgaaggtcgtg

SEQ ID NO: 26696 - DNA, 16 bp, Homo sapiens
  source 1..16: mol_type = genomic DNA
tctcatagtcctagcc

SEQ ID NO: 26697 - DNA, 17 bp, Homo sapiens
  source 1..17: mol_type = genomic DNA
tctcatagtcctagcca

SEQ ID NO: 26698 - DNA, 16 bp, Homo sapiens
  source 1..16: mol_type = genomic DNA
tctccaatggaggcgt

SEQ ID NO: 26699 - DNA, 19 bp, Homo sapiens
  source 1..19: mol_type = genomic DNA
tctccaatggaggcgtggg

SEQ ID NO: 26700 - DNA, 20 bp, Homo sapiens
  source 1..20: mol_type = genomic DNA
tctccaatggaggcgtgggt

SEQ ID NO: 26701 - DNA, 21 bp, Homo sapiens
  source 1..21: mol_type = genomic DNA
tctccaatggaggcgtgggtt

SEQ ID NO: 26702 - DNA, 22 bp, Homo sapiens
  source 1..22: mol_type = genomic DNA
tctccaatggaggcgtgggttc

SEQ ID NO: 26703 - DNA, 36 bp, Homo sapiens
  source 1..36: mol_type = genomic DNA
tctccaatggaggcgtgggttcgaatcccacttctg

SEQ ID NO: 26704 - DNA, 37 bp, Homo sapiens
  source 1..37: mol_type = genomic DNA
tctccaatggaggcgtgggttcgaatcccacttctga

SEQ ID NO: 26705 - DNA, 39 bp, Homo sapiens
  source 1..39: mol_type = genomic DNA
tctccaatggaggcgtgggttcgaatcccacttctgaca

SEQ ID NO: 26706 - DNA, 41 bp, Homo sapiens
  source 1..41: mol_type = genomic DNA
tctccaatggaggcgtgggttcgaatcccacttctgacacc

SEQ ID NO: 26707 - DNA, 42 bp, Homo sapiens
  source 1..42: mol_type = genomic DNA
tctccaatggaggcgtgggttcgaatcccacttctgacacca

SEQ ID NO: 26708 - DNA, 24 bp, Homo sapiens
  source 1..24: mol_type = genomic DNA
tctccccgcgcaggttcgaatcct

SEQ ID NO: 26709 - DNA, 25 bp, Homo sapiens
  source 1..25: mol_type = genomic DNA
tctccccgcgcaggttcgaatcctg

SEQ ID NO: 26710 - DNA, 34 bp, Homo sapiens
  source 1..34: mol_type = genomic DNA
tctccccgcgcaggttcgaatcctgccgactacg

SEQ ID NO: 26711 - DNA, 36 bp, Homo sapiens
  source 1..36: mol_type = genomic DNA
tctccccgcgcaggttcgaatcctgccgactacgcc

SEQ ID NO: 26712 - DNA, 19 bp, Homo sapiens
  source 1..19: mol_type = genomic DNA
tctcccctggaggcgtggg

SEQ ID NO: 26713 - DNA, 20 bp, Homo sapiens
  source 1..20: mol_type = genomic DNA
tctcccctggaggcgtgggt

SEQ ID NO: 26714 - DNA, 21 bp, Homo sapiens
  source 1..21: mol_type = genomic DNA
tctcccctggaggcgtgggtt

SEQ ID NO: 26715 - DNA, 32 bp, Homo sapiens
  source 1..32: mol_type = genomic DNA
tctcccctggaggcgtgggttcgaatcccact

SEQ ID NO: 26716 - DNA, 36 bp, Homo sapiens
  source 1..36: mol_type = genomic DNA
tctcccctggaggcgtgggttcgaatcccacttctg

SEQ ID NO: 26717 - DNA, 39 bp, Homo sapiens
  source 1..39: mol_type = genomic DNA
tctcccctggaggcgtgggttcgaatcccacttctgaca

SEQ ID NO: 26718 - DNA, 42 bp, Homo sapiens
  source 1..42: mol_type = genomic DNA
tctcccctggaggcgtgggttcgaatcccacttctgacacca

SEQ ID NO: 26719 - DNA, 16 bp, Homo sapiens
  source 1..16: mol_type = genomic DNA
tctccggatggaggcg

SEQ ID NO: 26720 - DNA, 17 bp, Homo sapiens
  source 1..17: mol_type = genomic DNA
tctccggatggaggcgt

SEQ ID NO: 26721 - DNA, 19 bp, Homo sapiens
  source 1..19: mol_type = genomic DNA
tctccggatggaggcgtgg

SEQ ID NO: 26722 - DNA, 20 bp, Homo sapiens
  source 1..20: mol_type = genomic DNA
tctccggatggaggcgtggg

SEQ ID NO: 26723 - DNA, 21 bp, Homo sapiens
  source 1..21: mol_type = genomic DNA
tctccggatggaggcgtgggt

SEQ ID NO: 26724 - DNA, 22 bp, Homo sapiens
  source 1..22: mol_type = genomic DNA
tctccggatggaggcgtgggtt

SEQ ID NO: 26725 - DNA, 23 bp, Homo sapiens
  source 1..23: mol_type = genomic DNA
tctccggatggaggcgtgggttc

SEQ ID NO: 26726 - DNA, 37 bp, Homo sapiens
  source 1..37: mol_type = genomic DNA
tctccggatggaggcgtgggttcgaatcccacttctg

SEQ ID NO: 26727 - DNA, 41 bp, Homo sapiens
  source 1..41: mol_type = genomic DNA
tctccggatggaggcgtgggttcgaatcccacttctgacac

SEQ ID NO: 26728 - DNA, 42 bp, Homo sapiens
  source 1..42: mol_type = genomic DNA
tctccggatggaggcgtgggttcgaatcccacttctgacacc

SEQ ID NO: 26729 - DNA, 43 bp, Homo sapiens
  source 1..43: mol_type = genomic DNA
tctccggatggaggcgtgggttcgaatcccacttctgacacca

SEQ ID NO: 26730 - DNA, 26 bp, Homo sapiens
  source 1..26: mol_type = genomic DNA
tctcgcctcccacgcgggagacccgg

SEQ ID NO: 26731 - DNA, 16 bp, Homo sapiens
  source 1..16: mol_type = genomic DNA
tctcgcctgccacgcg

SEQ ID NO: 26732 - DNA, 24 bp, Homo sapiens
  source 1..24: mol_type = genomic DNA
tctcgcctgccacgcgggaggccc

SEQ ID NO: 26733 - DNA, 26 bp, Homo sapiens
  source 1..26: mol_type = genomic DNA
tctcgcctgccacgcgggaggcccgg

SEQ ID NO: 26734 - DNA, 27 bp, Homo sapiens
  source 1..27: mol_type = genomic DNA
tctcgcctgccacgcgggaggcccggg

SEQ ID NO: 26735 - DNA, 28 bp, Homo sapiens
  source 1..28: mol_type = genomic DNA
tctcgcctgccacgcgggaggcccgggt

SEQ ID NO: 26736 - DNA, 29 bp, Homo sapiens
  source 1..29: mol_type = genomic DNA
tctcgcctgccacgcgggaggcccgggtt

SEQ ID NO: 26737 - DNA, 30 bp, Homo sapiens
  source 1..30: mol_type = genomic DNA
tctcgcctgccacgcgggaggcccgggttc

SEQ ID NO: 26738 - DNA, 16 bp, Homo sapiens
  source 1..16: mol_type = genomic DNA
tctcgctggggcctcc

SEQ ID NO: 26739 - DNA, 17 bp, Homo sapiens
  source 1..17: mol_type = genomic DNA
tctcgctggggcctcca

SEQ ID NO: 26740 - DNA, 27 bp, Homo sapiens
  source 1..27: mol_type = genomic DNA
tctcgcttcgggtgcgagaggtcccgg

SEQ ID NO: 26741 - DNA, 16 bp, Homo sapiens
  source 1..16: mol_type = genomic DNA
tctcggtggaacctcc

SEQ ID NO: 26742 - DNA, 17 bp, Homo sapiens
  source 1..17: mol_type = genomic DNA
tctcggtggaacctcca

SEQ ID NO: 26743 - DNA, 16 bp, Homo sapiens
  source 1..16: mol_type = genomic DNA
tctcggtgggaccccc

SEQ ID NO: 26744 - DNA, 16 bp, Homo sapiens
  source 1..16: mol_type = genomic DNA
tctcggtgggacctcc

SEQ ID NO: 26745 - DNA, 17 bp, Homo sapiens
  source 1..17: mol_type = genomic DNA
tctcggtgggacctcca

SEQ ID NO: 26746 - DNA, 19 bp, Homo sapiens
  source 1..19: mol_type = genomic DNA
tctctgtggcgcaatggac

SEQ ID NO: 26747 - DNA, 16 bp, Homo sapiens
  source 1..16: mol_type = genomic DNA
tctcttcgggggcgtg

SEQ ID NO: 26748 - DNA, 18 bp, Homo sapiens
  source 1..18: mol_type = genomic DNA
tctcttcgggggcgtggg

SEQ ID NO: 26749 - DNA, 19 bp, Homo sapiens
  source 1..19: mol_type = genomic DNA
tctcttcgggggcgtgggt

SEQ ID NO: 26750 - DNA, 20 bp, Homo sapiens
  source 1..20: mol_type = genomic DNA
tctcttcgggggcgtgggtt

SEQ ID NO: 26751 - DNA, 21 bp, Homo sapiens
  source 1..21: mol_type = genomic DNA
tctcttcgggggcgtgggttc

SEQ ID NO: 26752 - DNA, 40 bp, Homo sapiens
  source 1..40: mol_type = genomic DNA
tctcttcgggggcgtgggttcgaatcccaccgctgccacc

SEQ ID NO: 26753 - DNA, 16 bp, Homo sapiens
  source 1..16: mol_type = genomic DNA
tctgaaggtcctgagt

SEQ ID NO: 26754 - DNA, 17 bp, Homo sapiens
  source 1..17: mol_type = genomic DNA
tctgaaggtcctgagtt

SEQ ID NO: 26755 - DNA, 18 bp, Homo sapiens
  source 1..18: mol_type = genomic DNA
tctgaaggtcctgagttc

SEQ ID NO: 26756 - DNA, 19 bp, Homo sapiens
  source 1..19: mol_type = genomic DNA
tctgaaggtcctgagttcg

SEQ ID NO: 26757 - DNA, 23 bp, Homo sapiens
  source 1..23: mol_type = genomic DNA
tctgaaggtcctgagttcgaacc

SEQ ID NO: 26758 - DNA, 24 bp, Homo sapiens
  source 1..24: mol_type = genomic DNA
tctgaaggtcctgagttcgaacct

SEQ ID NO: 26759 - DNA, 26 bp, Homo sapiens
  source 1..26: mol_type = genomic DNA
tctgaaggtcctgagttcgaacctca

SEQ ID NO: 26760 - DNA, 27 bp, Homo sapiens
  source 1..27: mol_type = genomic DNA
tctgaaggtcctgagttcgaacctcag

SEQ ID NO: 26761 - DNA, 30 bp, Homo sapiens
  source 1..30: mol_type = genomic DNA
tctgaaggtcctgagttcgaacctcagagg

SEQ ID NO: 26762 - DNA, 32 bp, Homo sapiens
  source 1..32: mol_type = genomic DNA
tctgaaggtcctgagttcgaacctcagagggg

SEQ ID NO: 26763 - DNA, 33 bp, Homo sapiens
  source 1..33: mol_type = genomic DNA
tctgaaggtcctgagttcgaacctcagaggggg

SEQ ID NO: 26764 - DNA, 34 bp, Homo sapiens
  source 1..34: mol_type = genomic DNA
tctgaaggtcctgagttcgaacctcagagggggc

SEQ ID NO: 26765 - DNA, 35 bp, Homo sapiens
  source 1..35: mol_type = genomic DNA
tctgaaggtcctgagttcgaacctcagagggggca

SEQ ID NO: 26766 - DNA, 36 bp, Homo sapiens
  source 1..36: mol_type = genomic DNA
tctgaaggtcctgagttcgaacctcagagggggcac

SEQ ID NO: 26767 - DNA, 37 bp, Homo sapiens
  source 1..37: mol_type = genomic DNA
tctgaaggtcctgagttcgaacctcagagggggcacc

SEQ ID NO: 26768 - DNA, 38 bp, Homo sapiens
  source 1..38: mol_type = genomic DNA
tctgaaggtcctgagttcgaacctcagagggggcacca

SEQ ID NO: 26769 - DNA, 22 bp, Homo sapiens
  source 1..22: mol_type = genomic DNA
tctgaaggtcctgagttcgagc

SEQ ID NO: 26770 - DNA, 32 bp, Homo sapiens
  source 1..32: mol_type = genomic DNA
tctgaaggtcctgagttcgagcctcagagagg

SEQ ID NO: 26771 - DNA, 33 bp, Homo sapiens
  source 1..33: mol_type = genomic DNA
tctgaaggtcctgagttcgagcctcagagaggg

SEQ ID NO: 26772 - DNA, 35 bp, Homo sapiens
  source 1..35: mol_type = genomic DNA
tctgaaggtcctgagttcgagcctcagagagggca

SEQ ID NO: 26773 - DNA, 36 bp, Homo sapiens
  source 1..36: mol_type = genomic DNA
tctgaaggtcctgagttcgagcctcagagagggcac

SEQ ID NO: 26774 - DNA, 37 bp, Homo sapiens
  source 1..37: mol_type = genomic DNA
tctgaaggtcctgagttcgagcctcagagagggcacc

SEQ ID NO: 26775 - DNA, 38 bp, Homo sapiens
  source 1..38: mol_type = genomic DNA
tctgaaggtcctgagttcgagcctcagagagggcacca

SEQ ID NO: 26776 - DNA, 16 bp, Homo sapiens
  source 1..16: mol_type = genomic DNA
tctgaaggtcgtgagt

SEQ ID NO: 26777 - DNA, 17 bp, Homo sapiens
  source 1..17: mol_type = genomic DNA
tctgaaggtcgtgagtt

SEQ ID NO: 26778 - DNA, 18 bp, Homo sapiens
  source 1..18: mol_type = genomic DNA
tctgaaggtcgtgagttc

SEQ ID NO: 26779 - DNA, 19 bp, Homo sapiens
  source 1..19: mol_type = genomic DNA
tctgaaggtcgtgagttcg

SEQ ID NO: 26780 - DNA, 23 bp, Homo sapiens
  source 1..23: mol_type = genomic DNA
tctgaaggtcgtgagttcgagcc

SEQ ID NO: 26781 - DNA, 24 bp, Homo sapiens
  source 1..24: mol_type = genomic DNA
tctgaaggtcgtgagttcgagcct

SEQ ID NO: 26782 - DNA, 26 bp, Homo sapiens
  source 1..26: mol_type = genomic DNA
tctgaaggtcgtgagttcgagcctca

SEQ ID NO: 26783 - DNA, 28 bp, Homo sapiens
  source 1..28: mol_type = genomic DNA
tctgaaggtcgtgagttcgagcctcaca

SEQ ID NO: 26784 - DNA, 29 bp, Homo sapiens
  source 1..29: mol_type = genomic DNA
tctgaaggtcgtgagttcgagcctcacac

SEQ ID NO: 26785 - DNA, 30 bp, Homo sapiens
  source 1..30: mol_type = genomic DNA
tctgaaggtcgtgagttcgagcctcacacg

SEQ ID NO: 26786 - DNA, 31 bp, Homo sapiens
  source 1..31: mol_type = genomic DNA
tctgaaggtcgtgagttcgagcctcacacgg

SEQ ID NO: 26787 - DNA, 32 bp, Homo sapiens
  source 1..32: mol_type = genomic DNA
tctgaaggtcgtgagttcgagcctcacacggg

SEQ ID NO: 26788 - DNA, 33 bp, Homo sapiens
  source 1..33: mol_type = genomic DNA
tctgaaggtcgtgagttcgagcctcacacgggg

SEQ ID NO: 26789 - DNA, 34 bp, Homo sapiens
  source 1..34: mol_type = genomic DNA
tctgaaggtcgtgagttcgagcctcacacggggc

SEQ ID NO: 26790 - DNA, 35 bp, Homo sapiens
  source 1..35: mol_type = genomic DNA
tctgaaggtcgtgagttcgagcctcacacggggca

SEQ ID NO: 26791 - DNA, 36 bp, Homo sapiens
  source 1..36: mol_type = genomic DNA
tctgaaggtcgtgagttcgagcctcacacggggcac

SEQ ID NO: 26792 - DNA, 37 bp, Homo sapiens
  source 1..37: mol_type = genomic DNA
tctgaaggtcgtgagttcgagcctcacacggggcacc

SEQ ID NO: 26793 - DNA, 38 bp, Homo sapiens
  source 1..38: mol_type = genomic DNA
tctgaaggtcgtgagttcgagcctcacacggggcacca

SEQ ID NO: 26794 - DNA, 32 bp, Homo sapiens
  source 1..32: mol_type = genomic DNA
tctgaaggtcgtgagttcgatcctcacacggg

SEQ ID NO: 26795 - DNA, 33 bp, Homo sapiens
  source 1..33: mol_type = genomic DNA
tctgaaggtcgtgagttcgatcctcacacgggg

SEQ ID NO: 26796 - DNA, 34 bp, Homo sapiens
  source 1..34: mol_type = genomic DNA
tctgaaggtcgtgagttcgatcctcacacggggc

SEQ ID NO: 26797 - DNA, 35 bp, Homo sapiens
  source 1..35: mol_type = genomic DNA
tctgaaggtcgtgagttcgatcctcacacggggca

SEQ ID NO: 26798 - DNA, 36 bp, Homo sapiens
  source 1..36: mol_type = genomic DNA
tctgaaggtcgtgagttcgatcctcacacggggcac

SEQ ID NO: 26799 - DNA, 37 bp, Homo sapiens
  source 1..37: mol_type = genomic DNA
tctgaaggtcgtgagttcgatcctcacacggggcacc

SEQ ID NO: 26800 - DNA, 38 bp, Homo sapiens
  source 1..38: mol_type = genomic DNA
tctgaaggtcgtgagttcgatcctcacacggggcacca

SEQ ID NO: 26801 - DNA, 16 bp, Homo sapiens
  source 1..16: mol_type = genomic DNA
tctgaatccagcgatc

SEQ ID NO: 26802 - DNA, 17 bp, Homo sapiens
  source 1..17: mol_type = genomic DNA
tctgaatccagcgatcc

SEQ ID NO: 26803 - DNA, 18 bp, Homo sapiens
  source 1..18: mol_type = genomic DNA
tctgaatccagcgatccg

SEQ ID NO: 26804 - DNA, 19 bp, Homo sapiens
  source 1..19: mol_type = genomic DNA
tctgaatccagcgatccga

SEQ ID NO: 26805 - DNA, 20 bp, Homo sapiens
  source 1..20: mol_type = genomic DNA
tctgaatccagcgatccgag

SEQ ID NO: 26806 - DNA, 21 bp, Homo sapiens
  source 1..21: mol_type = genomic DNA
tctgaatccagcgatccgagt

SEQ ID NO: 26807 - DNA, 22 bp, Homo sapiens
  source 1..22: mol_type = genomic DNA
tctgaatccagcgatccgagtt

SEQ ID NO: 26808 - DNA, 23 bp, Homo sapiens
  source 1..23: mol_type = genomic DNA
tctgaatccagcgatccgagttc

SEQ ID NO: 26809 - DNA, 24 bp, Homo sapiens
  source 1..24: mol_type = genomic DNA
tctgaatccagcgatccgagttca

SEQ ID NO: 26810 - DNA, 27 bp, Homo sapiens
  source 1..27: mol_type = genomic DNA
tctgaatccagcgatccgagttcaaat

SEQ ID NO: 26811 - DNA, 33 bp, Homo sapiens
  source 1..33: mol_type = genomic DNA
tctgaatccagcgatccgagttcaaatctcggt

SEQ ID NO: 26812 - DNA, 34 bp, Homo sapiens
  source 1..34: mol_type = genomic DNA
tctgaatccagcgatccgagttcaaatctcggtg

SEQ ID NO: 26813 - DNA, 35 bp, Homo sapiens
  source 1..35: mol_type = genomic DNA
tctgaatccagcgatccgagttcaaatctcggtgg

SEQ ID NO: 26814 - DNA, 36 bp, Homo sapiens
  source 1..36: mol_type = genomic DNA
tctgaatccagcgatccgagttcaaatctcggtgga

SEQ ID NO: 26815 - DNA, 37 bp, Homo sapiens
  source 1..37: mol_type = genomic DNA
tctgaatccagcgatccgagttcaaatctcggtggaa

SEQ ID NO: 26816 - DNA, 38 bp, Homo sapiens
  source 1..38: mol_type = genomic DNA
tctgaatccagcgatccgagttcaaatctcggtggaac

SEQ ID NO: 26817 - DNA, 39 bp, Homo sapiens
  source 1..39: mol_type = genomic DNA
tctgaatccagcgatccgagttcaaatctcggtggaacc

SEQ ID NO: 26818 - DNA, 40 bp, Homo sapiens
  source 1..40: mol_type = genomic DNA
tctgaatccagcgatccgagttcaaatctcggtggaacct

SEQ ID NO: 26819 - DNA, 41 bp, Homo sapiens
  source 1..41: mol_type = genomic DNA
tctgaatccagcgatccgagttcaaatctcggtggaacctc

SEQ ID NO: 26820 - DNA, 42 bp, Homo sapiens
  source 1..42: mol_type = genomic DNA
tctgaatccagcgatccgagttcaaatctcggtggaacctcc

SEQ ID NO: 26821 - DNA, 43 bp, Homo sapiens
  source 1..43: mol_type = genomic DNA
tctgaatccagcgatccgagttcaaatctcggtggaacctcca

SEQ ID NO: 26822 - DNA, 36 bp, Homo sapiens
  source 1..36: mol_type = genomic DNA
tctgaatccagcgatccgagttcaagtctcggtgga

SEQ ID NO: 26823 - DNA, 40 bp, Homo sapiens
  source 1..40: mol_type = genomic DNA
tctgaatccagcgatccgagttcaagtctcggtggaacct

SEQ ID NO: 26824 - DNA, 24 bp, Homo sapiens
  source 1..24: mol_type = genomic DNA
tctgaatccagcgatccgagttcg

SEQ ID NO: 26825 - DNA, 25 bp, Homo sapiens
  source 1..25: mol_type = genomic DNA
tctgaatccagcgatccgagttcga

SEQ ID NO: 26826 - DNA, 34 bp, Homo sapiens
  source 1..34: mol_type = genomic DNA
tctgaatccagcgatccgagttcgagtctcggtg

SEQ ID NO: 26827 - DNA, 35 bp, Homo sapiens
  source 1..35: mol_type = genomic DNA
tctgaatccagcgatccgagttcgagtctcggtgg

SEQ ID NO: 26828 - DNA, 36 bp, Homo sapiens
  source 1..36: mol_type = genomic DNA
tctgaatccagcgatccgagttcgagtctcggtgga

SEQ ID NO: 26829 - DNA, 37 bp, Homo sapiens
  source 1..37: mol_type = genomic DNA
tctgaatccagcgatccgagttcgagtctcggtggaa

SEQ ID NO: 26830 - DNA, 38 bp, Homo sapiens
  source 1..38: mol_type = genomic DNA
tctgaatccagcgatccgagttcgagtctcggtggaac

SEQ ID NO: 26831 - DNA, 40 bp, Homo sapiens
  source 1..40: mol_type = genomic DNA
tctgaatccagcgatccgagttcgagtctcggtggaacct

SEQ ID NO: 26832 - DNA, 41 bp, Homo sapiens
  source 1..41: mol_type = genomic DNA
tctgaatccagcgatccgagttcgagtctcggtggaacctc

SEQ ID NO: 26833 - DNA, 42 bp, Homo sapiens
  source 1..42: mol_type = genomic DNA
tctgaatccagcgatccgagttcgagtctcggtggaacctcc

SEQ ID NO: 26834 - DNA, 16 bp, Homo sapiens
  source 1..16: mol_type = genomic DNA
tctgacaacagaggct

SEQ ID NO: 26835 - DNA, 17 bp, Homo sapiens
  source 1..17: mol_type = genomic DNA
tctgacaacagaggctt

SEQ ID NO: 26836 - DNA, 18 bp, Homo sapiens
  source 1..18: mol_type = genomic DNA
tctgacaacagaggctta

SEQ ID NO: 26837 - DNA, 19 bp, Homo sapiens
  source 1..19: mol_type = genomic DNA
tctgacaacagaggcttac

SEQ ID NO: 26838 - DNA, 20 bp, Homo sapiens
  source 1..20: mol_type = genomic DNA
tctgacaacagaggcttacg

SEQ ID NO: 26839 - DNA, 21 bp, Homo sapiens
  source 1..21: mol_type = genomic DNA
tctgacaacagaggcttacga

SEQ ID NO: 26840 - DNA, 22 bp, Homo sapiens
  source 1..22: mol_type = genomic DNA
tctgacaacagaggcttacgac

SEQ ID NO: 26841 - DNA, 24 bp, Homo sapiens
  source 1..24: mol_type = genomic DNA
tctgacaacagaggcttacgaccc

SEQ ID NO: 26842 - DNA, 25 bp, Homo sapiens
  source 1..25: mol_type = genomic DNA
tctgacaacagaggcttacgacccc

SEQ ID NO: 26843 - DNA, 26 bp, Homo sapiens
  source 1..26: mol_type = genomic DNA
tctgacaacagaggcttacgacccct

SEQ ID NO: 26844 - DNA, 27 bp, Homo sapiens
  source 1..27: mol_type = genomic DNA
tctgacaacagaggcttacgacccctt

SEQ ID NO: 26845 - DNA, 28 bp, Homo sapiens
  source 1..28: mol_type = genomic DNA
tctgacaacagaggcttacgacccctta

SEQ ID NO: 26846 - DNA, 29 bp, Homo sapiens
  source 1..29: mol_type = genomic DNA
tctgacaacagaggcttacgaccccttat

SEQ ID NO: 26847 - DNA, 30 bp, Homo sapiens
  source 1..30: mol_type = genomic DNA
tctgacaacagaggcttacgaccccttatt

SEQ ID NO: 26848 - DNA, 31 bp, Homo sapiens
  source 1..31: mol_type = genomic DNA
tctgacaacagaggcttacgaccccttattt

SEQ ID NO: 26849 - DNA, 32 bp, Homo sapiens
  source 1..32: mol_type = genomic DNA
tctgacaacagaggcttacgaccccttattta

SEQ ID NO: 26850 - DNA, 33 bp, Homo sapiens
  source 1..33: mol_type = genomic DNA
tctgacaacagaggcttacgaccccttatttac

SEQ ID NO: 26851 - DNA, 34 bp, Homo sapiens
  source 1..34: mol_type = genomic DNA
tctgacaacagaggcttacgaccccttatttacc

SEQ ID NO: 26852 - DNA, 35 bp, Homo sapiens
  source 1..35: mol_type = genomic DNA
tctgacaacagaggcttacgaccccttatttaccc

SEQ ID NO: 26853 - DNA, 36 bp, Homo sapiens
  source 1..36: mol_type = genomic DNA
tctgacaacagaggcttacgaccccttatttacccc

SEQ ID NO: 26854 - DNA, 37 bp, Homo sapiens
  source 1..37: mol_type = genomic DNA
tctgacaacagaggcttacgaccccttatttacccca

SEQ ID NO: 26855 - DNA, 16 bp, Homo sapiens
  source 1..16: mol_type = genomic DNA
tctgagggtccagggt

SEQ ID NO: 26856 - DNA, 17 bp, Homo sapiens
  source 1..17: mol_type = genomic DNA
tctgagggtccagggtt

SEQ ID NO: 26857 - DNA, 18 bp, Homo sapiens
  source 1..18: mol_type = genomic DNA
tctgagggtccagggttc

SEQ ID NO: 26858 - DNA, 19 bp, Homo sapiens
  source 1..19: mol_type = genomic DNA
tctgagggtccagggttca

SEQ ID NO: 26859 - DNA, 20 bp, Homo sapiens
  source 1..20: mol_type = genomic DNA
tctgagggtccagggttcaa

SEQ ID NO: 26860 - DNA, 21 bp, Homo sapiens
  source 1..21: mol_type = genomic DNA
tctgagggtccagggttcaag

SEQ ID NO: 26861 - DNA, 22 bp, Homo sapiens
  source 1..22: mol_type = genomic DNA
tctgagggtccagggttcaagt

SEQ ID NO: 26862 - DNA, 26 bp, Homo sapiens
  source 1..26: mol_type = genomic DNA
tctgagggtccagggttcaagtccct

SEQ ID NO: 26863 - DNA, 27 bp, Homo sapiens
  source 1..27: mol_type = genomic DNA
tctgagggtccagggttcaagtccctg

SEQ ID NO: 26864 - DNA, 36 bp, Homo sapiens
  source 1..36: mol_type = genomic DNA
tctgagggtccagggttcaagtccctgtccaggcgc

SEQ ID NO: 26865 - DNA, 37 bp, Homo sapiens
  source 1..37: mol_type = genomic DNA
tctgagggtccagggttcaagtccctgtccaggcgcc

SEQ ID NO: 26866 - DNA, 38 bp, Homo sapiens
  source 1..38: mol_type = genomic DNA
tctgagggtccagggttcaagtccctgtccaggcgcca

SEQ ID NO: 26867 - DNA, 29 bp, Homo sapiens
  source 1..29: mol_type = genomic DNA
tctgagggtccagggttcaagtccctgtt

SEQ ID NO: 26868 - DNA, 30 bp, Homo sapiens
  source 1..30: mol_type = genomic DNA
tctgagggtccagggttcaagtccctgttc

SEQ ID NO: 26869 - DNA, 36 bp, Homo sapiens
  source 1..36: mol_type = genomic DNA
tctgagggtccagggttcaagtccctgttcaggcac

SEQ ID NO: 26870 - DNA, 37 bp, Homo sapiens
  source 1..37: mol_type = genomic DNA
tctgagggtccagggttcaagtccctgttcaggcacc

SEQ ID NO: 26871 - DNA, 38 bp, Homo sapiens
  source 1..38: mol_type = genomic DNA
tctgagggtccagggttcaagtccctgttcaggcacca

SEQ ID NO: 26872 - DNA, 36 bp, Homo sapiens
  source 1..36: mol_type = genomic DNA
tctgagggtccagggttcaagtccctgttcaggcgc

SEQ ID NO: 26873 - DNA, 37 bp, Homo sapiens
  source 1..37: mol_type = genomic DNA
tctgagggtccagggttcaagtccctgttcaggcgcc

SEQ ID NO: 26874 - DNA, 38 bp, Homo sapiens
  source 1..38: mol_type = genomic DNA
tctgagggtccagggttcaagtccctgttcaggcgcca

SEQ ID NO: 26875 - DNA, 31 bp, Homo sapiens
  source 1..31: mol_type = genomic DNA
tctgagggtccagggttcaagtccctgttcg

SEQ ID NO: 26876 - DNA, 32 bp, Homo sapiens
  source 1..32: mol_type = genomic DNA
tctgagggtccagggttcaagtccctgttcgg

SEQ ID NO: 26877 - DNA, 33 bp, Homo sapiens
  source 1..33: mol_type = genomic DNA
tctgagggtccagggttcaagtccctgttcggg

SEQ ID NO: 26878 - DNA, 34 bp, Homo sapiens
  source 1..34: mol_type = genomic DNA
tctgagggtccagggttcaagtccctgttcgggc

SEQ ID NO: 26879 - DNA, 35 bp, Homo sapiens
  source 1..35: mol_type = genomic DNA
tctgagggtccagggttcaagtccctgttcgggcg

SEQ ID NO: 26880 - DNA, 36 bp, Homo sapiens
  source 1..36: mol_type = genomic DNA
tctgagggtccagggttcaagtccctgttcgggcgc

SEQ ID NO: 26881 - DNA, 37 bp, Homo sapiens
  source 1..37: mol_type = genomic DNA
tctgagggtccagggttcaagtccctgttcgggcgcc

SEQ ID NO: 26882 - DNA, 38 bp, Homo sapiens
  source 1..38: mol_type = genomic DNA
tctgagggtccagggttcaagtccctgttcgggcgcca

SEQ ID NO: 26883 - DNA, 25 bp, Homo sapiens
  source 1..25: mol_type = genomic DNA
tctgagggtccagggttcatgtccc

SEQ ID NO: 26884 - DNA, 26 bp, Homo sapiens
  source 1..26: mol_type = genomic DNA
tctgagggtccagggttcatgtccct

SEQ ID NO: 26885 - DNA, 27 bp, Homo sapiens
  source 1..27: mol_type = genomic DNA
tctgagggtccagggttcatgtccctg

SEQ ID NO: 26886 - DNA, 28 bp, Homo sapiens
  source 1..28: mol_type = genomic DNA
tctgagggtccagggttcatgtccctgt

SEQ ID NO: 26887 - DNA, 29 bp, Homo sapiens
  source 1..29: mol_type = genomic DNA
tctgagggtccagggttcatgtccctgtt

SEQ ID NO: 26888 - DNA, 30 bp, Homo sapiens
  source 1..30: mol_type = genomic DNA
tctgagggtccagggttcatgtccctgttc

SEQ ID NO: 26889 - DNA, 37 bp, Homo sapiens
  source 1..37: mol_type = genomic DNA
tctgagggtccggggttcaagtccctgttcgggcgcc

SEQ ID NO: 26890 - DNA, 38 bp, Homo sapiens
  source 1..38: mol_type = genomic DNA
tctgagggtccggggttcaagtccctgttcgggcgcca

SEQ ID NO: 26891 - DNA, 23 bp, Homo sapiens
  source 1..23: mol_type = genomic DNA
tctgataaaagagttactttgat

SEQ ID NO: 26892 - DNA, 42 bp, Homo sapiens
  source 1..42: mol_type = genomic DNA
tctgataaaagagttactttgatagagtaaataataggagct

SEQ ID NO: 26893 - DNA, 16 bp, Homo sapiens
  source 1..16: mol_type = genomic DNA
tctgcacgcgtgggtt

SEQ ID NO: 26894 - DNA, 29 bp, Homo sapiens
  source 1..29: mol_type = genomic DNA
tctgcacgcgtgggttcgaatcccatcct

SEQ ID NO: 26895 - DNA, 16 bp, Homo sapiens
  source 1..16: mol_type = genomic DNA
tctgcgttgtggccgc

SEQ ID NO: 26896 - DNA, 17 bp, Homo sapiens
  source 1..17: mol_type = genomic DNA
tctgcgttgtggccgca

SEQ ID NO: 26897 - DNA, 28 bp, Homo sapiens
  source 1..28: mol_type = genomic DNA
tctgcgttgtggccgcagcaacctcggt

SEQ ID NO: 26898 - DNA, 30 bp, Homo sapiens
  source 1..30: mol_type = genomic DNA
tctgctttacacgcagaaggtcctgggttc

SEQ ID NO: 26899 - DNA, 16 bp, Homo sapiens
  source 1..16: mol_type = genomic DNA
tctggactctgaatcc

SEQ ID NO: 26900 - DNA, 17 bp, Homo sapiens
  source 1..17: mol_type = genomic DNA
tctggactctgaatcca

SEQ ID NO: 26901 - DNA, 19 bp, Homo sapiens
  source 1..19: mol_type = genomic DNA
tctggactctgaatccagc

SEQ ID NO: 26902 - DNA, 20 bp, Homo sapiens
  source 1..20: mol_type = genomic DNA
tctggactctgaatccagcg

SEQ ID NO: 26903 - DNA, 22 bp, Homo sapiens
  source 1..22: mol_type = genomic DNA
tctggactctgaatccagcgat

SEQ ID NO: 26904 - DNA, 24 bp, Homo sapiens
  source 1..24: mol_type = genomic DNA
tctggactctgaatccagcgatcc

SEQ ID NO: 26905 - DNA, 25 bp, Homo sapiens
  source 1..25: mol_type = genomic DNA
tctggactctgaatccagcgatccg

SEQ ID NO: 26906 - DNA, 26 bp, Homo sapiens
  source 1..26: mol_type = genomic DNA
tctggactctgaatccagcgatccga

SEQ ID NO: 26907 - DNA, 27 bp, Homo sapiens
  source 1..27: mol_type = genomic DNA
tctggactctgaatccagcgatccgag

SEQ ID NO: 26908 - DNA, 28 bp, Homo sapiens
  source 1..28: mol_type = genomic DNA
tctggactctgaatccagcgatccgagt

SEQ ID NO: 26909 - DNA, 29 bp, Homo sapiens
  source 1..29: mol_type = genomic DNA
tctggactctgaatccagcgatccgagtt

SEQ ID NO: 26910 - DNA, 30 bp, Homo sapiens
  source 1..30: mol_type = genomic DNA
tctggactctgaatccagcgatccgagttc

SEQ ID NO: 26911 - DNA, 31 bp, Homo sapiens
  source 1..31: mol_type = genomic DNA
tctggactctgaatccagcgatccgagttca

SEQ ID NO: 26912 - DNA, 40 bp, Homo sapiens
  source 1..40: mol_type = genomic DNA
tctggactctgaatccagcgatccgagttcaaatctcggt

SEQ ID NO: 26913 - DNA, 41 bp, Homo sapiens
  source 1..41: mol_type = genomic DNA
tctggactctgaatccagcgatccgagttcaaatctcggtg

SEQ ID NO: 26914 - DNA, 47 bp, Homo sapiens
  source 1..47: mol_type = genomic DNA
tctggactctgaatccagcgatccgagttcaaatctcggtggaacct

SEQ ID NO: 26915 - DNA, 16 bp, Homo sapiens
  source 1..16: mol_type = genomic DNA
tctggactttgaatcc

SEQ ID NO: 26916 - DNA, 17 bp, Homo sapiens
  source 1..17: mol_type = genomic DNA
tctggactttgaatcca

SEQ ID NO: 26917 - DNA, 29 bp, Homo sapiens
  source 1..29: mol_type = genomic DNA
tctggactttgaatccagcgatccgagtt

SEQ ID NO: 26918 - DNA, 30 bp, Homo sapiens
  source 1..30: mol_type = genomic DNA
tctggactttgaatccagcgatccgagttc

SEQ ID NO: 26919 - DNA, 26 bp, Homo sapiens
  source 1..26: mol_type = genomic DNA
tctggtctccaatggaggcgtgggtt

SEQ ID NO: 26920 - DNA, 46 bp, Homo sapiens
  source 1..46: mol_type = genomic DNA
tctggtctccaatggaggcgtgggttcgaatcccacttctgacacc

SEQ ID NO: 26921 - DNA, 47 bp, Homo sapiens
  source 1..47: mol_type = genomic DNA
tctggtctccaatggaggcgtgggttcgaatcccacttctgacacca

SEQ ID NO: 26922 - DNA, 24 bp, Homo sapiens
  source 1..24: mol_type = genomic DNA
tctggtctccggatggaggcgtgg

SEQ ID NO: 26923 - DNA, 27 bp, Homo sapiens
  source 1..27: mol_type = genomic DNA
tctggtctccggatggaggcgtgggtt

SEQ ID NO: 26924 - DNA, 46 bp, Homo sapiens
  source 1..46: mol_type = genomic DNA
tctggtctccggatggaggcgtgggttcgaatcccacttctgacac

SEQ ID NO: 26925 - DNA, 47 bp, Homo sapiens
  source 1..47: mol_type = genomic DNA
tctggtctccggatggaggcgtgggttcgaatcccacttctgacacc

SEQ ID NO: 26926 - DNA, 20 bp, Homo sapiens
  source 1..20: mol_type = genomic DNA
tctgtagtgtagtggttatc

SEQ ID NO: 26927 - DNA, 29 bp, Homo sapiens
  source 1..29: mol_type = genomic DNA
tctgtagtgtagtggttatcacgttcgcc

SEQ ID NO: 26928 - DNA, 30 bp, Homo sapiens
  source 1..30: mol_type = genomic DNA
tctgtagtgtagtggttatcacgttcgcct

SEQ ID NO: 26929 - DNA, 31 bp, Homo sapiens
  source 1..31: mol_type = genomic DNA
tctgtagtgtagtggttatcacgttcgcctc

SEQ ID NO: 26930 - DNA, 32 bp, Homo sapiens
  source 1..32: mol_type = genomic DNA
tctgtagtgtagtggttatcacgttcgcctca

SEQ ID NO: 26931 - DNA, 33 bp, Homo sapiens
  source 1..33: mol_type = genomic DNA
tctgtagtgtagtggttatcacgttcgcctcac

SEQ ID NO: 26932 - DNA, 34 bp, Homo sapiens
  source 1..34: mol_type = genomic DNA
tctgtagtgtagtggttatcacgttcgcctcaca

SEQ ID NO: 26933 - DNA, 16 bp, Homo sapiens
  source 1..16: mol_type = genomic DNA
tctgtggcgcaatcgg

SEQ ID NO: 26934 - DNA, 37 bp, Homo sapiens
  source 1..37: mol_type = genomic DNA
tctgtggcgcaatcggttagcgcgttcggctgttaac

SEQ ID NO: 26935 - DNA, 16 bp, Homo sapiens
  source 1..16: mol_type = genomic DNA
tctgtggcgcaatgga

SEQ ID NO: 26936 - DNA, 17 bp, Homo sapiens
  source 1..17: mol_type = genomic DNA
tctgtggcgcaatggac

SEQ ID NO: 26937 - DNA, 18 bp, Homo sapiens
  source 1..18: mol_type = genomic DNA
tctgtggcgcaatggacg

SEQ ID NO: 26938 - DNA, 30 bp, Homo sapiens
  source 1..30: mol_type = genomic DNA
tctgtggcgcaatggatagcgcattggact

SEQ ID NO: 26939 - DNA, 33 bp, Homo sapiens
  source 1..33: mol_type = genomic DNA
tctgtggcgcaatggatagcgcattggacttct

SEQ ID NO: 26940 - DNA, 16 bp, Homo sapiens
  source 1..16: mol_type = genomic DNA
tcttaatcccagggtc

SEQ ID NO: 26941 - DNA, 17 bp, Homo sapiens
  source 1..17: mol_type = genomic DNA
tcttaatcccagggtcg

SEQ ID NO: 26942 - DNA, 18 bp, Homo sapiens
  source 1..18: mol_type = genomic DNA
tcttaatcccagggtcgt

SEQ ID NO: 26943 - DNA, 19 bp, Homo sapiens
  source 1..19: mol_type = genomic DNA
tcttaatcccagggtcgtg

SEQ ID NO: 26944 - DNA, 20 bp, Homo sapiens
  source 1..20: mol_type = genomic DNA
tcttaatcccagggtcgtgg

SEQ ID NO: 26945 - DNA, 31 bp, Homo sapiens
  source 1..31: mol_type = genomic DNA
tcttaatcccagggtcgtgggttcgagcccc

SEQ ID NO: 26946 - DNA, 37 bp, Homo sapiens
  source 1..37: mol_type = genomic DNA
tcttaatcccagggtcgtgggttcgagccccacgttg

SEQ ID NO: 26947 - DNA, 16 bp, Homo sapiens
  source 1..16: mol_type = genomic DNA
tcttaatctcagggtc

SEQ ID NO: 26948 - DNA, 17 bp, Homo sapiens
  source 1..17: mol_type = genomic DNA
tcttaatctcagggtcg

SEQ ID NO: 26949 - DNA, 18 bp, Homo sapiens
  source 1..18: mol_type = genomic DNA
tcttaatctcagggtcgt

SEQ ID NO: 26950 - DNA, 19 bp, Homo sapiens
  source 1..19: mol_type = genomic DNA
tcttaatctcagggtcgtg

SEQ ID NO: 26951 - DNA, 20 bp, Homo sapiens
  source 1..20: mol_type = genomic DNA
tcttaatctcagggtcgtgg

SEQ ID NO: 26952 - DNA, 21 bp, Homo sapiens
  source 1..21: mol_type = genomic DNA
tcttaatctcagggtcgtggg

SEQ ID NO: 26953 - DNA, 23 bp, Homo sapiens
  source 1..23: mol_type = genomic DNA
tcttaatctcagggtcgtgggtt

SEQ ID NO: 26954 - DNA, 24 bp, Homo sapiens
  source 1..24: mol_type = genomic DNA
tcttaatctcagggtcgtgggttc

SEQ ID NO: 26955 - DNA, 29 bp, Homo sapiens
  source 1..29: mol_type = genomic DNA
tcttaatctcagggtcgtgggttcgagcc

SEQ ID NO: 26956 - DNA, 31 bp, Homo sapiens
  source 1..31: mol_type = genomic DNA
tcttaatctcagggtcgtgggttcgagcccc

SEQ ID NO: 26957 - DNA, 34 bp, Homo sapiens
  source 1..34: mol_type = genomic DNA
tcttaatctcagggtcgtgggttcgagccccacg

SEQ ID NO: 26958 - DNA, 35 bp, Homo sapiens
  source 1..35: mol_type = genomic DNA
tcttaatctcagggtcgtgggttcgagccccacgt

SEQ ID NO: 26959 - DNA, 37 bp, Homo sapiens
  source 1..37: mol_type = genomic DNA
tcttaatctcagggtcgtgggttcgagccccacgttg

SEQ ID NO: 26960 - DNA, 38 bp, Homo sapiens
  source 1..38: mol_type = genomic DNA
tcttaatctcagggtcgtgggttcgagccccacgttgg

SEQ ID NO: 26961 - DNA, 43 bp, Homo sapiens
  source 1..43: mol_type = genomic DNA
tcttaatctcagggtcgtgggttcgagccccacgttgggcgcc

SEQ ID NO: 26962 - DNA, 16 bp, Homo sapiens
  source 1..16: mol_type = genomic DNA
tcttagctttgggtgc

SEQ ID NO: 26963 - DNA, 24 bp, Homo sapiens
  source 1..24: mol_type = genomic DNA
tcttagctttgggtgctaatggtg

SEQ ID NO: 26964 - DNA, 27 bp, Homo sapiens
  source 1..27: mol_type = genomic DNA
tcttagctttgggtgctaatggtggag

SEQ ID NO: 26965 - DNA, 28 bp, Homo sapiens
  source 1..28: mol_type = genomic DNA
tcttagctttgggtgctaatggtggagt

SEQ ID NO: 26966 - DNA, 29 bp, Homo sapiens
  source 1..29: mol_type = genomic DNA
tcttagctttgggtgctaatggtggagtt

SEQ ID NO: 26967 - DNA, 30 bp, Homo sapiens
  source 1..30: mol_type = genomic DNA
tcttagctttgggtgctaatggtggagtta

SEQ ID NO: 26968 - DNA, 31 bp, Homo sapiens
  source 1..31: mol_type = genomic DNA
tcttagctttgggtgctaatggtggagttaa

SEQ ID NO: 26969 - DNA, 33 bp, Homo sapiens
  source 1..33: mol_type = genomic DNA
tcttagctttgggtgctaatggtggagttaaag

SEQ ID NO: 26970 - DNA, 34 bp, Homo sapiens
  source 1..34: mol_type = genomic DNA
tcttagctttgggtgctaatggtggagttaaaga

SEQ ID NO: 26971 - DNA, 35 bp, Homo sapiens
  source 1..35: mol_type = genomic DNA
tcttagctttgggtgctaatggtggagttaaagac

SEQ ID NO: 26972 - DNA, 36 bp, Homo sapiens
  source 1..36: mol_type = genomic DNA
tcttagctttgggtgctaatggtggagttaaagact

SEQ ID NO: 26973 - DNA, 37 bp, Homo sapiens
  source 1..37: mol_type = genomic DNA
tcttagctttgggtgctaatggtggagttaaagactt

SEQ ID NO: 26974 - DNA, 38 bp, Homo sapiens
  source 1..38: mol_type = genomic DNA
tcttagctttgggtgctaatggtggagttaaagacttt

SEQ ID NO: 26975 - DNA, 39 bp, Homo sapiens
  source 1..39: mol_type = genomic DNA
tcttagctttgggtgctaatggtggagttaaagactttt

SEQ ID NO: 26976 - DNA, 43 bp, Homo sapiens
  source 1..43: mol_type = genomic DNA
tcttagctttgggtgctaatggtggagttaaagactttttctc

SEQ ID NO: 26977 - DNA, 46 bp, Homo sapiens
  source 1..46: mol_type = genomic DNA
tcttagctttgggtgctaatggtggagttaaagactttttctctga

SEQ ID NO: 26978 - DNA, 47 bp, Homo sapiens
  source 1..47: mol_type = genomic DNA
tcttagctttgggtgctaatggtggagttaaagactttttctctgac

SEQ ID NO: 26979 - DNA, 48 bp, Homo sapiens
  source 1..48: mol_type = genomic DNA
tcttagctttgggtgctaatggtggagttaaagactttttctctgacc

SEQ ID NO: 26980 - DNA, 30 bp, Homo sapiens
  source 1..30: mol_type = genomic DNA
tcttaggccccaaaaattttggtgcaactc

SEQ ID NO: 26981 - DNA, 44 bp, Homo sapiens
  source 1..44: mol_type = genomic DNA
tcttaggccccaaaaattttggtgcaactccaaataaaagtacc

SEQ ID NO: 26982 - DNA, 16 bp, Homo sapiens
  source 1..16: mol_type = genomic DNA
tcttcggaggcgtggg

SEQ ID NO: 26983 - DNA, 17 bp, Homo sapiens
  source 1..17: mol_type = genomic DNA
tcttcggaggcgtgggt

SEQ ID NO: 26984 - DNA, 19 bp, Homo sapiens
  source 1..19: mol_type = genomic DNA
tcttcggaggcgtgggttc

SEQ ID NO: 26985 - DNA, 27 bp, Homo sapiens
  source 1..27: mol_type = genomic DNA
tcttcggaggcgtgggttcgaatccca

SEQ ID NO: 26986 - DNA, 38 bp, Homo sapiens
  source 1..38: mol_type = genomic DNA
tcttcggaggcgtgggttcgaatcccaccgctgccacc

SEQ ID NO: 26987 - DNA, 16 bp, Homo sapiens
  source 1..16: mol_type = genomic DNA
tcttcgggggcgtggg

SEQ ID NO: 26988 - DNA, 17 bp, Homo sapiens
  source 1..17: mol_type = genomic DNA
tcttcgggggcgtgggt

SEQ ID NO: 26989 - DNA, 18 bp, Homo sapiens
  source 1..18: mol_type = genomic DNA
tcttcgggggcgtgggtt

SEQ ID NO: 26990 - DNA, 19 bp, Homo sapiens
  source 1..19: mol_type = genomic DNA
tcttcgggggcgtgggttc

SEQ ID NO: 26991 - DNA, 20 bp, Homo sapiens
  source 1..20: mol_type = genomic DNA
tcttcgggggcgtgggttcg

SEQ ID NO: 26992 - DNA, 33 bp, Homo sapiens
  source 1..33: mol_type = genomic DNA
tcttcgggggcgtgggttcgaatcccaccgctg

SEQ ID NO: 26993 - DNA, 38 bp, Homo sapiens
  source 1..38: mol_type = genomic DNA
tcttcgggggcgtgggttcgaatcccaccgctgccacc

SEQ ID NO: 26994 - DNA, 19 bp, Homo sapiens
  source 1..19: mol_type = genomic DNA
tcttcgggggcgtgggttt

SEQ ID NO: 26995 - DNA, 17 bp, Homo sapiens
  source 1..17: mol_type = genomic DNA
tcttgcgacccgggttc

SEQ ID NO: 26996 - DNA, 18 bp, Homo sapiens
  source 1..18: mol_type = genomic DNA
tcttgcgacccgggttcg

SEQ ID NO: 26997 - DNA, 29 bp, Homo sapiens
  source 1..29: mol_type = genomic DNA
tcttgcgacccgggttcgattcccgggcg

SEQ ID NO: 26998 - DNA, 30 bp, Homo sapiens
  source 1..30: mol_type = genomic DNA
tcttgcgacccgggttcgattcccgggcgg

SEQ ID NO: 26999 - DNA, 31 bp, Homo sapiens
  source 1..31: mol_type = genomic DNA
tcttgcgacccgggttcgattcccgggcggc

SEQ ID NO: 27000 - DNA, 32 bp, Homo sapiens
  source 1..32: mol_type = genomic DNA
tcttgcgacccgggttcgattcccgggcggcg

SEQ ID NO: 27001 - DNA, 33 bp, Homo sapiens
  source 1..33: mol_type = genomic DNA
tcttgcgacccgggttcgattcccgggcggcgc

SEQ ID NO: 27002 - DNA, 34 bp, Homo sapiens
  source 1..34: mol_type = genomic DNA
tcttgcgacccgggttcgattcccgggcggcgca

SEQ ID NO: 27003 - DNA, 35 bp, Homo sapiens
  source 1..35: mol_type = genomic DNA
tcttgcgacccgggttcgattcccgggcggcgcac

SEQ ID NO: 27004 - DNA, 36 bp, Homo sapiens
  source 1..36: mol_type = genomic DNA
tcttgcgacccgggttcgattcccgggcggcgcacc

SEQ ID NO: 27005 - DNA, 37 bp, Homo sapiens
  source 1..37: mol_type = genomic DNA
tcttgcgacccgggttcgattcccgggcggcgcacca

SEQ ID NO: 27006 - DNA, 24 bp, Homo sapiens
  source 1..24: mol_type = genomic DNA
tcttgtaaacaggagatcctgggt

SEQ ID NO: 27007 - DNA, 40 bp, Homo sapiens
  source 1..40: mol_type = genomic DNA
tcttgtaaaccggagatgaaaacctttttccaaggacacc

SEQ ID NO: 27008 - DNA, 41 bp, Homo sapiens
  source 1..41: mol_type = genomic DNA
tcttgtaaaccggagatgaaaacctttttccaaggacacca

SEQ ID NO: 27009 - DNA, 33 bp, Homo sapiens
  source 1..33: mol_type = genomic DNA
tcttgtagttgaaatacaacgatggtttttcat

SEQ ID NO: 27010 - DNA, 20 bp, Homo sapiens
  source 1..20: mol_type = genomic DNA
tcttttagtataaatagtac

SEQ ID NO: 27011 - DNA, 21 bp, Homo sapiens
  source 1..21: mol_type = genomic DNA
tcttttagtataaatagtacc

SEQ ID NO: 27012 - DNA, 27 bp, Homo sapiens
  source 1..27: mol_type = genomic DNA
tcttttagtataaatagtaccgttaac

SEQ ID NO: 27013 - DNA, 28 bp, Homo sapiens
  source 1..28: mol_type = genomic DNA
tcttttagtataaatagtaccgttaact

SEQ ID NO: 27014 - DNA, 29 bp, Homo sapiens
  source 1..29: mol_type = genomic DNA
tcttttagtataaatagtaccgttaactt

SEQ ID NO: 27015 - DNA, 30 bp, Homo sapiens
  source 1..30: mol_type = genomic DNA
tcttttagtataaatagtaccgttaacttc

SEQ ID NO: 27016 - DNA, 31 bp, Homo sapiens
  source 1..31: mol_type = genomic DNA
tcttttagtataaatagtaccgttaacttcc

SEQ ID NO: 27017 - DNA, 32 bp, Homo sapiens
  source 1..32: mol_type = genomic DNA
tcttttagtataaatagtaccgttaacttcca

SEQ ID NO: 27018 - DNA, 18 bp, Homo sapiens
  source 1..18: mol_type = genomic DNA
tgaaaaagtcatggaggc

SEQ ID NO: 27019 - DNA, 19 bp, Homo sapiens
  source 1..19: mol_type = genomic DNA
tgaaaaagtcatggaggcc

SEQ ID NO: 27020 - DNA, 21 bp, Homo sapiens
  source 1..21: mol_type = genomic DNA
tgaaaaagtcatggaggccat

SEQ ID NO: 27021 - DNA, 27 bp, Homo sapiens
  source 1..27: mol_type = genomic DNA
tgaaaaagtcatggaggccatggggtt

SEQ ID NO: 27022 - DNA, 28 bp, Homo sapiens
  source 1..28: mol_type = genomic DNA
tgaaaaagtcatggaggccatggggttg

SEQ ID NO: 27023 - DNA, 29 bp, Homo sapiens
  source 1..29: mol_type = genomic DNA
tgaaaaagtcatggaggccatggggttgg

SEQ ID NO: 27024 - DNA, 16 bp, Homo sapiens
  source 1..16: mol_type = genomic DNA
tgaaaacctttttcca

SEQ ID NO: 27025 - DNA, 20 bp, Homo sapiens
  source 1..20: mol_type = genomic DNA
tgaaaacctttttccaagga

SEQ ID NO: 27026 - DNA, 21 bp, Homo sapiens
  source 1..21: mol_type = genomic DNA
tgaaaacctttttccaaggac

SEQ ID NO: 27027 - DNA, 22 bp, Homo sapiens
  source 1..22: mol_type = genomic DNA
tgaaaacctttttccaaggaca

SEQ ID NO: 27028 - DNA, 23 bp, Homo sapiens
  source 1..23: mol_type = genomic DNA
tgaaaacctttttccaaggacac

SEQ ID NO: 27029 - DNA, 24 bp, Homo sapiens
  source 1..24: mol_type = genomic DNA
tgaaaacctttttccaaggacacc

SEQ ID NO: 27030 - DNA, 25 bp, Homo sapiens
  source 1..25: mol_type = genomic DNA
tgaaaacctttttccaaggacacca

SEQ ID NO: 27031 - DNA, 17 bp, Homo sapiens
  source 1..17: mol_type = genomic DNA
tgaaaatgtttagacgg

SEQ ID NO: 27032 - DNA, 19 bp, Homo sapiens
  source 1..19: mol_type = genomic DNA
tgaaaatgtttagacgggc

SEQ ID NO: 27033 - DNA, 20 bp, Homo sapiens
  source 1..20: mol_type = genomic DNA
tgaaaatgtttagacgggct

SEQ ID NO: 27034 - DNA, 21 bp, Homo sapiens
  source 1..21: mol_type = genomic DNA
tgaaaatgtttagacgggctc

SEQ ID NO: 27035 - DNA, 22 bp, Homo sapiens
  source 1..22: mol_type = genomic DNA
tgaaaatgtttagacgggctca

SEQ ID NO: 27036 - DNA, 23 bp, Homo sapiens
  source 1..23: mol_type = genomic DNA
tgaaaatgtttagacgggctcac

SEQ ID NO: 27037 - DNA, 24 bp, Homo sapiens
  source 1..24: mol_type = genomic DNA
tgaaaatgtttagacgggctcaca

SEQ ID NO: 27038 - DNA, 25 bp, Homo sapiens
  source 1..25: mol_type = genomic DNA
tgaaaatgtttagacgggctcacat

SEQ ID NO: 27039 - DNA, 26 bp, Homo sapiens
  source 1..26: mol_type = genomic DNA
tgaaaatgtttagacgggctcacatc

SEQ ID NO: 27040 - DNA, 28 bp, Homo sapiens
  source 1..28: mol_type = genomic DNA
tgaaaatgtttagacgggctcacatcac

SEQ ID NO: 27041 - DNA, 29 bp, Homo sapiens
  source 1..29: mol_type = genomic DNA
tgaaaatgtttagacgggctcacatcacc

SEQ ID NO: 27042 - DNA, 30 bp, Homo sapiens
  source 1..30: mol_type = genomic DNA
tgaaaatgtttagacgggctcacatcaccc

SEQ ID NO: 27043 - DNA, 31 bp, Homo sapiens
  source 1..31: mol_type = genomic DNA
tgaaaatgtttagacgggctcacatcacccc

SEQ ID NO: 27044 - DNA, 32 bp, Homo sapiens
  source 1..32: mol_type = genomic DNA
tgaaaatgtttagacgggctcacatcacccca

SEQ ID NO: 27045 - DNA, 34 bp, Homo sapiens
  source 1..34: mol_type = genomic DNA
tgaaaatgtttagacgggctcacatcaccccata

SEQ ID NO: 27046 - DNA, 35 bp, Homo sapiens
  source 1..35: mol_type = genomic DNA
tgaaaatgtttagacgggctcacatcaccccataa

SEQ ID NO: 27047 - DNA, 36 bp, Homo sapiens
  source 1..36: mol_type = genomic DNA
tgaaaatgtttagacgggctcacatcaccccataaa

SEQ ID NO: 27048 - DNA, 40 bp, Homo sapiens
  source 1..40: mol_type = genomic DNA
tgaaaatgtttagacgggctcacatcaccccataaacacc

SEQ ID NO: 27049 - DNA, 21 bp, Homo sapiens
  source 1..21: mol_type = genomic DNA
tgaaaccagctttggggggtt

SEQ ID NO: 27050 - DNA, 23 bp, Homo sapiens
  source 1..23: mol_type = genomic DNA
tgaaaccagctttggggggttcg

SEQ ID NO: 27051 - DNA, 36 bp, Homo sapiens
  source 1..36: mol_type = genomic DNA
tgaaaggttggtggttcgagcccacccagggacgcc

SEQ ID NO: 27052 - DNA, 21 bp, Homo sapiens
  source 1..21: mol_type = genomic DNA
tgaaatacaacgatggttttt

SEQ ID NO: 27053 - DNA, 22 bp, Homo sapiens
  source 1..22: mol_type = genomic DNA
tgaaatacaacgatggtttttc

SEQ ID NO: 27054 - DNA, 24 bp, Homo sapiens
  source 1..24: mol_type = genomic DNA
tgaaatacaacgatggtttttcat

SEQ ID NO: 27055 - DNA, 31 bp, Homo sapiens
  source 1..31: mol_type = genomic DNA
tgaaatacaacgatggtttttcatatcattg

SEQ ID NO: 27056 - DNA, 34 bp, Homo sapiens
  source 1..34: mol_type = genomic DNA
tgaaatacaacgatggtttttcatatcattggtc

SEQ ID NO: 27057 - DNA, 36 bp, Homo sapiens
  source 1..36: mol_type = genomic DNA
tgaaatacaacgatggtttttcatatcattggtcgt

SEQ ID NO: 27058 - DNA, 43 bp, Homo sapiens
  source 1..43: mol_type = genomic DNA
tgaaatacaacgatggtttttcatatcattggtcgtggttgta

SEQ ID NO: 27059 - DNA, 46 bp, Homo sapiens
  source 1..46: mol_type = genomic DNA
tgaaatacaacgatggtttttcatatcattggtcgtggttgtagtc

SEQ ID NO: 27060 - DNA, 47 bp, Homo sapiens
  source 1..47: mol_type = genomic DNA
tgaaatacaacgatggtttttcatatcattggtcgtggttgtagtcc

SEQ ID NO: 27061 - DNA, 16 bp, Homo sapiens
  source 1..16: mol_type = genomic DNA
tgaagcattggactgt

SEQ ID NO: 27062 - DNA, 17 bp, Homo sapiens
  source 1..17: mol_type = genomic DNA
tgaagcattggactgta

SEQ ID NO: 27063 - DNA, 18 bp, Homo sapiens
  source 1..18: mol_type = genomic DNA
tgaagcattggactgtaa

SEQ ID NO: 27064 - DNA, 19 bp, Homo sapiens
  source 1..19: mol_type = genomic DNA
tgaagcattggactgtaaa

SEQ ID NO: 27065 - DNA, 20 bp, Homo sapiens
  source 1..20: mol_type = genomic DNA
tgaagcattggactgtaaat

SEQ ID NO: 27066 - DNA, 21 bp, Homo sapiens
  source 1..21: mol_type = genomic DNA
tgaagcattggactgtaaatc

SEQ ID NO: 27067 - DNA, 22 bp, Homo sapiens
  source 1..22: mol_type = genomic DNA
tgaagcattggactgtaaatct

SEQ ID NO: 27068 - DNA, 23 bp, Homo sapiens
  source 1..23: mol_type = genomic DNA
tgaagcattggactgtaaatcta

SEQ ID NO: 27069 - DNA, 24 bp, Homo sapiens
  source 1..24: mol_type = genomic DNA
tgaagcattggactgtaaatctaa

SEQ ID NO: 27070 - DNA, 25 bp, Homo sapiens
  source 1..25: mol_type = genomic DNA
tgaagcattggactgtaaatctaaa

SEQ ID NO: 27071 - DNA, 26 bp, Homo sapiens
  source 1..26: mol_type = genomic DNA
tgaagcattggactgtaaatctaaag

SEQ ID NO: 27072 - DNA, 29 bp, Homo sapiens
  source 1..29: mol_type = genomic DNA
tgaagcattggactgtaaatctaaagaca

SEQ ID NO: 27073 - DNA, 32 bp, Homo sapiens
  source 1..32: mol_type = genomic DNA
tgaagcattggactgtaaatctaaagacaggg

SEQ ID NO: 27074 - DNA, 35 bp, Homo sapiens
  source 1..35: mol_type = genomic DNA
tgaagcattggactgtaaatctaaagacaggggtt

SEQ ID NO: 27075 - DNA, 45 bp, Homo sapiens
  source 1..45: mol_type = genomic DNA
tgaagcattggactgtaaatctaaagacaggggttaggcctcttt

SEQ ID NO: 27076 - DNA, 27 bp, Homo sapiens
  source 1..27: mol_type = genomic DNA
tgaagccagttgattagggtgcttagc

SEQ ID NO: 27077 - DNA, 30 bp, Homo sapiens
  source 1..30: mol_type = genomic DNA
tgaagccagttgattagggtgcttagctgt

SEQ ID NO: 27078 - DNA, 31 bp, Homo sapiens
  source 1..31: mol_type = genomic DNA
tgaagccagttgattagggtgcttagctgtt

SEQ ID NO: 27079 - DNA, 34 bp, Homo sapiens
  source 1..34: mol_type = genomic DNA
tgaagccagttgattagggtgcttagctgttaac

SEQ ID NO: 27080 - DNA, 16 bp, Homo sapiens
  source 1..16: mol_type = genomic DNA
tgaaggtcctgagttc

SEQ ID NO: 27081 - DNA, 17 bp, Homo sapiens
  source 1..17: mol_type = genomic DNA
tgaaggtcctgagttcg

SEQ ID NO: 27082 - DNA, 21 bp, Homo sapiens
  source 1..21: mol_type = genomic DNA
tgaaggtcctgagttcgaacc

SEQ ID NO: 27083 - DNA, 22 bp, Homo sapiens
  source 1..22: mol_type = genomic DNA
tgaaggtcctgagttcgaacct

SEQ ID NO: 27084 - DNA, 23 bp, Homo sapiens
  source 1..23: mol_type = genomic DNA
tgaaggtcctgagttcgaacctc

SEQ ID NO: 27085 - DNA, 29 bp, Homo sapiens
  source 1..29: mol_type = genomic DNA
tgaaggtcctgagttcgaacctcagaggg

SEQ ID NO: 27086 - DNA, 30 bp, Homo sapiens
  source 1..30: mol_type = genomic DNA
tgaaggtcctgagttcgaacctcagagggg

SEQ ID NO: 27087 - DNA, 32 bp, Homo sapiens
  source 1..32: mol_type = genomic DNA
tgaaggtcctgagttcgaacctcagagggggc

SEQ ID NO: 27088 - DNA, 33 bp, Homo sapiens
  source 1..33: mol_type = genomic DNA
tgaaggtcctgagttcgaacctcagagggggca

SEQ ID NO: 27089 - DNA, 34 bp, Homo sapiens
  source 1..34: mol_type = genomic DNA
tgaaggtcctgagttcgaacctcagagggggcac

SEQ ID NO: 27090 - DNA, 35 bp, Homo sapiens
  source 1..35: mol_type = genomic DNA
tgaaggtcctgagttcgaacctcagagggggcacc

SEQ ID NO: 27091 - DNA, 36 bp, Homo sapiens
  source 1..36: mol_type = genomic DNA
tgaaggtcctgagttcgaacctcagagggggcacca

SEQ ID NO: 27092 - DNA, 33 bp, Homo sapiens
  source 1..33: mol_type = genomic DNA
tgaaggtcctgagttcgagcctcagagagggca

SEQ ID NO: 27093 - DNA, 34 bp, Homo sapiens
  source 1..34: mol_type = genomic DNA
tgaaggtcctgagttcgagcctcagagagggcac

SEQ ID NO: 27094 - DNA, 35 bp, Homo sapiens
  source 1..35: mol_type = genomic DNA
tgaaggtcctgagttcgagcctcagagagggcacc

SEQ ID NO: 27095 - DNA, 36 bp, Homo sapiens
  source 1..36: mol_type = genomic DNA
tgaaggtcctgagttcgagcctcagagagggcacca

SEQ ID NO: 27096 - DNA, 16 bp, Homo sapiens
  source 1..16: mol_type = genomic DNA
tgaaggtcgtgagttc

SEQ ID NO: 27097 - DNA, 17 bp, Homo sapiens
  source 1..17: mol_type = genomic DNA
tgaaggtcgtgagttcg

SEQ ID NO: 27098 - DNA, 27 bp, Homo sapiens
  source 1..27: mol_type = genomic DNA
tgaaggtcgtgagttcgagcctcacac

SEQ ID NO: 27099 - DNA, 32 bp, Homo sapiens
  source 1..32: mol_type = genomic DNA
tgaaggtcgtgagttcgagcctcacacggggc

SEQ ID NO: 27100 - DNA, 33 bp, Homo sapiens
  source 1..33: mol_type = genomic DNA
tgaaggtcgtgagttcgagcctcacacggggca

SEQ ID NO: 27101 - DNA, 34 bp, Homo sapiens
  source 1..34: mol_type = genomic DNA
tgaaggtcgtgagttcgagcctcacacggggcac

SEQ ID NO: 27102 - DNA, 35 bp, Homo sapiens
  source 1..35: mol_type = genomic DNA
tgaaggtcgtgagttcgagcctcacacggggcacc

SEQ ID NO: 27103 - DNA, 36 bp, Homo sapiens
  source 1..36: mol_type = genomic DNA
tgaaggtcgtgagttcgagcctcacacggggcacca

SEQ ID NO: 27104 - DNA, 22 bp, Homo sapiens
  source 1..22: mol_type = genomic DNA
tgaaggtcgtgagttcgatcct

SEQ ID NO: 27105 - DNA, 23 bp, Homo sapiens
  source 1..23: mol_type = genomic DNA
tgaaggtcgtgagttcgatcctc

SEQ ID NO: 27106 - DNA, 30 bp, Homo sapiens
  source 1..30: mol_type = genomic DNA
tgaaggtcgtgagttcgatcctcacacggg

SEQ ID NO: 27107 - DNA, 32 bp, Homo sapiens
  source 1..32: mol_type = genomic DNA
tgaaggtcgtgagttcgatcctcacacggggc

SEQ ID NO: 27108 - DNA, 33 bp, Homo sapiens
  source 1..33: mol_type = genomic DNA
tgaaggtcgtgagttcgatcctcacacggggca

SEQ ID NO: 27109 - DNA, 34 bp, Homo sapiens
  source 1..34: mol_type = genomic DNA
tgaaggtcgtgagttcgatcctcacacggggcac

SEQ ID NO: 27110 - DNA, 35 bp, Homo sapiens
  source 1..35: mol_type = genomic DNA
tgaaggtcgtgagttcgatcctcacacggggcacc

SEQ ID NO: 27111 - DNA, 36 bp, Homo sapiens
  source 1..36: mol_type = genomic DNA
tgaaggtcgtgagttcgatcctcacacggggcacca

SEQ ID NO: 27112 - DNA, 18 bp, Homo sapiens
  source 1..18: mol_type = genomic DNA
tgaatccagcaatccgag

SEQ ID NO: 27113 - DNA, 21 bp, Homo sapiens
  source 1..21: mol_type = genomic DNA
tgaatccagcaatccgagttc

SEQ ID NO: 27114 - DNA, 16 bp, Homo sapiens
  source 1..16: mol_type = genomic DNA
tgaatccagcgatccg

SEQ ID NO: 27115 - DNA, 17 bp, Homo sapiens
  source 1..17: mol_type = genomic DNA
tgaatccagcgatccga

SEQ ID NO: 27116 - DNA, 18 bp, Homo sapiens
  source 1..18: mol_type = genomic DNA
tgaatccagcgatccgag

SEQ ID NO: 27117 - DNA, 19 bp, Homo sapiens
  source 1..19: mol_type = genomic DNA
tgaatccagcgatccgagt

SEQ ID NO: 27118 - DNA, 20 bp, Homo sapiens
  source 1..20: mol_type = genomic DNA
tgaatccagcgatccgagtt

SEQ ID NO: 27119 - DNA, 21 bp, Homo sapiens
  source 1..21: mol_type = genomic DNA
tgaatccagcgatccgagttc

SEQ ID NO: 27120 - DNA, 22 bp, Homo sapiens
  source 1..22: mol_type = genomic DNA
tgaatccagcgatccgagttca

SEQ ID NO: 27121 - DNA, 23 bp, Homo sapiens
  source 1..23: mol_type = genomic DNA
tgaatccagcgatccgagttcaa

SEQ ID NO: 27122 - DNA, 24 bp, Homo sapiens
  source 1..24: mol_type = genomic DNA
tgaatccagcgatccgagttcaaa

SEQ ID NO: 27123 - DNA, 25 bp, Homo sapiens
  source 1..25: mol_type = genomic DNA
tgaatccagcgatccgagttcaaat

SEQ ID NO: 27124 - DNA, 26 bp, Homo sapiens
  source 1..26: mol_type = genomic DNA
tgaatccagcgatccgagttcaaatc

SEQ ID NO: 27125 - DNA, 27 bp, Homo sapiens
  source 1..27: mol_type = genomic DNA
tgaatccagcgatccgagttcaaatct

SEQ ID NO: 27126 - DNA, 31 bp, Homo sapiens
  source 1..31: mol_type = genomic DNA
tgaatccagcgatccgagttcaaatctcggt

SEQ ID NO: 27127 - DNA, 32 bp, Homo sapiens
  source 1..32: mol_type = genomic DNA
tgaatccagcgatccgagttcaaatctcggtg

SEQ ID NO: 27128 - DNA, 33 bp, Homo sapiens
  source 1..33: mol_type = genomic DNA
tgaatccagcgatccgagttcaaatctcggtgg

SEQ ID NO: 27129 - DNA, 38 bp, Homo sapiens
  source 1..38: mol_type = genomic DNA
tgaatccagcgatccgagttcaaatctcggtggaacct

SEQ ID NO: 27130 - DNA, 39 bp, Homo sapiens
  source 1..39: mol_type = genomic DNA
tgaatccagcgatccgagttcaaatctcggtggaacctc

SEQ ID NO: 27131 - DNA, 40 bp, Homo sapiens
  source 1..40: mol_type = genomic DNA
tgaatccagcgatccgagttcaaatctcggtggaacctcc

SEQ ID NO: 27132 - DNA, 41 bp, Homo sapiens
  source 1..41: mol_type = genomic DNA
tgaatccagcgatccgagttcaaatctcggtggaacctcca

SEQ ID NO: 27133 - DNA, 24 bp, Homo sapiens
  source 1..24: mol_type = genomic DNA
tgaatccagcgatccgagttcaag

SEQ ID NO: 27134 - DNA, 25 bp, Homo sapiens
  source 1..25: mol_type = genomic DNA
tgaatccagcgatccgagttcaagt

SEQ ID NO: 27135 - DNA, 32 bp, Homo sapiens
  source 1..32: mol_type = genomic DNA
tgaatccagcgatccgagttcaagtctcggtg

SEQ ID NO: 27136 - DNA, 38 bp, Homo sapiens
  source 1..38: mol_type = genomic DNA
tgaatccagcgatccgagttcaagtctcggtggaacct

SEQ ID NO: 27137 - DNA, 22 bp, Homo sapiens
  source 1..22: mol_type = genomic DNA
tgaatccagcgatccgagttcg

SEQ ID NO: 27138 - DNA, 23 bp, Homo sapiens
  source 1..23: mol_type = genomic DNA
tgaatccagcgatccgagttcga

SEQ ID NO: 27139 - DNA, 24 bp, Homo sapiens
  source 1..24: mol_type = genomic DNA
tgaatccagcgatccgagttcgag

SEQ ID NO: 27140 - DNA, 25 bp, Homo sapiens
  source 1..25: mol_type = genomic DNA
tgaatccagcgatccgagttcgagt

SEQ ID NO: 27141 - DNA, 26 bp, Homo sapiens
  source 1..26: mol_type = genomic DNA
tgaatccagcgatccgagttcgagtc

SEQ ID NO: 27142 - DNA, 27 bp, Homo sapiens
  source 1..27: mol_type = genomic DNA
tgaatccagcgatccgagttcgagtct

SEQ ID NO: 27143 - DNA, 32 bp, Homo sapiens
  source 1..32: mol_type = genomic DNA
tgaatccagcgatccgagttcgagtctcggtg

SEQ ID NO: 27144 - DNA, 33 bp, Homo sapiens
  source 1..33: mol_type = genomic DNA
tgaatccagcgatccgagttcgagtctcggtgg

SEQ ID NO: 27145 - DNA, 38 bp, Homo sapiens
  source 1..38: mol_type = genomic DNA
tgaatccagcgatccgagttcgagtctcggtggaacct

SEQ ID NO: 27146 - DNA, 39 bp, Homo sapiens
  source 1..39: mol_type = genomic DNA
tgaatccagcgatccgagttcgagtctcggtggaacctc

SEQ ID NO: 27147 - DNA, 40 bp, Homo sapiens
  source 1..40: mol_type = genomic DNA
tgaatccagcgatccgagttcgagtctcggtggaacctcc

SEQ ID NO: 27148 - DNA, 16 bp, Homo sapiens
  source 1..16: mol_type = genomic DNA
tgaatctgacaacaga

SEQ ID NO: 27149 - DNA, 17 bp, Homo sapiens
  source 1..17: mol_type = genomic DNA
tgaatctgacaacagag

SEQ ID NO: 27150 - DNA, 18 bp, Homo sapiens
  source 1..18: mol_type = genomic DNA
tgaatctgacaacagagg

SEQ ID NO: 27151 - DNA, 19 bp, Homo sapiens
  source 1..19: mol_type = genomic DNA
tgaatctgacaacagaggc

SEQ ID NO: 27152 - DNA, 20 bp, Homo sapiens
  source 1..20: mol_type = genomic DNA
tgaatctgacaacagaggct

SEQ ID NO: 27153 - DNA, 21 bp, Homo sapiens
  source 1..21: mol_type = genomic DNA
tgaatctgacaacagaggctt

SEQ ID NO: 27154 - DNA, 24 bp, Homo sapiens
  source 1..24: mol_type = genomic DNA
tgaatctgacaacagaggcttacg

SEQ ID NO: 27155 - DNA, 25 bp, Homo sapiens
  source 1..25: mol_type = genomic DNA
tgaatctgacaacagaggcttacga

(The sequence listing continues in the following parts.)

1. A method of identifying a subject in need of therapeutic intervention to treat a disease, condition, disease recurrence, or disease progression, the method comprising:
isolating fragments derived from tRNAs (tRFs) from a sample obtained from the subject; and
characterizing the tRFs and their relative abundance in the sample to identify a signature, wherein when the signature is indicative of a diagnosis of the disease, a treatment of the subject is recommended.

2. The method of claim 1, wherein the tRFs are selected from the group consisting of 3′-tRFs, 3′-tRHs, 5′-tRFs, 5′-tRHs, and i-tRFs from a mitochondrion (MT).

3. The method of claim 1, wherein the tRFs are selected from the group consisting of 3′-tRFs, 3′-tRHs, 5′-tRFs, 5′-tRHs, and i-tRFs a nucleus (Nuc).

4. The method of claim 1, wherein the sample is isolated from a cell, a tissue, an extracellular vesicle, or a body fluid obtained from the subject.

5. The method of claim 4, wherein the body fluid, the extracellular vesicle, the tissue or the cell is selected from the group consisting of bile, blood serum, plasma, cerebrospinal fluid, and prefrontal cortex.

6. The method of claim 1, wherein isolating the tRFs comprises isolating tRFs fragments with a length in the range of about 10 nucleotides to about 70 nucleotides.

7. The method of claim 1, wherein the signature comprises at least one sequence selected from the group consisting of SEQ ID NO:53135-SEQ ID NO: 63850.

8. The method of claim 1, wherein characterizing the tRFs comprises at least one assessment selected from the group consisting of sequencing the tRFs, measuring overall abundance of a tRF mapped to the genome, measuring a relative abundance of a tRF to a reference, assessing a length of a tRF, identifying starting and ending points of a tRF, identifying a genomic origin of a tRF, and identifying a terminal modification of a tRF.

9. The method of claim 1, wherein the tRFs and their relative abundance vary between the normal state as compared to disease state or condition.

10. The method of claim 1, wherein the tRFs and their relative abundance vary depending on sex of the subject.

11. The method of claim 1, wherein the disease or condition, disease recurrence, or disease progression is a brain disease.

12. The method of claim 11, wherein the brain disease is genetically predisposed.

13. The method of claim 11, wherein the brain disease is Parkinson's Disease.

14. A method of diagnosing, identifying or monitoring Parkinson's Disease (PD) in a subject in need thereof, the method comprising:
isolating tRFs from a cell obtained from the subject; quantifying the tRFs using a panel of oligonucleotides engineered to detect tRFs, or another method; analyzing levels of the tRFs present in the cell; wherein a differential in the level of measured tRFs as compared to a reference is indicative of a diagnosis or identification of PD in the subject; and
providing a treatment regimen to the subject dependent on the differential in the level of measured tRFs as compared to the reference.

15. The method of claim 14, wherein the tRFs comprise at least one sequence selected from the group consisting of SEQ ID NO:53135-SEQ ID NO: 63850.

16. A method of identifying a subject at risk for developing Parkinson's Disease (PD) or in need of therapeutic intervention to treat Parkinson's disease (PD), the method comprising:
isolating fragments of tRFs from a sample obtained from the subject; quantifying the tRFs using a panel of oligonucleotides engineered to detect tRFs, or another method; and
characterizing the tRFs and their relative abundance in the sample to identify a signature, wherein when the signature is indicative of a prognosis for developing PD or a diagnosis for PD, a treatment of the subject is recommended.

17. The method of claim 16, wherein the sample is isolated from a cell, tissue, extracellular vesicle, or body fluid obtained from the subject.

18. The method of claim 16, wherein the cell, extracellular vesicle, the tissue or the body fluid is selected from the group consisting of bile, blood serum, plasma, cerebrospinal fluid, and prefrontal cortex.

19. The method of claim 16, wherein isolating the tRFs comprises isolating tRFs with a length in the range of about 10 nucleotides to about 70 nucleotides.

20. The method of claim 16, wherein the signature comprises at least one sequence selected from the group consisting of SEQ ID NO:53135-SEQ ID NO: 63850.

21. The method of claim 16, wherein characterizing the tRFs comprises at least one assessment selected from the group consisting of sequencing tRFs, measuring overall abundance of a tRF mapped to the genome, measuring a relative abundance of a tRF to a reference, assessing a length of a tRF, identifying starting and ending points of a tRF, identifying genomic origin of a tRF, and identifying a terminal modification of a tRF.

22. The method of claim 16, wherein the tRFs and their relative abundance vary between the normal state subject as compared to a subject at a risk of or suffering from PD.

23. The method of claim 16, wherein the tRFs and their relative abundance compared to control subjects differ between subjects suffering from PD with dementia and subjects suffering from PD without dementia.

24. The method of claim 16, wherein the tRFs and their relative abundance vary with the sex of the subject.

25. The method of claim 16, wherein the tRFs and their relative abundance vary with the body fluid, extracellular vesicle, cell or tissue sample.

26. The method of claim 16, wherein the tRFs and their relative abundance vary in the prefrontal cortex samples from the normal state subjects, the subjects suffering from PD with dementia, and the subjects suffering from PD without dementia.

27. The method of claim 16, wherein the tRFs and their relative abundance vary in the cerebrospinal fluid samples from the normal state subjects, the subjects suffering from PD with dementia, and the subjects suffering from PD without dementia.

28. The method of claim 16, wherein the tRFs and their relative abundance vary in the serum samples from the normal state subjects, the subjects suffering from PD with dementia, and the subjects suffering from PD without dementia.

29. The method of any one of the preceding claims claim 1, wherein the subject is a human.

30. A kit for high-throughput analysis of tRFs fragments in a sample from a subject in need thereof, the kit comprising a collection of specially-designed qPCR assays for quantitating tRFs, or a panel of engineered oligonucleotides capable of hybridizing tRFs, or another quantification method.
